United States Patent Application Publication US 2005/0255487 A1 - sequence listing, part 96

SEQ ID NO: 2641000 - RNA, 19 nt, Homo sapiens
  misc_RNA (1)...(19): siRNA sense strand
gcaagaaaccuaaaaggga

SEQ ID NO: 2641001 - RNA, 19 nt, Homo sapiens
  misc_RNA (1)...(19): siRNA sense strand
acgaaggagauguggugga

SEQ ID NO: 2641002 - RNA, 19 nt, Homo sapiens
  misc_RNA (1)...(19): siRNA sense strand
ggguggaggacaucgacau

SEQ ID NO: 2641003 - RNA, 19 nt, Homo sapiens
  misc_RNA (1)...(19): siRNA sense strand
aaacaaacucugacagcgu

SEQ ID NO: 2641004 - RNA, 19 nt, Homo sapiens
  misc_RNA (1)...(19): siRNA sense strand
ccuuuaaagcagaagcaaa

SEQ ID NO: 2641005 - RNA, 19 nt, Homo sapiens
  misc_RNA (1)...(19): siRNA sense strand
caagaaaccuaaaagggaa

SEQ ID NO: 2641006 - RNA, 19 nt, Homo sapiens
  misc_RNA (1)...(19): siRNA sense strand
cgaaggagaugugguggaa

SEQ ID NO: 2641007 - RNA, 19 nt, Homo sapiens
  misc_RNA (1)...(19): siRNA sense strand
aaggagaugugguggaagu

SEQ ID NO: 2641008 - RNA, 19 nt, Homo sapiens
  misc_RNA (1)...(19): siRNA sense strand
cagaagagguugaugaguc

SEQ ID NO: 2641009 - RNA, 19 nt, Homo sapiens
  misc_RNA (1)...(19): siRNA sense strand
cggaauggaaggaugacga

SEQ ID NO: 2641010 - RNA, 19 nt, Homo sapiens
  misc_RNA (1)...(19): siRNA sense strand
ucauaacagaagagguuga

SEQ ID NO: 2641011 - RNA, 19 nt, Homo sapiens
  misc_RNA (1)...(19): siRNA sense strand
ucaugggaggagagaaauu

SEQ ID NO: 2641012 - RNA, 19 nt, Homo sapiens
  misc_RNA (1)...(19): siRNA sense strand
gguacaaagacgaugccga

SEQ ID NO: 2641013 - RNA, 19 nt, Homo sapiens
  misc_RNA (1)...(19): siRNA sense strand
gaucuauggcauugagaac

SEQ ID NO: 2641014 - RNA, 19 nt, Homo sapiens
  misc_RNA (1)...(19): siRNA sense strand
agaccaagcccucggacga

SEQ ID NO: 2641015 - RNA, 19 nt, Homo sapiens
  misc_RNA (1)...(19): siRNA sense strand
acaucgacauccaggcgaa

SEQ ID NO: 2641016 - RNA, 19 nt, Homo sapiens
  misc_RNA (1)...(19): siRNA sense strand
agaacauggaucugaacuu

SEQ ID NO: 2641017 - RNA, 19 nt, Homo sapiens
  misc_RNA (1)...(19): siRNA sense strand
aagaaaccuaaaagggaaa

SEQ ID NO: 2641018 - RNA, 19 nt, Homo sapiens
  misc_RNA (1)...(19): siRNA sense strand
agaacagcgacaacagcaa

SEQ ID NO: 2641019 - RNA, 19 nt, Homo sapiens
  misc_RNA (1)...(19): siRNA sense strand
gcaagaaaccuaaaaggga

SEQ ID NO: 2641020 - RNA, 19 nt, Homo sapiens
  misc_RNA (1)...(19): siRNA sense strand
acgaaggagauguggugga

SEQ ID NO: 2641021 - RNA, 19 nt, Homo sapiens
  misc_RNA (1)...(19): siRNA sense strand
ggguggaggacaucgacau

SEQ ID NO: 2641022 - RNA, 19 nt, Homo sapiens
  misc_RNA (1)...(19): siRNA sense strand
aaacaaacucugacagcgu

SEQ ID NO: 2641023 - RNA, 19 nt, Homo sapiens
  misc_RNA (1)...(19): siRNA sense strand
gggaagaaguggcgggaga

SEQ ID NO: 2641024 - RNA, 19 nt, Homo sapiens
  misc_RNA (1)...(19): siRNA sense strand
ggagagaguuagauuugaa

SEQ ID NO: 2641025 - RNA, 19 nt, Homo sapiens
  misc_RNA (1)...(19): siRNA sense strand
aguaugaaguggugaagga

SEQ ID NO: 2641026 - RNA, 19 nt, Homo sapiens
  misc_RNA (1)...(19): siRNA sense strand
acaugaagaucguggccuu

SEQ ID NO: 2641027 - RNA, 19 nt, Homo sapiens
  misc_RNA (1)...(19): siRNA sense strand
augagauaaucgugcagua

SEQ ID NO: 2641028 - RNA, 19 nt, Homo sapiens
  misc_RNA (1)...(19): siRNA sense strand
ccaagaauccugacagcca

SEQ ID NO: 2641029 - RNA, 19 nt, Homo sapiens
  misc_RNA (1)...(19): siRNA sense strand
gaacaugcuuucugugcca

SEQ ID NO: 2641030 - RNA, 19 nt, Homo sapiens
  misc_RNA (1)...(19): siRNA sense strand
uggccaagcaguacggaca

SEQ ID NO: 2641031 - RNA, 19 nt, Homo sapiens
  misc_RNA (1)...(19): siRNA sense strand
agacagaggccuugccgga

SEQ ID NO: 2641032 - RNA, 19 nt, Homo sapiens
  misc_RNA (1)...(19): siRNA sense strand
cagcggagagaguuagauu

SEQ ID NO: 2641033 - RNA, 19 nt, Homo sapiens
  misc_RNA (1)...(19): siRNA sense strand
gggcccaagaggaagauga

SEQ ID NO: 2641034 - RNA, 19 nt, Homo sapiens
  misc_RNA (1)...(19): siRNA sense strand
ugugcagcggagagaguua

SEQ ID NO: 2641035 - RNA, 19 nt, Homo sapiens
  misc_RNA (1)...(19): siRNA sense strand
ugaaagacauccagggcug

SEQ ID NO: 2641036 - RNA, 19 nt, Homo sapiens
  misc_RNA (1)...(19): siRNA sense strand
gccaguaugaaguggugaa

SEQ ID NO: 2641037 - RNA, 19 nt, Homo sapiens
  misc_RNA (1)...(19): siRNA sense strand
ggccaggaucacaggcauu

SEQ ID NO: 2641038 - RNA, 19 nt, Homo sapiens
  misc_RNA (1)...(19): siRNA sense strand
agcuagaaaugaaagacau

SEQ ID NO: 2641039 - RNA, 19 nt, Homo sapiens
  misc_RNA (1)...(19): siRNA sense strand
cagaaaaguacgaagaucu

SEQ ID NO: 2641040 - RNA, 19 nt, Homo sapiens
  misc_RNA (1)...(19): siRNA sense strand
ucaagguggacgcgagaga

SEQ ID NO: 2641041 - RNA, 19 nt, Homo sapiens
  misc_RNA (1)...(19): siRNA sense strand
cugcuggccaugagauaau

SEQ ID NO: 2641042 - RNA, 19 nt, Homo sapiens
  misc_RNA (1)...(19): siRNA sense strand
gggaaggcuuucucgcuga

SEQ ID NO: 2641043 - RNA, 19 nt, Homo sapiens
  misc_RNA (1)...(19): siRNA sense strand
gggaagaaguggcgggaga

SEQ ID NO: 2641044 - RNA, 19 nt, Homo sapiens
  misc_RNA (1)...(19): siRNA sense strand
ggagagaguuagauuugaa

SEQ ID NO: 2641045 - RNA, 19 nt, Homo sapiens
  misc_RNA (1)...(19): siRNA sense strand
aguaugaaguggugaagga

SEQ ID NO: 2641046 - RNA, 19 nt, Homo sapiens
  misc_RNA (1)...(19): siRNA sense strand
acaugaagaucguggccuu

SEQ ID NO: 2641047 - RNA, 19 nt, Homo sapiens
  misc_RNA (1)...(19): siRNA sense strand
augagauaaucgugcagua

SEQ ID NO: 2641048 - RNA, 19 nt, Homo sapiens
  misc_RNA (1)...(19): siRNA sense strand
ccaagaauccugacagcca

SEQ ID NO: 2641049 - RNA, 19 nt, Homo sapiens
  misc_RNA (1)...(19): siRNA sense strand
gaacaugcuuucugugcca

SEQ ID NO: 2641050 - RNA, 19 nt, Homo sapiens
  misc_RNA (1)...(19): siRNA sense strand
uggccaagcaguacggaca

SEQ ID NO: 2641051 - RNA, 19 nt, Homo sapiens
  misc_RNA (1)...(19): siRNA sense strand
agacagaggccuugccgga

SEQ ID NO: 2641052 - RNA, 19 nt, Homo sapiens
  misc_RNA (1)...(19): siRNA sense strand
cagcggagagaguuagauu

SEQ ID NO: 2641053 - RNA, 19 nt, Homo sapiens
  misc_RNA (1)...(19): siRNA sense strand
gggcccaagaggaagauga

SEQ ID NO: 2641054 - RNA, 19 nt, Homo sapiens
  misc_RNA (1)...(19): siRNA sense strand
ugugcagcggagagaguua

SEQ ID NO: 2641055 - RNA, 19 nt, Homo sapiens
  misc_RNA (1)...(19): siRNA sense strand
ugaaagacauccagggcug

SEQ ID NO: 2641056 - RNA, 19 nt, Homo sapiens
  misc_RNA (1)...(19): siRNA sense strand
gccaguaugaaguggugaa

SEQ ID NO: 2641057 - RNA, 19 nt, Homo sapiens
  misc_RNA (1)...(19): siRNA sense strand
ggccaggaucacaggcauu

SEQ ID NO: 2641058 - RNA, 19 nt, Homo sapiens
  misc_RNA (1)...(19): siRNA sense strand
agcuagaaaugaaagacau

SEQ ID NO: 2641059 - RNA, 19 nt, Homo sapiens
  misc_RNA (1)...(19): siRNA sense strand
cagaaaaguacgaagaucu

SEQ ID NO: 2641060 - RNA, 19 nt, Homo sapiens
  misc_RNA (1)...(19): siRNA sense strand
ucaagguggacgcgagaga

SEQ ID NO: 2641061 - RNA, 19 nt, Homo sapiens
  misc_RNA (1)...(19): siRNA sense strand
cugcuggccaugagauaau

SEQ ID NO: 2641062 - RNA, 19 nt, Homo sapiens
  misc_RNA (1)...(19): siRNA sense strand
gggaaggcuuucucgcuga

SEQ ID NO: 2641063 - RNA, 19 nt, Homo sapiens
  misc_RNA (1)...(19): siRNA sense strand
uggaagggcugcagcggaa

SEQ ID NO: 2641064 - RNA, 19 nt, Homo sapiens
  misc_RNA (1)...(19): siRNA sense strand
uugugaagguggaggagga

SEQ ID NO: 2641065 - RNA, 19 nt, Homo sapiens
  misc_RNA (1)...(19): siRNA sense strand
gaaugaaggaccugggauc

SEQ ID NO: 2641066 - RNA, 19 nt, Homo sapiens
  misc_RNA (1)...(19): siRNA sense strand
ccgugaacuuggaggacgu

SEQ ID NO: 2641067 - RNA, 19 nt, Homo sapiens
  misc_RNA (1)...(19): siRNA sense strand
ugaagguggaggaggacuu

SEQ ID NO: 2641068 - RNA, 19 nt, Homo sapiens
  misc_RNA (1)...(19): siRNA sense strand
gggaagggcuuuagcgacc

SEQ ID NO: 2641069 - RNA, 19 nt, Homo sapiens
  misc_RNA (1)...(19): siRNA sense strand
cagcggaagcccaggaaac

SEQ ID NO: 2641070 - RNA, 19 nt, Homo sapiens
  misc_RNA (1)...(19): siRNA sense strand
guggcaaaggcuucagcaa

SEQ ID NO: 2641071 - RNA, 19 nt, Homo sapiens
  misc_RNA (1)...(19): siRNA sense strand
gugccuagucugugggaag

SEQ ID NO: 2641072 - RNA, 19 nt, Homo sapiens
  misc_RNA (1)...(19): siRNA sense strand
ucuuaaaacaccaggcaga

SEQ ID NO: 2641073 - RNA, 19 nt, Homo sapiens
  misc_RNA (1)...(19): siRNA sense strand
cagaagaggagcaggagca

SEQ ID NO: 2641074 - RNA, 19 nt, Homo sapiens
  misc_RNA (1)...(19): siRNA sense strand
uugaggugguugaggacaa

SEQ ID NO: 2641075 - RNA, 19 nt, Homo sapiens
  misc_RNA (1)...(19): siRNA sense strand
ugacagaagaggagcagga

SEQ ID NO: 2641076 - RNA, 19 nt, Homo sapiens
  misc_RNA (1)...(19): siRNA sense strand
gggacaagcuggaugcgga

SEQ ID NO: 2641077 - RNA, 19 nt, Homo sapiens
  misc_RNA (1)...(19): siRNA sense strand
acaccaaaggcuugaugaa

SEQ ID NO: 2641078 - RNA, 19 nt, Homo sapiens
  misc_RNA (1)...(19): siRNA sense strand
ggaaggaggugauugagca

SEQ ID NO: 2641079 - RNA, 19 nt, Homo sapiens
  misc_RNA (1)...(19): siRNA sense strand
cggccuacgagaagcguuu

SEQ ID NO: 2641080 - RNA, 19 nt, Homo sapiens
  misc_RNA (1)...(19): siRNA sense strand
ccgucaacgaggaaggaca

SEQ ID NO: 2641081 - RNA, 19 nt, Homo sapiens
  misc_RNA (1)...(19): siRNA sense strand
ggaugauugaggugguuga

SEQ ID NO: 2641082 - RNA, 19 nt, Homo sapiens
  misc_RNA (1)...(19): siRNA sense strand
ggacagaagcggugugagg

SEQ ID NO: 2641083 - RNA, 19 nt, Homo sapiens
  misc_RNA (1)...(19): siRNA sense strand
uugaaaaugccuuggagaa

SEQ ID NO: 2641084 - RNA, 19 nt, Homo sapiens
  misc_RNA (1)...(19): siRNA sense strand
cauuggugcuccagcguga

SEQ ID NO: 2641085 - RNA, 19 nt, Homo sapiens
  misc_RNA (1)...(19): siRNA sense strand
guguugagcacguggucuu

SEQ ID NO: 2641086 - RNA, 19 nt, Homo sapiens
  misc_RNA (1)...(19): siRNA sense strand
ccgaaaugacacaugcaca

SEQ ID NO: 2641087 - RNA, 19 nt, Homo sapiens
  misc_RNA (1)...(19): siRNA sense strand
gcggaagaucgcagguguu

SEQ ID NO: 2641088 - RNA, 19 nt, Homo sapiens
  misc_RNA (1)...(19): siRNA sense strand
cgguccacccugagaauga

SEQ ID NO: 2641089 - RNA, 19 nt, Homo sapiens
  misc_RNA (1)...(19): siRNA sense strand
ugauugaggugguugagga

SEQ ID NO: 2641090 - RNA, 19 nt, Homo sapiens
  misc_RNA (1)...(19): siRNA sense strand
cggacuacauugagaggug

SEQ ID NO: 2641091 - RNA, 19 nt, Homo sapiens
  misc_RNA (1)...(19): siRNA sense strand
cggcacugguuacaggaga

SEQ ID NO: 2641092 - RNA, 19 nt, Homo sapiens
  misc_RNA (1)...(19): siRNA sense strand
acaaugagaccuucgccaa

SEQ ID NO: 2641093 - RNA, 19 nt, Homo sapiens
  misc_RNA (1)...(19): siRNA sense strand
gaaggaggugauugagcau

SEQ ID NO: 2641094 - RNA, 19 nt, Homo sapiens
  misc_RNA (1)...(19): siRNA sense strand
gugaggaggaugcccgcaa

SEQ ID NO: 2641095 - RNA, 19 nt, Homo sapiens
  misc_RNA (1)...(19): siRNA sense strand
aggaggaagaggaggauga

SEQ ID NO: 2641096 - RNA, 19 nt, Homo sapiens
  misc_RNA (1)...(19): siRNA sense strand
ggaacacauagaagagcaa

SEQ ID NO: 2641097 - RNA, 19 nt, Homo sapiens
  misc_RNA (1)...(19): siRNA sense strand
acucggaggaggaggaaga

SEQ ID NO: 2641098 - RNA, 19 nt, Homo sapiens
  misc_RNA (1)...(19): siRNA sense strand
agaaggagcgugagcguga

SEQ ID NO: 2641099 - RNA, 19 nt, Homo sapiens
  misc_RNA (1)...(19): siRNA sense strand
cagcaguggaggucgggaa

SEQ ID NO: 2641100 - RNA, 19 nt, Homo sapiens
  misc_RNA (1)...(19): siRNA sense strand
gcagagaagcugaaggaug

SEQ ID NO: 2641101 - RNA, 19 nt, Homo sapiens
  misc_RNA (1)...(19): siRNA sense strand
cggaggaugcugcgagaga

SEQ ID NO: 2641102 - RNA, 19 nt, Homo sapiens
  misc_RNA (1)...(19): siRNA sense strand
gaggaugcugcgagagaga

SEQ ID NO: 2641103 - RNA, 19 nt, Homo sapiens
  misc_RNA (1)...(19): siRNA sense strand
cugcagaagcauaaaggga

SEQ ID NO: 2641104 - RNA, 19 nt, Homo sapiens
  misc_RNA (1)...(19): siRNA sense strand
aggaggaggaagaggagga

SEQ ID NO: 2641105 - RNA, 19 nt, Homo sapiens
  misc_RNA (1)...(19): siRNA sense strand
agcaagagaaggagcguga

SEQ ID NO: 2641106 - RNA, 19 nt, Homo sapiens
  misc_RNA (1)...(19): siRNA sense strand
cugagaagaggaaagacaa

SEQ ID NO: 2641107 - RNA, 19 nt, Homo sapiens
  misc_RNA (1)...(19): siRNA sense strand
uggccgacuccuugacaaa

SEQ ID NO: 2641108 - RNA, 19 nt, Homo sapiens
  misc_RNA (1)...(19): siRNA sense strand
cggaggaggaggaagagga

SEQ ID NO: 2641109 - RNA, 19 nt, Homo sapiens
  misc_RNA (1)...(19): siRNA sense strand
agaaggaacgugagcgcga

SEQ ID NO: 2641110 - RNA, 19 nt, Homo sapiens
  misc_RNA (1)...(19): siRNA sense strand
ccaugaagcagaaggcacu

SEQ ID NO: 2641111 - RNA, 19 nt, Homo sapiens
  misc_RNA (1)...(19): siRNA sense strand
aggaggaauugguggccca

SEQ ID NO: 2641112 - RNA, 19 nt, Homo sapiens
  misc_RNA (1)...(19): siRNA sense strand
acaaacucuccgagggaca

SEQ ID NO: 2641113 - RNA, 19 nt, Homo sapiens
  misc_RNA (1)...(19): siRNA sense strand
cccagaaggcccugcagaa

SEQ ID NO: 2641114 - RNA, 19 nt, Homo sapiens
  misc_RNA (1)...(19): siRNA sense strand
auggagaagaugaggagga

SEQ ID NO: 2641115 - RNA, 19 nt, Homo sapiens
  misc_RNA (1)...(19): siRNA sense strand
cagagaagcugaaggaugc

SEQ ID NO: 2641116 - RNA, 19 nt, Homo sapiens
  misc_RNA (1)...(19): siRNA sense strand
aggagaaaggguacuacua

SEQ ID NO: 2641117 - RNA, 19 nt, Homo sapiens
  misc_RNA (1)...(19): siRNA sense strand
cuuuguggcagaagaguuu

SEQ ID NO: 2641118 - RNA, 19 nt, Homo sapiens
  misc_RNA (1)...(19): siRNA sense strand
auucagagcaagcggcaga

SEQ ID NO: 2641119 - RNA, 19 nt, Homo sapiens
  misc_RNA (1)...(19): siRNA sense strand
aggaugaugaagauggaga

SEQ ID NO: 2641120 - RNA, 19 nt, Homo sapiens
  misc_RNA (1)...(19): siRNA sense strand
uggugaagguggagcgggu

SEQ ID NO: 2641121 - RNA, 19 nt, Homo sapiens
  misc_RNA (1)...(19): siRNA sense strand
gcgcaaguggcaagggauc

SEQ ID NO: 2641122 - RNA, 19 nt, Homo sapiens
  misc_RNA (1)...(19): siRNA sense strand
ccugaugagaugaacaaca

SEQ ID NO: 2641123 - RNA, 19 nt, Homo sapiens
  misc_RNA (1)...(19): siRNA sense strand
ugacaaacucuccgaggga

SEQ ID NO: 2641124 - RNA, 19 nt, Homo sapiens
  misc_RNA (1)...(19): siRNA sense strand
augaagauggagaagauga

SEQ ID NO: 2641125 - RNA, 19 nt, Homo sapiens
  misc_RNA (1)...(19): siRNA sense strand
gucccaacuucgaagaaaa

SEQ ID NO: 2641126 - RNA, 19 nt, Homo sapiens
  misc_RNA (1)...(19): siRNA sense strand
uggcagaagaguuugcaca

SEQ ID NO: 2641127 - RNA, 19 nt, Homo sapiens
  misc_RNA (1)...(19): siRNA sense strand
gcauaaagggagcguggcu

SEQ ID NO: 2641128 - RNA, 19 nt, Homo sapiens
  misc_RNA (1)...(19): siRNA sense strand
aggaacacauagaagagca

SEQ ID NO: 2641129 - RNA, 19 nt, Homo sapiens
  misc_RNA (1)...(19): siRNA sense strand
ccccaacaauucagagcaa

SEQ ID NO: 2641130 - RNA, 19 nt, Homo sapiens
  misc_RNA (1)...(19): siRNA sense strand
aagaagaaguuccugacca

SEQ ID NO: 2641131 - RNA, 19 nt, Homo sapiens
  misc_RNA (1)...(19): siRNA sense strand
uggagaagccgguuggugu

SEQ ID NO: 2641132 - RNA, 19 nt, Homo sapiens
  misc_RNA (1)...(19): siRNA sense strand
aggaggaagaggaggauga

SEQ ID NO: 2641133 - RNA, 19 nt, Homo sapiens
  misc_RNA (1)...(19): siRNA sense strand
ggaacacauagaagagcaa

SEQ ID NO: 2641134 - RNA, 19 nt, Homo sapiens
  misc_RNA (1)...(19): siRNA sense strand
acucggaggaggaggaaga

SEQ ID NO: 2641135 - RNA, 19 nt, Homo sapiens
  misc_RNA (1)...(19): siRNA sense strand
agaaggagcgugagcguga

SEQ ID NO: 2641136 - RNA, 19 nt, Homo sapiens
  misc_RNA (1)...(19): siRNA sense strand
cagcaguggaggucgggaa

SEQ ID NO: 2641137 - RNA, 19 nt, Homo sapiens
  misc_RNA (1)...(19): siRNA sense strand
gcagagaagcugaaggaug

SEQ ID NO: 2641138 - RNA, 19 nt, Homo sapiens
  misc_RNA (1)...(19): siRNA sense strand
cggaggaugcugcgagaga

SEQ ID NO: 2641139 - RNA, 19 nt, Homo sapiens
  misc_RNA (1)...(19): siRNA sense strand
gaggaugcugcgagagaga

SEQ ID NO: 2641140 - RNA, 19 nt, Homo sapiens
  misc_RNA (1)...(19): siRNA sense strand
cugcagaagcauaaaggga

SEQ ID NO: 2641141 - RNA, 19 nt, Homo sapiens
  misc_RNA (1)...(19): siRNA sense strand
aggaggaggaagaggagga

SEQ ID NO: 2641142 - RNA, 19 nt, Homo sapiens
  misc_RNA (1)...(19): siRNA sense strand
agcaagagaaggagcguga

SEQ ID NO: 2641143 - RNA, 19 nt, Homo sapiens
  misc_RNA (1)...(19): siRNA sense strand
cugagaagaggaaagacaa

SEQ ID NO: 2641144 - RNA, 19 nt, Homo sapiens
  misc_RNA (1)...(19): siRNA sense strand
uggccgacuccuugacaaa

SEQ ID NO: 2641145 - RNA, 19 nt, Homo sapiens
  misc_RNA (1)...(19): siRNA sense strand
cggaggaggaggaagagga

SEQ ID NO: 2641146 - RNA, 19 nt, Homo sapiens
  misc_RNA (1)...(19): siRNA sense strand
agaaggaacgugagcgcga

SEQ ID NO: 2641147 - RNA, 19 nt, Homo sapiens
  misc_RNA (1)...(19): siRNA sense strand
ccaugaagcagaaggcacu

SEQ ID NO: 2641148 - RNA, 19 nt, Homo sapiens
  misc_RNA (1)...(19): siRNA sense strand
aggaggaauugguggccca

SEQ ID NO: 2641149 - RNA, 19 nt, Homo sapiens
  misc_RNA (1)...(19): siRNA sense strand
acaaacucuccgagggaca

SEQ ID NO: 2641150 - RNA, 19 nt, Homo sapiens
  misc_RNA (1)...(19): siRNA sense strand
cccagaaggcccugcagaa

SEQ ID NO: 2641151 - RNA, 19 nt, Homo sapiens
  misc_RNA (1)...(19): siRNA sense strand
auggagaagaugaggagga

SEQ ID NO: 2641152 - RNA, 19 nt, Homo sapiens
  misc_RNA (1)...(19): siRNA sense strand
cagagaagcugaaggaugc

SEQ ID NO: 2641153 - RNA, 19 nt, Homo sapiens
  misc_RNA (1)...(19): siRNA sense strand
aggagaaaggguacuacua

SEQ ID NO: 2641154 - RNA, 19 nt, Homo sapiens
  misc_RNA (1)...(19): siRNA sense strand
cuuuguggcagaagaguuu

SEQ ID NO: 2641155 - RNA, 19 nt, Homo sapiens
  misc_RNA (1)...(19): siRNA sense strand
auucagagcaagcggcaga

SEQ ID NO: 2641156 - RNA, 19 nt, Homo sapiens
  misc_RNA (1)...(19): siRNA sense strand
aggaugaugaagauggaga

SEQ ID NO: 2641157 - RNA, 19 nt, Homo sapiens
  misc_RNA (1)...(19): siRNA sense strand
uggugaagguggagcgggu

SEQ ID NO: 2641158 - RNA, 19 nt, Homo sapiens
  misc_RNA (1)...(19): siRNA sense strand
gcgcaaguggcaagggauc

SEQ ID NO: 2641159 - RNA, 19 nt, Homo sapiens
  misc_RNA (1)...(19): siRNA sense strand
ccugaugagaugaacaaca

SEQ ID NO: 2641160 - RNA, 19 nt, Homo sapiens
  misc_RNA (1)...(19): siRNA sense strand
ugacaaacucuccgaggga

SEQ ID NO: 2641161 - RNA, 19 nt, Homo sapiens
  misc_RNA (1)...(19): siRNA sense strand
augaagauggagaagauga

SEQ ID NO: 2641162 - RNA, 19 nt, Homo sapiens
  misc_RNA (1)...(19): siRNA sense strand
gucccaacuucgaagaaaa

SEQ ID NO: 2641163 - RNA, 19 nt, Homo sapiens
  misc_RNA (1)...(19): siRNA sense strand
uggcagaagaguuugcaca

SEQ ID NO: 2641164 - RNA, 19 nt, Homo sapiens
  misc_RNA (1)...(19): siRNA sense strand
gcauaaagggagcguggcu

SEQ ID NO: 2641165 - RNA, 19 nt, Homo sapiens
  misc_RNA (1)...(19): siRNA sense strand
aggaacacauagaagagca

SEQ ID NO: 2641166 - RNA, 19 nt, Homo sapiens
  misc_RNA (1)...(19): siRNA sense strand
ccccaacaauucagagcaa

SEQ ID NO: 2641167 - RNA, 19 nt, Homo sapiens
  misc_RNA (1)...(19): siRNA sense strand
aagaagaaguuccugacca

SEQ ID NO: 2641168 - RNA, 19 nt, Homo sapiens
  misc_RNA (1)...(19): siRNA sense strand
uggagaagccgguuggugu

SEQ ID NO: 2641169 - RNA, 19 nt, Homo sapiens
  misc_RNA (1)...(19): siRNA sense strand
gcccaaggcuggaaggaaa

SEQ ID NO: 2641170 - RNA, 19 nt, Homo sapiens
  misc_RNA (1)...(19): siRNA sense strand
gcagcaacaaggagggaaa

SEQ ID NO: 2641171 - RNA, 19 nt, Homo sapiens
  misc_RNA (1)...(19): siRNA sense strand
ccacgaaggacuaaguaaa

SEQ ID NO: 2641172 - RNA, 19 nt, Homo sapiens
  misc_RNA (1)...(19): siRNA sense strand
gggccaagcuauagaggca

SEQ ID NO: 2641173 - RNA, 19 nt, Homo sapiens
  misc_RNA (1)...(19): siRNA sense strand
caccaaaguugaaaugaaa

SEQ ID NO: 2641174 - RNA, 19 nt, Homo sapiens
  misc_RNA (1)...(19): siRNA sense strand
gagaauucgacaagagauu

SEQ ID NO: 2641175 - RNA, 19 nt, Homo sapiens
  misc_RNA (1)...(19): siRNA sense strand
gcaagaaugugaaggcuga

SEQ ID NO: 2641176 - RNA, 19 nt, Homo sapiens
  misc_RNA (1)...(19): siRNA sense strand
gcaaagaagaugacacuga

SEQ ID NO: 2641177 - RNA, 19 nt, Homo sapiens
  misc_RNA (1)...(19): siRNA sense strand
aagaagaagcauugcaaau

SEQ ID NO: 2641178 - RNA, 19 nt, Homo sapiens
  misc_RNA (1)...(19): siRNA sense strand
gucagaagguucagaagaa

SEQ ID NO: 2641179 - RNA, 19 nt, Homo sapiens
  misc_RNA (1)...(19): siRNA sense strand
gacaagagauugagaagga

SEQ ID NO: 2641180 - RNA, 19 nt, Homo sapiens
  misc_RNA (1)...(19): siRNA sense strand
cuauaagguuccagguaga

SEQ ID NO: 2641181 - RNA, 19 nt, Homo sapiens
  misc_RNA (1)...(19): siRNA sense strand
agaggaaguuaaugagaga

SEQ ID NO: 2641182 - RNA, 19 nt, Homo sapiens
  misc_RNA (1)...(19): siRNA sense strand
ggaccucacagcagggaaa

SEQ ID NO: 2641183 - RNA, 19 nt, Homo sapiens
  misc_RNA (1)...(19): siRNA sense strand
ucaccaaaguugaaaugaa

SEQ ID NO: 2641184 - RNA, 19 nt, Homo sapiens
  misc_RNA (1)...(19): siRNA sense strand
gaaagaaccucuagcaacu

SEQ ID NO: 2641185 - RNA, 19 nt, Homo sapiens
  misc_RNA (1)...(19): siRNA sense strand
gcaccagagaggaaguuaa

SEQ ID NO: 2641186 - RNA, 19 nt, Homo sapiens
  misc_RNA (1)...(19): siRNA sense strand
gcuaaggagcugagggacu

SEQ ID NO: 2641187 - RNA, 19 nt, Homo sapiens
  misc_RNA (1)...(19): siRNA sense strand
acagaauccaggugcgaaa

SEQ ID NO: 2641188 - RNA, 19 nt, Homo sapiens
  misc_RNA (1)...(19): siRNA sense strand
gacccuagccagagauuua

SEQ ID NO: 2641189 - RNA, 19 nt, Homo sapiens
  misc_RNA (1)...(19): siRNA sense strand
augcaaugcuucacacaaa

SEQ ID NO: 2641190 - RNA, 19 nt, Homo sapiens
  misc_RNA (1)...(19): siRNA sense strand
agacagagucagugaaacu

SEQ ID NO: 2641191 - RNA, 19 nt, Homo sapiens
  misc_RNA (1)...(19): siRNA sense strand
ucacagaagcacagcaaga

SEQ ID NO: 2641192 - RNA, 19 nt, Homo sapiens
  misc_RNA (1)...(19): siRNA sense strand
cugagaugcaggugagaau

SEQ ID NO: 2641193 - RNA, 19 nt, Homo sapiens
  misc_RNA (1)...(19): siRNA sense strand
ucuaagaaauugacagcuu

SEQ ID NO: 2641194 - RNA, 19 nt, Homo sapiens
  misc_RNA (1)...(19): siRNA sense strand
gugugaaagccaaggugaa

SEQ ID NO: 2641195 - RNA, 19 nt, Homo sapiens
  misc_RNA (1)...(19): siRNA sense strand
ucagagagcuuuaggagga

SEQ ID NO: 2641196 - RNA, 19 nt, Homo sapiens
  misc_RNA (1)...(19): siRNA sense strand
ugacauugacguugagaca

SEQ ID NO: 2641197 - RNA, 19 nt, Homo sapiens
  misc_RNA (1)...(19): siRNA sense strand
gcagaaaagaagaguguga

SEQ ID NO: 2641198 - RNA, 19 nt, Homo sapiens
  misc_RNA (1)...(19): siRNA sense strand
gaaugugaaggcugagaua

SEQ ID NO: 2641199 - RNA, 19 nt, Homo sapiens
  misc_RNA (1)...(19): siRNA sense strand
gcccaaaggaugaggaucu

SEQ ID NO: 2641200 - RNA, 19 nt, Homo sapiens
  misc_RNA (1)...(19): siRNA sense strand
aaauagcaccagagaggaa

SEQ ID NO: 2641201 - RNA, 19 nt, Homo sapiens
  misc_RNA (1)...(19): siRNA sense strand
gagaauuaccuguucacua

SEQ ID NO: 2641202 - RNA, 19 nt, Homo sapiens
  misc_RNA (1)...(19): siRNA sense strand
agaaaagaagagugugaaa

SEQ ID NO: 2641203 - RNA, 19 nt, Homo sapiens
  misc_RNA (1)...(19): siRNA sense strand
agguagaaugggaguauau

SEQ ID NO: 2641204 - RNA, 19 nt, Homo sapiens
  misc_RNA (1)...(19): siRNA sense strand
cacuaaagcaggcgcuaaa

SEQ ID NO: 2641205 - RNA, 19 nt, Homo sapiens
  misc_RNA (1)...(19): siRNA sense strand
uaacagaacaggagccaga

SEQ ID NO: 2641206 - RNA, 19 nt, Homo sapiens
  misc_RNA (1)...(19): siRNA sense strand
cugcaacaugggaaggaaa

SEQ ID NO: 2641207 - RNA, 19 nt, Homo sapiens
  misc_RNA (1)...(19): siRNA sense strand
gagaagaggccacguguca

SEQ ID NO: 2641208 - RNA, 19 nt, Homo sapiens
  misc_RNA (1)...(19): siRNA sense strand
gagaaggacuaaaagaaau

SEQ ID NO: 2641209 - RNA, 19 nt, Homo sapiens
  misc_RNA (1)...(19): siRNA sense strand
gaaaagggacguaggaaga

SEQ ID NO: 2641210 - RNA, 19 nt, Homo sapiens
  misc_RNA (1)...(19): siRNA sense strand
gcucauagcuaccaacaca

SEQ ID NO: 2641211 - RNA, 19 nt, Homo sapiens
  misc_RNA (1)...(19): siRNA sense strand
ccagagaggaaguuaauga

SEQ ID NO: 2641212 - RNA, 19 nt, Homo sapiens
  misc_RNA (1)...(19): siRNA sense strand
gggcacuacuuacugaaua

SEQ ID NO: 2641213 - RNA, 19 nt, Homo sapiens
  misc_RNA (1)...(19): siRNA sense strand
ggacguaggaagaagggca

SEQ ID NO: 2641214 - RNA, 19 nt, Homo sapiens
  misc_RNA (1)...(19): siRNA sense strand
uaacaaaagugaaagccaa

SEQ ID NO: 2641215 - RNA, 19 nt, Homo sapiens
  misc_RNA (1)...(19): siRNA sense strand
ccacaagggcccaguaguu

SEQ ID NO: 2641216 - RNA, 19 nt, Homo sapiens
  misc_RNA (1)...(19): siRNA sense strand
gcuaccaacacaacagaaa

SEQ ID NO: 2641217 - RNA, 19 nt, Homo sapiens
  misc_RNA (1)...(19): siRNA sense strand
aggaaguuaaugagagaca

SEQ ID NO: 2641218 - RNA, 19 nt, Homo sapiens
  misc_RNA (1)...(19): siRNA sense strand
ccacugaagccuugaaaau

SEQ ID NO: 2641219 - RNA, 19 nt, Homo sapiens
  misc_RNA (1)...(19): siRNA sense strand
agaugacacugaugaggaa

SEQ ID NO: 2641220 - RNA, 19 nt, Homo sapiens
  misc_RNA (1)...(19): siRNA sense strand
cagcccacauagagaaauu

SEQ ID NO: 2641221 - RNA, 19 nt, Homo sapiens
  misc_RNA (1)...(19): siRNA sense strand
gagagaaggacuaaaagaa

SEQ ID NO: 2641222 - RNA, 19 nt, Homo sapiens
  misc_RNA (1)...(19): siRNA sense strand
cagcagcaaugcaggccaa

SEQ ID NO: 2641223 - RNA, 19 nt, Homo sapiens
  misc_RNA (1)...(19): siRNA sense strand
gggagguacgagagagcuu

SEQ ID NO: 2641224 - RNA, 19 nt, Homo sapiens
  misc_RNA (1)...(19): siRNA sense strand
ggacccacuuuaagaccaa

SEQ ID NO: 2641225 - RNA, 19 nt, Homo sapiens
  misc_RNA (1)...(19): siRNA sense strand
gcuauagaggcaugaucaa

SEQ ID NO: 2641226 - RNA, 19 nt, Homo sapiens
  misc_RNA (1)...(19): siRNA sense strand
ggaaagacucucagaaggu

SEQ ID NO: 2641227 - RNA, 19 nt, Homo sapiens
  misc_RNA (1)...(19): siRNA sense strand
ggaaaguacuggugaugag

SEQ ID NO: 2641228 - RNA, 19 nt, Homo sapiens
  misc_RNA (1)...(19): siRNA sense strand
agagaaggacuaaaagaaa

SEQ ID NO: 2641229 - RNA, 19 nt, Homo sapiens
  misc_RNA (1)...(19): siRNA sense strand
cagcaaagaagaugacacu

SEQ ID NO: 2641230 - RNA, 19 nt, Homo sapiens
  misc_RNA (1)...(19): siRNA sense strand
caucaaagcaaaagcccaa

SEQ ID NO: 2641231 - RNA, 19 nt, Homo sapiens
  misc_RNA (1)...(19): siRNA sense strand
gagcacaacuacagcaaac

SEQ ID NO: 2641232 - RNA, 19 nt, Homo sapiens
  misc_RNA (1)...(19): siRNA sense strand
gcagugagagguaaggcaa

SEQ ID NO: 2641233 - RNA, 19 nt, Homo sapiens
  misc_RNA (1)...(19): siRNA sense strand
gcacuaaagcaggcgcuaa

SEQ ID NO: 2641234 - RNA, 19 nt, Homo sapiens
  misc_RNA (1)...(19): siRNA sense strand
acaggagacuaauaugaaa

SEQ ID NO: 2641235 - RNA, 19 nt, Homo sapiens
  misc_RNA (1)...(19): siRNA sense strand
gcuucaaggcaaagauguu

SEQ ID NO: 2641236 - RNA, 19 nt, Homo sapiens
  misc_RNA (1)...(19): siRNA sense strand
gccuaaaccucucaccaaa

SEQ ID NO: 2641237 - RNA, 19 nt, Homo sapiens
  misc_RNA (1)...(19): siRNA sense strand
ggcacuacuuacugaauau

SEQ ID NO: 2641238 - RNA, 19 nt, Homo sapiens
  misc_RNA (1)...(19): siRNA sense strand
gcaagaaggcacuaaagca

SEQ ID NO: 2641239 - RNA, 19 nt, Homo sapiens
  misc_RNA (1)...(19): siRNA sense strand
ccucaguuaaaguggaaaa

SEQ ID NO: 2641240 - RNA, 19 nt, Homo sapiens
  misc_RNA (1)...(19): siRNA sense strand
agucagaguguaaagaaga

SEQ ID NO: 2641241 - RNA, 19 nt, Homo sapiens
  misc_RNA (1)...(19): siRNA sense strand
ccuaguaagaauauaccua

SEQ ID NO: 2641242 - RNA, 19 nt, Homo sapiens
  misc_RNA (1)...(19): siRNA sense strand
ccagagagaaggacuaaaa

SEQ ID NO: 2641243 - RNA, 19 nt, Homo sapiens
  misc_RNA (1)...(19): siRNA sense strand
ccagaggugaagagggcau

SEQ ID NO: 2641244 - RNA, 19 nt, Homo sapiens
  misc_RNA (1)...(19): siRNA sense strand
ccagugaucccaaaguaaa

SEQ ID NO: 2641245 - RNA, 19 nt, Homo sapiens
  misc_RNA (1)...(19): siRNA sense strand
gcacagaagcagauggcuc

SEQ ID NO: 2641246 - RNA, 19 nt, Homo sapiens
  misc_RNA (1)...(19): siRNA sense strand
aagcagugauggucaguca

SEQ ID NO: 2641247 - RNA, 19 nt, Homo sapiens
  misc_RNA (1)...(19): siRNA sense strand
caccauuccagcagguaaa

SEQ ID NO: 2641248 - RNA, 19 nt, Homo sapiens
  misc_RNA (1)...(19): siRNA sense strand
ccaauacacccaugaguca

SEQ ID NO: 2641249 - RNA, 19 nt, Homo sapiens
  misc_RNA (1)...(19): siRNA sense strand
gggugaaagagcugucaga

SEQ ID NO: 2641250 - RNA, 19 nt, Homo sapiens
  misc_RNA (1)...(19): siRNA sense strand
caucacagaagcacagcaa

SEQ ID NO: 2641251 - RNA, 19 nt, Homo sapiens
  misc_RNA (1)...(19): siRNA sense strand
gaaagcaaucugauggaca

SEQ ID NO: 2641252 - RNA, 19 nt, Homo sapiens
  misc_RNA (1)...(19): siRNA sense strand
agagguagaucgacagguu

SEQ ID NO: 2641253 - RNA, 19 nt, Homo sapiens
  misc_RNA (1)...(19): siRNA sense strand
caagagauugagaaggaga

SEQ ID NO: 2641254 - RNA, 19 nt, Homo sapiens
  misc_RNA (1)...(19): siRNA sense strand
ccacaggagacuaauauga

SEQ ID NO: 2641255 - RNA, 19 nt, Homo sapiens
  misc_RNA (1)...(19): siRNA sense strand
gcucagacagagucaguga

SEQ ID NO: 2641256 - RNA, 19 nt, Homo sapiens
  misc_RNA (1)...(19): siRNA sense strand
ggagagaguagcagcagca

SEQ ID NO: 2641257 - RNA, 19 nt, Homo sapiens
  misc_RNA (1)...(19): siRNA sense strand
aacaggaaucugagaagaa

SEQ ID NO: 2641258 - RNA, 19 nt, Homo sapiens
  misc_RNA (1)...(19): siRNA sense strand
agaaaucagaagugggacu

SEQ ID NO: 2641259 - RNA, 19 nt, Homo sapiens
  misc_RNA (1)...(19): siRNA sense strand
ccuuaaaaccccaggaacu

SEQ ID NO: 2641260 - RNA, 19 nt, Homo sapiens
  misc_RNA (1)...(19): siRNA sense strand
ccaggaacuucuuuaaaca

SEQ ID NO: 2641261 - RNA, 19 nt, Homo sapiens
  misc_RNA (1)...(19): siRNA sense strand
gugcaaaggcuguggcgcu

SEQ ID NO: 2641262 - RNA, 19 nt, Homo sapiens
  misc_RNA (1)...(19): siRNA sense strand
ucagaagguucagaagaaa

SEQ ID NO: 2641263 - RNA, 19 nt, Homo sapiens
  misc_RNA (1)...(19): siRNA sense strand
ccaccauuccagcagguaa

SEQ ID NO: 2641264 - RNA, 19 nt, Homo sapiens
  misc_RNA (1)...(19): siRNA sense strand
ucagacagagucagugaaa

SEQ ID NO: 2641265 - RNA, 19 nt, Homo sapiens
  misc_RNA (1)...(19): siRNA sense strand
ccagcagcuucuagccuua

SEQ ID NO: 2641266 - RNA, 19 nt, Homo sapiens
  misc_RNA (1)...(19): siRNA sense strand
ccaauaccacgaaggacua

SEQ ID NO: 2641267 - RNA, 19 nt, Homo sapiens
  misc_RNA (1)...(19): siRNA sense strand
cagaauaguuccaguaguc

SEQ ID NO: 2641268 - RNA, 19 nt, Homo sapiens
  misc_RNA (1)...(19): siRNA sense strand
gucagaguguaaagaagaa

SEQ ID NO: 2641269 - RNA, 19 nt, Homo sapiens
  misc_RNA (1)...(19): siRNA sense strand
cugugauaguggagauaaa

SEQ ID NO: 2641270 - RNA, 19 nt, Homo sapiens
  misc_RNA (1)...(19): siRNA sense strand
agaaauagauguuugccua

SEQ ID NO: 2641271 - RNA, 19 nt, Homo sapiens
  misc_RNA (1)...(19): siRNA sense strand
gagcauggcaagagcaaga

SEQ ID NO: 2641272 - RNA, 19 nt, Homo sapiens
  misc_RNA (1)...(19): siRNA sense strand
cugaagagguuaaauguau

SEQ ID NO: 2641273 - RNA, 19 nt, Homo sapiens
  misc_RNA (1)...(19): siRNA sense strand
gagcagauuguuugagcaa

SEQ ID NO: 2641274 - RNA, 19 nt, Homo sapiens
  misc_RNA (1)...(19): siRNA sense strand
gggugaaauuguuguuauu

SEQ ID NO: 2641275 - RNA, 19 nt, Homo sapiens
  misc_RNA (1)...(19): siRNA sense strand
agugaaacugugagagcaa

SEQ ID NO: 2641276 - RNA, 19 nt, Homo sapiens
  misc_RNA (1)...(19): siRNA sense strand
ugacauugcuacaagauau

SEQ ID NO: 2641277 - RNA, 19 nt, Homo sapiens
  misc_RNA (1)...(19): siRNA sense strand
ggaaauuaaggaagcaaga

SEQ ID NO: 2641278 - RNA, 19 nt, Homo sapiens
  misc_RNA (1)...(19): siRNA sense strand
uugauuuguugguggauaa

SEQ ID NO: 2641279 - RNA, 19 nt, Homo sapiens
  misc_RNA (1)...(19): siRNA sense strand
gcuuuaacaucuucagcaa

SEQ ID NO: 2641280 - RNA, 19 nt, Homo sapiens
  misc_RNA (1)...(19): siRNA sense strand
ucgugaagcucgaagaaca

SEQ ID NO: 2641281 - RNA, 19 nt, Homo sapiens
  misc_RNA (1)...(19): siRNA sense strand
ugaagaagacagaagaaaa

SEQ ID NO: 2641282 - RNA, 19 nt, Homo sapiens
  misc_RNA (1)...(19): siRNA sense strand
auuagagaauggagaguuu

SEQ ID NO: 2641283 - RNA, 19 nt, Homo sapiens
  misc_RNA (1)...(19): siRNA sense strand
agaaagucacuaagaagaa

SEQ ID NO: 2641284 - RNA, 19 nt, Homo sapiens
  misc_RNA (1)...(19): siRNA sense strand
uugaagaggcagaaggaga

SEQ ID NO: 2641285 - RNA, 19 nt, Homo sapiens
  misc_RNA (1)...(19): siRNA sense strand
aggcagaaggagaagaaaa

SEQ ID NO: 2641286 - RNA, 19 nt, Homo sapiens
  misc_RNA (1)...(19): siRNA sense strand
gcagauuguuugagcaagu

SEQ ID NO: 2641287 - RNA, 19 nt, Homo sapiens
  misc_RNA (1)...(19): siRNA sense strand
gaaggaaaucaaagagcau

SEQ ID NO: 2641288 - RNA, 19 nt, Homo sapiens
  misc_RNA (1)...(19): siRNA sense strand
cauaauuaccugacugcaa

SEQ ID NO: 2641289 - RNA, 19 nt, Homo sapiens
  misc_RNA (1)...(19): siRNA sense strand
ugaagaggcagaaggagaa

SEQ ID NO: 2641290 - RNA, 19 nt, Homo sapiens
  misc_RNA (1)...(19): siRNA sense strand
ggcaagagcaagaaauaga

SEQ ID NO: 2641291 - RNA, 19 nt, Homo sapiens
  misc_RNA (1)...(19): siRNA sense strand
gaagaagacagaagaaaau

SEQ ID NO: 2641292 - RNA, 19 nt, Homo sapiens
  misc_RNA (1)...(19): siRNA sense strand
acaccaaauuugcagacua

SEQ ID NO: 2641293 - RNA, 19 nt, Homo sapiens
  misc_RNA (1)...(19): siRNA sense strand
gugaaaaggcgaagaaagu

SEQ ID NO: 2641294 - RNA, 19 nt, Homo sapiens
  misc_RNA (1)...(19): siRNA sense strand
ccaucauauucaugcgcua

SEQ ID NO: 2641295 - RNA, 19 nt, Homo sapiens
  misc_RNA (1)...(19): siRNA sense strand
uggugaaucugaaaggcaa

SEQ ID NO: 2641296 - RNA, 19 nt, Homo sapiens
  misc_RNA (1)...(19): siRNA sense strand
ugacaguuuugaaggaaua

SEQ ID NO: 2641297 - RNA, 19 nt, Homo sapiens
  misc_RNA (1)...(19): siRNA sense strand
auucauagaucuccagcaa

SEQ ID NO: 2641298 - RNA, 19 nt, Homo sapiens
  misc_RNA (1)...(19): siRNA sense strand
ccagcaagaagaagccaua

SEQ ID NO: 2641299 - RNA, 19 nt, Homo sapiens
  misc_RNA (1)...(19): siRNA sense strand
ccaaagaaacagucaucau

SEQ ID NO: 2641300 - RNA, 19 nt, Homo sapiens
  misc_RNA (1)...(19): siRNA sense strand
agauaaggacccaggagau

SEQ ID NO: 2641301 - RNA, 19 nt, Homo sapiens
  misc_RNA (1)...(19): siRNA sense strand
gcacaaacaaagaaaucca

SEQ ID NO: 2641302 - RNA, 19 nt, Homo sapiens
  misc_RNA (1)...(19): siRNA sense strand
uauaguugaucgugagaga

SEQ ID NO: 2641303 - RNA, 19 nt, Homo sapiens
  misc_RNA (1)...(19): siRNA sense strand
gcuacaagauauaccauca

SEQ ID NO: 2641304 - RNA, 19 nt, Homo sapiens
  misc_RNA (1)...(19): siRNA sense strand
caggaaaguugaaguugau

SEQ ID NO: 2641305 - RNA, 19 nt, Homo sapiens
  misc_RNA (1)...(19): siRNA sense strand
ggaaaauggagaagagacu

SEQ ID NO: 2641306 - RNA, 19 nt, Homo sapiens
  misc_RNA (1)...(19): siRNA sense strand
aggcgaagaaagucacuaa

SEQ ID NO: 2641307 - RNA, 19 nt, Homo sapiens
  misc_RNA (1)...(19): siRNA sense strand
gggugaagaagaagcuaga

SEQ ID NO: 2641308 - RNA, 19 nt, Homo sapiens
  misc_RNA (1)...(19): siRNA sense strand
gaggcuggccacagauaaa

SEQ ID NO: 2641309 - RNA, 19 nt, Homo sapiens
  misc_RNA (1)...(19): siRNA sense strand
auucaugcgcuaaaggaaa

SEQ ID NO: 2641310 - RNA, 19 nt, Homo sapiens
  misc_RNA (1)...(19): siRNA sense strand
gagcaaguggguuggugaa

SEQ ID NO: 2641311 - RNA, 19 nt, Homo sapiens
  misc_RNA (1)...(19): siRNA sense strand
gcauauuugaugagaccuu

SEQ ID NO: 2641312 - RNA, 19 nt, Homo sapiens
  misc_RNA (1)...(19): siRNA sense strand
uggaggaccaggaggaaaa

SEQ ID NO: 2641313 - RNA, 19 nt, Homo sapiens
  misc_RNA (1)...(19): siRNA sense strand
gcuuguacccugaaggaca

SEQ ID NO: 2641314 - RNA, 19 nt, Homo sapiens
  misc_RNA (1)...(19): siRNA sense strand
uauagaaguugaagaggca

SEQ ID NO: 2641315 - RNA, 19 nt, Homo sapiens
  misc_RNA (1)...(19): siRNA sense strand
cauuaacauccgacagaau

SEQ ID NO: 2641316 - RNA, 19 nt, Homo sapiens
  misc_RNA (1)...(19): siRNA sense strand
caggagaaguagaacgacu

SEQ ID NO: 2641317 - RNA, 19 nt, Homo sapiens
  misc_RNA (1)...(19): siRNA sense strand
gaccauauaauuugagaca

SEQ ID NO: 2641318 - RNA, 19 nt, Homo sapiens
  misc_RNA (1)...(19): siRNA sense strand
cauucauaguagugacaca

SEQ ID NO: 2641319 - RNA, 19 nt, Homo sapiens
  misc_RNA (1)...(19): siRNA sense strand
agauaauaggggugaaauu

SEQ ID NO: 2641320 - RNA, 19 nt, Homo sapiens
  misc_RNA (1)...(19): siRNA sense strand
ggauagugaagaugaaaau

SEQ ID NO: 2641321 - RNA, 19 nt, Homo sapiens
  misc_RNA (1)...(19): siRNA sense strand
auaauuaggcacagggcuu

SEQ ID NO: 2641322 - RNA, 19 nt, Homo sapiens
  misc_RNA (1)...(19): siRNA sense strand
agccauauuaggagaaaga

SEQ ID NO: 2641323 - RNA, 19 nt, Homo sapiens
  misc_RNA (1)...(19): siRNA sense strand
auggcaagagcaagaaaua

SEQ ID NO: 2641324 - RNA, 19 nt, Homo sapiens
  misc_RNA (1)...(19): siRNA sense strand
ggagcucggaagacagaaa

SEQ ID NO: 2641325 - RNA, 19 nt, Homo sapiens
  misc_RNA (1)...(19): siRNA sense strand
cuacugagggugaagaaga

SEQ ID NO: 2641326 - RNA, 19 nt, Homo sapiens
  misc_RNA (1)...(19): siRNA sense strand
ggagaaaaucaguauagaa

SEQ ID NO: 2641327 - RNA, 19 nt, Homo sapiens
  misc_RNA (1)...(19): siRNA sense strand
acuuagaaaucaagaccaa

SEQ ID NO: 2641328 - RNA, 19 nt, Homo sapiens
  misc_RNA (1)...(19): siRNA sense strand
gaggaaagaguauggguca

SEQ ID NO: 2641329 - RNA, 19 nt, Homo sapiens
  misc_RNA (1)...(19): siRNA sense strand
cggagaaggaggagcgagu

SEQ ID NO: 2641330 - RNA, 19 nt, Homo sapiens
  misc_RNA (1)...(19): siRNA sense strand
ccugagaaggagaaagaga

SEQ ID NO: 2641331 - RNA, 19 nt, Homo sapiens
  misc_RNA (1)...(19): siRNA sense strand
augaugaacugcaggccaa

SEQ ID NO: 2641332 - RNA, 19 nt, Homo sapiens
  misc_RNA (1)...(19): siRNA sense strand
gugauagagaccaggaaga

SEQ ID NO: 2641333 - RNA, 19 nt, Homo sapiens
  misc_RNA (1)...(19): siRNA sense strand
uauaaaucagggagaggaa

SEQ ID NO: 2641334 - RNA, 19 nt, Homo sapiens
  misc_RNA (1)...(19): siRNA sense strand
gcguagcaguggaggagca

SEQ ID NO: 2641335 - RNA, 19 nt, Homo sapiens
  misc_RNA (1)...(19): siRNA sense strand
ggacagaacuggaggaggg

SEQ ID NO: 2641336 - RNA, 19 nt, Homo sapiens
  misc_RNA (1)...(19): siRNA sense strand
gugaagaccaacauggaga

SEQ ID NO: 2641337 - RNA, 19 nt, Homo sapiens
  misc_RNA (1)...(19): siRNA sense strand
uggaggagcaggagcguga

SEQ ID NO: 2641338 - RNA, 19 nt, Homo sapiens
  misc_RNA (1)...(19): siRNA sense strand
aggaaacaaacgugcagaa

SEQ ID NO: 2641339 - RNA, 19 nt, Homo sapiens
  misc_RNA (1)...(19): siRNA sense strand
gcugcuggagucagagaaa

SEQ ID NO: 2641340 - RNA, 19 nt, Homo sapiens
  misc_RNA (1)...(19): siRNA sense strand
agaggauccuggcggcaaa

SEQ ID NO: 2641341 - RNA, 19 nt, Homo sapiens
  misc_RNA (1)...(19): siRNA sense strand
acccacagcacauggauaa

SEQ ID NO: 2641342 - RNA, 19 nt, Homo sapiens
  misc_RNA (1)...(19): siRNA sense strand
acgaggaggugguggugga

SEQ ID NO: 2641343 - RNA, 19 nt, Homo sapiens
  misc_RNA (1)...(19): siRNA sense strand
aggaaaagcaagcggacuu

SEQ ID NO: 2641344 - RNA, 19 nt, Homo sapiens
  misc_RNA (1)...(19): siRNA sense strand
ccaagaucaucaaggagca

SEQ ID NO: 2641345 - RNA, 19 nt, Homo sapiens
  misc_RNA (1)...(19): siRNA sense strand
cccaagucaaugaggagaa

SEQ ID NO: 2641346 - RNA, 19 nt, Homo sapiens
  misc_RNA (1)...(19): siRNA sense strand
uaaaucagggagaggaaaa

SEQ ID NO: 2641347 - RNA, 19 nt, Homo sapiens
  misc_RNA (1)...(19): siRNA sense strand
agaccaacauggagaagcu

SEQ ID NO: 2641348 - RNA, 19 nt, Homo sapiens
  misc_RNA (1)...(19): siRNA sense strand
cuauggaggcuuuggacca

SEQ ID NO: 2641349 - RNA, 19 nt, Homo sapiens
  misc_RNA (1)...(19): siRNA sense strand
gaagaaagccauuguggac

SEQ ID NO: 2641350 - RNA, 19 nt, Homo sapiens
  misc_RNA (1)...(19): siRNA sense strand
ugcaagggguggugaggaa

SEQ ID NO: 2641351 - RNA, 19 nt, Homo sapiens
  misc_RNA (1)...(19): siRNA sense strand
cuugcgaauuacacauaua

SEQ ID NO: 2641352 - RNA, 19 nt, Homo sapiens
  misc_RNA (1)...(19): siRNA sense strand
ccaugaugacuuagaaauc

SEQ ID NO: 2641353 - RNA, 19 nt, Homo sapiens
  misc_RNA (1)...(19): siRNA sense strand
gagcaagaucagugaaguc

SEQ ID NO: 2641354 - RNA, 19 nt, Homo sapiens
  misc_RNA (1)...(19): siRNA sense strand
uccucaagaugguggccaa

SEQ ID NO: 2641355 - RNA, 19 nt, Homo sapiens
  misc_RNA (1)...(19): siRNA sense strand
uugccaacaucgaggagga

SEQ ID NO: 2641356 - RNA, 19 nt, Homo sapiens
  misc_RNA (1)...(19): siRNA sense strand
ccuccaagcaccugagaag

SEQ ID NO: 2641357 - RNA, 19 nt, Homo sapiens
  misc_RNA (1)...(19): siRNA sense strand
guggugaggaagacgguga

SEQ ID NO: 2641358 - RNA, 19 nt, Homo sapiens
  misc_RNA (1)...(19): siRNA sense strand
ccgccgagauguacggugu

SEQ ID NO: 2641359 - RNA, 19 nt, Homo sapiens
  misc_RNA (1)...(19): siRNA sense strand
ucauggaggaugcagaaau

SEQ ID NO: 2641360 - RNA, 19 nt, Homo sapiens
  misc_RNA (1)...(19): siRNA sense strand
cguuuauccaagaggagga

SEQ ID NO: 2641361 - RNA, 19 nt, Homo sapiens
  misc_RNA (1)...(19): siRNA sense strand
cccugcagguggagguaga

SEQ ID NO: 2641362 - RNA, 19 nt, Homo sapiens
  misc_RNA (1)...(19): siRNA sense strand
cggcaguggacaacgguga

SEQ ID NO: 2641363 - RNA, 19 nt, Homo sapiens
  misc_RNA (1)...(19): siRNA sense strand
gggcaguucuccagagccu

SEQ ID NO: 2641364 - RNA, 19 nt, Homo sapiens
  misc_RNA (1)...(19): siRNA sense strand
ggacaacggugacagcuca

SEQ ID NO: 2641365 - RNA, 19 nt, Homo sapiens
  misc_RNA (1)...(19): siRNA sense strand
aggacagcgagguguacaa

SEQ ID NO: 2641366 - RNA, 19 nt, Homo sapiens
  misc_RNA (1)...(19): siRNA sense strand
aauccgaggcggugaagga

SEQ ID NO: 2641367 - RNA, 19 nt, Homo sapiens
  misc_RNA (1)...(19): siRNA sense strand
cuucaaugccggagagcua

SEQ ID NO: 2641368 - RNA, 19 nt, Homo sapiens
  misc_RNA (1)...(19): siRNA sense strand
gcaaggagcuggaggcuga

SEQ ID NO: 2641369 - RNA, 19 nt, Homo sapiens
  misc_RNA (1)...(19): siRNA sense strand
cuacaagauuggagaagau

SEQ ID NO: 2641370 - RNA, 19 nt, Homo sapiens
  misc_RNA (1)...(19): siRNA sense strand
gggaagaggcaaagcccaa

SEQ ID NO: 2641371 - RNA, 19 nt, Homo sapiens
  misc_RNA (1)...(19): siRNA sense strand
aggaagagcuauaugguga

SEQ ID NO: 2641372 - RNA, 19 nt, Homo sapiens
  misc_RNA (1)...(19): siRNA sense strand
aggcaaagcccaaggagau

SEQ ID NO: 2641373 - RNA, 19 nt, Homo sapiens
  misc_RNA (1)...(19): siRNA sense strand
gcaucugggaagaggcaaa

SEQ ID NO: 2641374 - RNA, 19 nt, Homo sapiens
  misc_RNA (1)...(19): siRNA sense strand
gcuauauggugaagggcau

SEQ ID NO: 2641375 - RNA, 19 nt, Homo sapiens
  misc_RNA (1)...(19): siRNA sense strand
cauggagaacggagagaua

SEQ ID NO: 2641376 - RNA, 19 nt, Homo sapiens
  misc_RNA (1)...(19): siRNA sense strand
uggagaacggagagauaaa

SEQ ID NO: 2641377 - RNA, 19 nt, Homo sapiens
  misc_RNA (1)...(19): siRNA sense strand
ggaauauggcggagaagga

SEQ ID NO: 2641378 - RNA, 19 nt, Homo sapiens
  misc_RNA (1)...(19): siRNA sense strand
gcgaggaacagaagauaau

SEQ ID NO: 2641379 - RNA, 19 nt, Homo sapiens
  misc_RNA (1)...(19): siRNA sense strand
gcaugagaccaaugagauu

SEQ ID NO: 2641380 - RNA, 19 nt, Homo sapiens
  misc_RNA (1)...(19): siRNA sense strand
ccgaggugcuugugggaca

SEQ ID NO: 2641381 - RNA, 19 nt, Homo sapiens
  misc_RNA (1)...(19): siRNA sense strand
cggagaaggaacagacuuu

SEQ ID NO: 2641382 - RNA, 19 nt, Homo sapiens
  misc_RNA (1)...(19): siRNA sense strand
ggaaaugaccccagaaaca

SEQ ID NO: 2641383 - RNA, 19 nt, Homo sapiens
  misc_RNA (1)...(19): siRNA sense strand
gcccaggaauggaaggcaa

SEQ ID NO: 2641384 - RNA, 19 nt, Homo sapiens
  misc_RNA (1)...(19): siRNA sense strand
acuacaagauucugcacaa

SEQ ID NO: 2641385 - RNA, 19 nt, Homo sapiens
  misc_RNA (1)...(19): siRNA sense strand
ggugcugacccgagaggaa

SEQ ID NO: 2641386 - RNA, 19 nt, Homo sapiens
  misc_RNA (1)...(19): siRNA sense strand
ccgugaggcugaaaggcua

SEQ ID NO: 2641387 - RNA, 19 nt, Homo sapiens
  misc_RNA (1)...(19): siRNA sense strand
ggaacaaggcgaagcgugu

SEQ ID NO: 2641388 - RNA, 19 nt, Homo sapiens
  misc_RNA (1)...(19): siRNA sense strand
ccucaagaaucagggcaaa

SEQ ID NO: 2641389 - RNA, 19 nt, Homo sapiens
  misc_RNA (1)...(19): siRNA sense strand
caguggagguggugaaacu

SEQ ID NO: 2641390 - RNA, 19 nt, Homo sapiens
  misc_RNA (1)...(19): siRNA sense strand
agcuaacccugguggaaua

SEQ ID NO: 2641391 - RNA, 19 nt, Homo sapiens
  misc_RNA (1)...(19): siRNA sense strand
gagaggaacugcuagccaa

SEQ ID NO: 2641392 - RNA, 19 nt, Homo sapiens
  misc_RNA (1)...(19): siRNA sense strand
guaaauucgaagaggcuga

SEQ ID NO: 2641393 - RNA, 19 nt, Homo sapiens
  misc_RNA (1)...(19): siRNA sense strand
uaaucggcuuagugagaua

SEQ ID NO: 2641394 - RNA, 19 nt, Homo sapiens
  misc_RNA (1)...(19): siRNA sense strand
gcaaguaccgugaggcuga

SEQ ID NO: 2641395 - RNA, 19 nt, Homo sapiens
  misc_RNA (1)...(19): siRNA sense strand
aaauggagaagcagggcaa

SEQ ID NO: 2641396 - RNA, 19 nt, Homo sapiens
  misc_RNA (1)...(19): siRNA sense strand
aggaagaauaugagcggga

SEQ ID NO: 2641397 - RNA, 19 nt, Homo sapiens
  misc_RNA (1)...(19): siRNA sense strand
cgaagaagcaucugggaag

SEQ ID NO: 2641398 - RNA, 19 nt, Homo sapiens
  misc_RNA (1)...(19): siRNA sense strand
aggcgaagcguguagcuaa

SEQ ID NO: 2641399 - RNA, 19 nt, Homo sapiens
  misc_RNA (1)...(19): siRNA sense strand
gaauaugggaauaaugaca

SEQ ID NO: 2641400 - RNA, 19 nt, Homo sapiens
  misc_RNA (1)...(19): siRNA sense strand
acuacaaacuggcugaaau

SEQ ID NO: 2641401 - RNA, 19 nt, Homo sapiens
  misc_RNA (1)...(19): siRNA sense strand
uuauaaggaggcuggauua

SEQ ID NO: 2641402 - RNA, 19 nt, Homo sapiens
  misc_RNA (1)...(19): siRNA sense strand
aacaaauugcucugggaaa

SEQ ID NO: 2641403 - RNA, 19 nt, Homo sapiens
  misc_RNA (1)...(19): siRNA sense strand
aggugaaaauccuaggaaa

SEQ ID NO: 2641404 - RNA, 19 nt, Homo sapiens
  misc_RNA (1)...(19): siRNA sense strand
gccaggugauugugaagaa

SEQ ID NO: 2641405 - RNA, 19 nt, Homo sapiens
  misc_RNA (1)...(19): siRNA sense strand
ccgggaauauggcggagaa

SEQ ID NO: 2641406 - RNA, 19 nt, Homo sapiens
  misc_RNA (1)...(19): siRNA sense strand
ucgaagaggcugaagcuga

SEQ ID NO: 2641407 - RNA, 19 nt, Homo sapiens
  misc_RNA (1)...(19): siRNA sense strand
ccucaaagugcgagacucu

SEQ ID NO: 2641408 - RNA, 19 nt, Homo sapiens
  misc_RNA (1)...(19): siRNA sense strand
gggaagguucguuuagcaa

SEQ ID NO: 2641409 - RNA, 19 nt, Homo sapiens
  misc_RNA (1)...(19): siRNA sense strand
aaauuguagccuauggaaa

SEQ ID NO: 2641410 - RNA, 19 nt, Homo sapiens
  misc_RNA (1)...(19): siRNA sense strand
ggaguauuuacaagaacaa

SEQ ID NO: 2641411 - RNA, 19 nt, Homo sapiens
  misc_RNA (1)...(19): siRNA sense strand
cccacaagcuggcgaugaa

SEQ ID NO: 2641412 - RNA, 19 nt, Homo sapiens
  misc_RNA (1)...(19): siRNA sense strand
uggagggauuuguggaaca

SEQ ID NO: 2641413 - RNA, 19 nt, Homo sapiens
  misc_RNA (1)...(19): siRNA sense strand
ggggaaagaccgaggugau

SEQ ID NO: 2641414 - RNA, 19 nt, Homo sapiens
  misc_RNA (1)...(19): siRNA sense strand
uggaagaaggcaauuuaua

SEQ ID NO: 2641415 - RNA, 19 nt, Homo sapiens
  misc_RNA (1)...(19): siRNA sense strand
gggaagaggccuacagggu

SEQ ID NO: 2641416 - RNA, 19 nt, Homo sapiens
  misc_RNA (1)...(19): siRNA sense strand
guaugaugaacauggagaa

SEQ ID NO: 2641417 - RNA, 19 nt, Homo sapiens
  misc_RNA (1)...(19): siRNA sense strand
cgccaguggaagaaggcaa

SEQ ID NO: 2641418 - RNA, 19 nt, Homo sapiens
  misc_RNA (1)...(19): siRNA sense strand
ugggacaagugcauugaaa

SEQ ID NO: 2641419 - RNA, 19 nt, Homo sapiens
  misc_RNA (1)...(19): siRNA sense strand
aacaaggacaacuggaaua

SEQ ID NO: 2641420 - RNA, 19 nt, Homo sapiens
  misc_RNA (1)...(19): siRNA sense strand
gguauuucuuugaugauga

SEQ ID NO: 2641421 - RNA, 19 nt, Homo sapiens
  misc_RNA (1)...(19): siRNA sense strand
gaggcaaagcccaaggaga

SEQ ID NO: 2641422 - RNA, 19 nt, Homo sapiens
  misc_RNA (1)...(19): siRNA sense strand
ggaagagcuauauggugaa

SEQ ID NO: 2641423 - RNA, 19 nt, Homo sapiens
  misc_RNA (1)...(19): siRNA sense strand
aauuguagccuauggaaaa

SEQ ID NO: 2641424 - RNA, 19 nt, Homo sapiens
  misc_RNA (1)...(19): siRNA sense strand
gagaggugucagcgaggaa

SEQ ID NO: 2641425 - RNA, 19 nt, Homo sapiens
  misc_RNA (1)...(19): siRNA sense strand
ggacaaaagaugccauaga

SEQ ID NO: 2641426 - RNA, 19 nt, Homo sapiens
  misc_RNA (1)...(19): siRNA sense strand
gaauaugagcgggaagcua

SEQ ID NO: 2641427 - RNA, 19 nt, Homo sapiens
  misc_RNA (1)...(19): siRNA sense strand
ccaacugugccgaggccua

SEQ ID NO: 2641428 - RNA, 19 nt, Homo sapiens
  misc_RNA (1)...(19): siRNA sense strand
caucaguguucguauuaau

SEQ ID NO: 2641429 - RNA, 19 nt, Homo sapiens
  misc_RNA (1)...(19): siRNA sense strand
ccucagugauacacaccua

SEQ ID NO: 2641430 - RNA, 19 nt, Homo sapiens
  misc_RNA (1)...(19): siRNA sense strand
ggguaaauucgaagaggcu

SEQ ID NO: 2641431 - RNA, 19 nt, Homo sapiens
  misc_RNA (1)...(19): siRNA sense strand
ucgaagaagcaucugggaa

SEQ ID NO: 2641432 - RNA, 19 nt, Homo sapiens
  misc_RNA (1)...(19): siRNA sense strand
agaccgaggugauggugau

SEQ ID NO: 2641433 - RNA, 19 nt, Homo sapiens
  misc_RNA (1)...(19): siRNA sense strand
gcuaugagguggaagaggu

SEQ ID NO: 2641434 - RNA, 19 nt, Homo sapiens
  misc_RNA (1)...(19): siRNA sense strand
cauugaggcaccugagaga

SEQ ID NO: 2641435 - RNA, 19 nt, Homo sapiens
  misc_RNA (1)...(19): siRNA sense strand
uggcuuggucccagaacaa

SEQ ID NO: 2641436 - RNA, 19 nt, Homo sapiens
  misc_RNA (1)...(19): siRNA sense strand
uggaggaggccaugggcau

SEQ ID NO: 2641437 - RNA, 19 nt, Homo sapiens
  misc_RNA (1)...(19): siRNA sense strand
ucacucaggcccaggaaau

SEQ ID NO: 2641438 - RNA, 19 nt, Homo sapiens
  misc_RNA (1)...(19): siRNA sense strand
aggcaacagugaacaugua

SEQ ID NO: 2641439 - RNA, 19 nt, Homo sapiens
  misc_RNA (1)...(19): siRNA sense strand
ccgagcaaguagagagcaa

SEQ ID NO: 2641440 - RNA, 19 nt, Homo sapiens
  misc_RNA (1)...(19): siRNA sense strand
auuaauaagugguggacau

SEQ ID NO: 2641441 - RNA, 19 nt, Homo sapiens
  misc_RNA (1)...(19): siRNA sense strand
gggaaaggcaagaagucaa

SEQ ID NO: 2641442 - RNA, 19 nt, Homo sapiens
  misc_RNA (1)...(19): siRNA sense strand
ccaaagaagucuacaggca

SEQ ID NO: 2641443 - RNA, 19 nt, Homo sapiens
  misc_RNA (1)...(19): siRNA sense strand
gaugaggaggagagugaaa

SEQ ID NO: 2641444 - RNA, 19 nt, Homo sapiens
  misc_RNA (1)...(19): siRNA sense strand
aaucagaagcuguaggaau

SEQ ID NO: 2641445 - RNA, 19 nt, Homo sapiens
  misc_RNA (1)...(19): siRNA sense strand
cuucaaacuaggaauguaa

SEQ ID NO: 2641446 - RNA, 19 nt, Homo sapiens
  misc_RNA (1)...(19): siRNA sense strand
aguaaagugcaaauggaaa

SEQ ID NO: 2641447 - RNA, 19 nt, Homo sapiens
  misc_RNA (1)...(19): siRNA sense strand
gggaugaagaugaggagga

SEQ ID NO: 2641448 - RNA, 19 nt, Homo sapiens
  misc_RNA (1)...(19): siRNA sense strand
cagcaucagagaagacaaa

SEQ ID NO: 2641449 - RNA, 19 nt, Homo sapiens
  misc_RNA (1)...(19): siRNA sense strand
agagauacagcaagugaaa

SEQ ID NO: 2641450 - RNA, 19 nt, Homo sapiens
  misc_RNA (1)...(19): siRNA sense strand
aagaugaggaggagaguga

SEQ ID NO: 2641451 - RNA, 19 nt, Homo sapiens
  misc_RNA (1)...(19): siRNA sense strand
aaguagagagcaagaggaa

SEQ ID NO: 2641452 - RNA, 19 nt, Homo sapiens
  misc_RNA (1)...(19): siRNA sense strand
gagaagacaaagggagcaa

SEQ ID NO: 2641453 - RNA, 19 nt, Homo sapiens
  misc_RNA (1)...(19): siRNA sense strand
guaucagcccagauggaaa

SEQ ID NO: 2641454 - RNA, 19 nt, Homo sapiens
  misc_RNA (1)...(19): siRNA sense strand
caaagagguuacaaggaca

SEQ ID NO: 2641455 - RNA, 19 nt, Homo sapiens
  misc_RNA (1)...(19): siRNA sense strand
aauggaaagcagagucaaa

SEQ ID NO: 2641456 - RNA, 19 nt, Homo sapiens
  misc_RNA (1)...(19): siRNA sense strand
augaggaugccgaaggaaa

SEQ ID NO: 2641457 - RNA, 19 nt, Homo sapiens
  misc_RNA (1)...(19): siRNA sense strand
uuaaauggguacugcaaaa

SEQ ID NO: 2641458 - RNA, 19 nt, Homo sapiens
  misc_RNA (1)...(19): siRNA sense strand
ugaugaauucugaagcaaa

SEQ ID NO: 2641459 - RNA, 19 nt, Homo sapiens
  misc_RNA (1)...(19): siRNA sense strand
gagcaaguagagagcaaga

SEQ ID NO: 2641460 - RNA, 19 nt, Homo sapiens
  misc_RNA (1)...(19): siRNA sense strand
gaaaguccccagaggaaaa

SEQ ID NO: 2641461 - RNA, 19 nt, Homo sapiens
  misc_RNA (1)...(19): siRNA sense strand
cacaguaaaaggagaguua

SEQ ID NO: 2641462 - RNA, 19 nt, Homo sapiens
  misc_RNA (1)...(19): siRNA sense strand
gaguaugggagacggccaa

SEQ ID NO: 2641463 - RNA, 19 nt, Homo sapiens
  misc_RNA (1)...(19): siRNA sense strand
agcaauggauauagacaca

SEQ ID NO: 2641464 - RNA, 19 nt, Homo sapiens
  misc_RNA (1)...(19): siRNA sense strand
cgaaggaaaagaugaagaa

SEQ ID NO: 2641465 - RNA, 19 nt, Homo sapiens
  misc_RNA (1)...(19): siRNA sense strand
uggcagguccgaucagaaa

SEQ ID NO: 2641466 - RNA, 19 nt, Homo sapiens
  misc_RNA (1)...(19): siRNA sense strand
aagcuguaggaaugaguaa

SEQ ID NO: 2641467 - RNA, 19 nt, Homo sapiens
  misc_RNA (1)...(19): siRNA sense strand
cuuauuggcucuuggcaca

SEQ ID NO: 2641468 - RNA, 19 nt, Homo sapiens
  misc_RNA (1)...(19): siRNA sense strand
aaguaaagugcaaauggaa

SEQ ID NO: 2641469 - RNA, 19 nt, Homo sapiens
  misc_RNA (1)...(19): siRNA sense strand
aggaaaguccccagaggaa

SEQ ID NO: 2641470 - RNA, 19 nt, Homo sapiens
  misc_RNA (1)...(19): siRNA sense strand
ugauggaauuacaggucuu

SEQ ID NO: 2641471 - RNA, 19 nt, Homo sapiens
  misc_RNA (1)...(19): siRNA sense strand
cuauugagcgaguggcuuu

SEQ ID NO: 2641472 - RNA, 19 nt, Homo sapiens
  misc_RNA (1)...(19): siRNA sense strand
cccagggcuuagaaaguaa

SEQ ID NO: 2641473 - RNA, 19 nt, Homo sapiens
  misc_RNA (1)...(19): siRNA sense strand
cuaaugguucaguggcuaa

SEQ ID NO: 2641474 - RNA, 19 nt, Homo sapiens
  misc_RNA (1)...(19): siRNA sense strand
aggaggagagugaaaguga

SEQ ID NO: 2641475 - RNA, 19 nt, Homo sapiens
  misc_RNA (1)...(19): siRNA sense strand
guaaagugcaaauggaaag

SEQ ID NO: 2641476 - RNA, 19 nt, Homo sapiens
  misc_RNA (1)...(19): siRNA sense strand
cgucugggagcaauggaua

SEQ ID NO: 2641477 - RNA, 19 nt, Homo sapiens
  misc_RNA (1)...(19): siRNA sense strand
gcuaaugguucaguggcua

SEQ ID NO: 2641478 - RNA, 19 nt, Homo sapiens
  misc_RNA (1)...(19): siRNA sense strand
aagaugaggacguugaaga

SEQ ID NO: 2641479 - RNA, 19 nt, Homo sapiens
  misc_RNA (1)...(19): siRNA sense strand
ugaggaugccgaaggaaaa

SEQ ID NO: 2641480 - RNA, 19 nt, Homo sapiens
  misc_RNA (1)...(19): siRNA sense strand
uggcgaggacagagauaca

SEQ ID NO: 2641481 - RNA, 19 nt, Homo sapiens
  misc_RNA (1)...(19): siRNA sense strand
gugaugaauucugaagcaa

SEQ ID NO: 2641482 - RNA, 19 nt, Homo sapiens
  misc_RNA (1)...(19): siRNA sense strand
acguugaagaggaagauga

SEQ ID NO: 2641483 - RNA, 19 nt, Homo sapiens
  misc_RNA (1)...(19): siRNA sense strand
acaaagaagagccugucaa

SEQ ID NO: 2641484 - RNA, 19 nt, Homo sapiens
  misc_RNA (1)...(19): siRNA sense strand
cugaagaggagucugauga

SEQ ID NO: 2641485 - RNA, 19 nt, Homo sapiens
  misc_RNA (1)...(19): siRNA sense strand
gaggacagagauacagcaa

SEQ ID NO: 2641486 - RNA, 19 nt, Homo sapiens
  misc_RNA (1)...(19): siRNA sense strand
aaggaaaucagaagcugua

SEQ ID NO: 2641487 - RNA, 19 nt, Homo sapiens
  misc_RNA (1)...(19): siRNA sense strand
cgaucagaaaacaaagaaa

SEQ ID NO: 2641488 - RNA, 19 nt, Homo sapiens
  misc_RNA (1)...(19): siRNA sense strand
uccuaauagugcugugcua

SEQ ID NO: 2641489 - RNA, 19 nt, Homo sapiens
  misc_RNA (1)...(19): siRNA sense strand
cuaauagugcugugcuaau

SEQ ID NO: 2641490 - RNA, 19 nt, Homo sapiens
  misc_RNA (1)...(19): siRNA sense strand
cguacagacaugcaaagua

SEQ ID NO: 2641491 - RNA, 19 nt, Homo sapiens
  misc_RNA (1)...(19): siRNA sense strand
caaagaagucuacaggcau

SEQ ID NO: 2641492 - RNA, 19 nt, Homo sapiens
  misc_RNA (1)...(19): siRNA sense strand
uguauauggcaguugguuu

SEQ ID NO: 2641493 - RNA, 19 nt, Homo sapiens
  misc_RNA (1)...(19): siRNA sense strand
gugcugugcuaaugguuca

SEQ ID NO: 2641494 - RNA, 19 nt, Homo sapiens
  misc_RNA (1)...(19): siRNA sense strand
aagaggagucugaugauga

SEQ ID NO: 2641495 - RNA, 19 nt, Homo sapiens
  misc_RNA (1)...(19): siRNA sense strand
ucuguaaacuagaggaaaa

SEQ ID NO: 2641496 - RNA, 19 nt, Homo sapiens
  misc_RNA (1)...(19): siRNA sense strand
cuaucaaggcggagguuau

SEQ ID NO: 2641497 - RNA, 19 nt, Homo sapiens
  misc_RNA (1)...(19): siRNA sense strand
ugaacaaggaggcgggaga

SEQ ID NO: 2641498 - RNA, 19 nt, Homo sapiens
  misc_RNA (1)...(19): siRNA sense strand
ggaaaagauagaagcaauu

SEQ ID NO: 2641499 - RNA, 19 nt, Homo sapiens
  misc_RNA (1)...(19): siRNA sense strand
cguuggaagaucuagguua

SEQ ID NO: 2641500 - RNA, 19 nt, Homo sapiens
  misc_RNA (1)...(19): siRNA sense strand
gcuugaggugagugggcua

SEQ ID NO: 2641501 - RNA, 19 nt, Homo sapiens
  misc_RNA (1)...(19): siRNA sense strand
aggaagaggaaauaagcau

SEQ ID NO: 2641502 - RNA, 19 nt, Homo sapiens
  misc_RNA (1)...(19): siRNA sense strand
aggaagagggagccagaau

SEQ ID NO: 2641503 - RNA, 19 nt, Homo sapiens
  misc_RNA (1)...(19): siRNA sense strand
agguggacgugguggcuau

SEQ ID NO: 2641504 - RNA, 19 nt, Homo sapiens
  misc_RNA (1)...(19): siRNA sense strand
ggaggaagagggagccaga

SEQ ID NO: 2641505 - RNA, 19 nt, Homo sapiens
  misc_RNA (1)...(19): siRNA sense strand
cuggacagauggagggagu

SEQ ID NO: 2641506 - RNA, 19 nt, Homo sapiens
  misc_RNA (1)...(19): siRNA sense strand
gcagcaaacaggaggccga

SEQ ID NO: 2641507 - RNA, 19 nt, Homo sapiens
  misc_RNA (1)...(19): siRNA sense strand
cggaggacgaggaggucau

SEQ ID NO: 2641508 - RNA, 19 nt, Homo sapiens
  misc_RNA (1)...(19): siRNA sense strand
gcaucaaggaggcuggaca

SEQ ID NO: 2641509 - RNA, 19 nt, Homo sapiens
  misc_RNA (1)...(19): siRNA sense strand
aagccauagccaaugaaua

SEQ ID NO: 2641510 - RNA, 19 nt, Homo sapiens
  misc_RNA (1)...(19): siRNA sense strand
gagagguggcuaugaacau

SEQ ID NO: 2641511 - RNA, 19 nt, Homo sapiens
  misc_RNA (1)...(19): siRNA sense strand
auguauugcucuaggaaug

SEQ ID NO: 2641512 - RNA, 19 nt, Homo sapiens
  misc_RNA (1)...(19): siRNA sense strand
agcaauuaaccaagccaua

SEQ ID NO: 2641513 - RNA, 19 nt, Homo sapiens
  misc_RNA (1)...(19): siRNA sense strand
guggcuaccagcaggacaa

SEQ ID NO: 2641514 - RNA, 19 nt, Homo sapiens
  misc_RNA (1)...(19): siRNA sense strand
gaggaaaacgugcaagcaa

SEQ ID NO: 2641515 - RNA, 19 nt, Homo sapiens
  misc_RNA (1)...(19): siRNA sense strand
agauagaagcaauuaacca

SEQ ID NO: 2641516 - RNA, 19 nt, Homo sapiens
  misc_RNA (1)...(19): siRNA sense strand
uggagggagugguggagga

SEQ ID NO: 2641517 - RNA, 19 nt, Homo sapiens
  misc_RNA (1)...(19): siRNA sense strand
ggaaauaagcaucaaggag

SEQ ID NO: 2641518 - RNA, 19 nt, Homo sapiens
  misc_RNA (1)...(19): siRNA sense strand
gagaaagcugcuaauaaaa

SEQ ID NO: 2641519 - RNA, 19 nt, Homo sapiens
  misc_RNA (1)...(19): siRNA sense strand
aggagggagagguggcuau

SEQ ID NO: 2641520 - RNA, 19 nt, Homo sapiens
  misc_RNA (1)...(19): siRNA sense strand
aggacgaggaggucaugaa

SEQ ID NO: 2641521 - RNA, 19 nt, Homo sapiens
  misc_RNA (1)...(19): siRNA sense strand
gggaggaagaggaaauaag

SEQ ID NO: 2641522 - RNA, 19 nt, Homo sapiens
  misc_RNA (1)...(19): siRNA sense strand
agggagugguggaggaggu

SEQ ID NO: 2641523 - RNA, 19 nt, Homo sapiens
  misc_RNA (1)...(19): siRNA sense strand
cugacagagcuaagagcca

SEQ ID NO: 2641524 - RNA, 19 nt, Homo sapiens
  misc_RNA (1)...(19): siRNA sense strand
caguauaaucauucuggau

SEQ ID NO: 2641525 - RNA, 19 nt, Homo sapiens
  misc_RNA (1)...(19): siRNA sense strand
gagugugaccucauggaga

SEQ ID NO: 2641526 - RNA, 19 nt, Homo sapiens
  misc_RNA (1)...(19): siRNA sense strand
gguuaugguggcuuccaaa

SEQ ID NO: 2641527 - RNA, 19 nt, Homo sapiens
  misc_RNA (1)...(19): siRNA sense strand
ucuguaaacuagaggaaaa

SEQ ID NO: 2641528 - RNA, 19 nt, Homo sapiens
  misc_RNA (1)...(19): siRNA sense strand
cuaucaaggcggagguuau

SEQ ID NO: 2641529 - RNA, 19 nt, Homo sapiens
  misc_RNA (1)...(19): siRNA sense strand
ugaacaaggaggcgggaga

SEQ ID NO: 2641530 - RNA, 19 nt, Homo sapiens
  misc_RNA (1)...(19): siRNA sense strand
ggaaaagauagaagcaauu

SEQ ID NO: 2641531 - RNA, 19 nt, Homo sapiens
  misc_RNA (1)...(19): siRNA sense strand
cguuggaagaucuagguua

SEQ ID NO: 2641532 - RNA, 19 nt, Homo sapiens
  misc_RNA (1)...(19): siRNA sense strand
gcuugaggugagugggcua

SEQ ID NO: 2641533 - RNA, 19 nt, Homo sapiens
  misc_RNA (1)...(19): siRNA sense strand
aggaagaggaaauaagcau

SEQ ID NO: 2641534 - RNA, 19 nt, Homo sapiens
  misc_RNA (1)...(19): siRNA sense strand
aggaagagggagccagaau

SEQ ID NO: 2641535 - RNA, 19 nt, Homo sapiens
  misc_RNA (1)...(19): siRNA sense strand
agguggacgugguggcuau

SEQ ID NO: 2641536 - RNA, 19 nt, Homo sapiens
  misc_RNA (1)...(19): siRNA sense strand
ggaggaagagggagccaga

SEQ ID NO: 2641537 - RNA, 19 nt, Homo sapiens
  misc_RNA (1)...(19): siRNA sense strand
cuggacagauggagggagu

SEQ ID NO: 2641538 - RNA, 19 nt, Homo sapiens
  misc_RNA (1)...(19): siRNA sense strand
gcagcaaacaggaggccga

SEQ ID NO: 2641539 - RNA, 19 nt, Homo sapiens
  misc_RNA (1)...(19): siRNA sense strand
cggaggacgaggaggucau

SEQ ID NO: 2641540 - RNA, 19 nt, Homo sapiens
  misc_RNA (1)...(19): siRNA sense strand
gcaucaaggaggcuggaca

SEQ ID NO: 2641541 - RNA, 19 nt, Homo sapiens
  misc_RNA (1)...(19): siRNA sense strand
aagccauagccaaugaaua

SEQ ID NO: 2641542 - RNA, 19 nt, Homo sapiens
  misc_RNA (1)...(19): siRNA sense strand
gagagguggcuaugaacau

SEQ ID NO: 2641543 - RNA, 19 nt, Homo sapiens
  misc_RNA (1)...(19): siRNA sense strand
auguauugcucuaggaaug

SEQ ID NO: 2641544 - RNA, 19 nt, Homo sapiens
  misc_RNA (1)...(19): siRNA sense strand
agcaauuaaccaagccaua

SEQ ID NO: 2641545 - RNA, 19 nt, Homo sapiens
  misc_RNA (1)...(19): siRNA sense strand
guggcuaccagcaggacaa

SEQ ID NO: 2641546 - RNA, 19 nt, Homo sapiens
  misc_RNA (1)...(19): siRNA sense strand
gaggaaaacgugcaagcaa

SEQ ID NO: 2641547 - RNA, 19 nt, Homo sapiens
  misc_RNA (1)...(19): siRNA sense strand
gagccugacgacucggaaa

SEQ ID NO: 2641548 - RNA, 19 nt, Homo sapiens
  misc_RNA (1)...(19): siRNA sense strand
agauagaagcaauuaacca

SEQ ID NO: 2641549 - RNA, 19 nt, Homo sapiens
  misc_RNA (1)...(19): siRNA sense strand
uggagggagugguggagga

SEQ ID NO: 2641550 - RNA, 19 nt, Homo sapiens
  misc_RNA (1)...(19): siRNA sense strand
ggaaauaagcaucaaggag

SEQ ID NO: 2641551 - RNA, 19 nt, Homo sapiens
  misc_RNA (1)...(19): siRNA sense strand
gagaaagcugcuaauaaaa

SEQ ID NO: 2641552 - RNA, 19 nt, Homo sapiens
  misc_RNA (1)...(19): siRNA sense strand
aggagggagagguggcuau

SEQ ID NO: 2641553 - RNA, 19 nt, Homo sapiens
  misc_RNA (1)...(19): siRNA sense strand
aggacgaggaggucaugaa

SEQ ID NO: 2641554 - RNA, 19 nt, Homo sapiens
  misc_RNA (1)...(19): siRNA sense strand
gggaggaagaggaaauaag

SEQ ID NO: 2641555 - RNA, 19 nt, Homo sapiens
  misc_RNA (1)...(19): siRNA sense strand
agggagugguggaggaggu

SEQ ID NO: 2641556 - RNA, 19 nt, Homo sapiens
  misc_RNA (1)...(19): siRNA sense strand
cugacagagcuaagagcca

SEQ ID NO: 2641557 - RNA, 19 nt, Homo sapiens
  misc_RNA (1)...(19): siRNA sense strand
caguauaaucauucuggau

SEQ ID NO: 2641558 - RNA, 19 nt, Homo sapiens
  misc_RNA (1)...(19): siRNA sense strand
gagugugaccucauggaga

SEQ ID NO: 2641559 - RNA, 19 nt, Homo sapiens
  misc_RNA (1)...(19): siRNA sense strand
gguuaugguggcuuccaaa

SEQ ID NO: 2641560 - RNA, 19 nt, Homo sapiens
  misc_RNA (1)...(19): siRNA sense strand
cuuaaugagucuacagaaa

SEQ ID NO: 2641561 - RNA, 19 nt, Homo sapiens
  misc_RNA (1)...(19): siRNA sense strand
uggaauaggcucaggacaa

SEQ ID NO: 2641562 - RNA, 19 nt, Homo sapiens
  misc_RNA (1)...(19): siRNA sense strand
gcuaaaucuuugccagaaa

SEQ ID NO: 2641563 - RNA, 19 nt, Homo sapiens
  misc_RNA (1)...(19): siRNA sense strand
ccaacaagaccgauguaaa

SEQ ID NO: 2641564 - RNA, 19 nt, Homo sapiens
  misc_RNA (1)...(19): siRNA sense strand
cuuaaagagcgguggagaa

SEQ ID NO: 2641565 - RNA, 19 nt, Homo sapiens
  misc_RNA (1)...(19): siRNA sense strand
cguagaagcaguagugaau

SEQ ID NO: 2641566 - RNA, 19 nt, Homo sapiens
  misc_RNA (1)...(19): siRNA sense strand
acgcauaccugcuggagaa

SEQ ID NO: 2641567 - RNA, 19 nt, Homo sapiens
  misc_RNA (1)...(19): siRNA sense strand
ucucaagggcgaagugaaa

SEQ ID NO: 2641568 - RNA, 19 nt, Homo sapiens
  misc_RNA (1)...(19): siRNA sense strand
gcuuuaaggcuuuggaaaa

SEQ ID NO: 2641569 - RNA, 19 nt, Homo sapiens
  misc_RNA (1)...(19): siRNA sense strand
ucguuauguugguggaaua

SEQ ID NO: 2641570 - RNA, 19 nt, Homo sapiens
  misc_RNA (1)...(19): siRNA sense strand
ucucuuaaguaguggaaaa

SEQ ID NO: 2641571 - RNA, 19 nt, Homo sapiens
  misc_RNA (1)...(19): siRNA sense strand
ggauuauuugcaagagaaa

SEQ ID NO: 2641572 - RNA, 19 nt, Homo sapiens
  misc_RNA (1)...(19): siRNA sense strand
cugaagaugugauucgaaa

SEQ ID NO: 2641573 - RNA, 19 nt, Homo sapiens
  misc_RNA (1)...(19): siRNA sense strand
acaaagagaagcagcggaa

SEQ ID NO: 2641574 - RNA, 19 nt, Homo sapiens
  misc_RNA (1)...(19): siRNA sense strand
agucauggccacagcauua

SEQ ID NO: 2641575 - RNA, 19 nt, Homo sapiens
  misc_RNA (1)...(19): siRNA sense strand
gagcaagccaagcgagcaa

SEQ ID NO: 2641576 - RNA, 19 nt, Homo sapiens
  misc_RNA (1)...(19): siRNA sense strand
cguuaaucgugaagugaga

SEQ ID NO: 2641577 - RNA, 19 nt, Homo sapiens
  misc_RNA (1)...(19): siRNA sense strand
gagaacugguagcggaauu

SEQ ID NO: 2641578 - RNA, 19 nt, Homo sapiens
  misc_RNA (1)...(19): siRNA sense strand
gagcaaagcuaaagcggcu

SEQ ID NO: 2641579 - RNA, 19 nt, Homo sapiens
  misc_RNA (1)...(19): siRNA sense strand
cguuaggugaagaagauaa

SEQ ID NO: 2641580 - RNA, 19 nt, Homo sapiens
  misc_RNA (1)...(19): siRNA sense strand
ccguagaagcaguagugaa

SEQ ID NO: 2641581 - RNA, 19 nt, Homo sapiens
  misc_RNA (1)...(19): siRNA sense strand
agaaagaugagauggauga

SEQ ID NO: 2641582 - RNA, 19 nt, Homo sapiens
  misc_RNA (1)...(19): siRNA sense strand
aagcuugggcagagguaua

SEQ ID NO: 2641583 - RNA, 19 nt, Homo sapiens
  misc_RNA (1)...(19): siRNA sense strand
agauacaccaucagauaua

SEQ ID NO: 2641584 - RNA, 19 nt, Homo sapiens
  misc_RNA (1)...(19): siRNA sense strand
gugcagagcuugaaugcca

SEQ ID NO: 2641585 - RNA, 19 nt, Homo sapiens
  misc_RNA (1)...(19): siRNA sense strand
acacaagaccauucagauu

SEQ ID NO: 2641586 - RNA, 19 nt, Homo sapiens
  misc_RNA (1)...(19): siRNA sense strand
agaccgauguaaaggaaaa

SEQ ID NO: 2641587 - RNA, 19 nt, Homo sapiens
  misc_RNA (1)...(19): siRNA sense strand
cagaaugugaagcgagcaa

SEQ ID NO: 2641588 - RNA, 19 nt, Homo sapiens
  misc_RNA (1)...(19): siRNA sense strand
caucaauuugugugagaau

SEQ ID NO: 2641589 - RNA, 19 nt, Homo sapiens
  misc_RNA (1)...(19): siRNA sense strand
gguaguuaguauugcugaa

SEQ ID NO: 2641590 - RNA, 19 nt, Homo sapiens
  misc_RNA (1)...(19): siRNA sense strand
ugaaagacacagcaauaaa

SEQ ID NO: 2641591 - RNA, 19 nt, Homo sapiens
  misc_RNA (1)...(19): siRNA sense strand
acucauggccacaggauuu

SEQ ID NO: 2641592 - RNA, 19 nt, Homo sapiens
  misc_RNA (1)...(19): siRNA sense strand
uuaaagagcgguggagaaa

SEQ ID NO: 2641593 - RNA, 19 nt, Homo sapiens
  misc_RNA (1)...(19): siRNA sense strand
acuuaugacuuuaggacca

SEQ ID NO: 2641594 - RNA, 19 nt, Homo sapiens
  misc_RNA (1)...(19): siRNA sense strand
ccagauugcagcugccaaa

SEQ ID NO: 2641595 - RNA, 19 nt, Homo sapiens
  misc_RNA (1)...(19): siRNA sense strand
uaacaaagacagaaugcau

SEQ ID NO: 2641596 - RNA, 19 nt, Homo sapiens
  misc_RNA (1)...(19): siRNA sense strand
gaaugacacaaguggagaa

SEQ ID NO: 2641597 - RNA, 19 nt, Homo sapiens
  misc_RNA (1)...(19): siRNA sense strand
guuaggugaagaagauaaa

SEQ ID NO: 2641598 - RNA, 19 nt, Homo sapiens
  misc_RNA (1)...(19): siRNA sense strand
uggaaaaucucuuguguuu

SEQ ID NO: 2641599 - RNA, 19 nt, Homo sapiens
  misc_RNA (1)...(19): siRNA sense strand
aaugaaagccguagaagca

SEQ ID NO: 2641600 - RNA, 19 nt, Homo sapiens
  misc_RNA (1)...(19): siRNA sense strand
agguauauguggucgcuau

SEQ ID NO: 2641601 - RNA, 19 nt, Homo sapiens
  misc_RNA (1)...(19): siRNA sense strand
gugcagaacggcucaacaa

SEQ ID NO: 2641602 - RNA, 19 nt, Homo sapiens
  misc_RNA (1)...(19): siRNA sense strand
guugcgauuucuugauaaa

SEQ ID NO: 2641603 - RNA, 19 nt, Homo sapiens
  misc_RNA (1)...(19): siRNA sense strand
uacuagaacuacagaauga

SEQ ID NO: 2641604 - RNA, 19 nt, Homo sapiens
  misc_RNA (1)...(19): siRNA sense strand
cuacaagggaauggagcaa

SEQ ID NO: 2641605 - RNA, 19 nt, Homo sapiens
  misc_RNA (1)...(19): siRNA sense strand
acaagggaauggagcaaca

SEQ ID NO: 2641606 - RNA, 19 nt, Homo sapiens
  misc_RNA (1)...(19): siRNA sense strand
gcgaaagcuugccagguau

SEQ ID NO: 2641607 - RNA, 19 nt, Homo sapiens
  misc_RNA (1)...(19): siRNA sense strand
ccaccagauaguuuaauaa

SEQ ID NO: 2641608 - RNA, 19 nt, Homo sapiens
  misc_RNA (1)...(19): siRNA sense strand
cuacagaagcagcagcaau

SEQ ID NO: 2641609 - RNA, 19 nt, Homo sapiens
  misc_RNA (1)...(19): siRNA sense strand
ccagaaauuaacaaagaca

SEQ ID NO: 2641610 - RNA, 19 nt, Homo sapiens
  misc_RNA (1)...(19): siRNA sense strand
cuccagaauuuaaugcaua

SEQ ID NO: 2641611 - RNA, 19 nt, Homo sapiens
  misc_RNA (1)...(19): siRNA sense strand
caccaacaauuaagcuaaa

SEQ ID NO: 2641612 - RNA, 19 nt, Homo sapiens
  misc_RNA (1)...(19): siRNA sense strand
agaaacuggucuugaggga

SEQ ID NO: 2641613 - RNA, 19 nt, Homo sapiens
  misc_RNA (1)...(19): siRNA sense strand
aggauuauuugcaagagaa

SEQ ID NO: 2641614 - RNA, 19 nt, Homo sapiens
  misc_RNA (1)...(19): siRNA sense strand
gugaaaucuuaaugagucu

SEQ ID NO: 2641615 - RNA, 19 nt, Homo sapiens
  misc_RNA (1)...(19): siRNA sense strand
cccugaaacuauugauaca

SEQ ID NO: 2641616 - RNA, 19 nt, Homo sapiens
  misc_RNA (1)...(19): siRNA sense strand
augaagaagcuuuggcuca

SEQ ID NO: 2641617 - RNA, 19 nt, Homo sapiens
  misc_RNA (1)...(19): siRNA sense strand
cugcaugaacagauuuaaa

SEQ ID NO: 2641618 - RNA, 19 nt, Homo sapiens
  misc_RNA (1)...(19): siRNA sense strand
aggcaacaguaaugcguca

SEQ ID NO: 2641619 - RNA, 19 nt, Homo sapiens
  misc_RNA (1)...(19): siRNA sense strand
aaacaaaucuggcgcagca

SEQ ID NO: 2641620 - RNA, 19 nt, Homo sapiens
  misc_RNA (1)...(19): siRNA sense strand
gguucuuggcuucaggaaa

SEQ ID NO: 2641621 - RNA, 19 nt, Homo sapiens
  misc_RNA (1)...(19): siRNA sense strand
ggacaacaucugaagacca

SEQ ID NO: 2641622 - RNA, 19 nt, Homo sapiens
  misc_RNA (1)...(19): siRNA sense strand
uuuauuggcucuagcacaa

SEQ ID NO: 2641623 - RNA, 19 nt, Homo sapiens
  misc_RNA (1)...(19): siRNA sense strand
gguucaagaaggaauaaaa

SEQ ID NO: 2641624 - RNA, 19 nt, Homo sapiens
  misc_RNA (1)...(19): siRNA sense strand
gggcgaagugaaaucuuaa

SEQ ID NO: 2641625 - RNA, 19 nt, Homo sapiens
  misc_RNA (1)...(19): siRNA sense strand
gcgagcaacauuugaugaa

SEQ ID NO: 2641626 - RNA, 19 nt, Homo sapiens
  misc_RNA (1)...(19): siRNA sense strand
uaguauugcugaagaucuu

SEQ ID NO: 2641627 - RNA, 19 nt, Homo sapiens
  misc_RNA (1)...(19): siRNA sense strand
ggucgaugcuugggugcua

SEQ ID NO: 2641628 - RNA, 19 nt, Homo sapiens
  misc_RNA (1)...(19): siRNA sense strand
caucagauauaauagcgaa

SEQ ID NO: 2641629 - RNA, 19 nt, Homo sapiens
  misc_RNA (1)...(19): siRNA sense strand
acaaaguucaggcuggaaa

SEQ ID NO: 2641630 - RNA, 19 nt, Homo sapiens
  misc_RNA (1)...(19): siRNA sense strand
gggcaguuugcuaggugaa

SEQ ID NO: 2641631 - RNA, 19 nt, Homo sapiens
  misc_RNA (1)...(19): siRNA sense strand
cggaauucacuuugacuga

SEQ ID NO: 2641632 - RNA, 19 nt, Homo sapiens
  misc_RNA (1)...(19): siRNA sense strand
aagaccagcuccagccaaa

SEQ ID NO: 2641633 - RNA, 19 nt, Homo sapiens
  misc_RNA (1)...(19): siRNA sense strand
cagcggaaguaugugaaua

SEQ ID NO: 2641634 - RNA, 19 nt, Homo sapiens
  misc_RNA (1)...(19): siRNA sense strand
ggugaagaagauaaaucaa

SEQ ID NO: 2641635 - RNA, 19 nt, Homo sapiens
  misc_RNA (1)...(19): siRNA sense strand
cugcagaacuccacggcaa

SEQ ID NO: 2641636 - RNA, 19 nt, Homo sapiens
  misc_RNA (1)...(19): siRNA sense strand
gcaugaacgagaagcggaa

SEQ ID NO: 2641637 - RNA, 19 nt, Homo sapiens
  misc_RNA (1)...(19): siRNA sense strand
ucacauaccuccugccuca

SEQ ID NO: 2641638 - RNA, 19 nt, Homo sapiens
  misc_RNA (1)...(19): siRNA sense strand
cgcucaaggcgguggacuu

SEQ ID NO: 2641639 - RNA, 19 nt, Homo sapiens
  misc_RNA (1)...(19): siRNA sense strand
gcaaagaaaccuaauguaa

SEQ ID NO: 2641640 - RNA, 19 nt, Homo sapiens
  misc_RNA (1)...(19): siRNA sense strand
agacagacaugcugaacua

SEQ ID NO: 2641641 - RNA, 19 nt, Homo sapiens
  misc_RNA (1)...(19): siRNA sense strand
agucagaagaagagaaguu

SEQ ID NO: 2641642 - RNA, 19 nt, Homo sapiens
  misc_RNA (1)...(19): siRNA sense strand
cagaauaugcagacagaca

SEQ ID NO: 2641643 - RNA, 19 nt, Homo sapiens
  misc_RNA (1)...(19): siRNA sense strand
gauccauccugcaaagaaa

SEQ ID NO: 2641644 - RNA, 19 nt, Homo sapiens
  misc_RNA (1)...(19): siRNA sense strand
cugaaaagcaaaagcacua

SEQ ID NO: 2641645 - RNA, 19 nt, Homo sapiens
  misc_RNA (1)...(19): siRNA sense strand
agggaaugccaguccgaaa

SEQ ID NO: 2641646 - RNA, 19 nt, Homo sapiens
  misc_RNA (1)...(19): siRNA sense strand
uugaagaggcacuggaaaa

SEQ ID NO: 2641647 - RNA, 19 nt, Homo sapiens
  misc_RNA (1)...(19): siRNA sense strand
ugcuaaagaaauugaggaa

SEQ ID NO: 2641648 - RNA, 19 nt, Homo sapiens
  misc_RNA (1)...(19): siRNA sense strand
gagaaucagaugagaggga

SEQ ID NO: 2641649 - RNA, 19 nt, Homo sapiens
  misc_RNA (1)...(19): siRNA sense strand
cuucaaugacauacggcaa

SEQ ID NO: 2641650 - RNA, 19 nt, Homo sapiens
  misc_RNA (1)...(19): siRNA sense strand
ccuaauaugcaguguagau

SEQ ID NO: 2641651 - RNA, 19 nt, Homo sapiens
  misc_RNA (1)...(19): siRNA sense strand
guguagauuaugugcaauu

SEQ ID NO: 2641652 - RNA, 19 nt, Homo sapiens
  misc_RNA (1)...(19): siRNA sense strand
cagauaugugcaacagaaa

SEQ ID NO: 2641653 - RNA, 19 nt, Homo sapiens
  misc_RNA (1)...(19): siRNA sense strand
guggaaaacuacugacaga

SEQ ID NO: 2641654 - RNA, 19 nt, Homo sapiens
  misc_RNA (1)...(19): siRNA sense strand
ucacaauggucuggaugaa

SEQ ID NO: 2641655 - RNA, 19 nt, Homo sapiens
  misc_RNA (1)...(19): siRNA sense strand
ggaaaagaaacuacaguca

SEQ ID NO: 2641656 - RNA, 19 nt, Homo sapiens
  misc_RNA (1)...(19): siRNA sense strand
ggcagaauaugcagacaga

SEQ ID NO: 2641657 - RNA, 19 nt, Homo sapiens
  misc_RNA (1)...(19): siRNA sense strand
cgaaacacugggaguccaa

SEQ ID NO: 2641658 - RNA, 19 nt, Homo sapiens
  misc_RNA (1)...(19): siRNA sense strand
gcauaugagugcugcugca

SEQ ID NO: 2641659 - RNA, 19 nt, Homo sapiens
  misc_RNA (1)...(19): siRNA sense strand
aaaccaaaucccaaccaaa

SEQ ID NO: 2641660 - RNA, 19 nt, Homo sapiens
  misc_RNA (1)...(19): siRNA sense strand
gcagagaugaaauggagga

SEQ ID NO: 2641661 - RNA, 19 nt, Homo sapiens
  misc_RNA (1)...(19): siRNA sense strand
acuuacggaucgacagauu

SEQ ID NO: 2641662 - RNA, 19 nt, Homo sapiens
  misc_RNA (1)...(19): siRNA sense strand
agaaauugaggaagaaucu

SEQ ID NO: 2641663 - RNA, 19 nt, Homo sapiens
  misc_RNA (1)...(19): siRNA sense strand
caguugaaacauagggaac

SEQ ID NO: 2641664 - RNA, 19 nt, Homo sapiens
  misc_RNA (1)...(19): siRNA sense strand
aguuaaaguuugggaucca

SEQ ID NO: 2641665 - RNA, 19 nt, Homo sapiens
  misc_RNA (1)...(19): siRNA sense strand
aggugaaaucagaguggga

SEQ ID NO: 2641666 - RNA, 19 nt, Homo sapiens
  misc_RNA (1)...(19): siRNA sense strand
cagaagaagagaaguuauc

SEQ ID NO: 2641667 - RNA, 19 nt, Homo sapiens
  misc_RNA (1)...(19): siRNA sense strand
aggaagaaucugaaacaac

SEQ ID NO: 2641668 - RNA, 19 nt, Homo sapiens
  misc_RNA (1)...(19): siRNA sense strand
uggcauguaucauugggua

SEQ ID NO: 2641669 - RNA, 19 nt, Homo sapiens
  misc_RNA (1)...(19): siRNA sense strand
ccuaauguaauucgaucua

SEQ ID NO: 2641670 - RNA, 19 nt, Homo sapiens
  misc_RNA (1)...(19): siRNA sense strand
agaaaugcuguuagaagga

SEQ ID NO: 2641671 - RNA, 19 nt, Homo sapiens
  misc_RNA (1)...(19): siRNA sense strand
ccuacaaaccaaaucccaa

SEQ ID NO: 2641672 - RNA, 19 nt, Homo sapiens
  misc_RNA (1)...(19): siRNA sense strand
ccacccagucagaagaaga

SEQ ID NO: 2641673 - RNA, 19 nt, Homo sapiens
  misc_RNA (1)...(19): siRNA sense strand
ggcauguaucauuggguau

SEQ ID NO: 2641674 - RNA, 19 nt, Homo sapiens
  misc_RNA (1)...(19): siRNA sense strand
guaauucgaucuacaccaa

SEQ ID NO: 2641675 - RNA, 19 nt, Homo sapiens
  misc_RNA (1)...(19): siRNA sense strand
agugggaccuagauaucaa

SEQ ID NO: 2641676 - RNA, 19 nt, Homo sapiens
  misc_RNA (1)...(19): siRNA sense strand
guccaaagucugcagugaa

SEQ ID NO: 2641677 - RNA, 19 nt, Homo sapiens
  misc_RNA (1)...(19): siRNA sense strand
ucgcagauaagcaugcuaa

SEQ ID NO: 2641678 - RNA, 19 nt, Homo sapiens
  misc_RNA (1)...(19): siRNA sense strand
caacacauaucaggggaaa

SEQ ID NO: 2641679 - RNA, 19 nt, Homo sapiens
  misc_RNA (1)...(19): siRNA sense strand
gaaucagaugagagggaac

SEQ ID NO: 2641680 - RNA, 19 nt, Homo sapiens
  misc_RNA (1)...(19): siRNA sense strand
ugaaauggaggaaugguca

SEQ ID NO: 2641681 - RNA, 19 nt, Homo sapiens
  misc_RNA (1)...(19): siRNA sense strand
gcuuauuugaagaggcacu

SEQ ID NO: 2641682 - RNA, 19 nt, Homo sapiens
  misc_RNA (1)...(19): siRNA sense strand
ugacauacggcaagauuuu

SEQ ID NO: 2641683 - RNA, 19 nt, Homo sapiens
  misc_RNA (1)...(19): siRNA sense strand
gcaacagaaacgucuaaaa

SEQ ID NO: 2641684 - RNA, 19 nt, Homo sapiens
  misc_RNA (1)...(19): siRNA sense strand
cagagugggaccuagauau

SEQ ID NO: 2641685 - RNA, 19 nt, Homo sapiens
  misc_RNA (1)...(19): siRNA sense strand
ugaccgauaagcagaaaca

SEQ ID NO: 2641686 - RNA, 19 nt, Homo sapiens
  misc_RNA (1)...(19): siRNA sense strand
gugcaacagaaacgucuaa

SEQ ID NO: 2641687 - RNA, 19 nt, Homo sapiens
  misc_RNA (1)...(19): siRNA sense strand
agcugagaguaaacugaaa

SEQ ID NO: 2641688 - RNA, 19 nt, Homo sapiens
  misc_RNA (1)...(19): siRNA sense strand
ggagagacugauagagaaa

SEQ ID NO: 2641689 - RNA, 19 nt, Homo sapiens
  misc_RNA (1)...(19): siRNA sense strand
uggcagagauuuagagcau

SEQ ID NO: 2641690 - RNA, 19 nt, Homo sapiens
  misc_RNA (1)...(19): siRNA sense strand
gcucuauauuugaggaaga

SEQ ID NO: 2641691 - RNA, 19 nt, Homo sapiens
  misc_RNA (1)...(19): siRNA sense strand
aaagcaagucauagagaaa

SEQ ID NO: 2641692 - RNA, 19 nt, Homo sapiens
  misc_RNA (1)...(19): siRNA sense strand
agaaagcagcuaagauaaa

SEQ ID NO: 2641693 - RNA, 19 nt, Homo sapiens
  misc_RNA (1)...(19): siRNA sense strand
gaacagaaucggaaaacaa

SEQ ID NO: 2641694 - RNA, 19 nt, Homo sapiens
  misc_RNA (1)...(19): siRNA sense strand
gagcaagauaucaucgaaa

SEQ ID NO: 2641695 - RNA, 19 nt, Homo sapiens
  misc_RNA (1)...(19): siRNA sense strand
agguacaaguuauggaaga

SEQ ID NO: 2641696 - RNA, 19 nt, Homo sapiens
  misc_RNA (1)...(19): siRNA sense strand
ccuaaaagguauagagaug

SEQ ID NO: 2641697 - RNA, 19 nt, Homo sapiens
  misc_RNA (1)...(19): siRNA sense strand
aguuaaaugagcuggaauu

SEQ ID NO: 2641698 - RNA, 19 nt, Homo sapiens
  misc_RNA (1)...(19): siRNA sense strand
gcaacaaaauggugacaga

SEQ ID NO: 2641699 - RNA, 19 nt, Homo sapiens
  misc_RNA (1)...(19): siRNA sense strand
ugcaacagcuugagagaca

SEQ ID NO: 2641700 - RNA, 19 nt, Homo sapiens
  misc_RNA (1)...(19): siRNA sense strand
cuugaagagcagaaacaaa

SEQ ID NO: 2641701 - RNA, 19 nt, Homo sapiens
  misc_RNA (1)...(19): siRNA sense strand
acugaagagauaagaacaa

SEQ ID NO: 2641702 - RNA, 19 nt, Homo sapiens
  misc_RNA (1)...(19): siRNA sense strand
gcucagaacagaaucggaa

SEQ ID NO: 2641703 - RNA, 19 nt, Homo sapiens
  misc_RNA (1)...(19): siRNA sense strand
aauuuaugcuguagccaaa

SEQ ID NO: 2641704 - RNA, 19 nt, Homo sapiens
  misc_RNA (1)...(19): siRNA sense strand
gaauguucuucgaguacaa

SEQ ID NO: 2641705 - RNA, 19 nt, Homo sapiens
  misc_RNA (1)...(19): siRNA sense strand
ccucggaugaacugaauaa

SEQ ID NO: 2641706 - RNA, 19 nt, Homo sapiens
  misc_RNA (1)...(19): siRNA sense strand
uggaaaaggaacacaauua

SEQ ID NO: 2641707 - RNA, 19 nt, Homo sapiens
  misc_RNA (1)...(19): siRNA sense strand
ggauauuccaagagagucu

SEQ ID NO: 2641708 - RNA, 19 nt, Homo sapiens
  misc_RNA (1)...(19): siRNA sense strand
ggacacaggaaugaggaaa

SEQ ID NO: 2641709 - RNA, 19 nt, Homo sapiens
  misc_RNA (1)...(19): siRNA sense strand
aguucaagcaagcaagaua

SEQ ID NO: 2641710 - RNA, 19 nt, Homo sapiens
  misc_RNA (1)...(19): siRNA sense strand
acaagaaguucaaggaaag

SEQ ID NO: 2641711 - RNA, 19 nt, Homo sapiens
  misc_RNA (1)...(19): siRNA sense strand
guggagagacugauagaga

SEQ ID NO: 2641712 - RNA, 19 nt, Homo sapiens
  misc_RNA (1)...(19): siRNA sense strand
ggaaaagacauggaagaaa

SEQ ID NO: 2641713 - RNA, 19 nt, Homo sapiens
  misc_RNA (1)...(19): siRNA sense strand
caguguagcaggaugggaa

SEQ ID NO: 2641714 - RNA, 19 nt, Homo sapiens
  misc_RNA (1)...(19): siRNA sense strand
acucacagccagagcagaa

SEQ ID NO: 2641715 - RNA, 19 nt, Homo sapiens
  misc_RNA (1)...(19): siRNA sense strand
caguaaagaaggaaucauu

SEQ ID NO: 2641716 - RNA, 19 nt, Homo sapiens
  misc_RNA (1)...(19): siRNA sense strand
gguacaaauagaaacgcua

SEQ ID NO: 2641717 - RNA, 19 nt, Homo sapiens
  misc_RNA (1)...(19): siRNA sense strand
aaaaugaaccacuggaaaa

SEQ ID NO: 2641718 - RNA, 19 nt, Homo sapiens
  misc_RNA (1)...(19): siRNA sense strand
aaucugaggaaaugagcaa

SEQ ID NO: 2641719 - RNA, 19 nt, Homo sapiens
  misc_RNA (1)...(19): siRNA sense strand
acauggaagaaauggaaau

SEQ ID NO: 2641720 - RNA, 19 nt, Homo sapiens
  misc_RNA (1)...(19): siRNA sense strand
agcaagucauagagaaauu

SEQ ID NO: 2641721 - RNA, 19 nt, Homo sapiens
  misc_RNA (1)...(19): siRNA sense strand
gcaagauaucaucgaaaga

SEQ ID NO: 2641722 - RNA, 19 nt, Homo sapiens
  misc_RNA (1)...(19): siRNA sense strand
gguagagauuggagauuuu

SEQ ID NO: 2641723 - RNA, 19 nt, Homo sapiens
  misc_RNA (1)...(19): siRNA sense strand
agagaaaaguugcuguuaa

SEQ ID NO: 2641724 - RNA, 19 nt, Homo sapiens
  misc_RNA (1)...(19): siRNA sense strand
gggaaggcgacccaaauaa

SEQ ID NO: 2641725 - RNA, 19 nt, Homo sapiens
  misc_RNA (1)...(19): siRNA sense strand
uggaaaaugugaagguaca

SEQ ID NO: 2641726 - RNA, 19 nt, Homo sapiens
  misc_RNA (1)...(19): siRNA sense strand
ugaacaaagaucuggcauu

SEQ ID NO: 2641727 - RNA, 19 nt, Homo sapiens
  misc_RNA (1)...(19): siRNA sense strand
cagaacacaagaagcuaua

SEQ ID NO: 2641728 - RNA, 19 nt, Homo sapiens
  misc_RNA (1)...(19): siRNA sense strand
ccuucaauauggagagugu

SEQ ID NO: 2641729 - RNA, 19 nt, Homo sapiens
  misc_RNA (1)...(19): siRNA sense strand
agaguggauuaaaguguua

SEQ ID NO: 2641730 - RNA, 19 nt, Homo sapiens
  misc_RNA (1)...(19): siRNA sense strand
gcacuucaugaaugggaua

SEQ ID NO: 2641731 - RNA, 19 nt, Homo sapiens
  misc_RNA (1)...(19): siRNA sense strand
gcauaaagagaccagaaca

SEQ ID NO: 2641732 - RNA, 19 nt, Homo sapiens
  misc_RNA (1)...(19): siRNA sense strand
agucccaacucaugaaauu

SEQ ID NO: 2641733 - RNA, 19 nt, Homo sapiens
  misc_RNA (1)...(19): siRNA sense strand
gagcauugucuucaaggaa

SEQ ID NO: 2641734 - RNA, 19 nt, Homo sapiens
  misc_RNA (1)...(19): siRNA sense strand
gaauuuaugcuguagccaa

SEQ ID NO: 2641735 - RNA, 19 nt, Homo sapiens
  misc_RNA (1)...(19): siRNA sense strand
uggagagacugauagagaa

SEQ ID NO: 2641736 - RNA, 19 nt, Homo sapiens
  misc_RNA (1)...(19): siRNA sense strand
gauuggagauuuugaaaga

SEQ ID NO: 2641737 - RNA, 19 nt, Homo sapiens
  misc_RNA (1)...(19): siRNA sense strand
uagaagagaaagcagcuaa

SEQ ID NO: 2641738 - RNA, 19 nt, Homo sapiens
  misc_RNA (1)...(19): siRNA sense strand
gagucaagaagauaaguuu

SEQ ID NO: 2641739 - RNA, 19 nt, Homo sapiens
  misc_RNA (1)...(19): siRNA sense strand
gguacaaguuauggaagau

SEQ ID NO: 2641740 - RNA, 19 nt, Homo sapiens
  misc_RNA (1)...(19): siRNA sense strand
agacgggagcaaaggaaga

SEQ ID NO: 2641741 - RNA, 19 nt, Homo sapiens
  misc_RNA (1)...(19): siRNA sense strand
uggcauaaagagaccagaa

SEQ ID NO: 2641742 - RNA, 19 nt, Homo sapiens
  misc_RNA (1)...(19): siRNA sense strand
caauauggagaguguuaau

SEQ ID NO: 2641743 - RNA, 19 nt, Homo sapiens
  misc_RNA (1)...(19): siRNA sense strand
ccucaaggauggaaauucu

SEQ ID NO: 2641744 - RNA, 19 nt, Homo sapiens
  misc_RNA (1)...(19): siRNA sense strand
agaagguggcauacagcaa

SEQ ID NO: 2641745 - RNA, 19 nt, Homo sapiens
  misc_RNA (1)...(19): siRNA sense strand
guacaaguuauggaagaua

SEQ ID NO: 2641746 - RNA, 19 nt, Homo sapiens
  misc_RNA (1)...(19): siRNA sense strand
uugaagagcagaaacaaau

SEQ ID NO: 2641747 - RNA, 19 nt, Homo sapiens
  misc_RNA (1)...(19): siRNA sense strand
auucagaugaccaggaaca

SEQ ID NO: 2641748 - RNA, 19 nt, Homo sapiens
  misc_RNA (1)...(19): siRNA sense strand
acaaaccaacagagaaauu

SEQ ID NO: 2641749 - RNA, 19 nt, Homo sapiens
  misc_RNA (1)...(19): siRNA sense strand
agcuggaauuggagaauca

SEQ ID NO: 2641750 - RNA, 19 nt, Homo sapiens
  misc_RNA (1)...(19): siRNA sense strand
ugaggaaaugagcaagaua

SEQ ID NO: 2641751 - RNA, 19 nt, Homo sapiens
  misc_RNA (1)...(19): siRNA sense strand
ggagagacugauagagaaa

SEQ ID NO: 2641752 - RNA, 19 nt, Homo sapiens
  misc_RNA (1)...(19): siRNA sense strand
uggcagagauuuagagcau

SEQ ID NO: 2641753 - RNA, 19 nt, Homo sapiens
  misc_RNA (1)...(19): siRNA sense strand
gcucuauauuugaggaaga

SEQ ID NO: 2641754 - RNA, 19 nt, Homo sapiens
  misc_RNA (1)...(19): siRNA sense strand
aaagcaagucauagagaaa

SEQ ID NO: 2641755 - RNA, 19 nt, Homo sapiens
  misc_RNA (1)...(19): siRNA sense strand
agaaagcagcuaagauaaa

SEQ ID NO: 2641756 - RNA, 19 nt, Homo sapiens
  misc_RNA (1)...(19): siRNA sense strand
gaacagaaucggaaaacaa

SEQ ID NO: 2641757 - RNA, 19 nt, Homo sapiens
  misc_RNA (1)...(19): siRNA sense strand
gagcaagauaucaucgaaa

SEQ ID NO: 2641758 - RNA, 19 nt, Homo sapiens
  misc_RNA (1)...(19): siRNA sense strand
agguacaaguuauggaaga

SEQ ID NO: 2641759 - RNA, 19 nt, Homo sapiens
  misc_RNA (1)...(19): siRNA sense strand
ccuaaaagguauagagaug

SEQ ID NO: 2641760 - RNA, 19 nt, Homo sapiens
  misc_RNA (1)...(19): siRNA sense strand
aguuaaaugagcuggaauu

SEQ ID NO: 2641761 - RNA, 19 nt, Homo sapiens
  misc_RNA (1)...(19): siRNA sense strand
gcaacaaaauggugacaga

SEQ ID NO: 2641762 - RNA, 19 nt, Homo sapiens
  misc_RNA (1)...(19): siRNA sense strand
ugcaacagcuugagagaca

SEQ ID NO: 2641763 - RNA, 19 nt, Homo sapiens
  misc_RNA (1)...(19): siRNA sense strand
cuugaagagcagaaacaaa

SEQ ID NO: 2641764 - RNA, 19 nt, Homo sapiens
  misc_RNA (1)...(19): siRNA sense strand
acugaagagauaagaacaa

SEQ ID NO: 2641765 - RNA, 19 nt, Homo sapiens
  misc_RNA (1)...(19): siRNA sense strand
gcucagaacagaaucggaa

SEQ ID NO: 2641766 - RNA, 19 nt, Homo sapiens
  misc_RNA (1)...(19): siRNA sense strand
aauuuaugcuguagccaaa

SEQ ID NO: 2641767 - RNA, 19 nt, Homo sapiens
  misc_RNA (1)...(19): siRNA sense strand
gaauguucuucgaguacaa

SEQ ID NO: 2641768 - RNA, 19 nt, Homo sapiens
  misc_RNA (1)...(19): siRNA sense strand
ccucggaugaacugaauaa

SEQ ID NO: 2641769 - RNA, 19 nt, Homo sapiens
  misc_RNA (1)...(19): siRNA sense strand
uggaaaaggaacacaauua

SEQ ID NO: 2641770 - RNA, 19 nt, Homo sapiens
  misc_RNA (1)...(19): siRNA sense strand
ggauauuccaagagagucu

SEQ ID NO: 2641771 - RNA, 19 nt, Homo sapiens
  misc_RNA (1)...(19): siRNA sense strand
ggacacaggaaugaggaaa

SEQ ID NO: 2641772 - RNA, 19 nt, Homo sapiens
  misc_RNA (1)...(19): siRNA sense strand
aguucaagcaagcaagaua

SEQ ID NO: 2641773 - RNA, 19 nt, Homo sapiens
  misc_RNA (1)...(19): siRNA sense strand
acaagaaguucaaggaaag

SEQ ID NO: 2641774 - RNA, 19 nt, Homo sapiens
  misc_RNA (1)...(19): siRNA sense strand
guggagagacugauagaga

SEQ ID NO: 2641775 - RNA, 19 nt, Homo sapiens
  misc_RNA (1)...(19): siRNA sense strand
caguguagcaggaugggaa

SEQ ID NO: 2641776 - RNA, 19 nt, Homo sapiens
  misc_RNA (1)...(19): siRNA sense strand
acucacagccagagcagaa

SEQ ID NO: 2641777 - RNA, 19 nt, Homo sapiens
  misc_RNA (1)...(19): siRNA sense strand
caguaaagaaggaaucauu

SEQ ID NO: 2641778 - RNA, 19 nt, Homo sapiens
  misc_RNA (1)...(19): siRNA sense strand
gguacaaauagaaacgcua

SEQ ID NO: 2641779 - RNA, 19 nt, Homo sapiens
  misc_RNA (1)...(19): siRNA sense strand
aaaaugaaccacuggaaaa

SEQ ID NO: 2641780 - RNA, 19 nt, Homo sapiens
  misc_RNA (1)...(19): siRNA sense strand
aaucugaggaaaugagcaa

SEQ ID NO: 2641781 - RNA, 19 nt, Homo sapiens
  misc_RNA (1)...(19): siRNA sense strand
agcaagucauagagaaauu

SEQ ID NO: 2641782 - RNA, 19 nt, Homo sapiens
  misc_RNA (1)...(19): siRNA sense strand
gcaagauaucaucgaaaga

SEQ ID NO: 2641783 - RNA, 19 nt, Homo sapiens
  misc_RNA (1)...(19): siRNA sense strand
gguagagauuggagauuuu

SEQ ID NO: 2641784 - RNA, 19 nt, Homo sapiens
  misc_RNA (1)...(19): siRNA sense strand
agagaaaaguugcuguuaa

SEQ ID NO: 2641785 - RNA, 19 nt, Homo sapiens
  misc_RNA (1)...(19): siRNA sense strand
gggaaggcgacccaaauaa

SEQ ID NO: 2641786 - RNA, 19 nt, Homo sapiens
  misc_RNA (1)...(19): siRNA sense strand
uggaaaaugugaagguaca

SEQ ID NO: 2641787 - RNA, 19 nt, Homo sapiens
  misc_RNA (1)...(19): siRNA sense strand
ugaacaaagaucuggcauu

SEQ ID NO: 2641788 - RNA, 19 nt, Homo sapiens
  misc_RNA (1)...(19): siRNA sense strand
cagaacacaagaagcuaua

SEQ ID NO: 2641789 - RNA, 19 nt, Homo sapiens
  misc_RNA (1)...(19): siRNA sense strand
agaguggauuaaaguguua

SEQ ID NO: 2641790 - RNA, 19 nt, Homo sapiens
  misc_RNA (1)...(19): siRNA sense strand
gcacuucaugaaugggaua

SEQ ID NO: 2641791 - RNA, 19 nt, Homo sapiens
  misc_RNA (1)...(19): siRNA sense strand
gcauaaagagaccagaaca

SEQ ID NO: 2641792 - RNA, 19 nt, Homo sapiens
  misc_RNA (1)...(19): siRNA sense strand
gagcauugucuucaaggaa

SEQ ID NO: 2641793 - RNA, 19 nt, Homo sapiens
  misc_RNA (1)...(19): siRNA sense strand
agucccaacucaugaaauu

SEQ ID NO: 2641794 - RNA, 19 nt, Homo sapiens
  misc_RNA (1)...(19): siRNA sense strand
gaauuuaugcuguagccaa

SEQ ID NO: 2641795 - RNA, 19 nt, Homo sapiens
  misc_RNA (1)...(19): siRNA sense strand
uggagagacugauagagaa

SEQ ID NO: 2641796 - RNA, 19 nt, Homo sapiens
  misc_RNA (1)...(19): siRNA sense strand
gauuggagauuuugaaaga

SEQ ID NO: 2641797 - RNA, 19 nt, Homo sapiens
  misc_RNA (1)...(19): siRNA sense strand
uagaagagaaagcagcuaa

SEQ ID NO: 2641798 - RNA, 19 nt, Homo sapiens
  misc_RNA (1)...(19): siRNA sense strand
gagucaagaagauaaguuu

SEQ ID NO: 2641799 - RNA, 19 nt, Homo sapiens
  misc_RNA (1)...(19): siRNA sense strand
gguacaaguuauggaagau

SEQ ID NO: 2641800 - RNA, 19 nt, Homo sapiens
  misc_RNA (1)...(19): siRNA sense strand
agacgggagcaaaggaaga

SEQ ID NO: 2641801 - RNA, 19 nt, Homo sapiens
  misc_RNA (1)...(19): siRNA sense strand
uggcauaaagagaccagaa

SEQ ID NO: 2641802 - RNA, 19 nt, Homo sapiens
  misc_RNA (1)...(19): siRNA sense strand
ccucaaggauggaaauucu

SEQ ID NO: 2641803 - RNA, 19 nt, Homo sapiens
  misc_RNA (1)...(19): siRNA sense strand
agaagguggcauacagcaa

SEQ ID NO: 2641804 - RNA, 19 nt, Homo sapiens
  misc_RNA (1)...(19): siRNA sense strand
guacaaguuauggaagaua

SEQ ID NO: 2641805 - RNA, 19 nt, Homo sapiens
  misc_RNA (1)...(19): siRNA sense strand
uugaagagcagaaacaaau

SEQ ID NO: 2641806 - RNA, 19 nt, Homo sapiens
  misc_RNA (1)...(19): siRNA sense strand
auucagaugaccaggaaca

SEQ ID NO: 2641807 - RNA, 19 nt, Homo sapiens
  misc_RNA (1)...(19): siRNA sense strand
acaaaccaacagagaaauu

SEQ ID NO: 2641808 - RNA, 19 nt, Homo sapiens
  misc_RNA (1)...(19): siRNA sense strand
agcuggaauuggagaauca

SEQ ID NO: 2641809 - RNA, 19 nt, Homo sapiens
  misc_RNA (1)...(19): siRNA sense strand
ugaggaaaugagcaagaua

SEQ ID NO: 2641810 - RNA, 19 nt, Homo sapiens
  misc_RNA (1)...(19): siRNA sense strand
uaaagagaccagaacacaa

SEQ ID NO: 2641811 - RNA, 19 nt, Homo sapiens
  misc_RNA (1)...(19): siRNA sense strand
ccgaagcccugcagacaga

SEQ ID NO: 2641812 - RNA, 19 nt, Homo sapiens
  misc_RNA (1)...(19): siRNA sense strand
caggacagaauuuggaaaa

SEQ ID NO: 2641813 - RNA, 19 nt, Homo sapiens
  misc_RNA (1)...(19): siRNA sense strand
agaaagaacgcaacaaaau

SEQ ID NO: 2641814 - RNA, 19 nt, Homo sapiens
  misc_RNA (1)...(19): siRNA sense strand
agguagagauuggagauuu

SEQ ID NO: 2641815 - RNA, 19 nt, Homo sapiens
  misc_RNA (1)...(19): siRNA sense strand
cagcagggcauguuaccaa

SEQ ID NO: 2641816 - RNA, 19 nt, Homo sapiens
  misc_RNA (1)...(19): siRNA sense strand
ggaauuggagaaucagaau

SEQ ID NO: 2641817 - RNA, 19 nt, Homo sapiens
  misc_RNA (1)...(19): siRNA sense strand
uagcagagaagaugcaaca

SEQ ID NO: 2641818 - RNA, 19 nt, Homo sapiens
  misc_RNA (1)...(19): siRNA sense strand
caaacuacaagaagagaaa

SEQ ID NO: 2641819 - RNA, 19 nt, Homo sapiens
  misc_RNA (1)...(19): siRNA sense strand
uggcauuggagcagagcaa

SEQ ID NO: 2641820 - RNA, 19 nt, Homo sapiens
  misc_RNA (1)...(19): siRNA sense strand
gcaaaugggauccggguga

SEQ ID NO: 2641821 - RNA, 19 nt, Homo sapiens
  misc_RNA (1)...(19): siRNA sense strand
ccgauaaaggacagauuga

SEQ ID NO: 2641822 - RNA, 19 nt, Homo sapiens
  misc_RNA (1)...(19): siRNA sense strand
gcauuggagcagagcaaga

SEQ ID NO: 2641823 - RNA, 19 nt, Homo sapiens
  misc_RNA (1)...(19): siRNA sense strand
agaaaguggccgagcuuca

SEQ ID NO: 2641824 - RNA, 19 nt, Homo sapiens
  misc_RNA (1)...(19): siRNA sense strand
gggcauacgagcugggucu

SEQ ID NO: 2641825 - RNA, 19 nt, Homo sapiens
  misc_RNA (1)...(19): siRNA sense strand
ucacagaguuugagggcag

SEQ ID NO: 2641826 - RNA, 19 nt, Homo sapiens
  misc_RNA (1)...(19): siRNA sense strand
agucaagugcuguaaggaa

SEQ ID NO: 2641827 - RNA, 19 nt, Homo sapiens
  misc_RNA (1)...(19): siRNA sense strand
aggagaugagcgugggcua

SEQ ID NO: 2641828 - RNA, 19 nt, Homo sapiens
  misc_RNA (1)...(19): siRNA sense strand
aaacgugggacgagaauga

SEQ ID NO: 2641829 - RNA, 19 nt, Homo sapiens
  misc_RNA (1)...(19): siRNA sense strand
ggucagccacuuugggcaa

SEQ ID NO: 2641830 - RNA, 19 nt, Homo sapiens
  misc_RNA (1)...(19): siRNA sense strand
ggagccagguggauggaga

SEQ ID NO: 2641831 - RNA, 19 nt, Homo sapiens
  misc_RNA (1)...(19): siRNA sense strand
cagaaaacguuugggaauu

SEQ ID NO: 2641832 - RNA, 19 nt, Homo sapiens
  misc_RNA (1)...(19): siRNA sense strand
ucagaaaacguuugggaau

SEQ ID NO: 2641833 - RNA, 19 nt, Homo sapiens
  misc_RNA (1)...(19): siRNA sense strand
gcugaauguuauagguauc

SEQ ID NO: 2641834 - RNA, 19 nt, Homo sapiens
  misc_RNA (1)...(19): siRNA sense strand
ggcaagaaccagcuggaga

SEQ ID NO: 2641835 - RNA, 19 nt, Homo sapiens
  misc_RNA (1)...(19): siRNA sense strand
cggaaaguaccuugccgaa

SEQ ID NO: 2641836 - RNA, 19 nt, Homo sapiens
  misc_RNA (1)...(19): siRNA sense strand
cgccagaaacacagcaaaa

SEQ ID NO: 2641837 - RNA, 19 nt, Homo sapiens
  misc_RNA (1)...(19): siRNA sense strand
acaaacuacaagaagagaa

SEQ ID NO: 2641838 - RNA, 19 nt, Homo sapiens
  misc_RNA (1)...(19): siRNA sense strand
uguggaugcugauggaaga

SEQ ID NO: 2641839 - RNA, 19 nt, Homo sapiens
  misc_RNA (1)...(19): siRNA sense strand
ggaaaacaaacuacaagaa

SEQ ID NO: 2641840 - RNA, 19 nt, Homo sapiens
  misc_RNA (1)...(19): siRNA sense strand
gguucaguucacagaguuu

SEQ ID NO: 2641841 - RNA, 19 nt, Homo sapiens
  misc_RNA (1)...(19): siRNA sense strand
cuaccaucaguuagagcaa

SEQ ID NO: 2641842 - RNA, 19 nt, Homo sapiens
  misc_RNA (1)...(19): siRNA sense strand
gagccagguggauggagaa

SEQ ID NO: 2641843 - RNA, 19 nt, Homo sapiens
  misc_RNA (1)...(19): siRNA sense strand
caucaguuagagcaagaaa

SEQ ID NO: 2641844 - RNA, 19 nt, Homo sapiens
  misc_RNA (1)...(19): siRNA sense strand
gcucaaucuuucuggccca

SEQ ID NO: 2641845 - RNA, 19 nt, Homo sapiens
  misc_RNA (1)...(19): siRNA sense strand
ggguggaggguaugaaaau

SEQ ID NO: 2641846 - RNA, 19 nt, Homo sapiens
  misc_RNA (1)...(19): siRNA sense strand
ggauccgggugaugagcau

SEQ ID NO: 2641847 - RNA, 19 nt, Homo sapiens
  misc_RNA (1)...(19): siRNA sense strand
gugaugagcaugacgcaca

SEQ ID NO: 2641848 - RNA, 19 nt, Homo sapiens
  misc_RNA (1)...(19): siRNA sense strand
cugaggaggaugccagaau

SEQ ID NO: 2641849 - RNA, 19 nt, Homo sapiens
  misc_RNA (1)...(19): siRNA sense strand
guuggaagacaaagagcca

SEQ ID NO: 2641850 - RNA, 19 nt, Homo sapiens
  misc_RNA (1)...(19): siRNA sense strand
caacuauuguggaugcuga

SEQ ID NO: 2641851 - RNA, 19 nt, Homo sapiens
  misc_RNA (1)...(19): siRNA sense strand
gcaucagacaugaggugca

SEQ ID NO: 2641852 - RNA, 19 nt, Homo sapiens
  misc_RNA (1)...(19): siRNA sense strand
gggcuaugcaaaugggauc

SEQ ID NO: 2641853 - RNA, 19 nt, Homo sapiens
  misc_RNA (1)...(19): siRNA sense strand
agaucaugaaguuggugaa

SEQ ID NO: 2641854 - RNA, 19 nt, Homo sapiens
  misc_RNA (1)...(19): siRNA sense strand
cuauaagccagauugguuu

SEQ ID NO: 2641855 - RNA, 19 nt, Homo sapiens
  misc_RNA (1)...(19): siRNA sense strand
uuaagaaacacaugccgaa

SEQ ID NO: 2641856 - RNA, 19 nt, Homo sapiens
  misc_RNA (1)...(19): siRNA sense strand
uggcagacuacucaaacaa

SEQ ID NO: 2641857 - RNA, 19 nt, Homo sapiens
  misc_RNA (1)...(19): siRNA sense strand
ccaaaaugguguucagauc

SEQ ID NO: 2641858 - RNA, 19 nt, Homo sapiens
  misc_RNA (1)...(19): siRNA sense strand
agauugaaugccaguauuu

SEQ ID NO: 2641859 - RNA, 19 nt, Homo sapiens
  misc_RNA (1)...(19): siRNA sense strand
ugaaaaugacugcagcaua

SEQ ID NO: 2641860 - RNA, 19 nt, Homo sapiens
  misc_RNA (1)...(19): siRNA sense strand
caauuuucacugagggcaa

SEQ ID NO: 2641861 - RNA, 19 nt, Homo sapiens
  misc_RNA (1)...(19): siRNA sense strand
ucguggagucugaagucaa

SEQ ID NO: 2641862 - RNA, 19 nt, Homo sapiens
  misc_RNA (1)...(19): siRNA sense strand
ggagaugagcgugggcuau

SEQ ID NO: 2641863 - RNA, 19 nt, Homo sapiens
  misc_RNA (1)...(19): siRNA sense strand
aaacacagcaaaagcgcaa

SEQ ID NO: 2641864 - RNA, 19 nt, Homo sapiens
  misc_RNA (1)...(19): siRNA sense strand
aagucaugccuuugaugua

SEQ ID NO: 2641865 - RNA, 19 nt, Homo sapiens
  misc_RNA (1)...(19): siRNA sense strand
gaaaggaaacucagcggaa

SEQ ID NO: 2641866 - RNA, 19 nt, Homo sapiens
  misc_RNA (1)...(19): siRNA sense strand
uuguacagagagagauaaa

SEQ ID NO: 2641867 - RNA, 19 nt, Homo sapiens
  misc_RNA (1)...(19): siRNA sense strand
cagaaacagacgucagaca

SEQ ID NO: 2641868 - RNA, 19 nt, Homo sapiens
  misc_RNA (1)...(19): siRNA sense strand
acugaacacuccaggguca

SEQ ID NO: 2641869 - RNA, 19 nt, Homo sapiens
  misc_RNA (1)...(19): siRNA sense strand
aaaccaggcaguaggccaa

SEQ ID NO: 2641870 - RNA, 19 nt, Homo sapiens
  misc_RNA (1)...(19): siRNA sense strand
gagcuuuuguacagagaga

SEQ ID NO: 2641871 - RNA, 19 nt, Homo sapiens
  misc_RNA (1)...(19): siRNA sense strand
gaaaggaaacucagcggaa

SEQ ID NO: 2641872 - RNA, 19 nt, Homo sapiens
  misc_RNA (1)...(19): siRNA sense strand
uuguacagagagagauaaa

SEQ ID NO: 2641873 - RNA, 19 nt, Homo sapiens
  misc_RNA (1)...(19): siRNA sense strand
cagaaacagacgucagaca

SEQ ID NO: 2641874 - RNA, 19 nt, Homo sapiens
  misc_RNA (1)...(19): siRNA sense strand
acugaacacuccaggguca

SEQ ID NO: 2641875 - RNA, 19 nt, Homo sapiens
  misc_RNA (1)...(19): siRNA sense strand
ggaaaaggaagauaagcau

SEQ ID NO: 2641876 - RNA, 19 nt, Homo sapiens
  misc_RNA (1)...(19): siRNA sense strand
gagcuuuuguacagagaga

SEQ ID NO: 2641877 - RNA, 19 nt, Homo sapiens
  misc_RNA (1)...(19): siRNA sense strand
aggaaaaggaagauaagca

SEQ ID NO: 2641878 - RNA, 19 nt, Homo sapiens
  misc_RNA (1)...(19): siRNA sense strand
gcgcgauggagcagcgaaa

SEQ ID NO: 2641879 - RNA, 19 nt, Homo sapiens
  misc_RNA (1)...(19): siRNA sense strand
ccaguacagcaguggaaua

SEQ ID NO: 2641880 - RNA, 19 nt, Homo sapiens
  misc_RNA (1)...(19): siRNA sense strand
cgaaagaucucucgccaga

SEQ ID NO: 2641881 - RNA, 19 nt, Homo sapiens
  misc_RNA (1)...(19): siRNA sense strand
gugucaagaugcuggugaa

SEQ ID NO: 2641882 - RNA, 19 nt, Homo sapiens
  misc_RNA (1)...(19): siRNA sense strand
cugugaaguucugggauua

SEQ ID NO: 2641883 - RNA, 19 nt, Homo sapiens
  misc_RNA (1)...(19): siRNA sense strand
cgccagagcaaaugggaca

SEQ ID NO: 2641884 - RNA, 19 nt, Homo sapiens
  misc_RNA (1)...(19): siRNA sense strand
gcgaaaacgugguuguaga

SEQ ID NO: 2641885 - RNA, 19 nt, Homo sapiens
  misc_RNA (1)...(19): siRNA sense strand
aagaaaugcuauggggaaa

SEQ ID NO: 2641886 - RNA, 19 nt, Homo sapiens
  misc_RNA (1)...(19): siRNA sense strand
aaaucaagacgauggaaaa

SEQ ID NO: 2641887 - RNA, 19 nt, Homo sapiens
  misc_RNA (1)...(19): siRNA sense strand
ucugugaaguucugggauu

SEQ ID NO: 2641888 - RNA, 19 nt, Homo sapiens
  misc_RNA (1)...(19): siRNA sense strand
gggaggaagaagcccuaaa

SEQ ID NO: 2641889 - RNA, 19 nt, Homo sapiens
  misc_RNA (1)...(19): siRNA sense strand
aggaaacaugucagaagaa

SEQ ID NO: 2641890 - RNA, 19 nt, Homo sapiens
  misc_RNA (1)...(19): siRNA sense strand
agaccuugcagcaggaauu

SEQ ID NO: 2641891 - RNA, 19 nt, Homo sapiens
  misc_RNA (1)...(19): siRNA sense strand
gggcgguguuugagccuga

SEQ ID NO: 2641892 - RNA, 19 nt, Homo sapiens
  misc_RNA (1)...(19): siRNA sense strand
ggucguaccaggacgccaa

SEQ ID NO: 2641893 - RNA, 19 nt, Homo sapiens
  misc_RNA (1)...(19): siRNA sense strand
agucgauauccuagcuuua

SEQ ID NO: 2641894 - RNA, 19 nt, Homo sapiens
  misc_RNA (1)...(19): siRNA sense strand
agagaggaaaucagaucaa

SEQ ID NO: 2641895 - RNA, 19 nt, Homo sapiens
  misc_RNA (1)...(19): siRNA sense strand
aggaauucucccugaucaa

SEQ ID NO: 2641896 - RNA, 19 nt, Homo sapiens
  misc_RNA (1)...(19): siRNA sense strand
agaucaaggcugcugggaa

SEQ ID NO: 2641897 - RNA, 19 nt, Homo sapiens
  misc_RNA (1)...(19): siRNA sense strand
gggaagagaggcagagcac

SEQ ID NO: 2641898 - RNA, 19 nt, Homo sapiens
  misc_RNA (1)...(19): siRNA sense strand
ccgccaauacccagcaauu

SEQ ID NO: 2641899 - RNA, 19 nt, Homo sapiens
  misc_RNA (1)...(19): siRNA sense strand
gagagagaagcgagcugaa

SEQ ID NO: 2641900 - RNA, 19 nt, Homo sapiens
  misc_RNA (1)...(19): siRNA sense strand
gaaagacggcaguggggaa

SEQ ID NO: 2641901 - RNA, 19 nt, Homo sapiens
  misc_RNA (1)...(19): siRNA sense strand
ggaaugucaauguggagau

SEQ ID NO: 2641902 - RNA, 19 nt, Homo sapiens
  misc_RNA (1)...(19): siRNA sense strand
gaacauagcgggaagagag

SEQ ID NO: 2641903 - RNA, 19 nt, Homo sapiens
  misc_RNA (1)...(19): siRNA sense strand
ucuacuacaaggagcggaa

SEQ ID NO: 2641904 - RNA, 19 nt, Homo sapiens
  misc_RNA (1)...(19): siRNA sense strand
gggaaauccucuaccguug

SEQ ID NO: 2641905 - RNA, 19 nt, Homo sapiens
  misc_RNA (1)...(19): siRNA sense strand
aggaagaagcccuaaaaga

SEQ ID NO: 2641906 - RNA, 19 nt, Homo sapiens
  misc_RNA (1)...(19): siRNA sense strand
gcucguuggaagaaaggau

SEQ ID NO: 2641907 - RNA, 19 nt, Homo sapiens
  misc_RNA (1)...(19): siRNA sense strand
uaagaaaugcuauggggaa

SEQ ID NO: 2641908 - RNA, 19 nt, Homo sapiens
  misc_RNA (1)...(19): siRNA sense strand
aaaguaagcgugagggauc

SEQ ID NO: 2641909 - RNA, 19 nt, Homo sapiens
  misc_RNA (1)...(19): siRNA sense strand
aagacaauucugugaaguu

SEQ ID NO: 2641910 - RNA, 19 nt, Homo sapiens
  misc_RNA (1)...(19): siRNA sense strand
agaaagagcaggucuccau

SEQ ID NO: 2641911 - RNA, 19 nt, Homo sapiens
  misc_RNA (1)...(19): siRNA sense strand
ggaacauagcgggaagaga

SEQ ID NO: 2641912 - RNA, 19 nt, Homo sapiens
  misc_RNA (1)...(19): siRNA sense strand
ugacauauuagaugguguu

SEQ ID NO: 2641913 - RNA, 19 nt, Homo sapiens
  misc_RNA (1)...(19): siRNA sense strand
ccuuugugaaccaggaaga

SEQ ID NO: 2641914 - RNA, 19 nt, Homo sapiens
  misc_RNA (1)...(19): siRNA sense strand
ccucccaggucaaauggaa

SEQ ID NO: 2641915 - RNA, 19 nt, Homo sapiens
  misc_RNA (1)...(19): siRNA sense strand
cagguuuggucgcuggcua

SEQ ID NO: 2641916 - RNA, 19 nt, Homo sapiens
  misc_RNA (1)...(19): siRNA sense strand
cagaaaggcaagagggugu

SEQ ID NO: 2641917 - RNA, 19 nt, Homo sapiens
  misc_RNA (1)...(19): siRNA sense strand
cagccagaauagaaggcaa

SEQ ID NO: 2641918 - RNA, 19 nt, Homo sapiens
  misc_RNA (1)...(19): siRNA sense strand
aggugaagcaggaggaagu

SEQ ID NO: 2641919 - RNA, 19 nt, Homo sapiens
  misc_RNA (1)...(19): siRNA sense strand
ccaacuagaaacagcucaa

SEQ ID NO: 2641920 - RNA, 19 nt, Homo sapiens
  misc_RNA (1)...(19): siRNA sense strand
ccacagaaacccagagccu

SEQ ID NO: 2641921 - RNA, 19 nt, Homo sapiens
  misc_RNA (1)...(19): siRNA sense strand
gaguaagacagcuggagga

SEQ ID NO: 2641922 - RNA, 19 nt, Homo sapiens
  misc_RNA (1)...(19): siRNA sense strand
cggaaugucuacaguggca

SEQ ID NO: 2641923 - RNA, 19 nt, Homo sapiens
  misc_RNA (1)...(19): siRNA sense strand
gggugaugcacaaggaagu

SEQ ID NO: 2641924 - RNA, 19 nt, Homo sapiens
  misc_RNA (1)...(19): siRNA sense strand
gaggaaguggugaaggaga

SEQ ID NO: 2641925 - RNA, 19 nt, Homo sapiens
  misc_RNA (1)...(19): siRNA sense strand
aggaagacaaccaggaacu

SEQ ID NO: 2641926 - RNA, 19 nt, Homo sapiens
  misc_RNA (1)...(19): siRNA sense strand
gugccgaggaauaggacga

SEQ ID NO: 2641927 - RNA, 19 nt, Homo sapiens
  misc_RNA (1)...(19): siRNA sense strand
agaaacuccaggaagacaa

SEQ ID NO: 2641928 - RNA, 19 nt, Homo sapiens
  misc_RNA (1)...(19): siRNA sense strand
ccaaagugucggacgagga

SEQ ID NO: 2641929 - RNA, 19 nt, Homo sapiens
  misc_RNA (1)...(19): siRNA sense strand
ugucaggaaaccaguacaa

SEQ ID NO: 2641930 - RNA, 19 nt, Homo sapiens
  misc_RNA (1)...(19): siRNA sense strand
aggaggcaguggaggaagu

SEQ ID NO: 2641931 - RNA, 19 nt, Homo sapiens
  misc_RNA (1)...(19): siRNA sense strand
agcaggaggaaguggugaa

SEQ ID NO: 2641932 - RNA, 19 nt, Homo sapiens
  misc_RNA (1)...(19): siRNA sense strand
caaggauaucaaccagaaa

SEQ ID NO: 2641933 - RNA, 19 nt, Homo sapiens
  misc_RNA (1)...(19): siRNA sense strand
gguuacacuucgugaucaa

SEQ ID NO: 2641934 - RNA, 19 nt, Homo sapiens
  misc_RNA (1)...(19): siRNA sense strand
cagacuaucaacugggaaa

SEQ ID NO: 2641935 - RNA, 19 nt, Homo sapiens
  misc_RNA (1)...(19): siRNA sense strand
ggguauagaaugugauguu

SEQ ID NO: 2641936 - RNA, 19 nt, Homo sapiens
  misc_RNA (1)...(19): siRNA sense strand
aguuggagaugaagaagaa

SEQ ID NO: 2641937 - RNA, 19 nt, Homo sapiens
  misc_RNA (1)...(19): siRNA sense strand
aagaaaaggcauuggagaa

SEQ ID NO: 2641938 - RNA, 19 nt, Homo sapiens
  misc_RNA (1)...(19): siRNA sense strand
ugucaauaccacucagaaa

SEQ ID NO: 2641939 - RNA, 19 nt, Homo sapiens
  misc_RNA (1)...(19): siRNA sense strand
aggagaagccaaagaaguu

SEQ ID NO: 2641940 - RNA, 19 nt, Homo sapiens
  misc_RNA (1)...(19): siRNA sense strand
agaauuugcaggagguauu

SEQ ID NO: 2641941 - RNA, 19 nt, Homo sapiens
  misc_RNA (1)...(19): siRNA sense strand
ugaagaaucugaagggcca

SEQ ID NO: 2641942 - RNA, 19 nt, Homo sapiens
  misc_RNA (1)...(19): siRNA sense strand
agucguggauauucagaaa

SEQ ID NO: 2641943 - RNA, 19 nt, Homo sapiens
  misc_RNA (1)...(19): siRNA sense strand
augaguaugcagaagaaua

SEQ ID NO: 2641944 - RNA, 19 nt, Homo sapiens
  misc_RNA (1)...(19): siRNA sense strand
acucauaaugguggagaaa

SEQ ID NO: 2641945 - RNA, 19 nt, Homo sapiens
  misc_RNA (1)...(19): siRNA sense strand
cagaagaauaagugggaug

SEQ ID NO: 2641946 - RNA, 19 nt, Homo sapiens
  misc_RNA (1)...(19): siRNA sense strand
ggccaaacauggugaucca

SEQ ID NO: 2641947 - RNA, 19 nt, Homo sapiens
  misc_RNA (1)...(19): siRNA sense strand
aagaaguauccaagaaaca

SEQ ID NO: 2641948 - RNA, 19 nt, Homo sapiens
  misc_RNA (1)...(19): siRNA sense strand
uguugaaacuuuagccaca

SEQ ID NO: 2641949 - RNA, 19 nt, Homo sapiens
  misc_RNA (1)...(19): siRNA sense strand
agauacaguuagugauguu

SEQ ID NO: 2641950 - RNA, 19 nt, Homo sapiens
  misc_RNA (1)...(19): siRNA sense strand
ugaaaaggguauagaaugu

SEQ ID NO: 2641951 - RNA, 19 nt, Homo sapiens
  misc_RNA (1)...(19): siRNA sense strand
uggagaaaugacugaagaa

SEQ ID NO: 2641952 - RNA, 19 nt, Homo sapiens
  misc_RNA (1)...(19): siRNA sense strand
cugaagaugaaguuggaga

SEQ ID NO: 2641953 - RNA, 19 nt, Homo sapiens
  misc_RNA (1)...(19): siRNA sense strand
ugaaguuggagaugaagaa

SEQ ID NO: 2641954 - RNA, 19 nt, Homo sapiens
  misc_RNA (1)...(19): siRNA sense strand
guugaugauuuaaaggaca

SEQ ID NO: 2641955 - RNA, 19 nt, Homo sapiens
  misc_RNA (1)...(19): siRNA sense strand
cgccaaagcagcucagaga

SEQ ID NO: 2641956 - RNA, 19 nt, Homo sapiens
  misc_RNA (1)...(19): siRNA sense strand
uggagaugaagaagaagua

SEQ ID NO: 2641957 - RNA, 19 nt, Homo sapiens
  misc_RNA (1)...(19): siRNA sense strand
gcugggaagagguggacau

SEQ ID NO: 2641958 - RNA, 19 nt, Homo sapiens
  misc_RNA (1)...(19): siRNA sense strand
ccacuuuagagccaggaaa

SEQ ID NO: 2641959 - RNA, 19 nt, Homo sapiens
  misc_RNA (1)...(19): siRNA sense strand
gaugaaaaggguauagaau

SEQ ID NO: 2641960 - RNA, 19 nt, Homo sapiens
  misc_RNA (1)...(19): siRNA sense strand
uccaagaaacaaaggaaaa

SEQ ID NO: 2641961 - RNA, 19 nt, Homo sapiens
  misc_RNA (1)...(19): siRNA sense strand
ugaucaaggugaaggcgga

SEQ ID NO: 2641962 - RNA, 19 nt, Homo sapiens
  misc_RNA (1)...(19): siRNA sense strand
accaaaagagugugcaaaa

SEQ ID NO: 2641963 - RNA, 19 nt, Homo sapiens
  misc_RNA (1)...(19): siRNA sense strand
acacaaugaaguugaugau

SEQ ID NO: 2641964 - RNA, 19 nt, Homo sapiens
  misc_RNA (1)...(19): siRNA sense strand
agagauaagacaugggaug

SEQ ID NO: 2641965 - RNA, 19 nt, Homo sapiens
  misc_RNA (1)...(19): siRNA sense strand
ggaauuuaucccugcugua

SEQ ID NO: 2641966 - RNA, 19 nt, Homo sapiens
  misc_RNA (1)...(19): siRNA sense strand
cugcuagaauguuggacga

SEQ ID NO: 2641967 - RNA, 19 nt, Homo sapiens
  misc_RNA (1)...(19): siRNA sense strand
gauccaugugugugaugaa

SEQ ID NO: 2641968 - RNA, 19 nt, Homo sapiens
  misc_RNA (1)...(19): siRNA sense strand
auccaagaaacaaaggaaa

SEQ ID NO: 2641969 - RNA, 19 nt, Homo sapiens
  misc_RNA (1)...(19): siRNA sense strand
uggagagaguccuguugaa

SEQ ID NO: 2641970 - RNA, 19 nt, Homo sapiens
  misc_RNA (1)...(19): siRNA sense strand
cagaagaagaagaauauac

SEQ ID NO: 2641971 - RNA, 19 nt, Homo sapiens
  misc_RNA (1)...(19): siRNA sense strand
ccaggaugcacaaagagaa

SEQ ID NO: 2641972 - RNA, 19 nt, Homo sapiens
  misc_RNA (1)...(19): siRNA sense strand
caaaggaagcaaaagaauu

SEQ ID NO: 2641973 - RNA, 19 nt, Homo sapiens
  misc_RNA (1)...(19): siRNA sense strand
agagaguccuguugaaacu

SEQ ID NO: 2641974 - RNA, 19 nt, Homo sapiens
  misc_RNA (1)...(19): siRNA sense strand
augaagaagaaguauccaa

SEQ ID NO: 2641975 - RNA, 19 nt, Homo sapiens
  misc_RNA (1)...(19): siRNA sense strand
cacaaagagaagacgauca

SEQ ID NO: 2641976 - RNA, 19 nt, Homo sapiens
  misc_RNA (1)...(19): siRNA sense strand
uuaugaguaugcagaagaa

SEQ ID NO: 2641977 - RNA, 19 nt, Homo sapiens
  misc_RNA (1)...(19): siRNA sense strand
agucaaaggaagcaaaaga

SEQ ID NO: 2641978 - RNA, 19 nt, Homo sapiens
  misc_RNA (1)...(19): siRNA sense strand
uauccaagaaacaaaggaa

SEQ ID NO: 2641979 - RNA, 19 nt, Homo sapiens
  misc_RNA (1)...(19): siRNA sense strand
cggcgaaugacugaaauua

SEQ ID NO: 2641980 - RNA, 19 nt, Homo sapiens
  misc_RNA (1)...(19): siRNA sense strand
caaaagaaacagaaagaag

SEQ ID NO: 2641981 - RNA, 19 nt, Homo sapiens
  misc_RNA (1)...(19): siRNA sense strand
augggauguucaugaguau

SEQ ID NO: 2641982 - RNA, 19 nt, Homo sapiens
  misc_RNA (1)...(19): siRNA sense strand
ugaagaugaaguuggagau

SEQ ID NO: 2641983 - RNA, 19 nt, Homo sapiens
  misc_RNA (1)...(19): siRNA sense strand
aagccaaagaaguucacua

SEQ ID NO: 2641984 - RNA, 19 nt, Homo sapiens
  misc_RNA (1)...(19): siRNA sense strand
ggacaugauccuuuaucca

SEQ ID NO: 2641985 - RNA, 19 nt, Homo sapiens
  misc_RNA (1)...(19): siRNA sense strand
acguggaaauauugucuau

SEQ ID NO: 2641986 - RNA, 19 nt, Homo sapiens
  misc_RNA (1)...(19): siRNA sense strand
ggacucuacaacugaaaca

SEQ ID NO: 2641987 - RNA, 19 nt, Homo sapiens
  misc_RNA (1)...(19): siRNA sense strand
ccuaauggcugcuggagag

SEQ ID NO: 2641988 - RNA, 19 nt, Homo sapiens
  misc_RNA (1)...(19): siRNA sense strand
guggauauucagaaaacaa

SEQ ID NO: 2641989 - RNA, 19 nt, Homo sapiens
  misc_RNA (1)...(19): siRNA sense strand
ucggaguaaugcagcaaca

SEQ ID NO: 2641990 - RNA, 19 nt, Homo sapiens
  misc_RNA (1)...(19): siRNA sense strand
aggugaaggcggagauuug

SEQ ID NO: 2641991 - RNA, 19 nt, Homo sapiens
  misc_RNA (1)...(19): siRNA sense strand
aaucaaggccucagugcca

SEQ ID NO: 2641992 - RNA, 19 nt, Homo sapiens
  misc_RNA (1)...(19): siRNA sense strand
ggauauaguccaagaugaa

SEQ ID NO: 2641993 - RNA, 19 nt, Homo sapiens
  misc_RNA (1)...(19): siRNA sense strand
cuacaaagcuagugcccua

SEQ ID NO: 2641994 - RNA, 19 nt, Homo sapiens
  misc_RNA (1)...(19): siRNA sense strand
gcggaaagccauaggaaaa

SEQ ID NO: 2641995 - RNA, 19 nt, Homo sapiens
  misc_RNA (1)...(19): siRNA sense strand
cagguuaaguuuagagcaa

SEQ ID NO: 2641996 - RNA, 19 nt, Homo sapiens
  misc_RNA (1)...(19): siRNA sense strand
auagaaaguuagagaguca

SEQ ID NO: 2641997 - RNA, 19 nt, Homo sapiens
  misc_RNA (1)...(19): siRNA sense strand
gggaagaagaagaggagga

SEQ ID NO: 2641998 - RNA, 19 nt, Homo sapiens
  misc_RNA (1)...(19): siRNA sense strand
caagcuaauaggagggaaa

SEQ ID NO: 2641999 - RNA, 19 nt, Homo sapiens
  misc_RNA (1)...(19): siRNA sense strand
gcauggaaccagaggaaga

SEQ ID NO: 2642000 - RNA, 19 nt, Homo sapiens
  misc_RNA (1)...(19): siRNA sense strand
gggaaagagugagaggaaa

SEQ ID NO: 2642001 - RNA, 19 nt, Homo sapiens
  misc_RNA (1)...(19): siRNA sense strand
gguucaaagucaaguguuu

SEQ ID NO: 2642002 - RNA, 19 nt, Homo sapiens
  misc_RNA (1)...(19): siRNA sense strand
gaagaaaguacgagcugaa

SEQ ID NO: 2642003 - RNA, 19 nt, Homo sapiens
  misc_RNA (1)...(19): siRNA sense strand
gagcaagaagccaaagaaa

SEQ ID NO: 2642004 - RNA, 19 nt, Homo sapiens
  misc_RNA (1)...(19): siRNA sense strand
cggaauagaaaguuagaga

SEQ ID NO: 2642005 - RNA, 19 nt, Homo sapiens
  misc_RNA (1)...(19): siRNA sense strand
ugggaaagagugagaggaa

SEQ ID NO: 2642006 - RNA, 19 nt, Homo sapiens
  misc_RNA (1)...(19): siRNA sense strand
ccuaauauguugauggcau

SEQ ID NO: 2642007 - RNA, 19 nt, Homo sapiens
  misc_RNA (1)...(19): siRNA sense strand
gcauauaauccuagaccuu

SEQ ID NO: 2642008 - RNA, 19 nt, Homo sapiens
  misc_RNA (1)...(19): siRNA sense strand
gagaagaagaauuagaaga

SEQ ID NO: 2642009 - RNA, 19 nt, Homo sapiens
  misc_RNA (1)...(19): siRNA sense strand
ggauaugggaggugauuga

SEQ ID NO: 2642010 - RNA, 19 nt, Homo sapiens
  misc_RNA (1)...(19): siRNA sense strand
agauaugagagaagaagaa

SEQ ID NO: 2642011 - RNA, 19 nt, Homo sapiens
  misc_RNA (1)...(19): siRNA sense strand
auuaaagcacuguggaaua

SEQ ID NO: 2642012 - RNA, 19 nt, Homo sapiens
  misc_RNA (1)...(19): siRNA sense strand
caucugagacaguggcaaa

SEQ ID NO: 2642013 - RNA, 19 nt, Homo sapiens
  misc_RNA (1)...(19): siRNA sense strand
ccaaguauucagaggauau

SEQ ID NO: 2642014 - RNA, 19 nt, Homo sapiens
  misc_RNA (1)...(19): siRNA sense strand
cauauuuaauggagaguga

SEQ ID NO: 2642015 - RNA, 19 nt, Homo sapiens
  misc_RNA (1)...(19): siRNA sense strand
ggaaagagugagaggaaag

SEQ ID NO: 2642016 - RNA, 19 nt, Homo sapiens
  misc_RNA (1)...(19): siRNA sense strand
ggauugagucagauaacaa

SEQ ID NO: 2642017 - RNA, 19 nt, Homo sapiens
  misc_RNA (1)...(19): siRNA sense strand
gagcuuacgaugugaagaa

SEQ ID NO: 2642018 - RNA, 19 nt, Homo sapiens
  misc_RNA (1)...(19): siRNA sense strand
cagaaaggcauuugacauu

SEQ ID NO: 2642019 - RNA, 19 nt, Homo sapiens
  misc_RNA (1)...(19): siRNA sense strand
gaaccaaacaugugcaaca

SEQ ID NO: 2642020 - RNA, 19 nt, Homo sapiens
  misc_RNA (1)...(19): siRNA sense strand
ucucaugguuauagaaaga

SEQ ID NO: 2642021 - RNA, 19 nt, Homo sapiens
  misc_RNA (1)...(19): siRNA sense strand
caaaagacucagagagcua

SEQ ID NO: 2642022 - RNA, 19 nt, Homo sapiens
  misc_RNA (1)...(19): siRNA sense strand
gcaacaaugugguggagca

SEQ ID NO: 2642023 - RNA, 19 nt, Homo sapiens
  misc_RNA (1)...(19): siRNA sense strand
gaauagaaaguuagagagu

SEQ ID NO: 2642024 - RNA, 19 nt, Homo sapiens
  misc_RNA (1)...(19): siRNA sense strand
cuggaagcguuuaggagaa

SEQ ID NO: 2642025 - RNA, 19 nt, Homo sapiens
  misc_RNA (1)...(19): siRNA sense strand
ucaaagaggaagaugaaga

SEQ ID NO: 2642026 - RNA, 19 nt, Homo sapiens
  misc_RNA (1)...(19): siRNA sense strand
gguacagaucuucggaaua

SEQ ID NO: 2642027 - RNA, 19 nt, Homo sapiens
  misc_RNA (1)...(19): siRNA sense strand
aauacuuuguugugggaua

SEQ ID NO: 2642028 - RNA, 19 nt, Homo sapiens
  misc_RNA (1)...(19): siRNA sense strand
cuuaaugacagcaaaguua

SEQ ID NO: 2642029 - RNA, 19 nt, Homo sapiens
  misc_RNA (1)...(19): siRNA sense strand
guugaaauuuccaaagcaa

SEQ ID NO: 2642030 - RNA, 19 nt, Homo sapiens
  misc_RNA (1)...(19): siRNA sense strand
gaugaaagagaaagugaau

SEQ ID NO: 2642031 - RNA, 19 nt, Homo sapiens
  misc_RNA (1)...(19): siRNA sense strand
gggauauaguccaagauga

SEQ ID NO: 2642032 - RNA, 19 nt, Homo sapiens
  misc_RNA (1)...(19): siRNA sense strand
ggauuuaauuggaaagaac

SEQ ID NO: 2642033 - RNA, 19 nt, Homo sapiens
  misc_RNA (1)...(19): siRNA sense strand
gggaaaaccuaauagaaga

SEQ ID NO: 2642034 - RNA, 19 nt, Homo sapiens
  misc_RNA (1)...(19): siRNA sense strand
guguaaaaccucacaguaa

SEQ ID NO: 2642035 - RNA, 19 nt, Homo sapiens
  misc_RNA (1)...(19): siRNA sense strand
acucagagagcuaugaaua

SEQ ID NO: 2642036 - RNA, 19 nt, Homo sapiens
  misc_RNA (1)...(19): siRNA sense strand
uggaaauaagaaagaggaa

SEQ ID NO: 2642037 - RNA, 19 nt, Homo sapiens
  misc_RNA (1)...(19): siRNA sense strand
ggauauaucaacucaagaa

SEQ ID NO: 2642038 - RNA, 19 nt, Homo sapiens
  misc_RNA (1)...(19): siRNA sense strand
uuaaugaugcugagguaaa

SEQ ID NO: 2642039 - RNA, 19 nt, Homo sapiens
  misc_RNA (1)...(19): siRNA sense strand
cgucagauguuccggucaa

SEQ ID NO: 2642040 - RNA, 19 nt, Homo sapiens
  misc_RNA (1)...(19): siRNA sense strand
acaaugugguggagcauau

SEQ ID NO: 2642041 - RNA, 19 nt, Homo sapiens
  misc_RNA (1)...(19): siRNA sense strand
uuauugaagcacugggaaa

SEQ ID NO: 2642042 - RNA, 19 nt, Homo sapiens
  misc_RNA (1)...(19): siRNA sense strand
cuaaucaaauugugagaca

SEQ ID NO: 2642043 - RNA, 19 nt, Homo sapiens
  misc_RNA (1)...(19): siRNA sense strand
gaucuagcaaugagguuaa

SEQ ID NO: 2642044 - RNA, 19 nt, Homo sapiens
  misc_RNA (1)...(19): siRNA sense strand
agaugaagaugcaguuaau

SEQ ID NO: 2642045 - RNA, 19 nt, Homo sapiens
  misc_RNA (1)...(19): siRNA sense strand
cuggaauucuagagccuaa

SEQ ID NO: 2642046 - RNA, 19 nt, Homo sapiens
  misc_RNA (1)...(19): siRNA sense strand
gaacagucucgaucagaaa

SEQ ID NO: 2642047 - RNA, 19 nt, Homo sapiens
  misc_RNA (1)...(19): siRNA sense strand
aguucgaaguaaagaucaa

SEQ ID NO: 2642048 - RNA, 19 nt, Homo sapiens
  misc_RNA (1)...(19): siRNA sense strand
ggaugguaauguagaagau

SEQ ID NO: 2642049 - RNA, 19 nt, Homo sapiens
  misc_RNA (1)...(19): siRNA sense strand
gaagaaaauggcagagaau

SEQ ID NO: 2642050 - RNA, 19 nt, Homo sapiens
  misc_RNA (1)...(19): siRNA sense strand
guacauuaccagauccuaa

SEQ ID NO: 2642051 - RNA, 19 nt, Homo sapiens
  misc_RNA (1)...(19): siRNA sense strand
aaguggagguagugacauu

SEQ ID NO: 2642052 - RNA, 19 nt, Homo sapiens
  misc_RNA (1)...(19): siRNA sense strand
uguagaagaugaugggcuu

SEQ ID NO: 2642053 - RNA, 19 nt, Homo sapiens
  misc_RNA (1)...(19): siRNA sense strand
acgcauggaaccagaggaa

SEQ ID NO: 2642054 - RNA, 19 nt, Homo sapiens
  misc_RNA (1)...(19): siRNA sense strand
gugagaacccuguuauuaa

SEQ ID NO: 2642055 - RNA, 19 nt, Homo sapiens
  misc_RNA (1)...(19): siRNA sense strand
acaucaaaguggagguagu

SEQ ID NO: 2642056 - RNA, 19 nt, Homo sapiens
  misc_RNA (1)...(19): siRNA sense strand
gcacaagggucucaggagu

SEQ ID NO: 2642057 - RNA, 19 nt, Homo sapiens
  misc_RNA (1)...(19): siRNA sense strand
cagaggauaugaagcacaa

SEQ ID NO: 2642058 - RNA, 19 nt, Homo sapiens
  misc_RNA (1)...(19): siRNA sense strand
gggcauguuuuaagaaauu

SEQ ID NO: 2642059 - RNA, 19 nt, Homo sapiens
  misc_RNA (1)...(19): siRNA sense strand
gggaggugauugaauacaa

SEQ ID NO: 2642060 - RNA, 19 nt, Homo sapiens
  misc_RNA (1)...(19): siRNA sense strand
agagaaaagaugugaaaca

SEQ ID NO: 2642061 - RNA, 19 nt, Homo sapiens
  misc_RNA (1)...(19): siRNA sense strand
aaggaaaggaugagagaau

SEQ ID NO: 2642062 - RNA, 19 nt, Homo sapiens
  misc_RNA (1)...(19): siRNA sense strand
gggaaaagcagcugagaga

SEQ ID NO: 2642063 - RNA, 19 nt, Homo sapiens
  misc_RNA (1)...(19): siRNA sense strand
acuagaagaaagagaagaa

SEQ ID NO: 2642064 - RNA, 19 nt, Homo sapiens
  misc_RNA (1)...(19): siRNA sense strand
agaugaagccaaugaggaa

SEQ ID NO: 2642065 - RNA, 19 nt, Homo sapiens
  misc_RNA (1)...(19): siRNA sense strand
ugauaagagaacagaagaa

SEQ ID NO: 2642066 - RNA, 19 nt, Homo sapiens
  misc_RNA (1)...(19): siRNA sense strand
acgaagaggaggagaaagu

SEQ ID NO: 2642067 - RNA, 19 nt, Homo sapiens
  misc_RNA (1)...(19): siRNA sense strand
aggacgaagaggaggagaa

SEQ ID NO: 2642068 - RNA, 19 nt, Homo sapiens
  misc_RNA (1)...(19): siRNA sense strand
agaaaauguaccaggauaa

SEQ ID NO: 2642069 - RNA, 19 nt, Homo sapiens
  misc_RNA (1)...(19): siRNA sense strand
agaaagagcgaaaaggaaa

SEQ ID NO: 2642070 - RNA, 19 nt, Homo sapiens
  misc_RNA (1)...(19): siRNA sense strand
aagaaaggccaaaguggaa

SEQ ID NO: 2642071 - RNA, 19 nt, Homo sapiens
  misc_RNA (1)...(19): siRNA sense strand
cgauaagcuaugaggacuu

SEQ ID NO: 2642072 - RNA, 19 nt, Homo sapiens
  misc_RNA (1)...(19): siRNA sense strand
caggauucuuacaaggaaa

SEQ ID NO: 2642073 - RNA, 19 nt, Homo sapiens
  misc_RNA (1)...(19): siRNA sense strand
gccguaagaaagagcgaaa

SEQ ID NO: 2642074 - RNA, 19 nt, Homo sapiens
  misc_RNA (1)...(19): siRNA sense strand
caaugaggaaagugaagaa

SEQ ID NO: 2642075 - RNA, 19 nt, Homo sapiens
  misc_RNA (1)...(19): siRNA sense strand
agaaaguagaagaguugaa

SEQ ID NO: 2642076 - RNA, 19 nt, Homo sapiens
  misc_RNA (1)...(19): siRNA sense strand
aggaaagugaagaagagaa

SEQ ID NO: 2642077 - RNA, 19 nt, Homo sapiens
  misc_RNA (1)...(19): siRNA sense strand
aaggauuugcugaaggaaa

SEQ ID NO: 2642078 - RNA, 19 nt, Homo sapiens
  misc_RNA (1)...(19): siRNA sense strand
cuaccaaugacaaguuaaa

SEQ ID NO: 2642079 - RNA, 19 nt, Homo sapiens
  misc_RNA (1)...(19): siRNA sense strand
uuccagaggacgagaacaa

SEQ ID NO: 2642080 - RNA, 19 nt, Homo sapiens
  misc_RNA (1)...(19): siRNA sense strand
ggaaaggaugagagaauac

SEQ ID NO: 2642081 - RNA, 19 nt, Homo sapiens
  misc_RNA (1)...(19): siRNA sense strand
guguaaaccauuugaucuu

SEQ ID NO: 2642082 - RNA, 19 nt, Homo sapiens
  misc_RNA (1)...(19): siRNA sense strand
ccagaguauaagaagaaau

SEQ ID NO: 2642083 - RNA, 19 nt, Homo sapiens
  misc_RNA (1)...(19): siRNA sense strand
uggcagacaucgaagcaga

SEQ ID NO: 2642084 - RNA, 19 nt, Homo sapiens
  misc_RNA (1)...(19): siRNA sense strand
gagagaauggggaagaaaa

SEQ ID NO: 2642085 - RNA, 19 nt, Homo sapiens
  misc_RNA (1)...(19): siRNA sense strand
gagaacuagaagaaagaga

SEQ ID NO: 2642086 - RNA, 19 nt, Homo sapiens
  misc_RNA (1)...(19): siRNA sense strand
ucaacaaucaagagacgaa

SEQ ID NO: 2642087 - RNA, 19 nt, Homo sapiens
  misc_RNA (1)...(19): siRNA sense strand
aggccaaaguggaaaagua

SEQ ID NO: 2642088 - RNA, 19 nt, Homo sapiens
  misc_RNA (1)...(19): siRNA sense strand
agaacuagaagaaagagaa

SEQ ID NO: 2642089 - RNA, 19 nt, Homo sapiens
  misc_RNA (1)...(19): siRNA sense strand
aagaagaaauuccgagcca

SEQ ID NO: 2642090 - RNA, 19 nt, Homo sapiens
  misc_RNA (1)...(19): siRNA sense strand
gcguaagucaccaguaaga

SEQ ID NO: 2642091 - RNA, 19 nt, Homo sapiens
  misc_RNA (1)...(19): siRNA sense strand
acgagaacuagaagaaaga

SEQ ID NO: 2642092 - RNA, 19 nt, Homo sapiens
  misc_RNA (1)...(19): siRNA sense strand
agaaagagagaauggggaa

SEQ ID NO: 2642093 - RNA, 19 nt, Homo sapiens
  misc_RNA (1)...(19): siRNA sense strand
aaagaguauccuaggaaaa

SEQ ID NO: 2642094 - RNA, 19 nt, Homo sapiens
  misc_RNA (1)...(19): siRNA sense strand
aggaagaaacgaaaagaau

SEQ ID NO: 2642095 - RNA, 19 nt, Homo sapiens
  misc_RNA (1)...(19): siRNA sense strand
uagcaagggaggaacagaa

SEQ ID NO: 2642096 - RNA, 19 nt, Homo sapiens
  misc_RNA (1)...(19): siRNA sense strand
uaaaagaagaagagcucua

SEQ ID NO: 2642097 - RNA, 19 nt, Homo sapiens
  misc_RNA (1)...(19): siRNA sense strand
cugaagacaaagaaagcuu

SEQ ID NO: 2642098 - RNA, 19 nt, Homo sapiens
  misc_RNA (1)...(19): siRNA sense strand
agaauaccaacgagaacua

SEQ ID NO: 2642099 - RNA, 19 nt, Homo sapiens
  misc_RNA (1)...(19): siRNA sense strand
aagagaaaucuguugaaga

SEQ ID NO: 2642100 - RNA, 19 nt, Homo sapiens
  misc_RNA (1)...(19): siRNA sense strand
caagaauggcagcagaaaa

SEQ ID NO: 2642101 - RNA, 19 nt, Homo sapiens
  misc_RNA (1)...(19): siRNA sense strand
cugaagaggaguuacccaa

SEQ ID NO: 2642102 - RNA, 19 nt, Homo sapiens
  misc_RNA (1)...(19): siRNA sense strand
aagaagaguccaugaaauc

SEQ ID NO: 2642103 - RNA, 19 nt, Homo sapiens
  misc_RNA (1)...(19): siRNA sense strand
auuuauagcaagggaggaa

SEQ ID NO: 2642104 - RNA, 19 nt, Homo sapiens
  misc_RNA (1)...(19): siRNA sense strand
acuuuuguguugaggauua

SEQ ID NO: 2642105 - RNA, 19 nt, Homo sapiens
  misc_RNA (1)...(19): siRNA sense strand
cuguaaagauacuggcuuc

SEQ ID NO: 2642106 - RNA, 19 nt, Homo sapiens
  misc_RNA (1)...(19): siRNA sense strand
auuuaaagccagacccauu

SEQ ID NO: 2642107 - RNA, 19 nt, Homo sapiens
  misc_RNA (1)...(19): siRNA sense strand
cugagagauaccagaaaca

SEQ ID NO: 2642108 - RNA, 19 nt, Homo sapiens
  misc_RNA (1)...(19): siRNA sense strand
auccagaguauaagaagaa

SEQ ID NO: 2642109 - RNA, 19 nt, Homo sapiens
  misc_RNA (1)...(19): siRNA sense strand
aggcgaucuuggaggacga

SEQ ID NO: 2642110 - RNA, 19 nt, Homo sapiens
  misc_RNA (1)...(19): siRNA sense strand
augaggacuuugugaacuu

SEQ ID NO: 2642111 - RNA, 19 nt, Homo sapiens
  misc_RNA (1)...(19): siRNA sense strand
gcuaaggagcucaucaaca

SEQ ID NO: 2642112 - RNA, 19 nt, Homo sapiens
  misc_RNA (1)...(19): siRNA sense strand
caaaugaugauaagagaac

SEQ ID NO: 2642113 - RNA, 19 nt, Homo sapiens
  misc_RNA (1)...(19): siRNA sense strand
ggcaacagccagugcacau

SEQ ID NO: 2642114 - RNA, 19 nt, Homo sapiens
  misc_RNA (1)...(19): siRNA sense strand
agagaauggggaagaaaau

SEQ ID NO: 2642115 - RNA, 19 nt, Homo sapiens
  misc_RNA (1)...(19): siRNA sense strand
agaauggggaagaaaauua

SEQ ID NO: 2642116 - RNA, 19 nt, Homo sapiens
  misc_RNA (1)...(19): siRNA sense strand
aggauuugcugaaggaaag

SEQ ID NO: 2642117 - RNA, 19 nt, Homo sapiens
  misc_RNA (1)...(19): siRNA sense strand
ucaagaggacaacgagcua

SEQ ID NO: 2642118 - RNA, 19 nt, Homo sapiens
  misc_RNA (1)...(19): siRNA sense strand
aagaaagagcgaaaaggaa

SEQ ID NO: 2642119 - RNA, 19 nt, Homo sapiens
  misc_RNA (1)...(19): siRNA sense strand
aggaggagaaaguggcuca

SEQ ID NO: 2642120 - RNA, 19 nt, Homo sapiens
  misc_RNA (1)...(19): siRNA sense strand
caauauguggacagacuuu

SEQ ID NO: 2642121 - RNA, 19 nt, Homo sapiens
  misc_RNA (1)...(19): siRNA sense strand
guacauaaagcgcucaaaa

SEQ ID NO: 2642122 - RNA, 19 nt, Homo sapiens
  misc_RNA (1)...(19): siRNA sense strand
gcucuuuaaugaaggccua

SEQ ID NO: 2642123 - RNA, 19 nt, Homo sapiens
  misc_RNA (1)...(19): siRNA sense strand
agaggagacaugagaagga

SEQ ID NO: 2642124 - RNA, 19 nt, Homo sapiens
  misc_RNA (1)...(19): siRNA sense strand
caaucuugccugacuacua

SEQ ID NO: 2642125 - RNA, 19 nt, Homo sapiens
  misc_RNA (1)...(19): siRNA sense strand
cgaccgagaaauugagaaa

SEQ ID NO: 2642126 - RNA, 19 nt, Homo sapiens
  misc_RNA (1)...(19): siRNA sense strand
gcugaaagugagaggagaa

SEQ ID NO: 2642127 - RNA, 19 nt, Homo sapiens
  misc_RNA (1)...(19): siRNA sense strand
cuugagaagaugaaggaua

SEQ ID NO: 2642128 - RNA, 19 nt, Homo sapiens
  misc_RNA (1)...(19): siRNA sense strand
guuagaaaucagagaccaa

SEQ ID NO: 2642129 - RNA, 19 nt, Homo sapiens
  misc_RNA (1)...(19): siRNA sense strand
agacaaaauuggagagacu

SEQ ID NO: 2642130 - RNA, 19 nt, Homo sapiens
  misc_RNA (1)...(19): siRNA sense strand
ccgggaaacauuugagaau

SEQ ID NO: 2642131 - RNA, 19 nt, Homo sapiens
  misc_RNA (1)...(19): siRNA sense strand
agaaaucaacucagacaaa

SEQ ID NO: 2642132 - RNA, 19 nt, Homo sapiens
  misc_RNA (1)...(19): siRNA sense strand
ccauagugacagagguuau

SEQ ID NO: 2642133 - RNA, 19 nt, Homo sapiens
  misc_RNA (1)...(19): siRNA sense strand
auugaugaacugugggaaa

SEQ ID NO: 2642134 - RNA, 19 nt, Homo sapiens
  misc_RNA (1)...(19): siRNA sense strand
uguuuaugauggugaagaa

SEQ ID NO: 2642135 - RNA, 19 nt, Homo sapiens
  misc_RNA (1)...(19): siRNA sense strand
gcgagcagccucaggacua

SEQ ID NO: 2642136 - RNA, 19 nt, Homo sapiens
  misc_RNA (1)...(19): siRNA sense strand
ugacagagguuaugugacu

SEQ ID NO: 2642137 - RNA, 19 nt, Homo sapiens
  misc_RNA (1)...(19): siRNA sense strand
agaggaaaucuaagaaaga

SEQ ID NO: 2642138 - RNA, 19 nt, Homo sapiens
  misc_RNA (1)...(19): siRNA sense strand
cguaaucacgaccgagaaa

SEQ ID NO: 2642139 - RNA, 19 nt, Homo sapiens
  misc_RNA (1)...(19): siRNA sense strand
ugguaauagcaauggaaga

SEQ ID NO: 2642140 - RNA, 19 nt, Homo sapiens
  misc_RNA (1)...(19): siRNA sense strand
agcaaagaaaccuggauaa

SEQ ID NO: 2642141 - RNA, 19 nt, Homo sapiens
  misc_RNA (1)...(19): siRNA sense strand
auagguagcaagaggaaau

SEQ ID NO: 2642142 - RNA, 19 nt, Homo sapiens
  misc_RNA (1)...(19): siRNA sense strand
uggaagaauuuaucaccaa

SEQ ID NO: 2642143 - RNA, 19 nt, Homo sapiens
  misc_RNA (1)...(19): siRNA sense strand
gaggagaagcccagaaacu

SEQ ID NO: 2642144 - RNA, 19 nt, Homo sapiens
  misc_RNA (1)...(19): siRNA sense strand
gagcauuacagcaguucaa

SEQ ID NO: 2642145 - RNA, 19 nt, Homo sapiens
  misc_RNA (1)...(19): siRNA sense strand
ccaucuaacaugcaugaaa

SEQ ID NO: 2642146 - RNA, 19 nt, Homo sapiens
  misc_RNA (1)...(19): siRNA sense strand
acuuaaaccagaagauuga

SEQ ID NO: 2642147 - RNA, 19 nt, Homo sapiens
  misc_RNA (1)...(19): siRNA sense strand
uagcaauggaagagcugaa

SEQ ID NO: 2642148 - RNA, 19 nt, Homo sapiens
  misc_RNA (1)...(19): siRNA sense strand
ccuguaaguacuuggaaga

SEQ ID NO: 2642149 - RNA, 19 nt, Homo sapiens
  misc_RNA (1)...(19): siRNA sense strand
ccagagugccauagugaca

SEQ ID NO: 2642150 - RNA, 19 nt, Homo sapiens
  misc_RNA (1)...(19): siRNA sense strand
gaugaaaacuaaaaggcau

SEQ ID NO: 2642151 - RNA, 19 nt, Homo sapiens
  misc_RNA (1)...(19): siRNA sense strand
agaccaauauagugaaacu

SEQ ID NO: 2642152 - RNA, 19 nt, Homo sapiens
  misc_RNA (1)...(19): siRNA sense strand
aguaacaagugaagagaug

SEQ ID NO: 2642153 - RNA, 19 nt, Homo sapiens
  misc_RNA (1)...(19): siRNA sense strand
aaggaagaauauugggcuu

SEQ ID NO: 2642154 - RNA, 19 nt, Homo sapiens
  misc_RNA (1)...(19): siRNA sense strand
gcagaaaucaacucagaca

SEQ ID NO: 2642155 - RNA, 19 nt, Homo sapiens
  misc_RNA (1)...(19): siRNA sense strand
auguugaagacgaggaaga

SEQ ID NO: 2642156 - RNA, 19 nt, Homo sapiens
  misc_RNA (1)...(19): siRNA sense strand
auacaacacauuuggagaa

SEQ ID NO: 2642157 - RNA, 19 nt, Homo sapiens
  misc_RNA (1)...(19): siRNA sense strand
uccuagagauguacagcaa

SEQ ID NO: 2642158 - RNA, 19 nt, Homo sapiens
  misc_RNA (1)...(19): siRNA sense strand
agagaccaauauagugaaa

SEQ ID NO: 2642159 - RNA, 19 nt, Homo sapiens
  misc_RNA (1)...(19): siRNA sense strand
aggaagaauauugggcuua

SEQ ID NO: 2642160 - RNA, 19 nt, Homo sapiens
  misc_RNA (1)...(19): siRNA sense strand
gguagcaagaggaaaucua

SEQ ID NO: 2642161 - RNA, 19 nt, Homo sapiens
  misc_RNA (1)...(19): siRNA sense strand
gcauuguggggcagggaaa

SEQ ID NO: 2642162 - RNA, 19 nt, Homo sapiens
  misc_RNA (1)...(19): siRNA sense strand
ggauguugaagacgaggaa

SEQ ID NO: 2642163 - RNA, 19 nt, Homo sapiens
  misc_RNA (1)...(19): siRNA sense strand
acgaggaagaugaugaaga

SEQ ID NO: 2642164 - RNA, 19 nt, Homo sapiens
  misc_RNA (1)...(19): siRNA sense strand
ugaccggagauuugggcaa

SEQ ID NO: 2642165 - RNA, 19 nt, Homo sapiens
  misc_RNA (1)...(19): siRNA sense strand
uuaugauggugaagaacau

SEQ ID NO: 2642166 - RNA, 19 nt, Homo sapiens
  misc_RNA (1)...(19): siRNA sense strand
aagacuuucuggagagcau

SEQ ID NO: 2642167 - RNA, 19 nt, Homo sapiens
  misc_RNA (1)...(19): siRNA sense strand
gcugaagaagagauuuaua

SEQ ID NO: 2642168 - RNA, 19 nt, Homo sapiens
  misc_RNA (1)...(19): siRNA sense strand
aggugaugguggacaacau

SEQ ID NO: 2642169 - RNA, 19 nt, Homo sapiens
  misc_RNA (1)...(19): siRNA sense strand
ccuuguagaaguucagauu

SEQ ID NO: 2642170 - RNA, 19 nt, Homo sapiens
  misc_RNA (1)...(19): siRNA sense strand
uaaccaggacucugagcaa

SEQ ID NO: 2642171 - RNA, 19 nt, Homo sapiens
  misc_RNA (1)...(19): siRNA sense strand
ucuggaacaucuagagcau

SEQ ID NO: 2642172 - RNA, 19 nt, Homo sapiens
  misc_RNA (1)...(19): siRNA sense strand
uugaagacgaggaagauga

SEQ ID NO: 2642173 - RNA, 19 nt, Homo sapiens
  misc_RNA (1)...(19): siRNA sense strand
uguaaguacuuggaagaau

SEQ ID NO: 2642174 - RNA, 19 nt, Homo sapiens
  misc_RNA (1)...(19): siRNA sense strand
cgucagagaaugugaacag

SEQ ID NO: 2642175 - RNA, 19 nt, Homo sapiens
  misc_RNA (1)...(19): siRNA sense strand
acgucgaaccguggagaaa

SEQ ID NO: 2642176 - RNA, 19 nt, Homo sapiens
  misc_RNA (1)...(19): siRNA sense strand
guaagauggcggaggcgga

SEQ ID NO: 2642177 - RNA, 19 nt, Homo sapiens
  misc_RNA (1)...(19): siRNA sense strand
uugcaaaagcagaaaucaa

SEQ ID NO: 2642178 - RNA, 19 nt, Homo sapiens
  misc_RNA (1)...(19): siRNA sense strand
accgagaaauugagaaaau

SEQ ID NO: 2642179 - RNA, 19 nt, Homo sapiens
  misc_RNA (1)...(19): siRNA sense strand
aagcaagcccagcagcaaa

SEQ ID NO: 2642180 - RNA, 19 nt, Homo sapiens
  misc_RNA (1)...(19): siRNA sense strand
aaucagaaguauucaccuu

SEQ ID NO: 2642181 - RNA, 19 nt, Homo sapiens
  misc_RNA (1)...(19): siRNA sense strand
uagaaaucagagaccaaua

SEQ ID NO: 2642182 - RNA, 19 nt, Homo sapiens
  misc_RNA (1)...(19): siRNA sense strand
ccaaaaguuuacaaccaaa

SEQ ID NO: 2642183 - RNA, 19 nt, Homo sapiens
  misc_RNA (1)...(19): siRNA sense strand
ggcaacaaagcuagugauu

SEQ ID NO: 2642184 - RNA, 19 nt, Homo sapiens
  misc_RNA (1)...(19): siRNA sense strand
cagaaaucaacucagacaa

SEQ ID NO: 2642185 - RNA, 19 nt, Homo sapiens
  misc_RNA (1)...(19): siRNA sense strand
agacgaggaagaugaugaa

SEQ ID NO: 2642186 - RNA, 19 nt, Homo sapiens
  misc_RNA (1)...(19): siRNA sense strand
cuuuagauggcuacaggaa

SEQ ID NO: 2642187 - RNA, 19 nt, Homo sapiens
  misc_RNA (1)...(19): siRNA sense strand
cgagacaagcagaaacuca

SEQ ID NO: 2642188 - RNA, 19 nt, Homo sapiens
  misc_RNA (1)...(19): siRNA sense strand
augaaacuuuagauggcua

SEQ ID NO: 2642189 - RNA, 19 nt, Homo sapiens
  misc_RNA (1)...(19): siRNA sense strand
ggcagaagcuggaggagga

SEQ ID NO: 2642190 - RNA, 19 nt, Homo sapiens
  misc_RNA (1)...(19): siRNA sense strand
ggacaaaguacaaacggca

SEQ ID NO: 2642191 - RNA, 19 nt, Homo sapiens
  misc_RNA (1)...(19): siRNA sense strand
uuccagaaccggaggacaa

SEQ ID NO: 2642192 - RNA, 19 nt, Homo sapiens
  misc_RNA (1)...(19): siRNA sense strand
gagcagaagaagaagggcu

SEQ ID NO: 2642193 - RNA, 19 nt, Homo sapiens
  misc_RNA (1)...(19): siRNA sense strand
acaaaguacaaacggcaga

SEQ ID NO: 2642194 - RNA, 19 nt, Homo sapiens
  misc_RNA (1)...(19): siRNA sense strand
aggaagggccugaguccga

SEQ ID NO: 2642195 - RNA, 19 nt, Homo sapiens
  misc_RNA (1)...(19): siRNA sense strand
ggcagaagcuggaggagga

SEQ ID NO: 2642196 - RNA, 19 nt, Homo sapiens
  misc_RNA (1)...(19): siRNA sense strand
ggacaaaguacaaacggca

SEQ ID NO: 2642197 - RNA, 19 nt, Homo sapiens
  misc_RNA (1)...(19): siRNA sense strand
uuccagaaccggaggacaa

SEQ ID NO: 2642198 - RNA, 19 nt, Homo sapiens
  misc_RNA (1)...(19): siRNA sense strand
gagcagaagaagaagggcu

SEQ ID NO: 2642199 - RNA, 19 nt, Homo sapiens
  misc_RNA (1)...(19): siRNA sense strand
acaaaguacaaacggcaga

SEQ ID NO: 2642200 - RNA, 19 nt, Homo sapiens
  misc_RNA (1)...(19): siRNA sense strand
aggaagggccugaguccga

SEQ ID NO: 2642201 - RNA, 19 nt, Homo sapiens
  misc_RNA (1)...(19): siRNA sense strand
gagacaaauucaagggcca

SEQ ID NO: 2642202 - RNA, 19 nt, Homo sapiens
  misc_RNA (1)...(19): siRNA sense strand
aggaagaggaagaggagga

SEQ ID NO: 2642203 - RNA, 19 nt, Homo sapiens
  misc_RNA (1)...(19): siRNA sense strand
aggaagaggaggaggagga

SEQ ID NO: 2642204 - RNA, 19 nt, Homo sapiens
  misc_RNA (1)...(19): siRNA sense strand
gagaaugcccagaggcuga

SEQ ID NO: 2642205 - RNA, 19 nt, Homo sapiens
  misc_RNA (1)...(19): siRNA sense strand
uauuaagccaggagaggaa

SEQ ID NO: 2642206 - RNA, 19 nt, Homo sapiens
  misc_RNA (1)...(19): siRNA sense strand
ccacacagcucauccggaa

SEQ ID NO: 2642207 - RNA, 19 nt, Homo sapiens
  misc_RNA (1)...(19): siRNA sense strand
aggaggaggaggaaggaga

SEQ ID NO: 2642208 - RNA, 19 nt, Homo sapiens
  misc_RNA (1)...(19): siRNA sense strand
ccacagugaagcaggcgaa

SEQ ID NO: 2642209 - RNA, 19 nt, Homo sapiens
  misc_RNA (1)...(19): siRNA sense strand
ugagcagcgccaagggaaa

SEQ ID NO: 2642210 - RNA, 19 nt, Homo sapiens
  misc_RNA (1)...(19): siRNA sense strand
uccauaaacuucugggaga

SEQ ID NO: 2642211 - RNA, 19 nt, Homo sapiens
  misc_RNA (1)...(19): siRNA sense strand
cacaagauccucagggaga

SEQ ID NO: 2642212 - RNA, 19 nt, Homo sapiens
  misc_RNA (1)...(19): siRNA sense strand
ggacaaggaccguuggauc

SEQ ID NO: 2642213 - RNA, 19 nt, Homo sapiens
  misc_RNA (1)...(19): siRNA sense strand
ggaaugcacuuuaucgcua

SEQ ID NO: 2642214 - RNA, 19 nt, Homo sapiens
  misc_RNA (1)...(19): siRNA sense strand
ggaggaggaaggagagcca

SEQ ID NO: 2642215 - RNA, 19 nt, Homo sapiens
  misc_RNA (1)...(19): siRNA sense strand
aagaggaagaggaggagga

SEQ ID NO: 2642216 - RNA, 19 nt, Homo sapiens
  misc_RNA (1)...(19): siRNA sense strand
aagaggaggaggaggagga

SEQ ID NO: 2642217 - RNA, 19 nt, Homo sapiens
  misc_RNA (1)...(19): siRNA sense strand
gggcacuagagaaggcaga

SEQ ID NO: 2642218 - RNA, 19 nt, Homo sapiens
  misc_RNA (1)...(19): siRNA sense strand
cagccaaugaagaggagga

SEQ ID NO: 2642219 - RNA, 19 nt, Homo sapiens
  misc_RNA (1)...(19): siRNA sense strand
ccuuagggcacuagagaag

SEQ ID NO: 2642220 - RNA, 19 nt, Homo sapiens
  misc_RNA (1)...(19): siRNA sense strand
cucagaagaggaagaggaa

SEQ ID NO: 2642221 - RNA, 19 nt, Homo sapiens
  misc_RNA (1)...(19): siRNA sense strand
ccagaggcugaccgggaaa

SEQ ID NO: 2642222 - RNA, 19 nt, Homo sapiens
  misc_RNA (1)...(19): siRNA sense strand
agagaaggcagaggagaau

SEQ ID NO: 2642223 - RNA, 19 nt, Homo sapiens
  misc_RNA (1)...(19): siRNA sense strand
gugaagcaggcgaaggaca

SEQ ID NO: 2642224 - RNA, 19 nt, Homo sapiens
  misc_RNA (1)...(19): siRNA sense strand
aggaaauuguccauaaacu

SEQ ID NO: 2642225 - RNA, 19 nt, Homo sapiens
  misc_RNA (1)...(19): siRNA sense strand
uaaacuucugggagacaaa

SEQ ID NO: 2642226 - RNA, 19 nt, Homo sapiens
  misc_RNA (1)...(19): siRNA sense strand
aggaggaaggagagccaga

SEQ ID NO: 2642227 - RNA, 19 nt, Homo sapiens
  misc_RNA (1)...(19): siRNA sense strand
agacaaauucaagggccaa

SEQ ID NO: 2642228 - RNA, 19 nt, Homo sapiens
  misc_RNA (1)...(19): siRNA sense strand
gguccaugccugugacacu

SEQ ID NO: 2642229 - RNA, 19 nt, Homo sapiens
  misc_RNA (1)...(19): siRNA sense strand
augaagaggaggaaauugu

SEQ ID NO: 2642230 - RNA, 19 nt, Homo sapiens
  misc_RNA (1)...(19): siRNA sense strand
auucaagggccaacuggaa

SEQ ID NO: 2642231 - RNA, 19 nt, Homo sapiens
  misc_RNA (1)...(19): siRNA sense strand
ccuucauugaccagcuaua

SEQ ID NO: 2642232 - RNA, 19 nt, Homo sapiens
  misc_RNA (1)...(19): siRNA sense strand
gcgaggagguggagcagaa

SEQ ID NO: 2642233 - RNA, 19 nt, Homo sapiens
  misc_RNA (1)...(19): siRNA sense strand
ggggaaagaaggagagcaa

SEQ ID NO: 2642234 - RNA, 19 nt, Homo sapiens
  misc_RNA (1)...(19): siRNA sense strand
gggaaggccugaagggacu

SEQ ID NO: 2642235 - RNA, 19 nt, Homo sapiens
  misc_RNA (1)...(19): siRNA sense strand
uggagaagcuggaggugga

SEQ ID NO: 2642236 - RNA, 19 nt, Homo sapiens
  misc_RNA (1)...(19): siRNA sense strand
gcgagaaggaggagcugga

SEQ ID NO: 2642237 - RNA, 19 nt, Homo sapiens
  misc_RNA (1)...(19): siRNA sense strand
aggagagcaaggaggagua

SEQ ID NO: 2642238 - RNA, 19 nt, Homo sapiens
  misc_RNA (1)...(19): siRNA sense strand
ggaaagaaggagagcaagg

SEQ ID NO: 2642239 - RNA, 19 nt, Homo sapiens
  misc_RNA (1)...(19): siRNA sense strand
gaacaggagcugagccgca

SEQ ID NO: 2642240 - RNA, 19 nt, Homo sapiens
  misc_RNA (1)...(19): siRNA sense strand
ugacaaaacuccaggcucu

SEQ ID NO: 2642241 - RNA, 19 nt, Homo sapiens
  misc_RNA (1)...(19): siRNA sense strand
agaagcuguuugaggacau

SEQ ID NO: 2642242 - RNA, 19 nt, Homo sapiens
  misc_RNA (1)...(19): siRNA sense strand
gggcaggguacgacuauca

SEQ ID NO: 2642243 - RNA, 19 nt, Homo sapiens
  misc_RNA (1)...(19): siRNA sense strand
agaaggaggagcuggagga

SEQ ID NO: 2642244 - RNA, 19 nt, Homo sapiens
  misc_RNA (1)...(19): siRNA sense strand
aggcagaaugcgagaacac

SEQ ID NO: 2642245 - RNA, 19 nt, Homo sapiens
  misc_RNA (1)...(19): siRNA sense strand
agaaggagagcaaggagga

SEQ ID NO: 2642246 - RNA, 19 nt, Homo sapiens
  misc_RNA (1)...(19): siRNA sense strand
cgguggugcuggacccaau

SEQ ID NO: 2642247 - RNA, 19 nt, Homo sapiens
  misc_RNA (1)...(19): siRNA sense strand
agcaggagguggugcagau

SEQ ID NO: 2642248 - RNA, 19 nt, Homo sapiens
  misc_RNA (1)...(19): siRNA sense strand
gcagaaugcgagaacacca

SEQ ID NO: 2642249 - RNA, 19 nt, Homo sapiens
  misc_RNA (1)...(19): siRNA sense strand
ccagauugggauugcggau

SEQ ID NO: 2642250 - RNA, 19 nt, Homo sapiens
  misc_RNA (1)...(19): siRNA sense strand
ggagaaagaugaaggucca

SEQ ID NO: 2642251 - RNA, 19 nt, Homo sapiens
  misc_RNA (1)...(19): siRNA sense strand
cgaacaaauaguggagaaa

SEQ ID NO: 2642252 - RNA, 19 nt, Homo sapiens
  misc_RNA (1)...(19): siRNA sense strand
ggagaauggaggaggacca

SEQ ID NO: 2642253 - RNA, 19 nt, Homo sapiens
  misc_RNA (1)...(19): siRNA sense strand
aggccaagcucuacgggaa

SEQ ID NO: 2642254 - RNA, 19 nt, Homo sapiens
  misc_RNA (1)...(19): siRNA sense strand
acgcggugguggagagcua

SEQ ID NO: 2642255 - RNA, 19 nt, Homo sapiens
  misc_RNA (1)...(19): siRNA sense strand
cuaccaagcccaaggucaa

SEQ ID NO: 2642256 - RNA, 19 nt, Homo sapiens
  misc_RNA (1)...(19): siRNA sense strand
aggaagaagugcuccggaa

SEQ ID NO: 2642257 - RNA, 19 nt, Homo sapiens
  misc_RNA (1)...(19): siRNA sense strand
cggagaagaucaagcagga

SEQ ID NO: 2642258 - RNA, 19 nt, Homo sapiens
  misc_RNA (1)...(19): siRNA sense strand
aggcagcagccgagaagaa

SEQ ID NO: 2642259 - RNA, 19 nt, Homo sapiens
  misc_RNA (1)...(19): siRNA sense strand
cggaggaggaagaggagga

SEQ ID NO: 2642260 - RNA, 19 nt, Homo sapiens
  misc_RNA (1)...(19): siRNA sense strand
gagcggugaaggaggagaa

SEQ ID NO: 2642261 - RNA, 19 nt, Homo sapiens
  misc_RNA (1)...(19): siRNA sense strand
cccacaaggaccagcauaa

SEQ ID NO: 2642262 - RNA, 19 nt, Homo sapiens
  misc_RNA (1)...(19): siRNA sense strand
ccgagaagaagaagauuca

SEQ ID NO: 2642263 - RNA, 19 nt, Homo sapiens
  misc_RNA (1)...(19): siRNA sense strand
aagaagauucagaaggaga

SEQ ID NO: 2642264 - RNA, 19 nt, Homo sapiens
  misc_RNA (1)...(19): siRNA sense strand
gcuacucggugcugggcaa

SEQ ID NO: 2642265 - RNA, 19 nt, Homo sapiens
  misc_RNA (1)...(19): siRNA sense strand
gaauggaggaggaccagua

SEQ ID NO: 2642266 - RNA, 19 nt, Homo sapiens
  misc_RNA (1)...(19): siRNA sense strand
agaagauucagaaggagaa

SEQ ID NO: 2642267 - RNA, 19 nt, Homo sapiens
  misc_RNA (1)...(19): siRNA sense strand
cacccaaggagaagaagaa

SEQ ID NO: 2642268 - RNA, 19 nt, Homo sapiens
  misc_RNA (1)...(19): siRNA sense strand
aggagaaccagaaugcaaa

SEQ ID NO: 2642269 - RNA, 19 nt, Homo sapiens
  misc_RNA (1)...(19): siRNA sense strand
cggaggaggaaaaggagaa

SEQ ID NO: 2642270 - RNA, 19 nt, Homo sapiens
  misc_RNA (1)...(19): siRNA sense strand
agaucaagucuguggucau

SEQ ID NO: 2642271 - RNA, 19 nt, Homo sapiens
  misc_RNA (1)...(19): siRNA sense strand
ucgaguggcuggaggggaa

SEQ ID NO: 2642272 - RNA, 19 nt, Homo sapiens
  misc_RNA (1)...(19): siRNA sense strand
acacggggaaggagggaaa

SEQ ID NO: 2642273 - RNA, 19 nt, Homo sapiens
  misc_RNA (1)...(19): siRNA sense strand
acaacuuccuggacgagaa

SEQ ID NO: 2642274 - RNA, 19 nt, Homo sapiens
  misc_RNA (1)...(19): siRNA sense strand
ccgaugacaagcuggaaga

SEQ ID NO: 2642275 - RNA, 19 nt, Homo sapiens
  misc_RNA (1)...(19): siRNA sense strand
cagcagccgagaagaagaa

SEQ ID NO: 2642276 - RNA, 19 nt, Homo sapiens
  misc_RNA (1)...(19): siRNA sense strand
ccaguaaccggcaggguca

SEQ ID NO: 2642277 - RNA, 19 nt, Homo sapiens
  misc_RNA (1)...(19): siRNA sense strand
gaaagguaguccuggguuc

SEQ ID NO: 2642278 - RNA, 19 nt, Homo sapiens
  misc_RNA (1)...(19): siRNA sense strand
uggagauagcuuugggcuu

SEQ ID NO: 2642279 - RNA, 19 nt, Homo sapiens
  misc_RNA (1)...(19): siRNA sense strand
ccucuuaaguaccuggaca

SEQ ID NO: 2642280 - RNA, 19 nt, Homo sapiens
  misc_RNA (1)...(19): siRNA sense strand
cccaaggagaagaagaaga

SEQ ID NO: 2642281 - RNA, 19 nt, Homo sapiens
  misc_RNA (1)...(19): siRNA sense strand
cagccgagaagaagaagau

SEQ ID NO: 2642282 - RNA, 19 nt, Homo sapiens
  misc_RNA (1)...(19): siRNA sense strand
gguauggagagaaggggaa

SEQ ID NO: 2642283 - RNA, 19 nt, Homo sapiens
  misc_RNA (1)...(19): siRNA sense strand
aaaggagaauggaggagga

SEQ ID NO: 2642284 - RNA, 19 nt, Homo sapiens
  misc_RNA (1)...(19): siRNA sense strand
gcaggagaguggagaacag

SEQ ID NO: 2642285 - RNA, 19 nt, Homo sapiens
  misc_RNA (1)...(19): siRNA sense strand
ccaucaagcaagagccagu

SEQ ID NO: 2642286 - RNA, 19 nt, Homo sapiens
  misc_RNA (1)...(19): siRNA sense strand
ccagcaagggagcggugaa

SEQ ID NO: 2642287 - RNA, 19 nt, Homo sapiens
  misc_RNA (1)...(19): siRNA sense strand
ugagaugagucgugaggcu

SEQ ID NO: 2642288 - RNA, 19 nt, Homo sapiens
  misc_RNA (1)...(19): siRNA sense strand
aaauaguggagaaagauga

SEQ ID NO: 2642289 - RNA, 19 nt, Homo sapiens
  misc_RNA (1)...(19): siRNA sense strand
ccaaagaggaagaagugcu

SEQ ID NO: 2642290 - RNA, 19 nt, Homo sapiens
  misc_RNA (1)...(19): siRNA sense strand
ggucggacagugaacacaa

SEQ ID NO: 2642291 - RNA, 19 nt, Homo sapiens
  misc_RNA (1)...(19): siRNA sense strand
cccaggaagugcaggcuca

SEQ ID NO: 2642292 - RNA, 19 nt, Homo sapiens
  misc_RNA (1)...(19): siRNA sense strand
uggaagagcucauccggca

SEQ ID NO: 2642293 - RNA, 19 nt, Homo sapiens
  misc_RNA (1)...(19): siRNA sense strand
ggaaggagggaaagagcuc

SEQ ID NO: 2642294 - RNA, 19 nt, Homo sapiens
  misc_RNA (1)...(19): siRNA sense strand
gguuguuccuggagcaugu

SEQ ID NO: 2642295 - RNA, 19 nt, Homo sapiens
  misc_RNA (1)...(19): siRNA sense strand
ggaaauagcgauugacugc

SEQ ID NO: 2642296 - RNA, 19 nt, Homo sapiens
  misc_RNA (1)...(19): siRNA sense strand
ccagaaaggcagcagccga

SEQ ID NO: 2642297 - RNA, 19 nt, Homo sapiens
  misc_RNA (1)...(19): siRNA sense strand
agguggagccgcagaacca

SEQ ID NO: 2642298 - RNA, 19 nt, Homo sapiens
  misc_RNA (1)...(19): siRNA sense strand
gagcagugagggcaggaga

SEQ ID NO: 2642299 - RNA, 19 nt, Homo sapiens
  misc_RNA (1)...(19): siRNA sense strand
ggagauagcuuugggcuuc

SEQ ID NO: 2642300 - RNA, 19 nt, Homo sapiens
  misc_RNA (1)...(19): siRNA sense strand
uggaggagcgguauggaga

SEQ ID NO: 2642301 - RNA, 19 nt, Homo sapiens
  misc_RNA (1)...(19): siRNA sense strand
cuucaacggcugcaaguau

SEQ ID NO: 2642302 - RNA, 19 nt, Homo sapiens
  misc_RNA (1)...(19): siRNA sense strand
ccaggugaccaacgaggaa

SEQ ID NO: 2642303 - RNA, 19 nt, Homo sapiens
  misc_RNA (1)...(19): siRNA sense strand
aggacggcugcgaggcaaa

SEQ ID NO: 2642304 - RNA, 19 nt, Homo sapiens
  misc_RNA (1)...(19): siRNA sense strand
cccagcagaaagagaagaa

SEQ ID NO: 2642305 - RNA, 19 nt, Homo sapiens
  misc_RNA (1)...(19): siRNA sense strand
ggaaaaggagaauggagga

SEQ ID NO: 2642306 - RNA, 19 nt, Homo sapiens
  misc_RNA (1)...(19): siRNA sense strand
ugaaaggagaggagggcag

SEQ ID NO: 2642307 - RNA, 19 nt, Homo sapiens
  misc_RNA (1)...(19): siRNA sense strand
gaggagaagcugugggacc

SEQ ID NO: 2642308 - RNA, 19 nt, Homo sapiens
  misc_RNA (1)...(19): siRNA sense strand
gugcggaggaggaagagga

SEQ ID NO: 2642309 - RNA, 19 nt, Homo sapiens
  misc_RNA (1)...(19): siRNA sense strand
ccacccaaggagaagaaga

SEQ ID NO: 2642310 - RNA, 19 nt, Homo sapiens
  misc_RNA (1)...(19): siRNA sense strand
ggagagaaggggaaagcca

SEQ ID NO: 2642311 - RNA, 19 nt, Homo sapiens
  misc_RNA (1)...(19): siRNA sense strand
gcacccugaccaaggaaga

SEQ ID NO: 2642312 - RNA, 19 nt, Homo sapiens
  misc_RNA (1)...(19): siRNA sense strand
ucugggaagccaagaugaa

SEQ ID NO: 2642313 - RNA, 19 nt, Homo sapiens
  misc_RNA (1)...(19): siRNA sense strand
caauuauucaggagagaaa

SEQ ID NO: 2642314 - RNA, 19 nt, Homo sapiens
  misc_RNA (1)...(19): siRNA sense strand
ggguaagagcuauggauuu

SEQ ID NO: 2642315 - RNA, 19 nt, Homo sapiens
  misc_RNA (1)...(19): siRNA sense strand
ggacguacuacuagaacaa

SEQ ID NO: 2642316 - RNA, 19 nt, Homo sapiens
  misc_RNA (1)...(19): siRNA sense strand
uggauaaggaacaaggaaa

SEQ ID NO: 2642317 - RNA, 19 nt, Homo sapiens
  misc_RNA (1)...(19): siRNA sense strand
caggcaaaccguuggauaa

SEQ ID NO: 2642318 - RNA, 19 nt, Homo sapiens
  misc_RNA (1)...(19): siRNA sense strand
caacaaaacuauaagccaa

SEQ ID NO: 2642319 - RNA, 19 nt, Homo sapiens
  misc_RNA (1)...(19): siRNA sense strand
cuggaagagcuuaaggaaa

SEQ ID NO: 2642320 - RNA, 19 nt, Homo sapiens
  misc_RNA (1)...(19): siRNA sense strand
ggaugaagcaacagcaaaa

SEQ ID NO: 2642321 - RNA, 19 nt, Homo sapiens
  misc_RNA (1)...(19): siRNA sense strand
gaacaaagaauuaagcuca

SEQ ID NO: 2642322 - RNA, 19 nt, Homo sapiens
  misc_RNA (1)...(19): siRNA sense strand
aaggaaauauucuggacaa

SEQ ID NO: 2642323 - RNA, 19 nt, Homo sapiens
  misc_RNA (1)...(19): siRNA sense strand
guugaagcccugauggaaa

SEQ ID NO: 2642324 - RNA, 19 nt, Homo sapiens
  misc_RNA (1)...(19): siRNA sense strand
ccacuaggaucauggguca

SEQ ID NO: 2642325 - RNA, 19 nt, Homo sapiens
  misc_RNA (1)...(19): siRNA sense strand
aagauaaacacaugagaca

SEQ ID NO: 2642326 - RNA, 19 nt, Homo sapiens
  misc_RNA (1)...(19): siRNA sense strand
cuacaagaguuuaaggacu

SEQ ID NO: 2642327 - RNA, 19 nt, Homo sapiens
  misc_RNA (1)...(19): siRNA sense strand
gaaaacuaucgaagagaaa

SEQ ID NO: 2642328 - RNA, 19 nt, Homo sapiens
  misc_RNA (1)...(19): siRNA sense strand
ggucaugacaguaauggaa

SEQ ID NO: 2642329 - RNA, 19 nt, Homo sapiens
  misc_RNA (1)...(19): siRNA sense strand
ugacaguaauggaagcaau

SEQ ID NO: 2642330 - RNA, 19 nt, Homo sapiens
  misc_RNA (1)...(19): siRNA sense strand
cugaaacauuagaagaaga

SEQ ID NO: 2642331 - RNA, 19 nt, Homo sapiens
  misc_RNA (1)...(19): siRNA sense strand
ccaagcuacuagaaacaaa

SEQ ID NO: 2642332 - RNA, 19 nt, Homo sapiens
  misc_RNA (1)...(19): siRNA sense strand
ucuaugugcauguggguaa

SEQ ID NO: 2642333 - RNA, 19 nt, Homo sapiens
  misc_RNA (1)...(19): siRNA sense strand
auggcuacccugagagaaa

SEQ ID NO: 2642334 - RNA, 19 nt, Homo sapiens
  misc_RNA (1)...(19): siRNA sense strand
aaucaggccuggaggauca

SEQ ID NO: 2642335 - RNA, 19 nt, Homo sapiens
  misc_RNA (1)...(19): siRNA sense strand
cuauagaugagcugaguuu

SEQ ID NO: 2642336 - RNA, 19 nt, Homo sapiens
  misc_RNA (1)...(19): siRNA sense strand
gcuacuagaaacaaacaua

SEQ ID NO: 2642337 - RNA, 19 nt, Homo sapiens
  misc_RNA (1)...(19): siRNA sense strand
agaccauggcccugacaaa

SEQ ID NO: 2642338 - RNA, 19 nt, Homo sapiens
  misc_RNA (1)...(19): siRNA sense strand
uacagaaguuugaggaaga

SEQ ID NO: 2642339 - RNA, 19 nt, Homo sapiens
  misc_RNA (1)...(19): siRNA sense strand
gguuggaagaacaaagaau

SEQ ID NO: 2642340 - RNA, 19 nt, Homo sapiens
  misc_RNA (1)...(19): siRNA sense strand
ggauguuggcaauggaaga

SEQ ID NO: 2642341 - RNA, 19 nt, Homo sapiens
  misc_RNA (1)...(19): siRNA sense strand
ggauaaggaacaaggaaag

SEQ ID NO: 2642342 - RNA, 19 nt, Homo sapiens
  misc_RNA (1)...(19): siRNA sense strand
cuacugguggagagggaaa

SEQ ID NO: 2642343 - RNA, 19 nt, Homo sapiens
  misc_RNA (1)...(19): siRNA sense strand
auucauacuucucuggaaa

SEQ ID NO: 2642344 - RNA, 19 nt, Homo sapiens
  misc_RNA (1)...(19): siRNA sense strand
gggaagaaagcauacagaa

SEQ ID NO: 2642345 - RNA, 19 nt, Homo sapiens
  misc_RNA (1)...(19): siRNA sense strand
acaccauacuugagguuca

SEQ ID NO: 2642346 - RNA, 19 nt, Homo sapiens
  misc_RNA (1)...(19): siRNA sense strand
gaugauaaggagaugguga

SEQ ID NO: 2642347 - RNA, 19 nt, Homo sapiens
  misc_RNA (1)...(19): siRNA sense strand
ggaagaaagcauacagaag

SEQ ID NO: 2642348 - RNA, 19 nt, Homo sapiens
  misc_RNA (1)...(19): siRNA sense strand
ugaagaacuuauugacaca

SEQ ID NO: 2642349 - RNA, 19 nt, Homo sapiens
  misc_RNA (1)...(19): siRNA sense strand
ccaaaaggcuuacgugcaa

SEQ ID NO: 2642350 - RNA, 19 nt, Homo sapiens
  misc_RNA (1)...(19): siRNA sense strand
aagacaaguagaagaucaa

SEQ ID NO: 2642351 - RNA, 19 nt, Homo sapiens
  misc_RNA (1)...(19): siRNA sense strand
aagagaaaauccugagaau

SEQ ID NO: 2642352 - RNA, 19 nt, Homo sapiens
  misc_RNA (1)...(19): siRNA sense strand
cugccaagacagugcaauu

SEQ ID NO: 2642353 - RNA, 19 nt, Homo sapiens
  misc_RNA (1)...(19): siRNA sense strand
agucaaagcugaagaaacc

SEQ ID NO: 2642354 - RNA, 19 nt, Homo sapiens
  misc_RNA (1)...(19): siRNA sense strand
aguuucaaauacagcguaa

SEQ ID NO: 2642355 - RNA, 19 nt, Homo sapiens
  misc_RNA (1)...(19): siRNA sense strand
aagaaagcauacagaaguu

SEQ ID NO: 2642356 - RNA, 19 nt, Homo sapiens
  misc_RNA (1)...(19): siRNA sense strand
gagauacggcaguggaaca

SEQ ID NO: 2642357 - RNA, 19 nt, Homo sapiens
  misc_RNA (1)...(19): siRNA sense strand
ucuuacagacuuugugaua

SEQ ID NO: 2642358 - RNA, 19 nt, Homo sapiens
  misc_RNA (1)...(19): siRNA sense strand
ggagauggugauagaagau

SEQ ID NO: 2642359 - RNA, 19 nt, Homo sapiens
  misc_RNA (1)...(19): siRNA sense strand
cugaagaaacccaagcaau

SEQ ID NO: 2642360 - RNA, 19 nt, Homo sapiens
  misc_RNA (1)...(19): siRNA sense strand
gagagaaaagcaagcauua

SEQ ID NO: 2642361 - RNA, 19 nt, Homo sapiens
  misc_RNA (1)...(19): siRNA sense strand
caguacaggcagucacuua

SEQ ID NO: 2642362 - RNA, 19 nt, Homo sapiens
  misc_RNA (1)...(19): siRNA sense strand
gcagauuauuucagcacga

SEQ ID NO: 2642363 - RNA, 19 nt, Homo sapiens
  misc_RNA (1)...(19): siRNA sense strand
ggaaagcaaaagugguuua

SEQ ID NO: 2642364 - RNA, 19 nt, Homo sapiens
  misc_RNA (1)...(19): siRNA sense strand
acuaagacaaguagaagau

SEQ ID NO: 2642365 - RNA, 19 nt, Homo sapiens
  misc_RNA (1)...(19): siRNA sense strand
aggccuuacaagaugaaua

SEQ ID NO: 2642366 - RNA, 19 nt, Homo sapiens
  misc_RNA (1)...(19): siRNA sense strand
gaauaugacaaagguguaa

SEQ ID NO: 2642367 - RNA, 19 nt, Homo sapiens
  misc_RNA (1)...(19): siRNA sense strand
cauuaacauucuuggagau

SEQ ID NO: 2642368 - RNA, 19 nt, Homo sapiens
  misc_RNA (1)...(19): siRNA sense strand
ccaauaaagcacuggauuc

SEQ ID NO: 2642369 - RNA, 19 nt, Homo sapiens
  misc_RNA (1)...(19): siRNA sense strand
cagggaaaguggauauuca

SEQ ID NO: 2642370 - RNA, 19 nt, Homo sapiens
  misc_RNA (1)...(19): siRNA sense strand
cagcagcauuagaagauga

SEQ ID NO: 2642371 - RNA, 19 nt, Homo sapiens
  misc_RNA (1)...(19): siRNA sense strand
aggagauggugauagaaga

SEQ ID NO: 2642372 - RNA, 19 nt, Homo sapiens
  misc_RNA (1)...(19): siRNA sense strand
ggucaaggucgucgaacca

SEQ ID NO: 2642373 - RNA, 19 nt, Homo sapiens
  misc_RNA (1)...(19): siRNA sense strand
aggaaauauucuggacaau

SEQ ID NO: 2642374 - RNA, 19 nt, Homo sapiens
  misc_RNA (1)...(19): siRNA sense strand
augcaaugaaaucaggaaa

SEQ ID NO: 2642375 - RNA, 19 nt, Homo sapiens
  misc_RNA (1)...(19): siRNA sense strand
ccugaagccacuaggauca

SEQ ID NO: 2642376 - RNA, 19 nt, Homo sapiens
  misc_RNA (1)...(19): siRNA sense strand
acacugugcaggaggauga

SEQ ID NO: 2642377 - RNA, 19 nt, Homo sapiens
  misc_RNA (1)...(19): siRNA sense strand
ugaauaugacaaaggugua

SEQ ID NO: 2642378 - RNA, 19 nt, Homo sapiens
  misc_RNA (1)...(19): siRNA sense strand
gacaaagguguaaaugaaa

SEQ ID NO: 2642379 - RNA, 19 nt, Homo sapiens
  misc_RNA (1)...(19): siRNA sense strand
uggagaucccuacgagaua

SEQ ID NO: 2642380 - RNA, 19 nt, Homo sapiens
  misc_RNA (1)...(19): siRNA sense strand
guguugagaugaugcguca

SEQ ID NO: 2642381 - RNA, 19 nt, Homo sapiens
  misc_RNA (1)...(19): siRNA sense strand
ccggaaacugggagcgcaa

SEQ ID NO: 2642382 - RNA, 19 nt, Homo sapiens
  misc_RNA (1)...(19): siRNA sense strand
ggaaugagagaauagggaa

SEQ ID NO: 2642383 - RNA, 19 nt, Homo sapiens
  misc_RNA (1)...(19): siRNA sense strand
agagaaaggaccagggaag

SEQ ID NO: 2642384 - RNA, 19 nt, Homo sapiens
  misc_RNA (1)...(19): siRNA sense strand
cuacaagcggaaugagaga

SEQ ID NO: 2642385 - RNA, 19 nt, Homo sapiens
  misc_RNA (1)...(19): siRNA sense strand
cacaaagggaagaguaaaa

SEQ ID NO: 2642386 - RNA, 19 nt, Homo sapiens
  misc_RNA (1)...(19): siRNA sense strand
uggaaaagguggaagagca

SEQ ID NO: 2642387 - RNA, 19 nt, Homo sapiens
  misc_RNA (1)...(19): siRNA sense strand
uccacaaagggaagaguaa

SEQ ID NO: 2642388 - RNA, 19 nt, Homo sapiens
  misc_RNA (1)...(19): siRNA sense strand
gggaagguucagaagcaau

SEQ ID NO: 2642389 - RNA, 19 nt, Homo sapiens
  misc_RNA (1)...(19): siRNA sense strand
aggcugagcggcugaggaa

SEQ ID NO: 2642390 - RNA, 19 nt, Homo sapiens
  misc_RNA (1)...(19): siRNA sense strand
agaauagggaagcggguga

SEQ ID NO: 2642391 - RNA, 19 nt, Homo sapiens
  misc_RNA (1)...(19): siRNA sense strand
gugaaggcuaugagguaga

SEQ ID NO: 2642392 - RNA, 19 nt, Homo sapiens
  misc_RNA (1)...(19): siRNA sense strand
cgacaaaugcuccugcgaa

SEQ ID NO: 2642393 - RNA, 19 nt, Homo sapiens
  misc_RNA (1)...(19): siRNA sense strand
auuaaagaccacugcgaca

SEQ ID NO: 2642394 - RNA, 19 nt, Homo sapiens
  misc_RNA (1)...(19): siRNA sense strand
ggagaaacgcgguucggga

SEQ ID NO: 2642395 - RNA, 19 nt, Homo sapiens
  misc_RNA (1)...(19): siRNA sense strand
gaaugagagaauagggaag

SEQ ID NO: 2642396 - RNA, 19 nt, Homo sapiens
  misc_RNA (1)...(19): siRNA sense strand
ccuggaggagagugacaua

SEQ ID NO: 2642397 - RNA, 19 nt, Homo sapiens
  misc_RNA (1)...(19): siRNA sense strand
acaagcggaaugagagaau

SEQ ID NO: 2642398 - RNA, 19 nt, Homo sapiens
  misc_RNA (1)...(19): siRNA sense strand
cggaaugagagaauaggga

SEQ ID NO: 2642399 - RNA, 19 nt, Homo sapiens
  misc_RNA (1)...(19): siRNA sense strand
ccgccaacugcgagcucaa

SEQ ID NO: 2642400 - RNA, 19 nt, Homo sapiens
  misc_RNA (1)...(19): siRNA sense strand
gcacaauccaugucccgua

SEQ ID NO: 2642401 - RNA, 19 nt, Homo sapiens
  misc_RNA (1)...(19): siRNA sense strand
ggaaacugggagcgcaaga

SEQ ID NO: 2642402 - RNA, 19 nt, Homo sapiens
  misc_RNA (1)...(19): siRNA sense strand
gacaaaugcuccugcgaac

SEQ ID NO: 2642403 - RNA, 19 nt, Homo sapiens
  misc_RNA (1)...(19): siRNA sense strand
ggcaaugggcagccagaga

SEQ ID NO: 2642404 - RNA, 19 nt, Homo sapiens
  misc_RNA (1)...(19): siRNA sense strand
uggaguaugucaagcucau

SEQ ID NO: 2642405 - RNA, 19 nt, Homo sapiens
  misc_RNA (1)...(19): siRNA sense strand
ggggaaagagaaaggacca

SEQ ID NO: 2642406 - RNA, 19 nt, Homo sapiens
  misc_RNA (1)...(19): siRNA sense strand
gcaacaacacagugcugga

SEQ ID NO: 2642407 - RNA, 19 nt, Homo sapiens
  misc_RNA (1)...(19): siRNA sense strand
ggaggaugguggacggcua

SEQ ID NO: 2642408 - RNA, 19 nt, Homo sapiens
  misc_RNA (1)...(19): siRNA sense strand
aggaaguggugaaggagau

SEQ ID NO: 2642409 - RNA, 19 nt, Homo sapiens
  misc_RNA (1)...(19): siRNA sense strand
gcuucaagaggcaggagaa

SEQ ID NO: 2642410 - RNA, 19 nt, Homo sapiens
  misc_RNA (1)...(19): siRNA sense strand
gugaagaacgcaagaggca

SEQ ID NO: 2642411 - RNA, 19 nt, Homo sapiens
  misc_RNA (1)...(19): siRNA sense strand
caaucaugaggcagugaaa

SEQ ID NO: 2642412 - RNA, 19 nt, Homo sapiens
  misc_RNA (1)...(19): siRNA sense strand
guaucaugagguugugaaa

SEQ ID NO: 2642413 - RNA, 19 nt, Homo sapiens
  misc_RNA (1)...(19): siRNA sense strand
aggcaagaucucagaagga

SEQ ID NO: 2642414 - RNA, 19 nt, Homo sapiens
  misc_RNA (1)...(19): siRNA sense strand
gugauuaacugcaacgguu

SEQ ID NO: 2642415 - RNA, 19 nt, Homo sapiens
  misc_RNA (1)...(19): siRNA sense strand
caucaagagauaugggaag

SEQ ID NO: 2642416 - RNA, 19 nt, Homo sapiens
  misc_RNA (1)...(19): siRNA sense strand
uggugaaggagaugauaca

SEQ ID NO: 2642417 - RNA, 19 nt, Homo sapiens
  misc_RNA (1)...(19): siRNA sense strand
ccucucaggaaguggugaa

SEQ ID NO: 2642418 - RNA, 19 nt, Homo sapiens
  misc_RNA (1)...(19): siRNA sense strand
ccguggacgacuugcagaa

SEQ ID NO: 2642419 - RNA, 19 nt, Homo sapiens
  misc_RNA (1)...(19): siRNA sense strand
acaauagggagaauggaga

SEQ ID NO: 2642420 - RNA, 19 nt, Homo sapiens
  misc_RNA (1)...(19): siRNA sense strand
caggaaguggugaaggaga

SEQ ID NO: 2642421 - RNA, 19 nt, Homo sapiens
  misc_RNA (1)...(19): siRNA sense strand
gugaaauuaugccgggagu

SEQ ID NO: 2642422 - RNA, 19 nt, Homo sapiens
  misc_RNA (1)...(19): siRNA sense strand
cagaaggaugcuuggcuga

SEQ ID NO: 2642423 - RNA, 19 nt, Homo sapiens
  misc_RNA (1)...(19): siRNA sense strand
aagaaugaauguucggcca

SEQ ID NO: 2642424 - RNA, 19 nt, Homo sapiens
  misc_RNA (1)...(19): siRNA sense strand
augugaacacugccagaaa

SEQ ID NO: 2642425 - RNA, 19 nt, Homo sapiens
  misc_RNA (1)...(19): siRNA sense strand
acaucuucggagugauuaa

SEQ ID NO: 2642426 - RNA, 19 nt, Homo sapiens
  misc_RNA (1)...(19): siRNA sense strand
uggagaagcaggagccagu

SEQ ID NO: 2642427 - RNA, 19 nt, Homo sapiens
  misc_RNA (1)...(19): siRNA sense strand
gcaaacaagagaagagaca

SEQ ID NO: 2642428 - RNA, 19 nt, Homo sapiens
  misc_RNA (1)...(19): siRNA sense strand
ucacagaaguggaacgaga

SEQ ID NO: 2642429 - RNA, 19 nt, Homo sapiens
  misc_RNA (1)...(19): siRNA sense strand
agacagaaacugagaaaau

SEQ ID NO: 2642430 - RNA, 19 nt, Homo sapiens
  misc_RNA (1)...(19): siRNA sense strand
aaauggaauuggugaagaa

SEQ ID NO: 2642431 - RNA, 19 nt, Homo sapiens
  misc_RNA (1)...(19): siRNA sense strand
ccacaagcuuacugaucaa

SEQ ID NO: 2642432 - RNA, 19 nt, Homo sapiens
  misc_RNA (1)...(19): siRNA sense strand
acauauaggcauugggcuu

SEQ ID NO: 2642433 - RNA, 19 nt, Homo sapiens
  misc_RNA (1)...(19): siRNA sense strand
cauacagucaggugagaaa

SEQ ID NO: 2642434 - RNA, 19 nt, Homo sapiens
  misc_RNA (1)...(19): siRNA sense strand
aaacaagagaagagacaga

SEQ ID NO: 2642435 - RNA, 19 nt, Homo sapiens
  misc_RNA (1)...(19): siRNA sense strand
uggaauuggugaagaagau

SEQ ID NO: 2642436 - RNA, 19 nt, Homo sapiens
  misc_RNA (1)...(19): siRNA sense strand
agacagagcaccuaggauu

SEQ ID NO: 2642437 - RNA, 19 nt, Homo sapiens
  misc_RNA (1)...(19): siRNA sense strand
ggaaggaauuaaacgccaa

SEQ ID NO: 2642438 - RNA, 19 nt, Homo sapiens
  misc_RNA (1)...(19): siRNA sense strand
agagacagaaacugagaaa

SEQ ID NO: 2642439 - RNA, 19 nt, Homo sapiens
  misc_RNA (1)...(19): siRNA sense strand
agaaauaaggcucagcaaa

SEQ ID NO: 2642440 - RNA, 19 nt, Homo sapiens
  misc_RNA (1)...(19): siRNA sense strand
acccaauguuccaaagaaa

SEQ ID NO: 2642441 - RNA, 19 nt, Homo sapiens
  misc_RNA (1)...(19): siRNA sense strand
guguugaaauagcggaauu

SEQ ID NO: 2642442 - RNA, 19 nt, Homo sapiens
  misc_RNA (1)...(19): siRNA sense strand
gcagaagcagggaggauau

SEQ ID NO: 2642443 - RNA, 19 nt, Homo sapiens
  misc_RNA (1)...(19): siRNA sense strand
gcuucaacuuaguaaagaa

SEQ ID NO: 2642444 - RNA, 19 nt, Homo sapiens
  misc_RNA (1)...(19): siRNA sense strand
cagagaaagaauaggaagu

SEQ ID NO: 2642445 - RNA, 19 nt, Homo sapiens
  misc_RNA (1)...(19): siRNA sense strand
gugaagaagaugagcgaac

SEQ ID NO: 2642446 - RNA, 19 nt, Homo sapiens
  misc_RNA (1)...(19): siRNA sense strand
caauauuaccguagaaacu

SEQ ID NO: 2642447 - RNA, 19 nt, Homo sapiens
  misc_RNA (1)...(19): siRNA sense strand
acaagagaagagacagaaa

SEQ ID NO: 2642448 - RNA, 19 nt, Homo sapiens
  misc_RNA (1)...(19): siRNA sense strand
ccaaauuauugcuggugau

SEQ ID NO: 2642449 - RNA, 19 nt, Homo sapiens
  misc_RNA (1)...(19): siRNA sense strand
cuaaauuuguugagcaguu

SEQ ID NO: 2642450 - RNA, 19 nt, Homo sapiens
  misc_RNA (1)...(19): siRNA sense strand
augcaauuguaguucgaaa

SEQ ID NO: 2642451 - RNA, 19 nt, Homo sapiens
  misc_RNA (1)...(19): siRNA sense strand
ccguagaaacuuauaauga

SEQ ID NO: 2642452 - RNA, 19 nt, Homo sapiens
  misc_RNA (1)...(19): siRNA sense strand
uugaaauggcugauggcaa

SEQ ID NO: 2642453 - RNA, 19 nt, Homo sapiens
  misc_RNA (1)...(19): siRNA sense strand
gcuagaugguguggagcaa

SEQ ID NO: 2642454 - RNA, 19 nt, Homo sapiens
  misc_RNA (1)...(19): siRNA sense strand
ugauauaggacaugcugua

SEQ ID NO: 2642455 - RNA, 19 nt, Homo sapiens
  misc_RNA (1)...(19): siRNA sense strand
ccacauacuugauaauuca

SEQ ID NO: 2642456 - RNA, 19 nt, Homo sapiens
  misc_RNA (1)...(19): siRNA sense strand
cagcaaaacuauaccaaga

SEQ ID NO: 2642457 - RNA, 19 nt, Homo sapiens
  misc_RNA (1)...(19): siRNA sense strand
augacaugguagaaagaau

SEQ ID NO: 2642458 - RNA, 19 nt, Homo sapiens
  misc_RNA (1)...(19): siRNA sense strand
caacuggagguucgagaaa

SEQ ID NO: 2642459 - RNA, 19 nt, Homo sapiens
  misc_RNA (1)...(19): siRNA sense strand
ugagauuacucgaguggau

SEQ ID NO: 2642460 - RNA, 19 nt, Homo sapiens
  misc_RNA (1)...(19): siRNA sense strand
aauuaaacgccaacaggaa

SEQ ID NO: 2642461 - RNA, 19 nt, Homo sapiens
  misc_RNA (1)...(19): siRNA sense strand
augaagagcuagacaagga

SEQ ID NO: 2642462 - RNA, 19 nt, Homo sapiens
  misc_RNA (1)...(19): siRNA sense strand
ccuggaaauuugaacauau

SEQ ID NO: 2642463 - RNA, 19 nt, Homo sapiens
  misc_RNA (1)...(19): siRNA sense strand
gagaaauaaggcucagcaa

SEQ ID NO: 2642464 - RNA, 19 nt, Homo sapiens
  misc_RNA (1)...(19): siRNA sense strand
uguuuaugcugguguggaa

SEQ ID NO: 2642465 - RNA, 19 nt, Homo sapiens
  misc_RNA (1)...(19): siRNA sense strand
gcagauucauuuugagcaa

SEQ ID NO: 2642466 - RNA, 19 nt, Homo sapiens
  misc_RNA (1)...(19): siRNA sense strand
ggguggaccaaguaagcua

SEQ ID NO: 2642467 - RNA, 19 nt, Homo sapiens
  misc_RNA (1)...(19): siRNA sense strand
ccugaagguccuacacaua

SEQ ID NO: 2642468 - RNA, 19 nt, Homo sapiens
  misc_RNA (1)...(19): siRNA sense strand
cuugaaaugucuagagaug

SEQ ID NO: 2642469 - RNA, 19 nt, Homo sapiens
  misc_RNA (1)...(19): siRNA sense strand
gggcauuaaacucuugaaa

SEQ ID NO: 2642470 - RNA, 19 nt, Homo sapiens
  misc_RNA (1)...(19): siRNA sense strand
ucgauuggcuacagauaau

SEQ ID NO: 2642471 - RNA, 19 nt, Homo sapiens
  misc_RNA (1)...(19): siRNA sense strand
aaggagagccaguuacuaa

SEQ ID NO: 2642472 - RNA, 19 nt, Homo sapiens
  misc_RNA (1)...(19): siRNA sense strand
gaaguaauugcuacaguua

SEQ ID NO: 2642473 - RNA, 19 nt, Homo sapiens
  misc_RNA (1)...(19): siRNA sense strand
ugcuacaguuauaaggaaa

SEQ ID NO: 2642474 - RNA, 19 nt, Homo sapiens
  misc_RNA (1)...(19): siRNA sense strand
aagcaaugucccuggaaaa

SEQ ID NO: 2642475 - RNA, 19 nt, Homo sapiens
  misc_RNA (1)...(19): siRNA sense strand
cuguugauugauagaguaa

SEQ ID NO: 2642476 - RNA, 19 nt, Homo sapiens
  misc_RNA (1)...(19): siRNA sense strand
gcauuaaacucuugaaaac

SEQ ID NO: 2642477 - RNA, 19 nt, Homo sapiens
  misc_RNA (1)...(19): siRNA sense strand
ugacaauagcuacgaugaa

SEQ ID NO: 2642478 - RNA, 19 nt, Homo sapiens
  misc_RNA (1)...(19): siRNA sense strand
ccuauugagaugacuguaa

SEQ ID NO: 2642479 - RNA, 19 nt, Homo sapiens
  misc_RNA (1)...(19): siRNA sense strand
ucucaaaacacucgugaaa

SEQ ID NO: 2642480 - RNA, 19 nt, Homo sapiens
  misc_RNA (1)...(19): siRNA sense strand
guuugaugaucuugcagaa

SEQ ID NO: 2642481 - RNA, 19 nt, Homo sapiens
  misc_RNA (1)...(19): siRNA sense strand
ugacagaggcagaacagau

SEQ ID NO: 2642482 - RNA, 19 nt, Homo sapiens
  misc_RNA (1)...(19): siRNA sense strand
gguucuaagcacuggacau

SEQ ID NO: 2642483 - RNA, 19 nt, Homo sapiens
  misc_RNA (1)...(19): siRNA sense strand
guauacuggacuugaauau

SEQ ID NO: 2642484 - RNA, 19 nt, Homo sapiens
  misc_RNA (1)...(19): siRNA sense strand
cuuaaggccugauagacaa

SEQ ID NO: 2642485 - RNA, 19 nt, Homo sapiens
  misc_RNA (1)...(19): siRNA sense strand
ccuacauauucaugauaga

SEQ ID NO: 2642486 - RNA, 19 nt, Homo sapiens
  misc_RNA (1)...(19): siRNA sense strand
aagauugcaucgugaaaga

SEQ ID NO: 2642487 - RNA, 19 nt, Homo sapiens
  misc_RNA (1)...(19): siRNA sense strand
aaagauuauuggagaccuu

SEQ ID NO: 2642488 - RNA, 19 nt, Homo sapiens
  misc_RNA (1)...(19): siRNA sense strand
ucuuaaggccugauagaca

SEQ ID NO: 2642489 - RNA, 19 nt, Homo sapiens
  misc_RNA (1)...(19): siRNA sense strand
cagaaauuauagcugguuu

SEQ ID NO: 2642490 - RNA, 19 nt, Homo sapiens
  misc_RNA (1)...(19): siRNA sense strand
auagcaacauccugugaaa

SEQ ID NO: 2642491 - RNA, 19 nt, Homo sapiens
  misc_RNA (1)...(19): siRNA sense strand
acaaugaagaugcaguuaa

SEQ ID NO: 2642492 - RNA, 19 nt, Homo sapiens
  misc_RNA (1)...(19): siRNA sense strand
gcucgauuggcuacagaua

SEQ ID NO: 2642493 - RNA, 19 nt, Homo sapiens
  misc_RNA (1)...(19): siRNA sense strand
cagaaaagaaagagagcaa

SEQ ID NO: 2642494 - RNA, 19 nt, Homo sapiens
  misc_RNA (1)...(19): siRNA sense strand
gcaaaggccaugagggaga

SEQ ID NO: 2642495 - RNA, 19 nt, Homo sapiens
  misc_RNA (1)...(19): siRNA sense strand
gagcaaaggccaugaggga

SEQ ID NO: 2642496 - RNA, 19 nt, Homo sapiens
  misc_RNA (1)...(19): siRNA sense strand
ccaucgaagaggagaacaa

SEQ ID NO: 2642497 - RNA, 19 nt, Homo sapiens
  misc_RNA (1)...(19): siRNA sense strand
gugacuacuuugacggaaa

SEQ ID NO: 2642498 - RNA, 19 nt, Homo sapiens
  misc_RNA (1)...(19): siRNA sense strand
aggaagaggaagaagaaaa

SEQ ID NO: 2642499 - RNA, 19 nt, Homo sapiens
  misc_RNA (1)...(19): siRNA sense strand
gggaggaggaggaggagau

SEQ ID NO: 2642500 - RNA, 19 nt, Homo sapiens
  misc_RNA (1)...(19): siRNA sense strand
acgaugaacugguggccaa

SEQ ID NO: 2642501 - RNA, 19 nt, Homo sapiens
  misc_RNA (1)...(19): siRNA sense strand
aggcaaagcuuucuggaga

SEQ ID NO: 2642502 - RNA, 19 nt, Homo sapiens
  misc_RNA (1)...(19): siRNA sense strand
ggacugaggacauggauga

SEQ ID NO: 2642503 - RNA, 19 nt, Homo sapiens
  misc_RNA (1)...(19): siRNA sense strand
aggaugaagaagaggaaga

SEQ ID NO: 2642504 - RNA, 19 nt, Homo sapiens
  misc_RNA (1)...(19): siRNA sense strand
cagaaaaggaugauaacaa

SEQ ID NO: 2642505 - RNA, 19 nt, Homo sapiens
  misc_RNA (1)...(19): siRNA sense strand
aggaagaggaggaggagga

SEQ ID NO: 2642506 - RNA, 19 nt, Homo sapiens
  misc_RNA (1)...(19): siRNA sense strand
aggaggaggaggaggaaga

SEQ ID NO: 2642507 - RNA, 19 nt, Homo sapiens
  misc_RNA (1)...(19): siRNA sense strand
aggaggaggaagaggaaga

SEQ ID NO: 2642508 - RNA, 19 nt, Homo sapiens
  misc_RNA (1)...(19): siRNA sense strand
gggaugaggacgaggagga

SEQ ID NO: 2642509 - RNA, 19 nt, Homo sapiens
  misc_RNA (1)...(19): siRNA sense strand
aagaagaggaagaggagga

SEQ ID NO: 2642510 - RNA, 19 nt, Homo sapiens
  misc_RNA (1)...(19): siRNA sense strand
ccgcagaaccugagcacca

SEQ ID NO: 2642511 - RNA, 19 nt, Homo sapiens
  misc_RNA (1)...(19): siRNA sense strand
aagaaaucaaggagcuaaa

SEQ ID NO: 2642512 - RNA, 19 nt, Homo sapiens
  misc_RNA (1)...(19): siRNA sense strand
augagaaggaggaggauga

SEQ ID NO: 2642513 - RNA, 19 nt, Homo sapiens
  misc_RNA (1)...(19): siRNA sense strand
cugaagagguguucgacau

SEQ ID NO: 2642514 - RNA, 19 nt, Homo sapiens
  misc_RNA (1)...(19): siRNA sense strand
cggaaagagcaaaggccau

SEQ ID NO: 2642515 - RNA, 19 nt, Homo sapiens
  misc_RNA (1)...(19): siRNA sense strand
ggccaaggagcucgagaaa

SEQ ID NO: 2642516 - RNA, 19 nt, Homo sapiens
  misc_RNA (1)...(19): siRNA sense strand
cagcaacgguauagaaaau

SEQ ID NO: 2642517 - RNA, 19 nt, Homo sapiens
  misc_RNA (1)...(19): siRNA sense strand
guuuagacuuagacaguga

SEQ ID NO: 2642518 - RNA, 19 nt, Homo sapiens
  misc_RNA (1)...(19): siRNA sense strand
cagcagagaaacuggccaa

SEQ ID NO: 2642519 - RNA, 19 nt, Homo sapiens
  misc_RNA (1)...(19): siRNA sense strand
aggaggagaucgaggagga

SEQ ID NO: 2642520 - RNA, 19 nt, Homo sapiens
  misc_RNA (1)...(19): siRNA sense strand
agaucgaggaggaggauga

SEQ ID NO: 2642521 - RNA, 19 nt, Homo sapiens
  misc_RNA (1)...(19): siRNA sense strand
cagcgaugaagaaggcaaa

SEQ ID NO: 2642522 - RNA, 19 nt, Homo sapiens
  misc_RNA (1)...(19): siRNA sense strand
ccuuaaacuauuagcccaa

SEQ ID NO: 2642523 - RNA, 19 nt, Homo sapiens
  misc_RNA (1)...(19): siRNA sense strand
cguuugaauacaacaguua

SEQ ID NO: 2642524 - RNA, 19 nt, Homo sapiens
  misc_RNA (1)...(19): siRNA sense strand
cggccaagaggcagaaaga

SEQ ID NO: 2642525 - RNA, 19 nt, Homo sapiens
  misc_RNA (1)...(19): siRNA sense strand
acacagaaaaggaugauaa

SEQ ID NO: 2642526 - RNA, 19 nt, Homo sapiens
  misc_RNA (1)...(19): siRNA sense strand
uggaaaagaugguggagga

SEQ ID NO: 2642527 - RNA, 19 nt, Homo sapiens
  misc_RNA (1)...(19): siRNA sense strand
uggccaaggcacaggaaaa

SEQ ID NO: 2642528 - RNA, 19 nt, Homo sapiens
  misc_RNA (1)...(19): siRNA sense strand
gggacuugcccguagacua

SEQ ID NO: 2642529 - RNA, 19 nt, Homo sapiens
  misc_RNA (1)...(19): siRNA sense strand
agugauguuguuagagaaa

SEQ ID NO: 2642530 - RNA, 19 nt, Homo sapiens
  misc_RNA (1)...(19): siRNA sense strand
uggccaagucauuguuaaa

SEQ ID NO: 2642531 - RNA, 19 nt, Homo sapiens
  misc_RNA (1)...(19): siRNA sense strand
aggaggaagaggaagaaga

SEQ ID NO: 2642532 - RNA, 19 nt, Homo sapiens
  misc_RNA (1)...(19): siRNA sense strand
ugucacaauacucgaauaa

SEQ ID NO: 2642533 - RNA, 19 nt, Homo sapiens
  misc_RNA (1)...(19): siRNA sense strand
acaaagugauugagcagca

SEQ ID NO: 2642534 - RNA, 19 nt, Homo sapiens
  misc_RNA (1)...(19): siRNA sense strand
aggaggaggaugaggacga

SEQ ID NO: 2642535 - RNA, 19 nt, Homo sapiens
  misc_RNA (1)...(19): siRNA sense strand
ggugcaaaccagggauaua

SEQ ID NO: 2642536 - RNA, 19 nt, Homo sapiens
  misc_RNA (1)...(19): siRNA sense strand
agaccaucgaagaggagaa

SEQ ID NO: 2642537 - RNA, 19 nt, Homo sapiens
  misc_RNA (1)...(19): siRNA sense strand
gaagcugggaggagggaca

SEQ ID NO: 2642538 - RNA, 19 nt, Homo sapiens
  misc_RNA (1)...(19): siRNA sense strand
ggaggauagacgaggacga

SEQ ID NO: 2642539 - RNA, 19 nt, Homo sapiens
  misc_RNA (1)...(19): siRNA sense strand
cggucaagacggaaggcau

SEQ ID NO: 2642540 - RNA, 19 nt, Homo sapiens
  misc_RNA (1)...(19): siRNA sense strand
ggauccaaucaaugaacaa

SEQ ID NO: 2642541 - RNA, 19 nt, Homo sapiens
  misc_RNA (1)...(19): siRNA sense strand
acaacggacucauggaaaa

SEQ ID NO: 2642542 - RNA, 19 nt, Homo sapiens
  misc_RNA (1)...(19): siRNA sense strand
cagauuaccacgauggaga

SEQ ID NO: 2642543 - RNA, 19 nt, Homo sapiens
  misc_RNA (1)...(19): siRNA sense strand
cugaggacauggaugagaa

SEQ ID NO: 2642544 - RNA, 19 nt, Homo sapiens
  misc_RNA (1)...(19): siRNA sense strand
ucgaauaaugcaagacaca

SEQ ID NO: 2642545 - RNA, 19 nt, Homo sapiens
  misc_RNA (1)...(19): siRNA sense strand
cggcaaaaucgcugaggau

SEQ ID NO: 2642546 - RNA, 19 nt, Homo sapiens
  misc_RNA (1)...(19): siRNA sense strand
gggcaugucaacagcaaca

SEQ ID NO: 2642547 - RNA, 19 nt, Homo sapiens
  misc_RNA (1)...(19): siRNA sense strand
uuaccacgauggagagcaa

SEQ ID NO: 2642548 - RNA, 19 nt, Homo sapiens
  misc_RNA (1)...(19): siRNA sense strand
uuggaaacggaaagagcaa

SEQ ID NO: 2642549 - RNA, 19 nt, Homo sapiens
  misc_RNA (1)...(19): siRNA sense strand
gaacaaagugauugagcag

SEQ ID NO: 2642550 - RNA, 19 nt, Homo sapiens
  misc_RNA (1)...(19): siRNA sense strand
aggaggaggaggaggagga

SEQ ID NO: 2642551 - RNA, 19 nt, Homo sapiens
  misc_RNA (1)...(19): siRNA sense strand
aggaggaggaggaggagga

SEQ ID NO: 2642552 - RNA, 19 nt, Homo sapiens
  misc_RNA (1)...(19): siRNA sense strand
cagugauguuguuagagaa

SEQ ID NO: 2642553 - RNA, 19 nt, Homo sapiens
  misc_RNA (1)...(19): siRNA sense strand
ucuagaagaaagacgguau

SEQ ID NO: 2642554 - RNA, 19 nt, Homo sapiens
  misc_RNA (1)...(19): siRNA sense strand
uggucaugucaguggcaaa

SEQ ID NO: 2642555 - RNA, 19 nt, Homo sapiens
  misc_RNA (1)...(19): siRNA sense strand
aagccuaaauccagugaca

SEQ ID NO: 2642556 - RNA, 19 nt, Homo sapiens
  misc_RNA (1)...(19): siRNA sense strand
ggacaaaagcauucgaagu

SEQ ID NO: 2642557 - RNA, 19 nt, Homo sapiens
  misc_RNA (1)...(19): siRNA sense strand
cgguauagaaaaugaugaa

SEQ ID NO: 2642558 - RNA, 19 nt, Homo sapiens
  misc_RNA (1)...(19): siRNA sense strand
caucaaaugaauugucaca

SEQ ID NO: 2642559 - RNA, 19 nt, Homo sapiens
  misc_RNA (1)...(19): siRNA sense strand
gggaggacagaaagccuaa

SEQ ID NO: 2642560 - RNA, 19 nt, Homo sapiens
  misc_RNA (1)...(19): siRNA sense strand
agagcaaagaagauaaaga

SEQ ID NO: 2642561 - RNA, 19 nt, Homo sapiens
  misc_RNA (1)...(19): siRNA sense strand
agacuuagacagugauguu

SEQ ID NO: 2642562 - RNA, 19 nt, Homo sapiens
  misc_RNA (1)...(19): siRNA sense strand
ccucaagaacagaaaagaa

SEQ ID NO: 2642563 - RNA, 19 nt, Homo sapiens
  misc_RNA (1)...(19): siRNA sense strand
agaagagggcggaggaaaa

SEQ ID NO: 2642564 - RNA, 19 nt, Homo sapiens
  misc_RNA (1)...(19): siRNA sense strand
acauuuaguuccagggaca

SEQ ID NO: 2642565 - RNA, 19 nt, Homo sapiens
  misc_RNA (1)...(19): siRNA sense strand
gaggauaccuaguggagca

SEQ ID NO: 2642566 - RNA, 19 nt, Homo sapiens
  misc_RNA (1)...(19): siRNA sense strand
cagaagagggcggaggaaa

SEQ ID NO: 2642567 - RNA, 19 nt, Homo sapiens
  misc_RNA (1)...(19): siRNA sense strand
gcuauaaacucaacccgaa

SEQ ID NO: 2642568 - RNA, 19 nt, Homo sapiens
  misc_RNA (1)...(19): siRNA sense strand
cagaacacagauaaagaaa

SEQ ID NO: 2642569 - RNA, 19 nt, Homo sapiens
  misc_RNA (1)...(19): siRNA sense strand
caaagaacguggccggaga

SEQ ID NO: 2642570 - RNA, 19 nt, Homo sapiens
  misc_RNA (1)...(19): siRNA sense strand
gaaaacaagaccacggaaa

SEQ ID NO: 2642571 - RNA, 19 nt, Homo sapiens
  misc_RNA (1)...(19): siRNA sense strand
ggugacagaaaguggaaaa

SEQ ID NO: 2642572 - RNA, 19 nt, Homo sapiens
  misc_RNA (1)...(19): siRNA sense strand
cauuugaagacuuggaaaa

SEQ ID NO: 2642573 - RNA, 19 nt, Homo sapiens
  misc_RNA (1)...(19): siRNA sense strand
agugugaagccaagggcaa

SEQ ID NO: 2642574 - RNA, 19 nt, Homo sapiens
  misc_RNA (1)...(19): siRNA sense strand
gcaugaggacgcugggaga

SEQ ID NO: 2642575 - RNA, 19 nt, Homo sapiens
  misc_RNA (1)...(19): siRNA sense strand
gugaacaacugcucggaca

SEQ ID NO: 2642576 - RNA, 19 nt, Homo sapiens
  misc_RNA (1)...(19): siRNA sense strand
ugugaagacuguaggacca

SEQ ID NO: 2642577 - RNA, 19 nt, Homo sapiens
  misc_RNA (1)...(19): siRNA sense strand
ccggagaggugaagacgca

SEQ ID NO: 2642578 - RNA, 19 nt, Homo sapiens
  misc_RNA (1)...(19): siRNA sense strand
gcgacaacgcggacaacau

SEQ ID NO: 2642579 - RNA, 19 nt, Homo sapiens
  misc_RNA (1)...(19): siRNA sense strand
cugaaggauucuugaccau

SEQ ID NO: 2642580 - RNA, 19 nt, Homo sapiens
  misc_RNA (1)...(19): siRNA sense strand
cugaggaacuugaacacau

SEQ ID NO: 2642581 - RNA, 19 nt, Homo sapiens
  misc_RNA (1)...(19): siRNA sense strand
uggaaaugcagaagaccau

SEQ ID NO: 2642582 - RNA, 19 nt, Homo sapiens
  misc_RNA (1)...(19): siRNA sense strand
ucagcuaccaggaggacaa

SEQ ID NO: 2642583 - RNA, 19 nt, Homo sapiens
  misc_RNA (1)...(19): siRNA sense strand
acaauaaugagcugagcau

SEQ ID NO: 2642584 - RNA, 19 nt, Homo sapiens
  misc_RNA (1)...(19): siRNA sense strand
gccuaaacuugcuggacga

SEQ ID NO: 2642585 - RNA, 19 nt, Homo sapiens
  misc_RNA (1)...(19): siRNA sense strand
aaaacaagaccacggaaaa

SEQ ID NO: 2642586 - RNA, 19 nt, Homo sapiens
  misc_RNA (1)...(19): siRNA sense strand
gcauuugaagacuuggaaa

SEQ ID NO: 2642587 - RNA, 19 nt, Homo sapiens
  misc_RNA (1)...(19): siRNA sense strand
ccugcagagccgaaggcaa

SEQ ID NO: 2642588 - RNA, 19 nt, Homo sapiens
  misc_RNA (1)...(19): siRNA sense strand
gcacacaguucaagcgccu

SEQ ID NO: 2642589 - RNA, 19 nt, Homo sapiens
  misc_RNA (1)...(19): siRNA sense strand
acuacagggucuacugcaa

SEQ ID NO: 2642590 - RNA, 19 nt, Homo sapiens
  misc_RNA (1)...(19): siRNA sense strand
uuuaacagaaucagagaga

SEQ ID NO: 2642591 - RNA, 19 nt, Homo sapiens
  misc_RNA (1)...(19): siRNA sense strand
cugcagagccgaaggcaac

SEQ ID NO: 2642592 - RNA, 19 nt, Homo sapiens
  misc_RNA (1)...(19): siRNA sense strand
aggagacagaccaggguau

SEQ ID NO: 2642593 - RNA, 19 nt, Homo sapiens
  misc_RNA (1)...(19): siRNA sense strand
ugggagaguaccacggcua

SEQ ID NO: 2642594 - RNA, 19 nt, Homo sapiens
  misc_RNA (1)...(19): siRNA sense strand
aaucagaucaagaggauac

SEQ ID NO: 2642595 - RNA, 19 nt, Homo sapiens
  misc_RNA (1)...(19): siRNA sense strand
uguacaagaaugagaucca

SEQ ID NO: 2642596 - RNA, 19 nt, Homo sapiens
  misc_RNA (1)...(19): siRNA sense strand
ccaacaacauugacagcgu

SEQ ID NO: 2642597 - RNA, 19 nt, Homo sapiens
  misc_RNA (1)...(19): siRNA sense strand
ccacaguaccugaaccuca

SEQ ID NO: 2642598 - RNA, 19 nt, Homo sapiens
  misc_RNA (1)...(19): siRNA sense strand
agaacacacaggagacaga

SEQ ID NO: 2642599 - RNA, 19 nt, Homo sapiens
  misc_RNA (1)...(19): siRNA sense strand
aggacagagucguuauuga

SEQ ID NO: 2642600 - RNA, 19 nt, Homo sapiens
  misc_RNA (1)...(19): siRNA sense strand
cggcugaggaacuugaaca

SEQ ID NO: 2642601 - RNA, 19 nt, Homo sapiens
  misc_RNA (1)...(19): siRNA sense strand
cgucagucgaaauggagau

SEQ ID NO: 2642602 - RNA, 19 nt, Homo sapiens
  misc_RNA (1)...(19): siRNA sense strand
cuggaaaugcagaagacca

SEQ ID NO: 2642603 - RNA, 19 nt, Homo sapiens
  misc_RNA (1)...(19): siRNA sense strand
cagcauucccagcgacaca

SEQ ID NO: 2642604 - RNA, 19 nt, Homo sapiens
  misc_RNA (1)...(19): siRNA sense strand
agaaaucuuugaacggaca

SEQ ID NO: 2642605 - RNA, 19 nt, Homo sapiens
  misc_RNA (1)...(19): siRNA sense strand
aggacaagccgaccaagaa

SEQ ID NO: 2642606 - RNA, 19 nt, Homo sapiens
  misc_RNA (1)...(19): siRNA sense strand
gaccagggccaguacgaau

SEQ ID NO: 2642607 - RNA, 19 nt, Homo sapiens
  misc_RNA (1)...(19): siRNA sense strand
gauagaaacuuuggaccca

SEQ ID NO: 2642608 - RNA, 19 nt, Homo sapiens
  misc_RNA (1)...(19): siRNA sense strand
gcgaaacaauaaugagcug

SEQ ID NO: 2642609 - RNA, 19 nt, Homo sapiens
  misc_RNA (1)...(19): siRNA sense strand
cggaguucccucacggcua

SEQ ID NO: 2642610 - RNA, 19 nt, Homo sapiens
  misc_RNA (1)...(19): siRNA sense strand
ggcaagcauuuaagggacu

SEQ ID NO: 2642611 - RNA, 19 nt, Homo sapiens
  misc_RNA (1)...(19): siRNA sense strand
aguucaagcgccugcgaga

SEQ ID NO: 2642612 - RNA, 19 nt, Homo sapiens
  misc_RNA (1)...(19): siRNA sense strand
agaccucagaacacagaua

SEQ ID NO: 2642613 - RNA, 19 nt, Homo sapiens
  misc_RNA (1)...(19): siRNA sense strand
gagucguuauugagggcca

SEQ ID NO: 2642614 - RNA, 19 nt, Homo sapiens
  misc_RNA (1)...(19): siRNA sense strand
cugaaauccguguacgaga

SEQ ID NO: 2642615 - RNA, 19 nt, Homo sapiens
  misc_RNA (1)...(19): siRNA sense strand
ccaggaagaucgugggugc

SEQ ID NO: 2642616 - RNA, 19 nt, Homo sapiens
  misc_RNA (1)...(19): siRNA sense strand
uuguauggcucgacacuca

SEQ ID NO: 2642617 - RNA, 19 nt, Homo sapiens
  misc_RNA (1)...(19): siRNA sense strand
ggagacauguggaaacaaa

SEQ ID NO: 2642618 - RNA, 19 nt, Homo sapiens
  misc_RNA (1)...(19): siRNA sense strand
cgucauuacucuacggaga

SEQ ID NO: 2642619 - RNA, 19 nt, Homo sapiens
  misc_RNA (1)...(19): siRNA sense strand
gagcagaggacuaccacaa

SEQ ID NO: 2642620 - RNA, 19 nt, Homo sapiens
  misc_RNA (1)...(19): siRNA sense strand
ggaaagaggaagaccgcca

SEQ ID NO: 2642621 - RNA, 19 nt, Homo sapiens
  misc_RNA (1)...(19): siRNA sense strand
cccaagaggcggagguuga

SEQ ID NO: 2642622 - RNA, 19 nt, Homo sapiens
  misc_RNA (1)...(19): siRNA sense strand
aaucaaccaucaugacaaa

SEQ ID NO: 2642623 - RNA, 19 nt, Homo sapiens
  misc_RNA (1)...(19): siRNA sense strand
cguaagaggaaggugacaa

SEQ ID NO: 2642624 - RNA, 19 nt, Homo sapiens
  misc_RNA (1)...(19): siRNA sense strand
caucauuacccgaacccaa

SEQ ID NO: 2642625 - RNA, 19 nt, Homo sapiens
  misc_RNA (1)...(19): siRNA sense strand
aaaucaauggaaagaggaa

SEQ ID NO: 2642626 - RNA, 19 nt, Homo sapiens
  misc_RNA (1)...(19): siRNA sense strand
caggaagggcugaggucca

SEQ ID NO: 2642627 - RNA, 19 nt, Homo sapiens
  misc_RNA (1)...(19): siRNA sense strand
cuaaaauccguaagaggaa

SEQ ID NO: 2642628 - RNA, 19 nt, Homo sapiens
  misc_RNA (1)...(19): siRNA sense strand
gcucuuugcaacuggguca

SEQ ID NO: 2642629 - RNA, 19 nt, Homo sapiens
  misc_RNA (1)...(19): siRNA sense strand
ccaucaucaucgugggacu

SEQ ID NO: 2642630 - RNA, 19 nt, Homo sapiens
  misc_RNA (1)...(19): siRNA sense strand
caugcgaguaccugaggaa

SEQ ID NO: 2642631 - RNA, 19 nt, Homo sapiens
  misc_RNA (1)...(19): siRNA sense strand
aucaauggaaagaggaaga

SEQ ID NO: 2642632 - RNA, 19 nt, Homo sapiens
  misc_RNA (1)...(19): siRNA sense strand
gcagcagcauguaaaguca

SEQ ID NO: 2642633 - RNA, 19 nt, Homo sapiens
  misc_RNA (1)...(19): siRNA sense strand
gcuaaaauccguaagagga

SEQ ID NO: 2642634 - RNA, 19 nt, Homo sapiens
  misc_RNA (1)...(19): siRNA sense strand
aaaucaaccaucaugacaa

SEQ ID NO: 2642635 - RNA, 19 nt, Homo sapiens
  misc_RNA (1)...(19): siRNA sense strand
cagcauguaaagucaguga

SEQ ID NO: 2642636 - RNA, 19 nt, Homo sapiens
  misc_RNA (1)...(19): siRNA sense strand
ucgaaauggacaugaugga

SEQ ID NO: 2642637 - RNA, 19 nt, Homo sapiens
  misc_RNA (1)...(19): siRNA sense strand
caucaucacccgaacccaa

SEQ ID NO: 2642638 - RNA, 19 nt, Homo sapiens
  misc_RNA (1)...(19): siRNA sense strand
caucaucacccgaacccaa

SEQ ID NO: 2642639 - RNA, 19 nt, Homo sapiens
  misc_RNA (1)...(19): siRNA sense strand
ccuaugaccacgugcgcaa

SEQ ID NO: 2642640 - RNA, 19 nt, Homo sapiens
  misc_RNA (1)...(19): siRNA sense strand
gggagguggagauggugaa

SEQ ID NO: 2642641 - RNA, 19 nt, Homo sapiens
  misc_RNA (1)...(19): siRNA sense strand
ccuucgaacaucagaccua

SEQ ID NO: 2642642 - RNA, 19 nt, Homo sapiens
  misc_RNA (1)...(19): siRNA sense strand
cuguacaaguugcugaaaa

SEQ ID NO: 2642643 - RNA, 19 nt, Homo sapiens
  misc_RNA (1)...(19): siRNA sense strand
ccaacgugcuccaccgaga

SEQ ID NO: 2642644 - RNA, 19 nt, Homo sapiens
  misc_RNA (1)...(19): siRNA sense strand
cccuggaagccaugagaga

SEQ ID NO: 2642645 - RNA, 19 nt, Homo sapiens
  misc_RNA (1)...(19): siRNA sense strand
ccauggagcuggaugaccu

SEQ ID NO: 2642646 - RNA, 19 nt, Homo sapiens
  misc_RNA (1)...(19): siRNA sense strand
gggccaagcuuuuccccaa

SEQ ID NO: 2642647 - RNA, 19 nt, Homo sapiens
  misc_RNA (1)...(19): siRNA sense strand
cggaaagagccaucggaaa

SEQ ID NO: 2642648 - RNA, 19 nt, Homo sapiens
  misc_RNA (1)...(19): siRNA sense strand
aagccaaggaggaggauaa

SEQ ID NO: 2642649 - RNA, 19 nt, Homo sapiens
  misc_RNA (1)...(19): siRNA sense strand
cauucaagguaaagcggaa

SEQ ID NO: 2642650 - RNA, 19 nt, Homo sapiens
  misc_RNA (1)...(19): siRNA sense strand
cugaagaugaagaggaaga

SEQ ID NO: 2642651 - RNA, 19 nt, Homo sapiens
  misc_RNA (1)...(19): siRNA sense strand
gcaaggaggagaaggccaa

SEQ ID NO: 2642652 - RNA, 19 nt, Homo sapiens
  misc_RNA (1)...(19): siRNA sense strand
cggagaaggaugaggagga

SEQ ID NO: 2642653 - RNA, 19 nt, Homo sapiens
  misc_RNA (1)...(19): siRNA sense strand
gggagagcaaggaggagaa

SEQ ID NO: 2642654 - RNA, 19 nt, Homo sapiens
  misc_RNA (1)...(19): siRNA sense strand
gaggcaagacccagggcaa

SEQ ID NO: 2642655 - RNA, 19 nt, Homo sapiens
  misc_RNA (1)...(19): siRNA sense strand
acgaggaagaugaggaaga

SEQ ID NO: 2642656 - RNA, 19 nt, Homo sapiens
  misc_RNA (1)...(19): siRNA sense strand
aggauaaagagaagacgaa

SEQ ID NO: 2642657 - RNA, 19 nt, Homo sapiens
  misc_RNA (1)...(19): siRNA sense strand
gggaggaagaggaggagga

SEQ ID NO: 2642658 - RNA, 19 nt, Homo sapiens
  misc_RNA (1)...(19): siRNA sense strand
ggccagagauacagggagu

SEQ ID NO: 2642659 - RNA, 19 nt, Homo sapiens
  misc_RNA (1)...(19): siRNA sense strand
ccaucgagucccagaagaa

SEQ ID NO: 2642660 - RNA, 19 nt, Homo sapiens
  misc_RNA (1)...(19): siRNA sense strand
aggacaacaacgaaugaaa

SEQ ID NO: 2642661 - RNA, 19 nt, Homo sapiens
  misc_RNA (1)...(19): siRNA sense strand
uggaagagguagagauccu

SEQ ID NO: 2642662 - RNA, 19 nt, Homo sapiens
  misc_RNA (1)...(19): siRNA sense strand
ccgaggaagaggaggcuga

SEQ ID NO: 2642663 - RNA, 19 nt, Homo sapiens
  misc_RNA (1)...(19): siRNA sense strand
aggaggaugacgaggaaga

SEQ ID NO: 2642664 - RNA, 19 nt, Homo sapiens
  misc_RNA (1)...(19): siRNA sense strand
aggagaaggccaagccauu

SEQ ID NO: 2642665 - RNA, 19 nt, Homo sapiens
  misc_RNA (1)...(19): siRNA sense strand
ccacagagacaucggacga

SEQ ID NO: 2642666 - RNA, 19 nt, Homo sapiens
  misc_RNA (1)...(19): siRNA sense strand
augcagacccagauguuaa

SEQ ID NO: 2642667 - RNA, 19 nt, Homo sapiens
  misc_RNA (1)...(19): siRNA sense strand
gguaaagcggaaagagcca

SEQ ID NO: 2642668 - RNA, 19 nt, Homo sapiens
  misc_RNA (1)...(19): siRNA sense strand
gcgccaaggaaacggucaa

SEQ ID NO: 2642669 - RNA, 19 nt, Homo sapiens
  misc_RNA (1)...(19): siRNA sense strand
cagagcuggcagagggcaa

SEQ ID NO: 2642670 - RNA, 19 nt, Homo sapiens
  misc_RNA (1)...(19): siRNA sense strand
aggaggaggauaaagagaa

SEQ ID NO: 2642671 - RNA, 19 nt, Homo sapiens
  misc_RNA (1)...(19): siRNA sense strand
cggccaagcagcaagccaa

SEQ ID NO: 2642672 - RNA, 19 nt, Homo sapiens
  misc_RNA (1)...(19): siRNA sense strand
gcuacgugcaggagggcau

SEQ ID NO: 2642673 - RNA, 19 nt, Homo sapiens
  misc_RNA (1)...(19): siRNA sense strand
cggugagguggaagaggua

SEQ ID NO: 2642674 - RNA, 19 nt, Homo sapiens
  misc_RNA (1)...(19): siRNA sense strand
ugacgaggaagaugaggaa

SEQ ID NO: 2642675 - RNA, 19 nt, Homo sapiens
  misc_RNA (1)...(19): siRNA sense strand
gcggaaagagccaucggaa

SEQ ID NO: 2642676 - RNA, 19 nt, Homo sapiens
  misc_RNA (1)...(19): siRNA sense strand
aggaagaugaagaucgaga

SEQ ID NO: 2642677 - RNA, 19 nt, Homo sapiens
  misc_RNA (1)...(19): siRNA sense strand
aggcaaauggacagaacca

SEQ ID NO: 2642678 - RNA, 19 nt, Homo sapiens
  misc_RNA (1)...(19): siRNA sense strand
aagagaagacgaagcugaa

SEQ ID NO: 2642679 - RNA, 19 nt, Homo sapiens
  misc_RNA (1)...(19): siRNA sense strand
ggacgaagagcgaggcaag

SEQ ID NO: 2642680 - RNA, 19 nt, Homo sapiens
  misc_RNA (1)...(19): siRNA sense strand
gugagguggaagagguaga

SEQ ID NO: 2642681 - RNA, 19 nt, Homo sapiens
  misc_RNA (1)...(19): siRNA sense strand
gaggauaaagagaagacga

SEQ ID NO: 2642682 - RNA, 19 nt, Homo sapiens
  misc_RNA (1)...(19): siRNA sense strand
aggaagaggaggaggaguc

SEQ ID NO: 2642683 - RNA, 19 nt, Homo sapiens
  misc_RNA (1)...(19): siRNA sense strand
cugcugaggaagaugaaga

SEQ ID NO: 2642684 - RNA, 19 nt, Homo sapiens
  misc_RNA (1)...(19): siRNA sense strand
aaagagaagacgaagcuga

SEQ ID NO: 2642685 - RNA, 19 nt, Homo sapiens
  misc_RNA (1)...(19): siRNA sense strand
agcaagaaggagaaggaca

SEQ ID NO: 2642686 - RNA, 19 nt, Homo sapiens
  misc_RNA (1)...(19): siRNA sense strand
cucagaagguguaccgcua

SEQ ID NO: 2642687 - RNA, 19 nt, Homo sapiens
  misc_RNA (1)...(19): siRNA sense strand
ucaaaggacaacaacgaau

SEQ ID NO: 2642688 - RNA, 19 nt, Homo sapiens
  misc_RNA (1)...(19): siRNA sense strand
accgcaagaugguggagaa

SEQ ID NO: 2642689 - RNA, 19 nt, Homo sapiens
  misc_RNA (1)...(19): siRNA sense strand
ccaucagcaagaaggagaa

SEQ ID NO: 2642690 - RNA, 19 nt, Homo sapiens
  misc_RNA (1)...(19): siRNA sense strand
gcgaggacgaggaaagcga

SEQ ID NO: 2642691 - RNA, 19 nt, Homo sapiens
  misc_RNA (1)...(19): siRNA sense strand
aggaugacgaggaagauga

SEQ ID NO: 2642692 - RNA, 19 nt, Homo sapiens
  misc_RNA (1)...(19): siRNA sense strand
ucaucgaauacguggguca

SEQ ID NO: 2642693 - RNA, 19 nt, Homo sapiens
  misc_RNA (1)...(19): siRNA sense strand
aguauauaccagucgaaga

SEQ ID NO: 2642694 - RNA, 19 nt, Homo sapiens
  misc_RNA (1)...(19): siRNA sense strand
gguggaagagguagagauc

SEQ ID NO: 2642695 - RNA, 19 nt, Homo sapiens
  misc_RNA (1)...(19): siRNA sense strand
cccaagaaacgccggaaaa

SEQ ID NO: 2642696 - RNA, 19 nt, Homo sapiens
  misc_RNA (1)...(19): siRNA sense strand
cugaaggauaugugccgua

SEQ ID NO: 2642697 - RNA, 19 nt, Homo sapiens
  misc_RNA (1)...(19): siRNA sense strand
aagagaaggaggcuggaga

SEQ ID NO: 2642698 - RNA, 19 nt, Homo sapiens
  misc_RNA (1)...(19): siRNA sense strand
cuguaugacauuuggaacu

SEQ ID NO: 2642699 - RNA, 19 nt, Homo sapiens
  misc_RNA (1)...(19): siRNA sense strand
gagagaagaaguucggacu

SEQ ID NO: 2642700 - RNA, 19 nt, Homo sapiens
  misc_RNA (1)...(19): siRNA sense strand
aggccaagccauuccagaa

SEQ ID NO: 2642701 - RNA, 19 nt, Homo sapiens
  misc_RNA (1)...(19): siRNA sense strand
cggaaaggguugcaggcuc

SEQ ID NO: 2642702 - RNA, 19 nt, Homo sapiens
  misc_RNA (1)...(19): siRNA sense strand
guaaguacggugaggugga

SEQ ID NO: 2642703 - RNA, 19 nt, Homo sapiens
  misc_RNA (1)...(19): siRNA sense strand
cugaggaagaugaagacga

SEQ ID NO: 2642704 - RNA, 19 nt, Homo sapiens
  misc_RNA (1)...(19): siRNA sense strand
cgagccacgcagugaguuu

SEQ ID NO: 2642705 - RNA, 19 nt, Homo sapiens
  misc_RNA (1)...(19): siRNA sense strand
caucagacuccgagagcag

SEQ ID NO: 2642706 - RNA, 19 nt, Homo sapiens
  misc_RNA (1)...(19): siRNA sense strand
cagcuaauuuugaggaugu

SEQ ID NO: 2642707 - RNA, 19 nt, Homo sapiens
  misc_RNA (1)...(19): siRNA sense strand
aggaugaggaggaugacga

SEQ ID NO: 2642708 - RNA, 19 nt, Homo sapiens
  misc_RNA (1)...(19): siRNA sense strand
gguggaagcugaucggcca

SEQ ID NO: 2642709 - RNA, 19 nt, Homo sapiens
  misc_RNA (1)...(19): siRNA sense strand
cgagagaccuugucgcugu

SEQ ID NO: 2642710 - RNA, 19 nt, Homo sapiens
  misc_RNA (1)...(19): siRNA sense strand
gcgacuggcgagagaccuu

SEQ ID NO: 2642711 - RNA, 19 nt, Homo sapiens
  misc_RNA (1)...(19): siRNA sense strand
acacuggagaggagcccua

SEQ ID NO: 2642712 - RNA, 19 nt, Homo sapiens
  misc_RNA (1)...(19): siRNA sense strand
cuguagaaauaaugaggaa

SEQ ID NO: 2642713 - RNA, 19 nt, Homo sapiens
  misc_RNA (1)...(19): siRNA sense strand
ugauagacacagagaggaa

SEQ ID NO: 2642714 - RNA, 19 nt, Homo sapiens
  misc_RNA (1)...(19): siRNA sense strand
gcuacaacgaggagaaaga

SEQ ID NO: 2642715 - RNA, 19 nt, Homo sapiens
  misc_RNA (1)...(19): siRNA sense strand
gggcccaguuagaggacua

SEQ ID NO: 2642716 - RNA, 19 nt, Homo sapiens
  misc_RNA (1)...(19): siRNA sense strand
acgcauggaaugagagauu

SEQ ID NO: 2642717 - RNA, 19 nt, Homo sapiens
  misc_RNA (1)...(19): siRNA sense strand
gcugaaaccaguaggugaa

SEQ ID NO: 2642718 - RNA, 19 nt, Homo sapiens
  misc_RNA (1)...(19): siRNA sense strand
aauuguaucuggugagcaa

SEQ ID NO: 2642719 - RNA, 19 nt, Homo sapiens
  misc_RNA (1)...(19): siRNA sense strand
aggagaaagaugaggacca

SEQ ID NO: 2642720 - RNA, 19 nt, Homo sapiens
  misc_RNA (1)...(19): siRNA sense strand
ggacaagacacgcauggaa

SEQ ID NO: 2642721 - RNA, 19 nt, Homo sapiens
  misc_RNA (1)...(19): siRNA sense strand
uaauaaagauggaggcuuc

SEQ ID NO: 2642722 - RNA, 19 nt, Homo sapiens
  misc_RNA (1)...(19): siRNA sense strand
cugaacaaacugaaaggaa

SEQ ID NO: 2642723 - RNA, 19 nt, Homo sapiens
  misc_RNA (1)...(19): siRNA sense strand
guagaaauaaugaggaagu

SEQ ID NO: 2642724 - RNA, 19 nt, Homo sapiens
  misc_RNA (1)...(19): siRNA sense strand
ggaaacgaagagagugauu

SEQ ID NO: 2642725 - RNA, 19 nt, Homo sapiens
  misc_RNA (1)...(19): siRNA sense strand
gcacgaugaguuuggagaa

SEQ ID NO: 2642726 - RNA, 19 nt, Homo sapiens
  misc_RNA (1)...(19): siRNA sense strand
gauugaaggcccagggagu

SEQ ID NO: 2642727 - RNA, 19 nt, Homo sapiens
  misc_RNA (1)...(19): siRNA sense strand
acacagucguuaacaggaa

SEQ ID NO: 2642728 - RNA, 19 nt, Homo sapiens
  misc_RNA (1)...(19): siRNA sense strand
uuggaaacgaagagaguga

SEQ ID NO: 2642729 - RNA, 19 nt, Homo sapiens
  misc_RNA (1)...(19): siRNA sense strand
uggaagggauagauacaau

SEQ ID NO: 2642730 - RNA, 19 nt, Homo sapiens
  misc_RNA (1)...(19): siRNA sense strand
aggauagcucagaagauaa

SEQ ID NO: 2642731 - RNA, 19 nt, Homo sapiens
  misc_RNA (1)...(19): siRNA sense strand
gcauggaaugagagauuga

SEQ ID NO: 2642732 - RNA, 19 nt, Homo sapiens
  misc_RNA (1)...(19): siRNA sense strand
uuaaaucacccaaggacaa

SEQ ID NO: 2642733 - RNA, 19 nt, Homo sapiens
  misc_RNA (1)...(19): siRNA sense strand
caaauaaagcacagaacgu

SEQ ID NO: 2642734 - RNA, 19 nt, Homo sapiens
  misc_RNA (1)...(19): siRNA sense strand
gauggaugccagugccaaa

SEQ ID NO: 2642735 - RNA, 19 nt, Homo sapiens
  misc_RNA (1)...(19): siRNA sense strand
gcuucuggauugugauuga

SEQ ID NO: 2642736 - RNA, 19 nt, Homo sapiens
  misc_RNA (1)...(19): siRNA sense strand
aggaaucgauauaggggaa

SEQ ID NO: 2642737 - RNA, 19 nt, Homo sapiens
  misc_RNA (1)...(19): siRNA sense strand
ugccaaauuuaaagagcuu

SEQ ID NO: 2642738 - RNA, 19 nt, Homo sapiens
  misc_RNA (1)...(19): siRNA sense strand
aagaaaugucagugggugu

SEQ ID NO: 2642739 - RNA, 19 nt, Homo sapiens
  misc_RNA (1)...(19): siRNA sense strand
ugaacaaacugaaaggaac

SEQ ID NO: 2642740 - RNA, 19 nt, Homo sapiens
  misc_RNA (1)...(19): siRNA sense strand
ggaggauagcucagaagau

SEQ ID NO: 2642741 - RNA, 19 nt, Homo sapiens
  misc_RNA (1)...(19): siRNA sense strand
ggauggggaaagaaggaaa

SEQ ID NO: 2642742 - RNA, 19 nt, Homo sapiens
  misc_RNA (1)...(19): siRNA sense strand
ucaucgaacguuugagauu

SEQ ID NO: 2642743 - RNA, 19 nt, Homo sapiens
  misc_RNA (1)...(19): siRNA sense strand
ccaaauuuaaagagcuuga

SEQ ID NO: 2642744 - RNA, 19 nt, Homo sapiens
  misc_RNA (1)...(19): siRNA sense strand
cucuauaaucucugaguuu

SEQ ID NO: 2642745 - RNA, 19 nt, Homo sapiens
  misc_RNA (1)...(19): siRNA sense strand
gggucacagcagugccaua

SEQ ID NO: 2642746 - RNA, 19 nt, Homo sapiens
  misc_RNA (1)...(19): siRNA sense strand
acagcuacaacgaggagaa

SEQ ID NO: 2642747 - RNA, 19 nt, Homo sapiens
  misc_RNA (1)...(19): siRNA sense strand
agauuuaggucauguggca

SEQ ID NO: 2642748 - RNA, 19 nt, Homo sapiens
  misc_RNA (1)...(19): siRNA sense strand
ccuggaagggauagauaca

SEQ ID NO: 2642749 - RNA, 19 nt, Homo sapiens
  misc_RNA (1)...(19): siRNA sense strand
aagauuggaacgaggguca

SEQ ID NO: 2642750 - RNA, 19 nt, Homo sapiens
  misc_RNA (1)...(19): siRNA sense strand
ggacagcagggcacaggaa

SEQ ID NO: 2642751 - RNA, 19 nt, Homo sapiens
  misc_RNA (1)...(19): siRNA sense strand
gggagaggacggguggaua

SEQ ID NO: 2642752 - RNA, 19 nt, Homo sapiens
  misc_RNA (1)...(19): siRNA sense strand
gggcacaggaaacugacaa

SEQ ID NO: 2642753 - RNA, 19 nt, Homo sapiens
  misc_RNA (1)...(19): siRNA sense strand
aaauaaugaggaagugaca

SEQ ID NO: 2642754 - RNA, 19 nt, Homo sapiens
  misc_RNA (1)...(19): siRNA sense strand
agacaauaacauucaggau

SEQ ID NO: 2642755 - RNA, 19 nt, Homo sapiens
  misc_RNA (1)...(19): siRNA sense strand
gagaccugcuguugguaau

SEQ ID NO: 2642756 - RNA, 19 nt, Homo sapiens
  misc_RNA (1)...(19): siRNA sense strand
uaugaaugcuucugcucaa

SEQ ID NO: 2642757 - RNA, 19 nt, Homo sapiens
  misc_RNA (1)...(19): siRNA sense strand
gaaaccaguaggugaacuu

SEQ ID NO: 2642758 - RNA, 19 nt, Homo sapiens
  misc_RNA (1)...(19): siRNA sense strand
aagcugauuuggagaacca

SEQ ID NO: 2642759 - RNA, 19 nt, Homo sapiens
  misc_RNA (1)...(19): siRNA sense strand
gggcagucaccaacgaaga

SEQ ID NO: 2642760 - RNA, 19 nt, Homo sapiens
  misc_RNA (1)...(19): siRNA sense strand
aguaauagcccgugcuuuc

SEQ ID NO: 2642761 - RNA, 19 nt, Homo sapiens
  misc_RNA (1)...(19): siRNA sense strand
accaaaagggcgagggaca

SEQ ID NO: 2642762 - RNA, 19 nt, Homo sapiens
  misc_RNA (1)...(19): siRNA sense strand
agaagaugggcuuuguuua

SEQ ID NO: 2642763 - RNA, 19 nt, Homo sapiens
  misc_RNA (1)...(19): siRNA sense strand
cacuugauauugagcaaau

SEQ ID NO: 2642764 - RNA, 19 nt, Homo sapiens
  misc_RNA (1)...(19): siRNA sense strand
gauacaagugguugaagca

SEQ ID NO: 2642765 - RNA, 19 nt, Homo sapiens
  misc_RNA (1)...(19): siRNA sense strand
uguggauggcaaagacuua

SEQ ID NO: 2642766 - RNA, 19 nt, Homo sapiens
  misc_RNA (1)...(19): siRNA sense strand
caggagagcugaaggggca

SEQ ID NO: 2642767 - RNA, 19 nt, Homo sapiens
  misc_RNA (1)...(19): siRNA sense strand
gacaagacacgcauggaau

SEQ ID NO: 2642768 - RNA, 19 nt, Homo sapiens
  misc_RNA (1)...(19): siRNA sense strand
acaacgaggagaaagauga

SEQ ID NO: 2642769 - RNA, 19 nt, Homo sapiens
  misc_RNA (1)...(19): siRNA sense strand
agaucuuagcugugcauuu

SEQ ID NO: 2642770 - RNA, 19 nt, Homo sapiens
  misc_RNA (1)...(19): siRNA sense strand
cgaagaugcccgacccaga

SEQ ID NO: 2642771 - RNA, 19 nt, Homo sapiens
  misc_RNA (1)...(19): siRNA sense strand
ggcaagagcuucagcguca

SEQ ID NO: 2642772 - RNA, 19 nt, Homo sapiens
  misc_RNA (1)...(19): siRNA sense strand
ccacagaucaggaagguga

SEQ ID NO: 2642773 - RNA, 19 nt, Homo sapiens
  misc_RNA (1)...(19): siRNA sense strand
ggcaagagcuucagccaga

SEQ ID NO: 2642774 - RNA, 19 nt, Homo sapiens
  misc_RNA (1)...(19): siRNA sense strand
gcuucaacgacgagggcau

SEQ ID NO: 2642775 - RNA, 19 nt, Homo sapiens
  misc_RNA (1)...(19): siRNA sense strand
ggcaagagcuucacgcaga

SEQ ID NO: 2642776 - RNA, 19 nt, Homo sapiens
  misc_RNA (1)...(19): siRNA sense strand
aggagaucaucaugggaga

SEQ ID NO: 2642777 - RNA, 19 nt, Homo sapiens
  misc_RNA (1)...(19): siRNA sense strand
gcuccaaccuggugcagca

SEQ ID NO: 2642778 - RNA, 19 nt, Homo sapiens
  misc_RNA (1)...(19): siRNA sense strand
uagaauuggccuaggggaa

SEQ ID NO: 2642779 - RNA, 19 nt, Homo sapiens
  misc_RNA (1)...(19): siRNA sense strand
ggcaagagcuucagccagu

SEQ ID NO: 2642780 - RNA, 19 nt, Homo sapiens
  misc_RNA (1)...(19): siRNA sense strand
ccccaaaacccuaguggaa

SEQ ID NO: 2642781 - RNA, 19 nt, Homo sapiens
  misc_RNA (1)...(19): siRNA sense strand
gagaaagccuucacccaga

SEQ ID NO: 2642782 - RNA, 19 nt, Homo sapiens
  misc_RNA (1)...(19): siRNA sense strand
ccagaagaguccagagcug

SEQ ID NO: 2642783 - RNA, 19 nt, Homo sapiens
  misc_RNA (1)...(19): siRNA sense strand
agaggugccgagagugaaa

SEQ ID NO: 2642784 - RNA, 19 nt, Homo sapiens
  misc_RNA (1)...(19): siRNA sense strand
ugauuauagaauuggccua

SEQ ID NO: 2642785 - RNA, 19 nt, Homo sapiens
  misc_RNA (1)...(19): siRNA sense strand
ggagagagcuuccuggauc

SEQ ID NO: 2642786 - RNA, 19 nt, Homo sapiens
  misc_RNA (1)...(19): siRNA sense strand
gcgagaaagccuucaccca

SEQ ID NO: 2642787 - RNA, 19 nt, Homo sapiens
  misc_RNA (1)...(19): siRNA sense strand
gagcagcagccauggggaa

SEQ ID NO: 2642788 - RNA, 19 nt, Homo sapiens
  misc_RNA (1)...(19): siRNA sense strand
augcaaagaauguggcaaa

SEQ ID NO: 2642789 - RNA, 19 nt, Homo sapiens
  misc_RNA (1)...(19): siRNA sense strand
auguaaagaauguggcaaa

SEQ ID NO: 2642790 - RNA, 19 nt, Homo sapiens
  misc_RNA (1)...(19): siRNA sense strand
auguaaagaauguggcaaa

SEQ ID NO: 2642791 - RNA, 19 nt, Homo sapiens
  misc_RNA (1)...(19): siRNA sense strand
auguaaagaauguggcaaa

SEQ ID NO: 2642792 - RNA, 19 nt, Homo sapiens
  misc_RNA (1)...(19): siRNA sense strand
aauucauaccggagagaaa

SEQ ID NO: 2642793 - RNA, 19 nt, Homo sapiens
  misc_RNA (1)...(19): siRNA sense strand
uguuagagaacuacggaaa

SEQ ID NO: 2642794 - RNA, 19 nt, Homo sapiens
  misc_RNA (1)...(19): siRNA sense strand
auguaaagcauguagcaaa

SEQ ID NO: 2642795 - RNA, 19 nt, Homo sapiens
  misc_RNA (1)...(19): siRNA sense strand
cccuauaaauguaaggaau

SEQ ID NO: 2642796 - RNA, 19 nt, Homo sapiens
  misc_RNA (1)...(19): siRNA sense strand
ugugaagagugcagagaca

SEQ ID NO: 2642797 - RNA, 19 nt, Homo sapiens
  misc_RNA (1)...(19): siRNA sense strand
uuaaggaaagagugggaaa

SEQ ID NO: 2642798 - RNA, 19 nt, Homo sapiens
  misc_RNA (1)...(19): siRNA sense strand
aagugauauuggauggaua

SEQ ID NO: 2642799 - RNA, 19 nt, Homo sapiens
  misc_RNA (1)...(19): siRNA sense strand
cccuauaaaugcaaagaau

SEQ ID NO: 2642800 - RNA, 19 nt, Homo sapiens
  misc_RNA (1)...(19): siRNA sense strand
auguaaagcguguagcaaa

SEQ ID NO: 2642801 - RNA, 19 nt, Homo sapiens
  misc_RNA (1)...(19): siRNA sense strand
augugauguuagagaacua

SEQ ID NO: 2642802 - RNA, 19 nt, Homo sapiens
  misc_RNA (1)...(19): siRNA sense strand
cuacauaaccauugcaaac

SEQ ID NO: 2642803 - RNA, 19 nt, Homo sapiens
  misc_RNA (1)...(19): siRNA sense strand
aacauuaagccaaggcaua

SEQ ID NO: 2642804 - RNA, 19 nt, Homo sapiens
  misc_RNA (1)...(19): siRNA sense strand
uuacuagacaucagagaau

SEQ ID NO: 2642805 - RNA, 19 nt, Homo sapiens
  misc_RNA (1)...(19): siRNA sense strand
auacucagccucagagaau

SEQ ID NO: 2642806 - RNA, 19 nt, Homo sapiens
  misc_RNA (1)...(19): siRNA sense strand
uguaaagaauguggcaaau

SEQ ID NO: 2642807 - RNA, 19 nt, Homo sapiens
  misc_RNA (1)...(19): siRNA sense strand
gugcagagacaguagccau

SEQ ID NO: 2642808 - RNA, 19 nt, Homo sapiens
  misc_RNA (1)...(19): siRNA sense strand
acauuaagccaaggcauaa

SEQ ID NO: 2642809 - RNA, 19 nt, Homo sapiens
  misc_RNA (1)...(19): siRNA sense strand
ugauacaacauuaagccaa

SEQ ID NO: 2642810 - RNA, 19 nt, Homo sapiens
  misc_RNA (1)...(19): siRNA sense strand
aggaaagagcccuggaaug

SEQ ID NO: 2642811 - RNA, 19 nt, Homo sapiens
  misc_RNA (1)...(19): siRNA sense strand
cagauaacucauacuggaa

SEQ ID NO: 2642812 - RNA, 19 nt, Homo sapiens
  misc_RNA (1)...(19): siRNA sense strand
gccagggacuguugacauu

SEQ ID NO: 2642813 - RNA, 19 nt, Homo sapiens
  misc_RNA (1)...(19): siRNA sense strand
caacauuaagccaaggcau

SEQ ID NO: 2642814 - RNA, 19 nt, Homo sapiens
  misc_RNA (1)...(19): siRNA sense strand
gccaaauguaauaagugua

SEQ ID NO: 2642815 - RNA, 19 nt, Homo sapiens
  misc_RNA (1)...(19): siRNA sense strand
ccccagaagacaucagaaa

SEQ ID NO: 2642816 - RNA, 19 nt, Homo sapiens
  misc_RNA (1)...(19): siRNA sense strand
cuaacuaaacaucagagaa

SEQ ID NO: 2642817 - RNA, 19 nt, Homo sapiens
  misc_RNA (1)...(19): siRNA sense strand
gagcuguggcccucagaau

SEQ ID NO: 2642818 - RNA, 19 nt, Homo sapiens
  misc_RNA (1)...(19): siRNA sense strand
ccuauaaauguaaggaaug

SEQ ID NO: 2642819 - RNA, 19 nt, Homo sapiens
  misc_RNA (1)...(19): siRNA sense strand
auguaaggaaugcagcaaa

SEQ ID NO: 2642820 - RNA, 19 nt, Homo sapiens
  misc_RNA (1)...(19): siRNA sense strand
uggagagaaaccauacaaa

SEQ ID NO: 2642821 - RNA, 19 nt, Homo sapiens
  misc_RNA (1)...(19): siRNA sense strand
ggaugugauguuagagaac

SEQ ID NO: 2642822 - RNA, 19 nt, Homo sapiens
  misc_RNA (1)...(19): siRNA sense strand
acuuaaggaaagaguggga

SEQ ID NO: 2642823 - RNA, 19 nt, Homo sapiens
  misc_RNA (1)...(19): siRNA sense strand
gcguguagcaaauguuuua

SEQ ID NO: 2642824 - RNA, 19 nt, Homo sapiens
  misc_RNA (1)...(19): siRNA sense strand
ccauagaauucucucggga

SEQ ID NO: 2642825 - RNA, 19 nt, Homo sapiens
  misc_RNA (1)...(19): siRNA sense strand
gaaaagucacacagaugua

SEQ ID NO: 2642826 - RNA, 19 nt, Homo sapiens
  misc_RNA (1)...(19): siRNA sense strand
aacccuuacucgacauaaa

SEQ ID NO: 2642827 - RNA, 19 nt, Homo sapiens
  misc_RNA (1)...(19): siRNA sense strand
cccucagaauuuaaacuua

SEQ ID NO: 2642828 - RNA, 19 nt, Homo sapiens
  misc_RNA (1)...(19): siRNA sense strand
gaucugaggaugaaggaca

SEQ ID NO: 2642829 - RNA, 19 nt, Homo sapiens
  misc_RNA (1)...(19): siRNA sense strand
cggagcagcgaguggaaau

SEQ ID NO: 2642830 - RNA, 19 nt, Homo sapiens
  misc_RNA (1)...(19): siRNA sense strand
aguccaaagugcagcaaac

SEQ ID NO: 2642831 - RNA, 19 nt, Homo sapiens
  misc_RNA (1)...(19): siRNA sense strand
gagaaguagcugugagaca

SEQ ID NO: 2642832 - RNA, 19 nt, Homo sapiens
  misc_RNA (1)...(19): siRNA sense strand
aaacaaaggaucagcaaca

SEQ ID NO: 2642833 - RNA, 19 nt, Homo sapiens
  misc_RNA (1)...(19): siRNA sense strand
gagaugaugucuuaaacaa

SEQ ID NO: 2642834 - RNA, 19 nt, Homo sapiens
  misc_RNA (1)...(19): siRNA sense strand
aagagaaagcagaaagaga

SEQ ID NO: 2642835 - RNA, 19 nt, Homo sapiens
  misc_RNA (1)...(19): siRNA sense strand
augcaggauucaaggaaga

SEQ ID NO: 2642836 - RNA, 19 nt, Homo sapiens
  misc_RNA (1)...(19): siRNA sense strand
acaaaggaucagcaacaaa

SEQ ID NO: 2642837 - RNA, 19 nt, Homo sapiens
  misc_RNA (1)...(19): siRNA sense strand
ugucuuaaacaaaggauca

SEQ ID NO: 2642838 - RNA, 19 nt, Homo sapiens
  misc_RNA (1)...(19): siRNA sense strand
aaauuagaccagaugagaa

SEQ ID NO: 2642839 - RNA, 19 nt, Homo sapiens
  misc_RNA (1)...(19): siRNA sense strand
aagagaaguagcugugaga

SEQ ID NO: 2642840 - RNA, 19 nt, Homo sapiens
  misc_RNA (1)...(19): siRNA sense strand
caggauucaaggaagaaau

SEQ ID NO: 2642841 - RNA, 19 nt, Homo sapiens
  misc_RNA (1)...(19): siRNA sense strand
gagaaagcagaaagagaag

SEQ ID NO: 2642842 - RNA, 19 nt, Homo sapiens
  misc_RNA (1)...(19): siRNA sense strand
ggaugcaggauucaaggaa

SEQ ID NO: 2642843 - RNA, 19 nt, Homo sapiens
  misc_RNA (1)...(19): siRNA sense strand
cagaaagagaaguagcugu

SEQ ID NO: 2642844 - RNA, 19 nt, Homo sapiens
  misc_RNA (1)...(19): siRNA sense strand
gagaaguagcugugagaca

SEQ ID NO: 2642845 - RNA, 19 nt, Homo sapiens
  misc_RNA (1)...(19): siRNA sense strand
aaacaaaggaucagcaaca

SEQ ID NO: 2642846 - RNA, 19 nt, Homo sapiens
  misc_RNA (1)...(19): siRNA sense strand
gagaugaugucuuaaacaa

SEQ ID NO: 2642847 - RNA, 19 nt, Homo sapiens
  misc_RNA (1)...(19): siRNA sense strand
aagagaaagcagaaagaga

SEQ ID NO: 2642848 - RNA, 19 nt, Homo sapiens
  misc_RNA (1)...(19): siRNA sense strand
augcaggauucaaggaaga

SEQ ID NO: 2642849 - RNA, 19 nt, Homo sapiens
  misc_RNA (1)...(19): siRNA sense strand
acaaaggaucagcaacaaa

SEQ ID NO: 2642850 - RNA, 19 nt, Homo sapiens
  misc_RNA (1)...(19): siRNA sense strand
ugucuuaaacaaaggauca

SEQ ID NO: 2642851 - RNA, 19 nt, Homo sapiens
  misc_RNA (1)...(19): siRNA sense strand
aaauuagaccagaugagaa

SEQ ID NO: 2642852 - RNA, 19 nt, Homo sapiens
  misc_RNA (1)...(19): siRNA sense strand
aagagaaguagcugugaga

SEQ ID NO: 2642853 - RNA, 19 nt, Homo sapiens
  misc_RNA (1)...(19): siRNA sense strand
caggauucaaggaagaaau

SEQ ID NO: 2642854 - RNA, 19 nt, Homo sapiens
  misc_RNA (1)...(19): siRNA sense strand
gagaaagcagaaagagaag

SEQ ID NO: 2642855 - RNA, 19 nt, Homo sapiens
  misc_RNA (1)...(19): siRNA sense strand
ggaugcaggauucaaggaa

SEQ ID NO: 2642856 - RNA, 19 nt, Homo sapiens
  misc_RNA (1)...(19): siRNA sense strand
cagaaagagaaguagcugu

SEQ ID NO: 2642857 - RNA, 19 nt, Homo sapiens
  misc_RNA (1)...(19): siRNA sense strand
ccacagaagaucauggaaa

SEQ ID NO: 2642858 - RNA, 19 nt, Homo sapiens
  misc_RNA (1)...(19): siRNA sense strand
ggaugaagcuggaggcugu

SEQ ID NO: 2642859 - RNA, 19 nt, Homo sapiens
  misc_RNA (1)...(19): siRNA sense strand
gcauauugcugcugagcca

SEQ ID NO: 2642860 - RNA, 19 nt, Homo sapiens
  misc_RNA (1)...(19): siRNA sense strand
agaaggagguacagcgcau

SEQ ID NO: 2642861 - RNA, 19 nt, Homo sapiens
  misc_RNA (1)...(19): siRNA sense strand
gcaaugugauccuggugaa

SEQ ID NO: 2642862 - RNA, 19 nt, Homo sapiens
  misc_RNA (1)...(19): siRNA sense strand
agaugaagaugguccagaa

SEQ ID NO: 2642863 - RNA, 19 nt, Homo sapiens
  misc_RNA (1)...(19): siRNA sense strand
gugaaggaggagaacacaa

SEQ ID NO: 2642864 - RNA, 19 nt, Homo sapiens
  misc_RNA (1)...(19): siRNA sense strand
ugccugaccuugugaagaa

SEQ ID NO: 2642865 - RNA, 19 nt, Homo sapiens
  misc_RNA (1)...(19): siRNA sense strand
aggcaguccaggugggcau

SEQ ID NO: 2642866 - RNA, 19 nt, Homo sapiens
  misc_RNA (1)...(19): siRNA sense strand
ggaggagaacacaagguuu

SEQ ID NO: 2642867 - RNA, 19 nt, Homo sapiens
  misc_RNA (1)...(19): siRNA sense strand
ggaccuaggcuucugcaau

SEQ ID NO: 2642868 - RNA, 19 nt, Homo sapiens
  misc_RNA (1)...(19): siRNA sense strand
agaaugagcuguaccgcca

SEQ ID NO: 2642869 - RNA, 19 nt, Homo sapiens
  misc_RNA (1)...(19): siRNA sense strand
uugugaagaaggagguaca

SEQ ID NO: 2642870 - RNA, 19 nt, Homo sapiens
  misc_RNA (1)...(19): siRNA sense strand
ccgauacugaguugggcua

SEQ ID NO: 2642871 - RNA, 19 nt, Homo sapiens
  misc_RNA (1)...(19): siRNA sense strand
gcauaacggaccuaggcuu

SEQ ID NO: 2642872 - RNA, 19 nt, Homo sapiens
  misc_RNA (1)...(19): siRNA sense strand
gaggagaacacaagguuuc

SEQ ID NO: 2642873 - RNA, 19 nt, Homo sapiens
  misc_RNA (1)...(19): siRNA sense strand
guucggaggcucugcuauu

SEQ ID NO: 2642874 - RNA, 19 nt, Homo sapiens
  misc_RNA (1)...(19): siRNA sense strand
cuucagagaccuagggguu

SEQ ID NO: 2642875 - RNA, 19 nt, Homo sapiens
  misc_RNA (1)...(19): siRNA sense strand
cgucaggcuuugggaugaa

SEQ ID NO: 2642876 - RNA, 19 nt, Homo sapiens
  misc_RNA (1)...(19): siRNA sense strand
gguuuguggugcaggcagu

SEQ ID NO: 2642877 - RNA, 19 nt, Homo sapiens
  misc_RNA (1)...(19): siRNA sense strand
ccggaugcaccgugugaca

SEQ ID NO: 2642878 - RNA, 19 nt, Homo sapiens
  misc_RNA (1)...(19): siRNA sense strand
acacugagaaggagcagga

SEQ ID NO: 2642879 - RNA, 19 nt, Homo sapiens
  misc_RNA (1)...(19): siRNA sense strand
cacagaagaucauggaaag

SEQ ID NO: 2642880 - RNA, 19 nt, Homo sapiens
  misc_RNA (1)...(19): siRNA sense strand
uggugaaggugguagacaa

SEQ ID NO: 2642881 - RNA, 19 nt, Homo sapiens
  misc_RNA (1)...(19): siRNA sense strand
ccagaaagccuaaacggua

SEQ ID NO: 2642882 - RNA, 19 nt, Homo sapiens
  misc_RNA (1)...(19): siRNA sense strand
agagagaagacgagcgaca

SEQ ID NO: 2642883 - RNA, 19 nt, Homo sapiens
  misc_RNA (1)...(19): siRNA sense strand
gguuauacgggcuggagaa

SEQ ID NO: 2642884 - RNA, 19 nt, Homo sapiens
  misc_RNA (1)...(19): siRNA sense strand
ggacagaacccaucaggga

SEQ ID NO: 2642885 - RNA, 19 nt, Homo sapiens
  misc_RNA (1)...(19): siRNA sense strand
uggagaaggacaugcagaa

SEQ ID NO: 2642886 - RNA, 19 nt, Homo sapiens
  misc_RNA (1)...(19): siRNA sense strand
ggccagagagagaggacuu

SEQ ID NO: 2642887 - RNA, 19 nt, Homo sapiens
  misc_RNA (1)...(19): siRNA sense strand
ugguuuggccagagagaga

SEQ ID NO: 2642888 - RNA, 19 nt, Homo sapiens
  misc_RNA (1)...(19): siRNA sense strand
gauccaaaccuaaagccua

SEQ ID NO: 2642889 - RNA, 19 nt, Homo sapiens
  misc_RNA (1)...(19): siRNA sense strand
gggccacagaugagcacaa

SEQ ID NO: 2642890 - RNA, 19 nt, Homo sapiens
  misc_RNA (1)...(19): siRNA sense strand
aggaugaguaugagcauga

SEQ ID NO: 2642891 - RNA, 19 nt, Homo sapiens
  misc_RNA (1)...(19): siRNA sense strand
caggcaucgaccagggaaa

SEQ ID NO: 2642892 - RNA, 19 nt, Homo sapiens
  misc_RNA (1)...(19): siRNA sense strand
cuucaaacucauagccuuu

SEQ ID NO: 2642893 - RNA, 19 nt, Homo sapiens
  misc_RNA (1)...(19): siRNA sense strand
gcacguguguccagagcca

SEQ ID NO: 2642894 - RNA, 19 nt, Homo sapiens
  misc_RNA (1)...(19): siRNA sense strand
ccugaugauaagauaggaa

SEQ ID NO: 2642895 - RNA, 19 nt, Homo sapiens
  misc_RNA (1)...(19): siRNA sense strand
gugcaaauguggguggaca

SEQ ID NO: 2642896 - RNA, 19 nt, Homo sapiens
  misc_RNA (1)...(19): siRNA sense strand
gacaauuuaaguagagaga

SEQ ID NO: 2642897 - RNA, 19 nt, Homo sapiens
  misc_RNA (1)...(19): siRNA sense strand
auguggaccugguggauga

SEQ ID NO: 2642898 - RNA, 19 nt, Homo sapiens
  misc_RNA (1)...(19): siRNA sense strand
gcaacauaccccuggagaa

SEQ ID NO: 2642899 - RNA, 19 nt, Homo sapiens
  misc_RNA (1)...(19): siRNA sense strand
gugacuggcugguggccuu

SEQ ID NO: 2642900 - RNA, 19 nt, Homo sapiens
  misc_RNA (1)...(19): siRNA sense strand
gggacauguaccagcccaa

SEQ ID NO: 2642901 - RNA, 19 nt, Homo sapiens
  misc_RNA (1)...(19): siRNA sense strand
gcuucaaacucauagccuu

SEQ ID NO: 2642902 - RNA, 19 nt, Homo sapiens
  misc_RNA (1)...(19): siRNA sense strand
aguaugagcaugaggugga

SEQ ID NO: 2642903 - RNA, 19 nt, Homo sapiens
  misc_RNA (1)...(19): siRNA sense strand
accaagacuuccuaggcua

SEQ ID NO: 2642904 - RNA, 19 nt, Homo sapiens
  misc_RNA (1)...(19): siRNA sense strand
ggaccugguggaugacaau

SEQ ID NO: 2642905 - RNA, 19 nt, Homo sapiens
  misc_RNA (1)...(19): siRNA sense strand
aggacaugcagaagacaga

SEQ ID NO: 2642906 - RNA, 19 nt, Homo sapiens
  misc_RNA (1)...(19): siRNA sense strand
agcacaagucccugaagua

SEQ ID NO: 2642907 - RNA, 19 nt, Homo sapiens
  misc_RNA (1)...(19): siRNA sense strand
guagagagaagacgagcga

SEQ ID NO: 2642908 - RNA, 19 nt, Homo sapiens
  misc_RNA (1)...(19): siRNA sense strand
uuuaagaagaagacuguga

SEQ ID NO: 2642909 - RNA, 19 nt, Homo sapiens
  misc_RNA (1)...(19): siRNA sense strand
gagguggacugguggagca

SEQ ID NO: 2642910 - RNA, 19 nt, Homo sapiens
  misc_RNA (1)...(19): siRNA sense strand
ccuucaaacucuaccagga

SEQ ID NO: 2642911 - RNA, 19 nt, Homo sapiens
  misc_RNA (1)...(19): siRNA sense strand
agaugagccuggagauucu

SEQ ID NO: 2642912 - RNA, 19 nt, Homo sapiens
  misc_RNA (1)...(19): siRNA sense strand
gagcuuggcaaccgggaca

SEQ ID NO: 2642913 - RNA, 19 nt, Homo sapiens
  misc_RNA (1)...(19): siRNA sense strand
cgguaugagcugcgaugca

SEQ ID NO: 2642914 - RNA, 19 nt, Homo sapiens
  misc_RNA (1)...(19): siRNA sense strand
ggaaagaaaggcaagcaca

SEQ ID NO: 2642915 - RNA, 19 nt, Homo sapiens
  misc_RNA (1)...(19): siRNA sense strand
gcaugaauuauguggacca

SEQ ID NO: 2642916 - RNA, 19 nt, Homo sapiens
  misc_RNA (1)...(19): siRNA sense strand
uggccguggucauuggaaa

SEQ ID NO: 2642917 - RNA, 19 nt, Homo sapiens
  misc_RNA (1)...(19): siRNA sense strand
ggacaguguagcagaucca

SEQ ID NO: 2642918 - RNA, 19 nt, Homo sapiens
  misc_RNA (1)...(19): siRNA sense strand
agggaaugguggagggguu

SEQ ID NO: 2642919 - RNA, 19 nt, Homo sapiens
  misc_RNA (1)...(19): siRNA sense strand
gggaagucguccagagcag

SEQ ID NO: 2642920 - RNA, 19 nt, Homo sapiens
  misc_RNA (1)...(19): siRNA sense strand
agaugguauucaagacaga

SEQ ID NO: 2642921 - RNA, 19 nt, Homo sapiens
  misc_RNA (1)...(19): siRNA sense strand
ccaaagacgaugacgcagu

SEQ ID NO: 2642922 - RNA, 19 nt, Homo sapiens
  misc_RNA (1)...(19): siRNA sense strand
ccagucacauggccagaua

SEQ ID NO: 2642923 - RNA, 19 nt, Homo sapiens
  misc_RNA (1)...(19): siRNA sense strand
agaacgugcccgugcccaa

SEQ ID NO: 2642924 - RNA, 19 nt, Homo sapiens
  misc_RNA (1)...(19): siRNA sense strand
gggcaugaauuauguggac

SEQ ID NO: 2642925 - RNA, 19 nt, Homo sapiens
  misc_RNA (1)...(19): siRNA sense strand
cgaagaaggccaaggagga

SEQ ID NO: 2642926 - RNA, 19 nt, Homo sapiens
  misc_RNA (1)...(19): siRNA sense strand
ccauaaagguggcuccaga

SEQ ID NO: 2642927 - RNA, 19 nt, Homo sapiens
  misc_RNA (1)...(19): siRNA sense strand
gcacagaacagcagggccu

SEQ ID NO: 2642928 - RNA, 19 nt, Homo sapiens
  misc_RNA (1)...(19): siRNA sense strand
aggaaagaccaaagcagau

SEQ ID NO: 2642929 - RNA, 19 nt, Homo sapiens
  misc_RNA (1)...(19): siRNA sense strand
caggaaagaccaaagcaga

SEQ ID NO: 2642930 - RNA, 19 nt, Homo sapiens
  misc_RNA (1)...(19): siRNA sense strand
uuaaggaggcggaugccaa

SEQ ID NO: 2642931 - RNA, 19 nt, Homo sapiens
  misc_RNA (1)...(19): siRNA sense strand
acuuaaagauggggugcua

SEQ ID NO: 2642932 - RNA, 19 nt, Homo sapiens
  misc_RNA (1)...(19): siRNA sense strand
cgaagaaggccaaggagga

SEQ ID NO: 2642933 - RNA, 19 nt, Homo sapiens
  misc_RNA (1)...(19): siRNA sense strand
ucuacaaagcaguggagaa

SEQ ID NO: 2642934 - RNA, 19 nt, Homo sapiens
  misc_RNA (1)...(19): siRNA sense strand
ccauaaagguggcuccaga

SEQ ID NO: 2642935 - RNA, 19 nt, Homo sapiens
  misc_RNA (1)...(19): siRNA sense strand
aaacaguacaagauggcua

SEQ ID NO: 2642936 - RNA, 19 nt, Homo sapiens
  misc_RNA (1)...(19): siRNA sense strand
gcacagaacagcagggccu

SEQ ID NO: 2642937 - RNA, 19 nt, Homo sapiens
  misc_RNA (1)...(19): siRNA sense strand
aggaaagaccaaagcagau

SEQ ID NO: 2642938 - RNA, 19 nt, Homo sapiens
  misc_RNA (1)...(19): siRNA sense strand
caggaaagaccaaagcaga

SEQ ID NO: 2642939 - RNA, 19 nt, Homo sapiens
  misc_RNA (1)...(19): siRNA sense strand
cuggcaagcagaacggaau

SEQ ID NO: 2642940 - RNA, 19 nt, Homo sapiens
  misc_RNA (1)...(19): siRNA sense strand
uuaaggaggcggaugccaa

SEQ ID NO: 2642941 - RNA, 19 nt, Homo sapiens
  misc_RNA (1)...(19): siRNA sense strand
ccuccaagcccaggaaaca

SEQ ID NO: 2642942 - RNA, 19 nt, Homo sapiens
  misc_RNA (1)...(19): siRNA sense strand
acuuaaagauggggugcua

SEQ ID NO: 2642943 - RNA, 19 nt, Homo sapiens
  misc_RNA (1)...(19): siRNA sense strand
cugucauaaucgugagaaa

SEQ ID NO: 2642944 - RNA, 19 nt, Homo sapiens
  misc_RNA (1)...(19): siRNA sense strand
agccagaggccuugggaaa

SEQ ID NO: 2642945 - RNA, 19 nt, Homo sapiens
  misc_RNA (1)...(19): siRNA sense strand
ugucaagaaugcugggaga

SEQ ID NO: 2642946 - RNA, 19 nt, Homo sapiens
  misc_RNA (1)...(19): siRNA sense strand
aggauaaggacaagcagaa

SEQ ID NO: 2642947 - RNA, 19 nt, Homo sapiens
  misc_RNA (1)...(19): siRNA sense strand
ugagaaagccagaggccuu

SEQ ID NO: 2642948 - RNA, 19 nt, Homo sapiens
  misc_RNA (1)...(19): siRNA sense strand
cgaaauucaacauggccaa

SEQ ID NO: 2642949 - RNA, 19 nt, Homo sapiens
  misc_RNA (1)...(19): siRNA sense strand
agaaaaugccagaagaauu

SEQ ID NO: 2642950 - RNA, 19 nt, Homo sapiens
  misc_RNA (1)...(19): siRNA sense strand
uggugaacgccaugggcaa

SEQ ID NO: 2642951 - RNA, 19 nt, Homo sapiens
  misc_RNA (1)...(19): siRNA sense strand
aauaaggccuggugcguga

SEQ ID NO: 2642952 - RNA, 19 nt, Homo sapiens
  misc_RNA (1)...(19): siRNA sense strand
uugccaaacgggagagaga

SEQ ID NO: 2642953 - RNA, 19 nt, Homo sapiens
  misc_RNA (1)...(19): siRNA sense strand
gcauuaucccagagaacga

SEQ ID NO: 2642954 - RNA, 19 nt, Homo sapiens
  misc_RNA (1)...(19): siRNA sense strand
gaggaaaggccuggcguau

SEQ ID NO: 2642955 - RNA, 19 nt, Homo sapiens
  misc_RNA (1)...(19): siRNA sense strand
ggccuggcguauugugaaa

SEQ ID NO: 2642956 - RNA, 19 nt, Homo sapiens
  misc_RNA (1)...(19): siRNA sense strand
gaagcaaaggauaaggaca

SEQ ID NO: 2642957 - RNA, 19 nt, Homo sapiens
  misc_RNA (1)...(19): siRNA sense strand
ccaaugggaccgaggacga

SEQ ID NO: 2642958 - RNA, 19 nt, Homo sapiens
  misc_RNA (1)...(19): siRNA sense strand
gugaaagucuacaaggagu

SEQ ID NO: 2642959 - RNA, 19 nt, Homo sapiens
  misc_RNA (1)...(19): siRNA sense strand
gauaaggacaagcagaaaa

SEQ ID NO: 2642960 - RNA, 19 nt, Homo sapiens
  misc_RNA (1)...(19): siRNA sense strand
ucgaagggcguguggugaa

SEQ ID NO: 2642961 - RNA, 19 nt, Homo sapiens
  misc_RNA (1)...(19): siRNA sense strand
ugagaaaaugccagaagaa

SEQ ID NO: 2642962 - RNA, 19 nt, Homo sapiens
  misc_RNA (1)...(19): siRNA sense strand
gcaaggcuuuggagggcau

SEQ ID NO: 2642963 - RNA, 19 nt, Homo sapiens
  misc_RNA (1)...(19): siRNA sense strand
ugaaauugaccuaaagcca

SEQ ID NO: 2642964 - RNA, 19 nt, Homo sapiens
  misc_RNA (1)...(19): siRNA sense strand
ccuaaagccagucugcaaa

SEQ ID NO: 2642965 - RNA, 19 nt, Homo sapiens
  misc_RNA (1)...(19): siRNA sense strand
ucccagagaacgaagaaau

SEQ ID NO: 2642966 - RNA, 19 nt, Homo sapiens
  misc_RNA (1)...(19): siRNA sense strand
cuauuaacauccacagcau

SEQ ID NO: 2642967 - RNA, 19 nt, Homo sapiens
  misc_RNA (1)...(19): siRNA sense strand
accuaaagccagucugcaa

SEQ ID NO: 2642968 - RNA, 19 nt, Homo sapiens
  misc_RNA (1)...(19): siRNA sense strand
gcacaggaugguaagcaca

SEQ ID NO: 2642969 - RNA, 19 nt, Homo sapiens
  misc_RNA (1)...(19): siRNA sense strand
cugcauuaucccagagaac

SEQ ID NO: 2642970 - RNA, 19 nt, Homo sapiens
  misc_RNA (1)...(19): siRNA sense strand
ggaaaggccuggcguauug

SEQ ID NO: 2642971 - RNA, 19 nt, Homo sapiens
  misc_RNA (1)...(19): siRNA sense strand
guuugaaggaagaaaguac

SEQ ID NO: 2642972 - RNA, 19 nt, Homo sapiens
  misc_RNA (1)...(19): siRNA sense strand
acacuguccacgaggccaa

SEQ ID NO: 2642973 - RNA, 19 nt, Homo sapiens
  misc_RNA (1)...(19): siRNA sense strand
agaggaaaggccuggcgua

SEQ ID NO: 2642974 - RNA, 19 nt, Homo sapiens
  misc_RNA (1)...(19): siRNA sense strand
ugaaagucuacaaggaguu

SEQ ID NO: 2642975 - RNA, 19 nt, Homo sapiens
  misc_RNA (1)...(19): siRNA sense strand
gcgaaauucaacauggcca

SEQ ID NO: 2642976 - RNA, 19 nt, Homo sapiens
  misc_RNA (1)...(19): siRNA sense strand
ucuaugaguuugaaggaag

SEQ ID NO: 2642977 - RNA, 19 nt, Homo sapiens
  misc_RNA (1)...(19): siRNA sense strand
ucaagaaugcugggagaca

SEQ ID NO: 2642978 - RNA, 19 nt, Homo sapiens
  misc_RNA (1)...(19): siRNA sense strand
cgacuugccaaacgggaga

SEQ ID NO: 2642979 - RNA, 19 nt, Homo sapiens
  misc_RNA (1)...(19): siRNA sense strand
augauuacguuaagaggga

SEQ ID NO: 2642980 - RNA, 19 nt, Homo sapiens
  misc_RNA (1)...(19): siRNA sense strand
gugugaaggugaagcugca

SEQ ID NO: 2642981 - RNA, 19 nt, Homo sapiens
  misc_RNA (1)...(19): siRNA sense strand
ggacacagcuggucaggag

SEQ ID NO: 2642982 - RNA, 19 nt, Homo sapiens
  misc_RNA (1)...(19): siRNA sense strand
cagccauagcaaaggaguu

SEQ ID NO: 2642983 - RNA, 19 nt, Homo sapiens
  misc_RNA (1)...(19): siRNA sense strand
agaagcuggccaaggagua

SEQ ID NO: 2642984 - RNA, 19 nt, Homo sapiens
  misc_RNA (1)...(19): siRNA sense strand
cccaugagcguguggugaa

SEQ ID NO: 2642985 - RNA, 19 nt, Homo sapiens
  misc_RNA (1)...(19): siRNA sense strand
guggauggugugaagguga

SEQ ID NO: 2642986 - RNA, 19 nt, Homo sapiens
  misc_RNA (1)...(19): siRNA sense strand
gcaaaggaguugaagcagc

SEQ ID NO: 2642987 - RNA, 19 nt, Homo sapiens
  misc_RNA (1)...(19): siRNA sense strand
ccagcuuguuggauggaaa

SEQ ID NO: 2642988 - RNA, 19 nt, Homo sapiens
  misc_RNA (1)...(19): siRNA sense strand
cugucuaacucuuccguaa

SEQ ID NO: 2642989 - RNA, 19 nt, Homo sapiens
  misc_RNA (1)...(19): siRNA sense strand
ccagagaagagccggaaga

SEQ ID NO: 2642990 - RNA, 19 nt, Homo sapiens
  misc_RNA (1)...(19): siRNA sense strand
gauggaaacucgcgggacu

SEQ ID NO: 2642991 - RNA, 19 nt, Homo sapiens
  misc_RNA (1)...(19): siRNA sense strand
cggauuucuuccugccaaa

SEQ ID NO: 2642992 - RNA, 19 nt, Homo sapiens
  misc_RNA (1)...(19): siRNA sense strand
ccuuggacaccgagggcuu

SEQ ID NO: 2642993 - RNA, 19 nt, Homo sapiens
  misc_RNA (1)...(19): siRNA sense strand
caguaaagaagcagagcug

SEQ ID NO: 2642994 - RNA, 19 nt, Homo sapiens
  misc_RNA (1)...(19): siRNA sense strand
guaaagaagcagagcugac

SEQ ID NO: 2642995 - RNA, 19 nt, Homo sapiens
  misc_RNA (1)...(19): siRNA sense strand
ccgcuguccucgucagaga

SEQ ID NO: 2642996 - RNA, 19 nt, Homo sapiens
  misc_RNA (1)...(19): siRNA sense strand
ugacucagauggaggccuu

SEQ ID NO: 2642997 - RNA, 19 nt, Homo sapiens
  misc_RNA (1)...(19): siRNA sense strand
gaacucaccaggauggaga

SEQ ID NO: 2642998 - RNA, 19 nt, Homo sapiens
  misc_RNA (1)...(19): siRNA sense strand
gugugcaugaugaacgaaa

SEQ ID NO: 2642999 - RNA, 19 nt, Homo sapiens
  misc_RNA (1)...(19): siRNA sense strand
caggaggagcagucgauga

SEQ ID NO: 2643000 - RNA, 19 nt, Homo sapiens
  misc_RNA (1)...(19): siRNA sense strand
cagggaagguggugaccgu

SEQ ID NO: 2643001 - RNA, 19 nt, Homo sapiens
  misc_RNA (1)...(19): siRNA sense strand
aagcaaugacucagaugga

SEQ ID NO: 2643002 - RNA, 19 nt, Homo sapiens
  misc_RNA (1)...(19): siRNA sense strand
ccagcuuguuggauggaaa

SEQ ID NO: 2643003 - RNA, 19 nt, Homo sapiens
  misc_RNA (1)...(19): siRNA sense strand
ggaugaucguggagcuaca

SEQ ID NO: 2643004 - RNA, 19 nt, Homo sapiens
  misc_RNA (1)...(19): siRNA sense strand
cugucuaacucuuccguaa

SEQ ID NO: 2643005 - RNA, 19 nt, Homo sapiens
  misc_RNA (1)...(19): siRNA sense strand
ccagagaagagccggaaga

SEQ ID NO: 2643006 - RNA, 19 nt, Homo sapiens
  misc_RNA (1)...(19): siRNA sense strand
gauggaaacucgcgggacu

SEQ ID NO: 2643007 - RNA, 19 nt, Homo sapiens
  misc_RNA (1)...(19): siRNA sense strand
cugaagaagcugugcgauc

SEQ ID NO: 2643008 - RNA, 19 nt, Homo sapiens
  misc_RNA (1)...(19): siRNA sense strand
cgaaaggucuccagccuca

SEQ ID NO: 2643009 - RNA, 19 nt, Homo sapiens
  misc_RNA (1)...(19): siRNA sense strand
cggauuucuuccugccaaa

SEQ ID NO: 2643010 - RNA, 19 nt, Homo sapiens
  misc_RNA (1)...(19): siRNA sense strand
aagaaaggcaagccagcaa

SEQ ID NO: 2643011 - RNA, 19 nt, Homo sapiens
  misc_RNA (1)...(19): siRNA sense strand
gugaugaagaggaccagaa

SEQ ID NO: 2643012 - RNA, 19 nt, Homo sapiens
  misc_RNA (1)...(19): siRNA sense strand
cuguauggaugacaagaau

SEQ ID NO: 2643013 - RNA, 19 nt, Homo sapiens
  misc_RNA (1)...(19): siRNA sense strand
gcuguauggaugacaagaa

SEQ ID NO: 2643014 - RNA, 19 nt, Homo sapiens
  misc_RNA (1)...(19): siRNA sense strand
ccuuggacaccgagggcuu

SEQ ID NO: 2643015 - RNA, 19 nt, Homo sapiens
  misc_RNA (1)...(19): siRNA sense strand
caguaaagaagcagagcug

SEQ ID NO: 2643016 - RNA, 19 nt, Homo sapiens
  misc_RNA (1)...(19): siRNA sense strand
guaaagaagcagagcugac

SEQ ID NO: 2643017 - RNA, 19 nt, Homo sapiens
  misc_RNA (1)...(19): siRNA sense strand
ccgcuguccucgucagaga

SEQ ID NO: 2643018 - RNA, 19 nt, Homo sapiens
  misc_RNA (1)...(19): siRNA sense strand
augacaagaaugcaacaaa

SEQ ID NO: 2643019 - RNA, 19 nt, Homo sapiens
  misc_RNA (1)...(19): siRNA sense strand
ugacucagauggaggccuu

SEQ ID NO: 2643020 - RNA, 19 nt, Homo sapiens
  misc_RNA (1)...(19): siRNA sense strand
ucaucgaauucuugaagca

SEQ ID NO: 2643021 - RNA, 19 nt, Homo sapiens
  misc_RNA (1)...(19): siRNA sense strand
gaacucaccaggauggaga

SEQ ID NO: 2643022 - RNA, 19 nt, Homo sapiens
  misc_RNA (1)...(19): siRNA sense strand
gugugcaugaugaacgaaa

SEQ ID NO: 2643023 - RNA, 19 nt, Homo sapiens
  misc_RNA (1)...(19): siRNA sense strand
caggaggagcagucgauga

SEQ ID NO: 2643024 - RNA, 19 nt, Homo sapiens
  misc_RNA (1)...(19): siRNA sense strand
cagggaagguggugaccgu

SEQ ID NO: 2643025 - RNA, 19 nt, Homo sapiens
  misc_RNA (1)...(19): siRNA sense strand
gcuauggcgagcugcgcaa

SEQ ID NO: 2643026 - RNA, 19 nt, Homo sapiens
  misc_RNA (1)...(19): siRNA sense strand
aagcaaugacucagaugga

SEQ ID NO: 2643027 - RNA, 19 nt, Homo sapiens
  misc_RNA (1)...(19): siRNA sense strand
uggugaagaacaaggagca

SEQ ID NO: 2643028 - RNA, 19 nt, Homo sapiens
  misc_RNA (1)...(19): siRNA sense strand
ucaccaaggcccugcgcua

SEQ ID NO: 2643029 - RNA, 19 nt, Homo sapiens
  misc_RNA (1)...(19): siRNA sense strand
acuucuauguugacagcau

SEQ ID NO: 2643030 - RNA, 19 nt, Homo sapiens
  misc_RNA (1)...(19): siRNA sense strand
acugcgugucccaggaaua

SEQ ID NO: 2643031 - RNA, 19 nt, Homo sapiens
  misc_RNA (1)...(19): siRNA sense strand
ugggcaagaucgugggcaa

SEQ ID NO: 2643032 - RNA, 19 nt, Homo sapiens
  misc_RNA (1)...(19): siRNA sense strand
gaaauaaguuuggaggcaa

SEQ ID NO: 2643033 - RNA, 19 nt, Homo sapiens
  misc_RNA (1)...(19): siRNA sense strand
agaaauaaguuuggaggca

SEQ ID NO: 2643034 - RNA, 19 nt, Homo sapiens
  misc_RNA (1)...(19): siRNA sense strand
gagaaagcccugaagcaga

SEQ ID NO: 2643035 - RNA, 19 nt, Homo sapiens
  misc_RNA (1)...(19): siRNA sense strand
acaacugcuucguggacaa

SEQ ID NO: 2643036 - RNA, 19 nt, Homo sapiens
  misc_RNA (1)...(19): siRNA sense strand
gugagggagaugagagaca

SEQ ID NO: 2643037 - RNA, 19 nt, Homo sapiens
  misc_RNA (1)...(19): siRNA sense strand
acagcgacaucgugggcaa

SEQ ID NO: 2643038 - RNA, 19 nt, Homo sapiens
  misc_RNA (1)...(19): siRNA sense strand
gcgugagggagaugagaga

SEQ ID NO: 2643039 - RNA, 19 nt, Homo sapiens
  misc_RNA (1)...(19): siRNA sense strand
ccgugaagcagaagagugu

SEQ ID NO: 2643040 - RNA, 19 nt, Homo sapiens
  misc_RNA (1)...(19): siRNA sense strand
ugcccgaguucguggacaa

SEQ ID NO: 2643041 - RNA, 19 nt, Homo sapiens
  misc_RNA (1)...(19): siRNA sense strand
agccugaggugcagcgcua

SEQ ID NO: 2643042 - RNA, 19 nt, Homo sapiens
  misc_RNA (1)...(19): siRNA sense strand
ccugagaagcugcuggaga

SEQ ID NO: 2643043 - RNA, 19 nt, Homo sapiens
  misc_RNA (1)...(19): siRNA sense strand
ccuccaagaccgaguccau

SEQ ID NO: 2643044 - RNA, 19 nt, Homo sapiens
  misc_RNA (1)...(19): siRNA sense strand
ucgacgaggccgagugcuu

SEQ ID NO: 2643045 - RNA, 19 nt, Homo sapiens
  misc_RNA (1)...(19): siRNA sense strand
ucuuccugguggagggcua

SEQ ID NO: 2643046 - RNA, 19 nt, Homo sapiens
  misc_RNA (1)...(19): siRNA sense strand
uggacaaagacaagaugga

SEQ ID NO: 2643047 - RNA, 19 nt, Homo sapiens
  misc_RNA (1)...(19): siRNA sense strand
gcuucguggacaaagacaa

SEQ ID NO: 2643048 - RNA, 19 nt, Homo sapiens
  misc_RNA (1)...(19): siRNA sense strand
cggacagcgugaagcagga

SEQ ID NO: 2643049 - RNA, 19 nt, Homo sapiens
  misc_RNA (1)...(19): siRNA sense strand
augagaaagcccugaagca

SEQ ID NO: 2643050 - RNA, 19 nt, Homo sapiens
  misc_RNA (1)...(19): siRNA sense strand
gcuacgaguggguggugau

SEQ ID NO: 2643051 - RNA, 19 nt, Homo sapiens
  misc_RNA (1)...(19): siRNA sense strand
gcuccaacucagagggcaa

SEQ ID NO: 2643052 - RNA, 19 nt, Homo sapiens
  misc_RNA (1)...(19): siRNA sense strand
cugaagaaggcgaagaaua

SEQ ID NO: 2643053 - RNA, 19 nt, Homo sapiens
  misc_RNA (1)...(19): siRNA sense strand
gcacaggacugcagggcuu

SEQ ID NO: 2643054 - RNA, 19 nt, Homo sapiens
  misc_RNA (1)...(19): siRNA sense strand
agaccaaccuagugccgua

SEQ ID NO: 2643055 - RNA, 19 nt, Homo sapiens
  misc_RNA (1)...(19): siRNA sense strand
ccguggaagcugaggcuga

SEQ ID NO: 2643056 - RNA, 19 nt, Homo sapiens
  misc_RNA (1)...(19): siRNA sense strand
ggaaggaagaugcagccaa

SEQ ID NO: 2643057 - RNA, 19 nt, Homo sapiens
  misc_RNA (1)...(19): siRNA sense strand
ugaagaaggcgaagaauac

SEQ ID NO: 2643058 - RNA, 19 nt, Homo sapiens
  misc_RNA (1)...(19): siRNA sense strand
gagcaguguuuguggaccu

SEQ ID NO: 2643059 - RNA, 19 nt, Homo sapiens
  misc_RNA (1)...(19): siRNA sense strand
uagagaaggauuaugaaga

SEQ ID NO: 2643060 - RNA, 19 nt, Homo sapiens
  misc_RNA (1)...(19): siRNA sense strand
ggcugaagaaggcgaagaa

SEQ ID NO: 2643061 - RNA, 19 nt, Homo sapiens
  misc_RNA (1)...(19): siRNA sense strand
cagccaaucaaauggucaa

SEQ ID NO: 2643062 - RNA, 19 nt, Homo sapiens
  misc_RNA (1)...(19): siRNA sense strand
cagcucuagagaaggauua

SEQ ID NO: 2643063 - RNA, 19 nt, Homo sapiens
  misc_RNA (1)...(19): siRNA sense strand
ucucaguggauuacggcaa

SEQ ID NO: 2643064 - RNA, 19 nt, Homo sapiens
  misc_RNA (1)...(19): siRNA sense strand
agcuagaguuugccauuua

SEQ ID NO: 2643065 - RNA, 19 nt, Homo sapiens
  misc_RNA (1)...(19): siRNA sense strand
gcacagggaccuacaggca

SEQ ID NO: 2643066 - RNA, 19 nt, Homo sapiens
  misc_RNA (1)...(19): siRNA sense strand
aaggcauggaagagggaga

SEQ ID NO: 2643067 - RNA, 19 nt, Homo sapiens
  misc_RNA (1)...(19): siRNA sense strand
gcaaggagauuguugaccu

SEQ ID NO: 2643068 - RNA, 19 nt, Homo sapiens
  misc_RNA (1)...(19): siRNA sense strand
gugccuucauggucgacaa

SEQ ID NO: 2643069 - RNA, 19 nt, Homo sapiens
  misc_RNA (1)...(19): siRNA sense strand
uggcagcucuagagaagga

SEQ ID NO: 2643070 - RNA, 19 nt, Homo sapiens
  misc_RNA (1)...(19): siRNA sense strand
guaagaaccuggagaaaga

SEQ ID NO: 2643071 - RNA, 19 nt, Homo sapiens
  misc_RNA (1)...(19): siRNA sense strand
cagcaaagaauguggagaa

SEQ ID NO: 2643072 - RNA, 19 nt, Homo sapiens
  misc_RNA (1)...(19): siRNA sense strand
gggcaauagagauagguua

SEQ ID NO: 2643073 - RNA, 19 nt, Homo sapiens
  misc_RNA (1)...(19): siRNA sense strand
ccuuauaugaggagagaga

SEQ ID NO: 2643074 - RNA, 19 nt, Homo sapiens
  misc_RNA (1)...(19): siRNA sense strand
gaaauuaauccaagcggaa

SEQ ID NO: 2643075 - RNA, 19 nt, Homo sapiens
  misc_RNA (1)...(19): siRNA sense strand
cauucgaagucuugggcaa

SEQ ID NO: 2643076 - RNA, 19 nt, Homo sapiens
  misc_RNA (1)...(19): siRNA sense strand
cugcauuguugaaggagaa

SEQ ID NO: 2643077 - RNA, 19 nt, Homo sapiens
  misc_RNA (1)...(19): siRNA sense strand
ccaacagguucuagaaaca

SEQ ID NO: 2643078 - RNA, 19 nt, Homo sapiens
  misc_RNA (1)...(19): siRNA sense strand
ccacagaaauggagcccuu

SEQ ID NO: 2643079 - RNA, 19 nt, Homo sapiens
  misc_RNA (1)...(19): siRNA sense strand
ggguacaagcagacagcaa

SEQ ID NO: 2643080 - RNA, 19 nt, Homo sapiens
  misc_RNA (1)...(19): siRNA sense strand
ggaacacaaucuaggaaaa

SEQ ID NO: 2643081 - RNA, 19 nt, Homo sapiens
  misc_RNA (1)...(19): siRNA sense strand
gcgacagcucacagggaaa

SEQ ID NO: 2643082 - RNA, 19 nt, Homo sapiens
  misc_RNA (1)...(19): siRNA sense strand
uacaagaagugauggacaa

SEQ ID NO: 2643083 - RNA, 19 nt, Homo sapiens
  misc_RNA (1)...(19): siRNA sense strand
ggacaaaaugcuauguuaa

SEQ ID NO: 2643084 - RNA, 19 nt, Homo sapiens
  misc_RNA (1)...(19): siRNA sense strand
ggagagagagugugaagau

SEQ ID NO: 2643085 - RNA, 19 nt, Homo sapiens
  misc_RNA (1)...(19): siRNA sense strand
cggcagguuucguguacaa

SEQ ID NO: 2643086 - RNA, 19 nt, Homo sapiens
  misc_RNA (1)...(19): siRNA sense strand
cagcaaugucccagguauu

SEQ ID NO: 2643087 - RNA, 19 nt, Homo sapiens
  misc_RNA (1)...(19): siRNA sense strand
agguauuccuggagaacuu

SEQ ID NO: 2643088 - RNA, 19 nt, Homo sapiens
  misc_RNA (1)...(19): siRNA sense strand
agugagaauucgauccaaa

SEQ ID NO: 2643089 - RNA, 19 nt, Homo sapiens
  misc_RNA (1)...(19): siRNA sense strand
ggcaauagagauagguuau

SEQ ID NO: 2643090 - RNA, 19 nt, Homo sapiens
  misc_RNA (1)...(19): siRNA sense strand
ccagaaugaccgcggagaa

SEQ ID NO: 2643091 - RNA, 19 nt, Homo sapiens
  misc_RNA (1)...(19): siRNA sense strand
uggaagaagcuuugagacu

SEQ ID NO: 2643092 - RNA, 19 nt, Homo sapiens
  misc_RNA (1)...(19): siRNA sense strand
aggaaaugccacaguaaaa

SEQ ID NO: 2643093 - RNA, 19 nt, Homo sapiens
  misc_RNA (1)...(19): siRNA sense strand
gcacauggcuauuggaggu

SEQ ID NO: 2643094 - RNA, 19 nt, Homo sapiens
  misc_RNA (1)...(19): siRNA sense strand
gcgcuguggaggaggaaca

SEQ ID NO: 2643095 - RNA, 19 nt, Homo sapiens
  misc_RNA (1)...(19): siRNA sense strand
cuaacagaguggagcacau

SEQ ID NO: 2643096 - RNA, 19 nt, Homo sapiens
  misc_RNA (1)...(19): siRNA sense strand
gguacaagcagacagcaaa

SEQ ID NO: 2643097 - RNA, 19 nt, Homo sapiens
  misc_RNA (1)...(19): siRNA sense strand
ccauuugauugcaaguuaa

SEQ ID NO: 2643098 - RNA, 19 nt, Homo sapiens
  misc_RNA (1)...(19): siRNA sense strand
guacaagaagugauggaca

SEQ ID NO: 2643099 - RNA, 19 nt, Homo sapiens
  misc_RNA (1)...(19): siRNA sense strand
gauugcaaguuaagcgauu

SEQ ID NO: 2643100 - RNA, 19 nt, Homo sapiens
  misc_RNA (1)...(19): siRNA sense strand
ugguaagaaccuggagaaa

SEQ ID NO: 2643101 - RNA, 19 nt, Homo sapiens
  misc_RNA (1)...(19): siRNA sense strand
gaguggagcacaugugaau

SEQ ID NO: 2643102 - RNA, 19 nt, Homo sapiens
  misc_RNA (1)...(19): siRNA sense strand
guggaauuggagugagaau

SEQ ID NO: 2643103 - RNA, 19 nt, Homo sapiens
  misc_RNA (1)...(19): siRNA sense strand
ggacaaguaaugaccaaaa

SEQ ID NO: 2643104 - RNA, 19 nt, Homo sapiens
  misc_RNA (1)...(19): siRNA sense strand
cacacaaugcagagaagaa

SEQ ID NO: 2643105 - RNA, 19 nt, Homo sapiens
  misc_RNA (1)...(19): siRNA sense strand
uggagaagccccagagaau

SEQ ID NO: 2643106 - RNA, 19 nt, Homo sapiens
  misc_RNA (1)...(19): siRNA sense strand
ggaugugccaagcaggaaa

SEQ ID NO: 2643107 - RNA, 19 nt, Homo sapiens
  misc_RNA (1)...(19): siRNA sense strand
guggagcaguggauagcaa

SEQ ID NO: 2643108 - RNA, 19 nt, Homo sapiens
  misc_RNA (1)...(19): siRNA sense strand
ggguggagacuguggggaa

SEQ ID NO: 2643109 - RNA, 19 nt, Homo sapiens
  misc_RNA (1)...(19): siRNA sense strand
caugaaaguaccaggcuca

SEQ ID NO: 2643110 - RNA, 19 nt, Homo sapiens
  misc_RNA (1)...(19): siRNA sense strand
caggaaaugccacaguaaa

SEQ ID NO: 2643111 - RNA, 19 nt, Homo sapiens
  misc_RNA (1)...(19): siRNA sense strand
aagcagaaagaaggagaaa

SEQ ID NO: 2643112 - RNA, 19 nt, Homo sapiens
  misc_RNA (1)...(19): siRNA sense strand
aggaacacaaucuaggaaa

SEQ ID NO: 2643113 - RNA, 19 nt, Homo sapiens
  misc_RNA (1)...(19): siRNA sense strand
ugggacaaguaaugaccaa

SEQ ID NO: 2643114 - RNA, 19 nt, Homo sapiens
  misc_RNA (1)...(19): siRNA sense strand
cagugaagccuguggaaag

SEQ ID NO: 2643115 - RNA, 19 nt, Homo sapiens
  misc_RNA (1)...(19): siRNA sense strand
cuaacuguggugagagcaa

SEQ ID NO: 2643116 - RNA, 19 nt, Homo sapiens
  misc_RNA (1)...(19): siRNA sense strand
caucaaaguuacaaagcac

SEQ ID NO: 2643117 - RNA, 19 nt, Homo sapiens
  misc_RNA (1)...(19): siRNA sense strand
gggacaguugggacaauua

SEQ ID NO: 2643118 - RNA, 19 nt, Homo sapiens
  misc_RNA (1)...(19): siRNA sense strand
gucuugggcaauagagaua

SEQ ID NO: 2643119 - RNA, 19 nt, Homo sapiens
  misc_RNA (1)...(19): siRNA sense strand
ucucuagaccuguggaaaa

SEQ ID NO: 2643120 - RNA, 19 nt, Homo sapiens
  misc_RNA (1)...(19): siRNA sense strand
aaguuaagcgauuggucua

SEQ ID NO: 2643121 - RNA, 19 nt, Homo sapiens
  misc_RNA (1)...(19): siRNA sense strand
ccuccaaaggaaagaaguu

SEQ ID NO: 2643122 - RNA, 19 nt, Homo sapiens
  misc_RNA (1)...(19): siRNA sense strand
aagcaagucuuuggaacaa

SEQ ID NO: 2643123 - RNA, 19 nt, Homo sapiens
  misc_RNA (1)...(19): siRNA sense strand
uuguggaauuggagugaga

SEQ ID NO: 2643124 - RNA, 19 nt, Homo sapiens
  misc_RNA (1)...(19): siRNA sense strand
gaaaaucagaugugugaau

SEQ ID NO: 2643125 - RNA, 19 nt, Homo sapiens
  misc_RNA (1)...(19): siRNA sense strand
gaacaauaacgaacgaacu

SEQ ID NO: 2643126 - RNA, 19 nt, Homo sapiens
  misc_RNA (1)...(19): siRNA sense strand
gcaaaugaaauaugcgaac

SEQ ID NO: 2643127 - RNA, 19 nt, Homo sapiens
  misc_RNA (1)...(19): siRNA sense strand
gagagagugugaagauguu

SEQ ID NO: 2643128 - RNA, 19 nt, Homo sapiens
  misc_RNA (1)...(19): siRNA sense strand
gcuuccaguuccaguacaa

SEQ ID NO: 2643129 - RNA, 19 nt, Homo sapiens
  misc_RNA (1)...(19): siRNA sense strand
ugugguugcaaaugaaaua

SEQ ID NO: 2643130 - RNA, 19 nt, Homo sapiens
  misc_RNA (1)...(19): siRNA sense strand
acgugaagcacauggcuau

SEQ ID NO: 2643131 - RNA, 19 nt, Homo sapiens
  misc_RNA (1)...(19): siRNA sense strand
gaaagaaggagaaaugcca

SEQ ID NO: 2643132 - RNA, 19 nt, Homo sapiens
  misc_RNA (1)...(19): siRNA sense strand
acuauguccuugugaugaa

SEQ ID NO: 2643133 - RNA, 19 nt, Homo sapiens
  misc_RNA (1)...(19): siRNA sense strand
aagaagugauggacaaaau

SEQ ID NO: 2643134 - RNA, 19 nt, Homo sapiens
  misc_RNA (1)...(19): siRNA sense strand
cuggagaaagagaagaaaa

SEQ ID NO: 2643135 - RNA, 19 nt, Homo sapiens
  misc_RNA (1)...(19): siRNA sense strand
caguaaaacagucucgaua

SEQ ID NO: 2643136 - RNA, 19 nt, Homo sapiens
  misc_RNA (1)...(19): siRNA sense strand
ggaucuaugcagaggccaa

SEQ ID NO: 2643137 - RNA, 19 nt, Homo sapiens
  misc_RNA (1)...(19): siRNA sense strand
ccacauugacucugggacu

SEQ ID NO: 2643138 - RNA, 19 nt, Homo sapiens
  misc_RNA (1)...(19): siRNA sense strand
ggccaagacuucaggcauc

SEQ ID NO: 2643139 - RNA, 19 nt, Homo sapiens
  misc_RNA (1)...(19): siRNA sense strand
gcacagcucucauugccaa

SEQ ID NO: 2643140 - RNA, 19 nt, Homo sapiens
  misc_RNA (1)...(19): siRNA sense strand
ggaaccaacggcugcgaca

SEQ ID NO: 2643141 - RNA, 19 nt, Homo sapiens
  misc_RNA (1)...(19): siRNA sense strand
gaacagaguugauaagaaa

SEQ ID NO: 2643142 - RNA, 19 nt, Homo sapiens
  misc_RNA (1)...(19): siRNA sense strand
gggaagaaccucaggaaaa

SEQ ID NO: 2643143 - RNA, 19 nt, Homo sapiens
  misc_RNA (1)...(19): siRNA sense strand
ccgauaaguccguggagaa

SEQ ID NO: 2643144 - RNA, 19 nt, Homo sapiens
  misc_RNA (1)...(19): siRNA sense strand
ggguaugaauggcgccaaa

SEQ ID NO: 2643145 - RNA, 19 nt, Homo sapiens
  misc_RNA (1)...(19): siRNA sense strand
cuacaagagccauuggaaa

SEQ ID NO: 2643146 - RNA, 19 nt, Homo sapiens
  misc_RNA (1)...(19): siRNA sense strand
agccuuagcuccugggaaa

SEQ ID NO: 2643147 - RNA, 19 nt, Homo sapiens
  misc_RNA (1)...(19): siRNA sense strand
ugaagaggacacugagaaa

SEQ ID NO: 2643148 - RNA, 19 nt, Homo sapiens
  misc_RNA (1)...(19): siRNA sense strand
caucgaagggucaggcaaa

SEQ ID NO: 2643149 - RNA, 19 nt, Homo sapiens
  misc_RNA (1)...(19): siRNA sense strand
ggaaaagggccaagugcaa

SEQ ID NO: 2643150 - RNA, 19 nt, Homo sapiens
  misc_RNA (1)...(19): siRNA sense strand
cuacagugugagacagaaa

SEQ ID NO: 2643151 - RNA, 19 nt, Homo sapiens
  misc_RNA (1)...(19): siRNA sense strand
caguuuagcugaugggcuu

SEQ ID NO: 2643152 - RNA, 19 nt, Homo sapiens
  misc_RNA (1)...(19): siRNA sense strand
aagauugaaccaaggaaua

SEQ ID NO: 2643153 - RNA, 19 nt, Homo sapiens
  misc_RNA (1)...(19): siRNA sense strand
ugaacagaguugauaagaa

SEQ ID NO: 2643154 - RNA, 19 nt, Homo sapiens
  misc_RNA (1)...(19): siRNA sense strand
gguuauaaagauugcauga

SEQ ID NO: 2643155 - RNA, 19 nt, Homo sapiens
  misc_RNA (1)...(19): siRNA sense strand
gagaugaagcugugcccaa

SEQ ID NO: 2643156 - RNA, 19 nt, Homo sapiens
  misc_RNA (1)...(19): siRNA sense strand
ggucaaaccaacacacaau

SEQ ID NO: 2643157 - RNA, 19 nt, Homo sapiens
  misc_RNA (1)...(19): siRNA sense strand
ccacaaagggacauaggau

SEQ ID NO: 2643158 - RNA, 19 nt, Homo sapiens
  misc_RNA (1)...(19): siRNA sense strand
gcugaagacccaauggcaa

SEQ ID NO: 2643159 - RNA, 19 nt, Homo sapiens
  misc_RNA (1)...(19): siRNA sense strand
ggauaaaaggcuaaguauu

SEQ ID NO: 2643160 - RNA, 19 nt, Homo sapiens
  misc_RNA (1)...(19): siRNA sense strand
caaaagacucccugguaaa

SEQ ID NO: 2643161 - RNA, 19 nt, Homo sapiens
  misc_RNA (1)...(19): siRNA sense strand
gcugggagacaaacagaaa

SEQ ID NO: 2643162 - RNA, 19 nt, Homo sapiens
  misc_RNA (1)...(19): siRNA sense strand
acagaagugcagaggaaga

SEQ ID NO: 2643163 - RNA, 19 nt, Homo sapiens
  misc_RNA (1)...(19): siRNA sense strand
gcucugaguagcaggaaaa

SEQ ID NO: 2643164 - RNA, 19 nt, Homo sapiens
  misc_RNA (1)...(19): siRNA sense strand
cagaguaauuccaggucuu

SEQ ID NO: 2643165 - RNA, 19 nt, Homo sapiens
  misc_RNA (1)...(19): siRNA sense strand
gaaagcuacagaagcgaaa

SEQ ID NO: 2643166 - RNA, 19 nt, Homo sapiens
  misc_RNA (1)...(19): siRNA sense strand
acaccaagucagcagauaa

SEQ ID NO: 2643167 - RNA, 19 nt, Homo sapiens
  misc_RNA (1)...(19): siRNA sense strand
gaagauugaaccaaggaau

SEQ ID NO: 2643168 - RNA, 19 nt, Homo sapiens
  misc_RNA (1)...(19): siRNA sense strand
gaaagcagcuccacagaca

SEQ ID NO: 2643169 - RNA, 19 nt, Homo sapiens
  misc_RNA (1)...(19): siRNA sense strand
gagaaaaggacaauugaau

SEQ ID NO: 2643170 - RNA, 19 nt, Homo sapiens
  misc_RNA (1)...(19): siRNA sense strand
gcagcaaagaguuguaaaa

SEQ ID NO: 2643171 - RNA, 19 nt, Homo sapiens
  misc_RNA (1)...(19): siRNA sense strand
ggagaauuucccaguagaa

SEQ ID NO: 2643172 - RNA, 19 nt, Homo sapiens
  misc_RNA (1)...(19): siRNA sense strand
ccaaaguagaaaagaaaga

SEQ ID NO: 2643173 - RNA, 19 nt, Homo sapiens
  misc_RNA (1)...(19): siRNA sense strand
augcaaaagucuugggguu

SEQ ID NO: 2643174 - RNA, 19 nt, Homo sapiens
  misc_RNA (1)...(19): siRNA sense strand
gcagaaugaagcagagcca

SEQ ID NO: 2643175 - RNA, 19 nt, Homo sapiens
  misc_RNA (1)...(19): siRNA sense strand
cagaaaguggaucaaguaa

SEQ ID NO: 2643176 - RNA, 19 nt, Homo sapiens
  misc_RNA (1)...(19): siRNA sense strand
ggaagggcuaagaaagcua

SEQ ID NO: 2643177 - RNA, 19 nt, Homo sapiens
  misc_RNA (1)...(19): siRNA sense strand
gugcagaggaagaaaccuu

SEQ ID NO: 2643178 - RNA, 19 nt, Homo sapiens
  misc_RNA (1)...(19): siRNA sense strand
guaaaagaggcaaaugaaa

SEQ ID NO: 2643179 - RNA, 19 nt, Homo sapiens
  misc_RNA (1)...(19): siRNA sense strand
cggauaugcugaagaccca

SEQ ID NO: 2643180 - RNA, 19 nt, Homo sapiens
  misc_RNA (1)...(19): siRNA sense strand
gugaggaacaccaacuaaa

SEQ ID NO: 2643181 - RNA, 19 nt, Homo sapiens
  misc_RNA (1)...(19): siRNA sense strand
ugugauauuugaugcggaa

SEQ ID NO: 2643182 - RNA, 19 nt, Homo sapiens
  misc_RNA (1)...(19): siRNA sense strand
agaaaguggaucaaguaau

SEQ ID NO: 2643183 - RNA, 19 nt, Homo sapiens
  misc_RNA (1)...(19): siRNA sense strand
caaggaaaccacaagaaaa

SEQ ID NO: 2643184 - RNA, 19 nt, Homo sapiens
  misc_RNA (1)...(19): siRNA sense strand
guaaguugccuuugaggau

SEQ ID NO: 2643185 - RNA, 19 nt, Homo sapiens
  misc_RNA (1)...(19): siRNA sense strand
ccgauauggaaguaccaaa

SEQ ID NO: 2643186 - RNA, 19 nt, Homo sapiens
  misc_RNA (1)...(19): siRNA sense strand
gagacuaggccaaagacuu

SEQ ID NO: 2643187 - RNA, 19 nt, Homo sapiens
  misc_RNA (1)...(19): siRNA sense strand
ugggaagaaccucaggaaa

SEQ ID NO: 2643188 - RNA, 19 nt, Homo sapiens
  misc_RNA (1)...(19): siRNA sense strand
cggaagacggugagcccau

SEQ ID NO: 2643189 - RNA, 19 nt, Homo sapiens
  misc_RNA (1)...(19): siRNA sense strand
auauaucaugccagaguaa

SEQ ID NO: 2643190 - RNA, 19 nt, Homo sapiens
  misc_RNA (1)...(19): siRNA sense strand
ggcagaacauacugagcuu

SEQ ID NO: 2643191 - RNA, 19 nt, Homo sapiens
  misc_RNA (1)...(19): siRNA sense strand
gcaucuaucaaaagcaaaa

SEQ ID NO: 2643192 - RNA, 19 nt, Homo sapiens
  misc_RNA (1)...(19): siRNA sense strand
gguaaaagaggcaaaugaa

SEQ ID NO: 2643193 - RNA, 19 nt, Homo sapiens
  misc_RNA (1)...(19): siRNA sense strand
gccauugagucuagugaca

SEQ ID NO: 2643194 - RNA, 19 nt, Homo sapiens
  misc_RNA (1)...(19): siRNA sense strand
ccagcaaaccacaccuaaa

SEQ ID NO: 2643195 - RNA, 19 nt, Homo sapiens
  misc_RNA (1)...(19): siRNA sense strand
cuguggaagcaaagcagaa

SEQ ID NO: 2643196 - RNA, 19 nt, Homo sapiens
  misc_RNA (1)...(19): siRNA sense strand
ccuucagagacuaggccaa

SEQ ID NO: 2643197 - RNA, 19 nt, Homo sapiens
  misc_RNA (1)...(19): siRNA sense strand
ggucugaagaggacacuga

SEQ ID NO: 2643198 - RNA, 19 nt, Homo sapiens
  misc_RNA (1)...(19): siRNA sense strand
cccaugagccacuggaaau

SEQ ID NO: 2643199 - RNA, 19 nt, Homo sapiens
  misc_RNA (1)...(19): siRNA sense strand
agacagaaaaugagcuuau

SEQ ID NO: 2643200 - RNA, 19 nt, Homo sapiens
  misc_RNA (1)...(19): siRNA sense strand
cgauauggaaguaccaaaa

SEQ ID NO: 2643201 - RNA, 19 nt, Homo sapiens
  misc_RNA (1)...(19): siRNA sense strand
cugaagaggacacugagaa

SEQ ID NO: 2643202 - RNA, 19 nt, Homo sapiens
  misc_RNA (1)...(19): siRNA sense strand
ugaacuacagugugagaca

SEQ ID NO: 2643203 - RNA, 19 nt, Homo sapiens
  misc_RNA (1)...(19): siRNA sense strand
ccaacucguaucaaggaaa

SEQ ID NO: 2643204 - RNA, 19 nt, Homo sapiens
  misc_RNA (1)...(19): siRNA sense strand
cagaagaaugugugacugu

SEQ ID NO: 2643205 - RNA, 19 nt, Homo sapiens
  misc_RNA (1)...(19): siRNA sense strand
cacaaagggacauaggauu

SEQ ID NO: 2643206 - RNA, 19 nt, Homo sapiens
  misc_RNA (1)...(19): siRNA sense strand
ugaacaagucuaagccaga

SEQ ID NO: 2643207 - RNA, 19 nt, Homo sapiens
  misc_RNA (1)...(19): siRNA sense strand
acagaaaguggaucaagua

SEQ ID NO: 2643208 - RNA, 19 nt, Homo sapiens
  misc_RNA (1)...(19): siRNA sense strand
uaucaguacucaaggaaac

SEQ ID NO: 2643209 - RNA, 19 nt, Homo sapiens
  misc_RNA (1)...(19): siRNA sense strand
cugcaagagacuauacuuu

SEQ ID NO: 2643210 - RNA, 19 nt, Homo sapiens
  misc_RNA (1)...(19): siRNA sense strand
gcuccaggacagugacaca

SEQ ID NO: 2643211 - RNA, 19 nt, Homo sapiens
  misc_RNA (1)...(19): siRNA sense strand
ucaugagaaaggacugaaa

SEQ ID NO: 2643212 - RNA, 19 nt, Homo sapiens
  misc_RNA (1)...(19): siRNA sense strand
aggaagaccagcaggccuu

SEQ ID NO: 2643213 - RNA, 19 nt, Homo sapiens
  misc_RNA (1)...(19): siRNA sense strand
caacauaucuccagggaag

SEQ ID NO: 2643214 - RNA, 19 nt, Homo sapiens
  misc_RNA (1)...(19): siRNA sense strand
agacaguggaggaggccaa

SEQ ID NO: 2643215 - RNA, 19 nt, Homo sapiens
  misc_RNA (1)...(19): siRNA sense strand
gcgccucagcagagagcaa

SEQ ID NO: 2643216 - RNA, 19 nt, Homo sapiens
  misc_RNA (1)...(19): siRNA sense strand
ggaaggaugugaaugcaga

SEQ ID NO: 2643217 - RNA, 19 nt, Homo sapiens
  misc_RNA (1)...(19): siRNA sense strand
ccgccuucuucgaggugaa

SEQ ID NO: 2643218 - RNA, 19 nt, Homo sapiens
  misc_RNA (1)...(19): siRNA sense strand
agaggaagcuggcggcuca

SEQ ID NO: 2643219 - RNA, 19 nt, Homo sapiens
  misc_RNA (1)...(19): siRNA sense strand
cagacaaggucaucagcca

SEQ ID NO: 2643220 - RNA, 19 nt, Homo sapiens
  misc_RNA (1)...(19): siRNA sense strand
aggacaagacaguggagga

SEQ ID NO: 2643221 - RNA, 19 nt, Homo sapiens
  misc_RNA (1)...(19): siRNA sense strand
agguguacuucaugcggaa

SEQ ID NO: 2643222 - RNA, 19 nt, Homo sapiens
  misc_RNA (1)...(19): siRNA sense strand
gcuauaagauggaugaccu

SEQ ID NO: 2643223 - RNA, 19 nt, Homo sapiens
  misc_RNA (1)...(19): siRNA sense strand
ccagagaaggacaugguga

SEQ ID NO: 2643224 - RNA, 19 nt, Homo sapiens
  misc_RNA (1)...(19): siRNA sense strand
cuggagggccugaaggaga

SEQ ID NO: 2643225 - RNA, 19 nt, Homo sapiens
  misc_RNA (1)...(19): siRNA sense strand
ucuacaaggcccaguucaa

SEQ ID NO: 2643226 - RNA, 19 nt, Homo sapiens
  misc_RNA (1)...(19): siRNA sense strand
cccaagauccugagggaac

SEQ ID NO: 2643227 - RNA, 19 nt, Homo sapiens
  misc_RNA (1)...(19): siRNA sense strand
ucacuaagcccucggcaca

SEQ ID NO: 2643228 - RNA, 19 nt, Homo sapiens
  misc_RNA (1)...(19): siRNA sense strand
augcggaaauuguggcuca

SEQ ID NO: 2643229 - RNA, 19 nt, Homo sapiens
  misc_RNA (1)...(19): siRNA sense strand
cccaaugacaccagugaga

SEQ ID NO: 2643230 - RNA, 19 nt, Homo sapiens
  misc_RNA (1)...(19): siRNA sense strand
aggaggaagagcugguuga

SEQ ID NO: 2643231 - RNA, 19 nt, Homo sapiens
  misc_RNA (1)...(19): siRNA sense strand
ugagggaacuggugccuga

SEQ ID NO: 2643232 - RNA, 19 nt, Homo sapiens
  misc_RNA (1)...(19): siRNA sense strand
ugucugacugggugaagaa

SEQ ID NO: 2643233 - RNA, 19 nt, Homo sapiens
  misc_RNA (1)...(19): siRNA sense strand
ccucauaugugcagcagcu

SEQ ID NO: 2643234 - RNA, 19 nt, Homo sapiens
  misc_RNA (1)...(19): siRNA sense strand
gugagaugcuggagguggu

SEQ ID NO: 2643235 - RNA, 19 nt, Homo sapiens
  misc_RNA (1)...(19): siRNA sense strand
cugucaaguccaagaagca

SEQ ID NO: 2643236 - RNA, 19 nt, Homo sapiens
  misc_RNA (1)...(19): siRNA sense strand
aggagaagaugcugcugga

SEQ ID NO: 2643237 - RNA, 19 nt, Homo sapiens
  misc_RNA (1)...(19): siRNA sense strand
cugcaggacaggaaggcca

SEQ ID NO: 2643238 - RNA, 19 nt, Homo sapiens
  misc_RNA (1)...(19): siRNA sense strand
gagcagauggcccaggaga

SEQ ID NO: 2643239 - RNA, 19 nt, Homo sapiens
  misc_RNA (1)...(19): siRNA sense strand
ggacaagguuccuggggua

SEQ ID NO: 2643240 - RNA, 19 nt, Homo sapiens
  misc_RNA (1)...(19): siRNA sense strand
cagaagaggcugcaggcaa

SEQ ID NO: 2643241 - RNA, 19 nt, Homo sapiens
  misc_RNA (1)...(19): siRNA sense strand
ccagaaaggagaaagcaga

SEQ ID NO: 2643242 - RNA, 19 nt, Homo sapiens
  misc_RNA (1)...(19): siRNA sense strand
gggcaggccagaaaggaga

SEQ ID NO: 2643243 - RNA, 19 nt, Homo sapiens
  misc_RNA (1)...(19): siRNA sense strand
acucggagaugcuggccaa

SEQ ID NO: 2643244 - RNA, 19 nt, Homo sapiens
  misc_RNA (1)...(19): siRNA sense strand
gcgaagugcucauccgcga

SEQ ID NO: 2643245 - RNA, 19 nt, Homo sapiens
  misc_RNA (1)...(19): siRNA sense strand
ggaaccuggaccuggagaa

SEQ ID NO: 2643246 - RNA, 19 nt, Homo sapiens
  misc_RNA (1)...(19): siRNA sense strand
aggcggaccuggaagagga

SEQ ID NO: 2643247 - RNA, 19 nt, Homo sapiens
  misc_RNA (1)...(19): siRNA sense strand
uggccaagcuccaugagga

SEQ ID NO: 2643248 - RNA, 19 nt, Homo sapiens
  misc_RNA (1)...(19): siRNA sense strand
gcacaggacugcagggcuu

SEQ ID NO: 2643249 - RNA, 19 nt, Homo sapiens
  misc_RNA (1)...(19): siRNA sense strand
ccguggaagcugaggcuga

SEQ ID NO: 2643250 - RNA, 19 nt, Homo sapiens
  misc_RNA (1)...(19): siRNA sense strand
gagcaguguuuguggaccu

SEQ ID NO: 2643251 - RNA, 19 nt, Homo sapiens
  misc_RNA (1)...(19): siRNA sense strand
cagccaaucagauggucaa

SEQ ID NO: 2643252 - RNA, 19 nt, Homo sapiens
  misc_RNA (1)...(19): siRNA sense strand
ucucaguggauuacagcaa

SEQ ID NO: 2643253 - RNA, 19 nt, Homo sapiens
  misc_RNA (1)...(19): siRNA sense strand
agcuagaguuugccauuua

SEQ ID NO: 2643254 - RNA, 19 nt, Homo sapiens
  misc_RNA (1)...(19): siRNA sense strand
gcacagggaccuacaggca

SEQ ID NO: 2643255 - RNA, 19 nt, Homo sapiens
  misc_RNA (1)...(19): siRNA sense strand
gaaggaagaugcagccagu

SEQ ID NO: 2643256 - RNA, 19 nt, Homo sapiens
  misc_RNA (1)...(19): siRNA sense strand
aaggcauggaagagggaga

SEQ ID NO: 2643257 - RNA, 19 nt, Homo sapiens
  misc_RNA (1)...(19): siRNA sense strand
gcaaggagauuguugaccu

SEQ ID NO: 2643258 - RNA, 19 nt, Homo sapiens
  misc_RNA (1)...(19): siRNA sense strand
gugccuucauggucgacaa

SEQ ID NO: 2643259 - RNA, 19 nt, Homo sapiens
  misc_RNA (1)...(19): siRNA sense strand
uggcagcucuagagaagga

SEQ ID NO: 2643260 - RNA, 19 nt, Homo sapiens
  misc_RNA (1)...(19): siRNA sense strand
auggagauggcaagagaaa

SEQ ID NO: 2643261 - RNA, 19 nt, Homo sapiens
  misc_RNA (1)...(19): siRNA sense strand
ggcaagagaaagaggagca

SEQ ID NO: 2643262 - RNA, 19 nt, Homo sapiens
  misc_RNA (1)...(19): siRNA sense strand
ccauuaauaagaaggccaa

SEQ ID NO: 2643263 - RNA, 19 nt, Homo sapiens
  misc_RNA (1)...(19): siRNA sense strand
ccguaugagaggcagcuua

SEQ ID NO: 2643264 - RNA, 19 nt, Homo sapiens
  misc_RNA (1)...(19): siRNA sense strand
gaaagaauaacccuggcaa

SEQ ID NO: 2643265 - RNA, 19 nt, Homo sapiens
  misc_RNA (1)...(19): siRNA sense strand
ccgugguccuucagcauau

SEQ ID NO: 2643266 - RNA, 19 nt, Homo sapiens
  misc_RNA (1)...(19): siRNA sense strand
aggaagaugucaacgccga

SEQ ID NO: 2643267 - RNA, 19 nt, Homo sapiens
  misc_RNA (1)...(19): siRNA sense strand
cggaugugcauuaguggau

SEQ ID NO: 2643268 - RNA, 19 nt, Homo sapiens
  misc_RNA (1)...(19): siRNA sense strand
uggaggauggagauggcaa

SEQ ID NO: 2643269 - RNA, 19 nt, Homo sapiens
  misc_RNA (1)...(19): siRNA sense strand
cgaagaggcaggaagacaa

SEQ ID NO: 2643270 - RNA, 19 nt, Homo sapiens
  misc_RNA (1)...(19): siRNA sense strand
ggaagaaagaggcggagga

SEQ ID NO: 2643271 - RNA, 19 nt, Homo sapiens
  misc_RNA (1)...(19): siRNA sense strand
agacagacucgaaaggcaa

SEQ ID NO: 2643272 - RNA, 19 nt, Homo sapiens
  misc_RNA (1)...(19): siRNA sense strand
cggcgaagaggcaggaaga

SEQ ID NO: 2643273 - RNA, 19 nt, Homo sapiens
  misc_RNA (1)...(19): siRNA sense strand
cgguagagucagucauaga

SEQ ID NO: 2643274 - RNA, 19 nt, Homo sapiens
  misc_RNA (1)...(19): siRNA sense strand
gcgaagaggcaggaagaca

SEQ ID NO: 2643275 - RNA, 19 nt, Homo sapiens
  misc_RNA (1)...(19): siRNA sense strand
gagacagacucgaaaggca

SEQ ID NO: 2643276 - RNA, 19 nt, Homo sapiens
  misc_RNA (1)...(19): siRNA sense strand
ccccaaaccuggagggcau

SEQ ID NO: 2643277 - RNA, 19 nt, Homo sapiens
  misc_RNA (1)...(19): siRNA sense strand
cagcaaggaucccugggua

SEQ ID NO: 2643278 - RNA, 19 nt, Homo sapiens
  misc_RNA (1)...(19): siRNA sense strand
uggaggugcaggugaagaa

SEQ ID NO: 2643279 - RNA, 19 nt, Homo sapiens
  misc_RNA (1)...(19): siRNA sense strand
ccuacuaccacaacagcaa

SEQ ID NO: 2643280 - RNA, 19 nt, Homo sapiens
  misc_RNA (1)...(19): siRNA sense strand
cugcuuaugugcuggggaa

SEQ ID NO: 2643281 - RNA, 19 nt, Homo sapiens
  misc_RNA (1)...(19): siRNA sense strand
accuggaacaaguggacaa

SEQ ID NO: 2643282 - RNA, 19 nt, Homo sapiens
  misc_RNA (1)...(19): siRNA sense strand
gccuuaagugucaggaaca

SEQ ID NO: 2643283 - RNA, 19 nt, Homo sapiens
  misc_RNA (1)...(19): siRNA sense strand
gccgacgacugaauaauaa

SEQ ID NO: 2643284 - RNA, 19 nt, Homo sapiens
  misc_RNA (1)...(19): siRNA sense strand
ccaaguacgacgaggcuac

SEQ ID NO: 2643285 - RNA, 19 nt, Homo sapiens
  misc_RNA (1)...(19): siRNA sense strand
gcaagugugagaacggaga

SEQ ID NO: 2643286 - RNA, 19 nt, Homo sapiens
  misc_RNA (1)...(19): siRNA sense strand
agcaaggaucccuggguau

SEQ ID NO: 2643287 - RNA, 19 nt, Homo sapiens
  misc_RNA (1)...(19): siRNA sense strand
guauugugguccugugcuu

SEQ ID NO: 2643288 - RNA, 19 nt, Homo sapiens
  misc_RNA (1)...(19): siRNA sense strand
ucagggagcuucaggccau

SEQ ID NO: 2643289 - RNA, 19 nt, Homo sapiens
  misc_RNA (1)...(19): siRNA sense strand
ccaccaagugcaacgacau

SEQ ID NO: 2643290 - RNA, 19 nt, Homo sapiens
  misc_RNA (1)...(19): siRNA sense strand
ugaaacaggccaagggcau

SEQ ID NO: 2643291 - RNA, 19 nt, Homo sapiens
  misc_RNA (1)...(19): siRNA sense strand
ccgucaaguuuguggagga

SEQ ID NO: 2643292 - RNA, 19 nt, Homo sapiens
  misc_RNA (1)...(19): siRNA sense strand
caacagugaaacaggccaa

SEQ ID NO: 2643293 - RNA, 19 nt, Homo sapiens
  misc_RNA (1)...(19): siRNA sense strand
ccaagggcauucugggcaa

SEQ ID NO: 2643294 - RNA, 19 nt, Homo sapiens
  misc_RNA (1)...(19): siRNA sense strand
aggcagaacagcaggagga

SEQ ID NO: 2643295 - RNA, 19 nt, Homo sapiens
  misc_RNA (1)...(19): siRNA sense strand
acacgacgguuguggguga

SEQ ID NO: 2643296 - RNA, 19 nt, Homo sapiens
  misc_RNA (1)...(19): siRNA sense strand
agaugaaggccuuuggaga

SEQ ID NO: 2643297 - RNA, 19 nt, Homo sapiens
  misc_RNA (1)...(19): siRNA sense strand
cgggagacccagaagcaca

SEQ ID NO: 2643298 - RNA, 19 nt, Homo sapiens
  misc_RNA (1)...(19): siRNA sense strand
auccauaagcggagagcca

SEQ ID NO: 2643299 - RNA, 19 nt, Homo sapiens
  misc_RNA (1)...(19): siRNA sense strand
aggacaaaggccaggacga

SEQ ID NO: 2643300 - RNA, 19 nt, Homo sapiens
  misc_RNA (1)...(19): siRNA sense strand
cagagaugggcgagagucu

SEQ ID NO: 2643301 - RNA, 19 nt, Homo sapiens
  misc_RNA (1)...(19): siRNA sense strand
gaguccuggcccuggauaa

SEQ ID NO: 2643302 - RNA, 19 nt, Homo sapiens
  misc_RNA (1)...(19): siRNA sense strand
caaagaugucaguggguuc

SEQ ID NO: 2643303 - RNA, 19 nt, Homo sapiens
  misc_RNA (1)...(19): siRNA sense strand
cagaacagcaggaggagcu

SEQ ID NO: 2643304 - RNA, 19 nt, Homo sapiens
  misc_RNA (1)...(19): siRNA sense strand
gcaucgaguaccaguggau

SEQ ID NO: 2643305 - RNA, 19 nt, Homo sapiens
  misc_RNA (1)...(19): siRNA sense strand
cgccaagcacauccagaaa

SEQ ID NO: 2643306 - RNA, 19 nt, Homo sapiens
  misc_RNA (1)...(19): siRNA sense strand
gcacugagaccuacccaga

SEQ ID NO: 2643307 - RNA, 19 nt, Homo sapiens
  misc_RNA (1)...(19): siRNA sense strand
ugaaguuccuggaggugga

SEQ ID NO: 2643308 - RNA, 19 nt, Homo sapiens
  misc_RNA (1)...(19): siRNA sense strand
gggucagggagcuugagaa

SEQ ID NO: 2643309 - RNA, 19 nt, Homo sapiens
  misc_RNA (1)...(19): siRNA sense strand
gcaaagaugucaguggguu

SEQ ID NO: 2643310 - RNA, 19 nt, Homo sapiens
  misc_RNA (1)...(19): siRNA sense strand
ccuucauccuggaguuuga

SEQ ID NO: 2643311 - RNA, 19 nt, Homo sapiens
  misc_RNA (1)...(19): siRNA sense strand
ugaaacaggccaagggcau

SEQ ID NO: 2643312 - RNA, 19 nt, Homo sapiens
  misc_RNA (1)...(19): siRNA sense strand
caacagugaaacaggccaa

SEQ ID NO: 2643313 - RNA, 19 nt, Homo sapiens
  misc_RNA (1)...(19): siRNA sense strand
ccaagggcauucugggcaa

SEQ ID NO: 2643314 - RNA, 19 nt, Homo sapiens
  misc_RNA (1)...(19): siRNA sense strand
aggcagaacagcaggagga

SEQ ID NO: 2643315 - RNA, 19 nt, Homo sapiens
  misc_RNA (1)...(19): siRNA sense strand
acacgacgguuguggguga

SEQ ID NO: 2643316 - RNA, 19 nt, Homo sapiens
  misc_RNA (1)...(19): siRNA sense strand
agaugaaggccuuuggaga

SEQ ID NO: 2643317 - RNA, 19 nt, Homo sapiens
  misc_RNA (1)...(19): siRNA sense strand
cgggagacccagaagcaca

SEQ ID NO: 2643318 - RNA, 19 nt, Homo sapiens
  misc_RNA (1)...(19): siRNA sense strand
auccauaagcggagagcca

SEQ ID NO: 2643319 - RNA, 19 nt, Homo sapiens
  misc_RNA (1)...(19): siRNA sense strand
aggacaaaggccaggacga

SEQ ID NO: 2643320 - RNA, 19 nt, Homo sapiens
  misc_RNA (1)...(19): siRNA sense strand
cagagaugggcgagagucu

SEQ ID NO: 2643321 - RNA, 19 nt, Homo sapiens
  misc_RNA (1)...(19): siRNA sense strand
gaguccuggcccuggauaa

SEQ ID NO: 2643322 - RNA, 19 nt, Homo sapiens
  misc_RNA (1)...(19): siRNA sense strand
caaagaugucaguggguuc

SEQ ID NO: 2643323 - RNA, 19 nt, Homo sapiens
  misc_RNA (1)...(19): siRNA sense strand
cagaacagcaggaggagcu

SEQ ID NO: 2643324 - RNA, 19 nt, Homo sapiens
  misc_RNA (1)...(19): siRNA sense strand
gcaucgaguaccaguggau

SEQ ID NO: 2643325 - RNA, 19 nt, Homo sapiens
  misc_RNA (1)...(19): siRNA sense strand
cgccaagcacauccagaaa

SEQ ID NO: 2643326 - RNA, 19 nt, Homo sapiens
  misc_RNA (1)...(19): siRNA sense strand
gcacugagaccuacccaga

SEQ ID NO: 2643327 - RNA, 19 nt, Homo sapiens
  misc_RNA (1)...(19): siRNA sense strand
ugaaguuccuggaggugga

SEQ ID NO: 2643328 - RNA, 19 nt, Homo sapiens
  misc_RNA (1)...(19): siRNA sense strand
gggucagggagcuugagaa

SEQ ID NO: 2643329 - RNA, 19 nt, Homo sapiens
  misc_RNA (1)...(19): siRNA sense strand
gcaaagaugucaguggguu

SEQ ID NO: 2643330 - RNA, 19 nt, Homo sapiens
  misc_RNA (1)...(19): siRNA sense strand
ccuucauccuggaguuuga

SEQ ID NO: 2643331 - RNA, 19 nt, Homo sapiens
  misc_RNA (1)...(19): siRNA sense strand
cggccaaggacuacaggaa

SEQ ID NO: 2643332 - RNA, 19 nt, Homo sapiens
  misc_RNA (1)...(19): siRNA sense strand
cagacagaaguuuggacaa

SEQ ID NO: 2643333 - RNA, 19 nt, Homo sapiens
  misc_RNA (1)...(19): siRNA sense strand
uggaagagaaugaugcuga

SEQ ID NO: 2643334 - RNA, 19 nt, Homo sapiens
  misc_RNA (1)...(19): siRNA sense strand
gcuaaggacagucaggaca

SEQ ID NO: 2643335 - RNA, 19 nt, Homo sapiens
  misc_RNA (1)...(19): siRNA sense strand
gcaagagccgcuaaggaca

SEQ ID NO: 2643336 - RNA, 19 nt, Homo sapiens
  misc_RNA (1)...(19): siRNA sense strand
aggccggauugucaggaaa

SEQ ID NO: 2643337 - RNA, 19 nt, Homo sapiens
  misc_RNA (1)...(19): siRNA sense strand
agcggaaggcaaagaggaa

SEQ ID NO: 2643338 - RNA, 19 nt, Homo sapiens
  misc_RNA (1)...(19): siRNA sense strand
acuuacagucacagcggaa

SEQ ID NO: 2643339 - RNA, 19 nt, Homo sapiens
  misc_RNA (1)...(19): siRNA sense strand
gcagacagaaguuuggaca

SEQ ID NO: 2643340 - RNA, 19 nt, Homo sapiens
  misc_RNA (1)...(19): siRNA sense strand
cagucacagcggaaggcaa

SEQ ID NO: 2643341 - RNA, 19 nt, Homo sapiens
  misc_RNA (1)...(19): siRNA sense strand
cggauugucaggaaaccaa

SEQ ID NO: 2643342 - RNA, 19 nt, Homo sapiens
  misc_RNA (1)...(19): siRNA sense strand
ggacaacucaggacaggga

SEQ ID NO: 2643343 - RNA, 19 nt, Homo sapiens
  misc_RNA (1)...(19): siRNA sense strand
gcccaaggcuguugagcuc

SEQ ID NO: 2643344 - RNA, 19 nt, Homo sapiens
  misc_RNA (1)...(19): siRNA sense strand
gcaaagaggaagcaggcag

SEQ ID NO: 2643345 - RNA, 19 nt, Homo sapiens
  misc_RNA (1)...(19): siRNA sense strand
gcacugaagaggagggaga

SEQ ID NO: 2643346 - RNA, 19 nt, Homo sapiens
  misc_RNA (1)...(19): siRNA sense strand
gugagaaacuggauaagaa

SEQ ID NO: 2643347 - RNA, 19 nt, Homo sapiens
  misc_RNA (1)...(19): siRNA sense strand
cagcaaaaguaaaggguga

SEQ ID NO: 2643348 - RNA, 19 nt, Homo sapiens
  misc_RNA (1)...(19): siRNA sense strand
gcgugaaagcacuggacaa

SEQ ID NO: 2643349 - RNA, 19 nt, Homo sapiens
  misc_RNA (1)...(19): siRNA sense strand
cugaagacgaagugaguga

SEQ ID NO: 2643350 - RNA, 19 nt, Homo sapiens
  misc_RNA (1)...(19): siRNA sense strand
aaguaaagggugagaaacu

SEQ ID NO: 2643351 - RNA, 19 nt, Homo sapiens
  misc_RNA (1)...(19): siRNA sense strand
gggcagauucccuggccaa

SEQ ID NO: 2643352 - RNA, 19 nt, Homo sapiens
  misc_RNA (1)...(19): siRNA sense strand
cauuggagguggaggagga

SEQ ID NO: 2643353 - RNA, 19 nt, Homo sapiens
  misc_RNA (1)...(19): siRNA sense strand
agcaggaugcagagggaaa

SEQ ID NO: 2643354 - RNA, 19 nt, Homo sapiens
  misc_RNA (1)...(19): siRNA sense strand
acagcaaagcagagaauca

SEQ ID NO: 2643355 - RNA, 19 nt, Homo sapiens
  misc_RNA (1)...(19): siRNA sense strand
gcguggaggagguggacau

SEQ ID NO: 2643356 - RNA, 19 nt, Homo sapiens
  misc_RNA (1)...(19): siRNA sense strand
gcauaaaggaggaagacac

SEQ ID NO: 2643357 - RNA, 19 nt, Homo sapiens
  misc_RNA (1)...(19): siRNA sense strand
agugaagagcccuggagaa

SEQ ID NO: 2643358 - RNA, 19 nt, Homo sapiens
  misc_RNA (1)...(19): siRNA sense strand
cagcauuggagguggagga

SEQ ID NO: 2643359 - RNA, 19 nt, Homo sapiens
  misc_RNA (1)...(19): siRNA sense strand
agggugagaaacuggauaa

SEQ ID NO: 2643360 - RNA, 19 nt, Homo sapiens
  misc_RNA (1)...(19): siRNA sense strand
gagcauuccugcagcgagu

SEQ ID NO: 2643361 - RNA, 19 nt, Homo sapiens
  misc_RNA (1)...(19): siRNA sense strand
aaaugagcuuccugagcaa

SEQ ID NO: 2643362 - RNA, 19 nt, Homo sapiens
  misc_RNA (1)...(19): siRNA sense strand
agauaaugauaguggcauc

SEQ ID NO: 2643363 - RNA, 19 nt, Homo sapiens
  misc_RNA (1)...(19): siRNA sense strand
agauuugauagaagaggaa

SEQ ID NO: 2643364 - RNA, 19 nt, Homo sapiens
  misc_RNA (1)...(19): siRNA sense strand
cauuaugggaggagagaag

SEQ ID NO: 2643365 - RNA, 19 nt, Homo sapiens
  misc_RNA (1)...(19): siRNA sense strand
uguuauagaggaagaggau

SEQ ID NO: 2643366 - RNA, 19 nt, Homo sapiens
  misc_RNA (1)...(19): siRNA sense strand
augaaggagacgaguauuu

SEQ ID NO: 2643367 - RNA, 19 nt, Homo sapiens
  misc_RNA (1)...(19): siRNA sense strand
gcagcgagucggagacaca

SEQ ID NO: 2643368 - RNA, 19 nt, Homo sapiens
  misc_RNA (1)...(19): siRNA sense strand
uggagguggaggaggauuu

SEQ ID NO: 2643369 - RNA, 19 nt, Homo sapiens
  misc_RNA (1)...(19): siRNA sense strand
ugacagcaaagcagagaau

SEQ ID NO: 2643370 - RNA, 19 nt, Homo sapiens
  misc_RNA (1)...(19): siRNA sense strand
ucaaaugugcugaggaagu

SEQ ID NO: 2643371 - RNA, 19 nt, Homo sapiens
  misc_RNA (1)...(19): siRNA sense strand
ugacacagaugcucgggua

SEQ ID NO: 2643372 - RNA, 19 nt, Homo sapiens
  misc_RNA (1)...(19): siRNA sense strand
ccgaagaggagcuuggcuu

SEQ ID NO: 2643373 - RNA, 19 nt, Homo sapiens
  misc_RNA (1)...(19): siRNA sense strand
agguauggagugugacaau

SEQ ID NO: 2643374 - RNA, 19 nt, Homo sapiens
  misc_RNA (1)...(19): siRNA sense strand
uagaagaggaaaaggaaga

SEQ ID NO: 2643375 - RNA, 19 nt, Homo sapiens
  misc_RNA (1)...(19): siRNA sense strand
cgugaaagcacuggacaau

SEQ ID NO: 2643376 - RNA, 19 nt, Homo sapiens
  misc_RNA (1)...(19): siRNA sense strand
gcauccauccucagagaau

SEQ ID NO: 2643377 - RNA, 19 nt, Homo sapiens
  misc_RNA (1)...(19): siRNA sense strand
guacaagcgaggagugugu

SEQ ID NO: 2643378 - RNA, 19 nt, Homo sapiens
  misc_RNA (1)...(19): siRNA sense strand
aggaagagucaggaagcua

SEQ ID NO: 2643379 - RNA, 19 nt, Homo sapiens
  misc_RNA (1)...(19): siRNA sense strand
auuuagaccgagaaguuua

SEQ ID NO: 2643380 - RNA, 19 nt, Homo sapiens
  misc_RNA (1)...(19): siRNA sense strand
cgugcugcaugaagaggaa

SEQ ID NO: 2643381 - RNA, 19 nt, Homo sapiens
  misc_RNA (1)...(19): siRNA sense strand
gaaaugauguuauagagga

SEQ ID NO: 2643382 - RNA, 19 nt, Homo sapiens
  misc_RNA (1)...(19): siRNA sense strand
gcuacauucccaaagacaa

SEQ ID NO: 2643383 - RNA, 19 nt, Homo sapiens
  misc_RNA (1)...(19): siRNA sense strand
gcuuugauuuagaccgaga

SEQ ID NO: 2643384 - RNA, 19 nt, Homo sapiens
  misc_RNA (1)...(19): siRNA sense strand
uggaugaaggagacgagua

SEQ ID NO: 2643385 - RNA, 19 nt, Homo sapiens
  misc_RNA (1)...(19): siRNA sense strand
gauccgagccaugaggaaa

SEQ ID NO: 2643386 - RNA, 19 nt, Homo sapiens
  misc_RNA (1)...(19): siRNA sense strand
agaagagggcggagcagga

SEQ ID NO: 2643387 - RNA, 19 nt, Homo sapiens
  misc_RNA (1)...(19): siRNA sense strand
auucuaagguggcugaaga

SEQ ID NO: 2643388 - RNA, 19 nt, Homo sapiens
  misc_RNA (1)...(19): siRNA sense strand
gguauagaugaccuggaaa

SEQ ID NO: 2643389 - RNA, 19 nt, Homo sapiens
  misc_RNA (1)...(19): siRNA sense strand
caguaaagcuaaaguccac

SEQ ID NO: 2643390 - RNA, 19 nt, Homo sapiens
  misc_RNA (1)...(19): siRNA sense strand
guauagaugaccuggaaac

SEQ ID NO: 2643391 - RNA, 19 nt, Homo sapiens
  misc_RNA (1)...(19): siRNA sense strand
agugcaaagagcuggaaaa

SEQ ID NO: 2643392 - RNA, 19 nt, Homo sapiens
  misc_RNA (1)...(19): siRNA sense strand
gucaauauccgaaaggaca

SEQ ID NO: 2643393 - RNA, 19 nt, Homo sapiens
  misc_RNA (1)...(19): siRNA sense strand
augauguuauagaggaaga

SEQ ID NO: 2643394 - RNA, 19 nt, Homo sapiens
  misc_RNA (1)...(19): siRNA sense strand
ugaagaggaagaugagcau

SEQ ID NO: 2643395 - RNA, 19 nt, Homo sapiens
  misc_RNA (1)...(19): siRNA sense strand
ccgugguggaugaaggaga

SEQ ID NO: 2643396 - RNA, 19 nt, Homo sapiens
  misc_RNA (1)...(19): siRNA sense strand
cuggagagcaggaugcaga

SEQ ID NO: 2643397 - RNA, 19 nt, Homo sapiens
  misc_RNA (1)...(19): siRNA sense strand
agggaaaugauguuauaga

SEQ ID NO: 2643398 - RNA, 19 nt, Homo sapiens
  misc_RNA (1)...(19): siRNA sense strand
agaggaauguggugugacu

SEQ ID NO: 2643399 - RNA, 19 nt, Homo sapiens
  misc_RNA (1)...(19): siRNA sense strand
cagagaaucacaagguagu

SEQ ID NO: 2643400 - RNA, 19 nt, Homo sapiens
  misc_RNA (1)...(19): siRNA sense strand
ccaacaacagcaaggagga

SEQ ID NO: 2643401 - RNA, 19 nt, Homo sapiens
  misc_RNA (1)...(19): siRNA sense strand
cuggauaagaagcugaaaa

SEQ ID NO: 2643402 - RNA, 19 nt, Homo sapiens
  misc_RNA (1)...(19): siRNA sense strand
ggucaauauccgaaaggac

SEQ ID NO: 2643403 - RNA, 19 nt, Homo sapiens
  misc_RNA (1)...(19): siRNA sense strand
agaggaagaggauggauca

SEQ ID NO: 2643404 - RNA, 19 nt, Homo sapiens
  misc_RNA (1)...(19): siRNA sense strand
cuggcaggcugaugacaau

SEQ ID NO: 2643405 - RNA, 19 nt, Homo sapiens
  misc_RNA (1)...(19): siRNA sense strand
agugcauaaaggaggaaga

SEQ ID NO: 2643406 - RNA, 19 nt, Homo sapiens
  misc_RNA (1)...(19): siRNA sense strand
gauagaagaggaaaaggaa

SEQ ID NO: 2643407 - RNA, 19 nt, Homo sapiens
  misc_RNA (1)...(19): siRNA sense strand
guguauggauggagaaugu

SEQ ID NO: 2643408 - RNA, 19 nt, Homo sapiens
  misc_RNA (1)...(19): siRNA sense strand
ggauggagaaugugccaau

SEQ ID NO: 2643409 - RNA, 19 nt, Homo sapiens
  misc_RNA (1)...(19): siRNA sense strand
ccuccguguucuuggacaa

SEQ ID NO: 2643410 - RNA, 19 nt, Homo sapiens
  misc_RNA (1)...(19): siRNA sense strand
gugaaccaggacaggguaa

SEQ ID NO: 2643411 - RNA, 19 nt, Homo sapiens
  misc_RNA (1)...(19): siRNA sense strand
acaagggugucaauggcaa

SEQ ID NO: 2643412 - RNA, 19 nt, Homo sapiens
  misc_RNA (1)...(19): siRNA sense strand
caggaaagaugcugcaccu

SEQ ID NO: 2643413 - RNA, 19 nt, Homo sapiens
  misc_RNA (1)...(19): siRNA sense strand
aggccaagaagcugaaguu

SEQ ID NO: 2643414 - RNA, 19 nt, Homo sapiens
  misc_RNA (1)...(19): siRNA sense strand
gcuuaaggagagagggcac

SEQ ID NO: 2643415 - RNA, 19 nt, Homo sapiens
  misc_RNA (1)...(19): siRNA sense strand
gggaagaaauuaaagacua

SEQ ID NO: 2643416 - RNA, 19 nt, Homo sapiens
  misc_RNA (1)...(19): siRNA sense strand
caaauaaccaagaggaaaa

SEQ ID NO: 2643417 - RNA, 19 nt, Homo sapiens
  misc_RNA (1)...(19): siRNA sense strand
ggaaaagggaagaaauuaa

SEQ ID NO: 2643418 - RNA, 19 nt, Homo sapiens
  misc_RNA (1)...(19): siRNA sense strand
aggauaaacccgaugcaaa

SEQ ID NO: 2643419 - RNA, 19 nt, Homo sapiens
  misc_RNA (1)...(19): siRNA sense strand
aaacaauaucugugagaga

SEQ ID NO: 2643420 - RNA, 19 nt, Homo sapiens
  misc_RNA (1)...(19): siRNA sense strand
ccaaggaagacaugaggaa

SEQ ID NO: 2643421 - RNA, 19 nt, Homo sapiens
  misc_RNA (1)...(19): siRNA sense strand
gcucagaaauggaagcuca

SEQ ID NO: 2643422 - RNA, 19 nt, Homo sapiens
  misc_RNA (1)...(19): siRNA sense strand
caaucuuauuagaggagaa

SEQ ID NO: 2643423 - RNA, 19 nt, Homo sapiens
  misc_RNA (1)...(19): siRNA sense strand
aguuagaaucugaagagaa

SEQ ID NO: 2643424 - RNA, 19 nt, Homo sapiens
  misc_RNA (1)...(19): siRNA sense strand
ggaccaguaaugaggaaau

SEQ ID NO: 2643425 - RNA, 19 nt, Homo sapiens
  misc_RNA (1)...(19): siRNA sense strand
cugaagagaagcaaguuaa

SEQ ID NO: 2643426 - RNA, 19 nt, Homo sapiens
  misc_RNA (1)...(19): siRNA sense strand
acaaauaaccaagaggaaa

SEQ ID NO: 2643427 - RNA, 19 nt, Homo sapiens
  misc_RNA (1)...(19): siRNA sense strand
uguaagaacguuagcgaga

SEQ ID NO: 2643428 - RNA, 19 nt, Homo sapiens
  misc_RNA (1)...(19): siRNA sense strand
uggaaaucguaguagaaga

SEQ ID NO: 2643429 - RNA, 19 nt, Homo sapiens
  misc_RNA (1)...(19): siRNA sense strand
ccagagugaagaagagauu

SEQ ID NO: 2643430 - RNA, 19 nt, Homo sapiens
  misc_RNA (1)...(19): siRNA sense strand
ugaaauugcugauggggaa

SEQ ID NO: 2643431 - RNA, 19 nt, Homo sapiens
  misc_RNA (1)...(19): siRNA sense strand
aaggaagacaugaggaaga

SEQ ID NO: 2643432 - RNA, 19 nt, Homo sapiens
  misc_RNA (1)...(19): siRNA sense strand
gcuuuuaauugaaggacaa

SEQ ID NO: 2643433 - RNA, 19 nt, Homo sapiens
  misc_RNA (1)...(19): siRNA sense strand
gggacugugucuuggaaaa

SEQ ID NO: 2643434 - RNA, 19 nt, Homo sapiens
  misc_RNA (1)...(19): siRNA sense strand
cuaugaagcuggagagccu

SEQ ID NO: 2643435 - RNA, 19 nt, Homo sapiens
  misc_RNA (1)...(19): siRNA sense strand
aguuaaugcugaagaaauc

SEQ ID NO: 2643436 - RNA, 19 nt, Homo sapiens
  misc_RNA (1)...(19): siRNA sense strand
ccuggacgguggagaggaa

SEQ ID NO: 2643437 - RNA, 19 nt, Homo sapiens
  misc_RNA (1)...(19): siRNA sense strand
aaguaaaccagaugugaau

SEQ ID NO: 2643438 - RNA, 19 nt, Homo sapiens
  misc_RNA (1)...(19): siRNA sense strand
gcagaauugaagaugggaa

SEQ ID NO: 2643439 - RNA, 19 nt, Homo sapiens
  misc_RNA (1)...(19): siRNA sense strand
cugauauguucuggagaua

SEQ ID NO: 2643440 - RNA, 19 nt, Homo sapiens
  misc_RNA (1)...(19): siRNA sense strand
ggauuaaucucaagcccuu

SEQ ID NO: 2643441 - RNA, 19 nt, Homo sapiens
  misc_RNA (1)...(19): siRNA sense strand
gggaaaaggauauugaaca

SEQ ID NO: 2643442 - RNA, 19 nt, Homo sapiens
  misc_RNA (1)...(19): siRNA sense strand
ggauaaacccgaugcaaag

SEQ ID NO: 2643443 - RNA, 19 nt, Homo sapiens
  misc_RNA (1)...(19): siRNA sense strand
aaucaucccuuuacaguua

SEQ ID NO: 2643444 - RNA, 19 nt, Homo sapiens
  misc_RNA (1)...(19): siRNA sense strand
auguugaucauuugggaaa

SEQ ID NO: 2643445 - RNA, 19 nt, Homo sapiens
  misc_RNA (1)...(19): siRNA sense strand
cggagauacuauugguguu

SEQ ID NO: 2643446 - RNA, 19 nt, Homo sapiens
  misc_RNA (1)...(19): siRNA sense strand
ccaccugcuccuagagaau

SEQ ID NO: 2643447 - RNA, 19 nt, Homo sapiens
  misc_RNA (1)...(19): siRNA sense strand
gugaagaagagauugauca

SEQ ID NO: 2643448 - RNA, 19 nt, Homo sapiens
  misc_RNA (1)...(19): siRNA sense strand
auucuaaaguccagccaau

SEQ ID NO: 2643449 - RNA, 19 nt, Homo sapiens
  misc_RNA (1)...(19): siRNA sense strand
auauaaacuaggacggaga

SEQ ID NO: 2643450 - RNA, 19 nt, Homo sapiens
  misc_RNA (1)...(19): siRNA sense strand
aacaaauaaccaagaggaa

SEQ ID NO: 2643451 - RNA, 19 nt, Homo sapiens
  misc_RNA (1)...(19): siRNA sense strand
agaagaugcaacacugaaa

SEQ ID NO: 2643452 - RNA, 19 nt, Homo sapiens
  misc_RNA (1)...(19): siRNA sense strand
cuugaaagacggagauacu

SEQ ID NO: 2643453 - RNA, 19 nt, Homo sapiens
  misc_RNA (1)...(19): siRNA sense strand
agagugaagaagagauuga

SEQ ID NO: 2643454 - RNA, 19 nt, Homo sapiens
  misc_RNA (1)...(19): siRNA sense strand
aggaaugaccagcaaauuu

SEQ ID NO: 2643455 - RNA, 19 nt, Homo sapiens
  misc_RNA (1)...(19): siRNA sense strand
gguuuaaacaauagcaucu

SEQ ID NO: 2643456 - RNA, 19 nt, Homo sapiens
  misc_RNA (1)...(19): siRNA sense strand
gcgagaggcaggaagacuu

SEQ ID NO: 2643457 - RNA, 19 nt, Homo sapiens
  misc_RNA (1)...(19): siRNA sense strand
gaacagcaauuucagggua

SEQ ID NO: 2643458 - RNA, 19 nt, Homo sapiens
  misc_RNA (1)...(19): siRNA sense strand
ugaccaaggaagagaaaug

SEQ ID NO: 2643459 - RNA, 19 nt, Homo sapiens
  misc_RNA (1)...(19): siRNA sense strand
guucaaccugggacagaaa

SEQ ID NO: 2643460 - RNA, 19 nt, Homo sapiens
  misc_RNA (1)...(19): siRNA sense strand
aaucguaguagaagaaaca

SEQ ID NO: 2643461 - RNA, 19 nt, Homo sapiens
  misc_RNA (1)...(19): siRNA sense strand
gcugaagaaaucuggccua

SEQ ID NO: 2643462 - RNA, 19 nt, Homo sapiens
  misc_RNA (1)...(19): siRNA sense strand
guaaugaggaaaugaggca

SEQ ID NO: 2643463 - RNA, 19 nt, Homo sapiens
  misc_RNA (1)...(19): siRNA sense strand
ggguaaagaaagugccuac

SEQ ID NO: 2643464 - RNA, 19 nt, Homo sapiens
  misc_RNA (1)...(19): siRNA sense strand
ccacauucaaacugguauu

SEQ ID NO: 2643465 - RNA, 19 nt, Homo sapiens
  misc_RNA (1)...(19): siRNA sense strand
cagagaugacacuggaaaa

SEQ ID NO: 2643466 - RNA, 19 nt, Homo sapiens
  misc_RNA (1)...(19): siRNA sense strand
guaaagaauguaagaacgu

SEQ ID NO: 2643467 - RNA, 19 nt, Homo sapiens
  misc_RNA (1)...(19): siRNA sense strand
ugaagagaagcaaguuaaa

SEQ ID NO: 2643468 - RNA, 19 nt, Homo sapiens
  misc_RNA (1)...(19): siRNA sense strand
cggcagccacucagggaau

SEQ ID NO: 2643469 - RNA, 19 nt, Homo sapiens
  misc_RNA (1)...(19): siRNA sense strand
cggaaaucccaguugcaga

SEQ ID NO: 2643470 - RNA, 19 nt, Homo sapiens
  misc_RNA (1)...(19): siRNA sense strand
agaaacaauaucugugaga

SEQ ID NO: 2643471 - RNA, 19 nt, Homo sapiens
  misc_RNA (1)...(19): siRNA sense strand
gaagaugcucucuggaaca

SEQ ID NO: 2643472 - RNA, 19 nt, Homo sapiens
  misc_RNA (1)...(19): siRNA sense strand
aaggaaacuagcuguuaua

SEQ ID NO: 2643473 - RNA, 19 nt, Homo sapiens
  misc_RNA (1)...(19): siRNA sense strand
aacagcaauuucaggguaa

SEQ ID NO: 2643474 - RNA, 19 nt, Homo sapiens
  misc_RNA (1)...(19): siRNA sense strand
augaaauggaugcagcuaa

SEQ ID NO: 2643475 - RNA, 19 nt, Homo sapiens
  misc_RNA (1)...(19): siRNA sense strand
ucugaagagaagcaaguua

SEQ ID NO: 2643476 - RNA, 19 nt, Homo sapiens
  misc_RNA (1)...(19): siRNA sense strand
caacaaauaaccaagagga

SEQ ID NO: 2643477 - RNA, 19 nt, Homo sapiens
  misc_RNA (1)...(19): siRNA sense strand
ugaaagacggagauacuau

SEQ ID NO: 2643478 - RNA, 19 nt, Homo sapiens
  misc_RNA (1)...(19): siRNA sense strand
cauguauguagaagaggaa

SEQ ID NO: 2643479 - RNA, 19 nt, Homo sapiens
  misc_RNA (1)...(19): siRNA sense strand
ggaaacuagcuguuauaca

SEQ ID NO: 2643480 - RNA, 19 nt, Homo sapiens
  misc_RNA (1)...(19): siRNA sense strand
aaaguaaaccagaugugaa

SEQ ID NO: 2643481 - RNA, 19 nt, Homo sapiens
  misc_RNA (1)...(19): siRNA sense strand
auaggaauaucuuggaaca

SEQ ID NO: 2643482 - RNA, 19 nt, Homo sapiens
  misc_RNA (1)...(19): siRNA sense strand
ccaaaagggcagaauguga

SEQ ID NO: 2643483 - RNA, 19 nt, Homo sapiens
  misc_RNA (1)...(19): siRNA sense strand
cagaaauggaagcucaauu

SEQ ID NO: 2643484 - RNA, 19 nt, Homo sapiens
  misc_RNA (1)...(19): siRNA sense strand
ggacauuccuggagggugu

SEQ ID NO: 2643485 - RNA, 19 nt, Homo sapiens
  misc_RNA (1)...(19): siRNA sense strand
gcaaugacuuugacagcga

SEQ ID NO: 2643486 - RNA, 19 nt, Homo sapiens
  misc_RNA (1)...(19): siRNA sense strand
ccuucauccucuuuggaaa

SEQ ID NO: 2643487 - RNA, 19 nt, Homo sapiens
  misc_RNA (1)...(19): siRNA sense strand
uggcaaggguggucgggau

SEQ ID NO: 2643488 - RNA, 19 nt, Homo sapiens
  misc_RNA (1)...(19): siRNA sense strand
ucaagagagucaagagcca

SEQ ID NO: 2643489 - RNA, 19 nt, Homo sapiens
  misc_RNA (1)...(19): siRNA sense strand
gcauuauaguggcggucau

SEQ ID NO: 2643490 - RNA, 19 nt, Homo sapiens
  misc_RNA (1)...(19): siRNA sense strand
gugccgaccaggaggaaga

SEQ ID NO: 2643491 - RNA, 19 nt, Homo sapiens
  misc_RNA (1)...(19): siRNA sense strand
ugaccaagauccuggcuga

SEQ ID NO: 2643492 - RNA, 19 nt, Homo sapiens
  misc_RNA (1)...(19): siRNA sense strand
ggaauuauuaugaagcaga

SEQ ID NO: 2643493 - RNA, 19 nt, Homo sapiens
  misc_RNA (1)...(19): siRNA sense strand
cggaaggucuugcuggaga

SEQ ID NO: 2643494 - RNA, 19 nt, Homo sapiens
  misc_RNA (1)...(19): siRNA sense strand
ucaaaggggaggugaagaa

SEQ ID NO: 2643495 - RNA, 19 nt, Homo sapiens
  misc_RNA (1)...(19): siRNA sense strand
gggccaagugauaccgcua

SEQ ID NO: 2643496 - RNA, 19 nt, Homo sapiens
  misc_RNA (1)...(19): siRNA sense strand
ccacagaggaaaacaguga

SEQ ID NO: 2643497 - RNA, 19 nt, Homo sapiens
  misc_RNA (1)...(19): siRNA sense strand
auuaagacccuguaugcaa

SEQ ID NO: 2643498 - RNA, 19 nt, Homo sapiens
  misc_RNA (1)...(19): siRNA sense strand
aggugaagcaguaccggaa

SEQ ID NO: 2643499 - RNA, 19 nt, Homo sapiens
  misc_RNA (1)...(19): siRNA sense strand
ccagcaagguggagguccu

SEQ ID NO: 2643500 - RNA, 19 nt, Homo sapiens
  misc_RNA (1)...(19): siRNA sense strand
cagcauggguuucuggcuu

SEQ ID NO: 2643501 - RNA, 19 nt, Homo sapiens
  misc_RNA (1)...(19): siRNA sense strand
gaucagaaagccugggaag

SEQ ID NO: 2643502 - RNA, 19 nt, Homo sapiens
  misc_RNA (1)...(19): siRNA sense strand
aggagauggugcagaucca

SEQ ID NO: 2643503 - RNA, 19 nt, Homo sapiens
  misc_RNA (1)...(19): siRNA sense strand
aggacaagguggccgagau

SEQ ID NO: 2643504 - RNA, 19 nt, Homo sapiens
  misc_RNA (1)...(19): siRNA sense strand
agaagcuggaugagaauga

SEQ ID NO: 2643505 - RNA, 19 nt, Homo sapiens
  misc_RNA (1)...(19): siRNA sense strand
augacaagcucccggacuu

SEQ ID NO: 2643506 - RNA, 19 nt, Homo sapiens
  misc_RNA (1)...(19): siRNA sense strand
ucacaucgcuccugaggca

SEQ ID NO: 2643507 - RNA, 19 nt, Homo sapiens
  misc_RNA (1)...(19): siRNA sense strand
acaagacggacuacagcaa

SEQ ID NO: 2643508 - RNA, 19 nt, Homo sapiens
  misc_RNA (1)...(19): siRNA sense strand
aacagugagcugauggaua

SEQ ID NO: 2643509 - RNA, 19 nt, Homo sapiens
  misc_RNA (1)...(19): siRNA sense strand
ucagaagcuggaugagaau

SEQ ID NO: 2643510 - RNA, 19 nt, Homo sapiens
  misc_RNA (1)...(19): siRNA sense strand
auuaugaagcagaugucua

SEQ ID NO: 2643511 - RNA, 19 nt, Homo sapiens
  misc_RNA (1)...(19): siRNA sense strand
acaucaaggaccuggagga

SEQ ID NO: 2643512 - RNA, 19 nt, Homo sapiens
  misc_RNA (1)...(19): siRNA sense strand
gggauguccaagaagcauu

SEQ ID NO: 2643513 - RNA, 19 nt, Homo sapiens
  misc_RNA (1)...(19): siRNA sense strand
acagcgagggugugauuau

SEQ ID NO: 2643514 - RNA, 19 nt, Homo sapiens
  misc_RNA (1)...(19): siRNA sense strand
ggaucuucuucgacaacga

SEQ ID NO: 2643515 - RNA, 19 nt, Homo sapiens
  misc_RNA (1)...(19): siRNA sense strand
uguucaccaugcugagaaa

SEQ ID NO: 2643516 - RNA, 19 nt, Homo sapiens
  misc_RNA (1)...(19): siRNA sense strand
gggaaaagcccagggacga

SEQ ID NO: 2643517 - RNA, 19 nt, Homo sapiens
  misc_RNA (1)...(19): siRNA sense strand
ggaaggagguggagcaggu

SEQ ID NO: 2643518 - RNA, 19 nt, Homo sapiens
  misc_RNA (1)...(19): siRNA sense strand
cagaggauguacagggaug

SEQ ID NO: 2643519 - RNA, 19 nt, Homo sapiens
  misc_RNA (1)...(19): siRNA sense strand
acaggaaggagguggagca

SEQ ID NO: 2643520 - RNA, 19 nt, Homo sapiens
  misc_RNA (1)...(19): siRNA sense strand
aggagguggagcaggugua

SEQ ID NO: 2643521 - RNA, 19 nt, Homo sapiens
  misc_RNA (1)...(19): siRNA sense strand
aagcagaacuugaggccaa

SEQ ID NO: 2643522 - RNA, 19 nt, Homo sapiens
  misc_RNA (1)...(19): siRNA sense strand
agcuaaagaaucugccaaa

SEQ ID NO: 2643523 - RNA, 19 nt, Homo sapiens
  misc_RNA (1)...(19): siRNA sense strand
guagacagguacuggcaca

SEQ ID NO: 2643524 - RNA, 19 nt, Homo sapiens
  misc_RNA (1)...(19): siRNA sense strand
ccgaaauagcuaaagaauc

SEQ ID NO: 2643525 - RNA, 19 nt, Homo sapiens
  misc_RNA (1)...(19): siRNA sense strand
ccagaauaguuuuagugaa

SEQ ID NO: 2643526 - RNA, 19 nt, Homo sapiens
  misc_RNA (1)...(19): siRNA sense strand
agaccagggaagaagcaga

SEQ ID NO: 2643527 - RNA, 19 nt, Homo sapiens
  misc_RNA (1)...(19): siRNA sense strand
ccuaccagcggauggagaa

SEQ ID NO: 2643528 - RNA, 19 nt, Homo sapiens
  misc_RNA (1)...(19): siRNA sense strand
gagaaaagguccugcagac

SEQ ID NO: 2643529 - RNA, 19 nt, Homo sapiens
  misc_RNA (1)...(19): siRNA sense strand
cagaaaagccgaagggaaa

SEQ ID NO: 2643530 - RNA, 19 nt, Homo sapiens
  misc_RNA (1)...(19): siRNA sense strand
cauuaaagccaaagaguau

SEQ ID NO: 2643531 - RNA, 19 nt, Homo sapiens
  misc_RNA (1)...(19): siRNA sense strand
uggaaauagugaaggaauu

SEQ ID NO: 2643532 - RNA, 19 nt, Homo sapiens
  misc_RNA (1)...(19): siRNA sense strand
ucgaugagauggagggaau

SEQ ID NO: 2643533 - RNA, 19 nt, Homo sapiens
  misc_RNA (1)...(19): siRNA sense strand
gaacaauggccuagaaguu

SEQ ID NO: 2643534 - RNA, 19 nt, Homo sapiens
  misc_RNA (1)...(19): siRNA sense strand
cugaagaaagagaugaaua

SEQ ID NO: 2643535 - RNA, 19 nt, Homo sapiens
  misc_RNA (1)...(19): siRNA sense strand
agagaugccuauagagaau

SEQ ID NO: 2643536 - RNA, 19 nt, Homo sapiens
  misc_RNA (1)...(19): siRNA sense strand
aagauguagaugagagaaa

SEQ ID NO: 2643537 - RNA, 19 nt, Homo sapiens
  misc_RNA (1)...(19): siRNA sense strand
agacaaggcugguggucau

SEQ ID NO: 2643538 - RNA, 19 nt, Homo sapiens
  misc_RNA (1)...(19): siRNA sense strand
auucaaaccuagagcaaga

SEQ ID NO: 2643539 - RNA, 19 nt, Homo sapiens
  misc_RNA (1)...(19): siRNA sense strand
uggaagagacugaagguau

SEQ ID NO: 2643540 - RNA, 19 nt, Homo sapiens
  misc_RNA (1)...(19): siRNA sense strand
caacaaagcaggcgagacu

SEQ ID NO: 2643541 - RNA, 19 nt, Homo sapiens
  misc_RNA (1)...(19): siRNA sense strand
cuacagggauacaggaaga

SEQ ID NO: 2643542 - RNA, 19 nt, Homo sapiens
  misc_RNA (1)...(19): siRNA sense strand
caagaaaaggggaaggaua

SEQ ID NO: 2643543 - RNA, 19 nt, Homo sapiens
  misc_RNA (1)...(19): siRNA sense strand
ggaucaagaaggagcuaau

SEQ ID NO: 2643544 - RNA, 19 nt, Homo sapiens
  misc_RNA (1)...(19): siRNA sense strand
ugaaauuguucgagcgcuu

SEQ ID NO: 2643545 - RNA, 19 nt, Homo sapiens
  misc_RNA (1)...(19): siRNA sense strand
ucuuaaaugugaaguggaa

SEQ ID NO: 2643546 - RNA, 19 nt, Homo sapiens
  misc_RNA (1)...(19): siRNA sense strand
gcacauauuacauggguca

SEQ ID NO: 2643547 - RNA, 19 nt, Homo sapiens
  misc_RNA (1)...(19): siRNA sense strand
caguguagguggagaaacu

SEQ ID NO: 2643548 - RNA, 19 nt, Homo sapiens
  misc_RNA (1)...(19): siRNA sense strand
acuuauaucugcaucgaaa

SEQ ID NO: 2643549 - RNA, 19 nt, Homo sapiens
  misc_RNA (1)...(19): siRNA sense strand
guagauaagaaaggagaua

SEQ ID NO: 2643550 - RNA, 19 nt, Homo sapiens
  misc_RNA (1)...(19): siRNA sense strand
ugugagaagcugaaacaaa

SEQ ID NO: 2643551 - RNA, 19 nt, Homo sapiens
  misc_RNA (1)...(19): siRNA sense strand
acgaagagaaggagagagu

SEQ ID NO: 2643552 - RNA, 19 nt, Homo sapiens
  misc_RNA (1)...(19): siRNA sense strand
gagaagaaagagaaagcau

SEQ ID NO: 2643553 - RNA, 19 nt, Homo sapiens
  misc_RNA (1)...(19): siRNA sense strand
cucagauacuacagggaua

SEQ ID NO: 2643554 - RNA, 19 nt, Homo sapiens
  misc_RNA (1)...(19): siRNA sense strand
cgaagaaggcagaugcaga

SEQ ID NO: 2643555 - RNA, 19 nt, Homo sapiens
  misc_RNA (1)...(19): siRNA sense strand
gcuagauaaaggugcuaaa

SEQ ID NO: 2643556 - RNA, 19 nt, Homo sapiens
  misc_RNA (1)...(19): siRNA sense strand
uggcaagacauauuggaua

SEQ ID NO: 2643557 - RNA, 19 nt, Homo sapiens
  misc_RNA (1)...(19): siRNA sense strand
cagacagauuugaagcuua

SEQ ID NO: 2643558 - RNA, 19 nt, Homo sapiens
  misc_RNA (1)...(19): siRNA sense strand
caguacuagaaaugagaaa

SEQ ID NO: 2643559 - RNA, 19 nt, Homo sapiens
  misc_RNA (1)...(19): siRNA sense strand
cgaaagggucauuuggaau

SEQ ID NO: 2643560 - RNA, 19 nt, Homo sapiens
  misc_RNA (1)...(19): siRNA sense strand
ucaagaaacuagaagacga

SEQ ID NO: 2643561 - RNA, 19 nt, Homo sapiens
  misc_RNA (1)...(19): siRNA sense strand
caagaaacuagaagacgaa

SEQ ID NO: 2643562 - RNA, 19 nt, Homo sapiens
  misc_RNA (1)...(19): siRNA sense strand
gauuugaagcuuaagggaa

SEQ ID NO: 2643563 - RNA, 19 nt, Homo sapiens
  misc_RNA (1)...(19): siRNA sense strand
cgaagggaaaguagagaga

SEQ ID NO: 2643564 - RNA, 19 nt, Homo sapiens
  misc_RNA (1)...(19): siRNA sense strand
acuagaagacgaaaugaaa

SEQ ID NO: 2643565 - RNA, 19 nt, Homo sapiens
  misc_RNA (1)...(19): siRNA sense strand
aagggaaaguagagagagu

SEQ ID NO: 2643566 - RNA, 19 nt, Homo sapiens
  misc_RNA (1)...(19): siRNA sense strand
acauuagaggacaggauaa

SEQ ID NO: 2643567 - RNA, 19 nt, Homo sapiens
  misc_RNA (1)...(19): siRNA sense strand
augcaacaauggugagaga

SEQ ID NO: 2643568 - RNA, 19 nt, Homo sapiens
  misc_RNA (1)...(19): siRNA sense strand
gagauaucuuacagugcaa

SEQ ID NO: 2643569 - RNA, 19 nt, Homo sapiens
  misc_RNA (1)...(19): siRNA sense strand
cuguaaaccuagaucccaa

SEQ ID NO: 2643570 - RNA, 19 nt, Homo sapiens
  misc_RNA (1)...(19): siRNA sense strand
gggagauguuaucgauuau

SEQ ID NO: 2643571 - RNA, 19 nt, Homo sapiens
  misc_RNA (1)...(19): siRNA sense strand
ugagaaaggaaaugcaaca

SEQ ID NO: 2643572 - RNA, 19 nt, Homo sapiens
  misc_RNA (1)...(19): siRNA sense strand
gaaggagagaguuggaauu

SEQ ID NO: 2643573 - RNA, 19 nt, Homo sapiens
  misc_RNA (1)...(19): siRNA sense strand
gcuaccaagaugagaaaca

SEQ ID NO: 2643574 - RNA, 19 nt, Homo sapiens
  misc_RNA (1)...(19): siRNA sense strand
caaagauguagaugagaga

SEQ ID NO: 2643575 - RNA, 19 nt, Homo sapiens
  misc_RNA (1)...(19): siRNA sense strand
aagaugacaaagacagaaa

SEQ ID NO: 2643576 - RNA, 19 nt, Homo sapiens
  misc_RNA (1)...(19): siRNA sense strand
gcuacuuuguggagggcuu

SEQ ID NO: 2643577 - RNA, 19 nt, Homo sapiens
  misc_RNA (1)...(19): siRNA sense strand
gcacuagauuggcaagaca

SEQ ID NO: 2643578 - RNA, 19 nt, Homo sapiens
  misc_RNA (1)...(19): siRNA sense strand
ccaaagcaucugacuguaa

SEQ ID NO: 2643579 - RNA, 19 nt, Homo sapiens
  misc_RNA (1)...(19): siRNA sense strand
aggcagaugcagaggacca

SEQ ID NO: 2643580 - RNA, 19 nt, Homo sapiens
  misc_RNA (1)...(19): siRNA sense strand
acagaaaagccgaagggaa

SEQ ID NO: 2643581 - RNA, 19 nt, Homo sapiens
  misc_RNA (1)...(19): siRNA sense strand
acgaaagggucauuuggaa

SEQ ID NO: 2643582 - RNA, 19 nt, Homo sapiens
  misc_RNA (1)...(19): siRNA sense strand
cagaagaguuucacagaac

SEQ ID NO: 2643583 - RNA, 19 nt, Homo sapiens
  misc_RNA (1)...(19): siRNA sense strand
cugauaaggugcaggccga

SEQ ID NO: 2643584 - RNA, 19 nt, Homo sapiens
  misc_RNA (1)...(19): siRNA sense strand
ucauuaaagccaaagagua

SEQ ID NO: 2643585 - RNA, 19 nt, Homo sapiens
  misc_RNA (1)...(19): siRNA sense strand
agaagaaagagaaagcauu

SEQ ID NO: 2643586 - RNA, 19 nt, Homo sapiens
  misc_RNA (1)...(19): siRNA sense strand
cgaacaaggcaaucuggaa

SEQ ID NO: 2643587 - RNA, 19 nt, Homo sapiens
  misc_RNA (1)...(19): siRNA sense strand
gcaucaaaggagggacaua

SEQ ID NO: 2643588 - RNA, 19 nt, Homo sapiens
  misc_RNA (1)...(19): siRNA sense strand
gggcuguugagaaaggaaa

SEQ ID NO: 2643589 - RNA, 19 nt, Homo sapiens
  misc_RNA (1)...(19): siRNA sense strand
cagaacugcuuuuaagaaa

SEQ ID NO: 2643590 - RNA, 19 nt, Homo sapiens
  misc_RNA (1)...(19): siRNA sense strand
cugcauuauaucuggaauu

SEQ ID NO: 2643591 - RNA, 19 nt, Homo sapiens
  misc_RNA (1)...(19): siRNA sense strand
ucgcaucuguagugggauu

SEQ ID NO: 2643592 - RNA, 19 nt, Homo sapiens
  misc_RNA (1)...(19): siRNA sense strand
ugaagguauuccagaucaa

SEQ ID NO: 2643593 - RNA, 19 nt, Homo sapiens
  misc_RNA (1)...(19): siRNA sense strand
guguguuagcucaguguaa

SEQ ID NO: 2643594 - RNA, 19 nt, Homo sapiens
  misc_RNA (1)...(19): siRNA sense strand
acuuauuguggcagugaaa

SEQ ID NO: 2643595 - RNA, 19 nt, Homo sapiens
  misc_RNA (1)...(19): siRNA sense strand
ggaaaugcaacaaugguga

SEQ ID NO: 2643596 - RNA, 19 nt, Homo sapiens
  misc_RNA (1)...(19): siRNA sense strand
ucucguaacuucagcaaca

SEQ ID NO: 2643597 - RNA, 19 nt, Homo sapiens
  misc_RNA (1)...(19): siRNA sense strand
ugauaugggaggauggaca

SEQ ID NO: 2643598 - RNA, 19 nt, Homo sapiens
  misc_RNA (1)...(19): siRNA sense strand
gugaaacgccacuuauaaa

SEQ ID NO: 2643599 - RNA, 19 nt, Homo sapiens
  misc_RNA (1)...(19): siRNA sense strand
gagcagacuacuaaagcuu

SEQ ID NO: 2643600 - RNA, 19 nt, Homo sapiens
  misc_RNA (1)...(19): siRNA sense strand
uuucagaagcacaguacua

SEQ ID NO: 2643601 - RNA, 19 nt, Homo sapiens
  misc_RNA (1)...(19): siRNA sense strand
gggauguagcagaagcaaa

SEQ ID NO: 2643602 - RNA, 19 nt, Homo sapiens
  misc_RNA (1)...(19): siRNA sense strand
aauuaagucugcugggaga

SEQ ID NO: 2643603 - RNA, 19 nt, Homo sapiens
  misc_RNA (1)...(19): siRNA sense strand
ggucagaaaaugugauguu

SEQ ID NO: 2643604 - RNA, 19 nt, Homo sapiens
  misc_RNA (1)...(19): siRNA sense strand
ugggaagaacagugcauca

SEQ ID NO: 2643605 - RNA, 19 nt, Homo sapiens
  misc_RNA (1)...(19): siRNA sense strand
gugaaacagccugggaaga

SEQ ID NO: 2643606 - RNA, 19 nt, Homo sapiens
  misc_RNA (1)...(19): siRNA sense strand
cucuguuguuggugaauau

SEQ ID NO: 2643607 - RNA, 19 nt, Homo sapiens
  misc_RNA (1)...(19): siRNA sense strand
ucacaaguggcgagggaaa

SEQ ID NO: 2643608 - RNA, 19 nt, Homo sapiens
  misc_RNA (1)...(19): siRNA sense strand
uggaaagcccugagugaua

SEQ ID NO: 2643609 - RNA, 19 nt, Homo sapiens
  misc_RNA (1)...(19): siRNA sense strand
agagaaaguaugagcaaaa

SEQ ID NO: 2643610 - RNA, 19 nt, Homo sapiens
  misc_RNA (1)...(19): siRNA sense strand
aggugaaaaugcagagaua

SEQ ID NO: 2643611 - RNA, 19 nt, Homo sapiens
  misc_RNA (1)...(19): siRNA sense strand
aggaagacuuaaaggcaga

SEQ ID NO: 2643612 - RNA, 19 nt, Homo sapiens
  misc_RNA (1)...(19): siRNA sense strand
ccgcaaagugaaugagcuu

SEQ ID NO: 2643613 - RNA, 19 nt, Homo sapiens
  misc_RNA (1)...(19): siRNA sense strand
agaaaugggaggugaaaau

SEQ ID NO: 2643614 - RNA, 19 nt, Homo sapiens
  misc_RNA (1)...(19): siRNA sense strand
ggaaaagagggguggccaa

SEQ ID NO: 2643615 - RNA, 19 nt, Homo sapiens
  misc_RNA (1)...(19): siRNA sense strand
ugucaaaauaccagagcaa

SEQ ID NO: 2643616 - RNA, 19 nt, Homo sapiens
  misc_RNA (1)...(19): siRNA sense strand
ucaagaaaugggaggugaa

SEQ ID NO: 2643617 - RNA, 19 nt, Homo sapiens
  misc_RNA (1)...(19): siRNA sense strand
aggcaaaugauaagaaagu

SEQ ID NO: 2643618 - RNA, 19 nt, Homo sapiens
  misc_RNA (1)...(19): siRNA sense strand
acucagaucgugaaacaaa

SEQ ID NO: 2643619 - RNA, 19 nt, Homo sapiens
  misc_RNA (1)...(19): siRNA sense strand
uuaucaugcuucaagguaa

SEQ ID NO: 2643620 - RNA, 19 nt, Homo sapiens
  misc_RNA (1)...(19): siRNA sense strand
acagaaaauugcagaacau

SEQ ID NO: 2643621 - RNA, 19 nt, Homo sapiens
  misc_RNA (1)...(19): siRNA sense strand
aagaaaaugccaaggaaga

SEQ ID NO: 2643622 - RNA, 19 nt, Homo sapiens
  misc_RNA (1)...(19): siRNA sense strand
cagagauaacggaggagau

SEQ ID NO: 2643623 - RNA, 19 nt, Homo sapiens
  misc_RNA (1)...(19): siRNA sense strand
uaucaugcuucaagguaau

SEQ ID NO: 2643624 - RNA, 19 nt, Homo sapiens
  misc_RNA (1)...(19): siRNA sense strand
ugaaauucuuagugaucca

SEQ ID NO: 2643625 - RNA, 19 nt, Homo sapiens
  misc_RNA (1)...(19): siRNA sense strand
cagagcaacccaaagcaaa

SEQ ID NO: 2643626 - RNA, 19 nt, Homo sapiens
  misc_RNA (1)...(19): siRNA sense strand
ggaggaagacuuaaaggca

SEQ ID NO: 2643627 - RNA, 19 nt, Homo sapiens
  misc_RNA (1)...(19): siRNA sense strand
aggaaagugaucuagaaau

SEQ ID NO: 2643628 - RNA, 19 nt, Homo sapiens
  misc_RNA (1)...(19): siRNA sense strand
agauaacggaggagaugau

SEQ ID NO: 2643629 - RNA, 19 nt, Homo sapiens
  misc_RNA (1)...(19): siRNA sense strand
cagaaguuaugguggccuu

SEQ ID NO: 2643630 - RNA, 19 nt, Homo sapiens
  misc_RNA (1)...(19): siRNA sense strand
ucuuagugauccagagguu

SEQ ID NO: 2643631 - RNA, 19 nt, Homo sapiens
  misc_RNA (1)...(19): siRNA sense strand
agguggaggaagacuuaaa

SEQ ID NO: 2643632 - RNA, 19 nt, Homo sapiens
  misc_RNA (1)...(19): siRNA sense strand
agggaaagcacauagacuu

SEQ ID NO: 2643633 - RNA, 19 nt, Homo sapiens
  misc_RNA (1)...(19): siRNA sense strand
gcuaacacuugcuauggaa

SEQ ID NO: 2643634 - RNA, 19 nt, Homo sapiens
  misc_RNA (1)...(19): siRNA sense strand
ccuuugugaacauguguaa

SEQ ID NO: 2643635 - RNA, 19 nt, Homo sapiens
  misc_RNA (1)...(19): siRNA sense strand
ucaacuuagggcacagaaa

SEQ ID NO: 2643636 - RNA, 19 nt, Homo sapiens
  misc_RNA (1)...(19): siRNA sense strand
guguggagcugaaugaguu

SEQ ID NO: 2643637 - RNA, 19 nt, Homo sapiens
  misc_RNA (1)...(19): siRNA sense strand
ccugcuacucagaaagcua

SEQ ID NO: 2643638 - RNA, 19 nt, Homo sapiens
  misc_RNA (1)...(19): siRNA sense strand
aagugaggaaagugaucua

SEQ ID NO: 2643639 - RNA, 19 nt, Homo sapiens
  misc_RNA (1)...(19): siRNA sense strand
agaaauugacaaagaaggu

SEQ ID NO: 2643640 - RNA, 19 nt, Homo sapiens
  misc_RNA (1)...(19): siRNA sense strand
gugaaaaugcagagauaac

SEQ ID NO: 2643641 - RNA, 19 nt, Homo sapiens
  misc_RNA (1)...(19): siRNA sense strand
augcagagauaacggagga

SEQ ID NO: 2643642 - RNA, 19 nt, Homo sapiens
  misc_RNA (1)...(19): siRNA sense strand
gugacagagccauugaaau

SEQ ID NO: 2643643 - RNA, 19 nt, Homo sapiens
  misc_RNA (1)...(19): siRNA sense strand
ggucugaacugucugcuga

SEQ ID NO: 2643644 - RNA, 19 nt, Homo sapiens
  misc_RNA (1)...(19): siRNA sense strand
ccagagcaacccaaagcaa

SEQ ID NO: 2643645 - RNA, 19 nt, Homo sapiens
  misc_RNA (1)...(19): siRNA sense strand
cagaggaaagccacaguuu

SEQ ID NO: 2643646 - RNA, 19 nt, Homo sapiens
  misc_RNA (1)...(19): siRNA sense strand
cuuaaaggcagacgaacca

SEQ ID NO: 2643647 - RNA, 19 nt, Homo sapiens
  misc_RNA (1)...(19): siRNA sense strand
agcccuaaaugauggugaa

SEQ ID NO: 2643648 - RNA, 19 nt, Homo sapiens
  misc_RNA (1)...(19): siRNA sense strand
gaaaagagggguggccaaa

SEQ ID NO: 2643649 - RNA, 19 nt, Homo sapiens
  misc_RNA (1)...(19): siRNA sense strand
cagcagagaccuugaggga

SEQ ID NO: 2643650 - RNA, 19 nt, Homo sapiens
  misc_RNA (1)...(19): siRNA sense strand
ucuacagagaagaaggaaa

SEQ ID NO: 2643651 - RNA, 19 nt, Homo sapiens
  misc_RNA (1)...(19): siRNA sense strand
gaaaggaacuucacagcca

SEQ ID NO: 2643652 - RNA, 19 nt, Homo sapiens
  misc_RNA (1)...(19): siRNA sense strand
gcacaauacagaaagcuga

SEQ ID NO: 2643653 - RNA, 19 nt, Homo sapiens
  misc_RNA (1)...(19): siRNA sense strand
gcccaugggacgaugaaau

SEQ ID NO: 2643654 - RNA, 19 nt, Homo sapiens
  misc_RNA (1)...(19): siRNA sense strand
aggucaagacacuuaauua

SEQ ID NO: 2643655 - RNA, 19 nt, Homo sapiens
  misc_RNA (1)...(19): siRNA sense strand
ggccuaacacugaggacau

SEQ ID NO: 2643656 - RNA, 19 nt, Homo sapiens
  misc_RNA (1)...(19): siRNA sense strand
ggccaaaacccuugaggau

SEQ ID NO: 2643657 - RNA, 19 nt, Homo sapiens
  misc_RNA (1)...(19): siRNA sense strand
ccugagcacaauacagaaa

SEQ ID NO: 2643658 - RNA, 19 nt, Homo sapiens
  misc_RNA (1)...(19): siRNA sense strand
gauuugaggauguucgcaa

SEQ ID NO: 2643659 - RNA, 19 nt, Homo sapiens
  misc_RNA (1)...(19): siRNA sense strand
ggagaaagauuacacagga

SEQ ID NO: 2643660 - RNA, 19 nt, Homo sapiens
  misc_RNA (1)...(19): siRNA sense strand
aaggacagucucacagaaa

SEQ ID NO: 2643661 - RNA, 19 nt, Homo sapiens
  misc_RNA (1)...(19): siRNA sense strand
cuagacagcaaaugggaca

SEQ ID NO: 2643662 - RNA, 19 nt, Homo sapiens
  misc_RNA (1)...(19): siRNA sense strand
ggacaucuguuuaccugaa

SEQ ID NO: 2643663 - RNA, 19 nt, Homo sapiens
  misc_RNA (1)...(19): siRNA sense strand
uagaaaggggcaagagauu

SEQ ID NO: 2643664 - RNA, 19 nt, Homo sapiens
  misc_RNA (1)...(19): siRNA sense strand
ccuaggggagagugagaaa

SEQ ID NO: 2643665 - RNA, 19 nt, Homo sapiens
  misc_RNA (1)...(19): siRNA sense strand
gugcagacagcuagaagca

SEQ ID NO: 2643666 - RNA, 19 nt, Homo sapiens
  misc_RNA (1)...(19): siRNA sense strand
cgcugagggaggagaauga

SEQ ID NO: 2643667 - RNA, 19 nt, Homo sapiens
  misc_RNA (1)...(19): siRNA sense strand
ccgaaaggcagcagaagcu

SEQ ID NO: 2643668 - RNA, 19 nt, Homo sapiens
  misc_RNA (1)...(19): siRNA sense strand
gagggaggagaaugaacaa

SEQ ID NO: 2643669 - RNA, 19 nt, Homo sapiens
  misc_RNA (1)...(19): siRNA sense strand
aagauuaguaacaaggaca

SEQ ID NO: 2643670 - RNA, 19 nt, Homo sapiens
  misc_RNA (1)...(19): siRNA sense strand
cccgaagcccugagcacaa

SEQ ID NO: 2643671 - RNA, 19 nt, Homo sapiens
  misc_RNA (1)...(19): siRNA sense strand
gggaggagaaugaacaacu

SEQ ID NO: 2643672 - RNA, 19 nt, Homo sapiens
  misc_RNA (1)...(19): siRNA sense strand
acagagaagaaggaaacaa

SEQ ID NO: 2643673 - RNA, 19 nt, Homo sapiens
  misc_RNA (1)...(19): siRNA sense strand
gugucacauucaaggccua

SEQ ID NO: 2643674 - RNA, 19 nt, Homo sapiens
  misc_RNA (1)...(19): siRNA sense strand
gaugcgauauuaaugggaa

SEQ ID NO: 2643675 - RNA, 19 nt, Homo sapiens
  misc_RNA (1)...(19): siRNA sense strand
cagcagagaccuugaggga

SEQ ID NO: 2643676 - RNA, 19 nt, Homo sapiens
  misc_RNA (1)...(19): siRNA sense strand
ucuacagagaagaaggaaa

SEQ ID NO: 2643677 - RNA, 19 nt, Homo sapiens
  misc_RNA (1)...(19): siRNA sense strand
gaaaggaacuucacagcca

SEQ ID NO: 2643678 - RNA, 19 nt, Homo sapiens
  misc_RNA (1)...(19): siRNA sense strand
gcacaauacagaaagcuga

SEQ ID NO: 2643679 - RNA, 19 nt, Homo sapiens
  misc_RNA (1)...(19): siRNA sense strand
gcccaugggacgaugaaau

SEQ ID NO: 2643680 - RNA, 19 nt, Homo sapiens
  misc_RNA (1)...(19): siRNA sense strand
aggucaagacacuuaauua

SEQ ID NO: 2643681 - RNA, 19 nt, Homo sapiens
  misc_RNA (1)...(19): siRNA sense strand
ggccuaacacugaggacau

SEQ ID NO: 2643682 - RNA, 19 nt, Homo sapiens
  misc_RNA (1)...(19): siRNA sense strand
ggccaaaacccuugaggau

SEQ ID NO: 2643683 - RNA, 19 nt, Homo sapiens
  misc_RNA (1)...(19): siRNA sense strand
ccugagcacaauacagaaa

SEQ ID NO: 2643684 - RNA, 19 nt, Homo sapiens
  misc_RNA (1)...(19): siRNA sense strand
gauuugaggauguucgcaa

SEQ ID NO: 2643685 - RNA, 19 nt, Homo sapiens
  misc_RNA (1)...(19): siRNA sense strand
ggagaaagauuacacagga

SEQ ID NO: 2643686 - RNA, 19 nt, Homo sapiens
  misc_RNA (1)...(19): siRNA sense strand
aaggacagucucacagaaa

SEQ ID NO: 2643687 - RNA, 19 nt, Homo sapiens
  misc_RNA (1)...(19): siRNA sense strand
cuagacagcaaaugggaca

SEQ ID NO: 2643688 - RNA, 19 nt, Homo sapiens
  misc_RNA (1)...(19): siRNA sense strand
uagaaaggggcaagagauu

SEQ ID NO: 2643689 - RNA, 19 nt, Homo sapiens
  misc_RNA (1)...(19): siRNA sense strand
ccuaggggagagugagaaa

SEQ ID NO: 2643690 - RNA, 19 nt, Homo sapiens
  misc_RNA (1)...(19): siRNA sense strand
gugcagacagcuagaagca

SEQ ID NO: 2643691 - RNA, 19 nt, Homo sapiens
  misc_RNA (1)...(19): siRNA sense strand
cgcugagggaggagaauga

SEQ ID NO: 2643692 - RNA, 19 nt, Homo sapiens
  misc_RNA (1)...(19): siRNA sense strand
ccgaaaggcagcagaagcu

SEQ ID NO: 2643693 - RNA, 19 nt, Homo sapiens
  misc_RNA (1)...(19): siRNA sense strand
gagggaggagaaugaacaa

SEQ ID NO: 2643694 - RNA, 19 nt, Homo sapiens
  misc_RNA (1)...(19): siRNA sense strand
aagauuaguaacaaggaca

SEQ ID NO: 2643695 - RNA, 19 nt, Homo sapiens
  misc_RNA (1)...(19): siRNA sense strand
cccgaagcccugagcacaa

SEQ ID NO: 2643696 - RNA, 19 nt, Homo sapiens
  misc_RNA (1)...(19): siRNA sense strand
gggaggagaaugaacaacu

SEQ ID NO: 2643697 - RNA, 19 nt, Homo sapiens
  misc_RNA (1)...(19): siRNA sense strand
acagagaagaaggaaacaa

SEQ ID NO: 2643698 - RNA, 19 nt, Homo sapiens
  misc_RNA (1)...(19): siRNA sense strand
gugucacauucaaggccua

SEQ ID NO: 2643699 - RNA, 19 nt, Homo sapiens
  misc_RNA (1)...(19): siRNA sense strand
gaugcgauauuaaugggaa

SEQ ID NO: 2643700 - RNA, 19 nt, Homo sapiens
  misc_RNA (1)...(19): siRNA sense strand
augaggaagaggaggauaa

SEQ ID NO: 2643701 - RNA, 19 nt, Homo sapiens
  misc_RNA (1)...(19): siRNA sense strand
ccugaagauuccagaccaa

SEQ ID NO: 2643702 - RNA, 19 nt, Homo sapiens
  misc_RNA (1)...(19): siRNA sense strand
gcaagaaggagauggagca

SEQ ID NO: 2643703 - RNA, 19 nt, Homo sapiens
  misc_RNA (1)...(19): siRNA sense strand
gagaguaugaagaggcaga

SEQ ID NO: 2643704 - RNA, 19 nt, Homo sapiens
  misc_RNA (1)...(19): siRNA sense strand
acgugaagaaggaggugaa

SEQ ID NO: 2643705 - RNA, 19 nt, Homo sapiens
  misc_RNA (1)...(19): siRNA sense strand
aagaaggaggugaagcaaa

SEQ ID NO: 2643706 - RNA, 19 nt, Homo sapiens
  misc_RNA (1)...(19): siRNA sense strand
gugcaauaccuggcggaaa

SEQ ID NO: 2643707 - RNA, 19 nt, Homo sapiens
  misc_RNA (1)...(19): siRNA sense strand
uggaauacacuaagcucaa

SEQ ID NO: 2643708 - RNA, 19 nt, Homo sapiens
  misc_RNA (1)...(19): siRNA sense strand
augaagaggaugagccaga

SEQ ID NO: 2643709 - RNA, 19 nt, Homo sapiens
  misc_RNA (1)...(19): siRNA sense strand
ccguggauauggaggagau

SEQ ID NO: 2643710 - RNA, 19 nt, Homo sapiens
  misc_RNA (1)...(19): siRNA sense strand
aggaagaggaggauaaacu

SEQ ID NO: 2643711 - RNA, 19 nt, Homo sapiens
  misc_RNA (1)...(19): siRNA sense strand
ccuuaaaccugcaccgcau

SEQ ID NO: 2643712 - RNA, 19 nt, Homo sapiens
  misc_RNA (1)...(19): siRNA sense strand
ugaucgagaugcagggcuu

SEQ ID NO: 2643713 - RNA, 19 nt, Homo sapiens
  misc_RNA (1)...(19): siRNA sense strand
ggcaugagcaagaaggaga

SEQ ID NO: 2643714 - RNA, 19 nt, Homo sapiens
  misc_RNA (1)...(19): siRNA sense strand
uggacgaugaugaggaaga

SEQ ID NO: 2643715 - RNA, 19 nt, Homo sapiens
  misc_RNA (1)...(19): siRNA sense strand
cgaugaaagacgcugguga

SEQ ID NO: 2643716 - RNA, 19 nt, Homo sapiens
  misc_RNA (1)...(19): siRNA sense strand
cuugaaacacguaugggua

SEQ ID NO: 2643717 - RNA, 19 nt, Homo sapiens
  misc_RNA (1)...(19): siRNA sense strand
agguguuggcagaguggaa

SEQ ID NO: 2643718 - RNA, 19 nt, Homo sapiens
  misc_RNA (1)...(19): siRNA sense strand
gugacaugaucgagaugca

SEQ ID NO: 2643719 - RNA, 19 nt, Homo sapiens
  misc_RNA (1)...(19): siRNA sense strand
gagaggagcuugcggcugu

SEQ ID NO: 2643720 - RNA, 19 nt, Homo sapiens
  misc_RNA (1)...(19): siRNA sense strand
agaugcucauagagaacaa

SEQ ID NO: 2643721 - RNA, 19 nt, Homo sapiens
  misc_RNA (1)...(19): siRNA sense strand
aggauaaacugcacgcgau

SEQ ID NO: 2643722 - RNA, 19 nt, Homo sapiens
  misc_RNA (1)...(19): siRNA sense strand
cuauagaauuacuggacac

SEQ ID NO: 2643723 - RNA, 19 nt, Homo sapiens
  misc_RNA (1)...(19): siRNA sense strand
agaaggagauggagcaggu

SEQ ID NO: 2643724 - RNA, 19 nt, Homo sapiens
  misc_RNA (1)...(19): siRNA sense strand
gcagaugcucauagagaac

SEQ ID NO: 2643725 - RNA, 19 nt, Homo sapiens
  misc_RNA (1)...(19): siRNA sense strand
augaugaggaagaggagga

SEQ ID NO: 2643726 - RNA, 19 nt, Homo sapiens
  misc_RNA (1)...(19): siRNA sense strand
acaaguucggcaugagcaa

SEQ ID NO: 2643727 - RNA, 19 nt, Homo sapiens
  misc_RNA (1)...(19): siRNA sense strand
gagaacugcuguaugagga

SEQ ID NO: 2643728 - RNA, 19 nt, Homo sapiens
  misc_RNA (1)...(19): siRNA sense strand
gugacaacaacauggacuu

SEQ ID NO: 2643729 - RNA, 19 nt, Homo sapiens
  misc_RNA (1)...(19): siRNA sense strand
gugagaguaugaagaggca

SEQ ID NO: 2643730 - RNA, 19 nt, Homo sapiens
  misc_RNA (1)...(19): siRNA sense strand
gugccuuggaauacacuaa

SEQ ID NO: 2643731 - RNA, 19 nt, Homo sapiens
  misc_RNA (1)...(19): siRNA sense strand
acaaugaucagcuggccua

SEQ ID NO: 2643732 - RNA, 19 nt, Homo sapiens
  misc_RNA (1)...(19): siRNA sense strand
gcaugagcaagaaggagau

SEQ ID NO: 2643733 - RNA, 19 nt, Homo sapiens
  misc_RNA (1)...(19): siRNA sense strand
cgcagaggacgcagucaaa

SEQ ID NO: 2643734 - RNA, 19 nt, Homo sapiens
  misc_RNA (1)...(19): siRNA sense strand
acaagcagagggcaggaaa

SEQ ID NO: 2643735 - RNA, 19 nt, Homo sapiens
  misc_RNA (1)...(19): siRNA sense strand
aguuuacuacggaggcaua

SEQ ID NO: 2643736 - RNA, 19 nt, Homo sapiens
  misc_RNA (1)...(19): siRNA sense strand
ugggcuaugugcagggcau

SEQ ID NO: 2643737 - RNA, 19 nt, Homo sapiens
  misc_RNA (1)...(19): siRNA sense strand
gugcagggcaugugcgauc

SEQ ID NO: 2643738 - RNA, 19 nt, Homo sapiens
  misc_RNA (1)...(19): siRNA sense strand
augcaaagaaugugggaaa

SEQ ID NO: 2643739 - RNA, 19 nt, Homo sapiens
  misc_RNA (1)...(19): siRNA sense strand
ggacagauguucagucaaa

SEQ ID NO: 2643740 - RNA, 19 nt, Homo sapiens
  misc_RNA (1)...(19): siRNA sense strand
auguaaagaaugugggaaa

SEQ ID NO: 2643741 - RNA, 19 nt, Homo sapiens
  misc_RNA (1)...(19): siRNA sense strand
auguaaagaaugugggaaa

SEQ ID NO: 2643742 - RNA, 19 nt, Homo sapiens
  misc_RNA (1)...(19): siRNA sense strand
guguaaugaaugugggaaa

SEQ ID NO: 2643743 - RNA, 19 nt, Homo sapiens
  misc_RNA (1)...(19): siRNA sense strand
ccugcauacuggagagaaa

SEQ ID NO: 2643744 - RNA, 19 nt, Homo sapiens
  misc_RNA (1)...(19): siRNA sense strand
uguucauacuggagagaaa

SEQ ID NO: 2643745 - RNA, 19 nt, Homo sapiens
  misc_RNA (1)...(19): siRNA sense strand
gaaacuugaaugugagaaa

SEQ ID NO: 2643746 - RNA, 19 nt, Homo sapiens
  misc_RNA (1)...(19): siRNA sense strand
uauucauacuggagagaaa

SEQ ID NO: 2643747 - RNA, 19 nt, Homo sapiens
  misc_RNA (1)...(19): siRNA sense strand
acuugaagaaugugagaaa

SEQ ID NO: 2643748 - RNA, 19 nt, Homo sapiens
  misc_RNA (1)...(19): siRNA sense strand
acuucauaguggugagaaa

SEQ ID NO: 2643749 - RNA, 19 nt, Homo sapiens
  misc_RNA (1)...(19): siRNA sense strand
aauucauaguggugagaaa

SEQ ID NO: 2643750 - RNA, 19 nt, Homo sapiens
  misc_RNA (1)...(19): siRNA sense strand
acugcaugcuggagagaaa

SEQ ID NO: 2643751 - RNA, 19 nt, Homo sapiens
  misc_RNA (1)...(19): siRNA sense strand
auguaaggaaugugggaaa

SEQ ID NO: 2643752 - RNA, 19 nt, Homo sapiens
  misc_RNA (1)...(19): siRNA sense strand
gagagaaacuugaauguga

SEQ ID NO: 2643753 - RNA, 19 nt, Homo sapiens
  misc_RNA (1)...(19): siRNA sense strand
ccauaugaaugcaaagaau

SEQ ID NO: 2643754 - RNA, 19 nt, Homo sapiens
  misc_RNA (1)...(19): siRNA sense strand
gggaaggcuuucagucaaa

SEQ ID NO: 2643755 - RNA, 19 nt, Homo sapiens
  misc_RNA (1)...(19): siRNA sense strand
gagaaagcuuauuggugua

SEQ ID NO: 2643756 - RNA, 19 nt, Homo sapiens
  misc_RNA (1)...(19): siRNA sense strand
gggaaaucuuuuaggggua

SEQ ID NO: 2643757 - RNA, 19 nt, Homo sapiens
  misc_RNA (1)...(19): siRNA sense strand
auugcaugcuggagagaaa

SEQ ID NO: 2643758 - RNA, 19 nt, Homo sapiens
  misc_RNA (1)...(19): siRNA sense strand
gugcagugaaugugggaau

SEQ ID NO: 2643759 - RNA, 19 nt, Homo sapiens
  misc_RNA (1)...(19): siRNA sense strand
ccucaaauguaaugaaugu

SEQ ID NO: 2643760 - RNA, 19 nt, Homo sapiens
  misc_RNA (1)...(19): siRNA sense strand
gugcacugaaugugggaaa

SEQ ID NO: 2643761 - RNA, 19 nt, Homo sapiens
  misc_RNA (1)...(19): siRNA sense strand
gggaaagccuucagccaga

SEQ ID NO: 2643762 - RNA, 19 nt, Homo sapiens
  misc_RNA (1)...(19): siRNA sense strand
uggaaaucaaagauggaaa

SEQ ID NO: 2643763 - RNA, 19 nt, Homo sapiens
  misc_RNA (1)...(19): siRNA sense strand
auguagugaaugugggaaa

SEQ ID NO: 2643764 - RNA, 19 nt, Homo sapiens
  misc_RNA (1)...(19): siRNA sense strand
auguagugaaugugggaaa

SEQ ID NO: 2643765 - RNA, 19 nt, Homo sapiens
  misc_RNA (1)...(19): siRNA sense strand
gcucagaccucaucagaca

SEQ ID NO: 2643766 - RNA, 19 nt, Homo sapiens
  misc_RNA (1)...(19): siRNA sense strand
augcaacaaaugugggaaa

SEQ ID NO: 2643767 - RNA, 19 nt, Homo sapiens
  misc_RNA (1)...(19): siRNA sense strand
gcucagaucuuauuagaca

SEQ ID NO: 2643768 - RNA, 19 nt, Homo sapiens
  misc_RNA (1)...(19): siRNA sense strand
gcacagaucuuauuauaca

SEQ ID NO: 2643769 - RNA, 19 nt, Homo sapiens
  misc_RNA (1)...(19): siRNA sense strand
gcagagaauucaccaggaa

SEQ ID NO: 2643770 - RNA, 19 nt, Homo sapiens
  misc_RNA (1)...(19): siRNA sense strand
gaagaaaagaagucagcaa

SEQ ID NO: 2643771 - RNA, 19 nt, Homo sapiens
  misc_RNA (1)...(19): siRNA sense strand
ccucagaccucaucagaca

SEQ ID NO: 2643772 - RNA, 19 nt, Homo sapiens
  misc_RNA (1)...(19): siRNA sense strand
aggaugaggagcuuagaaa

SEQ ID NO: 2643773 - RNA, 19 nt, Homo sapiens
  misc_RNA (1)...(19): siRNA sense strand
uuauugaagcacuggguaa

SEQ ID NO: 2643774 - RNA, 19 nt, Homo sapiens
  misc_RNA (1)...(19): siRNA sense strand
agaaagccauugugggaga

SEQ ID NO: 2643775 - RNA, 19 nt, Homo sapiens
  misc_RNA (1)...(19): siRNA sense strand
ccagaaagccauuguggga

SEQ ID NO: 2643776 - RNA, 19 nt, Homo sapiens
  misc_RNA (1)...(19): siRNA sense strand
ggauguaaugaaggagaaa

SEQ ID NO: 2643777 - RNA, 19 nt, Homo sapiens
  misc_RNA (1)...(19): siRNA sense strand
gugcaaagagugugggaag

SEQ ID NO: 2643778 - RNA, 19 nt, Homo sapiens
  misc_RNA (1)...(19): siRNA sense strand
uggauguaaugaaggagaa

SEQ ID NO: 2643779 - RNA, 19 nt, Homo sapiens
  misc_RNA (1)...(19): siRNA sense strand
cccuaugaauguagugaau

SEQ ID NO: 2643780 - RNA, 19 nt, Homo sapiens
  misc_RNA (1)...(19): siRNA sense strand
cccuaugaauguagugaau

SEQ ID NO: 2643781 - RNA, 19 nt, Homo sapiens
  misc_RNA (1)...(19): siRNA sense strand
gagagcgguaucagggaaa

SEQ ID NO: 2643782 - RNA, 19 nt, Homo sapiens
  misc_RNA (1)...(19): siRNA sense strand
agagaaagcuuauuggugu

SEQ ID NO: 2643783 - RNA, 19 nt, Homo sapiens
  misc_RNA (1)...(19): siRNA sense strand
uagaauucacaguggagaa

SEQ ID NO: 2643784 - RNA, 19 nt, Homo sapiens
  misc_RNA (1)...(19): siRNA sense strand
auguagcaaaugugggaaa

SEQ ID NO: 2643785 - RNA, 19 nt, Homo sapiens
  misc_RNA (1)...(19): siRNA sense strand
cccuaugaauguaaggaau

SEQ ID NO: 2643786 - RNA, 19 nt, Homo sapiens
  misc_RNA (1)...(19): siRNA sense strand
uagaauucacaguggagaa

SEQ ID NO: 2643787 - RNA, 19 nt, Homo sapiens
  misc_RNA (1)...(19): siRNA sense strand
cccuaugaauguaaggaau

SEQ ID NO: 2643788 - RNA, 19 nt, Homo sapiens
  misc_RNA (1)...(19): siRNA sense strand
cagagaauucauacaggaa

SEQ ID NO: 2643789 - RNA, 19 nt, Homo sapiens
  misc_RNA (1)...(19): siRNA sense strand
cagagaauucauacaggaa

SEQ ID NO: 2643790 - RNA, 19 nt, Homo sapiens
  misc_RNA (1)...(19): siRNA sense strand
gcgcacagcuuuccucaaa

SEQ ID NO: 2643791 - RNA, 19 nt, Homo sapiens
  misc_RNA (1)...(19): siRNA sense strand
aacucauacaggagagaaa

SEQ ID NO: 2643792 - RNA, 19 nt, Homo sapiens
  misc_RNA (1)...(19): siRNA sense strand
aacucauacaagagagaaa

SEQ ID NO: 2643793 - RNA, 19 nt, Homo sapiens
  misc_RNA (1)...(19): siRNA sense strand
cagagaacucaccaggaaa

SEQ ID NO: 2643794 - RNA, 19 nt, Homo sapiens
  misc_RNA (1)...(19): siRNA sense strand
aacucauacaagagagaaa

SEQ ID NO: 2643795 - RNA, 19 nt, Homo sapiens
  misc_RNA (1)...(19): siRNA sense strand
gggaaggcuuuuaagggaa

SEQ ID NO: 2643796 - RNA, 19 nt, Homo sapiens
  misc_RNA (1)...(19): siRNA sense strand
agagaauucaccaggaaga

SEQ ID NO: 2643797 - RNA, 19 nt, Homo sapiens
  misc_RNA (1)...(19): siRNA sense strand
uggagagaaacuugaagaa

SEQ ID NO: 2643798 - RNA, 19 nt, Homo sapiens
  misc_RNA (1)...(19): siRNA sense strand
auaugagguuaguggccaa

SEQ ID NO: 2643799 - RNA, 19 nt, Homo sapiens
  misc_RNA (1)...(19): siRNA sense strand
aaucagugugguaggaauu

SEQ ID NO: 2643800 - RNA, 19 nt, Homo sapiens
  misc_RNA (1)...(19): siRNA sense strand
gggaaaucuuuuaggggca

SEQ ID NO: 2643801 - RNA, 19 nt, Homo sapiens
  misc_RNA (1)...(19): siRNA sense strand
gcagaaaauucaccaggaa

SEQ ID NO: 2643802 - RNA, 19 nt, Homo sapiens
  misc_RNA (1)...(19): siRNA sense strand
auacaggaaauaagccaua

SEQ ID NO: 2643803 - RNA, 19 nt, Homo sapiens
  misc_RNA (1)...(19): siRNA sense strand
ggucacaccuuguuacaca

SEQ ID NO: 2643804 - RNA, 19 nt, Homo sapiens
  misc_RNA (1)...(19): siRNA sense strand
cacccaggaaugugaguua

SEQ ID NO: 2643805 - RNA, 19 nt, Homo sapiens
  misc_RNA (1)...(19): siRNA sense strand
auacaagagagaaaccaua

SEQ ID NO: 2643806 - RNA, 19 nt, Homo sapiens
  misc_RNA (1)...(19): siRNA sense strand
gagaguggcaggagggaga

SEQ ID NO: 2643807 - RNA, 19 nt, Homo sapiens
  misc_RNA (1)...(19): siRNA sense strand
agaugaaagacuugaucaa

SEQ ID NO: 2643808 - RNA, 19 nt, Homo sapiens
  misc_RNA (1)...(19): siRNA sense strand
acaaaggguucaagggcga

SEQ ID NO: 2643809 - RNA, 19 nt, Homo sapiens
  misc_RNA (1)...(19): siRNA sense strand
aguguaaccaugagugcaa

SEQ ID NO: 2643810 - RNA, 19 nt, Homo sapiens
  misc_RNA (1)...(19): siRNA sense strand
gcagaauucaacagaaaau

SEQ ID NO: 2643811 - RNA, 19 nt, Homo sapiens
  misc_RNA (1)...(19): siRNA sense strand
cuaccagacaccugugcaa

SEQ ID NO: 2643812 - RNA, 19 nt, Homo sapiens
  misc_RNA (1)...(19): siRNA sense strand
gcuacuacuuugauggaac

SEQ ID NO: 2643813 - RNA, 19 nt, Homo sapiens
  misc_RNA (1)...(19): siRNA sense strand
aagacuugaucaauggcua

SEQ ID NO: 2643814 - RNA, 19 nt, Homo sapiens
  misc_RNA (1)...(19): siRNA sense strand
gguggauauugaagggcua

SEQ ID NO: 2643815 - RNA, 19 nt, Homo sapiens
  misc_RNA (1)...(19): siRNA sense strand
cugugaaacgcaagguaua

SEQ ID NO: 2643816 - RNA, 19 nt, Homo sapiens
  misc_RNA (1)...(19): siRNA sense strand
ggugcgaaguggacggaga

SEQ ID NO: 2643817 - RNA, 19 nt, Homo sapiens
  misc_RNA (1)...(19): siRNA sense strand
uauugaagggcuaggagaa

SEQ ID NO: 2643818 - RNA, 19 nt, Homo sapiens
  misc_RNA (1)...(19): siRNA sense strand
uaaagaaacagaaggcuga

SEQ ID NO: 2643819 - RNA, 19 nt, Homo sapiens
  misc_RNA (1)...(19): siRNA sense strand
aaguggacggagacggaaa

SEQ ID NO: 2643820 - RNA, 19 nt, Homo sapiens
  misc_RNA (1)...(19): siRNA sense strand
acgcaagguauaugaagau

SEQ ID NO: 2643821 - RNA, 19 nt, Homo sapiens
  misc_RNA (1)...(19): siRNA sense strand
cgaaguggacggagacgga

SEQ ID NO: 2643822 - RNA, 19 nt, Homo sapiens
  misc_RNA (1)...(19): siRNA sense strand
auugaagggcuaggagaaa

SEQ ID NO: 2643823 - RNA, 19 nt, Homo sapiens
  misc_RNA (1)...(19): siRNA sense strand
agaucaacacugaggagaa

SEQ ID NO: 2643824 - RNA, 19 nt, Homo sapiens
  misc_RNA (1)...(19): siRNA sense strand
aggaagaggaacagcaaca

SEQ ID NO: 2643825 - RNA, 19 nt, Homo sapiens
  misc_RNA (1)...(19): siRNA sense strand
aggaggagaaggagaguga

SEQ ID NO: 2643826 - RNA, 19 nt, Homo sapiens
  misc_RNA (1)...(19): siRNA sense strand
cugugaaaccgaagaucaa

SEQ ID NO: 2643827 - RNA, 19 nt, Homo sapiens
  misc_RNA (1)...(19): siRNA sense strand
ccacccaggaagaggagaa

SEQ ID NO: 2643828 - RNA, 19 nt, Homo sapiens
  misc_RNA (1)...(19): siRNA sense strand
guucgugacaagugagaau

SEQ ID NO: 2643829 - RNA, 19 nt, Homo sapiens
  misc_RNA (1)...(19): siRNA sense strand
cccaggaagaggagaagaa

SEQ ID NO: 2643830 - RNA, 19 nt, Homo sapiens
  misc_RNA (1)...(19): siRNA sense strand
augccaaggugaaagggaa

SEQ ID NO: 2643831 - RNA, 19 nt, Homo sapiens
  misc_RNA (1)...(19): siRNA sense strand
gguggaagcgaguggcgaa

SEQ ID NO: 2643832 - RNA, 19 nt, Homo sapiens
  misc_RNA (1)...(19): siRNA sense strand
ggguaacauccacgggcaa

SEQ ID NO: 2643833 - RNA, 19 nt, Homo sapiens
  misc_RNA (1)...(19): siRNA sense strand
ucaugaagaugcuggacga

SEQ ID NO: 2643834 - RNA, 19 nt, Homo sapiens
  misc_RNA (1)...(19): siRNA sense strand
aguggaaugaggugaagaa

SEQ ID NO: 2643835 - RNA, 19 nt, Homo sapiens
  misc_RNA (1)...(19): siRNA sense strand
cugcaggaggagaaggaga

SEQ ID NO: 2643836 - RNA, 19 nt, Homo sapiens
  misc_RNA (1)...(19): siRNA sense strand
acgaguggaaugaggugaa

SEQ ID NO: 2643837 - RNA, 19 nt, Homo sapiens
  misc_RNA (1)...(19): siRNA sense strand
caggaaugccaaggugaaa

SEQ ID NO: 2643838 - RNA, 19 nt, Homo sapiens
  misc_RNA (1)...(19): siRNA sense strand
gcaaggaagaggaacagca

SEQ ID NO: 2643839 - RNA, 19 nt, Homo sapiens
  misc_RNA (1)...(19): siRNA sense strand
uggaacgauacgaguggaa

SEQ ID NO: 2643840 - RNA, 19 nt, Homo sapiens
  misc_RNA (1)...(19): siRNA sense strand
ggcacacagcagucggaaa

SEQ ID NO: 2643841 - RNA, 19 nt, Homo sapiens
  misc_RNA (1)...(19): siRNA sense strand
cugaggugcuagaagagau

SEQ ID NO: 2643842 - RNA, 19 nt, Homo sapiens
  misc_RNA (1)...(19): siRNA sense strand
gcucaucaagguagagagu

SEQ ID NO: 2643843 - RNA, 19 nt, Homo sapiens
  misc_RNA (1)...(19): siRNA sense strand
cgggcaacaugcugagcca

SEQ ID NO: 2643844 - RNA, 19 nt, Homo sapiens
  misc_RNA (1)...(19): siRNA sense strand
ggugaagcgagcugcugaa

SEQ ID NO: 2643845 - RNA, 19 nt, Homo sapiens
  misc_RNA (1)...(19): siRNA sense strand
gugaggaugaggagucaga

SEQ ID NO: 2643846 - RNA, 19 nt, Homo sapiens
  misc_RNA (1)...(19): siRNA sense strand
ggaaagaaggcucgggagg

SEQ ID NO: 2643847 - RNA, 19 nt, Homo sapiens
  misc_RNA (1)...(19): siRNA sense strand
gaaagaaggcucgggagga

SEQ ID NO: 2643848 - RNA, 19 nt, Homo sapiens
  misc_RNA (1)...(19): siRNA sense strand
gugaagaacgucaaaucca

SEQ ID NO: 2643849 - RNA, 19 nt, Homo sapiens
  misc_RNA (1)...(19): siRNA sense strand
acacaaugcuggacaguua

SEQ ID NO: 2643850 - RNA, 19 nt, Homo sapiens
  misc_RNA (1)...(19): siRNA sense strand
uguacagggcacagagaaa

SEQ ID NO: 2643851 - RNA, 19 nt, Homo sapiens
  misc_RNA (1)...(19): siRNA sense strand
aaggauugcuacagagaca

SEQ ID NO: 2643852 - RNA, 19 nt, Homo sapiens
  misc_RNA (1)...(19): siRNA sense strand
gugaaauggaaauggagau

SEQ ID NO: 2643853 - RNA, 19 nt, Homo sapiens
  misc_RNA (1)...(19): siRNA sense strand
cugaagaacagcuagaaaa

SEQ ID NO: 2643854 - RNA, 19 nt, Homo sapiens
  misc_RNA (1)...(19): siRNA sense strand
agauaaguaacaugagaga

SEQ ID NO: 2643855 - RNA, 19 nt, Homo sapiens
  misc_RNA (1)...(19): siRNA sense strand
gcaaggaaaauaugggaau

SEQ ID NO: 2643856 - RNA, 19 nt, Homo sapiens
  misc_RNA (1)...(19): siRNA sense strand
ggaagaagucaucacguga

SEQ ID NO: 2643857 - RNA, 19 nt, Homo sapiens
  misc_RNA (1)...(19): siRNA sense strand
uagaaauugcugaagaaca

SEQ ID NO: 2643858 - RNA, 19 nt, Homo sapiens
  misc_RNA (1)...(19): siRNA sense strand
aggaaguuaaagaagcuaa

SEQ ID NO: 2643859 - RNA, 19 nt, Homo sapiens
  misc_RNA (1)...(19): siRNA sense strand
augcaagugaaauggaaau

SEQ ID NO: 2643860 - RNA, 19 nt, Homo sapiens
  misc_RNA (1)...(19): siRNA sense strand
aggagcaagccgugaugua

SEQ ID NO: 2643861 - RNA, 19 nt, Homo sapiens
  misc_RNA (1)...(19): siRNA sense strand
ggaauuauuuagaaggcuc

SEQ ID NO: 2643862 - RNA, 19 nt, Homo sapiens
  misc_RNA (1)...(19): siRNA sense strand
ucaggaagcaacagcauuu

SEQ ID NO: 2643863 - RNA, 19 nt, Homo sapiens
  misc_RNA (1)...(19): siRNA sense strand
gcaaaaguuacaacagcaa

SEQ ID NO: 2643864 - RNA, 19 nt, Homo sapiens
  misc_RNA (1)...(19): siRNA sense strand
aguuacaacagcaagguau

SEQ ID NO: 2643865 - RNA, 19 nt, Homo sapiens
  misc_RNA (1)...(19): siRNA sense strand
guuacaacagcaagguauu

SEQ ID NO: 2643866 - RNA, 19 nt, Homo sapiens
  misc_RNA (1)...(19): siRNA sense strand
agaagaacccaguacccaa

SEQ ID NO: 2643867 - RNA, 19 nt, Homo sapiens
  misc_RNA (1)...(19): siRNA sense strand
auaaguaccuggaugcaga

SEQ ID NO: 2643868 - RNA, 19 nt, Homo sapiens
  misc_RNA (1)...(19): siRNA sense strand
ugagauuggagcagacaga

SEQ ID NO: 2643869 - RNA, 19 nt, Homo sapiens
  misc_RNA (1)...(19): siRNA sense strand
uuucacaauucuugguaca

SEQ ID NO: 2643870 - RNA, 19 nt, Homo sapiens
  misc_RNA (1)...(19): siRNA sense strand
ugaagaacagcuagaaaau

SEQ ID NO: 2643871 - RNA, 19 nt, Homo sapiens
  misc_RNA (1)...(19): siRNA sense strand
aaugcaagugaaauggaaa

SEQ ID NO: 2643872 - RNA, 19 nt, Homo sapiens
  misc_RNA (1)...(19): siRNA sense strand
auggaaauggagauaagua

SEQ ID NO: 2643873 - RNA, 19 nt, Homo sapiens
  misc_RNA (1)...(19): siRNA sense strand
guagaaagcaaaaguuaca

SEQ ID NO: 2643874 - RNA, 19 nt, Homo sapiens
  misc_RNA (1)...(19): siRNA sense strand
ggaaaauaugggaauguca

SEQ ID NO: 2643875 - RNA, 19 nt, Homo sapiens
  misc_RNA (1)...(19): siRNA sense strand
agugaaauggaaauggaga

SEQ ID NO: 2643876 - RNA, 19 nt, Homo sapiens
  misc_RNA (1)...(19): siRNA sense strand
uugaaauacuugacaugca

SEQ ID NO: 2643877 - RNA, 19 nt, Homo sapiens
  misc_RNA (1)...(19): siRNA sense strand
aguuguggccagaccuaaa

SEQ ID NO: 2643878 - RNA, 19 nt, Homo sapiens
  misc_RNA (1)...(19): siRNA sense strand
agcuagaaauugcugaaga

SEQ ID NO: 2643879 - RNA, 19 nt, Homo sapiens
  misc_RNA (1)...(19): siRNA sense strand
cugauauggacgaugacau

SEQ ID NO: 2643880 - RNA, 19 nt, Homo sapiens
  misc_RNA (1)...(19): siRNA sense strand
ccaaagaugaugugggaaa

SEQ ID NO: 2643881 - RNA, 19 nt, Homo sapiens
  misc_RNA (1)...(19): siRNA sense strand
gcagaagagaugagggcaa

SEQ ID NO: 2643882 - RNA, 19 nt, Homo sapiens
  misc_RNA (1)...(19): siRNA sense strand
uggaagaagcagagaagaa

SEQ ID NO: 2643883 - RNA, 19 nt, Homo sapiens
  misc_RNA (1)...(19): siRNA sense strand
caguagaagcauuggcaaa

SEQ ID NO: 2643884 - RNA, 19 nt, Homo sapiens
  misc_RNA (1)...(19): siRNA sense strand
ggagagaaauacugaucaa

SEQ ID NO: 2643885 - RNA, 19 nt, Homo sapiens
  misc_RNA (1)...(19): siRNA sense strand
agacgaagguggaaggaga

SEQ ID NO: 2643886 - RNA, 19 nt, Homo sapiens
  misc_RNA (1)...(19): siRNA sense strand
uggaagaagccaagaagaa

SEQ ID NO: 2643887 - RNA, 19 nt, Homo sapiens
  misc_RNA (1)...(19): siRNA sense strand
uggaagaggagcagagcaa

SEQ ID NO: 2643888 - RNA, 19 nt, Homo sapiens
  misc_RNA (1)...(19): siRNA sense strand
gggccaacauugaaacaua

SEQ ID NO: 2643889 - RNA, 19 nt, Homo sapiens
  misc_RNA (1)...(19): siRNA sense strand
cagcagaggccaagaucaa

SEQ ID NO: 2643890 - RNA, 19 nt, Homo sapiens
  misc_RNA (1)...(19): siRNA sense strand
cccuaaagccacagauaaa

SEQ ID NO: 2643891 - RNA, 19 nt, Homo sapiens
  misc_RNA (1)...(19): siRNA sense strand
gcuuaaagaaggaagaaaa

SEQ ID NO: 2643892 - RNA, 19 nt, Homo sapiens
  misc_RNA (1)...(19): siRNA sense strand
aaacauaccuucuggaaaa

SEQ ID NO: 2643893 - RNA, 19 nt, Homo sapiens
  misc_RNA (1)...(19): siRNA sense strand
gagaauggaaagaaagcaa

SEQ ID NO: 2643894 - RNA, 19 nt, Homo sapiens
  misc_RNA (1)...(19): siRNA sense strand
uguugaaggugaaggagaa

SEQ ID NO: 2643895 - RNA, 19 nt, Homo sapiens
  misc_RNA (1)...(19): siRNA sense strand
gguugaagaagaagaagaa

SEQ ID NO: 2643896 - RNA, 19 nt, Homo sapiens
  misc_RNA (1)...(19): siRNA sense strand
uggaaaaggccaaaagaaa

SEQ ID NO: 2643897 - RNA, 19 nt, Homo sapiens
  misc_RNA (1)...(19): siRNA sense strand
agaggaagaaagagauuua

SEQ ID NO: 2643898 - RNA, 19 nt, Homo sapiens
  misc_RNA (1)...(19): siRNA sense strand
acaaggagcugaaggccaa

SEQ ID NO: 2643899 - RNA, 19 nt, Homo sapiens
  misc_RNA (1)...(19): siRNA sense strand
auaaagagcagauggagaa

SEQ ID NO: 2643900 - RNA, 19 nt, Homo sapiens
  misc_RNA (1)...(19): siRNA sense strand
aaggagagcuggaggagau

SEQ ID NO: 2643901 - RNA, 19 nt, Homo sapiens
  misc_RNA (1)...(19): siRNA sense strand
uggaggagauggagcggaa

SEQ ID NO: 2643902 - RNA, 19 nt, Homo sapiens
  misc_RNA (1)...(19): siRNA sense strand
aagcagagaagaaggguau

SEQ ID NO: 2643903 - RNA, 19 nt, Homo sapiens
  misc_RNA (1)...(19): siRNA sense strand
caaagagagugaaaagaaa

SEQ ID NO: 2643904 - RNA, 19 nt, Homo sapiens
  misc_RNA (1)...(19): siRNA sense strand
aggaauucagacagagaua

SEQ ID NO: 2643905 - RNA, 19 nt, Homo sapiens
  misc_RNA (1)...(19): siRNA sense strand
ggaaagaaagcaaugguca

SEQ ID NO: 2643906 - RNA, 19 nt, Homo sapiens
  misc_RNA (1)...(19): siRNA sense strand
gcagaaugagcuagauaau

SEQ ID NO: 2643907 - RNA, 19 nt, Homo sapiens
  misc_RNA (1)...(19): siRNA sense strand
agaagaaaguagaugacga

SEQ ID NO: 2643908 - RNA, 19 nt, Homo sapiens
  misc_RNA (1)...(19): siRNA sense strand
ccuccaaaaugaaaagaaa

SEQ ID NO: 2643909 - RNA, 19 nt, Homo sapiens
  misc_RNA (1)...(19): siRNA sense strand
acuuagaggaagaaagaga

SEQ ID NO: 2643910 - RNA, 19 nt, Homo sapiens
  misc_RNA (1)...(19): siRNA sense strand
uggagaagaagcagaagaa

SEQ ID NO: 2643911 - RNA, 19 nt, Homo sapiens
  misc_RNA (1)...(19): siRNA sense strand
agccgaggccagagagaaa

SEQ ID NO: 2643912 - RNA, 19 nt, Homo sapiens
  misc_RNA (1)...(19): siRNA sense strand
aagcaauggucaacaaaga

SEQ ID NO: 2643913 - RNA, 19 nt, Homo sapiens
  misc_RNA (1)...(19): siRNA sense strand
gaagaauauccuugcagaa

SEQ ID NO: 2643914 - RNA, 19 nt, Homo sapiens
  misc_RNA (1)...(19): siRNA sense strand
ggguugaagaagaagaaga

SEQ ID NO: 2643915 - RNA, 19 nt, Homo sapiens
  misc_RNA (1)...(19): siRNA sense strand
agaaaagacucgucaggaa

SEQ ID NO: 2643916 - RNA, 19 nt, Homo sapiens
  misc_RNA (1)...(19): siRNA sense strand
aaacagagcuggaggacac

SEQ ID NO: 2643917 - RNA, 19 nt, Homo sapiens
  misc_RNA (1)...(19): siRNA sense strand
agucugagcacaagaggaa

SEQ ID NO: 2643918 - RNA, 19 nt, Homo sapiens
  misc_RNA (1)...(19): siRNA sense strand
ggaagaagcucgacgcgca

SEQ ID NO: 2643919 - RNA, 19 nt, Homo sapiens
  misc_RNA (1)...(19): siRNA sense strand
aggccaagaucaagaagau

SEQ ID NO: 2643920 - RNA, 19 nt, Homo sapiens
  misc_RNA (1)...(19): siRNA sense strand
uggcacacuuagaggaaga

SEQ ID NO: 2643921 - RNA, 19 nt, Homo sapiens
  misc_RNA (1)...(19): siRNA sense strand
agaagaagaaagaaaccaa

SEQ ID NO: 2643922 - RNA, 19 nt, Homo sapiens
  misc_RNA (1)...(19): siRNA sense strand
ccaagaagaaaguagauga

SEQ ID NO: 2643923 - RNA, 19 nt, Homo sapiens
  misc_RNA (1)...(19): siRNA sense strand
gagaugagcuggcggacga

SEQ ID NO: 2643924 - RNA, 19 nt, Homo sapiens
  misc_RNA (1)...(19): siRNA sense strand
gaagaggagcagagcaaca

SEQ ID NO: 2643925 - RNA, 19 nt, Homo sapiens
  misc_RNA (1)...(19): siRNA sense strand
gcaggaauuagaagagauu

SEQ ID NO: 2643926 - RNA, 19 nt, Homo sapiens
  misc_RNA (1)...(19): siRNA sense strand
ccagagagaaagaaaccaa

SEQ ID NO: 2643927 - RNA, 19 nt, Homo sapiens
  misc_RNA (1)...(19): siRNA sense strand
aggaggaguuugagaggca

SEQ ID NO: 2643928 - RNA, 19 nt, Homo sapiens
  misc_RNA (1)...(19): siRNA sense strand
aggcgcaguucgagagaga

SEQ ID NO: 2643929 - RNA, 19 nt, Homo sapiens
  misc_RNA (1)...(19): siRNA sense strand
gaaacauaccuucuggaaa

SEQ ID NO: 2643930 - RNA, 19 nt, Homo sapiens
  misc_RNA (1)...(19): siRNA sense strand
agucuaggguugaagaaga

SEQ ID NO: 2643931 - RNA, 19 nt, Homo sapiens
  misc_RNA (1)...(19): siRNA sense strand
aggcugagucugagcacaa

SEQ ID NO: 2643932 - RNA, 19 nt, Homo sapiens
  misc_RNA (1)...(19): siRNA sense strand
uagcagaagagaagagcau

SEQ ID NO: 2643933 - RNA, 19 nt, Homo sapiens
  misc_RNA (1)...(19): siRNA sense strand
acgaugacacagaaaguaa

SEQ ID NO: 2643934 - RNA, 19 nt, Homo sapiens
  misc_RNA (1)...(19): siRNA sense strand
aguaguaucuucagugcua

SEQ ID NO: 2643935 - RNA, 19 nt, Homo sapiens
  misc_RNA (1)...(19): siRNA sense strand
acgccgagcaggagagaga

SEQ ID NO: 2643936 - RNA, 19 nt, Homo sapiens
  misc_RNA (1)...(19): siRNA sense strand
cccuuaaaguugugcgaga

SEQ ID NO: 2643937 - RNA, 19 nt, Homo sapiens
  misc_RNA (1)...(19): siRNA sense strand
gggaagaagcgucaugaga

SEQ ID NO: 2643938 - RNA, 19 nt, Homo sapiens
  misc_RNA (1)...(19): siRNA sense strand
ggugcugggaagacagaaa

SEQ ID NO: 2643939 - RNA, 19 nt, Homo sapiens
  misc_RNA (1)...(19): siRNA sense strand
cgagaagagggcuggaaaa

SEQ ID NO: 2643940 - RNA, 19 nt, Homo sapiens
  misc_RNA (1)...(19): siRNA sense strand
ggaggagacacgccagaaa

SEQ ID NO: 2643941 - RNA, 19 nt, Homo sapiens
  misc_RNA (1)...(19): siRNA sense strand
ugcuguagcuucaaagaaa

SEQ ID NO: 2643942 - RNA, 19 nt, Homo sapiens
  misc_RNA (1)...(19): siRNA sense strand
gaagaaugcugguucccua

SEQ ID NO: 2643943 - RNA, 19 nt, Homo sapiens
  misc_RNA (1)...(19): siRNA sense strand
cugcagaaugagcuagaua

SEQ ID NO: 2643944 - RNA, 19 nt, Homo sapiens
  misc_RNA (1)...(19): siRNA sense strand
ccaacgugaauuagaagaa

SEQ ID NO: 2643945 - RNA, 19 nt, Homo sapiens
  misc_RNA (1)...(19): siRNA sense strand
gaagaugguugcagaggaa

SEQ ID NO: 2643946 - RNA, 19 nt, Homo sapiens
  misc_RNA (1)...(19): siRNA sense strand
gccaugaacuggaaggaga

SEQ ID NO: 2643947 - RNA, 19 nt, Homo sapiens
  misc_RNA (1)...(19): siRNA sense strand
gcuugaagaaccacggcaa

SEQ ID NO: 2643948 - RNA, 19 nt, Homo sapiens
  misc_RNA (1)...(19): siRNA sense strand
caauauagaucuuccuuga

SEQ ID NO: 2643949 - RNA, 19 nt, Homo sapiens
  misc_RNA (1)...(19): siRNA sense strand
gcucucaguuccaaggcaa

SEQ ID NO: 2643950 - RNA, 19 nt, Homo sapiens
  misc_RNA (1)...(19): siRNA sense strand
gcgcucagggcuugaagaa

SEQ ID NO: 2643951 - RNA, 19 nt, Homo sapiens
  misc_RNA (1)...(19): siRNA sense strand
ggaagaugguugcagagga

SEQ ID NO: 2643952 - RNA, 19 nt, Homo sapiens
  misc_RNA (1)...(19): siRNA sense strand
agacgagguucuugagugu

SEQ ID NO: 2643953 - RNA, 19 nt, Homo sapiens
  misc_RNA (1)...(19): siRNA sense strand
cggaagaaggagaacagga

SEQ ID NO: 2643954 - RNA, 19 nt, Homo sapiens
  misc_RNA (1)...(19): siRNA sense strand
gagauaauguguaugccuu

SEQ ID NO: 2643955 - RNA, 19 nt, Homo sapiens
  misc_RNA (1)...(19): siRNA sense strand
gugcagugucucagcaaca

SEQ ID NO: 2643956 - RNA, 19 nt, Homo sapiens
  misc_RNA (1)...(19): siRNA sense strand
cagcaaagacagucgccga

SEQ ID NO: 2643957 - RNA, 19 nt, Homo sapiens
  misc_RNA (1)...(19): siRNA sense strand
ugaacuggaaggagagcuu

SEQ ID NO: 2643958 - RNA, 19 nt, Homo sapiens
  misc_RNA (1)...(19): siRNA sense strand
auaccaucgcagagggaga

SEQ ID NO: 2643959 - RNA, 19 nt, Homo sapiens
  misc_RNA (1)...(19): siRNA sense strand
caggugggcgagagaagaa

SEQ ID NO: 2643960 - RNA, 19 nt, Homo sapiens
  misc_RNA (1)...(19): siRNA sense strand
gaggaugagaagucagcau

SEQ ID NO: 2643961 - RNA, 19 nt, Homo sapiens
  misc_RNA (1)...(19): siRNA sense strand
ugaggaagaugguugcaga

SEQ ID NO: 2643962 - RNA, 19 nt, Homo sapiens
  misc_RNA (1)...(19): siRNA sense strand
guggcagcccugaggaaga

SEQ ID NO: 2643963 - RNA, 19 nt, Homo sapiens
  misc_RNA (1)...(19): siRNA sense strand
cuucaguggagcaugagaa

SEQ ID NO: 2643964 - RNA, 19 nt, Homo sapiens
  misc_RNA (1)...(19): siRNA sense strand
aagaaggagaacaggagga

SEQ ID NO: 2643965 - RNA, 19 nt, Homo sapiens
  misc_RNA (1)...(19): siRNA sense strand
augaagaggaccugaauac

SEQ ID NO: 2643966 - RNA, 19 nt, Homo sapiens
  misc_RNA (1)...(19): siRNA sense strand
uccaaacacagcaaggaaa

SEQ ID NO: 2643967 - RNA, 19 nt, Homo sapiens
  misc_RNA (1)...(19): siRNA sense strand
augcagggcaggacaucaa

SEQ ID NO: 2643968 - RNA, 19 nt, Homo sapiens
  misc_RNA (1)...(19): siRNA sense strand
cgagagggaugucugguca

SEQ ID NO: 2643969 - RNA, 19 nt, Homo sapiens
  misc_RNA (1)...(19): siRNA sense strand
augaggaccuggaggguuc

SEQ ID NO: 2643970 - RNA, 19 nt, Homo sapiens
  misc_RNA (1)...(19): siRNA sense strand
acgagguucuugaguguca

SEQ ID NO: 2643971 - RNA, 19 nt, Homo sapiens
  misc_RNA (1)...(19): siRNA sense strand
gggcaugucacaaaggacu

SEQ ID NO: 2643972 - RNA, 19 nt, Homo sapiens
  misc_RNA (1)...(19): siRNA sense strand
agaaggagaacaggaggaa

SEQ ID NO: 2643973 - RNA, 19 nt, Homo sapiens
  misc_RNA (1)...(19): siRNA sense strand
ucagcuuccucuaggucaa

SEQ ID NO: 2643974 - RNA, 19 nt, Homo sapiens
  misc_RNA (1)...(19): siRNA sense strand
cugcauaggagauagacaa

SEQ ID NO: 2643975 - RNA, 19 nt, Homo sapiens
  misc_RNA (1)...(19): siRNA sense strand
aggagauagacaagagaau

SEQ ID NO: 2643976 - RNA, 19 nt, Homo sapiens
  misc_RNA (1)...(19): siRNA sense strand
cuuuggagaaggagagaau

SEQ ID NO: 2643977 - RNA, 19 nt, Homo sapiens
  misc_RNA (1)...(19): siRNA sense strand
aauccacacaggagagaaa

SEQ ID NO: 2643978 - RNA, 19 nt, Homo sapiens
  misc_RNA (1)...(19): siRNA sense strand
accuaaauuuggagaauca

SEQ ID NO: 2643979 - RNA, 19 nt, Homo sapiens
  misc_RNA (1)...(19): siRNA sense strand
aagagaaugacaaggagaa

SEQ ID NO: 2643980 - RNA, 19 nt, Homo sapiens
  misc_RNA (1)...(19): siRNA sense strand
ccacaucgugaaagaggaa

SEQ ID NO: 2643981 - RNA, 19 nt, Homo sapiens
  misc_RNA (1)...(19): siRNA sense strand
cuugaggagaagagagaga

SEQ ID NO: 2643982 - RNA, 19 nt, Homo sapiens
  misc_RNA (1)...(19): siRNA sense strand
gagaagaucccaagaccca

SEQ ID NO: 2643983 - RNA, 19 nt, Homo sapiens
  misc_RNA (1)...(19): siRNA sense strand
ggcuugaggagaagagaga

SEQ ID NO: 2643984 - RNA, 19 nt, Homo sapiens
  misc_RNA (1)...(19): siRNA sense strand
gagaagaggcagugacccu

SEQ ID NO: 2643985 - RNA, 19 nt, Homo sapiens
  misc_RNA (1)...(19): siRNA sense strand
augugauuacugugggaaa

SEQ ID NO: 2643986 - RNA, 19 nt, Homo sapiens
  misc_RNA (1)...(19): siRNA sense strand
caagagaaugacaaggaga

SEQ ID NO: 2643987 - RNA, 19 nt, Homo sapiens
  misc_RNA (1)...(19): siRNA sense strand
ggaugagggaacaggggaa

SEQ ID NO: 2643988 - RNA, 19 nt, Homo sapiens
  misc_RNA (1)...(19): siRNA sense strand
aggaaguggagaagaggca

SEQ ID NO: 2643989 - RNA, 19 nt, Homo sapiens
  misc_RNA (1)...(19): siRNA sense strand
caauagaauuuggggaaga

SEQ ID NO: 2643990 - RNA, 19 nt, Homo sapiens
  misc_RNA (1)...(19): siRNA sense strand
gaaacaacuaggucagcau

SEQ ID NO: 2643991 - RNA, 19 nt, Homo sapiens
  misc_RNA (1)...(19): siRNA sense strand
ccacucaaaaggagcaaua

SEQ ID NO: 2643992 - RNA, 19 nt, Homo sapiens
  misc_RNA (1)...(19): siRNA sense strand
ggucucaggagcaggcauu

SEQ ID NO: 2643993 - RNA, 19 nt, Homo sapiens
  misc_RNA (1)...(19): siRNA sense strand
cugagaaacaacuagguca

SEQ ID NO: 2643994 - RNA, 19 nt, Homo sapiens
  misc_RNA (1)...(19): siRNA sense strand
ccuuauaaauguucgcacu

SEQ ID NO: 2643995 - RNA, 19 nt, Homo sapiens
  misc_RNA (1)...(19): siRNA sense strand
caggaacaguggagacaac

SEQ ID NO: 2643996 - RNA, 19 nt, Homo sapiens
  misc_RNA (1)...(19): siRNA sense strand
augacaaggagaaccuaaa

SEQ ID NO: 2643997 - RNA, 19 nt, Homo sapiens
  misc_RNA (1)...(19): siRNA sense strand
gcuucuucacugaggauga

SEQ ID NO: 2643998 - RNA, 19 nt, Homo sapiens
  misc_RNA (1)...(19): siRNA sense strand
agacuguggcaauggauca

SEQ ID NO: 2643999 - RNA, 19 nt, Homo sapiens
  misc_RNA (1)...(19): siRNA sense strand
ggcagugacccuuguggaa

SEQ ID NO: 2644000 - RNA, 19 nt, Homo sapiens
  misc_RNA (1)...(19): siRNA sense strand
agacauacuuucagugcac

SEQ ID NO: 2644001 - RNA, 19 nt, Homo sapiens
  misc_RNA (1)...(19): siRNA sense strand
cagacuuugugaagcauca

SEQ ID NO: 2644002 - RNA, 19 nt, Homo sapiens
  misc_RNA (1)...(19): siRNA sense strand
guauccagguucuaggaca

SEQ ID NO: 2644003 - RNA, 19 nt, Homo sapiens
  misc_RNA (1)...(19): siRNA sense strand
cuggagaccuaugggaaaa

SEQ ID NO: 2644004 - RNA, 19 nt, Homo sapiens
  misc_RNA (1)...(19): siRNA sense strand
gaaaauggucucaggagca

SEQ ID NO: 2644005 - RNA, 19 nt, Homo sapiens
  misc_RNA (1)...(19): siRNA sense strand
ugcaaaacauucaggauga

SEQ ID NO: 2644006 - RNA, 19 nt, Homo sapiens
  misc_RNA (1)...(19): siRNA sense strand
aguugggacuugagaauuc

SEQ ID NO: 2644007 - RNA, 19 nt, Homo sapiens
  misc_RNA (1)...(19): siRNA sense strand
ccaaagaacucacaccgga

SEQ ID NO: 2644008 - RNA, 19 nt, Homo sapiens
  misc_RNA (1)...(19): siRNA sense strand
uggagagaaaccuuauaaa

SEQ ID NO: 2644009 - RNA, 19 nt, Homo sapiens
  misc_RNA (1)...(19): siRNA sense strand
gagcaaagaagcagaacaa

SEQ ID NO: 2644010 - RNA, 19 nt, Homo sapiens
  misc_RNA (1)...(19): siRNA sense strand
gaacagauguaaaggauau

SEQ ID NO: 2644011 - RNA, 19 nt, Homo sapiens
  misc_RNA (1)...(19): siRNA sense strand
agaaagagcuguacgauuu

SEQ ID NO: 2644012 - RNA, 19 nt, Homo sapiens
  misc_RNA (1)...(19): siRNA sense strand
gcaaagaagcagaacaaga

SEQ ID NO: 2644013 - RNA, 19 nt, Homo sapiens
  misc_RNA (1)...(19): siRNA sense strand
gguuaugguugaaaugaaa

SEQ ID NO: 2644014 - RNA, 19 nt, Homo sapiens
  misc_RNA (1)...(19): siRNA sense strand
ugacaggccugcagauaaa

SEQ ID NO: 2644015 - RNA, 19 nt, Homo sapiens
  misc_RNA (1)...(19): siRNA sense strand
caucagaggaagagcaaga

SEQ ID NO: 2644016 - RNA, 19 nt, Homo sapiens
  misc_RNA (1)...(19): siRNA sense strand
agaagaggagugugggaaa

SEQ ID NO: 2644017 - RNA, 19 nt, Homo sapiens
  misc_RNA (1)...(19): siRNA sense strand
ggauuuacacacaaggaaa

SEQ ID NO: 2644018 - RNA, 19 nt, Homo sapiens
  misc_RNA (1)...(19): siRNA sense strand
cagaaaacaaagagagcaa

SEQ ID NO: 2644019 - RNA, 19 nt, Homo sapiens
  misc_RNA (1)...(19): siRNA sense strand
gcacagaaguaauagcaca

SEQ ID NO: 2644020 - RNA, 19 nt, Homo sapiens
  misc_RNA (1)...(19): siRNA sense strand
agagaaagcaggaagaaaa

SEQ ID NO: 2644021 - RNA, 19 nt, Homo sapiens
  misc_RNA (1)...(19): siRNA sense strand
gagaaagagcuguacgauu

SEQ ID NO: 2644022 - RNA, 19 nt, Homo sapiens
  misc_RNA (1)...(19): siRNA sense strand
agaacaagcaaaaggaaaa

SEQ ID NO: 2644023 - RNA, 19 nt, Homo sapiens
  misc_RNA (1)...(19): siRNA sense strand
ccaaauugaacaaagcaaa

SEQ ID NO: 2644024 - RNA, 19 nt, Homo sapiens
  misc_RNA (1)...(19): siRNA sense strand
ugguugugcaggagagaaa

SEQ ID NO: 2644025 - RNA, 19 nt, Homo sapiens
  misc_RNA (1)...(19): siRNA sense strand
cuaccuagaagaagugaaa

SEQ ID NO: 2644026 - RNA, 19 nt, Homo sapiens
  misc_RNA (1)...(19): siRNA sense strand
ggaacagauguaaaggaua

SEQ ID NO: 2644027 - RNA, 19 nt, Homo sapiens
  misc_RNA (1)...(19): siRNA sense strand
gaaagaagauguucaacuu

SEQ ID NO: 2644028 - RNA, 19 nt, Homo sapiens
  misc_RNA (1)...(19): siRNA sense strand
gaagaaagaagauguucaa

SEQ ID NO: 2644029 - RNA, 19 nt, Homo sapiens
  misc_RNA (1)...(19): siRNA sense strand
agacuuaaaggaugcgaaa

SEQ ID NO: 2644030 - RNA, 19 nt, Homo sapiens
  misc_RNA (1)...(19): siRNA sense strand
cagaagugguuaugguuga

SEQ ID NO: 2644031 - RNA, 19 nt, Homo sapiens
  misc_RNA (1)...(19): siRNA sense strand
augaagaauuacagcaaga

SEQ ID NO: 2644032 - RNA, 19 nt, Homo sapiens
  misc_RNA (1)...(19): siRNA sense strand
aguuuaagaaugaggucaa

SEQ ID NO: 2644033 - RNA, 19 nt, Homo sapiens
  misc_RNA (1)...(19): siRNA sense strand
gaacaaagcaaacugaaga

SEQ ID NO: 2644034 - RNA, 19 nt, Homo sapiens
  misc_RNA (1)...(19): siRNA sense strand
caaccaaagaacugggaca

SEQ ID NO: 2644035 - RNA, 19 nt, Homo sapiens
  misc_RNA (1)...(19): siRNA sense strand
acauugaggcugugaaaga

SEQ ID NO: 2644036 - RNA, 19 nt, Homo sapiens
  misc_RNA (1)...(19): siRNA sense strand
gaucaaugugagaaagaga

SEQ ID NO: 2644037 - RNA, 19 nt, Homo sapiens
  misc_RNA (1)...(19): siRNA sense strand
uugaagaagaaauggagaa

SEQ ID NO: 2644038 - RNA, 19 nt, Homo sapiens
  misc_RNA (1)...(19): siRNA sense strand
ggaaacauuaacagaaaca

SEQ ID NO: 2644039 - RNA, 19 nt, Homo sapiens
  misc_RNA (1)...(19): siRNA sense strand
guggauugaacaaggcaaa

SEQ ID NO: 2644040 - RNA, 19 nt, Homo sapiens
  misc_RNA (1)...(19): siRNA sense strand
ugaaaugaaagaagaccaa

SEQ ID NO: 2644041 - RNA, 19 nt, Homo sapiens
  misc_RNA (1)...(19): siRNA sense strand
gcaaagagaccucagccaa

SEQ ID NO: 2644042 - RNA, 19 nt, Homo sapiens
  misc_RNA (1)...(19): siRNA sense strand
gaaggaaaauggagagcau

SEQ ID NO: 2644043 - RNA, 19 nt, Homo sapiens
  misc_RNA (1)...(19): siRNA sense strand
uguugaagaugcagcagaa

SEQ ID NO: 2644044 - RNA, 19 nt, Homo sapiens
  misc_RNA (1)...(19): siRNA sense strand
gggauaggaagaagagcau

SEQ ID NO: 2644045 - RNA, 19 nt, Homo sapiens
  misc_RNA (1)...(19): siRNA sense strand
caagaggaacagauguaaa

SEQ ID NO: 2644046 - RNA, 19 nt, Homo sapiens
  misc_RNA (1)...(19): siRNA sense strand
gcauguugcaggaagaaau

SEQ ID NO: 2644047 - RNA, 19 nt, Homo sapiens
  misc_RNA (1)...(19): siRNA sense strand
aggaagagcaagaaagacu

SEQ ID NO: 2644048 - RNA, 19 nt, Homo sapiens
  misc_RNA (1)...(19): siRNA sense strand
aaggcaaauuagaguggaa

SEQ ID NO: 2644049 - RNA, 19 nt, Homo sapiens
  misc_RNA (1)...(19): siRNA sense strand
ccaagaaucugaaaguuga

SEQ ID NO: 2644050 - RNA, 19 nt, Homo sapiens
  misc_RNA (1)...(19): siRNA sense strand
ucaaugugagaaagagaaa

SEQ ID NO: 2644051 - RNA, 19 nt, Homo sapiens
  misc_RNA (1)...(19): siRNA sense strand
acaugaagaauuacagcaa

SEQ ID NO: 2644052 - RNA, 19 nt, Homo sapiens
  misc_RNA (1)...(19): siRNA sense strand
ggagaagcacagaaguaau

SEQ ID NO: 2644053 - RNA, 19 nt, Homo sapiens
  misc_RNA (1)...(19): siRNA sense strand
cccuacagcugguggaaaa

SEQ ID NO: 2644054 - RNA, 19 nt, Homo sapiens
  misc_RNA (1)...(19): siRNA sense strand
ccagaauauuacaagauca

SEQ ID NO: 2644055 - RNA, 19 nt, Homo sapiens
  misc_RNA (1)...(19): siRNA sense strand
ccucaaaaguuauauggaa

SEQ ID NO: 2644056 - RNA, 19 nt, Homo sapiens
  misc_RNA (1)...(19): siRNA sense strand
auggagaagcacagaagua

SEQ ID NO: 2644057 - RNA, 19 nt, Homo sapiens
  misc_RNA (1)...(19): siRNA sense strand
aaauauggucaguguacua

SEQ ID NO: 2644058 - RNA, 19 nt, Homo sapiens
  misc_RNA (1)...(19): siRNA sense strand
gcuacaagcucgagugcaa

SEQ ID NO: 2644059 - RNA, 19 nt, Homo sapiens
  misc_RNA (1)...(19): siRNA sense strand
aggaggaggaagaggacaa

SEQ ID NO: 2644060 - RNA, 19 nt, Homo sapiens
  misc_RNA (1)...(19): siRNA sense strand
ucgacgagguuguggagaa

SEQ ID NO: 2644061 - RNA, 19 nt, Homo sapiens
  misc_RNA (1)...(19): siRNA sense strand
uggcaagucugaaggucaa

SEQ ID NO: 2644062 - RNA, 19 nt, Homo sapiens
  misc_RNA (1)...(19): siRNA sense strand
cccagcagcuccagagaaa

SEQ ID NO: 2644063 - RNA, 19 nt, Homo sapiens
  misc_RNA (1)...(19): siRNA sense strand
aggaggagcuauuugggaa

SEQ ID NO: 2644064 - RNA, 19 nt, Homo sapiens
  misc_RNA (1)...(19): siRNA sense strand
gaaaugacaucguggccau

SEQ ID NO: 2644065 - RNA, 19 nt, Homo sapiens
  misc_RNA (1)...(19): siRNA sense strand
agaagaacaaggacgacua

SEQ ID NO: 2644066 - RNA, 19 nt, Homo sapiens
  misc_RNA (1)...(19): siRNA sense strand
ggaucgaggacccggagaa

SEQ ID NO: 2644067 - RNA, 19 nt, Homo sapiens
  misc_RNA (1)...(19): siRNA sense strand
agaacaaggacgacuauau

SEQ ID NO: 2644068 - RNA, 19 nt, Homo sapiens
  misc_RNA (1)...(19): siRNA sense strand
cccaaaugauuguguccua

SEQ ID NO: 2644069 - RNA, 19 nt, Homo sapiens
  misc_RNA (1)...(19): siRNA sense strand
ucuuugagaugcuggagaa

SEQ ID NO: 2644070 - RNA, 19 nt, Homo sapiens
  misc_RNA (1)...(19): siRNA sense strand
ggaacaaugaggagagccu

SEQ ID NO: 2644071 - RNA, 19 nt, Homo sapiens
  misc_RNA (1)...(19): siRNA sense strand
cagcagcuccagagaaaga

SEQ ID NO: 2644072 - RNA, 19 nt, Homo sapiens
  misc_RNA (1)...(19): siRNA sense strand
ccuucaagcaggagguguu

SEQ ID NO: 2644073 - RNA, 19 nt, Homo sapiens
  misc_RNA (1)...(19): siRNA sense strand
gcgaggaagcagaggggau

SEQ ID NO: 2644074 - RNA, 19 nt, Homo sapiens
  misc_RNA (1)...(19): siRNA sense strand
ccagagaaagagacacauu

SEQ ID NO: 2644075 - RNA, 19 nt, Homo sapiens
  misc_RNA (1)...(19): siRNA sense strand
uugagaugcuggagaaaau

SEQ ID NO: 2644076 - RNA, 19 nt, Homo sapiens
  misc_RNA (1)...(19): siRNA sense strand
auucaaauucggagucauu

SEQ ID NO: 2644077 - RNA, 19 nt, Homo sapiens
  misc_RNA (1)...(19): siRNA sense strand
ucugugaggaggaggaaga

SEQ ID NO: 2644078 - RNA, 19 nt, Homo sapiens
  misc_RNA (1)...(19): siRNA sense strand
gguccaaacugaagacggu

SEQ ID NO: 2644079 - RNA, 19 nt, Homo sapiens
  misc_RNA (1)...(19): siRNA sense strand
ccaugaagucgucggaguu

SEQ ID NO: 2644080 - RNA, 19 nt, Homo sapiens
  misc_RNA (1)...(19): siRNA sense strand
augaugagcaugaagucaa

SEQ ID NO: 2644081 - RNA, 19 nt, Homo sapiens
  misc_RNA (1)...(19): siRNA sense strand
cgucggaguucuuugagau

SEQ ID NO: 2644082 - RNA, 19 nt, Homo sapiens
  misc_RNA (1)...(19): siRNA sense strand
cuccagagaaagagacaca

SEQ ID NO: 2644083 - RNA, 19 nt, Homo sapiens
  misc_RNA (1)...(19): siRNA sense strand
gucugaaggucaagaagca

SEQ ID NO: 2644084 - RNA, 19 nt, Homo sapiens
  misc_RNA (1)...(19): siRNA sense strand
uggagaaaaugcaggggau

SEQ ID NO: 2644085 - RNA, 19 nt, Homo sapiens
  misc_RNA (1)...(19): siRNA sense strand
gugaugaugcagugggacu

SEQ ID NO: 2644086 - RNA, 19 nt, Homo sapiens
  misc_RNA (1)...(19): siRNA sense strand
gugaggaggaggaagagga

SEQ ID NO: 2644087 - RNA, 19 nt, Homo sapiens
  misc_RNA (1)...(19): siRNA sense strand
ggaaggaucaucuaaacuu

SEQ ID NO: 2644088 - RNA, 19 nt, Homo sapiens
  misc_RNA (1)...(19): siRNA sense strand
ggccagaagaagucgcaca

SEQ ID NO: 2644089 - RNA, 19 nt, Homo sapiens
  misc_RNA (1)...(19): siRNA sense strand
cuggcaagucugaagguca

SEQ ID NO: 2644090 - RNA, 19 nt, Homo sapiens
  misc_RNA (1)...(19): siRNA sense strand
agaagcaggagcuggccaa

SEQ ID NO: 2644091 - RNA, 19 nt, Homo sapiens
  misc_RNA (1)...(19): siRNA sense strand
gaaggaucaucuaaacuuu

SEQ ID NO: 2644092 - RNA, 19 nt, Homo sapiens
  misc_RNA (1)...(19): siRNA sense strand
gagaaaaugcaggggauca

SEQ ID NO: 2644093 - RNA, 19 nt, Homo sapiens
  misc_RNA (1)...(19): siRNA sense strand
cccagaagaacaaggacga

SEQ ID NO: 2644094 - RNA, 19 nt, Homo sapiens
  misc_RNA (1)...(19): siRNA sense strand
agacgguacaugagcggau

SEQ ID NO: 2644095 - RNA, 19 nt, Homo sapiens
  misc_RNA (1)...(19): siRNA sense strand
uguccuaugaugagcauga

SEQ ID NO: 2644096 - RNA, 19 nt, Homo sapiens
  misc_RNA (1)...(19): siRNA sense strand
gggcaugaucacaggaaca

SEQ ID NO: 2644097 - RNA, 19 nt, Homo sapiens
  misc_RNA (1)...(19): siRNA sense strand
aggaaguggcuuuggaguu

SEQ ID NO: 2644098 - RNA, 19 nt, Homo sapiens
  misc_RNA (1)...(19): siRNA sense strand
ggagacuggcacugggcau

SEQ ID NO: 2644099 - RNA, 19 nt, Homo sapiens
  misc_RNA (1)...(19): siRNA sense strand
gcgaugaggugcagacgcu

SEQ ID NO: 2644100 - RNA, 19 nt, Homo sapiens
  misc_RNA (1)...(19): siRNA sense strand
cgccagagcacuaaggacu

SEQ ID NO: 2644101 - RNA, 19 nt, Homo sapiens
  misc_RNA (1)...(19): siRNA sense strand
agagaaacuuacagagaau

SEQ ID NO: 2644102 - RNA, 19 nt, Homo sapiens
  misc_RNA (1)...(19): siRNA sense strand
guguaaugugugugggaaa

SEQ ID NO: 2644103 - RNA, 19 nt, Homo sapiens
  misc_RNA (1)...(19): siRNA sense strand
auguaaugacugugggaaa

SEQ ID NO: 2644104 - RNA, 19 nt, Homo sapiens
  misc_RNA (1)...(19): siRNA sense strand
gggaaagcuuuuagugaua

SEQ ID NO: 2644105 - RNA, 19 nt, Homo sapiens
  misc_RNA (1)...(19): siRNA sense strand
auguaaugaaugugggaaa

SEQ ID NO: 2644106 - RNA, 19 nt, Homo sapiens
  misc_RNA (1)...(19): siRNA sense strand
auguaaugaaugugggaaa

SEQ ID NO: 2644107 - RNA, 19 nt, Homo sapiens
  misc_RNA (1)...(19): siRNA sense strand
auguaaugaaugugggaaa

SEQ ID NO: 2644108 - RNA, 19 nt, Homo sapiens
  misc_RNA (1)...(19): siRNA sense strand
augugaugauugugggaaa

SEQ ID NO: 2644109 - RNA, 19 nt, Homo sapiens
  misc_RNA (1)...(19): siRNA sense strand
aacacauacuggagagaaa

SEQ ID NO: 2644110 - RNA, 19 nt, Homo sapiens
  misc_RNA (1)...(19): siRNA sense strand
ucacagaacaucagcgaau

SEQ ID NO: 2644111 - RNA, 19 nt, Homo sapiens
  misc_RNA (1)...(19): siRNA sense strand
gggaaagcauuuagccaga

SEQ ID NO: 2644112 - RNA, 19 nt, Homo sapiens
  misc_RNA (1)...(19): siRNA sense strand
gcgaauucacacaggagaa

SEQ ID NO: 2644113 - RNA, 19 nt, Homo sapiens
  misc_RNA (1)...(19): siRNA sense strand
auggaaggguuauggaaau

SEQ ID NO: 2644114 - RNA, 19 nt, Homo sapiens
  misc_RNA (1)...(19): siRNA sense strand
aaugcauacaggagagaaa

SEQ ID NO: 2644115 - RNA, 19 nt, Homo sapiens
  misc_RNA (1)...(19): siRNA sense strand
ugguaaaucucaaggagca

SEQ ID NO: 2644116 - RNA, 19 nt, Homo sapiens
  misc_RNA (1)...(19): siRNA sense strand
augccaaacacaagaggaa

SEQ ID NO: 2644117 - RNA, 19 nt, Homo sapiens
  misc_RNA (1)...(19): siRNA sense strand
gaacuaacuuuggggaaaa

SEQ ID NO: 2644118 - RNA, 19 nt, Homo sapiens
  misc_RNA (1)...(19): siRNA sense strand
ggggagucuuucagaauaa

SEQ ID NO: 2644119 - RNA, 19 nt, Homo sapiens
  misc_RNA (1)...(19): siRNA sense strand
ucacagaacaucagaaaau

SEQ ID NO: 2644120 - RNA, 19 nt, Homo sapiens
  misc_RNA (1)...(19): siRNA sense strand
ccauauaaauguacugacu

SEQ ID NO: 2644121 - RNA, 19 nt, Homo sapiens
  misc_RNA (1)...(19): siRNA sense strand
gccaaacacaagaggaaaa

SEQ ID NO: 2644122 - RNA, 19 nt, Homo sapiens
  misc_RNA (1)...(19): siRNA sense strand
ggagaugaaaggcagcaaa

SEQ ID NO: 2644123 - RNA, 19 nt, Homo sapiens
  misc_RNA (1)...(19): siRNA sense strand
auguagugaaugcgggaaa

SEQ ID NO: 2644124 - RNA, 19 nt, Homo sapiens
  misc_RNA (1)...(19): siRNA sense strand
cuagagaaacuuacagaga

SEQ ID NO: 2644125 - RNA, 19 nt, Homo sapiens
  misc_RNA (1)...(19): siRNA sense strand
aggagaaucauuugaguca

SEQ ID NO: 2644126 - RNA, 19 nt, Homo sapiens
  misc_RNA (1)...(19): siRNA sense strand
cagcagaugccaaacacaa

SEQ ID NO: 2644127 - RNA, 19 nt, Homo sapiens
  misc_RNA (1)...(19): siRNA sense strand
agaacuaacuuuggggaaa

SEQ ID NO: 2644128 - RNA, 19 nt, Homo sapiens
  misc_RNA (1)...(19): siRNA sense strand
ggacuaaaucauaccuuau

SEQ ID NO: 2644129 - RNA, 19 nt, Homo sapiens
  misc_RNA (1)...(19): siRNA sense strand
aggccauacuagagaaacu

SEQ ID NO: 2644130 - RNA, 19 nt, Homo sapiens
  misc_RNA (1)...(19): siRNA sense strand
aauggaaggguuauggaaa

SEQ ID NO: 2644131 - RNA, 19 nt, Homo sapiens
  misc_RNA (1)...(19): siRNA sense strand
aaggcagacuucagaacua

SEQ ID NO: 2644132 - RNA, 19 nt, Homo sapiens
  misc_RNA (1)...(19): siRNA sense strand
gugggaaagcauucauuaa

SEQ ID NO: 2644133 - RNA, 19 nt, Homo sapiens
  misc_RNA (1)...(19): siRNA sense strand
ucucaaggagcaucagaaa

SEQ ID NO: 2644134 - RNA, 19 nt, Homo sapiens
  misc_RNA (1)...(19): siRNA sense strand
ugucacagaacaucagaaa

SEQ ID NO: 2644135 - RNA, 19 nt, Homo sapiens
  misc_RNA (1)...(19): siRNA sense strand
gagccuuacuguacaucaa

SEQ ID NO: 2644136 - RNA, 19 nt, Homo sapiens
  misc_RNA (1)...(19): siRNA sense strand
aagauaauuugcaaggaga

SEQ ID NO: 2644137 - RNA, 19 nt, Homo sapiens
  misc_RNA (1)...(19): siRNA sense strand
aaucaaaacuugcaagaca

SEQ ID NO: 2644138 - RNA, 19 nt, Homo sapiens
  misc_RNA (1)...(19): siRNA sense strand
gugugaugucuguggaaaa

SEQ ID NO: 2644139 - RNA, 19 nt, Homo sapiens
  misc_RNA (1)...(19): siRNA sense strand
augugaagaauguggaaaa

SEQ ID NO: 2644140 - RNA, 19 nt, Homo sapiens
  misc_RNA (1)...(19): siRNA sense strand
cuucacagcagaugccaaa

SEQ ID NO: 2644141 - RNA, 19 nt, Homo sapiens
  misc_RNA (1)...(19): siRNA sense strand
cauuauagaucauugcuca

SEQ ID NO: 2644142 - RNA, 19 nt, Homo sapiens
  misc_RNA (1)...(19): siRNA sense strand
cuauaaauguagugaaugc

SEQ ID NO: 2644143 - RNA, 19 nt, Homo sapiens
  misc_RNA (1)...(19): siRNA sense strand
ccaaaaugguaaaucucaa

SEQ ID NO: 2644144 - RNA, 19 nt, Homo sapiens
  misc_RNA (1)...(19): siRNA sense strand
uguggaaaggguuguauua

SEQ ID NO: 2644145 - RNA, 19 nt, Homo sapiens
  misc_RNA (1)...(19): siRNA sense strand
ccugcaaccaagaaggcua

SEQ ID NO: 2644146 - RNA, 19 nt, Homo sapiens
  misc_RNA (1)...(19): siRNA sense strand
ccuuuaggaacaagucaua

SEQ ID NO: 2644147 - RNA, 19 nt, Homo sapiens
  misc_RNA (1)...(19): siRNA sense strand
agauguaacgaauguggaa

SEQ ID NO: 2644148 - RNA, 19 nt, Homo sapiens
  misc_RNA (1)...(19): siRNA sense strand
gcccuauaaaugugaagaa

SEQ ID NO: 2644149 - RNA, 19 nt, Homo sapiens
  misc_RNA (1)...(19): siRNA sense strand
cuucaucacuuaugguaca

SEQ ID NO: 2644150 - RNA, 19 nt, Homo sapiens
  misc_RNA (1)...(19): siRNA sense strand
acacugaagagaaaccaua

SEQ ID NO: 2644151 - RNA, 19 nt, Homo sapiens
  misc_RNA (1)...(19): siRNA sense strand
gcauuuagccagaugguac

SEQ ID NO: 2644152 - RNA, 19 nt, Homo sapiens
  misc_RNA (1)...(19): siRNA sense strand
cagcaaagccauaaggcag

SEQ ID NO: 2644153 - RNA, 19 nt, Homo sapiens
  misc_RNA (1)...(19): siRNA sense strand
gagaaaccuuuuagaugua

SEQ ID NO: 2644154 - RNA, 19 nt, Homo sapiens
  misc_RNA (1)...(19): siRNA sense strand
ggaaagcauucaaccgcau

SEQ ID NO: 2644155 - RNA, 19 nt, Homo sapiens
  misc_RNA (1)...(19): siRNA sense strand
gggcagcaguggacacaga

SEQ ID NO: 2644156 - RNA, 19 nt, Homo sapiens
  misc_RNA (1)...(19): siRNA sense strand
gcguguugacaucuggaaa

SEQ ID NO: 2644157 - RNA, 19 nt, Homo sapiens
  misc_RNA (1)...(19): siRNA sense strand
cguguugacaucuggaaau

SEQ ID NO: 2644158 - RNA, 19 nt, Homo sapiens
  misc_RNA (1)...(19): siRNA sense strand
caguggacacagagcauga

SEQ ID NO: 2644159 - RNA, 19 nt, Homo sapiens
  misc_RNA (1)...(19): siRNA sense strand
ggguugugugugagacaga

SEQ ID NO: 2644160 - RNA, 19 nt, Homo sapiens
  misc_RNA (1)...(19): siRNA sense strand
ggugaagggaagagccugu

SEQ ID NO: 2644161 - RNA, 19 nt, Homo sapiens
  misc_RNA (1)...(19): siRNA sense strand
ggacacagagcaugagcgu

SEQ ID NO: 2644162 - RNA, 19 nt, Homo sapiens
  misc_RNA (1)...(19): siRNA sense strand
guguugacaucuggaaauu

SEQ ID NO: 2644163 - RNA, 19 nt, Homo sapiens
  misc_RNA (1)...(19): siRNA sense strand
gaacagauauccagcuaua

SEQ ID NO: 2644164 - RNA, 19 nt, Homo sapiens
  misc_RNA (1)...(19): siRNA sense strand
ggaacugacuacagaaauu

SEQ ID NO: 2644165 - RNA, 19 nt, Homo sapiens
  misc_RNA (1)...(19): siRNA sense strand
acuaugagcuggaaggcaa

SEQ ID NO: 2644166 - RNA, 19 nt, Homo sapiens
  misc_RNA (1)...(19): siRNA sense strand
ugacucaacuucugaauaa

SEQ ID NO: 2644167 - RNA, 19 nt, Homo sapiens
  misc_RNA (1)...(19): siRNA sense strand
uguacaagcucuggagaua

SEQ ID NO: 2644168 - RNA, 19 nt, Homo sapiens
  misc_RNA (1)...(19): siRNA sense strand
ugaacaacuugcugaacaa

SEQ ID NO: 2644169 - RNA, 19 nt, Homo sapiens
  misc_RNA (1)...(19): siRNA sense strand
ggagguagcuuucguggaa

SEQ ID NO: 2644170 - RNA, 19 nt, Homo sapiens
  misc_RNA (1)...(19): siRNA sense strand
ccagaauacugaauaccaa

SEQ ID NO: 2644171 - RNA, 19 nt, Homo sapiens
  misc_RNA (1)...(19): siRNA sense strand
uggccuaucugaagaagaa

SEQ ID NO: 2644172 - RNA, 19 nt, Homo sapiens
  misc_RNA (1)...(19): siRNA sense strand
caaccuaacaacugauaau

SEQ ID NO: 2644173 - RNA, 19 nt, Homo sapiens
  misc_RNA (1)...(19): siRNA sense strand
ccucgugacuacagcaaau

SEQ ID NO: 2644174 - RNA, 19 nt, Homo sapiens
  misc_RNA (1)...(19): siRNA sense strand
ggcugaaguaugagaauga

SEQ ID NO: 2644175 - RNA, 19 nt, Homo sapiens
  misc_RNA (1)...(19): siRNA sense strand
gcguggaggcugacaucaa

SEQ ID NO: 2644176 - RNA, 19 nt, Homo sapiens
  misc_RNA (1)...(19): siRNA sense strand
agaagaaccacgaggagga

SEQ ID NO: 2644177 - RNA, 19 nt, Homo sapiens
  misc_RNA (1)...(19): siRNA sense strand
gugaugugaauguggaaau

SEQ ID NO: 2644178 - RNA, 19 nt, Homo sapiens
  misc_RNA (1)...(19): siRNA sense strand
aggaggauguggaggagga

SEQ ID NO: 2644179 - RNA, 19 nt, Homo sapiens
  misc_RNA (1)...(19): siRNA sense strand
aaaugaaagaccuucgaaa

SEQ ID NO: 2644180 - RNA, 19 nt, Homo sapiens
  misc_RNA (1)...(19): siRNA sense strand
aggaggaggaggaguguca

SEQ ID NO: 2644181 - RNA, 19 nt, Homo sapiens
  misc_RNA (1)...(19): siRNA sense strand
cggcuuuggaggaggcuuu

SEQ ID NO: 2644182 - RNA, 19 nt, Homo sapiens
  misc_RNA (1)...(19): siRNA sense strand
acgaggaggaaaugaaaga

SEQ ID NO: 2644183 - RNA, 19 nt, Homo sapiens
  misc_RNA (1)...(19): siRNA sense strand
aaugaaagaccuucgaaau

SEQ ID NO: 2644184 - RNA, 19 nt, Homo sapiens
  misc_RNA (1)...(19): siRNA sense strand
cguggaagcuauggaagua

SEQ ID NO: 2644185 - RNA, 19 nt, Homo sapiens
  misc_RNA (1)...(19): siRNA sense strand
aggaggaggaggaggagga

SEQ ID NO: 2644186 - RNA, 19 nt, Homo sapiens
  misc_RNA (1)...(19): siRNA sense strand
aggaggaggaggaggagga

SEQ ID NO: 2644187 - RNA, 19 nt, Homo sapiens
  misc_RNA (1)...(19): siRNA sense strand
agauagaacuacaguccca

SEQ ID NO: 2644188 - RNA, 19 nt, Homo sapiens
  misc_RNA (1)...(19): siRNA sense strand
agaaccacgaggaggaaau

SEQ ID NO: 2644189 - RNA, 19 nt, Homo sapiens
  misc_RNA (1)...(19): siRNA sense strand
aggaggaggaggaggaugu

SEQ ID NO: 2644190 - RNA, 19 nt, Homo sapiens
  misc_RNA (1)...(19): siRNA sense strand
ccacgaggaggaaaugaaa

SEQ ID NO: 2644191 - RNA, 19 nt, Homo sapiens
  misc_RNA (1)...(19): siRNA sense strand
caguggaggaggaggagga

SEQ ID NO: 2644192 - RNA, 19 nt, Homo sapiens
  misc_RNA (1)...(19): siRNA sense strand
caugagaagccaauaugaa

SEQ ID NO: 2644193 - RNA, 19 nt, Homo sapiens
  misc_RNA (1)...(19): siRNA sense strand
acagauauccagcuauaaa

SEQ ID NO: 2644194 - RNA, 19 nt, Homo sapiens
  misc_RNA (1)...(19): siRNA sense strand
caacuggccuugaaacaau

SEQ ID NO: 2644195 - RNA, 19 nt, Homo sapiens
  misc_RNA (1)...(19): siRNA sense strand
accaacaacuccuggauau

SEQ ID NO: 2644196 - RNA, 19 nt, Homo sapiens
  misc_RNA (1)...(19): siRNA sense strand
gagaagccaauaugaacaa

SEQ ID NO: 2644197 - RNA, 19 nt, Homo sapiens
  misc_RNA (1)...(19): siRNA sense strand
gagcugaaaccgagugcca

SEQ ID NO: 2644198 - RNA, 19 nt, Homo sapiens
  misc_RNA (1)...(19): siRNA sense strand
agguggcuauggaggauua

SEQ ID NO: 2644199 - RNA, 19 nt, Homo sapiens
  misc_RNA (1)...(19): siRNA sense strand
uggaggaggaggaggagga

SEQ ID NO: 2644200 - RNA, 19 nt, Homo sapiens
  misc_RNA (1)...(19): siRNA sense strand
gcugaaaccgagugccaga

SEQ ID NO: 2644201 - RNA, 19 nt, Homo sapiens
  misc_RNA (1)...(19): siRNA sense strand
aggaggaggauguggagga

SEQ ID NO: 2644202 - RNA, 19 nt, Homo sapiens
  misc_RNA (1)...(19): siRNA sense strand
ugacugaagagcuggccua

SEQ ID NO: 2644203 - RNA, 19 nt, Homo sapiens
  misc_RNA (1)...(19): siRNA sense strand
augugaauguggaaaugaa

SEQ ID NO: 2644204 - RNA, 19 nt, Homo sapiens
  misc_RNA (1)...(19): siRNA sense strand
gcaaggaacugacuacaga

SEQ ID NO: 2644205 - RNA, 19 nt, Homo sapiens
  misc_RNA (1)...(19): siRNA sense strand
auugagacguaauguacaa

SEQ ID NO: 2644206 - RNA, 19 nt, Homo sapiens
  misc_RNA (1)...(19): siRNA sense strand
gaaguaugagaaugaggua

SEQ ID NO: 2644207 - RNA, 19 nt, Homo sapiens
  misc_RNA (1)...(19): siRNA sense strand
gaauaacaugagaagccaa

SEQ ID NO: 2644208 - RNA, 19 nt, Homo sapiens
  misc_RNA (1)...(19): siRNA sense strand
agauccgacuggagaauga

SEQ ID NO: 2644209 - RNA, 19 nt, Homo sapiens
  misc_RNA (1)...(19): siRNA sense strand
auuacugaauugagacgua

SEQ ID NO: 2644210 - RNA, 19 nt, Homo sapiens
  misc_RNA (1)...(19): siRNA sense strand
ggaggaaaugaaagaccuu

SEQ ID NO: 2644211 - RNA, 19 nt, Homo sapiens
  misc_RNA (1)...(19): siRNA sense strand
gaacaaaaccgcaaagaug

SEQ ID NO: 2644212 - RNA, 19 nt, Homo sapiens
  misc_RNA (1)...(19): siRNA sense strand
ugagauuacugaauugaga

SEQ ID NO: 2644213 - RNA, 19 nt, Homo sapiens
  misc_RNA (1)...(19): siRNA sense strand
gaaaccgagugccagaaua

SEQ ID NO: 2644214 - RNA, 19 nt, Homo sapiens
  misc_RNA (1)...(19): siRNA sense strand
gugucaucccuaagaauuu

SEQ ID NO: 2644215 - RNA, 19 nt, Homo sapiens
  misc_RNA (1)...(19): siRNA sense strand
ccgacuggagaaugaaauu

SEQ ID NO: 2644216 - RNA, 19 nt, Homo sapiens
  misc_RNA (1)...(19): siRNA sense strand
uggaagaaucaaacuauga

SEQ ID NO: 2644217 - RNA, 19 nt, Homo sapiens
  misc_RNA (1)...(19): siRNA sense strand
cuauggaaguagcagcuuu

SEQ ID NO: 2644218 - RNA, 19 nt, Homo sapiens
  misc_RNA (1)...(19): siRNA sense strand
cuaugagcuggaaggcaaa

SEQ ID NO: 2644219 - RNA, 19 nt, Homo sapiens
  misc_RNA (1)...(19): siRNA sense strand
uaacaugagaagccaauau

SEQ ID NO: 2644220 - RNA, 19 nt, Homo sapiens
  misc_RNA (1)...(19): siRNA sense strand
aaggaacugacuacagaaa

SEQ ID NO: 2644221 - RNA, 19 nt, Homo sapiens
  misc_RNA (1)...(19): siRNA sense strand
ccugcuagaaggagaggga

SEQ ID NO: 2644222 - RNA, 19 nt, Homo sapiens
  misc_RNA (1)...(19): siRNA sense strand
augaacaacuugcugaaca

SEQ ID NO: 2644223 - RNA, 19 nt, Homo sapiens
  misc_RNA (1)...(19): siRNA sense strand
ugaauugagacguaaugua

SEQ ID NO: 2644224 - RNA, 19 nt, Homo sapiens
  misc_RNA (1)...(19): siRNA sense strand
agauauccgcucuggaaga

SEQ ID NO: 2644225 - RNA, 19 nt, Homo sapiens
  misc_RNA (1)...(19): siRNA sense strand
gggcucaucagguggcuau

SEQ ID NO: 2644226 - RNA, 19 nt, Homo sapiens
  misc_RNA (1)...(19): siRNA sense strand
ggaggagugucaucccuaa

SEQ ID NO: 2644227 - RNA, 19 nt, Homo sapiens
  misc_RNA (1)...(19): siRNA sense strand
aggauguggaggaggagga

SEQ ID NO: 2644228 - RNA, 19 nt, Homo sapiens
  misc_RNA (1)...(19): siRNA sense strand
aaucaaacuaugagcugga

SEQ ID NO: 2644229 - RNA, 19 nt, Homo sapiens
  misc_RNA (1)...(19): siRNA sense strand
gguaugaaaagcauggcaa

SEQ ID NO: 2644230 - RNA, 19 nt, Homo sapiens
  misc_RNA (1)...(19): siRNA sense strand
acgaagaggacaagggaga

SEQ ID NO: 2644231 - RNA, 19 nt, Homo sapiens
  misc_RNA (1)...(19): siRNA sense strand
gggaaagcgucauugggaa

SEQ ID NO: 2644232 - RNA, 19 nt, Homo sapiens
  misc_RNA (1)...(19): siRNA sense strand
ccugaaggaggaagagaau

SEQ ID NO: 2644233 - RNA, 19 nt, Homo sapiens
  misc_RNA (1)...(19): siRNA sense strand
ucaaauuccuugugggcca

SEQ ID NO: 2644234 - RNA, 19 nt, Homo sapiens
  misc_RNA (1)...(19): siRNA sense strand
gaauggaggccguggagga

SEQ ID NO: 2644235 - RNA, 19 nt, Homo sapiens
  misc_RNA (1)...(19): siRNA sense strand
gcauugaccuccaagccaa

SEQ ID NO: 2644236 - RNA, 19 nt, Homo sapiens
  misc_RNA (1)...(19): siRNA sense strand
ugacagacauggugaccca

SEQ ID NO: 2644237 - RNA, 19 nt, Homo sapiens
  misc_RNA (1)...(19): siRNA sense strand
gcuccauugugucgggcua

SEQ ID NO: 2644238 - RNA, 19 nt, Homo sapiens
  misc_RNA (1)...(19): siRNA sense strand
gccugaaggaggaagagaa

SEQ ID NO: 2644239 - RNA, 19 nt, Homo sapiens
  misc_RNA (1)...(19): siRNA sense strand
gguaaaggugaauggggaa

SEQ ID NO: 2644240 - RNA, 19 nt, Homo sapiens
  misc_RNA (1)...(19): siRNA sense strand
ggaagagaauggaggccgu

SEQ ID NO: 2644241 - RNA, 19 nt, Homo sapiens
  misc_RNA (1)...(19): siRNA sense strand
ugaaagggaacgagccgua

SEQ ID NO: 2644242 - RNA, 19 nt, Homo sapiens
  misc_RNA (1)...(19): siRNA sense strand
gcuacaagaucguggagac

SEQ ID NO: 2644243 - RNA, 19 nt, Homo sapiens
  misc_RNA (1)...(19): siRNA sense strand
ucagugacgaagaggacaa

SEQ ID NO: 2644244 - RNA, 19 nt, Homo sapiens
  misc_RNA (1)...(19): siRNA sense strand
aggacaagggagagagaac

SEQ ID NO: 2644245 - RNA, 19 nt, Homo sapiens
  misc_RNA (1)...(19): siRNA sense strand
gaaugaggacgcugcggaa

SEQ ID NO: 2644246 - RNA, 19 nt, Homo sapiens
  misc_RNA (1)...(19): siRNA sense strand
ccgucaaccgcaagcgcaa

SEQ ID NO: 2644247 - RNA, 19 nt, Homo sapiens
  misc_RNA (1)...(19): siRNA sense strand
acgacuucaucgaggccaa

SEQ ID NO: 2644248 - RNA, 19 nt, Homo sapiens
  misc_RNA (1)...(19): siRNA sense strand
ggaaagcgucauugggaag

SEQ ID NO: 2644249 - RNA, 19 nt, Homo sapiens
  misc_RNA (1)...(19): siRNA sense strand
augccuaccugaaagggaa

SEQ ID NO: 2644250 - RNA, 19 nt, Homo sapiens
  misc_RNA (1)...(19): siRNA sense strand
cuacaagaucguggagaca

SEQ ID NO: 2644251 - RNA, 19 nt, Homo sapiens
  misc_RNA (1)...(19): siRNA sense strand
acaagaucguggagacacu

SEQ ID NO: 2644252 - RNA, 19 nt, Homo sapiens
  misc_RNA (1)...(19): siRNA sense strand
ugaggacgucugaggacaa

SEQ ID NO: 2644253 - RNA, 19 nt, Homo sapiens
  misc_RNA (1)...(19): siRNA sense strand
cagccaaguccaaggguuc

SEQ ID NO: 2644254 - RNA, 19 nt, Homo sapiens
  misc_RNA (1)...(19): siRNA sense strand
ugcccaaggacgaggacau

SEQ ID NO: 2644255 - RNA, 19 nt, Homo sapiens
  misc_RNA (1)...(19): siRNA sense strand
ccgcaagacagaugaaccu

SEQ ID NO: 2644256 - RNA, 19 nt, Homo sapiens
  misc_RNA (1)...(19): siRNA sense strand
ccuccuaccugcuggccau

SEQ ID NO: 2644257 - RNA, 19 nt, Homo sapiens
  misc_RNA (1)...(19): siRNA sense strand
ugguaaaggugaaugggga

SEQ ID NO: 2644258 - RNA, 19 nt, Homo sapiens
  misc_RNA (1)...(19): siRNA sense strand
cuaucaugcccaaggacga

SEQ ID NO: 2644259 - RNA, 19 nt, Homo sapiens
  misc_RNA (1)...(19): siRNA sense strand
uggagaaaucgguggagaa

SEQ ID NO: 2644260 - RNA, 19 nt, Homo sapiens
  misc_RNA (1)...(19): siRNA sense strand
ccaagaaggugacggcaga

SEQ ID NO: 2644261 - RNA, 19 nt, Homo sapiens
  misc_RNA (1)...(19): siRNA sense strand
uggaagagacacaggcaga

SEQ ID NO: 2644262 - RNA, 19 nt, Homo sapiens
  misc_RNA (1)...(19): siRNA sense strand
cgagaguccuggagggaag

SEQ ID NO: 2644263 - RNA, 19 nt, Homo sapiens
  misc_RNA (1)...(19): siRNA sense strand
gcgagaagauugaaggcuc

SEQ ID NO: 2644264 - RNA, 19 nt, Homo sapiens
  misc_RNA (1)...(19): siRNA sense strand
gcggcauggugcuggugaa

SEQ ID NO: 2644265 - RNA, 19 nt, Homo sapiens
  misc_RNA (1)...(19): siRNA sense strand
ggcaaguggaugagggugu

SEQ ID NO: 2644266 - RNA, 19 nt, Homo sapiens
  misc_RNA (1)...(19): siRNA sense strand
agguggaggcggugaaguu

SEQ ID NO: 2644267 - RNA, 19 nt, Homo sapiens
  misc_RNA (1)...(19): siRNA sense strand
ucgcaucaucgcagagcua

SEQ ID NO: 2644268 - RNA, 19 nt, Homo sapiens
  misc_RNA (1)...(19): siRNA sense strand
cggcauggugcuggugaaa

SEQ ID NO: 2644269 - RNA, 19 nt, Homo sapiens
  misc_RNA (1)...(19): siRNA sense strand
uguugaggcugcagagcga

SEQ ID NO: 2644270 - RNA, 19 nt, Homo sapiens
  misc_RNA (1)...(19): siRNA sense strand
gagaagauccagagagacg

SEQ ID NO: 2644271 - RNA, 19 nt, Homo sapiens
  misc_RNA (1)...(19): siRNA sense strand
ucaagaaggcugaguccga

SEQ ID NO: 2644272 - RNA, 19 nt, Homo sapiens
  misc_RNA (1)...(19): siRNA sense strand
gcaucaucgcagagcuaga

SEQ ID NO: 2644273 - RNA, 19 nt, Homo sapiens
  misc_RNA (1)...(19): siRNA sense strand
ggacaggaugcgagagcag

SEQ ID NO: 2644274 - RNA, 19 nt, Homo sapiens
  misc_RNA (1)...(19): siRNA sense strand
ggcccagauccgaaggcaa

SEQ ID NO: 2644275 - RNA, 19 nt, Homo sapiens
  misc_RNA (1)...(19): siRNA sense strand
ucuacgagcuggaggacgu

SEQ ID NO: 2644276 - RNA, 19 nt, Homo sapiens
  misc_RNA (1)...(19): siRNA sense strand
ggaugcgagagcagccaaa

SEQ ID NO: 2644277 - RNA, 19 nt, Homo sapiens
  misc_RNA (1)...(19): siRNA sense strand
aagaggaacggcugcgcua

SEQ ID NO: 2644278 - RNA, 19 nt, Homo sapiens
  misc_RNA (1)...(19): siRNA sense strand
gagcgagacugggaggaga

SEQ ID NO: 2644279 - RNA, 19 nt, Homo sapiens
  misc_RNA (1)...(19): siRNA sense strand
cugcggacgaugcggagua

SEQ ID NO: 2644280 - RNA, 19 nt, Homo sapiens
  misc_RNA (1)...(19): siRNA sense strand
ggaugaaccgcuuccgaca

SEQ ID NO: 2644281 - RNA, 19 nt, Homo sapiens
  misc_RNA (1)...(19): siRNA sense strand
gggccgaguacaugcggau

SEQ ID NO: 2644282 - RNA, 19 nt, Homo sapiens
  misc_RNA (1)...(19): siRNA sense strand
ucaacgacgaggagcuuau

SEQ ID NO: 2644283 - RNA, 19 nt, Homo sapiens
  misc_RNA (1)...(19): siRNA sense strand
uggagaaaucgguggagaa

SEQ ID NO: 2644284 - RNA, 19 nt, Homo sapiens
  misc_RNA (1)...(19): siRNA sense strand
ccaagaaggugacggcaga

SEQ ID NO: 2644285 - RNA, 19 nt, Homo sapiens
  misc_RNA (1)...(19): siRNA sense strand
uggaagagacacaggcaga

SEQ ID NO: 2644286 - RNA, 19 nt, Homo sapiens
  misc_RNA (1)...(19): siRNA sense strand
cgagaguccuggagggaag

SEQ ID NO: 2644287 - RNA, 19 nt, Homo sapiens
  misc_RNA (1)...(19): siRNA sense strand
gcgagaagauugaaggcuc

SEQ ID NO: 2644288 - RNA, 19 nt, Homo sapiens
  misc_RNA (1)...(19): siRNA sense strand
gcggcauggugcuggugaa

SEQ ID NO: 2644289 - RNA, 19 nt, Homo sapiens
  misc_RNA (1)...(19): siRNA sense strand
ggcaaguggaugagggugu

SEQ ID NO: 2644290 - RNA, 19 nt, Homo sapiens
  misc_RNA (1)...(19): siRNA sense strand
agguggaggcggugaaguu

SEQ ID NO: 2644291 - RNA, 19 nt, Homo sapiens
  misc_RNA (1)...(19): siRNA sense strand
ucgcaucaucgcagagcua

SEQ ID NO: 2644292 - RNA, 19 nt, Homo sapiens
  misc_RNA (1)...(19): siRNA sense strand
cggcauggugcuggugaaa

SEQ ID NO: 2644293 - RNA, 19 nt, Homo sapiens
  misc_RNA (1)...(19): siRNA sense strand
uguugaggcugcagagcga

SEQ ID NO: 2644294 - RNA, 19 nt, Homo sapiens
  misc_RNA (1)...(19): siRNA sense strand
gagaagauccagagagacg

SEQ ID NO: 2644295 - RNA, 19 nt, Homo sapiens
  misc_RNA (1)...(19): siRNA sense strand
ucaagaaggcugaguccga

SEQ ID NO: 2644296 - RNA, 19 nt, Homo sapiens
  misc_RNA (1)...(19): siRNA sense strand
gcaucaucgcagagcuaga

SEQ ID NO: 2644297 - RNA, 19 nt, Homo sapiens
  misc_RNA (1)...(19): siRNA sense strand
ggacaggaugcgagagcag

SEQ ID NO: 2644298 - RNA, 19 nt, Homo sapiens
  misc_RNA (1)...(19): siRNA sense strand
ggcccagauccgaaggcaa

SEQ ID NO: 2644299 - RNA, 19 nt, Homo sapiens
  misc_RNA (1)...(19): siRNA sense strand
ucuacgagcuggaggacgu

SEQ ID NO: 2644300 - RNA, 19 nt, Homo sapiens
  misc_RNA (1)...(19): siRNA sense strand
ggaugcgagagcagccaaa

SEQ ID NO: 2644301 - RNA, 19 nt, Homo sapiens
  misc_RNA (1)...(19): siRNA sense strand
aagaggaacggcugcgcua

SEQ ID NO: 2644302 - RNA, 19 nt, Homo sapiens
  misc_RNA (1)...(19): siRNA sense strand
gagcgagacugggaggaga

SEQ ID NO: 2644303 - RNA, 19 nt, Homo sapiens
  misc_RNA (1)...(19): siRNA sense strand
cugcggacgaugcggagua

SEQ ID NO: 2644304 - RNA, 19 nt, Homo sapiens
  misc_RNA (1)...(19): siRNA sense strand
ggaugaaccgcuuccgaca

SEQ ID NO: 2644305 - RNA, 19 nt, Homo sapiens
  misc_RNA (1)...(19): siRNA sense strand
gggccgaguacaugcggau

SEQ ID NO: 2644306 - RNA, 19 nt, Homo sapiens
  misc_RNA (1)...(19): siRNA sense strand
ucaacgacgaggagcuuau

SEQ ID NO: 2644307 - RNA, 19 nt, Homo sapiens
  misc_RNA (1)...(19): siRNA sense strand
cauaauauccuccaggcaa

SEQ ID NO: 2644308 - RNA, 19 nt, Homo sapiens
  misc_RNA (1)...(19): siRNA sense strand
uguuaaagcagaaacucaa

SEQ ID NO: 2644309 - RNA, 19 nt, Homo sapiens
  misc_RNA (1)...(19): siRNA sense strand
agauaugacuuuauggucu

SEQ ID NO: 2644310 - RNA, 19 nt, Homo sapiens
  misc_RNA (1)...(19): siRNA sense strand
cagaaacucaagaagaaaa

SEQ ID NO: 2644311 - RNA, 19 nt, Homo sapiens
  misc_RNA (1)...(19): siRNA sense strand
ggucuuugccuaucgggaa

SEQ ID NO: 2644312 - RNA, 19 nt, Homo sapiens
  misc_RNA (1)...(19): siRNA sense strand
ccuaaugaaaagacguuaa

SEQ ID NO: 2644313 - RNA, 19 nt, Homo sapiens
  misc_RNA (1)...(19): siRNA sense strand
cuguuaaagcagaaacuca

SEQ ID NO: 2644314 - RNA, 19 nt, Homo sapiens
  misc_RNA (1)...(19): siRNA sense strand
agaucgaauagaagacuuu

SEQ ID NO: 2644315 - RNA, 19 nt, Homo sapiens
  misc_RNA (1)...(19): siRNA sense strand
cuuuagagugcugaagaaa

SEQ ID NO: 2644316 - RNA, 19 nt, Homo sapiens
  misc_RNA (1)...(19): siRNA sense strand
ccuccaggcaagagaucga

SEQ ID NO: 2644317 - RNA, 19 nt, Homo sapiens
  misc_RNA (1)...(19): siRNA sense strand
cauaauauccuccaggcaa

SEQ ID NO: 2644318 - RNA, 19 nt, Homo sapiens
  misc_RNA (1)...(19): siRNA sense strand
uguuaaagcagaaacucaa

SEQ ID NO: 2644319 - RNA, 19 nt, Homo sapiens
  misc_RNA (1)...(19): siRNA sense strand
agauaugacuuuauggucu

SEQ ID NO: 2644320 - RNA, 19 nt, Homo sapiens
  misc_RNA (1)...(19): siRNA sense strand
cagaaacucaagaagaaaa

SEQ ID NO: 2644321 - RNA, 19 nt, Homo sapiens
  misc_RNA (1)...(19): siRNA sense strand
ggucuuugccuaucgggaa

SEQ ID NO: 2644322 - RNA, 19 nt, Homo sapiens
  misc_RNA (1)...(19): siRNA sense strand
ccuaaugaaaagacguuaa

SEQ ID NO: 2644323 - RNA, 19 nt, Homo sapiens
  misc_RNA (1)...(19): siRNA sense strand
cuguuaaagcagaaacuca

SEQ ID NO: 2644324 - RNA, 19 nt, Homo sapiens
  misc_RNA (1)...(19): siRNA sense strand
agaucgaauagaagacuuu

SEQ ID NO: 2644325 - RNA, 19 nt, Homo sapiens
  misc_RNA (1)...(19): siRNA sense strand
cuuuagagugcugaagaaa

SEQ ID NO: 2644326 - RNA, 19 nt, Homo sapiens
  misc_RNA (1)...(19): siRNA sense strand
ccuccaggcaagagaucga

SEQ ID NO: 2644327 - RNA, 19 nt, Homo sapiens
  misc_RNA (1)...(19): siRNA sense strand
gggaauguauuuauggaaa

SEQ ID NO: 2644328 - RNA, 19 nt, Homo sapiens
  misc_RNA (1)...(19): siRNA sense strand
gcaaaguaccucacagaaa

SEQ ID NO: 2644329 - RNA, 19 nt, Homo sapiens
  misc_RNA (1)...(19): siRNA sense strand
caggaguggugcagaauaa

SEQ ID NO: 2644330 - RNA, 19 nt, Homo sapiens
  misc_RNA (1)...(19): siRNA sense strand
gaucaguauuuaaggacaa

SEQ ID NO: 2644331 - RNA, 19 nt, Homo sapiens
  misc_RNA (1)...(19): siRNA sense strand
gcaaagggacccagcauaa

SEQ ID NO: 2644332 - RNA, 19 nt, Homo sapiens
  misc_RNA (1)...(19): siRNA sense strand
gaagaaacaagaagggcaa

SEQ ID NO: 2644333 - RNA, 19 nt, Homo sapiens
  misc_RNA (1)...(19): siRNA sense strand
ccagauaacuccuacauua

SEQ ID NO: 2644334 - RNA, 19 nt, Homo sapiens
  misc_RNA (1)...(19): siRNA sense strand
guacaggaguggugcagaa

SEQ ID NO: 2644335 - RNA, 19 nt, Homo sapiens
  misc_RNA (1)...(19): siRNA sense strand
accuauaauucgaggcaaa

SEQ ID NO: 2644336 - RNA, 19 nt, Homo sapiens
  misc_RNA (1)...(19): siRNA sense strand
ggacagagacucaagauuu

SEQ ID NO: 2644337 - RNA, 19 nt, Homo sapiens
  misc_RNA (1)...(19): siRNA sense strand
gugcagaauaacagacuaa

SEQ ID NO: 2644338 - RNA, 19 nt, Homo sapiens
  misc_RNA (1)...(19): siRNA sense strand
uugaagaagaagaagguaa

SEQ ID NO: 2644339 - RNA, 19 nt, Homo sapiens
  misc_RNA (1)...(19): siRNA sense strand
gaaugaggaagaugaaaua

SEQ ID NO: 2644340 - RNA, 19 nt, Homo sapiens
  misc_RNA (1)...(19): siRNA sense strand
caguaaagcauguccuaaa

SEQ ID NO: 2644341 - RNA, 19 nt, Homo sapiens
  misc_RNA (1)...(19): siRNA sense strand
gcaagaagcacgcgaguca

SEQ ID NO: 2644342 - RNA, 19 nt, Homo sapiens
  misc_RNA (1)...(19): siRNA sense strand
cgaaacauggagaggcuaa

SEQ ID NO: 2644343 - RNA, 19 nt, Homo sapiens
  misc_RNA (1)...(19): siRNA sense strand
cugaagaugcagagcacaa

SEQ ID NO: 2644344 - RNA, 19 nt, Homo sapiens
  misc_RNA (1)...(19): siRNA sense strand
agacaauucugcagcaaau

SEQ ID NO: 2644345 - RNA, 19 nt, Homo sapiens
  misc_RNA (1)...(19): siRNA sense strand
acaagaaaguagcaagauu

SEQ ID NO: 2644346 - RNA, 19 nt, Homo sapiens
  misc_RNA (1)...(19): siRNA sense strand
caguggagguggaagaauu

SEQ ID NO: 2644347 - RNA, 19 nt, Homo sapiens
  misc_RNA (1)...(19): siRNA sense strand
ggagauaagcaaaugaaaa

SEQ ID NO: 2644348 - RNA, 19 nt, Homo sapiens
  misc_RNA (1)...(19): siRNA sense strand
agacauagauaccuugaaa

SEQ ID NO: 2644349 - RNA, 19 nt, Homo sapiens
  misc_RNA (1)...(19): siRNA sense strand
gggcuuucuuggaugguaa

SEQ ID NO: 2644350 - RNA, 19 nt, Homo sapiens
  misc_RNA (1)...(19): siRNA sense strand
agggaaauguggacagaga

SEQ ID NO: 2644351 - RNA, 19 nt, Homo sapiens
  misc_RNA (1)...(19): siRNA sense strand
gaugaaacacgaucagaua

SEQ ID NO: 2644352 - RNA, 19 nt, Homo sapiens
  misc_RNA (1)...(19): siRNA sense strand
uuucaaagccagacagcua

SEQ ID NO: 2644353 - RNA, 19 nt, Homo sapiens
  misc_RNA (1)...(19): siRNA sense strand
caacacaacuccaugagaa

SEQ ID NO: 2644354 - RNA, 19 nt, Homo sapiens
  misc_RNA (1)...(19): siRNA sense strand
ggacaauaugccaaggauu

SEQ ID NO: 2644355 - RNA, 19 nt, Homo sapiens
  misc_RNA (1)...(19): siRNA sense strand
gaacaauauucuggagaca

SEQ ID NO: 2644356 - RNA, 19 nt, Homo sapiens
  misc_RNA (1)...(19): siRNA sense strand
caaguuagaucaagcagaa

SEQ ID NO: 2644357 - RNA, 19 nt, Homo sapiens
  misc_RNA (1)...(19): siRNA sense strand
cagcaacuccaaugaaaua

SEQ ID NO: 2644358 - RNA, 19 nt, Homo sapiens
  misc_RNA (1)...(19): siRNA sense strand
cagaagaaccucacaucaa

SEQ ID NO: 2644359 - RNA, 19 nt, Homo sapiens
  misc_RNA (1)...(19): siRNA sense strand
agacaagaaaguagcaaga

SEQ ID NO: 2644360 - RNA, 19 nt, Homo sapiens
  misc_RNA (1)...(19): siRNA sense strand
gcacagaucacaaacuuua

SEQ ID NO: 2644361 - RNA, 19 nt, Homo sapiens
  misc_RNA (1)...(19): siRNA sense strand
caagaaaguagcaagauuu

SEQ ID NO: 2644362 - RNA, 19 nt, Homo sapiens
  misc_RNA (1)...(19): siRNA sense strand
ccaaacaccucaaguauga

SEQ ID NO: 2644363 - RNA, 19 nt, Homo sapiens
  misc_RNA (1)...(19): siRNA sense strand
agaaugaggaagaugaaau

SEQ ID NO: 2644364 - RNA, 19 nt, Homo sapiens
  misc_RNA (1)...(19): siRNA sense strand
gacaauaugccaaggauuu

SEQ ID NO: 2644365 - RNA, 19 nt, Homo sapiens
  misc_RNA (1)...(19): siRNA sense strand
ucuggaagucugagcgaua

SEQ ID NO: 2644366 - RNA, 19 nt, Homo sapiens
  misc_RNA (1)...(19): siRNA sense strand
acaauauucuggagacauu

SEQ ID NO: 2644367 - RNA, 19 nt, Homo sapiens
  misc_RNA (1)...(19): siRNA sense strand
ggaaggugcacguggccaa

SEQ ID NO: 2644368 - RNA, 19 nt, Homo sapiens
  misc_RNA (1)...(19): siRNA sense strand
aaauagacaucgugcauca

SEQ ID NO: 2644369 - RNA, 19 nt, Homo sapiens
  misc_RNA (1)...(19): siRNA sense strand
gcagaaaauuuacugguua

SEQ ID NO: 2644370 - RNA, 19 nt, Homo sapiens
  misc_RNA (1)...(19): siRNA sense strand
ggucuggauucgcuggaua

SEQ ID NO: 2644371 - RNA, 19 nt, Homo sapiens
  misc_RNA (1)...(19): siRNA sense strand
gaaacagauucuucagaga

SEQ ID NO: 2644372 - RNA, 19 nt, Homo sapiens
  misc_RNA (1)...(19): siRNA sense strand
cggaagacagauuucgaaa

SEQ ID NO: 2644373 - RNA, 19 nt, Homo sapiens
  misc_RNA (1)...(19): siRNA sense strand
gugucagcgugaagguuaa

SEQ ID NO: 2644374 - RNA, 19 nt, Homo sapiens
  misc_RNA (1)...(19): siRNA sense strand
caaguaugauagccagaaa

SEQ ID NO: 2644375 - RNA, 19 nt, Homo sapiens
  misc_RNA (1)...(19): siRNA sense strand
aggaagaaggagcgaugaa

SEQ ID NO: 2644376 - RNA, 19 nt, Homo sapiens
  misc_RNA (1)...(19): siRNA sense strand
gcacaaggcagaaaauuua

SEQ ID NO: 2644377 - RNA, 19 nt, Homo sapiens
  misc_RNA (1)...(19): siRNA sense strand
cuuuaugaccucagagaca

SEQ ID NO: 2644378 - RNA, 19 nt, Homo sapiens
  misc_RNA (1)...(19): siRNA sense strand
ggaauauaacugugugcau

SEQ ID NO: 2644379 - RNA, 19 nt, Homo sapiens
  misc_RNA (1)...(19): siRNA sense strand
uggaaacgucaguuggaua

SEQ ID NO: 2644380 - RNA, 19 nt, Homo sapiens
  misc_RNA (1)...(19): siRNA sense strand
auuuauggaccgaggguau

SEQ ID NO: 2644381 - RNA, 19 nt, Homo sapiens
  misc_RNA (1)...(19): siRNA sense strand
cagaauaacagacuaagaa

SEQ ID NO: 2644382 - RNA, 19 nt, Homo sapiens
  misc_RNA (1)...(19): siRNA sense strand
uuaaggacaaccagggaaa

SEQ ID NO: 2644383 - RNA, 19 nt, Homo sapiens
  misc_RNA (1)...(19): siRNA sense strand
uggaaagcauggugggagu

SEQ ID NO: 2644384 - RNA, 19 nt, Homo sapiens
  misc_RNA (1)...(19): siRNA sense strand
gaacaauggaacucucaaa

SEQ ID NO: 2644385 - RNA, 19 nt, Homo sapiens
  misc_RNA (1)...(19): siRNA sense strand
caauggaagaaguggacau

SEQ ID NO: 2644386 - RNA, 19 nt, Homo sapiens
  misc_RNA (1)...(19): siRNA sense strand
acucaaaucuucagggaug

SEQ ID NO: 2644387 - RNA, 19 nt, Homo sapiens
  misc_RNA (1)...(19): siRNA sense strand
aagaaggagcgaugaaaga

SEQ ID NO: 2644388 - RNA, 19 nt, Homo sapiens
  misc_RNA (1)...(19): siRNA sense strand
ugguacagaaugaggaaga

SEQ ID NO: 2644389 - RNA, 19 nt, Homo sapiens
  misc_RNA (1)...(19): siRNA sense strand
caauauagcuacggagguu

SEQ ID NO: 2644390 - RNA, 19 nt, Homo sapiens
  misc_RNA (1)...(19): siRNA sense strand
gcucaaacugcaaggaagu

SEQ ID NO: 2644391 - RNA, 19 nt, Homo sapiens
  misc_RNA (1)...(19): siRNA sense strand
ccaaagaacccaaaggaug

SEQ ID NO: 2644392 - RNA, 19 nt, Homo sapiens
  misc_RNA (1)...(19): siRNA sense strand
gaaucaugaucaucuguaa

SEQ ID NO: 2644393 - RNA, 19 nt, Homo sapiens
  misc_RNA (1)...(19): siRNA sense strand
gaaugaaaaugauccgaua

SEQ ID NO: 2644394 - RNA, 19 nt, Homo sapiens
  misc_RNA (1)...(19): siRNA sense strand
ggaaacgucaguuggauau

SEQ ID NO: 2644395 - RNA, 19 nt, Homo sapiens
  misc_RNA (1)...(19): siRNA sense strand
gcacagcacuugauugaca

SEQ ID NO: 2644396 - RNA, 19 nt, Homo sapiens
  misc_RNA (1)...(19): siRNA sense strand
ggaugcacuugaagaaaca

SEQ ID NO: 2644397 - RNA, 19 nt, Homo sapiens
  misc_RNA (1)...(19): siRNA sense strand
ggaaaacgcaacauaauaa

SEQ ID NO: 2644398 - RNA, 19 nt, Homo sapiens
  misc_RNA (1)...(19): siRNA sense strand
gguuaaggaggcuuguaaa

SEQ ID NO: 2644399 - RNA, 19 nt, Homo sapiens
  misc_RNA (1)...(19): siRNA sense strand
ccaagagaaucaugaucau

SEQ ID NO: 2644400 - RNA, 19 nt, Homo sapiens
  misc_RNA (1)...(19): siRNA sense strand
gugccgaaccuuauauuaa

SEQ ID NO: 2644401 - RNA, 19 nt, Homo sapiens
  misc_RNA (1)...(19): siRNA sense strand
auagaagggccgacagaau

SEQ ID NO: 2644402 - RNA, 19 nt, Homo sapiens
  misc_RNA (1)...(19): siRNA sense strand
caacaaggcacggaauaua

SEQ ID NO: 2644403 - RNA, 19 nt, Homo sapiens
  misc_RNA (1)...(19): siRNA sense strand
uggaaagugacgaugaaau

SEQ ID NO: 2644404 - RNA, 19 nt, Homo sapiens
  misc_RNA (1)...(19): siRNA sense strand
ccaauggagauaagcaaau

SEQ ID NO: 2644405 - RNA, 19 nt, Homo sapiens
  misc_RNA (1)...(19): siRNA sense strand
uugaagaaaccaaugcaaa

SEQ ID NO: 2644406 - RNA, 19 nt, Homo sapiens
  misc_RNA (1)...(19): siRNA sense strand
ggccaggagaaaugggaaa

SEQ ID NO: 2644407 - RNA, 19 nt, Homo sapiens
  misc_RNA (1)...(19): siRNA sense strand
gagaugugucagucagaaa

SEQ ID NO: 2644408 - RNA, 19 nt, Homo sapiens
  misc_RNA (1)...(19): siRNA sense strand
guaacaaaugugaugacaa

SEQ ID NO: 2644409 - RNA, 19 nt, Homo sapiens
  misc_RNA (1)...(19): siRNA sense strand
guagaugaugccagugaaa

SEQ ID NO: 2644410 - RNA, 19 nt, Homo sapiens
  misc_RNA (1)...(19): siRNA sense strand
agaugaugccagugaaaga

SEQ ID NO: 2644411 - RNA, 19 nt, Homo sapiens
  misc_RNA (1)...(19): siRNA sense strand
ccaccauaugagaggaaau

SEQ ID NO: 2644412 - RNA, 19 nt, Homo sapiens
  misc_RNA (1)...(19): siRNA sense strand
ggacuguaguggaagcaga

SEQ ID NO: 2644413 - RNA, 19 nt, Homo sapiens
  misc_RNA (1)...(19): siRNA sense strand
gagaaauggacaggaggaa

SEQ ID NO: 2644414 - RNA, 19 nt, Homo sapiens
  misc_RNA (1)...(19): siRNA sense strand
agaaauggacaggaggaaa

SEQ ID NO: 2644415 - RNA, 19 nt, Homo sapiens
  misc_RNA (1)...(19): siRNA sense strand
uagaaggauguaagacaaa

SEQ ID NO: 2644416 - RNA, 19 nt, Homo sapiens
  misc_RNA (1)...(19): siRNA sense strand
aauaaaggaagacaggaaa

SEQ ID NO: 2644417 - RNA, 19 nt, Homo sapiens
  misc_RNA (1)...(19): siRNA sense strand
agauguaagauuagaagga

SEQ ID NO: 2644418 - RNA, 19 nt, Homo sapiens
  misc_RNA (1)...(19): siRNA sense strand
cauuagagaauuacgugaa

SEQ ID NO: 2644419 - RNA, 19 nt, Homo sapiens
  misc_RNA (1)...(19): siRNA sense strand
aggaaaggagacagaacau

SEQ ID NO: 2644420 - RNA, 19 nt, Homo sapiens
  misc_RNA (1)...(19): siRNA sense strand
ucaaaguggauuauggaga

SEQ ID NO: 2644421 - RNA, 19 nt, Homo sapiens
  misc_RNA (1)...(19): siRNA sense strand
auuagaaggauguaagaca

SEQ ID NO: 2644422 - RNA, 19 nt, Homo sapiens
  misc_RNA (1)...(19): siRNA sense strand
caacaagaacaacaggaga

SEQ ID NO: 2644423 - RNA, 19 nt, Homo sapiens
  misc_RNA (1)...(19): siRNA sense strand
ggauuauggagauguguca

SEQ ID NO: 2644424 - RNA, 19 nt, Homo sapiens
  misc_RNA (1)...(19): siRNA sense strand
guguugucaaaguggauua

SEQ ID NO: 2644425 - RNA, 19 nt, Homo sapiens
  misc_RNA (1)...(19): siRNA sense strand
caggaggaaaggagacaga

SEQ ID NO: 2644426 - RNA, 19 nt, Homo sapiens
  misc_RNA (1)...(19): siRNA sense strand
ugugaugacaagaaggaga

SEQ ID NO: 2644427 - RNA, 19 nt, Homo sapiens
  misc_RNA (1)...(19): siRNA sense strand
auaaaggaagacaggaaaa

SEQ ID NO: 2644428 - RNA, 19 nt, Homo sapiens
  misc_RNA (1)...(19): siRNA sense strand
uacuauggcugguggccua

SEQ ID NO: 2644429 - RNA, 19 nt, Homo sapiens
  misc_RNA (1)...(19): siRNA sense strand
agagaaaaucugaagugua

SEQ ID NO: 2644430 - RNA, 19 nt, Homo sapiens
  misc_RNA (1)...(19): siRNA sense strand
aggaaaucaguuaugggaa

SEQ ID NO: 2644431 - RNA, 19 nt, Homo sapiens
  misc_RNA (1)...(19): siRNA sense strand
uaucugggguggagagaau

SEQ ID NO: 2644432 - RNA, 19 nt, Homo sapiens
  misc_RNA (1)...(19): siRNA sense strand
acagaaacuacuuugaaga

SEQ ID NO: 2644433 - RNA, 19 nt, Homo sapiens
  misc_RNA (1)...(19): siRNA sense strand
agagaaauggacaggagga

SEQ ID NO: 2644434 - RNA, 19 nt, Homo sapiens
  misc_RNA (1)...(19): siRNA sense strand
ggaggaaaggagacagaac

SEQ ID NO: 2644435 - RNA, 19 nt, Homo sapiens
  misc_RNA (1)...(19): siRNA sense strand
aagaugaccaggagaaaau

SEQ ID NO: 2644436 - RNA, 19 nt, Homo sapiens
  misc_RNA (1)...(19): siRNA sense strand
aaguguagucauuguguuu

SEQ ID NO: 2644437 - RNA, 19 nt, Homo sapiens
  misc_RNA (1)...(19): siRNA sense strand
aauaugaugcugagagacu

SEQ ID NO: 2644438 - RNA, 19 nt, Homo sapiens
  misc_RNA (1)...(19): siRNA sense strand
augacaagaaggagagauc

SEQ ID NO: 2644439 - RNA, 19 nt, Homo sapiens
  misc_RNA (1)...(19): siRNA sense strand
cagaggucaucuugguaga

SEQ ID NO: 2644440 - RNA, 19 nt, Homo sapiens
  misc_RNA (1)...(19): siRNA sense strand
caaagaaauccgaaccgau

SEQ ID NO: 2644441 - RNA, 19 nt, Homo sapiens
  misc_RNA (1)...(19): siRNA sense strand
gaacaugaccuugggcaca

SEQ ID NO: 2644442 - RNA, 19 nt, Homo sapiens
  misc_RNA (1)...(19): siRNA sense strand
cauaaugaagcuuggagca

SEQ ID NO: 2644443 - RNA, 19 nt, Homo sapiens
  misc_RNA (1)...(19): siRNA sense strand
gcagaaguuuggauggaug

SEQ ID NO: 2644444 - RNA, 19 nt, Homo sapiens
  misc_RNA (1)...(19): siRNA sense strand
ucaugguaugggaggaaau

SEQ ID NO: 2644445 - RNA, 19 nt, Homo sapiens
  misc_RNA (1)...(19): siRNA sense strand
ugaugugauuagugaugau

SEQ ID NO: 2644446 - RNA, 19 nt, Homo sapiens
  misc_RNA (1)...(19): siRNA sense strand
gggccaggagaaaugggaa

SEQ ID NO: 2644447 - RNA, 19 nt, Homo sapiens
  misc_RNA (1)...(19): siRNA sense strand
caguuuaaccuuauggcca

SEQ ID NO: 2644448 - RNA, 19 nt, Homo sapiens
  misc_RNA (1)...(19): siRNA sense strand
uguaagauuagaaggaugu

SEQ ID NO: 2644449 - RNA, 19 nt, Homo sapiens
  misc_RNA (1)...(19): siRNA sense strand
ugaugaacuuccaaacaca

SEQ ID NO: 2644450 - RNA, 19 nt, Homo sapiens
  misc_RNA (1)...(19): siRNA sense strand
guguagucauuguguuuca

SEQ ID NO: 2644451 - RNA, 19 nt, Homo sapiens
  misc_RNA (1)...(19): siRNA sense strand
ccaaucaguguuuagacaa

SEQ ID NO: 2644452 - RNA, 19 nt, Homo sapiens
  misc_RNA (1)...(19): siRNA sense strand
ugucaugguaugggaggaa

SEQ ID NO: 2644453 - RNA, 19 nt, Homo sapiens
  misc_RNA (1)...(19): siRNA sense strand
auguaagauuagaaggaug

SEQ ID NO: 2644454 - RNA, 19 nt, Homo sapiens
  misc_RNA (1)...(19): siRNA sense strand
caacaggagacuggcagaa

SEQ ID NO: 2644455 - RNA, 19 nt, Homo sapiens
  misc_RNA (1)...(19): siRNA sense strand
ggccaggagaaaugggaaa

SEQ ID NO: 2644456 - RNA, 19 nt, Homo sapiens
  misc_RNA (1)...(19): siRNA sense strand
gagaugugucagucagaaa

SEQ ID NO: 2644457 - RNA, 19 nt, Homo sapiens
  misc_RNA (1)...(19): siRNA sense strand
guaacaaaugugaugacaa

SEQ ID NO: 2644458 - RNA, 19 nt, Homo sapiens
  misc_RNA (1)...(19): siRNA sense strand
guagaugaugccagugaaa

SEQ ID NO: 2644459 - RNA, 19 nt, Homo sapiens
  misc_RNA (1)...(19): siRNA sense strand
agaugaugccagugaaaga

SEQ ID NO: 2644460 - RNA, 19 nt, Homo sapiens
  misc_RNA (1)...(19): siRNA sense strand
ccaccauaugagaggaaau

SEQ ID NO: 2644461 - RNA, 19 nt, Homo sapiens
  misc_RNA (1)...(19): siRNA sense strand
ggacuguaguggaagcaga

SEQ ID NO: 2644462 - RNA, 19 nt, Homo sapiens
  misc_RNA (1)...(19): siRNA sense strand
gagaaauggacaggaggaa

SEQ ID NO: 2644463 - RNA, 19 nt, Homo sapiens
  misc_RNA (1)...(19): siRNA sense strand
agaaauggacaggaggaaa

SEQ ID NO: 2644464 - RNA, 19 nt, Homo sapiens
  misc_RNA (1)...(19): siRNA sense strand
uagaaggauguaagacaaa

SEQ ID NO: 2644465 - RNA, 19 nt, Homo sapiens
  misc_RNA (1)...(19): siRNA sense strand
aauaaaggaagacaggaaa

SEQ ID NO: 2644466 - RNA, 19 nt, Homo sapiens
  misc_RNA (1)...(19): siRNA sense strand
agauguaagauuagaagga

SEQ ID NO: 2644467 - RNA, 19 nt, Homo sapiens
  misc_RNA (1)...(19): siRNA sense strand
cauuagagaauuacgugaa

SEQ ID NO: 2644468 - RNA, 19 nt, Homo sapiens
  misc_RNA (1)...(19): siRNA sense strand
aggaaaggagacagaacau

SEQ ID NO: 2644469 - RNA, 19 nt, Homo sapiens
  misc_RNA (1)...(19): siRNA sense strand
ucaaaguggauuauggaga

SEQ ID NO: 2644470 - RNA, 19 nt, Homo sapiens
  misc_RNA (1)...(19): siRNA sense strand
auuagaaggauguaagaca

SEQ ID NO: 2644471 - RNA, 19 nt, Homo sapiens
  misc_RNA (1)...(19): siRNA sense strand
caacaagaacaacaggaga

SEQ ID NO: 2644472 - RNA, 19 nt, Homo sapiens
  misc_RNA (1)...(19): siRNA sense strand
ggauuauggagauguguca

SEQ ID NO: 2644473 - RNA, 19 nt, Homo sapiens
  misc_RNA (1)...(19): siRNA sense strand
guguugucaaaguggauua

SEQ ID NO: 2644474 - RNA, 19 nt, Homo sapiens
  misc_RNA (1)...(19): siRNA sense strand
caggaggaaaggagacaga

SEQ ID NO: 2644475 - RNA, 19 nt, Homo sapiens
  misc_RNA (1)...(19): siRNA sense strand
ugugaugacaagaaggaga

SEQ ID NO: 2644476 - RNA, 19 nt, Homo sapiens
  misc_RNA (1)...(19): siRNA sense strand
auaaaggaagacaggaaaa

SEQ ID NO: 2644477 - RNA, 19 nt, Homo sapiens
  misc_RNA (1)...(19): siRNA sense strand
uacuauggcugguggccua

SEQ ID NO: 2644478 - RNA, 19 nt, Homo sapiens
  misc_RNA (1)...(19): siRNA sense strand
agagaaaaucugaagugua

SEQ ID NO: 2644479 - RNA, 19 nt, Homo sapiens
  misc_RNA (1)...(19): siRNA sense strand
aggaaaucaguuaugggaa

SEQ ID NO: 2644480 - RNA, 19 nt, Homo sapiens
  misc_RNA (1)...(19): siRNA sense strand
uaucugggguggagagaau

SEQ ID NO: 2644481 - RNA, 19 nt, Homo sapiens
  misc_RNA (1)...(19): siRNA sense strand
acagaaacuacuuugaaga

SEQ ID NO: 2644482 - RNA, 19 nt, Homo sapiens
  misc_RNA (1)...(19): siRNA sense strand
agagaaauggacaggagga

SEQ ID NO: 2644483 - RNA, 19 nt, Homo sapiens
  misc_RNA (1)...(19): siRNA sense strand
ggaggaaaggagacagaac

SEQ ID NO: 2644484 - RNA, 19 nt, Homo sapiens
  misc_RNA (1)...(19): siRNA sense strand
aagaugaccaggagaaaau

SEQ ID NO: 2644485 - RNA, 19 nt, Homo sapiens
  misc_RNA (1)...(19): siRNA sense strand
aaguguagucauuguguuu

SEQ ID NO: 2644486 - RNA, 19 nt, Homo sapiens
  misc_RNA (1)...(19): siRNA sense strand
aauaugaugcugagagacu

SEQ ID NO: 2644487 - RNA, 19 nt, Homo sapiens
  misc_RNA (1)...(19): siRNA sense strand
augacaagaaggagagauc

SEQ ID NO: 2644488 - RNA, 19 nt, Homo sapiens
  misc_RNA (1)...(19): siRNA sense strand
cagaggucaucuugguaga

SEQ ID NO: 2644489 - RNA, 19 nt, Homo sapiens
  misc_RNA (1)...(19): siRNA sense strand
caaagaaauccgaaccgau

SEQ ID NO: 2644490 - RNA, 19 nt, Homo sapiens
  misc_RNA (1)...(19): siRNA sense strand
gaacaugaccuugggcaca

SEQ ID NO: 2644491 - RNA, 19 nt, Homo sapiens
  misc_RNA (1)...(19): siRNA sense strand
cauaaugaagcuuggagca

SEQ ID NO: 2644492 - RNA, 19 nt, Homo sapiens
  misc_RNA (1)...(19): siRNA sense strand
gcagaaguuuggauggaug

SEQ ID NO: 2644493 - RNA, 19 nt, Homo sapiens
  misc_RNA (1)...(19): siRNA sense strand
ucaugguaugggaggaaau

SEQ ID NO: 2644494 - RNA, 19 nt, Homo sapiens
  misc_RNA (1)...(19): siRNA sense strand
ugaugugauuagugaugau

SEQ ID NO: 2644495 - RNA, 19 nt, Homo sapiens
  misc_RNA (1)...(19): siRNA sense strand
gggccaggagaaaugggaa

SEQ ID NO: 2644496 - RNA, 19 nt, Homo sapiens
  misc_RNA (1)...(19): siRNA sense strand
caguuuaaccuuauggcca

SEQ ID NO: 2644497 - RNA, 19 nt, Homo sapiens
  misc_RNA (1)...(19): siRNA sense strand
uguaagauuagaaggaugu

SEQ ID NO: 2644498 - RNA, 19 nt, Homo sapiens
  misc_RNA (1)...(19): siRNA sense strand
ugaugaacuuccaaacaca

SEQ ID NO: 2644499 - RNA, 19 nt, Homo sapiens
  misc_RNA (1)...(19): siRNA sense strand
guguagucauuguguuuca

SEQ ID NO: 2644500 - RNA, 19 nt, Homo sapiens
  misc_RNA (1)...(19): siRNA sense strand
ccaaucaguguuuagacaa

SEQ ID NO: 2644501 - RNA, 19 nt, Homo sapiens
  misc_RNA (1)...(19): siRNA sense strand
ugucaugguaugggaggaa

SEQ ID NO: 2644502 - RNA, 19 nt, Homo sapiens
  misc_RNA (1)...(19): siRNA sense strand
auguaagauuagaaggaug

SEQ ID NO: 2644503 - RNA, 19 nt, Homo sapiens
  misc_RNA (1)...(19): siRNA sense strand
caacaggagacuggcagaa

SEQ ID NO: 2644504 - RNA, 19 nt, Homo sapiens
  misc_RNA (1)...(19): siRNA sense strand
gcguagaagaggagugcaa

SEQ ID NO: 2644505 - RNA, 19 nt, Homo sapiens
  misc_RNA (1)...(19): siRNA sense strand
cauuaagaggcgagacaaa

SEQ ID NO: 2644506 - RNA, 19 nt, Homo sapiens
  misc_RNA (1)...(19): siRNA sense strand
gcaguaaggugcaggccaa

SEQ ID NO: 2644507 - RNA, 19 nt, Homo sapiens
  misc_RNA (1)...(19): siRNA sense strand
aauuaauggaggaaggaaa

SEQ ID NO: 2644508 - RNA, 19 nt, Homo sapiens
  misc_RNA (1)...(19): siRNA sense strand
gaagagaaauagcaggcaa

SEQ ID NO: 2644509 - RNA, 19 nt, Homo sapiens
  misc_RNA (1)...(19): siRNA sense strand
cuucuaaggugguggccua

SEQ ID NO: 2644510 - RNA, 19 nt, Homo sapiens
  misc_RNA (1)...(19): siRNA sense strand
aagcaaaggccgauaauga

SEQ ID NO: 2644511 - RNA, 19 nt, Homo sapiens
  misc_RNA (1)...(19): siRNA sense strand
aagcaaggacaguggaauu

SEQ ID NO: 2644512 - RNA, 19 nt, Homo sapiens
  misc_RNA (1)...(19): siRNA sense strand
gagcagaucuuucaggcua

SEQ ID NO: 2644513 - RNA, 19 nt, Homo sapiens
  misc_RNA (1)...(19): siRNA sense strand
gcugaaaaccagagaccaa

SEQ ID NO: 2644514 - RNA, 19 nt, Homo sapiens
  misc_RNA (1)...(19): siRNA sense strand
ccagaggagucaacagcaa

SEQ ID NO: 2644515 - RNA, 19 nt, Homo sapiens
  misc_RNA (1)...(19): siRNA sense strand
auuuagacgggcagagaaa

SEQ ID NO: 2644516 - RNA, 19 nt, Homo sapiens
  misc_RNA (1)...(19): siRNA sense strand
ccaagaagggagugagagu

SEQ ID NO: 2644517 - RNA, 19 nt, Homo sapiens
  misc_RNA (1)...(19): siRNA sense strand
ccagagaccaagagaggau

SEQ ID NO: 2644518 - RNA, 19 nt, Homo sapiens
  misc_RNA (1)...(19): siRNA sense strand
ggauuugggaagacggcaa

SEQ ID NO: 2644519 - RNA, 19 nt, Homo sapiens
  misc_RNA (1)...(19): siRNA sense strand
cuuaaaugaagcugaguuu

SEQ ID NO: 2644520 - RNA, 19 nt, Homo sapiens
  misc_RNA (1)...(19): siRNA sense strand
aauuggaagaucugaguua

SEQ ID NO: 2644521 - RNA, 19 nt, Homo sapiens
  misc_RNA (1)...(19): siRNA sense strand
cuacaagccacaagacauu

SEQ ID NO: 2644522 - RNA, 19 nt, Homo sapiens
  misc_RNA (1)...(19): siRNA sense strand
aggaaggaaaugugaugua

SEQ ID NO: 2644523 - RNA, 19 nt, Homo sapiens
  misc_RNA (1)...(19): siRNA sense strand
acauaaccauugaagacaa

SEQ ID NO: 2644524 - RNA, 19 nt, Homo sapiens
  misc_RNA (1)...(19): siRNA sense strand
cauaaccauugaagacaaa

SEQ ID NO: 2644525 - RNA, 19 nt, Homo sapiens
  misc_RNA (1)...(19): siRNA sense strand
caguaugccuuaagaaagu

SEQ ID NO: 2644526 - RNA, 19 nt, Homo sapiens
  misc_RNA (1)...(19): siRNA sense strand
aguaagaagacgggaauuu

SEQ ID NO: 2644527 - RNA, 19 nt, Homo sapiens
  misc_RNA (1)...(19): siRNA sense strand
ggaaaugugauguacaaaa

SEQ ID NO: 2644528 - RNA, 19 nt, Homo sapiens
  misc_RNA (1)...(19): siRNA sense strand
ggguuacaguccaaaggaa

SEQ ID NO: 2644529 - RNA, 19 nt, Homo sapiens
  misc_RNA (1)...(19): siRNA sense strand
agugaaggagcuagaagaa

SEQ ID NO: 2644530 - RNA, 19 nt, Homo sapiens
  misc_RNA (1)...(19): siRNA sense strand
auuacaaguucauccgaaa

SEQ ID NO: 2644531 - RNA, 19 nt, Homo sapiens
  misc_RNA (1)...(19): siRNA sense strand
gggcagugguccaguaucu

SEQ ID NO: 2644532 - RNA, 19 nt, Homo sapiens
  misc_RNA (1)...(19): siRNA sense strand
ccaccaaucaggaagucaa

SEQ ID NO: 2644533 - RNA, 19 nt, Homo sapiens
  misc_RNA (1)...(19): siRNA sense strand
ccugcaguguggugagaau

SEQ ID NO: 2644534 - RNA, 19 nt, Homo sapiens
  misc_RNA (1)...(19): siRNA sense strand
gcgaucauuuauagaguca

SEQ ID NO: 2644535 - RNA, 19 nt, Homo sapiens
  misc_RNA (1)...(19): siRNA sense strand
gguuccaacagcagagcaa

SEQ ID NO: 2644536 - RNA, 19 nt, Homo sapiens
  misc_RNA (1)...(19): siRNA sense strand
guuucuacccugagugcaa

SEQ ID NO: 2644537 - RNA, 19 nt, Homo sapiens
  misc_RNA (1)...(19): siRNA sense strand
guuugaaguaccaagcaua

SEQ ID NO: 2644538 - RNA, 19 nt, Homo sapiens
  misc_RNA (1)...(19): siRNA sense strand
agaaggaacaugaaguaga

SEQ ID NO: 2644539 - RNA, 19 nt, Homo sapiens
  misc_RNA (1)...(19): siRNA sense strand
caugcaagugggaggauau

SEQ ID NO: 2644540 - RNA, 19 nt, Homo sapiens
  misc_RNA (1)...(19): siRNA sense strand
ccugagaaaugagcagaaa

SEQ ID NO: 2644541 - RNA, 19 nt, Homo sapiens
  misc_RNA (1)...(19): siRNA sense strand
gauagauggcuuaaaugaa

SEQ ID NO: 2644542 - RNA, 19 nt, Homo sapiens
  misc_RNA (1)...(19): siRNA sense strand
acaugaagcuggugugucu

SEQ ID NO: 2644543 - RNA, 19 nt, Homo sapiens
  misc_RNA (1)...(19): siRNA sense strand
aagagaaauagcaggcaau

SEQ ID NO: 2644544 - RNA, 19 nt, Homo sapiens
  misc_RNA (1)...(19): siRNA sense strand
gggcacaagugaaggagcu

SEQ ID NO: 2644545 - RNA, 19 nt, Homo sapiens
  misc_RNA (1)...(19): siRNA sense strand
ggaaaugcugcuugggcga

SEQ ID NO: 2644546 - RNA, 19 nt, Homo sapiens
  misc_RNA (1)...(19): siRNA sense strand
gauaaugaaccgagcuguu

SEQ ID NO: 2644547 - RNA, 19 nt, Homo sapiens
  misc_RNA (1)...(19): siRNA sense strand
ccacagagcagggcaggaa

SEQ ID NO: 2644548 - RNA, 19 nt, Homo sapiens
  misc_RNA (1)...(19): siRNA sense strand
uagaagaaaacuugaggaa

SEQ ID NO: 2644549 - RNA, 19 nt, Homo sapiens
  misc_RNA (1)...(19): siRNA sense strand
auuaauggaggaaggaaau

SEQ ID NO: 2644550 - RNA, 19 nt, Homo sapiens
  misc_RNA (1)...(19): siRNA sense strand
aagaaggguuacaguccaa

SEQ ID NO: 2644551 - RNA, 19 nt, Homo sapiens
  misc_RNA (1)...(19): siRNA sense strand
gggaauuucuucaagccau

SEQ ID NO: 2644552 - RNA, 19 nt, Homo sapiens
  misc_RNA (1)...(19): siRNA sense strand
ccugcaagaggcugugaaa

SEQ ID NO: 2644553 - RNA, 19 nt, Homo sapiens
  misc_RNA (1)...(19): siRNA sense strand
ccuacaagccacaagacau

SEQ ID NO: 2644554 - RNA, 19 nt, Homo sapiens
  misc_RNA (1)...(19): siRNA sense strand
caagagaggaugcagugaa

SEQ ID NO: 2644555 - RNA, 19 nt, Homo sapiens
  misc_RNA (1)...(19): siRNA sense strand
gugaaggagcuagaagaaa

SEQ ID NO: 2644556 - RNA, 19 nt, Homo sapiens
  misc_RNA (1)...(19): siRNA sense strand
ugagaaaugagcagaaaau

SEQ ID NO: 2644557 - RNA, 19 nt, Homo sapiens
  misc_RNA (1)...(19): siRNA sense strand
aaaccugauuauggagaua

SEQ ID NO: 2644558 - RNA, 19 nt, Homo sapiens
  misc_RNA (1)...(19): siRNA sense strand
ugacagacgagcagaucuu

SEQ ID NO: 2644559 - RNA, 19 nt, Homo sapiens
  misc_RNA (1)...(19): siRNA sense strand
aggacagaaguguuaaaua

SEQ ID NO: 2644560 - RNA, 19 nt, Homo sapiens
  misc_RNA (1)...(19): siRNA sense strand
agaaauuaauggaggaagg

SEQ ID NO: 2644561 - RNA, 19 nt, Homo sapiens
  misc_RNA (1)...(19): siRNA sense strand
uggauaagacugcgagguu

SEQ ID NO: 2644562 - RNA, 19 nt, Homo sapiens
  misc_RNA (1)...(19): siRNA sense strand
ggaagaucugaguuauuua

SEQ ID NO: 2644563 - RNA, 19 nt, Homo sapiens
  misc_RNA (1)...(19): siRNA sense strand
gaugugaaccuaagugaca

SEQ ID NO: 2644564 - RNA, 19 nt, Homo sapiens
  misc_RNA (1)...(19): siRNA sense strand
gggcuugucugaaagguca

SEQ ID NO: 2644565 - RNA, 19 nt, Homo sapiens
  misc_RNA (1)...(19): siRNA sense strand
caaggacaguggaauuaua

SEQ ID NO: 2644566 - RNA, 19 nt, Homo sapiens
  misc_RNA (1)...(19): siRNA sense strand
ccucuacggacgucaauua

SEQ ID NO: 2644567 - RNA, 19 nt, Homo sapiens
  misc_RNA (1)...(19): siRNA sense strand
ggaaguuaaagcacgauuu

SEQ ID NO: 2644568 - RNA, 19 nt, Homo sapiens
  misc_RNA (1)...(19): siRNA sense strand
acacauaaccauugaagac

SEQ ID NO: 2644569 - RNA, 19 nt, Homo sapiens
  misc_RNA (1)...(19): siRNA sense strand
gaccaagaagggagugaga

SEQ ID NO: 2644570 - RNA, 19 nt, Homo sapiens
  misc_RNA (1)...(19): siRNA sense strand
ccgugaaacaagaggaaau

SEQ ID NO: 2644571 - RNA, 19 nt, Homo sapiens
  misc_RNA (1)...(19): siRNA sense strand
ccgaaaagcccgugaaaca

SEQ ID NO: 2644572 - RNA, 19 nt, Homo sapiens
  misc_RNA (1)...(19): siRNA sense strand
gcuacauccaggagagaau

SEQ ID NO: 2644573 - RNA, 19 nt, Homo sapiens
  misc_RNA (1)...(19): siRNA sense strand
gugguaaagucuaugggaa

SEQ ID NO: 2644574 - RNA, 19 nt, Homo sapiens
  misc_RNA (1)...(19): siRNA sense strand
ccaaauugugcaagguauu

SEQ ID NO: 2644575 - RNA, 19 nt, Homo sapiens
  misc_RNA (1)...(19): siRNA sense strand
aaucaauagugucgaucua

SEQ ID NO: 2644576 - RNA, 19 nt, Homo sapiens
  misc_RNA (1)...(19): siRNA sense strand
ggguauaaaucaagaaagc

SEQ ID NO: 2644577 - RNA, 19 nt, Homo sapiens
  misc_RNA (1)...(19): siRNA sense strand
ccgacggacauuugauaaa

SEQ ID NO: 2644578 - RNA, 19 nt, Homo sapiens
  misc_RNA (1)...(19): siRNA sense strand
cugaagagacacaggcaca

SEQ ID NO: 2644579 - RNA, 19 nt, Homo sapiens
  misc_RNA (1)...(19): siRNA sense strand
ggaaaugagacaauggagu

SEQ ID NO: 2644580 - RNA, 19 nt, Homo sapiens
  misc_RNA (1)...(19): siRNA sense strand
aaucaagaaagcagucaaa

SEQ ID NO: 2644581 - RNA, 19 nt, Homo sapiens
  misc_RNA (1)...(19): siRNA sense strand
auauuaggaucaaggaaga

SEQ ID NO: 2644582 - RNA, 19 nt, Homo sapiens
  misc_RNA (1)...(19): siRNA sense strand
gugaugaauuacagaggca

SEQ ID NO: 2644583 - RNA, 19 nt, Homo sapiens
  misc_RNA (1)...(19): siRNA sense strand
uuugauaaacacaggacaa

SEQ ID NO: 2644584 - RNA, 19 nt, Homo sapiens
  misc_RNA (1)...(19): siRNA sense strand
gauuacugcaggaggaaca

SEQ ID NO: 2644585 - RNA, 19 nt, Homo sapiens
  misc_RNA (1)...(19): siRNA sense strand
acagaauacugcugcccaa

SEQ ID NO: 2644586 - RNA, 19 nt, Homo sapiens
  misc_RNA (1)...(19): siRNA sense strand
cuggauguacugugguaaa

SEQ ID NO: 2644587 - RNA, 19 nt, Homo sapiens
  misc_RNA (1)...(19): siRNA sense strand
agguucuguuucagggaua

SEQ ID NO: 2644588 - RNA, 19 nt, Homo sapiens
  misc_RNA (1)...(19): siRNA sense strand
cuguaaagaagguggugga

SEQ ID NO: 2644589 - RNA, 19 nt, Homo sapiens
  misc_RNA (1)...(19): siRNA sense strand
gguucagggaguugcaauu

SEQ ID NO: 2644590 - RNA, 19 nt, Homo sapiens
  misc_RNA (1)...(19): siRNA sense strand
ugugcaagccaguggucaa

SEQ ID NO: 2644591 - RNA, 19 nt, Homo sapiens
  misc_RNA (1)...(19): siRNA sense strand
cccaaauugugcaagguau

SEQ ID NO: 2644592 - RNA, 19 nt, Homo sapiens
  misc_RNA (1)...(19): siRNA sense strand
ugguaaagucuaugggaag

SEQ ID NO: 2644593 - RNA, 19 nt, Homo sapiens
  misc_RNA (1)...(19): siRNA sense strand
auacaggugagaagaaauu

SEQ ID NO: 2644594 - RNA, 19 nt, Homo sapiens
  misc_RNA (1)...(19): siRNA sense strand
aguucagacaauucagaaa

SEQ ID NO: 2644595 - RNA, 19 nt, Homo sapiens
  misc_RNA (1)...(19): siRNA sense strand
agggauaggaacuguuaau

SEQ ID NO: 2644596 - RNA, 19 nt, Homo sapiens
  misc_RNA (1)...(19): siRNA sense strand
cuugaauaccaaugaccua

SEQ ID NO: 2644597 - RNA, 19 nt, Homo sapiens
  misc_RNA (1)...(19): siRNA sense strand
gaugaauuacagaggcaca

SEQ ID NO: 2644598 - RNA, 19 nt, Homo sapiens
  misc_RNA (1)...(19): siRNA sense strand
aggcacagaagaacacaua

SEQ ID NO: 2644599 - RNA, 19 nt, Homo sapiens
  misc_RNA (1)...(19): siRNA sense strand
cauuaaugccgacggacau

SEQ ID NO: 2644600 - RNA, 19 nt, Homo sapiens
  misc_RNA (1)...(19): siRNA sense strand
cugcuaacauccagaaucu

SEQ ID NO: 2644601 - RNA, 19 nt, Homo sapiens
  misc_RNA (1)...(19): siRNA sense strand
agacaaugacugcaggcau

SEQ ID NO: 2644602 - RNA, 19 nt, Homo sapiens
  misc_RNA (1)...(19): siRNA sense strand
aacaacaucaagaaggaaa

SEQ ID NO: 2644603 - RNA, 19 nt, Homo sapiens
  misc_RNA (1)...(19): siRNA sense strand
agguauuacaccacagaca

SEQ ID NO: 2644604 - RNA, 19 nt, Homo sapiens
  misc_RNA (1)...(19): siRNA sense strand
aagaagaaccugauccuga

SEQ ID NO: 2644605 - RNA, 19 nt, Homo sapiens
  misc_RNA (1)...(19): siRNA sense strand
cauacaggugagaagaaau

SEQ ID NO: 2644606 - RNA, 19 nt, Homo sapiens
  misc_RNA (1)...(19): siRNA sense strand
gguucaaauugguuucaca

SEQ ID NO: 2644607 - RNA, 19 nt, Homo sapiens
  misc_RNA (1)...(19): siRNA sense strand
acaaacaguuacagugaac

SEQ ID NO: 2644608 - RNA, 19 nt, Homo sapiens
  misc_RNA (1)...(19): siRNA sense strand
gaucaaggaagaagaaccu

SEQ ID NO: 2644609 - RNA, 19 nt, Homo sapiens
  misc_RNA (1)...(19): siRNA sense strand
gaagaaauuuguuugucca

SEQ ID NO: 2644610 - RNA, 19 nt, Homo sapiens
  misc_RNA (1)...(19): siRNA sense strand
ccuuaccaacacugaaaua

SEQ ID NO: 2644611 - RNA, 19 nt, Homo sapiens
  misc_RNA (1)...(19): siRNA sense strand
aaaugagacaauggaguaa

SEQ ID NO: 2644612 - RNA, 19 nt, Homo sapiens
  misc_RNA (1)...(19): siRNA sense strand
gguucauucuucagaucuu

SEQ ID NO: 2644613 - RNA, 19 nt, Homo sapiens
  misc_RNA (1)...(19): siRNA sense strand
agauauuaggaucaaggaa

SEQ ID NO: 2644614 - RNA, 19 nt, Homo sapiens
  misc_RNA (1)...(19): siRNA sense strand
uaagaguacaggugguaga

SEQ ID NO: 2644615 - RNA, 19 nt, Homo sapiens
  misc_RNA (1)...(19): siRNA sense strand
aggaugugguaaagucuau

SEQ ID NO: 2644616 - RNA, 19 nt, Homo sapiens
  misc_RNA (1)...(19): siRNA sense strand
ccuugcaaauauucaacaa

SEQ ID NO: 2644617 - RNA, 19 nt, Homo sapiens
  misc_RNA (1)...(19): siRNA sense strand
guauuacaccacagacaau

SEQ ID NO: 2644618 - RNA, 19 nt, Homo sapiens
  misc_RNA (1)...(19): siRNA sense strand
uauggauaguucagacaau

SEQ ID NO: 2644619 - RNA, 19 nt, Homo sapiens
  misc_RNA (1)...(19): siRNA sense strand
cuauagauucugcugguau

SEQ ID NO: 2644620 - RNA, 19 nt, Homo sapiens
  misc_RNA (1)...(19): siRNA sense strand
cugcagauauuaggaucaa

SEQ ID NO: 2644621 - RNA, 19 nt, Homo sapiens
  misc_RNA (1)...(19): siRNA sense strand
ggucaugacagaagggaaa

SEQ ID NO: 2644622 - RNA, 19 nt, Homo sapiens
  misc_RNA (1)...(19): siRNA sense strand
gugaagaggacgaggaaga

SEQ ID NO: 2644623 - RNA, 19 nt, Homo sapiens
  misc_RNA (1)...(19): siRNA sense strand
agaucaaagucaaaggaaa

SEQ ID NO: 2644624 - RNA, 19 nt, Homo sapiens
  misc_RNA (1)...(19): siRNA sense strand
aggaagaagaagaggaaga

SEQ ID NO: 2644625 - RNA, 19 nt, Homo sapiens
  misc_RNA (1)...(19): siRNA sense strand
agagaaagaaggucagaaa

SEQ ID NO: 2644626 - RNA, 19 nt, Homo sapiens
  misc_RNA (1)...(19): siRNA sense strand
aagaagaggaagagggaga

SEQ ID NO: 2644627 - RNA, 19 nt, Homo sapiens
  misc_RNA (1)...(19): siRNA sense strand
cggaaaaggucucggaaau

SEQ ID NO: 2644628 - RNA, 19 nt, Homo sapiens
  misc_RNA (1)...(19): siRNA sense strand
cgagauaauccaagaaaca

SEQ ID NO: 2644629 - RNA, 19 nt, Homo sapiens
  misc_RNA (1)...(19): siRNA sense strand
cgaauuaaagacagugaaa

SEQ ID NO: 2644630 - RNA, 19 nt, Homo sapiens
  misc_RNA (1)...(19): siRNA sense strand
acgcagagaaagagaaaga

SEQ ID NO: 2644631 - RNA, 19 nt, Homo sapiens
  misc_RNA (1)...(19): siRNA sense strand
cgaaacagggaccgagaaa

SEQ ID NO: 2644632 - RNA, 19 nt, Homo sapiens
  misc_RNA (1)...(19): siRNA sense strand
cagcuaaugauguaagaaa

SEQ ID NO: 2644633 - RNA, 19 nt, Homo sapiens
  misc_RNA (1)...(19): siRNA sense strand
acaaggacugagagagaaa

SEQ ID NO: 2644634 - RNA, 19 nt, Homo sapiens
  misc_RNA (1)...(19): siRNA sense strand
cgaggaagaagaagaggaa

SEQ ID NO: 2644635 - RNA, 19 nt, Homo sapiens
  misc_RNA (1)...(19): siRNA sense strand
ggaaacaaggacugagaga

SEQ ID NO: 2644636 - RNA, 19 nt, Homo sapiens
  misc_RNA (1)...(19): siRNA sense strand
aagaaagaguacauggaau

SEQ ID NO: 2644637 - RNA, 19 nt, Homo sapiens
  misc_RNA (1)...(19): siRNA sense strand
gguucaaauuggagagauc

SEQ ID NO: 2644638 - RNA, 19 nt, Homo sapiens
  misc_RNA (1)...(19): siRNA sense strand
aaagaagagaggagagaga

SEQ ID NO: 2644639 - RNA, 19 nt, Homo sapiens
  misc_RNA (1)...(19): siRNA sense strand
agaaaagucuccagcaaaa

SEQ ID NO: 2644640 - RNA, 19 nt, Homo sapiens
  misc_RNA (1)...(19): siRNA sense strand
gccgagagacgaugggaaa

SEQ ID NO: 2644641 - RNA, 19 nt, Homo sapiens
  misc_RNA (1)...(19): siRNA sense strand
gcagagaaagagaaagaga

SEQ ID NO: 2644642 - RNA, 19 nt, Homo sapiens
  misc_RNA (1)...(19): siRNA sense strand
aggaagagggagaagaaga

SEQ ID NO: 2644643 - RNA, 19 nt, Homo sapiens
  misc_RNA (1)...(19): siRNA sense strand
gcuaaugauguaagaaaga

SEQ ID NO: 2644644 - RNA, 19 nt, Homo sapiens
  misc_RNA (1)...(19): siRNA sense strand
uggagaaugaagagaagua

SEQ ID NO: 2644645 - RNA, 19 nt, Homo sapiens
  misc_RNA (1)...(19): siRNA sense strand
ggaagagggagaagaagau

SEQ ID NO: 2644646 - RNA, 19 nt, Homo sapiens
  misc_RNA (1)...(19): siRNA sense strand
augcaagauuaaaggauga

SEQ ID NO: 2644647 - RNA, 19 nt, Homo sapiens
  misc_RNA (1)...(19): siRNA sense strand
gaaagaagggacaugggaa

SEQ ID NO: 2644648 - RNA, 19 nt, Homo sapiens
  misc_RNA (1)...(19): siRNA sense strand
ugggaagaccagaaguaaa

SEQ ID NO: 2644649 - RNA, 19 nt, Homo sapiens
  misc_RNA (1)...(19): siRNA sense strand
agaaugaagagaaguacaa

SEQ ID NO: 2644650 - RNA, 19 nt, Homo sapiens
  misc_RNA (1)...(19): siRNA sense strand
agaggaagagggagaagaa

SEQ ID NO: 2644651 - RNA, 19 nt, Homo sapiens
  misc_RNA (1)...(19): siRNA sense strand
agaagaugaagaaggacaa

SEQ ID NO: 2644652 - RNA, 19 nt, Homo sapiens
  misc_RNA (1)...(19): siRNA sense strand
ugaacaauccagagaauca

SEQ ID NO: 2644653 - RNA, 19 nt, Homo sapiens
  misc_RNA (1)...(19): siRNA sense strand
aagaagugaugaagauaga

SEQ ID NO: 2644654 - RNA, 19 nt, Homo sapiens
  misc_RNA (1)...(19): siRNA sense strand
uggaagaagaugaucaauu

SEQ ID NO: 2644655 - RNA, 19 nt, Homo sapiens
  misc_RNA (1)...(19): siRNA sense strand
ggaaaugaauagaaagcac

SEQ ID NO: 2644656 - RNA, 19 nt, Homo sapiens
  misc_RNA (1)...(19): siRNA sense strand
gagaggagagagaagaaau

SEQ ID NO: 2644657 - RNA, 19 nt, Homo sapiens
  misc_RNA (1)...(19): siRNA sense strand
gaaacaaacaaguugcgaa

SEQ ID NO: 2644658 - RNA, 19 nt, Homo sapiens
  misc_RNA (1)...(19): siRNA sense strand
caggaacagauuacagaua

SEQ ID NO: 2644659 - RNA, 19 nt, Homo sapiens
  misc_RNA (1)...(19): siRNA sense strand
agaugauagcguugaagua

SEQ ID NO: 2644660 - RNA, 19 nt, Homo sapiens
  misc_RNA (1)...(19): siRNA sense strand
gcucaagaagugaugaaga

SEQ ID NO: 2644661 - RNA, 19 nt, Homo sapiens
  misc_RNA (1)...(19): siRNA sense strand
gggaggagaaacccagaaa

SEQ ID NO: 2644662 - RNA, 19 nt, Homo sapiens
  misc_RNA (1)...(19): siRNA sense strand
gguggaagaagaugaucaa

SEQ ID NO: 2644663 - RNA, 19 nt, Homo sapiens
  misc_RNA (1)...(19): siRNA sense strand
aagaagaugaagaaggaca

SEQ ID NO: 2644664 - RNA, 19 nt, Homo sapiens
  misc_RNA (1)...(19): siRNA sense strand
aaacgcagagaaagagaaa

SEQ ID NO: 2644665 - RNA, 19 nt, Homo sapiens
  misc_RNA (1)...(19): siRNA sense strand
gauucugacagcagugaua

SEQ ID NO: 2644666 - RNA, 19 nt, Homo sapiens
  misc_RNA (1)...(19): siRNA sense strand
cucaagaagugaugaagau

SEQ ID NO: 2644667 - RNA, 19 nt, Homo sapiens
  misc_RNA (1)...(19): siRNA sense strand
agggagaagaagaugaaga

SEQ ID NO: 2644668 - RNA, 19 nt, Homo sapiens
  misc_RNA (1)...(19): siRNA sense strand
gauuaaaggaugaaacucu

SEQ ID NO: 2644669 - RNA, 19 nt, Homo sapiens
  misc_RNA (1)...(19): siRNA sense strand
ugacuauaauccagaagau

SEQ ID NO: 2644670 - RNA, 19 nt, Homo sapiens
  misc_RNA (1)...(19): siRNA sense strand
agaaagaguacauggaauc

SEQ ID NO: 2644671 - RNA, 19 nt, Homo sapiens
  misc_RNA (1)...(19): siRNA sense strand
ccagaaguaaagagguaga

SEQ ID NO: 2644672 - RNA, 19 nt, Homo sapiens
  misc_RNA (1)...(19): siRNA sense strand
ugagagagaaagaagguca

SEQ ID NO: 2644673 - RNA, 19 nt, Homo sapiens
  misc_RNA (1)...(19): siRNA sense strand
aagagaggagagagaagaa

SEQ ID NO: 2644674 - RNA, 19 nt, Homo sapiens
  misc_RNA (1)...(19): siRNA sense strand
agucaaaggaaaugaauag

SEQ ID NO: 2644675 - RNA, 19 nt, Homo sapiens
  misc_RNA (1)...(19): siRNA sense strand
ucgcacugguggagcauau

SEQ ID NO: 2644676 - RNA, 19 nt, Homo sapiens
  misc_RNA (1)...(19): siRNA sense strand
aggacgaggaagaagaaga

SEQ ID NO: 2644677 - RNA, 19 nt, Homo sapiens
  misc_RNA (1)...(19): siRNA sense strand
gcucacaaauugcugaaaa

SEQ ID NO: 2644678 - RNA, 19 nt, Homo sapiens
  misc_RNA (1)...(19): siRNA sense strand
aaccagauguugagcaaaa

SEQ ID NO: 2644679 - RNA, 19 nt, Homo sapiens
  misc_RNA (1)...(19): siRNA sense strand
agaaagaagacaagaacac

SEQ ID NO: 2644680 - RNA, 19 nt, Homo sapiens
  misc_RNA (1)...(19): siRNA sense strand
agaggagagagaagaaauu

SEQ ID NO: 2644681 - RNA, 19 nt, Homo sapiens
  misc_RNA (1)...(19): siRNA sense strand
ugaaccugcuacaaagaaa

SEQ ID NO: 2644682 - RNA, 19 nt, Homo sapiens
  misc_RNA (1)...(19): siRNA sense strand
gcccugaagaagucaauua

SEQ ID NO: 2644683 - RNA, 19 nt, Homo sapiens
  misc_RNA (1)...(19): siRNA sense strand
ccaaugaaagagaggagca

SEQ ID NO: 2644684 - RNA, 19 nt, Homo sapiens
  misc_RNA (1)...(19): siRNA sense strand
ccccagaaauagaugacaa

SEQ ID NO: 2644685 - RNA, 19 nt, Homo sapiens
  misc_RNA (1)...(19): siRNA sense strand
cauaaaagggguuaagcau

SEQ ID NO: 2644686 - RNA, 19 nt, Homo sapiens
  misc_RNA (1)...(19): siRNA sense strand
cugaagaagaagaaggcac

SEQ ID NO: 2644687 - RNA, 19 nt, Homo sapiens
  misc_RNA (1)...(19): siRNA sense strand
aaagagaggagcagcggga

SEQ ID NO: 2644688 - RNA, 19 nt, Homo sapiens
  misc_RNA (1)...(19): siRNA sense strand
cugaagcagcagagcagau

SEQ ID NO: 2644689 - RNA, 19 nt, Homo sapiens
  misc_RNA (1)...(19): siRNA sense strand
gagugaaauacaagaguua

SEQ ID NO: 2644690 - RNA, 19 nt, Homo sapiens
  misc_RNA (1)...(19): siRNA sense strand
ccuuaagucuggagaagaa

SEQ ID NO: 2644691 - RNA, 19 nt, Homo sapiens
  misc_RNA (1)...(19): siRNA sense strand
aaauaugaucggagugaaa

SEQ ID NO: 2644692 - RNA, 19 nt, Homo sapiens
  misc_RNA (1)...(19): siRNA sense strand
ggagaagaauggaggacca

SEQ ID NO: 2644693 - RNA, 19 nt, Homo sapiens
  misc_RNA (1)...(19): siRNA sense strand
gguagaagcgggaggcauu

SEQ ID NO: 2644694 - RNA, 19 nt, Homo sapiens
  misc_RNA (1)...(19): siRNA sense strand
gguauuguguauaggaaau

SEQ ID NO: 2644695 - RNA, 19 nt, Homo sapiens
  misc_RNA (1)...(19): siRNA sense strand
gggcgugacaauaaggaaa

SEQ ID NO: 2644696 - RNA, 19 nt, Homo sapiens
  misc_RNA (1)...(19): siRNA sense strand
uggcagaacaaauuggaua

SEQ ID NO: 2644697 - RNA, 19 nt, Homo sapiens
  misc_RNA (1)...(19): siRNA sense strand
gcaguauguuggaggugaa

SEQ ID NO: 2644698 - RNA, 19 nt, Homo sapiens
  misc_RNA (1)...(19): siRNA sense strand
ggguauuguguauaggaaa

SEQ ID NO: 2644699 - RNA, 19 nt, Homo sapiens
  misc_RNA (1)...(19): siRNA sense strand
cguaaaaccucaagcucaa

SEQ ID NO: 2644700 - RNA, 19 nt, Homo sapiens
  misc_RNA (1)...(19): siRNA sense strand
cuguuggguuauugaguaa

SEQ ID NO: 2644701 - RNA, 19 nt, Homo sapiens
  misc_RNA (1)...(19): siRNA sense strand
gggaaggagcaccgaagaa

SEQ ID NO: 2644702 - RNA, 19 nt, Homo sapiens
  misc_RNA (1)...(19): siRNA sense strand
acaaauguaucaagaccaa

SEQ ID NO: 2644703 - RNA, 19 nt, Homo sapiens
  misc_RNA (1)...(19): siRNA sense strand
ccucaaacaaauaaagaca

SEQ ID NO: 2644704 - RNA, 19 nt, Homo sapiens
  misc_RNA (1)...(19): siRNA sense strand
gaacaaucugagacugaaa

SEQ ID NO: 2644705 - RNA, 19 nt, Homo sapiens
  misc_RNA (1)...(19): siRNA sense strand
ugggaaacauguccagaaa

SEQ ID NO: 2644706 - RNA, 19 nt, Homo sapiens
  misc_RNA (1)...(19): siRNA sense strand
gaaauguuacagugugaaa

SEQ ID NO: 2644707 - RNA, 19 nt, Homo sapiens
  misc_RNA (1)...(19): siRNA sense strand
gaaugauguguuacagaaa

SEQ ID NO: 2644708 - RNA, 19 nt, Homo sapiens
  misc_RNA (1)...(19): siRNA sense strand
gcugaaagcacuauggcau

SEQ ID NO: 2644709 - RNA, 19 nt, Homo sapiens
  misc_RNA (1)...(19): siRNA sense strand
acauugauccugauggaaa

SEQ ID NO: 2644710 - RNA, 19 nt, Homo sapiens
  misc_RNA (1)...(19): siRNA sense strand
aggcaacagcugagaauca

SEQ ID NO: 2644711 - RNA, 19 nt, Homo sapiens
  misc_RNA (1)...(19): siRNA sense strand
augcauuguccuagggaau

SEQ ID NO: 2644712 - RNA, 19 nt, Homo sapiens
  misc_RNA (1)...(19): siRNA sense strand
ccuggaaaauuuagcaaua

SEQ ID NO: 2644713 - RNA, 19 nt, Homo sapiens
  misc_RNA (1)...(19): siRNA sense strand
cuaugaaaugcaagaguau

SEQ ID NO: 2644714 - RNA, 19 nt, Homo sapiens
  misc_RNA (1)...(19): siRNA sense strand
uagaaauguuacaguguga

SEQ ID NO: 2644715 - RNA, 19 nt, Homo sapiens
  misc_RNA (1)...(19): siRNA sense strand
caaggauguuauugccaaa

SEQ ID NO: 2644716 - RNA, 19 nt, Homo sapiens
  misc_RNA (1)...(19): siRNA sense strand
caauaaucgcuuucaacaa

SEQ ID NO: 2644717 - RNA, 19 nt, Homo sapiens
  misc_RNA (1)...(19): siRNA sense strand
ugauaagagaguuggcuau

SEQ ID NO: 2644718 - RNA, 19 nt, Homo sapiens
  misc_RNA (1)...(19): siRNA sense strand
aggucaagacagagcgaga

SEQ ID NO: 2644719 - RNA, 19 nt, Homo sapiens
  misc_RNA (1)...(19): siRNA sense strand
gugaacaaucugagacuga

SEQ ID NO: 2644720 - RNA, 19 nt, Homo sapiens
  misc_RNA (1)...(19): siRNA sense strand
acagaaagacuuacaugaa

SEQ ID NO: 2644721 - RNA, 19 nt, Homo sapiens
  misc_RNA (1)...(19): siRNA sense strand
cagaagagggauaggauac

SEQ ID NO: 2644722 - RNA, 19 nt, Homo sapiens
  misc_RNA (1)...(19): siRNA sense strand
gugcaauggcuguggaauc

SEQ ID NO: 2644723 - RNA, 19 nt, Homo sapiens
  misc_RNA (1)...(19): siRNA sense strand
guugaaacugagaaggcaa

SEQ ID NO: 2644724 - RNA, 19 nt, Homo sapiens
  misc_RNA (1)...(19): siRNA sense strand
augaagacgugaaugaaga

SEQ ID NO: 2644725 - RNA, 19 nt, Homo sapiens
  misc_RNA (1)...(19): siRNA sense strand
augcuaacuucaaggucaa

SEQ ID NO: 2644726 - RNA, 19 nt, Homo sapiens
  misc_RNA (1)...(19): siRNA sense strand
ucagaagagggauaggaua

SEQ ID NO: 2644727 - RNA, 19 nt, Homo sapiens
  misc_RNA (1)...(19): siRNA sense strand
caaucaaagagcugugaga

SEQ ID NO: 2644728 - RNA, 19 nt, Homo sapiens
  misc_RNA (1)...(19): siRNA sense strand
augaugaagacgugaauga

SEQ ID NO: 2644729 - RNA, 19 nt, Homo sapiens
  misc_RNA (1)...(19): siRNA sense strand
caggcuugcucauuagaaa

SEQ ID NO: 2644730 - RNA, 19 nt, Homo sapiens
  misc_RNA (1)...(19): siRNA sense strand
gugaugagccugaaguaca

SEQ ID NO: 2644731 - RNA, 19 nt, Homo sapiens
  misc_RNA (1)...(19): siRNA sense strand
cauauuacuuugucugcaa

SEQ ID NO: 2644732 - RNA, 19 nt, Homo sapiens
  misc_RNA (1)...(19): siRNA sense strand
auagagagguccaucaaau

SEQ ID NO: 2644733 - RNA, 19 nt, Homo sapiens
  misc_RNA (1)...(19): siRNA sense strand
uggaaaaccucaaacaaau

SEQ ID NO: 2644734 - RNA, 19 nt, Homo sapiens
  misc_RNA (1)...(19): siRNA sense strand
ggaaaacuuugguagaaau

SEQ ID NO: 2644735 - RNA, 19 nt, Homo sapiens
  misc_RNA (1)...(19): siRNA sense strand
agcuauaaacgaaggauga

SEQ ID NO: 2644736 - RNA, 19 nt, Homo sapiens
  misc_RNA (1)...(19): siRNA sense strand
auaugaucggagugaaaua

SEQ ID NO: 2644737 - RNA, 19 nt, Homo sapiens
  misc_RNA (1)...(19): siRNA sense strand
aucaaagagcugugagaga

SEQ ID NO: 2644738 - RNA, 19 nt, Homo sapiens
  misc_RNA (1)...(19): siRNA sense strand
acagggaauuuaauagcaa

SEQ ID NO: 2644739 - RNA, 19 nt, Homo sapiens
  misc_RNA (1)...(19): siRNA sense strand
gcauuuaccacauuaggaa

SEQ ID NO: 2644740 - RNA, 19 nt, Homo sapiens
  misc_RNA (1)...(19): siRNA sense strand
cauugauccugauggaaaa

SEQ ID NO: 2644741 - RNA, 19 nt, Homo sapiens
  misc_RNA (1)...(19): siRNA sense strand
cauuaagguugaaguggca

SEQ ID NO: 2644742 - RNA, 19 nt, Homo sapiens
  misc_RNA (1)...(19): siRNA sense strand
ccaaagaggaugugcgcuc

SEQ ID NO: 2644743 - RNA, 19 nt, Homo sapiens
  misc_RNA (1)...(19): siRNA sense strand
gcuuagcaaaugaucaaua

SEQ ID NO: 2644744 - RNA, 19 nt, Homo sapiens
  misc_RNA (1)...(19): siRNA sense strand
acauaaaggccucccauau

SEQ ID NO: 2644745 - RNA, 19 nt, Homo sapiens
  misc_RNA (1)...(19): siRNA sense strand
cacacaaauucaacaguau

SEQ ID NO: 2644746 - RNA, 19 nt, Homo sapiens
  misc_RNA (1)...(19): siRNA sense strand
ggaaaaccucaaacaaaua

SEQ ID NO: 2644747 - RNA, 19 nt, Homo sapiens
  misc_RNA (1)...(19): siRNA sense strand
cuaccagagacuacagcaa

SEQ ID NO: 2644748 - RNA, 19 nt, Homo sapiens
  misc_RNA (1)...(19): siRNA sense strand
agauuguuguacuggcuaa

SEQ ID NO: 2644749 - RNA, 19 nt, Homo sapiens
  misc_RNA (1)...(19): siRNA sense strand
agccaaugcuggaaagaaa

SEQ ID NO: 2644750 - RNA, 19 nt, Homo sapiens
  misc_RNA (1)...(19): siRNA sense strand
ggaaaguggagcaggaaaa

SEQ ID NO: 2644751 - RNA, 19 nt, Homo sapiens
  misc_RNA (1)...(19): siRNA sense strand
gaaagaaggucaugggugu

SEQ ID NO: 2644752 - RNA, 19 nt, Homo sapiens
  misc_RNA (1)...(19): siRNA sense strand
cguagagaauacaggaaau

SEQ ID NO: 2644753 - RNA, 19 nt, Homo sapiens
  misc_RNA (1)...(19): siRNA sense strand
agugaauggucuagaugaa

SEQ ID NO: 2644754 - RNA, 19 nt, Homo sapiens
  misc_RNA (1)...(19): siRNA sense strand
uugcugaagucgugaacaa

SEQ ID NO: 2644755 - RNA, 19 nt, Homo sapiens
  misc_RNA (1)...(19): siRNA sense strand
gggaaaguggagcaggaaa

SEQ ID NO: 2644756 - RNA, 19 nt, Homo sapiens
  misc_RNA (1)...(19): siRNA sense strand
guggaagaauacaggaaca

SEQ ID NO: 2644757 - RNA, 19 nt, Homo sapiens
  misc_RNA (1)...(19): siRNA sense strand
aauuagaagaccugaggaa

SEQ ID NO: 2644758 - RNA, 19 nt, Homo sapiens
  misc_RNA (1)...(19): siRNA sense strand
gcuaaugggaagaguacau

SEQ ID NO: 2644759 - RNA, 19 nt, Homo sapiens
  misc_RNA (1)...(19): siRNA sense strand
aagaauacaggaacagaaa

SEQ ID NO: 2644760 - RNA, 19 nt, Homo sapiens
  misc_RNA (1)...(19): siRNA sense strand
cauuuauucaccagagaaa

SEQ ID NO: 2644761 - RNA, 19 nt, Homo sapiens
  misc_RNA (1)...(19): siRNA sense strand
gaaaaggagcagaaguuaa

SEQ ID NO: 2644762 - RNA, 19 nt, Homo sapiens
  misc_RNA (1)...(19): siRNA sense strand
guacaggagauaugcgcaa

SEQ ID NO: 2644763 - RNA, 19 nt, Homo sapiens
  misc_RNA (1)...(19): siRNA sense strand
agccaagaggugaaagaaa

SEQ ID NO: 2644764 - RNA, 19 nt, Homo sapiens
  misc_RNA (1)...(19): siRNA sense strand
uggaaggauucguugacaa

SEQ ID NO: 2644765 - RNA, 19 nt, Homo sapiens
  misc_RNA (1)...(19): siRNA sense strand
cauuuauggcuuugagauu

SEQ ID NO: 2644766 - RNA, 19 nt, Homo sapiens
  misc_RNA (1)...(19): siRNA sense strand
aggaaauucuucagagcca

SEQ ID NO: 2644767 - RNA, 19 nt, Homo sapiens
  misc_RNA (1)...(19): siRNA sense strand
ccgaugaguuccugguaca

SEQ ID NO: 2644768 - RNA, 19 nt, Homo sapiens
  misc_RNA (1)...(19): siRNA sense strand
acgaaaagcugcaacaaau

SEQ ID NO: 2644769 - RNA, 19 nt, Homo sapiens
  misc_RNA (1)...(19): siRNA sense strand
caccagagaaaguggaaga

SEQ ID NO: 2644770 - RNA, 19 nt, Homo sapiens
  misc_RNA (1)...(19): siRNA sense strand
uggucuagaugaaagcaaa

SEQ ID NO: 2644771 - RNA, 19 nt, Homo sapiens
  misc_RNA (1)...(19): siRNA sense strand
acguagagaauacaggaaa

SEQ ID NO: 2644772 - RNA, 19 nt, Homo sapiens
  misc_RNA (1)...(19): siRNA sense strand
ccuggaagcuuuuggaaau

SEQ ID NO: 2644773 - RNA, 19 nt, Homo sapiens
  misc_RNA (1)...(19): siRNA sense strand
aggccaaacaggagaaagu

SEQ ID NO: 2644774 - RNA, 19 nt, Homo sapiens
  misc_RNA (1)...(19): siRNA sense strand
gaguauauacgggaggaua

SEQ ID NO: 2644775 - RNA, 19 nt, Homo sapiens
  misc_RNA (1)...(19): siRNA sense strand
aguuuacgcuucagagaau

SEQ ID NO: 2644776 - RNA, 19 nt, Homo sapiens
  misc_RNA (1)...(19): siRNA sense strand
ccgaaacccaagaacauua

SEQ ID NO: 2644777 - RNA, 19 nt, Homo sapiens
  misc_RNA (1)...(19): siRNA sense strand
cggccaaagugaauggagu

SEQ ID NO: 2644778 - RNA, 19 nt, Homo sapiens
  misc_RNA (1)...(19): siRNA sense strand
agagguaccagcagacaaa

SEQ ID NO: 2644779 - RNA, 19 nt, Homo sapiens
  misc_RNA (1)...(19): siRNA sense strand
ccaugcagauugugggcuu

SEQ ID NO: 2644780 - RNA, 19 nt, Homo sapiens
  misc_RNA (1)...(19): siRNA sense strand
ugaauguggcucaggcuua

SEQ ID NO: 2644781 - RNA, 19 nt, Homo sapiens
  misc_RNA (1)...(19): siRNA sense strand
caaacaaaagugagaaaga

SEQ ID NO: 2644782 - RNA, 19 nt, Homo sapiens
  misc_RNA (1)...(19): siRNA sense strand
cuuuaaaggcgauccacua

SEQ ID NO: 2644783 - RNA, 19 nt, Homo sapiens
  misc_RNA (1)...(19): siRNA sense strand
ggagauaugcgcaacaaaa

SEQ ID NO: 2644784 - RNA, 19 nt, Homo sapiens
  misc_RNA (1)...(19): siRNA sense strand
aaaccaaacagaagcucaa

SEQ ID NO: 2644785 - RNA, 19 nt, Homo sapiens
  misc_RNA (1)...(19): siRNA sense strand
ugccaaaacuguaaggaau

SEQ ID NO: 2644786 - RNA, 19 nt, Homo sapiens
  misc_RNA (1)...(19): siRNA sense strand
cuggaaaggugcuguacca

SEQ ID NO: 2644787 - RNA, 19 nt, Homo sapiens
  misc_RNA (1)...(19): siRNA sense strand
uguaccagguggaaggauu

SEQ ID NO: 2644788 - RNA, 19 nt, Homo sapiens
  misc_RNA (1)...(19): siRNA sense strand
ccaaacuauauuaggugua

SEQ ID NO: 2644789 - RNA, 19 nt, Homo sapiens
  misc_RNA (1)...(19): siRNA sense strand
uccacuaggaggaguaaua

SEQ ID NO: 2644790 - RNA, 19 nt, Homo sapiens
  misc_RNA (1)...(19): siRNA sense strand
agggauuucagcagguaua

SEQ ID NO: 2644791 - RNA, 19 nt, Homo sapiens
  misc_RNA (1)...(19): siRNA sense strand
uuaaagaagagcaggagga

SEQ ID NO: 2644792 - RNA, 19 nt, Homo sapiens
  misc_RNA (1)...(19): siRNA sense strand
acaagaaccccaaguauaa

SEQ ID NO: 2644793 - RNA, 19 nt, Homo sapiens
  misc_RNA (1)...(19): siRNA sense strand
gaccaaaagucuggacaaa

SEQ ID NO: 2644794 - RNA, 19 nt, Homo sapiens
  misc_RNA (1)...(19): siRNA sense strand
agauaaggaccaauguauu

SEQ ID NO: 2644795 - RNA, 19 nt, Homo sapiens
  misc_RNA (1)...(19): siRNA sense strand
uggaaaaggagcagaaguu

SEQ ID NO: 2644796 - RNA, 19 nt, Homo sapiens
  misc_RNA (1)...(19): siRNA sense strand
aacuuaagcuugagaggga

SEQ ID NO: 2644797 - RNA, 19 nt, Homo sapiens
  misc_RNA (1)...(19): siRNA sense strand
augaaagcauuaaggcaca

SEQ ID NO: 2644798 - RNA, 19 nt, Homo sapiens
  misc_RNA (1)...(19): siRNA sense strand
uggccaugcuggaugaaga

SEQ ID NO: 2644799 - RNA, 19 nt, Homo sapiens
  misc_RNA (1)...(19): siRNA sense strand
cuacagaccaagaacccaa

SEQ ID NO: 2644800 - RNA, 19 nt, Homo sapiens
  misc_RNA (1)...(19): siRNA sense strand
cccaagaacauuauucaaa

SEQ ID NO: 2644801 - RNA, 19 nt, Homo sapiens
  misc_RNA (1)...(19): siRNA sense strand
gcuucagagaauugugcaa

SEQ ID NO: 2644802 - RNA, 19 nt, Homo sapiens
  misc_RNA (1)...(19): siRNA sense strand
ccucaauaaacuuaagcuu

SEQ ID NO: 2644803 - RNA, 19 nt, Homo sapiens
  misc_RNA (1)...(19): siRNA sense strand
caaagagggcucagaagca

SEQ ID NO: 2644804 - RNA, 19 nt, Homo sapiens
  misc_RNA (1)...(19): siRNA sense strand
cauuaaggcacaaacaaaa

SEQ ID NO: 2644805 - RNA, 19 nt, Homo sapiens
  misc_RNA (1)...(19): siRNA sense strand
ccgccaagaucaaccugaa

SEQ ID NO: 2644806 - RNA, 19 nt, Homo sapiens
  misc_RNA (1)...(19): siRNA sense strand
ggaaaugccaaaacuguaa

SEQ ID NO: 2644807 - RNA, 19 nt, Homo sapiens
  misc_RNA (1)...(19): siRNA sense strand
ccaaaauggaggugaaaac

SEQ ID NO: 2644808 - RNA, 19 nt, Homo sapiens
  misc_RNA (1)...(19): siRNA sense strand
accaagaacccaaacuaua

SEQ ID NO: 2644809 - RNA, 19 nt, Homo sapiens
  misc_RNA (1)...(19): siRNA sense strand
acaaaguaugugugaaguu

SEQ ID NO: 2644810 - RNA, 19 nt, Homo sapiens
  misc_RNA (1)...(19): siRNA sense strand
agagaaaguggaagaauac

SEQ ID NO: 2644811 - RNA, 19 nt, Homo sapiens
  misc_RNA (1)...(19): siRNA sense strand
aagauaaggaccaauguau

SEQ ID NO: 2644812 - RNA, 19 nt, Homo sapiens
  misc_RNA (1)...(19): siRNA sense strand
ccgaacaguugaggccaaa

SEQ ID NO: 2644813 - RNA, 19 nt, Homo sapiens
  misc_RNA (1)...(19): siRNA sense strand
gguaaaucgaaucaaugaa

SEQ ID NO: 2644814 - RNA, 19 nt, Homo sapiens
  misc_RNA (1)...(19): siRNA sense strand
ucacagaccagcagaaacu

SEQ ID NO: 2644815 - RNA, 19 nt, Homo sapiens
  misc_RNA (1)...(19): siRNA sense strand
cgcuuugaccacagugaaa

SEQ ID NO: 2644816 - RNA, 19 nt, Homo sapiens
  misc_RNA (1)...(19): siRNA sense strand
agccaaugcuggaaagaaa

SEQ ID NO: 2644817 - RNA, 19 nt, Homo sapiens
  misc_RNA (1)...(19): siRNA sense strand
gaaagaaggucaugggugu

SEQ ID NO: 2644818 - RNA, 19 nt, Homo sapiens
  misc_RNA (1)...(19): siRNA sense strand
cguagagaauacaggaaau

SEQ ID NO: 2644819 - RNA, 19 nt, Homo sapiens
  misc_RNA (1)...(19): siRNA sense strand
agugaauggucuagaugaa

SEQ ID NO: 2644820 - RNA, 19 nt, Homo sapiens
  misc_RNA (1)...(19): siRNA sense strand
uugcugaagucgugaacaa

SEQ ID NO: 2644821 - RNA, 19 nt, Homo sapiens
  misc_RNA (1)...(19): siRNA sense strand
guggaagaauacaggaaca

SEQ ID NO: 2644822 - RNA, 19 nt, Homo sapiens
  misc_RNA (1)...(19): siRNA sense strand
aauuagaagaccugaggaa

SEQ ID NO: 2644823 - RNA, 19 nt, Homo sapiens
  misc_RNA (1)...(19): siRNA sense strand
gcuaaugggaagaguacau

SEQ ID NO: 2644824 - RNA, 19 nt, Homo sapiens
  misc_RNA (1)...(19): siRNA sense strand
aagaauacaggaacagaaa

SEQ ID NO: 2644825 - RNA, 19 nt, Homo sapiens
  misc_RNA (1)...(19): siRNA sense strand
cauuuauucaccagagaaa

SEQ ID NO: 2644826 - RNA, 19 nt, Homo sapiens
  misc_RNA (1)...(19): siRNA sense strand
gaaaaggagcagaaguuaa

SEQ ID NO: 2644827 - RNA, 19 nt, Homo sapiens
  misc_RNA (1)...(19): siRNA sense strand
guacaggagauaugcgcaa

SEQ ID NO: 2644828 - RNA, 19 nt, Homo sapiens
  misc_RNA (1)...(19): siRNA sense strand
agccaagaggugaaagaaa

SEQ ID NO: 2644829 - RNA, 19 nt, Homo sapiens
  misc_RNA (1)...(19): siRNA sense strand
uggaaggauucguugacaa

SEQ ID NO: 2644830 - RNA, 19 nt, Homo sapiens
  misc_RNA (1)...(19): siRNA sense strand
cauuuauggcuuugagauu

SEQ ID NO: 2644831 - RNA, 19 nt, Homo sapiens
  misc_RNA (1)...(19): siRNA sense strand
aggaaauucuucagagcca

SEQ ID NO: 2644832 - RNA, 19 nt, Homo sapiens
  misc_RNA (1)...(19): siRNA sense strand
ccgaugaguuccugguaca

SEQ ID NO: 2644833 - RNA, 19 nt, Homo sapiens
  misc_RNA (1)...(19): siRNA sense strand
acgaaaagcugcaacaaau

SEQ ID NO: 2644834 - RNA, 19 nt, Homo sapiens
  misc_RNA (1)...(19): siRNA sense strand
caccagagaaaguggaaga

SEQ ID NO: 2644835 - RNA, 19 nt, Homo sapiens
  misc_RNA (1)...(19): siRNA sense strand
uggucuagaugaaagcaaa

SEQ ID NO: 2644836 - RNA, 19 nt, Homo sapiens
  misc_RNA (1)...(19): siRNA sense strand
acguagagaauacaggaaa

SEQ ID NO: 2644837 - RNA, 19 nt, Homo sapiens
  misc_RNA (1)...(19): siRNA sense strand
ccuggaagcuuuuggaaau

SEQ ID NO: 2644838 - RNA, 19 nt, Homo sapiens
  misc_RNA (1)...(19): siRNA sense strand
aggccaaacaggagaaagu

SEQ ID NO: 2644839 - RNA, 19 nt, Homo sapiens
  misc_RNA (1)...(19): siRNA sense strand
gaguauauacgggaggaua

SEQ ID NO: 2644840 - RNA, 19 nt, Homo sapiens
  misc_RNA (1)...(19): siRNA sense strand
aguuuacgcuucagagaau

SEQ ID NO: 2644841 - RNA, 19 nt, Homo sapiens
  misc_RNA (1)...(19): siRNA sense strand
ccgaaacccaagaacauua

SEQ ID NO: 2644842 - RNA, 19 nt, Homo sapiens
  misc_RNA (1)...(19): siRNA sense strand
cggccaaagugaauggagu

SEQ ID NO: 2644843 - RNA, 19 nt, Homo sapiens
  misc_RNA (1)...(19): siRNA sense strand
agagguaccagcagacaaa

SEQ ID NO: 2644844 - RNA, 19 nt, Homo sapiens
  misc_RNA (1)...(19): siRNA sense strand
ccaugcagauugugggcuu

SEQ ID NO: 2644845 - RNA, 19 nt, Homo sapiens
  misc_RNA (1)...(19): siRNA sense strand
ugaauguggcucaggcuua

SEQ ID NO: 2644846 - RNA, 19 nt, Homo sapiens
  misc_RNA (1)...(19): siRNA sense strand
caaacaaaagugagaaaga

SEQ ID NO: 2644847 - RNA, 19 nt, Homo sapiens
  misc_RNA (1)...(19): siRNA sense strand
cuuuaaaggcgauccacua

SEQ ID NO: 2644848 - RNA, 19 nt, Homo sapiens
  misc_RNA (1)...(19): siRNA sense strand
ggagauaugcgcaacaaaa

SEQ ID NO: 2644849 - RNA, 19 nt, Homo sapiens
  misc_RNA (1)...(19): siRNA sense strand
aaaccaaacagaagcucaa

SEQ ID NO: 2644850 - RNA, 19 nt, Homo sapiens
  misc_RNA (1)...(19): siRNA sense strand
ugccaaaacuguaaggaau

SEQ ID NO: 2644851 - RNA, 19 nt, Homo sapiens
  misc_RNA (1)...(19): siRNA sense strand
cuggaaaggugcuguacca

SEQ ID NO: 2644852 - RNA, 19 nt, Homo sapiens
  misc_RNA (1)...(19): siRNA sense strand
uguaccagguggaaggauu

SEQ ID NO: 2644853 - RNA, 19 nt, Homo sapiens
  misc_RNA (1)...(19): siRNA sense strand
ccaaacuauauuaggugua

SEQ ID NO: 2644854 - RNA, 19 nt, Homo sapiens
  misc_RNA (1)...(19): siRNA sense strand
uccacuaggaggaguaaua

SEQ ID NO: 2644855 - RNA, 19 nt, Homo sapiens
  misc_RNA (1)...(19): siRNA sense strand
agggauuucagcagguaua

SEQ ID NO: 2644856 - RNA, 19 nt, Homo sapiens
  misc_RNA (1)...(19): siRNA sense strand
uuaaagaagagcaggagga

SEQ ID NO: 2644857 - RNA, 19 nt, Homo sapiens
  misc_RNA (1)...(19): siRNA sense strand
acaagaaccccaaguauaa

SEQ ID NO: 2644858 - RNA, 19 nt, Homo sapiens
  misc_RNA (1)...(19): siRNA sense strand
gaccaaaagucuggacaaa

SEQ ID NO: 2644859 - RNA, 19 nt, Homo sapiens
  misc_RNA (1)...(19): siRNA sense strand
agauaaggaccaauguauu

SEQ ID NO: 2644860 - RNA, 19 nt, Homo sapiens
  misc_RNA (1)...(19): siRNA sense strand
uggaaaaggagcagaaguu

SEQ ID NO: 2644861 - RNA, 19 nt, Homo sapiens
  misc_RNA (1)...(19): siRNA sense strand
aacuuaagcuugagaggga

SEQ ID NO: 2644862 - RNA, 19 nt, Homo sapiens
  misc_RNA (1)...(19): siRNA sense strand
augaaagcauuaaggcaca

SEQ ID NO: 2644863 - RNA, 19 nt, Homo sapiens
  misc_RNA (1)...(19): siRNA sense strand
uggccaugcuggaugaaga

SEQ ID NO: 2644864 - RNA, 19 nt, Homo sapiens
  misc_RNA (1)...(19): siRNA sense strand
cuacagaccaagaacccaa

SEQ ID NO: 2644865 - RNA, 19 nt, Homo sapiens
  misc_RNA (1)...(19): siRNA sense strand
cccaagaacauuauucaaa

SEQ ID NO: 2644866 - RNA, 19 nt, Homo sapiens
  misc_RNA (1)...(19): siRNA sense strand
gcuucagagaauugugcaa

SEQ ID NO: 2644867 - RNA, 19 nt, Homo sapiens
  misc_RNA (1)...(19): siRNA sense strand
ccucaauaaacuuaagcuu

SEQ ID NO: 2644868 - RNA, 19 nt, Homo sapiens
  misc_RNA (1)...(19): siRNA sense strand
caaagagggcucagaagca

SEQ ID NO: 2644869 - RNA, 19 nt, Homo sapiens
  misc_RNA (1)...(19): siRNA sense strand
cauuaaggcacaaacaaaa

SEQ ID NO: 2644870 - RNA, 19 nt, Homo sapiens
  misc_RNA (1)...(19): siRNA sense strand
ggaaaugccaaaacuguaa

SEQ ID NO: 2644871 - RNA, 19 nt, Homo sapiens
  misc_RNA (1)...(19): siRNA sense strand
ccaaaauggaggugaaaac

SEQ ID NO: 2644872 - RNA, 19 nt, Homo sapiens
  misc_RNA (1)...(19): siRNA sense strand
accaagaacccaaacuaua

SEQ ID NO: 2644873 - RNA, 19 nt, Homo sapiens
  misc_RNA (1)...(19): siRNA sense strand
acaaaguaugugugaaguu

SEQ ID NO: 2644874 - RNA, 19 nt, Homo sapiens
  misc_RNA (1)...(19): siRNA sense strand
agagaaaguggaagaauac

SEQ ID NO: 2644875 - RNA, 19 nt, Homo sapiens
  misc_RNA (1)...(19): siRNA sense strand
aagauaaggaccaauguau

SEQ ID NO: 2644876 - RNA, 19 nt, Homo sapiens
  misc_RNA (1)...(19): siRNA sense strand
ccgaacaguugaggccaaa

SEQ ID NO: 2644877 - RNA, 19 nt, Homo sapiens
  misc_RNA (1)...(19): siRNA sense strand
gguaaaucgaaucaaugaa

SEQ ID NO: 2644878 - RNA, 19 nt, Homo sapiens
  misc_RNA (1)...(19): siRNA sense strand
ucacagaccagcagaaacu

SEQ ID NO: 2644879 - RNA, 19 nt, Homo sapiens
  misc_RNA (1)...(19): siRNA sense strand
cgcuuugaccacagugaaa

SEQ ID NO: 2644880 - RNA, 19 nt, Homo sapiens
  misc_RNA (1)...(19): siRNA sense strand
gcucacaguucaaggcauc

SEQ ID NO: 2644881 - RNA, 19 nt, Homo sapiens
  misc_RNA (1)...(19): siRNA sense strand
aaccuugccuagaaagaua

SEQ ID NO: 2644882 - RNA, 19 nt, Homo sapiens
  misc_RNA (1)...(19): siRNA sense strand
cgauccacuaggaggagua

SEQ ID NO: 2644883 - RNA, 19 nt, Homo sapiens
  misc_RNA (1)...(19): siRNA sense strand
ccgaaaggaaagaggaaga

SEQ ID NO: 2644884 - RNA, 19 nt, Homo sapiens
  misc_RNA (1)...(19): siRNA sense strand
ucugaaagaaacaggaaua

SEQ ID NO: 2644885 - RNA, 19 nt, Homo sapiens
  misc_RNA (1)...(19): siRNA sense strand
gagaaaaguaguugagauu

SEQ ID NO: 2644886 - RNA, 19 nt, Homo sapiens
  misc_RNA (1)...(19): siRNA sense strand
uggcaguucaagagggaaa

SEQ ID NO: 2644887 - RNA, 19 nt, Homo sapiens
  misc_RNA (1)...(19): siRNA sense strand
guauagaagaggagaaaau

SEQ ID NO: 2644888 - RNA, 19 nt, Homo sapiens
  misc_RNA (1)...(19): siRNA sense strand
caaacaacaaagaggaaaa

SEQ ID NO: 2644889 - RNA, 19 nt, Homo sapiens
  misc_RNA (1)...(19): siRNA sense strand
acaaagaggaaaacagaaa

SEQ ID NO: 2644890 - RNA, 19 nt, Homo sapiens
  misc_RNA (1)...(19): siRNA sense strand
cagaaauguugcaugguga

SEQ ID NO: 2644891 - RNA, 19 nt, Homo sapiens
  misc_RNA (1)...(19): siRNA sense strand
agaaacaggaauagcuaau

SEQ ID NO: 2644892 - RNA, 19 nt, Homo sapiens
  misc_RNA (1)...(19): siRNA sense strand
uggugaaaauggaagauua

SEQ ID NO: 2644893 - RNA, 19 nt, Homo sapiens
  misc_RNA (1)...(19): siRNA sense strand
ugauaaugaaggugaacuu

SEQ ID NO: 2644894 - RNA, 19 nt, Homo sapiens
  misc_RNA (1)...(19): siRNA sense strand
ucgacauacuagaaagaga

SEQ ID NO: 2644895 - RNA, 19 nt, Homo sapiens
  misc_RNA (1)...(19): siRNA sense strand
ccaauaaaacccaggaaca

SEQ ID NO: 2644896 - RNA, 19 nt, Homo sapiens
  misc_RNA (1)...(19): siRNA sense strand
ugacagauuuagaaggcca

SEQ ID NO: 2644897 - RNA, 19 nt, Homo sapiens
  misc_RNA (1)...(19): siRNA sense strand
ggagaaaaucauagaccau

SEQ ID NO: 2644898 - RNA, 19 nt, Homo sapiens
  misc_RNA (1)...(19): siRNA sense strand
ugagauuaaucaugaggau

SEQ ID NO: 2644899 - RNA, 19 nt, Homo sapiens
  misc_RNA (1)...(19): siRNA sense strand
agaaagagacaguugaagu

SEQ ID NO: 2644900 - RNA, 19 nt, Homo sapiens
  misc_RNA (1)...(19): siRNA sense strand
caugaauguuugaacguca

SEQ ID NO: 2644901 - RNA, 19 nt, Homo sapiens
  misc_RNA (1)...(19): siRNA sense strand
aaaggaaagaggaagaaaa

SEQ ID NO: 2644902 - RNA, 19 nt, Homo sapiens
  misc_RNA (1)...(19): siRNA sense strand
agagaaagagacaguugaa

SEQ ID NO: 2644903 - RNA, 19 nt, Homo sapiens
  misc_RNA (1)...(19): siRNA sense strand
uuaaacuaccgaaaggaaa

SEQ ID NO: 2644904 - RNA, 19 nt, Homo sapiens
  misc_RNA (1)...(19): siRNA sense strand
gggaggaaaaguaaugaaa

SEQ ID NO: 2644905 - RNA, 19 nt, Homo sapiens
  misc_RNA (1)...(19): siRNA sense strand
uuguauagaagaggagaaa

SEQ ID NO: 2644906 - RNA, 19 nt, Homo sapiens
  misc_RNA (1)...(19): siRNA sense strand
caauaaaacccaggaacaa

SEQ ID NO: 2644907 - RNA, 19 nt, Homo sapiens
  misc_RNA (1)...(19): siRNA sense strand
guuaaacuaccgaaaggaa

SEQ ID NO: 2644908 - RNA, 19 nt, Homo sapiens
  misc_RNA (1)...(19): siRNA sense strand
ugaucagggugaacaguau

SEQ ID NO: 2644909 - RNA, 19 nt, Homo sapiens
  misc_RNA (1)...(19): siRNA sense strand
caaccauugccaugaagaa

SEQ ID NO: 2644910 - RNA, 19 nt, Homo sapiens
  misc_RNA (1)...(19): siRNA sense strand
ggugaaaauggaagauuau

SEQ ID NO: 2644911 - RNA, 19 nt, Homo sapiens
  misc_RNA (1)...(19): siRNA sense strand
cauacuagaaagagagaag

SEQ ID NO: 2644912 - RNA, 19 nt, Homo sapiens
  misc_RNA (1)...(19): siRNA sense strand
cgaaaggaaagaggaagaa

SEQ ID NO: 2644913 - RNA, 19 nt, Homo sapiens
  misc_RNA (1)...(19): siRNA sense strand
ggaggaaaaguaaugaaaa

SEQ ID NO: 2644914 - RNA, 19 nt, Homo sapiens
  misc_RNA (1)...(19): siRNA sense strand
cugaagaugaggcaaauau

SEQ ID NO: 2644915 - RNA, 19 nt, Homo sapiens
  misc_RNA (1)...(19): siRNA sense strand
agagaaaaguaguugagau

SEQ ID NO: 2644916 - RNA, 19 nt, Homo sapiens
  misc_RNA (1)...(19): siRNA sense strand
gggugaacaguaugagcau

SEQ ID NO: 2644917 - RNA, 19 nt, Homo sapiens
  misc_RNA (1)...(19): siRNA sense strand
gcauaaucggguccacaaa

SEQ ID NO: 2644918 - RNA, 19 nt, Homo sapiens
  misc_RNA (1)...(19): siRNA sense strand
cagacuuuguauugagcau

SEQ ID NO: 2644919 - RNA, 19 nt, Homo sapiens
  misc_RNA (1)...(19): siRNA sense strand
agguacauaugcacacaaa

SEQ ID NO: 2644920 - RNA, 19 nt, Homo sapiens
  misc_RNA (1)...(19): siRNA sense strand
guacauaugcacacaaaau

SEQ ID NO: 2644921 - RNA, 19 nt, Homo sapiens
  misc_RNA (1)...(19): siRNA sense strand
uuuagaaggccaacaagaa

SEQ ID NO: 2644922 - RNA, 19 nt, Homo sapiens
  misc_RNA (1)...(19): siRNA sense strand
caucguggaaugacagaau

SEQ ID NO: 2644923 - RNA, 19 nt, Homo sapiens
  misc_RNA (1)...(19): siRNA sense strand
guucaagagggaaagcauu

SEQ ID NO: 2644924 - RNA, 19 nt, Homo sapiens
  misc_RNA (1)...(19): siRNA sense strand
cuacaaacaacaaagagga

SEQ ID NO: 2644925 - RNA, 19 nt, Homo sapiens
  misc_RNA (1)...(19): siRNA sense strand
ccuucaacagagaccaaua

SEQ ID NO: 2644926 - RNA, 19 nt, Homo sapiens
  misc_RNA (1)...(19): siRNA sense strand
acacagaagaaucaacuau

SEQ ID NO: 2644927 - RNA, 19 nt, Homo sapiens
  misc_RNA (1)...(19): siRNA sense strand
agauuuagaaggccaacaa

SEQ ID NO: 2644928 - RNA, 19 nt, Homo sapiens
  misc_RNA (1)...(19): siRNA sense strand
aauauagccuggaugguga

SEQ ID NO: 2644929 - RNA, 19 nt, Homo sapiens
  misc_RNA (1)...(19): siRNA sense strand
gguuauuacaccagguuuu

SEQ ID NO: 2644930 - RNA, 19 nt, Homo sapiens
  misc_RNA (1)...(19): siRNA sense strand
acaaacaacaaagaggaaa

SEQ ID NO: 2644931 - RNA, 19 nt, Homo sapiens
  misc_RNA (1)...(19): siRNA sense strand
acagaacacagaagaauca

SEQ ID NO: 2644932 - RNA, 19 nt, Homo sapiens
  misc_RNA (1)...(19): siRNA sense strand
aaugugauccagagaaaga

SEQ ID NO: 2644933 - RNA, 19 nt, Homo sapiens
  misc_RNA (1)...(19): siRNA sense strand
uuccugaagaugaggcaaa

SEQ ID NO: 2644934 - RNA, 19 nt, Homo sapiens
  misc_RNA (1)...(19): siRNA sense strand
acaaaacugugcugaggaa

SEQ ID NO: 2644935 - RNA, 19 nt, Homo sapiens
  misc_RNA (1)...(19): siRNA sense strand
ugauguuaaacuaccgaaa

SEQ ID NO: 2644936 - RNA, 19 nt, Homo sapiens
  misc_RNA (1)...(19): siRNA sense strand
aaacaauacaccagauucu

SEQ ID NO: 2644937 - RNA, 19 nt, Homo sapiens
  misc_RNA (1)...(19): siRNA sense strand
aggcaugcucauaggcaca

SEQ ID NO: 2644938 - RNA, 19 nt, Homo sapiens
  misc_RNA (1)...(19): siRNA sense strand
uagaaagagagaagcacca

SEQ ID NO: 2644939 - RNA, 19 nt, Homo sapiens
  misc_RNA (1)...(19): siRNA sense strand
ugauggugacaaugaagaa

SEQ ID NO: 2644940 - RNA, 19 nt, Homo sapiens
  misc_RNA (1)...(19): siRNA sense strand
gcucuuuggauuugccauu

SEQ ID NO: 2644941 - RNA, 19 nt, Homo sapiens
  misc_RNA (1)...(19): siRNA sense strand
uaccgaaaggaaagaggaa

SEQ ID NO: 2644942 - RNA, 19 nt, Homo sapiens
  misc_RNA (1)...(19): siRNA sense strand
cgacagcagacuuuguauu

SEQ ID NO: 2644943 - RNA, 19 nt, Homo sapiens
  misc_RNA (1)...(19): siRNA sense strand
aggauugcucuuuggauuu

SEQ ID NO: 2644944 - RNA, 19 nt, Homo sapiens
  misc_RNA (1)...(19): siRNA sense strand
ucauggaaccggagauaaa

SEQ ID NO: 2644945 - RNA, 19 nt, Homo sapiens
  misc_RNA (1)...(19): siRNA sense strand
ggacagagagugugagcga

SEQ ID NO: 2644946 - RNA, 19 nt, Homo sapiens
  misc_RNA (1)...(19): siRNA sense strand
gggcaaauuguauggagaa

SEQ ID NO: 2644947 - RNA, 19 nt, Homo sapiens
  misc_RNA (1)...(19): siRNA sense strand
aaauagacacagaggaauu

SEQ ID NO: 2644948 - RNA, 19 nt, Homo sapiens
  misc_RNA (1)...(19): siRNA sense strand
gacuaaaggauauggacaa

SEQ ID NO: 2644949 - RNA, 19 nt, Homo sapiens
  misc_RNA (1)...(19): siRNA sense strand
cuaagugauuggagaaaca

SEQ ID NO: 2644950 - RNA, 19 nt, Homo sapiens
  misc_RNA (1)...(19): siRNA sense strand
gagaagaacaagaaggagu

SEQ ID NO: 2644951 - RNA, 19 nt, Homo sapiens
  misc_RNA (1)...(19): siRNA sense strand
aggaguacaucgagaggau

SEQ ID NO: 2644952 - RNA, 19 nt, Homo sapiens
  misc_RNA (1)...(19): siRNA sense strand
aagcauucauucaggacua

SEQ ID NO: 2644953 - RNA, 19 nt, Homo sapiens
  misc_RNA (1)...(19): siRNA sense strand
agaagaacaagaaggagua

SEQ ID NO: 2644954 - RNA, 19 nt, Homo sapiens
  misc_RNA (1)...(19): siRNA sense strand
gcuccaugccagagaacau

SEQ ID NO: 2644955 - RNA, 19 nt, Homo sapiens
  misc_RNA (1)...(19): siRNA sense strand
gggaaaugaaacaugauca

SEQ ID NO: 2644956 - RNA, 19 nt, Homo sapiens
  misc_RNA (1)...(19): siRNA sense strand
agaccuaagugauuggaga

SEQ ID NO: 2644957 - RNA, 19 nt, Homo sapiens
  misc_RNA (1)...(19): siRNA sense strand
agaacaagaaggaguacau

SEQ ID NO: 2644958 - RNA, 19 nt, Homo sapiens
  misc_RNA (1)...(19): siRNA sense strand
acacauacacaguacaaau

SEQ ID NO: 2644959 - RNA, 19 nt, Homo sapiens
  misc_RNA (1)...(19): siRNA sense strand
ccuagaauaccuugaugaa

SEQ ID NO: 2644960 - RNA, 19 nt, Homo sapiens
  misc_RNA (1)...(19): siRNA sense strand
augcaagagaacuggaauu

SEQ ID NO: 2644961 - RNA, 19 nt, Homo sapiens
  misc_RNA (1)...(19): siRNA sense strand
uggagaaacaacacagaau

SEQ ID NO: 2644962 - RNA, 19 nt, Homo sapiens
  misc_RNA (1)...(19): siRNA sense strand
aauuuggcaccgagagaaa

SEQ ID NO: 2644963 - RNA, 19 nt, Homo sapiens
  misc_RNA (1)...(19): siRNA sense strand
gggugagguaggagaagau

SEQ ID NO: 2644964 - RNA, 19 nt, Homo sapiens
  misc_RNA (1)...(19): siRNA sense strand
cagagaagaacaagaagga

SEQ ID NO: 2644965 - RNA, 19 nt, Homo sapiens
  misc_RNA (1)...(19): siRNA sense strand
augagaggccugaggaaaa

SEQ ID NO: 2644966 - RNA, 19 nt, Homo sapiens
  misc_RNA (1)...(19): siRNA sense strand
cugcaguggaugaaagaca

SEQ ID NO: 2644967 - RNA, 19 nt, Homo sapiens
  misc_RNA (1)...(19): siRNA sense strand
ucuuagggcaguugggcua

SEQ ID NO: 2644968 - RNA, 19 nt, Homo sapiens
  misc_RNA (1)...(19): siRNA sense strand
aguuuaaaguggagguuac

SEQ ID NO: 2644969 - RNA, 19 nt, Homo sapiens
  misc_RNA (1)...(19): siRNA sense strand
guugacagcaguugaagaa

SEQ ID NO: 2644970 - RNA, 19 nt, Homo sapiens
  misc_RNA (1)...(19): siRNA sense strand
ggccugagggagagaguga

SEQ ID NO: 2644971 - RNA, 19 nt, Homo sapiens
  misc_RNA (1)...(19): siRNA sense strand
agacuaaaggauauggaca

SEQ ID NO: 2644972 - RNA, 19 nt, Homo sapiens
  misc_RNA (1)...(19): siRNA sense strand
acgaagaaguauuugggca

SEQ ID NO: 2644973 - RNA, 19 nt, Homo sapiens
  misc_RNA (1)...(19): siRNA sense strand
gggaggugcuucaggaaac

SEQ ID NO: 2644974 - RNA, 19 nt, Homo sapiens
  misc_RNA (1)...(19): siRNA sense strand
ggcaguugggcuaaagaaa

SEQ ID NO: 2644975 - RNA, 19 nt, Homo sapiens
  misc_RNA (1)...(19): siRNA sense strand
ccaggaaagaagagcaguu

SEQ ID NO: 2644976 - RNA, 19 nt, Homo sapiens
  misc_RNA (1)...(19): siRNA sense strand
caaugagaggccugaggaa

SEQ ID NO: 2644977 - RNA, 19 nt, Homo sapiens
  misc_RNA (1)...(19): siRNA sense strand
gggagaacauccugccuca

SEQ ID NO: 2644978 - RNA, 19 nt, Homo sapiens
  misc_RNA (1)...(19): siRNA sense strand
aggcauucuuuguggacca

SEQ ID NO: 2644979 - RNA, 19 nt, Homo sapiens
  misc_RNA (1)...(19): siRNA sense strand
guuaauuauccgaagagau

SEQ ID NO: 2644980 - RNA, 19 nt, Homo sapiens
  misc_RNA (1)...(19): siRNA sense strand
cugaaauagaccuaaguga

SEQ ID NO: 2644981 - RNA, 19 nt, Homo sapiens
  misc_RNA (1)...(19): siRNA sense strand
ggcaaauuguauggagaau

SEQ ID NO: 2644982 - RNA, 19 nt, Homo sapiens
  misc_RNA (1)...(19): siRNA sense strand
cugcagagaaauaagcuau

SEQ ID NO: 2644983 - RNA, 19 nt, Homo sapiens
  misc_RNA (1)...(19): siRNA sense strand
gaguaacggcccaagaaga

SEQ ID NO: 2644984 - RNA, 19 nt, Homo sapiens
  misc_RNA (1)...(19): siRNA sense strand
acauuaaagaggaggugga

SEQ ID NO: 2644985 - RNA, 19 nt, Homo sapiens
  misc_RNA (1)...(19): siRNA sense strand
agggcaaauuguauggaga

SEQ ID NO: 2644986 - RNA, 19 nt, Homo sapiens
  misc_RNA (1)...(19): siRNA sense strand
acacaagacucaaugccau

SEQ ID NO: 2644987 - RNA, 19 nt, Homo sapiens
  misc_RNA (1)...(19): siRNA sense strand
gccgaagggucgcaggaau

SEQ ID NO: 2644988 - RNA, 19 nt, Homo sapiens
  misc_RNA (1)...(19): siRNA sense strand
ccacaagugcgcugguuca

SEQ ID NO: 2644989 - RNA, 19 nt, Homo sapiens
  misc_RNA (1)...(19): siRNA sense strand
cagaauauagaggaggaua

SEQ ID NO: 2644990 - RNA, 19 nt, Homo sapiens
  misc_RNA (1)...(19): siRNA sense strand
cuucagagcaguagaccca

SEQ ID NO: 2644991 - RNA, 19 nt, Homo sapiens
  misc_RNA (1)...(19): siRNA sense strand
caguuacagagaagaacaa

SEQ ID NO: 2644992 - RNA, 19 nt, Homo sapiens
  misc_RNA (1)...(19): siRNA sense strand
cagagaaccuccagagccu

SEQ ID NO: 2644993 - RNA, 19 nt, Homo sapiens
  misc_RNA (1)...(19): siRNA sense strand
agaaaaucuuccagagcuu

SEQ ID NO: 2644994 - RNA, 19 nt, Homo sapiens
  misc_RNA (1)...(19): siRNA sense strand
ggacaugguuccaguggcu

SEQ ID NO: 2644995 - RNA, 19 nt, Homo sapiens
  misc_RNA (1)...(19): siRNA sense strand
gugaaguggaggauugaga

SEQ ID NO: 2644996 - RNA, 19 nt, Homo sapiens
  misc_RNA (1)...(19): siRNA sense strand
gaccuaagugauuggagaa

SEQ ID NO: 2644997 - RNA, 19 nt, Homo sapiens
  misc_RNA (1)...(19): siRNA sense strand
cagauaacugaacgagaau

SEQ ID NO: 2644998 - RNA, 19 nt, Homo sapiens
  misc_RNA (1)...(19): siRNA sense strand
aagaaggaguacaucgaga

SEQ ID NO: 2644999 - RNA, 19 nt, Homo sapiens
  misc_RNA (1)...(19): siRNA sense strand
agaauauagaggaggauac

SEQ ID NO: 2645000 - RNA, 19 nt, Homo sapiens
  misc_RNA (1)...(19): siRNA sense strand
gcgacaagccaucggugau

SEQ ID NO: 2645001 - RNA, 19 nt, Homo sapiens
  misc_RNA (1)...(19): siRNA sense strand
ucaccaagccagugcagau

SEQ ID NO: 2645002 - RNA, 19 nt, Homo sapiens
  misc_RNA (1)...(19): siRNA sense strand
gcagauuuccgacgggaga

SEQ ID NO: 2645003 - RNA, 19 nt, Homo sapiens
  misc_RNA (1)...(19): siRNA sense strand
gaaauaagcuauaugucac

SEQ ID NO: 2645004 - RNA, 19 nt, Homo sapiens
  misc_RNA (1)...(19): siRNA sense strand
acuuugaaccagaggauua

SEQ ID NO: 2645005 - RNA, 19 nt, Homo sapiens
  misc_RNA (1)...(19): siRNA sense strand
gaaagagauuggagaggga

SEQ ID NO: 2645006 - RNA, 19 nt, Homo sapiens
  misc_RNA (1)...(19): siRNA sense strand
agggagaagaagaggaaga

SEQ ID NO: 2645007 - RNA, 19 nt, Homo sapiens
  misc_RNA (1)...(19): siRNA sense strand
gagaagaagaggaagacca

SEQ ID NO: 2645008 - RNA, 19 nt, Homo sapiens
  misc_RNA (1)...(19): siRNA sense strand
caggaaggccuuugggcau

SEQ ID NO: 2645009 - RNA, 19 nt, Homo sapiens
  misc_RNA (1)...(19): siRNA sense strand
ggggaagugaagaagaaaa

SEQ ID NO: 2645010 - RNA, 19 nt, Homo sapiens
  misc_RNA (1)...(19): siRNA sense strand
agagggagaagaagaggaa

SEQ ID NO: 2645011 - RNA, 19 nt, Homo sapiens
  misc_RNA (1)...(19): siRNA sense strand
ccacagaagaggugcucca

SEQ ID NO: 2645012 - RNA, 19 nt, Homo sapiens
  misc_RNA (1)...(19): siRNA sense strand
acacaaggguccacagcca

SEQ ID NO: 2645013 - RNA, 19 nt, Homo sapiens
  misc_RNA (1)...(19): siRNA sense strand
ugaauuugccaaugggaga

SEQ ID NO: 2645014 - RNA, 19 nt, Homo sapiens
  misc_RNA (1)...(19): siRNA sense strand
gaagccagcuggagagcca

SEQ ID NO: 2645015 - RNA, 19 nt, Homo sapiens
  misc_RNA (1)...(19): siRNA sense strand
gggccuggaugaaggggaa

SEQ ID NO: 2645016 - RNA, 19 nt, Homo sapiens
  misc_RNA (1)...(19): siRNA sense strand
gcuucaaaggagagcuaca

SEQ ID NO: 2645017 - RNA, 19 nt, Homo sapiens
  misc_RNA (1)...(19): siRNA sense strand
cugaagggaagcaaggcaa

SEQ ID NO: 2645018 - RNA, 19 nt, Homo sapiens
  misc_RNA (1)...(19): siRNA sense strand
ccugaagagccaauuuaaa

SEQ ID NO: 2645019 - RNA, 19 nt, Homo sapiens
  misc_RNA (1)...(19): siRNA sense strand
guggacagcccuaggacau

SEQ ID NO: 2645020 - RNA, 19 nt, Homo sapiens
  misc_RNA (1)...(19): siRNA sense strand
acaagaucuuucaggugua

SEQ ID NO: 2645021 - RNA, 19 nt, Homo sapiens
  misc_RNA (1)...(19): siRNA sense strand
gguccacagccaaggaaaa

SEQ ID NO: 2645022 - RNA, 19 nt, Homo sapiens
  misc_RNA (1)...(19): siRNA sense strand
cagcaaaccuccaggaagg

SEQ ID NO: 2645023 - RNA, 19 nt, Homo sapiens
  misc_RNA (1)...(19): siRNA sense strand
aggacaaacagaaguuaga

SEQ ID NO: 2645024 - RNA, 19 nt, Homo sapiens
  misc_RNA (1)...(19): siRNA sense strand
caaugggagacgcuggaaa

SEQ ID NO: 2645025 - RNA, 19 nt, Homo sapiens
  misc_RNA (1)...(19): siRNA sense strand
gauaaacaaaggaacguga

SEQ ID NO: 2645026 - RNA, 19 nt, Homo sapiens
  misc_RNA (1)...(19): siRNA sense strand
accagaaagcagcgaagaa

SEQ ID NO: 2645027 - RNA, 19 nt, Homo sapiens
  misc_RNA (1)...(19): siRNA sense strand
ccaaagaagcucaggccac

SEQ ID NO: 2645028 - RNA, 19 nt, Homo sapiens
  misc_RNA (1)...(19): siRNA sense strand
gcuggaaagagauuggaga

SEQ ID NO: 2645029 - RNA, 19 nt, Homo sapiens
  misc_RNA (1)...(19): siRNA sense strand
aagcaaggcaagacacaca

SEQ ID NO: 2645030 - RNA, 19 nt, Homo sapiens
  misc_RNA (1)...(19): siRNA sense strand
aagaggaagaccacaguau

SEQ ID NO: 2645031 - RNA, 19 nt, Homo sapiens
  misc_RNA (1)...(19): siRNA sense strand
aggcagaggacacgucaau

SEQ ID NO: 2645032 - RNA, 19 nt, Homo sapiens
  misc_RNA (1)...(19): siRNA sense strand
aagagauuggagagggaga

SEQ ID NO: 2645033 - RNA, 19 nt, Homo sapiens
  misc_RNA (1)...(19): siRNA sense strand
aagaugaaacgcaggcaga

SEQ ID NO: 2645034 - RNA, 19 nt, Homo sapiens
  misc_RNA (1)...(19): siRNA sense strand
cuggggaagugaagaagaa

SEQ ID NO: 2645035 - RNA, 19 nt, Homo sapiens
  misc_RNA (1)...(19): siRNA sense strand
uuauaugcuucaaaggaga

SEQ ID NO: 2645036 - RNA, 19 nt, Homo sapiens
  misc_RNA (1)...(19): siRNA sense strand
gaacaaugccagucagcac

SEQ ID NO: 2645037 - RNA, 19 nt, Homo sapiens
  misc_RNA (1)...(19): siRNA sense strand
caaagaagcucaggccaca

SEQ ID NO: 2645038 - RNA, 19 nt, Homo sapiens
  misc_RNA (1)...(19): siRNA sense strand
uuggagagggagaagaaga

SEQ ID NO: 2645039 - RNA, 19 nt, Homo sapiens
  misc_RNA (1)...(19): siRNA sense strand
caagauaagaacaaugcca

SEQ ID NO: 2645040 - RNA, 19 nt, Homo sapiens
  misc_RNA (1)...(19): siRNA sense strand
gaggauuacuugaacugga

SEQ ID NO: 2645041 - RNA, 19 nt, Homo sapiens
  misc_RNA (1)...(19): siRNA sense strand
cuacuuugaaccagaggau

SEQ ID NO: 2645042 - RNA, 19 nt, Homo sapiens
  misc_RNA (1)...(19): siRNA sense strand
cagaagaaccacccagagu

SEQ ID NO: 2645043 - RNA, 19 nt, Homo sapiens
  misc_RNA (1)...(19): siRNA sense strand
aggaggaggaggagagaaa

SEQ ID NO: 2645044 - RNA, 19 nt, Homo sapiens
  misc_RNA (1)...(19): siRNA sense strand
ggcaagaggaauuggaaau

SEQ ID NO: 2645045 - RNA, 19 nt, Homo sapiens
  misc_RNA (1)...(19): siRNA sense strand
ucaaaggacucaaaggcua

SEQ ID NO: 2645046 - RNA, 19 nt, Homo sapiens
  misc_RNA (1)...(19): siRNA sense strand
ccugaaggaaaguggaaau

SEQ ID NO: 2645047 - RNA, 19 nt, Homo sapiens
  misc_RNA (1)...(19): siRNA sense strand
guggaaaugcacuggacua

SEQ ID NO: 2645048 - RNA, 19 nt, Homo sapiens
  misc_RNA (1)...(19): siRNA sense strand
agcaaaggcaagaggaauu

SEQ ID NO: 2645049 - RNA, 19 nt, Homo sapiens
  misc_RNA (1)...(19): siRNA sense strand
caagagaaagagaagggaa

SEQ ID NO: 2645050 - RNA, 19 nt, Homo sapiens
  misc_RNA (1)...(19): siRNA sense strand
aggcaagaggaauuggaaa

SEQ ID NO: 2645051 - RNA, 19 nt, Homo sapiens
  misc_RNA (1)...(19): siRNA sense strand
aggaaaggucuacgggcaa

SEQ ID NO: 2645052 - RNA, 19 nt, Homo sapiens
  misc_RNA (1)...(19): siRNA sense strand
agagaagggagcaggaaga

SEQ ID NO: 2645053 - RNA, 19 nt, Homo sapiens
  misc_RNA (1)...(19): siRNA sense strand
uggaagaagccacgaaaca

SEQ ID NO: 2645054 - RNA, 19 nt, Homo sapiens
  misc_RNA (1)...(19): siRNA sense strand
cgaccaagacccagagcca

SEQ ID NO: 2645055 - RNA, 19 nt, Homo sapiens
  misc_RNA (1)...(19): siRNA sense strand
agagagaaggaaaggucua

SEQ ID NO: 2645056 - RNA, 19 nt, Homo sapiens
  misc_RNA (1)...(19): siRNA sense strand
cuaagagggagcaggagaa

SEQ ID NO: 2645057 - RNA, 19 nt, Homo sapiens
  misc_RNA (1)...(19): siRNA sense strand
gagcagcuggagagagcaa

SEQ ID NO: 2645058 - RNA, 19 nt, Homo sapiens
  misc_RNA (1)...(19): siRNA sense strand
uggaaaugcaguuagaaga

SEQ ID NO: 2645059 - RNA, 19 nt, Homo sapiens
  misc_RNA (1)...(19): siRNA sense strand
ccaccuacacagaggacuu

SEQ ID NO: 2645060 - RNA, 19 nt, Homo sapiens
  misc_RNA (1)...(19): siRNA sense strand
guacuggauauuugggcaa

SEQ ID NO: 2645061 - RNA, 19 nt, Homo sapiens
  misc_RNA (1)...(19): siRNA sense strand
augagagggauuugauuaa

SEQ ID NO: 2645062 - RNA, 19 nt, Homo sapiens
  misc_RNA (1)...(19): siRNA sense strand
aaggaaaggucuacgggca

SEQ ID NO: 2645063 - RNA, 19 nt, Homo sapiens
  misc_RNA (1)...(19): siRNA sense strand
aggccaagagaaaggaaaa

SEQ ID NO: 2645064 - RNA, 19 nt, Homo sapiens
  misc_RNA (1)...(19): siRNA sense strand
ucuaaagaagagagaagau

SEQ ID NO: 2645065 - RNA, 19 nt, Homo sapiens
  misc_RNA (1)...(19): siRNA sense strand
ggcaacagcaagaggaguu

SEQ ID NO: 2645066 - RNA, 19 nt, Homo sapiens
  misc_RNA (1)...(19): siRNA sense strand
aaagcgagagagaaggaaa

SEQ ID NO: 2645067 - RNA, 19 nt, Homo sapiens
  misc_RNA (1)...(19): siRNA sense strand
ggaaaaggacacagaagga

SEQ ID NO: 2645068 - RNA, 19 nt, Homo sapiens
  misc_RNA (1)...(19): siRNA sense strand
acacagaaggaaagaaauc

SEQ ID NO: 2645069 - RNA, 19 nt, Homo sapiens
  misc_RNA (1)...(19): siRNA sense strand
aaucuaaagaagagagaag

SEQ ID NO: 2645070 - RNA, 19 nt, Homo sapiens
  misc_RNA (1)...(19): siRNA sense strand
uggaaauggcugaagagga

SEQ ID NO: 2645071 - RNA, 19 nt, Homo sapiens
  misc_RNA (1)...(19): siRNA sense strand
ucaggaagaagcagggaga

SEQ ID NO: 2645072 - RNA, 19 nt, Homo sapiens
  misc_RNA (1)...(19): siRNA sense strand
ggaaucuaaagaagagaga

SEQ ID NO: 2645073 - RNA, 19 nt, Homo sapiens
  misc_RNA (1)...(19): siRNA sense strand
gagaagaagagaagggagc

SEQ ID NO: 2645074 - RNA, 19 nt, Homo sapiens
  misc_RNA (1)...(19): siRNA sense strand
gggagaccccucagagaaa

SEQ ID NO: 2645075 - RNA, 19 nt, Homo sapiens
  misc_RNA (1)...(19): siRNA sense strand
gcagagaagcaaaggcaag

SEQ ID NO: 2645076 - RNA, 19 nt, Homo sapiens
  misc_RNA (1)...(19): siRNA sense strand
acuaagagggagcaggaga

SEQ ID NO: 2645077 - RNA, 19 nt, Homo sapiens
  misc_RNA (1)...(19): siRNA sense strand
gaggccaagagaaaggaaa

SEQ ID NO: 2645078 - RNA, 19 nt, Homo sapiens
  misc_RNA (1)...(19): siRNA sense strand
aaaaggacacagaaggaaa

SEQ ID NO: 2645079 - RNA, 19 nt, Homo sapiens
  misc_RNA (1)...(19): siRNA sense strand
cacugaaccuagagccaau

SEQ ID NO: 2645080 - RNA, 19 nt, Homo sapiens
  misc_RNA (1)...(19): siRNA sense strand
aagaagaacagcagcggca

SEQ ID NO: 2645081 - RNA, 19 nt, Homo sapiens
  misc_RNA (1)...(19): siRNA sense strand
aagcaaaggcaagaggaau

SEQ ID NO: 2645082 - RNA, 19 nt, Homo sapiens
  misc_RNA (1)...(19): siRNA sense strand
aagaggaacgacuggagua

SEQ ID NO: 2645083 - RNA, 19 nt, Homo sapiens
  misc_RNA (1)...(19): siRNA sense strand
agaagaggaagcagcaaga

SEQ ID NO: 2645084 - RNA, 19 nt, Homo sapiens
  misc_RNA (1)...(19): siRNA sense strand
aagagaaagagaagggaag

SEQ ID NO: 2645085 - RNA, 19 nt, Homo sapiens
  misc_RNA (1)...(19): siRNA sense strand
aaagagaagggaaggcuga

SEQ ID NO: 2645086 - RNA, 19 nt, Homo sapiens
  misc_RNA (1)...(19): siRNA sense strand
caagaggaguuucggagga

SEQ ID NO: 2645087 - RNA, 19 nt, Homo sapiens
  misc_RNA (1)...(19): siRNA sense strand
aaaugcaguuagaagaaga

SEQ ID NO: 2645088 - RNA, 19 nt, Homo sapiens
  misc_RNA (1)...(19): siRNA sense strand
ccaagaaagacaaaaccaa

SEQ ID NO: 2645089 - RNA, 19 nt, Homo sapiens
  misc_RNA (1)...(19): siRNA sense strand
aaacaagaccccaaaggaa

SEQ ID NO: 2645090 - RNA, 19 nt, Homo sapiens
  misc_RNA (1)...(19): siRNA sense strand
ggagauagcggcagagcug

SEQ ID NO: 2645091 - RNA, 19 nt, Homo sapiens
  misc_RNA (1)...(19): siRNA sense strand
guacagaagagauccgcuu

SEQ ID NO: 2645092 - RNA, 19 nt, Homo sapiens
  misc_RNA (1)...(19): siRNA sense strand
aaauaugaugcccaggaaa

SEQ ID NO: 2645093 - RNA, 19 nt, Homo sapiens
  misc_RNA (1)...(19): siRNA sense strand
aggaacgacuggaguacca

SEQ ID NO: 2645094 - RNA, 19 nt, Homo sapiens
  misc_RNA (1)...(19): siRNA sense strand
gacccagagccaaggagua

SEQ ID NO: 2645095 - RNA, 19 nt, Homo sapiens
  misc_RNA (1)...(19): siRNA sense strand
cggaggaaacugcgagaac

SEQ ID NO: 2645096 - RNA, 19 nt, Homo sapiens
  misc_RNA (1)...(19): siRNA sense strand
acauggaaucuaaagaaga

SEQ ID NO: 2645097 - RNA, 19 nt, Homo sapiens
  misc_RNA (1)...(19): siRNA sense strand
gggauacgggccugaguca

SEQ ID NO: 2645098 - RNA, 19 nt, Homo sapiens
  misc_RNA (1)...(19): siRNA sense strand
cagaaagagccgagaugag

SEQ ID NO: 2645099 - RNA, 19 nt, Homo sapiens
  misc_RNA (1)...(19): siRNA sense strand
gagguggagaagaagagaa

SEQ ID NO: 2645100 - RNA, 19 nt, Homo sapiens
  misc_RNA (1)...(19): siRNA sense strand
aggaauuggaaaugcaguu

SEQ ID NO: 2645101 - RNA, 19 nt, Homo sapiens
  misc_RNA (1)...(19): siRNA sense strand
aagagauccgcuugaggaa

SEQ ID NO: 2645102 - RNA, 19 nt, Homo sapiens
  misc_RNA (1)...(19): siRNA sense strand
aaacagaacuuguggcaga

SEQ ID NO: 2645103 - RNA, 19 nt, Homo sapiens
  misc_RNA (1)...(19): siRNA sense strand
ccgaaugacaagugaucua

SEQ ID NO: 2645104 - RNA, 19 nt, Homo sapiens
  misc_RNA (1)...(19): siRNA sense strand
cuuuaggaauauugaguga

SEQ ID NO: 2645105 - RNA, 19 nt, Homo sapiens
  misc_RNA (1)...(19): siRNA sense strand
ugaucuaauucaggagaaa

SEQ ID NO: 2645106 - RNA, 19 nt, Homo sapiens
  misc_RNA (1)...(19): siRNA sense strand
cuaaaagaugugugugaaa

SEQ ID NO: 2645107 - RNA, 19 nt, Homo sapiens
  misc_RNA (1)...(19): siRNA sense strand
gaacaaauaaugacccgaa

SEQ ID NO: 2645108 - RNA, 19 nt, Homo sapiens
  misc_RNA (1)...(19): siRNA sense strand
cugaacugaugaugguaau

SEQ ID NO: 2645109 - RNA, 19 nt, Homo sapiens
  misc_RNA (1)...(19): siRNA sense strand
ggagagagcuguuggaucg

SEQ ID NO: 2645110 - RNA, 19 nt, Homo sapiens
  misc_RNA (1)...(19): siRNA sense strand
gaauauugagugaaggcca

SEQ ID NO: 2645111 - RNA, 19 nt, Homo sapiens
  misc_RNA (1)...(19): siRNA sense strand
gugaucuaauucaggagaa

SEQ ID NO: 2645112 - RNA, 19 nt, Homo sapiens
  misc_RNA (1)...(19): siRNA sense strand
ggcuaaaagauguguguga

SEQ ID NO: 2645113 - RNA, 19 nt, Homo sapiens
  misc_RNA (1)...(19): siRNA sense strand
gaugaugguaauugcucaa

SEQ ID NO: 2645114 - RNA, 19 nt, Homo sapiens
  misc_RNA (1)...(19): siRNA sense strand
ugguaauugcucaagagaa

SEQ ID NO: 2645115 - RNA, 19 nt, Homo sapiens
  misc_RNA (1)...(19): siRNA sense strand
gcuguuggaucguggagga

SEQ ID NO: 2645116 - RNA, 19 nt, Homo sapiens
  misc_RNA (1)...(19): siRNA sense strand
gugaaauuugagaauggaa

SEQ ID NO: 2645117 - RNA, 19 nt, Homo sapiens
  misc_RNA (1)...(19): siRNA sense strand
aggagaaacuuguugcacu

SEQ ID NO: 2645118 - RNA, 19 nt, Homo sapiens
  misc_RNA (1)...(19): siRNA sense strand
auaaugaguuccuggagca

SEQ ID NO: 2645119 - RNA, 19 nt, Homo sapiens
  misc_RNA (1)...(19): siRNA sense strand
guuugggaggauuggcuaa

SEQ ID NO: 2645120 - RNA, 19 nt, Homo sapiens
  misc_RNA (1)...(19): siRNA sense strand
acugaacugaugaugguaa

SEQ ID NO: 2645121 - RNA, 19 nt, Homo sapiens
  misc_RNA (1)...(19): siRNA sense strand
ggguagagcagauugucca

SEQ ID NO: 2645122 - RNA, 19 nt, Homo sapiens
  misc_RNA (1)...(19): siRNA sense strand
agugaaggccaguuuggua

SEQ ID NO: 2645123 - RNA, 19 nt, Homo sapiens
  misc_RNA (1)...(19): siRNA sense strand
gccugugaaauuugagaau

SEQ ID NO: 2645124 - RNA, 19 nt, Homo sapiens
  misc_RNA (1)...(19): siRNA sense strand
aaacagaacuuguggcaga

SEQ ID NO: 2645125 - RNA, 19 nt, Homo sapiens
  misc_RNA (1)...(19): siRNA sense strand
ccgaaugacaagugaucua

SEQ ID NO: 2645126 - RNA, 19 nt, Homo sapiens
  misc_RNA (1)...(19): siRNA sense strand
cuuuaggaauauugaguga

SEQ ID NO: 2645127 - RNA, 19 nt, Homo sapiens
  misc_RNA (1)...(19): siRNA sense strand
ugaucuaauucaggagaaa

SEQ ID NO: 2645128 - RNA, 19 nt, Homo sapiens
  misc_RNA (1)...(19): siRNA sense strand
cuaaaagaugugugugaaa

SEQ ID NO: 2645129 - RNA, 19 nt, Homo sapiens
  misc_RNA (1)...(19): siRNA sense strand
gaacaaauaaugacccgaa

SEQ ID NO: 2645130 - RNA, 19 nt, Homo sapiens
  misc_RNA (1)...(19): siRNA sense strand
cugaacugaugaugguaau

SEQ ID NO: 2645131 - RNA, 19 nt, Homo sapiens
  misc_RNA (1)...(19): siRNA sense strand
ggagagagcuguuggaucg

SEQ ID NO: 2645132 - RNA, 19 nt, Homo sapiens
  misc_RNA (1)...(19): siRNA sense strand
gaauauugagugaaggcca

SEQ ID NO: 2645133 - RNA, 19 nt, Homo sapiens
  misc_RNA (1)...(19): siRNA sense strand
gugaucuaauucaggagaa

SEQ ID NO: 2645134 - RNA, 19 nt, Homo sapiens
  misc_RNA (1)...(19): siRNA sense strand
ggcuaaaagauguguguga

SEQ ID NO: 2645135 - RNA, 19 nt, Homo sapiens
  misc_RNA (1)...(19): siRNA sense strand
gaugaugguaauugcucaa

SEQ ID NO: 2645136 - RNA, 19 nt, Homo sapiens
  misc_RNA (1)...(19): siRNA sense strand
ugguaauugcucaagagaa

SEQ ID NO: 2645137 - RNA, 19 nt, Homo sapiens
  misc_RNA (1)...(19): siRNA sense strand
gcuguuggaucguggagga

SEQ ID NO: 2645138 - RNA, 19 nt, Homo sapiens
  misc_RNA (1)...(19): siRNA sense strand
gugaaauuugagaauggaa

SEQ ID NO: 2645139 - RNA, 19 nt, Homo sapiens
  misc_RNA (1)...(19): siRNA sense strand
aggagaaacuuguugcacu

SEQ ID NO: 2645140 - RNA, 19 nt, Homo sapiens
  misc_RNA (1)...(19): siRNA sense strand
auaaugaguuccuggagca

SEQ ID NO: 2645141 - RNA, 19 nt, Homo sapiens
  misc_RNA (1)...(19): siRNA sense strand
gucagaugcagcagaguuu

SEQ ID NO: 2645142 - RNA, 19 nt, Homo sapiens
  misc_RNA (1)...(19): siRNA sense strand
guuugggaggauuggcuaa

SEQ ID NO: 2645143 - RNA, 19 nt, Homo sapiens
  misc_RNA (1)...(19): siRNA sense strand
acugaacugaugaugguaa

SEQ ID NO: 2645144 - RNA, 19 nt, Homo sapiens
  misc_RNA (1)...(19): siRNA sense strand
ggguagagcagauugucca

SEQ ID NO: 2645145 - RNA, 19 nt, Homo sapiens
  misc_RNA (1)...(19): siRNA sense strand
agugaaggccaguuuggua

SEQ ID NO: 2645146 - RNA, 19 nt, Homo sapiens
  misc_RNA (1)...(19): siRNA sense strand
auaaagaucuggucccuga

SEQ ID NO: 2645147 - RNA, 19 nt, Homo sapiens
  misc_RNA (1)...(19): siRNA sense strand
gccugugaaauuugagaau

SEQ ID NO: 2645148 - RNA, 19 nt, Homo sapiens
  misc_RNA (1)...(19): siRNA sense strand
ucuucaaggacgaggagaa

SEQ ID NO: 2645149 - RNA, 19 nt, Homo sapiens
  misc_RNA (1)...(19): siRNA sense strand
ggacacuggugguggagga

SEQ ID NO: 2645150 - RNA, 19 nt, Homo sapiens
  misc_RNA (1)...(19): siRNA sense strand
ggguguauuacgagucaaa

SEQ ID NO: 2645151 - RNA, 19 nt, Homo sapiens
  misc_RNA (1)...(19): siRNA sense strand
ggugugaagcugcggguga

SEQ ID NO: 2645152 - RNA, 19 nt, Homo sapiens
  misc_RNA (1)...(19): siRNA sense strand
gcucacaaagcaugggaca

SEQ ID NO: 2645153 - RNA, 19 nt, Homo sapiens
  misc_RNA (1)...(19): siRNA sense strand
caucagaccgcgaccgcaa

SEQ ID NO: 2645154 - RNA, 19 nt, Homo sapiens
  misc_RNA (1)...(19): siRNA sense strand
cgccugaacucgcuggcua

SEQ ID NO: 2645155 - RNA, 19 nt, Homo sapiens
  misc_RNA (1)...(19): siRNA sense strand
agucaaaggcccacgugca

SEQ ID NO: 2645156 - RNA, 19 nt, Homo sapiens
  misc_RNA (1)...(19): siRNA sense strand
ccuaagaccuucuggguga

SEQ ID NO: 2645157 - RNA, 19 nt, Homo sapiens
  misc_RNA (1)...(19): siRNA sense strand
gcuccauguucgagagaca

SEQ ID NO: 2645158 - RNA, 19 nt, Homo sapiens
  misc_RNA (1)...(19): siRNA sense strand
gcugcuacgugaugggcaa

SEQ ID NO: 2645159 - RNA, 19 nt, Homo sapiens
  misc_RNA (1)...(19): siRNA sense strand
ccauauuggcagagauguu

SEQ ID NO: 2645160 - RNA, 19 nt, Homo sapiens
  misc_RNA (1)...(19): siRNA sense strand
guauagagcagaagggucu

SEQ ID NO: 2645161 - RNA, 19 nt, Homo sapiens
  misc_RNA (1)...(19): siRNA sense strand
aggcagacgaugaugguau

SEQ ID NO: 2645162 - RNA, 19 nt, Homo sapiens
  misc_RNA (1)...(19): siRNA sense strand
ggugcugaccugugagcua

SEQ ID NO: 2645163 - RNA, 19 nt, Homo sapiens
  misc_RNA (1)...(19): siRNA sense strand
uggaaguggaggagagcga

SEQ ID NO: 2645164 - RNA, 19 nt, Homo sapiens
  misc_RNA (1)...(19): siRNA sense strand
cagagauguucaagggcca

SEQ ID NO: 2645165 - RNA, 19 nt, Homo sapiens
  misc_RNA (1)...(19): siRNA sense strand
aggagguggaggagaguga

SEQ ID NO: 2645166 - RNA, 19 nt, Homo sapiens
  misc_RNA (1)...(19): siRNA sense strand
ggaugugcgggcagaggaa

SEQ ID NO: 2645167 - RNA, 19 nt, Homo sapiens
  misc_RNA (1)...(19): siRNA sense strand
gguacaaggaugggcagaa

SEQ ID NO: 2645168 - RNA, 19 nt, Homo sapiens
  misc_RNA (1)...(19): siRNA sense strand
ccugugagguggaccgaga

SEQ ID NO: 2645169 - RNA, 19 nt, Homo sapiens
  misc_RNA (1)...(19): siRNA sense strand
gggcauuaagccugagagu

SEQ ID NO: 2645170 - RNA, 19 nt, Homo sapiens
  misc_RNA (1)...(19): siRNA sense strand
gggcagaagguggaggaga

SEQ ID NO: 2645171 - RNA, 19 nt, Homo sapiens
  misc_RNA (1)...(19): siRNA sense strand
agaagguggaggagagcga

SEQ ID NO: 2645172 - RNA, 19 nt, Homo sapiens
  misc_RNA (1)...(19): siRNA sense strand
gagaggaggugguggagag

SEQ ID NO: 2645173 - RNA, 19 nt, Homo sapiens
  misc_RNA (1)...(19): siRNA sense strand
gcauuaagccugagagugg

SEQ ID NO: 2645174 - RNA, 19 nt, Homo sapiens
  misc_RNA (1)...(19): siRNA sense strand
ggcugcugguagagggcaa

SEQ ID NO: 2645175 - RNA, 19 nt, Homo sapiens
  misc_RNA (1)...(19): siRNA sense strand
ggcugaaggcagacgauga

SEQ ID NO: 2645176 - RNA, 19 nt, Homo sapiens
  misc_RNA (1)...(19): siRNA sense strand
ggcagaagguggaggagag

SEQ ID NO: 2645177 - RNA, 19 nt, Homo sapiens
  misc_RNA (1)...(19): siRNA sense strand
caggaagggaagaaacaca

SEQ ID NO: 2645178 - RNA, 19 nt, Homo sapiens
  misc_RNA (1)...(19): siRNA sense strand
cuguaguggugugggagaa

SEQ ID NO: 2645179 - RNA, 19 nt, Homo sapiens
  misc_RNA (1)...(19): siRNA sense strand
gcaccaagccugagagugg

SEQ ID NO: 2645180 - RNA, 19 nt, Homo sapiens
  misc_RNA (1)...(19): siRNA sense strand
acacacggcugcugguaga

SEQ ID NO: 2645181 - RNA, 19 nt, Homo sapiens
  misc_RNA (1)...(19): siRNA sense strand
ggccaacgucacagucaaa

SEQ ID NO: 2645182 - RNA, 19 nt, Homo sapiens
  misc_RNA (1)...(19): siRNA sense strand
cagaaugguucaagccgca

SEQ ID NO: 2645183 - RNA, 19 nt, Homo sapiens
  misc_RNA (1)...(19): siRNA sense strand
acuucguggugcuggagaa

SEQ ID NO: 2645184 - RNA, 19 nt, Homo sapiens
  misc_RNA (1)...(19): siRNA sense strand
augcagggaccgugacuuu

SEQ ID NO: 2645185 - RNA, 19 nt, Homo sapiens
  misc_RNA (1)...(19): siRNA sense strand
ccugggagaaggacgggaa

SEQ ID NO: 2645186 - RNA, 19 nt, Homo sapiens
  misc_RNA (1)...(19): siRNA sense strand
uacuggaaguggaggcauu

SEQ ID NO: 2645187 - RNA, 19 nt, Homo sapiens
  misc_RNA (1)...(19): siRNA sense strand
ccucggaacgccugagcuu

SEQ ID NO: 2645188 - RNA, 19 nt, Homo sapiens
  misc_RNA (1)...(19): siRNA sense strand
ggggaagagcucaagagua

SEQ ID NO: 2645189 - RNA, 19 nt, Homo sapiens
  misc_RNA (1)...(19): siRNA sense strand
gcugauguuaccugggaga

SEQ ID NO: 2645190 - RNA, 19 nt, Homo sapiens
  misc_RNA (1)...(19): siRNA sense strand
gguaccguauagagcagaa

SEQ ID NO: 2645191 - RNA, 19 nt, Homo sapiens
  misc_RNA (1)...(19): siRNA sense strand
gaccaaggauggagaggag

SEQ ID NO: 2645192 - RNA, 19 nt, Homo sapiens
  misc_RNA (1)...(19): siRNA sense strand
ccgacaggaagggaagaaa

SEQ ID NO: 2645193 - RNA, 19 nt, Homo sapiens
  misc_RNA (1)...(19): siRNA sense strand
cagaggaaggccaggaugu

SEQ ID NO: 2645194 - RNA, 19 nt, Homo sapiens
  misc_RNA (1)...(19): siRNA sense strand
cgacaggaagggaagaaac

SEQ ID NO: 2645195 - RNA, 19 nt, Homo sapiens
  misc_RNA (1)...(19): siRNA sense strand
accuagagcugguggugca

SEQ ID NO: 2645196 - RNA, 19 nt, Homo sapiens
  misc_RNA (1)...(19): siRNA sense strand
cagcuacguucgagugcga

SEQ ID NO: 2645197 - RNA, 19 nt, Homo sapiens
  misc_RNA (1)...(19): siRNA sense strand
cugcacagucagcggacau

SEQ ID NO: 2645198 - RNA, 19 nt, Homo sapiens
  misc_RNA (1)...(19): siRNA sense strand
ggcuggaaguggaggcauc

SEQ ID NO: 2645199 - RNA, 19 nt, Homo sapiens
  misc_RNA (1)...(19): siRNA sense strand
ccuauuugaaagagaagaa

SEQ ID NO: 2645200 - RNA, 19 nt, Homo sapiens
  misc_RNA (1)...(19): siRNA sense strand
aguucagagccuaaaguaa

SEQ ID NO: 2645201 - RNA, 19 nt, Homo sapiens
  misc_RNA (1)...(19): siRNA sense strand
acgccgaagacaagaagaa

SEQ ID NO: 2645202 - RNA, 19 nt, Homo sapiens
  misc_RNA (1)...(19): siRNA sense strand
cucccaaaccgaagcgaaa

SEQ ID NO: 2645203 - RNA, 19 nt, Homo sapiens
  misc_RNA (1)...(19): siRNA sense strand
ggaaggaggacgaugacca

SEQ ID NO: 2645204 - RNA, 19 nt, Homo sapiens
  misc_RNA (1)...(19): siRNA sense strand
ugagaggacugaagcguca

SEQ ID NO: 2645205 - RNA, 19 nt, Homo sapiens
  misc_RNA (1)...(19): siRNA sense strand
gaggaagacccuuuggaca

SEQ ID NO: 2645206 - RNA, 19 nt, Homo sapiens
  misc_RNA (1)...(19): siRNA sense strand
ccgaagacaagaagaagca

SEQ ID NO: 2645207 - RNA, 19 nt, Homo sapiens
  misc_RNA (1)...(19): siRNA sense strand
gccuaaaguaagcugcaaa

SEQ ID NO: 2645208 - RNA, 19 nt, Homo sapiens
  misc_RNA (1)...(19): siRNA sense strand
ccuaaaguaagcugcaaau

SEQ ID NO: 2645209 - RNA, 19 nt, Homo sapiens
  misc_RNA (1)...(19): siRNA sense strand
aaggaaguuacgugggcaa

SEQ ID NO: 2645210 - RNA, 19 nt, Homo sapiens
  misc_RNA (1)...(19): siRNA sense strand
agaaaucaacagaggaacu

SEQ ID NO: 2645211 - RNA, 19 nt, Homo sapiens
  misc_RNA (1)...(19): siRNA sense strand
cgucagauauugcucgaga

SEQ ID NO: 2645212 - RNA, 19 nt, Homo sapiens
  misc_RNA (1)...(19): siRNA sense strand
gaggaaaugaaguacccua

SEQ ID NO: 2645213 - RNA, 19 nt, Homo sapiens
  misc_RNA (1)...(19): siRNA sense strand
ggaaugggauggaacacca

SEQ ID NO: 2645214 - RNA, 19 nt, Homo sapiens
  misc_RNA (1)...(19): siRNA sense strand
agccaguaagagcgggaaa

SEQ ID NO: 2645215 - RNA, 19 nt, Homo sapiens
  misc_RNA (1)...(19): siRNA sense strand
ccgucuacgaggaaaugaa

SEQ ID NO: 2645216 - RNA, 19 nt, Homo sapiens
  misc_RNA (1)...(19): siRNA sense strand
agguggagaaguagggcga

SEQ ID NO: 2645217 - RNA, 19 nt, Homo sapiens
  misc_RNA (1)...(19): siRNA sense strand
aagaagcaauaaagcgcau

SEQ ID NO: 2645218 - RNA, 19 nt, Homo sapiens
  misc_RNA (1)...(19): siRNA sense strand
cugaaaguccgaagccaca

SEQ ID NO: 2645219 - RNA, 19 nt, Homo sapiens
  misc_RNA (1)...(19): siRNA sense strand
caccagucgacuaggaaga

SEQ ID NO: 2645220 - RNA, 19 nt, Homo sapiens
  misc_RNA (1)...(19): siRNA sense strand
gcacagacgaugacagcag

SEQ ID NO: 2645221 - RNA, 19 nt, Homo sapiens
  misc_RNA (1)...(19): siRNA sense strand
aggccgucuacgaggaaau

SEQ ID NO: 2645222 - RNA, 19 nt, Homo sapiens
  misc_RNA (1)...(19): siRNA sense strand
aauaaagcgcauaggugga

SEQ ID NO: 2645223 - RNA, 19 nt, Homo sapiens
  misc_RNA (1)...(19): siRNA sense strand
caacaaggaaagaggccac

SEQ ID NO: 2645224 - RNA, 19 nt, Homo sapiens
  misc_RNA (1)...(19): siRNA sense strand
aggaauagcaggagaggau

SEQ ID NO: 2645225 - RNA, 19 nt, Homo sapiens
  misc_RNA (1)...(19): siRNA sense strand
agggagaggauuugaguua

SEQ ID NO: 2645226 - RNA, 19 nt, Homo sapiens
  misc_RNA (1)...(19): siRNA sense strand
cuuaaaggacagucagaaa

SEQ ID NO: 2645227 - RNA, 19 nt, Homo sapiens
  misc_RNA (1)...(19): siRNA sense strand
ucuugaaacuggaggauga

SEQ ID NO: 2645228 - RNA, 19 nt, Homo sapiens
  misc_RNA (1)...(19): siRNA sense strand
uggaauugcaacaaggaaa

SEQ ID NO: 2645229 - RNA, 19 nt, Homo sapiens
  misc_RNA (1)...(19): siRNA sense strand
ccaaagugaauuaguagaa

SEQ ID NO: 2645230 - RNA, 19 nt, Homo sapiens
  misc_RNA (1)...(19): siRNA sense strand
cagaaaaugucgucaggaa

SEQ ID NO: 2645231 - RNA, 19 nt, Homo sapiens
  misc_RNA (1)...(19): siRNA sense strand
gcaagagggaacagaccaa

SEQ ID NO: 2645232 - RNA, 19 nt, Homo sapiens
  misc_RNA (1)...(19): siRNA sense strand
aggaaagcgagguggauga

SEQ ID NO: 2645233 - RNA, 19 nt, Homo sapiens
  misc_RNA (1)...(19): siRNA sense strand
uugaagaggaagaaagaga

SEQ ID NO: 2645234 - RNA, 19 nt, Homo sapiens
  misc_RNA (1)...(19): siRNA sense strand
ggagaaagccgucccacua

SEQ ID NO: 2645235 - RNA, 19 nt, Homo sapiens
  misc_RNA (1)...(19): siRNA sense strand
ccuaauaccuacagcagca

SEQ ID NO: 2645236 - RNA, 19 nt, Homo sapiens
  misc_RNA (1)...(19): siRNA sense strand
agugagaucaagaggaaga

SEQ ID NO: 2645237 - RNA, 19 nt, Homo sapiens
  misc_RNA (1)...(19): siRNA sense strand
ccuugaagaggaagaaaga

SEQ ID NO: 2645238 - RNA, 19 nt, Homo sapiens
  misc_RNA (1)...(19): siRNA sense strand
gcaacaggcgugccggaaa

SEQ ID NO: 2645239 - RNA, 19 nt, Homo sapiens
  misc_RNA (1)...(19): siRNA sense strand
auucaugaaacgugggcua

SEQ ID NO: 2645240 - RNA, 19 nt, Homo sapiens
  misc_RNA (1)...(19): siRNA sense strand
ccuugauaccagagaugua

SEQ ID NO: 2645241 - RNA, 19 nt, Homo sapiens
  misc_RNA (1)...(19): siRNA sense strand
ggaauugcaacaaggaaaa

SEQ ID NO: 2645242 - RNA, 19 nt, Homo sapiens
  misc_RNA (1)...(19): siRNA sense strand
cuggacaccuuaauggaaa

SEQ ID NO: 2645243 - RNA, 19 nt, Homo sapiens
  misc_RNA (1)...(19): siRNA sense strand
gagaaugaaugcagagccu

SEQ ID NO: 2645244 - RNA, 19 nt, Homo sapiens
  misc_RNA (1)...(19): siRNA sense strand
gcaaaaugcaugaggagca

SEQ ID NO: 2645245 - RNA, 19 nt, Homo sapiens
  misc_RNA (1)...(19): siRNA sense strand
ugaaaggaauagcaggaga

SEQ ID NO: 2645246 - RNA, 19 nt, Homo sapiens
  misc_RNA (1)...(19): siRNA sense strand
agacaucacuggaaacaga

SEQ ID NO: 2645247 - RNA, 19 nt, Homo sapiens
  misc_RNA (1)...(19): siRNA sense strand
aaagagaagcuguggggaa

SEQ ID NO: 2645248 - RNA, 19 nt, Homo sapiens
  misc_RNA (1)...(19): siRNA sense strand
cguucaagaagaugaguca

SEQ ID NO: 2645249 - RNA, 19 nt, Homo sapiens
  misc_RNA (1)...(19): siRNA sense strand
caacaggcgugccggaaaa

SEQ ID NO: 2645250 - RNA, 19 nt, Homo sapiens
  misc_RNA (1)...(19): siRNA sense strand
agguacaugcugagggaca

SEQ ID NO: 2645251 - RNA, 19 nt, Homo sapiens
  misc_RNA (1)...(19): siRNA sense strand
aagacuugcuugaaagaga

SEQ ID NO: 2645252 - RNA, 19 nt, Homo sapiens
  misc_RNA (1)...(19): siRNA sense strand
aaagagacaucacuggaaa

SEQ ID NO: 2645253 - RNA, 19 nt, Homo sapiens
  misc_RNA (1)...(19): siRNA sense strand
uggaaaguaaacagcuaaa

SEQ ID NO: 2645254 - RNA, 19 nt, Homo sapiens
  misc_RNA (1)...(19): siRNA sense strand
agaggaagcagaagggcau

SEQ ID NO: 2645255 - RNA, 19 nt, Homo sapiens
  misc_RNA (1)...(19): siRNA sense strand
uagcaggagaggauacaaa

SEQ ID NO: 2645256 - RNA, 19 nt, Homo sapiens
  misc_RNA (1)...(19): siRNA sense strand
ucaacgaaguucaagucaa

SEQ ID NO: 2645257 - RNA, 19 nt, Homo sapiens
  misc_RNA (1)...(19): siRNA sense strand
gauggaaaaugaagggaga

SEQ ID NO: 2645258 - RNA, 19 nt, Homo sapiens
  misc_RNA (1)...(19): siRNA sense strand
ccaacaaccaaaagaaaau

SEQ ID NO: 2645259 - RNA, 19 nt, Homo sapiens
  misc_RNA (1)...(19): siRNA sense strand
cauuacagacuuugcggaa

SEQ ID NO: 2645260 - RNA, 19 nt, Homo sapiens
  misc_RNA (1)...(19): siRNA sense strand
gauugaaacagaucagaga

SEQ ID NO: 2645261 - RNA, 19 nt, Homo sapiens
  misc_RNA (1)...(19): siRNA sense strand
agaggaagaaagagagcca

SEQ ID NO: 2645262 - RNA, 19 nt, Homo sapiens
  misc_RNA (1)...(19): siRNA sense strand
gaaacagaucagagagaag

SEQ ID NO: 2645263 - RNA, 19 nt, Homo sapiens
  misc_RNA (1)...(19): siRNA sense strand
gagauguaccagaggcuga

SEQ ID NO: 2645264 - RNA, 19 nt, Homo sapiens
  misc_RNA (1)...(19): siRNA sense strand
caggaaaacagaauugaaa

SEQ ID NO: 2645265 - RNA, 19 nt, Homo sapiens
  misc_RNA (1)...(19): siRNA sense strand
ggaaagugggugauaucuu

SEQ ID NO: 2645266 - RNA, 19 nt, Homo sapiens
  misc_RNA (1)...(19): siRNA sense strand
cagaaggaugggagacuga

SEQ ID NO: 2645267 - RNA, 19 nt, Homo sapiens
  misc_RNA (1)...(19): siRNA sense strand
uggguuagccucuggaaau

SEQ ID NO: 2645268 - RNA, 19 nt, Homo sapiens
  misc_RNA (1)...(19): siRNA sense strand
ccagaaaaccuaacaaaga

SEQ ID NO: 2645269 - RNA, 19 nt, Homo sapiens
  misc_RNA (1)...(19): siRNA sense strand
gaaaaugaagggagaggau

SEQ ID NO: 2645270 - RNA, 19 nt, Homo sapiens
  misc_RNA (1)...(19): siRNA sense strand
ggagaggauuugaguuacu

SEQ ID NO: 2645271 - RNA, 19 nt, Homo sapiens
  misc_RNA (1)...(19): siRNA sense strand
uguggaugaugcagaggaa

SEQ ID NO: 2645272 - RNA, 19 nt, Homo sapiens
  misc_RNA (1)...(19): siRNA sense strand
cuggaaacagagaagcuua

SEQ ID NO: 2645273 - RNA, 19 nt, Homo sapiens
  misc_RNA (1)...(19): siRNA sense strand
cagaggaugcccugccaaa

SEQ ID NO: 2645274 - RNA, 19 nt, Homo sapiens
  misc_RNA (1)...(19): siRNA sense strand
auauaaaugucucagccaa

SEQ ID NO: 2645275 - RNA, 19 nt, Homo sapiens
  misc_RNA (1)...(19): siRNA sense strand
caaacaaagcauccagaca

SEQ ID NO: 2645276 - RNA, 19 nt, Homo sapiens
  misc_RNA (1)...(19): siRNA sense strand
guggaauggaauugcaaca

SEQ ID NO: 2645277 - RNA, 19 nt, Homo sapiens
  misc_RNA (1)...(19): siRNA sense strand
caucagaaggagggagaca

SEQ ID NO: 2645278 - RNA, 19 nt, Homo sapiens
  misc_RNA (1)...(19): siRNA sense strand
gaggaguucuacagguaca

SEQ ID NO: 2645279 - RNA, 19 nt, Homo sapiens
  misc_RNA (1)...(19): siRNA sense strand
ucacuuugcucgagggaag

SEQ ID NO: 2645280 - RNA, 19 nt, Homo sapiens
  misc_RNA (1)...(19): siRNA sense strand
cuugguauauccaggagaa

SEQ ID NO: 2645281 - RNA, 19 nt, Homo sapiens
  misc_RNA (1)...(19): siRNA sense strand
ggagccugcuggugaucaa

SEQ ID NO: 2645282 - RNA, 19 nt, Homo sapiens
  misc_RNA (1)...(19): siRNA sense strand
ccaaugugcaagagggaac

SEQ ID NO: 2645283 - RNA, 19 nt, Homo sapiens
  misc_RNA (1)...(19): siRNA sense strand
caagcagagaagugugcaa

SEQ ID NO: 2645284 - RNA, 19 nt, Homo sapiens
  misc_RNA (1)...(19): siRNA sense strand
ggaaagacucuguuaccga

SEQ ID NO: 2645285 - RNA, 19 nt, Homo sapiens
  misc_RNA (1)...(19): siRNA sense strand
ggcucuuggaacugggaua

SEQ ID NO: 2645286 - RNA, 19 nt, Homo sapiens
  misc_RNA (1)...(19): siRNA sense strand
guaaacagcuaaagggagc

SEQ ID NO: 2645287 - RNA, 19 nt, Homo sapiens
  misc_RNA (1)...(19): siRNA sense strand
uggaagacaaauacaucaa

SEQ ID NO: 2645288 - RNA, 19 nt, Homo sapiens
  misc_RNA (1)...(19): siRNA sense strand
uugaaacagaucagagaga

SEQ ID NO: 2645289 - RNA, 19 nt, Homo sapiens
  misc_RNA (1)...(19): siRNA sense strand
ccagcuugccaaugaggaa

SEQ ID NO: 2645290 - RNA, 19 nt, Homo sapiens
  misc_RNA (1)...(19): siRNA sense strand
gaaagagacaucacuggaa

SEQ ID NO: 2645291 - RNA, 19 nt, Homo sapiens
  misc_RNA (1)...(19): siRNA sense strand
ccaagagaacagaaagaaa

SEQ ID NO: 2645292 - RNA, 19 nt, Homo sapiens
  misc_RNA (1)...(19): siRNA sense strand
gagcauaagaacaguaauu

SEQ ID NO: 2645293 - RNA, 19 nt, Homo sapiens
  misc_RNA (1)...(19): siRNA sense strand
uugaagaagucauggaaaa

SEQ ID NO: 2645294 - RNA, 19 nt, Homo sapiens
  misc_RNA (1)...(19): siRNA sense strand
caagagaacagaaagaaau

SEQ ID NO: 2645295 - RNA, 19 nt, Homo sapiens
  misc_RNA (1)...(19): siRNA sense strand
aggagaaacaagagacuga

SEQ ID NO: 2645296 - RNA, 19 nt, Homo sapiens
  misc_RNA (1)...(19): siRNA sense strand
uuaaaaucccagaggaaaa

SEQ ID NO: 2645297 - RNA, 19 nt, Homo sapiens
  misc_RNA (1)...(19): siRNA sense strand
gaaacuuacaagacggcua

SEQ ID NO: 2645298 - RNA, 19 nt, Homo sapiens
  misc_RNA (1)...(19): siRNA sense strand
uggaagaauuuagggaaaa

SEQ ID NO: 2645299 - RNA, 19 nt, Homo sapiens
  misc_RNA (1)...(19): siRNA sense strand
cagcuacagaacagacaaa

SEQ ID NO: 2645300 - RNA, 19 nt, Homo sapiens
  misc_RNA (1)...(19): siRNA sense strand
uugaucaucuggagcauaa

SEQ ID NO: 2645301 - RNA, 19 nt, Homo sapiens
  misc_RNA (1)...(19): siRNA sense strand
cgauguucuugaugauaau

SEQ ID NO: 2645302 - RNA, 19 nt, Homo sapiens
  misc_RNA (1)...(19): siRNA sense strand
uugaauauuugguugguga

SEQ ID NO: 2645303 - RNA, 19 nt, Homo sapiens
  misc_RNA (1)...(19): siRNA sense strand
agagcagacagaugacaaa

SEQ ID NO: 2645304 - RNA, 19 nt, Homo sapiens
  misc_RNA (1)...(19): siRNA sense strand
cuugaagaagucauggaaa

SEQ ID NO: 2645305 - RNA, 19 nt, Homo sapiens
  misc_RNA (1)...(19): siRNA sense strand
gguuggugaugguccacaa

SEQ ID NO: 2645306 - RNA, 19 nt, Homo sapiens
  misc_RNA (1)...(19): siRNA sense strand
cagagcagacagaugacaa

SEQ ID NO: 2645307 - RNA, 19 nt, Homo sapiens
  misc_RNA (1)...(19): siRNA sense strand
acacgauguucuugaugau

SEQ ID NO: 2645308 - RNA, 19 nt, Homo sapiens
  misc_RNA (1)...(19): siRNA sense strand
aaauucaagcauuggaaga

SEQ ID NO: 2645309 - RNA, 19 nt, Homo sapiens
  misc_RNA (1)...(19): siRNA sense strand
acaagagauucgucagcga

SEQ ID NO: 2645310 - RNA, 19 nt, Homo sapiens
  misc_RNA (1)...(19): siRNA sense strand
ucaaagaaagcaaaggagu

SEQ ID NO: 2645311 - RNA, 19 nt, Homo sapiens
  misc_RNA (1)...(19): siRNA sense strand
caaagaaagcaaaggagug

SEQ ID NO: 2645312 - RNA, 19 nt, Homo sapiens
  misc_RNA (1)...(19): siRNA sense strand
augaagcauuggaugauuu

SEQ ID NO: 2645313 - RNA, 19 nt, Homo sapiens
  misc_RNA (1)...(19): siRNA sense strand
uggcuuugaaggaagaauu

SEQ ID NO: 2645314 - RNA, 19 nt, Homo sapiens
  misc_RNA (1)...(19): siRNA sense strand
ugacaaaauaccagcuaca

SEQ ID NO: 2645315 - RNA, 19 nt, Homo sapiens
  misc_RNA (1)...(19): siRNA sense strand
acucaaagaaagcaaagga

SEQ ID NO: 2645316 - RNA, 19 nt, Homo sapiens
  misc_RNA (1)...(19): siRNA sense strand
agaagaggcagguggugga

SEQ ID NO: 2645317 - RNA, 19 nt, Homo sapiens
  misc_RNA (1)...(19): siRNA sense strand
caucuggagcauaagaaca

SEQ ID NO: 2645318 - RNA, 19 nt, Homo sapiens
  misc_RNA (1)...(19): siRNA sense strand
uggaaagaguggaacgaga

SEQ ID NO: 2645319 - RNA, 19 nt, Homo sapiens
  misc_RNA (1)...(19): siRNA sense strand
uguacaaaguggaggcuga

SEQ ID NO: 2645320 - RNA, 19 nt, Homo sapiens
  misc_RNA (1)...(19): siRNA sense strand
ugccagaaguggagcgaga

SEQ ID NO: 2645321 - RNA, 19 nt, Homo sapiens
  misc_RNA (1)...(19): siRNA sense strand
ggaagaagacccucggaca

SEQ ID NO: 2645322 - RNA, 19 nt, Homo sapiens
  misc_RNA (1)...(19): siRNA sense strand
ggaauaaucaagcugggaa

SEQ ID NO: 2645323 - RNA, 19 nt, Homo sapiens
  misc_RNA (1)...(19): siRNA sense strand
cuaguaaaccugagggcca

SEQ ID NO: 2645324 - RNA, 19 nt, Homo sapiens
  misc_RNA (1)...(19): siRNA sense strand
agauccaacaggagaugaa

SEQ ID NO: 2645325 - RNA, 19 nt, Homo sapiens
  misc_RNA (1)...(19): siRNA sense strand
ggaguuugggagaugguau

SEQ ID NO: 2645326 - RNA, 19 nt, Homo sapiens
  misc_RNA (1)...(19): siRNA sense strand
acaagaagauuaaagugga

SEQ ID NO: 2645327 - RNA, 19 nt, Homo sapiens
  misc_RNA (1)...(19): siRNA sense strand
caucaugagcccuggucuu

SEQ ID NO: 2645328 - RNA, 19 nt, Homo sapiens
  misc_RNA (1)...(19): siRNA sense strand
ccauuuaugacgagaucca

SEQ ID NO: 2645329 - RNA, 19 nt, Homo sapiens
  misc_RNA (1)...(19): siRNA sense strand
uugaauaugacaacagaga

SEQ ID NO: 2645330 - RNA, 19 nt, Homo sapiens
  misc_RNA (1)...(19): siRNA sense strand
aaguggaggcugaggagga

SEQ ID NO: 2645331 - RNA, 19 nt, Homo sapiens
  misc_RNA (1)...(19): siRNA sense strand
uggacguggcugaauauaa

SEQ ID NO: 2645332 - RNA, 19 nt, Homo sapiens
  misc_RNA (1)...(19): siRNA sense strand
aguuuguccuggugcggaa

SEQ ID NO: 2645333 - RNA, 19 nt, Homo sapiens
  misc_RNA (1)...(19): siRNA sense strand
auaugacaacagagaagaa

SEQ ID NO: 2645334 - RNA, 19 nt, Homo sapiens
  misc_RNA (1)...(19): siRNA sense strand
gugccaggaguuugggaga

SEQ ID NO: 2645335 - RNA, 19 nt, Homo sapiens
  misc_RNA (1)...(19): siRNA sense strand
ccagagcaguuaagccaga

SEQ ID NO: 2645336 - RNA, 19 nt, Homo sapiens
  misc_RNA (1)...(19): siRNA sense strand
cugaagagggccagugugu

SEQ ID NO: 2645337 - RNA, 19 nt, Homo sapiens
  misc_RNA (1)...(19): siRNA sense strand
gaggaggagucaaggcauc

SEQ ID NO: 2645338 - RNA, 19 nt, Homo sapiens
  misc_RNA (1)...(19): siRNA sense strand
cagaggagaacgacagcga

SEQ ID NO: 2645339 - RNA, 19 nt, Homo sapiens
  misc_RNA (1)...(19): siRNA sense strand
ccuuagaagcccuggggau

SEQ ID NO: 2645340 - RNA, 19 nt, Homo sapiens
  misc_RNA (1)...(19): siRNA sense strand
aauauaaggacgaggagcu

SEQ ID NO: 2645341 - RNA, 19 nt, Homo sapiens
  misc_RNA (1)...(19): siRNA sense strand
acgaggagcugcugaccga

SEQ ID NO: 2645342 - RNA, 19 nt, Homo sapiens
  misc_RNA (1)...(19): siRNA sense strand
gaauaaucaagcugggaag

SEQ ID NO: 2645343 - RNA, 19 nt, Homo sapiens
  misc_RNA (1)...(19): siRNA sense strand
aggaacugcucaaagagau

SEQ ID NO: 2645344 - RNA, 19 nt, Homo sapiens
  misc_RNA (1)...(19): siRNA sense strand
cguccaaugcauuuaccaa

SEQ ID NO: 2645345 - RNA, 19 nt, Homo sapiens
  misc_RNA (1)...(19): siRNA sense strand
caguuaagccagagccaac

SEQ ID NO: 2645346 - RNA, 19 nt, Homo sapiens
  misc_RNA (1)...(19): siRNA sense strand
cugaauauaaggacgagga

SEQ ID NO: 2645347 - RNA, 19 nt, Homo sapiens
  misc_RNA (1)...(19): siRNA sense strand
gaugagagggagcggagca

SEQ ID NO: 2645348 - RNA, 19 nt, Homo sapiens
  misc_RNA (1)...(19): siRNA sense strand
agacaaaagaccuggagga

SEQ ID NO: 2645349 - RNA, 19 nt, Homo sapiens
  misc_RNA (1)...(19): siRNA sense strand
ggucaugagagucacgaca

SEQ ID NO: 2645350 - RNA, 19 nt, Homo sapiens
  misc_RNA (1)...(19): siRNA sense strand
cugucaaccagcaguggaa

SEQ ID NO: 2645351 - RNA, 19 nt, Homo sapiens
  misc_RNA (1)...(19): siRNA sense strand
gcuacgggauguauggcuu

SEQ ID NO: 2645352 - RNA, 19 nt, Homo sapiens
  misc_RNA (1)...(19): siRNA sense strand
cgucaucgccauaagcaca

SEQ ID NO: 2645353 - RNA, 19 nt, Homo sapiens
  misc_RNA (1)...(19): siRNA sense strand
ggcagaugcuugauggcua

SEQ ID NO: 2645354 - RNA, 19 nt, Homo sapiens
  misc_RNA (1)...(19): siRNA sense strand
gggacuucgcugugagaca

SEQ ID NO: 2645355 - RNA, 19 nt, Homo sapiens
  misc_RNA (1)...(19): siRNA sense strand
gcgagauggauguggacga

SEQ ID NO: 2645356 - RNA, 19 nt, Homo sapiens
  misc_RNA (1)...(19): siRNA sense strand
gcaccugcaaagugggcua

SEQ ID NO: 2645357 - RNA, 19 nt, Homo sapiens
  misc_RNA (1)...(19): siRNA sense strand
acugugagcuggagaggga

SEQ ID NO: 2645358 - RNA, 19 nt, Homo sapiens
  misc_RNA (1)...(19): siRNA sense strand
gugcagaaauggagggucc

SEQ ID NO: 2645359 - RNA, 19 nt, Homo sapiens
  misc_RNA (1)...(19): siRNA sense strand
cccucaagauggagagagu

SEQ ID NO: 2645360 - RNA, 19 nt, Homo sapiens
  misc_RNA (1)...(19): siRNA sense strand
gagucagacacuggagaaa

SEQ ID NO: 2645361 - RNA, 19 nt, Homo sapiens
  misc_RNA (1)...(19): siRNA sense strand
guguugaccuaguggggaa

SEQ ID NO: 2645362 - RNA, 19 nt, Homo sapiens
  misc_RNA (1)...(19): siRNA sense strand
cagagagcuucuucggcua

SEQ ID NO: 2645363 - RNA, 19 nt, Homo sapiens
  misc_RNA (1)...(19): siRNA sense strand
aguaacaacaagaaugaca

SEQ ID NO: 2645364 - RNA, 19 nt, Homo sapiens
  misc_RNA (1)...(19): siRNA sense strand
gggccaggguucaaaggca

SEQ ID NO: 2645365 - RNA, 19 nt, Homo sapiens
  misc_RNA (1)...(19): siRNA sense strand
gcacaaggcuguucuccga

SEQ ID NO: 2645366 - RNA, 19 nt, Homo sapiens
  misc_RNA (1)...(19): siRNA sense strand
ucggaaacgucccuggcaa

SEQ ID NO: 2645367 - RNA, 19 nt, Homo sapiens
  misc_RNA (1)...(19): siRNA sense strand
ggcaaauacaagugugacu

SEQ ID NO: 2645368 - RNA, 19 nt, Homo sapiens
  misc_RNA (1)...(19): siRNA sense strand
cggcagaggaagagugagc

SEQ ID NO: 2645369 - RNA, 19 nt, Homo sapiens
  misc_RNA (1)...(19): siRNA sense strand
caggaaacaaaguaagagu

SEQ ID NO: 2645370 - RNA, 19 nt, Homo sapiens
  misc_RNA (1)...(19): siRNA sense strand
acaaaguaagagucagaca

SEQ ID NO: 2645371 - RNA, 19 nt, Homo sapiens
  misc_RNA (1)...(19): siRNA sense strand
cagacauggccgaggugga

SEQ ID NO: 2645372 - RNA, 19 nt, Homo sapiens
  misc_RNA (1)...(19): siRNA sense strand
acucaugacagcaggcuca

SEQ ID NO: 2645373 - RNA, 19 nt, Homo sapiens
  misc_RNA (1)...(19): siRNA sense strand
acgacugcgucacgggcaa

SEQ ID NO: 2645374 - RNA, 19 nt, Homo sapiens
  misc_RNA (1)...(19): siRNA sense strand
gggaauuacaccugcuugu

SEQ ID NO: 2645375 - RNA, 19 nt, Homo sapiens
  misc_RNA (1)...(19): siRNA sense strand
cagcaaggacaucggaaac

SEQ ID NO: 2645376 - RNA, 19 nt, Homo sapiens
  misc_RNA (1)...(19): siRNA sense strand
cugccugggaagagguaca

SEQ ID NO: 2645377 - RNA, 19 nt, Homo sapiens
  misc_RNA (1)...(19): siRNA sense strand
aggaagaagaagaggaaga

SEQ ID NO: 2645378 - RNA, 19 nt, Homo sapiens
  misc_RNA (1)...(19): siRNA sense strand
acagaagagcugagacaaa

SEQ ID NO: 2645379 - RNA, 19 nt, Homo sapiens
  misc_RNA (1)...(19): siRNA sense strand
gaagaaagaugauggcaga

SEQ ID NO: 2645380 - RNA, 19 nt, Homo sapiens
  misc_RNA (1)...(19): siRNA sense strand
caguaaucuugaugguaaa

SEQ ID NO: 2645381 - RNA, 19 nt, Homo sapiens
  misc_RNA (1)...(19): siRNA sense strand
caacauuggcacaggaaga

SEQ ID NO: 2645382 - RNA, 19 nt, Homo sapiens
  misc_RNA (1)...(19): siRNA sense strand
agacaaaaguacaaggauu

SEQ ID NO: 2645383 - RNA, 19 nt, Homo sapiens
  misc_RNA (1)...(19): siRNA sense strand
agucauagucagaagguuu

SEQ ID NO: 2645384 - RNA, 19 nt, Homo sapiens
  misc_RNA (1)...(19): siRNA sense strand
agaugaagaagguggagaa

SEQ ID NO: 2645385 - RNA, 19 nt, Homo sapiens
  misc_RNA (1)...(19): siRNA sense strand
cagcaaacacaaacguaaa

SEQ ID NO: 2645386 - RNA, 19 nt, Homo sapiens
  misc_RNA (1)...(19): siRNA sense strand
acacagaagagcugagaca

SEQ ID NO: 2645387 - RNA, 19 nt, Homo sapiens
  misc_RNA (1)...(19): siRNA sense strand
gggagaagguccugggaag

SEQ ID NO: 2645388 - RNA, 19 nt, Homo sapiens
  misc_RNA (1)...(19): siRNA sense strand
uaugagagccagugaacaa

SEQ ID NO: 2645389 - RNA, 19 nt, Homo sapiens
  misc_RNA (1)...(19): siRNA sense strand
gacaaaaguacaaggauua

SEQ ID NO: 2645390 - RNA, 19 nt, Homo sapiens
  misc_RNA (1)...(19): siRNA sense strand
cgaaagaagaauaagucau

SEQ ID NO: 2645391 - RNA, 19 nt, Homo sapiens
  misc_RNA (1)...(19): siRNA sense strand
gaggaaacacaaaggugaa

SEQ ID NO: 2645392 - RNA, 19 nt, Homo sapiens
  misc_RNA (1)...(19): siRNA sense strand
gagcaagaacagucagaga

SEQ ID NO: 2645393 - RNA, 19 nt, Homo sapiens
  misc_RNA (1)...(19): siRNA sense strand
gugaacaaauggaugguga

SEQ ID NO: 2645394 - RNA, 19 nt, Homo sapiens
  misc_RNA (1)...(19): siRNA sense strand
gcaagaacagucagagaca

SEQ ID NO: 2645395 - RNA, 19 nt, Homo sapiens
  misc_RNA (1)...(19): siRNA sense strand
ugccagaacuaaaggaaca

SEQ ID NO: 2645396 - RNA, 19 nt, Homo sapiens
  misc_RNA (1)...(19): siRNA sense strand
agaucaggcuccaggaaga

SEQ ID NO: 2645397 - RNA, 19 nt, Homo sapiens
  misc_RNA (1)...(19): siRNA sense strand
agaacuaaaggaacagaaa

SEQ ID NO: 2645398 - RNA, 19 nt, Homo sapiens
  misc_RNA (1)...(19): siRNA sense strand
gagcaaagaugaaagcacu

SEQ ID NO: 2645399 - RNA, 19 nt, Homo sapiens
  misc_RNA (1)...(19): siRNA sense strand
cgaaaacgaaagaagaaua

SEQ ID NO: 2645400 - RNA, 19 nt, Homo sapiens
  misc_RNA (1)...(19): siRNA sense strand
ggaggaaacacaaagguga

SEQ ID NO: 2645401 - RNA, 19 nt, Homo sapiens
  misc_RNA (1)...(19): siRNA sense strand
uggaaauggagcuugauua

SEQ ID NO: 2645402 - RNA, 19 nt, Homo sapiens
  misc_RNA (1)...(19): siRNA sense strand
guggagaagaugauaaaga

SEQ ID NO: 2645403 - RNA, 19 nt, Homo sapiens
  misc_RNA (1)...(19): siRNA sense strand
ccagcaaacacaaacguaa

SEQ ID NO: 2645404 - RNA, 19 nt, Homo sapiens
  misc_RNA (1)...(19): siRNA sense strand
agucgaagcaagcggagaa

SEQ ID NO: 2645405 - RNA, 19 nt, Homo sapiens
  misc_RNA (1)...(19): siRNA sense strand
ugucaaacucgaaucaaua

SEQ ID NO: 2645406 - RNA, 19 nt, Homo sapiens
  misc_RNA (1)...(19): siRNA sense strand
uggcacaggaagaggguca

SEQ ID NO: 2645407 - RNA, 19 nt, Homo sapiens
  misc_RNA (1)...(19): siRNA sense strand
agguggagaagaugauaaa

SEQ ID NO: 2645408 - RNA, 19 nt, Homo sapiens
  misc_RNA (1)...(19): siRNA sense strand
aaggaugaaacgagaagaa

SEQ ID NO: 2645409 - RNA, 19 nt, Homo sapiens
  misc_RNA (1)...(19): siRNA sense strand
cggagaagccguagcacca

SEQ ID NO: 2645410 - RNA, 19 nt, Homo sapiens
  misc_RNA (1)...(19): siRNA sense strand
caguaaagcaacaggucca

SEQ ID NO: 2645411 - RNA, 19 nt, Homo sapiens
  misc_RNA (1)...(19): siRNA sense strand
gcaagaaacgaaaacgaaa

SEQ ID NO: 2645412 - RNA, 19 nt, Homo sapiens
  misc_RNA (1)...(19): siRNA sense strand
gacagaagacacagggaga

SEQ ID NO: 2645413 - RNA, 19 nt, Homo sapiens
  misc_RNA (1)...(19): siRNA sense strand
gaugaaacgagaagaagga

SEQ ID NO: 2645414 - RNA, 19 nt, Homo sapiens
  misc_RNA (1)...(19): siRNA sense strand
gcaaagaaaacaagcugaa

SEQ ID NO: 2645415 - RNA, 19 nt, Homo sapiens
  misc_RNA (1)...(19): siRNA sense strand
gauaaagaugaaucagcua

SEQ ID NO: 2645416 - RNA, 19 nt, Homo sapiens
  misc_RNA (1)...(19): siRNA sense strand
gaagagggucagaagguga

SEQ ID NO: 2645417 - RNA, 19 nt, Homo sapiens
  misc_RNA (1)...(19): siRNA sense strand
cagaaaagacaguuaguga

SEQ ID NO: 2645418 - RNA, 19 nt, Homo sapiens
  misc_RNA (1)...(19): siRNA sense strand
ccucagaaccaggaagcaa

SEQ ID NO: 2645419 - RNA, 19 nt, Homo sapiens
  misc_RNA (1)...(19): siRNA sense strand
agaccauggugggaggaaa

SEQ ID NO: 2645420 - RNA, 19 nt, Homo sapiens
  misc_RNA (1)...(19): siRNA sense strand
gcgccguguccuagaagua

SEQ ID NO: 2645421 - RNA, 19 nt, Homo sapiens
  misc_RNA (1)...(19): siRNA sense strand
aagaacagucagagacaga

SEQ ID NO: 2645422 - RNA, 19 nt, Homo sapiens
  misc_RNA (1)...(19): siRNA sense strand
agaaagaacgaucugggaa

SEQ ID NO: 2645423 - RNA, 19 nt, Homo sapiens
  misc_RNA (1)...(19): siRNA sense strand
agaagaaggcggagagcuc

SEQ ID NO: 2645424 - RNA, 19 nt, Homo sapiens
  misc_RNA (1)...(19): siRNA sense strand
gaugaugacuauagccuca

SEQ ID NO: 2645425 - RNA, 19 nt, Homo sapiens
  misc_RNA (1)...(19): siRNA sense strand
agaugauggcagaggagau

SEQ ID NO: 2645426 - RNA, 19 nt, Homo sapiens
  misc_RNA (1)...(19): siRNA sense strand
ugaucagaguuuagaaagu

SEQ ID NO: 2645427 - RNA, 19 nt, Homo sapiens
  misc_RNA (1)...(19): siRNA sense strand
agucagaagguuucagaga

SEQ ID NO: 2645428 - RNA, 19 nt, Homo sapiens
  misc_RNA (1)...(19): siRNA sense strand
ccuagauccuggugagcca

SEQ ID NO: 2645429 - RNA, 19 nt, Homo sapiens
  misc_RNA (1)...(19): siRNA sense strand
ggcugacacagaagagaaa

SEQ ID NO: 2645430 - RNA, 19 nt, Homo sapiens
  misc_RNA (1)...(19): siRNA sense strand
agaagaagaggaagauuca

SEQ ID NO: 2645431 - RNA, 19 nt, Homo sapiens
  misc_RNA (1)...(19): siRNA sense strand
agauaaaaguggucagacu

SEQ ID NO: 2645432 - RNA, 19 nt, Homo sapiens
  misc_RNA (1)...(19): siRNA sense strand
cugucaaacucgaaucaau

SEQ ID NO: 2645433 - RNA, 19 nt, Homo sapiens
  misc_RNA (1)...(19): siRNA sense strand
gcaaggaagugggcggaga

SEQ ID NO: 2645434 - RNA, 19 nt, Homo sapiens
  misc_RNA (1)...(19): siRNA sense strand
agauggagaaguacagcaa

SEQ ID NO: 2645435 - RNA, 19 nt, Homo sapiens
  misc_RNA (1)...(19): siRNA sense strand
aaaccaaaggauauaggaa

SEQ ID NO: 2645436 - RNA, 19 nt, Homo sapiens
  misc_RNA (1)...(19): siRNA sense strand
ccgaaggaaaccagcauga

SEQ ID NO: 2645437 - RNA, 19 nt, Homo sapiens
  misc_RNA (1)...(19): siRNA sense strand
gggccaugaaggaaugcaa

SEQ ID NO: 2645438 - RNA, 19 nt, Homo sapiens
  misc_RNA (1)...(19): siRNA sense strand
agacaauagccgugugaau

SEQ ID NO: 2645439 - RNA, 19 nt, Homo sapiens
  misc_RNA (1)...(19): siRNA sense strand
agaagagugcugugaacaa

SEQ ID NO: 2645440 - RNA, 19 nt, Homo sapiens
  misc_RNA (1)...(19): siRNA sense strand
cagcaauggaaaagcaaua

SEQ ID NO: 2645441 - RNA, 19 nt, Homo sapiens
  misc_RNA (1)...(19): siRNA sense strand
ucuaauagccacagaacga

SEQ ID NO: 2645442 - RNA, 19 nt, Homo sapiens
  misc_RNA (1)...(19): siRNA sense strand
caagaauuauccuggaaaa

SEQ ID NO: 2645443 - RNA, 19 nt, Homo sapiens
  misc_RNA (1)...(19): siRNA sense strand
acauagaaggacuaacaaa

SEQ ID NO: 2645444 - RNA, 19 nt, Homo sapiens
  misc_RNA (1)...(19): siRNA sense strand
acguagaaaggaugaaauu

SEQ ID NO: 2645445 - RNA, 19 nt, Homo sapiens
  misc_RNA (1)...(19): siRNA sense strand
guguguggcuacucggaaa

SEQ ID NO: 2645446 - RNA, 19 nt, Homo sapiens
  misc_RNA (1)...(19): siRNA sense strand
cuguagaagcagacaccua

SEQ ID NO: 2645447 - RNA, 19 nt, Homo sapiens
  misc_RNA (1)...(19): siRNA sense strand
aacgagagguggagacaau

SEQ ID NO: 2645448 - RNA, 19 nt, Homo sapiens
  misc_RNA (1)...(19): siRNA sense strand
agguuaagccagcgaauca

SEQ ID NO: 2645449 - RNA, 19 nt, Homo sapiens
  misc_RNA (1)...(19): siRNA sense strand
ccucuuaacagaaaccaaa

SEQ ID NO: 2645450 - RNA, 19 nt, Homo sapiens
  misc_RNA (1)...(19): siRNA sense strand
cagacaaaugauacagcua

SEQ ID NO: 2645451 - RNA, 19 nt, Homo sapiens
  misc_RNA (1)...(19): siRNA sense strand
guacagcugaugugcauua

SEQ ID NO: 2645452 - RNA, 19 nt, Homo sapiens
  misc_RNA (1)...(19): siRNA sense strand
ugugaacaauggagagcau

SEQ ID NO: 2645453 - RNA, 19 nt, Homo sapiens
  misc_RNA (1)...(19): siRNA sense strand
caguacagcugaugugcau

SEQ ID NO: 2645454 - RNA, 19 nt, Homo sapiens
  misc_RNA (1)...(19): siRNA sense strand
ccaagaauuauccuggaaa

SEQ ID NO: 2645455 - RNA, 19 nt, Homo sapiens
  misc_RNA (1)...(19): siRNA sense strand
gcuuaauuguggaugaacu

SEQ ID NO: 2645456 - RNA, 19 nt, Homo sapiens
  misc_RNA (1)...(19): siRNA sense strand
ccaagaugacagagauguu

SEQ ID NO: 2645457 - RNA, 19 nt, Homo sapiens
  misc_RNA (1)...(19): siRNA sense strand
accaaaaggccaauagaua

SEQ ID NO: 2645458 - RNA, 19 nt, Homo sapiens
  misc_RNA (1)...(19): siRNA sense strand
uacuaaaggucuugaagca

SEQ ID NO: 2645459 - RNA, 19 nt, Homo sapiens
  misc_RNA (1)...(19): siRNA sense strand
gaugggagauuuaaggcau

SEQ ID NO: 2645460 - RNA, 19 nt, Homo sapiens
  misc_RNA (1)...(19): siRNA sense strand
augggagauuuaaggcaua

SEQ ID NO: 2645461 - RNA, 19 nt, Homo sapiens
  misc_RNA (1)...(19): siRNA sense strand
ucauuuaagugcagcuuca

SEQ ID NO: 2645462 - RNA, 19 nt, Homo sapiens
  misc_RNA (1)...(19): siRNA sense strand
aagcaauaccugcguaaca

SEQ ID NO: 2645463 - RNA, 19 nt, Homo sapiens
  misc_RNA (1)...(19): siRNA sense strand
aggaagguccaaagcauuu

SEQ ID NO: 2645464 - RNA, 19 nt, Homo sapiens
  misc_RNA (1)...(19): siRNA sense strand
uugcaaaggaagcaguauu

SEQ ID NO: 2645465 - RNA, 19 nt, Homo sapiens
  misc_RNA (1)...(19): siRNA sense strand
acuaacaaagccuggagaa

SEQ ID NO: 2645466 - RNA, 19 nt, Homo sapiens
  misc_RNA (1)...(19): siRNA sense strand
caucuagaguugaucgcuu

SEQ ID NO: 2645467 - RNA, 19 nt, Homo sapiens
  misc_RNA (1)...(19): siRNA sense strand
ggucauucuaauagccaca

SEQ ID NO: 2645468 - RNA, 19 nt, Homo sapiens
  misc_RNA (1)...(19): siRNA sense strand
caauuaaagagaugugugu

SEQ ID NO: 2645469 - RNA, 19 nt, Homo sapiens
  misc_RNA (1)...(19): siRNA sense strand
caaucacauagaaggacua

SEQ ID NO: 2645470 - RNA, 19 nt, Homo sapiens
  misc_RNA (1)...(19): siRNA sense strand
cggcaaaggcaaggaguuc

SEQ ID NO: 2645471 - RNA, 19 nt, Homo sapiens
  misc_RNA (1)...(19): siRNA sense strand
gaugaaucugugucagcaa

SEQ ID NO: 2645472 - RNA, 19 nt, Homo sapiens
  misc_RNA (1)...(19): siRNA sense strand
gcaacaucuucaggaggua

SEQ ID NO: 2645473 - RNA, 19 nt, Homo sapiens
  misc_RNA (1)...(19): siRNA sense strand
caagaaaacccuucagcau

SEQ ID NO: 2645474 - RNA, 19 nt, Homo sapiens
  misc_RNA (1)...(19): siRNA sense strand
aaugauacagcuaagacaa

SEQ ID NO: 2645475 - RNA, 19 nt, Homo sapiens
  misc_RNA (1)...(19): siRNA sense strand
caucagaauauggacuaaa

SEQ ID NO: 2645476 - RNA, 19 nt, Homo sapiens
  misc_RNA (1)...(19): siRNA sense strand
uaguuacaguggugcagaa

SEQ ID NO: 2645477 - RNA, 19 nt, Homo sapiens
  misc_RNA (1)...(19): siRNA sense strand
ugucaaucacauagaagga

SEQ ID NO: 2645478 - RNA, 19 nt, Homo sapiens
  misc_RNA (1)...(19): siRNA sense strand
cuagaagagugcugugaac

SEQ ID NO: 2645479 - RNA, 19 nt, Homo sapiens
  misc_RNA (1)...(19): siRNA sense strand
acagaaaccaaaaggccaa

SEQ ID NO: 2645480 - RNA, 19 nt, Homo sapiens
  misc_RNA (1)...(19): siRNA sense strand
ccacaaacuuaaccccaaa

SEQ ID NO: 2645481 - RNA, 19 nt, Homo sapiens
  misc_RNA (1)...(19): siRNA sense strand
cugaauuagcccuugccaa

SEQ ID NO: 2645482 - RNA, 19 nt, Homo sapiens
  misc_RNA (1)...(19): siRNA sense strand
cuuaauuguggaugaacuu

SEQ ID NO: 2645483 - RNA, 19 nt, Homo sapiens
  misc_RNA (1)...(19): siRNA sense strand
uggaagagacagaauaugu

SEQ ID NO: 2645484 - RNA, 19 nt, Homo sapiens
  misc_RNA (1)...(19): siRNA sense strand
uauggaagagacagaauau

SEQ ID NO: 2645485 - RNA, 19 nt, Homo sapiens
  misc_RNA (1)...(19): siRNA sense strand
acuauucagcucagaagua

SEQ ID NO: 2645486 - RNA, 19 nt, Homo sapiens
  misc_RNA (1)...(19): siRNA sense strand
gguccaaagcauuuagaug

SEQ ID NO: 2645487 - RNA, 19 nt, Homo sapiens
  misc_RNA (1)...(19): siRNA sense strand
augcaaagguaaagcagca

SEQ ID NO: 2645488 - RNA, 19 nt, Homo sapiens
  misc_RNA (1)...(19): siRNA sense strand
gagaagaagaggaggagac

SEQ ID NO: 2645489 - RNA, 19 nt, Homo sapiens
  misc_RNA (1)...(19): siRNA sense strand
uggccgaugcaaagguaaa

SEQ ID NO: 2645490 - RNA, 19 nt, Homo sapiens
  misc_RNA (1)...(19): siRNA sense strand
ggaugaggaugaaggccca

SEQ ID NO: 2645491 - RNA, 19 nt, Homo sapiens
  misc_RNA (1)...(19): siRNA sense strand
ucacagaguuugagacccu

SEQ ID NO: 2645492 - RNA, 19 nt, Homo sapiens
  misc_RNA (1)...(19): siRNA sense strand
cccagaugccagagcagaa

SEQ ID NO: 2645493 - RNA, 19 nt, Homo sapiens
  misc_RNA (1)...(19): siRNA sense strand
auggagaagaagaggagga

SEQ ID NO: 2645494 - RNA, 19 nt, Homo sapiens
  misc_RNA (1)...(19): siRNA sense strand
acagcuuccuccagggcua

SEQ ID NO: 2645495 - RNA, 19 nt, Homo sapiens
  misc_RNA (1)...(19): siRNA sense strand
ccccagaggaugaggauga

SEQ ID NO: 2645496 - RNA, 19 nt, Homo sapiens
  misc_RNA (1)...(19): siRNA sense strand
augcauuggcugggacaaa

SEQ ID NO: 2645497 - RNA, 19 nt, Homo sapiens
  misc_RNA (1)...(19): siRNA sense strand
gaagaagcgcguugcgagu

SEQ ID NO: 2645498 - RNA, 19 nt, Homo sapiens
  misc_RNA (1)...(19): siRNA sense strand
ugguucaggugguggacga

SEQ ID NO: 2645499 - RNA, 19 nt, Homo sapiens
  misc_RNA (1)...(19): siRNA sense strand
cugccuaaggagagggucu

SEQ ID NO: 2645500 - RNA, 19 nt, Homo sapiens
  misc_RNA (1)...(19): siRNA sense strand
gugcagaacuacagcggaa

SEQ ID NO: 2645501 - RNA, 19 nt, Homo sapiens
  misc_RNA (1)...(19): siRNA sense strand
agaagaagcuggugggauc

SEQ ID NO: 2645502 - RNA, 19 nt, Homo sapiens
  misc_RNA (1)...(19): siRNA sense strand
agaagugggccaagggaau

SEQ ID NO: 2645503 - RNA, 19 nt, Homo sapiens
  misc_RNA (1)...(19): siRNA sense strand
ccgugaaggccuugcagaa

SEQ ID NO: 2645504 - RNA, 19 nt, Homo sapiens
  misc_RNA (1)...(19): siRNA sense strand
ucagcaaagcccagguaaa

SEQ ID NO: 2645505 - RNA, 19 nt, Homo sapiens
  misc_RNA (1)...(19): siRNA sense strand
cugcuuacuccaagagaau

SEQ ID NO: 2645506 - RNA, 19 nt, Homo sapiens
  misc_RNA (1)...(19): siRNA sense strand
cggacugagccaagaaaca

SEQ ID NO: 2645507 - RNA, 19 nt, Homo sapiens
  misc_RNA (1)...(19): siRNA sense strand
gagaagugggccaagggaa

SEQ ID NO: 2645508 - RNA, 19 nt, Homo sapiens
  misc_RNA (1)...(19): siRNA sense strand
aagagguauuguuggaauu

SEQ ID NO: 2645509 - RNA, 19 nt, Homo sapiens
  misc_RNA (1)...(19): siRNA sense strand
ggagggaucugguccgcaa

SEQ ID NO: 2645510 - RNA, 19 nt, Homo sapiens
  misc_RNA (1)...(19): siRNA sense strand
cggaggaaccagaagcuga

SEQ ID NO: 2645511 - RNA, 19 nt, Homo sapiens
  misc_RNA (1)...(19): siRNA sense strand
gugaagacggagaugccaa

SEQ ID NO: 2645512 - RNA, 19 nt, Homo sapiens
  misc_RNA (1)...(19): siRNA sense strand
gggcaaugggcaucuggaa

SEQ ID NO: 2645513 - RNA, 19 nt, Homo sapiens
  misc_RNA (1)...(19): siRNA sense strand
aggaauuaucucuuggaau

SEQ ID NO: 2645514 - RNA, 19 nt, Homo sapiens
  misc_RNA (1)...(19): siRNA sense strand
cugaagacaucgaagucca

SEQ ID NO: 2645515 - RNA, 19 nt, Homo sapiens
  misc_RNA (1)...(19): siRNA sense strand
gagccaagaaacagagauc

SEQ ID NO: 2645516 - RNA, 19 nt, Homo sapiens
  misc_RNA (1)...(19): siRNA sense strand
aggcucaaccacaggaauu

SEQ ID NO: 2645517 - RNA, 19 nt, Homo sapiens
  misc_RNA (1)...(19): siRNA sense strand
cggccaaggcuguccugaa

SEQ ID NO: 2645518 - RNA, 19 nt, Homo sapiens
  misc_RNA (1)...(19): siRNA sense strand
agaccugggcacagcaaau

SEQ ID NO: 2645519 - RNA, 19 nt, Homo sapiens
  misc_RNA (1)...(19): siRNA sense strand
ucucagaguuggagcaccu

SEQ ID NO: 2645520 - RNA, 19 nt, Homo sapiens
  misc_RNA (1)...(19): siRNA sense strand
caggaggaugaguggguga

SEQ ID NO: 2645521 - RNA, 19 nt, Homo sapiens
  misc_RNA (1)...(19): siRNA sense strand
cuccaagaguccagaccau

SEQ ID NO: 2645522 - RNA, 19 nt, Homo sapiens
  misc_RNA (1)...(19): siRNA sense strand
gcuggaucucagaggauga

SEQ ID NO: 2645523 - RNA, 19 nt, Homo sapiens
  misc_RNA (1)...(19): siRNA sense strand
ggccauaagauacggagga

SEQ ID NO: 2645524 - RNA, 19 nt, Homo sapiens
  misc_RNA (1)...(19): siRNA sense strand
cagccagagaagugggcca

SEQ ID NO: 2645525 - RNA, 19 nt, Homo sapiens
  misc_RNA (1)...(19): siRNA sense strand
gagcuggaucucagaggau

SEQ ID NO: 2645526 - RNA, 19 nt, Homo sapiens
  misc_RNA (1)...(19): siRNA sense strand
ccaccaagacgaugccuca

SEQ ID NO: 2645527 - RNA, 19 nt, Homo sapiens
  misc_RNA (1)...(19): siRNA sense strand
cccugaaguuucugacaca

SEQ ID NO: 2645528 - RNA, 19 nt, Homo sapiens
  misc_RNA (1)...(19): siRNA sense strand
gagaauggcuccaagaguc

SEQ ID NO: 2645529 - RNA, 19 nt, Homo sapiens
  misc_RNA (1)...(19): siRNA sense strand
ucaggaacaaugagaagau

SEQ ID NO: 2645530 - RNA, 19 nt, Homo sapiens
  misc_RNA (1)...(19): siRNA sense strand
guggagaccauccgggaca

SEQ ID NO: 2645531 - RNA, 19 nt, Homo sapiens
  misc_RNA (1)...(19): siRNA sense strand
agcugaggccggaggaaaa

SEQ ID NO: 2645532 - RNA, 19 nt, Homo sapiens
  misc_RNA (1)...(19): siRNA sense strand
ccuccagggcacacaguuu

SEQ ID NO: 2645533 - RNA, 19 nt, Homo sapiens
  misc_RNA (1)...(19): siRNA sense strand
ggagagugcuucagaccac

SEQ ID NO: 2645534 - RNA, 19 nt, Homo sapiens
  misc_RNA (1)...(19): siRNA sense strand
ggcgcaaguaccaggaaca

SEQ ID NO: 2645535 - RNA, 19 nt, Homo sapiens
  misc_RNA (1)...(19): siRNA sense strand
ccagaggaccgcagugaua

SEQ ID NO: 2645536 - RNA, 19 nt, Homo sapiens
  misc_RNA (1)...(19): siRNA sense strand
aggaagauaaugaggacau

SEQ ID NO: 2645537 - RNA, 19 nt, Homo sapiens
  misc_RNA (1)...(19): siRNA sense strand
gagcccagaaggaagauaa

SEQ ID NO: 2645538 - RNA, 19 nt, Homo sapiens
  misc_RNA (1)...(19): siRNA sense strand
ggagaagacaccacugaga

SEQ ID NO: 2645539 - RNA, 19 nt, Homo sapiens
  misc_RNA (1)...(19): siRNA sense strand
ucaccauaucugagaauga

SEQ ID NO: 2645540 - RNA, 19 nt, Homo sapiens
  misc_RNA (1)...(19): siRNA sense strand
agaagacaccacugagauu

SEQ ID NO: 2645541 - RNA, 19 nt, Homo sapiens
  misc_RNA (1)...(19): siRNA sense strand
ugaaaguaagaaagagcau

SEQ ID NO: 2645542 - RNA, 19 nt, Homo sapiens
  misc_RNA (1)...(19): siRNA sense strand
agacagcaacccuggagaa

SEQ ID NO: 2645543 - RNA, 19 nt, Homo sapiens
  misc_RNA (1)...(19): siRNA sense strand
ccacugagauugucaccau

SEQ ID NO: 2645544 - RNA, 19 nt, Homo sapiens
  misc_RNA (1)...(19): siRNA sense strand
gagaauuggagcaaggacu

SEQ ID NO: 2645545 - RNA, 19 nt, Homo sapiens
  misc_RNA (1)...(19): siRNA sense strand
aggguuugaaaguaagaaa

SEQ ID NO: 2645546 - RNA, 19 nt, Homo sapiens
  misc_RNA (1)...(19): siRNA sense strand
cccagaaggaagauaauga

SEQ ID NO: 2645547 - RNA, 19 nt, Homo sapiens
  misc_RNA (1)...(19): siRNA sense strand
gaaggaagauaaugaggac

SEQ ID NO: 2645548 - RNA, 19 nt, Homo sapiens
  misc_RNA (1)...(19): siRNA sense strand
cggcaauaccagaggccuc

SEQ ID NO: 2645549 - RNA, 19 nt, Homo sapiens
  misc_RNA (1)...(19): siRNA sense strand
cggaggagcugaugccacu

SEQ ID NO: 2645550 - RNA, 19 nt, Homo sapiens
  misc_RNA (1)...(19): siRNA sense strand
uggccugggugcuggcauu

SEQ ID NO: 2645551 - RNA, 19 nt, Homo sapiens
  misc_RNA (1)...(19): siRNA sense strand
cgggacuccacaagaggaa

SEQ ID NO: 2645552 - RNA, 19 nt, Homo sapiens
  misc_RNA (1)...(19): siRNA sense strand
gaaaguacggcguggccca

SEQ ID NO: 2645553 - RNA, 19 nt, Homo sapiens
  misc_RNA (1)...(19): siRNA sense strand
acuacaacaugcuggucau

SEQ ID NO: 2645554 - RNA, 19 nt, Homo sapiens
  misc_RNA (1)...(19): siRNA sense strand
ggaaagaguguccgcggaa

SEQ ID NO: 2645555 - RNA, 19 nt, Homo sapiens
  misc_RNA (1)...(19): siRNA sense strand
cagacuggcugcagggaca

SEQ ID NO: 2645556 - RNA, 19 nt, Homo sapiens
  misc_RNA (1)...(19): siRNA sense strand
ccucaagaccccagagaga

SEQ ID NO: 2645557 - RNA, 19 nt, Homo sapiens
  misc_RNA (1)...(19): siRNA sense strand
ccaacaucugcgagaggua

SEQ ID NO: 2645558 - RNA, 19 nt, Homo sapiens
  misc_RNA (1)...(19): siRNA sense strand
gggaaagaguguccgcgga

SEQ ID NO: 2645559 - RNA, 19 nt, Homo sapiens
  misc_RNA (1)...(19): siRNA sense strand
ucaagaccccagagagaaa

SEQ ID NO: 2645560 - RNA, 19 nt, Homo sapiens
  misc_RNA (1)...(19): siRNA sense strand
cagaagacaccaagggcac

SEQ ID NO: 2645561 - RNA, 19 nt, Homo sapiens
  misc_RNA (1)...(19): siRNA sense strand
uggcuuagggaaagagugu

SEQ ID NO: 2645562 - RNA, 19 nt, Homo sapiens
  misc_RNA (1)...(19): siRNA sense strand
uuaaagagacugaggcaga

SEQ ID NO: 2645563 - RNA, 19 nt, Homo sapiens
  misc_RNA (1)...(19): siRNA sense strand
ccaagaaguuacugggucu

SEQ ID NO: 2645564 - RNA, 19 nt, Homo sapiens
  misc_RNA (1)...(19): siRNA sense strand
aggccaagguccaagucaa

SEQ ID NO: 2645565 - RNA, 19 nt, Homo sapiens
  misc_RNA (1)...(19): siRNA sense strand
agacugaggcagaaggcau

SEQ ID NO: 2645566 - RNA, 19 nt, Homo sapiens
  misc_RNA (1)...(19): siRNA sense strand
ccggcuggccagagaacua

SEQ ID NO: 2645567 - RNA, 19 nt, Homo sapiens
  misc_RNA (1)...(19): siRNA sense strand
gagcauaaccggcuggcca

SEQ ID NO: 2645568 - RNA, 19 nt, Homo sapiens
  misc_RNA (1)...(19): siRNA sense strand
gccaagaaauccaagcuga

SEQ ID NO: 2645569 - RNA, 19 nt, Homo sapiens
  misc_RNA (1)...(19): siRNA sense strand
cuuuaaagagacugaggca

SEQ ID NO: 2645570 - RNA, 19 nt, Homo sapiens
  misc_RNA (1)...(19): siRNA sense strand
aguacuguauccagggaga

SEQ ID NO: 2645571 - RNA, 19 nt, Homo sapiens
  misc_RNA (1)...(19): siRNA sense strand
ggaugagaauuaucagcca

SEQ ID NO: 2645572 - RNA, 19 nt, Homo sapiens
  misc_RNA (1)...(19): siRNA sense strand
agacacuagaggaguugaa

SEQ ID NO: 2645573 - RNA, 19 nt, Homo sapiens
  misc_RNA (1)...(19): siRNA sense strand
agcugaugaaacagaauaa

SEQ ID NO: 2645574 - RNA, 19 nt, Homo sapiens
  misc_RNA (1)...(19): siRNA sense strand
ccaagguccaagucaacaa

SEQ ID NO: 2645575 - RNA, 19 nt, Homo sapiens
  misc_RNA (1)...(19): siRNA sense strand
gcaauggacagguguggga

SEQ ID NO: 2645576 - RNA, 19 nt, Homo sapiens
  misc_RNA (1)...(19): siRNA sense strand
gcgcagacuaccagaaccu

SEQ ID NO: 2645577 - RNA, 19 nt, Homo sapiens
  misc_RNA (1)...(19): siRNA sense strand
cagaauaccucaagcaugc

SEQ ID NO: 2645578 - RNA, 19 nt, Homo sapiens
  misc_RNA (1)...(19): siRNA sense strand
aguugaacacagugcugaa

SEQ ID NO: 2645579 - RNA, 19 nt, Homo sapiens
  misc_RNA (1)...(19): siRNA sense strand
ugacuggagagcugcgcaa

SEQ ID NO: 2645580 - RNA, 19 nt, Homo sapiens
  misc_RNA (1)...(19): siRNA sense strand
cggcaaaccggcaggcaau

SEQ ID NO: 2645581 - RNA, 19 nt, Homo sapiens
  misc_RNA (1)...(19): siRNA sense strand
ccuaaauuggagaugguaa

SEQ ID NO: 2645582 - RNA, 19 nt, Homo sapiens
  misc_RNA (1)...(19): siRNA sense strand
ugguaaagguggagccugu

SEQ ID NO: 2645583 - RNA, 19 nt, Homo sapiens
  misc_RNA (1)...(19): siRNA sense strand
aaguaaaccuagaggcugu

SEQ ID NO: 2645584 - RNA, 19 nt, Homo sapiens
  misc_RNA (1)...(19): siRNA sense strand
guugagaaucagugcccaa

SEQ ID NO: 2645585 - RNA, 19 nt, Homo sapiens
  misc_RNA (1)...(19): siRNA sense strand
accaguggcuguaggacaa

SEQ ID NO: 2645586 - RNA, 19 nt, Homo sapiens
  misc_RNA (1)...(19): siRNA sense strand
ggaagaauuaaaagaguga

SEQ ID NO: 2645587 - RNA, 19 nt, Homo sapiens
  misc_RNA (1)...(19): siRNA sense strand
cggucauuucgucgagaua

SEQ ID NO: 2645588 - RNA, 19 nt, Homo sapiens
  misc_RNA (1)...(19): siRNA sense strand
caguaguauuugugcagga

SEQ ID NO: 2645589 - RNA, 19 nt, Homo sapiens
  misc_RNA (1)...(19): siRNA sense strand
agguggagccuguugagaa

SEQ ID NO: 2645590 - RNA, 19 nt, Homo sapiens
  misc_RNA (1)...(19): siRNA sense strand
agacacagguuuagccacu

SEQ ID NO: 2645591 - RNA, 19 nt, Homo sapiens
  misc_RNA (1)...(19): siRNA sense strand
augucaaacugaaggagca

SEQ ID NO: 2645592 - RNA, 19 nt, Homo sapiens
  misc_RNA (1)...(19): siRNA sense strand
agguggaugccaacauaaa

SEQ ID NO: 2645593 - RNA, 19 nt, Homo sapiens
  misc_RNA (1)...(19): siRNA sense strand
gaccaguggcuguaggaca

SEQ ID NO: 2645594 - RNA, 19 nt, Homo sapiens
  misc_RNA (1)...(19): siRNA sense strand
agaaguaaaccuagaggcu

SEQ ID NO: 2645595 - RNA, 19 nt, Homo sapiens
  misc_RNA (1)...(19): siRNA sense strand
gcacaguacucgcaagccu

SEQ ID NO: 2645596 - RNA, 19 nt, Homo sapiens
  misc_RNA (1)...(19): siRNA sense strand
uggagaugguaaaggugga

SEQ ID NO: 2645597 - RNA, 19 nt, Homo sapiens
  misc_RNA (1)...(19): siRNA sense strand
ggacaauuucaccggucau

SEQ ID NO: 2645598 - RNA, 19 nt, Homo sapiens
  misc_RNA (1)...(19): siRNA sense strand
cuggacaaguggagacauc

SEQ ID NO: 2645599 - RNA, 19 nt, Homo sapiens
  misc_RNA (1)...(19): siRNA sense strand
cuacaaaugcaaagcccaa

SEQ ID NO: 2645600 - RNA, 19 nt, Homo sapiens
  misc_RNA (1)...(19): siRNA sense strand
ggucauucaaacagaaaca

SEQ ID NO: 2645601 - RNA, 19 nt, Homo sapiens
  misc_RNA (1)...(19): siRNA sense strand
cuggagaagaggaagagua

SEQ ID NO: 2645602 - RNA, 19 nt, Homo sapiens
  misc_RNA (1)...(19): siRNA sense strand
aaacagaaacagaccgaca

SEQ ID NO: 2645603 - RNA, 19 nt, Homo sapiens
  misc_RNA (1)...(19): siRNA sense strand
cagcccaagaugaggccaa

SEQ ID NO: 2645604 - RNA, 19 nt, Homo sapiens
  misc_RNA (1)...(19): siRNA sense strand
aguauaggugugaagcuaa

SEQ ID NO: 2645605 - RNA, 19 nt, Homo sapiens
  misc_RNA (1)...(19): siRNA sense strand
cagccauggaaguuggaau

SEQ ID NO: 2645606 - RNA, 19 nt, Homo sapiens
  misc_RNA (1)...(19): siRNA sense strand
gugcugaacauuaugguca

SEQ ID NO: 2645607 - RNA, 19 nt, Homo sapiens
  misc_RNA (1)...(19): siRNA sense strand
uguauuggauugugaggca

SEQ ID NO: 2645608 - RNA, 19 nt, Homo sapiens
  misc_RNA (1)...(19): siRNA sense strand
cguaagacacaccugggaa

SEQ ID NO: 2645609 - RNA, 19 nt, Homo sapiens
  misc_RNA (1)...(19): siRNA sense strand
ccaagaagaauccuggaga

SEQ ID NO: 2645610 - RNA, 19 nt, Homo sapiens
  misc_RNA (1)...(19): siRNA sense strand
cauuauggucauucaaaca

SEQ ID NO: 2645611 - RNA, 19 nt, Homo sapiens
  misc_RNA (1)...(19): siRNA sense strand
aguuggaaucuaugcaaau

SEQ ID NO: 2645612 - RNA, 19 nt, Homo sapiens
  misc_RNA (1)...(19): siRNA sense strand
agaacaaaucacugcagau

SEQ ID NO: 2645613 - RNA, 19 nt, Homo sapiens
  misc_RNA (1)...(19): siRNA sense strand
gaaauaaugugcccaggga

SEQ ID NO: 2645614 - RNA, 19 nt, Homo sapiens
  misc_RNA (1)...(19): siRNA sense strand
acucaaagacuaagguggu

SEQ ID NO: 2645615 - RNA, 19 nt, Homo sapiens
  misc_RNA (1)...(19): siRNA sense strand
agagaaagucagacaagaa

SEQ ID NO: 2645616 - RNA, 19 nt, Homo sapiens
  misc_RNA (1)...(19): siRNA sense strand
acagaugagcagaggcgaa

SEQ ID NO: 2645617 - RNA, 19 nt, Homo sapiens
  misc_RNA (1)...(19): siRNA sense strand
acagcaaacuagaggccau

SEQ ID NO: 2645618 - RNA, 19 nt, Homo sapiens
  misc_RNA (1)...(19): siRNA sense strand
uggagaagugccugggaau

SEQ ID NO: 2645619 - RNA, 19 nt, Homo sapiens
  misc_RNA (1)...(19): siRNA sense strand
accaagaagaugugcacaa

SEQ ID NO: 2645620 - RNA, 19 nt, Homo sapiens
  misc_RNA (1)...(19): siRNA sense strand
ccuauggcucggagaagaa

SEQ ID NO: 2645621 - RNA, 19 nt, Homo sapiens
  misc_RNA (1)...(19): siRNA sense strand
cuggagaagugccugggaa

SEQ ID NO: 2645622 - RNA, 19 nt, Homo sapiens
  misc_RNA (1)...(19): siRNA sense strand
ucgagagcucccuggauaa

SEQ ID NO: 2645623 - RNA, 19 nt, Homo sapiens
  misc_RNA (1)...(19): siRNA sense strand
gauucugcuuugagguaca

SEQ ID NO: 2645624 - RNA, 19 nt, Homo sapiens
  misc_RNA (1)...(19): siRNA sense strand
gcuuggacaucuuuggaca

SEQ ID NO: 2645625 - RNA, 19 nt, Homo sapiens
  misc_RNA (1)...(19): siRNA sense strand
aacaagaagaagaagccaa

SEQ ID NO: 2645626 - RNA, 19 nt, Homo sapiens
  misc_RNA (1)...(19): siRNA sense strand
gcucggagaagaaagccaa

SEQ ID NO: 2645627 - RNA, 19 nt, Homo sapiens
  misc_RNA (1)...(19): siRNA sense strand
gguuccaacaagaagaaga

SEQ ID NO: 2645628 - RNA, 19 nt, Homo sapiens
  misc_RNA (1)...(19): siRNA sense strand
gcuacuucuucuuggacga

SEQ ID NO: 2645629 - RNA, 19 nt, Homo sapiens
  misc_RNA (1)...(19): siRNA sense strand
gaacuuagcaauucggauc

SEQ ID NO: 2645630 - RNA, 19 nt, Homo sapiens
  misc_RNA (1)...(19): siRNA sense strand
cugaacacaccaagaagau

SEQ ID NO: 2645631 - RNA, 19 nt, Homo sapiens
  misc_RNA (1)...(19): siRNA sense strand
ucaaccaguggaagagcaa

SEQ ID NO: 2645632 - RNA, 19 nt, Homo sapiens
  misc_RNA (1)...(19): siRNA sense strand
gagcagaggcgaaccguac

SEQ ID NO: 2645633 - RNA, 19 nt, Homo sapiens
  misc_RNA (1)...(19): siRNA sense strand
agaagagaaagucagacaa

SEQ ID NO: 2645634 - RNA, 19 nt, Homo sapiens
  misc_RNA (1)...(19): siRNA sense strand
cgggaaaggcaaggaggaa

SEQ ID NO: 2645635 - RNA, 19 nt, Homo sapiens
  misc_RNA (1)...(19): siRNA sense strand
ccaugaggagauuaggcaa

SEQ ID NO: 2645636 - RNA, 19 nt, Homo sapiens
  misc_RNA (1)...(19): siRNA sense strand
gccucggucaagugggaaa

SEQ ID NO: 2645637 - RNA, 19 nt, Homo sapiens
  misc_RNA (1)...(19): siRNA sense strand
cuucaguacugcagggcaa

SEQ ID NO: 2645638 - RNA, 19 nt, Homo sapiens
  misc_RNA (1)...(19): siRNA sense strand
cggaaaauccuuaaccaaa

SEQ ID NO: 2645639 - RNA, 19 nt, Homo sapiens
  misc_RNA (1)...(19): siRNA sense strand
uugcacaacaauaggcaua

SEQ ID NO: 2645640 - RNA, 19 nt, Homo sapiens
  misc_RNA (1)...(19): siRNA sense strand
cggacauauuuauuggaau

SEQ ID NO: 2645641 - RNA, 19 nt, Homo sapiens
  misc_RNA (1)...(19): siRNA sense strand
cugcugggguuaugagaaa

SEQ ID NO: 2645642 - RNA, 19 nt, Homo sapiens
  misc_RNA (1)...(19): siRNA sense strand
cuuucgauguagaagaauu

SEQ ID NO: 2645643 - RNA, 19 nt, Homo sapiens
  misc_RNA (1)...(19): siRNA sense strand
accuauagaagaugcuaaa

SEQ ID NO: 2645644 - RNA, 19 nt, Homo sapiens
  misc_RNA (1)...(19): siRNA sense strand
ccaaaaugagcuuguaaau

SEQ ID NO: 2645645 - RNA, 19 nt, Homo sapiens
  misc_RNA (1)...(19): siRNA sense strand
ucacagcauuccaggcgaa

SEQ ID NO: 2645646 - RNA, 19 nt, Homo sapiens
  misc_RNA (1)...(19): siRNA sense strand
ccuaaggaaacgagugacu

SEQ ID NO: 2645647 - RNA, 19 nt, Homo sapiens
  misc_RNA (1)...(19): siRNA sense strand
agaaacaucaagagaaauc

SEQ ID NO: 2645648 - RNA, 19 nt, Homo sapiens
  misc_RNA (1)...(19): siRNA sense strand
uggugaaauuggagggcac

SEQ ID NO: 2645649 - RNA, 19 nt, Homo sapiens
  misc_RNA (1)...(19): siRNA sense strand
ugugggacaccgauggaaa

SEQ ID NO: 2645650 - RNA, 19 nt, Homo sapiens
  misc_RNA (1)...(19): siRNA sense strand
cuaaaguacugcugggguu

SEQ ID NO: 2645651 - RNA, 19 nt, Homo sapiens
  misc_RNA (1)...(19): siRNA sense strand
ggccauuuaagaagaaaca

SEQ ID NO: 2645652 - RNA, 19 nt, Homo sapiens
  misc_RNA (1)...(19): siRNA sense strand
gaccuauagaagaugcuaa

SEQ ID NO: 2645653 - RNA, 19 nt, Homo sapiens
  misc_RNA (1)...(19): siRNA sense strand
gcacagaauaccggaaaau

SEQ ID NO: 2645654 - RNA, 19 nt, Homo sapiens
  misc_RNA (1)...(19): siRNA sense strand
acguauugcaacacccaaa

SEQ ID NO: 2645655 - RNA, 19 nt, Homo sapiens
  misc_RNA (1)...(19): siRNA sense strand
agagagaggcuggaggaga

SEQ ID NO: 2645656 - RNA, 19 nt, Homo sapiens
  misc_RNA (1)...(19): siRNA sense strand
acagauuuaaggaggacuu

SEQ ID NO: 2645657 - RNA, 19 nt, Homo sapiens
  misc_RNA (1)...(19): siRNA sense strand
ccuaauacucacagcauuc

SEQ ID NO: 2645658 - RNA, 19 nt, Homo sapiens
  misc_RNA (1)...(19): siRNA sense strand
gaagaugcuaaaugugaca

SEQ ID NO: 2645659 - RNA, 19 nt, Homo sapiens
  misc_RNA (1)...(19): siRNA sense strand
ccggaaaauccuuaaccaa

SEQ ID NO: 2645660 - RNA, 19 nt, Homo sapiens
  misc_RNA (1)...(19): siRNA sense strand
cagaccacguauugcaaca

SEQ ID NO: 2645661 - RNA, 19 nt, Homo sapiens
  misc_RNA (1)...(19): siRNA sense strand
cagcaauauccaagaaaca

SEQ ID NO: 2645662 - RNA, 19 nt, Homo sapiens
  misc_RNA (1)...(19): siRNA sense strand
acagagaagaggaaggcaa

SEQ ID NO: 2645663 - RNA, 19 nt, Homo sapiens
  misc_RNA (1)...(19): siRNA sense strand
guaaagggauuguggccau

SEQ ID NO: 2645664 - RNA, 19 nt, Homo sapiens
  misc_RNA (1)...(19): siRNA sense strand
augaagaagaugaagaaga

SEQ ID NO: 2645665 - RNA, 19 nt, Homo sapiens
  misc_RNA (1)...(19): siRNA sense strand
cauucaaagaacagagaga

SEQ ID NO: 2645666 - RNA, 19 nt, Homo sapiens
  misc_RNA (1)...(19): siRNA sense strand
cagaagaagcugauagcca

SEQ ID NO: 2645667 - RNA, 19 nt, Homo sapiens
  misc_RNA (1)...(19): siRNA sense strand
aggcaaagcaaaggaacaa

SEQ ID NO: 2645668 - RNA, 19 nt, Homo sapiens
  misc_RNA (1)...(19): siRNA sense strand
aagaaauguuacuggacuu

SEQ ID NO: 2645669 - RNA, 19 nt, Homo sapiens
  misc_RNA (1)...(19): siRNA sense strand
gcgcaugcuggaagaggaa

SEQ ID NO: 2645670 - RNA, 19 nt, Homo sapiens
  misc_RNA (1)...(19): siRNA sense strand
augaagaagaagaagauga

SEQ ID NO: 2645671 - RNA, 19 nt, Homo sapiens
  misc_RNA (1)...(19): siRNA sense strand
caggauaaacaaaggcaga

SEQ ID NO: 2645672 - RNA, 19 nt, Homo sapiens
  misc_RNA (1)...(19): siRNA sense strand
gggagcuugaggagaguua

SEQ ID NO: 2645673 - RNA, 19 nt, Homo sapiens
  misc_RNA (1)...(19): siRNA sense strand
cagaugaagaagaugaaga

SEQ ID NO: 2645674 - RNA, 19 nt, Homo sapiens
  misc_RNA (1)...(19): siRNA sense strand
uggugaagagagugaagaa

SEQ ID NO: 2645675 - RNA, 19 nt, Homo sapiens
  misc_RNA (1)...(19): siRNA sense strand
agaugauggugaagagagu

SEQ ID NO: 2645676 - RNA, 19 nt, Homo sapiens
  misc_RNA (1)...(19): siRNA sense strand
aguacaaggccuucaggaa

SEQ ID NO: 2645677 - RNA, 19 nt, Homo sapiens
  misc_RNA (1)...(19): siRNA sense strand
agaugaagaagaagaagau

SEQ ID NO: 2645678 - RNA, 19 nt, Homo sapiens
  misc_RNA (1)...(19): siRNA sense strand
ggugaagagagugaagaaa

SEQ ID NO: 2645679 - RNA, 19 nt, Homo sapiens
  misc_RNA (1)...(19): siRNA sense strand
cuugaggagaguuaggaaa

SEQ ID NO: 2645680 - RNA, 19 nt, Homo sapiens
  misc_RNA (1)...(19): siRNA sense strand
aagaugaagaagaagaaga

SEQ ID NO: 2645681 - RNA, 19 nt, Homo sapiens
  misc_RNA (1)...(19): siRNA sense strand
ccgaagaaaagcucaauaa

SEQ ID NO: 2645682 - RNA, 19 nt, Homo sapiens
  misc_RNA (1)...(19): siRNA sense strand
agaagaagcugauagccau

SEQ ID NO: 2645683 - RNA, 19 nt, Homo sapiens
  misc_RNA (1)...(19): siRNA sense strand
uggcuaacauguugcguga

SEQ ID NO: 2645684 - RNA, 19 nt, Homo sapiens
  misc_RNA (1)...(19): siRNA sense strand
aagaaacagaugaagaaga

SEQ ID NO: 2645685 - RNA, 19 nt, Homo sapiens
  misc_RNA (1)...(19): siRNA sense strand
ccaaagaaauguuacugga

SEQ ID NO: 2645686 - RNA, 19 nt, Homo sapiens
  misc_RNA (1)...(19): siRNA sense strand
aaggagaagaugaugguga

SEQ ID NO: 2645687 - RNA, 19 nt, Homo sapiens
  misc_RNA (1)...(19): siRNA sense strand
cugacaaagcauucaaaga

SEQ ID NO: 2645688 - RNA, 19 nt, Homo sapiens
  misc_RNA (1)...(19): siRNA sense strand
caguuuaaugagacgcuaa

SEQ ID NO: 2645689 - RNA, 19 nt, Homo sapiens
  misc_RNA (1)...(19): siRNA sense strand
aggaaucaggauaaacaaa

SEQ ID NO: 2645690 - RNA, 19 nt, Homo sapiens
  misc_RNA (1)...(19): siRNA sense strand
caauuucaucacagguaaa

SEQ ID NO: 2645691 - RNA, 19 nt, Homo sapiens
  misc_RNA (1)...(19): siRNA sense strand
aaggcaaagcaaaggaaca

SEQ ID NO: 2645692 - RNA, 19 nt, Homo sapiens
  misc_RNA (1)...(19): siRNA sense strand
gcccaagaacaaagugaga

SEQ ID NO: 2645693 - RNA, 19 nt, Homo sapiens
  misc_RNA (1)...(19): siRNA sense strand
aagaggaaggcaaagcaaa

SEQ ID NO: 2645694 - RNA, 19 nt, Homo sapiens
  misc_RNA (1)...(19): siRNA sense strand
ugucaaugcaaugaagaaa

SEQ ID NO: 2645695 - RNA, 19 nt, Homo sapiens
  misc_RNA (1)...(19): siRNA sense strand
ccagcagguaacugacaaa

SEQ ID NO: 2645696 - RNA, 19 nt, Homo sapiens
  misc_RNA (1)...(19): siRNA sense strand
uucaaagaacagagagaca

SEQ ID NO: 2645697 - RNA, 19 nt, Homo sapiens
  misc_RNA (1)...(19): siRNA sense strand
uauccaagaaacagaugaa

SEQ ID NO: 2645698 - RNA, 19 nt, Homo sapiens
  misc_RNA (1)...(19): siRNA sense strand
gagacagaccagaggccca

SEQ ID NO: 2645699 - RNA, 19 nt, Homo sapiens
  misc_RNA (1)...(19): siRNA sense strand
accagaggcccaagaacaa

SEQ ID NO: 2645700 - RNA, 19 nt, Homo sapiens
  misc_RNA (1)...(19): siRNA sense strand
agaaacgacaggaggagca

SEQ ID NO: 2645701 - RNA, 19 nt, Homo sapiens
  misc_RNA (1)...(19): siRNA sense strand
uugugaaauccgaagaaaa

SEQ ID NO: 2645702 - RNA, 19 nt, Homo sapiens
  misc_RNA (1)...(19): siRNA sense strand
cuucaggaaaccagacaga

SEQ ID NO: 2645703 - RNA, 19 nt, Homo sapiens
  misc_RNA (1)...(19): siRNA sense strand
uccaagaaacagaugaaga

SEQ ID NO: 2645704 - RNA, 19 nt, Homo sapiens
  misc_RNA (1)...(19): siRNA sense strand
uugaggagaguuaggaaaa

SEQ ID NO: 2645705 - RNA, 19 nt, Homo sapiens
  misc_RNA (1)...(19): siRNA sense strand
cgugaaaauagaagcauca

SEQ ID NO: 2645706 - RNA, 19 nt, Homo sapiens
  misc_RNA (1)...(19): siRNA sense strand
augaugacgacgaaggaga

SEQ ID NO: 2645707 - RNA, 19 nt, Homo sapiens
  misc_RNA (1)...(19): siRNA sense strand
ugaugacgacgaaggagaa

SEQ ID NO: 2645708 - RNA, 19 nt, Homo sapiens
  misc_RNA (1)...(19): siRNA sense strand
acgacgaaggagaagauga

SEQ ID NO: 2645709 - RNA, 19 nt, Homo sapiens
  misc_RNA (1)...(19): siRNA sense strand
gcuugaggagaguuaggaa

SEQ ID NO: 2645710 - RNA, 19 nt, Homo sapiens
  misc_RNA (1)...(19): siRNA sense strand
aacucaaggaacagaagaa

SEQ ID NO: 2645711 - RNA, 19 nt, Homo sapiens
  misc_RNA (1)...(19): siRNA sense strand
ggcagaaacgacaggagga

SEQ ID NO: 2645712 - RNA, 19 nt, Homo sapiens
  misc_RNA (1)...(19): siRNA sense strand
agcagcaacucaaggaaca

SEQ ID NO: 2645713 - RNA, 19 nt, Homo sapiens
  misc_RNA (1)...(19): siRNA sense strand
gaaucaaagggcagcagca

SEQ ID NO: 2645714 - RNA, 19 nt, Homo sapiens
  misc_RNA (1)...(19): siRNA sense strand
agacagaccuggaugggag

SEQ ID NO: 2645715 - RNA, 19 nt, Homo sapiens
  misc_RNA (1)...(19): siRNA sense strand
gaugggagcuugaggagag

SEQ ID NO: 2645716 - RNA, 19 nt, Homo sapiens
  misc_RNA (1)...(19): siRNA sense strand
ggaauaagcuauaagggaa

SEQ ID NO: 2645717 - RNA, 19 nt, Homo sapiens
  misc_RNA (1)...(19): siRNA sense strand
aagaagaaccuuugggcaa

SEQ ID NO: 2645718 - RNA, 19 nt, Homo sapiens
  misc_RNA (1)...(19): siRNA sense strand
agaaguuagugaagagcaa

SEQ ID NO: 2645719 - RNA, 19 nt, Homo sapiens
  misc_RNA (1)...(19): siRNA sense strand
gaacuaaagaagaaggaga

SEQ ID NO: 2645720 - RNA, 19 nt, Homo sapiens
  misc_RNA (1)...(19): siRNA sense strand
gaauaagcuauaagggaau

SEQ ID NO: 2645721 - RNA, 19 nt, Homo sapiens
  misc_RNA (1)...(19): siRNA sense strand
cguucaaauuagaugacaa

SEQ ID NO: 2645722 - RNA, 19 nt, Homo sapiens
  misc_RNA (1)...(19): siRNA sense strand
ggaaagaaacccagccaga

SEQ ID NO: 2645723 - RNA, 19 nt, Homo sapiens
  misc_RNA (1)...(19): siRNA sense strand
aauuagguguggaaagaaa

SEQ ID NO: 2645724 - RNA, 19 nt, Homo sapiens
  misc_RNA (1)...(19): siRNA sense strand
gcaaaaugccaaaggagua

SEQ ID NO: 2645725 - RNA, 19 nt, Homo sapiens
  misc_RNA (1)...(19): siRNA sense strand
ggacaggguaauugagcau

SEQ ID NO: 2645726 - RNA, 19 nt, Homo sapiens
  misc_RNA (1)...(19): siRNA sense strand
caauaaacgaauaccgaau

SEQ ID NO: 2645727 - RNA, 19 nt, Homo sapiens
  misc_RNA (1)...(19): siRNA sense strand
aacagaaagucauaggaaa

SEQ ID NO: 2645728 - RNA, 19 nt, Homo sapiens
  misc_RNA (1)...(19): siRNA sense strand
ucgcagaacuagaacguca

SEQ ID NO: 2645729 - RNA, 19 nt, Homo sapiens
  misc_RNA (1)...(19): siRNA sense strand
cuauaagggaauuggccaa

SEQ ID NO: 2645730 - RNA, 19 nt, Homo sapiens
  misc_RNA (1)...(19): siRNA sense strand
agaaugacaccgagggaca

SEQ ID NO: 2645731 - RNA, 19 nt, Homo sapiens
  misc_RNA (1)...(19): siRNA sense strand
aaaucgaaguagagagcga

SEQ ID NO: 2645732 - RNA, 19 nt, Homo sapiens
  misc_RNA (1)...(19): siRNA sense strand
gugaagagcaaaagagaga

SEQ ID NO: 2645733 - RNA, 19 nt, Homo sapiens
  misc_RNA (1)...(19): siRNA sense strand
gcacauaguugcuccgcuu

SEQ ID NO: 2645734 - RNA, 19 nt, Homo sapiens
  misc_RNA (1)...(19): siRNA sense strand
ccaaucaagcacagaguau

SEQ ID NO: 2645735 - RNA, 19 nt, Homo sapiens
  misc_RNA (1)...(19): siRNA sense strand
ggcagaaggaucagggaca

SEQ ID NO: 2645736 - RNA, 19 nt, Homo sapiens
  misc_RNA (1)...(19): siRNA sense strand
cggagaugguacacggaga

SEQ ID NO: 2645737 - RNA, 19 nt, Homo sapiens
  misc_RNA (1)...(19): siRNA sense strand
gaagcaaagcaaagcaaaa

SEQ ID NO: 2645738 - RNA, 19 nt, Homo sapiens
  misc_RNA (1)...(19): siRNA sense strand
ggaacuugaaagagcaaca

SEQ ID NO: 2645739 - RNA, 19 nt, Homo sapiens
  misc_RNA (1)...(19): siRNA sense strand
agauuauaccagugaugaa

SEQ ID NO: 2645740 - RNA, 19 nt, Homo sapiens
  misc_RNA (1)...(19): siRNA sense strand
ccuccaagcuggugacacu

SEQ ID NO: 2645741 - RNA, 19 nt, Homo sapiens
  misc_RNA (1)...(19): siRNA sense strand
gaagagcaaaagagagaaa

SEQ ID NO: 2645742 - RNA, 19 nt, Homo sapiens
  misc_RNA (1)...(19): siRNA sense strand
aacuaaagaagaaggagaa

SEQ ID NO: 2645743 - RNA, 19 nt, Homo sapiens
  misc_RNA (1)...(19): siRNA sense strand
ccaaagaagcagcagcaca

SEQ ID NO: 2645744 - RNA, 19 nt, Homo sapiens
  misc_RNA (1)...(19): siRNA sense strand
ggaggaggucaaagaaaca

SEQ ID NO: 2645745 - RNA, 19 nt, Homo sapiens
  misc_RNA (1)...(19): siRNA sense strand
aagaagaaggagaaacuau

SEQ ID NO: 2645746 - RNA, 19 nt, Homo sapiens
  misc_RNA (1)...(19): siRNA sense strand
agaagcagcagcacagaaa

SEQ ID NO: 2645747 - RNA, 19 nt, Homo sapiens
  misc_RNA (1)...(19): siRNA sense strand
cuacaaaugcuucugggaa

SEQ ID NO: 2645748 - RNA, 19 nt, Homo sapiens
  misc_RNA (1)...(19): siRNA sense strand
acagaaagucauaggaaag

SEQ ID NO: 2645749 - RNA, 19 nt, Homo sapiens
  misc_RNA (1)...(19): siRNA sense strand
gguuuuacauugagagcau

SEQ ID NO: 2645750 - RNA, 19 nt, Homo sapiens
  misc_RNA (1)...(19): siRNA sense strand
aggcugagcucacaggcaa

SEQ ID NO: 2645751 - RNA, 19 nt, Homo sapiens
  misc_RNA (1)...(19): siRNA sense strand
cggaggaggucaaagaaac

SEQ ID NO: 2645752 - RNA, 19 nt, Homo sapiens
  misc_RNA (1)...(19): siRNA sense strand
aaggaaggcugcugcaaaa

SEQ ID NO: 2645753 - RNA, 19 nt, Homo sapiens
  misc_RNA (1)...(19): siRNA sense strand
caacagaacugcucccuga

SEQ ID NO: 2645754 - RNA, 19 nt, Homo sapiens
  misc_RNA (1)...(19): siRNA sense strand
aagacaaccuggagaguag

SEQ ID NO: 2645755 - RNA, 19 nt, Homo sapiens
  misc_RNA (1)...(19): siRNA sense strand
uggaauaagcuauaaggga

SEQ ID NO: 2645756 - RNA, 19 nt, Homo sapiens
  misc_RNA (1)...(19): siRNA sense strand
aguguuaccagaagacaua

SEQ ID NO: 2645757 - RNA, 19 nt, Homo sapiens
  misc_RNA (1)...(19): siRNA sense strand
acuaaagaagaaggagaaa

SEQ ID NO: 2645758 - RNA, 19 nt, Homo sapiens
  misc_RNA (1)...(19): siRNA sense strand
agaagaaggagaaacuauu

SEQ ID NO: 2645759 - RNA, 19 nt, Homo sapiens
  misc_RNA (1)...(19): siRNA sense strand
ggucagaagacgugugggu

SEQ ID NO: 2645760 - RNA, 19 nt, Homo sapiens
  misc_RNA (1)...(19): siRNA sense strand
cggaagcaaagcaaagcaa

SEQ ID NO: 2645761 - RNA, 19 nt, Homo sapiens
  misc_RNA (1)...(19): siRNA sense strand
gagcgaaggaggaggcaug

SEQ ID NO: 2645762 - RNA, 19 nt, Homo sapiens
  misc_RNA (1)...(19): siRNA sense strand
caucaaguccauuugggua

SEQ ID NO: 2645763 - RNA, 19 nt, Homo sapiens
  misc_RNA (1)...(19): siRNA sense strand
uccuugaacuaaagaagaa

SEQ ID NO: 2645764 - RNA, 19 nt, Homo sapiens
  misc_RNA (1)...(19): siRNA sense strand
ugguuaugucuaugagaau

SEQ ID NO: 2645765 - RNA, 19 nt, Homo sapiens
  misc_RNA (1)...(19): siRNA sense strand
ccucagcccacuauggaua

SEQ ID NO: 2645766 - RNA, 19 nt, Homo sapiens
  misc_RNA (1)...(19): siRNA sense strand
gauaugagcgccagaggga

SEQ ID NO: 2645767 - RNA, 19 nt, Homo sapiens
  misc_RNA (1)...(19): siRNA sense strand
cugcaaaaucggagcacau

SEQ ID NO: 2645768 - RNA, 19 nt, Homo sapiens
  misc_RNA (1)...(19): siRNA sense strand
aggucucacucgaggucaa

SEQ ID NO: 2645769 - RNA, 19 nt, Homo sapiens
  misc_RNA (1)...(19): siRNA sense strand
auauacaagacaaggugaa

SEQ ID NO: 2645770 - RNA, 19 nt, Homo sapiens
  misc_RNA (1)...(19): siRNA sense strand
uggugacacuggagacgaa

SEQ ID NO: 2645771 - RNA, 19 nt, Homo sapiens
  misc_RNA (1)...(19): siRNA sense strand
gagccagaccuuuguaaaa

SEQ ID NO: 2645772 - RNA, 19 nt, Homo sapiens
  misc_RNA (1)...(19): siRNA sense strand
ccgaauuagguguggaaag

SEQ ID NO: 2645773 - RNA, 19 nt, Homo sapiens
  misc_RNA (1)...(19): siRNA sense strand
aauggaaacagcuggagaa

SEQ ID NO: 2645774 - RNA, 19 nt, Homo sapiens
  misc_RNA (1)...(19): siRNA sense strand
agaggguaggacugggaaa

SEQ ID NO: 2645775 - RNA, 19 nt, Homo sapiens
  misc_RNA (1)...(19): siRNA sense strand
gcaauaaacgaauaccgaa

SEQ ID NO: 2645776 - RNA, 19 nt, Homo sapiens
  misc_RNA (1)...(19): siRNA sense strand
augaugaagaagaggaaua

SEQ ID NO: 2645777 - RNA, 19 nt, Homo sapiens
  misc_RNA (1)...(19): siRNA sense strand
agaugaugaagaagaggaa

SEQ ID NO: 2645778 - RNA, 19 nt, Homo sapiens
  misc_RNA (1)...(19): siRNA sense strand
agaugagccuggugagcau

SEQ ID NO: 2645779 - RNA, 19 nt, Homo sapiens
  misc_RNA (1)...(19): siRNA sense strand
augcagagcagguuggauu

SEQ ID NO: 2645780 - RNA, 19 nt, Homo sapiens
  misc_RNA (1)...(19): siRNA sense strand
gcauggaguggaaggugaa

SEQ ID NO: 2645781 - RNA, 19 nt, Homo sapiens
  misc_RNA (1)...(19): siRNA sense strand
augaagaagaggaauaaga

SEQ ID NO: 2645782 - RNA, 19 nt, Homo sapiens
  misc_RNA (1)...(19): siRNA sense strand
gagaaauccgacaaggaca

SEQ ID NO: 2645783 - RNA, 19 nt, Homo sapiens
  misc_RNA (1)...(19): siRNA sense strand
gggauuuauaucagugaga

SEQ ID NO: 2645784 - RNA, 19 nt, Homo sapiens
  misc_RNA (1)...(19): siRNA sense strand
agcaaagagcggagagcca

SEQ ID NO: 2645785 - RNA, 19 nt, Homo sapiens
  misc_RNA (1)...(19): siRNA sense strand
ccaaagagcucaaccacgu

SEQ ID NO: 2645786 - RNA, 19 nt, Homo sapiens
  misc_RNA (1)...(19): siRNA sense strand
augaauacuacgauccaaa

SEQ ID NO: 2645787 - RNA, 19 nt, Homo sapiens
  misc_RNA (1)...(19): siRNA sense strand
cggcagagacuuauccaga

SEQ ID NO: 2645788 - RNA, 19 nt, Homo sapiens
  misc_RNA (1)...(19): siRNA sense strand
agaagaacaccaaggacca

SEQ ID NO: 2645789 - RNA, 19 nt, Homo sapiens
  misc_RNA (1)...(19): siRNA sense strand
ggacggacgaugaagacga

SEQ ID NO: 2645790 - RNA, 19 nt, Homo sapiens
  misc_RNA (1)...(19): siRNA sense strand
gcaucgagcuggagugccu

SEQ ID NO: 2645791 - RNA, 19 nt, Homo sapiens
  misc_RNA (1)...(19): siRNA sense strand
ccggacggcacuagaguau

SEQ ID NO: 2645792 - RNA, 19 nt, Homo sapiens
  misc_RNA (1)...(19): siRNA sense strand
aggaaggaggccugcaaau

SEQ ID NO: 2645793 - RNA, 19 nt, Homo sapiens
  misc_RNA (1)...(19): siRNA sense strand
gcuucgagcuggaccgcuu

SEQ ID NO: 2645794 - RNA, 19 nt, Homo sapiens
  misc_RNA (1)...(19): siRNA sense strand
agagacuuauccagagcaa

SEQ ID NO: 2645795 - RNA, 19 nt, Homo sapiens
  misc_RNA (1)...(19): siRNA sense strand
acaggaaggagaugaacau

SEQ ID NO: 2645796 - RNA, 19 nt, Homo sapiens
  misc_RNA (1)...(19): siRNA sense strand
ggauagaggugcagaaccg

SEQ ID NO: 2645797 - RNA, 19 nt, Homo sapiens
  misc_RNA (1)...(19): siRNA sense strand
acaagaugcagcagcucaa

SEQ ID NO: 2645798 - RNA, 19 nt, Homo sapiens
  misc_RNA (1)...(19): siRNA sense strand
cauacaagcacgcgcacau

SEQ ID NO: 2645799 - RNA, 19 nt, Homo sapiens
  misc_RNA (1)...(19): siRNA sense strand
uggugaaggccaaggagca

SEQ ID NO: 2645800 - RNA, 19 nt, Homo sapiens
  misc_RNA (1)...(19): siRNA sense strand
gcaagggcgaagaaaccaa

SEQ ID NO: 2645801 - RNA, 19 nt, Homo sapiens
  misc_RNA (1)...(19): siRNA sense strand
cgcauggaguggaagguga

SEQ ID NO: 2645802 - RNA, 19 nt, Homo sapiens
  misc_RNA (1)...(19): siRNA sense strand
aguccuggaugcugcacaa

SEQ ID NO: 2645803 - RNA, 19 nt, Homo sapiens
  misc_RNA (1)...(19): siRNA sense strand
agacuuauccagagcaacu

SEQ ID NO: 2645804 - RNA, 19 nt, Homo sapiens
  misc_RNA (1)...(19): siRNA sense strand
augacaggaaggagaugaa

SEQ ID NO: 2645805 - RNA, 19 nt, Homo sapiens
  misc_RNA (1)...(19): siRNA sense strand
gccgaugacaggaaggaga

SEQ ID NO: 2645806 - RNA, 19 nt, Homo sapiens
  misc_RNA (1)...(19): siRNA sense strand
gaugagggcuggauggaug

SEQ ID NO: 2645807 - RNA, 19 nt, Homo sapiens
  misc_RNA (1)...(19): siRNA sense strand
cggcaagggcgaagaaacc

SEQ ID NO: 2645808 - RNA, 19 nt, Homo sapiens
  misc_RNA (1)...(19): siRNA sense strand
cagcacuaccagagcuaca

SEQ ID NO: 2645809 - RNA, 19 nt, Homo sapiens
  misc_RNA (1)...(19): siRNA sense strand
gagacauccaucaggagau

SEQ ID NO: 2645810 - RNA, 19 nt, Homo sapiens
  misc_RNA (1)...(19): siRNA sense strand
uccucaagcuggacaucaa

SEQ ID NO: 2645811 - RNA, 19 nt, Homo sapiens
  misc_RNA (1)...(19): siRNA sense strand
uggcuauguuaacaggcaa

SEQ ID NO: 2645812 - RNA, 19 nt, Homo sapiens
  misc_RNA (1)...(19): siRNA sense strand
gcugaaacacagugggaaa

SEQ ID NO: 2645813 - RNA, 19 nt, Homo sapiens
  misc_RNA (1)...(19): siRNA sense strand
ucauaaaggauguggaaau

SEQ ID NO: 2645814 - RNA, 19 nt, Homo sapiens
  misc_RNA (1)...(19): siRNA sense strand
agaugaaaguggcaggaaa

SEQ ID NO: 2645815 - RNA, 19 nt, Homo sapiens
  misc_RNA (1)...(19): siRNA sense strand
gaggaaaucuugugguuau

SEQ ID NO: 2645816 - RNA, 19 nt, Homo sapiens
  misc_RNA (1)...(19): siRNA sense strand
uaacaaaggugaaggacca

SEQ ID NO: 2645817 - RNA, 19 nt, Homo sapiens
  misc_RNA (1)...(19): siRNA sense strand
aguaagaacugaagaggca

SEQ ID NO: 2645818 - RNA, 19 nt, Homo sapiens
  misc_RNA (1)...(19): siRNA sense strand
ugagaaaguuggugggagu

SEQ ID NO: 2645819 - RNA, 19 nt, Homo sapiens
  misc_RNA (1)...(19): siRNA sense strand
aggaaauguuguuuggaau

SEQ ID NO: 2645820 - RNA, 19 nt, Homo sapiens
  misc_RNA (1)...(19): siRNA sense strand
ugaagaagauagucggaga

SEQ ID NO: 2645821 - RNA, 19 nt, Homo sapiens
  misc_RNA (1)...(19): siRNA sense strand
cagaaaaugugaagguaga

SEQ ID NO: 2645822 - RNA, 19 nt, Homo sapiens
  misc_RNA (1)...(19): siRNA sense strand
ccucagauuaauuggagaa

SEQ ID NO: 2645823 - RNA, 19 nt, Homo sapiens
  misc_RNA (1)...(19): siRNA sense strand
agaugaaauuacagacaca

SEQ ID NO: 2645824 - RNA, 19 nt, Homo sapiens
  misc_RNA (1)...(19): siRNA sense strand
augaaagcaucgugccaua

SEQ ID NO: 2645825 - RNA, 19 nt, Homo sapiens
  misc_RNA (1)...(19): siRNA sense strand
augugaagguagaugaaau

SEQ ID NO: 2645826 - RNA, 19 nt, Homo sapiens
  misc_RNA (1)...(19): siRNA sense strand
caacagugccugaggucau

SEQ ID NO: 2645827 - RNA, 19 nt, Homo sapiens
  misc_RNA (1)...(19): siRNA sense strand
caacagaaauugggauaca

SEQ ID NO: 2645828 - RNA, 19 nt, Homo sapiens
  misc_RNA (1)...(19): siRNA sense strand
caaaauuggagguggagaa

SEQ ID NO: 2645829 - RNA, 19 nt, Homo sapiens
  misc_RNA (1)...(19): siRNA sense strand
aguuaaagccauggagaau

SEQ ID NO: 2645830 - RNA, 19 nt, Homo sapiens
  misc_RNA (1)...(19): siRNA sense strand
ggacagucuuuauugggaa

SEQ ID NO: 2645831 - RNA, 19 nt, Homo sapiens
  misc_RNA (1)...(19): siRNA sense strand
aaguuaaagccauggagaa

SEQ ID NO: 2645832 - RNA, 19 nt, Homo sapiens
  misc_RNA (1)...(19): siRNA sense strand
agaaauugggauacaggaa

SEQ ID NO: 2645833 - RNA, 19 nt, Homo sapiens
  misc_RNA (1)...(19): siRNA sense strand
gagaagaagugaugggcug

SEQ ID NO: 2645834 - RNA, 19 nt, Homo sapiens
  misc_RNA (1)...(19): siRNA sense strand
uaaguugaauggaggaaau

SEQ ID NO: 2645835 - RNA, 19 nt, Homo sapiens
  misc_RNA (1)...(19): siRNA sense strand
caaccauagcccaguuaua

SEQ ID NO: 2645836 - RNA, 19 nt, Homo sapiens
  misc_RNA (1)...(19): siRNA sense strand
uggaaauagccguggagga

SEQ ID NO: 2645837 - RNA, 19 nt, Homo sapiens
  misc_RNA (1)...(19): siRNA sense strand
cugugaaauuggaauguuu

SEQ ID NO: 2645838 - RNA, 19 nt, Homo sapiens
  misc_RNA (1)...(19): siRNA sense strand
ugagaauucacgaggaaaa

SEQ ID NO: 2645839 - RNA, 19 nt, Homo sapiens
  misc_RNA (1)...(19): siRNA sense strand
aauuggagguggagaacca

SEQ ID NO: 2645840 - RNA, 19 nt, Homo sapiens
  misc_RNA (1)...(19): siRNA sense strand
uggugaagguuuuggguau

SEQ ID NO: 2645841 - RNA, 19 nt, Homo sapiens
  misc_RNA (1)...(19): siRNA sense strand
cuuaauugggagcaaguua

SEQ ID NO: 2645842 - RNA, 19 nt, Homo sapiens
  misc_RNA (1)...(19): siRNA sense strand
gaacaucguuauaaguuga

SEQ ID NO: 2645843 - RNA, 19 nt, Homo sapiens
  misc_RNA (1)...(19): siRNA sense strand
gcaacaaauucacuuggaa

SEQ ID NO: 2645844 - RNA, 19 nt, Homo sapiens
  misc_RNA (1)...(19): siRNA sense strand
acucauaaaggauguggaa

SEQ ID NO: 2645845 - RNA, 19 nt, Homo sapiens
  misc_RNA (1)...(19): siRNA sense strand
guuccaaugcauagcagaa

SEQ ID NO: 2645846 - RNA, 19 nt, Homo sapiens
  misc_RNA (1)...(19): siRNA sense strand
uaacaaaauuggaggugga

SEQ ID NO: 2645847 - RNA, 19 nt, Homo sapiens
  misc_RNA (1)...(19): siRNA sense strand
ggaaaugagacaucagcca

SEQ ID NO: 2645848 - RNA, 19 nt, Homo sapiens
  misc_RNA (1)...(19): siRNA sense strand
ugggaaagcaaauggcaca

SEQ ID NO: 2645849 - RNA, 19 nt, Homo sapiens
  misc_RNA (1)...(19): siRNA sense strand
gggaagacgcacacagcca

SEQ ID NO: 2645850 - RNA, 19 nt, Homo sapiens
  misc_RNA (1)...(19): siRNA sense strand
acgaauaaccaguauggau

SEQ ID NO: 2645851 - RNA, 19 nt, Homo sapiens
  misc_RNA (1)...(19): siRNA sense strand
uggaaagaagguaaagaca

SEQ ID NO: 2645852 - RNA, 19 nt, Homo sapiens
  misc_RNA (1)...(19): siRNA sense strand
ggauccagucccugaagaa

SEQ ID NO: 2645853 - RNA, 19 nt, Homo sapiens
  misc_RNA (1)...(19): siRNA sense strand
agaggagagaacacagaua

SEQ ID NO: 2645854 - RNA, 19 nt, Homo sapiens
  misc_RNA (1)...(19): siRNA sense strand
ugugaagguagaugaaauu

SEQ ID NO: 2645855 - RNA, 19 nt, Homo sapiens
  misc_RNA (1)...(19): siRNA sense strand
caucguuuguugaagaaga

SEQ ID NO: 2645856 - RNA, 19 nt, Homo sapiens
  misc_RNA (1)...(19): siRNA sense strand
ggauacaggaacuuaccaa

SEQ ID NO: 2645857 - RNA, 19 nt, Homo sapiens
  misc_RNA (1)...(19): siRNA sense strand
gaauaugaauuucggguug

SEQ ID NO: 2645858 - RNA, 19 nt, Homo sapiens
  misc_RNA (1)...(19): siRNA sense strand
aggaggaaucauccaguaa

SEQ ID NO: 2645859 - RNA, 19 nt, Homo sapiens
  misc_RNA (1)...(19): siRNA sense strand
gucagaaguaacaggauau

SEQ ID NO: 2645860 - RNA, 19 nt, Homo sapiens
  misc_RNA (1)...(19): siRNA sense strand
ccaaguuuacccucagaaa

SEQ ID NO: 2645861 - RNA, 19 nt, Homo sapiens
  misc_RNA (1)...(19): siRNA sense strand
agucaauggaggaggcgga

SEQ ID NO: 2645862 - RNA, 19 nt, Homo sapiens
  misc_RNA (1)...(19): siRNA sense strand
ccuuggaaguugagcaaug

SEQ ID NO: 2645863 - RNA, 19 nt, Homo sapiens
  misc_RNA (1)...(19): siRNA sense strand
ccauggagaaugagucaga

SEQ ID NO: 2645864 - RNA, 19 nt, Homo sapiens
  misc_RNA (1)...(19): siRNA sense strand
ccauuaaagaggacuacau

SEQ ID NO: 2645865 - RNA, 19 nt, Homo sapiens
  misc_RNA (1)...(19): siRNA sense strand
ugaaugcauugcugagaau

SEQ ID NO: 2645866 - RNA, 19 nt, Homo sapiens
  misc_RNA (1)...(19): siRNA sense strand
acggaaccaacaagaauaa

SEQ ID NO: 2645867 - RNA, 19 nt, Homo sapiens
  misc_RNA (1)...(19): siRNA sense strand
uauugggaaugcagggcaa

SEQ ID NO: 2645868 - RNA, 19 nt, Homo sapiens
  misc_RNA (1)...(19): siRNA sense strand
guagaugaaauuacagaca

SEQ ID NO: 2645869 - RNA, 19 nt, Homo sapiens
  misc_RNA (1)...(19): siRNA sense strand
acagaauggugaagguuuu

SEQ ID NO: 2645870 - RNA, 19 nt, Homo sapiens
  misc_RNA (1)...(19): siRNA sense strand
ggaugggaccaguagugaa

SEQ ID NO: 2645871 - RNA, 19 nt, Homo sapiens
  misc_RNA (1)...(19): siRNA sense strand
auaucaaaccuaaguguga

SEQ ID NO: 2645872 - RNA, 19 nt, Homo sapiens
  misc_RNA (1)...(19): siRNA sense strand
augcauagcagaaaacaaa

SEQ ID NO: 2645873 - RNA, 19 nt, Homo sapiens
  misc_RNA (1)...(19): siRNA sense strand
gacuaaagcugaugcugga

SEQ ID NO: 2645874 - RNA, 19 nt, Homo sapiens
  misc_RNA (1)...(19): siRNA sense strand
ggaggaaaucuugugguua

SEQ ID NO: 2645875 - RNA, 19 nt, Homo sapiens
  misc_RNA (1)...(19): siRNA sense strand
guuauuaaucccaacagaa

SEQ ID NO: 2645876 - RNA, 19 nt, Homo sapiens
  misc_RNA (1)...(19): siRNA sense strand
gaagaagauagucggagau

SEQ ID NO: 2645877 - RNA, 19 nt, Homo sapiens
  misc_RNA (1)...(19): siRNA sense strand
gcugcugaccucauaguaa

SEQ ID NO: 2645878 - RNA, 19 nt, Homo sapiens
  misc_RNA (1)...(19): siRNA sense strand
uggaggaaaucuugugguu

SEQ ID NO: 2645879 - RNA, 19 nt, Homo sapiens
  misc_RNA (1)...(19): siRNA sense strand
cguuauaaguugaauggag

SEQ ID NO: 2645880 - RNA, 19 nt, Homo sapiens
  misc_RNA (1)...(19): siRNA sense strand
guuacuuaauugggagcaa

SEQ ID NO: 2645881 - RNA, 19 nt, Homo sapiens
  misc_RNA (1)...(19): siRNA sense strand
aggagagaacacagauaga

SEQ ID NO: 2645882 - RNA, 19 nt, Homo sapiens
  misc_RNA (1)...(19): siRNA sense strand
cugaagaggcaguuccaga

SEQ ID NO: 2645883 - RNA, 19 nt, Homo sapiens
  misc_RNA (1)...(19): siRNA sense strand
agguaacaauggugggaaa

SEQ ID NO: 2645884 - RNA, 19 nt, Homo sapiens
  misc_RNA (1)...(19): siRNA sense strand
aggaagaagcuguagaauu

SEQ ID NO: 2645885 - RNA, 19 nt, Homo sapiens
  misc_RNA (1)...(19): siRNA sense strand
gguagagauccaagagcaa

SEQ ID NO: 2645886 - RNA, 19 nt, Homo sapiens
  misc_RNA (1)...(19): siRNA sense strand
ggguuggaguaaagaguga

SEQ ID NO: 2645887 - RNA, 19 nt, Homo sapiens
  misc_RNA (1)...(19): siRNA sense strand
gaguaaagagugagccaca

SEQ ID NO: 2645888 - RNA, 19 nt, Homo sapiens
  misc_RNA (1)...(19): siRNA sense strand
ggguagagauccaagagca

SEQ ID NO: 2645889 - RNA, 19 nt, Homo sapiens
  misc_RNA (1)...(19): siRNA sense strand
agcaacaauucaagagcaa

SEQ ID NO: 2645890 - RNA, 19 nt, Homo sapiens
  misc_RNA (1)...(19): siRNA sense strand
aggugguacuggaggaaga

SEQ ID NO: 2645891 - RNA, 19 nt, Homo sapiens
  misc_RNA (1)...(19): siRNA sense strand
aggaauggauagugaaucu

SEQ ID NO: 2645892 - RNA, 19 nt, Homo sapiens
  misc_RNA (1)...(19): siRNA sense strand
gguucguacuacugaagaa

SEQ ID NO: 2645893 - RNA, 19 nt, Homo sapiens
  misc_RNA (1)...(19): siRNA sense strand
augacaaggaagaaagaau

SEQ ID NO: 2645894 - RNA, 19 nt, Homo sapiens
  misc_RNA (1)...(19): siRNA sense strand
ccugugaaacuaaaggaaa

SEQ ID NO: 2645895 - RNA, 19 nt, Homo sapiens
  misc_RNA (1)...(19): siRNA sense strand
aguggaugguacagcguua

SEQ ID NO: 2645896 - RNA, 19 nt, Homo sapiens
  misc_RNA (1)...(19): siRNA sense strand
acaguuuacaggugaauua

SEQ ID NO: 2645897 - RNA, 19 nt, Homo sapiens
  misc_RNA (1)...(19): siRNA sense strand
gaaagaagaggaagggacu

SEQ ID NO: 2645898 - RNA, 19 nt, Homo sapiens
  misc_RNA (1)...(19): siRNA sense strand
cugagaaucggguuggaaa

SEQ ID NO: 2645899 - RNA, 19 nt, Homo sapiens
  misc_RNA (1)...(19): siRNA sense strand
gggaagagaugcaacccau

SEQ ID NO: 2645900 - RNA, 19 nt, Homo sapiens
  misc_RNA (1)...(19): siRNA sense strand
gcucaaggucgaacaguga

SEQ ID NO: 2645901 - RNA, 19 nt, Homo sapiens
  misc_RNA (1)...(19): siRNA sense strand
auggaggacuaaugagcaa

SEQ ID NO: 2645902 - RNA, 19 nt, Homo sapiens
  misc_RNA (1)...(19): siRNA sense strand
cgagcuugccaguaaauaa

SEQ ID NO: 2645903 - RNA, 19 nt, Homo sapiens
  misc_RNA (1)...(19): siRNA sense strand
gccaauaauaaucgggaga

SEQ ID NO: 2645904 - RNA, 19 nt, Homo sapiens
  misc_RNA (1)...(19): siRNA sense strand
uggaagaugaacuggaaga

SEQ ID NO: 2645905 - RNA, 19 nt, Homo sapiens
  misc_RNA (1)...(19): siRNA sense strand
ucucaaagaccucgaccua

SEQ ID NO: 2645906 - RNA, 19 nt, Homo sapiens
  misc_RNA (1)...(19): siRNA sense strand
cugugaaacuaaaggaaac

SEQ ID NO: 2645907 - RNA, 19 nt, Homo sapiens
  misc_RNA (1)...(19): siRNA sense strand
ucaaagaggagauggagga

SEQ ID NO: 2645908 - RNA, 19 nt, Homo sapiens
  misc_RNA (1)...(19): siRNA sense strand
ccaguaaauaauagcaaca

SEQ ID NO: 2645909 - RNA, 19 nt, Homo sapiens
  misc_RNA (1)...(19): siRNA sense strand
ggcgaagaaagaagaggaa

SEQ ID NO: 2645910 - RNA, 19 nt, Homo sapiens
  misc_RNA (1)...(19): siRNA sense strand
cugcaauccuggagugcca

SEQ ID NO: 2645911 - RNA, 19 nt, Homo sapiens
  misc_RNA (1)...(19): siRNA sense strand
gaggaagguaugacaucaa

SEQ ID NO: 2645912 - RNA, 19 nt, Homo sapiens
  misc_RNA (1)...(19): siRNA sense strand
gcugguuaaaggagggauu

SEQ ID NO: 2645913 - RNA, 19 nt, Homo sapiens
  misc_RNA (1)...(19): siRNA sense strand
aggaagggacucaguaauu

SEQ ID NO: 2645914 - RNA, 19 nt, Homo sapiens
  misc_RNA (1)...(19): siRNA sense strand
gcaagugcagaaagagcua

SEQ ID NO: 2645915 - RNA, 19 nt, Homo sapiens
  misc_RNA (1)...(19): siRNA sense strand
gcgacaucuucguggcaga

SEQ ID NO: 2645916 - RNA, 19 nt, Homo sapiens
  misc_RNA (1)...(19): siRNA sense strand
gcagaauuuagaugccaaa

SEQ ID NO: 2645917 - RNA, 19 nt, Homo sapiens
  misc_RNA (1)...(19): siRNA sense strand
gcgcaaugccagcgaccuu

SEQ ID NO: 2645918 - RNA, 19 nt, Homo sapiens
  misc_RNA (1)...(19): siRNA sense strand
gggagcgaguggagacuga

SEQ ID NO: 2645919 - RNA, 19 nt, Homo sapiens
  misc_RNA (1)...(19): siRNA sense strand
ugacagaugaggaggccuu

SEQ ID NO: 2645920 - RNA, 19 nt, Homo sapiens
  misc_RNA (1)...(19): siRNA sense strand
uggcacauucaaagcaaua

SEQ ID NO: 2645921 - RNA, 19 nt, Homo sapiens
  misc_RNA (1)...(19): siRNA sense strand
caguagaugcucaguguca

SEQ ID NO: 2645922 - RNA, 19 nt, Homo sapiens
  misc_RNA (1)...(19): siRNA sense strand
uuguauuggcgaagaaaga

SEQ ID NO: 2645923 - RNA, 19 nt, Homo sapiens
  misc_RNA (1)...(19): siRNA sense strand
agaggaagggacucaguaa

SEQ ID NO: 2645924 - RNA, 19 nt, Homo sapiens
  misc_RNA (1)...(19): siRNA sense strand
aagaggaagcuuuagaaau

SEQ ID NO: 2645925 - RNA, 19 nt, Homo sapiens
  misc_RNA (1)...(19): siRNA sense strand
ggaagaaagaauaaguauc

SEQ ID NO: 2645926 - RNA, 19 nt, Homo sapiens
  misc_RNA (1)...(19): siRNA sense strand
aaguauccgugguggaaaa

SEQ ID NO: 2645927 - RNA, 19 nt, Homo sapiens
  misc_RNA (1)...(19): siRNA sense strand
gcuggcagaccguggcaaa

SEQ ID NO: 2645928 - RNA, 19 nt, Homo sapiens
  misc_RNA (1)...(19): siRNA sense strand
cgggagacgcaaugaaguu

SEQ ID NO: 2645929 - RNA, 19 nt, Homo sapiens
  misc_RNA (1)...(19): siRNA sense strand
cgaagaaagaagaggaagg

SEQ ID NO: 2645930 - RNA, 19 nt, Homo sapiens
  misc_RNA (1)...(19): siRNA sense strand
ucgaauugaugacaaggaa

SEQ ID NO: 2645931 - RNA, 19 nt, Homo sapiens
  misc_RNA (1)...(19): siRNA sense strand
ccaacugugagguggaaaa

SEQ ID NO: 2645932 - RNA, 19 nt, Homo sapiens
  misc_RNA (1)...(19): siRNA sense strand
gguaugacaucaaagacga

SEQ ID NO: 2645933 - RNA, 19 nt, Homo sapiens
  misc_RNA (1)...(19): siRNA sense strand
caaggaauggauagugaau

SEQ ID NO: 2645934 - RNA, 19 nt, Homo sapiens
  misc_RNA (1)...(19): siRNA sense strand
ggaagaugaacuggaagaa

SEQ ID NO: 2645935 - RNA, 19 nt, Homo sapiens
  misc_RNA (1)...(19): siRNA sense strand
ccuuauucuucuugcgcau

SEQ ID NO: 2645936 - RNA, 19 nt, Homo sapiens
  misc_RNA (1)...(19): siRNA sense strand
uguagaauuucguugucaa

SEQ ID NO: 2645937 - RNA, 19 nt, Homo sapiens
  misc_RNA (1)...(19): siRNA sense strand
agaucagauuguugcucaa

SEQ ID NO: 2645938 - RNA, 19 nt, Homo sapiens
  misc_RNA (1)...(19): siRNA sense strand
ccguaauaauugguggauu

SEQ ID NO: 2645939 - RNA, 19 nt, Homo sapiens
  misc_RNA (1)...(19): siRNA sense strand
ccacaauggaaaagcucaa

SEQ ID NO: 2645940 - RNA, 19 nt, Homo sapiens
  misc_RNA (1)...(19): siRNA sense strand
gcugauguuuacacaacua

SEQ ID NO: 2645941 - RNA, 19 nt, Homo sapiens
  misc_RNA (1)...(19): siRNA sense strand
ccuucuugacauaggauau

SEQ ID NO: 2645942 - RNA, 19 nt, Homo sapiens
  misc_RNA (1)...(19): siRNA sense strand
guacaaagauggggagcga

SEQ ID NO: 2645943 - RNA, 19 nt, Homo sapiens
  misc_RNA (1)...(19): siRNA sense strand
cgauuacacacuaagaauu

SEQ ID NO: 2645944 - RNA, 19 nt, Homo sapiens
  misc_RNA (1)...(19): siRNA sense strand
acaggcaagugcagaaaga

SEQ ID NO: 2645945 - RNA, 19 nt, Homo sapiens
  misc_RNA (1)...(19): siRNA sense strand
cagaagacgaugaggacga

SEQ ID NO: 2645946 - RNA, 19 nt, Homo sapiens
  misc_RNA (1)...(19): siRNA sense strand
cagaugguacggagggaua

SEQ ID NO: 2645947 - RNA, 19 nt, Homo sapiens
  misc_RNA (1)...(19): siRNA sense strand
ccgggaaggacgaggauca

SEQ ID NO: 2645948 - RNA, 19 nt, Homo sapiens
  misc_RNA (1)...(19): siRNA sense strand
gggaaggaaugaagcgugu

SEQ ID NO: 2645949 - RNA, 19 nt, Homo sapiens
  misc_RNA (1)...(19): siRNA sense strand
gaaccaggcugcagaggca

SEQ ID NO: 2645950 - RNA, 19 nt, Homo sapiens
  misc_RNA (1)...(19): siRNA sense strand
agucagaggcagaagacga

SEQ ID NO: 2645951 - RNA, 19 nt, Homo sapiens
  misc_RNA (1)...(19): siRNA sense strand
uggacaugcuggagaaacu

SEQ ID NO: 2645952 - RNA, 19 nt, Homo sapiens
  misc_RNA (1)...(19): siRNA sense strand
ggaaaguggcucagggccu

SEQ ID NO: 2645953 - RNA, 19 nt, Homo sapiens
  misc_RNA (1)...(19): siRNA sense strand
ccaguaauccaaagaugua

SEQ ID NO: 2645954 - RNA, 19 nt, Homo sapiens
  misc_RNA (1)...(19): siRNA sense strand
ugacauuaacagcagcaaa

SEQ ID NO: 2645955 - RNA, 19 nt, Homo sapiens
  misc_RNA (1)...(19): siRNA sense strand
aucaacaagacgaggcaaa

SEQ ID NO: 2645956 - RNA, 19 nt, Homo sapiens
  misc_RNA (1)...(19): siRNA sense strand
aggcagaagacgaugagga

SEQ ID NO: 2645957 - RNA, 19 nt, Homo sapiens
  misc_RNA (1)...(19): siRNA sense strand
gugaugaacuaccggcaga

SEQ ID NO: 2645958 - RNA, 19 nt, Homo sapiens
  misc_RNA (1)...(19): siRNA sense strand
aggagaucaucaagggcau

SEQ ID NO: 2645959 - RNA, 19 nt, Homo sapiens
  misc_RNA (1)...(19): siRNA sense strand
ugguaugagcugcaagcaa

SEQ ID NO: 2645960 - RNA, 19 nt, Homo sapiens
  misc_RNA (1)...(19): siRNA sense strand
gagcaagucccaugagucu

SEQ ID NO: 2645961 - RNA, 19 nt, Homo sapiens
  misc_RNA (1)...(19): siRNA sense strand
ggcaaaucgcucaggagau

SEQ ID NO: 2645962 - RNA, 19 nt, Homo sapiens
  misc_RNA (1)...(19): siRNA sense strand
ugggauaucuucaugccaa

SEQ ID NO: 2645963 - RNA, 19 nt, Homo sapiens
  misc_RNA (1)...(19): siRNA sense strand
gcagauuggaagcggggaa

SEQ ID NO: 2645964 - RNA, 19 nt, Homo sapiens
  misc_RNA (1)...(19): siRNA sense strand
cuggcaagucagaggcaga

SEQ ID NO: 2645965 - RNA, 19 nt, Homo sapiens
  misc_RNA (1)...(19): siRNA sense strand
aggcaaaucgcucaggaga

SEQ ID NO: 2645966 - RNA, 19 nt, Homo sapiens
  misc_RNA (1)...(19): siRNA sense strand
cggcuucggaggacagaau

SEQ ID NO: 2645967 - RNA, 19 nt, Homo sapiens
  misc_RNA (1)...(19): siRNA sense strand
gugagaugcuggugccguu

SEQ ID NO: 2645968 - RNA, 19 nt, Homo sapiens
  misc_RNA (1)...(19): siRNA sense strand
acgaugaggacgaggugga

SEQ ID NO: 2645969 - RNA, 19 nt, Homo sapiens
  misc_RNA (1)...(19): siRNA sense strand
ccuccuuauugcagaaagu

SEQ ID NO: 2645970 - RNA, 19 nt, Homo sapiens
  misc_RNA (1)...(19): siRNA sense strand
aggccaaggugaaggagac

SEQ ID NO: 2645971 - RNA, 19 nt, Homo sapiens
  misc_RNA (1)...(19): siRNA sense strand
gguaugagcugcaagcaag

SEQ ID NO: 2645972 - RNA, 19 nt, Homo sapiens
  misc_RNA (1)...(19): siRNA sense strand
cagauguguuggaagcuca

SEQ ID NO: 2645973 - RNA, 19 nt, Homo sapiens
  misc_RNA (1)...(19): siRNA sense strand
augagaacguggugcucuu

SEQ ID NO: 2645974 - RNA, 19 nt, Homo sapiens
  misc_RNA (1)...(19): siRNA sense strand
cccaagacgucucuggaca

SEQ ID NO: 2645975 - RNA, 19 nt, Homo sapiens
  misc_RNA (1)...(19): siRNA sense strand
gcuacaagggugagaagaa

SEQ ID NO: 2645976 - RNA, 19 nt, Homo sapiens
  misc_RNA (1)...(19): siRNA sense strand
ugaugaaggaugaaaguaa

SEQ ID NO: 2645977 - RNA, 19 nt, Homo sapiens
  misc_RNA (1)...(19): siRNA sense strand
ucuuaaagguugagcacuu

SEQ ID NO: 2645978 - RNA, 19 nt, Homo sapiens
  misc_RNA (1)...(19): siRNA sense strand
ugaugaaguuggugaugaa

SEQ ID NO: 2645979 - RNA, 19 nt, Homo sapiens
  misc_RNA (1)...(19): siRNA sense strand
gguuaaagauugauccaca

SEQ ID NO: 2645980 - RNA, 19 nt, Homo sapiens
  misc_RNA (1)...(19): siRNA sense strand
guucuaaagcaaaggaaaa

SEQ ID NO: 2645981 - RNA, 19 nt, Homo sapiens
  misc_RNA (1)...(19): siRNA sense strand
gagaagaagcaacggguca

SEQ ID NO: 2645982 - RNA, 19 nt, Homo sapiens
  misc_RNA (1)...(19): siRNA sense strand
augcaaaacuucugggcaa

SEQ ID NO: 2645983 - RNA, 19 nt, Homo sapiens
  misc_RNA (1)...(19): siRNA sense strand
ugacagaggaagauggaca

SEQ ID NO: 2645984 - RNA, 19 nt, Homo sapiens
  misc_RNA (1)...(19): siRNA sense strand
cggaaggaacauagugaga

SEQ ID NO: 2645985 - RNA, 19 nt, Homo sapiens
  misc_RNA (1)...(19): siRNA sense strand
aggaacuacuucugagcua

SEQ ID NO: 2645986 - RNA, 19 nt, Homo sapiens
  misc_RNA (1)...(19): siRNA sense strand
auugauaaccuguggauuu

SEQ ID NO: 2645987 - RNA, 19 nt, Homo sapiens
  misc_RNA (1)...(19): siRNA sense strand
acaagauggagcugcgaaa

SEQ ID NO: 2645988 - RNA, 19 nt, Homo sapiens
  misc_RNA (1)...(19): siRNA sense strand
ccauacaacacaacugaaa

SEQ ID NO: 2645989 - RNA, 19 nt, Homo sapiens
  misc_RNA (1)...(19): siRNA sense strand
cggauuuccuggacaacua

SEQ ID NO: 2645990 - RNA, 19 nt, Homo sapiens
  misc_RNA (1)...(19): siRNA sense strand
gggaaagcuagaaacuaaa

SEQ ID NO: 2645991 - RNA, 19 nt, Homo sapiens
  misc_RNA (1)...(19): siRNA sense strand
cagaacggaccuacagaaa

SEQ ID NO: 2645992 - RNA, 19 nt, Homo sapiens
  misc_RNA (1)...(19): siRNA sense strand
guucagaggugacagaaaa

SEQ ID NO: 2645993 - RNA, 19 nt, Homo sapiens
  misc_RNA (1)...(19): siRNA sense strand
cauucaacuuggagauaca

SEQ ID NO: 2645994 - RNA, 19 nt, Homo sapiens
  misc_RNA (1)...(19): siRNA sense strand
acuugaaggucgaagacau

SEQ ID NO: 2645995 - RNA, 19 nt, Homo sapiens
  misc_RNA (1)...(19): siRNA sense strand
acuaagagccacuguguuu

SEQ ID NO: 2645996 - RNA, 19 nt, Homo sapiens
  misc_RNA (1)...(19): siRNA sense strand
gggacuacaucaagggacu

SEQ ID NO: 2645997 - RNA, 19 nt, Homo sapiens
  misc_RNA (1)...(19): siRNA sense strand
ugaagaauaucgaggagca

SEQ ID NO: 2645998 - RNA, 19 nt, Homo sapiens
  misc_RNA (1)...(19): siRNA sense strand
auguagaaccuaagcggaa

SEQ ID NO: 2645999 - RNA, 19 nt, Homo sapiens
  misc_RNA (1)...(19): siRNA sense strand
gggcauuagcagucggcau

SEQ ID NO: 2646000 - RNA, 19 nt, Homo sapiens
  misc_RNA (1)...(19): siRNA sense strand
gugcaggagcugauggaga

SEQ ID NO: 2646001 - RNA, 19 nt, Homo sapiens
  misc_RNA (1)...(19): siRNA sense strand
gcacuagagacuucaggaa

SEQ ID NO: 2646002 - RNA, 19 nt, Homo sapiens
  misc_RNA (1)...(19): siRNA sense strand
guguggaccucuugaccaa

SEQ ID NO: 2646003 - RNA, 19 nt, Homo sapiens
  misc_RNA (1)...(19): siRNA sense strand
cuaauugaagagacagaua

SEQ ID NO: 2646004 - RNA, 19 nt, Homo sapiens
  misc_RNA (1)...(19): siRNA sense strand
acuggugacuacuggaaua

SEQ ID NO: 2646005 - RNA, 19 nt, Homo sapiens
  misc_RNA (1)...(19): siRNA sense strand
uuuggauagugaugggaaa

SEQ ID NO: 2646006 - RNA, 19 nt, Homo sapiens
  misc_RNA (1)...(19): siRNA sense strand
gaaaguaaggagagugcca

SEQ ID NO: 2646007 - RNA, 19 nt, Homo sapiens
  misc_RNA (1)...(19): siRNA sense strand
ugguuagaggugaagaaua

SEQ ID NO: 2646008 - RNA, 19 nt, Homo sapiens
  misc_RNA (1)...(19): siRNA sense strand
guuaagauggagaacacaa

SEQ ID NO: 2646009 - RNA, 19 nt, Homo sapiens
  misc_RNA (1)...(19): siRNA sense strand
agaaguggcugaagggacu

SEQ ID NO: 2646010 - RNA, 19 nt, Homo sapiens
  misc_RNA (1)...(19): siRNA sense strand
aaguaaggagagugccaaa

SEQ ID NO: 2646011 - RNA, 19 nt, Homo sapiens
  misc_RNA (1)...(19): siRNA sense strand
aggaacauagugagaagaa

SEQ ID NO: 2646012 - RNA, 19 nt, Homo sapiens
  misc_RNA (1)...(19): siRNA sense strand
ucaaggagguggaggugca

SEQ ID NO: 2646013 - RNA, 19 nt, Homo sapiens
  misc_RNA (1)...(19): siRNA sense strand
gcugaagggacuacaucaa

SEQ ID NO: 2646014 - RNA, 19 nt, Homo sapiens
  misc_RNA (1)...(19): siRNA sense strand
ggaugaaaguaaggagagu

SEQ ID NO: 2646015 - RNA, 19 nt, Homo sapiens
  misc_RNA (1)...(19): siRNA sense strand
gucgaaugcucaagugcaa

SEQ ID NO: 2646016 - RNA, 19 nt, Homo sapiens
  misc_RNA (1)...(19): siRNA sense strand
aaagagaagcuaaggcuga

SEQ ID NO: 2646017 - RNA, 19 nt, Homo sapiens
  misc_RNA (1)...(19): siRNA sense strand
cugaacugcugcuggaaga

SEQ ID NO: 2646018 - RNA, 19 nt, Homo sapiens
  misc_RNA (1)...(19): siRNA sense strand
gcgaaagcagcaagaagau

SEQ ID NO: 2646019 - RNA, 19 nt, Homo sapiens
  misc_RNA (1)...(19): siRNA sense strand
augaagaggauaaguccaa

SEQ ID NO: 2646020 - RNA, 19 nt, Homo sapiens
  misc_RNA (1)...(19): siRNA sense strand
gcaggaagaggaggagaaa

SEQ ID NO: 2646021 - RNA, 19 nt, Homo sapiens
  misc_RNA (1)...(19): siRNA sense strand
agcaggaagaggaggagaa

SEQ ID NO: 2646022 - RNA, 19 nt, Homo sapiens
  misc_RNA (1)...(19): siRNA sense strand
cuauaaacaucaugguucu

SEQ ID NO: 2646023 - RNA, 19 nt, Homo sapiens
  misc_RNA (1)...(19): siRNA sense strand
gaucaacagcaaaguucua

SEQ ID NO: 2646024 - RNA, 19 nt, Homo sapiens
  misc_RNA (1)...(19): siRNA sense strand
gaaccuaagcggaaggaac

SEQ ID NO: 2646025 - RNA, 19 nt, Homo sapiens
  misc_RNA (1)...(19): siRNA sense strand
gcagcuggaaagugaagaa

SEQ ID NO: 2646026 - RNA, 19 nt, Homo sapiens
  misc_RNA (1)...(19): siRNA sense strand
aggucaagguuaagaugga

SEQ ID NO: 2646027 - RNA, 19 nt, Homo sapiens
  misc_RNA (1)...(19): siRNA sense strand
gcaaaauugaggagcucua

SEQ ID NO: 2646028 - RNA, 19 nt, Homo sapiens
  misc_RNA (1)...(19): siRNA sense strand
acguggcaguggagaggaa

SEQ ID NO: 2646029 - RNA, 19 nt, Homo sapiens
  misc_RNA (1)...(19): siRNA sense strand
ccagauggugagugaccua

SEQ ID NO: 2646030 - RNA, 19 nt, Homo sapiens
  misc_RNA (1)...(19): siRNA sense strand
caaaagacauccuggacuu

SEQ ID NO: 2646031 - RNA, 19 nt, Homo sapiens
  misc_RNA (1)...(19): siRNA sense strand
cuggagaagcagauguauu

SEQ ID NO: 2646032 - RNA, 19 nt, Homo sapiens
  misc_RNA (1)...(19): siRNA sense strand
agguuaagauggagaacac

SEQ ID NO: 2646033 - RNA, 19 nt, Homo sapiens
  misc_RNA (1)...(19): siRNA sense strand
gguuauaugauggguacaa

SEQ ID NO: 2646034 - RNA, 19 nt, Homo sapiens
  misc_RNA (1)...(19): siRNA sense strand
cagcaaguccagcggauca

SEQ ID NO: 2646035 - RNA, 19 nt, Homo sapiens
  misc_RNA (1)...(19): siRNA sense strand
ggagcaacgcagcagcaua

SEQ ID NO: 2646036 - RNA, 19 nt, Homo sapiens
  misc_RNA (1)...(19): siRNA sense strand
ucuacagcaaggugaauaa

SEQ ID NO: 2646037 - RNA, 19 nt, Homo sapiens
  misc_RNA (1)...(19): siRNA sense strand
uguucuaaagcaaaggaaa

SEQ ID NO: 2646038 - RNA, 19 nt, Homo sapiens
  misc_RNA (1)...(19): siRNA sense strand
gcucugagguccggggaaa

SEQ ID NO: 2646039 - RNA, 19 nt, Homo sapiens
  misc_RNA (1)...(19): siRNA sense strand
gcgcugggguggaucaaaa

SEQ ID NO: 2646040 - RNA, 19 nt, Homo sapiens
  misc_RNA (1)...(19): siRNA sense strand
uguucagaggugacagaaa

SEQ ID NO: 2646041 - RNA, 19 nt, Homo sapiens
  misc_RNA (1)...(19): siRNA sense strand
gugaauaagucugaugaca

SEQ ID NO: 2646042 - RNA, 19 nt, Homo sapiens
  misc_RNA (1)...(19): siRNA sense strand
ugacaagaugaaagagcga

SEQ ID NO: 2646043 - RNA, 19 nt, Homo sapiens
  misc_RNA (1)...(19): siRNA sense strand
aggaagaagaagaggaaca

SEQ ID NO: 2646044 - RNA, 19 nt, Homo sapiens
  misc_RNA (1)...(19): siRNA sense strand
caguagaagcacaggaaga

SEQ ID NO: 2646045 - RNA, 19 nt, Homo sapiens
  misc_RNA (1)...(19): siRNA sense strand
cugcagaaauggagaaacu

SEQ ID NO: 2646046 - RNA, 19 nt, Homo sapiens
  misc_RNA (1)...(19): siRNA sense strand
ccauggagaaagaggcuaa

SEQ ID NO: 2646047 - RNA, 19 nt, Homo sapiens
  misc_RNA (1)...(19): siRNA sense strand
acgucaagccagagagauu

SEQ ID NO: 2646048 - RNA, 19 nt, Homo sapiens
  misc_RNA (1)...(19): siRNA sense strand
uuucaaagcagaaggagaa

SEQ ID NO: 2646049 - RNA, 19 nt, Homo sapiens
  misc_RNA (1)...(19): siRNA sense strand
aagcagaagaagaagcuaa

SEQ ID NO: 2646050 - RNA, 19 nt, Homo sapiens
  misc_RNA (1)...(19): siRNA sense strand
ccaaugaagugguggccau

SEQ ID NO: 2646051 - RNA, 19 nt, Homo sapiens
  misc_RNA (1)...(19): siRNA sense strand
caguaagagagcuggacaa

SEQ ID NO: 2646052 - RNA, 19 nt, Homo sapiens
  misc_RNA (1)...(19): siRNA sense strand
aggacaauaugauggcaaa

SEQ ID NO: 2646053 - RNA, 19 nt, Homo sapiens
  misc_RNA (1)...(19): siRNA sense strand
acugagaaauggcaggaua

SEQ ID NO: 2646054 - RNA, 19 nt, Homo sapiens
  misc_RNA (1)...(19): siRNA sense strand
cauuacaagaaguggaaau

SEQ ID NO: 2646055 - RNA, 19 nt, Homo sapiens
  misc_RNA (1)...(19): siRNA sense strand
caguaugaucacagcauua

SEQ ID NO: 2646056 - RNA, 19 nt, Homo sapiens
  misc_RNA (1)...(19): siRNA sense strand
acaaauauccaauggguca

SEQ ID NO: 2646057 - RNA, 19 nt, Homo sapiens
  misc_RNA (1)...(19): siRNA sense strand
acaacaugaucgagagcuu

SEQ ID NO: 2646058 - RNA, 19 nt, Homo sapiens
  misc_RNA (1)...(19): siRNA sense strand
caccaaagagugagcacaa

SEQ ID NO: 2646059 - RNA, 19 nt, Homo sapiens
  misc_RNA (1)...(19): siRNA sense strand
aguuaauaguguuggaagu

SEQ ID NO: 2646060 - RNA, 19 nt, Homo sapiens
  misc_RNA (1)...(19): siRNA sense strand
uagacaugauggagggaga

SEQ ID NO: 2646061 - RNA, 19 nt, Homo sapiens
  misc_RNA (1)...(19): siRNA sense strand
ggaagaagaagaggaacaa

SEQ ID NO: 2646062 - RNA, 19 nt, Homo sapiens
  misc_RNA (1)...(19): siRNA sense strand
aggcuaaagugauguccaa

SEQ ID NO: 2646063 - RNA, 19 nt, Homo sapiens
  misc_RNA (1)...(19): siRNA sense strand
agccauggaugaaggacaa

SEQ ID NO: 2646064 - RNA, 19 nt, Homo sapiens
  misc_RNA (1)...(19): siRNA sense strand
acauaauggaccagcagua

SEQ ID NO: 2646065 - RNA, 19 nt, Homo sapiens
  misc_RNA (1)...(19): siRNA sense strand
acaggaagaagaagaggaa

SEQ ID NO: 2646066 - RNA, 19 nt, Homo sapiens
  misc_RNA (1)...(19): siRNA sense strand
aagaagaagaggaacaaga

SEQ ID NO: 2646067 - RNA, 19 nt, Homo sapiens
  misc_RNA (1)...(19): siRNA sense strand
gagggagauccuagaacaa

SEQ ID NO: 2646068 - RNA, 19 nt, Homo sapiens
  misc_RNA (1)...(19): siRNA sense strand
ccugaaggacccugaaauu

SEQ ID NO: 2646069 - RNA, 19 nt, Homo sapiens
  misc_RNA (1)...(19): siRNA sense strand
gggagauccuagaacaaga

SEQ ID NO: 2646070 - RNA, 19 nt, Homo sapiens
  misc_RNA (1)...(19): siRNA sense strand
gagaacaaaugucuggcua

SEQ ID NO: 2646071 - RNA, 19 nt, Homo sapiens
  misc_RNA (1)...(19): siRNA sense strand
uauaauaagcgaagagaac

SEQ ID NO: 2646072 - RNA, 19 nt, Homo sapiens
  misc_RNA (1)...(19): siRNA sense strand
ccacacaagcccugcguuu

SEQ ID NO: 2646073 - RNA, 19 nt, Homo sapiens
  misc_RNA (1)...(19): siRNA sense strand
gcaggauauuauuaaggaa

SEQ ID NO: 2646074 - RNA, 19 nt, Homo sapiens
  misc_RNA (1)...(19): siRNA sense strand
auuuaaaaccagaggaaga

SEQ ID NO: 2646075 - RNA, 19 nt, Homo sapiens
  misc_RNA (1)...(19): siRNA sense strand
aggagaauauacagcauuu

SEQ ID NO: 2646076 - RNA, 19 nt, Homo sapiens
  misc_RNA (1)...(19): siRNA sense strand
aggcugagauggaugaaca

SEQ ID NO: 2646077 - RNA, 19 nt, Homo sapiens
  misc_RNA (1)...(19): siRNA sense strand
agaacuaagacgaaagcau

SEQ ID NO: 2646078 - RNA, 19 nt, Homo sapiens
  misc_RNA (1)...(19): siRNA sense strand
cugagaaauggcaggauau

SEQ ID NO: 2646079 - RNA, 19 nt, Homo sapiens
  misc_RNA (1)...(19): siRNA sense strand
gauccuagaacaagagcau

SEQ ID NO: 2646080 - RNA, 19 nt, Homo sapiens
  misc_RNA (1)...(19): siRNA sense strand
gcgaaugaggcgacaacau

SEQ ID NO: 2646081 - RNA, 19 nt, Homo sapiens
  misc_RNA (1)...(19): siRNA sense strand
cggauuuacuagaaguuca

SEQ ID NO: 2646082 - RNA, 19 nt, Homo sapiens
  misc_RNA (1)...(19): siRNA sense strand
ucucagaugacaagaguga

SEQ ID NO: 2646083 - RNA, 19 nt, Homo sapiens
  misc_RNA (1)...(19): siRNA sense strand
agucaaguuucuacaaaga

SEQ ID NO: 2646084 - RNA, 19 nt, Homo sapiens
  misc_RNA (1)...(19): siRNA sense strand
caaaggaugcaguaagaga

SEQ ID NO: 2646085 - RNA, 19 nt, Homo sapiens
  misc_RNA (1)...(19): siRNA sense strand
gaagaaaauuacagagaag

SEQ ID NO: 2646086 - RNA, 19 nt, Homo sapiens
  misc_RNA (1)...(19): siRNA sense strand
agaaagaggcuaaagugau

SEQ ID NO: 2646087 - RNA, 19 nt, Homo sapiens
  misc_RNA (1)...(19): siRNA sense strand
aagaagaggaacaagauca

SEQ ID NO: 2646088 - RNA, 19 nt, Homo sapiens
  misc_RNA (1)...(19): siRNA sense strand
ucagaaggacuuagagcau

SEQ ID NO: 2646089 - RNA, 19 nt, Homo sapiens
  misc_RNA (1)...(19): siRNA sense strand
agauaucaaagcaggaaau

SEQ ID NO: 2646090 - RNA, 19 nt, Homo sapiens
  misc_RNA (1)...(19): siRNA sense strand
aagaggagcuaaaugaaaa

SEQ ID NO: 2646091 - RNA, 19 nt, Homo sapiens
  misc_RNA (1)...(19): siRNA sense strand
gcucugaggcggacagcuu

SEQ ID NO: 2646092 - RNA, 19 nt, Homo sapiens
  misc_RNA (1)...(19): siRNA sense strand
gagauaucaaagcaggaaa

SEQ ID NO: 2646093 - RNA, 19 nt, Homo sapiens
  misc_RNA (1)...(19): siRNA sense strand
gcgacaacaucaaaagcaa

SEQ ID NO: 2646094 - RNA, 19 nt, Homo sapiens
  misc_RNA (1)...(19): siRNA sense strand
aaagaggagcuaaaugaaa

SEQ ID NO: 2646095 - RNA, 19 nt, Homo sapiens
  misc_RNA (1)...(19): siRNA sense strand
uuuccaagcagaagaagaa

SEQ ID NO: 2646096 - RNA, 19 nt, Homo sapiens
  misc_RNA (1)...(19): siRNA sense strand
gucuaaagaacuccaaaua

SEQ ID NO: 2646097 - RNA, 19 nt, Homo sapiens
  misc_RNA (1)...(19): siRNA sense strand
gaagaagagauguuggcuu

SEQ ID NO: 2646098 - RNA, 19 nt, Homo sapiens
  misc_RNA (1)...(19): siRNA sense strand
gaucucauucagaggacaa

SEQ ID NO: 2646099 - RNA, 19 nt, Homo sapiens
  misc_RNA (1)...(19): siRNA sense strand
cgacaacagccuaagaguu

SEQ ID NO: 2646100 - RNA, 19 nt, Homo sapiens
  misc_RNA (1)...(19): siRNA sense strand
aagcacaggaagaagaaga

SEQ ID NO: 2646101 - RNA, 19 nt, Homo sapiens
  misc_RNA (1)...(19): siRNA sense strand
ccauuuaaaaccagaggaa

SEQ ID NO: 2646102 - RNA, 19 nt, Homo sapiens
  misc_RNA (1)...(19): siRNA sense strand
caacugaugacucuggaaa

SEQ ID NO: 2646103 - RNA, 19 nt, Homo sapiens
  misc_RNA (1)...(19): siRNA sense strand
ucaaagaagauccagagaa

SEQ ID NO: 2646104 - RNA, 19 nt, Homo sapiens
  misc_RNA (1)...(19): siRNA sense strand
aggaagaagaagaggaaca

SEQ ID NO: 2646105 - RNA, 19 nt, Homo sapiens
  misc_RNA (1)...(19): siRNA sense strand
caguagaagcacaggaaga

SEQ ID NO: 2646106 - RNA, 19 nt, Homo sapiens
  misc_RNA (1)...(19): siRNA sense strand
cugcagaaauggagaaacu

SEQ ID NO: 2646107 - RNA, 19 nt, Homo sapiens
  misc_RNA (1)...(19): siRNA sense strand
acgucaagccagagagauu

SEQ ID NO: 2646108 - RNA, 19 nt, Homo sapiens
  misc_RNA (1)...(19): siRNA sense strand
uuucaaagcagaaggagaa

SEQ ID NO: 2646109 - RNA, 19 nt, Homo sapiens
  misc_RNA (1)...(19): siRNA sense strand
aagcagaagaagaagcuaa

SEQ ID NO: 2646110 - RNA, 19 nt, Homo sapiens
  misc_RNA (1)...(19): siRNA sense strand
ccaaugaagugguggccau

SEQ ID NO: 2646111 - RNA, 19 nt, Homo sapiens
  misc_RNA (1)...(19): siRNA sense strand
caguaagagagcuggacaa

SEQ ID NO: 2646112 - RNA, 19 nt, Homo sapiens
  misc_RNA (1)...(19): siRNA sense strand
aggacaauaugauggcaaa

SEQ ID NO: 2646113 - RNA, 19 nt, Homo sapiens
  misc_RNA (1)...(19): siRNA sense strand
acugagaaauggcaggaua

SEQ ID NO: 2646114 - RNA, 19 nt, Homo sapiens
  misc_RNA (1)...(19): siRNA sense strand
cauuacaagaaguggaaau

SEQ ID NO: 2646115 - RNA, 19 nt, Homo sapiens
  misc_RNA (1)...(19): siRNA sense strand
caguaugaucacagcauua

SEQ ID NO: 2646116 - RNA, 19 nt, Homo sapiens
  misc_RNA (1)...(19): siRNA sense strand
acaaauauccaauggguca

SEQ ID NO: 2646117 - RNA, 19 nt, Homo sapiens
  misc_RNA (1)...(19): siRNA sense strand
acaacaugaucgagagcuu

SEQ ID NO: 2646118 - RNA, 19 nt, Homo sapiens
  misc_RNA (1)...(19): siRNA sense strand
caccaaagagugagcacaa

SEQ ID NO: 2646119 - RNA, 19 nt, Homo sapiens
  misc_RNA (1)...(19): siRNA sense strand
aguuaauaguguuggaagu

SEQ ID NO: 2646120 - RNA, 19 nt, Homo sapiens
  misc_RNA (1)...(19): siRNA sense strand
uagacaugauggagggaga

SEQ ID NO: 2646121 - RNA, 19 nt, Homo sapiens
  misc_RNA (1)...(19): siRNA sense strand
ggaagaagaagaggaacaa

SEQ ID NO: 2646122 - RNA, 19 nt, Homo sapiens
  misc_RNA (1)...(19): siRNA sense strand
aggcuaaagugauguccaa

SEQ ID NO: 2646123 - RNA, 19 nt, Homo sapiens
  misc_RNA (1)...(19): siRNA sense strand
agccauggaugaaggacaa

SEQ ID NO: 2646124 - RNA, 19 nt, Homo sapiens
  misc_RNA (1)...(19): siRNA sense strand
acauaauggaccagcagua

SEQ ID NO: 2646125 - RNA, 19 nt, Homo sapiens
  misc_RNA (1)...(19): siRNA sense strand
acaggaagaagaagaggaa

SEQ ID NO: 2646126 - RNA, 19 nt, Homo sapiens
  misc_RNA (1)...(19): siRNA sense strand
aagaagaagaggaacaaga

SEQ ID NO: 2646127 - RNA, 19 nt, Homo sapiens
  misc_RNA (1)...(19): siRNA sense strand
gagggagauccuagaacaa

SEQ ID NO: 2646128 - RNA, 19 nt, Homo sapiens
  misc_RNA (1)...(19): siRNA sense strand
ccugaaggacccugaaauu

SEQ ID NO: 2646129 - RNA, 19 nt, Homo sapiens
  misc_RNA (1)...(19): siRNA sense strand
gggagauccuagaacaaga

SEQ ID NO: 2646130 - RNA, 19 nt, Homo sapiens
  misc_RNA (1)...(19): siRNA sense strand
gagaacaaaugucuggcua

SEQ ID NO: 2646131 - RNA, 19 nt, Homo sapiens
  misc_RNA (1)...(19): siRNA sense strand
uauaauaagcgaagagaac

SEQ ID NO: 2646132 - RNA, 19 nt, Homo sapiens
  misc_RNA (1)...(19): siRNA sense strand
ccacacaagcccugcguuu

SEQ ID NO: 2646133 - RNA, 19 nt, Homo sapiens
  misc_RNA (1)...(19): siRNA sense strand
gcaggauauuauuaaggaa

SEQ ID NO: 2646134 - RNA, 19 nt, Homo sapiens
  misc_RNA (1)...(19): siRNA sense strand
auuuaaaaccagaggaaga

SEQ ID NO: 2646135 - RNA, 19 nt, Homo sapiens
  misc_RNA (1)...(19): siRNA sense strand
aggagaauauacagcauuu

SEQ ID NO: 2646136 - RNA, 19 nt, Homo sapiens
  misc_RNA (1)...(19): siRNA sense strand
aggcugagauggaugaaca

SEQ ID NO: 2646137 - RNA, 19 nt, Homo sapiens
  misc_RNA (1)...(19): siRNA sense strand
agaacuaagacgaaagcau

SEQ ID NO: 2646138 - RNA, 19 nt, Homo sapiens
  misc_RNA (1)...(19): siRNA sense strand
cugagaaauggcaggauau

SEQ ID NO: 2646139 - RNA, 19 nt, Homo sapiens
  misc_RNA (1)...(19): siRNA sense strand
gauccuagaacaagagcau

SEQ ID NO: 2646140 - RNA, 19 nt, Homo sapiens
  misc_RNA (1)...(19): siRNA sense strand
gcgaaugaggcgacaacau

SEQ ID NO: 2646141 - RNA, 19 nt, Homo sapiens
  misc_RNA (1)...(19): siRNA sense strand
cggauuuacuagaaguuca

SEQ ID NO: 2646142 - RNA, 19 nt, Homo sapiens
  misc_RNA (1)...(19): siRNA sense strand
ucucagaugacaagaguga

SEQ ID NO: 2646143 - RNA, 19 nt, Homo sapiens
  misc_RNA (1)...(19): siRNA sense strand
agucaaguuucuacaaaga

SEQ ID NO: 2646144 - RNA, 19 nt, Homo sapiens
  misc_RNA (1)...(19): siRNA sense strand
caaaggaugcaguaagaga

SEQ ID NO: 2646145 - RNA, 19 nt, Homo sapiens
  misc_RNA (1)...(19): siRNA sense strand
gaagaaaauuacagagaag

SEQ ID NO: 2646146 - RNA, 19 nt, Homo sapiens
  misc_RNA (1)...(19): siRNA sense strand
agaaagaggcuaaagugau

SEQ ID NO: 2646147 - RNA, 19 nt, Homo sapiens
  misc_RNA (1)...(19): siRNA sense strand
aagaagaggaacaagauca

SEQ ID NO: 2646148 - RNA, 19 nt, Homo sapiens
  misc_RNA (1)...(19): siRNA sense strand
ucagaaggacuuagagcau

SEQ ID NO: 2646149 - RNA, 19 nt, Homo sapiens
  misc_RNA (1)...(19): siRNA sense strand
agauaucaaagcaggaaau

SEQ ID NO: 2646150 - RNA, 19 nt, Homo sapiens
  misc_RNA (1)...(19): siRNA sense strand
aagaggagcuaaaugaaaa

SEQ ID NO: 2646151 - RNA, 19 nt, Homo sapiens
  misc_RNA (1)...(19): siRNA sense strand
gcucugaggcggacagcuu

SEQ ID NO: 2646152 - RNA, 19 nt, Homo sapiens
  misc_RNA (1)...(19): siRNA sense strand
gagauaucaaagcaggaaa

SEQ ID NO: 2646153 - RNA, 19 nt, Homo sapiens
  misc_RNA (1)...(19): siRNA sense strand
gcgacaacaucaaaagcaa

SEQ ID NO: 2646154 - RNA, 19 nt, Homo sapiens
  misc_RNA (1)...(19): siRNA sense strand
aaagaggagcuaaaugaaa

SEQ ID NO: 2646155 - RNA, 19 nt, Homo sapiens
  misc_RNA (1)...(19): siRNA sense strand
uuuccaagcagaagaagaa

SEQ ID NO: 2646156 - RNA, 19 nt, Homo sapiens
  misc_RNA (1)...(19): siRNA sense strand
gucuaaagaacuccaaaua

SEQ ID NO: 2646157 - RNA, 19 nt, Homo sapiens
  misc_RNA (1)...(19): siRNA sense strand
gaagaagagauguuggcuu

SEQ ID NO: 2646158 - RNA, 19 nt, Homo sapiens
  misc_RNA (1)...(19): siRNA sense strand
gaucucauucagaggacaa

SEQ ID NO: 2646159 - RNA, 19 nt, Homo sapiens
  misc_RNA (1)...(19): siRNA sense strand
cgacaacagccuaagaguu

SEQ ID NO: 2646160 - RNA, 19 nt, Homo sapiens
  misc_RNA (1)...(19): siRNA sense strand
aagcacaggaagaagaaga

SEQ ID NO: 2646161 - RNA, 19 nt, Homo sapiens
  misc_RNA (1)...(19): siRNA sense strand
ccauuuaaaaccagaggaa

SEQ ID NO: 2646162 - RNA, 19 nt, Homo sapiens
  misc_RNA (1)...(19): siRNA sense strand
caacugaugacucuggaaa

SEQ ID NO: 2646163 - RNA, 19 nt, Homo sapiens
  misc_RNA (1)...(19): siRNA sense strand
ucaaagaagauccagagaa

SEQ ID NO: 2646164 - RNA, 19 nt, Homo sapiens
  misc_RNA (1)...(19): siRNA sense strand
ggagaggauuaaagggcug

SEQ ID NO: 2646165 - RNA, 19 nt, Homo sapiens
  misc_RNA (1)...(19): siRNA sense strand
cagaaagagcagaagucaa

SEQ ID NO: 2646166 - RNA, 19 nt, Homo sapiens
  misc_RNA (1)...(19): siRNA sense strand
gagaaaucuaggugcagaa

SEQ ID NO: 2646167 - RNA, 19 nt, Homo sapiens
  misc_RNA (1)...(19): siRNA sense strand
gaguaugaaagaugaucaa

SEQ ID NO: 2646168 - RNA, 19 nt, Homo sapiens
  misc_RNA (1)...(19): siRNA sense strand
gcugcaaggugcuguauga

SEQ ID NO: 2646169 - RNA, 19 nt, Homo sapiens
  misc_RNA (1)...(19): siRNA sense strand
agaacauggaacagaauga

SEQ ID NO: 2646170 - RNA, 19 nt, Homo sapiens
  misc_RNA (1)...(19): siRNA sense strand
gcaaggugcuguaugacuu

SEQ ID NO: 2646171 - RNA, 19 nt, Homo sapiens
  misc_RNA (1)...(19): siRNA sense strand
uggacgagcuggcagagaa

SEQ ID NO: 2646172 - RNA, 19 nt, Homo sapiens
  misc_RNA (1)...(19): siRNA sense strand
acauugagcagaugaguca

SEQ ID NO: 2646173 - RNA, 19 nt, Homo sapiens
  misc_RNA (1)...(19): siRNA sense strand
augaacagaaagagcagaa

SEQ ID NO: 2646174 - RNA, 19 nt, Homo sapiens
  misc_RNA (1)...(19): siRNA sense strand
caaauguacaagauggaga

SEQ ID NO: 2646175 - RNA, 19 nt, Homo sapiens
  misc_RNA (1)...(19): siRNA sense strand
gagcagaagucaagugagc

SEQ ID NO: 2646176 - RNA, 19 nt, Homo sapiens
  misc_RNA (1)...(19): siRNA sense strand
ggacugaguaugaaagaug

SEQ ID NO: 2646177 - RNA, 19 nt, Homo sapiens
  misc_RNA (1)...(19): siRNA sense strand
uugaauguagaaugggaua

SEQ ID NO: 2646178 - RNA, 19 nt, Homo sapiens
  misc_RNA (1)...(19): siRNA sense strand
agaccgacauugagcagau

SEQ ID NO: 2646179 - RNA, 19 nt, Homo sapiens
  misc_RNA (1)...(19): siRNA sense strand
acugagaaaucuaggugca

SEQ ID NO: 2646180 - RNA, 19 nt, Homo sapiens
  misc_RNA (1)...(19): siRNA sense strand
ugaugaagcuucucagcga

SEQ ID NO: 2646181 - RNA, 19 nt, Homo sapiens
  misc_RNA (1)...(19): siRNA sense strand
cagagaagcucaagcgcag

SEQ ID NO: 2646182 - RNA, 19 nt, Homo sapiens
  misc_RNA (1)...(19): siRNA sense strand
gaguauaagcccaaguucu

SEQ ID NO: 2646183 - RNA, 19 nt, Homo sapiens
  misc_RNA (1)...(19): siRNA sense strand
cugcaugucuaacagcaua

SEQ ID NO: 2646184 - RNA, 19 nt, Homo sapiens
  misc_RNA (1)...(19): siRNA sense strand
gcaucaacuugucaggcuu

SEQ ID NO: 2646185 - RNA, 19 nt, Homo sapiens
  misc_RNA (1)...(19): siRNA sense strand
gccccaagcgggaguauaa

SEQ ID NO: 2646186 - RNA, 19 nt, Homo sapiens
  misc_RNA (1)...(19): siRNA sense strand
gugcaagggagcugugcca

SEQ ID NO: 2646187 - RNA, 19 nt, Homo sapiens
  misc_RNA (1)...(19): siRNA sense strand
aagaagcaucuguagggaa

SEQ ID NO: 2646188 - RNA, 19 nt, Homo sapiens
  misc_RNA (1)...(19): siRNA sense strand
ccaugcagauccuggacga

SEQ ID NO: 2646189 - RNA, 19 nt, Homo sapiens
  misc_RNA (1)...(19): siRNA sense strand
cuauggacugaguaugaaa

SEQ ID NO: 2646190 - RNA, 19 nt, Homo sapiens
  misc_RNA (1)...(19): siRNA sense strand
gcagagaagcucaagcgca

SEQ ID NO: 2646191 - RNA, 19 nt, Homo sapiens
  misc_RNA (1)...(19): siRNA sense strand
ucaaccagaucaacgagaa

SEQ ID NO: 2646192 - RNA, 19 nt, Homo sapiens
  misc_RNA (1)...(19): siRNA sense strand
gcuacauggacgugcucau

SEQ ID NO: 2646193 - RNA, 19 nt, Homo sapiens
  misc_RNA (1)...(19): siRNA sense strand
gcuccugaguauuuugaaa

SEQ ID NO: 2646194 - RNA, 19 nt, Homo sapiens
  misc_RNA (1)...(19): siRNA sense strand
acauggaacagaaugaaca

SEQ ID NO: 2646195 - RNA, 19 nt, Homo sapiens
  misc_RNA (1)...(19): siRNA sense strand
gcgaagaggacgaggagga

SEQ ID NO: 2646196 - RNA, 19 nt, Homo sapiens
  misc_RNA (1)...(19): siRNA sense strand
cgucagaggagcuggccua

SEQ ID NO: 2646197 - RNA, 19 nt, Homo sapiens
  misc_RNA (1)...(19): siRNA sense strand
gugaagggcuggaggguac

SEQ ID NO: 2646198 - RNA, 19 nt, Homo sapiens
  misc_RNA (1)...(19): siRNA sense strand
aggacgaggaggaggaaga

SEQ ID NO: 2646199 - RNA, 19 nt, Homo sapiens
  misc_RNA (1)...(19): siRNA sense strand
aggaugaggaugaggagga

SEQ ID NO: 2646200 - RNA, 19 nt, Homo sapiens
  misc_RNA (1)...(19): siRNA sense strand
aggaugaggaggaggagga

SEQ ID NO: 2646201 - RNA, 19 nt, Homo sapiens
  misc_RNA (1)...(19): siRNA sense strand
gcaaagcacucaacagcca

SEQ ID NO: 2646202 - RNA, 19 nt, Homo sapiens
  misc_RNA (1)...(19): siRNA sense strand
gggaaagcgaggaugagga

SEQ ID NO: 2646203 - RNA, 19 nt, Homo sapiens
  misc_RNA (1)...(19): siRNA sense strand
aggaagaggaccuggguug

SEQ ID NO: 2646204 - RNA, 19 nt, Homo sapiens
  misc_RNA (1)...(19): siRNA sense strand
ccauggacacagagaucau

SEQ ID NO: 2646205 - RNA, 19 nt, Homo sapiens
  misc_RNA (1)...(19): siRNA sense strand
ggaaaagagucucgagggu

SEQ ID NO: 2646206 - RNA, 19 nt, Homo sapiens
  misc_RNA (1)...(19): siRNA sense strand
ucacacagcuucaggccca

SEQ ID NO: 2646207 - RNA, 19 nt, Homo sapiens
  misc_RNA (1)...(19): siRNA sense strand
agaccagcguccagagcca

SEQ ID NO: 2646208 - RNA, 19 nt, Homo sapiens
  misc_RNA (1)...(19): siRNA sense strand
ggucaguccgggaaagcga

SEQ ID NO: 2646209 - RNA, 19 nt, Homo sapiens
  misc_RNA (1)...(19): siRNA sense strand
cacucagggugaaggccaa

SEQ ID NO: 2646210 - RNA, 19 nt, Homo sapiens
  misc_RNA (1)...(19): siRNA sense strand
ugguaguggcugaggccga

SEQ ID NO: 2646211 - RNA, 19 nt, Homo sapiens
  misc_RNA (1)...(19): siRNA sense strand
cacaauuacaugcgcagaa

SEQ ID NO: 2646212 - RNA, 19 nt, Homo sapiens
  misc_RNA (1)...(19): siRNA sense strand
cgacaucauccgagggcac

SEQ ID NO: 2646213 - RNA, 19 nt, Homo sapiens
  misc_RNA (1)...(19): siRNA sense strand
cccaacagaccuugagcuu

SEQ ID NO: 2646214 - RNA, 19 nt, Homo sapiens
  misc_RNA (1)...(19): siRNA sense strand
cgcugagagcugccagaaa

SEQ ID NO: 2646215 - RNA, 19 nt, Homo sapiens
  misc_RNA (1)...(19): siRNA sense strand
acuggguguuccugggcaa

SEQ ID NO: 2646216 - RNA, 19 nt, Homo sapiens
  misc_RNA (1)...(19): siRNA sense strand
aagaggacgaggaggagga

SEQ ID NO: 2646217 - RNA, 19 nt, Homo sapiens
  misc_RNA (1)...(19): siRNA sense strand
aggaggaggaagaggaccu

SEQ ID NO: 2646218 - RNA, 19 nt, Homo sapiens
  misc_RNA (1)...(19): siRNA sense strand
agcaagaacaagaggaaua

SEQ ID NO: 2646219 - RNA, 19 nt, Homo sapiens
  misc_RNA (1)...(19): siRNA sense strand
caucaaggcuguagagcau

SEQ ID NO: 2646220 - RNA, 19 nt, Homo sapiens
  misc_RNA (1)...(19): siRNA sense strand
gagaaaggacagaccguaa

SEQ ID NO: 2646221 - RNA, 19 nt, Homo sapiens
  misc_RNA (1)...(19): siRNA sense strand
uggaaauguugaaggguca

SEQ ID NO: 2646222 - RNA, 19 nt, Homo sapiens
  misc_RNA (1)...(19): siRNA sense strand
guucaaauccugugcucaa

SEQ ID NO: 2646223 - RNA, 19 nt, Homo sapiens
  misc_RNA (1)...(19): siRNA sense strand
gguggaagacagagcaauu

SEQ ID NO: 2646224 - RNA, 19 nt, Homo sapiens
  misc_RNA (1)...(19): siRNA sense strand
gagucgaauuggagaacuu

SEQ ID NO: 2646225 - RNA, 19 nt, Homo sapiens
  misc_RNA (1)...(19): siRNA sense strand
caguuaggcuucagggaga

SEQ ID NO: 2646226 - RNA, 19 nt, Homo sapiens
  misc_RNA (1)...(19): siRNA sense strand
gcuucaaaccugaggagau

SEQ ID NO: 2646227 - RNA, 19 nt, Homo sapiens
  misc_RNA (1)...(19): siRNA sense strand
cggcaaagucaccgaugaa

SEQ ID NO: 2646228 - RNA, 19 nt, Homo sapiens
  misc_RNA (1)...(19): siRNA sense strand
gcaucaaacccaaugacaa

SEQ ID NO: 2646229 - RNA, 19 nt, Homo sapiens
  misc_RNA (1)...(19): siRNA sense strand
acacaauugagcaguauaa

SEQ ID NO: 2646230 - RNA, 19 nt, Homo sapiens
  misc_RNA (1)...(19): siRNA sense strand
uaggacagggagagggaaa

SEQ ID NO: 2646231 - RNA, 19 nt, Homo sapiens
  misc_RNA (1)...(19): siRNA sense strand
gaauugaaacggaaggaca

SEQ ID NO: 2646232 - RNA, 19 nt, Homo sapiens
  misc_RNA (1)...(19): siRNA sense strand
gagaagagcuagcaggaac

SEQ ID NO: 2646233 - RNA, 19 nt, Homo sapiens
  misc_RNA (1)...(19): siRNA sense strand
gcuaugaagaggcgaucaa

SEQ ID NO: 2646234 - RNA, 19 nt, Homo sapiens
  misc_RNA (1)...(19): siRNA sense strand
gggaaaguggagcugguaa

SEQ ID NO: 2646235 - RNA, 19 nt, Homo sapiens
  misc_RNA (1)...(19): siRNA sense strand
uucaauagauggagagcau

SEQ ID NO: 2646236 - RNA, 19 nt, Homo sapiens
  misc_RNA (1)...(19): siRNA sense strand
cagaaguaggacagggaga

SEQ ID NO: 2646237 - RNA, 19 nt, Homo sapiens
  misc_RNA (1)...(19): siRNA sense strand
guauaaaggccgugagcug

SEQ ID NO: 2646238 - RNA, 19 nt, Homo sapiens
  misc_RNA (1)...(19): siRNA sense strand
cgcccaaagagaagagcua

SEQ ID NO: 2646239 - RNA, 19 nt, Homo sapiens
  misc_RNA (1)...(19): siRNA sense strand
caccacaauccaugggaaa

SEQ ID NO: 2646240 - RNA, 19 nt, Homo sapiens
  misc_RNA (1)...(19): siRNA sense strand
gggaagaagugcaccgucu

SEQ ID NO: 2646241 - RNA, 19 nt, Homo sapiens
  misc_RNA (1)...(19): siRNA sense strand
cuaaugaauugaaacggaa

SEQ ID NO: 2646242 - RNA, 19 nt, Homo sapiens
  misc_RNA (1)...(19): siRNA sense strand
aauugaaacggaaggacaa

SEQ ID NO: 2646243 - RNA, 19 nt, Homo sapiens
  misc_RNA (1)...(19): siRNA sense strand
caauuacugcaaugagaaa

SEQ ID NO: 2646244 - RNA, 19 nt, Homo sapiens
  misc_RNA (1)...(19): siRNA sense strand
gcgucaagaccaugcgaga

SEQ ID NO: 2646245 - RNA, 19 nt, Homo sapiens
  misc_RNA (1)...(19): siRNA sense strand
gacagauaugguugagaaa

SEQ ID NO: 2646246 - RNA, 19 nt, Homo sapiens
  misc_RNA (1)...(19): siRNA sense strand
gcuaaugaauugaaacgga

SEQ ID NO: 2646247 - RNA, 19 nt, Homo sapiens
  misc_RNA (1)...(19): siRNA sense strand
ugagaauggcaaaguagua

SEQ ID NO: 2646248 - RNA, 19 nt, Homo sapiens
  misc_RNA (1)...(19): siRNA sense strand
agacaaaauucuggaguuu

SEQ ID NO: 2646249 - RNA, 19 nt, Homo sapiens
  misc_RNA (1)...(19): siRNA sense strand
agguugaaagagugaagaa

SEQ ID NO: 2646250 - RNA, 19 nt, Homo sapiens
  misc_RNA (1)...(19): siRNA sense strand
gaucaauauccguggucca

SEQ ID NO: 2646251 - RNA, 19 nt, Homo sapiens
  misc_RNA (1)...(19): siRNA sense strand
caucuauggaagagacaca

SEQ ID NO: 2646252 - RNA, 19 nt, Homo sapiens
  misc_RNA (1)...(19): siRNA sense strand
gcauuacagaggugaccaa

SEQ ID NO: 2646253 - RNA, 19 nt, Homo sapiens
  misc_RNA (1)...(19): siRNA sense strand
gaaacuaauugaacggugu

SEQ ID NO: 2646254 - RNA, 19 nt, Homo sapiens
  misc_RNA (1)...(19): siRNA sense strand
acuaaacaguacaagguga

SEQ ID NO: 2646255 - RNA, 19 nt, Homo sapiens
  misc_RNA (1)...(19): siRNA sense strand
gcacagcagaaguaggaca

SEQ ID NO: 2646256 - RNA, 19 nt, Homo sapiens
  misc_RNA (1)...(19): siRNA sense strand
gcuuaugggaagaccaaaa

SEQ ID NO: 2646257 - RNA, 19 nt, Homo sapiens
  misc_RNA (1)...(19): siRNA sense strand
cuauucugcacuugggaaa

SEQ ID NO: 2646258 - RNA, 19 nt, Homo sapiens
  misc_RNA (1)...(19): siRNA sense strand
cagaacaagaggccagcua

SEQ ID NO: 2646259 - RNA, 19 nt, Homo sapiens
  misc_RNA (1)...(19): siRNA sense strand
gcagagacgccuuugccaa

SEQ ID NO: 2646260 - RNA, 19 nt, Homo sapiens
  misc_RNA (1)...(19): siRNA sense strand
ugauguagcuuaugggaag

SEQ ID NO: 2646261 - RNA, 19 nt, Homo sapiens
  misc_RNA (1)...(19): siRNA sense strand
gcaucaaggcuguagagca

SEQ ID NO: 2646262 - RNA, 19 nt, Homo sapiens
  misc_RNA (1)...(19): siRNA sense strand
aggcagacuucgugcugau

SEQ ID NO: 2646263 - RNA, 19 nt, Homo sapiens
  misc_RNA (1)...(19): siRNA sense strand
ccagaauugccaacgggaa

SEQ ID NO: 2646264 - RNA, 19 nt, Homo sapiens
  misc_RNA (1)...(19): siRNA sense strand
agauccaaacaguguauaa

SEQ ID NO: 2646265 - RNA, 19 nt, Homo sapiens
  misc_RNA (1)...(19): siRNA sense strand
acugaagaauggagguagu

SEQ ID NO: 2646266 - RNA, 19 nt, Homo sapiens
  misc_RNA (1)...(19): siRNA sense strand
ccagaugcucauaaggauu

SEQ ID NO: 2646267 - RNA, 19 nt, Homo sapiens
  misc_RNA (1)...(19): siRNA sense strand
uuggagugcuggugaauca

SEQ ID NO: 2646268 - RNA, 19 nt, Homo sapiens
  misc_RNA (1)...(19): siRNA sense strand
agaaaggacagaccguaaa

SEQ ID NO: 2646269 - RNA, 19 nt, Homo sapiens
  misc_RNA (1)...(19): siRNA sense strand
acucaagcagguuuggaaa

SEQ ID NO: 2646270 - RNA, 19 nt, Homo sapiens
  misc_RNA (1)...(19): siRNA sense strand
agucaguccuuguggagca

SEQ ID NO: 2646271 - RNA, 19 nt, Homo sapiens
  misc_RNA (1)...(19): siRNA sense strand
ucuuauugagaauggcaaa

SEQ ID NO: 2646272 - RNA, 19 nt, Homo sapiens
  misc_RNA (1)...(19): siRNA sense strand
ccacugaagaauggaggua

SEQ ID NO: 2646273 - RNA, 19 nt, Homo sapiens
  misc_RNA (1)...(19): siRNA sense strand
auacgaaagacaacaaaga

SEQ ID NO: 2646274 - RNA, 19 nt, Homo sapiens
  misc_RNA (1)...(19): siRNA sense strand
gcuuacaaggcuaugaaga

SEQ ID NO: 2646275 - RNA, 19 nt, Homo sapiens
  misc_RNA (1)...(19): siRNA sense strand
caguacaaggugaugaaga

SEQ ID NO: 2646276 - RNA, 19 nt, Homo sapiens
  misc_RNA (1)...(19): siRNA sense strand
gcugaugccaugaaaguca

SEQ ID NO: 2646277 - RNA, 19 nt, Homo sapiens
  misc_RNA (1)...(19): siRNA sense strand
gauuuaguaagguggaaga

SEQ ID NO: 2646278 - RNA, 19 nt, Homo sapiens
  misc_RNA (1)...(19): siRNA sense strand
gauguuugccucagaucaa

SEQ ID NO: 2646279 - RNA, 19 nt, Homo sapiens
  misc_RNA (1)...(19): siRNA sense strand
guggaaugccggaaagcca

SEQ ID NO: 2646280 - RNA, 19 nt, Homo sapiens
  misc_RNA (1)...(19): siRNA sense strand
cagauaugguugagaaagc

SEQ ID NO: 2646281 - RNA, 19 nt, Homo sapiens
  misc_RNA (1)...(19): siRNA sense strand
agaaggauccaguguccaa

SEQ ID NO: 2646282 - RNA, 19 nt, Homo sapiens
  misc_RNA (1)...(19): siRNA sense strand
gguugaaagagugaagaau

SEQ ID NO: 2646283 - RNA, 19 nt, Homo sapiens
  misc_RNA (1)...(19): siRNA sense strand
ugagagucgaauuggagaa

SEQ ID NO: 2646284 - RNA, 19 nt, Homo sapiens
  misc_RNA (1)...(19): siRNA sense strand
gggaaggaaaugaaagaga

SEQ ID NO: 2646285 - RNA, 19 nt, Homo sapiens
  misc_RNA (1)...(19): siRNA sense strand
aagagaagacccagagaau

SEQ ID NO: 2646286 - RNA, 19 nt, Homo sapiens
  misc_RNA (1)...(19): siRNA sense strand
gagcauggcuggaaggagu

SEQ ID NO: 2646287 - RNA, 19 nt, Homo sapiens
  misc_RNA (1)...(19): siRNA sense strand
ggacagaacugcagaccac

SEQ ID NO: 2646288 - RNA, 19 nt, Homo sapiens
  misc_RNA (1)...(19): siRNA sense strand
ucaagaagccagaggggaa

SEQ ID NO: 2646289 - RNA, 19 nt, Homo sapiens
  misc_RNA (1)...(19): siRNA sense strand
cugguuauguauauggaaa

SEQ ID NO: 2646290 - RNA, 19 nt, Homo sapiens
  misc_RNA (1)...(19): siRNA sense strand
gcacaaggaugccuggaga

SEQ ID NO: 2646291 - RNA, 19 nt, Homo sapiens
  misc_RNA (1)...(19): siRNA sense strand
gagaaagaggugaagagau

SEQ ID NO: 2646292 - RNA, 19 nt, Homo sapiens
  misc_RNA (1)...(19): siRNA sense strand
cuucaucagaggaggagaa

SEQ ID NO: 2646293 - RNA, 19 nt, Homo sapiens
  misc_RNA (1)...(19): siRNA sense strand
cgaggaaggaccuggugaa

SEQ ID NO: 2646294 - RNA, 19 nt, Homo sapiens
  misc_RNA (1)...(19): siRNA sense strand
gagagaugaaacuggaaau

SEQ ID NO: 2646295 - RNA, 19 nt, Homo sapiens
  misc_RNA (1)...(19): siRNA sense strand
gccaggaagcugagaccaa

SEQ ID NO: 2646296 - RNA, 19 nt, Homo sapiens
  misc_RNA (1)...(19): siRNA sense strand
gggcaauggcgcugaaauc

SEQ ID NO: 2646297 - RNA, 19 nt, Homo sapiens
  misc_RNA (1)...(19): siRNA sense strand
ccgggaaggaaaugaaaga

SEQ ID NO: 2646298 - RNA, 19 nt, Homo sapiens
  misc_RNA (1)...(19): siRNA sense strand
aagcagauguccaggaagu

SEQ ID NO: 2646299 - RNA, 19 nt, Homo sapiens
  misc_RNA (1)...(19): siRNA sense strand
agugaggaguaaacugaaa

SEQ ID NO: 2646300 - RNA, 19 nt, Homo sapiens
  misc_RNA (1)...(19): siRNA sense strand
agaccaagaccaaggacga

SEQ ID NO: 2646301 - RNA, 19 nt, Homo sapiens
  misc_RNA (1)...(19): siRNA sense strand
uagaaaugcuguugcgacu

SEQ ID NO: 2646302 - RNA, 19 nt, Homo sapiens
  misc_RNA (1)...(19): siRNA sense strand
aaaacgagaaggagcaaaa

SEQ ID NO: 2646303 - RNA, 19 nt, Homo sapiens
  misc_RNA (1)...(19): siRNA sense strand
ggcaggagcugaaggagga

SEQ ID NO: 2646304 - RNA, 19 nt, Homo sapiens
  misc_RNA (1)...(19): siRNA sense strand
ucaaaaugggacagcaaua

SEQ ID NO: 2646305 - RNA, 19 nt, Homo sapiens
  misc_RNA (1)...(19): siRNA sense strand
uaccauugccggacggaaa

SEQ ID NO: 2646306 - RNA, 19 nt, Homo sapiens
  misc_RNA (1)...(19): siRNA sense strand
cuggugaaccugugccaaa

SEQ ID NO: 2646307 - RNA, 19 nt, Homo sapiens
  misc_RNA (1)...(19): siRNA sense strand
cuucaguuuaugagagaga

SEQ ID NO: 2646308 - RNA, 19 nt, Homo sapiens
  misc_RNA (1)...(19): siRNA sense strand
ccaucaaccugaacagcuu

SEQ ID NO: 2646309 - RNA, 19 nt, Homo sapiens
  misc_RNA (1)...(19): siRNA sense strand
ugccaaagaugcauggaca

SEQ ID NO: 2646310 - RNA, 19 nt, Homo sapiens
  misc_RNA (1)...(19): siRNA sense strand
gaacagaagugcagcugcu

SEQ ID NO: 2646311 - RNA, 19 nt, Homo sapiens
  misc_RNA (1)...(19): siRNA sense strand
agucaaaaugggacagcaa

SEQ ID NO: 2646312 - RNA, 19 nt, Homo sapiens
  misc_RNA (1)...(19): siRNA sense strand
aagcugagaccaagaccaa

SEQ ID NO: 2646313 - RNA, 19 nt, Homo sapiens
  misc_RNA (1)...(19): siRNA sense strand
cguucuuguugaaggcauu

SEQ ID NO: 2646314 - RNA, 19 nt, Homo sapiens
  misc_RNA (1)...(19): siRNA sense strand
agaagaaaaggaagaagaa

SEQ ID NO: 2646315 - RNA, 19 nt, Homo sapiens
  misc_RNA (1)...(19): siRNA sense strand
gauuugcaguacagggaga

SEQ ID NO: 2646316 - RNA, 19 nt, Homo sapiens
  misc_RNA (1)...(19): siRNA sense strand
agagaugaaacuggaaaua

SEQ ID NO: 2646317 - RNA, 19 nt, Homo sapiens
  misc_RNA (1)...(19): siRNA sense strand
gcaauggcgcugaaaucua

SEQ ID NO: 2646318 - RNA, 19 nt, Homo sapiens
  misc_RNA (1)...(19): siRNA sense strand
gggcucagacaguuggcaa

SEQ ID NO: 2646319 - RNA, 19 nt, Homo sapiens
  misc_RNA (1)...(19): siRNA sense strand
gggagaaagaggugaagag

SEQ ID NO: 2646320 - RNA, 19 nt, Homo sapiens
  misc_RNA (1)...(19): siRNA sense strand
acagggagaaagaggugaa

SEQ ID NO: 2646321 - RNA, 19 nt, Homo sapiens
  misc_RNA (1)...(19): siRNA sense strand
agagagaugaaacuggaaa

SEQ ID NO: 2646322 - RNA, 19 nt, Homo sapiens
  misc_RNA (1)...(19): siRNA sense strand
cgggaacaaaugcuagaua

SEQ ID NO: 2646323 - RNA, 19 nt, Homo sapiens
  misc_RNA (1)...(19): siRNA sense strand
gggaagaacagaagugcag

SEQ ID NO: 2646324 - RNA, 19 nt, Homo sapiens
  misc_RNA (1)...(19): siRNA sense strand
acaccagagacuuggguca

SEQ ID NO: 2646325 - RNA, 19 nt, Homo sapiens
  misc_RNA (1)...(19): siRNA sense strand
ggagacagccugaggacac

SEQ ID NO: 2646326 - RNA, 19 nt, Homo sapiens
  misc_RNA (1)...(19): siRNA sense strand
ccaaaggcuuagaggacag

SEQ ID NO: 2646327 - RNA, 19 nt, Homo sapiens
  misc_RNA (1)...(19): siRNA sense strand
aagaagaaaaggaagaaga

SEQ ID NO: 2646328 - RNA, 19 nt, Homo sapiens
  misc_RNA (1)...(19): siRNA sense strand
uuuacaagcaccagcagaa

SEQ ID NO: 2646329 - RNA, 19 nt, Homo sapiens
  misc_RNA (1)...(19): siRNA sense strand
cugcaacagccuaugauuu

SEQ ID NO: 2646330 - RNA, 19 nt, Homo sapiens
  misc_RNA (1)...(19): siRNA sense strand
ggacaagauucccgaggag

SEQ ID NO: 2646331 - RNA, 19 nt, Homo sapiens
  misc_RNA (1)...(19): siRNA sense strand
uggccaagaccuucgagaa

SEQ ID NO: 2646332 - RNA, 19 nt, Homo sapiens
  misc_RNA (1)...(19): siRNA sense strand
ggucucagcuccuccgcua

SEQ ID NO: 2646333 - RNA, 19 nt, Homo sapiens
  misc_RNA (1)...(19): siRNA sense strand
ccauaaagucuucaucaga

SEQ ID NO: 2646334 - RNA, 19 nt, Homo sapiens
  misc_RNA (1)...(19): siRNA sense strand
aaucucuccuccugggaaa

SEQ ID NO: 2646335 - RNA, 19 nt, Homo sapiens
  misc_RNA (1)...(19): siRNA sense strand
aggaaaugaaagagaagac

SEQ ID NO: 2646336 - RNA, 19 nt, Homo sapiens
  misc_RNA (1)...(19): siRNA sense strand
cgagacggcugcugcugaa

SEQ ID NO: 2646337 - RNA, 19 nt, Homo sapiens
  misc_RNA (1)...(19): siRNA sense strand
ucagaggaggagaagaauu

SEQ ID NO: 2646338 - RNA, 19 nt, Homo sapiens
  misc_RNA (1)...(19): siRNA sense strand
gccuaugauuuaugaagga

SEQ ID NO: 2646339 - RNA, 19 nt, Homo sapiens
  misc_RNA (1)...(19): siRNA sense strand
ccucugagucaccugguua

SEQ ID NO: 2646340 - RNA, 19 nt, Homo sapiens
  misc_RNA (1)...(19): siRNA sense strand
caccaaaggcuuagaggac

SEQ ID NO: 2646341 - RNA, 19 nt, Homo sapiens
  misc_RNA (1)...(19): siRNA sense strand
gaagaaaaggaagaagaaa

SEQ ID NO: 2646342 - RNA, 19 nt, Homo sapiens
  misc_RNA (1)...(19): siRNA sense strand
uccaagaagcaccuagaua

SEQ ID NO: 2646343 - RNA, 19 nt, Homo sapiens
  misc_RNA (1)...(19): siRNA sense strand
acaagcaccagcagaagaa

SEQ ID NO: 2646344 - RNA, 19 nt, Homo sapiens
  misc_RNA (1)...(19): siRNA sense strand
ccaaagaugcauggacaca

SEQ ID NO: 2646345 - RNA, 19 nt, Homo sapiens
  misc_RNA (1)...(19): siRNA sense strand
ccucauucacauacgucaa

SEQ ID NO: 2646346 - RNA, 19 nt, Homo sapiens
  misc_RNA (1)...(19): siRNA sense strand
gagaacaauaacuccacaa

SEQ ID NO: 2646347 - RNA, 19 nt, Homo sapiens
  misc_RNA (1)...(19): siRNA sense strand
aggagucguugcugggaga

SEQ ID NO: 2646348 - RNA, 19 nt, Homo sapiens
  misc_RNA (1)...(19): siRNA sense strand
uggaauggaggcucacaaa

SEQ ID NO: 2646349 - RNA, 19 nt, Homo sapiens
  misc_RNA (1)...(19): siRNA sense strand
gaaggaaaugaaagagaag

SEQ ID NO: 2646350 - RNA, 19 nt, Homo sapiens
  misc_RNA (1)...(19): siRNA sense strand
agagauaccuguggcaaca

SEQ ID NO: 2646351 - RNA, 19 nt, Homo sapiens
  misc_RNA (1)...(19): siRNA sense strand
aaaugaaagagaagaccca

SEQ ID NO: 2646352 - RNA, 19 nt, Homo sapiens
  misc_RNA (1)...(19): siRNA sense strand
aaagagaagacccagagaa

SEQ ID NO: 2646353 - RNA, 19 nt, Homo sapiens
  misc_RNA (1)...(19): siRNA sense strand
gggaaucuuuugaguauga

SEQ ID NO: 2646354 - RNA, 19 nt, Homo sapiens
  misc_RNA (1)...(19): siRNA sense strand
cagaaagucaugaaccaca

SEQ ID NO: 2646355 - RNA, 19 nt, Homo sapiens
  misc_RNA (1)...(19): siRNA sense strand
uggggaaucuuuugaguau

SEQ ID NO: 2646356 - RNA, 19 nt, Homo sapiens
  misc_RNA (1)...(19): siRNA sense strand
agaagaagggcgaguacgu

SEQ ID NO: 2646357 - RNA, 19 nt, Homo sapiens
  misc_RNA (1)...(19): siRNA sense strand
uccagaaagucaugaacca

SEQ ID NO: 2646358 - RNA, 19 nt, Homo sapiens
  misc_RNA (1)...(19): siRNA sense strand
acaaagaacaugcucacau

SEQ ID NO: 2646359 - RNA, 19 nt, Homo sapiens
  misc_RNA (1)...(19): siRNA sense strand
gcuuccgggacuugagcaa

SEQ ID NO: 2646360 - RNA, 19 nt, Homo sapiens
  misc_RNA (1)...(19): siRNA sense strand
ccaagaaguucguggacau

SEQ ID NO: 2646361 - RNA, 19 nt, Homo sapiens
  misc_RNA (1)...(19): siRNA sense strand
agaaacuggcugugggaaa

SEQ ID NO: 2646362 - RNA, 19 nt, Homo sapiens
  misc_RNA (1)...(19): siRNA sense strand
cugaaauggaaucgagaaa

SEQ ID NO: 2646363 - RNA, 19 nt, Homo sapiens
  misc_RNA (1)...(19): siRNA sense strand
caacuaaagaaaugaggaa

SEQ ID NO: 2646364 - RNA, 19 nt, Homo sapiens
  misc_RNA (1)...(19): siRNA sense strand
gcuuaaagaagguggagau

SEQ ID NO: 2646365 - RNA, 19 nt, Homo sapiens
  misc_RNA (1)...(19): siRNA sense strand
ggguguaccuggugcggaa

SEQ ID NO: 2646366 - RNA, 19 nt, Homo sapiens
  misc_RNA (1)...(19): siRNA sense strand
cggagaugcugacaagaaa

SEQ ID NO: 2646367 - RNA, 19 nt, Homo sapiens
  misc_RNA (1)...(19): siRNA sense strand
acacggaaguggagagguu

SEQ ID NO: 2646368 - RNA, 19 nt, Homo sapiens
  misc_RNA (1)...(19): siRNA sense strand
gggaagaggaacagccuau

SEQ ID NO: 2646369 - RNA, 19 nt, Homo sapiens
  misc_RNA (1)...(19): siRNA sense strand
gauugucauugaagagaaa

SEQ ID NO: 2646370 - RNA, 19 nt, Homo sapiens
  misc_RNA (1)...(19): siRNA sense strand
gagcaaauucauuggcgaa

SEQ ID NO: 2646371 - RNA, 19 nt, Homo sapiens
  misc_RNA (1)...(19): siRNA sense strand
acuaaagaaaugaggaaca

SEQ ID NO: 2646372 - RNA, 19 nt, Homo sapiens
  misc_RNA (1)...(19): siRNA sense strand
caguggagccugagagaca

SEQ ID NO: 2646373 - RNA, 19 nt, Homo sapiens
  misc_RNA (1)...(19): siRNA sense strand
ccuacgaaacgguguguaa

SEQ ID NO: 2646374 - RNA, 19 nt, Homo sapiens
  misc_RNA (1)...(19): siRNA sense strand
ccaauuugcccgaggccaa

SEQ ID NO: 2646375 - RNA, 19 nt, Homo sapiens
  misc_RNA (1)...(19): siRNA sense strand
agaaauggcagaagagcau

SEQ ID NO: 2646376 - RNA, 19 nt, Homo sapiens
  misc_RNA (1)...(19): siRNA sense strand
ggaaucgagaaaugagaua

SEQ ID NO: 2646377 - RNA, 19 nt, Homo sapiens
  misc_RNA (1)...(19): siRNA sense strand
ggcuacaguuggugaagaa

SEQ ID NO: 2646378 - RNA, 19 nt, Homo sapiens
  misc_RNA (1)...(19): siRNA sense strand
gcucuaacccuguggccaa

SEQ ID NO: 2646379 - RNA, 19 nt, Homo sapiens
  misc_RNA (1)...(19): siRNA sense strand
cagagauggccaaggagaa

SEQ ID NO: 2646380 - RNA, 19 nt, Homo sapiens
  misc_RNA (1)...(19): siRNA sense strand
gugaagagguugcacgaca

SEQ ID NO: 2646381 - RNA, 19 nt, Homo sapiens
  misc_RNA (1)...(19): siRNA sense strand
augaggaacaacugggaaa

SEQ ID NO: 2646382 - RNA, 19 nt, Homo sapiens
  misc_RNA (1)...(19): siRNA sense strand
gagaaggugggaaaggaaa

SEQ ID NO: 2646383 - RNA, 19 nt, Homo sapiens
  misc_RNA (1)...(19): siRNA sense strand
caguguuacuugaaggauu

SEQ ID NO: 2646384 - RNA, 19 nt, Homo sapiens
  misc_RNA (1)...(19): siRNA sense strand
agacgaacggugagaucaa

SEQ ID NO: 2646385 - RNA, 19 nt, Homo sapiens
  misc_RNA (1)...(19): siRNA sense strand
gguuagggaagaagaucua

SEQ ID NO: 2646386 - RNA, 19 nt, Homo sapiens
  misc_RNA (1)...(19): siRNA sense strand
ugucaacggaggaggaauu

SEQ ID NO: 2646387 - RNA, 19 nt, Homo sapiens
  misc_RNA (1)...(19): siRNA sense strand
gcagaggaggccauggaaa

SEQ ID NO: 2646388 - RNA, 19 nt, Homo sapiens
  misc_RNA (1)...(19): siRNA sense strand
ccauuugcuucaaggacaa

SEQ ID NO: 2646389 - RNA, 19 nt, Homo sapiens
  misc_RNA (1)...(19): siRNA sense strand
gauggaacggugacagaaa

SEQ ID NO: 2646390 - RNA, 19 nt, Homo sapiens
  misc_RNA (1)...(19): siRNA sense strand
uggccaagaugcugggaca

SEQ ID NO: 2646391 - RNA, 19 nt, Homo sapiens
  misc_RNA (1)...(19): siRNA sense strand
ggaagagauuugugaccca

SEQ ID NO: 2646392 - RNA, 19 nt, Homo sapiens
  misc_RNA (1)...(19): siRNA sense strand
cagaagaggcacaaauaca

SEQ ID NO: 2646393 - RNA, 19 nt, Homo sapiens
  misc_RNA (1)...(19): siRNA sense strand
guuaugaaguggagcggga

SEQ ID NO: 2646394 - RNA, 19 nt, Homo sapiens
  misc_RNA (1)...(19): siRNA sense strand
gagaaauggcagaagagca

SEQ ID NO: 2646395 - RNA, 19 nt, Homo sapiens
  misc_RNA (1)...(19): siRNA sense strand
gugcguggguggagaaguu

SEQ ID NO: 2646396 - RNA, 19 nt, Homo sapiens
  misc_RNA (1)...(19): siRNA sense strand
cugagaaggaagugauuga

SEQ ID NO: 2646397 - RNA, 19 nt, Homo sapiens
  misc_RNA (1)...(19): siRNA sense strand
ugggaguucugcagcgaaa

SEQ ID NO: 2646398 - RNA, 19 nt, Homo sapiens
  misc_RNA (1)...(19): siRNA sense strand
ggccaagugcucagaggaa

SEQ ID NO: 2646399 - RNA, 19 nt, Homo sapiens
  misc_RNA (1)...(19): siRNA sense strand
gcuggaaaaucaaggacua

SEQ ID NO: 2646400 - RNA, 19 nt, Homo sapiens
  misc_RNA (1)...(19): siRNA sense strand
gcaaggagacagccagcaa

SEQ ID NO: 2646401 - RNA, 19 nt, Homo sapiens
  misc_RNA (1)...(19): siRNA sense strand
aguucagccugguggacaa

SEQ ID NO: 2646402 - RNA, 19 nt, Homo sapiens
  misc_RNA (1)...(19): siRNA sense strand
aaugugaagcugugagcaa

SEQ ID NO: 2646403 - RNA, 19 nt, Homo sapiens
  misc_RNA (1)...(19): siRNA sense strand
gcaaagaaagagugcccau

SEQ ID NO: 2646404 - RNA, 19 nt, Homo sapiens
  misc_RNA (1)...(19): siRNA sense strand
guggacaagcugaggauca

SEQ ID NO: 2646405 - RNA, 19 nt, Homo sapiens
  misc_RNA (1)...(19): siRNA sense strand
ccuacaucguggugcagaa

SEQ ID NO: 2646406 - RNA, 19 nt, Homo sapiens
  misc_RNA (1)...(19): siRNA sense strand
ugguaaaguuccugccuga

SEQ ID NO: 2646407 - RNA, 19 nt, Homo sapiens
  misc_RNA (1)...(19): siRNA sense strand
aggaacuucuucaguguua

SEQ ID NO: 2646408 - RNA, 19 nt, Homo sapiens
  misc_RNA (1)...(19): siRNA sense strand
gcucugugguccugcacua

SEQ ID NO: 2646409 - RNA, 19 nt, Homo sapiens
  misc_RNA (1)...(19): siRNA sense strand
caugcaaacuaaagaaagu

SEQ ID NO: 2646410 - RNA, 19 nt, Homo sapiens
  misc_RNA (1)...(19): siRNA sense strand
cguggagcgcugugugaaa

SEQ ID NO: 2646411 - RNA, 19 nt, Homo sapiens
  misc_RNA (1)...(19): siRNA sense strand
ccucuggagugguuggcaa

SEQ ID NO: 2646412 - RNA, 19 nt, Homo sapiens
  misc_RNA (1)...(19): siRNA sense strand
agacggcaaccuagaguua

SEQ ID NO: 2646413 - RNA, 19 nt, Homo sapiens
  misc_RNA (1)...(19): siRNA sense strand
gcagagagaccgugcagga

SEQ ID NO: 2646414 - RNA, 19 nt, Homo sapiens
  misc_RNA (1)...(19): siRNA sense strand
gaacaucucuuuauggaca

SEQ ID NO: 2646415 - RNA, 19 nt, Homo sapiens
  misc_RNA (1)...(19): siRNA sense strand
acacgaugcuucugaacau

SEQ ID NO: 2646416 - RNA, 19 nt, Homo sapiens
  misc_RNA (1)...(19): siRNA sense strand
ccagaaaugaugaacugaa

SEQ ID NO: 2646417 - RNA, 19 nt, Homo sapiens
  misc_RNA (1)...(19): siRNA sense strand
uggaacaaacugaggagau

SEQ ID NO: 2646418 - RNA, 19 nt, Homo sapiens
  misc_RNA (1)...(19): siRNA sense strand
uuauggacaucaagaacaa

SEQ ID NO: 2646419 - RNA, 19 nt, Homo sapiens
  misc_RNA (1)...(19): siRNA sense strand
gagcacagcugguggggau

SEQ ID NO: 2646420 - RNA, 19 nt, Homo sapiens
  misc_RNA (1)...(19): siRNA sense strand
ugaagagguugcacgacaa

SEQ ID NO: 2646421 - RNA, 19 nt, Homo sapiens
  misc_RNA (1)...(19): siRNA sense strand
agaaagacucauaucggaa

SEQ ID NO: 2646422 - RNA, 19 nt, Homo sapiens
  misc_RNA (1)...(19): siRNA sense strand
gaauuaaaguuucugcaga

SEQ ID NO: 2646423 - RNA, 19 nt, Homo sapiens
  misc_RNA (1)...(19): siRNA sense strand
aggaagugauugagagccu

SEQ ID NO: 2646424 - RNA, 19 nt, Homo sapiens
  misc_RNA (1)...(19): siRNA sense strand
acuggagcaucuagauaaa

SEQ ID NO: 2646425 - RNA, 19 nt, Homo sapiens
  misc_RNA (1)...(19): siRNA sense strand
auuuggagcugcaggaaaa

SEQ ID NO: 2646426 - RNA, 19 nt, Homo sapiens
  misc_RNA (1)...(19): siRNA sense strand
ggaucuggacacugaguuu

SEQ ID NO: 2646427 - RNA, 19 nt, Homo sapiens
  misc_RNA (1)...(19): siRNA sense strand
gagaagauucagcggcaga

SEQ ID NO: 2646428 - RNA, 19 nt, Homo sapiens
  misc_RNA (1)...(19): siRNA sense strand
ugaggagagucauggaaga

SEQ ID NO: 2646429 - RNA, 19 nt, Homo sapiens
  misc_RNA (1)...(19): siRNA sense strand
ccaauaaggaccaacauca

SEQ ID NO: 2646430 - RNA, 19 nt, Homo sapiens
  misc_RNA (1)...(19): siRNA sense strand
agaagaaagccaagggcaa

SEQ ID NO: 2646431 - RNA, 19 nt, Homo sapiens
  misc_RNA (1)...(19): siRNA sense strand
cggaagaggaggaggacga

SEQ ID NO: 2646432 - RNA, 19 nt, Homo sapiens
  misc_RNA (1)...(19): siRNA sense strand
aauccaagcucaagcgcaa

SEQ ID NO: 2646433 - RNA, 19 nt, Homo sapiens
  misc_RNA (1)...(19): siRNA sense strand
uggucaagauggaggccaa

SEQ ID NO: 2646434 - RNA, 19 nt, Homo sapiens
  misc_RNA (1)...(19): siRNA sense strand
gccaagaagaagaaggaga

SEQ ID NO: 2646435 - RNA, 19 nt, Homo sapiens
  misc_RNA (1)...(19): siRNA sense strand
aacccaaggucaagagcaa

SEQ ID NO: 2646436 - RNA, 19 nt, Homo sapiens
  misc_RNA (1)...(19): siRNA sense strand
agaagaagaaggagaggca

SEQ ID NO: 2646437 - RNA, 19 nt, Homo sapiens
  misc_RNA (1)...(19): siRNA sense strand
accugaaggccgagggcaa

SEQ ID NO: 2646438 - RNA, 19 nt, Homo sapiens
  misc_RNA (1)...(19): siRNA sense strand
aggaggacgaggaggaaga

SEQ ID NO: 2646439 - RNA, 19 nt, Homo sapiens
  misc_RNA (1)...(19): siRNA sense strand
uuugaagacaccugggaaa

SEQ ID NO: 2646440 - RNA, 19 nt, Homo sapiens
  misc_RNA (1)...(19): siRNA sense strand
acuuugaguucgacgacaa

SEQ ID NO: 2646441 - RNA, 19 nt, Homo sapiens
  misc_RNA (1)...(19): siRNA sense strand
cggaggaccaagaagguau

SEQ ID NO: 2646442 - RNA, 19 nt, Homo sapiens
  misc_RNA (1)...(19): siRNA sense strand
cggcagaaggacacaguga

SEQ ID NO: 2646443 - RNA, 19 nt, Homo sapiens
  misc_RNA (1)...(19): siRNA sense strand
gcaagaaagucaaggcggu

SEQ ID NO: 2646444 - RNA, 19 nt, Homo sapiens
  misc_RNA (1)...(19): siRNA sense strand
uagauaagacuguuggcaa

SEQ ID NO: 2646445 - RNA, 19 nt, Homo sapiens
  misc_RNA (1)...(19): siRNA sense strand
ggacugugccagaggagga

SEQ ID NO: 2646446 - RNA, 19 nt, Homo sapiens
  misc_RNA (1)...(19): siRNA sense strand
cuaagaaggccgagagggu

SEQ ID NO: 2646447 - RNA, 19 nt, Homo sapiens
  misc_RNA (1)...(19): siRNA sense strand
accagaaggccaagaagaa

SEQ ID NO: 2646448 - RNA, 19 nt, Homo sapiens
  misc_RNA (1)...(19): siRNA sense strand
gcagcaaauccaagcucaa

SEQ ID NO: 2646449 - RNA, 19 nt, Homo sapiens
  misc_RNA (1)...(19): siRNA sense strand
acaugguggucaaggucaa

SEQ ID NO: 2646450 - RNA, 19 nt, Homo sapiens
  misc_RNA (1)...(19): siRNA sense strand
aggaagacuuugaguucga

SEQ ID NO: 2646451 - RNA, 19 nt, Homo sapiens
  misc_RNA (1)...(19): siRNA sense strand
ccaucagcgaggagcgcaa

SEQ ID NO: 2646452 - RNA, 19 nt, Homo sapiens
  misc_RNA (1)...(19): siRNA sense strand
ccaugaagaaccugcucaa

SEQ ID NO: 2646453 - RNA, 19 nt, Homo sapiens
  misc_RNA (1)...(19): siRNA sense strand
gaagcaagcuggagaggag

SEQ ID NO: 2646454 - RNA, 19 nt, Homo sapiens
  misc_RNA (1)...(19): siRNA sense strand
aggaggaggacgaggagga

SEQ ID NO: 2646455 - RNA, 19 nt, Homo sapiens
  misc_RNA (1)...(19): siRNA sense strand
aggaggaagaggaggagga

SEQ ID NO: 2646456 - RNA, 19 nt, Homo sapiens
  misc_RNA (1)...(19): siRNA sense strand
agauaagacuguuggcaag

SEQ ID NO: 2646457 - RNA, 19 nt, Homo sapiens
  misc_RNA (1)...(19): siRNA sense strand
ggcuaaagggccucgacua

SEQ ID NO: 2646458 - RNA, 19 nt, Homo sapiens
  misc_RNA (1)...(19): siRNA sense strand
gcucagggauucaugggau

SEQ ID NO: 2646459 - RNA, 19 nt, Homo sapiens
  misc_RNA (1)...(19): siRNA sense strand
aggaagaggaggaggacag

SEQ ID NO: 2646460 - RNA, 19 nt, Homo sapiens
  misc_RNA (1)...(19): siRNA sense strand
uggucaaggucaagugguu

SEQ ID NO: 2646461 - RNA, 19 nt, Homo sapiens
  misc_RNA (1)...(19): siRNA sense strand
gggcaaagagcugggcaga

SEQ ID NO: 2646462 - RNA, 19 nt, Homo sapiens
  misc_RNA (1)...(19): siRNA sense strand
aagccaagggcaaggccaa

SEQ ID NO: 2646463 - RNA, 19 nt, Homo sapiens
  misc_RNA (1)...(19): siRNA sense strand
acgaggaggaagaggagga

SEQ ID NO: 2646464 - RNA, 19 nt, Homo sapiens
  misc_RNA (1)...(19): siRNA sense strand
gcaucgucaucgagggcga

SEQ ID NO: 2646465 - RNA, 19 nt, Homo sapiens
  misc_RNA (1)...(19): siRNA sense strand
ggucaagagcaaagggcug

SEQ ID NO: 2646466 - RNA, 19 nt, Homo sapiens
  misc_RNA (1)...(19): siRNA sense strand
auccauuagcaaagacaaa

SEQ ID NO: 2646467 - RNA, 19 nt, Homo sapiens
  misc_RNA (1)...(19): siRNA sense strand
agaacgacgugcagaccau

SEQ ID NO: 2646468 - RNA, 19 nt, Homo sapiens
  misc_RNA (1)...(19): siRNA sense strand
gcugaggaggagaggacga

SEQ ID NO: 2646469 - RNA, 19 nt, Homo sapiens
  misc_RNA (1)...(19): siRNA sense strand
gcacgagaagagaggagca

SEQ ID NO: 2646470 - RNA, 19 nt, Homo sapiens
  misc_RNA (1)...(19): siRNA sense strand
ccaaggacuucgaccgcuu

SEQ ID NO: 2646471 - RNA, 19 nt, Homo sapiens
  misc_RNA (1)...(19): siRNA sense strand
agcugaaacccaaggucaa

SEQ ID NO: 2646472 - RNA, 19 nt, Homo sapiens
  misc_RNA (1)...(19): siRNA sense strand
gcccugagagugaggucaa

SEQ ID NO: 2646473 - RNA, 19 nt, Homo sapiens
  misc_RNA (1)...(19): siRNA sense strand
cagaggaggaagaggacgu

SEQ ID NO: 2646474 - RNA, 19 nt, Homo sapiens
  misc_RNA (1)...(19): siRNA sense strand
aggccaagaagaagaagga

SEQ ID NO: 2646475 - RNA, 19 nt, Homo sapiens
  misc_RNA (1)...(19): siRNA sense strand
uguccagcccugagaguga

SEQ ID NO: 2646476 - RNA, 19 nt, Homo sapiens
  misc_RNA (1)...(19): siRNA sense strand
gaagguauccagugaggca

SEQ ID NO: 2646477 - RNA, 19 nt, Homo sapiens
  misc_RNA (1)...(19): siRNA sense strand
gccacgaggaugagaacga

SEQ ID NO: 2646478 - RNA, 19 nt, Homo sapiens
  misc_RNA (1)...(19): siRNA sense strand
cagcugaaacccaagguca

SEQ ID NO: 2646479 - RNA, 19 nt, Homo sapiens
  misc_RNA (1)...(19): siRNA sense strand
ccaaggugcucaacggcga

SEQ ID NO: 2646480 - RNA, 19 nt, Homo sapiens
  misc_RNA (1)...(19): siRNA sense strand
augaagaaccugcucaaau

SEQ ID NO: 2646481 - RNA, 19 nt, Homo sapiens
  misc_RNA (1)...(19): siRNA sense strand
gccucauagcucagggauu

SEQ ID NO: 2646482 - RNA, 19 nt, Homo sapiens
  misc_RNA (1)...(19): siRNA sense strand
ggccaaagaucucagccuu

SEQ ID NO: 2646483 - RNA, 19 nt, Homo sapiens
  misc_RNA (1)...(19): siRNA sense strand
gcgaagaagcgaagcaagc

SEQ ID NO: 2646484 - RNA, 19 nt, Homo sapiens
  misc_RNA (1)...(19): siRNA sense strand
gcgcaguguaagaagagca

SEQ ID NO: 2646485 - RNA, 19 nt, Homo sapiens
  misc_RNA (1)...(19): siRNA sense strand
agauggaggccaaccagaa

SEQ ID NO: 2646486 - RNA, 19 nt, Homo sapiens
  misc_RNA (1)...(19): siRNA sense strand
ucucggaagaggaggagga

SEQ ID NO: 2646487 - RNA, 19 nt, Homo sapiens
  misc_RNA (1)...(19): siRNA sense strand
cuaaaagcggucuggacaa

SEQ ID NO: 2646488 - RNA, 19 nt, Homo sapiens
  misc_RNA (1)...(19): siRNA sense strand
gugagaggacugugccaga

SEQ ID NO: 2646489 - RNA, 19 nt, Homo sapiens
  misc_RNA (1)...(19): siRNA sense strand
agcacgaccaugagagaga

SEQ ID NO: 2646490 - RNA, 19 nt, Homo sapiens
  misc_RNA (1)...(19): siRNA sense strand
ucaagagggccacgcgcaa

SEQ ID NO: 2646491 - RNA, 19 nt, Homo sapiens
  misc_RNA (1)...(19): siRNA sense strand
aagcgaagcaagcuggaga

SEQ ID NO: 2646492 - RNA, 19 nt, Homo sapiens
  misc_RNA (1)...(19): siRNA sense strand
ccucuguggucaagaugga

SEQ ID NO: 2646493 - RNA, 19 nt, Homo sapiens
  misc_RNA (1)...(19): siRNA sense strand
gcgagcaguaugagcagau

SEQ ID NO: 2646494 - RNA, 19 nt, Homo sapiens
  misc_RNA (1)...(19): siRNA sense strand
gugacgaagaugaggaccu

SEQ ID NO: 2646495 - RNA, 19 nt, Homo sapiens
  misc_RNA (1)...(19): siRNA sense strand
caaagcugguaaagccgaa

SEQ ID NO: 2646496 - RNA, 19 nt, Homo sapiens
  misc_RNA (1)...(19): siRNA sense strand
acaucguggcacagagaaa

SEQ ID NO: 2646497 - RNA, 19 nt, Homo sapiens
  misc_RNA (1)...(19): siRNA sense strand
gggaagacgcugcugguga

SEQ ID NO: 2646498 - RNA, 19 nt, Homo sapiens
  misc_RNA (1)...(19): siRNA sense strand
gcacagagaaagaucacca

SEQ ID NO: 2646499 - RNA, 19 nt, Homo sapiens
  misc_RNA (1)...(19): siRNA sense strand
uuacugacaucguggcaca

SEQ ID NO: 2646500 - RNA, 19 nt, Homo sapiens
  misc_RNA (1)...(19): siRNA sense strand
uggccaaggaggagaguga

SEQ ID NO: 2646501 - RNA, 19 nt, Homo sapiens
  misc_RNA (1)...(19): siRNA sense strand
gaacaggagcugagggaag

SEQ ID NO: 2646502 - RNA, 19 nt, Homo sapiens
  misc_RNA (1)...(19): siRNA sense strand
aggaggaggcugagagguu

SEQ ID NO: 2646503 - RNA, 19 nt, Homo sapiens
  misc_RNA (1)...(19): siRNA sense strand
acaagggagcagugggcaa

SEQ ID NO: 2646504 - RNA, 19 nt, Homo sapiens
  misc_RNA (1)...(19): siRNA sense strand
ggaaggaggugacggagga

SEQ ID NO: 2646505 - RNA, 19 nt, Homo sapiens
  misc_RNA (1)...(19): siRNA sense strand
agcuggagguggaggagaa

SEQ ID NO: 2646506 - RNA, 19 nt, Homo sapiens
  misc_RNA (1)...(19): siRNA sense strand
ccaagaagaucaaggaggu

SEQ ID NO: 2646507 - RNA, 19 nt, Homo sapiens
  misc_RNA (1)...(19): siRNA sense strand
gggacaaguacgaggccga

SEQ ID NO: 2646508 - RNA, 19 nt, Homo sapiens
  misc_RNA (1)...(19): siRNA sense strand
aggccaagcuacaaagcau

SEQ ID NO: 2646509 - RNA, 19 nt, Homo sapiens
  misc_RNA (1)...(19): siRNA sense strand
uggagguggaggagaagaa

SEQ ID NO: 2646510 - RNA, 19 nt, Homo sapiens
  misc_RNA (1)...(19): siRNA sense strand
agauguaccgagagggaca

SEQ ID NO: 2646511 - RNA, 19 nt, Homo sapiens
  misc_RNA (1)...(19): siRNA sense strand
gggaacaggagcugaggga

SEQ ID NO: 2646512 - RNA, 19 nt, Homo sapiens
  misc_RNA (1)...(19): siRNA sense strand
gcguuaaaacuuuggagaa

SEQ ID NO: 2646513 - RNA, 19 nt, Homo sapiens
  misc_RNA (1)...(19): siRNA sense strand
ggcugaagcuggaggugga

SEQ ID NO: 2646514 - RNA, 19 nt, Homo sapiens
  misc_RNA (1)...(19): siRNA sense strand
ugacggaggaggaggcuga

SEQ ID NO: 2646515 - RNA, 19 nt, Homo sapiens
  misc_RNA (1)...(19): siRNA sense strand
caaagcagcgcgaagggaa

SEQ ID NO: 2646516 - RNA, 19 nt, Homo sapiens
  misc_RNA (1)...(19): siRNA sense strand
acuuggagaaauuuggaaa

SEQ ID NO: 2646517 - RNA, 19 nt, Homo sapiens
  misc_RNA (1)...(19): siRNA sense strand
aaacuuuggagaaggaaaa

SEQ ID NO: 2646518 - RNA, 19 nt, Homo sapiens
  misc_RNA (1)...(19): siRNA sense strand
gggucaaggagacagagaa

SEQ ID NO: 2646519 - RNA, 19 nt, Homo sapiens
  misc_RNA (1)...(19): siRNA sense strand
gccaaggaggagagugaga

SEQ ID NO: 2646520 - RNA, 19 nt, Homo sapiens
  misc_RNA (1)...(19): siRNA sense strand
caggaagugcggaggcuca

SEQ ID NO: 2646521 - RNA, 19 nt, Homo sapiens
  misc_RNA (1)...(19): siRNA sense strand
agaccagagugccaggaau

SEQ ID NO: 2646522 - RNA, 19 nt, Homo sapiens
  misc_RNA (1)...(19): siRNA sense strand
aggagaagaagcaggccau

SEQ ID NO: 2646523 - RNA, 19 nt, Homo sapiens
  misc_RNA (1)...(19): siRNA sense strand
uggagcagucggagcggaa

SEQ ID NO: 2646524 - RNA, 19 nt, Homo sapiens
  misc_RNA (1)...(19): siRNA sense strand
ccgagagggacacgcacaa

SEQ ID NO: 2646525 - RNA, 19 nt, Homo sapiens
  misc_RNA (1)...(19): siRNA sense strand
ggacaaggagauugagcug

SEQ ID NO: 2646526 - RNA, 19 nt, Homo sapiens
  misc_RNA (1)...(19): siRNA sense strand
ggaacguccuggaugacca

SEQ ID NO: 2646527 - RNA, 19 nt, Homo sapiens
  misc_RNA (1)...(19): siRNA sense strand
gugagaaaaccaagaagau

SEQ ID NO: 2646528 - RNA, 19 nt, Homo sapiens
  misc_RNA (1)...(19): siRNA sense strand
aagaaugucuccagugcca

SEQ ID NO: 2646529 - RNA, 19 nt, Homo sapiens
  misc_RNA (1)...(19): siRNA sense strand
uggccgagcugaagcagga

SEQ ID NO: 2646530 - RNA, 19 nt, Homo sapiens
  misc_RNA (1)...(19): siRNA sense strand
gcaccaggaaggagcccau

SEQ ID NO: 2646531 - RNA, 19 nt, Homo sapiens
  misc_RNA (1)...(19): siRNA sense strand
gaggagaagaagcaggcca

SEQ ID NO: 2646532 - RNA, 19 nt, Homo sapiens
  misc_RNA (1)...(19): siRNA sense strand
caggaggaccagagaugca

SEQ ID NO: 2646533 - RNA, 19 nt, Homo sapiens
  misc_RNA (1)...(19): siRNA sense strand
aggcuacaguccaggcuga

SEQ ID NO: 2646534 - RNA, 19 nt, Homo sapiens
  misc_RNA (1)...(19): siRNA sense strand
cagcgaaaagcuuggaaaa

SEQ ID NO: 2646535 - RNA, 19 nt, Homo sapiens
  misc_RNA (1)...(19): siRNA sense strand
augacaaagacauggaaau

SEQ ID NO: 2646536 - RNA, 19 nt, Homo sapiens
  misc_RNA (1)...(19): siRNA sense strand
gcgagggcaacgugguaaa

SEQ ID NO: 2646537 - RNA, 19 nt, Homo sapiens
  misc_RNA (1)...(19): siRNA sense strand
ccgaaaaggagaaagauca

SEQ ID NO: 2646538 - RNA, 19 nt, Homo sapiens
  misc_RNA (1)...(19): siRNA sense strand
guggacaacuggaagcaga

SEQ ID NO: 2646539 - RNA, 19 nt, Homo sapiens
  misc_RNA (1)...(19): siRNA sense strand
agcaaagagagcaggauga

SEQ ID NO: 2646540 - RNA, 19 nt, Homo sapiens
  misc_RNA (1)...(19): siRNA sense strand
aaauaaucgccaaggagga

SEQ ID NO: 2646541 - RNA, 19 nt, Homo sapiens
  misc_RNA (1)...(19): siRNA sense strand
gcagcuucaagguggacaa

SEQ ID NO: 2646542 - RNA, 19 nt, Homo sapiens
  misc_RNA (1)...(19): siRNA sense strand
gcaucauagaccagaucuu

SEQ ID NO: 2646543 - RNA, 19 nt, Homo sapiens
  misc_RNA (1)...(19): siRNA sense strand
cguauaaguugcugcaccu

SEQ ID NO: 2646544 - RNA, 19 nt, Homo sapiens
  misc_RNA (1)...(19): siRNA sense strand
acaaugggaagaaggccaa

SEQ ID NO: 2646545 - RNA, 19 nt, Homo sapiens
  misc_RNA (1)...(19): siRNA sense strand
acauggaaauaaucgccaa

SEQ ID NO: 2646546 - RNA, 19 nt, Homo sapiens
  misc_RNA (1)...(19): siRNA sense strand
acugcaaaggugaugacaa

SEQ ID NO: 2646547 - RNA, 19 nt, Homo sapiens
  misc_RNA (1)...(19): siRNA sense strand
ggugaugacaaugggaaga

SEQ ID NO: 2646548 - RNA, 19 nt, Homo sapiens
  misc_RNA (1)...(19): siRNA sense strand
gacaaugggaagaaggcca

SEQ ID NO: 2646549 - RNA, 19 nt, Homo sapiens
  misc_RNA (1)...(19): siRNA sense strand
ucaccagaccagagcacuu

SEQ ID NO: 2646550 - RNA, 19 nt, Homo sapiens
  misc_RNA (1)...(19): siRNA sense strand
gcgccaagaucaagugcag

SEQ ID NO: 2646551 - RNA, 19 nt, Homo sapiens
  misc_RNA (1)...(19): siRNA sense strand
gcuuuauccggcagcacaa

SEQ ID NO: 2646552 - RNA, 19 nt, Homo sapiens
  misc_RNA (1)...(19): siRNA sense strand
cugagguugaugagauauu

SEQ ID NO: 2646553 - RNA, 19 nt, Homo sapiens
  misc_RNA (1)...(19): siRNA sense strand
gcauaaaacagaugagaaa

SEQ ID NO: 2646554 - RNA, 19 nt, Homo sapiens
  misc_RNA (1)...(19): siRNA sense strand
gaugaaggagaaagagaaa

SEQ ID NO: 2646555 - RNA, 19 nt, Homo sapiens
  misc_RNA (1)...(19): siRNA sense strand
cuucaaaccaacagcauaa

SEQ ID NO: 2646556 - RNA, 19 nt, Homo sapiens
  misc_RNA (1)...(19): siRNA sense strand
ugaaaugaaaggaggaaaa

SEQ ID NO: 2646557 - RNA, 19 nt, Homo sapiens
  misc_RNA (1)...(19): siRNA sense strand
guuaagaagcagcaacaaa

SEQ ID NO: 2646558 - RNA, 19 nt, Homo sapiens
  misc_RNA (1)...(19): siRNA sense strand
gccaagagcuucaaggaga

SEQ ID NO: 2646559 - RNA, 19 nt, Homo sapiens
  misc_RNA (1)...(19): siRNA sense strand
guggagauguuuugggaaa

SEQ ID NO: 2646560 - RNA, 19 nt, Homo sapiens
  misc_RNA (1)...(19): siRNA sense strand
ccaagagcuucaaggagaa

SEQ ID NO: 2646561 - RNA, 19 nt, Homo sapiens
  misc_RNA (1)...(19): siRNA sense strand
uguagaacauugugaaaca

SEQ ID NO: 2646562 - RNA, 19 nt, Homo sapiens
  misc_RNA (1)...(19): siRNA sense strand
gaugagaaaggcagggcua

SEQ ID NO: 2646563 - RNA, 19 nt, Homo sapiens
  misc_RNA (1)...(19): siRNA sense strand
ugacuuuauucgagugcaa

SEQ ID NO: 2646564 - RNA, 19 nt, Homo sapiens
  misc_RNA (1)...(19): siRNA sense strand
gugauuaauggaagagauu

SEQ ID NO: 2646565 - RNA, 19 nt, Homo sapiens
  misc_RNA (1)...(19): siRNA sense strand
guaugaugaaggagaaaga

SEQ ID NO: 2646566 - RNA, 19 nt, Homo sapiens
  misc_RNA (1)...(19): siRNA sense strand
caagaagaacugaagaaaa

SEQ ID NO: 2646567 - RNA, 19 nt, Homo sapiens
  misc_RNA (1)...(19): siRNA sense strand
cuuugugaucagugggaua

SEQ ID NO: 2646568 - RNA, 19 nt, Homo sapiens
  misc_RNA (1)...(19): siRNA sense strand
acaaagaacacuugcuaca

SEQ ID NO: 2646569 - RNA, 19 nt, Homo sapiens
  misc_RNA (1)...(19): siRNA sense strand
guugaagaagcaagauuaa

SEQ ID NO: 2646570 - RNA, 19 nt, Homo sapiens
  misc_RNA (1)...(19): siRNA sense strand
aagaaagcuaucagaacaa

SEQ ID NO: 2646571 - RNA, 19 nt, Homo sapiens
  misc_RNA (1)...(19): siRNA sense strand
aguugaagaagcaagauua

SEQ ID NO: 2646572 - RNA, 19 nt, Homo sapiens
  misc_RNA (1)...(19): siRNA sense strand
gugaaaugaaaggaggaaa

SEQ ID NO: 2646573 - RNA, 19 nt, Homo sapiens
  misc_RNA (1)...(19): siRNA sense strand
aggaaaacacacagaguau

SEQ ID NO: 2646574 - RNA, 19 nt, Homo sapiens
  misc_RNA (1)...(19): siRNA sense strand
ugaugaaggagaaagagaa

SEQ ID NO: 2646575 - RNA, 19 nt, Homo sapiens
  misc_RNA (1)...(19): siRNA sense strand
gcuaucagaacaagaagaa

SEQ ID NO: 2646576 - RNA, 19 nt, Homo sapiens
  misc_RNA (1)...(19): siRNA sense strand
uggaagagauuuacagaac

SEQ ID NO: 2646577 - RNA, 19 nt, Homo sapiens
  misc_RNA (1)...(19): siRNA sense strand
cggcugaaaucaugagucu

SEQ ID NO: 2646578 - RNA, 19 nt, Homo sapiens
  misc_RNA (1)...(19): siRNA sense strand
cuaauaaaguggggacaua

SEQ ID NO: 2646579 - RNA, 19 nt, Homo sapiens
  misc_RNA (1)...(19): siRNA sense strand
ccaauugcgaaaugaacua

SEQ ID NO: 2646580 - RNA, 19 nt, Homo sapiens
  misc_RNA (1)...(19): siRNA sense strand
ugacauuccuacaacacaa

SEQ ID NO: 2646581 - RNA, 19 nt, Homo sapiens
  misc_RNA (1)...(19): siRNA sense strand
agguuaaagccaucuauaa

SEQ ID NO: 2646582 - RNA, 19 nt, Homo sapiens
  misc_RNA (1)...(19): siRNA sense strand
uaguugaaguccugccuaa

SEQ ID NO: 2646583 - RNA, 19 nt, Homo sapiens
  misc_RNA (1)...(19): siRNA sense strand
aacaagaagaacugaagaa

SEQ ID NO: 2646584 - RNA, 19 nt, Homo sapiens
  misc_RNA (1)...(19): siRNA sense strand
acagaugggccaagagcuu

SEQ ID NO: 2646585 - RNA, 19 nt, Homo sapiens
  misc_RNA (1)...(19): siRNA sense strand
gugaaugguucggcugaaa

SEQ ID NO: 2646586 - RNA, 19 nt, Homo sapiens
  misc_RNA (1)...(19): siRNA sense strand
acaagaagaacugaagaaa

SEQ ID NO: 2646587 - RNA, 19 nt, Homo sapiens
  misc_RNA (1)...(19): siRNA sense strand
cuguaaaagauaugcgcua

SEQ ID NO: 2646588 - RNA, 19 nt, Homo sapiens
  misc_RNA (1)...(19): siRNA sense strand
ugaacagguuauaguugaa

SEQ ID NO: 2646589 - RNA, 19 nt, Homo sapiens
  misc_RNA (1)...(19): siRNA sense strand
aguccauuccagugauuaa

SEQ ID NO: 2646590 - RNA, 19 nt, Homo sapiens
  misc_RNA (1)...(19): siRNA sense strand
aauguaugaugaaggagaa

SEQ ID NO: 2646591 - RNA, 19 nt, Homo sapiens
  misc_RNA (1)...(19): siRNA sense strand
acaaugauguuaagaagca

SEQ ID NO: 2646592 - RNA, 19 nt, Homo sapiens
  misc_RNA (1)...(19): siRNA sense strand
gauagagcugcgaugguua

SEQ ID NO: 2646593 - RNA, 19 nt, Homo sapiens
  misc_RNA (1)...(19): siRNA sense strand
gcaacaaauggcagcacuu

SEQ ID NO: 2646594 - RNA, 19 nt, Homo sapiens
  misc_RNA (1)...(19): siRNA sense strand
caacacaacaggugccaca

SEQ ID NO: 2646595 - RNA, 19 nt, Homo sapiens
  misc_RNA (1)...(19): siRNA sense strand
gcaacuaauuucuggaccu

SEQ ID NO: 2646596 - RNA, 19 nt, Homo sapiens
  misc_RNA (1)...(19): siRNA sense strand
gcagaaaguaguccuggaa

SEQ ID NO: 2646597 - RNA, 19 nt, Homo sapiens
  misc_RNA (1)...(19): siRNA sense strand
caaaagaaaaggaccaauu

SEQ ID NO: 2646598 - RNA, 19 nt, Homo sapiens
  misc_RNA (1)...(19): siRNA sense strand
gcuucuauuucagggauaa

SEQ ID NO: 2646599 - RNA, 19 nt, Homo sapiens
  misc_RNA (1)...(19): siRNA sense strand
cagaacaagaagaacugaa

SEQ ID NO: 2646600 - RNA, 19 nt, Homo sapiens
  misc_RNA (1)...(19): siRNA sense strand
gauugcacaucuagcacaa

SEQ ID NO: 2646601 - RNA, 19 nt, Homo sapiens
  misc_RNA (1)...(19): siRNA sense strand
guguaagaggcaucaaauu

SEQ ID NO: 2646602 - RNA, 19 nt, Homo sapiens
  misc_RNA (1)...(19): siRNA sense strand
aagggauaguacugaauau

SEQ ID NO: 2646603 - RNA, 19 nt, Homo sapiens
  misc_RNA (1)...(19): siRNA sense strand
uacuaaaggcaguggagau

SEQ ID NO: 2646604 - RNA, 19 nt, Homo sapiens
  misc_RNA (1)...(19): siRNA sense strand
ugaaggagaaagagaaauc

SEQ ID NO: 2646605 - RNA, 19 nt, Homo sapiens
  misc_RNA (1)...(19): siRNA sense strand
aguuagaacacuugaauuc

SEQ ID NO: 2646606 - RNA, 19 nt, Homo sapiens
  misc_RNA (1)...(19): siRNA sense strand
aaauguaugaugaaggaga

SEQ ID NO: 2646607 - RNA, 19 nt, Homo sapiens
  misc_RNA (1)...(19): siRNA sense strand
agugauuaauggaagagau

SEQ ID NO: 2646608 - RNA, 19 nt, Homo sapiens
  misc_RNA (1)...(19): siRNA sense strand
uggaagggauaguacugaa

SEQ ID NO: 2646609 - RNA, 19 nt, Homo sapiens
  misc_RNA (1)...(19): siRNA sense strand
ggccagaacuaaaggaguc

SEQ ID NO: 2646610 - RNA, 19 nt, Homo sapiens
  misc_RNA (1)...(19): siRNA sense strand
ccuucaaaccaacagcaua

SEQ ID NO: 2646611 - RNA, 19 nt, Homo sapiens
  misc_RNA (1)...(19): siRNA sense strand
cuaaucaaccugugaaguu

SEQ ID NO: 2646612 - RNA, 19 nt, Homo sapiens
  misc_RNA (1)...(19): siRNA sense strand
ccaacagcuucuuaaugaa

SEQ ID NO: 2646613 - RNA, 19 nt, Homo sapiens
  misc_RNA (1)...(19): siRNA sense strand
aaggagaaagagaaaucaa

SEQ ID NO: 2646614 - RNA, 19 nt, Homo sapiens
  misc_RNA (1)...(19): siRNA sense strand
uaucagaacaagaagaacu

SEQ ID NO: 2646615 - RNA, 19 nt, Homo sapiens
  misc_RNA (1)...(19): siRNA sense strand
aguauaaguguaagaggca

SEQ ID NO: 2646616 - RNA, 19 nt, Homo sapiens
  misc_RNA (1)...(19): siRNA sense strand
cuaaugaggaagauacuga

SEQ ID NO: 2646617 - RNA, 19 nt, Homo sapiens
  misc_RNA (1)...(19): siRNA sense strand
ggaagggauaguacugaau

SEQ ID NO: 2646618 - RNA, 19 nt, Homo sapiens
  misc_RNA (1)...(19): siRNA sense strand
augaugaaggagaaagaga

SEQ ID NO: 2646619 - RNA, 19 nt, Homo sapiens
  misc_RNA (1)...(19): siRNA sense strand
uuaagaagcagcaacaaau

SEQ ID NO: 2646620 - RNA, 19 nt, Homo sapiens
  misc_RNA (1)...(19): siRNA sense strand
gaaaagaaagcuaucagaa

SEQ ID NO: 2646621 - RNA, 19 nt, Homo sapiens
  misc_RNA (1)...(19): siRNA sense strand
gcacaaauugaagaugaua

SEQ ID NO: 2646622 - RNA, 19 nt, Homo sapiens
  misc_RNA (1)...(19): siRNA sense strand
ugagaaaggcagggcuaau

SEQ ID NO: 2646623 - RNA, 19 nt, Homo sapiens
  misc_RNA (1)...(19): siRNA sense strand
aaguaguccuggaagggau

SEQ ID NO: 2646624 - RNA, 19 nt, Homo sapiens
  misc_RNA (1)...(19): siRNA sense strand
aaacuauacuaaaggcagu

SEQ ID NO: 2646625 - RNA, 19 nt, Homo sapiens
  misc_RNA (1)...(19): siRNA sense strand
cgucguaucuaugaugaaa

SEQ ID NO: 2646626 - RNA, 19 nt, Homo sapiens
  misc_RNA (1)...(19): siRNA sense strand
ccaagaugaucaugugucu

SEQ ID NO: 2646627 - RNA, 19 nt, Homo sapiens
  misc_RNA (1)...(19): siRNA sense strand
cugaugaaccuaaacauuu

SEQ ID NO: 2646628 - RNA, 19 nt, Homo sapiens
  misc_RNA (1)...(19): siRNA sense strand
aaacaguacagaugggcca

SEQ ID NO: 2646629 - RNA, 19 nt, Homo sapiens
  misc_RNA (1)...(19): siRNA sense strand
ccugaugaaccuaaacauu

SEQ ID NO: 2646630 - RNA, 19 nt, Homo sapiens
  misc_RNA (1)...(19): siRNA sense strand
gcauaaaacagaugagaaa

SEQ ID NO: 2646631 - RNA, 19 nt, Homo sapiens
  misc_RNA (1)...(19): siRNA sense strand
gaugaaggagaaagagaaa

SEQ ID NO: 2646632 - RNA, 19 nt, Homo sapiens
  misc_RNA (1)...(19): siRNA sense strand
cuucaaaccaacagcauaa

SEQ ID NO: 2646633 - RNA, 19 nt, Homo sapiens
  misc_RNA (1)...(19): siRNA sense strand
ugaaaugaaaggaggaaaa

SEQ ID NO: 2646634 - RNA, 19 nt, Homo sapiens
  misc_RNA (1)...(19): siRNA sense strand
acgagaagcuacaagacaa

SEQ ID NO: 2646635 - RNA, 19 nt, Homo sapiens
  misc_RNA (1)...(19): siRNA sense strand
guuaagaagcagcaacaaa

SEQ ID NO: 2646636 - RNA, 19 nt, Homo sapiens
  misc_RNA (1)...(19): siRNA sense strand
ucucaaacuaauagaggaa

SEQ ID NO: 2646637 - RNA, 19 nt, Homo sapiens
  misc_RNA (1)...(19): siRNA sense strand
gccaagagcuucaaggaga

SEQ ID NO: 2646638 - RNA, 19 nt, Homo sapiens
  misc_RNA (1)...(19): siRNA sense strand
guggagauguuuugggaaa

SEQ ID NO: 2646639 - RNA, 19 nt, Homo sapiens
  misc_RNA (1)...(19): siRNA sense strand
ccaagagcuucaaggagaa

SEQ ID NO: 2646640 - RNA, 19 nt, Homo sapiens
  misc_RNA (1)...(19): siRNA sense strand
cgagaagcuacaagacaaa

SEQ ID NO: 2646641 - RNA, 19 nt, Homo sapiens
  misc_RNA (1)...(19): siRNA sense strand
caaacuagacagugugaau

SEQ ID NO: 2646642 - RNA, 19 nt, Homo sapiens
  misc_RNA (1)...(19): siRNA sense strand
uguagaacauugugaaaca

SEQ ID NO: 2646643 - RNA, 19 nt, Homo sapiens
  misc_RNA (1)...(19): siRNA sense strand
gaugagaaaggcagggcua

SEQ ID NO: 2646644 - RNA, 19 nt, Homo sapiens
  misc_RNA (1)...(19): siRNA sense strand
ugacuuuauucgagugcaa

SEQ ID NO: 2646645 - RNA, 19 nt, Homo sapiens
  misc_RNA (1)...(19): siRNA sense strand
gugauuaauggaagagauu

SEQ ID NO: 2646646 - RNA, 19 nt, Homo sapiens
  misc_RNA (1)...(19): siRNA sense strand
ucgaaguaauggaaaguuu

SEQ ID NO: 2646647 - RNA, 19 nt, Homo sapiens
  misc_RNA (1)...(19): siRNA sense strand
guaugaugaaggagaaaga

SEQ ID NO: 2646648 - RNA, 19 nt, Homo sapiens
  misc_RNA (1)...(19): siRNA sense strand
caagaagaacugaagaaaa

SEQ ID NO: 2646649 - RNA, 19 nt, Homo sapiens
  misc_RNA (1)...(19): siRNA sense strand
cuuugugaucagugggaua

SEQ ID NO: 2646650 - RNA, 19 nt, Homo sapiens
  misc_RNA (1)...(19): siRNA sense strand
acaaagaacacuugcuaca

SEQ ID NO: 2646651 - RNA, 19 nt, Homo sapiens
  misc_RNA (1)...(19): siRNA sense strand
guugaagaagcaagauuaa

SEQ ID NO: 2646652 - RNA, 19 nt, Homo sapiens
  misc_RNA (1)...(19): siRNA sense strand
aagaaagcuaucagaacaa

SEQ ID NO: 2646653 - RNA, 19 nt, Homo sapiens
  misc_RNA (1)...(19): siRNA sense strand
ggaucuuaacagucaauua

SEQ ID NO: 2646654 - RNA, 19 nt, Homo sapiens
  misc_RNA (1)...(19): siRNA sense strand
aguugaagaagcaagauua

SEQ ID NO: 2646655 - RNA, 19 nt, Homo sapiens
  misc_RNA (1)...(19): siRNA sense strand
acuugaugaacaugagaaa

SEQ ID NO: 2646656 - RNA, 19 nt, Homo sapiens
  misc_RNA (1)...(19): siRNA sense strand
gugaaaugaaaggaggaaa

SEQ ID NO: 2646657 - RNA, 19 nt, Homo sapiens
  misc_RNA (1)...(19): siRNA sense strand
aggaaaacacacagaguau

SEQ ID NO: 2646658 - RNA, 19 nt, Homo sapiens
  misc_RNA (1)...(19): siRNA sense strand
ugaugaaggagaaagagaa

SEQ ID NO: 2646659 - RNA, 19 nt, Homo sapiens
  misc_RNA (1)...(19): siRNA sense strand
gcuaucagaacaagaagaa

SEQ ID NO: 2646660 - RNA, 19 nt, Homo sapiens
  misc_RNA (1)...(19): siRNA sense strand
ccggauaugaggaagaaaa

SEQ ID NO: 2646661 - RNA, 19 nt, Homo sapiens
  misc_RNA (1)...(19): siRNA sense strand
uggaagagauuuacagaac

SEQ ID NO: 2646662 - RNA, 19 nt, Homo sapiens
  misc_RNA (1)...(19): siRNA sense strand
cggcugaaaucaugagucu

SEQ ID NO: 2646663 - RNA, 19 nt, Homo sapiens
  misc_RNA (1)...(19): siRNA sense strand
cuaauaaaguggggacaua

SEQ ID NO: 2646664 - RNA, 19 nt, Homo sapiens
  misc_RNA (1)...(19): siRNA sense strand
ccaauugcgaaaugaacua

SEQ ID NO: 2646665 - RNA, 19 nt, Homo sapiens
  misc_RNA (1)...(19): siRNA sense strand
ugacauuccuacaacacaa

SEQ ID NO: 2646666 - RNA, 19 nt, Homo sapiens
  misc_RNA (1)...(19): siRNA sense strand
agguuaaagccaucuauaa

SEQ ID NO: 2646667 - RNA, 19 nt, Homo sapiens
  misc_RNA (1)...(19): siRNA sense strand
uaguugaaguccugccuaa

SEQ ID NO: 2646668 - RNA, 19 nt, Homo sapiens
  misc_RNA (1)...(19): siRNA sense strand
aacaagaagaacugaagaa

SEQ ID NO: 2646669 - RNA, 19 nt, Homo sapiens
  misc_RNA (1)...(19): siRNA sense strand
acagaugggccaagagcuu

SEQ ID NO: 2646670 - RNA, 19 nt, Homo sapiens
  misc_RNA (1)...(19): siRNA sense strand
gugaaugguucggcugaaa

SEQ ID NO: 2646671 - RNA, 19 nt, Homo sapiens
  misc_RNA (1)...(19): siRNA sense strand
acaagaagaacugaagaaa

SEQ ID NO: 2646672 - RNA, 19 nt, Homo sapiens
  misc_RNA (1)...(19): siRNA sense strand
cuguaaaagauaugcgcua

SEQ ID NO: 2646673 - RNA, 19 nt, Homo sapiens
  misc_RNA (1)...(19): siRNA sense strand
ugaacagguuauaguugaa

SEQ ID NO: 2646674 - RNA, 19 nt, Homo sapiens
  misc_RNA (1)...(19): siRNA sense strand
aguccauuccagugauuaa

SEQ ID NO: 2646675 - RNA, 19 nt, Homo sapiens
  misc_RNA (1)...(19): siRNA sense strand
acaaugauguuaagaagca

SEQ ID NO: 2646676 - RNA, 19 nt, Homo sapiens
  misc_RNA (1)...(19): siRNA sense strand
gauagagcugcgaugguua

SEQ ID NO: 2646677 - RNA, 19 nt, Homo sapiens
  misc_RNA (1)...(19): siRNA sense strand
gcaacaaauggcagcacuu

SEQ ID NO: 2646678 - RNA, 19 nt, Homo sapiens
  misc_RNA (1)...(19): siRNA sense strand
caacacaacaggugccaca

SEQ ID NO: 2646679 - RNA, 19 nt, Homo sapiens
  misc_RNA (1)...(19): siRNA sense strand
aacuagacagugugaauaa

SEQ ID NO: 2646680 - RNA, 19 nt, Homo sapiens
  misc_RNA (1)...(19): siRNA sense strand
gcaacuaauuucuggaccu

SEQ ID NO: 2646681 - RNA, 19 nt, Homo sapiens
  misc_RNA (1)...(19): siRNA sense strand
gcagaaaguaguccuggaa

SEQ ID NO: 2646682 - RNA, 19 nt, Homo sapiens
  misc_RNA (1)...(19): siRNA sense strand
caaaagaaaaggaccaauu

SEQ ID NO: 2646683 - RNA, 19 nt, Homo sapiens
  misc_RNA (1)...(19): siRNA sense strand
gcuucuauuucagggauaa

SEQ ID NO: 2646684 - RNA, 19 nt, Homo sapiens
  misc_RNA (1)...(19): siRNA sense strand
cagaacaagaagaacugaa

SEQ ID NO: 2646685 - RNA, 19 nt, Homo sapiens
  misc_RNA (1)...(19): siRNA sense strand
gauugcacaucuagcacaa

SEQ ID NO: 2646686 - RNA, 19 nt, Homo sapiens
  misc_RNA (1)...(19): siRNA sense strand
guguaagaggcaucaaauu

SEQ ID NO: 2646687 - RNA, 19 nt, Homo sapiens
  misc_RNA (1)...(19): siRNA sense strand
aagggauaguacugaauau

SEQ ID NO: 2646688 - RNA, 19 nt, Homo sapiens
  misc_RNA (1)...(19): siRNA sense strand
uacuaaaggcaguggagau

SEQ ID NO: 2646689 - RNA, 19 nt, Homo sapiens
  misc_RNA (1)...(19): siRNA sense strand
ugaaggagaaagagaaauc

SEQ ID NO: 2646690 - RNA, 19 nt, Homo sapiens
  misc_RNA (1)...(19): siRNA sense strand
aguuagaacacuugaauuc

SEQ ID NO: 2646691 - RNA, 19 nt, Homo sapiens
  misc_RNA (1)...(19): siRNA sense strand
gaucuuaggggaacaaaua

SEQ ID NO: 2646692 - RNA, 19 nt, Homo sapiens
  misc_RNA (1)...(19): siRNA sense strand
agugauuaauggaagagau

SEQ ID NO: 2646693 - RNA, 19 nt, Homo sapiens
  misc_RNA (1)...(19): siRNA sense strand
uggaagggauaguacugaa

SEQ ID NO: 2646694 - RNA, 19 nt, Homo sapiens
  misc_RNA (1)...(19): siRNA sense strand
ccagagauggagaucgaau

SEQ ID NO: 2646695 - RNA, 19 nt, Homo sapiens
  misc_RNA (1)...(19): siRNA sense strand
acguaaguguaaugacuca

SEQ ID NO: 2646696 - RNA, 19 nt, Homo sapiens
  misc_RNA (1)...(19): siRNA sense strand
ggccagaacuaaaggaguc

SEQ ID NO: 2646697 - RNA, 19 nt, Homo sapiens
  misc_RNA (1)...(19): siRNA sense strand
ccuucaaaccaacagcaua

SEQ ID NO: 2646698 - RNA, 19 nt, Homo sapiens
  misc_RNA (1)...(19): siRNA sense strand
cuaaucaaccugugaaguu

SEQ ID NO: 2646699 - RNA, 19 nt, Homo sapiens
  misc_RNA (1)...(19): siRNA sense strand
ccaacagcuucuuaaugaa

SEQ ID NO: 2646700 - RNA, 19 nt, Homo sapiens
  misc_RNA (1)...(19): siRNA sense strand
caccaaagguugagacgac

SEQ ID NO: 2646701 - RNA, 19 nt, Homo sapiens
  misc_RNA (1)...(19): siRNA sense strand
uaucagaacaagaagaacu

SEQ ID NO: 2646702 - RNA, 19 nt, Homo sapiens
  misc_RNA (1)...(19): siRNA sense strand
aaggagaaagagaaaucaa

SEQ ID NO: 2646703 - RNA, 19 nt, Homo sapiens
  misc_RNA (1)...(19): siRNA sense strand
augaugaaggagaaagaga

SEQ ID NO: 2646704 - RNA, 19 nt, Homo sapiens
  misc_RNA (1)...(19): siRNA sense strand
aguauaaguguaagaggca

SEQ ID NO: 2646705 - RNA, 19 nt, Homo sapiens
  misc_RNA (1)...(19): siRNA sense strand
cuaaugaggaagauacuga

SEQ ID NO: 2646706 - RNA, 19 nt, Homo sapiens
  misc_RNA (1)...(19): siRNA sense strand
ggaagggauaguacugaau

SEQ ID NO: 2646707 - RNA, 19 nt, Homo sapiens
  misc_RNA (1)...(19): siRNA sense strand
uuaagaagcagcaacaaau

SEQ ID NO: 2646708 - RNA, 19 nt, Homo sapiens
  misc_RNA (1)...(19): siRNA sense strand
ggcuaaagcugguggagga

SEQ ID NO: 2646709 - RNA, 19 nt, Homo sapiens
  misc_RNA (1)...(19): siRNA sense strand
agaaagagcugcaggccuu

SEQ ID NO: 2646710 - RNA, 19 nt, Homo sapiens
  misc_RNA (1)...(19): siRNA sense strand
gaauuaacauugaggagga

SEQ ID NO: 2646711 - RNA, 19 nt, Homo sapiens
  misc_RNA (1)...(19): siRNA sense strand
ucgagaaggugcaggccaa

SEQ ID NO: 2646712 - RNA, 19 nt, Homo sapiens
  misc_RNA (1)...(19): siRNA sense strand
gguggaaagaacuggaaau

SEQ ID NO: 2646713 - RNA, 19 nt, Homo sapiens
  misc_RNA (1)...(19): siRNA sense strand
ggaagcagauggaggagga

SEQ ID NO: 2646714 - RNA, 19 nt, Homo sapiens
  misc_RNA (1)...(19): siRNA sense strand
cgggcaagaaggagaguga

SEQ ID NO: 2646715 - RNA, 19 nt, Homo sapiens
  misc_RNA (1)...(19): siRNA sense strand
gggagaaggacgagcugga

SEQ ID NO: 2646716 - RNA, 19 nt, Homo sapiens
  misc_RNA (1)...(19): siRNA sense strand
agauggaggaggaaggaga

SEQ ID NO: 2646717 - RNA, 19 nt, Homo sapiens
  misc_RNA (1)...(19): siRNA sense strand
aggccuugcuggaggacuu

SEQ ID NO: 2646718 - RNA, 19 nt, Homo sapiens
  misc_RNA (1)...(19): siRNA sense strand
cugagaacaaguugggaga

SEQ ID NO: 2646719 - RNA, 19 nt, Homo sapiens
  misc_RNA (1)...(19): siRNA sense strand
aggacgagcuggagcagga

SEQ ID NO: 2646720 - RNA, 19 nt, Homo sapiens
  misc_RNA (1)...(19): siRNA sense strand
agagauuggagcuggaaga

SEQ ID NO: 2646721 - RNA, 19 nt, Homo sapiens
  misc_RNA (1)...(19): siRNA sense strand
ggaagaucguggagcugga

SEQ ID NO: 2646722 - RNA, 19 nt, Homo sapiens
  misc_RNA (1)...(19): siRNA sense strand
cagcaauaugccagcgaca

SEQ ID NO: 2646723 - RNA, 19 nt, Homo sapiens
  misc_RNA (1)...(19): siRNA sense strand
aggaggaaggagaggaguu

SEQ ID NO: 2646724 - RNA, 19 nt, Homo sapiens
  misc_RNA (1)...(19): siRNA sense strand
ccgagagugaugcgggcaa

SEQ ID NO: 2646725 - RNA, 19 nt, Homo sapiens
  misc_RNA (1)...(19): siRNA sense strand
uguggauaucccagaauua

SEQ ID NO: 2646726 - RNA, 19 nt, Homo sapiens
  misc_RNA (1)...(19): siRNA sense strand
ccgagagggaguucaggaa

SEQ ID NO: 2646727 - RNA, 19 nt, Homo sapiens
  misc_RNA (1)...(19): siRNA sense strand
ccuggagugaugagaagaa

SEQ ID NO: 2646728 - RNA, 19 nt, Homo sapiens
  misc_RNA (1)...(19): siRNA sense strand
gccuggagauggaggagga

SEQ ID NO: 2646729 - RNA, 19 nt, Homo sapiens
  misc_RNA (1)...(19): siRNA sense strand
agaagaaucugaugcagca

SEQ ID NO: 2646730 - RNA, 19 nt, Homo sapiens
  misc_RNA (1)...(19): siRNA sense strand
gugcucggccagugagaau

SEQ ID NO: 2646731 - RNA, 19 nt, Homo sapiens
  misc_RNA (1)...(19): siRNA sense strand
ucguggagcuggaggugga

SEQ ID NO: 2646732 - RNA, 19 nt, Homo sapiens
  misc_RNA (1)...(19): siRNA sense strand
acagcgaugccgagaguga

SEQ ID NO: 2646733 - RNA, 19 nt, Homo sapiens
  misc_RNA (1)...(19): siRNA sense strand
aaggaauucuuguggagga

SEQ ID NO: 2646734 - RNA, 19 nt, Homo sapiens
  misc_RNA (1)...(19): siRNA sense strand
ggaggagacuuuaggcuuc

SEQ ID NO: 2646735 - RNA, 19 nt, Homo sapiens
  misc_RNA (1)...(19): siRNA sense strand
acaucgaggaguucaacaa

SEQ ID NO: 2646736 - RNA, 19 nt, Homo sapiens
  misc_RNA (1)...(19): siRNA sense strand
gcuucagccuggagaugga

SEQ ID NO: 2646737 - RNA, 19 nt, Homo sapiens
  misc_RNA (1)...(19): siRNA sense strand
cagcuggguccacgguaaa

SEQ ID NO: 2646738 - RNA, 19 nt, Homo sapiens
  misc_RNA (1)...(19): siRNA sense strand
agugggagcggcagaagaa

SEQ ID NO: 2646739 - RNA, 19 nt, Homo sapiens
  misc_RNA (1)...(19): siRNA sense strand
aagcagagccagagggagc

SEQ ID NO: 2646740 - RNA, 19 nt, Homo sapiens
  misc_RNA (1)...(19): siRNA sense strand
ccaaauaacaggacgucac

SEQ ID NO: 2646741 - RNA, 19 nt, Homo sapiens
  misc_RNA (1)...(19): siRNA sense strand
ugguggaggaggaagccaa

SEQ ID NO: 2646742 - RNA, 19 nt, Homo sapiens
  misc_RNA (1)...(19): siRNA sense strand
uggagugggccgugcucaa

SEQ ID NO: 2646743 - RNA, 19 nt, Homo sapiens
  misc_RNA (1)...(19): siRNA sense strand
ggcaagaaggagagugaug

SEQ ID NO: 2646744 - RNA, 19 nt, Homo sapiens
  misc_RNA (1)...(19): siRNA sense strand
uggagauggaggaggagca

SEQ ID NO: 2646745 - RNA, 19 nt, Homo sapiens
  misc_RNA (1)...(19): siRNA sense strand
gagcggcagaagaaggaau

SEQ ID NO: 2646746 - RNA, 19 nt, Homo sapiens
  misc_RNA (1)...(19): siRNA sense strand
ggaagagaagacugagaac

SEQ ID NO: 2646747 - RNA, 19 nt, Homo sapiens
  misc_RNA (1)...(19): siRNA sense strand
ccgagaucgaagaccacaa

SEQ ID NO: 2646748 - RNA, 19 nt, Homo sapiens
  misc_RNA (1)...(19): siRNA sense strand
gccuugagguggaaagaac

SEQ ID NO: 2646749 - RNA, 19 nt, Homo sapiens
  misc_RNA (1)...(19): siRNA sense strand
gcugaaacacuggcggcaa

SEQ ID NO: 2646750 - RNA, 19 nt, Homo sapiens
  misc_RNA (1)...(19): siRNA sense strand
cuggaagagaagacugaga

SEQ ID NO: 2646751 - RNA, 19 nt, Homo sapiens
  misc_RNA (1)...(19): siRNA sense strand
cuggcgagcugcaagucaa

SEQ ID NO: 2646752 - RNA, 19 nt, Homo sapiens
  misc_RNA (1)...(19): siRNA sense strand
ggucagagaugugcaggga

SEQ ID NO: 2646753 - RNA, 19 nt, Homo sapiens
  misc_RNA (1)...(19): siRNA sense strand
gagaagacugagaacaagu

SEQ ID NO: 2646754 - RNA, 19 nt, Homo sapiens
  misc_RNA (1)...(19): siRNA sense strand
aggaagaagaaaaucacaa

SEQ ID NO: 2646755 - RNA, 19 nt, Homo sapiens
  misc_RNA (1)...(19): siRNA sense strand
acgaagcagcacagaguaa

SEQ ID NO: 2646756 - RNA, 19 nt, Homo sapiens
  misc_RNA (1)...(19): siRNA sense strand
aaagaaagagccaggagaa

SEQ ID NO: 2646757 - RNA, 19 nt, Homo sapiens
  misc_RNA (1)...(19): siRNA sense strand
aagaauuggcugaaggaga

SEQ ID NO: 2646758 - RNA, 19 nt, Homo sapiens
  misc_RNA (1)...(19): siRNA sense strand
ucauggugguuuauggaaa

SEQ ID NO: 2646759 - RNA, 19 nt, Homo sapiens
  misc_RNA (1)...(19): siRNA sense strand
aggaggaagaggaagagaa

SEQ ID NO: 2646760 - RNA, 19 nt, Homo sapiens
  misc_RNA (1)...(19): siRNA sense strand
gaaagagccaggagaacuu

SEQ ID NO: 2646761 - RNA, 19 nt, Homo sapiens
  misc_RNA (1)...(19): siRNA sense strand
ucaaggaguucauuggcaa

SEQ ID NO: 2646762 - RNA, 19 nt, Homo sapiens
  misc_RNA (1)...(19): siRNA sense strand
cagaaaagcgagaggagga

SEQ ID NO: 2646763 - RNA, 19 nt, Homo sapiens
  misc_RNA (1)...(19): siRNA sense strand
ugaucuaugaagaggauuu

SEQ ID NO: 2646764 - RNA, 19 nt, Homo sapiens
  misc_RNA (1)...(19): siRNA sense strand
aggagaacuugcuuccaaa

SEQ ID NO: 2646765 - RNA, 19 nt, Homo sapiens
  misc_RNA (1)...(19): siRNA sense strand
guaucaaaguucaugccau

SEQ ID NO: 2646766 - RNA, 19 nt, Homo sapiens
  misc_RNA (1)...(19): siRNA sense strand
cuuccaaaguaagugaaua

SEQ ID NO: 2646767 - RNA, 19 nt, Homo sapiens
  misc_RNA (1)...(19): siRNA sense strand
guaucaagucaguaauuca

SEQ ID NO: 2646768 - RNA, 19 nt, Homo sapiens
  misc_RNA (1)...(19): siRNA sense strand
gagaugguguugaaggcga

SEQ ID NO: 2646769 - RNA, 19 nt, Homo sapiens
  misc_RNA (1)...(19): siRNA sense strand
caggagaacuugcuuccaa

SEQ ID NO: 2646770 - RNA, 19 nt, Homo sapiens
  misc_RNA (1)...(19): siRNA sense strand
ggaaaccuauuguugauau

SEQ ID NO: 2646771 - RNA, 19 nt, Homo sapiens
  misc_RNA (1)...(19): siRNA sense strand
uugaaggcgaguuggaaga

SEQ ID NO: 2646772 - RNA, 19 nt, Homo sapiens
  misc_RNA (1)...(19): siRNA sense strand
ccaaagaguugauggagga

SEQ ID NO: 2646773 - RNA, 19 nt, Homo sapiens
  misc_RNA (1)...(19): siRNA sense strand
gagaaugaagaaagggaau

SEQ ID NO: 2646774 - RNA, 19 nt, Homo sapiens
  misc_RNA (1)...(19): siRNA sense strand
cagaagaaggccugggaga

SEQ ID NO: 2646775 - RNA, 19 nt, Homo sapiens
  misc_RNA (1)...(19): siRNA sense strand
aggaagaaacgcugcacaa

SEQ ID NO: 2646776 - RNA, 19 nt, Homo sapiens
  misc_RNA (1)...(19): siRNA sense strand
ggagaaugaagaaagggaa

SEQ ID NO: 2646777 - RNA, 19 nt, Homo sapiens
  misc_RNA (1)...(19): siRNA sense strand
ggguacaggugaugaggga

SEQ ID NO: 2646778 - RNA, 19 nt, Homo sapiens
  misc_RNA (1)...(19): siRNA sense strand
caaaauuaagagugcgaaa

SEQ ID NO: 2646779 - RNA, 19 nt, Homo sapiens
  misc_RNA (1)...(19): siRNA sense strand
aguaguaugaggucagaaa

SEQ ID NO: 2646780 - RNA, 19 nt, Homo sapiens
  misc_RNA (1)...(19): siRNA sense strand
aaucuaagucuauggacaa

SEQ ID NO: 2646781 - RNA, 19 nt, Homo sapiens
  misc_RNA (1)...(19): siRNA sense strand
ucauugaaucuuugggaau

SEQ ID NO: 2646782 - RNA, 19 nt, Homo sapiens
  misc_RNA (1)...(19): siRNA sense strand
ggguaaaacuuaagaaggu

SEQ ID NO: 2646783 - RNA, 19 nt, Homo sapiens
  misc_RNA (1)...(19): siRNA sense strand
gacuaugguuugaaggaga

SEQ ID NO: 2646784 - RNA, 19 nt, Homo sapiens
  misc_RNA (1)...(19): siRNA sense strand
aaaucuaagucuauggaca

SEQ ID NO: 2646785 - RNA, 19 nt, Homo sapiens
  misc_RNA (1)...(19): siRNA sense strand
ugaugagggauuugaggaa

SEQ ID NO: 2646786 - RNA, 19 nt, Homo sapiens
  misc_RNA (1)...(19): siRNA sense strand
uuuauaaagcacuggacua

SEQ ID NO: 2646787 - RNA, 19 nt, Homo sapiens
  misc_RNA (1)...(19): siRNA sense strand
auuaagagugcgaaagaga

SEQ ID NO: 2646788 - RNA, 19 nt, Homo sapiens
  misc_RNA (1)...(19): siRNA sense strand
ggagauuagacguagcaga

SEQ ID NO: 2646789 - RNA, 19 nt, Homo sapiens
  misc_RNA (1)...(19): siRNA sense strand
ggaaaguaguaugagguca

SEQ ID NO: 2646790 - RNA, 19 nt, Homo sapiens
  misc_RNA (1)...(19): siRNA sense strand
gcacagacuuggaagagcu

SEQ ID NO: 2646791 - RNA, 19 nt, Homo sapiens
  misc_RNA (1)...(19): siRNA sense strand
uggacaaaucagaugaaga

SEQ ID NO: 2646792 - RNA, 19 nt, Homo sapiens
  misc_RNA (1)...(19): siRNA sense strand
guggaagaagugaugcaua

SEQ ID NO: 2646793 - RNA, 19 nt, Homo sapiens
  misc_RNA (1)...(19): siRNA sense strand
uaagagugcgaaagagaau

SEQ ID NO: 2646794 - RNA, 19 nt, Homo sapiens
  misc_RNA (1)...(19): siRNA sense strand
ggaaaagagcgaugaaucu

SEQ ID NO: 2646795 - RNA, 19 nt, Homo sapiens
  misc_RNA (1)...(19): siRNA sense strand
guuugaaggagaaugaaga

SEQ ID NO: 2646796 - RNA, 19 nt, Homo sapiens
  misc_RNA (1)...(19): siRNA sense strand
agaugaagaugaaaagaga

SEQ ID NO: 2646797 - RNA, 19 nt, Homo sapiens
  misc_RNA (1)...(19): siRNA sense strand
ccuccaugaaagaauauua

SEQ ID NO: 2646798 - RNA, 19 nt, Homo sapiens
  misc_RNA (1)...(19): siRNA sense strand
ucucuuguuccuaggauaa

SEQ ID NO: 2646799 - RNA, 19 nt, Homo sapiens
  misc_RNA (1)...(19): siRNA sense strand
augagauguuaauggauga

SEQ ID NO: 2646800 - RNA, 19 nt, Homo sapiens
  misc_RNA (1)...(19): siRNA sense strand
ccagcaagaaaucggaaaa

SEQ ID NO: 2646801 - RNA, 19 nt, Homo sapiens
  misc_RNA (1)...(19): siRNA sense strand
cccugaaucuacaaagaau

SEQ ID NO: 2646802 - RNA, 19 nt, Homo sapiens
  misc_RNA (1)...(19): siRNA sense strand
ggugaauggagguuugaca

SEQ ID NO: 2646803 - RNA, 19 nt, Homo sapiens
  misc_RNA (1)...(19): siRNA sense strand
cagacuuggaagagcugaa

SEQ ID NO: 2646804 - RNA, 19 nt, Homo sapiens
  misc_RNA (1)...(19): siRNA sense strand
cuguaucaccagaggagau

SEQ ID NO: 2646805 - RNA, 19 nt, Homo sapiens
  misc_RNA (1)...(19): siRNA sense strand
ccucaaaaucuaagucuau

SEQ ID NO: 2646806 - RNA, 19 nt, Homo sapiens
  misc_RNA (1)...(19): siRNA sense strand
acuaugguuugaaggagaa

SEQ ID NO: 2646807 - RNA, 19 nt, Homo sapiens
  misc_RNA (1)...(19): siRNA sense strand
guauuaucugugugagaga

SEQ ID NO: 2646808 - RNA, 19 nt, Homo sapiens
  misc_RNA (1)...(19): siRNA sense strand
ccaacacgguggaagcuga

SEQ ID NO: 2646809 - RNA, 19 nt, Homo sapiens
  misc_RNA (1)...(19): siRNA sense strand
gggcuaugaggcugcagaa

SEQ ID NO: 2646810 - RNA, 19 nt, Homo sapiens
  misc_RNA (1)...(19): siRNA sense strand
ggucauauagagaugucau

SEQ ID NO: 2646811 - RNA, 19 nt, Homo sapiens
  misc_RNA (1)...(19): siRNA sense strand
cauauagagaugucaugaa

SEQ ID NO: 2646812 - RNA, 19 nt, Homo sapiens
  misc_RNA (1)...(19): siRNA sense strand
auguauuaucugugugaga

SEQ ID NO: 2646813 - RNA, 19 nt, Homo sapiens
  misc_RNA (1)...(19): siRNA sense strand
gugaaggcagagcuggaaa

SEQ ID NO: 2646814 - RNA, 19 nt, Homo sapiens
  misc_RNA (1)...(19): siRNA sense strand
agaaugaagaaagggaauu

SEQ ID NO: 2646815 - RNA, 19 nt, Homo sapiens
  misc_RNA (1)...(19): siRNA sense strand
ccuacuaacgugaggcagu

SEQ ID NO: 2646816 - RNA, 19 nt, Homo sapiens
  misc_RNA (1)...(19): siRNA sense strand
ucggaaaucaucaguucaa

SEQ ID NO: 2646817 - RNA, 19 nt, Homo sapiens
  misc_RNA (1)...(19): siRNA sense strand
gcagucugguguuggccaa

SEQ ID NO: 2646818 - RNA, 19 nt, Homo sapiens
  misc_RNA (1)...(19): siRNA sense strand
gauucuggguacaggugau

SEQ ID NO: 2646819 - RNA, 19 nt, Homo sapiens
  misc_RNA (1)...(19): siRNA sense strand
ccuaggauaaccaguguau

SEQ ID NO: 2646820 - RNA, 19 nt, Homo sapiens
  misc_RNA (1)...(19): siRNA sense strand
aggagaaugaagaaaggga

SEQ ID NO: 2646821 - RNA, 19 nt, Homo sapiens
  misc_RNA (1)...(19): siRNA sense strand
agaagaaggccugggagau

SEQ ID NO: 2646822 - RNA, 19 nt, Homo sapiens
  misc_RNA (1)...(19): siRNA sense strand
ugggagaugaagaugaaaa

SEQ ID NO: 2646823 - RNA, 19 nt, Homo sapiens
  misc_RNA (1)...(19): siRNA sense strand
aagugauggugaaugguga

SEQ ID NO: 2646824 - RNA, 19 nt, Homo sapiens
  misc_RNA (1)...(19): siRNA sense strand
gcagauuagaugugacuac

SEQ ID NO: 2646825 - RNA, 19 nt, Homo sapiens
  misc_RNA (1)...(19): siRNA sense strand
uccaagagcggcaguacaa

SEQ ID NO: 2646826 - RNA, 19 nt, Homo sapiens
  misc_RNA (1)...(19): siRNA sense strand
aacaaaagaaaacggguua

SEQ ID NO: 2646827 - RNA, 19 nt, Homo sapiens
  misc_RNA (1)...(19): siRNA sense strand
uuauaaagcacuggacuau

SEQ ID NO: 2646828 - RNA, 19 nt, Homo sapiens
  misc_RNA (1)...(19): siRNA sense strand
gaaaguaguaugaggucag

SEQ ID NO: 2646829 - RNA, 19 nt, Homo sapiens
  misc_RNA (1)...(19): siRNA sense strand
gaguacugcccuucagaga

SEQ ID NO: 2646830 - RNA, 19 nt, Homo sapiens
  misc_RNA (1)...(19): siRNA sense strand
guggagucaucuaugguga

SEQ ID NO: 2646831 - RNA, 19 nt, Homo sapiens
  misc_RNA (1)...(19): siRNA sense strand
aggaagaagccuccaaaau

SEQ ID NO: 2646832 - RNA, 19 nt, Homo sapiens
  misc_RNA (1)...(19): siRNA sense strand
ggucaaauaucauggaaau

SEQ ID NO: 2646833 - RNA, 19 nt, Homo sapiens
  misc_RNA (1)...(19): siRNA sense strand
uggaaugaauggaguaaua

SEQ ID NO: 2646834 - RNA, 19 nt, Homo sapiens
  misc_RNA (1)...(19): siRNA sense strand
caaagaaggaaucgagaaa

SEQ ID NO: 2646835 - RNA, 19 nt, Homo sapiens
  misc_RNA (1)...(19): siRNA sense strand
gaagaaagguugcagagaa

SEQ ID NO: 2646836 - RNA, 19 nt, Homo sapiens
  misc_RNA (1)...(19): siRNA sense strand
aagaaagguugcagagaau

SEQ ID NO: 2646837 - RNA, 19 nt, Homo sapiens
  misc_RNA (1)...(19): siRNA sense strand
gggaggagaaggaggacaa

SEQ ID NO: 2646838 - RNA, 19 nt, Homo sapiens
  misc_RNA (1)...(19): siRNA sense strand
aagcaagagaagaaagaua

SEQ ID NO: 2646839 - RNA, 19 nt, Homo sapiens
  misc_RNA (1)...(19): siRNA sense strand
guaauaaaccgcaaugaaa

SEQ ID NO: 2646840 - RNA, 19 nt, Homo sapiens
  misc_RNA (1)...(19): siRNA sense strand
ccgagauuauuuagacaaa

SEQ ID NO: 2646841 - RNA, 19 nt, Homo sapiens
  misc_RNA (1)...(19): siRNA sense strand
agaaauaagaccagaggga

SEQ ID NO: 2646842 - RNA, 19 nt, Homo sapiens
  misc_RNA (1)...(19): siRNA sense strand
gggaugaguuggaaggcuu

SEQ ID NO: 2646843 - RNA, 19 nt, Homo sapiens
  misc_RNA (1)...(19): siRNA sense strand
gggaagaaagaaacaaauu

SEQ ID NO: 2646844 - RNA, 19 nt, Homo sapiens
  misc_RNA (1)...(19): siRNA sense strand
ggagcaggcacuagagcaa

SEQ ID NO: 2646845 - RNA, 19 nt, Homo sapiens
  misc_RNA (1)...(19): siRNA sense strand
gagcaagagccggaagaaa

SEQ ID NO: 2646846 - RNA, 19 nt, Homo sapiens
  misc_RNA (1)...(19): siRNA sense strand
auacggagcuacugguuua

SEQ ID NO: 2646847 - RNA, 19 nt, Homo sapiens
  misc_RNA (1)...(19): siRNA sense strand
gauacaaauacuuggaaca

SEQ ID NO: 2646848 - RNA, 19 nt, Homo sapiens
  misc_RNA (1)...(19): siRNA sense strand
ugacaaggucccagaaaca

SEQ ID NO: 2646849 - RNA, 19 nt, Homo sapiens
  misc_RNA (1)...(19): siRNA sense strand
cugagaagccggaguguga

SEQ ID NO: 2646850 - RNA, 19 nt, Homo sapiens
  misc_RNA (1)...(19): siRNA sense strand
ggaauagaccaguuggaga

SEQ ID NO: 2646851 - RNA, 19 nt, Homo sapiens
  misc_RNA (1)...(19): siRNA sense strand
aagaaggaaucgagaaaau

SEQ ID NO: 2646852 - RNA, 19 nt, Homo sapiens
  misc_RNA (1)...(19): siRNA sense strand
ccaaccacagagagagaaa

SEQ ID NO: 2646853 - RNA, 19 nt, Homo sapiens
  misc_RNA (1)...(19): siRNA sense strand
gcaagcaagagaagaaaga

SEQ ID NO: 2646854 - RNA, 19 nt, Homo sapiens
  misc_RNA (1)...(19): siRNA sense strand
cguuggagagggaggagaa

SEQ ID NO: 2646855 - RNA, 19 nt, Homo sapiens
  misc_RNA (1)...(19): siRNA sense strand
ccucaaggcaauugcaaaa

SEQ ID NO: 2646856 - RNA, 19 nt, Homo sapiens
  misc_RNA (1)...(19): siRNA sense strand
aaggcaagcaagagaagaa

SEQ ID NO: 2646857 - RNA, 19 nt, Homo sapiens
  misc_RNA (1)...(19): siRNA sense strand
aggcagaaccggaagcaga

SEQ ID NO: 2646858 - RNA, 19 nt, Homo sapiens
  misc_RNA (1)...(19): siRNA sense strand
ccacgagggugcagagacu

SEQ ID NO: 2646859 - RNA, 19 nt, Homo sapiens
  misc_RNA (1)...(19): siRNA sense strand
gggaccagcucauggccaa

SEQ ID NO: 2646860 - RNA, 19 nt, Homo sapiens
  misc_RNA (1)...(19): siRNA sense strand
ggauggaaugaauggagua

SEQ ID NO: 2646861 - RNA, 19 nt, Homo sapiens
  misc_RNA (1)...(19): siRNA sense strand
augcaaagcuucaugggau

SEQ ID NO: 2646862 - RNA, 19 nt, Homo sapiens
  misc_RNA (1)...(19): siRNA sense strand
ggcaagaagcacagcauca

SEQ ID NO: 2646863 - RNA, 19 nt, Homo sapiens
  misc_RNA (1)...(19): siRNA sense strand
ggucaaaccuuggucaaau

SEQ ID NO: 2646864 - RNA, 19 nt, Homo sapiens
  misc_RNA (1)...(19): siRNA sense strand
acaaauacuuggaacaguu

SEQ ID NO: 2646865 - RNA, 19 nt, Homo sapiens
  misc_RNA (1)...(19): siRNA sense strand
acaugaaggcugugcugaa

SEQ ID NO: 2646866 - RNA, 19 nt, Homo sapiens
  misc_RNA (1)...(19): siRNA sense strand
ggagcaaaggcaagcaaga

SEQ ID NO: 2646867 - RNA, 19 nt, Homo sapiens
  misc_RNA (1)...(19): siRNA sense strand
agagaauuccuguggucaa

SEQ ID NO: 2646868 - RNA, 19 nt, Homo sapiens
  misc_RNA (1)...(19): siRNA sense strand
aaauaagaccagagggaag

SEQ ID NO: 2646869 - RNA, 19 nt, Homo sapiens
  misc_RNA (1)...(19): siRNA sense strand
gcaagagccggaagaaaga

SEQ ID NO: 2646870 - RNA, 19 nt, Homo sapiens
  misc_RNA (1)...(19): siRNA sense strand
acaaagaaggaaucgagaa

SEQ ID NO: 2646871 - RNA, 19 nt, Homo sapiens
  misc_RNA (1)...(19): siRNA sense strand
aguaauaaaccgcaaugaa

SEQ ID NO: 2646872 - RNA, 19 nt, Homo sapiens
  misc_RNA (1)...(19): siRNA sense strand
uggucaaauaucauggaaa

SEQ ID NO: 2646873 - RNA, 19 nt, Homo sapiens
  misc_RNA (1)...(19): siRNA sense strand
gugcgagaucugcgugaaa

SEQ ID NO: 2646874 - RNA, 19 nt, Homo sapiens
  misc_RNA (1)...(19): siRNA sense strand
gggaggaggaugacauuga

SEQ ID NO: 2646875 - RNA, 19 nt, Homo sapiens
  misc_RNA (1)...(19): siRNA sense strand
ggucaaaacuggaacccau

SEQ ID NO: 2646876 - RNA, 19 nt, Homo sapiens
  misc_RNA (1)...(19): siRNA sense strand
gaucagaacuaucagaacu

SEQ ID NO: 2646877 - RNA, 19 nt, Homo sapiens
  misc_RNA (1)...(19): siRNA sense strand
uguuguauguggauggaau

SEQ ID NO: 2646878 - RNA, 19 nt, Homo sapiens
  misc_RNA (1)...(19): siRNA sense strand
guauguggauggaaugaau

SEQ ID NO: 2646879 - RNA, 19 nt, Homo sapiens
  misc_RNA (1)...(19): siRNA sense strand
caaugacuuuggugaacaa

SEQ ID NO: 2646880 - RNA, 19 nt, Homo sapiens
  misc_RNA (1)...(19): siRNA sense strand
caaauucagccgagauuau

SEQ ID NO: 2646881 - RNA, 19 nt, Homo sapiens
  misc_RNA (1)...(19): siRNA sense strand
gcaaaggcaagcaagagaa

SEQ ID NO: 2646882 - RNA, 19 nt, Homo sapiens
  misc_RNA (1)...(19): siRNA sense strand
gggcagugugaaagcauuu

SEQ ID NO: 2646883 - RNA, 19 nt, Homo sapiens
  misc_RNA (1)...(19): siRNA sense strand
agauauuucaggaugacaa

SEQ ID NO: 2646884 - RNA, 19 nt, Homo sapiens
  misc_RNA (1)...(19): siRNA sense strand
gagaauuccuguggucaaa

SEQ ID NO: 2646885 - RNA, 19 nt, Homo sapiens
  misc_RNA (1)...(19): siRNA sense strand
caggaggccagguuggaaa

SEQ ID NO: 2646886 - RNA, 19 nt, Homo sapiens
  misc_RNA (1)...(19): siRNA sense strand
cugaggagcacgagaagga

SEQ ID NO: 2646887 - RNA, 19 nt, Homo sapiens
  misc_RNA (1)...(19): siRNA sense strand
acaaggauuuggugcauga

SEQ ID NO: 2646888 - RNA, 19 nt, Homo sapiens
  misc_RNA (1)...(19): siRNA sense strand
aggauuuggugcaugaauu

SEQ ID NO: 2646889 - RNA, 19 nt, Homo sapiens
  misc_RNA (1)...(19): siRNA sense strand
ggauuuggugcaugaauuu

SEQ ID NO: 2646890 - RNA, 19 nt, Homo sapiens
  misc_RNA (1)...(19): siRNA sense strand
augcaaugacuuuggugaa

SEQ ID NO: 2646891 - RNA, 19 nt, Homo sapiens
  misc_RNA (1)...(19): siRNA sense strand
gcaagagaagaaagauaca

SEQ ID NO: 2646892 - RNA, 19 nt, Homo sapiens
  misc_RNA (1)...(19): siRNA sense strand
cagccuugcuaccaggaua

SEQ ID NO: 2646893 - RNA, 19 nt, Homo sapiens
  misc_RNA (1)...(19): siRNA sense strand
agaaaaggaaguagcagaa

SEQ ID NO: 2646894 - RNA, 19 nt, Homo sapiens
  misc_RNA (1)...(19): siRNA sense strand
ugucagauggagagaagau

SEQ ID NO: 2646895 - RNA, 19 nt, Homo sapiens
  misc_RNA (1)...(19): siRNA sense strand
gggaaaggguuuugcagca

SEQ ID NO: 2646896 - RNA, 19 nt, Homo sapiens
  misc_RNA (1)...(19): siRNA sense strand
gcggcaggagagagaagaa

SEQ ID NO: 2646897 - RNA, 19 nt, Homo sapiens
  misc_RNA (1)...(19): siRNA sense strand
ccaggaugcagguguaaau

SEQ ID NO: 2646898 - RNA, 19 nt, Homo sapiens
  misc_RNA (1)...(19): siRNA sense strand
cagaaaaggaaguagcaga

SEQ ID NO: 2646899 - RNA, 19 nt, Homo sapiens
  misc_RNA (1)...(19): siRNA sense strand
gggcuuugggccagauuau

SEQ ID NO: 2646900 - RNA, 19 nt, Homo sapiens
  misc_RNA (1)...(19): siRNA sense strand
ugaguaugccuuaaacaaa

SEQ ID NO: 2646901 - RNA, 19 nt, Homo sapiens
  misc_RNA (1)...(19): siRNA sense strand
gauggagagaagaugcaaa

SEQ ID NO: 2646902 - RNA, 19 nt, Homo sapiens
  misc_RNA (1)...(19): siRNA sense strand
augaauuuguaguggcuga

SEQ ID NO: 2646903 - RNA, 19 nt, Homo sapiens
  misc_RNA (1)...(19): siRNA sense strand
gucaaaccuuggucaaaua

SEQ ID NO: 2646904 - RNA, 19 nt, Homo sapiens
  misc_RNA (1)...(19): siRNA sense strand
uggagcaacucaacauuua

SEQ ID NO: 2646905 - RNA, 19 nt, Homo sapiens
  misc_RNA (1)...(19): siRNA sense strand
cggcaggagagagaagaaa

SEQ ID NO: 2646906 - RNA, 19 nt, Homo sapiens
  misc_RNA (1)...(19): siRNA sense strand
cugcaggauuauuagugaa

SEQ ID NO: 2646907 - RNA, 19 nt, Homo sapiens
  misc_RNA (1)...(19): siRNA sense strand
ggccaaccacagagagaga

SEQ ID NO: 2646908 - RNA, 19 nt, Homo sapiens
  misc_RNA (1)...(19): siRNA sense strand
gggucaaaccuuggucaaa

SEQ ID NO: 2646909 - RNA, 19 nt, Homo sapiens
  misc_RNA (1)...(19): siRNA sense strand
cccagaggcacuugaacaa

SEQ ID NO: 2646910 - RNA, 19 nt, Homo sapiens
  misc_RNA (1)...(19): siRNA sense strand
cagcugaggagcacgagaa

SEQ ID NO: 2646911 - RNA, 19 nt, Homo sapiens
  misc_RNA (1)...(19): siRNA sense strand
gcucagaauccaagacaug

SEQ ID NO: 2646912 - RNA, 19 nt, Homo sapiens
  misc_RNA (1)...(19): siRNA sense strand
acuaaaagaagcagagaaa

SEQ ID NO: 2646913 - RNA, 19 nt, Homo sapiens
  misc_RNA (1)...(19): siRNA sense strand
guagagaaauucaggguca

SEQ ID NO: 2646914 - RNA, 19 nt, Homo sapiens
  misc_RNA (1)...(19): siRNA sense strand
cagaguuauagaagagaaa

SEQ ID NO: 2646915 - RNA, 19 nt, Homo sapiens
  misc_RNA (1)...(19): siRNA sense strand
uggaaaguguaaaggaaga

SEQ ID NO: 2646916 - RNA, 19 nt, Homo sapiens
  misc_RNA (1)...(19): siRNA sense strand
ggugaaauugagucagaua

SEQ ID NO: 2646917 - RNA, 19 nt, Homo sapiens
  misc_RNA (1)...(19): siRNA sense strand
ggagaaaucaaaagagaau

SEQ ID NO: 2646918 - RNA, 19 nt, Homo sapiens
  misc_RNA (1)...(19): siRNA sense strand
agaaaagcccacagaaaua

SEQ ID NO: 2646919 - RNA, 19 nt, Homo sapiens
  misc_RNA (1)...(19): siRNA sense strand
agucagauuugaaaggcaa

SEQ ID NO: 2646920 - RNA, 19 nt, Homo sapiens
  misc_RNA (1)...(19): siRNA sense strand
gguccaaaggagacuauaa

SEQ ID NO: 2646921 - RNA, 19 nt, Homo sapiens
  misc_RNA (1)...(19): siRNA sense strand
cuauaaaaucacaggcuaa

SEQ ID NO: 2646922 - RNA, 19 nt, Homo sapiens
  misc_RNA (1)...(19): siRNA sense strand
gugaagaaauugcugguga

SEQ ID NO: 2646923 - RNA, 19 nt, Homo sapiens
  misc_RNA (1)...(19): siRNA sense strand
gcuggaagaaagaaagaau

SEQ ID NO: 2646924 - RNA, 19 nt, Homo sapiens
  misc_RNA (1)...(19): siRNA sense strand
gacgauaagaauucagaaa

SEQ ID NO: 2646925 - RNA, 19 nt, Homo sapiens
  misc_RNA (1)...(19): siRNA sense strand
cagagaaaacugaugaaaa

SEQ ID NO: 2646926 - RNA, 19 nt, Homo sapiens
  misc_RNA (1)...(19): siRNA sense strand
gggucaaguucaagcaguu

SEQ ID NO: 2646927 - RNA, 19 nt, Homo sapiens
  misc_RNA (1)...(19): siRNA sense strand
aauugauacaggagagaau

SEQ ID NO: 2646928 - RNA, 19 nt, Homo sapiens
  misc_RNA (1)...(19): siRNA sense strand
ccucagaagacuacuagaa

SEQ ID NO: 2646929 - RNA, 19 nt, Homo sapiens
  misc_RNA (1)...(19): siRNA sense strand
gcaucuaaugauaaagcua

SEQ ID NO: 2646930 - RNA, 19 nt, Homo sapiens
  misc_RNA (1)...(19): siRNA sense strand
caugaaaacccuaaagcaa

SEQ ID NO: 2646931 - RNA, 19 nt, Homo sapiens
  misc_RNA (1)...(19): siRNA sense strand
guuacgcaguagagaaauu

SEQ ID NO: 2646932 - RNA, 19 nt, Homo sapiens
  misc_RNA (1)...(19): siRNA sense strand
gaauaaacagcuuagccaa

SEQ ID NO: 2646933 - RNA, 19 nt, Homo sapiens
  misc_RNA (1)...(19): siRNA sense strand
ucguuacgcaguagagaaa

SEQ ID NO: 2646934 - RNA, 19 nt, Homo sapiens
  misc_RNA (1)...(19): siRNA sense strand
gucagauaauguagaggua

SEQ ID NO: 2646935 - RNA, 19 nt, Homo sapiens
  misc_RNA (1)...(19): siRNA sense strand
acgcaugaguacaagguca

SEQ ID NO: 2646936 - RNA, 19 nt, Homo sapiens
  misc_RNA (1)...(19): siRNA sense strand
gugaaauugagucagauaa

SEQ ID NO: 2646937 - RNA, 19 nt, Homo sapiens
  misc_RNA (1)...(19): siRNA sense strand
caguguugaaagacaaaua

SEQ ID NO: 2646938 - RNA, 19 nt, Homo sapiens
  misc_RNA (1)...(19): siRNA sense strand
caaagcuacaugauagaaa

SEQ ID NO: 2646939 - RNA, 19 nt, Homo sapiens
  misc_RNA (1)...(19): siRNA sense strand
gugccugaacaaagugaua

SEQ ID NO: 2646940 - RNA, 19 nt, Homo sapiens
  misc_RNA (1)...(19): siRNA sense strand
cgaaaucauucuuugccua

SEQ ID NO: 2646941 - RNA, 19 nt, Homo sapiens
  misc_RNA (1)...(19): siRNA sense strand
agaccaguguugaaagaca

SEQ ID NO: 2646942 - RNA, 19 nt, Homo sapiens
  misc_RNA (1)...(19): siRNA sense strand
ggaauaaacagcuuagcca

SEQ ID NO: 2646943 - RNA, 19 nt, Homo sapiens
  misc_RNA (1)...(19): siRNA sense strand
ccggagaucacaaaggcua

SEQ ID NO: 2646944 - RNA, 19 nt, Homo sapiens
  misc_RNA (1)...(19): siRNA sense strand
cuagaagagacgaaacgaa

SEQ ID NO: 2646945 - RNA, 19 nt, Homo sapiens
  misc_RNA (1)...(19): siRNA sense strand
ggaaaguguaaaggaagaa

SEQ ID NO: 2646946 - RNA, 19 nt, Homo sapiens
  misc_RNA (1)...(19): siRNA sense strand
acagaaagggcuccugaaa

SEQ ID NO: 2646947 - RNA, 19 nt, Homo sapiens
  misc_RNA (1)...(19): siRNA sense strand
auugaaugccuaaggagua

SEQ ID NO: 2646948 - RNA, 19 nt, Homo sapiens
  misc_RNA (1)...(19): siRNA sense strand
uggauaaucagaugaaaca

SEQ ID NO: 2646949 - RNA, 19 nt, Homo sapiens
  misc_RNA (1)...(19): siRNA sense strand
agagaaaaguacuggaagu

SEQ ID NO: 2646950 - RNA, 19 nt, Homo sapiens
  misc_RNA (1)...(19): siRNA sense strand
ugacgagauuagagagaug

SEQ ID NO: 2646951 - RNA, 19 nt, Homo sapiens
  misc_RNA (1)...(19): siRNA sense strand
gauggaaagcuguuugcaa

SEQ ID NO: 2646952 - RNA, 19 nt, Homo sapiens
  misc_RNA (1)...(19): siRNA sense strand
uugauacaggagagaauaa

SEQ ID NO: 2646953 - RNA, 19 nt, Homo sapiens
  misc_RNA (1)...(19): siRNA sense strand
acagaguuauagaagagaa

SEQ ID NO: 2646954 - RNA, 19 nt, Homo sapiens
  misc_RNA (1)...(19): siRNA sense strand
caugaugcgucggaagaaa

SEQ ID NO: 2646955 - RNA, 19 nt, Homo sapiens
  misc_RNA (1)...(19): siRNA sense strand
gaaucuucacaaauggaaa

SEQ ID NO: 2646956 - RNA, 19 nt, Homo sapiens
  misc_RNA (1)...(19): siRNA sense strand
caggagaaaucaaaagaga

SEQ ID NO: 2646957 - RNA, 19 nt, Homo sapiens
  misc_RNA (1)...(19): siRNA sense strand
uaacaauuccaaaggacuu

SEQ ID NO: 2646958 - RNA, 19 nt, Homo sapiens
  misc_RNA (1)...(19): siRNA sense strand
gggcuggaagaaagaaaga

SEQ ID NO: 2646959 - RNA, 19 nt, Homo sapiens
  misc_RNA (1)...(19): siRNA sense strand
gaucagucgaauaugggua

SEQ ID NO: 2646960 - RNA, 19 nt, Homo sapiens
  misc_RNA (1)...(19): siRNA sense strand
ccaaaggagacuauaaaau

SEQ ID NO: 2646961 - RNA, 19 nt, Homo sapiens
  misc_RNA (1)...(19): siRNA sense strand
auucuuugccuaaguguaa

SEQ ID NO: 2646962 - RNA, 19 nt, Homo sapiens
  misc_RNA (1)...(19): siRNA sense strand
uaaaagaagcagagaaaac

SEQ ID NO: 2646963 - RNA, 19 nt, Homo sapiens
  misc_RNA (1)...(19): siRNA sense strand
uugaaugccuaaggaguaa

SEQ ID NO: 2646964 - RNA, 19 nt, Homo sapiens
  misc_RNA (1)...(19): siRNA sense strand
gauaaaaccuucugaccca

SEQ ID NO: 2646965 - RNA, 19 nt, Homo sapiens
  misc_RNA (1)...(19): siRNA sense strand
uggacagaauagcacguaa

SEQ ID NO: 2646966 - RNA, 19 nt, Homo sapiens
  misc_RNA (1)...(19): siRNA sense strand
augaaaacccuaaagcaaa

SEQ ID NO: 2646967 - RNA, 19 nt, Homo sapiens
  misc_RNA (1)...(19): siRNA sense strand
cuucacaaauggaaagugu

SEQ ID NO: 2646968 - RNA, 19 nt, Homo sapiens
  misc_RNA (1)...(19): siRNA sense strand
guacuguggcacuggucaa

SEQ ID NO: 2646969 - RNA, 19 nt, Homo sapiens
  misc_RNA (1)...(19): siRNA sense strand
agagaaaggauuuggaaga

SEQ ID NO: 2646970 - RNA, 19 nt, Homo sapiens
  misc_RNA (1)...(19): siRNA sense strand
gauuaaagcagaaagccaa

SEQ ID NO: 2646971 - RNA, 19 nt, Homo sapiens
  misc_RNA (1)...(19): siRNA sense strand
agucagaagaugaagaaga

SEQ ID NO: 2646972 - RNA, 19 nt, Homo sapiens
  misc_RNA (1)...(19): siRNA sense strand
aauuggagaagcagagaaa

SEQ ID NO: 2646973 - RNA, 19 nt, Homo sapiens
  misc_RNA (1)...(19): siRNA sense strand
gauuuggaagaaagagaaa

SEQ ID NO: 2646974 - RNA, 19 nt, Homo sapiens
  misc_RNA (1)...(19): siRNA sense strand
aagaagaggaggaugugaa

SEQ ID NO: 2646975 - RNA, 19 nt, Homo sapiens
  misc_RNA (1)...(19): siRNA sense strand
ccuggaaagccauugaaua

SEQ ID NO: 2646976 - RNA, 19 nt, Homo sapiens
  misc_RNA (1)...(19): siRNA sense strand
caagaaaguggcagugaca

SEQ ID NO: 2646977 - RNA, 19 nt, Homo sapiens
  misc_RNA (1)...(19): siRNA sense strand
augaagaagaggaggaugu

SEQ ID NO: 2646978 - RNA, 19 nt, Homo sapiens
  misc_RNA (1)...(19): siRNA sense strand
agaagaggaggaugugaaa

SEQ ID NO: 2646979 - RNA, 19 nt, Homo sapiens
  misc_RNA (1)...(19): siRNA sense strand
aggaagaugcagagucaga

SEQ ID NO: 2646980 - RNA, 19 nt, Homo sapiens
  misc_RNA (1)...(19): siRNA sense strand
guccaagaaucacgagaau

SEQ ID NO: 2646981 - RNA, 19 nt, Homo sapiens
  misc_RNA (1)...(19): siRNA sense strand
cgacaaugcuagaaaaugu

SEQ ID NO: 2646982 - RNA, 19 nt, Homo sapiens
  misc_RNA (1)...(19): siRNA sense strand
agauuaaagcagaaagcca

SEQ ID NO: 2646983 - RNA, 19 nt, Homo sapiens
  misc_RNA (1)...(19): siRNA sense strand
aaaucgaagcagaagaauu

SEQ ID NO: 2646984 - RNA, 19 nt, Homo sapiens
  misc_RNA (1)...(19): siRNA sense strand
augcagagucagaagauga

SEQ ID NO: 2646985 - RNA, 19 nt, Homo sapiens
  misc_RNA (1)...(19): siRNA sense strand
ugaagaaaugcaagaacuu

SEQ ID NO: 2646986 - RNA, 19 nt, Homo sapiens
  misc_RNA (1)...(19): siRNA sense strand
uggagaaacuucaggugca

SEQ ID NO: 2646987 - RNA, 19 nt, Homo sapiens
  misc_RNA (1)...(19): siRNA sense strand
ggauuuggaagaaagagaa

SEQ ID NO: 2646988 - RNA, 19 nt, Homo sapiens
  misc_RNA (1)...(19): siRNA sense strand
ccuucuugcuucugggaca

SEQ ID NO: 2646989 - RNA, 19 nt, Homo sapiens
  misc_RNA (1)...(19): siRNA sense strand
cguccaagaaucacgagaa

SEQ ID NO: 2646990 - RNA, 19 nt, Homo sapiens
  misc_RNA (1)...(19): siRNA sense strand
uaguaucuguggaggaaga

SEQ ID NO: 2646991 - RNA, 19 nt, Homo sapiens
  misc_RNA (1)...(19): siRNA sense strand
uaacauaaccucaaggcca

SEQ ID NO: 2646992 - RNA, 19 nt, Homo sapiens
  misc_RNA (1)...(19): siRNA sense strand
cuggaaagccauugaauac

SEQ ID NO: 2646993 - RNA, 19 nt, Homo sapiens
  misc_RNA (1)...(19): siRNA sense strand
gcuagaaaaugugaagaaa

SEQ ID NO: 2646994 - RNA, 19 nt, Homo sapiens
  misc_RNA (1)...(19): siRNA sense strand
agccaaagaguuacagcaa

SEQ ID NO: 2646995 - RNA, 19 nt, Homo sapiens
  misc_RNA (1)...(19): siRNA sense strand
cagaagaugaagaagagga

SEQ ID NO: 2646996 - RNA, 19 nt, Homo sapiens
  misc_RNA (1)...(19): siRNA sense strand
gcaugacauuacagaacuu

SEQ ID NO: 2646997 - RNA, 19 nt, Homo sapiens
  misc_RNA (1)...(19): siRNA sense strand
uuacaaggcaagugaaaau

SEQ ID NO: 2646998 - RNA, 19 nt, Homo sapiens
  misc_RNA (1)...(19): siRNA sense strand
aggauuuggaagaaagaga

SEQ ID NO: 2646999 - RNA, 19 nt, Homo sapiens
  misc_RNA (1)...(19): siRNA sense strand
cagcugagauuaaagcaga

SEQ ID NO: 2647000 - RNA, 19 nt, Homo sapiens
  misc_RNA (1)...(19): siRNA sense strand
ggaacgacuacgaggccuu

SEQ ID NO: 2647001 - RNA, 19 nt, Homo sapiens
  misc_RNA (1)...(19): siRNA sense strand
aagaugaagaagaggagga

SEQ ID NO: 2647002 - RNA, 19 nt, Homo sapiens
  misc_RNA (1)...(19): siRNA sense strand
aaucuggaauugagggcuu

SEQ ID NO: 2647003 - RNA, 19 nt, Homo sapiens
  misc_RNA (1)...(19): siRNA sense strand
gggcccaacugcugcaaca

SEQ ID NO: 2647004 - RNA, 19 nt, Homo sapiens
  misc_RNA (1)...(19): siRNA sense strand
gcaguaacuuuuggagaaa

SEQ ID NO: 2647005 - RNA, 19 nt, Homo sapiens
  misc_RNA (1)...(19): siRNA sense strand
cagaagacgaugccaguga

SEQ ID NO: 2647006 - RNA, 19 nt, Homo sapiens
  misc_RNA (1)...(19): siRNA sense strand
aggaacgggagaugaagua

SEQ ID NO: 2647007 - RNA, 19 nt, Homo sapiens
  misc_RNA (1)...(19): siRNA sense strand
gaagugugguucagggcca

SEQ ID NO: 2647008 - RNA, 19 nt, Homo sapiens
  misc_RNA (1)...(19): siRNA sense strand
auuggaacuugcacagaua

SEQ ID NO: 2647009 - RNA, 19 nt, Homo sapiens
  misc_RNA (1)...(19): siRNA sense strand
cuaauaaagaagauccaga

SEQ ID NO: 2647010 - RNA, 19 nt, Homo sapiens
  misc_RNA (1)...(19): siRNA sense strand
ccuucaaguuugggagcau

SEQ ID NO: 2647011 - RNA, 19 nt, Homo sapiens
  misc_RNA (1)...(19): siRNA sense strand
aagaggaggaugugaaacu

SEQ ID NO: 2647012 - RNA, 19 nt, Homo sapiens
  misc_RNA (1)...(19): siRNA sense strand
auccagaacagcugagauu

SEQ ID NO: 2647013 - RNA, 19 nt, Homo sapiens
  misc_RNA (1)...(19): siRNA sense strand
guauauuaguggacagcac

SEQ ID NO: 2647014 - RNA, 19 nt, Homo sapiens
  misc_RNA (1)...(19): siRNA sense strand
ccauaauaccuacuaguca

SEQ ID NO: 2647015 - RNA, 19 nt, Homo sapiens
  misc_RNA (1)...(19): siRNA sense strand
cuuccauucuaaagcaaau

SEQ ID NO: 2647016 - RNA, 19 nt, Homo sapiens
  misc_RNA (1)...(19): siRNA sense strand
ggagaagcagagaaaggau

SEQ ID NO: 2647017 - RNA, 19 nt, Homo sapiens
  misc_RNA (1)...(19): siRNA sense strand
augacuacuuacaaggcaa

SEQ ID NO: 2647018 - RNA, 19 nt, Homo sapiens
  misc_RNA (1)...(19): siRNA sense strand
gaucaauuggagaagcaga

SEQ ID NO: 2647019 - RNA, 19 nt, Homo sapiens
  misc_RNA (1)...(19): siRNA sense strand
cuuaguaucuguggaggaa

SEQ ID NO: 2647020 - RNA, 19 nt, Homo sapiens
  misc_RNA (1)...(19): siRNA sense strand
uggaucaauuggagaagca

SEQ ID NO: 2647021 - RNA, 19 nt, Homo sapiens
  misc_RNA (1)...(19): siRNA sense strand
caggaaccguuuugauuaa

SEQ ID NO: 2647022 - RNA, 19 nt, Homo sapiens
  misc_RNA (1)...(19): siRNA sense strand
gaagaauuuacuaggaaac

SEQ ID NO: 2647023 - RNA, 19 nt, Homo sapiens
  misc_RNA (1)...(19): siRNA sense strand
agcaguaacuuuuggagaa

SEQ ID NO: 2647024 - RNA, 19 nt, Homo sapiens
  misc_RNA (1)...(19): siRNA sense strand
agaagcagagaaaggauuu

SEQ ID NO: 2647025 - RNA, 19 nt, Homo sapiens
  misc_RNA (1)...(19): siRNA sense strand
auaaagaagauccagaaca

SEQ ID NO: 2647026 - RNA, 19 nt, Homo sapiens
  misc_RNA (1)...(19): siRNA sense strand
ggacagaacucgaaggaga

SEQ ID NO: 2647027 - RNA, 19 nt, Homo sapiens
  misc_RNA (1)...(19): siRNA sense strand
augcuauuguccagagaaa

SEQ ID NO: 2647028 - RNA, 19 nt, Homo sapiens
  misc_RNA (1)...(19): siRNA sense strand
acuacaagcaggugugcaa

SEQ ID NO: 2647029 - RNA, 19 nt, Homo sapiens
  misc_RNA (1)...(19): siRNA sense strand
ggguguacacaauggagaa

SEQ ID NO: 2647030 - RNA, 19 nt, Homo sapiens
  misc_RNA (1)...(19): siRNA sense strand
gagcagugcacaaugggaa

SEQ ID NO: 2647031 - RNA, 19 nt, Homo sapiens
  misc_RNA (1)...(19): siRNA sense strand
acaaguaccugguggagga

SEQ ID NO: 2647032 - RNA, 19 nt, Homo sapiens
  misc_RNA (1)...(19): siRNA sense strand
gcguuguggagguggaaaa

SEQ ID NO: 2647033 - RNA, 19 nt, Homo sapiens
  misc_RNA (1)...(19): siRNA sense strand
agaccaagaagcuggccaa

SEQ ID NO: 2647034 - RNA, 19 nt, Homo sapiens
  misc_RNA (1)...(19): siRNA sense strand
auguaaugcuuguggaaug

SEQ ID NO: 2647035 - RNA, 19 nt, Homo sapiens
  misc_RNA (1)...(19): siRNA sense strand
agaauaugucccauggcua

SEQ ID NO: 2647036 - RNA, 19 nt, Homo sapiens
  misc_RNA (1)...(19): siRNA sense strand
aguauuacgacgaugaaaa

SEQ ID NO: 2647037 - RNA, 19 nt, Homo sapiens
  misc_RNA (1)...(19): siRNA sense strand
ugaaaagaagacauggaaa

SEQ ID NO: 2647038 - RNA, 19 nt, Homo sapiens
  misc_RNA (1)...(19): siRNA sense strand
caguggaauccgaauggaa

SEQ ID NO: 2647039 - RNA, 19 nt, Homo sapiens
  misc_RNA (1)...(19): siRNA sense strand
gcaggaaagaagagccagu

SEQ ID NO: 2647040 - RNA, 19 nt, Homo sapiens
  misc_RNA (1)...(19): siRNA sense strand
aggaugugcugcugcucaa

SEQ ID NO: 2647041 - RNA, 19 nt, Homo sapiens
  misc_RNA (1)...(19): siRNA sense strand
ugauguaaugcuuguggaa

SEQ ID NO: 2647042 - RNA, 19 nt, Homo sapiens
  misc_RNA (1)...(19): siRNA sense strand
agagaaaggaaccuggaca

SEQ ID NO: 2647043 - RNA, 19 nt, Homo sapiens
  misc_RNA (1)...(19): siRNA sense strand
gcauuuaccuugugggagg

SEQ ID NO: 2647044 - RNA, 19 nt, Homo sapiens
  misc_RNA (1)...(19): siRNA sense strand
uggaaugcuaugacccaaa

SEQ ID NO: 2647045 - RNA, 19 nt, Homo sapiens
  misc_RNA (1)...(19): siRNA sense strand
ccaacaaguaccuggugga

SEQ ID NO: 2647046 - RNA, 19 nt, Homo sapiens
  misc_RNA (1)...(19): siRNA sense strand
aggaaagaagagccaguuu

SEQ ID NO: 2647047 - RNA, 19 nt, Homo sapiens
  misc_RNA (1)...(19): siRNA sense strand
guggaauccgaauggaaaa

SEQ ID NO: 2647048 - RNA, 19 nt, Homo sapiens
  misc_RNA (1)...(19): siRNA sense strand
cagcaauuugguucaguau

SEQ ID NO: 2647049 - RNA, 19 nt, Homo sapiens
  misc_RNA (1)...(19): siRNA sense strand
uggaaaacacaguacaaau

SEQ ID NO: 2647050 - RNA, 19 nt, Homo sapiens
  misc_RNA (1)...(19): siRNA sense strand
cgauuuaauagcuggauuc

SEQ ID NO: 2647051 - RNA, 19 nt, Homo sapiens
  misc_RNA (1)...(19): siRNA sense strand
acaaauacaaccagagaaa

SEQ ID NO: 2647052 - RNA, 19 nt, Homo sapiens
  misc_RNA (1)...(19): siRNA sense strand
acacagagucgguuagaaa

SEQ ID NO: 2647053 - RNA, 19 nt, Homo sapiens
  misc_RNA (1)...(19): siRNA sense strand
aaacagcaccagagagaaa

SEQ ID NO: 2647054 - RNA, 19 nt, Homo sapiens
  misc_RNA (1)...(19): siRNA sense strand
gggcaugucaagagaggaa

SEQ ID NO: 2647055 - RNA, 19 nt, Homo sapiens
  misc_RNA (1)...(19): siRNA sense strand
cagagauaucaaagagaaa

SEQ ID NO: 2647056 - RNA, 19 nt, Homo sapiens
  misc_RNA (1)...(19): siRNA sense strand
cugcuaaauuacaggacaa

SEQ ID NO: 2647057 - RNA, 19 nt, Homo sapiens
  misc_RNA (1)...(19): siRNA sense strand
gcggauaaggcaagaaauu

SEQ ID NO: 2647058 - RNA, 19 nt, Homo sapiens
  misc_RNA (1)...(19): siRNA sense strand
caagaaauugagaaggaaa

SEQ ID NO: 2647059 - RNA, 19 nt, Homo sapiens
  misc_RNA (1)...(19): siRNA sense strand
cagcaaaacaagacaguaa

SEQ ID NO: 2647060 - RNA, 19 nt, Homo sapiens
  misc_RNA (1)...(19): siRNA sense strand
ggaaaagagagcuaggaua

SEQ ID NO: 2647061 - RNA, 19 nt, Homo sapiens
  misc_RNA (1)...(19): siRNA sense strand
aaguuaagauagaagggaa

SEQ ID NO: 2647062 - RNA, 19 nt, Homo sapiens
  misc_RNA (1)...(19): siRNA sense strand
acaucaaagagcagacaaa

SEQ ID NO: 2647063 - RNA, 19 nt, Homo sapiens
  misc_RNA (1)...(19): siRNA sense strand
gcaucaagcucgagcccau

SEQ ID NO: 2647064 - RNA, 19 nt, Homo sapiens
  misc_RNA (1)...(19): siRNA sense strand
cugaagggacagauaauaa

SEQ ID NO: 2647065 - RNA, 19 nt, Homo sapiens
  misc_RNA (1)...(19): siRNA sense strand
uggcagaauuggagucaga

SEQ ID NO: 2647066 - RNA, 19 nt, Homo sapiens
  misc_RNA (1)...(19): siRNA sense strand
cuguaauucaggaggaaau

SEQ ID NO: 2647067 - RNA, 19 nt, Homo sapiens
  misc_RNA (1)...(19): siRNA sense strand
acagaaccuuggaaagaaa

SEQ ID NO: 2647068 - RNA, 19 nt, Homo sapiens
  misc_RNA (1)...(19): siRNA sense strand
gagaauggcacaucagcaa

SEQ ID NO: 2647069 - RNA, 19 nt, Homo sapiens
  misc_RNA (1)...(19): siRNA sense strand
agacaaaggcuaagcucuu

SEQ ID NO: 2647070 - RNA, 19 nt, Homo sapiens
  misc_RNA (1)...(19): siRNA sense strand
cuaaagauauaauggcaga

SEQ ID NO: 2647071 - RNA, 19 nt, Homo sapiens
  misc_RNA (1)...(19): siRNA sense strand
cuauagauauggagcuaca

SEQ ID NO: 2647072 - RNA, 19 nt, Homo sapiens
  misc_RNA (1)...(19): siRNA sense strand
gagaaauuccacugaugaa

SEQ ID NO: 2647073 - RNA, 19 nt, Homo sapiens
  misc_RNA (1)...(19): siRNA sense strand
cgucugaagauuugcacaa

SEQ ID NO: 2647074 - RNA, 19 nt, Homo sapiens
  misc_RNA (1)...(19): siRNA sense strand
acaauaagacccugaguca

SEQ ID NO: 2647075 - RNA, 19 nt, Homo sapiens
  misc_RNA (1)...(19): siRNA sense strand
cuccaaauccagaugguaa

SEQ ID NO: 2647076 - RNA, 19 nt, Homo sapiens
  misc_RNA (1)...(19): siRNA sense strand
aauuacaggacaagcaaua

SEQ ID NO: 2647077 - RNA, 19 nt, Homo sapiens
  misc_RNA (1)...(19): siRNA sense strand
auauggagcuacagaguga

SEQ ID NO: 2647078 - RNA, 19 nt, Homo sapiens
  misc_RNA (1)...(19): siRNA sense strand
gggagcaauuaaagaacau

SEQ ID NO: 2647079 - RNA, 19 nt, Homo sapiens
  misc_RNA (1)...(19): siRNA sense strand
ucgcaauguuuacuggaaa

SEQ ID NO: 2647080 - RNA, 19 nt, Homo sapiens
  misc_RNA (1)...(19): siRNA sense strand
cuggaaacaugcugacaau

SEQ ID NO: 2647081 - RNA, 19 nt, Homo sapiens
  misc_RNA (1)...(19): siRNA sense strand
ugugaguucuguugauaaa

SEQ ID NO: 2647082 - RNA, 19 nt, Homo sapiens
  misc_RNA (1)...(19): siRNA sense strand
ccucaagucccauggaaga

SEQ ID NO: 2647083 - RNA, 19 nt, Homo sapiens
  misc_RNA (1)...(19): siRNA sense strand
cgcaguuacuacagggcaa

SEQ ID NO: 2647084 - RNA, 19 nt, Homo sapiens
  misc_RNA (1)...(19): siRNA sense strand
agcuaggacuguaggagaa

SEQ ID NO: 2647085 - RNA, 19 nt, Homo sapiens
  misc_RNA (1)...(19): siRNA sense strand
cugccaaaccucugggaga

SEQ ID NO: 2647086 - RNA, 19 nt, Homo sapiens
  misc_RNA (1)...(19): siRNA sense strand
cugcauagguccuucaaaa

SEQ ID NO: 2647087 - RNA, 19 nt, Homo sapiens
  misc_RNA (1)...(19): siRNA sense strand
cuuccauaaaugagagaau

SEQ ID NO: 2647088 - RNA, 19 nt, Homo sapiens
  misc_RNA (1)...(19): siRNA sense strand
aagaauaucuagagcaaag

SEQ ID NO: 2647089 - RNA, 19 nt, Homo sapiens
  misc_RNA (1)...(19): siRNA sense strand
gugcugaaagcuuggacaa

SEQ ID NO: 2647090 - RNA, 19 nt, Homo sapiens
  misc_RNA (1)...(19): siRNA sense strand
cagaugaauuggaacugaa

SEQ ID NO: 2647091 - RNA, 19 nt, Homo sapiens
  misc_RNA (1)...(19): siRNA sense strand
aauuggagucagaggauau

SEQ ID NO: 2647092 - RNA, 19 nt, Homo sapiens
  misc_RNA (1)...(19): siRNA sense strand
gagacuaguaucugugaau

SEQ ID NO: 2647093 - RNA, 19 nt, Homo sapiens
  misc_RNA (1)...(19): siRNA sense strand
gggacagauaauaagggaa

SEQ ID NO: 2647094 - RNA, 19 nt, Homo sapiens
  misc_RNA (1)...(19): siRNA sense strand
uuuggaaucuguaaggaaa

SEQ ID NO: 2647095 - RNA, 19 nt, Homo sapiens
  misc_RNA (1)...(19): siRNA sense strand
ggacagaggcauccguaca

SEQ ID NO: 2647096 - RNA, 19 nt, Homo sapiens
  misc_RNA (1)...(19): siRNA sense strand
gaaagaaggugaugaggug

SEQ ID NO: 2647097 - RNA, 19 nt, Homo sapiens
  misc_RNA (1)...(19): siRNA sense strand
cagacaagggcuuuagaau

SEQ ID NO: 2647098 - RNA, 19 nt, Homo sapiens
  misc_RNA (1)...(19): siRNA sense strand
cagcagcaaugcagaugaa

SEQ ID NO: 2647099 - RNA, 19 nt, Homo sapiens
  misc_RNA (1)...(19): siRNA sense strand
aggaauugcuauagauaug

SEQ ID NO: 2647100 - RNA, 19 nt, Homo sapiens
  misc_RNA (1)...(19): siRNA sense strand
acacauaagcaagggagua

SEQ ID NO: 2647101 - RNA, 19 nt, Homo sapiens
  misc_RNA (1)...(19): siRNA sense strand
agaaacugccacugacuua

SEQ ID NO: 2647102 - RNA, 19 nt, Homo sapiens
  misc_RNA (1)...(19): siRNA sense strand
aagccaugauugugugcaa

SEQ ID NO: 2647103 - RNA, 19 nt, Homo sapiens
  misc_RNA (1)...(19): siRNA sense strand
ggauaagaaaugaaaguag

SEQ ID NO: 2647104 - RNA, 19 nt, Homo sapiens
  misc_RNA (1)...(19): siRNA sense strand
gcagcaaugcagaugaauu

SEQ ID NO: 2647105 - RNA, 19 nt, Homo sapiens
  misc_RNA (1)...(19): siRNA sense strand
caacgaagguauagaucac

SEQ ID NO: 2647106 - RNA, 19 nt, Homo sapiens
  misc_RNA (1)...(19): siRNA sense strand
guuaaaagcauucgcgcua

SEQ ID NO: 2647107 - RNA, 19 nt, Homo sapiens
  misc_RNA (1)...(19): siRNA sense strand
uaauaagggaaaugagcuu

SEQ ID NO: 2647108 - RNA, 19 nt, Homo sapiens
  misc_RNA (1)...(19): siRNA sense strand
agacacaaccuguagcaau

SEQ ID NO: 2647109 - RNA, 19 nt, Homo sapiens
  misc_RNA (1)...(19): siRNA sense strand
ugguggagccagauguuaa

SEQ ID NO: 2647110 - RNA, 19 nt, Homo sapiens
  misc_RNA (1)...(19): siRNA sense strand
cccaaacaguggagagaau

SEQ ID NO: 2647111 - RNA, 19 nt, Homo sapiens
  misc_RNA (1)...(19): siRNA sense strand
ggagagaauaggaaggaga

SEQ ID NO: 2647112 - RNA, 19 nt, Homo sapiens
  misc_RNA (1)...(19): siRNA sense strand
ccuuauagcauuuaggaau

SEQ ID NO: 2647113 - RNA, 19 nt, Homo sapiens
  misc_RNA (1)...(19): siRNA sense strand
ggccagaguaagugaggaa

SEQ ID NO: 2647114 - RNA, 19 nt, Homo sapiens
  misc_RNA (1)...(19): siRNA sense strand
agaauaggaaggagaggaa

SEQ ID NO: 2647115 - RNA, 19 nt, Homo sapiens
  misc_RNA (1)...(19): siRNA sense strand
cuuaagacuuccaggguga

SEQ ID NO: 2647116 - RNA, 19 nt, Homo sapiens
  misc_RNA (1)...(19): siRNA sense strand
ccaaagagggacagugaca

SEQ ID NO: 2647117 - RNA, 19 nt, Homo sapiens
  misc_RNA (1)...(19): siRNA sense strand
ggagaaauaaagagugcau

SEQ ID NO: 2647118 - RNA, 19 nt, Homo sapiens
  misc_RNA (1)...(19): siRNA sense strand
agaaauaaagagugcauca

SEQ ID NO: 2647119 - RNA, 19 nt, Homo sapiens
  misc_RNA (1)...(19): siRNA sense strand
gagaagaagaucaggcagu

SEQ ID NO: 2647120 - RNA, 19 nt, Homo sapiens
  misc_RNA (1)...(19): siRNA sense strand
aggaaaaggaagugacaga

SEQ ID NO: 2647121 - RNA, 19 nt, Homo sapiens
  misc_RNA (1)...(19): siRNA sense strand
aggaaagacugaaagcuga

SEQ ID NO: 2647122 - RNA, 19 nt, Homo sapiens
  misc_RNA (1)...(19): siRNA sense strand
aggagucauuugagaagaa

SEQ ID NO: 2647123 - RNA, 19 nt, Homo sapiens
  misc_RNA (1)...(19): siRNA sense strand
ccagaguaagugaggaaaa

SEQ ID NO: 2647124 - RNA, 19 nt, Homo sapiens
  misc_RNA (1)...(19): siRNA sense strand
aauaggaaggagaggaaga

SEQ ID NO: 2647125 - RNA, 19 nt, Homo sapiens
  misc_RNA (1)...(19): siRNA sense strand
agaaaauggaacuggaaau

SEQ ID NO: 2647126 - RNA, 19 nt, Homo sapiens
  misc_RNA (1)...(19): siRNA sense strand
uggcccagcaggagacaaa

SEQ ID NO: 2647127 - RNA, 19 nt, Homo sapiens
  misc_RNA (1)...(19): siRNA sense strand
cuuaaaaggcacaggagau

SEQ ID NO: 2647128 - RNA, 19 nt, Homo sapiens
  misc_RNA (1)...(19): siRNA sense strand
aggaaaugucagaucaaga

SEQ ID NO: 2647129 - RNA, 19 nt, Homo sapiens
  misc_RNA (1)...(19): siRNA sense strand
aaaggaagugacagaggaa

SEQ ID NO: 2647130 - RNA, 19 nt, Homo sapiens
  misc_RNA (1)...(19): siRNA sense strand
agaucaggcaguuggaaga

SEQ ID NO: 2647131 - RNA, 19 nt, Homo sapiens
  misc_RNA (1)...(19): siRNA sense strand
cgcccaaaccucagcgcua

SEQ ID NO: 2647132 - RNA, 19 nt, Homo sapiens
  misc_RNA (1)...(19): siRNA sense strand
aagaguuggaggagaauca

SEQ ID NO: 2647133 - RNA, 19 nt, Homo sapiens
  misc_RNA (1)...(19): siRNA sense strand
aguuggaagaacagaauga

SEQ ID NO: 2647134 - RNA, 19 nt, Homo sapiens
  misc_RNA (1)...(19): siRNA sense strand
caaaccaagcaaagaccua

SEQ ID NO: 2647135 - RNA, 19 nt, Homo sapiens
  misc_RNA (1)...(19): siRNA sense strand
ccuaagacacauccagaau

SEQ ID NO: 2647136 - RNA, 19 nt, Homo sapiens
  misc_RNA (1)...(19): siRNA sense strand
guccaaaagcugauguuaa

SEQ ID NO: 2647137 - RNA, 19 nt, Homo sapiens
  misc_RNA (1)...(19): siRNA sense strand
aggaagugacagaggaaag

SEQ ID NO: 2647138 - RNA, 19 nt, Homo sapiens
  misc_RNA (1)...(19): siRNA sense strand
gaucaucaaagaaagggaa

SEQ ID NO: 2647139 - RNA, 19 nt, Homo sapiens
  misc_RNA (1)...(19): siRNA sense strand
gcagguauccaguagaaaa

SEQ ID NO: 2647140 - RNA, 19 nt, Homo sapiens
  misc_RNA (1)...(19): siRNA sense strand
uagagaaugccaagaacuu

SEQ ID NO: 2647141 - RNA, 19 nt, Homo sapiens
  misc_RNA (1)...(19): siRNA sense strand
ggucaugucaaaagaaaga

SEQ ID NO: 2647142 - RNA, 19 nt, Homo sapiens
  misc_RNA (1)...(19): siRNA sense strand
agaaaaugccacaagaaga

SEQ ID NO: 2647143 - RNA, 19 nt, Homo sapiens
  misc_RNA (1)...(19): siRNA sense strand
cacaagaagaauugcacau

SEQ ID NO: 2647144 - RNA, 19 nt, Homo sapiens
  misc_RNA (1)...(19): siRNA sense strand
aagaauugcacaugaagga

SEQ ID NO: 2647145 - RNA, 19 nt, Homo sapiens
  misc_RNA (1)...(19): siRNA sense strand
gacagaggaaagacugaaa

SEQ ID NO: 2647146 - RNA, 19 nt, Homo sapiens
  misc_RNA (1)...(19): siRNA sense strand
cagaacaacaggagaagcu

SEQ ID NO: 2647147 - RNA, 19 nt, Homo sapiens
  misc_RNA (1)...(19): siRNA sense strand
gaacaacaggagaagcuca

SEQ ID NO: 2647148 - RNA, 19 nt, Homo sapiens
  misc_RNA (1)...(19): siRNA sense strand
ucauagacuugcugcagau

SEQ ID NO: 2647149 - RNA, 19 nt, Homo sapiens
  misc_RNA (1)...(19): siRNA sense strand
cagugacaggaguuagaaa

SEQ ID NO: 2647150 - RNA, 19 nt, Homo sapiens
  misc_RNA (1)...(19): siRNA sense strand
ccugaagaguuggaggaga

SEQ ID NO: 2647151 - RNA, 19 nt, Homo sapiens
  misc_RNA (1)...(19): siRNA sense strand
agucauuugagaagaagau

SEQ ID NO: 2647152 - RNA, 19 nt, Homo sapiens
  misc_RNA (1)...(19): siRNA sense strand
agaacuuggugcugcuaga

SEQ ID NO: 2647153 - RNA, 19 nt, Homo sapiens
  misc_RNA (1)...(19): siRNA sense strand
cagaaaauggaacuggaaa

SEQ ID NO: 2647154 - RNA, 19 nt, Homo sapiens
  misc_RNA (1)...(19): siRNA sense strand
gggacagugacaggaguua

SEQ ID NO: 2647155 - RNA, 19 nt, Homo sapiens
  misc_RNA (1)...(19): siRNA sense strand
caggagauucaguagauga

SEQ ID NO: 2647156 - RNA, 19 nt, Homo sapiens
  misc_RNA (1)...(19): siRNA sense strand
gaggaaagacugaaagcug

SEQ ID NO: 2647157 - RNA, 19 nt, Homo sapiens
  misc_RNA (1)...(19): siRNA sense strand
uggaagaacagaaugaacu

SEQ ID NO: 2647158 - RNA, 19 nt, Homo sapiens
  misc_RNA (1)...(19): siRNA sense strand
caguagaugaacagaauuc

SEQ ID NO: 2647159 - RNA, 19 nt, Homo sapiens
  misc_RNA (1)...(19): siRNA sense strand
gagaaaaccugcaguccca

SEQ ID NO: 2647160 - RNA, 19 nt, Homo sapiens
  misc_RNA (1)...(19): siRNA sense strand
gcccaaacucugcgcccaa

SEQ ID NO: 2647161 - RNA, 19 nt, Homo sapiens
  misc_RNA (1)...(19): siRNA sense strand
gagaauaggaaggagagga

SEQ ID NO: 2647162 - RNA, 19 nt, Homo sapiens
  misc_RNA (1)...(19): siRNA sense strand
agugcaucauugaaggauu

SEQ ID NO: 2647163 - RNA, 19 nt, Homo sapiens
  misc_RNA (1)...(19): siRNA sense strand
gacugaaagcugagcagga

SEQ ID NO: 2647164 - RNA, 19 nt, Homo sapiens
  misc_RNA (1)...(19): siRNA sense strand
aggaaagggacugggauuu

SEQ ID NO: 2647165 - RNA, 19 nt, Homo sapiens
  misc_RNA (1)...(19): siRNA sense strand
ccagaaaagagaaggcuca

SEQ ID NO: 2647166 - RNA, 19 nt, Homo sapiens
  misc_RNA (1)...(19): siRNA sense strand
caggaguccaauuaugaaa

SEQ ID NO: 2647167 - RNA, 19 nt, Homo sapiens
  misc_RNA (1)...(19): siRNA sense strand
uaugaaaauuugagccaga

SEQ ID NO: 2647168 - RNA, 19 nt, Homo sapiens
  misc_RNA (1)...(19): siRNA sense strand
cgaacagacuuuaaggaau

SEQ ID NO: 2647169 - RNA, 19 nt, Homo sapiens
  misc_RNA (1)...(19): siRNA sense strand
ggcuagaagaugagaauuu

SEQ ID NO: 2647170 - RNA, 19 nt, Homo sapiens
  misc_RNA (1)...(19): siRNA sense strand
ccguggaggaagaggcaaa

SEQ ID NO: 2647171 - RNA, 19 nt, Homo sapiens
  misc_RNA (1)...(19): siRNA sense strand
guauugagaucuugggaca

SEQ ID NO: 2647172 - RNA, 19 nt, Homo sapiens
  misc_RNA (1)...(19): siRNA sense strand
auaagaaugccuuggguua

SEQ ID NO: 2647173 - RNA, 19 nt, Homo sapiens
  misc_RNA (1)...(19): siRNA sense strand
guaugugaaucgugaagaa

SEQ ID NO: 2647174 - RNA, 19 nt, Homo sapiens
  misc_RNA (1)...(19): siRNA sense strand
acacaaugccaaagcagua

SEQ ID NO: 2647175 - RNA, 19 nt, Homo sapiens
  misc_RNA (1)...(19): siRNA sense strand
gaaugaagccauaagccaa

SEQ ID NO: 2647176 - RNA, 19 nt, Homo sapiens
  misc_RNA (1)...(19): siRNA sense strand
cuaccaaagcauuaugaua

SEQ ID NO: 2647177 - RNA, 19 nt, Homo sapiens
  misc_RNA (1)...(19): siRNA sense strand
agaaauuacucuaccaaca

SEQ ID NO: 2647178 - RNA, 19 nt, Homo sapiens
  misc_RNA (1)...(19): siRNA sense strand
gcgaacagacuuuaaggaa

SEQ ID NO: 2647179 - RNA, 19 nt, Homo sapiens
  misc_RNA (1)...(19): siRNA sense strand
aggcagcagcgguaagaaa

SEQ ID NO: 2647180 - RNA, 19 nt, Homo sapiens
  misc_RNA (1)...(19): siRNA sense strand
aaacaaugguuaagcgcca

SEQ ID NO: 2647181 - RNA, 19 nt, Homo sapiens
  misc_RNA (1)...(19): siRNA sense strand
ggaagacugcauacagaaa

SEQ ID NO: 2647182 - RNA, 19 nt, Homo sapiens
  misc_RNA (1)...(19): siRNA sense strand
ggauggaguauuugaacau

SEQ ID NO: 2647183 - RNA, 19 nt, Homo sapiens
  misc_RNA (1)...(19): siRNA sense strand
uagcaaaagugaugcagaa

SEQ ID NO: 2647184 - RNA, 19 nt, Homo sapiens
  misc_RNA (1)...(19): siRNA sense strand
cguccaucauccuggcaaa

SEQ ID NO: 2647185 - RNA, 19 nt, Homo sapiens
  misc_RNA (1)...(19): siRNA sense strand
gguauuuaucaguggcauu

SEQ ID NO: 2647186 - RNA, 19 nt, Homo sapiens
  misc_RNA (1)...(19): siRNA sense strand
ggcagaaccucguggcuga

SEQ ID NO: 2647187 - RNA, 19 nt, Homo sapiens
  misc_RNA (1)...(19): siRNA sense strand
agugaggacaacagugaua

SEQ ID NO: 2647188 - RNA, 19 nt, Homo sapiens
  misc_RNA (1)...(19): siRNA sense strand
uguaugagcaaguggugaa

SEQ ID NO: 2647189 - RNA, 19 nt, Homo sapiens
  misc_RNA (1)...(19): siRNA sense strand
gagaguuauugaaggggaa

SEQ ID NO: 2647190 - RNA, 19 nt, Homo sapiens
  misc_RNA (1)...(19): siRNA sense strand
ugugaagucaacuggguua

SEQ ID NO: 2647191 - RNA, 19 nt, Homo sapiens
  misc_RNA (1)...(19): siRNA sense strand
cugcugugcuauugaguca

SEQ ID NO: 2647192 - RNA, 19 nt, Homo sapiens
  misc_RNA (1)...(19): siRNA sense strand
aguuugaaggcaugcauaa

SEQ ID NO: 2647193 - RNA, 19 nt, Homo sapiens
  misc_RNA (1)...(19): siRNA sense strand
cuucauguauugagaucuu

SEQ ID NO: 2647194 - RNA, 19 nt, Homo sapiens
  misc_RNA (1)...(19): siRNA sense strand
cgaucuuaaacaaugguua

SEQ ID NO: 2647195 - RNA, 19 nt, Homo sapiens
  misc_RNA (1)...(19): siRNA sense strand
uguuagacacaaugccaaa

SEQ ID NO: 2647196 - RNA, 19 nt, Homo sapiens
  misc_RNA (1)...(19): siRNA sense strand
aggaagaggcaaagcuguu

SEQ ID NO: 2647197 - RNA, 19 nt, Homo sapiens
  misc_RNA (1)...(19): siRNA sense strand
uggugaaguuucuaaguga

SEQ ID NO: 2647198 - RNA, 19 nt, Homo sapiens
  misc_RNA (1)...(19): siRNA sense strand
gagacuauacaguggcuuu

SEQ ID NO: 2647199 - RNA, 19 nt, Homo sapiens
  misc_RNA (1)...(19): siRNA sense strand
aaagaaaugaagagacguu

SEQ ID NO: 2647200 - RNA, 19 nt, Homo sapiens
  misc_RNA (1)...(19): siRNA sense strand
acaaggagcuggugaggcu

SEQ ID NO: 2647201 - RNA, 19 nt, Homo sapiens
  misc_RNA (1)...(19): siRNA sense strand
gaaaaguacuugaaaccau

SEQ ID NO: 2647202 - RNA, 19 nt, Homo sapiens
  misc_RNA (1)...(19): siRNA sense strand
ugaaagaaaugaagagacg

SEQ ID NO: 2647203 - RNA, 19 nt, Homo sapiens
  misc_RNA (1)...(19): siRNA sense strand
gggaccacaguauggguua

SEQ ID NO: 2647204 - RNA, 19 nt, Homo sapiens
  misc_RNA (1)...(19): siRNA sense strand
aggccaagcuugaguccca

SEQ ID NO: 2647205 - RNA, 19 nt, Homo sapiens
  misc_RNA (1)...(19): siRNA sense strand
aaggggaauuggugauaaa

SEQ ID NO: 2647206 - RNA, 19 nt, Homo sapiens
  misc_RNA (1)...(19): siRNA sense strand
ugaagaaagcccagaccca

SEQ ID NO: 2647207 - RNA, 19 nt, Homo sapiens
  misc_RNA (1)...(19): siRNA sense strand
agaugguuguauuggaaga

SEQ ID NO: 2647208 - RNA, 19 nt, Homo sapiens
  misc_RNA (1)...(19): siRNA sense strand
uaucaugaguuucaggaga

SEQ ID NO: 2647209 - RNA, 19 nt, Homo sapiens
  misc_RNA (1)...(19): siRNA sense strand
aagacugcauacagaaauu

SEQ ID NO: 2647210 - RNA, 19 nt, Homo sapiens
  misc_RNA (1)...(19): siRNA sense strand
uuguauuggaagaagguuu

SEQ ID NO: 2647211 - RNA, 19 nt, Homo sapiens
  misc_RNA (1)...(19): siRNA sense strand
ggaaaacagugcugaaauc

SEQ ID NO: 2647212 - RNA, 19 nt, Homo sapiens
  misc_RNA (1)...(19): siRNA sense strand
ggacaacgaaagcagccaa

SEQ ID NO: 2647213 - RNA, 19 nt, Homo sapiens
  misc_RNA (1)...(19): siRNA sense strand
ccaaaaugccagaguucau

SEQ ID NO: 2647214 - RNA, 19 nt, Homo sapiens
  misc_RNA (1)...(19): siRNA sense strand
gggaauuggugauaaacuc

SEQ ID NO: 2647215 - RNA, 19 nt, Homo sapiens
  misc_RNA (1)...(19): siRNA sense strand
cuaccaacaacauaagaau

SEQ ID NO: 2647216 - RNA, 19 nt, Homo sapiens
  misc_RNA (1)...(19): siRNA sense strand
ccuugaaccagaugaggau

SEQ ID NO: 2647217 - RNA, 19 nt, Homo sapiens
  misc_RNA (1)...(19): siRNA sense strand
auuugaacauggagcgcau

SEQ ID NO: 2647218 - RNA, 19 nt, Homo sapiens
  misc_RNA (1)...(19): siRNA sense strand
gcaucuaucaugaguuuca

SEQ ID NO: 2647219 - RNA, 19 nt, Homo sapiens
  misc_RNA (1)...(19): siRNA sense strand
cggaagucgccuuugucua

SEQ ID NO: 2647220 - RNA, 19 nt, Homo sapiens
  misc_RNA (1)...(19): siRNA sense strand
ugccaaagcaguaugugaa

SEQ ID NO: 2647221 - RNA, 19 nt, Homo sapiens
  misc_RNA (1)...(19): siRNA sense strand
cggccuuagugaaugccua

SEQ ID NO: 2647222 - RNA, 19 nt, Homo sapiens
  misc_RNA (1)...(19): siRNA sense strand
cugaagaacagcaggcucu

SEQ ID NO: 2647223 - RNA, 19 nt, Homo sapiens
  misc_RNA (1)...(19): siRNA sense strand
cauggcaucuuguggauau

SEQ ID NO: 2647224 - RNA, 19 nt, Homo sapiens
  misc_RNA (1)...(19): siRNA sense strand
caaagaaagcccucucaau

SEQ ID NO: 2647225 - RNA, 19 nt, Homo sapiens
  misc_RNA (1)...(19): siRNA sense strand
ucuacuugcuucaguguuu

SEQ ID NO: 2647226 - RNA, 19 nt, Homo sapiens
  misc_RNA (1)...(19): siRNA sense strand
cuuccuuuguggagggcuu

SEQ ID NO: 2647227 - RNA, 19 nt, Homo sapiens
  misc_RNA (1)...(19): siRNA sense strand
cuuauauggcugaugugaa

SEQ ID NO: 2647228 - RNA, 19 nt, Homo sapiens
  misc_RNA (1)...(19): siRNA sense strand
gcugauugacuuagaaaug

SEQ ID NO: 2647229 - RNA, 19 nt, Homo sapiens
  misc_RNA (1)...(19): siRNA sense strand
caguaaucauucagcucuu

SEQ ID NO: 2647230 - RNA, 19 nt, Homo sapiens
  misc_RNA (1)...(19): siRNA sense strand
cagacuuuaaggaaugaaa

SEQ ID NO: 2647231 - RNA, 19 nt, Homo sapiens
  misc_RNA (1)...(19): siRNA sense strand
gcauacagaaauuacucua

SEQ ID NO: 2647232 - RNA, 19 nt, Homo sapiens
  misc_RNA (1)...(19): siRNA sense strand
ggccagaaccgcagcucuu

SEQ ID NO: 2647233 - RNA, 19 nt, Homo sapiens
  misc_RNA (1)...(19): siRNA sense strand
gcauuauugugaagcaugu

SEQ ID NO: 2647234 - RNA, 19 nt, Homo sapiens
  misc_RNA (1)...(19): siRNA sense strand
ggaaggaccugcacccuga

SEQ ID NO: 2647235 - RNA, 19 nt, Homo sapiens
  misc_RNA (1)...(19): siRNA sense strand
uggaaguccugaugaugau

SEQ ID NO: 2647236 - RNA, 19 nt, Homo sapiens
  misc_RNA (1)...(19): siRNA sense strand
cugaccaagcucugaagaa

SEQ ID NO: 2647237 - RNA, 19 nt, Homo sapiens
  misc_RNA (1)...(19): siRNA sense strand
gauucagaaaguuggcauu

SEQ ID NO: 2647238 - RNA, 19 nt, Homo sapiens
  misc_RNA (1)...(19): siRNA sense strand
augagcaaguggugaaguu

SEQ ID NO: 2647239 - RNA, 19 nt, Homo sapiens
  misc_RNA (1)...(19): siRNA sense strand
gaaaaggcugauugacuua

SEQ ID NO: 2647240 - RNA, 19 nt, Homo sapiens
  misc_RNA (1)...(19): siRNA sense strand
ccuuagcaguccuagaaca

SEQ ID NO: 2647241 - RNA, 19 nt, Homo sapiens
  misc_RNA (1)...(19): siRNA sense strand
cauuuggagugcagaggca

SEQ ID NO: 2647242 - RNA, 19 nt, Homo sapiens
  misc_RNA (1)...(19): siRNA sense strand
agaaugaagccauaagcca

SEQ ID NO: 2647243 - RNA, 19 nt, Homo sapiens
  misc_RNA (1)...(19): siRNA sense strand
ccuggaacaaaauggaaaa

SEQ ID NO: 2647244 - RNA, 19 nt, Homo sapiens
  misc_RNA (1)...(19): siRNA sense strand
gaauucugcucuugguuca

SEQ ID NO: 2647245 - RNA, 19 nt, Homo sapiens
  misc_RNA (1)...(19): siRNA sense strand
auagaugguuguauuggaa

SEQ ID NO: 2647246 - RNA, 19 nt, Homo sapiens
  misc_RNA (1)...(19): siRNA sense strand
cgaacagacuuuaaggaau

SEQ ID NO: 2647247 - RNA, 19 nt, Homo sapiens
  misc_RNA (1)...(19): siRNA sense strand
ggcuagaagaugagaauuu

SEQ ID NO: 2647248 - RNA, 19 nt, Homo sapiens
  misc_RNA (1)...(19): siRNA sense strand
ccguggaggaagaggcaaa

SEQ ID NO: 2647249 - RNA, 19 nt, Homo sapiens
  misc_RNA (1)...(19): siRNA sense strand
guauugagaucuugggaca

SEQ ID NO: 2647250 - RNA, 19 nt, Homo sapiens
  misc_RNA (1)...(19): siRNA sense strand
auaagaaugccuuggguua

SEQ ID NO: 2647251 - RNA, 19 nt, Homo sapiens
  misc_RNA (1)...(19): siRNA sense strand
guaugugaaucgugaagaa

SEQ ID NO: 2647252 - RNA, 19 nt, Homo sapiens
  misc_RNA (1)...(19): siRNA sense strand
acacaaugccaaagcagua

SEQ ID NO: 2647253 - RNA, 19 nt, Homo sapiens
  misc_RNA (1)...(19): siRNA sense strand
gaaugaagccauaagccaa

SEQ ID NO: 2647254 - RNA, 19 nt, Homo sapiens
  misc_RNA (1)...(19): siRNA sense strand
cuaccaaagcauuaugaua

SEQ ID NO: 2647255 - RNA, 19 nt, Homo sapiens
  misc_RNA (1)...(19): siRNA sense strand
agaaauuacucuaccaaca

SEQ ID NO: 2647256 - RNA, 19 nt, Homo sapiens
  misc_RNA (1)...(19): siRNA sense strand
gcgaacagacuuuaaggaa

SEQ ID NO: 2647257 - RNA, 19 nt, Homo sapiens
  misc_RNA (1)...(19): siRNA sense strand
aggcagcagcgguaagaaa

SEQ ID NO: 2647258 - RNA, 19 nt, Homo sapiens
  misc_RNA (1)...(19): siRNA sense strand
ggaagacugcauacagaaa

SEQ ID NO: 2647259 - RNA, 19 nt, Homo sapiens
  misc_RNA (1)...(19): siRNA sense strand
aaacaaugguuaagcgcca

SEQ ID NO: 2647260 - RNA, 19 nt, Homo sapiens
  misc_RNA (1)...(19): siRNA sense strand
ggauggaguauuugaacau

SEQ ID NO: 2647261 - RNA, 19 nt, Homo sapiens
  misc_RNA (1)...(19): siRNA sense strand
uagcaaaagugaugcagaa

SEQ ID NO: 2647262 - RNA, 19 nt, Homo sapiens
  misc_RNA (1)...(19): siRNA sense strand
cguccaucauccuggcaaa

SEQ ID NO: 2647263 - RNA, 19 nt, Homo sapiens
  misc_RNA (1)...(19): siRNA sense strand
gguauuuaucaguggcauu

SEQ ID NO: 2647264 - RNA, 19 nt, Homo sapiens
  misc_RNA (1)...(19): siRNA sense strand
ggcagaaccucguggcuga

SEQ ID NO: 2647265 - RNA, 19 nt, Homo sapiens
  misc_RNA (1)...(19): siRNA sense strand
agugaggacaacagugaua

SEQ ID NO: 2647266 - RNA, 19 nt, Homo sapiens
  misc_RNA (1)...(19): siRNA sense strand
uguaugagcaaguggugaa

SEQ ID NO: 2647267 - RNA, 19 nt, Homo sapiens
  misc_RNA (1)...(19): siRNA sense strand
gagaguuauugaaggggaa

SEQ ID NO: 2647268 - RNA, 19 nt, Homo sapiens
  misc_RNA (1)...(19): siRNA sense strand
ugugaagucaacuggguua

SEQ ID NO: 2647269 - RNA, 19 nt, Homo sapiens
  misc_RNA (1)...(19): siRNA sense strand
cugcugugcuauugaguca

SEQ ID NO: 2647270 - RNA, 19 nt, Homo sapiens
  misc_RNA (1)...(19): siRNA sense strand
aguuugaaggcaugcauaa

SEQ ID NO: 2647271 - RNA, 19 nt, Homo sapiens
  misc_RNA (1)...(19): siRNA sense strand
cuucauguauugagaucuu

SEQ ID NO: 2647272 - RNA, 19 nt, Homo sapiens
  misc_RNA (1)...(19): siRNA sense strand
cgaucuuaaacaaugguua

SEQ ID NO: 2647273 - RNA, 19 nt, Homo sapiens
  misc_RNA (1)...(19): siRNA sense strand
ucauggaccacuuguguaa

SEQ ID NO: 2647274 - RNA, 19 nt, Homo sapiens
  misc_RNA (1)...(19): siRNA sense strand
uguuagacacaaugccaaa

SEQ ID NO: 2647275 - RNA, 19 nt, Homo sapiens
  misc_RNA (1)...(19): siRNA sense strand
aggaagaggcaaagcuguu

SEQ ID NO: 2647276 - RNA, 19 nt, Homo sapiens
  misc_RNA (1)...(19): siRNA sense strand
uggugaaguuucuaaguga

SEQ ID NO: 2647277 - RNA, 19 nt, Homo sapiens
  misc_RNA (1)...(19): siRNA sense strand
gagacuauacaguggcuuu

SEQ ID NO: 2647278 - RNA, 19 nt, Homo sapiens
  misc_RNA (1)...(19): siRNA sense strand
aaagaaaugaagagacguu

SEQ ID NO: 2647279 - RNA, 19 nt, Homo sapiens
  misc_RNA (1)...(19): siRNA sense strand
acaaggagcuggugaggcu

SEQ ID NO: 2647280 - RNA, 19 nt, Homo sapiens
  misc_RNA (1)...(19): siRNA sense strand
gaaaaguacuugaaaccau

SEQ ID NO: 2647281 - RNA, 19 nt, Homo sapiens
  misc_RNA (1)...(19): siRNA sense strand
ugaaagaaaugaagagacg

SEQ ID NO: 2647282 - RNA, 19 nt, Homo sapiens
  misc_RNA (1)...(19): siRNA sense strand
gggaccacaguauggguua

SEQ ID NO: 2647283 - RNA, 19 nt, Homo sapiens
  misc_RNA (1)...(19): siRNA sense strand
aggccaagcuugaguccca

SEQ ID NO: 2647284 - RNA, 19 nt, Homo sapiens
  misc_RNA (1)...(19): siRNA sense strand
acacauaucuguaagcacu

SEQ ID NO: 2647285 - RNA, 19 nt, Homo sapiens
  misc_RNA (1)...(19): siRNA sense strand
aaggggaauuggugauaaa

SEQ ID NO: 2647286 - RNA, 19 nt, Homo sapiens
  misc_RNA (1)...(19): siRNA sense strand
ugaagaaagcccagaccca

SEQ ID NO: 2647287 - RNA, 19 nt, Homo sapiens
  misc_RNA (1)...(19): siRNA sense strand
agaugguuguauuggaaga

SEQ ID NO: 2647288 - RNA, 19 nt, Homo sapiens
  misc_RNA (1)...(19): siRNA sense strand
aagacugcauacagaaauu

SEQ ID NO: 2647289 - RNA, 19 nt, Homo sapiens
  misc_RNA (1)...(19): siRNA sense strand
uaucaugaguuucaggaga

SEQ ID NO: 2647290 - RNA, 19 nt, Homo sapiens
  misc_RNA (1)...(19): siRNA sense strand
gggacaacgugaagcuucu

SEQ ID NO: 2647291 - RNA, 19 nt, Homo sapiens
  misc_RNA (1)...(19): siRNA sense strand
uuguauuggaagaagguuu

SEQ ID NO: 2647292 - RNA, 19 nt, Homo sapiens
  misc_RNA (1)...(19): siRNA sense strand
ggaaaacagugcugaaauc

SEQ ID NO: 2647293 - RNA, 19 nt, Homo sapiens
  misc_RNA (1)...(19): siRNA sense strand
ggacaacgaaagcagccaa

SEQ ID NO: 2647294 - RNA, 19 nt, Homo sapiens
  misc_RNA (1)...(19): siRNA sense strand
ccaaaaugccagaguucau

SEQ ID NO: 2647295 - RNA, 19 nt, Homo sapiens
  misc_RNA (1)...(19): siRNA sense strand
cuaccaacaacauaagaau

SEQ ID NO: 2647296 - RNA, 19 nt, Homo sapiens
  misc_RNA (1)...(19): siRNA sense strand
gggaauuggugauaaacuc

SEQ ID NO: 2647297 - RNA, 19 nt, Homo sapiens
  misc_RNA (1)...(19): siRNA sense strand
ccuugaaccagaugaggau

SEQ ID NO: 2647298 - RNA, 19 nt, Homo sapiens
  misc_RNA (1)...(19): siRNA sense strand
auuugaacauggagcgcau

SEQ ID NO: 2647299 - RNA, 19 nt, Homo sapiens
  misc_RNA (1)...(19): siRNA sense strand
gcaucuaucaugaguuuca

SEQ ID NO: 2647300 - RNA, 19 nt, Homo sapiens
  misc_RNA (1)...(19): siRNA sense strand
cggaagucgccuuugucua

SEQ ID NO: 2647301 - RNA, 19 nt, Homo sapiens
  misc_RNA (1)...(19): siRNA sense strand
ugccaaagcaguaugugaa

SEQ ID NO: 2647302 - RNA, 19 nt, Homo sapiens
  misc_RNA (1)...(19): siRNA sense strand
cggccuuagugaaugccua

SEQ ID NO: 2647303 - RNA, 19 nt, Homo sapiens
  misc_RNA (1)...(19): siRNA sense strand
cugaagaacagcaggcucu

SEQ ID NO: 2647304 - RNA, 19 nt, Homo sapiens
  misc_RNA (1)...(19): siRNA sense strand
cauggcaucuuguggauau

SEQ ID NO: 2647305 - RNA, 19 nt, Homo sapiens
  misc_RNA (1)...(19): siRNA sense strand
caaagaaagcccucucaau

SEQ ID NO: 2647306 - RNA, 19 nt, Homo sapiens
  misc_RNA (1)...(19): siRNA sense strand
ucuacuugcuucaguguuu

SEQ ID NO: 2647307 - RNA, 19 nt, Homo sapiens
  misc_RNA (1)...(19): siRNA sense strand
cuuccuuuguggagggcuu

SEQ ID NO: 2647308 - RNA, 19 nt, Homo sapiens
  misc_RNA (1)...(19): siRNA sense strand
cuuauauggcugaugugaa

SEQ ID NO: 2647309 - RNA, 19 nt, Homo sapiens
  misc_RNA (1)...(19): siRNA sense strand
gcugauugacuuagaaaug

SEQ ID NO: 2647310 - RNA, 19 nt, Homo sapiens
  misc_RNA (1)...(19): siRNA sense strand
caguaaucauucagcucuu

SEQ ID NO: 2647311 - RNA, 19 nt, Homo sapiens
  misc_RNA (1)...(19): siRNA sense strand
cagacuuuaaggaaugaaa

SEQ ID NO: 2647312 - RNA, 19 nt, Homo sapiens
  misc_RNA (1)...(19): siRNA sense strand
gcauacagaaauuacucua

SEQ ID NO: 2647313 - RNA, 19 nt, Homo sapiens
  misc_RNA (1)...(19): siRNA sense strand
ggccagaaccgcagcucuu

SEQ ID NO: 2647314 - RNA, 19 nt, Homo sapiens
  misc_RNA (1)...(19): siRNA sense strand
gcauuauugugaagcaugu

SEQ ID NO: 2647315 - RNA, 19 nt, Homo sapiens
  misc_RNA (1)...(19): siRNA sense strand
ggaaggaccugcacccuga

SEQ ID NO: 2647316 - RNA, 19 nt, Homo sapiens
  misc_RNA (1)...(19): siRNA sense strand
uggaaguccugaugaugau

SEQ ID NO: 2647317 - RNA, 19 nt, Homo sapiens
  misc_RNA (1)...(19): siRNA sense strand
cugaccaagcucugaagaa

SEQ ID NO: 2647318 - RNA, 19 nt, Homo sapiens
  misc_RNA (1)...(19): siRNA sense strand
gauucagaaaguuggcauu

SEQ ID NO: 2647319 - RNA, 19 nt, Homo sapiens
  misc_RNA (1)...(19): siRNA sense strand
augagcaaguggugaaguu

SEQ ID NO: 2647320 - RNA, 19 nt, Homo sapiens
  misc_RNA (1)...(19): siRNA sense strand
gaaaaggcugauugacuua

SEQ ID NO: 2647321 - RNA, 19 nt, Homo sapiens
  misc_RNA (1)...(19): siRNA sense strand
ccuuagcaguccuagaaca

SEQ ID NO: 2647322 - RNA, 19 nt, Homo sapiens
  misc_RNA (1)...(19): siRNA sense strand
cauuuggagugcagaggca

SEQ ID NO: 2647323 - RNA, 19 nt, Homo sapiens
  misc_RNA (1)...(19): siRNA sense strand
agaaugaagccauaagcca

SEQ ID NO: 2647324 - RNA, 19 nt, Homo sapiens
  misc_RNA (1)...(19): siRNA sense strand
ccuggaacaaaauggaaaa

SEQ ID NO: 2647325 - RNA, 19 nt, Homo sapiens
  misc_RNA (1)...(19): siRNA sense strand
agaaagaacuggaggagga

SEQ ID NO: 2647326 - RNA, 19 nt, Homo sapiens
  misc_RNA (1)...(19): siRNA sense strand
aggcagaugaugagaggaa

SEQ ID NO: 2647327 - RNA, 19 nt, Homo sapiens
  misc_RNA (1)...(19): siRNA sense strand
uggaaaagaaugagaggaa

SEQ ID NO: 2647328 - RNA, 19 nt, Homo sapiens
  misc_RNA (1)...(19): siRNA sense strand
agaaagaugagcugaggaa

SEQ ID NO: 2647329 - RNA, 19 nt, Homo sapiens
  misc_RNA (1)...(19): siRNA sense strand
gcagaugaugagaggaauu

SEQ ID NO: 2647330 - RNA, 19 nt, Homo sapiens
  misc_RNA (1)...(19): siRNA sense strand
aggaaaaucucaugaagaa

SEQ ID NO: 2647331 - RNA, 19 nt, Homo sapiens
  misc_RNA (1)...(19): siRNA sense strand
gcaagaaaguccaggcgga

SEQ ID NO: 2647332 - RNA, 19 nt, Homo sapiens
  misc_RNA (1)...(19): siRNA sense strand
cuaccaaggccuaaagcaa

SEQ ID NO: 2647333 - RNA, 19 nt, Homo sapiens
  misc_RNA (1)...(19): siRNA sense strand
ggaagaucgaugagcagaa

SEQ ID NO: 2647334 - RNA, 19 nt, Homo sapiens
  misc_RNA (1)...(19): siRNA sense strand
cagauaucuuggugggaga

SEQ ID NO: 2647335 - RNA, 19 nt, Homo sapiens
  misc_RNA (1)...(19): siRNA sense strand
ugaaggaggagauggacaa

SEQ ID NO: 2647336 - RNA, 19 nt, Homo sapiens
  misc_RNA (1)...(19): siRNA sense strand
aggcauuggcccagaguga

SEQ ID NO: 2647337 - RNA, 19 nt, Homo sapiens
  misc_RNA (1)...(19): siRNA sense strand
agguagagcggcugaagaa

SEQ ID NO: 2647338 - RNA, 19 nt, Homo sapiens
  misc_RNA (1)...(19): siRNA sense strand
ccaacaaggagcacaagaa

SEQ ID NO: 2647339 - RNA, 19 nt, Homo sapiens
  misc_RNA (1)...(19): siRNA sense strand
ccugaaugaauuugaagaa

SEQ ID NO: 2647340 - RNA, 19 nt, Homo sapiens
  misc_RNA (1)...(19): siRNA sense strand
ccaaaguagcuuagaaucu

SEQ ID NO: 2647341 - RNA, 19 nt, Homo sapiens
  misc_RNA (1)...(19): siRNA sense strand
aggaggagauggacaaaca

SEQ ID NO: 2647342 - RNA, 19 nt, Homo sapiens
  misc_RNA (1)...(19): siRNA sense strand
ccagagaugagaagaauca

SEQ ID NO: 2647343 - RNA, 19 nt, Homo sapiens
  misc_RNA (1)...(19): siRNA sense strand
ccaaguaugccaugcgcua

SEQ ID NO: 2647344 - RNA, 19 nt, Homo sapiens
  misc_RNA (1)...(19): siRNA sense strand
ggucauaggcggaacccau

SEQ ID NO: 2647345 - RNA, 19 nt, Homo sapiens
  misc_RNA (1)...(19): siRNA sense strand
cuacaaagaaggagacaag

SEQ ID NO: 2647346 - RNA, 19 nt, Homo sapiens
  misc_RNA (1)...(19): siRNA sense strand
uggccagagaugagaagaa

SEQ ID NO: 2647347 - RNA, 19 nt, Homo sapiens
  misc_RNA (1)...(19): siRNA sense strand
uugagacauuugagguaaa

SEQ ID NO: 2647348 - RNA, 19 nt, Homo sapiens
  misc_RNA (1)...(19): siRNA sense strand
agacaaacagcaagacuga

SEQ ID NO: 2647349 - RNA, 19 nt, Homo sapiens
  misc_RNA (1)...(19): siRNA sense strand
ugguagaaaagcuggaaaa

SEQ ID NO: 2647350 - RNA, 19 nt, Homo sapiens
  misc_RNA (1)...(19): siRNA sense strand
gagaagaaucaguccauca

SEQ ID NO: 2647351 - RNA, 19 nt, Homo sapiens
  misc_RNA (1)...(19): siRNA sense strand
agaaggauuuccagggcau

SEQ ID NO: 2647352 - RNA, 19 nt, Homo sapiens
  misc_RNA (1)...(19): siRNA sense strand
cugaagauuuacaugaaga

SEQ ID NO: 2647353 - RNA, 19 nt, Homo sapiens
  misc_RNA (1)...(19): siRNA sense strand
cagaagaagccuacaagca

SEQ ID NO: 2647354 - RNA, 19 nt, Homo sapiens
  misc_RNA (1)...(19): siRNA sense strand
guuugagacauuugaggua

SEQ ID NO: 2647355 - RNA, 19 nt, Homo sapiens
  misc_RNA (1)...(19): siRNA sense strand
uguaugaagagcagaucaa

SEQ ID NO: 2647356 - RNA, 19 nt, Homo sapiens
  misc_RNA (1)...(19): siRNA sense strand
aggaggagguggagagccu

SEQ ID NO: 2647357 - RNA, 19 nt, Homo sapiens
  misc_RNA (1)...(19): siRNA sense strand
ugaaagaugagaaagaaca

SEQ ID NO: 2647358 - RNA, 19 nt, Homo sapiens
  misc_RNA (1)...(19): siRNA sense strand
auuuaaagagcuugcacua

SEQ ID NO: 2647359 - RNA, 19 nt, Homo sapiens
  misc_RNA (1)...(19): siRNA sense strand
agaaaaugcucucuugaaa

SEQ ID NO: 2647360 - RNA, 19 nt, Homo sapiens
  misc_RNA (1)...(19): siRNA sense strand
gcuuagaaucugacuccaa

SEQ ID NO: 2647361 - RNA, 19 nt, Homo sapiens
  misc_RNA (1)...(19): siRNA sense strand
cugaaugagcugaggaaag

SEQ ID NO: 2647362 - RNA, 19 nt, Homo sapiens
  misc_RNA (1)...(19): siRNA sense strand
cugaaaugguugcacucaa

SEQ ID NO: 2647363 - RNA, 19 nt, Homo sapiens
  misc_RNA (1)...(19): siRNA sense strand
gcaaggaggaggugcucau

SEQ ID NO: 2647364 - RNA, 19 nt, Homo sapiens
  misc_RNA (1)...(19): siRNA sense strand
aggaggagguggagcaucu

SEQ ID NO: 2647365 - RNA, 19 nt, Homo sapiens
  misc_RNA (1)...(19): siRNA sense strand
ggaugaaacgauucuggaa

SEQ ID NO: 2647366 - RNA, 19 nt, Homo sapiens
  misc_RNA (1)...(19): siRNA sense strand
caauugauguacaacgcaa

SEQ ID NO: 2647367 - RNA, 19 nt, Homo sapiens
  misc_RNA (1)...(19): siRNA sense strand
uaugaagagcagaucaaua

SEQ ID NO: 2647368 - RNA, 19 nt, Homo sapiens
  misc_RNA (1)...(19): siRNA sense strand
aggaaauuggccuggagaa

SEQ ID NO: 2647369 - RNA, 19 nt, Homo sapiens
  misc_RNA (1)...(19): siRNA sense strand
ccacagacugacauagauu

SEQ ID NO: 2647370 - RNA, 19 nt, Homo sapiens
  misc_RNA (1)...(19): siRNA sense strand
gcggaaugacccucagcaa

SEQ ID NO: 2647371 - RNA, 19 nt, Homo sapiens
  misc_RNA (1)...(19): siRNA sense strand
cugaguuaaccaaggacua

SEQ ID NO: 2647372 - RNA, 19 nt, Homo sapiens
  misc_RNA (1)...(19): siRNA sense strand
ccauuaauccuuaugaaca

SEQ ID NO: 2647373 - RNA, 19 nt, Homo sapiens
  misc_RNA (1)...(19): siRNA sense strand
gaagaagccuacaagcaga

SEQ ID NO: 2647374 - RNA, 19 nt, Homo sapiens
  misc_RNA (1)...(19): siRNA sense strand
caaacuggagcaagaagaa

SEQ ID NO: 2647375 - RNA, 19 nt, Homo sapiens
  misc_RNA (1)...(19): siRNA sense strand
uugcagacaagguggagua

SEQ ID NO: 2647376 - RNA, 19 nt, Homo sapiens
  misc_RNA (1)...(19): siRNA sense strand
ggcugcagaaggugaaaua

SEQ ID NO: 2647377 - RNA, 19 nt, Homo sapiens
  misc_RNA (1)...(19): siRNA sense strand
acgugggcauggagaacaa

SEQ ID NO: 2647378 - RNA, 19 nt, Homo sapiens
  misc_RNA (1)...(19): siRNA sense strand
cagcggaaagagaaggauu

SEQ ID NO: 2647379 - RNA, 19 nt, Homo sapiens
  misc_RNA (1)...(19): siRNA sense strand
guacaauauaagucagcuu

SEQ ID NO: 2647380 - RNA, 19 nt, Homo sapiens
  misc_RNA (1)...(19): siRNA sense strand
aggaggacgcagaggcuau

SEQ ID NO: 2647381 - RNA, 19 nt, Homo sapiens
  misc_RNA (1)...(19): siRNA sense strand
ucuauggguuugagacauu

SEQ ID NO: 2647382 - RNA, 19 nt, Homo sapiens
  misc_RNA (1)...(19): siRNA sense strand
gaagaauacaugaaggaac

SEQ ID NO: 2647383 - RNA, 19 nt, Homo sapiens
  misc_RNA (1)...(19): siRNA sense strand
agaucgaugagcagaacaa

SEQ ID NO: 2647384 - RNA, 19 nt, Homo sapiens
  misc_RNA (1)...(19): siRNA sense strand
cuuaaagaacugguagaaa

SEQ ID NO: 2647385 - RNA, 19 nt, Homo sapiens
  misc_RNA (1)...(19): siRNA sense strand
agaccuacgucaagaccau

SEQ ID NO: 2647386 - RNA, 19 nt, Homo sapiens
  misc_RNA (1)...(19): siRNA sense strand
gugccagucuaaagaugaa

SEQ ID NO: 2647387 - RNA, 19 nt, Homo sapiens
  misc_RNA (1)...(19): siRNA sense strand
caucuauggguuugagaca

SEQ ID NO: 2647388 - RNA, 19 nt, Homo sapiens
  misc_RNA (1)...(19): siRNA sense strand
aagaagaauacaugaagga

SEQ ID NO: 2647389 - RNA, 19 nt, Homo sapiens
  misc_RNA (1)...(19): siRNA sense strand
augaagagcagaucaauau

SEQ ID NO: 2647390 - RNA, 19 nt, Homo sapiens
  misc_RNA (1)...(19): siRNA sense strand
cuguggugcuccagaaaca

SEQ ID NO: 2647391 - RNA, 19 nt, Homo sapiens
  misc_RNA (1)...(19): siRNA sense strand
aaagcaaacuccaggucau

SEQ ID NO: 2647392 - RNA, 19 nt, Homo sapiens
  misc_RNA (1)...(19): siRNA sense strand
cauuugagguaaacagcuu

SEQ ID NO: 2647393 - RNA, 19 nt, Homo sapiens
  misc_RNA (1)...(19): siRNA sense strand
gguaucgggugcuggucaa

SEQ ID NO: 2647394 - RNA, 19 nt, Homo sapiens
  misc_RNA (1)...(19): siRNA sense strand
agcuggagcaggagaggaa

SEQ ID NO: 2647395 - RNA, 19 nt, Homo sapiens
  misc_RNA (1)...(19): siRNA sense strand
aaaugaagauggagaacuc

SEQ ID NO: 2647396 - RNA, 19 nt, Homo sapiens
  misc_RNA (1)...(19): siRNA sense strand
agaucauccugcagguauu

SEQ ID NO: 2647397 - RNA, 19 nt, Homo sapiens
  misc_RNA (1)...(19): siRNA sense strand
ugaagaaagaacuggagga

SEQ ID NO: 2647398 - RNA, 19 nt, Homo sapiens
  misc_RNA (1)...(19): siRNA sense strand
gcauuaagaaaguccugaa

SEQ ID NO: 2647399 - RNA, 19 nt, Homo sapiens
  misc_RNA (1)...(19): siRNA sense strand
gcuuggacccugagaucau

SEQ ID NO: 2647400 - RNA, 19 nt, Homo sapiens
  misc_RNA (1)...(19): siRNA sense strand
gaucggagacacugaggau

SEQ ID NO: 2647401 - RNA, 19 nt, Homo sapiens
  misc_RNA (1)...(19): siRNA sense strand
gcaugaaggccaagaggga

SEQ ID NO: 2647402 - RNA, 19 nt, Homo sapiens
  misc_RNA (1)...(19): siRNA sense strand
ccagauggcucaaggacca

SEQ ID NO: 2647403 - RNA, 19 nt, Homo sapiens
  misc_RNA (1)...(19): siRNA sense strand
gggcuaagcugaugcgucu

SEQ ID NO: 2647404 - RNA, 19 nt, Homo sapiens
  misc_RNA (1)...(19): siRNA sense strand
gcaagagccucauccgcaa

SEQ ID NO: 2647405 - RNA, 19 nt, Homo sapiens
  misc_RNA (1)...(19): siRNA sense strand
augaaggccaagagggaca

SEQ ID NO: 2647406 - RNA, 19 nt, Homo sapiens
  misc_RNA (1)...(19): siRNA sense strand
aggguggguuugaggaaca

SEQ ID NO: 2647407 - RNA, 19 nt, Homo sapiens
  misc_RNA (1)...(19): siRNA sense strand
cgucuaagccagagagagc

SEQ ID NO: 2647408 - RNA, 19 nt, Homo sapiens
  misc_RNA (1)...(19): siRNA sense strand
cacaagagcuucugcagca

SEQ ID NO: 2647409 - RNA, 19 nt, Homo sapiens
  misc_RNA (1)...(19): siRNA sense strand
ggugcaugguguaggguug

SEQ ID NO: 2647410 - RNA, 19 nt, Homo sapiens
  misc_RNA (1)...(19): siRNA sense strand
ggacaggaccucuggacuc

SEQ ID NO: 2647411 - RNA, 19 nt, Homo sapiens
  misc_RNA (1)...(19): siRNA sense strand
acacguggcuccagaucaa

SEQ ID NO: 2647412 - RNA, 19 nt, Homo sapiens
  misc_RNA (1)...(19): siRNA sense strand
ccgugguggaggagcauuu

SEQ ID NO: 2647413 - RNA, 19 nt, Homo sapiens
  misc_RNA (1)...(19): siRNA sense strand
ggagccugggcaagaauua

SEQ ID NO: 2647414 - RNA, 19 nt, Homo sapiens
  misc_RNA (1)...(19): siRNA sense strand
uugccaaagcucuggguga

SEQ ID NO: 2647415 - RNA, 19 nt, Homo sapiens
  misc_RNA (1)...(19): siRNA sense strand
acacguggcuccagaucaa

SEQ ID NO: 2647416 - RNA, 19 nt, Homo sapiens
  misc_RNA (1)...(19): siRNA sense strand
ccgugguggaggagcauuu

SEQ ID NO: 2647417 - RNA, 19 nt, Homo sapiens
  misc_RNA (1)...(19): siRNA sense strand
ggagccugggcaagaauua

SEQ ID NO: 2647418 - RNA, 19 nt, Homo sapiens
  misc_RNA (1)...(19): siRNA sense strand
uugccaaagcucuggguga

SEQ ID NO: 2647419 - RNA, 19 nt, Homo sapiens
  misc_RNA (1)...(19): siRNA sense strand
cggaagaaccagcgggcuu

SEQ ID NO: 2647420 - RNA, 19 nt, Homo sapiens
  misc_RNA (1)...(19): siRNA sense strand
cuuaaagaucggagcguca

SEQ ID NO: 2647421 - RNA, 19 nt, Homo sapiens
  misc_RNA (1)...(19): siRNA sense strand
aggagaacgucaaggcuga

SEQ ID NO: 2647422 - RNA, 19 nt, Homo sapiens
  misc_RNA (1)...(19): siRNA sense strand
gugaugaggaugaggagca

SEQ ID NO: 2647423 - RNA, 19 nt, Homo sapiens
  misc_RNA (1)...(19): siRNA sense strand
gagacagaggauagugaau

SEQ ID NO: 2647424 - RNA, 19 nt, Homo sapiens
  misc_RNA (1)...(19): siRNA sense strand
uagugaauucagugagcaa

SEQ ID NO: 2647425 - RNA, 19 nt, Homo sapiens
  misc_RNA (1)...(19): siRNA sense strand
aggaagugccccaaggaaa

SEQ ID NO: 2647426 - RNA, 19 nt, Homo sapiens
  misc_RNA (1)...(19): siRNA sense strand
gaugaggagcagauggaga

SEQ ID NO: 2647427 - RNA, 19 nt, Homo sapiens
  misc_RNA (1)...(19): siRNA sense strand
aagaugacguccagcgaca

SEQ ID NO: 2647428 - RNA, 19 nt, Homo sapiens
  misc_RNA (1)...(19): siRNA sense strand
ggacaagaacggugaggug

SEQ ID NO: 2647429 - RNA, 19 nt, Homo sapiens
  misc_RNA (1)...(19): siRNA sense strand
gugaauucagugagcaaga

SEQ ID NO: 2647430 - RNA, 19 nt, Homo sapiens
  misc_RNA (1)...(19): siRNA sense strand
gugaagacgaguacagcga

SEQ ID NO: 2647431 - RNA, 19 nt, Homo sapiens
  misc_RNA (1)...(19): siRNA sense strand
cugugaagcaggaguuuga

SEQ ID NO: 2647432 - RNA, 19 nt, Homo sapiens
  misc_RNA (1)...(19): siRNA sense strand
uggagcagaucgaggcuga

SEQ ID NO: 2647433 - RNA, 19 nt, Homo sapiens
  misc_RNA (1)...(19): siRNA sense strand
acgaggacagcgagcgcaa

SEQ ID NO: 2647434 - RNA, 19 nt, Homo sapiens
  misc_RNA (1)...(19): siRNA sense strand
acgacagugaugaggauga

SEQ ID NO: 2647435 - RNA, 19 nt, Homo sapiens
  misc_RNA (1)...(19): siRNA sense strand
guguguggacuaugccaaa

SEQ ID NO: 2647436 - RNA, 19 nt, Homo sapiens
  misc_RNA (1)...(19): siRNA sense strand
aggacgggcugaaggacca

SEQ ID NO: 2647437 - RNA, 19 nt, Homo sapiens
  misc_RNA (1)...(19): siRNA sense strand
agcgcaagguggugaagau

SEQ ID NO: 2647438 - RNA, 19 nt, Homo sapiens
  misc_RNA (1)...(19): siRNA sense strand
acauaaaacacgaccccaa

SEQ ID NO: 2647439 - RNA, 19 nt, Homo sapiens
  misc_RNA (1)...(19): siRNA sense strand
agauggagacagaggauag

SEQ ID NO: 2647440 - RNA, 19 nt, Homo sapiens
  misc_RNA (1)...(19): siRNA sense strand
gagaguucauggagagccu

SEQ ID NO: 2647441 - RNA, 19 nt, Homo sapiens
  misc_RNA (1)...(19): siRNA sense strand
gcacagacucaauggagcu

SEQ ID NO: 2647442 - RNA, 19 nt, Homo sapiens
  misc_RNA (1)...(19): siRNA sense strand
cugacagccugaagcccua

SEQ ID NO: 2647443 - RNA, 19 nt, Homo sapiens
  misc_RNA (1)...(19): siRNA sense strand
acuacaacuacgacaguga

SEQ ID NO: 2647444 - RNA, 19 nt, Homo sapiens
  misc_RNA (1)...(19): siRNA sense strand
ggucaaagcugguucugug

SEQ ID NO: 2647445 - RNA, 19 nt, Homo sapiens
  misc_RNA (1)...(19): siRNA sense strand
caguggagcugaagcgcua

SEQ ID NO: 2647446 - RNA, 19 nt, Homo sapiens
  misc_RNA (1)...(19): siRNA sense strand
cggaggaggcagcgaagaa

SEQ ID NO: 2647447 - RNA, 19 nt, Homo sapiens
  misc_RNA (1)...(19): siRNA sense strand
aggaggaggaggaggauga

SEQ ID NO: 2647448 - RNA, 19 nt, Homo sapiens
  misc_RNA (1)...(19): siRNA sense strand
gcgacaagcuacuggccau

SEQ ID NO: 2647449 - RNA, 19 nt, Homo sapiens
  misc_RNA (1)...(19): siRNA sense strand
ggacuauggaggaagccaa

SEQ ID NO: 2647450 - RNA, 19 nt, Homo sapiens
  misc_RNA (1)...(19): siRNA sense strand
cugcagaaauggaggagcu

SEQ ID NO: 2647451 - RNA, 19 nt, Homo sapiens
  misc_RNA (1)...(19): siRNA sense strand
cagaggaggaggaggagga

SEQ ID NO: 2647452 - RNA, 19 nt, Homo sapiens
  misc_RNA (1)...(19): siRNA sense strand
gcuguggagucuugggaca

SEQ ID NO: 2647453 - RNA, 19 nt, Homo sapiens
  misc_RNA (1)...(19): siRNA sense strand
cagaaauggaggagcuguu

SEQ ID NO: 2647454 - RNA, 19 nt, Homo sapiens
  misc_RNA (1)...(19): siRNA sense strand
ccgucacacugaagaucaa

SEQ ID NO: 2647455 - RNA, 19 nt, Homo sapiens
  misc_RNA (1)...(19): siRNA sense strand
uggaggacgccgugcaaau

SEQ ID NO: 2647456 - RNA, 19 nt, Homo sapiens
  misc_RNA (1)...(19): siRNA sense strand
caagaaaggcagcguggca

SEQ ID NO: 2647457 - RNA, 19 nt, Homo sapiens
  misc_RNA (1)...(19): siRNA sense strand
guuacacaguggagcugaa

SEQ ID NO: 2647458 - RNA, 19 nt, Homo sapiens
  misc_RNA (1)...(19): siRNA sense strand
uccggaaggacgaggacaa

SEQ ID NO: 2647459 - RNA, 19 nt, Homo sapiens
  misc_RNA (1)...(19): siRNA sense strand
acaauauccgccuggacaa

SEQ ID NO: 2647460 - RNA, 19 nt, Homo sapiens
  misc_RNA (1)...(19): siRNA sense strand
cccaugaguccucgaacua

SEQ ID NO: 2647461 - RNA, 19 nt, Homo sapiens
  misc_RNA (1)...(19): siRNA sense strand
agaaaggcagcguggcaca

SEQ ID NO: 2647462 - RNA, 19 nt, Homo sapiens
  misc_RNA (1)...(19): siRNA sense strand
cugaugagcuggagaccac

SEQ ID NO: 2647463 - RNA, 19 nt, Homo sapiens
  misc_RNA (1)...(19): siRNA sense strand
ugagggaacuggaggcauc

SEQ ID NO: 2647464 - RNA, 19 nt, Homo sapiens
  misc_RNA (1)...(19): siRNA sense strand
ggacaacucugaugagcug

SEQ ID NO: 2647465 - RNA, 19 nt, Homo sapiens
  misc_RNA (1)...(19): siRNA sense strand
uguuaaugcucgagacaaa

SEQ ID NO: 2647466 - RNA, 19 nt, Homo sapiens
  misc_RNA (1)...(19): siRNA sense strand
cagaaauaguaguggaaga

SEQ ID NO: 2647467 - RNA, 19 nt, Homo sapiens
  misc_RNA (1)...(19): siRNA sense strand
gaagaguaaagaugggaaa

SEQ ID NO: 2647468 - RNA, 19 nt, Homo sapiens
  misc_RNA (1)...(19): siRNA sense strand
cuaaauugccacaggaaaa

SEQ ID NO: 2647469 - RNA, 19 nt, Homo sapiens
  misc_RNA (1)...(19): siRNA sense strand
ggauauucaagauggaaau

SEQ ID NO: 2647470 - RNA, 19 nt, Homo sapiens
  misc_RNA (1)...(19): siRNA sense strand
aaauaguaguggaagaaca

SEQ ID NO: 2647471 - RNA, 19 nt, Homo sapiens
  misc_RNA (1)...(19): siRNA sense strand
gggaauuuggagugccuaa

SEQ ID NO: 2647472 - RNA, 19 nt, Homo sapiens
  misc_RNA (1)...(19): siRNA sense strand
gauucagauaauagagcaa

SEQ ID NO: 2647473 - RNA, 19 nt, Homo sapiens
  misc_RNA (1)...(19): siRNA sense strand
agaaauaguaguggaagaa

SEQ ID NO: 2647474 - RNA, 19 nt, Homo sapiens
  misc_RNA (1)...(19): siRNA sense strand
aaccaaaugccuauggaaa

SEQ ID NO: 2647475 - RNA, 19 nt, Homo sapiens
  misc_RNA (1)...(19): siRNA sense strand
auguuaacuuucaggacaa

SEQ ID NO: 2647476 - RNA, 19 nt, Homo sapiens
  misc_RNA (1)...(19): siRNA sense strand
ggacauggugagaugguca

SEQ ID NO: 2647477 - RNA, 19 nt, Homo sapiens
  misc_RNA (1)...(19): siRNA sense strand
agcuagaguuaaugccaaa

SEQ ID NO: 2647478 - RNA, 19 nt, Homo sapiens
  misc_RNA (1)...(19): siRNA sense strand
gagcuagaguuaaugccaa

SEQ ID NO: 2647479 - RNA, 19 nt, Homo sapiens
  misc_RNA (1)...(19): siRNA sense strand
ccuucuagaucuuggaguu

SEQ ID NO: 2647480 - RNA, 19 nt, Homo sapiens
  misc_RNA (1)...(19): siRNA sense strand
uggauauucaagauggaaa

SEQ ID NO: 2647481 - RNA, 19 nt, Homo sapiens
  misc_RNA (1)...(19): siRNA sense strand
accaaaugccuauggaaau

SEQ ID NO: 2647482 - RNA, 19 nt, Homo sapiens
  misc_RNA (1)...(19): siRNA sense strand
uaaucgacugugaggauaa

SEQ ID NO: 2647483 - RNA, 19 nt, Homo sapiens
  misc_RNA (1)...(19): siRNA sense strand
gugaggauaagaauggaaa

SEQ ID NO: 2647484 - RNA, 19 nt, Homo sapiens
  misc_RNA (1)...(19): siRNA sense strand
cagcugauugcaagugaaa

SEQ ID NO: 2647485 - RNA, 19 nt, Homo sapiens
  misc_RNA (1)...(19): siRNA sense strand
cggagauccugaugaaguu

SEQ ID NO: 2647486 - RNA, 19 nt, Homo sapiens
  misc_RNA (1)...(19): siRNA sense strand
ggaggagguagaagaugaa

SEQ ID NO: 2647487 - RNA, 19 nt, Homo sapiens
  misc_RNA (1)...(19): siRNA sense strand
aagaaagauaggcgugcua

SEQ ID NO: 2647488 - RNA, 19 nt, Homo sapiens
  misc_RNA (1)...(19): siRNA sense strand
cuauaauggacaagauguu

SEQ ID NO: 2647489 - RNA, 19 nt, Homo sapiens
  misc_RNA (1)...(19): siRNA sense strand
cuucaggauuugauauaga

SEQ ID NO: 2647490 - RNA, 19 nt, Homo sapiens
  misc_RNA (1)...(19): siRNA sense strand
cacagaaugcaguggauau

SEQ ID NO: 2647491 - RNA, 19 nt, Homo sapiens
  misc_RNA (1)...(19): siRNA sense strand
gcugauugcaagugaaacu

SEQ ID NO: 2647492 - RNA, 19 nt, Homo sapiens
  misc_RNA (1)...(19): siRNA sense strand
gauguuaacuuucaggaca

SEQ ID NO: 2647493 - RNA, 19 nt, Homo sapiens
  misc_RNA (1)...(19): siRNA sense strand
ucuaaauugccacaggaaa

SEQ ID NO: 2647494 - RNA, 19 nt, Homo sapiens
  misc_RNA (1)...(19): siRNA sense strand
aauggaaaccucaggaaca

SEQ ID NO: 2647495 - RNA, 19 nt, Homo sapiens
  misc_RNA (1)...(19): siRNA sense strand
aauaggaaaugcagaacca

SEQ ID NO: 2647496 - RNA, 19 nt, Homo sapiens
  misc_RNA (1)...(19): siRNA sense strand
ugugaaugaccuugaugaa

SEQ ID NO: 2647497 - RNA, 19 nt, Homo sapiens
  misc_RNA (1)...(19): siRNA sense strand
gggcagcauauauggguca

SEQ ID NO: 2647498 - RNA, 19 nt, Homo sapiens
  misc_RNA (1)...(19): siRNA sense strand
ugaaauugcuugugucgca

SEQ ID NO: 2647499 - RNA, 19 nt, Homo sapiens
  misc_RNA (1)...(19): siRNA sense strand
aagauguuguagugaauga

SEQ ID NO: 2647500 - RNA, 19 nt, Homo sapiens
  misc_RNA (1)...(19): siRNA sense strand
cuguggugcuauugugaau

SEQ ID NO: 2647501 - RNA, 19 nt, Homo sapiens
  misc_RNA (1)...(19): siRNA sense strand
ccuuggagaugcagaaauc

SEQ ID NO: 2647502 - RNA, 19 nt, Homo sapiens
  misc_RNA (1)...(19): siRNA sense strand
acacagagcaguugcaucu

SEQ ID NO: 2647503 - RNA, 19 nt, Homo sapiens
  misc_RNA (1)...(19): siRNA sense strand
gucagaaauaguaguggaa

SEQ ID NO: 2647504 - RNA, 19 nt, Homo sapiens
  misc_RNA (1)...(19): siRNA sense strand
guguggauguacucauuaa

SEQ ID NO: 2647505 - RNA, 19 nt, Homo sapiens
  misc_RNA (1)...(19): siRNA sense strand
acagacaugcugagugauu

SEQ ID NO: 2647506 - RNA, 19 nt, Homo sapiens
  misc_RNA (1)...(19): siRNA sense strand
gugaaugaccuugaugaaa

SEQ ID NO: 2647507 - RNA, 19 nt, Homo sapiens
  misc_RNA (1)...(19): siRNA sense strand
ugucagaaauaguagugga

SEQ ID NO: 2647508 - RNA, 19 nt, Homo sapiens
  misc_RNA (1)...(19): siRNA sense strand
uuaucuggagcuagaguua

SEQ ID NO: 2647509 - RNA, 19 nt, Homo sapiens
  misc_RNA (1)...(19): siRNA sense strand
aagcuauauuuaacggaga

SEQ ID NO: 2647510 - RNA, 19 nt, Homo sapiens
  misc_RNA (1)...(19): siRNA sense strand
uggcaaaccccuuuacaua

SEQ ID NO: 2647511 - RNA, 19 nt, Homo sapiens
  misc_RNA (1)...(19): siRNA sense strand
uguaaucgacugugaggau

SEQ ID NO: 2647512 - RNA, 19 nt, Homo sapiens
  misc_RNA (1)...(19): siRNA sense strand
gaaccaaaugccuauggaa

SEQ ID NO: 2647513 - RNA, 19 nt, Homo sapiens
  misc_RNA (1)...(19): siRNA sense strand
cugcuauaauggacaagau

SEQ ID NO: 2647514 - RNA, 19 nt, Homo sapiens
  misc_RNA (1)...(19): siRNA sense strand
gugaaugaacuuauagacu

SEQ ID NO: 2647515 - RNA, 19 nt, Homo sapiens
  misc_RNA (1)...(19): siRNA sense strand
ggaaauaccccuuugcaca

SEQ ID NO: 2647516 - RNA, 19 nt, Homo sapiens
  misc_RNA (1)...(19): siRNA sense strand
ggaucaggagcaaguguga

SEQ ID NO: 2647517 - RNA, 19 nt, Homo sapiens
  misc_RNA (1)...(19): siRNA sense strand
ugguaccucuucugaguaa

SEQ ID NO: 2647518 - RNA, 19 nt, Homo sapiens
  misc_RNA (1)...(19): siRNA sense strand
ugaucagcguagucaagua

SEQ ID NO: 2647519 - RNA, 19 nt, Homo sapiens
  misc_RNA (1)...(19): siRNA sense strand
ggauaagaauggaaauacc

SEQ ID NO: 2647520 - RNA, 19 nt, Homo sapiens
  misc_RNA (1)...(19): siRNA sense strand
caguggacauggugagaug

SEQ ID NO: 2647521 - RNA, 19 nt, Homo sapiens
  misc_RNA (1)...(19): siRNA sense strand
ucacaaaccauuauccaga

SEQ ID NO: 2647522 - RNA, 19 nt, Homo sapiens
  misc_RNA (1)...(19): siRNA sense strand
agcaaaugguugacaccuu

SEQ ID NO: 2647523 - RNA, 19 nt, Homo sapiens
  misc_RNA (1)...(19): siRNA sense strand
agacaugcugagugauuca

SEQ ID NO: 2647524 - RNA, 19 nt, Homo sapiens
  misc_RNA (1)...(19): siRNA sense strand
cgacugugaggauaagaau

SEQ ID NO: 2647525 - RNA, 19 nt, Homo sapiens
  misc_RNA (1)...(19): siRNA sense strand
uggcaggacuugucuacau

SEQ ID NO: 2647526 - RNA, 19 nt, Homo sapiens
  misc_RNA (1)...(19): siRNA sense strand
gcugaauacuggugcagac

SEQ ID NO: 2647527 - RNA, 19 nt, Homo sapiens
  misc_RNA (1)...(19): siRNA sense strand
aggaagcaguucagguacu

SEQ ID NO: 2647528 - RNA, 19 nt, Homo sapiens
  misc_RNA (1)...(19): siRNA sense strand
gauguuaaugcucgagaca

SEQ ID NO: 2647529 - RNA, 19 nt, Homo sapiens
  misc_RNA (1)...(19): siRNA sense strand
cuagaggugccaauauuaa

SEQ ID NO: 2647530 - RNA, 19 nt, Homo sapiens
  misc_RNA (1)...(19): siRNA sense strand
aagugacaugcaaggauaa

SEQ ID NO: 2647531 - RNA, 19 nt, Homo sapiens
  misc_RNA (1)...(19): siRNA sense strand
ugaagaguaaagaugggaa

SEQ ID NO: 2647532 - RNA, 19 nt, Homo sapiens
  misc_RNA (1)...(19): siRNA sense strand
acuucuuucuucaggauuu

SEQ ID NO: 2647533 - RNA, 19 nt, Homo sapiens
  misc_RNA (1)...(19): siRNA sense strand
caucacuggugcaagcuau

SEQ ID NO: 2647534 - RNA, 19 nt, Homo sapiens
  misc_RNA (1)...(19): siRNA sense strand
cgugauaagcaaggauaca

SEQ ID NO: 2647535 - RNA, 19 nt, Homo sapiens
  misc_RNA (1)...(19): siRNA sense strand
uguuaaugcucgagacaaa

SEQ ID NO: 2647536 - RNA, 19 nt, Homo sapiens
  misc_RNA (1)...(19): siRNA sense strand
cagaaauaguaguggaaga

SEQ ID NO: 2647537 - RNA, 19 nt, Homo sapiens
  misc_RNA (1)...(19): siRNA sense strand
gagcaaauguagaugccaa

SEQ ID NO: 2647538 - RNA, 19 nt, Homo sapiens
  misc_RNA (1)...(19): siRNA sense strand
gaagaguaaagaugggaaa

SEQ ID NO: 2647539 - RNA, 19 nt, Homo sapiens
  misc_RNA (1)...(19): siRNA sense strand
cuaaauugccacaggaaaa

SEQ ID NO: 2647540 - RNA, 19 nt, Homo sapiens
  misc_RNA (1)...(19): siRNA sense strand
ggauauucaagauggaaau

SEQ ID NO: 2647541 - RNA, 19 nt, Homo sapiens
  misc_RNA (1)...(19): siRNA sense strand
aaauaguaguggaagaaca

SEQ ID NO: 2647542 - RNA, 19 nt, Homo sapiens
  misc_RNA (1)...(19): siRNA sense strand
gggaauuuggagugccuaa

SEQ ID NO: 2647543 - RNA, 19 nt, Homo sapiens
  misc_RNA (1)...(19): siRNA sense strand
gauucagauaauagagcaa

SEQ ID NO: 2647544 - RNA, 19 nt, Homo sapiens
  misc_RNA (1)...(19): siRNA sense strand
agaaauaguaguggaagaa

SEQ ID NO: 2647545 - RNA, 19 nt, Homo sapiens
  misc_RNA (1)...(19): siRNA sense strand
aaccaaaugccuauggaaa

SEQ ID NO: 2647546 - RNA, 19 nt, Homo sapiens
  misc_RNA (1)...(19): siRNA sense strand
auguuaacuuucaggacaa

SEQ ID NO: 2647547 - RNA, 19 nt, Homo sapiens
  misc_RNA (1)...(19): siRNA sense strand
ggacauggugagaugguca

SEQ ID NO: 2647548 - RNA, 19 nt, Homo sapiens
  misc_RNA (1)...(19): siRNA sense strand
aguuacaggccaugaagaa

SEQ ID NO: 2647549 - RNA, 19 nt, Homo sapiens
  misc_RNA (1)...(19): siRNA sense strand
auguagaugccaaagauaa

SEQ ID NO: 2647550 - RNA, 19 nt, Homo sapiens
  misc_RNA (1)...(19): siRNA sense strand
agcuagaguuaaugccaaa

SEQ ID NO: 2647551 - RNA, 19 nt, Homo sapiens
  misc_RNA (1)...(19): siRNA sense strand
gagcuagaguuaaugccaa

SEQ ID NO: 2647552 - RNA, 19 nt, Homo sapiens
  misc_RNA (1)...(19): siRNA sense strand
ccuucuagaucuuggaguu

SEQ ID NO: 2647553 - RNA, 19 nt, Homo sapiens
  misc_RNA (1)...(19): siRNA sense strand
uggauauucaagauggaaa

SEQ ID NO: 2647554 - RNA, 19 nt, Homo sapiens
  misc_RNA (1)...(19): siRNA sense strand
gcugaacaaaggagcaaau

SEQ ID NO: 2647555 - RNA, 19 nt, Homo sapiens
  misc_RNA (1)...(19): siRNA sense strand
accaaaugccuauggaaau

SEQ ID NO: 2647556 - RNA, 19 nt, Homo sapiens
  misc_RNA (1)...(19): siRNA sense strand
uaaucgacugugaggauaa

SEQ ID NO: 2647557 - RNA, 19 nt, Homo sapiens
  misc_RNA (1)...(19): siRNA sense strand
gugaggauaagaauggaaa

SEQ ID NO: 2647558 - RNA, 19 nt, Homo sapiens
  misc_RNA (1)...(19): siRNA sense strand
cagcugauugcaagugaaa

SEQ ID NO: 2647559 - RNA, 19 nt, Homo sapiens
  misc_RNA (1)...(19): siRNA sense strand
cggagauccugaugaaguu

SEQ ID NO: 2647560 - RNA, 19 nt, Homo sapiens
  misc_RNA (1)...(19): siRNA sense strand
ggaggagguagaagaugaa

SEQ ID NO: 2647561 - RNA, 19 nt, Homo sapiens
  misc_RNA (1)...(19): siRNA sense strand
ccaugaagaauguguagau

SEQ ID NO: 2647562 - RNA, 19 nt, Homo sapiens
  misc_RNA (1)...(19): siRNA sense strand
aagaaagauaggcgugcua

SEQ ID NO: 2647563 - RNA, 19 nt, Homo sapiens
  misc_RNA (1)...(19): siRNA sense strand
cuauaauggacaagauguu

SEQ ID NO: 2647564 - RNA, 19 nt, Homo sapiens
  misc_RNA (1)...(19): siRNA sense strand
cuucaggauuugauauaga

SEQ ID NO: 2647565 - RNA, 19 nt, Homo sapiens
  misc_RNA (1)...(19): siRNA sense strand
cacagaaugcaguggauau

SEQ ID NO: 2647566 - RNA, 19 nt, Homo sapiens
  misc_RNA (1)...(19): siRNA sense strand
gcugauugcaagugaaacu

SEQ ID NO: 2647567 - RNA, 19 nt, Homo sapiens
  misc_RNA (1)...(19): siRNA sense strand
gauguuaacuuucaggaca

SEQ ID NO: 2647568 - RNA, 19 nt, Homo sapiens
  misc_RNA (1)...(19): siRNA sense strand
ucuaaauugccacaggaaa

SEQ ID NO: 2647569 - RNA, 19 nt, Homo sapiens
  misc_RNA (1)...(19): siRNA sense strand
aauggaaaccucaggaaca

SEQ ID NO: 2647570 - RNA, 19 nt, Homo sapiens
  misc_RNA (1)...(19): siRNA sense strand
aauaggaaaugcagaacca

SEQ ID NO: 2647571 - RNA, 19 nt, Homo sapiens
  misc_RNA (1)...(19): siRNA sense strand
ugugaaugaccuugaugaa

SEQ ID NO: 2647572 - RNA, 19 nt, Homo sapiens
  misc_RNA (1)...(19): siRNA sense strand
gggcagcauauauggguca

SEQ ID NO: 2647573 - RNA, 19 nt, Homo sapiens
  misc_RNA (1)...(19): siRNA sense strand
ugaaauugcuugugucgca

SEQ ID NO: 2647574 - RNA, 19 nt, Homo sapiens
  misc_RNA (1)...(19): siRNA sense strand
aagauguuguagugaauga

SEQ ID NO: 2647575 - RNA, 19 nt, Homo sapiens
  misc_RNA (1)...(19): siRNA sense strand
cuguggugcuauugugaau

SEQ ID NO: 2647576 - RNA, 19 nt, Homo sapiens
  misc_RNA (1)...(19): siRNA sense strand
ccuuggagaugcagaaauc

SEQ ID NO: 2647577 - RNA, 19 nt, Homo sapiens
  misc_RNA (1)...(19): siRNA sense strand
acacagagcaguugcaucu

SEQ ID NO: 2647578 - RNA, 19 nt, Homo sapiens
  misc_RNA (1)...(19): siRNA sense strand
gucagaaauaguaguggaa

SEQ ID NO: 2647579 - RNA, 19 nt, Homo sapiens
  misc_RNA (1)...(19): siRNA sense strand
guguggauguacucauuaa

SEQ ID NO: 2647580 - RNA, 19 nt, Homo sapiens
  misc_RNA (1)...(19): siRNA sense strand
gcagacaaucauggauaua

SEQ ID NO: 2647581 - RNA, 19 nt, Homo sapiens
  misc_RNA (1)...(19): siRNA sense strand
acagacaugcugagugauu

SEQ ID NO: 2647582 - RNA, 19 nt, Homo sapiens
  misc_RNA (1)...(19): siRNA sense strand
gugaaugaccuugaugaaa

SEQ ID NO: 2647583 - RNA, 19 nt, Homo sapiens
  misc_RNA (1)...(19): siRNA sense strand
ugucagaaauaguagugga

SEQ ID NO: 2647584 - RNA, 19 nt, Homo sapiens
  misc_RNA (1)...(19): siRNA sense strand
gccaaagauaaguggggaa

SEQ ID NO: 2647585 - RNA, 19 nt, Homo sapiens
  misc_RNA (1)...(19): siRNA sense strand
uuaucuggagcuagaguua

SEQ ID NO: 2647586 - RNA, 19 nt, Homo sapiens
  misc_RNA (1)...(19): siRNA sense strand
uggcaaaccccuuuacaua

SEQ ID NO: 2647587 - RNA, 19 nt, Homo sapiens
  misc_RNA (1)...(19): siRNA sense strand
aagcuauauuuaacggaga

SEQ ID NO: 2647588 - RNA, 19 nt, Homo sapiens
  misc_RNA (1)...(19): siRNA sense strand
agcaaauguagaugccaaa

SEQ ID NO: 2647589 - RNA, 19 nt, Homo sapiens
  misc_RNA (1)...(19): siRNA sense strand
uguaaucgacugugaggau

SEQ ID NO: 2647590 - RNA, 19 nt, Homo sapiens
  misc_RNA (1)...(19): siRNA sense strand
acaaaggagcaaauguaga

SEQ ID NO: 2647591 - RNA, 19 nt, Homo sapiens
  misc_RNA (1)...(19): siRNA sense strand
gaaccaaaugccuauggaa

SEQ ID NO: 2647592 - RNA, 19 nt, Homo sapiens
  misc_RNA (1)...(19): siRNA sense strand
cugcuauaauggacaagau

SEQ ID NO: 2647593 - RNA, 19 nt, Homo sapiens
  misc_RNA (1)...(19): siRNA sense strand
gugaaugaacuuauagacu

SEQ ID NO: 2647594 - RNA, 19 nt, Homo sapiens
  misc_RNA (1)...(19): siRNA sense strand
ggaaauaccccuuugcaca

SEQ ID NO: 2647595 - RNA, 19 nt, Homo sapiens
  misc_RNA (1)...(19): siRNA sense strand
ggaucaggagcaaguguga

SEQ ID NO: 2647596 - RNA, 19 nt, Homo sapiens
  misc_RNA (1)...(19): siRNA sense strand
ugguaccucuucugaguaa

SEQ ID NO: 2647597 - RNA, 19 nt, Homo sapiens
  misc_RNA (1)...(19): siRNA sense strand
ugaucagcguagucaagua

SEQ ID NO: 2647598 - RNA, 19 nt, Homo sapiens
  misc_RNA (1)...(19): siRNA sense strand
ggauaagaauggaaauacc

SEQ ID NO: 2647599 - RNA, 19 nt, Homo sapiens
  misc_RNA (1)...(19): siRNA sense strand
caguggacauggugagaug

SEQ ID NO: 2647600 - RNA, 19 nt, Homo sapiens
  misc_RNA (1)...(19): siRNA sense strand
ucacaaaccauuauccaga

SEQ ID NO: 2647601 - RNA, 19 nt, Homo sapiens
  misc_RNA (1)...(19): siRNA sense strand
agcaaaugguugacaccuu

SEQ ID NO: 2647602 - RNA, 19 nt, Homo sapiens
  misc_RNA (1)...(19): siRNA sense strand
acucagugccagagacaaa

SEQ ID NO: 2647603 - RNA, 19 nt, Homo sapiens
  misc_RNA (1)...(19): siRNA sense strand
cagaagaaaaugagaagaa

SEQ ID NO: 2647604 - RNA, 19 nt, Homo sapiens
  misc_RNA (1)...(19): siRNA sense strand
gguuagagcacaugagcga

SEQ ID NO: 2647605 - RNA, 19 nt, Homo sapiens
  misc_RNA (1)...(19): siRNA sense strand
uggauggaccggagagcaa

SEQ ID NO: 2647606 - RNA, 19 nt, Homo sapiens
  misc_RNA (1)...(19): siRNA sense strand
gagcacaucuuuagagcca

SEQ ID NO: 2647607 - RNA, 19 nt, Homo sapiens
  misc_RNA (1)...(19): siRNA sense strand
gaggaaaucaaaagguaaa

SEQ ID NO: 2647608 - RNA, 19 nt, Homo sapiens
  misc_RNA (1)...(19): siRNA sense strand
gcaaaaccauacagggcua

SEQ ID NO: 2647609 - RNA, 19 nt, Homo sapiens
  misc_RNA (1)...(19): siRNA sense strand
aggcagaugaggaaaucaa

SEQ ID NO: 2647610 - RNA, 19 nt, Homo sapiens
  misc_RNA (1)...(19): siRNA sense strand
aagcuggagacaugggaaa

SEQ ID NO: 2647611 - RNA, 19 nt, Homo sapiens
  misc_RNA (1)...(19): siRNA sense strand
ccaacugguuagagcacau

SEQ ID NO: 2647612 - RNA, 19 nt, Homo sapiens
  misc_RNA (1)...(19): siRNA sense strand
ugaggaagucagagagcuu

SEQ ID NO: 2647613 - RNA, 19 nt, Homo sapiens
  misc_RNA (1)...(19): siRNA sense strand
acaacaagcagaagaaaau

SEQ ID NO: 2647614 - RNA, 19 nt, Homo sapiens
  misc_RNA (1)...(19): siRNA sense strand
ucaacaaaccgaagagcca

SEQ ID NO: 2647615 - RNA, 19 nt, Homo sapiens
  misc_RNA (1)...(19): siRNA sense strand
agaagaacuuagaagacca

SEQ ID NO: 2647616 - RNA, 19 nt, Homo sapiens
  misc_RNA (1)...(19): siRNA sense strand
uccaagaggacaagggaga

SEQ ID NO: 2647617 - RNA, 19 nt, Homo sapiens
  misc_RNA (1)...(19): siRNA sense strand
ccaagauagauguguccua

SEQ ID NO: 2647618 - RNA, 19 nt, Homo sapiens
  misc_RNA (1)...(19): siRNA sense strand
guuagagaaacgugaugaa

SEQ ID NO: 2647619 - RNA, 19 nt, Homo sapiens
  misc_RNA (1)...(19): siRNA sense strand
agguaaacucagugccaga

SEQ ID NO: 2647620 - RNA, 19 nt, Homo sapiens
  misc_RNA (1)...(19): siRNA sense strand
gagacaaacaacaagcaga

SEQ ID NO: 2647621 - RNA, 19 nt, Homo sapiens
  misc_RNA (1)...(19): siRNA sense strand
agggugaggcugugcagaa

SEQ ID NO: 2647622 - RNA, 19 nt, Homo sapiens
  misc_RNA (1)...(19): siRNA sense strand
cuaccuuggaauagugaau

SEQ ID NO: 2647623 - RNA, 19 nt, Homo sapiens
  misc_RNA (1)...(19): siRNA sense strand
uagagaaacgugaugaaaa

SEQ ID NO: 2647624 - RNA, 19 nt, Homo sapiens
  misc_RNA (1)...(19): siRNA sense strand
agguggaaaccaagauaga

SEQ ID NO: 2647625 - RNA, 19 nt, Homo sapiens
  misc_RNA (1)...(19): siRNA sense strand
gcuugguacgguugaagaa

SEQ ID NO: 2647626 - RNA, 19 nt, Homo sapiens
  misc_RNA (1)...(19): siRNA sense strand
cucagaaaaucaagaagaa

SEQ ID NO: 2647627 - RNA, 19 nt, Homo sapiens
  misc_RNA (1)...(19): siRNA sense strand
ggaggugcaugaagagcca

SEQ ID NO: 2647628 - RNA, 19 nt, Homo sapiens
  misc_RNA (1)...(19): siRNA sense strand
augagaagaacuuagaaga

SEQ ID NO: 2647629 - RNA, 19 nt, Homo sapiens
  misc_RNA (1)...(19): siRNA sense strand
ccugaaauucguugguguu

SEQ ID NO: 2647630 - RNA, 19 nt, Homo sapiens
  misc_RNA (1)...(19): siRNA sense strand
ugccagagacaaacaacaa

SEQ ID NO: 2647631 - RNA, 19 nt, Homo sapiens
  misc_RNA (1)...(19): siRNA sense strand
cagggaaaauggagaucuu

SEQ ID NO: 2647632 - RNA, 19 nt, Homo sapiens
  misc_RNA (1)...(19): siRNA sense strand
ugaggaaaucaaaagguaa

SEQ ID NO: 2647633 - RNA, 19 nt, Homo sapiens
  misc_RNA (1)...(19): siRNA sense strand
cgaggaugccagagaugca

SEQ ID NO: 2647634 - RNA, 19 nt, Homo sapiens
  misc_RNA (1)...(19): siRNA sense strand
ccucagaaaaucaagaaga

SEQ ID NO: 2647635 - RNA, 19 nt, Homo sapiens
  misc_RNA (1)...(19): siRNA sense strand
ccuuagaccacccgacaga

SEQ ID NO: 2647636 - RNA, 19 nt, Homo sapiens
  misc_RNA (1)...(19): siRNA sense strand
ccgacagaccagaaacuca

SEQ ID NO: 2647637 - RNA, 19 nt, Homo sapiens
  misc_RNA (1)...(19): siRNA sense strand
cgucacuggagaaugagaa

SEQ ID NO: 2647638 - RNA, 19 nt, Homo sapiens
  misc_RNA (1)...(19): siRNA sense strand
gucacuggagaaugagaaa

SEQ ID NO: 2647639 - RNA, 19 nt, Homo sapiens
  misc_RNA (1)...(19): siRNA sense strand
uggcaaaaggagaggcaua

SEQ ID NO: 2647640 - RNA, 19 nt, Homo sapiens
  misc_RNA (1)...(19): siRNA sense strand
cuacauaugauacaggcaa

SEQ ID NO: 2647641 - RNA, 19 nt, Homo sapiens
  misc_RNA (1)...(19): siRNA sense strand
aaggaaacuagaugggaga

SEQ ID NO: 2647642 - RNA, 19 nt, Homo sapiens
  misc_RNA (1)...(19): siRNA sense strand
cugaauaaccaucucaaaa

SEQ ID NO: 2647643 - RNA, 19 nt, Homo sapiens
  misc_RNA (1)...(19): siRNA sense strand
gaugggaucucaaagccaa

SEQ ID NO: 2647644 - RNA, 19 nt, Homo sapiens
  misc_RNA (1)...(19): siRNA sense strand
ggacagaggcagaugagga

SEQ ID NO: 2647645 - RNA, 19 nt, Homo sapiens
  misc_RNA (1)...(19): siRNA sense strand
aggcagaagaggaagaaga

SEQ ID NO: 2647646 - RNA, 19 nt, Homo sapiens
  misc_RNA (1)...(19): siRNA sense strand
ggaggaagacagaggcaga

SEQ ID NO: 2647647 - RNA, 19 nt, Homo sapiens
  misc_RNA (1)...(19): siRNA sense strand
augugagaauugagagcaa

SEQ ID NO: 2647648 - RNA, 19 nt, Homo sapiens
  misc_RNA (1)...(19): siRNA sense strand
uggaaaaggagguggauga

SEQ ID NO: 2647649 - RNA, 19 nt, Homo sapiens
  misc_RNA (1)...(19): siRNA sense strand
ccaaggugaucuacggcaa

SEQ ID NO: 2647650 - RNA, 19 nt, Homo sapiens
  misc_RNA (1)...(19): siRNA sense strand
agacagaggcagaagagga

SEQ ID NO: 2647651 - RNA, 19 nt, Homo sapiens
  misc_RNA (1)...(19): siRNA sense strand
cagcaaggcaggagaucca

SEQ ID NO: 2647652 - RNA, 19 nt, Homo sapiens
  misc_RNA (1)...(19): siRNA sense strand
ggacagaggggauggguca

SEQ ID NO: 2647653 - RNA, 19 nt, Homo sapiens
  misc_RNA (1)...(19): siRNA sense strand
agaugguacucuuggaaca

SEQ ID NO: 2647654 - RNA, 19 nt, Homo sapiens
  misc_RNA (1)...(19): siRNA sense strand
aggaaguggagaacagcaa

SEQ ID NO: 2647655 - RNA, 19 nt, Homo sapiens
  misc_RNA (1)...(19): siRNA sense strand
ucagagagcucauggagga

SEQ ID NO: 2647656 - RNA, 19 nt, Homo sapiens
  misc_RNA (1)...(19): siRNA sense strand
gagcugucgaugugagaau

SEQ ID NO: 2647657 - RNA, 19 nt, Homo sapiens
  misc_RNA (1)...(19): siRNA sense strand
aagaugaggcugaggcaca

SEQ ID NO: 2647658 - RNA, 19 nt, Homo sapiens
  misc_RNA (1)...(19): siRNA sense strand
cagcagaucgagauggaga

SEQ ID NO: 2647659 - RNA, 19 nt, Homo sapiens
  misc_RNA (1)...(19): siRNA sense strand
gugggaaagaugaggcuga

SEQ ID NO: 2647660 - RNA, 19 nt, Homo sapiens
  misc_RNA (1)...(19): siRNA sense strand
cuuccgagacugagggcau

SEQ ID NO: 2647661 - RNA, 19 nt, Homo sapiens
  misc_RNA (1)...(19): siRNA sense strand
aguccugguuagauggcua

SEQ ID NO: 2647662 - RNA, 19 nt, Homo sapiens
  misc_RNA (1)...(19): siRNA sense strand
ugggcaagaaugacagcaa

SEQ ID NO: 2647663 - RNA, 19 nt, Homo sapiens
  misc_RNA (1)...(19): siRNA sense strand
gugcaagugaggagcuuca

SEQ ID NO: 2647664 - RNA, 19 nt, Homo sapiens
  misc_RNA (1)...(19): siRNA sense strand
cagaggcagaagaggaaga

SEQ ID NO: 2647665 - RNA, 19 nt, Homo sapiens
  misc_RNA (1)...(19): siRNA sense strand
ucgagauggagaaggucua

SEQ ID NO: 2647666 - RNA, 19 nt, Homo sapiens
  misc_RNA (1)...(19): siRNA sense strand
cugaaaccaaggugaucua

SEQ ID NO: 2647667 - RNA, 19 nt, Homo sapiens
  misc_RNA (1)...(19): siRNA sense strand
acaagagcucuguguacaa

SEQ ID NO: 2647668 - RNA, 19 nt, Homo sapiens
  misc_RNA (1)...(19): siRNA sense strand
gggauggugacuugacgaa

SEQ ID NO: 2647669 - RNA, 19 nt, Homo sapiens
  misc_RNA (1)...(19): siRNA sense strand
gcggagagugguacaggau

SEQ ID NO: 2647670 - RNA, 19 nt, Homo sapiens
  misc_RNA (1)...(19): siRNA sense strand
ggagauauuaacagugaac

SEQ ID NO: 2647671 - RNA, 19 nt, Homo sapiens
  misc_RNA (1)...(19): siRNA sense strand
cugcugaggcuuuccacaa

SEQ ID NO: 2647672 - RNA, 19 nt, Homo sapiens
  misc_RNA (1)...(19): siRNA sense strand
agacaagguucgagaugaa

SEQ ID NO: 2647673 - RNA, 19 nt, Homo sapiens
  misc_RNA (1)...(19): siRNA sense strand
ggugagagaugcugcaaua

SEQ ID NO: 2647674 - RNA, 19 nt, Homo sapiens
  misc_RNA (1)...(19): siRNA sense strand
ccucauggcaagagaguau

SEQ ID NO: 2647675 - RNA, 19 nt, Homo sapiens
  misc_RNA (1)...(19): siRNA sense strand
uggcuauaguggagauuua

SEQ ID NO: 2647676 - RNA, 19 nt, Homo sapiens
  misc_RNA (1)...(19): siRNA sense strand
aggaagaagucgaacaaaa

SEQ ID NO: 2647677 - RNA, 19 nt, Homo sapiens
  misc_RNA (1)...(19): siRNA sense strand
ggguaucauuaaugggauu

SEQ ID NO: 2647678 - RNA, 19 nt, Homo sapiens
  misc_RNA (1)...(19): siRNA sense strand
cgggagagcagcagagaca

SEQ ID NO: 2647679 - RNA, 19 nt, Homo sapiens
  misc_RNA (1)...(19): siRNA sense strand
cauuaaugggauuggaaau

SEQ ID NO: 2647680 - RNA, 19 nt, Homo sapiens
  misc_RNA (1)...(19): siRNA sense strand
cagaaugggagaugccaaa

SEQ ID NO: 2647681 - RNA, 19 nt, Homo sapiens
  misc_RNA (1)...(19): siRNA sense strand
ggcuaugggagaugauaaa

SEQ ID NO: 2647682 - RNA, 19 nt, Homo sapiens
  misc_RNA (1)...(19): siRNA sense strand
ucgaagaagauaugaauca

SEQ ID NO: 2647683 - RNA, 19 nt, Homo sapiens
  misc_RNA (1)...(19): siRNA sense strand
ccauaaugagcguguagaa

SEQ ID NO: 2647684 - RNA, 19 nt, Homo sapiens
  misc_RNA (1)...(19): siRNA sense strand
ccagaguggaggcaagaaa

SEQ ID NO: 2647685 - RNA, 19 nt, Homo sapiens
  misc_RNA (1)...(19): siRNA sense strand
ccaauuggucagaaaggaa

SEQ ID NO: 2647686 - RNA, 19 nt, Homo sapiens
  misc_RNA (1)...(19): siRNA sense strand
gcaagagaguauucagcau

SEQ ID NO: 2647687 - RNA, 19 nt, Homo sapiens
  misc_RNA (1)...(19): siRNA sense strand
acauagaaacucuggccaa

SEQ ID NO: 2647688 - RNA, 19 nt, Homo sapiens
  misc_RNA (1)...(19): siRNA sense strand
ggcagauucuagaggaaga

SEQ ID NO: 2647689 - RNA, 19 nt, Homo sapiens
  misc_RNA (1)...(19): siRNA sense strand
agagagcaguguucggaaa

SEQ ID NO: 2647690 - RNA, 19 nt, Homo sapiens
  misc_RNA (1)...(19): siRNA sense strand
caaaagugauagagagagu

SEQ ID NO: 2647691 - RNA, 19 nt, Homo sapiens
  misc_RNA (1)...(19): siRNA sense strand
gguuaugggaucagccaau

SEQ ID NO: 2647692 - RNA, 19 nt, Homo sapiens
  misc_RNA (1)...(19): siRNA sense strand
cuugaaacgcuuggagaua

SEQ ID NO: 2647693 - RNA, 19 nt, Homo sapiens
  misc_RNA (1)...(19): siRNA sense strand
uccaaauggucuacagcaa

SEQ ID NO: 2647694 - RNA, 19 nt, Homo sapiens
  misc_RNA (1)...(19): siRNA sense strand
acaaacagguucuggagga

SEQ ID NO: 2647695 - RNA, 19 nt, Homo sapiens
  misc_RNA (1)...(19): siRNA sense strand
agacggaagauguggcaga

SEQ ID NO: 2647696 - RNA, 19 nt, Homo sapiens
  misc_RNA (1)...(19): siRNA sense strand
auaaggagguggugagauc

SEQ ID NO: 2647697 - RNA, 19 nt, Homo sapiens
  misc_RNA (1)...(19): siRNA sense strand
cggaagauguggcagaagu

SEQ ID NO: 2647698 - RNA, 19 nt, Homo sapiens
  misc_RNA (1)...(19): siRNA sense strand
gcuugaaacgcuuggagau

SEQ ID NO: 2647699 - RNA, 19 nt, Homo sapiens
  misc_RNA (1)...(19): siRNA sense strand
ccaaagacaagguucgaga

SEQ ID NO: 2647700 - RNA, 19 nt, Homo sapiens
  misc_RNA (1)...(19): siRNA sense strand
aaggcagauucuagaggaa

SEQ ID NO: 2647701 - RNA, 19 nt, Homo sapiens
  misc_RNA (1)...(19): siRNA sense strand
ggagagcagcagagacaca

SEQ ID NO: 2647702 - RNA, 19 nt, Homo sapiens
  misc_RNA (1)...(19): siRNA sense strand
acagauggauccaggagau

SEQ ID NO: 2647703 - RNA, 19 nt, Homo sapiens
  misc_RNA (1)...(19): siRNA sense strand
uugcagaguuguugaagga

SEQ ID NO: 2647704 - RNA, 19 nt, Homo sapiens
  misc_RNA (1)...(19): siRNA sense strand
agaggaagaagucgaacaa

SEQ ID NO: 2647705 - RNA, 19 nt, Homo sapiens
  misc_RNA (1)...(19): siRNA sense strand
aguuccaauuggucagaaa

SEQ ID NO: 2647706 - RNA, 19 nt, Homo sapiens
  misc_RNA (1)...(19): siRNA sense strand
aaacauuggaagcacauaa

SEQ ID NO: 2647707 - RNA, 19 nt, Homo sapiens
  misc_RNA (1)...(19): siRNA sense strand
gguuagagaagcuuguauu

SEQ ID NO: 2647708 - RNA, 19 nt, Homo sapiens
  misc_RNA (1)...(19): siRNA sense strand
gcuuaaaggugaagguugc

SEQ ID NO: 2647709 - RNA, 19 nt, Homo sapiens
  misc_RNA (1)...(19): siRNA sense strand
cccaagagcaggaggugau

SEQ ID NO: 2647710 - RNA, 19 nt, Homo sapiens
  misc_RNA (1)...(19): siRNA sense strand
gcgcaggcacugagcugua

SEQ ID NO: 2647711 - RNA, 19 nt, Homo sapiens
  misc_RNA (1)...(19): siRNA sense strand
uggcuaugggagaugauaa

SEQ ID NO: 2647712 - RNA, 19 nt, Homo sapiens
  misc_RNA (1)...(19): siRNA sense strand
cuuaaagaguucuggcagu

SEQ ID NO: 2647713 - RNA, 19 nt, Homo sapiens
  misc_RNA (1)...(19): siRNA sense strand
cugacaagcuggauggaac

SEQ ID NO: 2647714 - RNA, 19 nt, Homo sapiens
  misc_RNA (1)...(19): siRNA sense strand
gcguguagaagaaagaaaa

SEQ ID NO: 2647715 - RNA, 19 nt, Homo sapiens
  misc_RNA (1)...(19): siRNA sense strand
ugauagagagaguguccaa

SEQ ID NO: 2647716 - RNA, 19 nt, Homo sapiens
  misc_RNA (1)...(19): siRNA sense strand
guuaauggaucaaguagca

SEQ ID NO: 2647717 - RNA, 19 nt, Homo sapiens
  misc_RNA (1)...(19): siRNA sense strand
gagcaguugaugaagauga

SEQ ID NO: 2647718 - RNA, 19 nt, Homo sapiens
  misc_RNA (1)...(19): siRNA sense strand
agauuuaucauucggcaua

SEQ ID NO: 2647719 - RNA, 19 nt, Homo sapiens
  misc_RNA (1)...(19): siRNA sense strand
acucauguacccagacuua

SEQ ID NO: 2647720 - RNA, 19 nt, Homo sapiens
  misc_RNA (1)...(19): siRNA sense strand
ccucuaugaacuuaugaaa

SEQ ID NO: 2647721 - RNA, 19 nt, Homo sapiens
  misc_RNA (1)...(19): siRNA sense strand
caaucagggcuuuggcauu

SEQ ID NO: 2647722 - RNA, 19 nt, Homo sapiens
  misc_RNA (1)...(19): siRNA sense strand
ggaagaguucugaccacaa

SEQ ID NO: 2647723 - RNA, 19 nt, Homo sapiens
  misc_RNA (1)...(19): siRNA sense strand
caauuggucagaaaggaaa

SEQ ID NO: 2647724 - RNA, 19 nt, Homo sapiens
  misc_RNA (1)...(19): siRNA sense strand
cauacaugggucuuagaaa

SEQ ID NO: 2647725 - RNA, 19 nt, Homo sapiens
  misc_RNA (1)...(19): siRNA sense strand
caauucagccucagcacaa

SEQ ID NO: 2647726 - RNA, 19 nt, Homo sapiens
  misc_RNA (1)...(19): siRNA sense strand
cagacucauucauuggaaa

SEQ ID NO: 2647727 - RNA, 19 nt, Homo sapiens
  misc_RNA (1)...(19): siRNA sense strand
ccgucuugguugaaacuau

SEQ ID NO: 2647728 - RNA, 19 nt, Homo sapiens
  misc_RNA (1)...(19): siRNA sense strand
ccuacauauaugaggcaga

SEQ ID NO: 2647729 - RNA, 19 nt, Homo sapiens
  misc_RNA (1)...(19): siRNA sense strand
ccuagaucauucugaccua

SEQ ID NO: 2647730 - RNA, 19 nt, Homo sapiens
  misc_RNA (1)...(19): siRNA sense strand
aagagaaauccuaaggcau

SEQ ID NO: 2647731 - RNA, 19 nt, Homo sapiens
  misc_RNA (1)...(19): siRNA sense strand
gugccuuuguggacagauu

SEQ ID NO: 2647732 - RNA, 19 nt, Homo sapiens
  misc_RNA (1)...(19): siRNA sense strand
uguugaaggagcugucuaa

SEQ ID NO: 2647733 - RNA, 19 nt, Homo sapiens
  misc_RNA (1)...(19): siRNA sense strand
caggucuaauacaggguua

SEQ ID NO: 2647734 - RNA, 19 nt, Homo sapiens
  misc_RNA (1)...(19): siRNA sense strand
uaauagacagaaugggaga

SEQ ID NO: 2647735 - RNA, 19 nt, Homo sapiens
  misc_RNA (1)...(19): siRNA sense strand
gagaagagaaggaggcaga

SEQ ID NO: 2647736 - RNA, 19 nt, Homo sapiens
  misc_RNA (1)...(19): siRNA sense strand
uugugaauauggugggaaa

SEQ ID NO: 2647737 - RNA, 19 nt, Homo sapiens
  misc_RNA (1)...(19): siRNA sense strand
gcgagaagugcaagagaga

SEQ ID NO: 2647738 - RNA, 19 nt, Homo sapiens
  misc_RNA (1)...(19): siRNA sense strand
cgagaaucacagagcggaa

SEQ ID NO: 2647739 - RNA, 19 nt, Homo sapiens
  misc_RNA (1)...(19): siRNA sense strand
caauguaugauguggagaa

SEQ ID NO: 2647740 - RNA, 19 nt, Homo sapiens
  misc_RNA (1)...(19): siRNA sense strand
agaaggaggcagagaagga

SEQ ID NO: 2647741 - RNA, 19 nt, Homo sapiens
  misc_RNA (1)...(19): siRNA sense strand
cagaagagaacaagccaga

SEQ ID NO: 2647742 - RNA, 19 nt, Homo sapiens
  misc_RNA (1)...(19): siRNA sense strand
aguuguagucacagaaauu

SEQ ID NO: 2647743 - RNA, 19 nt, Homo sapiens
  misc_RNA (1)...(19): siRNA sense strand
agacgaggccagaagagaa

SEQ ID NO: 2647744 - RNA, 19 nt, Homo sapiens
  misc_RNA (1)...(19): siRNA sense strand
ccgagggaaucuggagaaa

SEQ ID NO: 2647745 - RNA, 19 nt, Homo sapiens
  misc_RNA (1)...(19): siRNA sense strand
gaaauuaucagaugcgaga

SEQ ID NO: 2647746 - RNA, 19 nt, Homo sapiens
  misc_RNA (1)...(19): siRNA sense strand
acgaaacagacauggaaau

SEQ ID NO: 2647747 - RNA, 19 nt, Homo sapiens
  misc_RNA (1)...(19): siRNA sense strand
cuucgauaguugagaaaau

SEQ ID NO: 2647748 - RNA, 19 nt, Homo sapiens
  misc_RNA (1)...(19): siRNA sense strand
aggacaugguggacaguga

SEQ ID NO: 2647749 - RNA, 19 nt, Homo sapiens
  misc_RNA (1)...(19): siRNA sense strand
ccagcaagagcauggacaa

SEQ ID NO: 2647750 - RNA, 19 nt, Homo sapiens
  misc_RNA (1)...(19): siRNA sense strand
cagccaaggccaagaagga

SEQ ID NO: 2647751 - RNA, 19 nt, Homo sapiens
  misc_RNA (1)...(19): siRNA sense strand
cugcaaagcuagaaaagga

SEQ ID NO: 2647752 - RNA, 19 nt, Homo sapiens
  misc_RNA (1)...(19): siRNA sense strand
aggaaggguggaaggguga

SEQ ID NO: 2647753 - RNA, 19 nt, Homo sapiens
  misc_RNA (1)...(19): siRNA sense strand
ggcugagggaggugaagaa

SEQ ID NO: 2647754 - RNA, 19 nt, Homo sapiens
  misc_RNA (1)...(19): siRNA sense strand
ggaucgaaacagcuggcaa

SEQ ID NO: 2647755 - RNA, 19 nt, Homo sapiens
  misc_RNA (1)...(19): siRNA sense strand
uggagaagcuggugaggac

SEQ ID NO: 2647756 - RNA, 19 nt, Homo sapiens
  misc_RNA (1)...(19): siRNA sense strand
caucauagaaagugugaag

SEQ ID NO: 2647757 - RNA, 19 nt, Homo sapiens
  misc_RNA (1)...(19): siRNA sense strand
gaaagaggacagaggccca

SEQ ID NO: 2647758 - RNA, 19 nt, Homo sapiens
  misc_RNA (1)...(19): siRNA sense strand
aagagaaggaggcagagaa

SEQ ID NO: 2647759 - RNA, 19 nt, Homo sapiens
  misc_RNA (1)...(19): siRNA sense strand
ugagaaagguuauggacug

SEQ ID NO: 2647760 - RNA, 19 nt, Homo sapiens
  misc_RNA (1)...(19): siRNA sense strand
gguugugagaacugcuuua

SEQ ID NO: 2647761 - RNA, 19 nt, Homo sapiens
  misc_RNA (1)...(19): siRNA sense strand
cagaaguuguagucacaga

SEQ ID NO: 2647762 - RNA, 19 nt, Homo sapiens
  misc_RNA (1)...(19): siRNA sense strand
gcaaggaggacauggugga

SEQ ID NO: 2647763 - RNA, 19 nt, Homo sapiens
  misc_RNA (1)...(19): siRNA sense strand
cugaggagacccagcaaga

SEQ ID NO: 2647764 - RNA, 19 nt, Homo sapiens
  misc_RNA (1)...(19): siRNA sense strand
acagaggcccagaggauca

SEQ ID NO: 2647765 - RNA, 19 nt, Homo sapiens
  misc_RNA (1)...(19): siRNA sense strand
aagcauguggugagaccua

SEQ ID NO: 2647766 - RNA, 19 nt, Homo sapiens
  misc_RNA (1)...(19): siRNA sense strand
cccaagagcugcagcgaag

SEQ ID NO: 2647767 - RNA, 19 nt, Homo sapiens
  misc_RNA (1)...(19): siRNA sense strand
agagcauggacaagaaaga

SEQ ID NO: 2647768 - RNA, 19 nt, Homo sapiens
  misc_RNA (1)...(19): siRNA sense strand
guuauggacuggaggugga

SEQ ID NO: 2647769 - RNA, 19 nt, Homo sapiens
  misc_RNA (1)...(19): siRNA sense strand
ccaauacagugaaacgaca

SEQ ID NO: 2647770 - RNA, 19 nt, Homo sapiens
  misc_RNA (1)...(19): siRNA sense strand
aaugggauguggacagcaa

SEQ ID NO: 2647771 - RNA, 19 nt, Homo sapiens
  misc_RNA (1)...(19): siRNA sense strand
gcgaggacccagaagaagu

SEQ ID NO: 2647772 - RNA, 19 nt, Homo sapiens
  misc_RNA (1)...(19): siRNA sense strand
cccaagaaagguugugaga

SEQ ID NO: 2647773 - RNA, 19 nt, Homo sapiens
  misc_RNA (1)...(19): siRNA sense strand
cagcagaaguuguagucac

SEQ ID NO: 2647774 - RNA, 19 nt, Homo sapiens
  misc_RNA (1)...(19): siRNA sense strand
agggaaaucaggagcgucu

SEQ ID NO: 2647775 - RNA, 19 nt, Homo sapiens
  misc_RNA (1)...(19): siRNA sense strand
ccaugaggcaccaggggaa

SEQ ID NO: 2647776 - RNA, 19 nt, Homo sapiens
  misc_RNA (1)...(19): siRNA sense strand
ggugacagccacaggagca

SEQ ID NO: 2647777 - RNA, 19 nt, Homo sapiens
  misc_RNA (1)...(19): siRNA sense strand
cagugaaacgacagaagca

SEQ ID NO: 2647778 - RNA, 19 nt, Homo sapiens
  misc_RNA (1)...(19): siRNA sense strand
ucggagauuuugugaauau

SEQ ID NO: 2647779 - RNA, 19 nt, Homo sapiens
  misc_RNA (1)...(19): siRNA sense strand
gcauguggugagaccuaua

SEQ ID NO: 2647780 - RNA, 19 nt, Homo sapiens
  misc_RNA (1)...(19): siRNA sense strand
gcaaggcucugaaaggaga

SEQ ID NO: 2647781 - RNA, 19 nt, Homo sapiens
  misc_RNA (1)...(19): siRNA sense strand
ucagaugcgagaagugcaa

SEQ ID NO: 2647782 - RNA, 19 nt, Homo sapiens
  misc_RNA (1)...(19): siRNA sense strand
gguggaagggugacagcca

SEQ ID NO: 2647783 - RNA, 19 nt, Homo sapiens
  misc_RNA (1)...(19): siRNA sense strand
agcagaaguuguagucaca

SEQ ID NO: 2647784 - RNA, 19 nt, Homo sapiens
  misc_RNA (1)...(19): siRNA sense strand
agucacagaaauuccuaaa

SEQ ID NO: 2647785 - RNA, 19 nt, Homo sapiens
  misc_RNA (1)...(19): siRNA sense strand
aagagaaggacccuggaau

SEQ ID NO: 2647786 - RNA, 19 nt, Homo sapiens
  misc_RNA (1)...(19): siRNA sense strand
gcuacuagggucggagauu

SEQ ID NO: 2647787 - RNA, 19 nt, Homo sapiens
  misc_RNA (1)...(19): siRNA sense strand
gagcaaacaugguggcugg

SEQ ID NO: 2647788 - RNA, 19 nt, Homo sapiens
  misc_RNA (1)...(19): siRNA sense strand
ggaacuuugcugucgugaa

SEQ ID NO: 2647789 - RNA, 19 nt, Homo sapiens
  misc_RNA (1)...(19): siRNA sense strand
ggacaaaucuacuaccuug

SEQ ID NO: 2647790 - RNA, 19 nt, Homo sapiens
  misc_RNA (1)...(19): siRNA sense strand
ggacaauaucucugaugcu

SEQ ID NO: 2647791 - RNA, 19 nt, Homo sapiens
  misc_RNA (1)...(19): siRNA sense strand
uggcaaagaaggaaagaaa

SEQ ID NO: 2647792 - RNA, 19 nt, Homo sapiens
  misc_RNA (1)...(19): siRNA sense strand
cuucaaagccaucgagaaa

SEQ ID NO: 2647793 - RNA, 19 nt, Homo sapiens
  misc_RNA (1)...(19): siRNA sense strand
ccgcaaaguaaguggagaa

SEQ ID NO: 2647794 - RNA, 19 nt, Homo sapiens
  misc_RNA (1)...(19): siRNA sense strand
cggaagaagcugaaaggua

SEQ ID NO: 2647795 - RNA, 19 nt, Homo sapiens
  misc_RNA (1)...(19): siRNA sense strand
aggaagaggacgaggaaga

SEQ ID NO: 2647796 - RNA, 19 nt, Homo sapiens
  misc_RNA (1)...(19): siRNA sense strand
gagcagaacacgugugcaa

SEQ ID NO: 2647797 - RNA, 19 nt, Homo sapiens
  misc_RNA (1)...(19): siRNA sense strand
aggaaaagcaguuggaaua

SEQ ID NO: 2647798 - RNA, 19 nt, Homo sapiens
  misc_RNA (1)...(19): siRNA sense strand
gcuuaaagaaggaagguau

SEQ ID NO: 2647799 - RNA, 19 nt, Homo sapiens
  misc_RNA (1)...(19): siRNA sense strand
gggagaggcagcaggauaa

SEQ ID NO: 2647800 - RNA, 19 nt, Homo sapiens
  misc_RNA (1)...(19): siRNA sense strand
gcaaaguaucugagugcaa

SEQ ID NO: 2647801 - RNA, 19 nt, Homo sapiens
  misc_RNA (1)...(19): siRNA sense strand
caauaaaggccaaguguca

SEQ ID NO: 2647802 - RNA, 19 nt, Homo sapiens
  misc_RNA (1)...(19): siRNA sense strand
gcauagaugagcaggagua

SEQ ID NO: 2647803 - RNA, 19 nt, Homo sapiens
  misc_RNA (1)...(19): siRNA sense strand
ugaugaaaaccgagagaaa

SEQ ID NO: 2647804 - RNA, 19 nt, Homo sapiens
  misc_RNA (1)...(19): siRNA sense strand
ugaagaacaaagagggcaa

SEQ ID NO: 2647805 - RNA, 19 nt, Homo sapiens
  misc_RNA (1)...(19): siRNA sense strand
gcuuauaaggaauggaaga

SEQ ID NO: 2647806 - RNA, 19 nt, Homo sapiens
  misc_RNA (1)...(19): siRNA sense strand
cagagaguguugucagaaa

SEQ ID NO: 2647807 - RNA, 19 nt, Homo sapiens
  misc_RNA (1)...(19): siRNA sense strand
aggauaaagcuguagaaau

SEQ ID NO: 2647808 - RNA, 19 nt, Homo sapiens
  misc_RNA (1)...(19): siRNA sense strand
agguaauccuuguggccaa

SEQ ID NO: 2647809 - RNA, 19 nt, Homo sapiens
  misc_RNA (1)...(19): siRNA sense strand
gggcugagcuggaaaggga

SEQ ID NO: 2647810 - RNA, 19 nt, Homo sapiens
  misc_RNA (1)...(19): siRNA sense strand
gagcacaucaagaggguuu

SEQ ID NO: 2647811 - RNA, 19 nt, Homo sapiens
  misc_RNA (1)...(19): siRNA sense strand
aggaaguaguucagagguu

SEQ ID NO: 2647812 - RNA, 19 nt, Homo sapiens
  misc_RNA (1)...(19): siRNA sense strand
cuaguaagguaaugaccaa

SEQ ID NO: 2647813 - RNA, 19 nt, Homo sapiens
  misc_RNA (1)...(19): siRNA sense strand
agaccuauuuggagugcaa

SEQ ID NO: 2647814 - RNA, 19 nt, Homo sapiens
  misc_RNA (1)...(19): siRNA sense strand
ccucaaaccaaauuacaaa

SEQ ID NO: 2647815 - RNA, 19 nt, Homo sapiens
  misc_RNA (1)...(19): siRNA sense strand
ggagaauugcauugaucaa

SEQ ID NO: 2647816 - RNA, 19 nt, Homo sapiens
  misc_RNA (1)...(19): siRNA sense strand
gggaggaagaggaggagga

SEQ ID NO: 2647817 - RNA, 19 nt, Homo sapiens
  misc_RNA (1)...(19): siRNA sense strand
aggacgaggaagaggaaga

SEQ ID NO: 2647818 - RNA, 19 nt, Homo sapiens
  misc_RNA (1)...(19): siRNA sense strand
gugagaacccugagaagau

SEQ ID NO: 2647819 - RNA, 19 nt, Homo sapiens
  misc_RNA (1)...(19): siRNA sense strand
gcaugaaauccaagaaagu

SEQ ID NO: 2647820 - RNA, 19 nt, Homo sapiens
  misc_RNA (1)...(19): siRNA sense strand
gagguuuauuguaggcuua

SEQ ID NO: 2647821 - RNA, 19 nt, Homo sapiens
  misc_RNA (1)...(19): siRNA sense strand
gcuuagaauuugaugaugu

SEQ ID NO: 2647822 - RNA, 19 nt, Homo sapiens
  misc_RNA (1)...(19): siRNA sense strand
aaggaaagaaagaugacaa

SEQ ID NO: 2647823 - RNA, 19 nt, Homo sapiens
  misc_RNA (1)...(19): siRNA sense strand
ccaaggucaucaagaagaa

SEQ ID NO: 2647824 - RNA, 19 nt, Homo sapiens
  misc_RNA (1)...(19): siRNA sense strand
gagcaugaaauccaagaaa

SEQ ID NO: 2647825 - RNA, 19 nt, Homo sapiens
  misc_RNA (1)...(19): siRNA sense strand
uggaauuggcuaagaccua

SEQ ID NO: 2647826 - RNA, 19 nt, Homo sapiens
  misc_RNA (1)...(19): siRNA sense strand
gaacagggaagguaggaga

SEQ ID NO: 2647827 - RNA, 19 nt, Homo sapiens
  misc_RNA (1)...(19): siRNA sense strand
gcuuaaaaugugaggauga

SEQ ID NO: 2647828 - RNA, 19 nt, Homo sapiens
  misc_RNA (1)...(19): siRNA sense strand
gcuauguggcuaugagaau

SEQ ID NO: 2647829 - RNA, 19 nt, Homo sapiens
  misc_RNA (1)...(19): siRNA sense strand
uggaaagggaggaguguca

SEQ ID NO: 2647830 - RNA, 19 nt, Homo sapiens
  misc_RNA (1)...(19): siRNA sense strand
ggaagguauuguucaggaa

SEQ ID NO: 2647831 - RNA, 19 nt, Homo sapiens
  misc_RNA (1)...(19): siRNA sense strand
aaaugaacuugguggcaau

SEQ ID NO: 2647832 - RNA, 19 nt, Homo sapiens
  misc_RNA (1)...(19): siRNA sense strand
gcuaugagaaugugaacuu

SEQ ID NO: 2647833 - RNA, 19 nt, Homo sapiens
  misc_RNA (1)...(19): siRNA sense strand
cggaaguugaggagggcau

SEQ ID NO: 2647834 - RNA, 19 nt, Homo sapiens
  misc_RNA (1)...(19): siRNA sense strand
ccaacaaugcugagaagga

SEQ ID NO: 2647835 - RNA, 19 nt, Homo sapiens
  misc_RNA (1)...(19): siRNA sense strand
cugagaaggaaauggucaa

SEQ ID NO: 2647836 - RNA, 19 nt, Homo sapiens
  misc_RNA (1)...(19): siRNA sense strand
aagaaauccucaaaccaaa

SEQ ID NO: 2647837 - RNA, 19 nt, Homo sapiens
  misc_RNA (1)...(19): siRNA sense strand
ugcuaaagcgcgugaagaa

SEQ ID NO: 2647838 - RNA, 19 nt, Homo sapiens
  misc_RNA (1)...(19): siRNA sense strand
acuacagugaggaggauaa

SEQ ID NO: 2647839 - RNA, 19 nt, Homo sapiens
  misc_RNA (1)...(19): siRNA sense strand
aauaagaacuucaaagcca

SEQ ID NO: 2647840 - RNA, 19 nt, Homo sapiens
  misc_RNA (1)...(19): siRNA sense strand
uguuagaccugcuggugaa

SEQ ID NO: 2647841 - RNA, 19 nt, Homo sapiens
  misc_RNA (1)...(19): siRNA sense strand
uggaaacaguagaaagcau

SEQ ID NO: 2647842 - RNA, 19 nt, Homo sapiens
  misc_RNA (1)...(19): siRNA sense strand
aaacagaggaugugcagau

SEQ ID NO: 2647843 - RNA, 19 nt, Homo sapiens
  misc_RNA (1)...(19): siRNA sense strand
gugcauuugagaaggagaa

SEQ ID NO: 2647844 - RNA, 19 nt, Homo sapiens
  misc_RNA (1)...(19): siRNA sense strand
gcuaagaccuauuuggagu

SEQ ID NO: 2647845 - RNA, 19 nt, Homo sapiens
  misc_RNA (1)...(19): siRNA sense strand
cgagaggcugggaaagaua

SEQ ID NO: 2647846 - RNA, 19 nt, Homo sapiens
  misc_RNA (1)...(19): siRNA sense strand
ugacugaccaagugaaauu

SEQ ID NO: 2647847 - RNA, 19 nt, Homo sapiens
  misc_RNA (1)...(19): siRNA sense strand
cagaaaugcugaagaagcu

SEQ ID NO: 2647848 - RNA, 19 nt, Homo sapiens
  misc_RNA (1)...(19): siRNA sense strand
gcuaacaauuuaugaagca

SEQ ID NO: 2647849 - RNA, 19 nt, Homo sapiens
  misc_RNA (1)...(19): siRNA sense strand
gggaguuccuguuuagcaa

SEQ ID NO: 2647850 - RNA, 19 nt, Homo sapiens
  misc_RNA (1)...(19): siRNA sense strand
caguggagacagaauauaa

SEQ ID NO: 2647851 - RNA, 19 nt, Homo sapiens
  misc_RNA (1)...(19): siRNA sense strand
cuggagucuuguaguguaa

SEQ ID NO: 2647852 - RNA, 19 nt, Homo sapiens
  misc_RNA (1)...(19): siRNA sense strand
ggggagaggcagcaggaua

SEQ ID NO: 2647853 - RNA, 19 nt, Homo sapiens
  misc_RNA (1)...(19): siRNA sense strand
aaaaggaauagaagggaaa

SEQ ID NO: 2647854 - RNA, 19 nt, Homo sapiens
  misc_RNA (1)...(19): siRNA sense strand
ggaacaaagcucugaugga

SEQ ID NO: 2647855 - RNA, 19 nt, Homo sapiens
  misc_RNA (1)...(19): siRNA sense strand
auaagaaauuagggaggaa

SEQ ID NO: 2647856 - RNA, 19 nt, Homo sapiens
  misc_RNA (1)...(19): siRNA sense strand
ucggaaacgcuuagcagaa

SEQ ID NO: 2647857 - RNA, 19 nt, Homo sapiens
  misc_RNA (1)...(19): siRNA sense strand
cagcaggauaaaaggaaua

SEQ ID NO: 2647858 - RNA, 19 nt, Homo sapiens
  misc_RNA (1)...(19): siRNA sense strand
ggacgugacaagagccauu

SEQ ID NO: 2647859 - RNA, 19 nt, Homo sapiens
  misc_RNA (1)...(19): siRNA sense strand
guguaaagugugugguaaa

SEQ ID NO: 2647860 - RNA, 19 nt, Homo sapiens
  misc_RNA (1)...(19): siRNA sense strand
augcaaagaauguggaaaa

SEQ ID NO: 2647861 - RNA, 19 nt, Homo sapiens
  misc_RNA (1)...(19): siRNA sense strand
uggagagaaguuugagaaa

SEQ ID NO: 2647862 - RNA, 19 nt, Homo sapiens
  misc_RNA (1)...(19): siRNA sense strand
auguaaagaguguggaaaa

SEQ ID NO: 2647863 - RNA, 19 nt, Homo sapiens
  misc_RNA (1)...(19): siRNA sense strand
agguuuaaguucagacaca

SEQ ID NO: 2647864 - RNA, 19 nt, Homo sapiens
  misc_RNA (1)...(19): siRNA sense strand
aguucacacuggcgagaaa

SEQ ID NO: 2647865 - RNA, 19 nt, Homo sapiens
  misc_RNA (1)...(19): siRNA sense strand
aagucaaagaggagacauu

SEQ ID NO: 2647866 - RNA, 19 nt, Homo sapiens
  misc_RNA (1)...(19): siRNA sense strand
guggaaaauacuucagaua

SEQ ID NO: 2647867 - RNA, 19 nt, Homo sapiens
  misc_RNA (1)...(19): siRNA sense strand
uggaaaagguuuaaguuca

SEQ ID NO: 2647868 - RNA, 19 nt, Homo sapiens
  misc_RNA (1)...(19): siRNA sense strand
ccuuaugaauguaaagagu

SEQ ID NO: 2647869 - RNA, 19 nt, Homo sapiens
  misc_RNA (1)...(19): siRNA sense strand
uguaacgaauguuggaaaa

SEQ ID NO: 2647870 - RNA, 19 nt, Homo sapiens
  misc_RNA (1)...(19): siRNA sense strand
agacaaagucaaagaggag

SEQ ID NO: 2647871 - RNA, 19 nt, Homo sapiens
  misc_RNA (1)...(19): siRNA sense strand
agauaauucacacuggaaa

SEQ ID NO: 2647872 - RNA, 19 nt, Homo sapiens
  misc_RNA (1)...(19): siRNA sense strand
aagacaaagucaaagagga

SEQ ID NO: 2647873 - RNA, 19 nt, Homo sapiens
  misc_RNA (1)...(19): siRNA sense strand
auguaacgaauguuggaaa

SEQ ID NO: 2647874 - RNA, 19 nt, Homo sapiens
  misc_RNA (1)...(19): siRNA sense strand
aaauccuaguggucagaua

SEQ ID NO: 2647875 - RNA, 19 nt, Homo sapiens
  misc_RNA (1)...(19): siRNA sense strand
gaauguaaggaguguggga

SEQ ID NO: 2647876 - RNA, 19 nt, Homo sapiens
  misc_RNA (1)...(19): siRNA sense strand
aguguaaagugugugguaa

SEQ ID NO: 2647877 - RNA, 19 nt, Homo sapiens
  misc_RNA (1)...(19): siRNA sense strand
gaauguaaggagugcggca

SEQ ID NO: 2647878 - RNA, 19 nt, Homo sapiens
  misc_RNA (1)...(19): siRNA sense strand
uggcagacuuccaccgaca

SEQ ID NO: 2647879 - RNA, 19 nt, Homo sapiens
  misc_RNA (1)...(19): siRNA sense strand
acuuauucggcaucagaua

SEQ ID NO: 2647880 - RNA, 19 nt, Homo sapiens
  misc_RNA (1)...(19): siRNA sense strand
cuuccaccgacaugagaaa

SEQ ID NO: 2647881 - RNA, 19 nt, Homo sapiens
  misc_RNA (1)...(19): siRNA sense strand
agaaaccuuaugaguguaa

SEQ ID NO: 2647882 - RNA, 19 nt, Homo sapiens
  misc_RNA (1)...(19): siRNA sense strand
aggaaggauuaacuccaaa

SEQ ID NO: 2647883 - RNA, 19 nt, Homo sapiens
  misc_RNA (1)...(19): siRNA sense strand
ggauuaacuccaaaggauc

SEQ ID NO: 2647884 - RNA, 19 nt, Homo sapiens
  misc_RNA (1)...(19): siRNA sense strand
ggaagugaugcuggagaau

SEQ ID NO: 2647885 - RNA, 19 nt, Homo sapiens
  misc_RNA (1)...(19): siRNA sense strand
aggccagaacugagaagga

SEQ ID NO: 2647886 - RNA, 19 nt, Homo sapiens
  misc_RNA (1)...(19): siRNA sense strand
agaauguggaaaagguuua

SEQ ID NO: 2647887 - RNA, 19 nt, Homo sapiens
  misc_RNA (1)...(19): siRNA sense strand
cucuaugaauguaacgaau

SEQ ID NO: 2647888 - RNA, 19 nt, Homo sapiens
  misc_RNA (1)...(19): siRNA sense strand
aggccuaugaggucaagaa

SEQ ID NO: 2647889 - RNA, 19 nt, Homo sapiens
  misc_RNA (1)...(19): siRNA sense strand
ggggagaaaccuuaugaau

SEQ ID NO: 2647890 - RNA, 19 nt, Homo sapiens
  misc_RNA (1)...(19): siRNA sense strand
ucaacaugcauuagagcaa

SEQ ID NO: 2647891 - RNA, 19 nt, Homo sapiens
  misc_RNA (1)...(19): siRNA sense strand
cauccaaggaggacccaaa

SEQ ID NO: 2647892 - RNA, 19 nt, Homo sapiens
  misc_RNA (1)...(19): siRNA sense strand
uggaacaucaggagagcau

SEQ ID NO: 2647893 - RNA, 19 nt, Homo sapiens
  misc_RNA (1)...(19): siRNA sense strand
auucuuaacuccuuggcua

SEQ ID NO: 2647894 - RNA, 19 nt, Homo sapiens
  misc_RNA (1)...(19): siRNA sense strand
ccugcaaagauucgaauau

SEQ ID NO: 2647895 - RNA, 19 nt, Homo sapiens
  misc_RNA (1)...(19): siRNA sense strand
aguugugacagaagaguuu

SEQ ID NO: 2647896 - RNA, 19 nt, Homo sapiens
  misc_RNA (1)...(19): siRNA sense strand
guguugauucugacagcaa

SEQ ID NO: 2647897 - RNA, 19 nt, Homo sapiens
  misc_RNA (1)...(19): siRNA sense strand
uggaacuacuuuaugaaca

SEQ ID NO: 2647898 - RNA, 19 nt, Homo sapiens
  misc_RNA (1)...(19): siRNA sense strand
caggagagcauucugggua

SEQ ID NO: 2647899 - RNA, 19 nt, Homo sapiens
  misc_RNA (1)...(19): siRNA sense strand
cuauacugguucagcugua

SEQ ID NO: 2647900 - RNA, 19 nt, Homo sapiens
  misc_RNA (1)...(19): siRNA sense strand
aagugaaacagcugaaguu

SEQ ID NO: 2647901 - RNA, 19 nt, Homo sapiens
  misc_RNA (1)...(19): siRNA sense strand
ggagcagcaaaguggcaau

SEQ ID NO: 2647902 - RNA, 19 nt, Homo sapiens
  misc_RNA (1)...(19): siRNA sense strand
augaagauccugagauuuu

SEQ ID NO: 2647903 - RNA, 19 nt, Homo sapiens
  misc_RNA (1)...(19): siRNA sense strand
uugaaguaacucuggaaca

SEQ ID NO: 2647904 - RNA, 19 nt, Homo sapiens
  misc_RNA (1)...(19): siRNA sense strand
gauuuauaaccgugagaug

SEQ ID NO: 2647905 - RNA, 19 nt, Homo sapiens
  misc_RNA (1)...(19): siRNA sense strand
agcaaaguggcaaugaaua

SEQ ID NO: 2647906 - RNA, 19 nt, Homo sapiens
  misc_RNA (1)...(19): siRNA sense strand
aaugaauaccuguccaaau

SEQ ID NO: 2647907 - RNA, 19 nt, Homo sapiens
  misc_RNA (1)...(19): siRNA sense strand
aaugagaagcacuuggaga

SEQ ID NO: 2647908 - RNA, 19 nt, Homo sapiens
  misc_RNA (1)...(19): siRNA sense strand
ugugcuuggauguggacaa

SEQ ID NO: 2647909 - RNA, 19 nt, Homo sapiens
  misc_RNA (1)...(19): siRNA sense strand
augugaugcuggagaacua

SEQ ID NO: 2647910 - RNA, 19 nt, Homo sapiens
  misc_RNA (1)...(19): siRNA sense strand
aggaaugacuggagagcag

SEQ ID NO: 2647911 - RNA, 19 nt, Homo sapiens
  misc_RNA (1)...(19): siRNA sense strand
ggauaggauacuuggaacu

SEQ ID NO: 2647912 - RNA, 19 nt, Homo sapiens
  misc_RNA (1)...(19): siRNA sense strand
ucaucuggagcaagggaaa

SEQ ID NO: 2647913 - RNA, 19 nt, Homo sapiens
  misc_RNA (1)...(19): siRNA sense strand
gcugggaagacaggagaaa

SEQ ID NO: 2647914 - RNA, 19 nt, Homo sapiens
  misc_RNA (1)...(19): siRNA sense strand
agacaggagaaaagcuuaa

SEQ ID NO: 2647915 - RNA, 19 nt, Homo sapiens
  misc_RNA (1)...(19): siRNA sense strand
agagaggcuccgagagaaa

SEQ ID NO: 2647916 - RNA, 19 nt, Homo sapiens
  misc_RNA (1)...(19): siRNA sense strand
gggcaagaaacaugggcuu

SEQ ID NO: 2647917 - RNA, 19 nt, Homo sapiens
  misc_RNA (1)...(19): siRNA sense strand
ggagaaagcugcguggcaa

SEQ ID NO: 2647918 - RNA, 19 nt, Homo sapiens
  misc_RNA (1)...(19): siRNA sense strand
gaaccaaagaccugggcca

SEQ ID NO: 2647919 - RNA, 19 nt, Homo sapiens
  misc_RNA (1)...(19): siRNA sense strand
agccuugacuggugggcaa

SEQ ID NO: 2647920 - RNA, 19 nt, Homo sapiens
  misc_RNA (1)...(19): siRNA sense strand
gggaggaugagguuggaga

SEQ ID NO: 2647921 - RNA, 19 nt, Homo sapiens
  misc_RNA (1)...(19): siRNA sense strand
ccauagagcaagaguggac

SEQ ID NO: 2647922 - RNA, 19 nt, Homo sapiens
  misc_RNA (1)...(19): siRNA sense strand
cggagaaagcugcguggca

SEQ ID NO: 2647923 - RNA, 19 nt, Homo sapiens
  misc_RNA (1)...(19): siRNA sense strand
cggcaggcuuugagcucca

SEQ ID NO: 2647924 - RNA, 19 nt, Homo sapiens
  misc_RNA (1)...(19): siRNA sense strand
gacaggugcugcugggaca

SEQ ID NO: 2647925 - RNA, 19 nt, Homo sapiens
  misc_RNA (1)...(19): siRNA sense strand
aggcagcgggcaagaaaca

SEQ ID NO: 2647926 - RNA, 19 nt, Homo sapiens
  misc_RNA (1)...(19): siRNA sense strand
aaacaugggcuucuggaga

SEQ ID NO: 2647927 - RNA, 19 nt, Homo sapiens
  misc_RNA (1)...(19): siRNA sense strand
gcuuugagcuccagccgga

SEQ ID NO: 2647928 - RNA, 19 nt, Homo sapiens
  misc_RNA (1)...(19): siRNA sense strand
cuacagaacaugcugcuga

SEQ ID NO: 2647929 - RNA, 19 nt, Homo sapiens
  misc_RNA (1)...(19): siRNA sense strand
ggagcaaggccauagagca

SEQ ID NO: 2647930 - RNA, 19 nt, Homo sapiens
  misc_RNA (1)...(19): siRNA sense strand
augcaauaguugugggaaa

SEQ ID NO: 2647931 - RNA, 19 nt, Homo sapiens
  misc_RNA (1)...(19): siRNA sense strand
ucaaagaguuagaaggaca

SEQ ID NO: 2647932 - RNA, 19 nt, Homo sapiens
  misc_RNA (1)...(19): siRNA sense strand
aagacagauaugaggaaua

SEQ ID NO: 2647933 - RNA, 19 nt, Homo sapiens
  misc_RNA (1)...(19): siRNA sense strand
guguaaugaaugugggaga

SEQ ID NO: 2647934 - RNA, 19 nt, Homo sapiens
  misc_RNA (1)...(19): siRNA sense strand
auguagugaaugugggaaa

SEQ ID NO: 2647935 - RNA, 19 nt, Homo sapiens
  misc_RNA (1)...(19): siRNA sense strand
gguaggaacaugauggaga

SEQ ID NO: 2647936 - RNA, 19 nt, Homo sapiens
  misc_RNA (1)...(19): siRNA sense strand
auguauugagugugggaaa

SEQ ID NO: 2647937 - RNA, 19 nt, Homo sapiens
  misc_RNA (1)...(19): siRNA sense strand
auguaaugaauguggcaaa

SEQ ID NO: 2647938 - RNA, 19 nt, Homo sapiens
  misc_RNA (1)...(19): siRNA sense strand
auauaaggaaguugaggaa

SEQ ID NO: 2647939 - RNA, 19 nt, Homo sapiens
  misc_RNA (1)...(19): siRNA sense strand
ccucauuggucaucggaga

SEQ ID NO: 2647940 - RNA, 19 nt, Homo sapiens
  misc_RNA (1)...(19): siRNA sense strand
aggcauucggucugaguaa

SEQ ID NO: 2647941 - RNA, 19 nt, Homo sapiens
  misc_RNA (1)...(19): siRNA sense strand
ucauuauacaccagagaau

SEQ ID NO: 2647942 - RNA, 19 nt, Homo sapiens
  misc_RNA (1)...(19): siRNA sense strand
caaagaguuagaaggacaa

SEQ ID NO: 2647943 - RNA, 19 nt, Homo sapiens
  misc_RNA (1)...(19): siRNA sense strand
cuauaaaugcaaugagugu

SEQ ID NO: 2647944 - RNA, 19 nt, Homo sapiens
  misc_RNA (1)...(19): siRNA sense strand
uggagauguuugugaagau

SEQ ID NO: 2647945 - RNA, 19 nt, Homo sapiens
  misc_RNA (1)...(19): siRNA sense strand
uggaaauaauagaugagga

SEQ ID NO: 2647946 - RNA, 19 nt, Homo sapiens
  misc_RNA (1)...(19): siRNA sense strand
gcuccaaacucuucgacca

SEQ ID NO: 2647947 - RNA, 19 nt, Homo sapiens
  misc_RNA (1)...(19): siRNA sense strand
augcaaugaguguggaaaa

SEQ ID NO: 2647948 - RNA, 19 nt, Homo sapiens
  misc_RNA (1)...(19): siRNA sense strand
aggaauauaaggaaguuga

SEQ ID NO: 2647949 - RNA, 19 nt, Homo sapiens
  misc_RNA (1)...(19): siRNA sense strand
gggaacagagacuggagau

SEQ ID NO: 2647950 - RNA, 19 nt, Homo sapiens
  misc_RNA (1)...(19): siRNA sense strand
ggggaaaagccauacaaau

SEQ ID NO: 2647951 - RNA, 19 nt, Homo sapiens
  misc_RNA (1)...(19): siRNA sense strand
augugaugaauguggcaaa

SEQ ID NO: 2647952 - RNA, 19 nt, Homo sapiens
  misc_RNA (1)...(19): siRNA sense strand
ggggaaaagcccuaugaau

SEQ ID NO: 2647953 - RNA, 19 nt, Homo sapiens
  misc_RNA (1)...(19): siRNA sense strand
cuaugaaugcagugagugu

SEQ ID NO: 2647954 - RNA, 19 nt, Homo sapiens
  misc_RNA (1)...(19): siRNA sense strand
auuuaaguguagugagugu

SEQ ID NO: 2647955 - RNA, 19 nt, Homo sapiens
  misc_RNA (1)...(19): siRNA sense strand
aaugaaugugggagagcau

SEQ ID NO: 2647956 - RNA, 19 nt, Homo sapiens
  misc_RNA (1)...(19): siRNA sense strand
cgaauucauacuggagaaa

SEQ ID NO: 2647957 - RNA, 19 nt, Homo sapiens
  misc_RNA (1)...(19): siRNA sense strand
agaaacccuaugaguguaa

SEQ ID NO: 2647958 - RNA, 19 nt, Homo sapiens
  misc_RNA (1)...(19): siRNA sense strand
aggacaacccucaaaugaa

SEQ ID NO: 2647959 - RNA, 19 nt, Homo sapiens
  misc_RNA (1)...(19): siRNA sense strand
aguuuuaaagggacagaaa

SEQ ID NO: 2647960 - RNA, 19 nt, Homo sapiens
  misc_RNA (1)...(19): siRNA sense strand
guguaaugagugugggaag

SEQ ID NO: 2647961 - RNA, 19 nt, Homo sapiens
  misc_RNA (1)...(19): siRNA sense strand
aggcaaaccucccagcuca

SEQ ID NO: 2647962 - RNA, 19 nt, Homo sapiens
  misc_RNA (1)...(19): siRNA sense strand
uuuuaaaggaucagaguca

SEQ ID NO: 2647963 - RNA, 19 nt, Homo sapiens
  misc_RNA (1)...(19): siRNA sense strand
ggggagaagccuuauaaau

SEQ ID NO: 2647964 - RNA, 19 nt, Homo sapiens
  misc_RNA (1)...(19): siRNA sense strand
gaaugcagugaguguggaa

SEQ ID NO: 2647965 - RNA, 19 nt, Homo sapiens
  misc_RNA (1)...(19): siRNA sense strand
agucggaguaaaugucuua

SEQ ID NO: 2647966 - RNA, 19 nt, Homo sapiens
  misc_RNA (1)...(19): siRNA sense strand
aaguguagugaguguggua

SEQ ID NO: 2647967 - RNA, 19 nt, Homo sapiens
  misc_RNA (1)...(19): siRNA sense strand
gaauguaaugaguguggga

SEQ ID NO: 2647968 - RNA, 19 nt, Homo sapiens
  misc_RNA (1)...(19): siRNA sense strand
agauaccuucaaagaguua

SEQ ID NO: 2647969 - RNA, 19 nt, Homo sapiens
  misc_RNA (1)...(19): siRNA sense strand
agaagggagcagacuagaa

SEQ ID NO: 2647970 - RNA, 19 nt, Homo sapiens
  misc_RNA (1)...(19): siRNA sense strand
ggggagaaaccuuaugaau

SEQ ID NO: 2647971 - RNA, 19 nt, Homo sapiens
  misc_RNA (1)...(19): siRNA sense strand
ccuuaugaauguauugagu

SEQ ID NO: 2647972 - RNA, 19 nt, Homo sapiens
  misc_RNA (1)...(19): siRNA sense strand
gagagaagcccucaggucu

SEQ ID NO: 2647973 - RNA, 19 nt, Homo sapiens
  misc_RNA (1)...(19): siRNA sense strand
agaaauggguacagcguga

SEQ ID NO: 2647974 - RNA, 19 nt, Homo sapiens
  misc_RNA (1)...(19): siRNA sense strand
cggccaaggagguguuuaa

SEQ ID NO: 2647975 - RNA, 19 nt, Homo sapiens
  misc_RNA (1)...(19): siRNA sense strand
aggaacggauggagaggaa

SEQ ID NO: 2647976 - RNA, 19 nt, Homo sapiens
  misc_RNA (1)...(19): siRNA sense strand
cgcagaaggaccuggguua

SEQ ID NO: 2647977 - RNA, 19 nt, Homo sapiens
  misc_RNA (1)...(19): siRNA sense strand
gggagaaguaugaaagcuu

SEQ ID NO: 2647978 - RNA, 19 nt, Homo sapiens
  misc_RNA (1)...(19): siRNA sense strand
cagcagaacuggaugagca

SEQ ID NO: 2647979 - RNA, 19 nt, Homo sapiens
  misc_RNA (1)...(19): siRNA sense strand
ccaagagagccuacagaau

SEQ ID NO: 2647980 - RNA, 19 nt, Homo sapiens
  misc_RNA (1)...(19): siRNA sense strand
gugcccugcuugagagcua

SEQ ID NO: 2647981 - RNA, 19 nt, Homo sapiens
  misc_RNA (1)...(19): siRNA sense strand
gugcugaaggccaugguaa

SEQ ID NO: 2647982 - RNA, 19 nt, Homo sapiens
  misc_RNA (1)...(19): siRNA sense strand
ggaaggcucuggagggcau

SEQ ID NO: 2647983 - RNA, 19 nt, Homo sapiens
  misc_RNA (1)...(19): siRNA sense strand
cugaggaagaguugugcaa

SEQ ID NO: 2647984 - RNA, 19 nt, Homo sapiens
  misc_RNA (1)...(19): siRNA sense strand
cggaaggaguauuugacca

SEQ ID NO: 2647985 - RNA, 19 nt, Homo sapiens
  misc_RNA (1)...(19): siRNA sense strand
ccucaggcuuguaagaaca

SEQ ID NO: 2647986 - RNA, 19 nt, Homo sapiens
  misc_RNA (1)...(19): siRNA sense strand
augugaaggauguggugaa

SEQ ID NO: 2647987 - RNA, 19 nt, Homo sapiens
  misc_RNA (1)...(19): siRNA sense strand
gaugauaccucgaacacca

SEQ ID NO: 2647988 - RNA, 19 nt, Homo sapiens
  misc_RNA (1)...(19): siRNA sense strand
cgacaaacagguacagcca

SEQ ID NO: 2647989 - RNA, 19 nt, Homo sapiens
  misc_RNA (1)...(19): siRNA sense strand
cagaugagcgggaacggaa

SEQ ID NO: 2647990 - RNA, 19 nt, Homo sapiens
  misc_RNA (1)...(19): siRNA sense strand
gcagauuggccuacggcuu

SEQ ID NO: 2647991 - RNA, 19 nt, Homo sapiens
  misc_RNA (1)...(19): siRNA sense strand
ccgaguugcugcaggagga

SEQ ID NO: 2647992 - RNA, 19 nt, Homo sapiens
  misc_RNA (1)...(19): siRNA sense strand
gugagggagaaguaugaaa

SEQ ID NO: 2647993 - RNA, 19 nt, Homo sapiens
  misc_RNA (1)...(19): siRNA sense strand
gucugaagcuggugcccaa

SEQ ID NO: 2647994 - RNA, 19 nt, Homo sapiens
  misc_RNA (1)...(19): siRNA sense strand
gaggaaaggagaacgggca

SEQ ID NO: 2647995 - RNA, 19 nt, Homo sapiens
  misc_RNA (1)...(19): siRNA sense strand
aguauuugaccaugaguuu

SEQ ID NO: 2647996 - RNA, 19 nt, Homo sapiens
  misc_RNA (1)...(19): siRNA sense strand
cagcagggaccauugacaa

SEQ ID NO: 2647997 - RNA, 19 nt, Homo sapiens
  misc_RNA (1)...(19): siRNA sense strand
gcuacagacugcagugcca

SEQ ID NO: 2647998 - RNA, 19 nt, Homo sapiens
  misc_RNA (1)...(19): siRNA sense strand
agacaaucugggugagguu

SEQ ID NO: 2647999 - RNA, 19 nt, Homo sapiens
  misc_RNA (1)...(19): siRNA sense strand
uggaaaccgaggagggcau

SEQ ID NO: 2648000 - RNA, 19 nt, Homo sapiens
  misc_RNA (1)...(19): siRNA sense strand
auggguacagcgugagaua

SEQ ID NO: 2648001 - RNA, 19 nt, Homo sapiens
  misc_RNA (1)...(19): siRNA sense strand
gggcauuaucagcaacuuu

SEQ ID NO: 2648002 - RNA, 19 nt, Homo sapiens
  misc_RNA (1)...(19): siRNA sense strand
ggguacagcgugagauauc

SEQ ID NO: 2648003 - RNA, 19 nt, Homo sapiens
  misc_RNA (1)...(19): siRNA sense strand
aggagaagagcaaauacaa

SEQ ID NO: 2648004 - RNA, 19 nt, Homo sapiens
  misc_RNA (1)...(19): siRNA sense strand
aguucgaaauggacacgua

SEQ ID NO: 2648005 - RNA, 19 nt, Homo sapiens
  misc_RNA (1)...(19): siRNA sense strand
acacguaugcuaagagcca

SEQ ID NO: 2648006 - RNA, 19 nt, Homo sapiens
  misc_RNA (1)...(19): siRNA sense strand
cugacuuccuggagaacca

SEQ ID NO: 2648007 - RNA, 19 nt, Homo sapiens
  misc_RNA (1)...(19): siRNA sense strand
caguggugugaguggacaa

SEQ ID NO: 2648008 - RNA, 19 nt, Homo sapiens
  misc_RNA (1)...(19): siRNA sense strand
uccaaggagaagagcaaau

SEQ ID NO: 2648009 - RNA, 19 nt, Homo sapiens
  misc_RNA (1)...(19): siRNA sense strand
ggcagauggcuguaaguga

SEQ ID NO: 2648010 - RNA, 19 nt, Homo sapiens
  misc_RNA (1)...(19): siRNA sense strand
uauccaacuucgaguacuu

SEQ ID NO: 2648011 - RNA, 19 nt, Homo sapiens
  misc_RNA (1)...(19): siRNA sense strand
ccaacgagaagguaggcga

SEQ ID NO: 2648012 - RNA, 19 nt, Homo sapiens
  misc_RNA (1)...(19): siRNA sense strand
caauaaggcccauggagcu

SEQ ID NO: 2648013 - RNA, 19 nt, Homo sapiens
  misc_RNA (1)...(19): siRNA sense strand
ugacggugacagaggacuu

SEQ ID NO: 2648014 - RNA, 19 nt, Homo sapiens
  misc_RNA (1)...(19): siRNA sense strand
ggaacggucuaguguagga

SEQ ID NO: 2648015 - RNA, 19 nt, Homo sapiens
  misc_RNA (1)...(19): siRNA sense strand
gcuuaugagcagugggcag

SEQ ID NO: 2648016 - RNA, 19 nt, Homo sapiens
  misc_RNA (1)...(19): siRNA sense strand
guaugaaagcuuugaggac

SEQ ID NO: 2648017 - RNA, 19 nt, Homo sapiens
  misc_RNA (1)...(19): siRNA sense strand
gcccaaagaggcugaagca

SEQ ID NO: 2648018 - RNA, 19 nt, Homo sapiens
  misc_RNA (1)...(19): siRNA sense strand
cagcauaguucgggagcac

SEQ ID NO: 2648019 - RNA, 19 nt, Homo sapiens
  misc_RNA (1)...(19): siRNA sense strand
gcugcuagaccgugccuau

SEQ ID NO: 2648020 - RNA, 19 nt, Homo sapiens
  misc_RNA (1)...(19): siRNA sense strand
aaugggaaguugcgggcuu

SEQ ID NO: 2648021 - RNA, 19 nt, Homo sapiens
  misc_RNA (1)...(19): siRNA sense strand
ggaaaggagaacgggcaga

SEQ ID NO: 2648022 - RNA, 19 nt, Homo sapiens
  misc_RNA (1)...(19): siRNA sense strand
caaagaggcugaagcaggu

SEQ ID NO: 2648023 - RNA, 19 nt, Homo sapiens
  misc_RNA (1)...(19): siRNA sense strand
ucagaggaacggauggaga

SEQ ID NO: 2648024 - RNA, 19 nt, Homo sapiens
  misc_RNA (1)...(19): siRNA sense strand
cugcaugagcucagcacca

SEQ ID NO: 2648025 - RNA, 19 nt, Homo sapiens
  misc_RNA (1)...(19): siRNA sense strand
gcuacacggcagugcugaa

SEQ ID NO: 2648026 - RNA, 19 nt, Homo sapiens
  misc_RNA (1)...(19): siRNA sense strand
cuguagaccuggaccaugu

SEQ ID NO: 2648027 - RNA, 19 nt, Homo sapiens
  misc_RNA (1)...(19): siRNA sense strand
acgacuuugucaagaggaa

SEQ ID NO: 2648028 - RNA, 19 nt, Homo sapiens
  misc_RNA (1)...(19): siRNA sense strand
cuaagcagcccgugcgaca

SEQ ID NO: 2648029 - RNA, 19 nt, Homo sapiens
  misc_RNA (1)...(19): siRNA sense strand
gcgccaaggacuccaccaa

SEQ ID NO: 2648030 - RNA, 19 nt, Homo sapiens
  misc_RNA (1)...(19): siRNA sense strand
gcaucaaguauauccucaa

SEQ ID NO: 2648031 - RNA, 19 nt, Homo sapiens
  misc_RNA (1)...(19): siRNA sense strand
cgacuuugucaagaggaaa

SEQ ID NO: 2648032 - RNA, 19 nt, Homo sapiens
  misc_RNA (1)...(19): siRNA sense strand
ugaaauacacagaggacau

SEQ ID NO: 2648033 - RNA, 19 nt, Homo sapiens
  misc_RNA (1)...(19): siRNA sense strand
cuacaguccaggagggcaa

SEQ ID NO: 2648034 - RNA, 19 nt, Homo sapiens
  misc_RNA (1)...(19): siRNA sense strand
gcaaugagcuccuggugga

SEQ ID NO: 2648035 - RNA, 19 nt, Homo sapiens
  misc_RNA (1)...(19): siRNA sense strand
gggcuauuuccuaggagaa

SEQ ID NO: 2648036 - RNA, 19 nt, Homo sapiens
  misc_RNA (1)...(19): siRNA sense strand
augaggaggaagaggaaga

SEQ ID NO: 2648037 - RNA, 19 nt, Homo sapiens
  misc_RNA (1)...(19): siRNA sense strand
agucugacaacgagggcua

SEQ ID NO: 2648038 - RNA, 19 nt, Homo sapiens
  misc_RNA (1)...(19): siRNA sense strand
gagcagaaccagacccaga

SEQ ID NO: 2648039 - RNA, 19 nt, Homo sapiens
  misc_RNA (1)...(19): siRNA sense strand
uguuugacuuucagaggaa

SEQ ID NO: 2648040 - RNA, 19 nt, Homo sapiens
  misc_RNA (1)...(19): siRNA sense strand
gggaagauauacuguggca

SEQ ID NO: 2648041 - RNA, 19 nt, Homo sapiens
  misc_RNA (1)...(19): siRNA sense strand
ucugagaagcugagcaaca

SEQ ID NO: 2648042 - RNA, 19 nt, Homo sapiens
  misc_RNA (1)...(19): siRNA sense strand
uggagaagaccaucagcaa

SEQ ID NO: 2648043 - RNA, 19 nt, Homo sapiens
  misc_RNA (1)...(19): siRNA sense strand
agccagaggaaacgcgaaa

SEQ ID NO: 2648044 - RNA, 19 nt, Homo sapiens
  misc_RNA (1)...(19): siRNA sense strand
aggaaugccgagaagacua

SEQ ID NO: 2648045 - RNA, 19 nt, Homo sapiens
  misc_RNA (1)...(19): siRNA sense strand
ugucugagaagcugagcaa

SEQ ID NO: 2648046 - RNA, 19 nt, Homo sapiens
  misc_RNA (1)...(19): siRNA sense strand
ccucacagguccaggcguu

SEQ ID NO: 2648047 - RNA, 19 nt, Homo sapiens
  misc_RNA (1)...(19): siRNA sense strand
accaagaugggaagauaua

SEQ ID NO: 2648048 - RNA, 19 nt, Homo sapiens
  misc_RNA (1)...(19): siRNA sense strand
cuggagagaaacugcgaau

SEQ ID NO: 2648049 - RNA, 19 nt, Homo sapiens
  misc_RNA (1)...(19): siRNA sense strand
aagagaagagggagcugaa

SEQ ID NO: 2648050 - RNA, 19 nt, Homo sapiens
  misc_RNA (1)...(19): siRNA sense strand
gaguaugauugguguucca

SEQ ID NO: 2648051 - RNA, 19 nt, Homo sapiens
  misc_RNA (1)...(19): siRNA sense strand
agaaagucccuuaugucaa

SEQ ID NO: 2648052 - RNA, 19 nt, Homo sapiens
  misc_RNA (1)...(19): siRNA sense strand
cagcggagcuuccaggaga

SEQ ID NO: 2648053 - RNA, 19 nt, Homo sapiens
  misc_RNA (1)...(19): siRNA sense strand
ggagcuuccaggagagcau

SEQ ID NO: 2648054 - RNA, 19 nt, Homo sapiens
  misc_RNA (1)...(19): siRNA sense strand
caccaugacaggagcuauu

SEQ ID NO: 2648055 - RNA, 19 nt, Homo sapiens
  misc_RNA (1)...(19): siRNA sense strand
aggaagaggaagaggaagg

SEQ ID NO: 2648056 - RNA, 19 nt, Homo sapiens
  misc_RNA (1)...(19): siRNA sense strand
uuggcaagaacaagggcaa

SEQ ID NO: 2648057 - RNA, 19 nt, Homo sapiens
  misc_RNA (1)...(19): siRNA sense strand
augacaaugagguucgaua

SEQ ID NO: 2648058 - RNA, 19 nt, Homo sapiens
  misc_RNA (1)...(19): siRNA sense strand
ggacaguugcacagcagga

SEQ ID NO: 2648059 - RNA, 19 nt, Homo sapiens
  misc_RNA (1)...(19): siRNA sense strand
aaaagacagaagagcaaaa

SEQ ID NO: 2648060 - RNA, 19 nt, Homo sapiens
  misc_RNA (1)...(19): siRNA sense strand
acaagauggagcagaacca

SEQ ID NO: 2648061 - RNA, 19 nt, Homo sapiens
  misc_RNA (1)...(19): siRNA sense strand
aggaaaagacagaagagca

SEQ ID NO: 2648062 - RNA, 19 nt, Homo sapiens
  misc_RNA (1)...(19): siRNA sense strand
ggcaagaacaagggcaaga

SEQ ID NO: 2648063 - RNA, 19 nt, Homo sapiens
  misc_RNA (1)...(19): siRNA sense strand
agaacaagggcaagacgga

SEQ ID NO: 2648064 - RNA, 19 nt, Homo sapiens
  misc_RNA (1)...(19): siRNA sense strand
auaugaggaggaagaggaa

SEQ ID NO: 2648065 - RNA, 19 nt, Homo sapiens
  misc_RNA (1)...(19): siRNA sense strand
aggaggaagaggaagagga

SEQ ID NO: 2648066 - RNA, 19 nt, Homo sapiens
  misc_RNA (1)...(19): siRNA sense strand
gcgugaggauccagcccau

SEQ ID NO: 2648067 - RNA, 19 nt, Homo sapiens
  misc_RNA (1)...(19): siRNA sense strand
guuccggagcgcagaguca

SEQ ID NO: 2648068 - RNA, 19 nt, Homo sapiens
  misc_RNA (1)...(19): siRNA sense strand
gggucaagccuguggcaaa

SEQ ID NO: 2648069 - RNA, 19 nt, Homo sapiens
  misc_RNA (1)...(19): siRNA sense strand
ggaaagaaggggauggaau

SEQ ID NO: 2648070 - RNA, 19 nt, Homo sapiens
  misc_RNA (1)...(19): siRNA sense strand
cggagauauugaucaacaa

SEQ ID NO: 2648071 - RNA, 19 nt, Homo sapiens
  misc_RNA (1)...(19): siRNA sense strand
ggacccgaguucugggcaa

SEQ ID NO: 2648072 - RNA, 19 nt, Homo sapiens
  misc_RNA (1)...(19): siRNA sense strand
ccuugaagaaagaguuaau

SEQ ID NO: 2648073 - RNA, 19 nt, Homo sapiens
  misc_RNA (1)...(19): siRNA sense strand
gaagcuugaugcugggcua

SEQ ID NO: 2648074 - RNA, 19 nt, Homo sapiens
  misc_RNA (1)...(19): siRNA sense strand
ggaaacagauggaagaggu

SEQ ID NO: 2648075 - RNA, 19 nt, Homo sapiens
  misc_RNA (1)...(19): siRNA sense strand
gccauuaaggagaggauga

SEQ ID NO: 2648076 - RNA, 19 nt, Homo sapiens
  misc_RNA (1)...(19): siRNA sense strand
ugggauuggcacugagaau

SEQ ID NO: 2648077 - RNA, 19 nt, Homo sapiens
  misc_RNA (1)...(19): siRNA sense strand
aaugagaaggugugugaau

SEQ ID NO: 2648078 - RNA, 19 nt, Homo sapiens
  misc_RNA (1)...(19): siRNA sense strand
cccauaaacuauuggaacu

SEQ ID NO: 2648079 - RNA, 19 nt, Homo sapiens
  misc_RNA (1)...(19): siRNA sense strand
aaggagaggaugaugaaga

SEQ ID NO: 2648080 - RNA, 19 nt, Homo sapiens
  misc_RNA (1)...(19): siRNA sense strand
cuuggauagcaaagugaaa

SEQ ID NO: 2648081 - RNA, 19 nt, Homo sapiens
  misc_RNA (1)...(19): siRNA sense strand
aacagauggaagagguaaa

SEQ ID NO: 2648082 - RNA, 19 nt, Homo sapiens
  misc_RNA (1)...(19): siRNA sense strand
aggaugaugaagaagggaa

SEQ ID NO: 2648083 - RNA, 19 nt, Homo sapiens
  misc_RNA (1)...(19): siRNA sense strand
gagauagacuuacugggua

SEQ ID NO: 2648084 - RNA, 19 nt, Homo sapiens
  misc_RNA (1)...(19): siRNA sense strand
aauucuaugaugugagcua

SEQ ID NO: 2648085 - RNA, 19 nt, Homo sapiens
  misc_RNA (1)...(19): siRNA sense strand
ggccuugaagaaagaguua

SEQ ID NO: 2648086 - RNA, 19 nt, Homo sapiens
  misc_RNA (1)...(19): siRNA sense strand
gguaccuaguagaugaaau

SEQ ID NO: 2648087 - RNA, 19 nt, Homo sapiens
  misc_RNA (1)...(19): siRNA sense strand
uagcaaagugaaaggagca

SEQ ID NO: 2648088 - RNA, 19 nt, Homo sapiens
  misc_RNA (1)...(19): siRNA sense strand
uguggaaacagauggaaga

SEQ ID NO: 2648089 - RNA, 19 nt, Homo sapiens
  misc_RNA (1)...(19): siRNA sense strand
gauucaaguuacugaugga

SEQ ID NO: 2648090 - RNA, 19 nt, Homo sapiens
  misc_RNA (1)...(19): siRNA sense strand
ccucagagagauggaagaa

SEQ ID NO: 2648091 - RNA, 19 nt, Homo sapiens
  misc_RNA (1)...(19): siRNA sense strand
gauuuaugaccgaagcauu

SEQ ID NO: 2648092 - RNA, 19 nt, Homo sapiens
  misc_RNA (1)...(19): siRNA sense strand
aaaugauaccugaggaacu

SEQ ID NO: 2648093 - RNA, 19 nt, Homo sapiens
  misc_RNA (1)...(19): siRNA sense strand
gauuuggagaugagagacu

SEQ ID NO: 2648094 - RNA, 19 nt, Homo sapiens
  misc_RNA (1)...(19): siRNA sense strand
guacauuaggccuugaaga

SEQ ID NO: 2648095 - RNA, 19 nt, Homo sapiens
  misc_RNA (1)...(19): siRNA sense strand
ccuggaugagauagacuua

SEQ ID NO: 2648096 - RNA, 19 nt, Homo sapiens
  misc_RNA (1)...(19): siRNA sense strand
ggaugaugaagaagggaag

SEQ ID NO: 2648097 - RNA, 19 nt, Homo sapiens
  misc_RNA (1)...(19): siRNA sense strand
cuggaaaggcggagagacc

SEQ ID NO: 2648098 - RNA, 19 nt, Homo sapiens
  misc_RNA (1)...(19): siRNA sense strand
gcuaauaauggaagaggug

SEQ ID NO: 2648099 - RNA, 19 nt, Homo sapiens
  misc_RNA (1)...(19): siRNA sense strand
ggagaagcaagucuggcaa

SEQ ID NO: 2648100 - RNA, 19 nt, Homo sapiens
  misc_RNA (1)...(19): siRNA sense strand
agacaaaucugaucuucuu

SEQ ID NO: 2648101 - RNA, 19 nt, Homo sapiens
  misc_RNA (1)...(19): siRNA sense strand
acugauggaaccugaauau

SEQ ID NO: 2648102 - RNA, 19 nt, Homo sapiens
  misc_RNA (1)...(19): siRNA sense strand
aagaacuggacgcuggaaa

SEQ ID NO: 2648103 - RNA, 19 nt, Homo sapiens
  misc_RNA (1)...(19): siRNA sense strand
ugcaaugaauuuagcuaga

SEQ ID NO: 2648104 - RNA, 19 nt, Homo sapiens
  misc_RNA (1)...(19): siRNA sense strand
augaagaagggaagcuuga

SEQ ID NO: 2648105 - RNA, 19 nt, Homo sapiens
  misc_RNA (1)...(19): siRNA sense strand
acggagauauugaucaaca

SEQ ID NO: 2648106 - RNA, 19 nt, Homo sapiens
  misc_RNA (1)...(19): siRNA sense strand
augcaaaagcuggagaaaa

SEQ ID NO: 2648107 - RNA, 19 nt, Homo sapiens
  misc_RNA (1)...(19): siRNA sense strand
uaaaaugauaccugaggaa

SEQ ID NO: 2648108 - RNA, 19 nt, Homo sapiens
  misc_RNA (1)...(19): siRNA sense strand
uagcagaagaccagaugca

SEQ ID NO: 2648109 - RNA, 19 nt, Homo sapiens
  misc_RNA (1)...(19): siRNA sense strand
uggaugaaauagcagacau

SEQ ID NO: 2648110 - RNA, 19 nt, Homo sapiens
  misc_RNA (1)...(19): siRNA sense strand
auuaaggagaggaugauga

SEQ ID NO: 2648111 - RNA, 19 nt, Homo sapiens
  misc_RNA (1)...(19): siRNA sense strand
uggaagaggugguuuugaa

SEQ ID NO: 2648112 - RNA, 19 nt, Homo sapiens
  misc_RNA (1)...(19): siRNA sense strand
ccaauauguaugcaaugaa

SEQ ID NO: 2648113 - RNA, 19 nt, Homo sapiens
  misc_RNA (1)...(19): siRNA sense strand
acauuaggccuugaagaaa

SEQ ID NO: 2648114 - RNA, 19 nt, Homo sapiens
  misc_RNA (1)...(19): siRNA sense strand
ccaaauauuaacagagagc

SEQ ID NO: 2648115 - RNA, 19 nt, Homo sapiens
  misc_RNA (1)...(19): siRNA sense strand
uguccaauauguaugcaau

SEQ ID NO: 2648116 - RNA, 19 nt, Homo sapiens
  misc_RNA (1)...(19): siRNA sense strand
ucaagaaaagagaaggauu

SEQ ID NO: 2648117 - RNA, 19 nt, Homo sapiens
  misc_RNA (1)...(19): siRNA sense strand
caagaaaagagaaggauuc

SEQ ID NO: 2648118 - RNA, 19 nt, Homo sapiens
  misc_RNA (1)...(19): siRNA sense strand
uggacuuccuccuggauga

SEQ ID NO: 2648119 - RNA, 19 nt, Homo sapiens
  misc_RNA (1)...(19): siRNA sense strand
agaacaggacagagauaaa

SEQ ID NO: 2648120 - RNA, 19 nt, Homo sapiens
  misc_RNA (1)...(19): siRNA sense strand
ucgcauaagagcaaagaau

SEQ ID NO: 2648121 - RNA, 19 nt, Homo sapiens
  misc_RNA (1)...(19): siRNA sense strand
uggaagaagcauaagaaca

SEQ ID NO: 2648122 - RNA, 19 nt, Homo sapiens
  misc_RNA (1)...(19): siRNA sense strand
cauuaacagucaaggcgaa

SEQ ID NO: 2648123 - RNA, 19 nt, Homo sapiens
  misc_RNA (1)...(19): siRNA sense strand
aggcuguggcccugagaaa

SEQ ID NO: 2648124 - RNA, 19 nt, Homo sapiens
  misc_RNA (1)...(19): siRNA sense strand
cuggaaaggauguguucaa

SEQ ID NO: 2648125 - RNA, 19 nt, Homo sapiens
  misc_RNA (1)...(19): siRNA sense strand
ucagcaagcucuauggaga

SEQ ID NO: 2648126 - RNA, 19 nt, Homo sapiens
  misc_RNA (1)...(19): siRNA sense strand
cgucaaauaaugugcagga

SEQ ID NO: 2648127 - RNA, 19 nt, Homo sapiens
  misc_RNA (1)...(19): siRNA sense strand
aagcauaagaacaucggaa

SEQ ID NO: 2648128 - RNA, 19 nt, Homo sapiens
  misc_RNA (1)...(19): siRNA sense strand
gcauaagaacaucggaacu

SEQ ID NO: 2648129 - RNA, 19 nt, Homo sapiens
  misc_RNA (1)...(19): siRNA sense strand
ccgcgaaggaagaggcugu

SEQ ID NO: 2648130 - RNA, 19 nt, Homo sapiens
  misc_RNA (1)...(19): siRNA sense strand
aggauguguucaacgcaaa

SEQ ID NO: 2648131 - RNA, 19 nt, Homo sapiens
  misc_RNA (1)...(19): siRNA sense strand
ggaaggaugucguggagag

SEQ ID NO: 2648132 - RNA, 19 nt, Homo sapiens
  misc_RNA (1)...(19): siRNA sense strand
caggaagagcggaccaaga

SEQ ID NO: 2648133 - RNA, 19 nt, Homo sapiens
  misc_RNA (1)...(19): siRNA sense strand
cugagaaagaucacgucua

SEQ ID NO: 2648134 - RNA, 19 nt, Homo sapiens
  misc_RNA (1)...(19): siRNA sense strand
gcagaacugaagaugggaa

SEQ ID NO: 2648135 - RNA, 19 nt, Homo sapiens
  misc_RNA (1)...(19): siRNA sense strand
aggaugucguggagaggga

SEQ ID NO: 2648136 - RNA, 19 nt, Homo sapiens
  misc_RNA (1)...(19): siRNA sense strand
aggaauaccguguguggga

SEQ ID NO: 2648137 - RNA, 19 nt, Homo sapiens
  misc_RNA (1)...(19): siRNA sense strand
uggccuugcugauggugaa

SEQ ID NO: 2648138 - RNA, 19 nt, Homo sapiens
  misc_RNA (1)...(19): siRNA sense strand
auuauaacauggacggcau

SEQ ID NO: 2648139 - RNA, 19 nt, Homo sapiens
  misc_RNA (1)...(19): siRNA sense strand
aggccuggauagcgucaaa

SEQ ID NO: 2648140 - RNA, 19 nt, Homo sapiens
  misc_RNA (1)...(19): siRNA sense strand
aggaagaggcuguggcccu

SEQ ID NO: 2648141 - RNA, 19 nt, Homo sapiens
  misc_RNA (1)...(19): siRNA sense strand
ggaccaagaagccgggaac

SEQ ID NO: 2648142 - RNA, 19 nt, Homo sapiens
  misc_RNA (1)...(19): siRNA sense strand
gguccugaggcacgggaau

SEQ ID NO: 2648143 - RNA, 19 nt, Homo sapiens
  misc_RNA (1)...(19): siRNA sense strand
ggcuguaucccgcuggaaa

SEQ ID NO: 2648144 - RNA, 19 nt, Homo sapiens
  misc_RNA (1)...(19): siRNA sense strand
ccuggauagcgucaaauaa

SEQ ID NO: 2648145 - RNA, 19 nt, Homo sapiens
  misc_RNA (1)...(19): siRNA sense strand
acugaagaugggaagauuu

SEQ ID NO: 2648146 - RNA, 19 nt, Homo sapiens
  misc_RNA (1)...(19): siRNA sense strand
ggaaaaucagcaagcucua

SEQ ID NO: 2648147 - RNA, 19 nt, Homo sapiens
  misc_RNA (1)...(19): siRNA sense strand
ucguggagagggaggcauu

SEQ ID NO: 2648148 - RNA, 19 nt, Homo sapiens
  misc_RNA (1)...(19): siRNA sense strand
ccaccuaccuccagagcag

SEQ ID NO: 2648149 - RNA, 19 nt, Homo sapiens
  misc_RNA (1)...(19): siRNA sense strand
aagugaaaguguaggaaaa

SEQ ID NO: 2648150 - RNA, 19 nt, Homo sapiens
  misc_RNA (1)...(19): siRNA sense strand
aagaagaagagguagagaa

SEQ ID NO: 2648151 - RNA, 19 nt, Homo sapiens
  misc_RNA (1)...(19): siRNA sense strand
augaagaagaagagguaga

SEQ ID NO: 2648152 - RNA, 19 nt, Homo sapiens
  misc_RNA (1)...(19): siRNA sense strand
gaggaaggucagagauaca

SEQ ID NO: 2648153 - RNA, 19 nt, Homo sapiens
  misc_RNA (1)...(19): siRNA sense strand
gaagaauauuauccgggaa

SEQ ID NO: 2648154 - RNA, 19 nt, Homo sapiens
  misc_RNA (1)...(19): siRNA sense strand
gacugaaacuauucggcaa

SEQ ID NO: 2648155 - RNA, 19 nt, Homo sapiens
  misc_RNA (1)...(19): siRNA sense strand
gaguguggccagaugcaaa

SEQ ID NO: 2648156 - RNA, 19 nt, Homo sapiens
  misc_RNA (1)...(19): siRNA sense strand
agauguaaauggaccaaaa

SEQ ID NO: 2648157 - RNA, 19 nt, Homo sapiens
  misc_RNA (1)...(19): siRNA sense strand
agcuguggauucagagaua

SEQ ID NO: 2648158 - RNA, 19 nt, Homo sapiens
  misc_RNA (1)...(19): siRNA sense strand
auucagagauacuggagau

SEQ ID NO: 2648159 - RNA, 19 nt, Homo sapiens
  misc_RNA (1)...(19): siRNA sense strand
gcucugaugaagaagaaga

SEQ ID NO: 2648160 - RNA, 19 nt, Homo sapiens
  misc_RNA (1)...(19): siRNA sense strand
agaauuaagaaauggagga

SEQ ID NO: 2648161 - RNA, 19 nt, Homo sapiens
  misc_RNA (1)...(19): siRNA sense strand
auuaagaaauggaggagcu

SEQ ID NO: 2648162 - RNA, 19 nt, Homo sapiens
  misc_RNA (1)...(19): siRNA sense strand
uggaaauggcagucacuau

SEQ ID NO: 2648163 - RNA, 19 nt, Homo sapiens
  misc_RNA (1)...(19): siRNA sense strand
aggaaauacugguggaacc

SEQ ID NO: 2648164 - RNA, 19 nt, Homo sapiens
  misc_RNA (1)...(19): siRNA sense strand
gagaauagaaggccgcuga

SEQ ID NO: 2648165 - RNA, 19 nt, Homo sapiens
  misc_RNA (1)...(19): siRNA sense strand
agucuaaaggauacccaaa

SEQ ID NO: 2648166 - RNA, 19 nt, Homo sapiens
  misc_RNA (1)...(19): siRNA sense strand
ugacgggauuucuggguga

SEQ ID NO: 2648167 - RNA, 19 nt, Homo sapiens
  misc_RNA (1)...(19): siRNA sense strand
gaauauuauccgggaacau

SEQ ID NO: 2648168 - RNA, 19 nt, Homo sapiens
  misc_RNA (1)...(19): siRNA sense strand
uuaucaugacagugaggaa

SEQ ID NO: 2648169 - RNA, 19 nt, Homo sapiens
  misc_RNA (1)...(19): siRNA sense strand
cggugcaagugaaagugua

SEQ ID NO: 2648170 - RNA, 19 nt, Homo sapiens
  misc_RNA (1)...(19): siRNA sense strand
cggcaagaacaagaauuaa

SEQ ID NO: 2648171 - RNA, 19 nt, Homo sapiens
  misc_RNA (1)...(19): siRNA sense strand
uggaccaagugacgggauu

SEQ ID NO: 2648172 - RNA, 19 nt, Homo sapiens
  misc_RNA (1)...(19): siRNA sense strand
gugaagacagccagcuaga

SEQ ID NO: 2648173 - RNA, 19 nt, Homo sapiens
  misc_RNA (1)...(19): siRNA sense strand
gcugaagagcccaguacca

SEQ ID NO: 2648174 - RNA, 19 nt, Homo sapiens
  misc_RNA (1)...(19): siRNA sense strand
acgugcagucuaaaggaua

SEQ ID NO: 2648175 - RNA, 19 nt, Homo sapiens
  misc_RNA (1)...(19): siRNA sense strand
cguuuguggcucugaugaa

SEQ ID NO: 2648176 - RNA, 19 nt, Homo sapiens
  misc_RNA (1)...(19): siRNA sense strand
agguuuaucaugacaguga

SEQ ID NO: 2648177 - RNA, 19 nt, Homo sapiens
  misc_RNA (1)...(19): siRNA sense strand
gggauuucugggugaacau

SEQ ID NO: 2648178 - RNA, 19 nt, Homo sapiens
  misc_RNA (1)...(19): siRNA sense strand
aagugaagacagccagcua

SEQ ID NO: 2648179 - RNA, 19 nt, Homo sapiens
  misc_RNA (1)...(19): siRNA sense strand
uggcucugaugaagaagaa

SEQ ID NO: 2648180 - RNA, 19 nt, Homo sapiens
  misc_RNA (1)...(19): siRNA sense strand
agguagagaaucuugccaa

SEQ ID NO: 2648181 - RNA, 19 nt, Homo sapiens
  misc_RNA (1)...(19): siRNA sense strand
gcauagaaaagaggagaau

SEQ ID NO: 2648182 - RNA, 19 nt, Homo sapiens
  misc_RNA (1)...(19): siRNA sense strand
agaaaagaggagaauagaa

SEQ ID NO: 2648183 - RNA, 19 nt, Homo sapiens
  misc_RNA (1)...(19): siRNA sense strand
ggaccaagugacgggauuu

SEQ ID NO: 2648184 - RNA, 19 nt, Homo sapiens
  misc_RNA (1)...(19): siRNA sense strand
aagaaauggaggagcuauc

SEQ ID NO: 2648185 - RNA, 19 nt, Homo sapiens
  misc_RNA (1)...(19): siRNA sense strand
cagugaggaaggucagaga

SEQ ID NO: 2648186 - RNA, 19 nt, Homo sapiens
  misc_RNA (1)...(19): siRNA sense strand
cguuagaaacacaguucaa

SEQ ID NO: 2648187 - RNA, 19 nt, Homo sapiens
  misc_RNA (1)...(19): siRNA sense strand
acuccaagcguuagaaaca

SEQ ID NO: 2648188 - RNA, 19 nt, Homo sapiens
  misc_RNA (1)...(19): siRNA sense strand
cauaguaaggcuuuggcaa

SEQ ID NO: 2648189 - RNA, 19 nt, Homo sapiens
  misc_RNA (1)...(19): siRNA sense strand
gggaagauggaguagacca

SEQ ID NO: 2648190 - RNA, 19 nt, Homo sapiens
  misc_RNA (1)...(19): siRNA sense strand
aaggauaaccugaugcaga

SEQ ID NO: 2648191 - RNA, 19 nt, Homo sapiens
  misc_RNA (1)...(19): siRNA sense strand
uagacuucaccaaggauaa

SEQ ID NO: 2648192 - RNA, 19 nt, Homo sapiens
  misc_RNA (1)...(19): siRNA sense strand
gaacaucauaguaaggcuu

SEQ ID NO: 2648193 - RNA, 19 nt, Homo sapiens
  misc_RNA (1)...(19): siRNA sense strand
gcguuagaguuguauggga

SEQ ID NO: 2648194 - RNA, 19 nt, Homo sapiens
  misc_RNA (1)...(19): siRNA sense strand
agguaauugagaaggggaa

SEQ ID NO: 2648195 - RNA, 19 nt, Homo sapiens
  misc_RNA (1)...(19): siRNA sense strand
gguaauugagaaggggaaa

SEQ ID NO: 2648196 - RNA, 19 nt, Homo sapiens
  misc_RNA (1)...(19): siRNA sense strand
aggaaguggaagaggaaga

SEQ ID NO: 2648197 - RNA, 19 nt, Homo sapiens
  misc_RNA (1)...(19): siRNA sense strand
acaaagagccagagccuga

SEQ ID NO: 2648198 - RNA, 19 nt, Homo sapiens
  misc_RNA (1)...(19): siRNA sense strand
uggaagaggaagacaguga

SEQ ID NO: 2648199 - RNA, 19 nt, Homo sapiens
  misc_RNA (1)...(19): siRNA sense strand
aggaggaggaaguggaaga

SEQ ID NO: 2648200 - RNA, 19 nt, Homo sapiens
  misc_RNA (1)...(19): siRNA sense strand
cguccauguuugccagaaa

SEQ ID NO: 2648201 - RNA, 19 nt, Homo sapiens
  misc_RNA (1)...(19): siRNA sense strand
aagcaguggaacagaacaa

SEQ ID NO: 2648202 - RNA, 19 nt, Homo sapiens
  misc_RNA (1)...(19): siRNA sense strand
ggaaaauugccguggccaa

SEQ ID NO: 2648203 - RNA, 19 nt, Homo sapiens
  misc_RNA (1)...(19): siRNA sense strand
gagcuaaugaagugcaaca

SEQ ID NO: 2648204 - RNA, 19 nt, Homo sapiens
  misc_RNA (1)...(19): siRNA sense strand
ccuaauaagaccucagcuu

SEQ ID NO: 2648205 - RNA, 19 nt, Homo sapiens
  misc_RNA (1)...(19): siRNA sense strand
gccuagaggaggaggaagu

SEQ ID NO: 2648206 - RNA, 19 nt, Homo sapiens
  misc_RNA (1)...(19): siRNA sense strand
agaggaagacagugauaga

SEQ ID NO: 2648207 - RNA, 19 nt, Homo sapiens
  misc_RNA (1)...(19): siRNA sense strand
aggaggaaguggaagagga

SEQ ID NO: 2648208 - RNA, 19 nt, Homo sapiens
  misc_RNA (1)...(19): siRNA sense strand
aggaagacagugauagaga

SEQ ID NO: 2648209 - RNA, 19 nt, Homo sapiens
  misc_RNA (1)...(19): siRNA sense strand
ccauguaccaggaggcuga

SEQ ID NO: 2648210 - RNA, 19 nt, Homo sapiens
  misc_RNA (1)...(19): siRNA sense strand
ccaaaugaaaugagcucca

SEQ ID NO: 2648211 - RNA, 19 nt, Homo sapiens
  misc_RNA (1)...(19): siRNA sense strand
gagagauccaggagcugaa

SEQ ID NO: 2648212 - RNA, 19 nt, Homo sapiens
  misc_RNA (1)...(19): siRNA sense strand
gccuggaagcaguggaaca

SEQ ID NO: 2648213 - RNA, 19 nt, Homo sapiens
  misc_RNA (1)...(19): siRNA sense strand
cagcagaggaucaaaccau

SEQ ID NO: 2648214 - RNA, 19 nt, Homo sapiens
  misc_RNA (1)...(19): siRNA sense strand
gcucucuguacauggaaua

SEQ ID NO: 2648215 - RNA, 19 nt, Homo sapiens
  misc_RNA (1)...(19): siRNA sense strand
ugucagacuacgaggagga

SEQ ID NO: 2648216 - RNA, 19 nt, Homo sapiens
  misc_RNA (1)...(19): siRNA sense strand
ugacaaagagccagagccu

SEQ ID NO: 2648217 - RNA, 19 nt, Homo sapiens
  misc_RNA (1)...(19): siRNA sense strand
ucaagaaagcagagggcac

SEQ ID NO: 2648218 - RNA, 19 nt, Homo sapiens
  misc_RNA (1)...(19): siRNA sense strand
gagaaugcccagauggcca

SEQ ID NO: 2648219 - RNA, 19 nt, Homo sapiens
  misc_RNA (1)...(19): siRNA sense strand
ucuucaacgugcaggacau

SEQ ID NO: 2648220 - RNA, 19 nt, Homo sapiens
  misc_RNA (1)...(19): siRNA sense strand
acaucaagcgacugcggua

SEQ ID NO: 2648221 - RNA, 19 nt, Homo sapiens
  misc_RNA (1)...(19): siRNA sense strand
ggacauaaacagugcccuc

SEQ ID NO: 2648222 - RNA, 19 nt, Homo sapiens
  misc_RNA (1)...(19): siRNA sense strand
aaugauaaggcgaaguuga

SEQ ID NO: 2648223 - RNA, 19 nt, Homo sapiens
  misc_RNA (1)...(19): siRNA sense strand
cuggguaauuugaagacga

SEQ ID NO: 2648224 - RNA, 19 nt, Homo sapiens
  misc_RNA (1)...(19): siRNA sense strand
acugugaguaccugggcaa

SEQ ID NO: 2648225 - RNA, 19 nt, Homo sapiens
  misc_RNA (1)...(19): siRNA sense strand
gcucauuaagaucuggaau

SEQ ID NO: 2648226 - RNA, 19 nt, Homo sapiens
  misc_RNA (1)...(19): siRNA sense strand
ccagaaagcacgagagccc

SEQ ID NO: 2648227 - RNA, 19 nt, Homo sapiens
  misc_RNA (1)...(19): siRNA sense strand
cacggaagcuuucggguca

SEQ ID NO: 2648228 - RNA, 19 nt, Homo sapiens
  misc_RNA (1)...(19): siRNA sense strand
ccugcaaugauaaggcgaa

SEQ ID NO: 2648229 - RNA, 19 nt, Homo sapiens
  misc_RNA (1)...(19): siRNA sense strand
cagaaggaacacagccuca

SEQ ID NO: 2648230 - RNA, 19 nt, Homo sapiens
  misc_RNA (1)...(19): siRNA sense strand
acauaauggagaagucaau

SEQ ID NO: 2648231 - RNA, 19 nt, Homo sapiens
  misc_RNA (1)...(19): siRNA sense strand
augagaagucugagaacau

SEQ ID NO: 2648232 - RNA, 19 nt, Homo sapiens
  misc_RNA (1)...(19): siRNA sense strand
gaacagcagugcacggaca

SEQ ID NO: 2648233 - RNA, 19 nt, Homo sapiens
  misc_RNA (1)...(19): siRNA sense strand
uccaagaagaacugagaca

SEQ ID NO: 2648234 - RNA, 19 nt, Homo sapiens
  misc_RNA (1)...(19): siRNA sense strand
ccgggaagaugaugggaag

SEQ ID NO: 2648235 - RNA, 19 nt, Homo sapiens
  misc_RNA (1)...(19): siRNA sense strand
aggaaaagguguucgggca

SEQ ID NO: 2648236 - RNA, 19 nt, Homo sapiens
  misc_RNA (1)...(19): siRNA sense strand
agucugagaacauggugaa

SEQ ID NO: 2648237 - RNA, 19 nt, Homo sapiens
  misc_RNA (1)...(19): siRNA sense strand
guaccaggggagacaaaua

SEQ ID NO: 2648238 - RNA, 19 nt, Homo sapiens
  misc_RNA (1)...(19): siRNA sense strand
accacaugcuacaggaaaa

SEQ ID NO: 2648239 - RNA, 19 nt, Homo sapiens
  misc_RNA (1)...(19): siRNA sense strand
ccgauaugaccgggagaga

SEQ ID NO: 2648240 - RNA, 19 nt, Homo sapiens
  misc_RNA (1)...(19): siRNA sense strand
agaacugagacaagagacu

SEQ ID NO: 2648241 - RNA, 19 nt, Homo sapiens
  misc_RNA (1)...(19): siRNA sense strand
ucaccaggaccaaagggaa

SEQ ID NO: 2648242 - RNA, 19 nt, Homo sapiens
  misc_RNA (1)...(19): siRNA sense strand
gagcaaugcaggagccuca

SEQ ID NO: 2648243 - RNA, 19 nt, Homo sapiens
  misc_RNA (1)...(19): siRNA sense strand
caaucaagguggagccgga

SEQ ID NO: 2648244 - RNA, 19 nt, Homo sapiens
  misc_RNA (1)...(19): siRNA sense strand
caauaguaacuuagcagca

SEQ ID NO: 2648245 - RNA, 19 nt, Homo sapiens
  misc_RNA (1)...(19): siRNA sense strand
gcacauaucaccacaccga

SEQ ID NO: 2648246 - RNA, 19 nt, Homo sapiens
  misc_RNA (1)...(19): siRNA sense strand
acucagcagcccaggccaa

SEQ ID NO: 2648247 - RNA, 19 nt, Homo sapiens
  misc_RNA (1)...(19): siRNA sense strand
ggaugugggugcuccgaaa

SEQ ID NO: 2648248 - RNA, 19 nt, Homo sapiens
  misc_RNA (1)...(19): siRNA sense strand
guacauucacucuaagaaa

SEQ ID NO: 2648249 - RNA, 19 nt, Homo sapiens
  misc_RNA (1)...(19): siRNA sense strand
gagcaaugcaggagccuca

SEQ ID NO: 2648250 - RNA, 19 nt, Homo sapiens
  misc_RNA (1)...(19): siRNA sense strand
caaucaagguggagccgga

SEQ ID NO: 2648251 - RNA, 19 nt, Homo sapiens
  misc_RNA (1)...(19): siRNA sense strand
agaaacacgugcaggaugu

SEQ ID NO: 2648252 - RNA, 19 nt, Homo sapiens
  misc_RNA (1)...(19): siRNA sense strand
cuaagaaacacgugcagga

SEQ ID NO: 2648253 - RNA, 19 nt, Homo sapiens
  misc_RNA (1)...(19): siRNA sense strand
guggaaggauguugcgcga

SEQ ID NO: 2648254 - RNA, 19 nt, Homo sapiens
  misc_RNA (1)...(19): siRNA sense strand
guucgaguguccuguggaa

SEQ ID NO: 2648255 - RNA, 19 nt, Homo sapiens
  misc_RNA (1)...(19): siRNA sense strand
caauaguaacuuagcagca

SEQ ID NO: 2648256 - RNA, 19 nt, Homo sapiens
  misc_RNA (1)...(19): siRNA sense strand
gcacauaucaccacaccga

SEQ ID NO: 2648257 - RNA, 19 nt, Homo sapiens
  misc_RNA (1)...(19): siRNA sense strand
acucagcagcccaggccaa

SEQ ID NO: 2648258 - RNA, 19 nt, Homo sapiens
  misc_RNA (1)...(19): siRNA sense strand
gggcaacagaaaugguaca

SEQ ID NO: 2648259 - RNA, 19 nt, Homo sapiens
  misc_RNA (1)...(19): siRNA sense strand
auuaaagggcaacagaaau

SEQ ID NO: 2648260 - RNA, 19 nt, Homo sapiens
  misc_RNA (1)...(19): siRNA sense strand
aggaagaagacguggacaa

SEQ ID NO: 2648261 - RNA, 19 nt, Homo sapiens
  misc_RNA (1)...(19): siRNA sense strand
cugaaauggaugaacauaa

SEQ ID NO: 2648262 - RNA, 19 nt, Homo sapiens
  misc_RNA (1)...(19): siRNA sense strand
caguguaaucuguaagaaa

SEQ ID NO: 2648263 - RNA, 19 nt, Homo sapiens
  misc_RNA (1)...(19): siRNA sense strand
aggaagaggaggaggagga

SEQ ID NO: 2648264 - RNA, 19 nt, Homo sapiens
  misc_RNA (1)...(19): siRNA sense strand
gggagagcuaggauggaaa

SEQ ID NO: 2648265 - RNA, 19 nt, Homo sapiens
  misc_RNA (1)...(19): siRNA sense strand
caacaacuguacugggaga

SEQ ID NO: 2648266 - RNA, 19 nt, Homo sapiens
  misc_RNA (1)...(19): siRNA sense strand
augaagaaauugaggguuc

SEQ ID NO: 2648267 - RNA, 19 nt, Homo sapiens
  misc_RNA (1)...(19): siRNA sense strand
ccuuugaaauagaagcaau

SEQ ID NO: 2648268 - RNA, 19 nt, Homo sapiens
  misc_RNA (1)...(19): siRNA sense strand
ucuuuaagggagaggaaaa

SEQ ID NO: 2648269 - RNA, 19 nt, Homo sapiens
  misc_RNA (1)...(19): siRNA sense strand
aggaggaggaggaagaaga

SEQ ID NO: 2648270 - RNA, 19 nt, Homo sapiens
  misc_RNA (1)...(19): siRNA sense strand
ccgugaugcagcucagaaa

SEQ ID NO: 2648271 - RNA, 19 nt, Homo sapiens
  misc_RNA (1)...(19): siRNA sense strand
cagaugagucccacggaau

SEQ ID NO: 2648272 - RNA, 19 nt, Homo sapiens
  misc_RNA (1)...(19): siRNA sense strand
gaagagugcugaagagcgu

SEQ ID NO: 2648273 - RNA, 19 nt, Homo sapiens
  misc_RNA (1)...(19): siRNA sense strand
aggaggaagaggaggagga

SEQ ID NO: 2648274 - RNA, 19 nt, Homo sapiens
  misc_RNA (1)...(19): siRNA sense strand
ggacugugguggaggacuc

SEQ ID NO: 2648275 - RNA, 19 nt, Homo sapiens
  misc_RNA (1)...(19): siRNA sense strand
uggaggaggaagaggagga

SEQ ID NO: 2648276 - RNA, 19 nt, Homo sapiens
  misc_RNA (1)...(19): siRNA sense strand
caguauacaaagaucgaca

SEQ ID NO: 2648277 - RNA, 19 nt, Homo sapiens
  misc_RNA (1)...(19): siRNA sense strand
aagccaaaccaguauacaa

SEQ ID NO: 2648278 - RNA, 19 nt, Homo sapiens
  misc_RNA (1)...(19): siRNA sense strand
ggguggaggaggaagagga

SEQ ID NO: 2648279 - RNA, 19 nt, Homo sapiens
  misc_RNA (1)...(19): siRNA sense strand
aaaagagagccuaggagaa

SEQ ID NO: 2648280 - RNA, 19 nt, Homo sapiens
  misc_RNA (1)...(19): siRNA sense strand
cugcaguacaggauaugaa

SEQ ID NO: 2648281 - RNA, 19 nt, Homo sapiens
  misc_RNA (1)...(19): siRNA sense strand
gaaaagagagccuaggaga

SEQ ID NO: 2648282 - RNA, 19 nt, Homo sapiens
  misc_RNA (1)...(19): siRNA sense strand
ggguuauuuccgagcugaa

SEQ ID NO: 2648283 - RNA, 19 nt, Homo sapiens
  misc_RNA (1)...(19): siRNA sense strand
aguacaggauaugaagaaa

SEQ ID NO: 2648284 - RNA, 19 nt, Homo sapiens
  misc_RNA (1)...(19): siRNA sense strand
ccuauagaaaggaaaggau

SEQ ID NO: 2648285 - RNA, 19 nt, Homo sapiens
  misc_RNA (1)...(19): siRNA sense strand
cugcgaaguccgggaauuu

SEQ ID NO: 2648286 - RNA, 19 nt, Homo sapiens
  misc_RNA (1)...(19): siRNA sense strand
uguaauggaaccaaaccaa

SEQ ID NO: 2648287 - RNA, 19 nt, Homo sapiens
  misc_RNA (1)...(19): siRNA sense strand
uaacauacauggaagcaac

SEQ ID NO: 2648288 - RNA, 19 nt, Homo sapiens
  misc_RNA (1)...(19): siRNA sense strand
aagugacacaggagggaga

SEQ ID NO: 2648289 - RNA, 19 nt, Homo sapiens
  misc_RNA (1)...(19): siRNA sense strand
uuguggagcugauggagau

SEQ ID NO: 2648290 - RNA, 19 nt, Homo sapiens
  misc_RNA (1)...(19): siRNA sense strand
gggccuagccaaaugccaa

SEQ ID NO: 2648291 - RNA, 19 nt, Homo sapiens
  misc_RNA (1)...(19): siRNA sense strand
aggaagaagaggagauaaa

SEQ ID NO: 2648292 - RNA, 19 nt, Homo sapiens
  misc_RNA (1)...(19): siRNA sense strand
ggagaagaaacgaaagaaa

SEQ ID NO: 2648293 - RNA, 19 nt, Homo sapiens
  misc_RNA (1)...(19): siRNA sense strand
guauaauagccuugagcaa

SEQ ID NO: 2648294 - RNA, 19 nt, Homo sapiens
  misc_RNA (1)...(19): siRNA sense strand
cggagaggguggaggaaga

SEQ ID NO: 2648295 - RNA, 19 nt, Homo sapiens
  misc_RNA (1)...(19): siRNA sense strand
gcagaagagcugaggaaaa

SEQ ID NO: 2648296 - RNA, 19 nt, Homo sapiens
  misc_RNA (1)...(19): siRNA sense strand
aggaagaacaagaggucaa

SEQ ID NO: 2648297 - RNA, 19 nt, Homo sapiens
  misc_RNA (1)...(19): siRNA sense strand
ugacaagagcuaaggcaaa

SEQ ID NO: 2648298 - RNA, 19 nt, Homo sapiens
  misc_RNA (1)...(19): siRNA sense strand
uuggaaaggacaagagaaa

SEQ ID NO: 2648299 - RNA, 19 nt, Homo sapiens
  misc_RNA (1)...(19): siRNA sense strand
agaagaaacuggaggcuga

SEQ ID NO: 2648300 - RNA, 19 nt, Homo sapiens
  misc_RNA (1)...(19): siRNA sense strand
gagcagaugacaagagcua

SEQ ID NO: 2648301 - RNA, 19 nt, Homo sapiens
  misc_RNA (1)...(19): siRNA sense strand
cuacagagcacaaggucaa

SEQ ID NO: 2648302 - RNA, 19 nt, Homo sapiens
  misc_RNA (1)...(19): siRNA sense strand
ggaaaggacaagagaaaau

SEQ ID NO: 2648303 - RNA, 19 nt, Homo sapiens
  misc_RNA (1)...(19): siRNA sense strand
gagugaagaugauggaaca

SEQ ID NO: 2648304 - RNA, 19 nt, Homo sapiens
  misc_RNA (1)...(19): siRNA sense strand
agaaggaggcucugauaaa

SEQ ID NO: 2648305 - RNA, 19 nt, Homo sapiens
  misc_RNA (1)...(19): siRNA sense strand
cagagaaagaugaagaaau

SEQ ID NO: 2648306 - RNA, 19 nt, Homo sapiens
  misc_RNA (1)...(19): siRNA sense strand
agaaguaggagaagaagua

SEQ ID NO: 2648307 - RNA, 19 nt, Homo sapiens
  misc_RNA (1)...(19): siRNA sense strand
acagaaagccuuggagaaa

SEQ ID NO: 2648308 - RNA, 19 nt, Homo sapiens
  misc_RNA (1)...(19): siRNA sense strand
gcauaaaggaggacaaaau

SEQ ID NO: 2648309 - RNA, 19 nt, Homo sapiens
  misc_RNA (1)...(19): siRNA sense strand
gcgagaaugaacugugaaa

SEQ ID NO: 2648310 - RNA, 19 nt, Homo sapiens
  misc_RNA (1)...(19): siRNA sense strand
ugcacaaacuggagggcaa

SEQ ID NO: 2648311 - RNA, 19 nt, Homo sapiens
  misc_RNA (1)...(19): siRNA sense strand
cccuugagcaggagagaaa

SEQ ID NO: 2648312 - RNA, 19 nt, Homo sapiens
  misc_RNA (1)...(19): siRNA sense strand
gaacagaagacuuggagga

SEQ ID NO: 2648313 - RNA, 19 nt, Homo sapiens
  misc_RNA (1)...(19): siRNA sense strand
augcaaacucagauggaua

SEQ ID NO: 2648314 - RNA, 19 nt, Homo sapiens
  misc_RNA (1)...(19): siRNA sense strand
caauaagagaugagagacu

SEQ ID NO: 2648315 - RNA, 19 nt, Homo sapiens
  misc_RNA (1)...(19): siRNA sense strand
uggcagaagagcugaggaa

SEQ ID NO: 2648316 - RNA, 19 nt, Homo sapiens
  misc_RNA (1)...(19): siRNA sense strand
aggcagaggaagacaagaa

SEQ ID NO: 2648317 - RNA, 19 nt, Homo sapiens
  misc_RNA (1)...(19): siRNA sense strand
cagaggaagacaagaagaa

SEQ ID NO: 2648318 - RNA, 19 nt, Homo sapiens
  misc_RNA (1)...(19): siRNA sense strand
agcaagagaguuugggaaa

SEQ ID NO: 2648319 - RNA, 19 nt, Homo sapiens
  misc_RNA (1)...(19): siRNA sense strand
auaucgaggcugagguaaa

SEQ ID NO: 2648320 - RNA, 19 nt, Homo sapiens
  misc_RNA (1)...(19): siRNA sense strand
cagaaaagcagcugaagaa

SEQ ID NO: 2648321 - RNA, 19 nt, Homo sapiens
  misc_RNA (1)...(19): siRNA sense strand
aggcaaaugcugagaaacu

SEQ ID NO: 2648322 - RNA, 19 nt, Homo sapiens
  misc_RNA (1)...(19): siRNA sense strand
ccaagaaggaacuggcaau

SEQ ID NO: 2648323 - RNA, 19 nt, Homo sapiens
  misc_RNA (1)...(19): siRNA sense strand
gcggaaacucgaagaugaa

SEQ ID NO: 2648324 - RNA, 19 nt, Homo sapiens
  misc_RNA (1)...(19): siRNA sense strand
cugaagagguggugcagga

SEQ ID NO: 2648325 - RNA, 19 nt, Homo sapiens
  misc_RNA (1)...(19): siRNA sense strand
gugaaagggaacugcacaa

SEQ ID NO: 2648326 - RNA, 19 nt, Homo sapiens
  misc_RNA (1)...(19): siRNA sense strand
gguaaaagggagugaagau

SEQ ID NO: 2648327 - RNA, 19 nt, Homo sapiens
  misc_RNA (1)...(19): siRNA sense strand
gggccaacuggaagcaaua

SEQ ID NO: 2648328 - RNA, 19 nt, Homo sapiens
  misc_RNA (1)...(19): siRNA sense strand
cuaagaaacaggaaaccaa

SEQ ID NO: 2648329 - RNA, 19 nt, Homo sapiens
  misc_RNA (1)...(19): siRNA sense strand
agaagaaauuugaagcuca

SEQ ID NO: 2648330 - RNA, 19 nt, Homo sapiens
  misc_RNA (1)...(19): siRNA sense strand
agaagaagauggaagagga

SEQ ID NO: 2648331 - RNA, 19 nt, Homo sapiens
  misc_RNA (1)...(19): siRNA sense strand
aaggugaacuggaggguga

SEQ ID NO: 2648332 - RNA, 19 nt, Homo sapiens
  misc_RNA (1)...(19): siRNA sense strand
gcaucaaagagcugaccua

SEQ ID NO: 2648333 - RNA, 19 nt, Homo sapiens
  misc_RNA (1)...(19): siRNA sense strand
aaucagaguuucagaggga

SEQ ID NO: 2648334 - RNA, 19 nt, Homo sapiens
  misc_RNA (1)...(19): siRNA sense strand
gggaaaguauggagaaccu

SEQ ID NO: 2648335 - RNA, 19 nt, Homo sapiens
  misc_RNA (1)...(19): siRNA sense strand
gagccaagauggaaaggga

SEQ ID NO: 2648336 - RNA, 19 nt, Homo sapiens
  misc_RNA (1)...(19): siRNA sense strand
gcuggaaauaacuaagaaa

SEQ ID NO: 2648337 - RNA, 19 nt, Homo sapiens
  misc_RNA (1)...(19): siRNA sense strand
gagaagggaccaagaacuu

SEQ ID NO: 2648338 - RNA, 19 nt, Homo sapiens
  misc_RNA (1)...(19): siRNA sense strand
ugaagaagaagauggaaga

SEQ ID NO: 2648339 - RNA, 19 nt, Homo sapiens
  misc_RNA (1)...(19): siRNA sense strand
ggauaugccgugaagguuu

SEQ ID NO: 2648340 - RNA, 19 nt, Homo sapiens
  misc_RNA (1)...(19): siRNA sense strand
guaaaggagcugucggaga

SEQ ID NO: 2648341 - RNA, 19 nt, Homo sapiens
  misc_RNA (1)...(19): siRNA sense strand
uggaaaaggucaagaaacu

SEQ ID NO: 2648342 - RNA, 19 nt, Homo sapiens
  misc_RNA (1)...(19): siRNA sense strand
ccauuaugcaggaguggua

SEQ ID NO: 2648343 - RNA, 19 nt, Homo sapiens
  misc_RNA (1)...(19): siRNA sense strand
ggaggaagaagaggagaua

SEQ ID NO: 2648344 - RNA, 19 nt, Homo sapiens
  misc_RNA (1)...(19): siRNA sense strand
agcaauaagagaugagaga

SEQ ID NO: 2648345 - RNA, 19 nt, Homo sapiens
  misc_RNA (1)...(19): siRNA sense strand
gagaagaaguagcuggacu

SEQ ID NO: 2648346 - RNA, 19 nt, Homo sapiens
  misc_RNA (1)...(19): siRNA sense strand
gaaggaagagugugcacaa

SEQ ID NO: 2648347 - RNA, 19 nt, Homo sapiens
  misc_RNA (1)...(19): siRNA sense strand
cuuggaagcuaaagcagaa

SEQ ID NO: 2648348 - RNA, 19 nt, Homo sapiens
  misc_RNA (1)...(19): siRNA sense strand
gaaagaagcugaagaggug

SEQ ID NO: 2648349 - RNA, 19 nt, Homo sapiens
  misc_RNA (1)...(19): siRNA sense strand
uugaaugaagugaaggaaa

SEQ ID NO: 2648350 - RNA, 19 nt, Homo sapiens
  misc_RNA (1)...(19): siRNA sense strand
ccaucaugcacuuuggaaa

SEQ ID NO: 2648351 - RNA, 19 nt, Homo sapiens
  misc_RNA (1)...(19): siRNA sense strand
caucaugcacuuuggaaau

SEQ ID NO: 2648352 - RNA, 19 nt, Homo sapiens
  misc_RNA (1)...(19): siRNA sense strand
uggcaaauguugaagagca

SEQ ID NO: 2648353 - RNA, 19 nt, Homo sapiens
  misc_RNA (1)...(19): siRNA sense strand
aagagaaacuagaagcuga

SEQ ID NO: 2648354 - RNA, 19 nt, Homo sapiens
  misc_RNA (1)...(19): siRNA sense strand
ccuaucaggcagaggaaga

SEQ ID NO: 2648355 - RNA, 19 nt, Homo sapiens
  misc_RNA (1)...(19): siRNA sense strand
cuugaaaaguccaggguga

SEQ ID NO: 2648356 - RNA, 19 nt, Homo sapiens
  misc_RNA (1)...(19): siRNA sense strand
agggcaaacugaugcgaau

SEQ ID NO: 2648357 - RNA, 19 nt, Homo sapiens
  misc_RNA (1)...(19): siRNA sense strand
ggagaaugaaguaugaaaa

SEQ ID NO: 2648358 - RNA, 19 nt, Homo sapiens
  misc_RNA (1)...(19): siRNA sense strand
augcagaagagaaggccaa

SEQ ID NO: 2648359 - RNA, 19 nt, Homo sapiens
  misc_RNA (1)...(19): siRNA sense strand
aaacagaaaccuagagaag

SEQ ID NO: 2648360 - RNA, 19 nt, Homo sapiens
  misc_RNA (1)...(19): siRNA sense strand
ggaagaaagggaugcacuu

SEQ ID NO: 2648361 - RNA, 19 nt, Homo sapiens
  misc_RNA (1)...(19): siRNA sense strand
agcaagagacacuggcaaa

SEQ ID NO: 2648362 - RNA, 19 nt, Homo sapiens
  misc_RNA (1)...(19): siRNA sense strand
gagaaggagaagcguacua

SEQ ID NO: 2648363 - RNA, 19 nt, Homo sapiens
  misc_RNA (1)...(19): siRNA sense strand
cagccaagguugugcagga

SEQ ID NO: 2648364 - RNA, 19 nt, Homo sapiens
  misc_RNA (1)...(19): siRNA sense strand
agucugaacuagaggaucu

SEQ ID NO: 2648365 - RNA, 19 nt, Homo sapiens
  misc_RNA (1)...(19): siRNA sense strand
ccuggaagcaacagaaaga

SEQ ID NO: 2648366 - RNA, 19 nt, Homo sapiens
  misc_RNA (1)...(19): siRNA sense strand
gagaaguauggaugcuaua

SEQ ID NO: 2648367 - RNA, 19 nt, Homo sapiens
  misc_RNA (1)...(19): siRNA sense strand
ggggagaagugcuggguaa

SEQ ID NO: 2648368 - RNA, 19 nt, Homo sapiens
  misc_RNA (1)...(19): siRNA sense strand
gguacuaaaugcugggcuu

SEQ ID NO: 2648369 - RNA, 19 nt, Homo sapiens
  misc_RNA (1)...(19): siRNA sense strand
cuucagggacugugagaau

SEQ ID NO: 2648370 - RNA, 19 nt, Homo sapiens
  misc_RNA (1)...(19): siRNA sense strand
uaugaaaggcugugagcau

SEQ ID NO: 2648371 - RNA, 19 nt, Homo sapiens
  misc_RNA (1)...(19): siRNA sense strand
ggauguauguucaggggaa

SEQ ID NO: 2648372 - RNA, 19 nt, Homo sapiens
  misc_RNA (1)...(19): siRNA sense strand
gggaaauuaaugagcacau

SEQ ID NO: 2648373 - RNA, 19 nt, Homo sapiens
  misc_RNA (1)...(19): siRNA sense strand
gggcauauuuugaggucau

SEQ ID NO: 2648374 - RNA, 19 nt, Homo sapiens
  misc_RNA (1)...(19): siRNA sense strand
aaccauaggaucugacaaa

SEQ ID NO: 2648375 - RNA, 19 nt, Homo sapiens
  misc_RNA (1)...(19): siRNA sense strand
ugucaugccacgugccaaa

SEQ ID NO: 2648376 - RNA, 19 nt, Homo sapiens
  misc_RNA (1)...(19): siRNA sense strand
acuucaagcugguggccau

SEQ ID NO: 2648377 - RNA, 19 nt, Homo sapiens
  misc_RNA (1)...(19): siRNA sense strand
gguagagcucauugaucaa

SEQ ID NO: 2648378 - RNA, 19 nt, Homo sapiens
  misc_RNA (1)...(19): siRNA sense strand
ugagaagaauuguggucca

SEQ ID NO: 2648379 - RNA, 19 nt, Homo sapiens
  misc_RNA (1)...(19): siRNA sense strand
aagcggagguagagcucau

SEQ ID NO: 2648380 - RNA, 19 nt, Homo sapiens
  misc_RNA (1)...(19): siRNA sense strand
ccauauuacccgagcuacu

SEQ ID NO: 2648381 - RNA, 19 nt, Homo sapiens
  misc_RNA (1)...(19): siRNA sense strand
augcaaguguaccuggaaa

SEQ ID NO: 2648382 - RNA, 19 nt, Homo sapiens
  misc_RNA (1)...(19): siRNA sense strand
ggagauuucugcagccuca

SEQ ID NO: 2648383 - RNA, 19 nt, Homo sapiens
  misc_RNA (1)...(19): siRNA sense strand
gcagcaucuuguacagaau

SEQ ID NO: 2648384 - RNA, 19 nt, Homo sapiens
  misc_RNA (1)...(19): siRNA sense strand
ccgcaucaucggaggcaca

SEQ ID NO: 2648385 - RNA, 19 nt, Homo sapiens
  misc_RNA (1)...(19): siRNA sense strand
ugugauggcuucagggacu

SEQ ID NO: 2648386 - RNA, 19 nt, Homo sapiens
  misc_RNA (1)...(19): siRNA sense strand
uggcagaauauggcaguua

SEQ ID NO: 2648387 - RNA, 19 nt, Homo sapiens
  misc_RNA (1)...(19): siRNA sense strand
ccagaacaaaagugugaaa

SEQ ID NO: 2648388 - RNA, 19 nt, Homo sapiens
  misc_RNA (1)...(19): siRNA sense strand
aguucaaggcuuucagaca

SEQ ID NO: 2648389 - RNA, 19 nt, Homo sapiens
  misc_RNA (1)...(19): siRNA sense strand
gcccauauuacccgagcua

SEQ ID NO: 2648390 - RNA, 19 nt, Homo sapiens
  misc_RNA (1)...(19): siRNA sense strand
ggccugagacccugaaaca

SEQ ID NO: 2648391 - RNA, 19 nt, Homo sapiens
  misc_RNA (1)...(19): siRNA sense strand
gcaagagagaugccugcaa

SEQ ID NO: 2648392 - RNA, 19 nt, Homo sapiens
  misc_RNA (1)...(19): siRNA sense strand
caaucaaguccauccaaau

SEQ ID NO: 2648393 - RNA, 19 nt, Homo sapiens
  misc_RNA (1)...(19): siRNA sense strand
ucacuggcuuugaagggaa

SEQ ID NO: 2648394 - RNA, 19 nt, Homo sapiens
  misc_RNA (1)...(19): siRNA sense strand
cagugcaguucaaggcuuu

SEQ ID NO: 2648395 - RNA, 19 nt, Homo sapiens
  misc_RNA (1)...(19): siRNA sense strand
caguguuggucaaagacau

SEQ ID NO: 2648396 - RNA, 19 nt, Homo sapiens
  misc_RNA (1)...(19): siRNA sense strand
ccucaaccugccugcaaua

SEQ ID NO: 2648397 - RNA, 19 nt, Homo sapiens
  misc_RNA (1)...(19): siRNA sense strand
guacagaauuugugaaccc

SEQ ID NO: 2648398 - RNA, 19 nt, Homo sapiens
  misc_RNA (1)...(19): siRNA sense strand
ugaggucauuccagaacaa

SEQ ID NO: 2648399 - RNA, 19 nt, Homo sapiens
  misc_RNA (1)...(19): siRNA sense strand
ugcaaaaugugaugggaca

SEQ ID NO: 2648400 - RNA, 19 nt, Homo sapiens
  misc_RNA (1)...(19): siRNA sense strand
acauggaucaucagacaau

SEQ ID NO: 2648401 - RNA, 19 nt, Homo sapiens
  misc_RNA (1)...(19): siRNA sense strand
gcagaauauggcaguuaca

SEQ ID NO: 2648402 - RNA, 19 nt, Homo sapiens
  misc_RNA (1)...(19): siRNA sense strand
ccagcguugugauggagua

SEQ ID NO: 2648403 - RNA, 19 nt, Homo sapiens
  misc_RNA (1)...(19): siRNA sense strand
ccaugcaacaacagaacuu

SEQ ID NO: 2648404 - RNA, 19 nt, Homo sapiens
  misc_RNA (1)...(19): siRNA sense strand
auacggaggcucucaggaa

SEQ ID NO: 2648405 - RNA, 19 nt, Homo sapiens
  misc_RNA (1)...(19): siRNA sense strand
cuucacagguccaaagaua

SEQ ID NO: 2648406 - RNA, 19 nt, Homo sapiens
  misc_RNA (1)...(19): siRNA sense strand
ccaaagacuacaaaguaaa

SEQ ID NO: 2648407 - RNA, 19 nt, Homo sapiens
  misc_RNA (1)...(19): siRNA sense strand
gcauucaagaagaaagaaa

SEQ ID NO: 2648408 - RNA, 19 nt, Homo sapiens
  misc_RNA (1)...(19): siRNA sense strand
aagcaagugauaaggaaua

SEQ ID NO: 2648409 - RNA, 19 nt, Homo sapiens
  misc_RNA (1)...(19): siRNA sense strand
accaaagacuacaaaguaa

SEQ ID NO: 2648410 - RNA, 19 nt, Homo sapiens
  misc_RNA (1)...(19): siRNA sense strand
gaacauuggaagaaggcau

SEQ ID NO: 2648411 - RNA, 19 nt, Homo sapiens
  misc_RNA (1)...(19): siRNA sense strand
agaagaaacaacagaacau

SEQ ID NO: 2648412 - RNA, 19 nt, Homo sapiens
  misc_RNA (1)...(19): siRNA sense strand
gagucaaaggagaaagauu

SEQ ID NO: 2648413 - RNA, 19 nt, Homo sapiens
  misc_RNA (1)...(19): siRNA sense strand
gaaagucaggaaagaguaa

SEQ ID NO: 2648414 - RNA, 19 nt, Homo sapiens
  misc_RNA (1)...(19): siRNA sense strand
aucaaaugguggagucaaa

SEQ ID NO: 2648415 - RNA, 19 nt, Homo sapiens
  misc_RNA (1)...(19): siRNA sense strand
gugaugagcccaaaggaau

SEQ ID NO: 2648416 - RNA, 19 nt, Homo sapiens
  misc_RNA (1)...(19): siRNA sense strand
aaagaaauguuaaggagga

SEQ ID NO: 2648417 - RNA, 19 nt, Homo sapiens
  misc_RNA (1)...(19): siRNA sense strand
agacaauacaggaaugaga

SEQ ID NO: 2648418 - RNA, 19 nt, Homo sapiens
  misc_RNA (1)...(19): siRNA sense strand
guggagaaauaauaggaga

SEQ ID NO: 2648419 - RNA, 19 nt, Homo sapiens
  misc_RNA (1)...(19): siRNA sense strand
ggugaugagcccaaaggaa

SEQ ID NO: 2648420 - RNA, 19 nt, Homo sapiens
  misc_RNA (1)...(19): siRNA sense strand
gguggaauuuguucauaua

SEQ ID NO: 2648421 - RNA, 19 nt, Homo sapiens
  misc_RNA (1)...(19): siRNA sense strand
aguuggaaugucaggaaua

SEQ ID NO: 2648422 - RNA, 19 nt, Homo sapiens
  misc_RNA (1)...(19): siRNA sense strand
cgaagaagaaacaacagaa

SEQ ID NO: 2648423 - RNA, 19 nt, Homo sapiens
  misc_RNA (1)...(19): siRNA sense strand
ccuaaggaaagucaggaaa

SEQ ID NO: 2648424 - RNA, 19 nt, Homo sapiens
  misc_RNA (1)...(19): siRNA sense strand
cgaguuagcaauuacauua

SEQ ID NO: 2648425 - RNA, 19 nt, Homo sapiens
  misc_RNA (1)...(19): siRNA sense strand
cuauaugcucaguggagaa

SEQ ID NO: 2648426 - RNA, 19 nt, Homo sapiens
  misc_RNA (1)...(19): siRNA sense strand
uauaagagaccuugggcuu

SEQ ID NO: 2648427 - RNA, 19 nt, Homo sapiens
  misc_RNA (1)...(19): siRNA sense strand
ugauaaggaauauggaaca

SEQ ID NO: 2648428 - RNA, 19 nt, Homo sapiens
  misc_RNA (1)...(19): siRNA sense strand
guacaugcuucaaaaguua

SEQ ID NO: 2648429 - RNA, 19 nt, Homo sapiens
  misc_RNA (1)...(19): siRNA sense strand
ccacacuguaacaaggaaa

SEQ ID NO: 2648430 - RNA, 19 nt, Homo sapiens
  misc_RNA (1)...(19): siRNA sense strand
agaauaaaccuaaggaaag

SEQ ID NO: 2648431 - RNA, 19 nt, Homo sapiens
  misc_RNA (1)...(19): siRNA sense strand
ggguggaauuuguucauau

SEQ ID NO: 2648432 - RNA, 19 nt, Homo sapiens
  misc_RNA (1)...(19): siRNA sense strand
gaguaugaucacccagaaa

SEQ ID NO: 2648433 - RNA, 19 nt, Homo sapiens
  misc_RNA (1)...(19): siRNA sense strand
gaauaaaccuaaggaaagu

SEQ ID NO: 2648434 - RNA, 19 nt, Homo sapiens
  misc_RNA (1)...(19): siRNA sense strand
ucacaugccuggaacauau

SEQ ID NO: 2648435 - RNA, 19 nt, Homo sapiens
  misc_RNA (1)...(19): siRNA sense strand
cuggaauauuuaaggaguu

SEQ ID NO: 2648436 - RNA, 19 nt, Homo sapiens
  misc_RNA (1)...(19): siRNA sense strand
cauaauggucuguagugaa

SEQ ID NO: 2648437 - RNA, 19 nt, Homo sapiens
  misc_RNA (1)...(19): siRNA sense strand
cucaauauggcuacagaaa

SEQ ID NO: 2648438 - RNA, 19 nt, Homo sapiens
  misc_RNA (1)...(19): siRNA sense strand
aagcaauggagcuggccaa

SEQ ID NO: 2648439 - RNA, 19 nt, Homo sapiens
  misc_RNA (1)...(19): siRNA sense strand
agauagcagcaaugaggaa

SEQ ID NO: 2648440 - RNA, 19 nt, Homo sapiens
  misc_RNA (1)...(19): siRNA sense strand
cagcaaugaggaaggacuu

SEQ ID NO: 2648441 - RNA, 19 nt, Homo sapiens
  misc_RNA (1)...(19): siRNA sense strand
acaaggaaauagaugagau

SEQ ID NO: 2648442 - RNA, 19 nt, Homo sapiens
  misc_RNA (1)...(19): siRNA sense strand
gcuaaugcugauuggaaca

SEQ ID NO: 2648443 - RNA, 19 nt, Homo sapiens
  misc_RNA (1)...(19): siRNA sense strand
gcaagcuaccagagacaau

SEQ ID NO: 2648444 - RNA, 19 nt, Homo sapiens
  misc_RNA (1)...(19): siRNA sense strand
uuggugagaagaagggaaa

SEQ ID NO: 2648445 - RNA, 19 nt, Homo sapiens
  misc_RNA (1)...(19): siRNA sense strand
agguuuagggauugaucaa

SEQ ID NO: 2648446 - RNA, 19 nt, Homo sapiens
  misc_RNA (1)...(19): siRNA sense strand
ugguggagucaaaggagaa

SEQ ID NO: 2648447 - RNA, 19 nt, Homo sapiens
  misc_RNA (1)...(19): siRNA sense strand
aggcauucaagaagaaaga

SEQ ID NO: 2648448 - RNA, 19 nt, Homo sapiens
  misc_RNA (1)...(19): siRNA sense strand
ggaaagucaggaaagagua

SEQ ID NO: 2648449 - RNA, 19 nt, Homo sapiens
  misc_RNA (1)...(19): siRNA sense strand
cagaacaucagaaggugaa

SEQ ID NO: 2648450 - RNA, 19 nt, Homo sapiens
  misc_RNA (1)...(19): siRNA sense strand
aacugaaggugcuggaauu

SEQ ID NO: 2648451 - RNA, 19 nt, Homo sapiens
  misc_RNA (1)...(19): siRNA sense strand
ggagaaagucugaugaccu

SEQ ID NO: 2648452 - RNA, 19 nt, Homo sapiens
  misc_RNA (1)...(19): siRNA sense strand
ggaacaugauugagaaagc

SEQ ID NO: 2648453 - RNA, 19 nt, Homo sapiens
  misc_RNA (1)...(19): siRNA sense strand
cuauaaaagagcuaggcua

SEQ ID NO: 2648454 - RNA, 19 nt, Homo sapiens
  misc_RNA (1)...(19): siRNA sense strand
guaugaucacccagaaauu

SEQ ID NO: 2648455 - RNA, 19 nt, Homo sapiens
  misc_RNA (1)...(19): siRNA sense strand
cuagaagccucaucaguuu

SEQ ID NO: 2648456 - RNA, 19 nt, Homo sapiens
  misc_RNA (1)...(19): siRNA sense strand
aagcagacauaaugaccau

SEQ ID NO: 2648457 - RNA, 19 nt, Homo sapiens
  misc_RNA (1)...(19): siRNA sense strand
ggaauauggaacaugcuau

SEQ ID NO: 2648458 - RNA, 19 nt, Homo sapiens
  misc_RNA (1)...(19): siRNA sense strand
auuaauagguucaguugga

SEQ ID NO: 2648459 - RNA, 19 nt, Homo sapiens
  misc_RNA (1)...(19): siRNA sense strand
gaccaaagacuacaaagua

SEQ ID NO: 2648460 - RNA, 19 nt, Homo sapiens
  misc_RNA (1)...(19): siRNA sense strand
cauacauguugaacgaaga

SEQ ID NO: 2648461 - RNA, 19 nt, Homo sapiens
  misc_RNA (1)...(19): siRNA sense strand
gauaaggaauauggaacau

SEQ ID NO: 2648462 - RNA, 19 nt, Homo sapiens
  misc_RNA (1)...(19): siRNA sense strand
auaaguuaaucauggccaa

SEQ ID NO: 2648463 - RNA, 19 nt, Homo sapiens
  misc_RNA (1)...(19): siRNA sense strand
cgauaauugacacagacua

SEQ ID NO: 2648464 - RNA, 19 nt, Homo sapiens
  misc_RNA (1)...(19): siRNA sense strand
uuaucuuacaccaggauua

SEQ ID NO: 2648465 - RNA, 19 nt, Homo sapiens
  misc_RNA (1)...(19): siRNA sense strand
uguuggauaccuugugaua

SEQ ID NO: 2648466 - RNA, 19 nt, Homo sapiens
  misc_RNA (1)...(19): siRNA sense strand
gggaaaggagcuagggaca

SEQ ID NO: 2648467 - RNA, 19 nt, Homo sapiens
  misc_RNA (1)...(19): siRNA sense strand
cggagaaggugguggagga

SEQ ID NO: 2648468 - RNA, 19 nt, Homo sapiens
  misc_RNA (1)...(19): siRNA sense strand
acuauaggaccuuggaaua

SEQ ID NO: 2648469 - RNA, 19 nt, Homo sapiens
  misc_RNA (1)...(19): siRNA sense strand
gaauuagagaagaggccaa

SEQ ID NO: 2648470 - RNA, 19 nt, Homo sapiens
  misc_RNA (1)...(19): siRNA sense strand
gcuaaagagcacagagugu

SEQ ID NO: 2648471 - RNA, 19 nt, Homo sapiens
  misc_RNA (1)...(19): siRNA sense strand
ggggaaaggcugugguuuu

SEQ ID NO: 2648472 - RNA, 19 nt, Homo sapiens
  misc_RNA (1)...(19): siRNA sense strand
ccaugaagcuggugagccu

SEQ ID NO: 2648473 - RNA, 19 nt, Homo sapiens
  misc_RNA (1)...(19): siRNA sense strand
aagcagaagcugaaacgaa

SEQ ID NO: 2648474 - RNA, 19 nt, Homo sapiens
  misc_RNA (1)...(19): siRNA sense strand
cuugaaacagagaggaauu

SEQ ID NO: 2648475 - RNA, 19 nt, Homo sapiens
  misc_RNA (1)...(19): siRNA sense strand
ccagagagcagcaaggaga

SEQ ID NO: 2648476 - RNA, 19 nt, Homo sapiens
  misc_RNA (1)...(19): siRNA sense strand
uggaagaagugggaggcaa

SEQ ID NO: 2648477 - RNA, 19 nt, Homo sapiens
  misc_RNA (1)...(19): siRNA sense strand
gcagaaaacacauggguca

SEQ ID NO: 2648478 - RNA, 19 nt, Homo sapiens
  misc_RNA (1)...(19): siRNA sense strand
aguagaaaugggaguguau

SEQ ID NO: 2648479 - RNA, 19 nt, Homo sapiens
  misc_RNA (1)...(19): siRNA sense strand
cgcaaggaaaggagggaga

SEQ ID NO: 2648480 - RNA, 19 nt, Homo sapiens
  misc_RNA (1)...(19): siRNA sense strand
ggaaaagaaaccaagggaa

SEQ ID NO: 2648481 - RNA, 19 nt, Homo sapiens
  misc_RNA (1)...(19): siRNA sense strand
ucaccaagcaggagggcga

SEQ ID NO: 2648482 - RNA, 19 nt, Homo sapiens
  misc_RNA (1)...(19): siRNA sense strand
uggaaagcucaaaggaaga

SEQ ID NO: 2648483 - RNA, 19 nt, Homo sapiens
  misc_RNA (1)...(19): siRNA sense strand
gggguuacacuuaggaaua

SEQ ID NO: 2648484 - RNA, 19 nt, Homo sapiens
  misc_RNA (1)...(19): siRNA sense strand
aguaggaggcccaggcaau

SEQ ID NO: 2648485 - RNA, 19 nt, Homo sapiens
  misc_RNA (1)...(19): siRNA sense strand
agagauuacuggaugggau

SEQ ID NO: 2648486 - RNA, 19 nt, Homo sapiens
  misc_RNA (1)...(19): siRNA sense strand
guggagaguuggcagaaaa

SEQ ID NO: 2648487 - RNA, 19 nt, Homo sapiens
  misc_RNA (1)...(19): siRNA sense strand
ccuggaaagcucaaaggaa

SEQ ID NO: 2648488 - RNA, 19 nt, Homo sapiens
  misc_RNA (1)...(19): siRNA sense strand
cauacaacggcuaaggcaa

SEQ ID NO: 2648489 - RNA, 19 nt, Homo sapiens
  misc_RNA (1)...(19): siRNA sense strand
gcuggugagccuugaggaa

SEQ ID NO: 2648490 - RNA, 19 nt, Homo sapiens
  misc_RNA (1)...(19): siRNA sense strand
gagagaagccggaaccuga

SEQ ID NO: 2648491 - RNA, 19 nt, Homo sapiens
  misc_RNA (1)...(19): siRNA sense strand
cacaagaagaggaggaugu

SEQ ID NO: 2648492 - RNA, 19 nt, Homo sapiens
  misc_RNA (1)...(19): siRNA sense strand
cuggaaagcucaaaggaag

SEQ ID NO: 2648493 - RNA, 19 nt, Homo sapiens
  misc_RNA (1)...(19): siRNA sense strand
ggaagaccucagagccuaa

SEQ ID NO: 2648494 - RNA, 19 nt, Homo sapiens
  misc_RNA (1)...(19): siRNA sense strand
gcgaaagcucuccaguaaa

SEQ ID NO: 2648495 - RNA, 19 nt, Homo sapiens
  misc_RNA (1)...(19): siRNA sense strand
gcucugaagaccagcccaa

SEQ ID NO: 2648496 - RNA, 19 nt, Homo sapiens
  misc_RNA (1)...(19): siRNA sense strand
gagaagaaaaccccagaaa

SEQ ID NO: 2648497 - RNA, 19 nt, Homo sapiens
  misc_RNA (1)...(19): siRNA sense strand
cuccucaggucuaaagaaa

SEQ ID NO: 2648498 - RNA, 19 nt, Homo sapiens
  misc_RNA (1)...(19): siRNA sense strand
ccggaacagcugaagguuu

SEQ ID NO: 2648499 - RNA, 19 nt, Homo sapiens
  misc_RNA (1)...(19): siRNA sense strand
gagaagaggcuuucccaca

SEQ ID NO: 2648500 - RNA, 19 nt, Homo sapiens
  misc_RNA (1)...(19): siRNA sense strand
aaguguaccuccaggacau

SEQ ID NO: 2648501 - RNA, 19 nt, Homo sapiens
  misc_RNA (1)...(19): siRNA sense strand
cgaagaugacacugugaca

SEQ ID NO: 2648502 - RNA, 19 nt, Homo sapiens
  misc_RNA (1)...(19): siRNA sense strand
gggaaauuucaaucgaaca

SEQ ID NO: 2648503 - RNA, 19 nt, Homo sapiens
  misc_RNA (1)...(19): siRNA sense strand
agacacagugacaagcaaa

SEQ ID NO: 2648504 - RNA, 19 nt, Homo sapiens
  misc_RNA (1)...(19): siRNA sense strand
ccucagcggagaucaguaa

SEQ ID NO: 2648505 - RNA, 19 nt, Homo sapiens
  misc_RNA (1)...(19): siRNA sense strand
uuaugagcucuaugagaaa

SEQ ID NO: 2648506 - RNA, 19 nt, Homo sapiens
  misc_RNA (1)...(19): siRNA sense strand
uaccagacaacaagcgaaa

SEQ ID NO: 2648507 - RNA, 19 nt, Homo sapiens
  misc_RNA (1)...(19): siRNA sense strand
cugacggaguaucuggaaa

SEQ ID NO: 2648508 - RNA, 19 nt, Homo sapiens
  misc_RNA (1)...(19): siRNA sense strand
ggccaaauccggagaaggu

SEQ ID NO: 2648509 - RNA, 19 nt, Homo sapiens
  misc_RNA (1)...(19): siRNA sense strand
cgcacaaggcccagguaca

SEQ ID NO: 2648510 - RNA, 19 nt, Homo sapiens
  misc_RNA (1)...(19): siRNA sense strand
gguuacacuuaggaauaaa

SEQ ID NO: 2648511 - RNA, 19 nt, Homo sapiens
  misc_RNA (1)...(19): siRNA sense strand
cacuauaggaccuuggaau

SEQ ID NO: 2648512 - RNA, 19 nt, Homo sapiens
  misc_RNA (1)...(19): siRNA sense strand
cuggccagaagaagagaaa

SEQ ID NO: 2648513 - RNA, 19 nt, Homo sapiens
  misc_RNA (1)...(19): siRNA sense strand
ggacaguggaaugcagcaa

SEQ ID NO: 2648514 - RNA, 19 nt, Homo sapiens
  misc_RNA (1)...(19): siRNA sense strand
ccagggagguugagaucgu

SEQ ID NO: 2648515 - RNA, 19 nt, Homo sapiens
  misc_RNA (1)...(19): siRNA sense strand
agaguuuggcucagaucaa

SEQ ID NO: 2648516 - RNA, 19 nt, Homo sapiens
  misc_RNA (1)...(19): siRNA sense strand
agaaauucacggaggcagu

SEQ ID NO: 2648517 - RNA, 19 nt, Homo sapiens
  misc_RNA (1)...(19): siRNA sense strand
ucauugaaucugaggagga

SEQ ID NO: 2648518 - RNA, 19 nt, Homo sapiens
  misc_RNA (1)...(19): siRNA sense strand
gagaaagcccugagguccu

SEQ ID NO: 2648519 - RNA, 19 nt, Homo sapiens
  misc_RNA (1)...(19): siRNA sense strand
ucagccuagcagagggaaa

SEQ ID NO: 2648520 - RNA, 19 nt, Homo sapiens
  misc_RNA (1)...(19): siRNA sense strand
uuugaagagcugugcagaa

SEQ ID NO: 2648521 - RNA, 19 nt, Homo sapiens
  misc_RNA (1)...(19): siRNA sense strand
caguaauucuggauggaag

SEQ ID NO: 2648522 - RNA, 19 nt, Homo sapiens
  misc_RNA (1)...(19): siRNA sense strand
cuaaagaaauugaagccac

SEQ ID NO: 2648523 - RNA, 19 nt, Homo sapiens
  misc_RNA (1)...(19): siRNA sense strand
ccugggacguucuggauca

SEQ ID NO: 2648524 - RNA, 19 nt, Homo sapiens
  misc_RNA (1)...(19): siRNA sense strand
cgggacaggauguuccaua

SEQ ID NO: 2648525 - RNA, 19 nt, Homo sapiens
  misc_RNA (1)...(19): siRNA sense strand
caacaggagcugaaaauca

SEQ ID NO: 2648526 - RNA, 19 nt, Homo sapiens
  misc_RNA (1)...(19): siRNA sense strand
gaaagaauauagaagggaa

SEQ ID NO: 2648527 - RNA, 19 nt, Homo sapiens
  misc_RNA (1)...(19): siRNA sense strand
agaaauuaacugagggaga

SEQ ID NO: 2648528 - RNA, 19 nt, Homo sapiens
  misc_RNA (1)...(19): siRNA sense strand
ccaaugaagaagaagaaau

SEQ ID NO: 2648529 - RNA, 19 nt, Homo sapiens
  misc_RNA (1)...(19): siRNA sense strand
uggaaauggcugugaucua

SEQ ID NO: 2648530 - RNA, 19 nt, Homo sapiens
  misc_RNA (1)...(19): siRNA sense strand
gggaaguuggagagaagaa

SEQ ID NO: 2648531 - RNA, 19 nt, Homo sapiens
  misc_RNA (1)...(19): siRNA sense strand
ggaacuugcaugagcacaa

SEQ ID NO: 2648532 - RNA, 19 nt, Homo sapiens
  misc_RNA (1)...(19): siRNA sense strand
agagaagauggcugagaaa

SEQ ID NO: 2648533 - RNA, 19 nt, Homo sapiens
  misc_RNA (1)...(19): siRNA sense strand
cuaugaaggauuaguggaa

SEQ ID NO: 2648534 - RNA, 19 nt, Homo sapiens
  misc_RNA (1)...(19): siRNA sense strand
aagcaugguucaaaagaaa

SEQ ID NO: 2648535 - RNA, 19 nt, Homo sapiens
  misc_RNA (1)...(19): siRNA sense strand
aagcugagguggagaugau

SEQ ID NO: 2648536 - RNA, 19 nt, Homo sapiens
  misc_RNA (1)...(19): siRNA sense strand
ccuuacagcggcagaggaa

SEQ ID NO: 2648537 - RNA, 19 nt, Homo sapiens
  misc_RNA (1)...(19): siRNA sense strand
gagguggagaugauagaaa

SEQ ID NO: 2648538 - RNA, 19 nt, Homo sapiens
  misc_RNA (1)...(19): siRNA sense strand
aaguuggagagaagaaaua

SEQ ID NO: 2648539 - RNA, 19 nt, Homo sapiens
  misc_RNA (1)...(19): siRNA sense strand
gcuccuaccuagaagacau

SEQ ID NO: 2648540 - RNA, 19 nt, Homo sapiens
  misc_RNA (1)...(19): siRNA sense strand
agaagauggcugagaaaau

SEQ ID NO: 2648541 - RNA, 19 nt, Homo sapiens
  misc_RNA (1)...(19): siRNA sense strand
cggaaagcaugguucaaaa

SEQ ID NO: 2648542 - RNA, 19 nt, Homo sapiens
  misc_RNA (1)...(19): siRNA sense strand
aggcagaaccauacacuuu

SEQ ID NO: 2648543 - RNA, 19 nt, Homo sapiens
  misc_RNA (1)...(19): siRNA sense strand
ccauuuaucagucgggaau

SEQ ID NO: 2648544 - RNA, 19 nt, Homo sapiens
  misc_RNA (1)...(19): siRNA sense strand
acaacaacucagaggacuu

SEQ ID NO: 2648545 - RNA, 19 nt, Homo sapiens
  misc_RNA (1)...(19): siRNA sense strand
cguccaaugaagaagaaga

SEQ ID NO: 2648546 - RNA, 19 nt, Homo sapiens
  misc_RNA (1)...(19): siRNA sense strand
acgagaggcugaagagagu

SEQ ID NO: 2648547 - RNA, 19 nt, Homo sapiens
  misc_RNA (1)...(19): siRNA sense strand
cgggaauggaagggacaua

SEQ ID NO: 2648548 - RNA, 19 nt, Homo sapiens
  misc_RNA (1)...(19): siRNA sense strand
gggcagcaagguuggacua

SEQ ID NO: 2648549 - RNA, 19 nt, Homo sapiens
  misc_RNA (1)...(19): siRNA sense strand
guccaaugaagaagaagaa

SEQ ID NO: 2648550 - RNA, 19 nt, Homo sapiens
  misc_RNA (1)...(19): siRNA sense strand
cagaaaacuuguaggaaag

SEQ ID NO: 2648551 - RNA, 19 nt, Homo sapiens
  misc_RNA (1)...(19): siRNA sense strand
uggaagggacauaaggaga

SEQ ID NO: 2648552 - RNA, 19 nt, Homo sapiens
  misc_RNA (1)...(19): siRNA sense strand
uauugugucaagugagaaa

SEQ ID NO: 2648553 - RNA, 19 nt, Homo sapiens
  misc_RNA (1)...(19): siRNA sense strand
uauccaaggcagaaccaua

SEQ ID NO: 2648554 - RNA, 19 nt, Homo sapiens
  misc_RNA (1)...(19): siRNA sense strand
gcgugaagagaaucagaau

SEQ ID NO: 2648555 - RNA, 19 nt, Homo sapiens
  misc_RNA (1)...(19): siRNA sense strand
aggcacuguuggauaagaa

SEQ ID NO: 2648556 - RNA, 19 nt, Homo sapiens
  misc_RNA (1)...(19): siRNA sense strand
aaauagagaagauggcuga

SEQ ID NO: 2648557 - RNA, 19 nt, Homo sapiens
  misc_RNA (1)...(19): siRNA sense strand
agaaaaguucccagguuua

SEQ ID NO: 2648558 - RNA, 19 nt, Homo sapiens
  misc_RNA (1)...(19): siRNA sense strand
gggaauggaagggacauaa

SEQ ID NO: 2648559 - RNA, 19 nt, Homo sapiens
  misc_RNA (1)...(19): siRNA sense strand
uguaggaaagagaaagaau

SEQ ID NO: 2648560 - RNA, 19 nt, Homo sapiens
  misc_RNA (1)...(19): siRNA sense strand
aagggaaguuggagagaag

SEQ ID NO: 2648561 - RNA, 19 nt, Homo sapiens
  misc_RNA (1)...(19): siRNA sense strand
ggaaguuggagagaagaaa

SEQ ID NO: 2648562 - RNA, 19 nt, Homo sapiens
  misc_RNA (1)...(19): siRNA sense strand
uaacugagggagagcaaga

SEQ ID NO: 2648563 - RNA, 19 nt, Homo sapiens
  misc_RNA (1)...(19): siRNA sense strand
augaaggauuaguggaacu

SEQ ID NO: 2648564 - RNA, 19 nt, Homo sapiens
  misc_RNA (1)...(19): siRNA sense strand
cuguuggauaagaagaaua

SEQ ID NO: 2648565 - RNA, 19 nt, Homo sapiens
  misc_RNA (1)...(19): siRNA sense strand
ugccauguuacuugagaaa

SEQ ID NO: 2648566 - RNA, 19 nt, Homo sapiens
  misc_RNA (1)...(19): siRNA sense strand
gguggagaugauagaaaga

SEQ ID NO: 2648567 - RNA, 19 nt, Homo sapiens
  misc_RNA (1)...(19): siRNA sense strand
cagaggagauuguugcuga

SEQ ID NO: 2648568 - RNA, 19 nt, Homo sapiens
  misc_RNA (1)...(19): siRNA sense strand
gcgggaggaggacgagaua

SEQ ID NO: 2648569 - RNA, 19 nt, Homo sapiens
  misc_RNA (1)...(19): siRNA sense strand
agaacaagccagggcagaa

SEQ ID NO: 2648570 - RNA, 19 nt, Homo sapiens
  misc_RNA (1)...(19): siRNA sense strand
gaaauggagaggaaggagu

SEQ ID NO: 2648571 - RNA, 19 nt, Homo sapiens
  misc_RNA (1)...(19): siRNA sense strand
cuuguaggaaagagaaaga

SEQ ID NO: 2648572 - RNA, 19 nt, Homo sapiens
  misc_RNA (1)...(19): siRNA sense strand
ugaggaacgcacagcggaa

SEQ ID NO: 2648573 - RNA, 19 nt, Homo sapiens
  misc_RNA (1)...(19): siRNA sense strand
gaugaaaagcuggugaaaa

SEQ ID NO: 2648574 - RNA, 19 nt, Homo sapiens
  misc_RNA (1)...(19): siRNA sense strand
ccauuuggccggacuggaa

SEQ ID NO: 2648575 - RNA, 19 nt, Homo sapiens
  misc_RNA (1)...(19): siRNA sense strand
gugagaaagaccauacaca

SEQ ID NO: 2648576 - RNA, 19 nt, Homo sapiens
  misc_RNA (1)...(19): siRNA sense strand
auguuugaagggaaagaaa

SEQ ID NO: 2648577 - RNA, 19 nt, Homo sapiens
  misc_RNA (1)...(19): siRNA sense strand
cugcaggaggagaggagga

SEQ ID NO: 2648578 - RNA, 19 nt, Homo sapiens
  misc_RNA (1)...(19): siRNA sense strand
auuaacugagggagagcaa

SEQ ID NO: 2648579 - RNA, 19 nt, Homo sapiens
  misc_RNA (1)...(19): siRNA sense strand
guugaguuuacgaggaaau

SEQ ID NO: 2648580 - RNA, 19 nt, Homo sapiens
  misc_RNA (1)...(19): siRNA sense strand
ugguauuaugugacaacaa

SEQ ID NO: 2648581 - RNA, 19 nt, Homo sapiens
  misc_RNA (1)...(19): siRNA sense strand
auuuggaagaguugaguuu

SEQ ID NO: 2648582 - RNA, 19 nt, Homo sapiens
  misc_RNA (1)...(19): siRNA sense strand
guguuuauaucuuggagga

SEQ ID NO: 2648583 - RNA, 19 nt, Homo sapiens
  misc_RNA (1)...(19): siRNA sense strand
ugacauaucugccucgaga

SEQ ID NO: 2648584 - RNA, 19 nt, Homo sapiens
  misc_RNA (1)...(19): siRNA sense strand
ggaauuagcugcacggacc

SEQ ID NO: 2648585 - RNA, 19 nt, Homo sapiens
  misc_RNA (1)...(19): siRNA sense strand
acaacaaaauccaaagcau

SEQ ID NO: 2648586 - RNA, 19 nt, Homo sapiens
  misc_RNA (1)...(19): siRNA sense strand
gugaaauuguagaggaaga

SEQ ID NO: 2648587 - RNA, 19 nt, Homo sapiens
  misc_RNA (1)...(19): siRNA sense strand
ggagaaggaaagugguaau

SEQ ID NO: 2648588 - RNA, 19 nt, Homo sapiens
  misc_RNA (1)...(19): siRNA sense strand
aguaauaaggaguggccaa

SEQ ID NO: 2648589 - RNA, 19 nt, Homo sapiens
  misc_RNA (1)...(19): siRNA sense strand
augugaaauuguagaggaa

SEQ ID NO: 2648590 - RNA, 19 nt, Homo sapiens
  misc_RNA (1)...(19): siRNA sense strand
ccaagaaaugugugauaau

SEQ ID NO: 2648591 - RNA, 19 nt, Homo sapiens
  misc_RNA (1)...(19): siRNA sense strand
uggaacagaaagaggaaau

SEQ ID NO: 2648592 - RNA, 19 nt, Homo sapiens
  misc_RNA (1)...(19): siRNA sense strand
aagcaaaugugguggucau

SEQ ID NO: 2648593 - RNA, 19 nt, Homo sapiens
  misc_RNA (1)...(19): siRNA sense strand
agaagaaaaccgagaaaau

SEQ ID NO: 2648594 - RNA, 19 nt, Homo sapiens
  misc_RNA (1)...(19): siRNA sense strand
ccaagaaauaggagaucau

SEQ ID NO: 2648595 - RNA, 19 nt, Homo sapiens
  misc_RNA (1)...(19): siRNA sense strand
ucaaagagaaggaagaaaa

SEQ ID NO: 2648596 - RNA, 19 nt, Homo sapiens
  misc_RNA (1)...(19): siRNA sense strand
cgucugaggaaguguuuaa

SEQ ID NO: 2648597 - RNA, 19 nt, Homo sapiens
  misc_RNA (1)...(19): siRNA sense strand
gugauaaucuacaggacau

SEQ ID NO: 2648598 - RNA, 19 nt, Homo sapiens
  misc_RNA (1)...(19): siRNA sense strand
gaagguaggagaaggaaaa

SEQ ID NO: 2648599 - RNA, 19 nt, Homo sapiens
  misc_RNA (1)...(19): siRNA sense strand
cuauauagaucaagugacu

SEQ ID NO: 2648600 - RNA, 19 nt, Homo sapiens
  misc_RNA (1)...(19): siRNA sense strand
guaaauggacacugcacaa

SEQ ID NO: 2648601 - RNA, 19 nt, Homo sapiens
  misc_RNA (1)...(19): siRNA sense strand
guucauaacaucacggaga

SEQ ID NO: 2648602 - RNA, 19 nt, Homo sapiens
  misc_RNA (1)...(19): siRNA sense strand
augcugaaauacaaggaua

SEQ ID NO: 2648603 - RNA, 19 nt, Homo sapiens
  misc_RNA (1)...(19): siRNA sense strand
gcccaagagaugaaggcaa

SEQ ID NO: 2648604 - RNA, 19 nt, Homo sapiens
  misc_RNA (1)...(19): siRNA sense strand
gaacaaagguuuacagagc

SEQ ID NO: 2648605 - RNA, 19 nt, Homo sapiens
  misc_RNA (1)...(19): siRNA sense strand
gcacaugaguuaaugcuga

SEQ ID NO: 2648606 - RNA, 19 nt, Homo sapiens
  misc_RNA (1)...(19): siRNA sense strand
agaagguaggagaaggaaa

SEQ ID NO: 2648607 - RNA, 19 nt, Homo sapiens
  misc_RNA (1)...(19): siRNA sense strand
ggaaaacaaacaugugaaa

SEQ ID NO: 2648608 - RNA, 19 nt, Homo sapiens
  misc_RNA (1)...(19): siRNA sense strand
agccaagaaaugugugaua

SEQ ID NO: 2648609 - RNA, 19 nt, Homo sapiens
  misc_RNA (1)...(19): siRNA sense strand
gcuagaggcgucugaggaa

SEQ ID NO: 2648610 - RNA, 19 nt, Homo sapiens
  misc_RNA (1)...(19): siRNA sense strand
aggagagcuggaagagaaa

SEQ ID NO: 2648611 - RNA, 19 nt, Homo sapiens
  misc_RNA (1)...(19): siRNA sense strand
aagucaaagagaaggaaga

SEQ ID NO: 2648612 - RNA, 19 nt, Homo sapiens
  misc_RNA (1)...(19): siRNA sense strand
caugaugaccagugcagaa

SEQ ID NO: 2648613 - RNA, 19 nt, Homo sapiens
  misc_RNA (1)...(19): siRNA sense strand
gaauacaagaccugcaaaa

SEQ ID NO: 2648614 - RNA, 19 nt, Homo sapiens
  misc_RNA (1)...(19): siRNA sense strand
gauuaaugcaaccgccaua

SEQ ID NO: 2648615 - RNA, 19 nt, Homo sapiens
  misc_RNA (1)...(19): siRNA sense strand
cuucauuuguggaaccuua

SEQ ID NO: 2648616 - RNA, 19 nt, Homo sapiens
  misc_RNA (1)...(19): siRNA sense strand
gaguaacaaaggacaguau

SEQ ID NO: 2648617 - RNA, 19 nt, Homo sapiens
  misc_RNA (1)...(19): siRNA sense strand
agaagcaauuacagcacua

SEQ ID NO: 2648618 - RNA, 19 nt, Homo sapiens
  misc_RNA (1)...(19): siRNA sense strand
agacacggccagugcgaau

SEQ ID NO: 2648619 - RNA, 19 nt, Homo sapiens
  misc_RNA (1)...(19): siRNA sense strand
ugcugaaauacaaggauaa

SEQ ID NO: 2648620 - RNA, 19 nt, Homo sapiens
  misc_RNA (1)...(19): siRNA sense strand
cgauagcccaagagaugaa

SEQ ID NO: 2648621 - RNA, 19 nt, Homo sapiens
  misc_RNA (1)...(19): siRNA sense strand
guuguacauuuaagcgaua

SEQ ID NO: 2648622 - RNA, 19 nt, Homo sapiens
  misc_RNA (1)...(19): siRNA sense strand
gaagugaaaaggugcaaaa

SEQ ID NO: 2648623 - RNA, 19 nt, Homo sapiens
  misc_RNA (1)...(19): siRNA sense strand
gaguuaaugcugaaauaca

SEQ ID NO: 2648624 - RNA, 19 nt, Homo sapiens
  misc_RNA (1)...(19): siRNA sense strand
cauuuaagcgauagcccaa

SEQ ID NO: 2648625 - RNA, 19 nt, Homo sapiens
  misc_RNA (1)...(19): siRNA sense strand
uuguagaagaccaaguuua

SEQ ID NO: 2648626 - RNA, 19 nt, Homo sapiens
  misc_RNA (1)...(19): siRNA sense strand
agaugaaggcaaacugcua

SEQ ID NO: 2648627 - RNA, 19 nt, Homo sapiens
  misc_RNA (1)...(19): siRNA sense strand
gguaggagaaggaaaacaa

SEQ ID NO: 2648628 - RNA, 19 nt, Homo sapiens
  misc_RNA (1)...(19): siRNA sense strand
auugaaaggagcugugcua

SEQ ID NO: 2648629 - RNA, 19 nt, Homo sapiens
  misc_RNA (1)...(19): siRNA sense strand
gggaagcuucggcaggaaa

SEQ ID NO: 2648630 - RNA, 19 nt, Homo sapiens
  misc_RNA (1)...(19): siRNA sense strand
cgggagaccugguguugau

SEQ ID NO: 2648631 - RNA, 19 nt, Homo sapiens
  misc_RNA (1)...(19): siRNA sense strand
gaauaguugcauuugggaa

SEQ ID NO: 2648632 - RNA, 19 nt, Homo sapiens
  misc_RNA (1)...(19): siRNA sense strand
agaaagaggaaauacacau

SEQ ID NO: 2648633 - RNA, 19 nt, Homo sapiens
  misc_RNA (1)...(19): siRNA sense strand
ggaacaaggcaauugaacu

SEQ ID NO: 2648634 - RNA, 19 nt, Homo sapiens
  misc_RNA (1)...(19): siRNA sense strand
gcacuauacuucauggacu

SEQ ID NO: 2648635 - RNA, 19 nt, Homo sapiens
  misc_RNA (1)...(19): siRNA sense strand
agagaggaaauucaggaaa

SEQ ID NO: 2648636 - RNA, 19 nt, Homo sapiens
  misc_RNA (1)...(19): siRNA sense strand
ggauacaguaauaaggagu

SEQ ID NO: 2648637 - RNA, 19 nt, Homo sapiens
  misc_RNA (1)...(19): siRNA sense strand
acagaagguaggagaagga

SEQ ID NO: 2648638 - RNA, 19 nt, Homo sapiens
  misc_RNA (1)...(19): siRNA sense strand
acaaagguuuacagagcca

SEQ ID NO: 2648639 - RNA, 19 nt, Homo sapiens
  misc_RNA (1)...(19): siRNA sense strand
aggaaauucaggaaacuuu

SEQ ID NO: 2648640 - RNA, 19 nt, Homo sapiens
  misc_RNA (1)...(19): siRNA sense strand
gauuacuagucuugcugua

SEQ ID NO: 2648641 - RNA, 19 nt, Homo sapiens
  misc_RNA (1)...(19): siRNA sense strand
cauacuguccagagccaua

SEQ ID NO: 2648642 - RNA, 19 nt, Homo sapiens
  misc_RNA (1)...(19): siRNA sense strand
agucaaagagaaggaagaa

SEQ ID NO: 2648643 - RNA, 19 nt, Homo sapiens
  misc_RNA (1)...(19): siRNA sense strand
cuagugaaggaguaacaaa

SEQ ID NO: 2648644 - RNA, 19 nt, Homo sapiens
  misc_RNA (1)...(19): siRNA sense strand
accauuagcagaugaacaa

SEQ ID NO: 2648645 - RNA, 19 nt, Homo sapiens
  misc_RNA (1)...(19): siRNA sense strand
gguauugccaagugguaca

SEQ ID NO: 2648646 - RNA, 19 nt, Homo sapiens
  misc_RNA (1)...(19): siRNA sense strand
acggauugcacuugaugaa

SEQ ID NO: 2648647 - RNA, 19 nt, Homo sapiens
  misc_RNA (1)...(19): siRNA sense strand
guaguugaucugacacaaa

SEQ ID NO: 2648648 - RNA, 19 nt, Homo sapiens
  misc_RNA (1)...(19): siRNA sense strand
uugggaugcuucugcaaua

SEQ ID NO: 2648649 - RNA, 19 nt, Homo sapiens
  misc_RNA (1)...(19): siRNA sense strand
uguccagagagcagaauau

SEQ ID NO: 2648650 - RNA, 19 nt, Homo sapiens
  misc_RNA (1)...(19): siRNA sense strand
gggaaaacaucaugggaaa

SEQ ID NO: 2648651 - RNA, 19 nt, Homo sapiens
  misc_RNA (1)...(19): siRNA sense strand
gaggaugcaaggagagaaa

SEQ ID NO: 2648652 - RNA, 19 nt, Homo sapiens
  misc_RNA (1)...(19): siRNA sense strand
cugcagaagaaguuaaaua

SEQ ID NO: 2648653 - RNA, 19 nt, Homo sapiens
  misc_RNA (1)...(19): siRNA sense strand
ccagaagggcuaauggaaa

SEQ ID NO: 2648654 - RNA, 19 nt, Homo sapiens
  misc_RNA (1)...(19): siRNA sense strand
ucauguaauugguggaaau

SEQ ID NO: 2648655 - RNA, 19 nt, Homo sapiens
  misc_RNA (1)...(19): siRNA sense strand
acauugaacuacaggagaa

SEQ ID NO: 2648656 - RNA, 19 nt, Homo sapiens
  misc_RNA (1)...(19): siRNA sense strand
ugaaagagggugugcagaa

SEQ ID NO: 2648657 - RNA, 19 nt, Homo sapiens
  misc_RNA (1)...(19): siRNA sense strand
gguaaucuuagcagggaaa

SEQ ID NO: 2648658 - RNA, 19 nt, Homo sapiens
  misc_RNA (1)...(19): siRNA sense strand
uggaauagcuaccaggcaa

SEQ ID NO: 2648659 - RNA, 19 nt, Homo sapiens
  misc_RNA (1)...(19): siRNA sense strand
guuucaauccugagaacaa

SEQ ID NO: 2648660 - RNA, 19 nt, Homo sapiens
  misc_RNA (1)...(19): siRNA sense strand
ggaauagcuaccaggcaaa

SEQ ID NO: 2648661 - RNA, 19 nt, Homo sapiens
  misc_RNA (1)...(19): siRNA sense strand
acacuuaaggagaugguaa

SEQ ID NO: 2648662 - RNA, 19 nt, Homo sapiens
  misc_RNA (1)...(19): siRNA sense strand
aggcagaugugauuguaaa

SEQ ID NO: 2648663 - RNA, 19 nt, Homo sapiens
  misc_RNA (1)...(19): siRNA sense strand
gagaugaaauugaggcgau

SEQ ID NO: 2648664 - RNA, 19 nt, Homo sapiens
  misc_RNA (1)...(19): siRNA sense strand
ugauuaagguuuugggaau

SEQ ID NO: 2648665 - RNA, 19 nt, Homo sapiens
  misc_RNA (1)...(19): siRNA sense strand
aggagaagccucugaucaa

SEQ ID NO: 2648666 - RNA, 19 nt, Homo sapiens
  misc_RNA (1)...(19): siRNA sense strand
uguccaaagcauugaggua

SEQ ID NO: 2648667 - RNA, 19 nt, Homo sapiens
  misc_RNA (1)...(19): siRNA sense strand
gugaaagaugacaggauuu

SEQ ID NO: 2648668 - RNA, 19 nt, Homo sapiens
  misc_RNA (1)...(19): siRNA sense strand
cagcuaugccggaaagaau

SEQ ID NO: 2648669 - RNA, 19 nt, Homo sapiens
  misc_RNA (1)...(19): siRNA sense strand
agagacugguugaaguaaa

SEQ ID NO: 2648670 - RNA, 19 nt, Homo sapiens
  misc_RNA (1)...(19): siRNA sense strand
ggauucagucuguguuaaa

SEQ ID NO: 2648671 - RNA, 19 nt, Homo sapiens
  misc_RNA (1)...(19): siRNA sense strand
ucacgaaagaagaggcaga

SEQ ID NO: 2648672 - RNA, 19 nt, Homo sapiens
  misc_RNA (1)...(19): siRNA sense strand
agacaaugaaugagaagca

SEQ ID NO: 2648673 - RNA, 19 nt, Homo sapiens
  misc_RNA (1)...(19): siRNA sense strand
gcucaaagaccgaaguacu

SEQ ID NO: 2648674 - RNA, 19 nt, Homo sapiens
  misc_RNA (1)...(19): siRNA sense strand
cagcaauaggaacaggaaa

SEQ ID NO: 2648675 - RNA, 19 nt, Homo sapiens
  misc_RNA (1)...(19): siRNA sense strand
ggaaaagaaaacagaauca

SEQ ID NO: 2648676 - RNA, 19 nt, Homo sapiens
  misc_RNA (1)...(19): siRNA sense strand
gauccaacaaugugggaca

SEQ ID NO: 2648677 - RNA, 19 nt, Homo sapiens
  misc_RNA (1)...(19): siRNA sense strand
gaaucuauacacauggaaa

SEQ ID NO: 2648678 - RNA, 19 nt, Homo sapiens
  misc_RNA (1)...(19): siRNA sense strand
ccacagacacaaagggcca

SEQ ID NO: 2648679 - RNA, 19 nt, Homo sapiens
  misc_RNA (1)...(19): siRNA sense strand
auaugaagcagcagaauuu

SEQ ID NO: 2648680 - RNA, 19 nt, Homo sapiens
  misc_RNA (1)...(19): siRNA sense strand
aauuaaaagggaagagcaa

SEQ ID NO: 2648681 - RNA, 19 nt, Homo sapiens
  misc_RNA (1)...(19): siRNA sense strand
ccaagaauggccagacaau

SEQ ID NO: 2648682 - RNA, 19 nt, Homo sapiens
  misc_RNA (1)...(19): siRNA sense strand
caaugaaggaagaccgaga

SEQ ID NO: 2648683 - RNA, 19 nt, Homo sapiens
  misc_RNA (1)...(19): siRNA sense strand
gaauuugccagaagggcua

SEQ ID NO: 2648684 - RNA, 19 nt, Homo sapiens
  misc_RNA (1)...(19): siRNA sense strand
uuuagaaugugcuggacaa

SEQ ID NO: 2648685 - RNA, 19 nt, Homo sapiens
  misc_RNA (1)...(19): siRNA sense strand
uguauaaagcaaaguguga

SEQ ID NO: 2648686 - RNA, 19 nt, Homo sapiens
  misc_RNA (1)...(19): siRNA sense strand
uggaagacauaaucagaga

SEQ ID NO: 2648687 - RNA, 19 nt, Homo sapiens
  misc_RNA (1)...(19): siRNA sense strand
cuaaagauacacaagguuu

SEQ ID NO: 2648688 - RNA, 19 nt, Homo sapiens
  misc_RNA (1)...(19): siRNA sense strand
cggaaagaaugcuguggca

SEQ ID NO: 2648689 - RNA, 19 nt, Homo sapiens
  misc_RNA (1)...(19): siRNA sense strand
auagaaagcacuacucaaa

SEQ ID NO: 2648690 - RNA, 19 nt, Homo sapiens
  misc_RNA (1)...(19): siRNA sense strand
agugugaaauccaggaaaa

SEQ ID NO: 2648691 - RNA, 19 nt, Homo sapiens
  misc_RNA (1)...(19): siRNA sense strand
aagaauggccagacaauga

SEQ ID NO: 2648692 - RNA, 19 nt, Homo sapiens
  misc_RNA (1)...(19): siRNA sense strand
guggagaaaugguagcaca

SEQ ID NO: 2648693 - RNA, 19 nt, Homo sapiens
  misc_RNA (1)...(19): siRNA sense strand
uguaauugguggaaaugau

SEQ ID NO: 2648694 - RNA, 19 nt, Homo sapiens
  misc_RNA (1)...(19): siRNA sense strand
cgaaagaagaggcagaugu

SEQ ID NO: 2648695 - RNA, 19 nt, Homo sapiens
  misc_RNA (1)...(19): siRNA sense strand
caaguuuauuuguggcauu

SEQ ID NO: 2648696 - RNA, 19 nt, Homo sapiens
  misc_RNA (1)...(19): siRNA sense strand
gcaaggagagaaaagaaaa

SEQ ID NO: 2648697 - RNA, 19 nt, Homo sapiens
  misc_RNA (1)...(19): siRNA sense strand
cggagugcccagagauaga

SEQ ID NO: 2648698 - RNA, 19 nt, Homo sapiens
  misc_RNA (1)...(19): siRNA sense strand
agguaaacuggaaagaauu

SEQ ID NO: 2648699 - RNA, 19 nt, Homo sapiens
  misc_RNA (1)...(19): siRNA sense strand
gcgcauugaaguugagaac

SEQ ID NO: 2648700 - RNA, 19 nt, Homo sapiens
  misc_RNA (1)...(19): siRNA sense strand
auggaaaucucgucaguga

SEQ ID NO: 2648701 - RNA, 19 nt, Homo sapiens
  misc_RNA (1)...(19): siRNA sense strand
gaagaaaagagaagggacu

SEQ ID NO: 2648702 - RNA, 19 nt, Homo sapiens
  misc_RNA (1)...(19): siRNA sense strand
gcaacagguaaacuggaaa

SEQ ID NO: 2648703 - RNA, 19 nt, Homo sapiens
  misc_RNA (1)...(19): siRNA sense strand
agagagacugguugaagua

SEQ ID NO: 2648704 - RNA, 19 nt, Homo sapiens
  misc_RNA (1)...(19): siRNA sense strand
agguaaaugugcagguaag

SEQ ID NO: 2648705 - RNA, 19 nt, Homo sapiens
  misc_RNA (1)...(19): siRNA sense strand
agaagaggcagaugugauu

SEQ ID NO: 2648706 - RNA, 19 nt, Homo sapiens
  misc_RNA (1)...(19): siRNA sense strand
cgucaaucgaaauggcuuu

SEQ ID NO: 2648707 - RNA, 19 nt, Homo sapiens
  misc_RNA (1)...(19): siRNA sense strand
ucaagauaauggaagacau

SEQ ID NO: 2648708 - RNA, 19 nt, Homo sapiens
  misc_RNA (1)...(19): siRNA sense strand
acaaaauuccgaaggcuaa

SEQ ID NO: 2648709 - RNA, 19 nt, Homo sapiens
  misc_RNA (1)...(19): siRNA sense strand
aggcgaugaucaagagagu

SEQ ID NO: 2648710 - RNA, 19 nt, Homo sapiens
  misc_RNA (1)...(19): siRNA sense strand
agauuguaucagugaguuu

SEQ ID NO: 2648711 - RNA, 19 nt, Homo sapiens
  misc_RNA (1)...(19): siRNA sense strand
gcuaagguguggauggaca

SEQ ID NO: 2648712 - RNA, 19 nt, Homo sapiens
  misc_RNA (1)...(19): siRNA sense strand
gggagaacgcaguggagca

SEQ ID NO: 2648713 - RNA, 19 nt, Homo sapiens
  misc_RNA (1)...(19): siRNA sense strand
aggaggagugucagaacua

SEQ ID NO: 2648714 - RNA, 19 nt, Homo sapiens
  misc_RNA (1)...(19): siRNA sense strand
ccgaguaccaggacugcaa

SEQ ID NO: 2648715 - RNA, 19 nt, Homo sapiens
  misc_RNA (1)...(19): siRNA sense strand
cugccaaagcaaagggaag

SEQ ID NO: 2648716 - RNA, 19 nt, Homo sapiens
  misc_RNA (1)...(19): siRNA sense strand
aagggaagacugaggagga

SEQ ID NO: 2648717 - RNA, 19 nt, Homo sapiens
  misc_RNA (1)...(19): siRNA sense strand
ccaccgacugugcagguaa

SEQ ID NO: 2648718 - RNA, 19 nt, Homo sapiens
  misc_RNA (1)...(19): siRNA sense strand
aggcuaaagacacgcucua

SEQ ID NO: 2648719 - RNA, 19 nt, Homo sapiens
  misc_RNA (1)...(19): siRNA sense strand
gccgcaucuucgugggcaa

SEQ ID NO: 2648720 - RNA, 19 nt, Homo sapiens
  misc_RNA (1)...(19): siRNA sense strand
gcaagaacaaggaaggaaa

SEQ ID NO: 2648721 - RNA, 19 nt, Homo sapiens
  misc_RNA (1)...(19): siRNA sense strand
agaaaggaaccgagugauu

SEQ ID NO: 2648722 - RNA, 19 nt, Homo sapiens
  misc_RNA (1)...(19): siRNA sense strand
gaacaaggaaggaaacgaa

SEQ ID NO: 2648723 - RNA, 19 nt, Homo sapiens
  misc_RNA (1)...(19): siRNA sense strand
auccagaacuugaacgaaa

SEQ ID NO: 2648724 - RNA, 19 nt, Homo sapiens
  misc_RNA (1)...(19): siRNA sense strand
uuccaaagcccgugugaua

SEQ ID NO: 2648725 - RNA, 19 nt, Homo sapiens
  misc_RNA (1)...(19): siRNA sense strand
gcaaaugcccgguugggua

SEQ ID NO: 2648726 - RNA, 19 nt, Homo sapiens
  misc_RNA (1)...(19): siRNA sense strand
cugcagaccuuaagagcca

SEQ ID NO: 2648727 - RNA, 19 nt, Homo sapiens
  misc_RNA (1)...(19): siRNA sense strand
uggaaacauuggccagaaa

SEQ ID NO: 2648728 - RNA, 19 nt, Homo sapiens
  misc_RNA (1)...(19): siRNA sense strand
ugaugaaagcagaagaaga

SEQ ID NO: 2648729 - RNA, 19 nt, Homo sapiens
  misc_RNA (1)...(19): siRNA sense strand
gcugauaggaugcagaaau

SEQ ID NO: 2648730 - RNA, 19 nt, Homo sapiens
  misc_RNA (1)...(19): siRNA sense strand
cgggauacuuucaguucaa

SEQ ID NO: 2648731 - RNA, 19 nt, Homo sapiens
  misc_RNA (1)...(19): siRNA sense strand
caaauacgcuggugggagu

SEQ ID NO: 2648732 - RNA, 19 nt, Homo sapiens
  misc_RNA (1)...(19): siRNA sense strand
uuucaaacaaagaguggaa

SEQ ID NO: 2648733 - RNA, 19 nt, Homo sapiens
  misc_RNA (1)...(19): siRNA sense strand
agagaaagucauuacagaa

SEQ ID NO: 2648734 - RNA, 19 nt, Homo sapiens
  misc_RNA (1)...(19): siRNA sense strand
acagaaaggaaccgaguga

SEQ ID NO: 2648735 - RNA, 19 nt, Homo sapiens
  misc_RNA (1)...(19): siRNA sense strand
agaaaugaccacaaagcuu

SEQ ID NO: 2648736 - RNA, 19 nt, Homo sapiens
  misc_RNA (1)...(19): siRNA sense strand
ucaaacaaagaguggaaca

SEQ ID NO: 2648737 - RNA, 19 nt, Homo sapiens
  misc_RNA (1)...(19): siRNA sense strand
gcaaaagaaaugaccacaa

SEQ ID NO: 2648738 - RNA, 19 nt, Homo sapiens
  misc_RNA (1)...(19): siRNA sense strand
guggaaucgagaagaaaca

SEQ ID NO: 2648739 - RNA, 19 nt, Homo sapiens
  misc_RNA (1)...(19): siRNA sense strand
ugagaauggaaguaccaaa

SEQ ID NO: 2648740 - RNA, 19 nt, Homo sapiens
  misc_RNA (1)...(19): siRNA sense strand
agugaugaaagcagaagaa

SEQ ID NO: 2648741 - RNA, 19 nt, Homo sapiens
  misc_RNA (1)...(19): siRNA sense strand
gcaucagcacagaaaggaa

SEQ ID NO: 2648742 - RNA, 19 nt, Homo sapiens
  misc_RNA (1)...(19): siRNA sense strand
ccuacaagaaguugaaaau

SEQ ID NO: 2648743 - RNA, 19 nt, Homo sapiens
  misc_RNA (1)...(19): siRNA sense strand
aagaaacaguagaguaacu

SEQ ID NO: 2648744 - RNA, 19 nt, Homo sapiens
  misc_RNA (1)...(19): siRNA sense strand
cuucaaaaguggagauuuc

SEQ ID NO: 2648745 - RNA, 19 nt, Homo sapiens
  misc_RNA (1)...(19): siRNA sense strand
gagaauggaaguaccaaaa

SEQ ID NO: 2648746 - RNA, 19 nt, Homo sapiens
  misc_RNA (1)...(19): siRNA sense strand
gaucgagggcugagucuuu

SEQ ID NO: 2648747 - RNA, 19 nt, Homo sapiens
  misc_RNA (1)...(19): siRNA sense strand
gaggugucguggaguggaa

SEQ ID NO: 2648748 - RNA, 19 nt, Homo sapiens
  misc_RNA (1)...(19): siRNA sense strand
cagaguucgaugaaagaau

SEQ ID NO: 2648749 - RNA, 19 nt, Homo sapiens
  misc_RNA (1)...(19): siRNA sense strand
gcuauugaacaaaggacuu

SEQ ID NO: 2648750 - RNA, 19 nt, Homo sapiens
  misc_RNA (1)...(19): siRNA sense strand
ccaaagagggcgugauggu

SEQ ID NO: 2648751 - RNA, 19 nt, Homo sapiens
  misc_RNA (1)...(19): siRNA sense strand
ggaggaagucacacagcau

SEQ ID NO: 2648752 - RNA, 19 nt, Homo sapiens
  misc_RNA (1)...(19): siRNA sense strand
gcaacaauacucagggauc

SEQ ID NO: 2648753 - RNA, 19 nt, Homo sapiens
  misc_RNA (1)...(19): siRNA sense strand
gaaaccauccggagcaaga

SEQ ID NO: 2648754 - RNA, 19 nt, Homo sapiens
  misc_RNA (1)...(19): siRNA sense strand
ucuuaauacaacuguggaa

SEQ ID NO: 2648755 - RNA, 19 nt, Homo sapiens
  misc_RNA (1)...(19): siRNA sense strand
cugccgagcaugugaagau

SEQ ID NO: 2648756 - RNA, 19 nt, Homo sapiens
  misc_RNA (1)...(19): siRNA sense strand
aagcagaagaagagacuac

SEQ ID NO: 2648757 - RNA, 19 nt, Homo sapiens
  misc_RNA (1)...(19): siRNA sense strand
acaaagaaucugugggcug

SEQ ID NO: 2648758 - RNA, 19 nt, Homo sapiens
  misc_RNA (1)...(19): siRNA sense strand
aacauuggccagaaaguaa

SEQ ID NO: 2648759 - RNA, 19 nt, Homo sapiens
  misc_RNA (1)...(19): siRNA sense strand
ggacuuacgucuuugcguu

SEQ ID NO: 2648760 - RNA, 19 nt, Homo sapiens
  misc_RNA (1)...(19): siRNA sense strand
uagucaaacugcagaccuu

SEQ ID NO: 2648761 - RNA, 19 nt, Homo sapiens
  misc_RNA (1)...(19): siRNA sense strand
cugaaauacuaguuccuca

SEQ ID NO: 2648762 - RNA, 19 nt, Homo sapiens
  misc_RNA (1)...(19): siRNA sense strand
caguauaacccgucuuuca

SEQ ID NO: 2648763 - RNA, 19 nt, Homo sapiens
  misc_RNA (1)...(19): siRNA sense strand
augcugaguuuguuaguga

SEQ ID NO: 2648764 - RNA, 19 nt, Homo sapiens
  misc_RNA (1)...(19): siRNA sense strand
gagcaaacccuuccagcca

SEQ ID NO: 2648765 - RNA, 19 nt, Homo sapiens
  misc_RNA (1)...(19): siRNA sense strand
guuggguaccaguuggaaa

SEQ ID NO: 2648766 - RNA, 19 nt, Homo sapiens
  misc_RNA (1)...(19): siRNA sense strand
ccuucgugacagaguuuaa

SEQ ID NO: 2648767 - RNA, 19 nt, Homo sapiens
  misc_RNA (1)...(19): siRNA sense strand
cuuaauacaacuguggaaa

SEQ ID NO: 2648768 - RNA, 19 nt, Homo sapiens
  misc_RNA (1)...(19): siRNA sense strand
gaagauggauauaggcuug

SEQ ID NO: 2648769 - RNA, 19 nt, Homo sapiens
  misc_RNA (1)...(19): siRNA sense strand
gacccuugguggaagauuu

SEQ ID NO: 2648770 - RNA, 19 nt, Homo sapiens
  misc_RNA (1)...(19): siRNA sense strand
cugcuuuggagaugggaga

SEQ ID NO: 2648771 - RNA, 19 nt, Homo sapiens
  misc_RNA (1)...(19): siRNA sense strand
ccgagaacgcugcgaucuu

SEQ ID NO: 2648772 - RNA, 19 nt, Homo sapiens
  misc_RNA (1)...(19): siRNA sense strand
uguacagucuggaggaagu

SEQ ID NO: 2648773 - RNA, 19 nt, Homo sapiens
  misc_RNA (1)...(19): siRNA sense strand
ccucagacauuguggagag

SEQ ID NO: 2648774 - RNA, 19 nt, Homo sapiens
  misc_RNA (1)...(19): siRNA sense strand
ucuccaacuuucacaacua

SEQ ID NO: 2648775 - RNA, 19 nt, Homo sapiens
  misc_RNA (1)...(19): siRNA sense strand
ggaagauuugaaacuguua

SEQ ID NO: 2648776 - RNA, 19 nt, Homo sapiens
  misc_RNA (1)...(19): siRNA sense strand
cacacuggcucuugaccaa

SEQ ID NO: 2648777 - RNA, 19 nt, Homo sapiens
  misc_RNA (1)...(19): siRNA sense strand
gcuccauaguagucaaacu

SEQ ID NO: 2648778 - RNA, 19 nt, Homo sapiens
  misc_RNA (1)...(19): siRNA sense strand
ggaugauugcaguguggau

SEQ ID NO: 2648779 - RNA, 19 nt, Homo sapiens
  misc_RNA (1)...(19): siRNA sense strand
cuguaaaugauguggaaca

SEQ ID NO: 2648780 - RNA, 19 nt, Homo sapiens
  misc_RNA (1)...(19): siRNA sense strand
ggaaaauaggcuuggagaa

SEQ ID NO: 2648781 - RNA, 19 nt, Homo sapiens
  misc_RNA (1)...(19): siRNA sense strand
agcugaaaguguuggcuaa

SEQ ID NO: 2648782 - RNA, 19 nt, Homo sapiens
  misc_RNA (1)...(19): siRNA sense strand
aggaauccaaggagauaaa

SEQ ID NO: 2648783 - RNA, 19 nt, Homo sapiens
  misc_RNA (1)...(19): siRNA sense strand
gugauauuuuggaggauaa

SEQ ID NO: 2648784 - RNA, 19 nt, Homo sapiens
  misc_RNA (1)...(19): siRNA sense strand
gcagaaaacgagacagcua

SEQ ID NO: 2648785 - RNA, 19 nt, Homo sapiens
  misc_RNA (1)...(19): siRNA sense strand
agguugucucugagggaaa

SEQ ID NO: 2648786 - RNA, 19 nt, Homo sapiens
  misc_RNA (1)...(19): siRNA sense strand
auuaaugagaagaguggaa

SEQ ID NO: 2648787 - RNA, 19 nt, Homo sapiens
  misc_RNA (1)...(19): siRNA sense strand
gggugaaaggccacgguau

SEQ ID NO: 2648788 - RNA, 19 nt, Homo sapiens
  misc_RNA (1)...(19): siRNA sense strand
cagaaacaauugaaggagu

SEQ ID NO: 2648789 - RNA, 19 nt, Homo sapiens
  misc_RNA (1)...(19): siRNA sense strand
aaauaggcuuggagaagau

SEQ ID NO: 2648790 - RNA, 19 nt, Homo sapiens
  misc_RNA (1)...(19): siRNA sense strand
ggguggugaucuucagcaa

SEQ ID NO: 2648791 - RNA, 19 nt, Homo sapiens
  misc_RNA (1)...(19): siRNA sense strand
agguuguauuccuaagaaa

SEQ ID NO: 2648792 - RNA, 19 nt, Homo sapiens
  misc_RNA (1)...(19): siRNA sense strand
ugucaauuccuauggagaa

SEQ ID NO: 2648793 - RNA, 19 nt, Homo sapiens
  misc_RNA (1)...(19): siRNA sense strand
cuuugggagucgaauguaa

SEQ ID NO: 2648794 - RNA, 19 nt, Homo sapiens
  misc_RNA (1)...(19): siRNA sense strand
gguuguauuccuaagaaau

SEQ ID NO: 2648795 - RNA, 19 nt, Homo sapiens
  misc_RNA (1)...(19): siRNA sense strand
guggauuaucugaagagaa

SEQ ID NO: 2648796 - RNA, 19 nt, Homo sapiens
  misc_RNA (1)...(19): siRNA sense strand
gaaagaaaguuauggugcu

SEQ ID NO: 2648797 - RNA, 19 nt, Homo sapiens
  misc_RNA (1)...(19): siRNA sense strand
ccuaagaaauugaugcauc

SEQ ID NO: 2648798 - RNA, 19 nt, Homo sapiens
  misc_RNA (1)...(19): siRNA sense strand
aggaaauuuggcugggaau

SEQ ID NO: 2648799 - RNA, 19 nt, Homo sapiens
  misc_RNA (1)...(19): siRNA sense strand
cugaaggaacagaaacaau

SEQ ID NO: 2648800 - RNA, 19 nt, Homo sapiens
  misc_RNA (1)...(19): siRNA sense strand
agacagggacuggcagaaa

SEQ ID NO: 2648801 - RNA, 19 nt, Homo sapiens
  misc_RNA (1)...(19): siRNA sense strand
aaggaaauuuggcugggaa

SEQ ID NO: 2648802 - RNA, 19 nt, Homo sapiens
  misc_RNA (1)...(19): siRNA sense strand
gcugaaaguguuggcuaaa

SEQ ID NO: 2648803 - RNA, 19 nt, Homo sapiens
  misc_RNA (1)...(19): siRNA sense strand
acugggagacaaugacaaa

SEQ ID NO: 2648804 - RNA, 19 nt, Homo sapiens
  misc_RNA (1)...(19): siRNA sense strand
cacugaaggaacagaaaca

SEQ ID NO: 2648805 - RNA, 19 nt, Homo sapiens
  misc_RNA (1)...(19): siRNA sense strand
aauccaaggagauaaagaa

SEQ ID NO: 2648806 - RNA, 19 nt, Homo sapiens
  misc_RNA (1)...(19): siRNA sense strand
ggacaguagcuggcagaga

SEQ ID NO: 2648807 - RNA, 19 nt, Homo sapiens
  misc_RNA (1)...(19): siRNA sense strand
aguuauggugcuagacuuu

SEQ ID NO: 2648808 - RNA, 19 nt, Homo sapiens
  misc_RNA (1)...(19): siRNA sense strand
aggcacaacugggagacaa

SEQ ID NO: 2648809 - RNA, 19 nt, Homo sapiens
  misc_RNA (1)...(19): siRNA sense strand
gcacaguuugucauagcaa

SEQ ID NO: 2648810 - RNA, 19 nt, Homo sapiens
  misc_RNA (1)...(19): siRNA sense strand
uccaaggagauaaagaaua

SEQ ID NO: 2648811 - RNA, 19 nt, Homo sapiens
  misc_RNA (1)...(19): siRNA sense strand
ggacugaaucacagaaccu

SEQ ID NO: 2648812 - RNA, 19 nt, Homo sapiens
  misc_RNA (1)...(19): siRNA sense strand
cagaaaucacuaaucagaa

SEQ ID NO: 2648813 - RNA, 19 nt, Homo sapiens
  misc_RNA (1)...(19): siRNA sense strand
accaagaaauggcagaaaa

SEQ ID NO: 2648814 - RNA, 19 nt, Homo sapiens
  misc_RNA (1)...(19): siRNA sense strand
ggcuaaauccacugaagga

SEQ ID NO: 2648815 - RNA, 19 nt, Homo sapiens
  misc_RNA (1)...(19): siRNA sense strand
ccaaugugccauaugucua

SEQ ID NO: 2648816 - RNA, 19 nt, Homo sapiens
  misc_RNA (1)...(19): siRNA sense strand
gcaaugaaaugugggcuca

SEQ ID NO: 2648817 - RNA, 19 nt, Homo sapiens
  misc_RNA (1)...(19): siRNA sense strand
ggcacaacugggagacaau

SEQ ID NO: 2648818 - RNA, 19 nt, Homo sapiens
  misc_RNA (1)...(19): siRNA sense strand
auuuaggaauccaaggaga

SEQ ID NO: 2648819 - RNA, 19 nt, Homo sapiens
  misc_RNA (1)...(19): siRNA sense strand
ggaacagaccaaugugcca

SEQ ID NO: 2648820 - RNA, 19 nt, Homo sapiens
  misc_RNA (1)...(19): siRNA sense strand
ggugauauuuuggaggaua

SEQ ID NO: 2648821 - RNA, 19 nt, Homo sapiens
  misc_RNA (1)...(19): siRNA sense strand
ugaugacaccauuggaauu

SEQ ID NO: 2648822 - RNA, 19 nt, Homo sapiens
  misc_RNA (1)...(19): siRNA sense strand
ccuggaaagcugaaagugu

SEQ ID NO: 2648823 - RNA, 19 nt, Homo sapiens
  misc_RNA (1)...(19): siRNA sense strand
uguagguggaugugaccaa

SEQ ID NO: 2648824 - RNA, 19 nt, Homo sapiens
  misc_RNA (1)...(19): siRNA sense strand
auuaugugacucaaggaaa

SEQ ID NO: 2648825 - RNA, 19 nt, Homo sapiens
  misc_RNA (1)...(19): siRNA sense strand
ugucuaugcuguuggugau

SEQ ID NO: 2648826 - RNA, 19 nt, Homo sapiens
  misc_RNA (1)...(19): siRNA sense strand
accaaacuuuccaggcaua

SEQ ID NO: 2648827 - RNA, 19 nt, Homo sapiens
  misc_RNA (1)...(19): siRNA sense strand
aaacauuaguggugggugc

SEQ ID NO: 2648828 - RNA, 19 nt, Homo sapiens
  misc_RNA (1)...(19): siRNA sense strand
cuugguggcacuuguguaa

SEQ ID NO: 2648829 - RNA, 19 nt, Homo sapiens
  misc_RNA (1)...(19): siRNA sense strand
guguaaauguagguuguau

SEQ ID NO: 2648830 - RNA, 19 nt, Homo sapiens
  misc_RNA (1)...(19): siRNA sense strand
ugacaaaagcgauucagaa

SEQ ID NO: 2648831 - RNA, 19 nt, Homo sapiens
  misc_RNA (1)...(19): siRNA sense strand
cgaccaagaaauggcagaa

SEQ ID NO: 2648832 - RNA, 19 nt, Homo sapiens
  misc_RNA (1)...(19): siRNA sense strand
agaaacaauugaaggaguc

SEQ ID NO: 2648833 - RNA, 19 nt, Homo sapiens
  misc_RNA (1)...(19): siRNA sense strand
guuccuacauggagcagca

SEQ ID NO: 2648834 - RNA, 19 nt, Homo sapiens
  misc_RNA (1)...(19): siRNA sense strand
cugggaauauaaucaacaa

SEQ ID NO: 2648835 - RNA, 19 nt, Homo sapiens
  misc_RNA (1)...(19): siRNA sense strand
gaccaagaaauggcagaaa

SEQ ID NO: 2648836 - RNA, 19 nt, Homo sapiens
  misc_RNA (1)...(19): siRNA sense strand
gcuaaauccacugaaggaa

SEQ ID NO: 2648837 - RNA, 19 nt, Homo sapiens
  misc_RNA (1)...(19): siRNA sense strand
uaaugagaagaguggaaaa

SEQ ID NO: 2648838 - RNA, 19 nt, Homo sapiens
  misc_RNA (1)...(19): siRNA sense strand
ugucuuggaacuugaucaa

SEQ ID NO: 2648839 - RNA, 19 nt, Homo sapiens
  misc_RNA (1)...(19): siRNA sense strand
cuauggagaauuuguugaa

SEQ ID NO: 2648840 - RNA, 19 nt, Homo sapiens
  misc_RNA (1)...(19): siRNA sense strand
guaaagagguggcuggaga

SEQ ID NO: 2648841 - RNA, 19 nt, Homo sapiens
  misc_RNA (1)...(19): siRNA sense strand
agauggaggaagugggcaa

SEQ ID NO: 2648842 - RNA, 19 nt, Homo sapiens
  misc_RNA (1)...(19): siRNA sense strand
aagaaaacgccaaagaaaa

SEQ ID NO: 2648843 - RNA, 19 nt, Homo sapiens
  misc_RNA (1)...(19): siRNA sense strand
cuuuaaggaguuugaggaa

SEQ ID NO: 2648844 - RNA, 19 nt, Homo sapiens
  misc_RNA (1)...(19): siRNA sense strand
cuucagaggccaaggucuu

SEQ ID NO: 2648845 - RNA, 19 nt, Homo sapiens
  misc_RNA (1)...(19): siRNA sense strand
cuguaaaggcagucggagu

SEQ ID NO: 2648846 - RNA, 19 nt, Homo sapiens
  misc_RNA (1)...(19): siRNA sense strand
ccauggauauccuggccaa

SEQ ID NO: 2648847 - RNA, 19 nt, Homo sapiens
  misc_RNA (1)...(19): siRNA sense strand
aggaagugggcaagcggua

SEQ ID NO: 2648848 - RNA, 19 nt, Homo sapiens
  misc_RNA (1)...(19): siRNA sense strand
agggugagaaccagagaau

SEQ ID NO: 2648849 - RNA, 19 nt, Homo sapiens
  misc_RNA (1)...(19): siRNA sense strand
ucaagaagcaggaggugga

SEQ ID NO: 2648850 - RNA, 19 nt, Homo sapiens
  misc_RNA (1)...(19): siRNA sense strand
gugaagagguccagugguc

SEQ ID NO: 2648851 - RNA, 19 nt, Homo sapiens
  misc_RNA (1)...(19): siRNA sense strand
aggccaaggucuuacacau

SEQ ID NO: 2648852 - RNA, 19 nt, Homo sapiens
  misc_RNA (1)...(19): siRNA sense strand
gaauuuaccaggaagcuga

SEQ ID NO: 2648853 - RNA, 19 nt, Homo sapiens
  misc_RNA (1)...(19): siRNA sense strand
ugaagaaccaagaggugga

SEQ ID NO: 2648854 - RNA, 19 nt, Homo sapiens
  misc_RNA (1)...(19): siRNA sense strand
cugcaaugcuggaagcucu

SEQ ID NO: 2648855 - RNA, 19 nt, Homo sapiens
  misc_RNA (1)...(19): siRNA sense strand
cagccagaggacaggaaga

SEQ ID NO: 2648856 - RNA, 19 nt, Homo sapiens
  misc_RNA (1)...(19): siRNA sense strand
ccuggugcgcugugggaau

SEQ ID NO: 2648857 - RNA, 19 nt, Homo sapiens
  misc_RNA (1)...(19): siRNA sense strand
ccuuaauccugcaucccaa

SEQ ID NO: 2648858 - RNA, 19 nt, Homo sapiens
  misc_RNA (1)...(19): siRNA sense strand
agcauuauaucuuggccaa

SEQ ID NO: 2648859 - RNA, 19 nt, Homo sapiens
  misc_RNA (1)...(19): siRNA sense strand
gccaaagaaaagcaagaaa

SEQ ID NO: 2648860 - RNA, 19 nt, Homo sapiens
  misc_RNA (1)...(19): siRNA sense strand
acaaggugggccaggguga

SEQ ID NO: 2648861 - RNA, 19 nt, Homo sapiens
  misc_RNA (1)...(19): siRNA sense strand
gcuuuaaggaguuugagga

SEQ ID NO: 2648862 - RNA, 19 nt, Homo sapiens
  misc_RNA (1)...(19): siRNA sense strand
cccuuaggaacaagaacua

SEQ ID NO: 2648863 - RNA, 19 nt, Homo sapiens
  misc_RNA (1)...(19): siRNA sense strand
gagcagagugcccagccaa

SEQ ID NO: 2648864 - RNA, 19 nt, Homo sapiens
  misc_RNA (1)...(19): siRNA sense strand
ccuuacaggaggagcgaua

SEQ ID NO: 2648865 - RNA, 19 nt, Homo sapiens
  misc_RNA (1)...(19): siRNA sense strand
gaacauuaucagagggacu

SEQ ID NO: 2648866 - RNA, 19 nt, Homo sapiens
  misc_RNA (1)...(19): siRNA sense strand
gagcaaaggugacuggcuu

SEQ ID NO: 2648867 - RNA, 19 nt, Homo sapiens
  misc_RNA (1)...(19): siRNA sense strand
aggaagggcaaguggauga

SEQ ID NO: 2648868 - RNA, 19 nt, Homo sapiens
  misc_RNA (1)...(19): siRNA sense strand
gggcaucgcuguaggagca

SEQ ID NO: 2648869 - RNA, 19 nt, Homo sapiens
  misc_RNA (1)...(19): siRNA sense strand
gauuggaagaacagcuaaa

SEQ ID NO: 2648870 - RNA, 19 nt, Homo sapiens
  misc_RNA (1)...(19): siRNA sense strand
uggcaagcauggaagaaaa

SEQ ID NO: 2648871 - RNA, 19 nt, Homo sapiens
  misc_RNA (1)...(19): siRNA sense strand
cucaaagcccagagagauu

SEQ ID NO: 2648872 - RNA, 19 nt, Homo sapiens
  misc_RNA (1)...(19): siRNA sense strand
ccuuaauaaugcagaccuu

SEQ ID NO: 2648873 - RNA, 19 nt, Homo sapiens
  misc_RNA (1)...(19): siRNA sense strand
gcgauauagaugugaacga

SEQ ID NO: 2648874 - RNA, 19 nt, Homo sapiens
  misc_RNA (1)...(19): siRNA sense strand
gaagauuguucuagugcca

SEQ ID NO: 2648875 - RNA, 19 nt, Homo sapiens
  misc_RNA (1)...(19): siRNA sense strand
gcuagaagggcuggagaau

SEQ ID NO: 2648876 - RNA, 19 nt, Homo sapiens
  misc_RNA (1)...(19): siRNA sense strand
gugaacgauuggaagaaca

SEQ ID NO: 2648877 - RNA, 19 nt, Homo sapiens
  misc_RNA (1)...(19): siRNA sense strand
aggccagacuagaggaauc

SEQ ID NO: 2648878 - RNA, 19 nt, Homo sapiens
  misc_RNA (1)...(19): siRNA sense strand
uuacaggaggagcgauaua

SEQ ID NO: 2648879 - RNA, 19 nt, Homo sapiens
  misc_RNA (1)...(19): siRNA sense strand
gaacaaauuuggcagugca

SEQ ID NO: 2648880 - RNA, 19 nt, Homo sapiens
  misc_RNA (1)...(19): siRNA sense strand
cccggaaccuucugggcaa

SEQ ID NO: 2648881 - RNA, 19 nt, Homo sapiens
  misc_RNA (1)...(19): siRNA sense strand
ucugaaggauguaggagca

SEQ ID NO: 2648882 - RNA, 19 nt, Homo sapiens
  misc_RNA (1)...(19): siRNA sense strand
agcuagaagggcuggagaa

SEQ ID NO: 2648883 - RNA, 19 nt, Homo sapiens
  misc_RNA (1)...(19): siRNA sense strand
caugcagagcucaggauuu

SEQ ID NO: 2648884 - RNA, 19 nt, Homo sapiens
  misc_RNA (1)...(19): siRNA sense strand
gcucaggauuugaugcacu

SEQ ID NO: 2648885 - RNA, 19 nt, Homo sapiens
  misc_RNA (1)...(19): siRNA sense strand
auaugguagugaagaagau

SEQ ID NO: 2648886 - RNA, 19 nt, Homo sapiens
  misc_RNA (1)...(19): siRNA sense strand
cuacaugagauccaggaga

SEQ ID NO: 2648887 - RNA, 19 nt, Homo sapiens
  misc_RNA (1)...(19): siRNA sense strand
cuggcaagcauggaagaaa

SEQ ID NO: 2648888 - RNA, 19 nt, Homo sapiens
  misc_RNA (1)...(19): siRNA sense strand
cgagagaagaucacggaaa

SEQ ID NO: 2648889 - RNA, 19 nt, Homo sapiens
  misc_RNA (1)...(19): siRNA sense strand
ggaagaaagaaguagaaaa

SEQ ID NO: 2648890 - RNA, 19 nt, Homo sapiens
  misc_RNA (1)...(19): siRNA sense strand
cagauaaacuugaacgaga

SEQ ID NO: 2648891 - RNA, 19 nt, Homo sapiens
  misc_RNA (1)...(19): siRNA sense strand
ggcaaagacuagcuggaaa

SEQ ID NO: 2648892 - RNA, 19 nt, Homo sapiens
  misc_RNA (1)...(19): siRNA sense strand
gcuuacaaauagacagcua

SEQ ID NO: 2648893 - RNA, 19 nt, Homo sapiens
  misc_RNA (1)...(19): siRNA sense strand
ggaccaaaggaauguuaaa

SEQ ID NO: 2648894 - RNA, 19 nt, Homo sapiens
  misc_RNA (1)...(19): siRNA sense strand
cagaagagagaauggacua

SEQ ID NO: 2648895 - RNA, 19 nt, Homo sapiens
  misc_RNA (1)...(19): siRNA sense strand
uguuagagacaaugugaaa

SEQ ID NO: 2648896 - RNA, 19 nt, Homo sapiens
  misc_RNA (1)...(19): siRNA sense strand
gcaaagacuagcuggaaaa

SEQ ID NO: 2648897 - RNA, 19 nt, Homo sapiens
  misc_RNA (1)...(19): siRNA sense strand
gaaugaagaaaguggauca

SEQ ID NO: 2648898 - RNA, 19 nt, Homo sapiens
  misc_RNA (1)...(19): siRNA sense strand
ggccagauccagagaauau

SEQ ID NO: 2648899 - RNA, 19 nt, Homo sapiens
  misc_RNA (1)...(19): siRNA sense strand
gauuacuauuggaggaaga

SEQ ID NO: 2648900 - RNA, 19 nt, Homo sapiens
  misc_RNA (1)...(19): siRNA sense strand
accaugaguuugagguuaa

SEQ ID NO: 2648901 - RNA, 19 nt, Homo sapiens
  misc_RNA (1)...(19): siRNA sense strand
augaaaagagagagugaaa

SEQ ID NO: 2648902 - RNA, 19 nt, Homo sapiens
  misc_RNA (1)...(19): siRNA sense strand
ucagaaaagugaagaaaca

SEQ ID NO: 2648903 - RNA, 19 nt, Homo sapiens
  misc_RNA (1)...(19): siRNA sense strand
uggaggaagaugagaauga

SEQ ID NO: 2648904 - RNA, 19 nt, Homo sapiens
  misc_RNA (1)...(19): siRNA sense strand
ggaagaugagaaugaagaa

SEQ ID NO: 2648905 - RNA, 19 nt, Homo sapiens
  misc_RNA (1)...(19): siRNA sense strand
cuuaacagcaacacagaaa

SEQ ID NO: 2648906 - RNA, 19 nt, Homo sapiens
  misc_RNA (1)...(19): siRNA sense strand
uggaaaagcugcuaaagaa

SEQ ID NO: 2648907 - RNA, 19 nt, Homo sapiens
  misc_RNA (1)...(19): siRNA sense strand
uugaugcacuggagggaua

SEQ ID NO: 2648908 - RNA, 19 nt, Homo sapiens
  misc_RNA (1)...(19): siRNA sense strand
aagcagggaucaagacaau

SEQ ID NO: 2648909 - RNA, 19 nt, Homo sapiens
  misc_RNA (1)...(19): siRNA sense strand
agagaguggcauucagaaa

SEQ ID NO: 2648910 - RNA, 19 nt, Homo sapiens
  misc_RNA (1)...(19): siRNA sense strand
caauggaucaguauggaaa

SEQ ID NO: 2648911 - RNA, 19 nt, Homo sapiens
  misc_RNA (1)...(19): siRNA sense strand
uuucaaaacacgagaagaa

SEQ ID NO: 2648912 - RNA, 19 nt, Homo sapiens
  misc_RNA (1)...(19): siRNA sense strand
cagaugucacgaagaaaua

SEQ ID NO: 2648913 - RNA, 19 nt, Homo sapiens
  misc_RNA (1)...(19): siRNA sense strand
ugucaauagaugaugcuua

SEQ ID NO: 2648914 - RNA, 19 nt, Homo sapiens
  misc_RNA (1)...(19): siRNA sense strand
cggacuauaacaauggaaa

SEQ ID NO: 2648915 - RNA, 19 nt, Homo sapiens
  misc_RNA (1)...(19): siRNA sense strand
gcagaugucacgaagaaau

SEQ ID NO: 2648916 - RNA, 19 nt, Homo sapiens
  misc_RNA (1)...(19): siRNA sense strand
gguauuuggcugaagaaca

SEQ ID NO: 2648917 - RNA, 19 nt, Homo sapiens
  misc_RNA (1)...(19): siRNA sense strand
gaugcauguuagagacaau

SEQ ID NO: 2648918 - RNA, 19 nt, Homo sapiens
  misc_RNA (1)...(19): siRNA sense strand
agauaaacuugaacgagau

SEQ ID NO: 2648919 - RNA, 19 nt, Homo sapiens
  misc_RNA (1)...(19): siRNA sense strand
agagaggugcacagauaaa

SEQ ID NO: 2648920 - RNA, 19 nt, Homo sapiens
  misc_RNA (1)...(19): siRNA sense strand
caugaugagagcaagauua

SEQ ID NO: 2648921 - RNA, 19 nt, Homo sapiens
  misc_RNA (1)...(19): siRNA sense strand
gggagggacauguuugaaa

SEQ ID NO: 2648922 - RNA, 19 nt, Homo sapiens
  misc_RNA (1)...(19): siRNA sense strand
gcaaucuggagcagugaaa

SEQ ID NO: 2648923 - RNA, 19 nt, Homo sapiens
  misc_RNA (1)...(19): siRNA sense strand
ccgcaugaugagagcaaga

SEQ ID NO: 2648924 - RNA, 19 nt, Homo sapiens
  misc_RNA (1)...(19): siRNA sense strand
augcaagaauuguggacca

SEQ ID NO: 2648925 - RNA, 19 nt, Homo sapiens
  misc_RNA (1)...(19): siRNA sense strand
gagacuauuaccugagauu

SEQ ID NO: 2648926 - RNA, 19 nt, Homo sapiens
  misc_RNA (1)...(19): siRNA sense strand
uacaauaagcucagaucaa

SEQ ID NO: 2648927 - RNA, 19 nt, Homo sapiens
  misc_RNA (1)...(19): siRNA sense strand
ccucaaugcugaagagcuc

SEQ ID NO: 2648928 - RNA, 19 nt, Homo sapiens
  misc_RNA (1)...(19): siRNA sense strand
gaaucugaaaugagagcau

SEQ ID NO: 2648929 - RNA, 19 nt, Homo sapiens
  misc_RNA (1)...(19): siRNA sense strand
ucaagucagaagagacaaa

SEQ ID NO: 2648930 - RNA, 19 nt, Homo sapiens
  misc_RNA (1)...(19): siRNA sense strand
gacaaaaggacaagauauu

SEQ ID NO: 2648931 - RNA, 19 nt, Homo sapiens
  misc_RNA (1)...(19): siRNA sense strand
agaauggacuagagguguu

SEQ ID NO: 2648932 - RNA, 19 nt, Homo sapiens
  misc_RNA (1)...(19): siRNA sense strand
gaacaauucuacaagagca

SEQ ID NO: 2648933 - RNA, 19 nt, Homo sapiens
  misc_RNA (1)...(19): siRNA sense strand
agaaaggaguggcccguau

SEQ ID NO: 2648934 - RNA, 19 nt, Homo sapiens
  misc_RNA (1)...(19): siRNA sense strand
aggcauggauggauggcga

SEQ ID NO: 2648935 - RNA, 19 nt, Homo sapiens
  misc_RNA (1)...(19): siRNA sense strand
ugagauuacuauuggagga

SEQ ID NO: 2648936 - RNA, 19 nt, Homo sapiens
  misc_RNA (1)...(19): siRNA sense strand
gaagaugagaaugaagaaa

SEQ ID NO: 2648937 - RNA, 19 nt, Homo sapiens
  misc_RNA (1)...(19): siRNA sense strand
ccagaaaauccaaccauaa

SEQ ID NO: 2648938 - RNA, 19 nt, Homo sapiens
  misc_RNA (1)...(19): siRNA sense strand
aaauccaaccauaaggaaa

SEQ ID NO: 2648939 - RNA, 19 nt, Homo sapiens
  misc_RNA (1)...(19): siRNA sense strand
cugcuaaagaaguugaaaa

SEQ ID NO: 2648940 - RNA, 19 nt, Homo sapiens
  misc_RNA (1)...(19): siRNA sense strand
agaugagaaugaagaaagu

SEQ ID NO: 2648941 - RNA, 19 nt, Homo sapiens
  misc_RNA (1)...(19): siRNA sense strand
caguacagguguguggaua

SEQ ID NO: 2648942 - RNA, 19 nt, Homo sapiens
  misc_RNA (1)...(19): siRNA sense strand
aggaagaugagaaugaaga

SEQ ID NO: 2648943 - RNA, 19 nt, Homo sapiens
  misc_RNA (1)...(19): siRNA sense strand
gauaaacuugaacgagaua

SEQ ID NO: 2648944 - RNA, 19 nt, Homo sapiens
  misc_RNA (1)...(19): siRNA sense strand
acuagaagagaguggcauu

SEQ ID NO: 2648945 - RNA, 19 nt, Homo sapiens
  misc_RNA (1)...(19): siRNA sense strand
guuaaggaucucauggauu

SEQ ID NO: 2648946 - RNA, 19 nt, Homo sapiens
  misc_RNA (1)...(19): siRNA sense strand
ccagauaugaaaagagaga

SEQ ID NO: 2648947 - RNA, 19 nt, Homo sapiens
  misc_RNA (1)...(19): siRNA sense strand
agacaaaaggacaagauau

SEQ ID NO: 2648948 - RNA, 19 nt, Homo sapiens
  misc_RNA (1)...(19): siRNA sense strand
caaacaacugugugauaca

SEQ ID NO: 2648949 - RNA, 19 nt, Homo sapiens
  misc_RNA (1)...(19): siRNA sense strand
aggaaugccgagagaagau

SEQ ID NO: 2648950 - RNA, 19 nt, Homo sapiens
  misc_RNA (1)...(19): siRNA sense strand
gccucuacccaaagugaaa

SEQ ID NO: 2648951 - RNA, 19 nt, Homo sapiens
  misc_RNA (1)...(19): siRNA sense strand
cucaaacaacugugugaua

SEQ ID NO: 2648952 - RNA, 19 nt, Homo sapiens
  misc_RNA (1)...(19): siRNA sense strand
cgguuaagcuucuaaaaga

SEQ ID NO: 2648953 - RNA, 19 nt, Homo sapiens
  misc_RNA (1)...(19): siRNA sense strand
gaauuguggaccaaaggaa

SEQ ID NO: 2648954 - RNA, 19 nt, Homo sapiens
  misc_RNA (1)...(19): siRNA sense strand
ccaauuaaagacccgguua

SEQ ID NO: 2648955 - RNA, 19 nt, Homo sapiens
  misc_RNA (1)...(19): siRNA sense strand
aauccaaccauaaggaaaa

SEQ ID NO: 2648956 - RNA, 19 nt, Homo sapiens
  misc_RNA (1)...(19): siRNA sense strand
gccugaugauagagaagau

SEQ ID NO: 2648957 - RNA, 19 nt, Homo sapiens
  misc_RNA (1)...(19): siRNA sense strand
ggagggacauguuugaaaa

SEQ ID NO: 2648958 - RNA, 19 nt, Homo sapiens
  misc_RNA (1)...(19): siRNA sense strand
guguggauacauaaguaaa

SEQ ID NO: 2648959 - RNA, 19 nt, Homo sapiens
  misc_RNA (1)...(19): siRNA sense strand
gagaaugaagaaaguggau

SEQ ID NO: 2648960 - RNA, 19 nt, Homo sapiens
  misc_RNA (1)...(19): siRNA sense strand
cagaagagacaaaaggaca

SEQ ID NO: 2648961 - RNA, 19 nt, Homo sapiens
  misc_RNA (1)...(19): siRNA sense strand
agaagagacaaaaggacaa

SEQ ID NO: 2648962 - RNA, 19 nt, Homo sapiens
  misc_RNA (1)...(19): siRNA sense strand
aaguagacauuuaguggga

SEQ ID NO: 2648963 - RNA, 19 nt, Homo sapiens
  misc_RNA (1)...(19): siRNA sense strand
acaagcaacuccagaaaau

SEQ ID NO: 2648964 - RNA, 19 nt, Homo sapiens
  misc_RNA (1)...(19): siRNA sense strand
ugaaaauagcaauggauca

SEQ ID NO: 2648965 - RNA, 19 nt, Homo sapiens
  misc_RNA (1)...(19): siRNA sense strand
cuuuagagguugugaauau

SEQ ID NO: 2648966 - RNA, 19 nt, Homo sapiens
  misc_RNA (1)...(19): siRNA sense strand
cuaagaaagccuagagaau

SEQ ID NO: 2648967 - RNA, 19 nt, Homo sapiens
  misc_RNA (1)...(19): siRNA sense strand
ucaaagaagcaauggcaaa

SEQ ID NO: 2648968 - RNA, 19 nt, Homo sapiens
  misc_RNA (1)...(19): siRNA sense strand
cgagagaagaucacggaaa

SEQ ID NO: 2648969 - RNA, 19 nt, Homo sapiens
  misc_RNA (1)...(19): siRNA sense strand
ggaagaaagaaguagaaaa

SEQ ID NO: 2648970 - RNA, 19 nt, Homo sapiens
  misc_RNA (1)...(19): siRNA sense strand
cagauaaacuugaacgaga

SEQ ID NO: 2648971 - RNA, 19 nt, Homo sapiens
  misc_RNA (1)...(19): siRNA sense strand
ggcaaagacuagcuggaaa

SEQ ID NO: 2648972 - RNA, 19 nt, Homo sapiens
  misc_RNA (1)...(19): siRNA sense strand
aggacaacccugaggcaaa

SEQ ID NO: 2648973 - RNA, 19 nt, Homo sapiens
  misc_RNA (1)...(19): siRNA sense strand
cagaaggagcagagugaau

SEQ ID NO: 2648974 - RNA, 19 nt, Homo sapiens
  misc_RNA (1)...(19): siRNA sense strand
gcuuacaaauagacagcua

SEQ ID NO: 2648975 - RNA, 19 nt, Homo sapiens
  misc_RNA (1)...(19): siRNA sense strand
ggaccaaaggaauguuaaa

SEQ ID NO: 2648976 - RNA, 19 nt, Homo sapiens
  misc_RNA (1)...(19): siRNA sense strand
cagaagagagaauggacua

SEQ ID NO: 2648977 - RNA, 19 nt, Homo sapiens
  misc_RNA (1)...(19): siRNA sense strand
uguuagagacaaugugaaa

SEQ ID NO: 2648978 - RNA, 19 nt, Homo sapiens
  misc_RNA (1)...(19): siRNA sense strand
gcaaagacuagcuggaaaa

SEQ ID NO: 2648979 - RNA, 19 nt, Homo sapiens
  misc_RNA (1)...(19): siRNA sense strand
gaaugaagaaaguggauca

SEQ ID NO: 2648980 - RNA, 19 nt, Homo sapiens
  misc_RNA (1)...(19): siRNA sense strand
cggcaaaaguggagucaga

SEQ ID NO: 2648981 - RNA, 19 nt, Homo sapiens
  misc_RNA (1)...(19): siRNA sense strand
ggccagauccagagaauau

SEQ ID NO: 2648982 - RNA, 19 nt, Homo sapiens
  misc_RNA (1)...(19): siRNA sense strand
cuuuggaggcucugagaaa

SEQ ID NO: 2648983 - RNA, 19 nt, Homo sapiens
  misc_RNA (1)...(19): siRNA sense strand
cuacagugaucaugccaaa

SEQ ID NO: 2648984 - RNA, 19 nt, Homo sapiens
  misc_RNA (1)...(19): siRNA sense strand
gcuuugacaucgaguacaa

SEQ ID NO: 2648985 - RNA, 19 nt, Homo sapiens
  misc_RNA (1)...(19): siRNA sense strand
caaaaugacagcagauaaa

SEQ ID NO: 2648986 - RNA, 19 nt, Homo sapiens
  misc_RNA (1)...(19): siRNA sense strand
gauuacuauuggaggaaga

SEQ ID NO: 2648987 - RNA, 19 nt, Homo sapiens
  misc_RNA (1)...(19): siRNA sense strand
ccaaaguuauccaggcaau

SEQ ID NO: 2648988 - RNA, 19 nt, Homo sapiens
  misc_RNA (1)...(19): siRNA sense strand
accaugaguuugagguuaa

SEQ ID NO: 2648989 - RNA, 19 nt, Homo sapiens
  misc_RNA (1)...(19): siRNA sense strand
acugaugaauggaaugaaa

SEQ ID NO: 2648990 - RNA, 19 nt, Homo sapiens
  misc_RNA (1)...(19): siRNA sense strand
ggagaacaggugaaugaaa

SEQ ID NO: 2648991 - RNA, 19 nt, Homo sapiens
  misc_RNA (1)...(19): siRNA sense strand
augaaaagagagagugaaa

SEQ ID NO: 2648992 - RNA, 19 nt, Homo sapiens
  misc_RNA (1)...(19): siRNA sense strand
ucagaaaagugaagaaaca

SEQ ID NO: 2648993 - RNA, 19 nt, Homo sapiens
  misc_RNA (1)...(19): siRNA sense strand
uggaggaagaugagaauga

SEQ ID NO: 2648994 - RNA, 19 nt, Homo sapiens
  misc_RNA (1)...(19): siRNA sense strand
ggaagaugagaaugaagaa

SEQ ID NO: 2648995 - RNA, 19 nt, Homo sapiens
  misc_RNA (1)...(19): siRNA sense strand
cuuaacagcaacacagaaa

SEQ ID NO: 2648996 - RNA, 19 nt, Homo sapiens
  misc_RNA (1)...(19): siRNA sense strand
ucaugaaaauccugaguua

SEQ ID NO: 2648997 - RNA, 19 nt, Homo sapiens
  misc_RNA (1)...(19): siRNA sense strand
uggaaaagcugcuaaagaa

SEQ ID NO: 2648998 - RNA, 19 nt, Homo sapiens
  misc_RNA (1)...(19): siRNA sense strand
uugaugcacuggagggaua

SEQ ID NO: 2648999 - RNA, 19 nt, Homo sapiens
  misc_RNA (1)...(19): siRNA sense strand
aagcagggaucaagacaau

SEQ ID NO: 2649000 - RNA, 19 nt, Homo sapiens
  misc_RNA (1)...(19): siRNA sense strand
agagaguggcauucagaaa

SEQ ID NO: 2649001 - RNA, 19 nt, Homo sapiens
  misc_RNA (1)...(19): siRNA sense strand
caauggaucaguauggaaa

SEQ ID NO: 2649002 - RNA, 19 nt, Homo sapiens
  misc_RNA (1)...(19): siRNA sense strand
ccuucaaagaucagaaaca

SEQ ID NO: 2649003 - RNA, 19 nt, Homo sapiens
  misc_RNA (1)...(19): siRNA sense strand
uuucaaaacacgagaagaa

SEQ ID NO: 2649004 - RNA, 19 nt, Homo sapiens
  misc_RNA (1)...(19): siRNA sense strand
cagaugucacgaagaaaua

SEQ ID NO: 2649005 - RNA, 19 nt, Homo sapiens
  misc_RNA (1)...(19): siRNA sense strand
ugucaauagaugaugcuua

SEQ ID NO: 2649006 - RNA, 19 nt, Homo sapiens
  misc_RNA (1)...(19): siRNA sense strand
cggacuauaacaauggaaa

SEQ ID NO: 2649007 - RNA, 19 nt, Homo sapiens
  misc_RNA (1)...(19): siRNA sense strand
gcagaugucacgaagaaau

SEQ ID NO: 2649008 - RNA, 19 nt, Homo sapiens
  misc_RNA (1)...(19): siRNA sense strand
gguauuuggcugaagaaca

SEQ ID NO: 2649009 - RNA, 19 nt, Homo sapiens
  misc_RNA (1)...(19): siRNA sense strand
ugaaggaacucaugaaaau

SEQ ID NO: 2649010 - RNA, 19 nt, Homo sapiens
  misc_RNA (1)...(19): siRNA sense strand
gaugcauguuagagacaau

SEQ ID NO: 2649011 - RNA, 19 nt, Homo sapiens
  misc_RNA (1)...(19): siRNA sense strand
agauaaacuugaacgagau

SEQ ID NO: 2649012 - RNA, 19 nt, Homo sapiens
  misc_RNA (1)...(19): siRNA sense strand
gguugugaauauagugaca

SEQ ID NO: 2649013 - RNA, 19 nt, Homo sapiens
  misc_RNA (1)...(19): siRNA sense strand
cuggauauguucugcaauu

SEQ ID NO: 2649014 - RNA, 19 nt, Homo sapiens
  misc_RNA (1)...(19): siRNA sense strand
uuggagaagcagaggguga

SEQ ID NO: 2649015 - RNA, 19 nt, Homo sapiens
  misc_RNA (1)...(19): siRNA sense strand
agagaggugcacagauaaa

SEQ ID NO: 2649016 - RNA, 19 nt, Homo sapiens
  misc_RNA (1)...(19): siRNA sense strand
caugaugagagcaagauua

SEQ ID NO: 2649017 - RNA, 19 nt, Homo sapiens
  misc_RNA (1)...(19): siRNA sense strand
gggagggacauguuugaaa

SEQ ID NO: 2649018 - RNA, 19 nt, Homo sapiens
  misc_RNA (1)...(19): siRNA sense strand
gagugaauuaguagcacaa

SEQ ID NO: 2649019 - RNA, 19 nt, Homo sapiens
  misc_RNA (1)...(19): siRNA sense strand
gcaaucuggagcagugaaa

SEQ ID NO: 2649020 - RNA, 19 nt, Homo sapiens
  misc_RNA (1)...(19): siRNA sense strand
ccgcaugaugagagcaaga

SEQ ID NO: 2649021 - RNA, 19 nt, Homo sapiens
  misc_RNA (1)...(19): siRNA sense strand
augcaagaauuguggacca

SEQ ID NO: 2649022 - RNA, 19 nt, Homo sapiens
  misc_RNA (1)...(19): siRNA sense strand
agucagagcaacauggaga

SEQ ID NO: 2649023 - RNA, 19 nt, Homo sapiens
  misc_RNA (1)...(19): siRNA sense strand
ccaaaaugacagcagauaa

SEQ ID NO: 2649024 - RNA, 19 nt, Homo sapiens
  misc_RNA (1)...(19): siRNA sense strand
ccacaacaguuagggaaau

SEQ ID NO: 2649025 - RNA, 19 nt, Homo sapiens
  misc_RNA (1)...(19): siRNA sense strand
gagacuauuaccugagauu

SEQ ID NO: 2649026 - RNA, 19 nt, Homo sapiens
  misc_RNA (1)...(19): siRNA sense strand
uacaauaagcucagaucaa

SEQ ID NO: 2649027 - RNA, 19 nt, Homo sapiens
  misc_RNA (1)...(19): siRNA sense strand
guuaaagcucucaaggcaa

SEQ ID NO: 2649028 - RNA, 19 nt, Homo sapiens
  misc_RNA (1)...(19): siRNA sense strand
agucacaaacagcaggaua

SEQ ID NO: 2649029 - RNA, 19 nt, Homo sapiens
  misc_RNA (1)...(19): siRNA sense strand
ccucaaugcugaagagcuc

SEQ ID NO: 2649030 - RNA, 19 nt, Homo sapiens
  misc_RNA (1)...(19): siRNA sense strand
auggagaacaggugaauga

SEQ ID NO: 2649031 - RNA, 19 nt, Homo sapiens
  misc_RNA (1)...(19): siRNA sense strand
gaaucugaaaugagagcau

SEQ ID NO: 2649032 - RNA, 19 nt, Homo sapiens
  misc_RNA (1)...(19): siRNA sense strand
ucaagucagaagagacaaa

SEQ ID NO: 2649033 - RNA, 19 nt, Homo sapiens
  misc_RNA (1)...(19): siRNA sense strand
gacaaaaggacaagauauu

SEQ ID NO: 2649034 - RNA, 19 nt, Homo sapiens
  misc_RNA (1)...(19): siRNA sense strand
agaauggacuagagguguu

SEQ ID NO: 2649035 - RNA, 19 nt, Homo sapiens
  misc_RNA (1)...(19): siRNA sense strand
acugauagguccaaagguu

SEQ ID NO: 2649036 - RNA, 19 nt, Homo sapiens
  misc_RNA (1)...(19): siRNA sense strand
gaguaaagaaggacagcga

SEQ ID NO: 2649037 - RNA, 19 nt, Homo sapiens
  misc_RNA (1)...(19): siRNA sense strand
augaagaggaagaagaaga

SEQ ID NO: 2649038 - RNA, 19 nt, Homo sapiens
  misc_RNA (1)...(19): siRNA sense strand
ccgaaaaggggcugguaau

SEQ ID NO: 2649039 - RNA, 19 nt, Homo sapiens
  misc_RNA (1)...(19): siRNA sense strand
ggacgaaauccaagcucca

SEQ ID NO: 2649040 - RNA, 19 nt, Homo sapiens
  misc_RNA (1)...(19): siRNA sense strand
ggaagaagaagaccgccaa

SEQ ID NO: 2649041 - RNA, 19 nt, Homo sapiens
  misc_RNA (1)...(19): siRNA sense strand
aggaagaagaagaccgcca

SEQ ID NO: 2649042 - RNA, 19 nt, Homo sapiens
  misc_RNA (1)...(19): siRNA sense strand
cuauagagacacugggaug

SEQ ID NO: 2649043 - RNA, 19 nt, Homo sapiens
  misc_RNA (1)...(19): siRNA sense strand
agaaggacagcgaggacga

SEQ ID NO: 2649044 - RNA, 19 nt, Homo sapiens
  misc_RNA (1)...(19): siRNA sense strand
ccaccaucugccugagcaa

SEQ ID NO: 2649045 - RNA, 19 nt, Homo sapiens
  misc_RNA (1)...(19): siRNA sense strand
cagcaauaccucaugggca

SEQ ID NO: 2649046 - RNA, 19 nt, Homo sapiens
  misc_RNA (1)...(19): siRNA sense strand
agacauacuucugugguga

SEQ ID NO: 2649047 - RNA, 19 nt, Homo sapiens
  misc_RNA (1)...(19): siRNA sense strand
aggacagcgaggacgaaau

SEQ ID NO: 2649048 - RNA, 19 nt, Homo sapiens
  misc_RNA (1)...(19): siRNA sense strand
gaguaaagaaggacagcga

SEQ ID NO: 2649049 - RNA, 19 nt, Homo sapiens
  misc_RNA (1)...(19): siRNA sense strand
augaagaggaagaagaaga

SEQ ID NO: 2649050 - RNA, 19 nt, Homo sapiens
  misc_RNA (1)...(19): siRNA sense strand
ccgaaaaggggcugguaau

SEQ ID NO: 2649051 - RNA, 19 nt, Homo sapiens
  misc_RNA (1)...(19): siRNA sense strand
ggacgaaauccaagcucca

SEQ ID NO: 2649052 - RNA, 19 nt, Homo sapiens
  misc_RNA (1)...(19): siRNA sense strand
ggaagaagaagaccgccaa

SEQ ID NO: 2649053 - RNA, 19 nt, Homo sapiens
  misc_RNA (1)...(19): siRNA sense strand
aggaagaagaagaccgcca

SEQ ID NO: 2649054 - RNA, 19 nt, Homo sapiens
  misc_RNA (1)...(19): siRNA sense strand
cuauagagacacugggaug

SEQ ID NO: 2649055 - RNA, 19 nt, Homo sapiens
  misc_RNA (1)...(19): siRNA sense strand
agaaggacagcgaggacga

SEQ ID NO: 2649056 - RNA, 19 nt, Homo sapiens
  misc_RNA (1)...(19): siRNA sense strand
ccaccaucugccugagcaa

SEQ ID NO: 2649057 - RNA, 19 nt, Homo sapiens
  misc_RNA (1)...(19): siRNA sense strand
cagcaauaccucaugggca

SEQ ID NO: 2649058 - RNA, 19 nt, Homo sapiens
  misc_RNA (1)...(19): siRNA sense strand
agacauacuucugugguga

SEQ ID NO: 2649059 - RNA, 19 nt, Homo sapiens
  misc_RNA (1)...(19): siRNA sense strand
aggacagcgaggacgaaau

SEQ ID NO: 2649060 - RNA, 19 nt, Homo sapiens
  misc_RNA (1)...(19): siRNA sense strand
gggagaaacuugagcccaa

SEQ ID NO: 2649061 - RNA, 19 nt, Homo sapiens
  misc_RNA (1)...(19): siRNA sense strand
cagaagugucccaggguca

SEQ ID NO: 2649062 - RNA, 19 nt, Homo sapiens
  misc_RNA (1)...(19): siRNA sense strand
gaaagcaaguuccgggaga

SEQ ID NO: 2649063 - RNA, 19 nt, Homo sapiens
  misc_RNA (1)...(19): siRNA sense strand
aagcaaguuccgggagaaa

SEQ ID NO: 2649064 - RNA, 19 nt, Homo sapiens
  misc_RNA (1)...(19): siRNA sense strand
acuaauacgugcaaccgaa

SEQ ID NO: 2649065 - RNA, 19 nt, Homo sapiens
  misc_RNA (1)...(19): siRNA sense strand
acgaaguguuugaguucau

SEQ ID NO: 2649066 - RNA, 19 nt, Homo sapiens
  misc_RNA (1)...(19): siRNA sense strand
ccuucgaauuccuugacaa

SEQ ID NO: 2649067 - RNA, 19 nt, Homo sapiens
  misc_RNA (1)...(19): siRNA sense strand
agucagaucccuacgccaa

SEQ ID NO: 2649068 - RNA, 19 nt, Homo sapiens
  misc_RNA (1)...(19): siRNA sense strand
gcccaagauccgagagaag

SEQ ID NO: 2649069 - RNA, 19 nt, Homo sapiens
  misc_RNA (1)...(19): siRNA sense strand
cuucgaauuccuugacaau

SEQ ID NO: 2649070 - RNA, 19 nt, Homo sapiens
  misc_RNA (1)...(19): siRNA sense strand
caaacuaucuguaggcaag

SEQ ID NO: 2649071 - RNA, 19 nt, Homo sapiens
  misc_RNA (1)...(19): siRNA sense strand
ucaaacuaucuguaggcaa

SEQ ID NO: 2649072 - RNA, 19 nt, Homo sapiens
  misc_RNA (1)...(19): siRNA sense strand
caaccgaagacgugugacu

SEQ ID NO: 2649073 - RNA, 19 nt, Homo sapiens
  misc_RNA (1)...(19): siRNA sense strand
ggucaacggugucaaggca

SEQ ID NO: 2649074 - RNA, 19 nt, Homo sapiens
  misc_RNA (1)...(19): siRNA sense strand
gcuuacugaccaagaaguu

SEQ ID NO: 2649075 - RNA, 19 nt, Homo sapiens
  misc_RNA (1)...(19): siRNA sense strand
gaagaaaggaguuaggaaa

SEQ ID NO: 2649076 - RNA, 19 nt, Homo sapiens
  misc_RNA (1)...(19): siRNA sense strand
gggagaaacuugagcccaa

SEQ ID NO: 2649077 - RNA, 19 nt, Homo sapiens
  misc_RNA (1)...(19): siRNA sense strand
ccagaaaggaagugggcau

SEQ ID NO: 2649078 - RNA, 19 nt, Homo sapiens
  misc_RNA (1)...(19): siRNA sense strand
acuagauguugcagugaaa

SEQ ID NO: 2649079 - RNA, 19 nt, Homo sapiens
  misc_RNA (1)...(19): siRNA sense strand
acacagaagaaaggaguua

SEQ ID NO: 2649080 - RNA, 19 nt, Homo sapiens
  misc_RNA (1)...(19): siRNA sense strand
agaagaaaggaguuaggaa

SEQ ID NO: 2649081 - RNA, 19 nt, Homo sapiens
  misc_RNA (1)...(19): siRNA sense strand
aagaaaggaguuaggaaaa

SEQ ID NO: 2649082 - RNA, 19 nt, Homo sapiens
  misc_RNA (1)...(19): siRNA sense strand
ccauggaagaaguaaagaa

SEQ ID NO: 2649083 - RNA, 19 nt, Homo sapiens
  misc_RNA (1)...(19): siRNA sense strand
cagaagugucccaggguca

SEQ ID NO: 2649084 - RNA, 19 nt, Homo sapiens
  misc_RNA (1)...(19): siRNA sense strand
gaaagcaaguuccgggaga

SEQ ID NO: 2649085 - RNA, 19 nt, Homo sapiens
  misc_RNA (1)...(19): siRNA sense strand
accugaagcccuaaagaaa

SEQ ID NO: 2649086 - RNA, 19 nt, Homo sapiens
  misc_RNA (1)...(19): siRNA sense strand
gguaugagcugacuccaaa

SEQ ID NO: 2649087 - RNA, 19 nt, Homo sapiens
  misc_RNA (1)...(19): siRNA sense strand
aagcaaguuccgggagaaa

SEQ ID NO: 2649088 - RNA, 19 nt, Homo sapiens
  misc_RNA (1)...(19): siRNA sense strand
uggaagaaguaaagaagag

SEQ ID NO: 2649089 - RNA, 19 nt, Homo sapiens
  misc_RNA (1)...(19): siRNA sense strand
acuaauacgugcaaccgaa

SEQ ID NO: 2649090 - RNA, 19 nt, Homo sapiens
  misc_RNA (1)...(19): siRNA sense strand
acgaaguguuugaguucau

SEQ ID NO: 2649091 - RNA, 19 nt, Homo sapiens
  misc_RNA (1)...(19): siRNA sense strand
ccuucgaauuccuugacaa

SEQ ID NO: 2649092 - RNA, 19 nt, Homo sapiens
  misc_RNA (1)...(19): siRNA sense strand
agucagaucccuacgccaa

SEQ ID NO: 2649093 - RNA, 19 nt, Homo sapiens
  misc_RNA (1)...(19): siRNA sense strand
gcccaagauccgagagaag

SEQ ID NO: 2649094 - RNA, 19 nt, Homo sapiens
  misc_RNA (1)...(19): siRNA sense strand
gagaagaagaguccagcca

SEQ ID NO: 2649095 - RNA, 19 nt, Homo sapiens
  misc_RNA (1)...(19): siRNA sense strand
cuucgaauuccuugacaau

SEQ ID NO: 2649096 - RNA, 19 nt, Homo sapiens
  misc_RNA (1)...(19): siRNA sense strand
caaacuaucuguaggcaag

SEQ ID NO: 2649097 - RNA, 19 nt, Homo sapiens
  misc_RNA (1)...(19): siRNA sense strand
ucaaacuaucuguaggcaa

SEQ ID NO: 2649098 - RNA, 19 nt, Homo sapiens
  misc_RNA (1)...(19): siRNA sense strand
acuuguugccagaaaggaa

SEQ ID NO: 2649099 - RNA, 19 nt, Homo sapiens
  misc_RNA (1)...(19): siRNA sense strand
aggagugugcucugggaau

SEQ ID NO: 2649100 - RNA, 19 nt, Homo sapiens
  misc_RNA (1)...(19): siRNA sense strand
cagugaagcggaagaccuu

SEQ ID NO: 2649101 - RNA, 19 nt, Homo sapiens
  misc_RNA (1)...(19): siRNA sense strand
caaccgaagacgugugacu

SEQ ID NO: 2649102 - RNA, 19 nt, Homo sapiens
  misc_RNA (1)...(19): siRNA sense strand
uaggaaaaguacugauuga

SEQ ID NO: 2649103 - RNA, 19 nt, Homo sapiens
  misc_RNA (1)...(19): siRNA sense strand
ggucaacggugucaaggca

SEQ ID NO: 2649104 - RNA, 19 nt, Homo sapiens
  misc_RNA (1)...(19): siRNA sense strand
ccacuuggcucacacagaa

SEQ ID NO: 2649105 - RNA, 19 nt, Homo sapiens
  misc_RNA (1)...(19): siRNA sense strand
gcuuacugaccaagaaguu

SEQ ID NO: 2649106 - RNA, 19 nt, Homo sapiens
  misc_RNA (1)...(19): siRNA sense strand
gaaguaaagaagaggucac

SEQ ID NO: 2649107 - RNA, 19 nt, Homo sapiens
  misc_RNA (1)...(19): siRNA sense strand
gaagaggucacuagauguu

SEQ ID NO: 2649108 - RNA, 19 nt, Homo sapiens
  misc_RNA (1)...(19): siRNA sense strand
gaguaauagcagugagaau

SEQ ID NO: 2649109 - RNA, 19 nt, Homo sapiens
  misc_RNA (1)...(19): siRNA sense strand
ucucaaagcugaaguguuu

SEQ ID NO: 2649110 - RNA, 19 nt, Homo sapiens
  misc_RNA (1)...(19): siRNA sense strand
ccgcuggacuugagggcaa

SEQ ID NO: 2649111 - RNA, 19 nt, Homo sapiens
  misc_RNA (1)...(19): siRNA sense strand
gguaacacagggaaagaaa

SEQ ID NO: 2649112 - RNA, 19 nt, Homo sapiens
  misc_RNA (1)...(19): siRNA sense strand
acucaaaucccuuggagaa

SEQ ID NO: 2649113 - RNA, 19 nt, Homo sapiens
  misc_RNA (1)...(19): siRNA sense strand
cugaaaagggagugguuaa

SEQ ID NO: 2649114 - RNA, 19 nt, Homo sapiens
  misc_RNA (1)...(19): siRNA sense strand
uauccaacuuagagguuaa

SEQ ID NO: 2649115 - RNA, 19 nt, Homo sapiens
  misc_RNA (1)...(19): siRNA sense strand
cauacaaaccgguguggaa

SEQ ID NO: 2649116 - RNA, 19 nt, Homo sapiens
  misc_RNA (1)...(19): siRNA sense strand
agauaaaguggguagguuu

SEQ ID NO: 2649117 - RNA, 19 nt, Homo sapiens
  misc_RNA (1)...(19): siRNA sense strand
aggcaugaaauuuggcaua

SEQ ID NO: 2649118 - RNA, 19 nt, Homo sapiens
  misc_RNA (1)...(19): siRNA sense strand
acucugugauggagacaaa

SEQ ID NO: 2649119 - RNA, 19 nt, Homo sapiens
  misc_RNA (1)...(19): siRNA sense strand
ccaaaagcauuaaggagaa

SEQ ID NO: 2649120 - RNA, 19 nt, Homo sapiens
  misc_RNA (1)...(19): siRNA sense strand
aaggaaacuuacagaaaca

SEQ ID NO: 2649121 - RNA, 19 nt, Homo sapiens
  misc_RNA (1)...(19): siRNA sense strand
ccucaaaauccaugaaaga

SEQ ID NO: 2649122 - RNA, 19 nt, Homo sapiens
  misc_RNA (1)...(19): siRNA sense strand
acuaaugggccaaggauca

SEQ ID NO: 2649123 - RNA, 19 nt, Homo sapiens
  misc_RNA (1)...(19): siRNA sense strand
cccugaaagaugacaguaa

SEQ ID NO: 2649124 - RNA, 19 nt, Homo sapiens
  misc_RNA (1)...(19): siRNA sense strand
gcacauucuaggaucuaaa

SEQ ID NO: 2649125 - RNA, 19 nt, Homo sapiens
  misc_RNA (1)...(19): siRNA sense strand
cuuauaagagcuaccgaaa

SEQ ID NO: 2649126 - RNA, 19 nt, Homo sapiens
  misc_RNA (1)...(19): siRNA sense strand
cuguaaacacccugaccaa

SEQ ID NO: 2649127 - RNA, 19 nt, Homo sapiens
  misc_RNA (1)...(19): siRNA sense strand
gagaggaggcauugaaaau

SEQ ID NO: 2649128 - RNA, 19 nt, Homo sapiens
  misc_RNA (1)...(19): siRNA sense strand
aaucacgagcagaggcaua

SEQ ID NO: 2649129 - RNA, 19 nt, Homo sapiens
  misc_RNA (1)...(19): siRNA sense strand
acuuagagguuaaucaaga

SEQ ID NO: 2649130 - RNA, 19 nt, Homo sapiens
  misc_RNA (1)...(19): siRNA sense strand
ucacuaucauuguggaaga

SEQ ID NO: 2649131 - RNA, 19 nt, Homo sapiens
  misc_RNA (1)...(19): siRNA sense strand
agagguuaaucaagaaaga

SEQ ID NO: 2649132 - RNA, 19 nt, Homo sapiens
  misc_RNA (1)...(19): siRNA sense strand
gagaaauaccggaggaguc

SEQ ID NO: 2649133 - RNA, 19 nt, Homo sapiens
  misc_RNA (1)...(19): siRNA sense strand
uugccaaauaacagugaaa

SEQ ID NO: 2649134 - RNA, 19 nt, Homo sapiens
  misc_RNA (1)...(19): siRNA sense strand
aauuuaaagcccauagcaa

SEQ ID NO: 2649135 - RNA, 19 nt, Homo sapiens
  misc_RNA (1)...(19): siRNA sense strand
agggagugguuaaagaaga

SEQ ID NO: 2649136 - RNA, 19 nt, Homo sapiens
  misc_RNA (1)...(19): siRNA sense strand
ucaagaaagaaguccacaa

SEQ ID NO: 2649137 - RNA, 19 nt, Homo sapiens
  misc_RNA (1)...(19): siRNA sense strand
ccauaaauguaaauaccca

SEQ ID NO: 2649138 - RNA, 19 nt, Homo sapiens
  misc_RNA (1)...(19): siRNA sense strand
guggaagauaccaaauuua

SEQ ID NO: 2649139 - RNA, 19 nt, Homo sapiens
  misc_RNA (1)...(19): siRNA sense strand
gggagaggaggcauugaaa

SEQ ID NO: 2649140 - RNA, 19 nt, Homo sapiens
  misc_RNA (1)...(19): siRNA sense strand
auguaaauacccagcagaa

SEQ ID NO: 2649141 - RNA, 19 nt, Homo sapiens
  misc_RNA (1)...(19): siRNA sense strand
aaacuaaagagaugcccaa

SEQ ID NO: 2649142 - RNA, 19 nt, Homo sapiens
  misc_RNA (1)...(19): siRNA sense strand
cagaagacaaugaccaaaa

SEQ ID NO: 2649143 - RNA, 19 nt, Homo sapiens
  misc_RNA (1)...(19): siRNA sense strand
acaaugaccaaaaggauaa

SEQ ID NO: 2649144 - RNA, 19 nt, Homo sapiens
  misc_RNA (1)...(19): siRNA sense strand
aaacaugccggaagccaaa

SEQ ID NO: 2649145 - RNA, 19 nt, Homo sapiens
  misc_RNA (1)...(19): siRNA sense strand
ccuccgaagacaugcaaau

SEQ ID NO: 2649146 - RNA, 19 nt, Homo sapiens
  misc_RNA (1)...(19): siRNA sense strand
acaguaagcccgagccaga

SEQ ID NO: 2649147 - RNA, 19 nt, Homo sapiens
  misc_RNA (1)...(19): siRNA sense strand
gccaaauaacagugaaaau

SEQ ID NO: 2649148 - RNA, 19 nt, Homo sapiens
  misc_RNA (1)...(19): siRNA sense strand
gcccaagucagcaggagaa

SEQ ID NO: 2649149 - RNA, 19 nt, Homo sapiens
  misc_RNA (1)...(19): siRNA sense strand
auuuaaagcccauagcaau

SEQ ID NO: 2649150 - RNA, 19 nt, Homo sapiens
  misc_RNA (1)...(19): siRNA sense strand
agacgauaucagugcauuu

SEQ ID NO: 2649151 - RNA, 19 nt, Homo sapiens
  misc_RNA (1)...(19): siRNA sense strand
agugaaaauuggaaacgaa

SEQ ID NO: 2649152 - RNA, 19 nt, Homo sapiens
  misc_RNA (1)...(19): siRNA sense strand
uugaggaagaagaaacuaa

SEQ ID NO: 2649153 - RNA, 19 nt, Homo sapiens
  misc_RNA (1)...(19): siRNA sense strand
caggacaaggcaugaaauu

SEQ ID NO: 2649154 - RNA, 19 nt, Homo sapiens
  misc_RNA (1)...(19): siRNA sense strand
ccagggaccucaaggacga

SEQ ID NO: 2649155 - RNA, 19 nt, Homo sapiens
  misc_RNA (1)...(19): siRNA sense strand
ggaaagucaacuggaggaa

SEQ ID NO: 2649156 - RNA, 19 nt, Homo sapiens
  misc_RNA (1)...(19): siRNA sense strand
ggcauauucgggagcauaa

SEQ ID NO: 2649157 - RNA, 19 nt, Homo sapiens
  misc_RNA (1)...(19): siRNA sense strand
cggugaucaugcacagcaa

SEQ ID NO: 2649158 - RNA, 19 nt, Homo sapiens
  misc_RNA (1)...(19): siRNA sense strand
ucacauaccaggggagaaa

SEQ ID NO: 2649159 - RNA, 19 nt, Homo sapiens
  misc_RNA (1)...(19): siRNA sense strand
cuggaggaucacugagcaa

SEQ ID NO: 2649160 - RNA, 19 nt, Homo sapiens
  misc_RNA (1)...(19): siRNA sense strand
ggaggaucacugagcaaaa

SEQ ID NO: 2649161 - RNA, 19 nt, Homo sapiens
  misc_RNA (1)...(19): siRNA sense strand
aggaagaagaaacuaaaga

SEQ ID NO: 2649162 - RNA, 19 nt, Homo sapiens
  misc_RNA (1)...(19): siRNA sense strand
gaaaauaggauuggugaau

SEQ ID NO: 2649163 - RNA, 19 nt, Homo sapiens
  misc_RNA (1)...(19): siRNA sense strand
ccaggauuccacugacaaa

SEQ ID NO: 2649164 - RNA, 19 nt, Homo sapiens
  misc_RNA (1)...(19): siRNA sense strand
aacaggagcccgagccaua

SEQ ID NO: 2649165 - RNA, 19 nt, Homo sapiens
  misc_RNA (1)...(19): siRNA sense strand
gacaaugaccaaaaggaua

SEQ ID NO: 2649166 - RNA, 19 nt, Homo sapiens
  misc_RNA (1)...(19): siRNA sense strand
ggauucagccacagaaaau

SEQ ID NO: 2649167 - RNA, 19 nt, Homo sapiens
  misc_RNA (1)...(19): siRNA sense strand
uggacaaaauggagguuca

SEQ ID NO: 2649168 - RNA, 19 nt, Homo sapiens
  misc_RNA (1)...(19): siRNA sense strand
ucucgcagcugcaggaaaa

SEQ ID NO: 2649169 - RNA, 19 nt, Homo sapiens
  misc_RNA (1)...(19): siRNA sense strand
cccaaaagcauuaaggaga

SEQ ID NO: 2649170 - RNA, 19 nt, Homo sapiens
  misc_RNA (1)...(19): siRNA sense strand
ggacgaucucaaagcugaa

SEQ ID NO: 2649171 - RNA, 19 nt, Homo sapiens
  misc_RNA (1)...(19): siRNA sense strand
cugaaguguuuacugaaau

SEQ ID NO: 2649172 - RNA, 19 nt, Homo sapiens
  misc_RNA (1)...(19): siRNA sense strand
cuuagagguuaaucaagaa

SEQ ID NO: 2649173 - RNA, 19 nt, Homo sapiens
  misc_RNA (1)...(19): siRNA sense strand
ugaaaaugcacgagaaaac

SEQ ID NO: 2649174 - RNA, 19 nt, Homo sapiens
  misc_RNA (1)...(19): siRNA sense strand
auugaaaccuacauugcaa

SEQ ID NO: 2649175 - RNA, 19 nt, Homo sapiens
  misc_RNA (1)...(19): siRNA sense strand
ugaggaagaagaaacuaaa

SEQ ID NO: 2649176 - RNA, 19 nt, Homo sapiens
  misc_RNA (1)...(19): siRNA sense strand
caguauugcaacaaggcau

SEQ ID NO: 2649177 - RNA, 19 nt, Homo sapiens
  misc_RNA (1)...(19): siRNA sense strand
guucagaagacaaugacca

SEQ ID NO: 2649178 - RNA, 19 nt, Homo sapiens
  misc_RNA (1)...(19): siRNA sense strand
aaggaagaacagagggaua

SEQ ID NO: 2649179 - RNA, 19 nt, Homo sapiens
  misc_RNA (1)...(19): siRNA sense strand
cgacaaggaaggaaaggaa

SEQ ID NO: 2649180 - RNA, 19 nt, Homo sapiens
  misc_RNA (1)...(19): siRNA sense strand
gcaugaagaaucagaagaa

SEQ ID NO: 2649181 - RNA, 19 nt, Homo sapiens
  misc_RNA (1)...(19): siRNA sense strand
aggaagugaugguaauaaa

SEQ ID NO: 2649182 - RNA, 19 nt, Homo sapiens
  misc_RNA (1)...(19): siRNA sense strand
uggaagauguagauggaau

SEQ ID NO: 2649183 - RNA, 19 nt, Homo sapiens
  misc_RNA (1)...(19): siRNA sense strand
ccaaagacaagaaggaaaa

SEQ ID NO: 2649184 - RNA, 19 nt, Homo sapiens
  misc_RNA (1)...(19): siRNA sense strand
agccaaacuucgugaaauu

SEQ ID NO: 2649185 - RNA, 19 nt, Homo sapiens
  misc_RNA (1)...(19): siRNA sense strand
ggauuaacuccaaggaaaa

SEQ ID NO: 2649186 - RNA, 19 nt, Homo sapiens
  misc_RNA (1)...(19): siRNA sense strand
aaagcaaauucaagaggaa

SEQ ID NO: 2649187 - RNA, 19 nt, Homo sapiens
  misc_RNA (1)...(19): siRNA sense strand
ggaagauguagauggaauu

SEQ ID NO: 2649188 - RNA, 19 nt, Homo sapiens
  misc_RNA (1)...(19): siRNA sense strand
ucaacgagagaaagagaaa

SEQ ID NO: 2649189 - RNA, 19 nt, Homo sapiens
  misc_RNA (1)...(19): siRNA sense strand
agaaagagaaagaguuaga

SEQ ID NO: 2649190 - RNA, 19 nt, Homo sapiens
  misc_RNA (1)...(19): siRNA sense strand
cugaaaugagugaggaaaa

SEQ ID NO: 2649191 - RNA, 19 nt, Homo sapiens
  misc_RNA (1)...(19): siRNA sense strand
agggauaaauuggaagaaa

SEQ ID NO: 2649192 - RNA, 19 nt, Homo sapiens
  misc_RNA (1)...(19): siRNA sense strand
cgaucagagcguucagaaa

SEQ ID NO: 2649193 - RNA, 19 nt, Homo sapiens
  misc_RNA (1)...(19): siRNA sense strand
ugaagaaucagaagaagaa

SEQ ID NO: 2649194 - RNA, 19 nt, Homo sapiens
  misc_RNA (1)...(19): siRNA sense strand
agaaagugaagaugaagaa

SEQ ID NO: 2649195 - RNA, 19 nt, Homo sapiens
  misc_RNA (1)...(19): siRNA sense strand
ugaauuggaaucugggaaa

SEQ ID NO: 2649196 - RNA, 19 nt, Homo sapiens
  misc_RNA (1)...(19): siRNA sense strand
aggaagaacagagggauaa

SEQ ID NO: 2649197 - RNA, 19 nt, Homo sapiens
  misc_RNA (1)...(19): siRNA sense strand
agaggaacgugaugagaga

SEQ ID NO: 2649198 - RNA, 19 nt, Homo sapiens
  misc_RNA (1)...(19): siRNA sense strand
cagugguagacgagugaaa

SEQ ID NO: 2649199 - RNA, 19 nt, Homo sapiens
  misc_RNA (1)...(19): siRNA sense strand
uccaaagacaagaaggaaa

SEQ ID NO: 2649200 - RNA, 19 nt, Homo sapiens
  misc_RNA (1)...(19): siRNA sense strand
uggaaugucagaagagcaa

SEQ ID NO: 2649201 - RNA, 19 nt, Homo sapiens
  misc_RNA (1)...(19): siRNA sense strand
uuagaaagagaacgagaaa

SEQ ID NO: 2649202 - RNA, 19 nt, Homo sapiens
  misc_RNA (1)...(19): siRNA sense strand
acgagaaagagacaagaaa

SEQ ID NO: 2649203 - RNA, 19 nt, Homo sapiens
  misc_RNA (1)...(19): siRNA sense strand
aagaagaacaugaaacaga

SEQ ID NO: 2649204 - RNA, 19 nt, Homo sapiens
  misc_RNA (1)...(19): siRNA sense strand
augaagaaucagaagaaga

SEQ ID NO: 2649205 - RNA, 19 nt, Homo sapiens
  misc_RNA (1)...(19): siRNA sense strand
aggaacaggaagaauuaaa

SEQ ID NO: 2649206 - RNA, 19 nt, Homo sapiens
  misc_RNA (1)...(19): siRNA sense strand
ggagagaaagaaaagaaaa

SEQ ID NO: 2649207 - RNA, 19 nt, Homo sapiens
  misc_RNA (1)...(19): siRNA sense strand
aagugaagaugaagaagau

SEQ ID NO: 2649208 - RNA, 19 nt, Homo sapiens
  misc_RNA (1)...(19): siRNA sense strand
ggccaauguuugaagcuau

SEQ ID NO: 2649209 - RNA, 19 nt, Homo sapiens
  misc_RNA (1)...(19): siRNA sense strand
ggaagaacagagggauaaa

SEQ ID NO: 2649210 - RNA, 19 nt, Homo sapiens
  misc_RNA (1)...(19): siRNA sense strand
ucaaagaagaaaugacuga

SEQ ID NO: 2649211 - RNA, 19 nt, Homo sapiens
  misc_RNA (1)...(19): siRNA sense strand
ggauaaauuggaagaaauc

SEQ ID NO: 2649212 - RNA, 19 nt, Homo sapiens
  misc_RNA (1)...(19): siRNA sense strand
guuagaaagagaacgagaa

SEQ ID NO: 2649213 - RNA, 19 nt, Homo sapiens
  misc_RNA (1)...(19): siRNA sense strand
ccacagaugaaugaagaaa

SEQ ID NO: 2649214 - RNA, 19 nt, Homo sapiens
  misc_RNA (1)...(19): siRNA sense strand
aaagagaacgagaaagaga

SEQ ID NO: 2649215 - RNA, 19 nt, Homo sapiens
  misc_RNA (1)...(19): siRNA sense strand
cagaaagaucucauaaaga

SEQ ID NO: 2649216 - RNA, 19 nt, Homo sapiens
  misc_RNA (1)...(19): siRNA sense strand
gcuccaaagacaagaagga

SEQ ID NO: 2649217 - RNA, 19 nt, Homo sapiens
  misc_RNA (1)...(19): siRNA sense strand
acaaggaaggaaaggaaga

SEQ ID NO: 2649218 - RNA, 19 nt, Homo sapiens
  misc_RNA (1)...(19): siRNA sense strand
aagaaauaguggauugcau

SEQ ID NO: 2649219 - RNA, 19 nt, Homo sapiens
  misc_RNA (1)...(19): siRNA sense strand
agauaaacuucuucaacga

SEQ ID NO: 2649220 - RNA, 19 nt, Homo sapiens
  misc_RNA (1)...(19): siRNA sense strand
gugaaaaucauguggccua

SEQ ID NO: 2649221 - RNA, 19 nt, Homo sapiens
  misc_RNA (1)...(19): siRNA sense strand
cagcuaaagaagaacauga

SEQ ID NO: 2649222 - RNA, 19 nt, Homo sapiens
  misc_RNA (1)...(19): siRNA sense strand
gggaauuauuugaccagca

SEQ ID NO: 2649223 - RNA, 19 nt, Homo sapiens
  misc_RNA (1)...(19): siRNA sense strand
gcuaaagaagaacaugaaa

SEQ ID NO: 2649224 - RNA, 19 nt, Homo sapiens
  misc_RNA (1)...(19): siRNA sense strand
gugguuaucccaacagaaa

SEQ ID NO: 2649225 - RNA, 19 nt, Homo sapiens
  misc_RNA (1)...(19): siRNA sense strand
agaaucagaagaagaagaa

SEQ ID NO: 2649226 - RNA, 19 nt, Homo sapiens
  misc_RNA (1)...(19): siRNA sense strand
gguaaaaucuauaagccau

SEQ ID NO: 2649227 - RNA, 19 nt, Homo sapiens
  misc_RNA (1)...(19): siRNA sense strand
acauuaauccacagaugaa

SEQ ID NO: 2649228 - RNA, 19 nt, Homo sapiens
  misc_RNA (1)...(19): siRNA sense strand
ugcugaagcugcugaagaa

SEQ ID NO: 2649229 - RNA, 19 nt, Homo sapiens
  misc_RNA (1)...(19): siRNA sense strand
cagaagaagaagaaaauca

SEQ ID NO: 2649230 - RNA, 19 nt, Homo sapiens
  misc_RNA (1)...(19): siRNA sense strand
aguucaaagacgagaucau

SEQ ID NO: 2649231 - RNA, 19 nt, Homo sapiens
  misc_RNA (1)...(19): siRNA sense strand
cagccuagagagcgguuaa

SEQ ID NO: 2649232 - RNA, 19 nt, Homo sapiens
  misc_RNA (1)...(19): siRNA sense strand
agaacacuacagagauaaa

SEQ ID NO: 2649233 - RNA, 19 nt, Homo sapiens
  misc_RNA (1)...(19): siRNA sense strand
acuccgacaaggaaggaaa

SEQ ID NO: 2649234 - RNA, 19 nt, Homo sapiens
  misc_RNA (1)...(19): siRNA sense strand
aaucagucuuccaaugaaa

SEQ ID NO: 2649235 - RNA, 19 nt, Homo sapiens
  misc_RNA (1)...(19): siRNA sense strand
aggaagaggaagaggccaa

SEQ ID NO: 2649236 - RNA, 19 nt, Homo sapiens
  misc_RNA (1)...(19): siRNA sense strand
ggaagaaggaggaagagga

SEQ ID NO: 2649237 - RNA, 19 nt, Homo sapiens
  misc_RNA (1)...(19): siRNA sense strand
ccgcaagcgcauggagaaa

SEQ ID NO: 2649238 - RNA, 19 nt, Homo sapiens
  misc_RNA (1)...(19): siRNA sense strand
aggaauaugaggaggagca

SEQ ID NO: 2649239 - RNA, 19 nt, Homo sapiens
  misc_RNA (1)...(19): siRNA sense strand
cagagagagccgagcaaca

SEQ ID NO: 2649240 - RNA, 19 nt, Homo sapiens
  misc_RNA (1)...(19): siRNA sense strand
cguaagaagccucuggaca

SEQ ID NO: 2649241 - RNA, 19 nt, Homo sapiens
  misc_RNA (1)...(19): siRNA sense strand
aggcuaagcuggcggagga

SEQ ID NO: 2649242 - RNA, 19 nt, Homo sapiens
  misc_RNA (1)...(19): siRNA sense strand
agcagaaauaugagaucaa

SEQ ID NO: 2649243 - RNA, 19 nt, Homo sapiens
  misc_RNA (1)...(19): siRNA sense strand
gggagaugaaggugcgcau

SEQ ID NO: 2649244 - RNA, 19 nt, Homo sapiens
  misc_RNA (1)...(19): siRNA sense strand
gagaagaugaggaaggaag

SEQ ID NO: 2649245 - RNA, 19 nt, Homo sapiens
  misc_RNA (1)...(19): siRNA sense strand
agaagaugaggaaggaaga

SEQ ID NO: 2649246 - RNA, 19 nt, Homo sapiens
  misc_RNA (1)...(19): siRNA sense strand
gggagaaagcccaggagcu

SEQ ID NO: 2649247 - RNA, 19 nt, Homo sapiens
  misc_RNA (1)...(19): siRNA sense strand
gcguugacuucgaugacau

SEQ ID NO: 2649248 - RNA, 19 nt, Homo sapiens
  misc_RNA (1)...(19): siRNA sense strand
uggucaaggcagaacagaa

SEQ ID NO: 2649249 - RNA, 19 nt, Homo sapiens
  misc_RNA (1)...(19): siRNA sense strand
agaaagaccugcuggagcu

SEQ ID NO: 2649250 - RNA, 19 nt, Homo sapiens
  misc_RNA (1)...(19): siRNA sense strand
cuaagcuggcggaggagaa

SEQ ID NO: 2649251 - RNA, 19 nt, Homo sapiens
  misc_RNA (1)...(19): siRNA sense strand
ggcagagccagaagaggaa

SEQ ID NO: 2649252 - RNA, 19 nt, Homo sapiens
  misc_RNA (1)...(19): siRNA sense strand
gagccgagcaacagcgcuu

SEQ ID NO: 2649253 - RNA, 19 nt, Homo sapiens
  misc_RNA (1)...(19): siRNA sense strand
aggaggagcagccggaaga

SEQ ID NO: 2649254 - RNA, 19 nt, Homo sapiens
  misc_RNA (1)...(19): siRNA sense strand
gaacugagaaggaacgcga

SEQ ID NO: 2649255 - RNA, 19 nt, Homo sapiens
  misc_RNA (1)...(19): siRNA sense strand
agaaggaacgcgaacguca

SEQ ID NO: 2649256 - RNA, 19 nt, Homo sapiens
  misc_RNA (1)...(19): siRNA sense strand
agaagcgggcagaggauga

SEQ ID NO: 2649257 - RNA, 19 nt, Homo sapiens
  misc_RNA (1)...(19): siRNA sense strand
gcauccucuccgagcguaa

SEQ ID NO: 2649258 - RNA, 19 nt, Homo sapiens
  misc_RNA (1)...(19): siRNA sense strand
agaaggaggaagaggagcu

SEQ ID NO: 2649259 - RNA, 19 nt, Homo sapiens
  misc_RNA (1)...(19): siRNA sense strand
agcggaagaaggaggaaga

SEQ ID NO: 2649260 - RNA, 19 nt, Homo sapiens
  misc_RNA (1)...(19): siRNA sense strand
gaggagaagaugaggaagg

SEQ ID NO: 2649261 - RNA, 19 nt, Homo sapiens
  misc_RNA (1)...(19): siRNA sense strand
gcuaccuggucaaggcaga

SEQ ID NO: 2649262 - RNA, 19 nt, Homo sapiens
  misc_RNA (1)...(19): siRNA sense strand
agacagacgugguggagau

SEQ ID NO: 2649263 - RNA, 19 nt, Homo sapiens
  misc_RNA (1)...(19): siRNA sense strand
ccaccaaggcagaggagau

SEQ ID NO: 2649264 - RNA, 19 nt, Homo sapiens
  misc_RNA (1)...(19): siRNA sense strand
ggaagaaaccugcagaaaa

SEQ ID NO: 2649265 - RNA, 19 nt, Homo sapiens
  misc_RNA (1)...(19): siRNA sense strand
agagaugggucaaggccaa

SEQ ID NO: 2649266 - RNA, 19 nt, Homo sapiens
  misc_RNA (1)...(19): siRNA sense strand
ugcccauguucgagaguaa

SEQ ID NO: 2649267 - RNA, 19 nt, Homo sapiens
  misc_RNA (1)...(19): siRNA sense strand
ccgaaaggccucagccgua

SEQ ID NO: 2649268 - RNA, 19 nt, Homo sapiens
  misc_RNA (1)...(19): siRNA sense strand
gggucaaggccaaggaacu

SEQ ID NO: 2649269 - RNA, 19 nt, Homo sapiens
  misc_RNA (1)...(19): siRNA sense strand
gcccaguguucgugaauca

SEQ ID NO: 2649270 - RNA, 19 nt, Homo sapiens
  misc_RNA (1)...(19): siRNA sense strand
aggaagaaaccugcagaaa

SEQ ID NO: 2649271 - RNA, 19 nt, Homo sapiens
  misc_RNA (1)...(19): siRNA sense strand
cagaggagauacaggagga

SEQ ID NO: 2649272 - RNA, 19 nt, Homo sapiens
  misc_RNA (1)...(19): siRNA sense strand
cuugaaacugugaggaaca

SEQ ID NO: 2649273 - RNA, 19 nt, Homo sapiens
  misc_RNA (1)...(19): siRNA sense strand
ugaccaagaaggaguccaa

SEQ ID NO: 2649274 - RNA, 19 nt, Homo sapiens
  misc_RNA (1)...(19): siRNA sense strand
cagcggaagagauggguca

SEQ ID NO: 2649275 - RNA, 19 nt, Homo sapiens
  misc_RNA (1)...(19): siRNA sense strand
cggaagaccucauggacuc

SEQ ID NO: 2649276 - RNA, 19 nt, Homo sapiens
  misc_RNA (1)...(19): siRNA sense strand
gcucuuagaacuugaaacu

SEQ ID NO: 2649277 - RNA, 19 nt, Homo sapiens
  misc_RNA (1)...(19): siRNA sense strand
gagccgugcuggagagaag

SEQ ID NO: 2649278 - RNA, 19 nt, Homo sapiens
  misc_RNA (1)...(19): siRNA sense strand
gggcgaagcuugaagagag

SEQ ID NO: 2649279 - RNA, 19 nt, Homo sapiens
  misc_RNA (1)...(19): siRNA sense strand
cugacaacgaggugggcuu

SEQ ID NO: 2649280 - RNA, 19 nt, Homo sapiens
  misc_RNA (1)...(19): siRNA sense strand
gaagaaaccugcagaaaag

SEQ ID NO: 2649281 - RNA, 19 nt, Homo sapiens
  misc_RNA (1)...(19): siRNA sense strand
ucucaaagauggaggccac

SEQ ID NO: 2649282 - RNA, 19 nt, Homo sapiens
  misc_RNA (1)...(19): siRNA sense strand
ccagaaggccccagccaua

SEQ ID NO: 2649283 - RNA, 19 nt, Homo sapiens
  misc_RNA (1)...(19): siRNA sense strand
ccugggugaaggagggcaa

SEQ ID NO: 2649284 - RNA, 19 nt, Homo sapiens
  misc_RNA (1)...(19): siRNA sense strand
gcucagagacagaggaagg

SEQ ID NO: 2649285 - RNA, 19 nt, Homo sapiens
  misc_RNA (1)...(19): siRNA sense strand
ucuuagaacuugaaacugu

SEQ ID NO: 2649286 - RNA, 19 nt, Homo sapiens
  misc_RNA (1)...(19): siRNA sense strand
caccaaggcagaggagaua

SEQ ID NO: 2649287 - RNA, 19 nt, Homo sapiens
  misc_RNA (1)...(19): siRNA sense strand
gagcgcaacuuuccgcaua

SEQ ID NO: 2649288 - RNA, 19 nt, Homo sapiens
  misc_RNA (1)...(19): siRNA sense strand
gcgugagauccaaggaguu

SEQ ID NO: 2649289 - RNA, 19 nt, Homo sapiens
  misc_RNA (1)...(19): siRNA sense strand
aggaguuggagcagcggaa

SEQ ID NO: 2649290 - RNA, 19 nt, Homo sapiens
  misc_RNA (1)...(19): siRNA sense strand
gaguuggagcagcggaaga

SEQ ID NO: 2649291 - RNA, 19 nt, Homo sapiens
  misc_RNA (1)...(19): siRNA sense strand
uguccuuacuggaggggaa

SEQ ID NO: 2649292 - RNA, 19 nt, Homo sapiens
  misc_RNA (1)...(19): siRNA sense strand
gcagaaaagaagugggcgu

SEQ ID NO: 2649293 - RNA, 19 nt, Homo sapiens
  misc_RNA (1)...(19): siRNA sense strand
agccagugguggucagaga

SEQ ID NO: 2649294 - RNA, 19 nt, Homo sapiens
  misc_RNA (1)...(19): siRNA sense strand
ccaaggcagaggagauaca

SEQ ID NO: 2649295 - RNA, 19 nt, Homo sapiens
  misc_RNA (1)...(19): siRNA sense strand
aggagauacaggaggaauc

SEQ ID NO: 2649296 - RNA, 19 nt, Homo sapiens
  misc_RNA (1)...(19): siRNA sense strand
ccaagagggugucgcagga

SEQ ID NO: 2649297 - RNA, 19 nt, Homo sapiens
  misc_RNA (1)...(19): siRNA sense strand
aacuugaaacugugaggaa

SEQ ID NO: 2649298 - RNA, 19 nt, Homo sapiens
  misc_RNA (1)...(19): siRNA sense strand
agagacagaggaaggccaa

SEQ ID NO: 2649299 - RNA, 19 nt, Homo sapiens
  misc_RNA (1)...(19): siRNA sense strand
cgcaggagcccaugaggau

SEQ ID NO: 2649300 - RNA, 19 nt, Homo sapiens
  misc_RNA (1)...(19): siRNA sense strand
gucugaagagggaaggaau

SEQ ID NO: 2649301 - RNA, 19 nt, Homo sapiens
  misc_RNA (1)...(19): siRNA sense strand
ccaaggaacuggccgucga

SEQ ID NO: 2649302 - RNA, 19 nt, Homo sapiens
  misc_RNA (1)...(19): siRNA sense strand
gcccaugcucuuagaacuu

SEQ ID NO: 2649303 - RNA, 19 nt, Homo sapiens
  misc_RNA (1)...(19): siRNA sense strand
gguaagcgcagaagggcaa

SEQ ID NO: 2649304 - RNA, 19 nt, Homo sapiens
  misc_RNA (1)...(19): siRNA sense strand
aggaaauccaguuguuaaa

SEQ ID NO: 2649305 - RNA, 19 nt, Homo sapiens
  misc_RNA (1)...(19): siRNA sense strand
ucaugaagagagucagaaa

SEQ ID NO: 2649306 - RNA, 19 nt, Homo sapiens
  misc_RNA (1)...(19): siRNA sense strand
cguuacuccaggaaagaaa

SEQ ID NO: 2649307 - RNA, 19 nt, Homo sapiens
  misc_RNA (1)...(19): siRNA sense strand
ugacaaaacaggaggugau

SEQ ID NO: 2649308 - RNA, 19 nt, Homo sapiens
  misc_RNA (1)...(19): siRNA sense strand
uguaggaguaaaucagaaa

SEQ ID NO: 2649309 - RNA, 19 nt, Homo sapiens
  misc_RNA (1)...(19): siRNA sense strand
gaggaagaaagcaagggua

SEQ ID NO: 2649310 - RNA, 19 nt, Homo sapiens
  misc_RNA (1)...(19): siRNA sense strand
ggaguaaaucagaaagaac

SEQ ID NO: 2649311 - RNA, 19 nt, Homo sapiens
  misc_RNA (1)...(19): siRNA sense strand
caguaauccugauggugau

SEQ ID NO: 2649312 - RNA, 19 nt, Homo sapiens
  misc_RNA (1)...(19): siRNA sense strand
acaaaugacucuagccugu

SEQ ID NO: 2649313 - RNA, 19 nt, Homo sapiens
  misc_RNA (1)...(19): siRNA sense strand
gugauaaugaagaggccuu

SEQ ID NO: 2649314 - RNA, 19 nt, Homo sapiens
  misc_RNA (1)...(19): siRNA sense strand
ccaguaauccugaugguga

SEQ ID NO: 2649315 - RNA, 19 nt, Homo sapiens
  misc_RNA (1)...(19): siRNA sense strand
acuccaacuaccaggaaau

SEQ ID NO: 2649316 - RNA, 19 nt, Homo sapiens
  misc_RNA (1)...(19): siRNA sense strand
gagugguguaggaguaaau

SEQ ID NO: 2649317 - RNA, 19 nt, Homo sapiens
  misc_RNA (1)...(19): siRNA sense strand
cugaaaaugcagaacagaa

SEQ ID NO: 2649318 - RNA, 19 nt, Homo sapiens
  misc_RNA (1)...(19): siRNA sense strand
ccgugagcguagcgcagaa

SEQ ID NO: 2649319 - RNA, 19 nt, Homo sapiens
  misc_RNA (1)...(19): siRNA sense strand
cgguuaugcccuugccauu

SEQ ID NO: 2649320 - RNA, 19 nt, Homo sapiens
  misc_RNA (1)...(19): siRNA sense strand
aggaagaaagcaaggguag

SEQ ID NO: 2649321 - RNA, 19 nt, Homo sapiens
  misc_RNA (1)...(19): siRNA sense strand
gugucaaucauuaguaaca

SEQ ID NO: 2649322 - RNA, 19 nt, Homo sapiens
  misc_RNA (1)...(19): siRNA sense strand
caguagaagcacacaggca

SEQ ID NO: 2649323 - RNA, 19 nt, Homo sapiens
  misc_RNA (1)...(19): siRNA sense strand
guggaaagagaaucauaau

SEQ ID NO: 2649324 - RNA, 19 nt, Homo sapiens
  misc_RNA (1)...(19): siRNA sense strand
agucagaucuccaucccua

SEQ ID NO: 2649325 - RNA, 19 nt, Homo sapiens
  misc_RNA (1)...(19): siRNA sense strand
cugauauuacagaagcuaa

SEQ ID NO: 2649326 - RNA, 19 nt, Homo sapiens
  misc_RNA (1)...(19): siRNA sense strand
gggagugguguaggaguaa

SEQ ID NO: 2649327 - RNA, 19 nt, Homo sapiens
  misc_RNA (1)...(19): siRNA sense strand
guagaagcacacaggcaga

SEQ ID NO: 2649328 - RNA, 19 nt, Homo sapiens
  misc_RNA (1)...(19): siRNA sense strand
auggcuaccaggaggaaau

SEQ ID NO: 2649329 - RNA, 19 nt, Homo sapiens
  misc_RNA (1)...(19): siRNA sense strand
aagcuaaacaggauuccaa

SEQ ID NO: 2649330 - RNA, 19 nt, Homo sapiens
  misc_RNA (1)...(19): siRNA sense strand
cugaagggccagaaagaag

SEQ ID NO: 2649331 - RNA, 19 nt, Homo sapiens
  misc_RNA (1)...(19): siRNA sense strand
acuccagccucuaagaaaa

SEQ ID NO: 2649332 - RNA, 19 nt, Homo sapiens
  misc_RNA (1)...(19): siRNA sense strand
cagacacaguagaagcaca

SEQ ID NO: 2649333 - RNA, 19 nt, Homo sapiens
  misc_RNA (1)...(19): siRNA sense strand
cacaaagaggcaucaacaa

SEQ ID NO: 2649334 - RNA, 19 nt, Homo sapiens
  misc_RNA (1)...(19): siRNA sense strand
uaggaguaaaucagaaaga

SEQ ID NO: 2649335 - RNA, 19 nt, Homo sapiens
  misc_RNA (1)...(19): siRNA sense strand
aggaauauucggagacaaa

SEQ ID NO: 2649336 - RNA, 19 nt, Homo sapiens
  misc_RNA (1)...(19): siRNA sense strand
guguaaugaagauggaaau

SEQ ID NO: 2649337 - RNA, 19 nt, Homo sapiens
  misc_RNA (1)...(19): siRNA sense strand
ugacggaaccacaggaaau

SEQ ID NO: 2649338 - RNA, 19 nt, Homo sapiens
  misc_RNA (1)...(19): siRNA sense strand
guacugaugaugaggaaga

SEQ ID NO: 2649339 - RNA, 19 nt, Homo sapiens
  misc_RNA (1)...(19): siRNA sense strand
agaucaaacccguguggua

SEQ ID NO: 2649340 - RNA, 19 nt, Homo sapiens
  misc_RNA (1)...(19): siRNA sense strand
ccaagaaaugguggagaua

SEQ ID NO: 2649341 - RNA, 19 nt, Homo sapiens
  misc_RNA (1)...(19): siRNA sense strand
aaauugaagacgagugcaa

SEQ ID NO: 2649342 - RNA, 19 nt, Homo sapiens
  misc_RNA (1)...(19): siRNA sense strand
cugaaauauuccacagaca

SEQ ID NO: 2649343 - RNA, 19 nt, Homo sapiens
  misc_RNA (1)...(19): siRNA sense strand
cgaagaaaagucagacaaa

SEQ ID NO: 2649344 - RNA, 19 nt, Homo sapiens
  misc_RNA (1)...(19): siRNA sense strand
aguuaucaguggacagcaa

SEQ ID NO: 2649345 - RNA, 19 nt, Homo sapiens
  misc_RNA (1)...(19): siRNA sense strand
gguagaugacaauggauuu

SEQ ID NO: 2649346 - RNA, 19 nt, Homo sapiens
  misc_RNA (1)...(19): siRNA sense strand
aauaagaauccuaggcaca

SEQ ID NO: 2649347 - RNA, 19 nt, Homo sapiens
  misc_RNA (1)...(19): siRNA sense strand
caguaguacaucaugguua

SEQ ID NO: 2649348 - RNA, 19 nt, Homo sapiens
  misc_RNA (1)...(19): siRNA sense strand
aaauucuagugaaggguaa

SEQ ID NO: 2649349 - RNA, 19 nt, Homo sapiens
  misc_RNA (1)...(19): siRNA sense strand
ugaaaggaauauucggaga

SEQ ID NO: 2649350 - RNA, 19 nt, Homo sapiens
  misc_RNA (1)...(19): siRNA sense strand
cagaugaaauugaagacga

SEQ ID NO: 2649351 - RNA, 19 nt, Homo sapiens
  misc_RNA (1)...(19): siRNA sense strand
cagugaaacaagagcacau

SEQ ID NO: 2649352 - RNA, 19 nt, Homo sapiens
  misc_RNA (1)...(19): siRNA sense strand
caguacugaugaugaggaa

SEQ ID NO: 2649353 - RNA, 19 nt, Homo sapiens
  misc_RNA (1)...(19): siRNA sense strand
uguguaaugaagauggaaa

SEQ ID NO: 2649354 - RNA, 19 nt, Homo sapiens
  misc_RNA (1)...(19): siRNA sense strand
cagaagaaaauaaggugaa

SEQ ID NO: 2649355 - RNA, 19 nt, Homo sapiens
  misc_RNA (1)...(19): siRNA sense strand
gauguaaaggaaaguggaa

SEQ ID NO: 2649356 - RNA, 19 nt, Homo sapiens
  misc_RNA (1)...(19): siRNA sense strand
cggucuaaaucuuacagua

SEQ ID NO: 2649357 - RNA, 19 nt, Homo sapiens
  misc_RNA (1)...(19): siRNA sense strand
gaguccagauguaaaggaa

SEQ ID NO: 2649358 - RNA, 19 nt, Homo sapiens
  misc_RNA (1)...(19): siRNA sense strand
ccuuugaggaagcugauaa

SEQ ID NO: 2649359 - RNA, 19 nt, Homo sapiens
  misc_RNA (1)...(19): siRNA sense strand
gcuacagugacaagaaaga

SEQ ID NO: 2649360 - RNA, 19 nt, Homo sapiens
  misc_RNA (1)...(19): siRNA sense strand
aaggaaaguggaaagaaau

SEQ ID NO: 2649361 - RNA, 19 nt, Homo sapiens
  misc_RNA (1)...(19): siRNA sense strand
aagcaacucacgaggauuu

SEQ ID NO: 2649362 - RNA, 19 nt, Homo sapiens
  misc_RNA (1)...(19): siRNA sense strand
ugaaauauuccacagacaa

SEQ ID NO: 2649363 - RNA, 19 nt, Homo sapiens
  misc_RNA (1)...(19): siRNA sense strand
gagauguuguggagaccau

SEQ ID NO: 2649364 - RNA, 19 nt, Homo sapiens
  misc_RNA (1)...(19): siRNA sense strand
gcaaaugugcaaagguacu

SEQ ID NO: 2649365 - RNA, 19 nt, Homo sapiens
  misc_RNA (1)...(19): siRNA sense strand
cagacaaauguuucaggaa

SEQ ID NO: 2649366 - RNA, 19 nt, Homo sapiens
  misc_RNA (1)...(19): siRNA sense strand
ugagcaggcuaaagcagaa

SEQ ID NO: 2649367 - RNA, 19 nt, Homo sapiens
  misc_RNA (1)...(19): siRNA sense strand
ccgacacagaugagaauca

SEQ ID NO: 2649368 - RNA, 19 nt, Homo sapiens
  misc_RNA (1)...(19): siRNA sense strand
gggcugucgcuguguggaa

SEQ ID NO: 2649369 - RNA, 19 nt, Homo sapiens
  misc_RNA (1)...(19): siRNA sense strand
gagauaaagaagauccuga

SEQ ID NO: 2649370 - RNA, 19 nt, Homo sapiens
  misc_RNA (1)...(19): siRNA sense strand
gcuuaaaugcacaccugaa

SEQ ID NO: 2649371 - RNA, 19 nt, Homo sapiens
  misc_RNA (1)...(19): siRNA sense strand
acaucagguuguucagcaa

SEQ ID NO: 2649372 - RNA, 19 nt, Homo sapiens
  misc_RNA (1)...(19): siRNA sense strand
aauucaaggcaaauggcaa

SEQ ID NO: 2649373 - RNA, 19 nt, Homo sapiens
  misc_RNA (1)...(19): siRNA sense strand
agacaaauguuucaggaag

SEQ ID NO: 2649374 - RNA, 19 nt, Homo sapiens
  misc_RNA (1)...(19): siRNA sense strand
auacauaccugacuggaga

SEQ ID NO: 2649375 - RNA, 19 nt, Homo sapiens
  misc_RNA (1)...(19): siRNA sense strand
auucaaggcaaauggcaau

SEQ ID NO: 2649376 - RNA, 19 nt, Homo sapiens
  misc_RNA (1)...(19): siRNA sense strand
ugguagaugacaauggauu

SEQ ID NO: 2649377 - RNA, 19 nt, Homo sapiens
  misc_RNA (1)...(19): siRNA sense strand
ugacagaagcauccauauu

SEQ ID NO: 2649378 - RNA, 19 nt, Homo sapiens
  misc_RNA (1)...(19): siRNA sense strand
agacaguuagaauguguaa

SEQ ID NO: 2649379 - RNA, 19 nt, Homo sapiens
  misc_RNA (1)...(19): siRNA sense strand
ccauuuacaaagugacuga

SEQ ID NO: 2649380 - RNA, 19 nt, Homo sapiens
  misc_RNA (1)...(19): siRNA sense strand
cuaaagcagaaaugugcaa

SEQ ID NO: 2649381 - RNA, 19 nt, Homo sapiens
  misc_RNA (1)...(19): siRNA sense strand
acagacaagcugaggggaa

SEQ ID NO: 2649382 - RNA, 19 nt, Homo sapiens
  misc_RNA (1)...(19): siRNA sense strand
uugaggaagcugauaagaa

SEQ ID NO: 2649383 - RNA, 19 nt, Homo sapiens
  misc_RNA (1)...(19): siRNA sense strand
gggauggcccagauggaga

SEQ ID NO: 2649384 - RNA, 19 nt, Homo sapiens
  misc_RNA (1)...(19): siRNA sense strand
aguccagauguaaaggaaa

SEQ ID NO: 2649385 - RNA, 19 nt, Homo sapiens
  misc_RNA (1)...(19): siRNA sense strand
aaagaaaucacauggacga

SEQ ID NO: 2649386 - RNA, 19 nt, Homo sapiens
  misc_RNA (1)...(19): siRNA sense strand
cgagccaaauucaaggcaa

SEQ ID NO: 2649387 - RNA, 19 nt, Homo sapiens
  misc_RNA (1)...(19): siRNA sense strand
aggcaaaauucuagugaag

SEQ ID NO: 2649388 - RNA, 19 nt, Homo sapiens
  misc_RNA (1)...(19): siRNA sense strand
gugcagaugaaauugaaga

SEQ ID NO: 2649389 - RNA, 19 nt, Homo sapiens
  misc_RNA (1)...(19): siRNA sense strand
acguggaaccaaagggcuu

SEQ ID NO: 2649390 - RNA, 19 nt, Homo sapiens
  misc_RNA (1)...(19): siRNA sense strand
auguaaaggaaaguggaaa

SEQ ID NO: 2649391 - RNA, 19 nt, Homo sapiens
  misc_RNA (1)...(19): siRNA sense strand
ugaaauuauuggauugcca

SEQ ID NO: 2649392 - RNA, 19 nt, Homo sapiens
  misc_RNA (1)...(19): siRNA sense strand
aguacacaugccagaaaua

SEQ ID NO: 2649393 - RNA, 19 nt, Homo sapiens
  misc_RNA (1)...(19): siRNA sense strand
agacauugaaggaaaagaa

SEQ ID NO: 2649394 - RNA, 19 nt, Homo sapiens
  misc_RNA (1)...(19): siRNA sense strand
ggaaguugacuguugggau

SEQ ID NO: 2649395 - RNA, 19 nt, Homo sapiens
  misc_RNA (1)...(19): siRNA sense strand
uguaaaggaaaguggaaag

SEQ ID NO: 2649396 - RNA, 19 nt, Homo sapiens
  misc_RNA (1)...(19): siRNA sense strand
ggucuaaaucuuacaguac

SEQ ID NO: 2649397 - RNA, 19 nt, Homo sapiens
  misc_RNA (1)...(19): siRNA sense strand
aguuaaaccgagccaaauu

SEQ ID NO: 2649398 - RNA, 19 nt, Homo sapiens
  misc_RNA (1)...(19): siRNA sense strand
guagauuguuguaaagauc

SEQ ID NO: 2649399 - RNA, 19 nt, Homo sapiens
  misc_RNA (1)...(19): siRNA sense strand
gacaaagaacugugaccuu

SEQ ID NO: 2649400 - RNA, 19 nt, Homo sapiens
  misc_RNA (1)...(19): siRNA sense strand
caaugaaaucuauggaaag

SEQ ID NO: 2649401 - RNA, 19 nt, Homo sapiens
  misc_RNA (1)...(19): siRNA sense strand
uggcgacccucuaggaaga

SEQ ID NO: 2649402 - RNA, 19 nt, Homo sapiens
  misc_RNA (1)...(19): siRNA sense strand
ccauaaagaggaagccaaa

SEQ ID NO: 2649403 - RNA, 19 nt, Homo sapiens
  misc_RNA (1)...(19): siRNA sense strand
gggcaugggcauugauaau

SEQ ID NO: 2649404 - RNA, 19 nt, Homo sapiens
  misc_RNA (1)...(19): siRNA sense strand
uggaaaagguggagaaguu

SEQ ID NO: 2649405 - RNA, 19 nt, Homo sapiens
  misc_RNA (1)...(19): siRNA sense strand
gggaaauacaguuuggauu

SEQ ID NO: 2649406 - RNA, 19 nt, Homo sapiens
  misc_RNA (1)...(19): siRNA sense strand
gaagaaagccuaagccaga

SEQ ID NO: 2649407 - RNA, 19 nt, Homo sapiens
  misc_RNA (1)...(19): siRNA sense strand
aguagaaagcaguucaaua

SEQ ID NO: 2649408 - RNA, 19 nt, Homo sapiens
  misc_RNA (1)...(19): siRNA sense strand
ccuaaagacaaaucugaaa

SEQ ID NO: 2649409 - RNA, 19 nt, Homo sapiens
  misc_RNA (1)...(19): siRNA sense strand
agccaaagaagauaagaaa

SEQ ID NO: 2649410 - RNA, 19 nt, Homo sapiens
  misc_RNA (1)...(19): siRNA sense strand
ucagaagucaaaugagaaa

SEQ ID NO: 2649411 - RNA, 19 nt, Homo sapiens
  misc_RNA (1)...(19): siRNA sense strand
gauuaugugcuguggaaga

SEQ ID NO: 2649412 - RNA, 19 nt, Homo sapiens
  misc_RNA (1)...(19): siRNA sense strand
gcuuuaagucagaagucaa

SEQ ID NO: 2649413 - RNA, 19 nt, Homo sapiens
  misc_RNA (1)...(19): siRNA sense strand
agaacagggagauaagaaa

SEQ ID NO: 2649414 - RNA, 19 nt, Homo sapiens
  misc_RNA (1)...(19): siRNA sense strand
gugcagggccauugucaaa

SEQ ID NO: 2649415 - RNA, 19 nt, Homo sapiens
  misc_RNA (1)...(19): siRNA sense strand
caguggaagaagaaguuaa

SEQ ID NO: 2649416 - RNA, 19 nt, Homo sapiens
  misc_RNA (1)...(19): siRNA sense strand
caacgaaauagaauggaau

SEQ ID NO: 2649417 - RNA, 19 nt, Homo sapiens
  misc_RNA (1)...(19): siRNA sense strand
uuauaauguucgagcugaa

SEQ ID NO: 2649418 - RNA, 19 nt, Homo sapiens
  misc_RNA (1)...(19): siRNA sense strand
agauucaccuaaagacaaa

SEQ ID NO: 2649419 - RNA, 19 nt, Homo sapiens
  misc_RNA (1)...(19): siRNA sense strand
gggugaaaccugcugacaa

SEQ ID NO: 2649420 - RNA, 19 nt, Homo sapiens
  misc_RNA (1)...(19): siRNA sense strand
auggauucauugagagauu

SEQ ID NO: 2649421 - RNA, 19 nt, Homo sapiens
  misc_RNA (1)...(19): siRNA sense strand
acaacgaaauagaauggaa

SEQ ID NO: 2649422 - RNA, 19 nt, Homo sapiens
  misc_RNA (1)...(19): siRNA sense strand
gggagauaagaaagccaaa

SEQ ID NO: 2649423 - RNA, 19 nt, Homo sapiens
  misc_RNA (1)...(19): siRNA sense strand
cauacauggugcaagggua

SEQ ID NO: 2649424 - RNA, 19 nt, Homo sapiens
  misc_RNA (1)...(19): siRNA sense strand
cggagaaagaugcgagcca

SEQ ID NO: 2649425 - RNA, 19 nt, Homo sapiens
  misc_RNA (1)...(19): siRNA sense strand
uaacauuggaagaaggaca

SEQ ID NO: 2649426 - RNA, 19 nt, Homo sapiens
  misc_RNA (1)...(19): siRNA sense strand
gagcuaaagugcuggugca

SEQ ID NO: 2649427 - RNA, 19 nt, Homo sapiens
  misc_RNA (1)...(19): siRNA sense strand
uuagauugacugagaagaa

SEQ ID NO: 2649428 - RNA, 19 nt, Homo sapiens
  misc_RNA (1)...(19): siRNA sense strand
cagaacagggagauaagaa

SEQ ID NO: 2649429 - RNA, 19 nt, Homo sapiens
  misc_RNA (1)...(19): siRNA sense strand
cagcuucccuauagagcaa

SEQ ID NO: 2649430 - RNA, 19 nt, Homo sapiens
  misc_RNA (1)...(19): siRNA sense strand
gcacuuacacucuggccaa

SEQ ID NO: 2649431 - RNA, 19 nt, Homo sapiens
  misc_RNA (1)...(19): siRNA sense strand
gaacaguggaagaagaagu

SEQ ID NO: 2649432 - RNA, 19 nt, Homo sapiens
  misc_RNA (1)...(19): siRNA sense strand
gguuaaguucaaaucguua

SEQ ID NO: 2649433 - RNA, 19 nt, Homo sapiens
  misc_RNA (1)...(19): siRNA sense strand
aagccaaagaagauaagaa

SEQ ID NO: 2649434 - RNA, 19 nt, Homo sapiens
  misc_RNA (1)...(19): siRNA sense strand
cugcagaacagggagauaa

SEQ ID NO: 2649435 - RNA, 19 nt, Homo sapiens
  misc_RNA (1)...(19): siRNA sense strand
gguaguacaucuuugccua

SEQ ID NO: 2649436 - RNA, 19 nt, Homo sapiens
  misc_RNA (1)...(19): siRNA sense strand
gcugaagauugaagaucca

SEQ ID NO: 2649437 - RNA, 19 nt, Homo sapiens
  misc_RNA (1)...(19): siRNA sense strand
ggaagauucacauggugua

SEQ ID NO: 2649438 - RNA, 19 nt, Homo sapiens
  misc_RNA (1)...(19): siRNA sense strand
uggcaauguccaacaggua

SEQ ID NO: 2649439 - RNA, 19 nt, Homo sapiens
  misc_RNA (1)...(19): siRNA sense strand
ggguucagguguuggaagu

SEQ ID NO: 2649440 - RNA, 19 nt, Homo sapiens
  misc_RNA (1)...(19): siRNA sense strand
ccaaagaagauaagaaagc

SEQ ID NO: 2649441 - RNA, 19 nt, Homo sapiens
  misc_RNA (1)...(19): siRNA sense strand
ugauaauccagaacacaua

SEQ ID NO: 2649442 - RNA, 19 nt, Homo sapiens
  misc_RNA (1)...(19): siRNA sense strand
augaugaucuuguugcaaa

SEQ ID NO: 2649443 - RNA, 19 nt, Homo sapiens
  misc_RNA (1)...(19): siRNA sense strand
cuuuaagucagaagucaaa

SEQ ID NO: 2649444 - RNA, 19 nt, Homo sapiens
  misc_RNA (1)...(19): siRNA sense strand
agaauagcugugugaaauu

SEQ ID NO: 2649445 - RNA, 19 nt, Homo sapiens
  misc_RNA (1)...(19): siRNA sense strand
uggaagaagaaguuaaguu

SEQ ID NO: 2649446 - RNA, 19 nt, Homo sapiens
  misc_RNA (1)...(19): siRNA sense strand
ccauauaugcugauccaga

SEQ ID NO: 2649447 - RNA, 19 nt, Homo sapiens
  misc_RNA (1)...(19): siRNA sense strand
gaaguugaagaaagggaau

SEQ ID NO: 2649448 - RNA, 19 nt, Homo sapiens
  misc_RNA (1)...(19): siRNA sense strand
uagaacaguggaagaagaa

SEQ ID NO: 2649449 - RNA, 19 nt, Homo sapiens
  misc_RNA (1)...(19): siRNA sense strand
ccgagacaguacugacauu

SEQ ID NO: 2649450 - RNA, 19 nt, Homo sapiens
  misc_RNA (1)...(19): siRNA sense strand
cggcacaaucucugcaaca

SEQ ID NO: 2649451 - RNA, 19 nt, Homo sapiens
  misc_RNA (1)...(19): siRNA sense strand
auugagagauucaccuaaa

SEQ ID NO: 2649452 - RNA, 19 nt, Homo sapiens
  misc_RNA (1)...(19): siRNA sense strand
gugugaaauuacugcaguu

SEQ ID NO: 2649453 - RNA, 19 nt, Homo sapiens
  misc_RNA (1)...(19): siRNA sense strand
uggaagaaggcccaauuua

SEQ ID NO: 2649454 - RNA, 19 nt, Homo sapiens
  misc_RNA (1)...(19): siRNA sense strand
caggaguucuggaagccaa

SEQ ID NO: 2649455 - RNA, 19 nt, Homo sapiens
  misc_RNA (1)...(19): siRNA sense strand
cuuugagagcugacggaau

SEQ ID NO: 2649456 - RNA, 19 nt, Homo sapiens
  misc_RNA (1)...(19): siRNA sense strand
uuagaacaguggaagaaga

SEQ ID NO: 2649457 - RNA, 19 nt, Homo sapiens
  misc_RNA (1)...(19): siRNA sense strand
ccgaagguuacuagguaca

SEQ ID NO: 2649458 - RNA, 19 nt, Homo sapiens
  misc_RNA (1)...(19): siRNA sense strand
ugauccuggcuuugggaaa

SEQ ID NO: 2649459 - RNA, 19 nt, Homo sapiens
  misc_RNA (1)...(19): siRNA sense strand
cagccacagcacaggacaa

SEQ ID NO: 2649460 - RNA, 19 nt, Homo sapiens
  misc_RNA (1)...(19): siRNA sense strand
augagaaaccucuuagauu

SEQ ID NO: 2649461 - RNA, 19 nt, Homo sapiens
  misc_RNA (1)...(19): siRNA sense strand
gagcaaaccaugugggcuu

SEQ ID NO: 2649462 - RNA, 19 nt, Homo sapiens
  misc_RNA (1)...(19): siRNA sense strand
gggaagaugcugugagacu

SEQ ID NO: 2649463 - RNA, 19 nt, Homo sapiens
  misc_RNA (1)...(19): siRNA sense strand
caacauugggaguggaaaa

SEQ ID NO: 2649464 - RNA, 19 nt, Homo sapiens
  misc_RNA (1)...(19): siRNA sense strand
aaguuuggguguaaagaaa

SEQ ID NO: 2649465 - RNA, 19 nt, Homo sapiens
  misc_RNA (1)...(19): siRNA sense strand
gagacaaagcugaugaaaa

SEQ ID NO: 2649466 - RNA, 19 nt, Homo sapiens
  misc_RNA (1)...(19): siRNA sense strand
agauaugacuacugcagaa

SEQ ID NO: 2649467 - RNA, 19 nt, Homo sapiens
  misc_RNA (1)...(19): siRNA sense strand
ggagaaaaucaaagccaaa

SEQ ID NO: 2649468 - RNA, 19 nt, Homo sapiens
  misc_RNA (1)...(19): siRNA sense strand
ggucauaugcauuagaaaa

SEQ ID NO: 2649469 - RNA, 19 nt, Homo sapiens
  misc_RNA (1)...(19): siRNA sense strand
cagugaaacaacucaaaua

SEQ ID NO: 2649470 - RNA, 19 nt, Homo sapiens
  misc_RNA (1)...(19): siRNA sense strand
caaguuaggaagaguggaa

SEQ ID NO: 2649471 - RNA, 19 nt, Homo sapiens
  misc_RNA (1)...(19): siRNA sense strand
ccggaaagccguuagguga

SEQ ID NO: 2649472 - RNA, 19 nt, Homo sapiens
  misc_RNA (1)...(19): siRNA sense strand
ggaacauacaggaggcuga

SEQ ID NO: 2649473 - RNA, 19 nt, Homo sapiens
  misc_RNA (1)...(19): siRNA sense strand
aguuacaguuggagaagau

SEQ ID NO: 2649474 - RNA, 19 nt, Homo sapiens
  misc_RNA (1)...(19): siRNA sense strand
cauagcaauaagagacaaa

SEQ ID NO: 2649475 - RNA, 19 nt, Homo sapiens
  misc_RNA (1)...(19): siRNA sense strand
caguuuauguggacagaga

SEQ ID NO: 2649476 - RNA, 19 nt, Homo sapiens
  misc_RNA (1)...(19): siRNA sense strand
uuaugaaggaacagcauua

SEQ ID NO: 2649477 - RNA, 19 nt, Homo sapiens
  misc_RNA (1)...(19): siRNA sense strand
uggaaugagaacagauauu

SEQ ID NO: 2649478 - RNA, 19 nt, Homo sapiens
  misc_RNA (1)...(19): siRNA sense strand
cuucaagauacucgauuua

SEQ ID NO: 2649479 - RNA, 19 nt, Homo sapiens
  misc_RNA (1)...(19): siRNA sense strand
uggaauuggcuguaaaaua

SEQ ID NO: 2649480 - RNA, 19 nt, Homo sapiens
  misc_RNA (1)...(19): siRNA sense strand
gggagaaaaucaaagccaa

SEQ ID NO: 2649481 - RNA, 19 nt, Homo sapiens
  misc_RNA (1)...(19): siRNA sense strand
agaaacaaacccaggcaga

SEQ ID NO: 2649482 - RNA, 19 nt, Homo sapiens
  misc_RNA (1)...(19): siRNA sense strand
ccuggaaugagaacagaua

SEQ ID NO: 2649483 - RNA, 19 nt, Homo sapiens
  misc_RNA (1)...(19): siRNA sense strand
uggugaagacuguaaauau

SEQ ID NO: 2649484 - RNA, 19 nt, Homo sapiens
  misc_RNA (1)...(19): siRNA sense strand
gagccaugcagguucguaa

SEQ ID NO: 2649485 - RNA, 19 nt, Homo sapiens
  misc_RNA (1)...(19): siRNA sense strand
aguaaugauaccauagcaa

SEQ ID NO: 2649486 - RNA, 19 nt, Homo sapiens
  misc_RNA (1)...(19): siRNA sense strand
cgauuuauagugugguauu

SEQ ID NO: 2649487 - RNA, 19 nt, Homo sapiens
  misc_RNA (1)...(19): siRNA sense strand
ccaaaauugagauggaaau

SEQ ID NO: 2649488 - RNA, 19 nt, Homo sapiens
  misc_RNA (1)...(19): siRNA sense strand
uacaaaagaaagagagcaa

SEQ ID NO: 2649489 - RNA, 19 nt, Homo sapiens
  misc_RNA (1)...(19): siRNA sense strand
uugauaagguucaguacau

SEQ ID NO: 2649490 - RNA, 19 nt, Homo sapiens
  misc_RNA (1)...(19): siRNA sense strand
aguuggagaagauggacaa

SEQ ID NO: 2649491 - RNA, 19 nt, Homo sapiens
  misc_RNA (1)...(19): siRNA sense strand
gggcuggacuacugcugaa

SEQ ID NO: 2649492 - RNA, 19 nt, Homo sapiens
  misc_RNA (1)...(19): siRNA sense strand
caauaagagacaaagcuga

SEQ ID NO: 2649493 - RNA, 19 nt, Homo sapiens
  misc_RNA (1)...(19): siRNA sense strand
cggaaagccguuaggugau

SEQ ID NO: 2649494 - RNA, 19 nt, Homo sapiens
  misc_RNA (1)...(19): siRNA sense strand
uugcacaugugguggaaca

SEQ ID NO: 2649495 - RNA, 19 nt, Homo sapiens
  misc_RNA (1)...(19): siRNA sense strand
uuaaugaugcaguggauuu

SEQ ID NO: 2649496 - RNA, 19 nt, Homo sapiens
  misc_RNA (1)...(19): siRNA sense strand
uggaaauugcucuggauca

SEQ ID NO: 2649497 - RNA, 19 nt, Homo sapiens
  misc_RNA (1)...(19): siRNA sense strand
aguuaggaagaguggaaaa

SEQ ID NO: 2649498 - RNA, 19 nt, Homo sapiens
  misc_RNA (1)...(19): siRNA sense strand
gcaguugcuaaucgagaua

SEQ ID NO: 2649499 - RNA, 19 nt, Homo sapiens
  misc_RNA (1)...(19): siRNA sense strand
ccucaugagcaucccauua

SEQ ID NO: 2649500 - RNA, 19 nt, Homo sapiens
  misc_RNA (1)...(19): siRNA sense strand
gaaagggaugcaagugaau

SEQ ID NO: 2649501 - RNA, 19 nt, Homo sapiens
  misc_RNA (1)...(19): siRNA sense strand
gccaaaauugagauggaaa

SEQ ID NO: 2649502 - RNA, 19 nt, Homo sapiens
  misc_RNA (1)...(19): siRNA sense strand
aguaaagcuuccugaugau

SEQ ID NO: 2649503 - RNA, 19 nt, Homo sapiens
  misc_RNA (1)...(19): siRNA sense strand
aggaacagcauuaguuaca

SEQ ID NO: 2649504 - RNA, 19 nt, Homo sapiens
  misc_RNA (1)...(19): siRNA sense strand
ucuuaaugaugcaguggau

SEQ ID NO: 2649505 - RNA, 19 nt, Homo sapiens
  misc_RNA (1)...(19): siRNA sense strand
uggaacgauacaugcaaua

SEQ ID NO: 2649506 - RNA, 19 nt, Homo sapiens
  misc_RNA (1)...(19): siRNA sense strand
uugguaaacaggaaacuaa

SEQ ID NO: 2649507 - RNA, 19 nt, Homo sapiens
  misc_RNA (1)...(19): siRNA sense strand
auggaauuaugaaggaaca

SEQ ID NO: 2649508 - RNA, 19 nt, Homo sapiens
  misc_RNA (1)...(19): siRNA sense strand
guuuauguggacagagaca

SEQ ID NO: 2649509 - RNA, 19 nt, Homo sapiens
  misc_RNA (1)...(19): siRNA sense strand
agcaguacuugcaggaaga

SEQ ID NO: 2649510 - RNA, 19 nt, Homo sapiens
  misc_RNA (1)...(19): siRNA sense strand
uaaaagaaccaaagcauca

SEQ ID NO: 2649511 - RNA, 19 nt, Homo sapiens
  misc_RNA (1)...(19): siRNA sense strand
ggaaagcucaugauggcau

SEQ ID NO: 2649512 - RNA, 19 nt, Homo sapiens
  misc_RNA (1)...(19): siRNA sense strand
ugcuggagccuguggaaau

SEQ ID NO: 2649513 - RNA, 19 nt, Homo sapiens
  misc_RNA (1)...(19): siRNA sense strand
acuuuggcauggaacgaua

SEQ ID NO: 2649514 - RNA, 19 nt, Homo sapiens
  misc_RNA (1)...(19): siRNA sense strand
gagcaguacuugcaggaag

SEQ ID NO: 2649515 - RNA, 19 nt, Homo sapiens
  misc_RNA (1)...(19): siRNA sense strand
aauaagagacaaagcugau

SEQ ID NO: 2649516 - RNA, 19 nt, Homo sapiens
  misc_RNA (1)...(19): siRNA sense strand
cugugaaacgauuugggaa

SEQ ID NO: 2649517 - RNA, 19 nt, Homo sapiens
  misc_RNA (1)...(19): siRNA sense strand
acuucaagauacucgauuu

SEQ ID NO: 2649518 - RNA, 19 nt, Homo sapiens
  misc_RNA (1)...(19): siRNA sense strand
aagggaugcaagugaauuu

SEQ ID NO: 2649519 - RNA, 19 nt, Homo sapiens
  misc_RNA (1)...(19): siRNA sense strand
uggugaaauugauaagguu

SEQ ID NO: 2649520 - RNA, 19 nt, Homo sapiens
  misc_RNA (1)...(19): siRNA sense strand
acgaagaacuggaacacac

SEQ ID NO: 2649521 - RNA, 19 nt, Homo sapiens
  misc_RNA (1)...(19): siRNA sense strand
acagagacauuuugccuaa

SEQ ID NO: 2649522 - RNA, 19 nt, Homo sapiens
  misc_RNA (1)...(19): siRNA sense strand
aguacauaauggagagaaa

SEQ ID NO: 2649523 - RNA, 19 nt, Homo sapiens
  misc_RNA (1)...(19): siRNA sense strand
aagccauaguggagagaaa

SEQ ID NO: 2649524 - RNA, 19 nt, Homo sapiens
  misc_RNA (1)...(19): siRNA sense strand
guuggaaauugcagaguaa

SEQ ID NO: 2649525 - RNA, 19 nt, Homo sapiens
  misc_RNA (1)...(19): siRNA sense strand
auguagagaaugugggaaa

SEQ ID NO: 2649526 - RNA, 19 nt, Homo sapiens
  misc_RNA (1)...(19): siRNA sense strand
cguuauuggaggauggaaa

SEQ ID NO: 2649527 - RNA, 19 nt, Homo sapiens
  misc_RNA (1)...(19): siRNA sense strand
augcagugaaugugggaaa

SEQ ID NO: 2649528 - RNA, 19 nt, Homo sapiens
  misc_RNA (1)...(19): siRNA sense strand
auguaaugagugugggaaa

SEQ ID NO: 2649529 - RNA, 19 nt, Homo sapiens
  misc_RNA (1)...(19): siRNA sense strand
augcaguauaugugggaaa

SEQ ID NO: 2649530 - RNA, 19 nt, Homo sapiens
  misc_RNA (1)...(19): siRNA sense strand
cauacaacuccaacagaaa

SEQ ID NO: 2649531 - RNA, 19 nt, Homo sapiens
  misc_RNA (1)...(19): siRNA sense strand
cacucacacuggagagaaa

SEQ ID NO: 2649532 - RNA, 19 nt, Homo sapiens
  misc_RNA (1)...(19): siRNA sense strand
ugggaaucaagaugggaaa

SEQ ID NO: 2649533 - RNA, 19 nt, Homo sapiens
  misc_RNA (1)...(19): siRNA sense strand
gggcaaaucucuuacccuu

SEQ ID NO: 2649534 - RNA, 19 nt, Homo sapiens
  misc_RNA (1)...(19): siRNA sense strand
cugaauaugcauuugagaa

SEQ ID NO: 2649535 - RNA, 19 nt, Homo sapiens
  misc_RNA (1)...(19): siRNA sense strand
ccaucaaagaguacauaau

SEQ ID NO: 2649536 - RNA, 19 nt, Homo sapiens
  misc_RNA (1)...(19): siRNA sense strand
cgcggaugauucugggaaa

SEQ ID NO: 2649537 - RNA, 19 nt, Homo sapiens
  misc_RNA (1)...(19): siRNA sense strand
uaagauaagagccuggaaa

SEQ ID NO: 2649538 - RNA, 19 nt, Homo sapiens
  misc_RNA (1)...(19): siRNA sense strand
acauacaacuccaacagaa

SEQ ID NO: 2649539 - RNA, 19 nt, Homo sapiens
  misc_RNA (1)...(19): siRNA sense strand
cagacuuguaauagagaga

SEQ ID NO: 2649540 - RNA, 19 nt, Homo sapiens
  misc_RNA (1)...(19): siRNA sense strand
gcggaugauucugggaaau

SEQ ID NO: 2649541 - RNA, 19 nt, Homo sapiens
  misc_RNA (1)...(19): siRNA sense strand
aaccagaaauccugcaaau

SEQ ID NO: 2649542 - RNA, 19 nt, Homo sapiens
  misc_RNA (1)...(19): siRNA sense strand
uggcauagaaagugcacga

SEQ ID NO: 2649543 - RNA, 19 nt, Homo sapiens
  misc_RNA (1)...(19): siRNA sense strand
acaccuuacucgacaucaa

SEQ ID NO: 2649544 - RNA, 19 nt, Homo sapiens
  misc_RNA (1)...(19): siRNA sense strand
agauaagagccuggaaaga

SEQ ID NO: 2649545 - RNA, 19 nt, Homo sapiens
  misc_RNA (1)...(19): siRNA sense strand
ccgcagagacuccugggaa

SEQ ID NO: 2649546 - RNA, 19 nt, Homo sapiens
  misc_RNA (1)...(19): siRNA sense strand
cauagaaagugcacgaucu

SEQ ID NO: 2649547 - RNA, 19 nt, Homo sapiens
  misc_RNA (1)...(19): siRNA sense strand
ucuguuggcuguuggaaau

SEQ ID NO: 2649548 - RNA, 19 nt, Homo sapiens
  misc_RNA (1)...(19): siRNA sense strand
ucucauucaccaucagaaa

SEQ ID NO: 2649549 - RNA, 19 nt, Homo sapiens
  misc_RNA (1)...(19): siRNA sense strand
gaagcauggaagucaggua

SEQ ID NO: 2649550 - RNA, 19 nt, Homo sapiens
  misc_RNA (1)...(19): siRNA sense strand
ugagaaagucaauggugga

SEQ ID NO: 2649551 - RNA, 19 nt, Homo sapiens
  misc_RNA (1)...(19): siRNA sense strand
gguaggucggugacauuua

SEQ ID NO: 2649552 - RNA, 19 nt, Homo sapiens
  misc_RNA (1)...(19): siRNA sense strand
ucacaaggaagcuggcuga

SEQ ID NO: 2649553 - RNA, 19 nt, Homo sapiens
  misc_RNA (1)...(19): siRNA sense strand
uguuggaaauugcagagua

SEQ ID NO: 2649554 - RNA, 19 nt, Homo sapiens
  misc_RNA (1)...(19): siRNA sense strand
cagguaggucggugacauu

SEQ ID NO: 2649555 - RNA, 19 nt, Homo sapiens
  misc_RNA (1)...(19): siRNA sense strand
aauuucugcugaagggaau

SEQ ID NO: 2649556 - RNA, 19 nt, Homo sapiens
  misc_RNA (1)...(19): siRNA sense strand
gggaaggccuuuagccaug

SEQ ID NO: 2649557 - RNA, 19 nt, Homo sapiens
  misc_RNA (1)...(19): siRNA sense strand
ccaucuuauugaacaucua

SEQ ID NO: 2649558 - RNA, 19 nt, Homo sapiens
  misc_RNA (1)...(19): siRNA sense strand
agagaaugugggaaagcuu

SEQ ID NO: 2649559 - RNA, 19 nt, Homo sapiens
  misc_RNA (1)...(19): siRNA sense strand
gauacuugugugccagaua

SEQ ID NO: 2649560 - RNA, 19 nt, Homo sapiens
  misc_RNA (1)...(19): siRNA sense strand
aucuauacaugcagugaau

SEQ ID NO: 2649561 - RNA, 19 nt, Homo sapiens
  misc_RNA (1)...(19): siRNA sense strand
cccuaugaaugucgugaau

SEQ ID NO: 2649562 - RNA, 19 nt, Homo sapiens
  misc_RNA (1)...(19): siRNA sense strand
cugcaaaugcccugaccca

SEQ ID NO: 2649563 - RNA, 19 nt, Homo sapiens
  misc_RNA (1)...(19): siRNA sense strand
guucguugcgccuggaauu

SEQ ID NO: 2649564 - RNA, 19 nt, Homo sapiens
  misc_RNA (1)...(19): siRNA sense strand
ggacacugcccaucucuaa

SEQ ID NO: 2649565 - RNA, 19 nt, Homo sapiens
  misc_RNA (1)...(19): siRNA sense strand
cagaguaaugccucaggua

SEQ ID NO: 2649566 - RNA, 19 nt, Homo sapiens
  misc_RNA (1)...(19): siRNA sense strand
ggagaauucauacaggaga

SEQ ID NO: 2649567 - RNA, 19 nt, Homo sapiens
  misc_RNA (1)...(19): siRNA sense strand
auacaggagagaagcccua

SEQ ID NO: 2649568 - RNA, 19 nt, Homo sapiens
  misc_RNA (1)...(19): siRNA sense strand
cgugaaugugggaagacuu

SEQ ID NO: 2649569 - RNA, 19 nt, Homo sapiens
  misc_RNA (1)...(19): siRNA sense strand
augcaaagaaugugggaaa

SEQ ID NO: 2649570 - RNA, 19 nt, Homo sapiens
  misc_RNA (1)...(19): siRNA sense strand
gugcaaugagugugggaaa

SEQ ID NO: 2649571 - RNA, 19 nt, Homo sapiens
  misc_RNA (1)...(19): siRNA sense strand
guguauugagugugggaaa

SEQ ID NO: 2649572 - RNA, 19 nt, Homo sapiens
  misc_RNA (1)...(19): siRNA sense strand
ggaaagaccuucagccaca

SEQ ID NO: 2649573 - RNA, 19 nt, Homo sapiens
  misc_RNA (1)...(19): siRNA sense strand
gugcaaagaaugugggaag

SEQ ID NO: 2649574 - RNA, 19 nt, Homo sapiens
  misc_RNA (1)...(19): siRNA sense strand
gauucauaccagaguuuaa

SEQ ID NO: 2649575 - RNA, 19 nt, Homo sapiens
  misc_RNA (1)...(19): siRNA sense strand
aagcuagagaugaggaaaa

SEQ ID NO: 2649576 - RNA, 19 nt, Homo sapiens
  misc_RNA (1)...(19): siRNA sense strand
cgacauaauaggacccaca

SEQ ID NO: 2649577 - RNA, 19 nt, Homo sapiens
  misc_RNA (1)...(19): siRNA sense strand
cccuauguuuguagagaau

SEQ ID NO: 2649578 - RNA, 19 nt, Homo sapiens
  misc_RNA (1)...(19): siRNA sense strand
augcacggaaugugggaaa

SEQ ID NO: 2649579 - RNA, 19 nt, Homo sapiens
  misc_RNA (1)...(19): siRNA sense strand
cccuaugagugcaaagaau

SEQ ID NO: 2649580 - RNA, 19 nt, Homo sapiens
  misc_RNA (1)...(19): siRNA sense strand
aggaauaacccuuacacau

SEQ ID NO: 2649581 - RNA, 19 nt, Homo sapiens
  misc_RNA (1)...(19): siRNA sense strand
aacucacacuggagagaaa

SEQ ID NO: 2649582 - RNA, 19 nt, Homo sapiens
  misc_RNA (1)...(19): siRNA sense strand
cggcauaauaggauccaca

SEQ ID NO: 2649583 - RNA, 19 nt, Homo sapiens
  misc_RNA (1)...(19): siRNA sense strand
acuggaacauggacaggaa

SEQ ID NO: 2649584 - RNA, 19 nt, Homo sapiens
  misc_RNA (1)...(19): siRNA sense strand
ccuuacacaugcacggaau

SEQ ID NO: 2649585 - RNA, 19 nt, Homo sapiens
  misc_RNA (1)...(19): siRNA sense strand
gcaagcuagagaugaggaa

SEQ ID NO: 2649586 - RNA, 19 nt, Homo sapiens
  misc_RNA (1)...(19): siRNA sense strand
gggaaagccuucaaacgca

SEQ ID NO: 2649587 - RNA, 19 nt, Homo sapiens
  misc_RNA (1)...(19): siRNA sense strand
agaugauagucugggcuua

SEQ ID NO: 2649588 - RNA, 19 nt, Homo sapiens
  misc_RNA (1)...(19): siRNA sense strand
augacugaugcaaggaaua

SEQ ID NO: 2649589 - RNA, 19 nt, Homo sapiens
  misc_RNA (1)...(19): siRNA sense strand
gugggaaaggguuuagcaa

SEQ ID NO: 2649590 - RNA, 19 nt, Homo sapiens
  misc_RNA (1)...(19): siRNA sense strand
guggaaagaccuucagcca

SEQ ID NO: 2649591 - RNA, 19 nt, Homo sapiens
  misc_RNA (1)...(19): siRNA sense strand
cuuaaggguuuuacaggaa

SEQ ID NO: 2649592 - RNA, 19 nt, Homo sapiens
  misc_RNA (1)...(19): siRNA sense strand
cuauguuuguagagaaugu

SEQ ID NO: 2649593 - RNA, 19 nt, Homo sapiens
  misc_RNA (1)...(19): siRNA sense strand
gugcagugaauguggaaag

SEQ ID NO: 2649594 - RNA, 19 nt, Homo sapiens
  misc_RNA (1)...(19): siRNA sense strand
agagauaugcccugagaag

SEQ ID NO: 2649595 - RNA, 19 nt, Homo sapiens
  misc_RNA (1)...(19): siRNA sense strand
caugacugaugcaaggaau

SEQ ID NO: 2649596 - RNA, 19 nt, Homo sapiens
  misc_RNA (1)...(19): siRNA sense strand
guuuguagagaauguggaa

SEQ ID NO: 2649597 - RNA, 19 nt, Homo sapiens
  misc_RNA (1)...(19): siRNA sense strand
gagaugaggaaaagcuaau

SEQ ID NO: 2649598 - RNA, 19 nt, Homo sapiens
  misc_RNA (1)...(19): siRNA sense strand
ccucauuugcucaacauau

SEQ ID NO: 2649599 - RNA, 19 nt, Homo sapiens
  misc_RNA (1)...(19): siRNA sense strand
ucgaaagauucauaccaga

SEQ ID NO: 2649600 - RNA, 19 nt, Homo sapiens
  misc_RNA (1)...(19): siRNA sense strand
ccaagaagaaggagggcau

SEQ ID NO: 2649601 - RNA, 19 nt, Homo sapiens
  misc_RNA (1)...(19): siRNA sense strand
ccaaauucguaguggccau

SEQ ID NO: 2649602 - RNA, 19 nt, Homo sapiens
  misc_RNA (1)...(19): siRNA sense strand
aggcauagaagcugaugaa

SEQ ID NO: 2649603 - RNA, 19 nt, Homo sapiens
  misc_RNA (1)...(19): siRNA sense strand
ucucaguggaggaggguuu

SEQ ID NO: 2649604 - RNA, 19 nt, Homo sapiens
  misc_RNA (1)...(19): siRNA sense strand
gagaagaggcccugcacca

SEQ ID NO: 2649605 - RNA, 19 nt, Homo sapiens
  misc_RNA (1)...(19): siRNA sense strand
ccacaggcauagaagcuga

SEQ ID NO: 2649606 - RNA, 19 nt, Homo sapiens
  misc_RNA (1)...(19): siRNA sense strand
aguccaugcuagagggaac

SEQ ID NO: 2649607 - RNA, 19 nt, Homo sapiens
  misc_RNA (1)...(19): siRNA sense strand
cauuauuacaccaugagaa

SEQ ID NO: 2649608 - RNA, 19 nt, Homo sapiens
  misc_RNA (1)...(19): siRNA sense strand
ccucaauggccuggggaaa

SEQ ID NO: 2649609 - RNA, 19 nt, Homo sapiens
  misc_RNA (1)...(19): siRNA sense strand
gggaaaucagacaagucaa

SEQ ID NO: 2649610 - RNA, 19 nt, Homo sapiens
  misc_RNA (1)...(19): siRNA sense strand
ccacugaagacaaaggcuu

SEQ ID NO: 2649611 - RNA, 19 nt, Homo sapiens
  misc_RNA (1)...(19): siRNA sense strand
uugcaaaugaugaguuaga

SEQ ID NO: 2649612 - RNA, 19 nt, Homo sapiens
  misc_RNA (1)...(19): siRNA sense strand
uggagauguuuguggcuca

SEQ ID NO: 2649613 - RNA, 19 nt, Homo sapiens
  misc_RNA (1)...(19): siRNA sense strand
ggacaaguagcaaagcgaa

SEQ ID NO: 2649614 - RNA, 19 nt, Homo sapiens
  misc_RNA (1)...(19): siRNA sense strand
gcaccaaaccaguggaguc

SEQ ID NO: 2649615 - RNA, 19 nt, Homo sapiens
  misc_RNA (1)...(19): siRNA sense strand
cuucuucaucaaugggaaa

SEQ ID NO: 2649616 - RNA, 19 nt, Homo sapiens
  misc_RNA (1)...(19): siRNA sense strand
gugaagaaucauacccaga

SEQ ID NO: 2649617 - RNA, 19 nt, Homo sapiens
  misc_RNA (1)...(19): siRNA sense strand
gcaacaugcuucuacgcuu

SEQ ID NO: 2649618 - RNA, 19 nt, Homo sapiens
  misc_RNA (1)...(19): siRNA sense strand
ccacuggagaggaagccaa

SEQ ID NO: 2649619 - RNA, 19 nt, Homo sapiens
  misc_RNA (1)...(19): siRNA sense strand
gcuugagagaccugauaga

SEQ ID NO: 2649620 - RNA, 19 nt, Homo sapiens
  misc_RNA (1)...(19): siRNA sense strand
uugccaugcuggugaacau

SEQ ID NO: 2649621 - RNA, 19 nt, Homo sapiens
  misc_RNA (1)...(19): siRNA sense strand
cggacaaguagcaaagcga

SEQ ID NO: 2649622 - RNA, 19 nt, Homo sapiens
  misc_RNA (1)...(19): siRNA sense strand
cuggagaggaagccaagaa

SEQ ID NO: 2649623 - RNA, 19 nt, Homo sapiens
  misc_RNA (1)...(19): siRNA sense strand
gugaagaauuccauaggcu

SEQ ID NO: 2649624 - RNA, 19 nt, Homo sapiens
  misc_RNA (1)...(19): siRNA sense strand
agcaaagcgaagagcaaaa

SEQ ID NO: 2649625 - RNA, 19 nt, Homo sapiens
  misc_RNA (1)...(19): siRNA sense strand
cugccuacaccuacagcua

SEQ ID NO: 2649626 - RNA, 19 nt, Homo sapiens
  misc_RNA (1)...(19): siRNA sense strand
aggagcacaccaagaagaa

SEQ ID NO: 2649627 - RNA, 19 nt, Homo sapiens
  misc_RNA (1)...(19): siRNA sense strand
gccugguggccaaggaaau

SEQ ID NO: 2649628 - RNA, 19 nt, Homo sapiens
  misc_RNA (1)...(19): siRNA sense strand
gcgaagagcaaaagcaaac

SEQ ID NO: 2649629 - RNA, 19 nt, Homo sapiens
  misc_RNA (1)...(19): siRNA sense strand
ccauauuauaccauugaca

SEQ ID NO: 2649630 - RNA, 19 nt, Homo sapiens
  misc_RNA (1)...(19): siRNA sense strand
uugagagaccugauagaga

SEQ ID NO: 2649631 - RNA, 19 nt, Homo sapiens
  misc_RNA (1)...(19): siRNA sense strand
ugagggagcuacaggccaa

SEQ ID NO: 2649632 - RNA, 19 nt, Homo sapiens
  misc_RNA (1)...(19): siRNA sense strand
uggaggagacccaggaaca

SEQ ID NO: 2649633 - RNA, 19 nt, Homo sapiens
  misc_RNA (1)...(19): siRNA sense strand
agggaaacucggccagcaa

SEQ ID NO: 2649634 - RNA, 19 nt, Homo sapiens
  misc_RNA (1)...(19): siRNA sense strand
gggccuacaucuugcagca

SEQ ID NO: 2649635 - RNA, 19 nt, Homo sapiens
  misc_RNA (1)...(19): siRNA sense strand
aggccaaacagcagcggau

SEQ ID NO: 2649636 - RNA, 19 nt, Homo sapiens
  misc_RNA (1)...(19): siRNA sense strand
gggcugacaucugggccua

SEQ ID NO: 2649637 - RNA, 19 nt, Homo sapiens
  misc_RNA (1)...(19): siRNA sense strand
cauggagaggaaagccaaa

SEQ ID NO: 2649638 - RNA, 19 nt, Homo sapiens
  misc_RNA (1)...(19): siRNA sense strand
ggaagugccuccagggaac

SEQ ID NO: 2649639 - RNA, 19 nt, Homo sapiens
  misc_RNA (1)...(19): siRNA sense strand
cuggaaagguacaagcuca

SEQ ID NO: 2649640 - RNA, 19 nt, Homo sapiens
  misc_RNA (1)...(19): siRNA sense strand
ggggcgagcgcaagagaaa

SEQ ID NO: 2649641 - RNA, 19 nt, Homo sapiens
  misc_RNA (1)...(19): siRNA sense strand
ggaacaagcuggcagggcu

SEQ ID NO: 2649642 - RNA, 19 nt, Homo sapiens
  misc_RNA (1)...(19): siRNA sense strand
ggacagacauggcgugcac

SEQ ID NO: 2649643 - RNA, 19 nt, Homo sapiens
  misc_RNA (1)...(19): siRNA sense strand
aggaagugccuccagggaa

SEQ ID NO: 2649644 - RNA, 19 nt, Homo sapiens
  misc_RNA (1)...(19): siRNA sense strand
uggaaagguacaagcucau

SEQ ID NO: 2649645 - RNA, 19 nt, Homo sapiens
  misc_RNA (1)...(19): siRNA sense strand
gcaugaauuacgagaagcu

SEQ ID NO: 2649646 - RNA, 19 nt, Homo sapiens
  misc_RNA (1)...(19): siRNA sense strand
aggaagaagaggaggagaa

SEQ ID NO: 2649647 - RNA, 19 nt, Homo sapiens
  misc_RNA (1)...(19): siRNA sense strand
guacaguggaagugaggaa

SEQ ID NO: 2649648 - RNA, 19 nt, Homo sapiens
  misc_RNA (1)...(19): siRNA sense strand
gaguaugaguacaguggaa

SEQ ID NO: 2649649 - RNA, 19 nt, Homo sapiens
  misc_RNA (1)...(19): siRNA sense strand
gggagaaugaggagcacaa

SEQ ID NO: 2649650 - RNA, 19 nt, Homo sapiens
  misc_RNA (1)...(19): siRNA sense strand
ccagaagaauccagggaca

SEQ ID NO: 2649651 - RNA, 19 nt, Homo sapiens
  misc_RNA (1)...(19): siRNA sense strand
gggaugaagaggaagaaau

SEQ ID NO: 2649652 - RNA, 19 nt, Homo sapiens
  misc_RNA (1)...(19): siRNA sense strand
ugguggaacuuguuggaaa

SEQ ID NO: 2649653 - RNA, 19 nt, Homo sapiens
  misc_RNA (1)...(19): siRNA sense strand
cagaaagacugcagaggca

SEQ ID NO: 2649654 - RNA, 19 nt, Homo sapiens
  misc_RNA (1)...(19): siRNA sense strand
ccgaagugggcaaggcaaa

SEQ ID NO: 2649655 - RNA, 19 nt, Homo sapiens
  misc_RNA (1)...(19): siRNA sense strand
gguggaacuuguuggaaau

SEQ ID NO: 2649656 - RNA, 19 nt, Homo sapiens
  misc_RNA (1)...(19): siRNA sense strand
aagaagaagcgaggagaaa

SEQ ID NO: 2649657 - RNA, 19 nt, Homo sapiens
  misc_RNA (1)...(19): siRNA sense strand
acauaaugacccagaagua

SEQ ID NO: 2649658 - RNA, 19 nt, Homo sapiens
  misc_RNA (1)...(19): siRNA sense strand
gagagaaggagcugcggaa

SEQ ID NO: 2649659 - RNA, 19 nt, Homo sapiens
  misc_RNA (1)...(19): siRNA sense strand
ggugauugccuuaaagaau

SEQ ID NO: 2649660 - RNA, 19 nt, Homo sapiens
  misc_RNA (1)...(19): siRNA sense strand
cggcaguauuucaagagaa

SEQ ID NO: 2649661 - RNA, 19 nt, Homo sapiens
  misc_RNA (1)...(19): siRNA sense strand
ugaugaagaugaagaggau

SEQ ID NO: 2649662 - RNA, 19 nt, Homo sapiens
  misc_RNA (1)...(19): siRNA sense strand
gggccaaggagguagaaga

SEQ ID NO: 2649663 - RNA, 19 nt, Homo sapiens
  misc_RNA (1)...(19): siRNA sense strand
cuuaaagaaugcuguggaa

SEQ ID NO: 2649664 - RNA, 19 nt, Homo sapiens
  misc_RNA (1)...(19): siRNA sense strand
gcaucgaggagcagaaaga

SEQ ID NO: 2649665 - RNA, 19 nt, Homo sapiens
  misc_RNA (1)...(19): siRNA sense strand
ucgagauauuaaagggcaa

SEQ ID NO: 2649666 - RNA, 19 nt, Homo sapiens
  misc_RNA (1)...(19): siRNA sense strand
gucagaaaguagcgaggaa

SEQ ID NO: 2649667 - RNA, 19 nt, Homo sapiens
  misc_RNA (1)...(19): siRNA sense strand
gcaacaaaggcgagagaag

SEQ ID NO: 2649668 - RNA, 19 nt, Homo sapiens
  misc_RNA (1)...(19): siRNA sense strand
cagaaaguagcgaggaaga

SEQ ID NO: 2649669 - RNA, 19 nt, Homo sapiens
  misc_RNA (1)...(19): siRNA sense strand
augaagaggaagaaaucaa

SEQ ID NO: 2649670 - RNA, 19 nt, Homo sapiens
  misc_RNA (1)...(19): siRNA sense strand
acagugggcaggaggaaua

SEQ ID NO: 2649671 - RNA, 19 nt, Homo sapiens
  misc_RNA (1)...(19): siRNA sense strand
aguuauugccugugaugaa

SEQ ID NO: 2649672 - RNA, 19 nt, Homo sapiens
  misc_RNA (1)...(19): siRNA sense strand
aaagaagaagcgaggagaa

SEQ ID NO: 2649673 - RNA, 19 nt, Homo sapiens
  misc_RNA (1)...(19): siRNA sense strand
ggccaaggagguagaagaa

SEQ ID NO: 2649674 - RNA, 19 nt, Homo sapiens
  misc_RNA (1)...(19): siRNA sense strand
augaagaugaagaggauga

SEQ ID NO: 2649675 - RNA, 19 nt, Homo sapiens
  misc_RNA (1)...(19): siRNA sense strand
agaugaagaggaugaggaa

SEQ ID NO: 2649676 - RNA, 19 nt, Homo sapiens
  misc_RNA (1)...(19): siRNA sense strand
cggagcaugaacaggaaua

SEQ ID NO: 2649677 - RNA, 19 nt, Homo sapiens
  misc_RNA (1)...(19): siRNA sense strand
agcuaaagcaagaaagaga

SEQ ID NO: 2649678 - RNA, 19 nt, Homo sapiens
  misc_RNA (1)...(19): siRNA sense strand
uugcagaucuccagcacaa

SEQ ID NO: 2649679 - RNA, 19 nt, Homo sapiens
  misc_RNA (1)...(19): siRNA sense strand
aaacagauggaauggaaau

SEQ ID NO: 2649680 - RNA, 19 nt, Homo sapiens
  misc_RNA (1)...(19): siRNA sense strand
cugaaaaugcagaaguuaa

SEQ ID NO: 2649681 - RNA, 19 nt, Homo sapiens
  misc_RNA (1)...(19): siRNA sense strand
cguugaaagaggaguggau

SEQ ID NO: 2649682 - RNA, 19 nt, Homo sapiens
  misc_RNA (1)...(19): siRNA sense strand
agugauucaucgagauauu

SEQ ID NO: 2649683 - RNA, 19 nt, Homo sapiens
  misc_RNA (1)...(19): siRNA sense strand
aggaauacuuucauuggaa

SEQ ID NO: 2649684 - RNA, 19 nt, Homo sapiens
  misc_RNA (1)...(19): siRNA sense strand
cggcugaagucuaagaagu

SEQ ID NO: 2649685 - RNA, 19 nt, Homo sapiens
  misc_RNA (1)...(19): siRNA sense strand
ggaagcagcaggagaggga

SEQ ID NO: 2649686 - RNA, 19 nt, Homo sapiens
  misc_RNA (1)...(19): siRNA sense strand
gcgcaaacaauuggaagaa

SEQ ID NO: 2649687 - RNA, 19 nt, Homo sapiens
  misc_RNA (1)...(19): siRNA sense strand
gaagaacggucaaggcuca

SEQ ID NO: 2649688 - RNA, 19 nt, Homo sapiens
  misc_RNA (1)...(19): siRNA sense strand
gaagauggagagagcgaga

SEQ ID NO: 2649689 - RNA, 19 nt, Homo sapiens
  misc_RNA (1)...(19): siRNA sense strand
aggaaguagccaaguguuu

SEQ ID NO: 2649690 - RNA, 19 nt, Homo sapiens
  misc_RNA (1)...(19): siRNA sense strand
gcgaccagcaacagaacaa

SEQ ID NO: 2649691 - RNA, 19 nt, Homo sapiens
  misc_RNA (1)...(19): siRNA sense strand
gaccauauugauagaacaa

SEQ ID NO: 2649692 - RNA, 19 nt, Homo sapiens
  misc_RNA (1)...(19): siRNA sense strand
aggaagauggagagagcga

SEQ ID NO: 2649693 - RNA, 19 nt, Homo sapiens
  misc_RNA (1)...(19): siRNA sense strand
uagaagaaggucaaagauu

SEQ ID NO: 2649694 - RNA, 19 nt, Homo sapiens
  misc_RNA (1)...(19): siRNA sense strand
agaccaaccuaaugagcga

SEQ ID NO: 2649695 - RNA, 19 nt, Homo sapiens
  misc_RNA (1)...(19): siRNA sense strand
ggaccauauugauagaaca

SEQ ID NO: 2649696 - RNA, 19 nt, Homo sapiens
  misc_RNA (1)...(19): siRNA sense strand
ggaagaagaggaggagaau

SEQ ID NO: 2649697 - RNA, 19 nt, Homo sapiens
  misc_RNA (1)...(19): siRNA sense strand
gagcaacaaaggcgagaga

SEQ ID NO: 2649698 - RNA, 19 nt, Homo sapiens
  misc_RNA (1)...(19): siRNA sense strand
agccaaagaacuaagagaa

SEQ ID NO: 2649699 - RNA, 19 nt, Homo sapiens
  misc_RNA (1)...(19): siRNA sense strand
ggaggaagauggagagagc

SEQ ID NO: 2649700 - RNA, 19 nt, Homo sapiens
  misc_RNA (1)...(19): siRNA sense strand
augaagaggaugaggaauc

SEQ ID NO: 2649701 - RNA, 19 nt, Homo sapiens
  misc_RNA (1)...(19): siRNA sense strand
gcauucaacucaaggacca

SEQ ID NO: 2649702 - RNA, 19 nt, Homo sapiens
  misc_RNA (1)...(19): siRNA sense strand
gugaggaagaagaggagga

SEQ ID NO: 2649703 - RNA, 19 nt, Homo sapiens
  misc_RNA (1)...(19): siRNA sense strand
agagacaguuagagaucuu

SEQ ID NO: 2649704 - RNA, 19 nt, Homo sapiens
  misc_RNA (1)...(19): siRNA sense strand
gcagcuaaagcaagaaaga

SEQ ID NO: 2649705 - RNA, 19 nt, Homo sapiens
  misc_RNA (1)...(19): siRNA sense strand
caggaaacucuuaugauau

SEQ ID NO: 2649706 - RNA, 19 nt, Homo sapiens
  misc_RNA (1)...(19): siRNA sense strand
cagaacaauugaugaagca

SEQ ID NO: 2649707 - RNA, 19 nt, Homo sapiens
  misc_RNA (1)...(19): siRNA sense strand
caguaagucagaaggauca

SEQ ID NO: 2649708 - RNA, 19 nt, Homo sapiens
  misc_RNA (1)...(19): siRNA sense strand
ggaaagaagaauaagcuac

SEQ ID NO: 2649709 - RNA, 19 nt, Homo sapiens
  misc_RNA (1)...(19): siRNA sense strand
auguaaagaaugugggaaa

SEQ ID NO: 2649710 - RNA, 19 nt, Homo sapiens
  misc_RNA (1)...(19): siRNA sense strand
auguaaagaaugugggaaa

SEQ ID NO: 2649711 - RNA, 19 nt, Homo sapiens
  misc_RNA (1)...(19): siRNA sense strand
auguaaagaaugugggaaa

SEQ ID NO: 2649712 - RNA, 19 nt, Homo sapiens
  misc_RNA (1)...(19): siRNA sense strand
gauucauccuggagagaaa

SEQ ID NO: 2649713 - RNA, 19 nt, Homo sapiens
  misc_RNA (1)...(19): siRNA sense strand
uuguaaagaaugugggaaa

SEQ ID NO: 2649714 - RNA, 19 nt, Homo sapiens
  misc_RNA (1)...(19): siRNA sense strand
auauaaaucaggagcgaua

SEQ ID NO: 2649715 - RNA, 19 nt, Homo sapiens
  misc_RNA (1)...(19): siRNA sense strand
ugguaaggaaugugggaaa

SEQ ID NO: 2649716 - RNA, 19 nt, Homo sapiens
  misc_RNA (1)...(19): siRNA sense strand
auguaaugauggagaacua

SEQ ID NO: 2649717 - RNA, 19 nt, Homo sapiens
  misc_RNA (1)...(19): siRNA sense strand
aauucauacuggugagaaa

SEQ ID NO: 2649718 - RNA, 19 nt, Homo sapiens
  misc_RNA (1)...(19): siRNA sense strand
uugcaaggaaugugggaaa

SEQ ID NO: 2649719 - RNA, 19 nt, Homo sapiens
  misc_RNA (1)...(19): siRNA sense strand
ccguaugauuguaaggaau

SEQ ID NO: 2649720 - RNA, 19 nt, Homo sapiens
  misc_RNA (1)...(19): siRNA sense strand
uuguaaggaaugugggaaa

SEQ ID NO: 2649721 - RNA, 19 nt, Homo sapiens
  misc_RNA (1)...(19): siRNA sense strand
uuguaaggaaugugggaaa

SEQ ID NO: 2649722 - RNA, 19 nt, Homo sapiens
  misc_RNA (1)...(19): siRNA sense strand
uuguaaggaaugugggaaa

SEQ ID NO: 2649723 - RNA, 19 nt, Homo sapiens
  misc_RNA (1)...(19): siRNA sense strand
aauucauacuggugacaaa

SEQ ID NO: 2649724 - RNA, 19 nt, Homo sapiens
  misc_RNA (1)...(19): siRNA sense strand
uuguaaggagugugggaaa

SEQ ID NO: 2649725 - RNA, 19 nt, Homo sapiens
  misc_RNA (1)...(19): siRNA sense strand
gcucagaacuaauucgaca

SEQ ID NO: 2649726 - RNA, 19 nt, Homo sapiens
  misc_RNA (1)...(19): siRNA sense strand
ccucaugagugucaggaau

SEQ ID NO: 2649727 - RNA, 19 nt, Homo sapiens
  misc_RNA (1)...(19): siRNA sense strand
gguaaggaaugugggaaau

SEQ ID NO: 2649728 - RNA, 19 nt, Homo sapiens
  misc_RNA (1)...(19): siRNA sense strand
cuguaaggaauguggaaaa

SEQ ID NO: 2649729 - RNA, 19 nt, Homo sapiens
  misc_RNA (1)...(19): siRNA sense strand
cuguaaggaauguggaaaa

SEQ ID NO: 2649730 - RNA, 19 nt, Homo sapiens
  misc_RNA (1)...(19): siRNA sense strand
guauaaauccacagaaugu

SEQ ID NO: 2649731 - RNA, 19 nt, Homo sapiens
  misc_RNA (1)...(19): siRNA sense strand
ggugagaaaccguaugauu

SEQ ID NO: 2649732 - RNA, 19 nt, Homo sapiens
  misc_RNA (1)...(19): siRNA sense strand
gcucagggcuaauuggaca

SEQ ID NO: 2649733 - RNA, 19 nt, Homo sapiens
  misc_RNA (1)...(19): siRNA sense strand
ccacagaauguauggcuuu

SEQ ID NO: 2649734 - RNA, 19 nt, Homo sapiens
  misc_RNA (1)...(19): siRNA sense strand
cccuaugacuguaaggaau

SEQ ID NO: 2649735 - RNA, 19 nt, Homo sapiens
  misc_RNA (1)...(19): siRNA sense strand
agauguaagaccaaagauu

SEQ ID NO: 2649736 - RNA, 19 nt, Homo sapiens
  misc_RNA (1)...(19): siRNA sense strand
cuggagagaaacuguauaa

SEQ ID NO: 2649737 - RNA, 19 nt, Homo sapiens
  misc_RNA (1)...(19): siRNA sense strand
uguaaagaaugugggaaau

SEQ ID NO: 2649738 - RNA, 19 nt, Homo sapiens
  misc_RNA (1)...(19): siRNA sense strand
augucaggaaugugggaaa

SEQ ID NO: 2649739 - RNA, 19 nt, Homo sapiens
  misc_RNA (1)...(19): siRNA sense strand
uguaaagaaugugggaaau

SEQ ID NO: 2649740 - RNA, 19 nt, Homo sapiens
  misc_RNA (1)...(19): siRNA sense strand
uguaaagaaugugggaaau

SEQ ID NO: 2649741 - RNA, 19 nt, Homo sapiens
  misc_RNA (1)...(19): siRNA sense strand
uguaaagaaugugggaaau

SEQ ID NO: 2649742 - RNA, 19 nt, Homo sapiens
  misc_RNA (1)...(19): siRNA sense strand
uguucacacuggcgagaaa

SEQ ID NO: 2649743 - RNA, 19 nt, Homo sapiens
  misc_RNA (1)...(19): siRNA sense strand
agaaggacuuauacagaga

SEQ ID NO: 2649744 - RNA, 19 nt, Homo sapiens
  misc_RNA (1)...(19): siRNA sense strand
cuuacuggagcaagggaaa

SEQ ID NO: 2649745 - RNA, 19 nt, Homo sapiens
  misc_RNA (1)...(19): siRNA sense strand
gcucaggguuaauuggaca

SEQ ID NO: 2649746 - RNA, 19 nt, Homo sapiens
  misc_RNA (1)...(19): siRNA sense strand
cccuaugauuguaaagaau

SEQ ID NO: 2649747 - RNA, 19 nt, Homo sapiens
  misc_RNA (1)...(19): siRNA sense strand
cccuaugauuguaaagaau

SEQ ID NO: 2649748 - RNA, 19 nt, Homo sapiens
  misc_RNA (1)...(19): siRNA sense strand
ggugagaagcucuaugauu

SEQ ID NO: 2649749 - RNA, 19 nt, Homo sapiens
  misc_RNA (1)...(19): siRNA sense strand
gaguuuagauguaagacca

SEQ ID NO: 2649750 - RNA, 19 nt, Homo sapiens
  misc_RNA (1)...(19): siRNA sense strand
caggagcgauauuuggaaa

SEQ ID NO: 2649751 - RNA, 19 nt, Homo sapiens
  misc_RNA (1)...(19): siRNA sense strand
gagaauucauacuggggaa

SEQ ID NO: 2649752 - RNA, 19 nt, Homo sapiens
  misc_RNA (1)...(19): siRNA sense strand
cccuaugauuguaaggaau

SEQ ID NO: 2649753 - RNA, 19 nt, Homo sapiens
  misc_RNA (1)...(19): siRNA sense strand
cccuauuguuguaaggaau

SEQ ID NO: 2649754 - RNA, 19 nt, Homo sapiens
  misc_RNA (1)...(19): siRNA sense strand
cccuaugauuguaaggaau

SEQ ID NO: 2649755 - RNA, 19 nt, Homo sapiens
  misc_RNA (1)...(19): siRNA sense strand
cccuaugauuguaaggaau

SEQ ID NO: 2649756 - RNA, 19 nt, Homo sapiens
  misc_RNA (1)...(19): siRNA sense strand
cccaaagccugaugugauu

SEQ ID NO: 2649757 - RNA, 19 nt, Homo sapiens
  misc_RNA (1)...(19): siRNA sense strand
uauucacacuggcgagaaa

SEQ ID NO: 2649758 - RNA, 19 nt, Homo sapiens
  misc_RNA (1)...(19): siRNA sense strand
uuguaaggaauguggaaaa

SEQ ID NO: 2649759 - RNA, 19 nt, Homo sapiens
  misc_RNA (1)...(19): siRNA sense strand
uguaaggagugugggaaau

SEQ ID NO: 2649760 - RNA, 19 nt, Homo sapiens
  misc_RNA (1)...(19): siRNA sense strand
uuguaaggaauguggaaaa

SEQ ID NO: 2649761 - RNA, 19 nt, Homo sapiens
  misc_RNA (1)...(19): siRNA sense strand
uuguaaggaauguggaaaa

SEQ ID NO: 2649762 - RNA, 19 nt, Homo sapiens
  misc_RNA (1)...(19): siRNA sense strand
uuguaaggaauguggaaaa

SEQ ID NO: 2649763 - RNA, 19 nt, Homo sapiens
  misc_RNA (1)...(19): siRNA sense strand
agauauaaaucaggagcga

SEQ ID NO: 2649764 - RNA, 19 nt, Homo sapiens
  misc_RNA (1)...(19): siRNA sense strand
uaauugaacaucagcgaau

SEQ ID NO: 2649765 - RNA, 19 nt, Homo sapiens
  misc_RNA (1)...(19): siRNA sense strand
gauuguaaggaauguggaa

SEQ ID NO: 2649766 - RNA, 19 nt, Homo sapiens
  misc_RNA (1)...(19): siRNA sense strand
cuuuagacgucguucaaaa

SEQ ID NO: 2649767 - RNA, 19 nt, Homo sapiens
  misc_RNA (1)...(19): siRNA sense strand
ucaccaaacaucacaguau

SEQ ID NO: 2649768 - RNA, 19 nt, Homo sapiens
  misc_RNA (1)...(19): siRNA sense strand
guuucagcaccaagauaua

SEQ ID NO: 2649769 - RNA, 19 nt, Homo sapiens
  misc_RNA (1)...(19): siRNA sense strand
gcucaacacuaauucgaca

SEQ ID NO: 2649770 - RNA, 19 nt, Homo sapiens
  misc_RNA (1)...(19): siRNA sense strand
cgaugaaaguuuuagacaa

SEQ ID NO: 2649771 - RNA, 19 nt, Homo sapiens
  misc_RNA (1)...(19): siRNA sense strand
aaauaagagucgucagcau

SEQ ID NO: 2649772 - RNA, 19 nt, Homo sapiens
  misc_RNA (1)...(19): siRNA sense strand
acacaguuauaauggacaa

SEQ ID NO: 2649773 - RNA, 19 nt, Homo sapiens
  misc_RNA (1)...(19): siRNA sense strand
gcuaaugaucccaaggaga

SEQ ID NO: 2649774 - RNA, 19 nt, Homo sapiens
  misc_RNA (1)...(19): siRNA sense strand
caguuauaauggacaagaa

SEQ ID NO: 2649775 - RNA, 19 nt, Homo sapiens
  misc_RNA (1)...(19): siRNA sense strand
aggcagaagauauuaagaa

SEQ ID NO: 2649776 - RNA, 19 nt, Homo sapiens
  misc_RNA (1)...(19): siRNA sense strand
ucaaagagcuccaggacac

SEQ ID NO: 2649777 - RNA, 19 nt, Homo sapiens
  misc_RNA (1)...(19): siRNA sense strand
gaaucagaaccuagggcau

SEQ ID NO: 2649778 - RNA, 19 nt, Homo sapiens
  misc_RNA (1)...(19): siRNA sense strand
cagaaaagauagcagccaa

SEQ ID NO: 2649779 - RNA, 19 nt, Homo sapiens
  misc_RNA (1)...(19): siRNA sense strand
aagucaucgaugugaguua

SEQ ID NO: 2649780 - RNA, 19 nt, Homo sapiens
  misc_RNA (1)...(19): siRNA sense strand
cuauacagauacaagguga

SEQ ID NO: 2649781 - RNA, 19 nt, Homo sapiens
  misc_RNA (1)...(19): siRNA sense strand
agagaaugaagcaaguuua

SEQ ID NO: 2649782 - RNA, 19 nt, Homo sapiens
  misc_RNA (1)...(19): siRNA sense strand
agaaggaacuagaggaguc

SEQ ID NO: 2649783 - RNA, 19 nt, Homo sapiens
  misc_RNA (1)...(19): siRNA sense strand
gaucugcaccaaagagcaa

SEQ ID NO: 2649784 - RNA, 19 nt, Homo sapiens
  misc_RNA (1)...(19): siRNA sense strand
aggaacagcuuuuggcaau

SEQ ID NO: 2649785 - RNA, 19 nt, Homo sapiens
  misc_RNA (1)...(19): siRNA sense strand
gcgggagagugcugaacuu

SEQ ID NO: 2649786 - RNA, 19 nt, Homo sapiens
  misc_RNA (1)...(19): siRNA sense strand
gggacauggagaaggaacu

SEQ ID NO: 2649787 - RNA, 19 nt, Homo sapiens
  misc_RNA (1)...(19): siRNA sense strand
cagaaauuugguacaacua

SEQ ID NO: 2649788 - RNA, 19 nt, Homo sapiens
  misc_RNA (1)...(19): siRNA sense strand
ugcaauaaucacagcguuu

SEQ ID NO: 2649789 - RNA, 19 nt, Homo sapiens
  misc_RNA (1)...(19): siRNA sense strand
gcagaagauauuaagaagu

SEQ ID NO: 2649790 - RNA, 19 nt, Homo sapiens
  misc_RNA (1)...(19): siRNA sense strand
caauccaggcagaagauau

SEQ ID NO: 2649791 - RNA, 19 nt, Homo sapiens
  misc_RNA (1)...(19): siRNA sense strand
aagaagaaucugacuacau

SEQ ID NO: 2649792 - RNA, 19 nt, Homo sapiens
  misc_RNA (1)...(19): siRNA sense strand
agacaauccaggcagaaga

SEQ ID NO: 2649793 - RNA, 19 nt, Homo sapiens
  misc_RNA (1)...(19): siRNA sense strand
ggggagaggauuucaagaa

SEQ ID NO: 2649794 - RNA, 19 nt, Homo sapiens
  misc_RNA (1)...(19): siRNA sense strand
acucacaguacuuagacaa

SEQ ID NO: 2649795 - RNA, 19 nt, Homo sapiens
  misc_RNA (1)...(19): siRNA sense strand
gcaacuucacccaaaggaa

SEQ ID NO: 2649796 - RNA, 19 nt, Homo sapiens
  misc_RNA (1)...(19): siRNA sense strand
uagagugggacauggagaa

SEQ ID NO: 2649797 - RNA, 19 nt, Homo sapiens
  misc_RNA (1)...(19): siRNA sense strand
guacauacaaauugcccuu

SEQ ID NO: 2649798 - RNA, 19 nt, Homo sapiens
  misc_RNA (1)...(19): siRNA sense strand
auggaauggcagaugauuu

SEQ ID NO: 2649799 - RNA, 19 nt, Homo sapiens
  misc_RNA (1)...(19): siRNA sense strand
ccaaaagcuagaaccaaaa

SEQ ID NO: 2649800 - RNA, 19 nt, Homo sapiens
  misc_RNA (1)...(19): siRNA sense strand
acuuauagaggcuugggaa

SEQ ID NO: 2649801 - RNA, 19 nt, Homo sapiens
  misc_RNA (1)...(19): siRNA sense strand
ggagaaggaacuagaggag

SEQ ID NO: 2649802 - RNA, 19 nt, Homo sapiens
  misc_RNA (1)...(19): siRNA sense strand
caucaaaacauuagagggu

SEQ ID NO: 2649803 - RNA, 19 nt, Homo sapiens
  misc_RNA (1)...(19): siRNA sense strand
aaacugaucucuucgccaa

SEQ ID NO: 2649804 - RNA, 19 nt, Homo sapiens
  misc_RNA (1)...(19): siRNA sense strand
cuacauuacccauuauaca

SEQ ID NO: 2649805 - RNA, 19 nt, Homo sapiens
  misc_RNA (1)...(19): siRNA sense strand
ccaaagagcaaucgcugca

SEQ ID NO: 2649806 - RNA, 19 nt, Homo sapiens
  misc_RNA (1)...(19): siRNA sense strand
ccucaguuauaucaagaga

SEQ ID NO: 2649807 - RNA, 19 nt, Homo sapiens
  misc_RNA (1)...(19): siRNA sense strand
aauccaggcagaagauauu

SEQ ID NO: 2649808 - RNA, 19 nt, Homo sapiens
  misc_RNA (1)...(19): siRNA sense strand
gguccaugcagaucaaaga

SEQ ID NO: 2649809 - RNA, 19 nt, Homo sapiens
  misc_RNA (1)...(19): siRNA sense strand
aaaugagacccuucaagaa

SEQ ID NO: 2649810 - RNA, 19 nt, Homo sapiens
  misc_RNA (1)...(19): siRNA sense strand
ugaagaagccagaaaagau

SEQ ID NO: 2649811 - RNA, 19 nt, Homo sapiens
  misc_RNA (1)...(19): siRNA sense strand
augaauggggagaggauuu

SEQ ID NO: 2649812 - RNA, 19 nt, Homo sapiens
  misc_RNA (1)...(19): siRNA sense strand
agugggacauggagaagga

SEQ ID NO: 2649813 - RNA, 19 nt, Homo sapiens
  misc_RNA (1)...(19): siRNA sense strand
ucaagacaauccaggcaga

SEQ ID NO: 2649814 - RNA, 19 nt, Homo sapiens
  misc_RNA (1)...(19): siRNA sense strand
ccuuuaaugcacuugauau

SEQ ID NO: 2649815 - RNA, 19 nt, Homo sapiens
  misc_RNA (1)...(19): siRNA sense strand
aagcaggaaacgagagaaa

SEQ ID NO: 2649816 - RNA, 19 nt, Homo sapiens
  misc_RNA (1)...(19): siRNA sense strand
ggaaagugagauugggaau

SEQ ID NO: 2649817 - RNA, 19 nt, Homo sapiens
  misc_RNA (1)...(19): siRNA sense strand
agaauugggacgagugaaa

SEQ ID NO: 2649818 - RNA, 19 nt, Homo sapiens
  misc_RNA (1)...(19): siRNA sense strand
ccaauaugggagugguaaa

SEQ ID NO: 2649819 - RNA, 19 nt, Homo sapiens
  misc_RNA (1)...(19): siRNA sense strand
cugaaggagaagaggagaa

SEQ ID NO: 2649820 - RNA, 19 nt, Homo sapiens
  misc_RNA (1)...(19): siRNA sense strand
auugagaagcugaagaaua

SEQ ID NO: 2649821 - RNA, 19 nt, Homo sapiens
  misc_RNA (1)...(19): siRNA sense strand
uggcgaacgaggagaacaa

SEQ ID NO: 2649822 - RNA, 19 nt, Homo sapiens
  misc_RNA (1)...(19): siRNA sense strand
gaguaugaagagcgaauua

SEQ ID NO: 2649823 - RNA, 19 nt, Homo sapiens
  misc_RNA (1)...(19): siRNA sense strand
cagagaaagaacuugauaa

SEQ ID NO: 2649824 - RNA, 19 nt, Homo sapiens
  misc_RNA (1)...(19): siRNA sense strand
ugcuaaaggaggaggaaaa

SEQ ID NO: 2649825 - RNA, 19 nt, Homo sapiens
  misc_RNA (1)...(19): siRNA sense strand
caucgacagaucagagaaa

SEQ ID NO: 2649826 - RNA, 19 nt, Homo sapiens
  misc_RNA (1)...(19): siRNA sense strand
gugaguaugaagagcgaau

SEQ ID NO: 2649827 - RNA, 19 nt, Homo sapiens
  misc_RNA (1)...(19): siRNA sense strand
auuuagaagcucugaggaa

SEQ ID NO: 2649828 - RNA, 19 nt, Homo sapiens
  misc_RNA (1)...(19): siRNA sense strand
cggaggaucgugugguuua

SEQ ID NO: 2649829 - RNA, 19 nt, Homo sapiens
  misc_RNA (1)...(19): siRNA sense strand
agaacuugauaaagccaaa

SEQ ID NO: 2649830 - RNA, 19 nt, Homo sapiens
  misc_RNA (1)...(19): siRNA sense strand
cagcaauuauacacagcaa

SEQ ID NO: 2649831 - RNA, 19 nt, Homo sapiens
  misc_RNA (1)...(19): siRNA sense strand
ggaagagcgaacugaagaa

SEQ ID NO: 2649832 - RNA, 19 nt, Homo sapiens
  misc_RNA (1)...(19): siRNA sense strand
gcaaggauaaagcaggaaa

SEQ ID NO: 2649833 - RNA, 19 nt, Homo sapiens
  misc_RNA (1)...(19): siRNA sense strand
uggaagaucaguugucaaa

SEQ ID NO: 2649834 - RNA, 19 nt, Homo sapiens
  misc_RNA (1)...(19): siRNA sense strand
gggauggagacauagauaa

SEQ ID NO: 2649835 - RNA, 19 nt, Homo sapiens
  misc_RNA (1)...(19): siRNA sense strand
agauaaagaaggacauuca

SEQ ID NO: 2649836 - RNA, 19 nt, Homo sapiens
  misc_RNA (1)...(19): siRNA sense strand
auuugaugauagaggacaa

SEQ ID NO: 2649837 - RNA, 19 nt, Homo sapiens
  misc_RNA (1)...(19): siRNA sense strand
gacugaaagugaagaacau

SEQ ID NO: 2649838 - RNA, 19 nt, Homo sapiens
  misc_RNA (1)...(19): siRNA sense strand
cuggaaaagaaaagugaua

SEQ ID NO: 2649839 - RNA, 19 nt, Homo sapiens
  misc_RNA (1)...(19): siRNA sense strand
gaaucagcucauaaagaua

SEQ ID NO: 2649840 - RNA, 19 nt, Homo sapiens
  misc_RNA (1)...(19): siRNA sense strand
gcguagaaucaaacaauga

SEQ ID NO: 2649841 - RNA, 19 nt, Homo sapiens
  misc_RNA (1)...(19): siRNA sense strand
cugaaggaugaaagagcaa

SEQ ID NO: 2649842 - RNA, 19 nt, Homo sapiens
  misc_RNA (1)...(19): siRNA sense strand
caguaaggcagaagaaguu

SEQ ID NO: 2649843 - RNA, 19 nt, Homo sapiens
  misc_RNA (1)...(19): siRNA sense strand
cuucaauacuggaaaagaa

SEQ ID NO: 2649844 - RNA, 19 nt, Homo sapiens
  misc_RNA (1)...(19): siRNA sense strand
agacugagacaaugaaaga

SEQ ID NO: 2649845 - RNA, 19 nt, Homo sapiens
  misc_RNA (1)...(19): siRNA sense strand
guuaagcguacucgagaaa

SEQ ID NO: 2649846 - RNA, 19 nt, Homo sapiens
  misc_RNA (1)...(19): siRNA sense strand
aauagaacuuccagugauu

SEQ ID NO: 2649847 - RNA, 19 nt, Homo sapiens
  misc_RNA (1)...(19): siRNA sense strand
aguuacagacugagacaau

SEQ ID NO: 2649848 - RNA, 19 nt, Homo sapiens
  misc_RNA (1)...(19): siRNA sense strand
augcacaacaagaugauaa

SEQ ID NO: 2649849 - RNA, 19 nt, Homo sapiens
  misc_RNA (1)...(19): siRNA sense strand
aaacaaugggagaacacaa

SEQ ID NO: 2649850 - RNA, 19 nt, Homo sapiens
  misc_RNA (1)...(19): siRNA sense strand
ugauaaagccaaagguuuu

SEQ ID NO: 2649851 - RNA, 19 nt, Homo sapiens
  misc_RNA (1)...(19): siRNA sense strand
gggacgagugaaagaugaa

SEQ ID NO: 2649852 - RNA, 19 nt, Homo sapiens
  misc_RNA (1)...(19): siRNA sense strand
gcgugagacugaaagugaa

SEQ ID NO: 2649853 - RNA, 19 nt, Homo sapiens
  misc_RNA (1)...(19): siRNA sense strand
ugggaauaacacagaguuu

SEQ ID NO: 2649854 - RNA, 19 nt, Homo sapiens
  misc_RNA (1)...(19): siRNA sense strand
cggcauaucaggaccauga

SEQ ID NO: 2649855 - RNA, 19 nt, Homo sapiens
  misc_RNA (1)...(19): siRNA sense strand
cugaacagcuguaacaaca

SEQ ID NO: 2649856 - RNA, 19 nt, Homo sapiens
  misc_RNA (1)...(19): siRNA sense strand
agaagaaucagcucauaaa

SEQ ID NO: 2649857 - RNA, 19 nt, Homo sapiens
  misc_RNA (1)...(19): siRNA sense strand
aaaggagauaacugagaaa

SEQ ID NO: 2649858 - RNA, 19 nt, Homo sapiens
  misc_RNA (1)...(19): siRNA sense strand
cagcaauggaagagcgaac

SEQ ID NO: 2649859 - RNA, 19 nt, Homo sapiens
  misc_RNA (1)...(19): siRNA sense strand
ccaagauaaagaaggacau

SEQ ID NO: 2649860 - RNA, 19 nt, Homo sapiens
  misc_RNA (1)...(19): siRNA sense strand
uaucagaaauugaaggaac

SEQ ID NO: 2649861 - RNA, 19 nt, Homo sapiens
  misc_RNA (1)...(19): siRNA sense strand
acacagaguuugagaaaag

SEQ ID NO: 2649862 - RNA, 19 nt, Homo sapiens
  misc_RNA (1)...(19): siRNA sense strand
gcaaagcaagggagcguga

SEQ ID NO: 2649863 - RNA, 19 nt, Homo sapiens
  misc_RNA (1)...(19): siRNA sense strand
ucauaaagauagugaugcu

SEQ ID NO: 2649864 - RNA, 19 nt, Homo sapiens
  misc_RNA (1)...(19): siRNA sense strand
gggagaacacaauagaaca

SEQ ID NO: 2649865 - RNA, 19 nt, Homo sapiens
  misc_RNA (1)...(19): siRNA sense strand
acgguuaaagggagaaauu

SEQ ID NO: 2649866 - RNA, 19 nt, Homo sapiens
  misc_RNA (1)...(19): siRNA sense strand
uuuagaagcucugaggaaa

SEQ ID NO: 2649867 - RNA, 19 nt, Homo sapiens
  misc_RNA (1)...(19): siRNA sense strand
ucgacagaucagagaaaga

SEQ ID NO: 2649868 - RNA, 19 nt, Homo sapiens
  misc_RNA (1)...(19): siRNA sense strand
ucacaguaaggcagaagaa

SEQ ID NO: 2649869 - RNA, 19 nt, Homo sapiens
  misc_RNA (1)...(19): siRNA sense strand
aaauugagaagcugaagaa

SEQ ID NO: 2649870 - RNA, 19 nt, Homo sapiens
  misc_RNA (1)...(19): siRNA sense strand
ugaaggagaagaggagaaa

SEQ ID NO: 2649871 - RNA, 19 nt, Homo sapiens
  misc_RNA (1)...(19): siRNA sense strand
uagaagaaucagcucauaa

SEQ ID NO: 2649872 - RNA, 19 nt, Homo sapiens
  misc_RNA (1)...(19): siRNA sense strand
ucagguuagaauuggauaa

SEQ ID NO: 2649873 - RNA, 19 nt, Homo sapiens
  misc_RNA (1)...(19): siRNA sense strand
ugucacgguuaaagggaga

SEQ ID NO: 2649874 - RNA, 19 nt, Homo sapiens
  misc_RNA (1)...(19): siRNA sense strand
cagaagagggauggagaca

SEQ ID NO: 2649875 - RNA, 19 nt, Homo sapiens
  misc_RNA (1)...(19): siRNA sense strand
aagauaugcuaaaggagga

SEQ ID NO: 2649876 - RNA, 19 nt, Homo sapiens
  misc_RNA (1)...(19): siRNA sense strand
uuaagaaagcucaggaguu

SEQ ID NO: 2649877 - RNA, 19 nt, Homo sapiens
  misc_RNA (1)...(19): siRNA sense strand
uugauaaagccaaagguuu

SEQ ID NO: 2649878 - RNA, 19 nt, Homo sapiens
  misc_RNA (1)...(19): siRNA sense strand
uggaauuagcaaggauaaa

SEQ ID NO: 2649879 - RNA, 19 nt, Homo sapiens
  misc_RNA (1)...(19): siRNA sense strand
aauucauacuggugagaaa

SEQ ID NO: 2649880 - RNA, 19 nt, Homo sapiens
  misc_RNA (1)...(19): siRNA sense strand
auguaaggaaugugggaaa

SEQ ID NO: 2649881 - RNA, 19 nt, Homo sapiens
  misc_RNA (1)...(19): siRNA sense strand
auguaaggaaugugggaaa

SEQ ID NO: 2649882 - RNA, 19 nt, Homo sapiens
  misc_RNA (1)...(19): siRNA sense strand
guguagggagugugggaaa

SEQ ID NO: 2649883 - RNA, 19 nt, Homo sapiens
  misc_RNA (1)...(19): siRNA sense strand
aauccauacgggugagaaa

SEQ ID NO: 2649884 - RNA, 19 nt, Homo sapiens
  misc_RNA (1)...(19): siRNA sense strand
cccuaugaguguaaggaau

SEQ ID NO: 2649885 - RNA, 19 nt, Homo sapiens
  misc_RNA (1)...(19): siRNA sense strand
gcucagaacuuacccgaca

SEQ ID NO: 2649886 - RNA, 19 nt, Homo sapiens
  misc_RNA (1)...(19): siRNA sense strand
ccccauaaguguaaggaau

SEQ ID NO: 2649887 - RNA, 19 nt, Homo sapiens
  misc_RNA (1)...(19): siRNA sense strand
auguggagaauguaggaaa

SEQ ID NO: 2649888 - RNA, 19 nt, Homo sapiens
  misc_RNA (1)...(19): siRNA sense strand
acucaaccucagagcauua

SEQ ID NO: 2649889 - RNA, 19 nt, Homo sapiens
  misc_RNA (1)...(19): siRNA sense strand
gccagaguuaucagagaaa

SEQ ID NO: 2649890 - RNA, 19 nt, Homo sapiens
  misc_RNA (1)...(19): siRNA sense strand
ccccauaaauguaaggaau

SEQ ID NO: 2649891 - RNA, 19 nt, Homo sapiens
  misc_RNA (1)...(19): siRNA sense strand
guuaagaggaaggagacaa

SEQ ID NO: 2649892 - RNA, 19 nt, Homo sapiens
  misc_RNA (1)...(19): siRNA sense strand
ugaaauuagaucaccacaa

SEQ ID NO: 2649893 - RNA, 19 nt, Homo sapiens
  misc_RNA (1)...(19): siRNA sense strand
uguggagaauguaggaaaa

SEQ ID NO: 2649894 - RNA, 19 nt, Homo sapiens
  misc_RNA (1)...(19): siRNA sense strand
uggaagagaaaccaagaau

SEQ ID NO: 2649895 - RNA, 19 nt, Homo sapiens
  misc_RNA (1)...(19): siRNA sense strand
guguaaggaaugugggaag

SEQ ID NO: 2649896 - RNA, 19 nt, Homo sapiens
  misc_RNA (1)...(19): siRNA sense strand
guguaaggaaugugggaag

SEQ ID NO: 2649897 - RNA, 19 nt, Homo sapiens
  misc_RNA (1)...(19): siRNA sense strand
ugggaguuuggaagagaaa

SEQ ID NO: 2649898 - RNA, 19 nt, Homo sapiens
  misc_RNA (1)...(19): siRNA sense strand
uggagagacaacaggguca

SEQ ID NO: 2649899 - RNA, 19 nt, Homo sapiens
  misc_RNA (1)...(19): siRNA sense strand
augcaggaaauguaagaau

SEQ ID NO: 2649900 - RNA, 19 nt, Homo sapiens
  misc_RNA (1)...(19): siRNA sense strand
cgcuaugaaugcagggagu

SEQ ID NO: 2649901 - RNA, 19 nt, Homo sapiens
  misc_RNA (1)...(19): siRNA sense strand
gaaugcagggaguguggaa

SEQ ID NO: 2649902 - RNA, 19 nt, Homo sapiens
  misc_RNA (1)...(19): siRNA sense strand
aggccagaguuaucagaga

SEQ ID NO: 2649903 - RNA, 19 nt, Homo sapiens
  misc_RNA (1)...(19): siRNA sense strand
ugugaaugcaggaaaugua

SEQ ID NO: 2649904 - RNA, 19 nt, Homo sapiens
  misc_RNA (1)...(19): siRNA sense strand
aggaaauguaagaaugcuu

SEQ ID NO: 2649905 - RNA, 19 nt, Homo sapiens
  misc_RNA (1)...(19): siRNA sense strand
aaauguaaggaauguggaa

SEQ ID NO: 2649906 - RNA, 19 nt, Homo sapiens
  misc_RNA (1)...(19): siRNA sense strand
caucaugagagaagucaca

SEQ ID NO: 2649907 - RNA, 19 nt, Homo sapiens
  misc_RNA (1)...(19): siRNA sense strand
gguuaagaggaaggagaca

SEQ ID NO: 2649908 - RNA, 19 nt, Homo sapiens
  misc_RNA (1)...(19): siRNA sense strand
agaaacccuacgaguguaa

SEQ ID NO: 2649909 - RNA, 19 nt, Homo sapiens
  misc_RNA (1)...(19): siRNA sense strand
guguaaggagugugggaag

SEQ ID NO: 2649910 - RNA, 19 nt, Homo sapiens
  misc_RNA (1)...(19): siRNA sense strand
ccacaacaggagaaggcca

SEQ ID NO: 2649911 - RNA, 19 nt, Homo sapiens
  misc_RNA (1)...(19): siRNA sense strand
cagaguuaucagagaaauc

SEQ ID NO: 2649912 - RNA, 19 nt, Homo sapiens
  misc_RNA (1)...(19): siRNA sense strand
aggaaugugggaaggcuuu

SEQ ID NO: 2649913 - RNA, 19 nt, Homo sapiens
  misc_RNA (1)...(19): siRNA sense strand
aggaaggagacaaaagaau

SEQ ID NO: 2649914 - RNA, 19 nt, Homo sapiens
  misc_RNA (1)...(19): siRNA sense strand
ccagauugggaguuuggaa

SEQ ID NO: 2649915 - RNA, 19 nt, Homo sapiens
  misc_RNA (1)...(19): siRNA sense strand
gaguguaaggaguguggga

SEQ ID NO: 2649916 - RNA, 19 nt, Homo sapiens
  misc_RNA (1)...(19): siRNA sense strand
uggagagaaaccucauaaa

SEQ ID NO: 2649917 - RNA, 19 nt, Homo sapiens
  misc_RNA (1)...(19): siRNA sense strand
gguuaaaacucuuggaaaa

SEQ ID NO: 2649918 - RNA, 19 nt, Homo sapiens
  misc_RNA (1)...(19): siRNA sense strand
cagaagaauuacagaggau

SEQ ID NO: 2649919 - RNA, 19 nt, Homo sapiens
  misc_RNA (1)...(19): siRNA sense strand
cguaggagaaugaguguaa

SEQ ID NO: 2649920 - RNA, 19 nt, Homo sapiens
  misc_RNA (1)...(19): siRNA sense strand
agacagacuacaagauaaa

SEQ ID NO: 2649921 - RNA, 19 nt, Homo sapiens
  misc_RNA (1)...(19): siRNA sense strand
ccaagaaauuaaugguaga

SEQ ID NO: 2649922 - RNA, 19 nt, Homo sapiens
  misc_RNA (1)...(19): siRNA sense strand
caaaagaguaugaggaaau

SEQ ID NO: 2649923 - RNA, 19 nt, Homo sapiens
  misc_RNA (1)...(19): siRNA sense strand
ucgaauagccaaagaugaa

SEQ ID NO: 2649924 - RNA, 19 nt, Homo sapiens
  misc_RNA (1)...(19): siRNA sense strand
caucuaagcuuaugauuga

SEQ ID NO: 2649925 - RNA, 19 nt, Homo sapiens
  misc_RNA (1)...(19): siRNA sense strand
gaguaugaggaaauagaua

SEQ ID NO: 2649926 - RNA, 19 nt, Homo sapiens
  misc_RNA (1)...(19): siRNA sense strand
cagucgaaaugcagaaauu

SEQ ID NO: 2649927 - RNA, 19 nt, Homo sapiens
  misc_RNA (1)...(19): siRNA sense strand
cuauugaagcauugagaau

SEQ ID NO: 2649928 - RNA, 19 nt, Homo sapiens
  misc_RNA (1)...(19): siRNA sense strand
gcaugaaauaccaagaaau

SEQ ID NO: 2649929 - RNA, 19 nt, Homo sapiens
  misc_RNA (1)...(19): siRNA sense strand
aagacagacuacaagauaa

SEQ ID NO: 2649930 - RNA, 19 nt, Homo sapiens
  misc_RNA (1)...(19): siRNA sense strand
cagaaauuguucagcugua

SEQ ID NO: 2649931 - RNA, 19 nt, Homo sapiens
  misc_RNA (1)...(19): siRNA sense strand
gaagaauuacagaggauca

SEQ ID NO: 2649932 - RNA, 19 nt, Homo sapiens
  misc_RNA (1)...(19): siRNA sense strand
acuaauagggaaagauaca

SEQ ID NO: 2649933 - RNA, 19 nt, Homo sapiens
  misc_RNA (1)...(19): siRNA sense strand
gggauaugaagauugguua

SEQ ID NO: 2649934 - RNA, 19 nt, Homo sapiens
  misc_RNA (1)...(19): siRNA sense strand
gcagcagcgggaagagaaa

SEQ ID NO: 2649935 - RNA, 19 nt, Homo sapiens
  misc_RNA (1)...(19): siRNA sense strand
gaagaaugcuggaacgagu

SEQ ID NO: 2649936 - RNA, 19 nt, Homo sapiens
  misc_RNA (1)...(19): siRNA sense strand
gauauuacuuggagccaca

SEQ ID NO: 2649937 - RNA, 19 nt, Homo sapiens
  misc_RNA (1)...(19): siRNA sense strand
uguaauagaaugccagcaa

SEQ ID NO: 2649938 - RNA, 19 nt, Homo sapiens
  misc_RNA (1)...(19): siRNA sense strand
ugggaugaaccuugguaua

SEQ ID NO: 2649939 - RNA, 19 nt, Homo sapiens
  misc_RNA (1)...(19): siRNA sense strand
ucgagaaacuauugaagca

SEQ ID NO: 2649940 - RNA, 19 nt, Homo sapiens
  misc_RNA (1)...(19): siRNA sense strand
cgaucugaaugaagagcuu

SEQ ID NO: 2649941 - RNA, 19 nt, Homo sapiens
  misc_RNA (1)...(19): siRNA sense strand
gauucagaucguaggagaa

SEQ ID NO: 2649942 - RNA, 19 nt, Homo sapiens
  misc_RNA (1)...(19): siRNA sense strand
aaucauggguaaagaagga

SEQ ID NO: 2649943 - RNA, 19 nt, Homo sapiens
  misc_RNA (1)...(19): siRNA sense strand
aaggauugguauuguguuu

SEQ ID NO: 2649944 - RNA, 19 nt, Homo sapiens
  misc_RNA (1)...(19): siRNA sense strand
uagagaaagaccugauauu

SEQ ID NO: 2649945 - RNA, 19 nt, Homo sapiens
  misc_RNA (1)...(19): siRNA sense strand
caucagagugacacaagaa

SEQ ID NO: 2649946 - RNA, 19 nt, Homo sapiens
  misc_RNA (1)...(19): siRNA sense strand
ugaagagcuuggacaggua

SEQ ID NO: 2649947 - RNA, 19 nt, Homo sapiens
  misc_RNA (1)...(19): siRNA sense strand
gagaugcaguuucgggaau

SEQ ID NO: 2649948 - RNA, 19 nt, Homo sapiens
  misc_RNA (1)...(19): siRNA sense strand
agcacuaucuugaaguaua

SEQ ID NO: 2649949 - RNA, 19 nt, Homo sapiens
  misc_RNA (1)...(19): siRNA sense strand
ggugauggucccuggcaau

SEQ ID NO: 2649950 - RNA, 19 nt, Homo sapiens
  misc_RNA (1)...(19): siRNA sense strand
augaagaaucagaucagaa

SEQ ID NO: 2649951 - RNA, 19 nt, Homo sapiens
  misc_RNA (1)...(19): siRNA sense strand
gcagcuugccagaagaauu

SEQ ID NO: 2649952 - RNA, 19 nt, Homo sapiens
  misc_RNA (1)...(19): siRNA sense strand
auggaaguuugcagaaauu

SEQ ID NO: 2649953 - RNA, 19 nt, Homo sapiens
  misc_RNA (1)...(19): siRNA sense strand
acugguacacugacagaaa

SEQ ID NO: 2649954 - RNA, 19 nt, Homo sapiens
  misc_RNA (1)...(19): siRNA sense strand
ugaagaaacuauggagguu

SEQ ID NO: 2649955 - RNA, 19 nt, Homo sapiens
  misc_RNA (1)...(19): siRNA sense strand
cugcagaaagcaaaaguaa

SEQ ID NO: 2649956 - RNA, 19 nt, Homo sapiens
  misc_RNA (1)...(19): siRNA sense strand
ggguaaagaaggaagacag

SEQ ID NO: 2649957 - RNA, 19 nt, Homo sapiens
  misc_RNA (1)...(19): siRNA sense strand
auaggaagauguaguccaa

SEQ ID NO: 2649958 - RNA, 19 nt, Homo sapiens
  misc_RNA (1)...(19): siRNA sense strand
ugcuaaaggagcugaguca

SEQ ID NO: 2649959 - RNA, 19 nt, Homo sapiens
  misc_RNA (1)...(19): siRNA sense strand
ugcaagaaacagugacuau

SEQ ID NO: 2649960 - RNA, 19 nt, Homo sapiens
  misc_RNA (1)...(19): siRNA sense strand
cugagaaaccuauaacauu

SEQ ID NO: 2649961 - RNA, 19 nt, Homo sapiens
  misc_RNA (1)...(19): siRNA sense strand
ggaaggagaagcagcgugu

SEQ ID NO: 2649962 - RNA, 19 nt, Homo sapiens
  misc_RNA (1)...(19): siRNA sense strand
uaaauguauagguggagaa

SEQ ID NO: 2649963 - RNA, 19 nt, Homo sapiens
  misc_RNA (1)...(19): siRNA sense strand
ucaaaagaguaugaggaaa

SEQ ID NO: 2649964 - RNA, 19 nt, Homo sapiens
  misc_RNA (1)...(19): siRNA sense strand
ccugagaaaccuauaacau

SEQ ID NO: 2649965 - RNA, 19 nt, Homo sapiens
  misc_RNA (1)...(19): siRNA sense strand
guauuguguuuauuggcaa

SEQ ID NO: 2649966 - RNA, 19 nt, Homo sapiens
  misc_RNA (1)...(19): siRNA sense strand
cauaggaaucauggguaaa

SEQ ID NO: 2649967 - RNA, 19 nt, Homo sapiens
  misc_RNA (1)...(19): siRNA sense strand
ugauucagaucguaggaga

SEQ ID NO: 2649968 - RNA, 19 nt, Homo sapiens
  misc_RNA (1)...(19): siRNA sense strand
ggcuaagaacucuguguau

SEQ ID NO: 2649969 - RNA, 19 nt, Homo sapiens
  misc_RNA (1)...(19): siRNA sense strand
aggaaauagauaaacgcau

SEQ ID NO: 2649970 - RNA, 19 nt, Homo sapiens
  misc_RNA (1)...(19): siRNA sense strand
ggauaaacaugaaacagcu

SEQ ID NO: 2649971 - RNA, 19 nt, Homo sapiens
  misc_RNA (1)...(19): siRNA sense strand
agacaggcugcaagaaaca

SEQ ID NO: 2649972 - RNA, 19 nt, Homo sapiens
  misc_RNA (1)...(19): siRNA sense strand
aaccagaagcagacuuaua

SEQ ID NO: 2649973 - RNA, 19 nt, Homo sapiens
  misc_RNA (1)...(19): siRNA sense strand
aagucaugcaggagagaaa

SEQ ID NO: 2649974 - RNA, 19 nt, Homo sapiens
  misc_RNA (1)...(19): siRNA sense strand
gagaauucacaguggagaa

SEQ ID NO: 2649975 - RNA, 19 nt, Homo sapiens
  misc_RNA (1)...(19): siRNA sense strand
agguaaugaaugugaagaa

SEQ ID NO: 2649976 - RNA, 19 nt, Homo sapiens
  misc_RNA (1)...(19): siRNA sense strand
augcaguaaaugugggaaa

SEQ ID NO: 2649977 - RNA, 19 nt, Homo sapiens
  misc_RNA (1)...(19): siRNA sense strand
gagaauucacgcuggagaa

SEQ ID NO: 2649978 - RNA, 19 nt, Homo sapiens
  misc_RNA (1)...(19): siRNA sense strand
guaacaaagcuuucagaca

SEQ ID NO: 2649979 - RNA, 19 nt, Homo sapiens
  misc_RNA (1)...(19): siRNA sense strand
ugggagucuuggugugaaa

SEQ ID NO: 2649980 - RNA, 19 nt, Homo sapiens
  misc_RNA (1)...(19): siRNA sense strand
augcaaugacuguggaaaa

SEQ ID NO: 2649981 - RNA, 19 nt, Homo sapiens
  misc_RNA (1)...(19): siRNA sense strand
ggaaaagagacaaugaauu

SEQ ID NO: 2649982 - RNA, 19 nt, Homo sapiens
  misc_RNA (1)...(19): siRNA sense strand
augucauguuggagaacua

SEQ ID NO: 2649983 - RNA, 19 nt, Homo sapiens
  misc_RNA (1)...(19): siRNA sense strand
aauucacacaggagagaaa

SEQ ID NO: 2649984 - RNA, 19 nt, Homo sapiens
  misc_RNA (1)...(19): siRNA sense strand
caggagaugguaauggaaa

SEQ ID NO: 2649985 - RNA, 19 nt, Homo sapiens
  misc_RNA (1)...(19): siRNA sense strand
cccuaugaauguagugaau

SEQ ID NO: 2649986 - RNA, 19 nt, Homo sapiens
  misc_RNA (1)...(19): siRNA sense strand
agggaaaugcggagaggca

SEQ ID NO: 2649987 - RNA, 19 nt, Homo sapiens
  misc_RNA (1)...(19): siRNA sense strand
ugaaucaacaucagagaau

SEQ ID NO: 2649988 - RNA, 19 nt, Homo sapiens
  misc_RNA (1)...(19): siRNA sense strand
agaaggauuuauacagaga

SEQ ID NO: 2649989 - RNA, 19 nt, Homo sapiens
  misc_RNA (1)...(19): siRNA sense strand
ccuggaaauauaaggguga

SEQ ID NO: 2649990 - RNA, 19 nt, Homo sapiens
  misc_RNA (1)...(19): siRNA sense strand
aggaaucuuugauagguaa

SEQ ID NO: 2649991 - RNA, 19 nt, Homo sapiens
  misc_RNA (1)...(19): siRNA sense strand
ggggagaaaccuuaugaaa

SEQ ID NO: 2649992 - RNA, 19 nt, Homo sapiens
  misc_RNA (1)...(19): siRNA sense strand
gggaaggccuuuagccguu

SEQ ID NO: 2649993 - RNA, 19 nt, Homo sapiens
  misc_RNA (1)...(19): siRNA sense strand
acgcauagcccuuacucua

SEQ ID NO: 2649994 - RNA, 19 nt, Homo sapiens
  misc_RNA (1)...(19): siRNA sense strand
gaugaaauaucccaggaga

SEQ ID NO: 2649995 - RNA, 19 nt, Homo sapiens
  misc_RNA (1)...(19): siRNA sense strand
gggaaaagagacaaugaau

SEQ ID NO: 2649996 - RNA, 19 nt, Homo sapiens
  misc_RNA (1)...(19): siRNA sense strand
cuucagagauguggcgcua

SEQ ID NO: 2649997 - RNA, 19 nt, Homo sapiens
  misc_RNA (1)...(19): siRNA sense strand
auuuaguaauucugggaga

SEQ ID NO: 2649998 - RNA, 19 nt, Homo sapiens
  misc_RNA (1)...(19): siRNA sense strand
aaggaaucuuugauaggua

SEQ ID NO: 2649999 - RNA, 19 nt, Homo sapiens
  misc_RNA (1)...(19): siRNA sense strand
gugcaaugaaugugggaag

SEQ ID NO: 2650000 - RNA, 19 nt, Homo sapiens
  misc_RNA (1)...(19): siRNA sense strand
guaacgaaugugggaauaa

SEQ ID NO: 2650001 - RNA, 19 nt, Homo sapiens
  misc_RNA (1)...(19): siRNA sense strand
gaauguaaggaauguaaca

SEQ ID NO: 2650002 - RNA, 19 nt, Homo sapiens
  misc_RNA (1)...(19): siRNA sense strand
auguaacgaaugugggaau

SEQ ID NO: 2650003 - RNA, 19 nt, Homo sapiens
  misc_RNA (1)...(19): siRNA sense strand
ugggaagaccuuuggcuau

SEQ ID NO: 2650004 - RNA, 19 nt, Homo sapiens
  misc_RNA (1)...(19): siRNA sense strand
ccuuagacgacaucagaga

SEQ ID NO: 2650005 - RNA, 19 nt, Homo sapiens
  misc_RNA (1)...(19): siRNA sense strand
augaaauaucccaggagau

SEQ ID NO: 2650006 - RNA, 19 nt, Homo sapiens
  misc_RNA (1)...(19): siRNA sense strand
gugacagcuguuaaggaaa

SEQ ID NO: 2650007 - RNA, 19 nt, Homo sapiens
  misc_RNA (1)...(19): siRNA sense strand
agggugaauuugagcuaca

SEQ ID NO: 2650008 - RNA, 19 nt, Homo sapiens
  misc_RNA (1)...(19): siRNA sense strand
uaagagaagucaugcagga

SEQ ID NO: 2650009 - RNA, 19 nt, Homo sapiens
  misc_RNA (1)...(19): siRNA sense strand
uuggagaacuacaggaacu

SEQ ID NO: 2650010 - RNA, 19 nt, Homo sapiens
  misc_RNA (1)...(19): siRNA sense strand
gugggaagaccuuuggcua

SEQ ID NO: 2650011 - RNA, 19 nt, Homo sapiens
  misc_RNA (1)...(19): siRNA sense strand
cagcagacgcauagcccuu

SEQ ID NO: 2650012 - RNA, 19 nt, Homo sapiens
  misc_RNA (1)...(19): siRNA sense strand
uguaacgaaugugggaaua

SEQ ID NO: 2650013 - RNA, 19 nt, Homo sapiens
  misc_RNA (1)...(19): siRNA sense strand
uuacucaaccucagagaau

SEQ ID NO: 2650014 - RNA, 19 nt, Homo sapiens
  misc_RNA (1)...(19): siRNA sense strand
cccuaugaauguaacaaau

SEQ ID NO: 2650015 - RNA, 19 nt, Homo sapiens
  misc_RNA (1)...(19): siRNA sense strand
gcuagcaagucauggccuu

SEQ ID NO: 2650016 - RNA, 19 nt, Homo sapiens
  misc_RNA (1)...(19): siRNA sense strand
acucacaacuuaaucgaca

SEQ ID NO: 2650017 - RNA, 19 nt, Homo sapiens
  misc_RNA (1)...(19): siRNA sense strand
gugggaaagccuucaguga

SEQ ID NO: 2650018 - RNA, 19 nt, Homo sapiens
  misc_RNA (1)...(19): siRNA sense strand
gugaaugugggaaggcuuu

SEQ ID NO: 2650019 - RNA, 19 nt, Homo sapiens
  misc_RNA (1)...(19): siRNA sense strand
aggagaugguaauggaaag

SEQ ID NO: 2650020 - RNA, 19 nt, Homo sapiens
  misc_RNA (1)...(19): siRNA sense strand
gugauaaauuggugggaau

SEQ ID NO: 2650021 - RNA, 19 nt, Homo sapiens
  misc_RNA (1)...(19): siRNA sense strand
acaagcaagcuguggaaua

SEQ ID NO: 2650022 - RNA, 19 nt, Homo sapiens
  misc_RNA (1)...(19): siRNA sense strand
ggaaaagaaaggagauauu

SEQ ID NO: 2650023 - RNA, 19 nt, Homo sapiens
  misc_RNA (1)...(19): siRNA sense strand
ggagagagagaguggauca

SEQ ID NO: 2650024 - RNA, 19 nt, Homo sapiens
  misc_RNA (1)...(19): siRNA sense strand
ggauuuggccaguggaaaa

SEQ ID NO: 2650025 - RNA, 19 nt, Homo sapiens
  misc_RNA (1)...(19): siRNA sense strand
ccgcuuaucuauuggaaaa

SEQ ID NO: 2650026 - RNA, 19 nt, Homo sapiens
  misc_RNA (1)...(19): siRNA sense strand
guucucauguguugggaaa

SEQ ID NO: 2650027 - RNA, 19 nt, Homo sapiens
  misc_RNA (1)...(19): siRNA sense strand
aagaaauggcugaugaaau

SEQ ID NO: 2650028 - RNA, 19 nt, Homo sapiens
  misc_RNA (1)...(19): siRNA sense strand
gggccaaacaagauggaca

SEQ ID NO: 2650029 - RNA, 19 nt, Homo sapiens
  misc_RNA (1)...(19): siRNA sense strand
ggcaaacacaagaggaauu

SEQ ID NO: 2650030 - RNA, 19 nt, Homo sapiens
  misc_RNA (1)...(19): siRNA sense strand
caaguaacaaaguaggaaa

SEQ ID NO: 2650031 - RNA, 19 nt, Homo sapiens
  misc_RNA (1)...(19): siRNA sense strand
ccaugaaggaaaagcaaaa

SEQ ID NO: 2650032 - RNA, 19 nt, Homo sapiens
  misc_RNA (1)...(19): siRNA sense strand
uggaauaucaacagcgaau

SEQ ID NO: 2650033 - RNA, 19 nt, Homo sapiens
  misc_RNA (1)...(19): siRNA sense strand
aggaaaacucagugaaaau

SEQ ID NO: 2650034 - RNA, 19 nt, Homo sapiens
  misc_RNA (1)...(19): siRNA sense strand
caaaagcaguagugggauu

SEQ ID NO: 2650035 - RNA, 19 nt, Homo sapiens
  misc_RNA (1)...(19): siRNA sense strand
aaacaagauuacugcucua

SEQ ID NO: 2650036 - RNA, 19 nt, Homo sapiens
  misc_RNA (1)...(19): siRNA sense strand
aggaaaagcaaaagcagua

SEQ ID NO: 2650037 - RNA, 19 nt, Homo sapiens
  misc_RNA (1)...(19): siRNA sense strand
aagaaugcacuguggaauu

SEQ ID NO: 2650038 - RNA, 19 nt, Homo sapiens
  misc_RNA (1)...(19): siRNA sense strand
ccaagaaauggcugaugaa

SEQ ID NO: 2650039 - RNA, 19 nt, Homo sapiens
  misc_RNA (1)...(19): siRNA sense strand
uggagugccuugagccaua

SEQ ID NO: 2650040 - RNA, 19 nt, Homo sapiens
  misc_RNA (1)...(19): siRNA sense strand
guacaagagacgccaagaa

SEQ ID NO: 2650041 - RNA, 19 nt, Homo sapiens
  misc_RNA (1)...(19): siRNA sense strand
caaagaaugcacuguggaa

SEQ ID NO: 2650042 - RNA, 19 nt, Homo sapiens
  misc_RNA (1)...(19): siRNA sense strand
gugagaauucaguggccaa

SEQ ID NO: 2650043 - RNA, 19 nt, Homo sapiens
  misc_RNA (1)...(19): siRNA sense strand
uagagagacuacaaagcaa

SEQ ID NO: 2650044 - RNA, 19 nt, Homo sapiens
  misc_RNA (1)...(19): siRNA sense strand
ggcagaaagcaauggauca

SEQ ID NO: 2650045 - RNA, 19 nt, Homo sapiens
  misc_RNA (1)...(19): siRNA sense strand
cuguggaauuugagggcca

SEQ ID NO: 2650046 - RNA, 19 nt, Homo sapiens
  misc_RNA (1)...(19): siRNA sense strand
gcaugugauugaucggcaa

SEQ ID NO: 2650047 - RNA, 19 nt, Homo sapiens
  misc_RNA (1)...(19): siRNA sense strand
caauaagcuccuuguauau

SEQ ID NO: 2650048 - RNA, 19 nt, Homo sapiens
  misc_RNA (1)...(19): siRNA sense strand
gaggagaagcagucuguau

SEQ ID NO: 2650049 - RNA, 19 nt, Homo sapiens
  misc_RNA (1)...(19): siRNA sense strand
ggacauauugaaacgguca

SEQ ID NO: 2650050 - RNA, 19 nt, Homo sapiens
  misc_RNA (1)...(19): siRNA sense strand
aggaaaacuuggagaaauc

SEQ ID NO: 2650051 - RNA, 19 nt, Homo sapiens
  misc_RNA (1)...(19): siRNA sense strand
cuauauguuugcagcagua

SEQ ID NO: 2650052 - RNA, 19 nt, Homo sapiens
  misc_RNA (1)...(19): siRNA sense strand
ggagugagaaccugugaau

SEQ ID NO: 2650053 - RNA, 19 nt, Homo sapiens
  misc_RNA (1)...(19): siRNA sense strand
augaaagagaacaccaaua

SEQ ID NO: 2650054 - RNA, 19 nt, Homo sapiens
  misc_RNA (1)...(19): siRNA sense strand
cauugaaggauguugaaga

SEQ ID NO: 2650055 - RNA, 19 nt, Homo sapiens
  misc_RNA (1)...(19): siRNA sense strand
ucggcaaacacaagaggaa

SEQ ID NO: 2650056 - RNA, 19 nt, Homo sapiens
  misc_RNA (1)...(19): siRNA sense strand
ccaguaagcgaaaggcuau

SEQ ID NO: 2650057 - RNA, 19 nt, Homo sapiens
  misc_RNA (1)...(19): siRNA sense strand
agagagacuacaaagcaaa

SEQ ID NO: 2650058 - RNA, 19 nt, Homo sapiens
  misc_RNA (1)...(19): siRNA sense strand
guaugaaagagaacaccaa

SEQ ID NO: 2650059 - RNA, 19 nt, Homo sapiens
  misc_RNA (1)...(19): siRNA sense strand
auucuaagccugaguugaa

SEQ ID NO: 2650060 - RNA, 19 nt, Homo sapiens
  misc_RNA (1)...(19): siRNA sense strand
gccaguaagcgaaaggcua

SEQ ID NO: 2650061 - RNA, 19 nt, Homo sapiens
  misc_RNA (1)...(19): siRNA sense strand
cgagcgaagaagagcugaa

SEQ ID NO: 2650062 - RNA, 19 nt, Homo sapiens
  misc_RNA (1)...(19): siRNA sense strand
guaggaaaacucagugaaa

SEQ ID NO: 2650063 - RNA, 19 nt, Homo sapiens
  misc_RNA (1)...(19): siRNA sense strand
cagaucaccaugugggauu

SEQ ID NO: 2650064 - RNA, 19 nt, Homo sapiens
  misc_RNA (1)...(19): siRNA sense strand
ggccaaacaagauggacau

SEQ ID NO: 2650065 - RNA, 19 nt, Homo sapiens
  misc_RNA (1)...(19): siRNA sense strand
agugagaaccugugaaucu

SEQ ID NO: 2650066 - RNA, 19 nt, Homo sapiens
  misc_RNA (1)...(19): siRNA sense strand
gaucaauaacagaugcuca

SEQ ID NO: 2650067 - RNA, 19 nt, Homo sapiens
  misc_RNA (1)...(19): siRNA sense strand
gcguagagaaguugcaugu

SEQ ID NO: 2650068 - RNA, 19 nt, Homo sapiens
  misc_RNA (1)...(19): siRNA sense strand
agaaguugcaugugauuga

SEQ ID NO: 2650069 - RNA, 19 nt, Homo sapiens
  misc_RNA (1)...(19): siRNA sense strand
aagaggaauuggagacagu

SEQ ID NO: 2650070 - RNA, 19 nt, Homo sapiens
  misc_RNA (1)...(19): siRNA sense strand
gcauacuaaaugagacuga

SEQ ID NO: 2650071 - RNA, 19 nt, Homo sapiens
  misc_RNA (1)...(19): siRNA sense strand
uggaaaacuucuaagauca

SEQ ID NO: 2650072 - RNA, 19 nt, Homo sapiens
  misc_RNA (1)...(19): siRNA sense strand
uuguguaaccugagagcuu

SEQ ID NO: 2650073 - RNA, 19 nt, Homo sapiens
  misc_RNA (1)...(19): siRNA sense strand
aagcugaguucuaucaaau

SEQ ID NO: 2650074 - RNA, 19 nt, Homo sapiens
  misc_RNA (1)...(19): siRNA sense strand
ugaaaauaccaaagaggau

SEQ ID NO: 2650075 - RNA, 19 nt, Homo sapiens
  misc_RNA (1)...(19): siRNA sense strand
gcucugaagucuuugacca

SEQ ID NO: 2650076 - RNA, 19 nt, Homo sapiens
  misc_RNA (1)...(19): siRNA sense strand
ggaagaagaaauuaccuga

SEQ ID NO: 2650077 - RNA, 19 nt, Homo sapiens
  misc_RNA (1)...(19): siRNA sense strand
gagagugaugggagugaga

SEQ ID NO: 2650078 - RNA, 19 nt, Homo sapiens
  misc_RNA (1)...(19): siRNA sense strand
ggaaaaugaaccagaccau

SEQ ID NO: 2650079 - RNA, 19 nt, Homo sapiens
  misc_RNA (1)...(19): siRNA sense strand
ggugacaggaccaacuuaa

SEQ ID NO: 2650080 - RNA, 19 nt, Homo sapiens
  misc_RNA (1)...(19): siRNA sense strand
ugauccaacucuugcaauu

SEQ ID NO: 2650081 - RNA, 19 nt, Homo sapiens
  misc_RNA (1)...(19): siRNA sense strand
gaugacaaggaguuugaua

SEQ ID NO: 2650082 - RNA, 19 nt, Homo sapiens
  misc_RNA (1)...(19): siRNA sense strand
cagaggagauguuguucau

SEQ ID NO: 2650083 - RNA, 19 nt, Homo sapiens
  misc_RNA (1)...(19): siRNA sense strand
cagaaguucagcuggucua

SEQ ID NO: 2650084 - RNA, 19 nt, Homo sapiens
  misc_RNA (1)...(19): siRNA sense strand
gcagaaagcaauggaucau

SEQ ID NO: 2650085 - RNA, 19 nt, Homo sapiens
  misc_RNA (1)...(19): siRNA sense strand
agacugaugaugaagauga

SEQ ID NO: 2650086 - RNA, 19 nt, Homo sapiens
  misc_RNA (1)...(19): siRNA sense strand
gggugaagucugcuguauu

SEQ ID NO: 2650087 - RNA, 19 nt, Homo sapiens
  misc_RNA (1)...(19): siRNA sense strand
auugaaggauguugaagau

SEQ ID NO: 2650088 - RNA, 19 nt, Homo sapiens
  misc_RNA (1)...(19): siRNA sense strand
aggauuacuucgugggcaa

SEQ ID NO: 2650089 - RNA, 19 nt, Homo sapiens
  misc_RNA (1)...(19): siRNA sense strand
gggagaagcuggaagacca

SEQ ID NO: 2650090 - RNA, 19 nt, Homo sapiens
  misc_RNA (1)...(19): siRNA sense strand
gugcagagacugaagguga

SEQ ID NO: 2650091 - RNA, 19 nt, Homo sapiens
  misc_RNA (1)...(19): siRNA sense strand
gggagauagugcagagacu

SEQ ID NO: 2650092 - RNA, 19 nt, Homo sapiens
  misc_RNA (1)...(19): siRNA sense strand
gagcagagcuucuucgaca

SEQ ID NO: 2650093 - RNA, 19 nt, Homo sapiens
  misc_RNA (1)...(19): siRNA sense strand
agaagaaggaaaagacaaa

SEQ ID NO: 2650094 - RNA, 19 nt, Homo sapiens
  misc_RNA (1)...(19): siRNA sense strand
ccuccaagaagaaggaaaa

SEQ ID NO: 2650095 - RNA, 19 nt, Homo sapiens
  misc_RNA (1)...(19): siRNA sense strand
gaccuaaacugcaaggaga

SEQ ID NO: 2650096 - RNA, 19 nt, Homo sapiens
  misc_RNA (1)...(19): siRNA sense strand
ccaucgacgugcagggcau

SEQ ID NO: 2650097 - RNA, 19 nt, Homo sapiens
  misc_RNA (1)...(19): siRNA sense strand
ccgaggaggagauguacaa

SEQ ID NO: 2650098 - RNA, 19 nt, Homo sapiens
  misc_RNA (1)...(19): siRNA sense strand
guggaggacauaagggaga

SEQ ID NO: 2650099 - RNA, 19 nt, Homo sapiens
  misc_RNA (1)...(19): siRNA sense strand
cggccaccuacgugagaua

SEQ ID NO: 2650100 - RNA, 19 nt, Homo sapiens
  misc_RNA (1)...(19): siRNA sense strand
acacgauguaccaggacua

SEQ ID NO: 2650101 - RNA, 19 nt, Homo sapiens
  misc_RNA (1)...(19): siRNA sense strand
agacggagcaggaaagcau

SEQ ID NO: 2650102 - RNA, 19 nt, Homo sapiens
  misc_RNA (1)...(19): siRNA sense strand
ggguggaaaucgacugcau

SEQ ID NO: 2650103 - RNA, 19 nt, Homo sapiens
  misc_RNA (1)...(19): siRNA sense strand
aggagaacuuggagcagga

SEQ ID NO: 2650104 - RNA, 19 nt, Homo sapiens
  misc_RNA (1)...(19): siRNA sense strand
ccaaagaagcagguggaca

SEQ ID NO: 2650105 - RNA, 19 nt, Homo sapiens
  misc_RNA (1)...(19): siRNA sense strand
aggacaagguggugcucca

SEQ ID NO: 2650106 - RNA, 19 nt, Homo sapiens
  misc_RNA (1)...(19): siRNA sense strand
caaagaagcagguggacac

SEQ ID NO: 2650107 - RNA, 19 nt, Homo sapiens
  misc_RNA (1)...(19): siRNA sense strand
ccagagcaggagagagaca

SEQ ID NO: 2650108 - RNA, 19 nt, Homo sapiens
  misc_RNA (1)...(19): siRNA sense strand
cccaagacggagcaggaaa

SEQ ID NO: 2650109 - RNA, 19 nt, Homo sapiens
  misc_RNA (1)...(19): siRNA sense strand
gcugggagacgguggacau

SEQ ID NO: 2650110 - RNA, 19 nt, Homo sapiens
  misc_RNA (1)...(19): siRNA sense strand
uggaagaccacaaggagca

SEQ ID NO: 2650111 - RNA, 19 nt, Homo sapiens
  misc_RNA (1)...(19): siRNA sense strand
gcggcuuucccgagaagaa

SEQ ID NO: 2650112 - RNA, 19 nt, Homo sapiens
  misc_RNA (1)...(19): siRNA sense strand
ggaagcacaaggugggcau

SEQ ID NO: 2650113 - RNA, 19 nt, Homo sapiens
  misc_RNA (1)...(19): siRNA sense strand
cugugaagguggucaucau

SEQ ID NO: 2650114 - RNA, 19 nt, Homo sapiens
  misc_RNA (1)...(19): siRNA sense strand
cagaaggagaagcaggaca

SEQ ID NO: 2650115 - RNA, 19 nt, Homo sapiens
  misc_RNA (1)...(19): siRNA sense strand
ccacggaagaacuacaaau

SEQ ID NO: 2650116 - RNA, 19 nt, Homo sapiens
  misc_RNA (1)...(19): siRNA sense strand
uggaggugaugcugaaaca

SEQ ID NO: 2650117 - RNA, 19 nt, Homo sapiens
  misc_RNA (1)...(19): siRNA sense strand
ccgacaaguuccacaccau

SEQ ID NO: 2650118 - RNA, 19 nt, Homo sapiens
  misc_RNA (1)...(19): siRNA sense strand
gagacuucuugcuggccaa

SEQ ID NO: 2650119 - RNA, 19 nt, Homo sapiens
  misc_RNA (1)...(19): siRNA sense strand
ccaaugaguuuguggugcu

SEQ ID NO: 2650120 - RNA, 19 nt, Homo sapiens
  misc_RNA (1)...(19): siRNA sense strand
gagaucuucugcagggaga

SEQ ID NO: 2650121 - RNA, 19 nt, Homo sapiens
  misc_RNA (1)...(19): siRNA sense strand
acuucgacgugcagagcau

SEQ ID NO: 2650122 - RNA, 19 nt, Homo sapiens
  misc_RNA (1)...(19): siRNA sense strand
ccagaaagguacacggcug

SEQ ID NO: 2650123 - RNA, 19 nt, Homo sapiens
  misc_RNA (1)...(19): siRNA sense strand
caacaggguggaagagaac

SEQ ID NO: 2650124 - RNA, 19 nt, Homo sapiens
  misc_RNA (1)...(19): siRNA sense strand
accuaaacugcaaggagaa

SEQ ID NO: 2650125 - RNA, 19 nt, Homo sapiens
  misc_RNA (1)...(19): siRNA sense strand
ucgaggaugaccugaagaa

SEQ ID NO: 2650126 - RNA, 19 nt, Homo sapiens
  misc_RNA (1)...(19): siRNA sense strand
cagccaaggcauacgaagu

SEQ ID NO: 2650127 - RNA, 19 nt, Homo sapiens
  misc_RNA (1)...(19): siRNA sense strand
aagaagaaggaaaagacaa

SEQ ID NO: 2650128 - RNA, 19 nt, Homo sapiens
  misc_RNA (1)...(19): siRNA sense strand
ggaggacauaagggagaua

SEQ ID NO: 2650129 - RNA, 19 nt, Homo sapiens
  misc_RNA (1)...(19): siRNA sense strand
aggcauacgaagugcaaag

SEQ ID NO: 2650130 - RNA, 19 nt, Homo sapiens
  misc_RNA (1)...(19): siRNA sense strand
ggugauuaacgcugagaac

SEQ ID NO: 2650131 - RNA, 19 nt, Homo sapiens
  misc_RNA (1)...(19): siRNA sense strand
agucauuccagcagcaaca

SEQ ID NO: 2650132 - RNA, 19 nt, Homo sapiens
  misc_RNA (1)...(19): siRNA sense strand
gggugugucagaagagcuu

SEQ ID NO: 2650133 - RNA, 19 nt, Homo sapiens
  misc_RNA (1)...(19): siRNA sense strand
gcaucgagcauguggaccu

SEQ ID NO: 2650134 - RNA, 19 nt, Homo sapiens
  misc_RNA (1)...(19): siRNA sense strand
cugcccagcuggacgucaa

SEQ ID NO: 2650135 - RNA, 19 nt, Homo sapiens
  misc_RNA (1)...(19): siRNA sense strand
aggagagagacacgggaca

SEQ ID NO: 2650136 - RNA, 19 nt, Homo sapiens
  misc_RNA (1)...(19): siRNA sense strand
uguaccagcuggaggugau

SEQ ID NO: 2650137 - RNA, 19 nt, Homo sapiens
  misc_RNA (1)...(19): siRNA sense strand
ggagcauacagaacggaca

SEQ ID NO: 2650138 - RNA, 19 nt, Homo sapiens
  misc_RNA (1)...(19): siRNA sense strand
cuucgugggcaaagaacau

SEQ ID NO: 2650139 - RNA, 19 nt, Homo sapiens
  misc_RNA (1)...(19): siRNA sense strand
aggaguaucucaaggaccu

SEQ ID NO: 2650140 - RNA, 19 nt, Homo sapiens
  misc_RNA (1)...(19): siRNA sense strand
gcaagaaggagaagggcaa

SEQ ID NO: 2650141 - RNA, 19 nt, Homo sapiens
  misc_RNA (1)...(19): siRNA sense strand
agaagaaggagaagggcaa

SEQ ID NO: 2650142 - RNA, 19 nt, Homo sapiens
  misc_RNA (1)...(19): siRNA sense strand
gagaagggcaagaaggaga

SEQ ID NO: 2650143 - RNA, 19 nt, Homo sapiens
  misc_RNA (1)...(19): siRNA sense strand
aagugaagaagaaggagaa

SEQ ID NO: 2650144 - RNA, 19 nt, Homo sapiens
  misc_RNA (1)...(19): siRNA sense strand
aggagaagggcaagaagga

SEQ ID NO: 2650145 - RNA, 19 nt, Homo sapiens
  misc_RNA (1)...(19): siRNA sense strand
aaagugaagaagaaggaga

SEQ ID NO: 2650146 - RNA, 19 nt, Homo sapiens
  misc_RNA (1)...(19): siRNA sense strand
aagaagaaggagaagggca

SEQ ID NO: 2650147 - RNA, 19 nt, Homo sapiens
  misc_RNA (1)...(19): siRNA sense strand
ggcaagaaggagaagggca

SEQ ID NO: 2650148 - RNA, 19 nt, Homo sapiens
  misc_RNA (1)...(19): siRNA sense strand
agaagggcaagaaggagaa

SEQ ID NO: 2650149 - RNA, 19 nt, Homo sapiens
  misc_RNA (1)...(19): siRNA sense strand
aaggagaagggcaagaaga

SEQ ID NO: 2650150 - RNA, 19 nt, Homo sapiens
  misc_RNA (1)...(19): siRNA sense strand
cagaagagggccugguaaa

SEQ ID NO: 2650151 - RNA, 19 nt, Homo sapiens
  misc_RNA (1)...(19): siRNA sense strand
gguaaagggacacgcguau

SEQ ID NO: 2650152 - RNA, 19 nt, Homo sapiens
  misc_RNA (1)...(19): siRNA sense strand
gcugaaaccuucuggacca

SEQ ID NO: 2650153 - RNA, 19 nt, Homo sapiens
  misc_RNA (1)...(19): siRNA sense strand
ggauggacgucguggugga

SEQ ID NO: 2650154 - RNA, 19 nt, Homo sapiens
  misc_RNA (1)...(19): siRNA sense strand
aggaggaugacgaggauga

SEQ ID NO: 2650155 - RNA, 19 nt, Homo sapiens
  misc_RNA (1)...(19): siRNA sense strand
uggagaaggccuacgccaa

SEQ ID NO: 2650156 - RNA, 19 nt, Homo sapiens
  misc_RNA (1)...(19): siRNA sense strand
ggccagagcuaugaggcaa

SEQ ID NO: 2650157 - RNA, 19 nt, Homo sapiens
  misc_RNA (1)...(19): siRNA sense strand
ucaacaaguucgaugagga

SEQ ID NO: 2650158 - RNA, 19 nt, Homo sapiens
  misc_RNA (1)...(19): siRNA sense strand
gagccaagggccucacuua

SEQ ID NO: 2650159 - RNA, 19 nt, Homo sapiens
  misc_RNA (1)...(19): siRNA sense strand
uggcuggagaggaggaaga

SEQ ID NO: 2650160 - RNA, 19 nt, Homo sapiens
  misc_RNA (1)...(19): siRNA sense strand
gugcucuaucugagacaaa

SEQ ID NO: 2650161 - RNA, 19 nt, Homo sapiens
  misc_RNA (1)...(19): siRNA sense strand
ccaaaggcgugaaauggau

SEQ ID NO: 2650162 - RNA, 19 nt, Homo sapiens
  misc_RNA (1)...(19): siRNA sense strand
ggaugacgaggaugaggaa

SEQ ID NO: 2650163 - RNA, 19 nt, Homo sapiens
  misc_RNA (1)...(19): siRNA sense strand
ggauggagcugcgggacuu

SEQ ID NO: 2650164 - RNA, 19 nt, Homo sapiens
  misc_RNA (1)...(19): siRNA sense strand
guguggacuucgagcgguu

SEQ ID NO: 2650165 - RNA, 19 nt, Homo sapiens
  misc_RNA (1)...(19): siRNA sense strand
gggccagagcuaugaggca

SEQ ID NO: 2650166 - RNA, 19 nt, Homo sapiens
  misc_RNA (1)...(19): siRNA sense strand
ugguaaagggacacgcgua

SEQ ID NO: 2650167 - RNA, 19 nt, Homo sapiens
  misc_RNA (1)...(19): siRNA sense strand
cugcugggccucugggauu

SEQ ID NO: 2650168 - RNA, 19 nt, Homo sapiens
  misc_RNA (1)...(19): siRNA sense strand
uggacgucgugguggauga

SEQ ID NO: 2650169 - RNA, 19 nt, Homo sapiens
  misc_RNA (1)...(19): siRNA sense strand
acaagguguuccugggcuu

SEQ ID NO: 2650170 - RNA, 19 nt, Homo sapiens
  misc_RNA (1)...(19): siRNA sense strand
cggagaaggccaaaggcgu

SEQ ID NO: 2650171 - RNA, 19 nt, Homo sapiens
  misc_RNA (1)...(19): siRNA sense strand
cuggagaggaggaagaacu

SEQ ID NO: 2650172 - RNA, 19 nt, Homo sapiens
  misc_RNA (1)...(19): siRNA sense strand
ccucucagcuccaggccuu

SEQ ID NO: 2650173 - RNA, 19 nt, Homo sapiens
  misc_RNA (1)...(19): siRNA sense strand
aggccaaaggcgugaaaug

SEQ ID NO: 2650174 - RNA, 19 nt, Homo sapiens
  misc_RNA (1)...(19): siRNA sense strand
acagaagagggccugguaa

SEQ ID NO: 2650175 - RNA, 19 nt, Homo sapiens
  misc_RNA (1)...(19): siRNA sense strand
gauugaaggaagagacaaa

SEQ ID NO: 2650176 - RNA, 19 nt, Homo sapiens
  misc_RNA (1)...(19): siRNA sense strand
agaaugagauggagauauu

SEQ ID NO: 2650177 - RNA, 19 nt, Homo sapiens
  misc_RNA (1)...(19): siRNA sense strand
caaugaaggagaagagaau

SEQ ID NO: 2650178 - RNA, 19 nt, Homo sapiens
  misc_RNA (1)...(19): siRNA sense strand
ugauaaaggcagagaagga

SEQ ID NO: 2650179 - RNA, 19 nt, Homo sapiens
  misc_RNA (1)...(19): siRNA sense strand
cguuaguagaagagaagaa

SEQ ID NO: 2650180 - RNA, 19 nt, Homo sapiens
  misc_RNA (1)...(19): siRNA sense strand
ggaacuacuuagaaggaca

SEQ ID NO: 2650181 - RNA, 19 nt, Homo sapiens
  misc_RNA (1)...(19): siRNA sense strand
gcaucaaagugcagaaaau

SEQ ID NO: 2650182 - RNA, 19 nt, Homo sapiens
  misc_RNA (1)...(19): siRNA sense strand
agugaagacuauaaggaau

SEQ ID NO: 2650183 - RNA, 19 nt, Homo sapiens
  misc_RNA (1)...(19): siRNA sense strand
caggagauuaggagguuaa

SEQ ID NO: 2650184 - RNA, 19 nt, Homo sapiens
  misc_RNA (1)...(19): siRNA sense strand
ugccaaagauauugaucaa

SEQ ID NO: 2650185 - RNA, 19 nt, Homo sapiens
  misc_RNA (1)...(19): siRNA sense strand
gagaagagaaugagaugga

SEQ ID NO: 2650186 - RNA, 19 nt, Homo sapiens
  misc_RNA (1)...(19): siRNA sense strand
cauaagaaagccagaccua

SEQ ID NO: 2650187 - RNA, 19 nt, Homo sapiens
  misc_RNA (1)...(19): siRNA sense strand
uaguagaagagaagaaaca

SEQ ID NO: 2650188 - RNA, 19 nt, Homo sapiens
  misc_RNA (1)...(19): siRNA sense strand
cagaggaggcugaagaaga

SEQ ID NO: 2650189 - RNA, 19 nt, Homo sapiens
  misc_RNA (1)...(19): siRNA sense strand
caagagaagaacaggagau

SEQ ID NO: 2650190 - RNA, 19 nt, Homo sapiens
  misc_RNA (1)...(19): siRNA sense strand
gaagagaaugagauggaga

SEQ ID NO: 2650191 - RNA, 19 nt, Homo sapiens
  misc_RNA (1)...(19): siRNA sense strand
acucaaggcugccggaaaa

SEQ ID NO: 2650192 - RNA, 19 nt, Homo sapiens
  misc_RNA (1)...(19): siRNA sense strand
augaaggagaagagaauga

SEQ ID NO: 2650193 - RNA, 19 nt, Homo sapiens
  misc_RNA (1)...(19): siRNA sense strand
agauggagauauuuggcua

SEQ ID NO: 2650194 - RNA, 19 nt, Homo sapiens
  misc_RNA (1)...(19): siRNA sense strand
ccuacaagaagcuggaaaa

SEQ ID NO: 2650195 - RNA, 19 nt, Homo sapiens
  misc_RNA (1)...(19): siRNA sense strand
gaacaaagugcuaaugcca

SEQ ID NO: 2650196 - RNA, 19 nt, Homo sapiens
  misc_RNA (1)...(19): siRNA sense strand
agggagaccuugugagauc

SEQ ID NO: 2650197 - RNA, 19 nt, Homo sapiens
  misc_RNA (1)...(19): siRNA sense strand
ucaaugaaggagaagagaa

SEQ ID NO: 2650198 - RNA, 19 nt, Homo sapiens
  misc_RNA (1)...(19): siRNA sense strand
acccuaagccagugaauuu

SEQ ID NO: 2650199 - RNA, 19 nt, Homo sapiens
  misc_RNA (1)...(19): siRNA sense strand
aguuaaaccuugucugcuu

SEQ ID NO: 2650200 - RNA, 19 nt, Homo sapiens
  misc_RNA (1)...(19): siRNA sense strand
guaguuaagcccugcagaa

SEQ ID NO: 2650201 - RNA, 19 nt, Homo sapiens
  misc_RNA (1)...(19): siRNA sense strand
aggcugaagaagagaggca

SEQ ID NO: 2650202 - RNA, 19 nt, Homo sapiens
  misc_RNA (1)...(19): siRNA sense strand
guagaagagaagaaacaca

SEQ ID NO: 2650203 - RNA, 19 nt, Homo sapiens
  misc_RNA (1)...(19): siRNA sense strand
gggacgauuuccacaucaa

SEQ ID NO: 2650204 - RNA, 19 nt, Homo sapiens
  misc_RNA (1)...(19): siRNA sense strand
gacucaaggcugccggaaa

SEQ ID NO: 2650205 - RNA, 19 nt, Homo sapiens
  misc_RNA (1)...(19): siRNA sense strand
cagccuacugccaaagaua

SEQ ID NO: 2650206 - RNA, 19 nt, Homo sapiens
  misc_RNA (1)...(19): siRNA sense strand
gaagccaccaccugggaaa

SEQ ID NO: 2650207 - RNA, 19 nt, Homo sapiens
  misc_RNA (1)...(19): siRNA sense strand
agagaaugagauggagaua

SEQ ID NO: 2650208 - RNA, 19 nt, Homo sapiens
  misc_RNA (1)...(19): siRNA sense strand
gagaaucgauugaaggaag

SEQ ID NO: 2650209 - RNA, 19 nt, Homo sapiens
  misc_RNA (1)...(19): siRNA sense strand
gaacaggagauuaggaggu

SEQ ID NO: 2650210 - RNA, 19 nt, Homo sapiens
  misc_RNA (1)...(19): siRNA sense strand
ucaucaaggagguucuaaa

SEQ ID NO: 2650211 - RNA, 19 nt, Homo sapiens
  misc_RNA (1)...(19): siRNA sense strand
agaaucgauugaaggaaga

SEQ ID NO: 2650212 - RNA, 19 nt, Homo sapiens
  misc_RNA (1)...(19): siRNA sense strand
aggcaugcugacaggagaa

SEQ ID NO: 2650213 - RNA, 19 nt, Homo sapiens
  misc_RNA (1)...(19): siRNA sense strand
aaauagagccauaagaaag

SEQ ID NO: 2650214 - RNA, 19 nt, Homo sapiens
  misc_RNA (1)...(19): siRNA sense strand
uguugaaguuacaccaauu

SEQ ID NO: 2650215 - RNA, 19 nt, Homo sapiens
  misc_RNA (1)...(19): siRNA sense strand
gagaaugagauggagauau

SEQ ID NO: 2650216 - RNA, 19 nt, Homo sapiens
  misc_RNA (1)...(19): siRNA sense strand
gcucaaugaaggagaagag

SEQ ID NO: 2650217 - RNA, 19 nt, Homo sapiens
  misc_RNA (1)...(19): siRNA sense strand
ccguuacccaagauggaua

SEQ ID NO: 2650218 - RNA, 19 nt, Homo sapiens
  misc_RNA (1)...(19): siRNA sense strand
ggucccaguggaaggaauu

SEQ ID NO: 2650219 - RNA, 19 nt, Homo sapiens
  misc_RNA (1)...(19): siRNA sense strand
gagucauagcacuggccua

SEQ ID NO: 2650220 - RNA, 19 nt, Homo sapiens
  misc_RNA (1)...(19): siRNA sense strand
gccuacaagaagcuggaaa

SEQ ID NO: 2650221 - RNA, 19 nt, Homo sapiens
  misc_RNA (1)...(19): siRNA sense strand
gagggagacgguagaauca

SEQ ID NO: 2650222 - RNA, 19 nt, Homo sapiens
  misc_RNA (1)...(19): siRNA sense strand
uguaugggaaucaggacaa

SEQ ID NO: 2650223 - RNA, 19 nt, Homo sapiens
  misc_RNA (1)...(19): siRNA sense strand
agagugaagcggauuacaa

SEQ ID NO: 2650224 - RNA, 19 nt, Homo sapiens
  misc_RNA (1)...(19): siRNA sense strand
cagagguuauccaggccaa

SEQ ID NO: 2650225 - RNA, 19 nt, Homo sapiens
  misc_RNA (1)...(19): siRNA sense strand
cagccaggucccaguggaa

SEQ ID NO: 2650226 - RNA, 19 nt, Homo sapiens
  misc_RNA (1)...(19): siRNA sense strand
cugccaagauacaucaaaa

SEQ ID NO: 2650227 - RNA, 19 nt, Homo sapiens
  misc_RNA (1)...(19): siRNA sense strand
agagaagaacaggagauua

SEQ ID NO: 2650228 - RNA, 19 nt, Homo sapiens
  misc_RNA (1)...(19): siRNA sense strand
uaggaauggcuuucaggaa

SEQ ID NO: 2650229 - RNA, 19 nt, Homo sapiens
  misc_RNA (1)...(19): siRNA sense strand
guuaguagaagagaagaaa

SEQ ID NO: 2650230 - RNA, 19 nt, Homo sapiens
  misc_RNA (1)...(19): siRNA sense strand
augggaaucaggacaauua

SEQ ID NO: 2650231 - RNA, 19 nt, Homo sapiens
  misc_RNA (1)...(19): siRNA sense strand
cagagaaggaaguuaccau

SEQ ID NO: 2650232 - RNA, 19 nt, Homo sapiens
  misc_RNA (1)...(19): siRNA sense strand
gguuaauaugugggccuaa

SEQ ID NO: 2650233 - RNA, 19 nt, Homo sapiens
  misc_RNA (1)...(19): siRNA sense strand
cagagaggguggccagcuu

SEQ ID NO: 2650234 - RNA, 19 nt, Homo sapiens
  misc_RNA (1)...(19): siRNA sense strand
agaaggacaguuccagaaa

SEQ ID NO: 2650235 - RNA, 19 nt, Homo sapiens
  misc_RNA (1)...(19): siRNA sense strand
ugacaagagaagaacagga

SEQ ID NO: 2650236 - RNA, 19 nt, Homo sapiens
  misc_RNA (1)...(19): siRNA sense strand
gcugacaggagaaaguauu

SEQ ID NO: 2650237 - RNA, 19 nt, Homo sapiens
  misc_RNA (1)...(19): siRNA sense strand
gcccagaggaggcugaaga

SEQ ID NO: 2650238 - RNA, 19 nt, Homo sapiens
  misc_RNA (1)...(19): siRNA sense strand
acguauguggacaguuaaa

SEQ ID NO: 2650239 - RNA, 19 nt, Homo sapiens
  misc_RNA (1)...(19): siRNA sense strand
agucauuguccaagagaug

SEQ ID NO: 2650240 - RNA, 19 nt, Homo sapiens
  misc_RNA (1)...(19): siRNA sense strand
gcaucuauaucuuggacgu

SEQ ID NO: 2650241 - RNA, 19 nt, Homo sapiens
  misc_RNA (1)...(19): siRNA sense strand
gauugaaggaagagacaaa

SEQ ID NO: 2650242 - RNA, 19 nt, Homo sapiens
  misc_RNA (1)...(19): siRNA sense strand
agaaugagauggagauauu

SEQ ID NO: 2650243 - RNA, 19 nt, Homo sapiens
  misc_RNA (1)...(19): siRNA sense strand
caaugaaggagaagagaau

SEQ ID NO: 2650244 - RNA, 19 nt, Homo sapiens
  misc_RNA (1)...(19): siRNA sense strand
ugauaaaggcagagaagga

SEQ ID NO: 2650245 - RNA, 19 nt, Homo sapiens
  misc_RNA (1)...(19): siRNA sense strand
cguuaguagaagagaagaa

SEQ ID NO: 2650246 - RNA, 19 nt, Homo sapiens
  misc_RNA (1)...(19): siRNA sense strand
ggaacuacuuagaaggaca

SEQ ID NO: 2650247 - RNA, 19 nt, Homo sapiens
  misc_RNA (1)...(19): siRNA sense strand
gcaucaaagugcagaaaau

SEQ ID NO: 2650248 - RNA, 19 nt, Homo sapiens
  misc_RNA (1)...(19): siRNA sense strand
agugaagacuauaaggaau

SEQ ID NO: 2650249 - RNA, 19 nt, Homo sapiens
  misc_RNA (1)...(19): siRNA sense strand
caggagauuaggagguuaa

SEQ ID NO: 2650250 - RNA, 19 nt, Homo sapiens
  misc_RNA (1)...(19): siRNA sense strand
ugccaaagauauugaucaa

SEQ ID NO: 2650251 - RNA, 19 nt, Homo sapiens
  misc_RNA (1)...(19): siRNA sense strand
gagaagagaaugagaugga

SEQ ID NO: 2650252 - RNA, 19 nt, Homo sapiens
  misc_RNA (1)...(19): siRNA sense strand
cauaagaaagccagaccua

SEQ ID NO: 2650253 - RNA, 19 nt, Homo sapiens
  misc_RNA (1)...(19): siRNA sense strand
uaguagaagagaagaaaca

SEQ ID NO: 2650254 - RNA, 19 nt, Homo sapiens
  misc_RNA (1)...(19): siRNA sense strand
cagaggaggcugaagaaga

SEQ ID NO: 2650255 - RNA, 19 nt, Homo sapiens
  misc_RNA (1)...(19): siRNA sense strand
caagagaagaacaggagau

SEQ ID NO: 2650256 - RNA, 19 nt, Homo sapiens
  misc_RNA (1)...(19): siRNA sense strand
gaagagaaugagauggaga

SEQ ID NO: 2650257 - RNA, 19 nt, Homo sapiens
  misc_RNA (1)...(19): siRNA sense strand
acucaaggcugccggaaaa

SEQ ID NO: 2650258 - RNA, 19 nt, Homo sapiens
  misc_RNA (1)...(19): siRNA sense strand
augaaggagaagagaauga

SEQ ID NO: 2650259 - RNA, 19 nt, Homo sapiens
  misc_RNA (1)...(19): siRNA sense strand
agauggagauauuuggcua

SEQ ID NO: 2650260 - RNA, 19 nt, Homo sapiens
  misc_RNA (1)...(19): siRNA sense strand
ccuacaagaagcuggaaaa

SEQ ID NO: 2650261 - RNA, 19 nt, Homo sapiens
  misc_RNA (1)...(19): siRNA sense strand
gaacaaagugcuaaugcca

SEQ ID NO: 2650262 - RNA, 19 nt, Homo sapiens
  misc_RNA (1)...(19): siRNA sense strand
agggagaccuugugagauc

SEQ ID NO: 2650263 - RNA, 19 nt, Homo sapiens
  misc_RNA (1)...(19): siRNA sense strand
ucaaugaaggagaagagaa

SEQ ID NO: 2650264 - RNA, 19 nt, Homo sapiens
  misc_RNA (1)...(19): siRNA sense strand
acccuaagccagugaauuu

SEQ ID NO: 2650265 - RNA, 19 nt, Homo sapiens
  misc_RNA (1)...(19): siRNA sense strand
aguuaaaccuugucugcuu

SEQ ID NO: 2650266 - RNA, 19 nt, Homo sapiens
  misc_RNA (1)...(19): siRNA sense strand
guaguuaagcccugcagaa

SEQ ID NO: 2650267 - RNA, 19 nt, Homo sapiens
  misc_RNA (1)...(19): siRNA sense strand
aggcugaagaagagaggca

SEQ ID NO: 2650268 - RNA, 19 nt, Homo sapiens
  misc_RNA (1)...(19): siRNA sense strand
guagaagagaagaaacaca

SEQ ID NO: 2650269 - RNA, 19 nt, Homo sapiens
  misc_RNA (1)...(19): siRNA sense strand
gggacgauuuccacaucaa

SEQ ID NO: 2650270 - RNA, 19 nt, Homo sapiens
  misc_RNA (1)...(19): siRNA sense strand
gacucaaggcugccggaaa

SEQ ID NO: 2650271 - RNA, 19 nt, Homo sapiens
  misc_RNA (1)...(19): siRNA sense strand
cagccuacugccaaagaua

SEQ ID NO: 2650272 - RNA, 19 nt, Homo sapiens
  misc_RNA (1)...(19): siRNA sense strand
gaagccaccaccugggaaa

SEQ ID NO: 2650273 - RNA, 19 nt, Homo sapiens
  misc_RNA (1)...(19): siRNA sense strand
agagaaugagauggagaua

SEQ ID NO: 2650274 - RNA, 19 nt, Homo sapiens
  misc_RNA (1)...(19): siRNA sense strand
gagaaucgauugaaggaag

SEQ ID NO: 2650275 - RNA, 19 nt, Homo sapiens
  misc_RNA (1)...(19): siRNA sense strand
gaacaggagauuaggaggu

SEQ ID NO: 2650276 - RNA, 19 nt, Homo sapiens
  misc_RNA (1)...(19): siRNA sense strand
ucaucaaggagguucuaaa

SEQ ID NO: 2650277 - RNA, 19 nt, Homo sapiens
  misc_RNA (1)...(19): siRNA sense strand
agaaucgauugaaggaaga

SEQ ID NO: 2650278 - RNA, 19 nt, Homo sapiens
  misc_RNA (1)...(19): siRNA sense strand
aggcaugcugacaggagaa

SEQ ID NO: 2650279 - RNA, 19 nt, Homo sapiens
  misc_RNA (1)...(19): siRNA sense strand
aaauagagccauaagaaag

SEQ ID NO: 2650280 - RNA, 19 nt, Homo sapiens
  misc_RNA (1)...(19): siRNA sense strand
uguugaaguuacaccaauu

SEQ ID NO: 2650281 - RNA, 19 nt, Homo sapiens
  misc_RNA (1)...(19): siRNA sense strand
gagaaugagauggagauau

SEQ ID NO: 2650282 - RNA, 19 nt, Homo sapiens
  misc_RNA (1)...(19): siRNA sense strand
gcucaaugaaggagaagag

SEQ ID NO: 2650283 - RNA, 19 nt, Homo sapiens
  misc_RNA (1)...(19): siRNA sense strand
ccguuacccaagauggaua

SEQ ID NO: 2650284 - RNA, 19 nt, Homo sapiens
  misc_RNA (1)...(19): siRNA sense strand
ggucccaguggaaggaauu

SEQ ID NO: 2650285 - RNA, 19 nt, Homo sapiens
  misc_RNA (1)...(19): siRNA sense strand
gagucauagcacuggccua

SEQ ID NO: 2650286 - RNA, 19 nt, Homo sapiens
  misc_RNA (1)...(19): siRNA sense strand
gccuacaagaagcuggaaa

SEQ ID NO: 2650287 - RNA, 19 nt, Homo sapiens
  misc_RNA (1)...(19): siRNA sense strand
gagggagacgguagaauca

SEQ ID NO: 2650288 - RNA, 19 nt, Homo sapiens
  misc_RNA (1)...(19): siRNA sense strand
uguaugggaaucaggacaa

SEQ ID NO: 2650289 - RNA, 19 nt, Homo sapiens
  misc_RNA (1)...(19): siRNA sense strand
agagugaagcggauuacaa

SEQ ID NO: 2650290 - RNA, 19 nt, Homo sapiens
  misc_RNA (1)...(19): siRNA sense strand
cagagguuauccaggccaa

SEQ ID NO: 2650291 - RNA, 19 nt, Homo sapiens
  misc_RNA (1)...(19): siRNA sense strand
cagccaggucccaguggaa

SEQ ID NO: 2650292 - RNA, 19 nt, Homo sapiens
  misc_RNA (1)...(19): siRNA sense strand
cugccaagauacaucaaaa

SEQ ID NO: 2650293 - RNA, 19 nt, Homo sapiens
  misc_RNA (1)...(19): siRNA sense strand
agagaagaacaggagauua

SEQ ID NO: 2650294 - RNA, 19 nt, Homo sapiens
  misc_RNA (1)...(19): siRNA sense strand
uaggaauggcuuucaggaa

SEQ ID NO: 2650295 - RNA, 19 nt, Homo sapiens
  misc_RNA (1)...(19): siRNA sense strand
guuaguagaagagaagaaa

SEQ ID NO: 2650296 - RNA, 19 nt, Homo sapiens
  misc_RNA (1)...(19): siRNA sense strand
augggaaucaggacaauua

SEQ ID NO: 2650297 - RNA, 19 nt, Homo sapiens
  misc_RNA (1)...(19): siRNA sense strand
cagagaaggaaguuaccau

SEQ ID NO: 2650298 - RNA, 19 nt, Homo sapiens
  misc_RNA (1)...(19): siRNA sense strand
gguuaauaugugggccuaa

SEQ ID NO: 2650299 - RNA, 19 nt, Homo sapiens
  misc_RNA (1)...(19): siRNA sense strand
cagagaggguggccagcuu

SEQ ID NO: 2650300 - RNA, 19 nt, Homo sapiens
  misc_RNA (1)...(19): siRNA sense strand
agaaggacaguuccagaaa

SEQ ID NO: 2650301 - RNA, 19 nt, Homo sapiens
  misc_RNA (1)...(19): siRNA sense strand
ugacaagagaagaacagga

SEQ ID NO: 2650302 - RNA, 19 nt, Homo sapiens
  misc_RNA (1)...(19): siRNA sense strand
gcugacaggagaaaguauu

SEQ ID NO: 2650303 - RNA, 19 nt, Homo sapiens
  misc_RNA (1)...(19): siRNA sense strand
gcccagaggaggcugaaga

SEQ ID NO: 2650304 - RNA, 19 nt, Homo sapiens
  misc_RNA (1)...(19): siRNA sense strand
acguauguggacaguuaaa

SEQ ID NO: 2650305 - RNA, 19 nt, Homo sapiens
  misc_RNA (1)...(19): siRNA sense strand
agucauuguccaagagaug

SEQ ID NO: 2650306 - RNA, 19 nt, Homo sapiens
  misc_RNA (1)...(19): siRNA sense strand
gcaucuauaucuuggacgu

SEQ ID NO: 2650307 - RNA, 19 nt, Homo sapiens
  misc_RNA (1)...(19): siRNA sense strand
ggagacugguccaacgcua

SEQ ID NO: 2650308 - RNA, 19 nt, Homo sapiens
  misc_RNA (1)...(19): siRNA sense strand
gaagggaucuggagggaag

SEQ ID NO: 2650309 - RNA, 19 nt, Homo sapiens
  misc_RNA (1)...(19): siRNA sense strand
guggcacguuggaggaaau

SEQ ID NO: 2650310 - RNA, 19 nt, Homo sapiens
  misc_RNA (1)...(19): siRNA sense strand
ggaggaaaucaaaagaaau

SEQ ID NO: 2650311 - RNA, 19 nt, Homo sapiens
  misc_RNA (1)...(19): siRNA sense strand
gacaaagaauccaaggacu

SEQ ID NO: 2650312 - RNA, 19 nt, Homo sapiens
  misc_RNA (1)...(19): siRNA sense strand
gcuauaagguguauggcga

SEQ ID NO: 2650313 - RNA, 19 nt, Homo sapiens
  misc_RNA (1)...(19): siRNA sense strand
gggcacuauuccagagcca

SEQ ID NO: 2650314 - RNA, 19 nt, Homo sapiens
  misc_RNA (1)...(19): siRNA sense strand
gcacuauuccagagccaca

SEQ ID NO: 2650315 - RNA, 19 nt, Homo sapiens
  misc_RNA (1)...(19): siRNA sense strand
agucagaccuuccugguga

SEQ ID NO: 2650316 - RNA, 19 nt, Homo sapiens
  misc_RNA (1)...(19): siRNA sense strand
aguggaugcuggagaguac

SEQ ID NO: 2650317 - RNA, 19 nt, Homo sapiens
  misc_RNA (1)...(19): siRNA sense strand
acaacaaccuggaggcccu

SEQ ID NO: 2650318 - RNA, 19 nt, Homo sapiens
  misc_RNA (1)...(19): siRNA sense strand
cuccaaugcugcuggggaa

SEQ ID NO: 2650319 - RNA, 19 nt, Homo sapiens
  misc_RNA (1)...(19): siRNA sense strand
gggugaugggacagacaaa

SEQ ID NO: 2650320 - RNA, 19 nt, Homo sapiens
  misc_RNA (1)...(19): siRNA sense strand
acaaaggcaccgaggccaa

SEQ ID NO: 2650321 - RNA, 19 nt, Homo sapiens
  misc_RNA (1)...(19): siRNA sense strand
cagaacacgccuuggguga

SEQ ID NO: 2650322 - RNA, 19 nt, Homo sapiens
  misc_RNA (1)...(19): siRNA sense strand
ccagaagcugcgugagaga

SEQ ID NO: 2650323 - RNA, 19 nt, Homo sapiens
  misc_RNA (1)...(19): siRNA sense strand
uuacacgggugaugggcaa

SEQ ID NO: 2650324 - RNA, 19 nt, Homo sapiens
  misc_RNA (1)...(19): siRNA sense strand
gggcaaagugugcacccaa

SEQ ID NO: 2650325 - RNA, 19 nt, Homo sapiens
  misc_RNA (1)...(19): siRNA sense strand
cuggaagagcgguuggcua

SEQ ID NO: 2650326 - RNA, 19 nt, Homo sapiens
  misc_RNA (1)...(19): siRNA sense strand
aggccaagucggaguacau

SEQ ID NO: 2650327 - RNA, 19 nt, Homo sapiens
  misc_RNA (1)...(19): siRNA sense strand
caggcaacacagaggccaa

SEQ ID NO: 2650328 - RNA, 19 nt, Homo sapiens
  misc_RNA (1)...(19): siRNA sense strand
ugcagaaagugcuggccua

SEQ ID NO: 2650329 - RNA, 19 nt, Homo sapiens
  misc_RNA (1)...(19): siRNA sense strand
acaagauagcccugagcau

SEQ ID NO: 2650330 - RNA, 19 nt, Homo sapiens
  misc_RNA (1)...(19): siRNA sense strand
cgccuugggugaugggaca

SEQ ID NO: 2650331 - RNA, 19 nt, Homo sapiens
  misc_RNA (1)...(19): siRNA sense strand
ccacacuggaggaccgcaa

SEQ ID NO: 2650332 - RNA, 19 nt, Homo sapiens
  misc_RNA (1)...(19): siRNA sense strand
ccaaagagaaggugguguc

SEQ ID NO: 2650333 - RNA, 19 nt, Homo sapiens
  misc_RNA (1)...(19): siRNA sense strand
acacagaggccaagucgga

SEQ ID NO: 2650334 - RNA, 19 nt, Homo sapiens
  misc_RNA (1)...(19): siRNA sense strand
ccauucacgucaaggcuca

SEQ ID NO: 2650335 - RNA, 19 nt, Homo sapiens
  misc_RNA (1)...(19): siRNA sense strand
agaagcugcgugagagaca

SEQ ID NO: 2650336 - RNA, 19 nt, Homo sapiens
  misc_RNA (1)...(19): siRNA sense strand
ccgcacuagagaugcagaa

SEQ ID NO: 2650337 - RNA, 19 nt, Homo sapiens
  misc_RNA (1)...(19): siRNA sense strand
cagaagaggaggaggagga

SEQ ID NO: 2650338 - RNA, 19 nt, Homo sapiens
  misc_RNA (1)...(19): siRNA sense strand
ccucaaggcuggagcgugu

SEQ ID NO: 2650339 - RNA, 19 nt, Homo sapiens
  misc_RNA (1)...(19): siRNA sense strand
gcucagugcuuuuggggaa

SEQ ID NO: 2650340 - RNA, 19 nt, Homo sapiens
  misc_RNA (1)...(19): siRNA sense strand
cugaagaaauccuggaacu

SEQ ID NO: 2650341 - RNA, 19 nt, Homo sapiens
  misc_RNA (1)...(19): siRNA sense strand
ccucaaucacugaagaaau

SEQ ID NO: 2650342 - RNA, 19 nt, Homo sapiens
  misc_RNA (1)...(19): siRNA sense strand
aggcauuggaacagggaca

SEQ ID NO: 2650343 - RNA, 19 nt, Homo sapiens
  misc_RNA (1)...(19): siRNA sense strand
ugggagcaauccugggaaa

SEQ ID NO: 2650344 - RNA, 19 nt, Homo sapiens
  misc_RNA (1)...(19): siRNA sense strand
ggaugcugcugguggccaa

SEQ ID NO: 2650345 - RNA, 19 nt, Homo sapiens
  misc_RNA (1)...(19): siRNA sense strand
ucaacgacaugaagcgcaa

SEQ ID NO: 2650346 - RNA, 19 nt, Homo sapiens
  misc_RNA (1)...(19): siRNA sense strand
gugccuggcgacagcgaaa

SEQ ID NO: 2650347 - RNA, 19 nt, Homo sapiens
  misc_RNA (1)...(19): siRNA sense strand
gcaaggagguuccagggau

SEQ ID NO: 2650348 - RNA, 19 nt, Homo sapiens
  misc_RNA (1)...(19): siRNA sense strand
uugccaacauugaggacau

SEQ ID NO: 2650349 - RNA, 19 nt, Homo sapiens
  misc_RNA (1)...(19): siRNA sense strand
ggaccagagcucagugcuu

SEQ ID NO: 2650350 - RNA, 19 nt, Homo sapiens
  misc_RNA (1)...(19): siRNA sense strand
gcaaggagguucccggcau

SEQ ID NO: 2650351 - RNA, 19 nt, Homo sapiens
  misc_RNA (1)...(19): siRNA sense strand
gcgagaugguggaggaagc

SEQ ID NO: 2650352 - RNA, 19 nt, Homo sapiens
  misc_RNA (1)...(19): siRNA sense strand
caagaagagaagaggcugu

SEQ ID NO: 2650353 - RNA, 19 nt, Homo sapiens
  misc_RNA (1)...(19): siRNA sense strand
aggccaagaaccaagaaga

SEQ ID NO: 2650354 - RNA, 19 nt, Homo sapiens
  misc_RNA (1)...(19): siRNA sense strand
cagcuuugcccaaggagau

SEQ ID NO: 2650355 - RNA, 19 nt, Homo sapiens
  misc_RNA (1)...(19): siRNA sense strand
cauuguacugcaugaacua

SEQ ID NO: 2650356 - RNA, 19 nt, Homo sapiens
  misc_RNA (1)...(19): siRNA sense strand
ucacccaacaucagggauu

SEQ ID NO: 2650357 - RNA, 19 nt, Homo sapiens
  misc_RNA (1)...(19): siRNA sense strand
agcuaugccacgacgguua

SEQ ID NO: 2650358 - RNA, 19 nt, Homo sapiens
  misc_RNA (1)...(19): siRNA sense strand
ccaacauugaggacaucua

SEQ ID NO: 2650359 - RNA, 19 nt, Homo sapiens
  misc_RNA (1)...(19): siRNA sense strand
ccucuaggguucaaggugu

SEQ ID NO: 2650360 - RNA, 19 nt, Homo sapiens
  misc_RNA (1)...(19): siRNA sense strand
cuagacagcgagagcccaa

SEQ ID NO: 2650361 - RNA, 19 nt, Homo sapiens
  misc_RNA (1)...(19): siRNA sense strand
aggaggaggaggaagagga

SEQ ID NO: 2650362 - RNA, 19 nt, Homo sapiens
  misc_RNA (1)...(19): siRNA sense strand
gugaaauucccgaagguuc

SEQ ID NO: 2650363 - RNA, 19 nt, Homo sapiens
  misc_RNA (1)...(19): siRNA sense strand
gaucccagguucagccaga

SEQ ID NO: 2650364 - RNA, 19 nt, Homo sapiens
  misc_RNA (1)...(19): siRNA sense strand
ggaggaugaagaaggggua

SEQ ID NO: 2650365 - RNA, 19 nt, Homo sapiens
  misc_RNA (1)...(19): siRNA sense strand
agcaagaccuuccgggcau

SEQ ID NO: 2650366 - RNA, 19 nt, Homo sapiens
  misc_RNA (1)...(19): siRNA sense strand
gugcagaggagcgaggauu

SEQ ID NO: 2650367 - RNA, 19 nt, Homo sapiens
  misc_RNA (1)...(19): siRNA sense strand
gguacaucaacgacaugaa

SEQ ID NO: 2650368 - RNA, 19 nt, Homo sapiens
  misc_RNA (1)...(19): siRNA sense strand
cagaagaggaggaggagga

SEQ ID NO: 2650369 - RNA, 19 nt, Homo sapiens
  misc_RNA (1)...(19): siRNA sense strand
ccucaaggcuggagcgugu

SEQ ID NO: 2650370 - RNA, 19 nt, Homo sapiens
  misc_RNA (1)...(19): siRNA sense strand
gcucagugcuuuuggggaa

SEQ ID NO: 2650371 - RNA, 19 nt, Homo sapiens
  misc_RNA (1)...(19): siRNA sense strand
cugaagaaauccuggaacu

SEQ ID NO: 2650372 - RNA, 19 nt, Homo sapiens
  misc_RNA (1)...(19): siRNA sense strand
ccucaaucacugaagaaau

SEQ ID NO: 2650373 - RNA, 19 nt, Homo sapiens
  misc_RNA (1)...(19): siRNA sense strand
aggcauuggaacagggaca

SEQ ID NO: 2650374 - RNA, 19 nt, Homo sapiens
  misc_RNA (1)...(19): siRNA sense strand
ugggagcaauccugggaaa

SEQ ID NO: 2650375 - RNA, 19 nt, Homo sapiens
  misc_RNA (1)...(19): siRNA sense strand
ggaugcugcugguggccaa

SEQ ID NO: 2650376 - RNA, 19 nt, Homo sapiens
  misc_RNA (1)...(19): siRNA sense strand
ucaacgacaugaagcgcaa

SEQ ID NO: 2650377 - RNA, 19 nt, Homo sapiens
  misc_RNA (1)...(19): siRNA sense strand
gugccuggcgacagcgaaa

SEQ ID NO: 2650378 - RNA, 19 nt, Homo sapiens
  misc_RNA (1)...(19): siRNA sense strand
gcaaggagguuccagggau

SEQ ID NO: 2650379 - RNA, 19 nt, Homo sapiens
  misc_RNA (1)...(19): siRNA sense strand
uugccaacauugaggacau

SEQ ID NO: 2650380 - RNA, 19 nt, Homo sapiens
  misc_RNA (1)...(19): siRNA sense strand
ggaccagagcucagugcuu

SEQ ID NO: 2650381 - RNA, 19 nt, Homo sapiens
  misc_RNA (1)...(19): siRNA sense strand
gcaaggagguucccggcau

SEQ ID NO: 2650382 - RNA, 19 nt, Homo sapiens
  misc_RNA (1)...(19): siRNA sense strand
gcgagaugguggaggaagc

SEQ ID NO: 2650383 - RNA, 19 nt, Homo sapiens
  misc_RNA (1)...(19): siRNA sense strand
caagaagagaagaggcugu

SEQ ID NO: 2650384 - RNA, 19 nt, Homo sapiens
  misc_RNA (1)...(19): siRNA sense strand
aggccaagaaccaagaaga

SEQ ID NO: 2650385 - RNA, 19 nt, Homo sapiens
  misc_RNA (1)...(19): siRNA sense strand
cagcuuugcccaaggagau

SEQ ID NO: 2650386 - RNA, 19 nt, Homo sapiens
  misc_RNA (1)...(19): siRNA sense strand
cauuguacugcaugaacua

SEQ ID NO: 2650387 - RNA, 19 nt, Homo sapiens
  misc_RNA (1)...(19): siRNA sense strand
ucacccaacaucagggauu

SEQ ID NO: 2650388 - RNA, 19 nt, Homo sapiens
  misc_RNA (1)...(19): siRNA sense strand
agcuaugccacgacgguua

SEQ ID NO: 2650389 - RNA, 19 nt, Homo sapiens
  misc_RNA (1)...(19): siRNA sense strand
ccaacauugaggacaucua

SEQ ID NO: 2650390 - RNA, 19 nt, Homo sapiens
  misc_RNA (1)...(19): siRNA sense strand
ccucuaggguucaaggugu

SEQ ID NO: 2650391 - RNA, 19 nt, Homo sapiens
  misc_RNA (1)...(19): siRNA sense strand
cuagacagcgagagcccaa

SEQ ID NO: 2650392 - RNA, 19 nt, Homo sapiens
  misc_RNA (1)...(19): siRNA sense strand
aggaggaggaggaagagga

SEQ ID NO: 2650393 - RNA, 19 nt, Homo sapiens
  misc_RNA (1)...(19): siRNA sense strand
gugaaauucccgaagguuc

SEQ ID NO: 2650394 - RNA, 19 nt, Homo sapiens
  misc_RNA (1)...(19): siRNA sense strand
gaucccagguucagccaga

SEQ ID NO: 2650395 - RNA, 19 nt, Homo sapiens
  misc_RNA (1)...(19): siRNA sense strand
ggaggaugaagaaggggua

SEQ ID NO: 2650396 - RNA, 19 nt, Homo sapiens
  misc_RNA (1)...(19): siRNA sense strand
agcaagaccuuccgggcau

SEQ ID NO: 2650397 - RNA, 19 nt, Homo sapiens
  misc_RNA (1)...(19): siRNA sense strand
gugcagaggagcgaggauu

SEQ ID NO: 2650398 - RNA, 19 nt, Homo sapiens
  misc_RNA (1)...(19): siRNA sense strand
gguacaucaacgacaugaa

SEQ ID NO: 2650399 - RNA, 19 nt, Homo sapiens
  misc_RNA (1)...(19): siRNA sense strand
caagauacauggauggaca

SEQ ID NO: 2650400 - RNA, 19 nt, Homo sapiens
  misc_RNA (1)...(19): siRNA sense strand
gcuuggagcuggugggacu

SEQ ID NO: 2650401 - RNA, 19 nt, Homo sapiens
  misc_RNA (1)...(19): siRNA sense strand
gaaacaacccgguggacga

SEQ ID NO: 2650402 - RNA, 19 nt, Homo sapiens
  misc_RNA (1)...(19): siRNA sense strand
ggcuagagcaggaggagca

SEQ ID NO: 2650403 - RNA, 19 nt, Homo sapiens
  misc_RNA (1)...(19): siRNA sense strand
gcuuucaaacagcggcaaa

SEQ ID NO: 2650404 - RNA, 19 nt, Homo sapiens
  misc_RNA (1)...(19): siRNA sense strand
gaguaguaguuguggacug

SEQ ID NO: 2650405 - RNA, 19 nt, Homo sapiens
  misc_RNA (1)...(19): siRNA sense strand
uaguaguuguggacugcaa

SEQ ID NO: 2650406 - RNA, 19 nt, Homo sapiens
  misc_RNA (1)...(19): siRNA sense strand
ugaaagaauuggaagagga

SEQ ID NO: 2650407 - RNA, 19 nt, Homo sapiens
  misc_RNA (1)...(19): siRNA sense strand
cagaagaggagcagcgcau

SEQ ID NO: 2650408 - RNA, 19 nt, Homo sapiens
  misc_RNA (1)...(19): siRNA sense strand
aguuuaaugaggaggauga

SEQ ID NO: 2650409 - RNA, 19 nt, Homo sapiens
  misc_RNA (1)...(19): siRNA sense strand
cuggcugaguggaaagcaa

SEQ ID NO: 2650410 - RNA, 19 nt, Homo sapiens
  misc_RNA (1)...(19): siRNA sense strand
uuguuuaccuggaaggaga

SEQ ID NO: 2650411 - RNA, 19 nt, Homo sapiens
  misc_RNA (1)...(19): siRNA sense strand
gucugaaagaauuggaaga

SEQ ID NO: 2650412 - RNA, 19 nt, Homo sapiens
  misc_RNA (1)...(19): siRNA sense strand
aauuggaagaggaggcaga

SEQ ID NO: 2650413 - RNA, 19 nt, Homo sapiens
  misc_RNA (1)...(19): siRNA sense strand
aaggagauaucaaggcuca

SEQ ID NO: 2650414 - RNA, 19 nt, Homo sapiens
  misc_RNA (1)...(19): siRNA sense strand
agaucucagggaaggauua

SEQ ID NO: 2650415 - RNA, 19 nt, Homo sapiens
  misc_RNA (1)...(19): siRNA sense strand
gagcaauuaugauggaccu

SEQ ID NO: 2650416 - RNA, 19 nt, Homo sapiens
  misc_RNA (1)...(19): siRNA sense strand
ggacagcgauucugagggu

SEQ ID NO: 2650417 - RNA, 19 nt, Homo sapiens
  misc_RNA (1)...(19): siRNA sense strand
auaucaaggcucaguuuau

SEQ ID NO: 2650418 - RNA, 19 nt, Homo sapiens
  misc_RNA (1)...(19): siRNA sense strand
acaagagaugaguuggaau

SEQ ID NO: 2650419 - RNA, 19 nt, Homo sapiens
  misc_RNA (1)...(19): siRNA sense strand
aucaugaagacgaguuuaa

SEQ ID NO: 2650420 - RNA, 19 nt, Homo sapiens
  misc_RNA (1)...(19): siRNA sense strand
augaggagggacagcgauu

SEQ ID NO: 2650421 - RNA, 19 nt, Homo sapiens
  misc_RNA (1)...(19): siRNA sense strand
acagcgauucugaggguga

SEQ ID NO: 2650422 - RNA, 19 nt, Homo sapiens
  misc_RNA (1)...(19): siRNA sense strand
gagaaaucuuugaguguaa

SEQ ID NO: 2650423 - RNA, 19 nt, Homo sapiens
  misc_RNA (1)...(19): siRNA sense strand
gggaagaccuuuaguugua

SEQ ID NO: 2650424 - RNA, 19 nt, Homo sapiens
  misc_RNA (1)...(19): siRNA sense strand
uauucauacuggagagaaa

SEQ ID NO: 2650425 - RNA, 19 nt, Homo sapiens
  misc_RNA (1)...(19): siRNA sense strand
gagaaacgcuauaauguaa

SEQ ID NO: 2650426 - RNA, 19 nt, Homo sapiens
  misc_RNA (1)...(19): siRNA sense strand
aauucauacuggugagaaa

SEQ ID NO: 2650427 - RNA, 19 nt, Homo sapiens
  misc_RNA (1)...(19): siRNA sense strand
aauucauacuggugagaaa

SEQ ID NO: 2650428 - RNA, 19 nt, Homo sapiens
  misc_RNA (1)...(19): siRNA sense strand
auguaaggaaugugggaaa

SEQ ID NO: 2650429 - RNA, 19 nt, Homo sapiens
  misc_RNA (1)...(19): siRNA sense strand
auguaaggaaugugggaaa

SEQ ID NO: 2650430 - RNA, 19 nt, Homo sapiens
  misc_RNA (1)...(19): siRNA sense strand
auguaaggaaugugggaaa

SEQ ID NO: 2650431 - RNA, 19 nt, Homo sapiens
  misc_RNA (1)...(19): siRNA sense strand
guuacuagagcaagagaaa

SEQ ID NO: 2650432 - RNA, 19 nt, Homo sapiens
  misc_RNA (1)...(19): siRNA sense strand
caauaaggaguguggacaa

SEQ ID NO: 2650433 - RNA, 19 nt, Homo sapiens
  misc_RNA (1)...(19): siRNA sense strand
ugagaaaucuugugaacau

SEQ ID NO: 2650434 - RNA, 19 nt, Homo sapiens
  misc_RNA (1)...(19): siRNA sense strand
agggauaucaagaaggaaa

SEQ ID NO: 2650435 - RNA, 19 nt, Homo sapiens
  misc_RNA (1)...(19): siRNA sense strand
ccguaugaauguaaggaau

SEQ ID NO: 2650436 - RNA, 19 nt, Homo sapiens
  misc_RNA (1)...(19): siRNA sense strand
cuggaugguuguaaggaaa

SEQ ID NO: 2650437 - RNA, 19 nt, Homo sapiens
  misc_RNA (1)...(19): siRNA sense strand
cgcuauaauguaaggaaua

SEQ ID NO: 2650438 - RNA, 19 nt, Homo sapiens
  misc_RNA (1)...(19): siRNA sense strand
auguaaggagugugggaaa

SEQ ID NO: 2650439 - RNA, 19 nt, Homo sapiens
  misc_RNA (1)...(19): siRNA sense strand
auguaaggagugugggaaa

SEQ ID NO: 2650440 - RNA, 19 nt, Homo sapiens
  misc_RNA (1)...(19): siRNA sense strand
auguaaggagugugggaaa

SEQ ID NO: 2650441 - RNA, 19 nt, Homo sapiens
  misc_RNA (1)...(19): siRNA sense strand
auguaaggagugugggaaa

SEQ ID NO: 2650442 - RNA, 19 nt, Homo sapiens
  misc_RNA (1)...(19): siRNA sense strand
auguaaggagugugggaaa

SEQ ID NO: 2650443 - RNA, 19 nt, Homo sapiens
  misc_RNA (1)...(19): siRNA sense strand
auguaaggaauaugggaaa

SEQ ID NO: 2650444 - RNA, 19 nt, Homo sapiens
  misc_RNA (1)...(19): siRNA sense strand
gcgagaagccauuugaauu

SEQ ID NO: 2650445 - RNA, 19 nt, Homo sapiens
  misc_RNA (1)...(19): siRNA sense strand
auugcauacuggugagaaa

SEQ ID NO: 2650446 - RNA, 19 nt, Homo sapiens
  misc_RNA (1)...(19): siRNA sense strand
auugcauacuggugagaaa

SEQ ID NO: 2650447 - RNA, 19 nt, Homo sapiens
  misc_RNA (1)...(19): siRNA sense strand
agaaacaagcagacgguau

SEQ ID NO: 2650448 - RNA, 19 nt, Homo sapiens
  misc_RNA (1)...(19): siRNA sense strand
uugagggacuacagggaua

SEQ ID NO: 2650449 - RNA, 19 nt, Homo sapiens
  misc_RNA (1)...(19): siRNA sense strand
gugagauggccuuuagaua

SEQ ID NO: 2650450 - RNA, 19 nt, Homo sapiens
  misc_RNA (1)...(19): siRNA sense strand
cgagaagccauuugaauuu

SEQ ID NO: 2650451 - RNA, 19 nt, Homo sapiens
  misc_RNA (1)...(19): siRNA sense strand
gguuguaaggaaagaaaca

SEQ ID NO: 2650452 - RNA, 19 nt, Homo sapiens
  misc_RNA (1)...(19): siRNA sense strand
gguaugaaacccugugaau

SEQ ID NO: 2650453 - RNA, 19 nt, Homo sapiens
  misc_RNA (1)...(19): siRNA sense strand
augugauguuggagaacua

SEQ ID NO: 2650454 - RNA, 19 nt, Homo sapiens
  misc_RNA (1)...(19): siRNA sense strand
gggauaucaagaaggaaau

SEQ ID NO: 2650455 - RNA, 19 nt, Homo sapiens
  misc_RNA (1)...(19): siRNA sense strand
gaguauucgugcuggugua

SEQ ID NO: 2650456 - RNA, 19 nt, Homo sapiens
  misc_RNA (1)...(19): siRNA sense strand
ggaauaugggaaagcauuu

SEQ ID NO: 2650457 - RNA, 19 nt, Homo sapiens
  misc_RNA (1)...(19): siRNA sense strand
gccauuugaauuugagaaa

SEQ ID NO: 2650458 - RNA, 19 nt, Homo sapiens
  misc_RNA (1)...(19): siRNA sense strand
ccauaugaauguaaggagu

SEQ ID NO: 2650459 - RNA, 19 nt, Homo sapiens
  misc_RNA (1)...(19): siRNA sense strand
ccauaugaauguaaggagu

SEQ ID NO: 2650460 - RNA, 19 nt, Homo sapiens
  misc_RNA (1)...(19): siRNA sense strand
aaguacaacucuuggcauu

SEQ ID NO: 2650461 - RNA, 19 nt, Homo sapiens
  misc_RNA (1)...(19): siRNA sense strand
ccguuugaauguaaggaau

SEQ ID NO: 2650462 - RNA, 19 nt, Homo sapiens
  misc_RNA (1)...(19): siRNA sense strand
aagaaugugugaagaacuu

SEQ ID NO: 2650463 - RNA, 19 nt, Homo sapiens
  misc_RNA (1)...(19): siRNA sense strand
cuuuagucguagugcaaau

SEQ ID NO: 2650464 - RNA, 19 nt, Homo sapiens
  misc_RNA (1)...(19): siRNA sense strand
ccuuauucgacaucagaaa

SEQ ID NO: 2650465 - RNA, 19 nt, Homo sapiens
  misc_RNA (1)...(19): siRNA sense strand
acgcuauaauguaaggaau

SEQ ID NO: 2650466 - RNA, 19 nt, Homo sapiens
  misc_RNA (1)...(19): siRNA sense strand
aauucauuccagugagaaa

SEQ ID NO: 2650467 - RNA, 19 nt, Homo sapiens
  misc_RNA (1)...(19): siRNA sense strand
ccuggaugguuguaaggaa

SEQ ID NO: 2650468 - RNA, 19 nt, Homo sapiens
  misc_RNA (1)...(19): siRNA sense strand
aggaauguggaaagaguau

SEQ ID NO: 2650469 - RNA, 19 nt, Homo sapiens
  misc_RNA (1)...(19): siRNA sense strand
uacuagagcaagagaaaga

SEQ ID NO: 2650470 - RNA, 19 nt, Homo sapiens
  misc_RNA (1)...(19): siRNA sense strand
aaaauauggaccugagaaa

SEQ ID NO: 2650471 - RNA, 19 nt, Homo sapiens
  misc_RNA (1)...(19): siRNA sense strand
auguaaggggugugggaaa

SEQ ID NO: 2650472 - RNA, 19 nt, Homo sapiens
  misc_RNA (1)...(19): siRNA sense strand
gaguggaggacgaccuuua

SEQ ID NO: 2650473 - RNA, 19 nt, Homo sapiens
  misc_RNA (1)...(19): siRNA sense strand
gaugagaaaucuugugaac

SEQ ID NO: 2650474 - RNA, 19 nt, Homo sapiens
  misc_RNA (1)...(19): siRNA sense strand
ggugagaaacucuaugaau

SEQ ID NO: 2650475 - RNA, 19 nt, Homo sapiens
  misc_RNA (1)...(19): siRNA sense strand
uuacguuacuagagcaaga

SEQ ID NO: 2650476 - RNA, 19 nt, Homo sapiens
  misc_RNA (1)...(19): siRNA sense strand
cuguuugaauguaaggaau

SEQ ID NO: 2650477 - RNA, 19 nt, Homo sapiens
  misc_RNA (1)...(19): siRNA sense strand
gggaaggcuuuuagacuuu

SEQ ID NO: 2650478 - RNA, 19 nt, Homo sapiens
  misc_RNA (1)...(19): siRNA sense strand
cguuauucagcaucagaaa

SEQ ID NO: 2650479 - RNA, 19 nt, Homo sapiens
  misc_RNA (1)...(19): siRNA sense strand
gugagaaacucuaugaaug

SEQ ID NO: 2650480 - RNA, 19 nt, Homo sapiens
  misc_RNA (1)...(19): siRNA sense strand
gagaaaucuugugaacaua

SEQ ID NO: 2650481 - RNA, 19 nt, Homo sapiens
  misc_RNA (1)...(19): siRNA sense strand
aaaugauaccucugaagua

SEQ ID NO: 2650482 - RNA, 19 nt, Homo sapiens
  misc_RNA (1)...(19): siRNA sense strand
gguccugacugcacaucaa

SEQ ID NO: 2650483 - RNA, 19 nt, Homo sapiens
  misc_RNA (1)...(19): siRNA sense strand
ccuuagaguucggagaaga

SEQ ID NO: 2650484 - RNA, 19 nt, Homo sapiens
  misc_RNA (1)...(19): siRNA sense strand
acuuauucgacaucagaaa

SEQ ID NO: 2650485 - RNA, 19 nt, Homo sapiens
  misc_RNA (1)...(19): siRNA sense strand
ggaggacgaccuuuagaua

SEQ ID NO: 2650486 - RNA, 19 nt, Homo sapiens
  misc_RNA (1)...(19): siRNA sense strand
cugagaaaucuuugagugu

SEQ ID NO: 2650487 - RNA, 19 nt, Homo sapiens
  misc_RNA (1)...(19): siRNA sense strand
ugcaaggaguggaggacga

SEQ ID NO: 2650488 - RNA, 19 nt, Homo sapiens
  misc_RNA (1)...(19): siRNA sense strand
auguaaagaauguggaaag

SEQ ID NO: 2650489 - RNA, 19 nt, Homo sapiens
  misc_RNA (1)...(19): siRNA sense strand
caucauuguuagagggaga

SEQ ID NO: 2650490 - RNA, 19 nt, Homo sapiens
  misc_RNA (1)...(19): siRNA sense strand
cgggaaacccuuuggacaa

SEQ ID NO: 2650491 - RNA, 19 nt, Homo sapiens
  misc_RNA (1)...(19): siRNA sense strand
agaaauaagaguuuggcua

SEQ ID NO: 2650492 - RNA, 19 nt, Homo sapiens
  misc_RNA (1)...(19): siRNA sense strand
caaccaaacaguaggucaa

SEQ ID NO: 2650493 - RNA, 19 nt, Homo sapiens
  misc_RNA (1)...(19): siRNA sense strand
ccaucaagggacagugaaa

SEQ ID NO: 2650494 - RNA, 19 nt, Homo sapiens
  misc_RNA (1)...(19): siRNA sense strand
acacagacaacguggacua

SEQ ID NO: 2650495 - RNA, 19 nt, Homo sapiens
  misc_RNA (1)...(19): siRNA sense strand
ucucagaacaucagaggaa

SEQ ID NO: 2650496 - RNA, 19 nt, Homo sapiens
  misc_RNA (1)...(19): siRNA sense strand
gagagucagaauagggaaa

SEQ ID NO: 2650497 - RNA, 19 nt, Homo sapiens
  misc_RNA (1)...(19): siRNA sense strand
cuaaagugcaccauggaaa

SEQ ID NO: 2650498 - RNA, 19 nt, Homo sapiens
  misc_RNA (1)...(19): siRNA sense strand
cacacaggccagagagaaa

SEQ ID NO: 2650499 - RNA, 19 nt, Homo sapiens
  misc_RNA (1)...(19): siRNA sense strand
agaaauagccacagugcuu

SEQ ID NO: 2650500 - RNA, 19 nt, Homo sapiens
  misc_RNA (1)...(19): siRNA sense strand
agucaaaccacuacagcua

SEQ ID NO: 2650501 - RNA, 19 nt, Homo sapiens
  misc_RNA (1)...(19): siRNA sense strand
ucagaacaucagaggaaua

SEQ ID NO: 2650502 - RNA, 19 nt, Homo sapiens
  misc_RNA (1)...(19): siRNA sense strand
ccauauuagaagagagagu

SEQ ID NO: 2650503 - RNA, 19 nt, Homo sapiens
  misc_RNA (1)...(19): siRNA sense strand
gcuuaauggaggaaacaau

SEQ ID NO: 2650504 - RNA, 19 nt, Homo sapiens
  misc_RNA (1)...(19): siRNA sense strand
ggaaacaaguccugccuga

SEQ ID NO: 2650505 - RNA, 19 nt, Homo sapiens
  misc_RNA (1)...(19): siRNA sense strand
accaaguaguuuagcauua

SEQ ID NO: 2650506 - RNA, 19 nt, Homo sapiens
  misc_RNA (1)...(19): siRNA sense strand
cagcaaugcaagugauuca

SEQ ID NO: 2650507 - RNA, 19 nt, Homo sapiens
  misc_RNA (1)...(19): siRNA sense strand
gguagaaaucauugcugaa

SEQ ID NO: 2650508 - RNA, 19 nt, Homo sapiens
  misc_RNA (1)...(19): siRNA sense strand
ugaaacaacaagagaagau

SEQ ID NO: 2650509 - RNA, 19 nt, Homo sapiens
  misc_RNA (1)...(19): siRNA sense strand
acagauaccuaaagagagu

SEQ ID NO: 2650510 - RNA, 19 nt, Homo sapiens
  misc_RNA (1)...(19): siRNA sense strand
cagucagagaugugagcaa

SEQ ID NO: 2650511 - RNA, 19 nt, Homo sapiens
  misc_RNA (1)...(19): siRNA sense strand
ggagaggccccuugagaaa

SEQ ID NO: 2650512 - RNA, 19 nt, Homo sapiens
  misc_RNA (1)...(19): siRNA sense strand
ugucagacguuuaaaccaa

SEQ ID NO: 2650513 - RNA, 19 nt, Homo sapiens
  misc_RNA (1)...(19): siRNA sense strand
ggaacagcaccuugaauau

SEQ ID NO: 2650514 - RNA, 19 nt, Homo sapiens
  misc_RNA (1)...(19): siRNA sense strand
cuguaaugauggacugcua

SEQ ID NO: 2650515 - RNA, 19 nt, Homo sapiens
  misc_RNA (1)...(19): siRNA sense strand
ccaguuuaagugugaauaa

SEQ ID NO: 2650516 - RNA, 19 nt, Homo sapiens
  misc_RNA (1)...(19): siRNA sense strand
cagcuaaauacuaugacua

SEQ ID NO: 2650517 - RNA, 19 nt, Homo sapiens
  misc_RNA (1)...(19): siRNA sense strand
cagcagaugcagcaacaaa

SEQ ID NO: 2650518 - RNA, 19 nt, Homo sapiens
  misc_RNA (1)...(19): siRNA sense strand
auucaggguuccagaguuu

SEQ ID NO: 2650519 - RNA, 19 nt, Homo sapiens
  misc_RNA (1)...(19): siRNA sense strand
gggcagaaguuuccaacca

SEQ ID NO: 2650520 - RNA, 19 nt, Homo sapiens
  misc_RNA (1)...(19): siRNA sense strand
gcgaagauccaaauaccaa

SEQ ID NO: 2650521 - RNA, 19 nt, Homo sapiens
  misc_RNA (1)...(19): siRNA sense strand
ccaugaaagccguaaggau

SEQ ID NO: 2650522 - RNA, 19 nt, Homo sapiens
  misc_RNA (1)...(19): siRNA sense strand
aggaacagcaccuugaaua

SEQ ID NO: 2650523 - RNA, 19 nt, Homo sapiens
  misc_RNA (1)...(19): siRNA sense strand
ucuggaaaccaaaggcaaa

SEQ ID NO: 2650524 - RNA, 19 nt, Homo sapiens
  misc_RNA (1)...(19): siRNA sense strand
augaugaacuccugcuuaa

SEQ ID NO: 2650525 - RNA, 19 nt, Homo sapiens
  misc_RNA (1)...(19): siRNA sense strand
uggaggaaacaaugaacaa

SEQ ID NO: 2650526 - RNA, 19 nt, Homo sapiens
  misc_RNA (1)...(19): siRNA sense strand
gugacuagaucuucagaca

SEQ ID NO: 2650527 - RNA, 19 nt, Homo sapiens
  misc_RNA (1)...(19): siRNA sense strand
gcuaaugacauaugcuuau

SEQ ID NO: 2650528 - RNA, 19 nt, Homo sapiens
  misc_RNA (1)...(19): siRNA sense strand
gggcaagguuuaacuacau

SEQ ID NO: 2650529 - RNA, 19 nt, Homo sapiens
  misc_RNA (1)...(19): siRNA sense strand
acuccugcauugaggcaaa

SEQ ID NO: 2650530 - RNA, 19 nt, Homo sapiens
  misc_RNA (1)...(19): siRNA sense strand
augaacaagcugaagaaau

SEQ ID NO: 2650531 - RNA, 19 nt, Homo sapiens
  misc_RNA (1)...(19): siRNA sense strand
gccacagagaagagaggaa

SEQ ID NO: 2650532 - RNA, 19 nt, Homo sapiens
  misc_RNA (1)...(19): siRNA sense strand
gucuaauaauucagugcaa

SEQ ID NO: 2650533 - RNA, 19 nt, Homo sapiens
  misc_RNA (1)...(19): siRNA sense strand
cuugauguucccagaaaua

SEQ ID NO: 2650534 - RNA, 19 nt, Homo sapiens
  misc_RNA (1)...(19): siRNA sense strand
agagaagagaggaaguauu

SEQ ID NO: 2650535 - RNA, 19 nt, Homo sapiens
  misc_RNA (1)...(19): siRNA sense strand
ucacagauaccuaaagaga

SEQ ID NO: 2650536 - RNA, 19 nt, Homo sapiens
  misc_RNA (1)...(19): siRNA sense strand
cgaucaaggcccugcugua

SEQ ID NO: 2650537 - RNA, 19 nt, Homo sapiens
  misc_RNA (1)...(19): siRNA sense strand
auuaauagccuuacacgaa

SEQ ID NO: 2650538 - RNA, 19 nt, Homo sapiens
  misc_RNA (1)...(19): siRNA sense strand
ugacuguguuucugaggua

SEQ ID NO: 2650539 - RNA, 19 nt, Homo sapiens
  misc_RNA (1)...(19): siRNA sense strand
cggaaacaacuggaagaaa

SEQ ID NO: 2650540 - RNA, 19 nt, Homo sapiens
  misc_RNA (1)...(19): siRNA sense strand
guaaccaucucuacauaaa

SEQ ID NO: 2650541 - RNA, 19 nt, Homo sapiens
  misc_RNA (1)...(19): siRNA sense strand
gagcaucccaacaggaaau

SEQ ID NO: 2650542 - RNA, 19 nt, Homo sapiens
  misc_RNA (1)...(19): siRNA sense strand
ucauggaaauggcgaucaa

SEQ ID NO: 2650543 - RNA, 19 nt, Homo sapiens
  misc_RNA (1)...(19): siRNA sense strand
cuuauaaucuagugaguac

SEQ ID NO: 2650544 - RNA, 19 nt, Homo sapiens
  misc_RNA (1)...(19): siRNA sense strand
aaacaaugaacaagcugaa

SEQ ID NO: 2650545 - RNA, 19 nt, Homo sapiens
  misc_RNA (1)...(19): siRNA sense strand
ggauaaaccaccaaguagu

SEQ ID NO: 2650546 - RNA, 19 nt, Homo sapiens
  misc_RNA (1)...(19): siRNA sense strand
acauaaagcagcagcagca

SEQ ID NO: 2650547 - RNA, 19 nt, Homo sapiens
  misc_RNA (1)...(19): siRNA sense strand
gcaccauggaacugaccaa

SEQ ID NO: 2650548 - RNA, 19 nt, Homo sapiens
  misc_RNA (1)...(19): siRNA sense strand
gagagugagagucagaaua

SEQ ID NO: 2650549 - RNA, 19 nt, Homo sapiens
  misc_RNA (1)...(19): siRNA sense strand
guacagaggacuugcaauc

SEQ ID NO: 2650550 - RNA, 19 nt, Homo sapiens
  misc_RNA (1)...(19): siRNA sense strand
ggaguuuacccuucugaaa

SEQ ID NO: 2650551 - RNA, 19 nt, Homo sapiens
  misc_RNA (1)...(19): siRNA sense strand
gcuaucugaucuugcuaaa

SEQ ID NO: 2650552 - RNA, 19 nt, Homo sapiens
  misc_RNA (1)...(19): siRNA sense strand
ggauaucaauucaggguuc

SEQ ID NO: 2650553 - RNA, 19 nt, Homo sapiens
  misc_RNA (1)...(19): siRNA sense strand
agacagcagugguuccaaa

SEQ ID NO: 2650554 - RNA, 19 nt, Homo sapiens
  misc_RNA (1)...(19): siRNA sense strand
cccaaaguauugaagaaaa

SEQ ID NO: 2650555 - RNA, 19 nt, Homo sapiens
  misc_RNA (1)...(19): siRNA sense strand
ugaacaaugaugauagaga

SEQ ID NO: 2650556 - RNA, 19 nt, Homo sapiens
  misc_RNA (1)...(19): siRNA sense strand
gcagggcaguuaagagaga

SEQ ID NO: 2650557 - RNA, 19 nt, Homo sapiens
  misc_RNA (1)...(19): siRNA sense strand
uguuggaagcagacagcaa

SEQ ID NO: 2650558 - RNA, 19 nt, Homo sapiens
  misc_RNA (1)...(19): siRNA sense strand
ccagaguaauuuugaagua

SEQ ID NO: 2650559 - RNA, 19 nt, Homo sapiens
  misc_RNA (1)...(19): siRNA sense strand
uagagaaagaggagcgcaa

SEQ ID NO: 2650560 - RNA, 19 nt, Homo sapiens
  misc_RNA (1)...(19): siRNA sense strand
gcaauggguuggaggagga

SEQ ID NO: 2650561 - RNA, 19 nt, Homo sapiens
  misc_RNA (1)...(19): siRNA sense strand
augaagaagaugaugaaga

SEQ ID NO: 2650562 - RNA, 19 nt, Homo sapiens
  misc_RNA (1)...(19): siRNA sense strand
aagucaagauggagcccua

SEQ ID NO: 2650563 - RNA, 19 nt, Homo sapiens
  misc_RNA (1)...(19): siRNA sense strand
aggaggaggaagaggacga

SEQ ID NO: 2650564 - RNA, 19 nt, Homo sapiens
  misc_RNA (1)...(19): siRNA sense strand
aggaagaggacgaugagga

SEQ ID NO: 2650565 - RNA, 19 nt, Homo sapiens
  misc_RNA (1)...(19): siRNA sense strand
cuuugacucccuagagaaa

SEQ ID NO: 2650566 - RNA, 19 nt, Homo sapiens
  misc_RNA (1)...(19): siRNA sense strand
aggacgaugaggaggauga

SEQ ID NO: 2650567 - RNA, 19 nt, Homo sapiens
  misc_RNA (1)...(19): siRNA sense strand
acgaugaggaggaugaaga

SEQ ID NO: 2650568 - RNA, 19 nt, Homo sapiens
  misc_RNA (1)...(19): siRNA sense strand
aggaugaagaagaugauga

SEQ ID NO: 2650569 - RNA, 19 nt, Homo sapiens
  misc_RNA (1)...(19): siRNA sense strand
cagcaucgcuugagcagca

SEQ ID NO: 2650570 - RNA, 19 nt, Homo sapiens
  misc_RNA (1)...(19): siRNA sense strand
cugaggaguucuuggagca

SEQ ID NO: 2650571 - RNA, 19 nt, Homo sapiens
  misc_RNA (1)...(19): siRNA sense strand
aggaggaagaggacgauga

SEQ ID NO: 2650572 - RNA, 19 nt, Homo sapiens
  misc_RNA (1)...(19): siRNA sense strand
ucucagaggaggaggcacu

SEQ ID NO: 2650573 - RNA, 19 nt, Homo sapiens
  misc_RNA (1)...(19): siRNA sense strand
augaggaggaugaagaaga

SEQ ID NO: 2650574 - RNA, 19 nt, Homo sapiens
  misc_RNA (1)...(19): siRNA sense strand
aggaguucuuggagcauca

SEQ ID NO: 2650575 - RNA, 19 nt, Homo sapiens
  misc_RNA (1)...(19): siRNA sense strand
aggaggaugaagaagauga

SEQ ID NO: 2650576 - RNA, 19 nt, Homo sapiens
  misc_RNA (1)...(19): siRNA sense strand
ggcccauguugguggcaca

SEQ ID NO: 2650577 - RNA, 19 nt, Homo sapiens
  misc_RNA (1)...(19): siRNA sense strand
aagaggacgaugaggagga

SEQ ID NO: 2650578 - RNA, 19 nt, Homo sapiens
  misc_RNA (1)...(19): siRNA sense strand
uagagaaagaggagcgcaa

SEQ ID NO: 2650579 - RNA, 19 nt, Homo sapiens
  misc_RNA (1)...(19): siRNA sense strand
gcaauggguuggaggagga

SEQ ID NO: 2650580 - RNA, 19 nt, Homo sapiens
  misc_RNA (1)...(19): siRNA sense strand
augaagaagaugaugaaga

SEQ ID NO: 2650581 - RNA, 19 nt, Homo sapiens
  misc_RNA (1)...(19): siRNA sense strand
aagucaagauggagcccua

SEQ ID NO: 2650582 - RNA, 19 nt, Homo sapiens
  misc_RNA (1)...(19): siRNA sense strand
aggaggaggaagaggacga

SEQ ID NO: 2650583 - RNA, 19 nt, Homo sapiens
  misc_RNA (1)...(19): siRNA sense strand
aggaagaggacgaugagga

SEQ ID NO: 2650584 - RNA, 19 nt, Homo sapiens
  misc_RNA (1)...(19): siRNA sense strand
cuuugacucccuagagaaa

SEQ ID NO: 2650585 - RNA, 19 nt, Homo sapiens
  misc_RNA (1)...(19): siRNA sense strand
aggacgaugaggaggauga

SEQ ID NO: 2650586 - RNA, 19 nt, Homo sapiens
  misc_RNA (1)...(19): siRNA sense strand
acgaugaggaggaugaaga

SEQ ID NO: 2650587 - RNA, 19 nt, Homo sapiens
  misc_RNA (1)...(19): siRNA sense strand
aggaugaagaagaugauga

SEQ ID NO: 2650588 - RNA, 19 nt, Homo sapiens
  misc_RNA (1)...(19): siRNA sense strand
cagcaucgcuugagcagca

SEQ ID NO: 2650589 - RNA, 19 nt, Homo sapiens
  misc_RNA (1)...(19): siRNA sense strand
cugaggaguucuuggagca

SEQ ID NO: 2650590 - RNA, 19 nt, Homo sapiens
  misc_RNA (1)...(19): siRNA sense strand
aggaggaagaggacgauga

SEQ ID NO: 2650591 - RNA, 19 nt, Homo sapiens
  misc_RNA (1)...(19): siRNA sense strand
ucucagaggaggaggcacu

SEQ ID NO: 2650592 - RNA, 19 nt, Homo sapiens
  misc_RNA (1)...(19): siRNA sense strand
augaggaggaugaagaaga

SEQ ID NO: 2650593 - RNA, 19 nt, Homo sapiens
  misc_RNA (1)...(19): siRNA sense strand
aggaguucuuggagcauca

SEQ ID NO: 2650594 - RNA, 19 nt, Homo sapiens
  misc_RNA (1)...(19): siRNA sense strand
aggaggaugaagaagauga

SEQ ID NO: 2650595 - RNA, 19 nt, Homo sapiens
  misc_RNA (1)...(19): siRNA sense strand
ggcccauguugguggcaca

SEQ ID NO: 2650596 - RNA, 19 nt, Homo sapiens
  misc_RNA (1)...(19): siRNA sense strand
aagaggacgaugaggagga

SEQ ID NO: 2650597 - RNA, 19 nt, Homo sapiens
  misc_RNA (1)...(19): siRNA sense strand
caguagagauccagggcca

SEQ ID NO: 2650598 - RNA, 19 nt, Homo sapiens
  misc_RNA (1)...(19): siRNA sense strand
ggaagggacuguugagcca

SEQ ID NO: 2650599 - RNA, 19 nt, Homo sapiens
  misc_RNA (1)...(19): siRNA sense strand
uguccaagggagagccaaa

SEQ ID NO: 2650600 - RNA, 19 nt, Homo sapiens
  misc_RNA (1)...(19): siRNA sense strand
ccacaggucucuaugguca

SEQ ID NO: 2650601 - RNA, 19 nt, Homo sapiens
  misc_RNA (1)...(19): siRNA sense strand
cggagaacauggaggaggu

SEQ ID NO: 2650602 - RNA, 19 nt, Homo sapiens
  misc_RNA (1)...(19): siRNA sense strand
cugacuaccacuuggacua

SEQ ID NO: 2650603 - RNA, 19 nt, Homo sapiens
  misc_RNA (1)...(19): siRNA sense strand
cgggaagucaggaagaaga

SEQ ID NO: 2650604 - RNA, 19 nt, Homo sapiens
  misc_RNA (1)...(19): siRNA sense strand
gcucaucaggagaaggaga

SEQ ID NO: 2650605 - RNA, 19 nt, Homo sapiens
  misc_RNA (1)...(19): siRNA sense strand
cccauuaccaggaggaaaa

SEQ ID NO: 2650606 - RNA, 19 nt, Homo sapiens
  misc_RNA (1)...(19): siRNA sense strand
ugucagaauaacacagaga

SEQ ID NO: 2650607 - RNA, 19 nt, Homo sapiens
  misc_RNA (1)...(19): siRNA sense strand
ggaaauagccacaucugca

SEQ ID NO: 2650608 - RNA, 19 nt, Homo sapiens
  misc_RNA (1)...(19): siRNA sense strand
ggaucggacuggugugcca

SEQ ID NO: 2650609 - RNA, 19 nt, Homo sapiens
  misc_RNA (1)...(19): siRNA sense strand
gcaucugugccgagggcuu

SEQ ID NO: 2650610 - RNA, 19 nt, Homo sapiens
  misc_RNA (1)...(19): siRNA sense strand
gggaagucaggaagaagau

SEQ ID NO: 2650611 - RNA, 19 nt, Homo sapiens
  misc_RNA (1)...(19): siRNA sense strand
ccugaggacgagugugcaa

SEQ ID NO: 2650612 - RNA, 19 nt, Homo sapiens
  misc_RNA (1)...(19): siRNA sense strand
gguguggcaaugaggacaa

SEQ ID NO: 2650613 - RNA, 19 nt, Homo sapiens
  misc_RNA (1)...(19): siRNA sense strand
gggagaaaugcgagagcug

SEQ ID NO: 2650614 - RNA, 19 nt, Homo sapiens
  misc_RNA (1)...(19): siRNA sense strand
uacaaauguccaagggaga

SEQ ID NO: 2650615 - RNA, 19 nt, Homo sapiens
  misc_RNA (1)...(19): siRNA sense strand
ccugcaaccuggagaugga

SEQ ID NO: 2650616 - RNA, 19 nt, Homo sapiens
  misc_RNA (1)...(19): siRNA sense strand
gaggaaugugcguggcuca

SEQ ID NO: 2650617 - RNA, 19 nt, Homo sapiens
  misc_RNA (1)...(19): siRNA sense strand
aggaaaagugcuacgaaga

SEQ ID NO: 2650618 - RNA, 19 nt, Homo sapiens
  misc_RNA (1)...(19): siRNA sense strand
gggcuguccaugucagaau

SEQ ID NO: 2650619 - RNA, 19 nt, Homo sapiens
  misc_RNA (1)...(19): siRNA sense strand
gaguguggcugguguggca

SEQ ID NO: 2650620 - RNA, 19 nt, Homo sapiens
  misc_RNA (1)...(19): siRNA sense strand
gcaggaacuuguaaccaga

SEQ ID NO: 2650621 - RNA, 19 nt, Homo sapiens
  misc_RNA (1)...(19): siRNA sense strand
ccggcuauaccauggacaa

SEQ ID NO: 2650622 - RNA, 19 nt, Homo sapiens
  misc_RNA (1)...(19): siRNA sense strand
ugcaauggcggcaggagaa

SEQ ID NO: 2650623 - RNA, 19 nt, Homo sapiens
  misc_RNA (1)...(19): siRNA sense strand
cagcagugucugagcccuu

SEQ ID NO: 2650624 - RNA, 19 nt, Homo sapiens
  misc_RNA (1)...(19): siRNA sense strand
cgcaacugcuccacggaau

SEQ ID NO: 2650625 - RNA, 19 nt, Homo sapiens
  misc_RNA (1)...(19): siRNA sense strand
cagaugugucccuggucua

SEQ ID NO: 2650626 - RNA, 19 nt, Homo sapiens
  misc_RNA (1)...(19): siRNA sense strand
ccugaagaguccagaggag

SEQ ID NO: 2650627 - RNA, 19 nt, Homo sapiens
  misc_RNA (1)...(19): siRNA sense strand
gcccugacacggagaacau

SEQ ID NO: 2650628 - RNA, 19 nt, Homo sapiens
  misc_RNA (1)...(19): siRNA sense strand
gagaugaccaagauggcca

SEQ ID NO: 2650629 - RNA, 19 nt, Homo sapiens
  misc_RNA (1)...(19): siRNA sense strand
caguagagauccagggcca

SEQ ID NO: 2650630 - RNA, 19 nt, Homo sapiens
  misc_RNA (1)...(19): siRNA sense strand
ggaagggacuguugagcca

SEQ ID NO: 2650631 - RNA, 19 nt, Homo sapiens
  misc_RNA (1)...(19): siRNA sense strand
uguccaagggagagccaaa

SEQ ID NO: 2650632 - RNA, 19 nt, Homo sapiens
  misc_RNA (1)...(19): siRNA sense strand
ccacaggucucuaugguca

SEQ ID NO: 2650633 - RNA, 19 nt, Homo sapiens
  misc_RNA (1)...(19): siRNA sense strand
cggagaacauggaggaggu

SEQ ID NO: 2650634 - RNA, 19 nt, Homo sapiens
  misc_RNA (1)...(19): siRNA sense strand
cugacuaccacuuggacua

SEQ ID NO: 2650635 - RNA, 19 nt, Homo sapiens
  misc_RNA (1)...(19): siRNA sense strand
cgggaagucaggaagaaga

SEQ ID NO: 2650636 - RNA, 19 nt, Homo sapiens
  misc_RNA (1)...(19): siRNA sense strand
gcucaucaggagaaggaga

SEQ ID NO: 2650637 - RNA, 19 nt, Homo sapiens
  misc_RNA (1)...(19): siRNA sense strand
cccauuaccaggaggaaaa

SEQ ID NO: 2650638 - RNA, 19 nt, Homo sapiens
  misc_RNA (1)...(19): siRNA sense strand
ugucagaauaacacagaga

SEQ ID NO: 2650639 - RNA, 19 nt, Homo sapiens
  misc_RNA (1)...(19): siRNA sense strand
ggaaauagccacaucugca

SEQ ID NO: 2650640 - RNA, 19 nt, Homo sapiens
  misc_RNA (1)...(19): siRNA sense strand
ggaucggacuggugugcca

SEQ ID NO: 2650641 - RNA, 19 nt, Homo sapiens
  misc_RNA (1)...(19): siRNA sense strand
gcaucugugccgagggcuu

SEQ ID NO: 2650642 - RNA, 19 nt, Homo sapiens
  misc_RNA (1)...(19): siRNA sense strand
gggaagucaggaagaagau

SEQ ID NO: 2650643 - RNA, 19 nt, Homo sapiens
  misc_RNA (1)...(19): siRNA sense strand
ccugaggacgagugugcaa

SEQ ID NO: 2650644 - RNA, 19 nt, Homo sapiens
  misc_RNA (1)...(19): siRNA sense strand
gguguggcaaugaggacaa

SEQ ID NO: 2650645 - RNA, 19 nt, Homo sapiens
  misc_RNA (1)...(19): siRNA sense strand
gggagaaaugcgagagcug

SEQ ID NO: 2650646 - RNA, 19 nt, Homo sapiens
  misc_RNA (1)...(19): siRNA sense strand
uacaaauguccaagggaga

SEQ ID NO: 2650647 - RNA, 19 nt, Homo sapiens
  misc_RNA (1)...(19): siRNA sense strand
ccugcaaccuggagaugga

SEQ ID NO: 2650648 - RNA, 19 nt, Homo sapiens
  misc_RNA (1)...(19): siRNA sense strand
gaggaaugugcguggcuca

SEQ ID NO: 2650649 - RNA, 19 nt, Homo sapiens
  misc_RNA (1)...(19): siRNA sense strand
aggaaaagugcuacgaaga

SEQ ID NO: 2650650 - RNA, 19 nt, Homo sapiens
  misc_RNA (1)...(19): siRNA sense strand
gggcuguccaugucagaau

SEQ ID NO: 2650651 - RNA, 19 nt, Homo sapiens
  misc_RNA (1)...(19): siRNA sense strand
gaguguggcugguguggca

SEQ ID NO: 2650652 - RNA, 19 nt, Homo sapiens
  misc_RNA (1)...(19): siRNA sense strand
gcaggaacuuguaaccaga

SEQ ID NO: 2650653 - RNA, 19 nt, Homo sapiens
  misc_RNA (1)...(19): siRNA sense strand
ccggcuauaccauggacaa

SEQ ID NO: 2650654 - RNA, 19 nt, Homo sapiens
  misc_RNA (1)...(19): siRNA sense strand
ugcaauggcggcaggagaa

SEQ ID NO: 2650655 - RNA, 19 nt, Homo sapiens
  misc_RNA (1)...(19): siRNA sense strand
cagcagugucugagcccuu

SEQ ID NO: 2650656 - RNA, 19 nt, Homo sapiens
  misc_RNA (1)...(19): siRNA sense strand
cgcaacugcuccacggaau

SEQ ID NO: 2650657 - RNA, 19 nt, Homo sapiens
  misc_RNA (1)...(19): siRNA sense strand
ccugaagaguccagaggag

SEQ ID NO: 2650658 - RNA, 19 nt, Homo sapiens
  misc_RNA (1)...(19): siRNA sense strand
gcccugacacggagaacau

SEQ ID NO: 2650659 - RNA, 19 nt, Homo sapiens
  misc_RNA (1)...(19): siRNA sense strand
gagaugaccaagauggcca

SEQ ID NO: 2650660 - RNA, 19 nt, Homo sapiens
  misc_RNA (1)...(19): siRNA sense strand
cagaaagaauggaaagaaa

SEQ ID NO: 2650661 - RNA, 19 nt, Homo sapiens
  misc_RNA (1)...(19): siRNA sense strand
gggaaaggccauugagaau

SEQ ID NO: 2650662 - RNA, 19 nt, Homo sapiens
  misc_RNA (1)...(19): siRNA sense strand
agaaauugcaggagaggaa

SEQ ID NO: 2650663 - RNA, 19 nt, Homo sapiens
  misc_RNA (1)...(19): siRNA sense strand
caucugagucugaggauaa

SEQ ID NO: 2650664 - RNA, 19 nt, Homo sapiens
  misc_RNA (1)...(19): siRNA sense strand
cagaagacaacgugacaaa

SEQ ID NO: 2650665 - RNA, 19 nt, Homo sapiens
  misc_RNA (1)...(19): siRNA sense strand
caaacacagcugagagaaa

SEQ ID NO: 2650666 - RNA, 19 nt, Homo sapiens
  misc_RNA (1)...(19): siRNA sense strand
caucaaaggcccugcggaa

SEQ ID NO: 2650667 - RNA, 19 nt, Homo sapiens
  misc_RNA (1)...(19): siRNA sense strand
ggaaaaggcuucauguaaa

SEQ ID NO: 2650668 - RNA, 19 nt, Homo sapiens
  misc_RNA (1)...(19): siRNA sense strand
gcaaagagaugaaagcuga

SEQ ID NO: 2650669 - RNA, 19 nt, Homo sapiens
  misc_RNA (1)...(19): siRNA sense strand
aggaagaguuucagcucaa

SEQ ID NO: 2650670 - RNA, 19 nt, Homo sapiens
  misc_RNA (1)...(19): siRNA sense strand
agacaugggcagcaggaua

SEQ ID NO: 2650671 - RNA, 19 nt, Homo sapiens
  misc_RNA (1)...(19): siRNA sense strand
ggucagccuuggauggaaa

SEQ ID NO: 2650672 - RNA, 19 nt, Homo sapiens
  misc_RNA (1)...(19): siRNA sense strand
ggaaagacggagugaaaau

SEQ ID NO: 2650673 - RNA, 19 nt, Homo sapiens
  misc_RNA (1)...(19): siRNA sense strand
ugucaaagcagcuggucaa

SEQ ID NO: 2650674 - RNA, 19 nt, Homo sapiens
  misc_RNA (1)...(19): siRNA sense strand
acaagcaggauuugggaaa

SEQ ID NO: 2650675 - RNA, 19 nt, Homo sapiens
  misc_RNA (1)...(19): siRNA sense strand
ccuauagcaaugagacaaa

SEQ ID NO: 2650676 - RNA, 19 nt, Homo sapiens
  misc_RNA (1)...(19): siRNA sense strand
caucaauaaggaagaguuu

SEQ ID NO: 2650677 - RNA, 19 nt, Homo sapiens
  misc_RNA (1)...(19): siRNA sense strand
gugaaagcagugugaggaa

SEQ ID NO: 2650678 - RNA, 19 nt, Homo sapiens
  misc_RNA (1)...(19): siRNA sense strand
gggaaaaggcuucauguaa

SEQ ID NO: 2650679 - RNA, 19 nt, Homo sapiens
  misc_RNA (1)...(19): siRNA sense strand
cggaauggcagucggaaga

SEQ ID NO: 2650680 - RNA, 19 nt, Homo sapiens
  misc_RNA (1)...(19): siRNA sense strand
aggaaaagagaguguauua

SEQ ID NO: 2650681 - RNA, 19 nt, Homo sapiens
  misc_RNA (1)...(19): siRNA sense strand
uaugauuggcuuagugaaa

SEQ ID NO: 2650682 - RNA, 19 nt, Homo sapiens
  misc_RNA (1)...(19): siRNA sense strand
caccgggacugcagagaaa

SEQ ID NO: 2650683 - RNA, 19 nt, Homo sapiens
  misc_RNA (1)...(19): siRNA sense strand
uuugagaucuacagugaaa

SEQ ID NO: 2650684 - RNA, 19 nt, Homo sapiens
  misc_RNA (1)...(19): siRNA sense strand
gccaaaugacuucaagaaa

SEQ ID NO: 2650685 - RNA, 19 nt, Homo sapiens
  misc_RNA (1)...(19): siRNA sense strand
agacuuugcuugaagguca

SEQ ID NO: 2650686 - RNA, 19 nt, Homo sapiens
  misc_RNA (1)...(19): siRNA sense strand
ggagggaaucgcuggagaa

SEQ ID NO: 2650687 - RNA, 19 nt, Homo sapiens
  misc_RNA (1)...(19): siRNA sense strand
cggagaacagggugauaau

SEQ ID NO: 2650688 - RNA, 19 nt, Homo sapiens
  misc_RNA (1)...(19): siRNA sense strand
aguaaaggaaccagcagua

SEQ ID NO: 2650689 - RNA, 19 nt, Homo sapiens
  misc_RNA (1)...(19): siRNA sense strand
gggaaacagaggacuaaau

SEQ ID NO: 2650690 - RNA, 19 nt, Homo sapiens
  misc_RNA (1)...(19): siRNA sense strand
gaaaaggagaaaagggaga

SEQ ID NO: 2650691 - RNA, 19 nt, Homo sapiens
  misc_RNA (1)...(19): siRNA sense strand
ggauaauguggaagaggca

SEQ ID NO: 2650692 - RNA, 19 nt, Homo sapiens
  misc_RNA (1)...(19): siRNA sense strand
uaaagagagugguagauuu

SEQ ID NO: 2650693 - RNA, 19 nt, Homo sapiens
  misc_RNA (1)...(19): siRNA sense strand
cugcaaacagacugagaga

SEQ ID NO: 2650694 - RNA, 19 nt, Homo sapiens
  misc_RNA (1)...(19): siRNA sense strand
ugagagaaauugcaggaga

SEQ ID NO: 2650695 - RNA, 19 nt, Homo sapiens
  misc_RNA (1)...(19): siRNA sense strand
gcggaagcccugagacaca

SEQ ID NO: 2650696 - RNA, 19 nt, Homo sapiens
  misc_RNA (1)...(19): siRNA sense strand
ugauaaauucacugagcau

SEQ ID NO: 2650697 - RNA, 19 nt, Homo sapiens
  misc_RNA (1)...(19): siRNA sense strand
gaaagcagugugaggaaaa

SEQ ID NO: 2650698 - RNA, 19 nt, Homo sapiens
  misc_RNA (1)...(19): siRNA sense strand
cucccaaguuugagaucua

SEQ ID NO: 2650699 - RNA, 19 nt, Homo sapiens
  misc_RNA (1)...(19): siRNA sense strand
caaagaagcagcgaggaaa

SEQ ID NO: 2650700 - RNA, 19 nt, Homo sapiens
  misc_RNA (1)...(19): siRNA sense strand
uuucagugcuccagaauga

SEQ ID NO: 2650701 - RNA, 19 nt, Homo sapiens
  misc_RNA (1)...(19): siRNA sense strand
uggauguuguggugggauu

SEQ ID NO: 2650702 - RNA, 19 nt, Homo sapiens
  misc_RNA (1)...(19): siRNA sense strand
gagcaagguacuaagggau

SEQ ID NO: 2650703 - RNA, 19 nt, Homo sapiens
  misc_RNA (1)...(19): siRNA sense strand
uaagggaaacagaggacua

SEQ ID NO: 2650704 - RNA, 19 nt, Homo sapiens
  misc_RNA (1)...(19): siRNA sense strand
agggagaaguuggggaaaa

SEQ ID NO: 2650705 - RNA, 19 nt, Homo sapiens
  misc_RNA (1)...(19): siRNA sense strand
gggagaaguuggggaaaau

SEQ ID NO: 2650706 - RNA, 19 nt, Homo sapiens
  misc_RNA (1)...(19): siRNA sense strand
ugggaaaggccauugagaa

SEQ ID NO: 2650707 - RNA, 19 nt, Homo sapiens
  misc_RNA (1)...(19): siRNA sense strand
caauguugcugaaaggaca

SEQ ID NO: 2650708 - RNA, 19 nt, Homo sapiens
  misc_RNA (1)...(19): siRNA sense strand
auguaaagagagugguaga

SEQ ID NO: 2650709 - RNA, 19 nt, Homo sapiens
  misc_RNA (1)...(19): siRNA sense strand
uaaauggacaggagggaga

SEQ ID NO: 2650710 - RNA, 19 nt, Homo sapiens
  misc_RNA (1)...(19): siRNA sense strand
cauaaauaagucagagguu

SEQ ID NO: 2650711 - RNA, 19 nt, Homo sapiens
  misc_RNA (1)...(19): siRNA sense strand
acacugagucuguugcaaa

SEQ ID NO: 2650712 - RNA, 19 nt, Homo sapiens
  misc_RNA (1)...(19): siRNA sense strand
aggaagaacuuuggauuca

SEQ ID NO: 2650713 - RNA, 19 nt, Homo sapiens
  misc_RNA (1)...(19): siRNA sense strand
guacaaggagggagcaguu

SEQ ID NO: 2650714 - RNA, 19 nt, Homo sapiens
  misc_RNA (1)...(19): siRNA sense strand
ucaauaaggaagaguuuca

SEQ ID NO: 2650715 - RNA, 19 nt, Homo sapiens
  misc_RNA (1)...(19): siRNA sense strand
uggugaagcucaggacaua

SEQ ID NO: 2650716 - RNA, 19 nt, Homo sapiens
  misc_RNA (1)...(19): siRNA sense strand
augcaaaccucuuggauuc

SEQ ID NO: 2650717 - RNA, 19 nt, Homo sapiens
  misc_RNA (1)...(19): siRNA sense strand
gugaagaaugcaagcggau

SEQ ID NO: 2650718 - RNA, 19 nt, Homo sapiens
  misc_RNA (1)...(19): siRNA sense strand
cuucaaaaguagauuguga

SEQ ID NO: 2650719 - RNA, 19 nt, Homo sapiens
  misc_RNA (1)...(19): siRNA sense strand
aggaaaaccugaaggccau

SEQ ID NO: 2650720 - RNA, 19 nt, Homo sapiens
  misc_RNA (1)...(19): siRNA sense strand
ccaaguuguucaagaaauc

SEQ ID NO: 2650721 - RNA, 19 nt, Homo sapiens
  misc_RNA (1)...(19): siRNA sense strand
ccucaaagaaaggaaauau

SEQ ID NO: 2650722 - RNA, 19 nt, Homo sapiens
  misc_RNA (1)...(19): siRNA sense strand
ugaccaaugccauggaaaa

SEQ ID NO: 2650723 - RNA, 19 nt, Homo sapiens
  misc_RNA (1)...(19): siRNA sense strand
aguuugagaucuacaguga

SEQ ID NO: 2650724 - RNA, 19 nt, Homo sapiens
  misc_RNA (1)...(19): siRNA sense strand
ugacaaaagcagcuguuaa

SEQ ID NO: 2650725 - RNA, 19 nt, Homo sapiens
  misc_RNA (1)...(19): siRNA sense strand
caauagaccaaauggcuca

SEQ ID NO: 2650726 - RNA, 19 nt, Homo sapiens
  misc_RNA (1)...(19): siRNA sense strand
cugaggaagcagacaucua

SEQ ID NO: 2650727 - RNA, 19 nt, Homo sapiens
  misc_RNA (1)...(19): siRNA sense strand
gcccugagacacagaggua

SEQ ID NO: 2650728 - RNA, 19 nt, Homo sapiens
  misc_RNA (1)...(19): siRNA sense strand
caccaaagguccuaaggga

SEQ ID NO: 2650729 - RNA, 19 nt, Homo sapiens
  misc_RNA (1)...(19): siRNA sense strand
ucuccaaacugaagaccuu

SEQ ID NO: 2650730 - RNA, 19 nt, Homo sapiens
  misc_RNA (1)...(19): siRNA sense strand
aggcagaugggugggaaua

SEQ ID NO: 2650731 - RNA, 19 nt, Homo sapiens
  misc_RNA (1)...(19): siRNA sense strand
ugggaaaggauuugaguac

SEQ ID NO: 2650732 - RNA, 19 nt, Homo sapiens
  misc_RNA (1)...(19): siRNA sense strand
aaaacaaggcucagaaaga

SEQ ID NO: 2650733 - RNA, 19 nt, Homo sapiens
  misc_RNA (1)...(19): siRNA sense strand
gaagcagcgaggaaacaaa

SEQ ID NO: 2650734 - RNA, 19 nt, Homo sapiens
  misc_RNA (1)...(19): siRNA sense strand
augugauguuggagaauua

SEQ ID NO: 2650735 - RNA, 19 nt, Homo sapiens
  misc_RNA (1)...(19): siRNA sense strand
ucauaugaguguaaggaau

SEQ ID NO: 2650736 - RNA, 19 nt, Homo sapiens
  misc_RNA (1)...(19): siRNA sense strand
auaagaagggcuuuagaaa

SEQ ID NO: 2650737 - RNA, 19 nt, Homo sapiens
  misc_RNA (1)...(19): siRNA sense strand
gagacauggaaaagaaaua

SEQ ID NO: 2650738 - RNA, 19 nt, Homo sapiens
  misc_RNA (1)...(19): siRNA sense strand
aggaauauaagaagggcuu

SEQ ID NO: 2650739 - RNA, 19 nt, Homo sapiens
  misc_RNA (1)...(19): siRNA sense strand
caucaggagacauggaaaa

SEQ ID NO: 2650740 - RNA, 19 nt, Homo sapiens
  misc_RNA (1)...(19): siRNA sense strand
gggagacaacagagaccua

SEQ ID NO: 2650741 - RNA, 19 nt, Homo sapiens
  misc_RNA (1)...(19): siRNA sense strand
cccuaugaauguaaagaau

SEQ ID NO: 2650742 - RNA, 19 nt, Homo sapiens
  misc_RNA (1)...(19): siRNA sense strand
ucucaggaggagugggaau

SEQ ID NO: 2650743 - RNA, 19 nt, Homo sapiens
  misc_RNA (1)...(19): siRNA sense strand
cccuaugaauguaaggaau

SEQ ID NO: 2650744 - RNA, 19 nt, Homo sapiens
  misc_RNA (1)...(19): siRNA sense strand
auguaaggaauguggaaaa

SEQ ID NO: 2650745 - RNA, 19 nt, Homo sapiens
  misc_RNA (1)...(19): siRNA sense strand
ccacaguacacaauugaau

SEQ ID NO: 2650746 - RNA, 19 nt, Homo sapiens
  misc_RNA (1)...(19): siRNA sense strand
acagaaaugcaaagaaugu

SEQ ID NO: 2650747 - RNA, 19 nt, Homo sapiens
  misc_RNA (1)...(19): siRNA sense strand
gagacaacagagaccuaaa

SEQ ID NO: 2650748 - RNA, 19 nt, Homo sapiens
  misc_RNA (1)...(19): siRNA sense strand
gaucagagggauuuguaca

SEQ ID NO: 2650749 - RNA, 19 nt, Homo sapiens
  misc_RNA (1)...(19): siRNA sense strand
acugaaagcaacaaguuau

SEQ ID NO: 2650750 - RNA, 19 nt, Homo sapiens
  misc_RNA (1)...(19): siRNA sense strand
caggagacauggaaaagaa

SEQ ID NO: 2650751 - RNA, 19 nt, Homo sapiens
  misc_RNA (1)...(19): siRNA sense strand
uuacugaacaucugagaga

SEQ ID NO: 2650752 - RNA, 19 nt, Homo sapiens
  misc_RNA (1)...(19): siRNA sense strand
acagagaccuaaaguggga

SEQ ID NO: 2650753 - RNA, 19 nt, Homo sapiens
  misc_RNA (1)...(19): siRNA sense strand
uaagaagggcuuuagaaaa

SEQ ID NO: 2650754 - RNA, 19 nt, Homo sapiens
  misc_RNA (1)...(19): siRNA sense strand
cccuauguauguaaagaau

SEQ ID NO: 2650755 - RNA, 19 nt, Homo sapiens
  misc_RNA (1)...(19): siRNA sense strand
acauaaaucccuuccucua

SEQ ID NO: 2650756 - RNA, 19 nt, Homo sapiens
  misc_RNA (1)...(19): siRNA sense strand
augcaauggaugugagaag

SEQ ID NO: 2650757 - RNA, 19 nt, Homo sapiens
  misc_RNA (1)...(19): siRNA sense strand
ucaacuuagucaacaucaa

SEQ ID NO: 2650758 - RNA, 19 nt, Homo sapiens
  misc_RNA (1)...(19): siRNA sense strand
augcaaagaaugugguaag

SEQ ID NO: 2650759 - RNA, 19 nt, Homo sapiens
  misc_RNA (1)...(19): siRNA sense strand
gugguaaggccuuuaguca

SEQ ID NO: 2650760 - RNA, 19 nt, Homo sapiens
  misc_RNA (1)...(19): siRNA sense strand
cuaucaacuuagucaacau

SEQ ID NO: 2650761 - RNA, 19 nt, Homo sapiens
  misc_RNA (1)...(19): siRNA sense strand
aaguaaaugcguaccauca

SEQ ID NO: 2650762 - RNA, 19 nt, Homo sapiens
  misc_RNA (1)...(19): siRNA sense strand
uggaaaagcauuuguaguu

SEQ ID NO: 2650763 - RNA, 19 nt, Homo sapiens
  misc_RNA (1)...(19): siRNA sense strand
gauuugaaacccuaugaau

SEQ ID NO: 2650764 - RNA, 19 nt, Homo sapiens
  misc_RNA (1)...(19): siRNA sense strand
gggaauauuuaaacucgga

SEQ ID NO: 2650765 - RNA, 19 nt, Homo sapiens
  misc_RNA (1)...(19): siRNA sense strand
agagaaauaacacaagaga

SEQ ID NO: 2650766 - RNA, 19 nt, Homo sapiens
  misc_RNA (1)...(19): siRNA sense strand
aggagugggaauauuuaaa

SEQ ID NO: 2650767 - RNA, 19 nt, Homo sapiens
  misc_RNA (1)...(19): siRNA sense strand
gggaagagguggcagguga

SEQ ID NO: 2650768 - RNA, 19 nt, Homo sapiens
  misc_RNA (1)...(19): siRNA sense strand
gguccacacaggagagaaa

SEQ ID NO: 2650769 - RNA, 19 nt, Homo sapiens
  misc_RNA (1)...(19): siRNA sense strand
ccauauaaaugcagcgagu

SEQ ID NO: 2650770 - RNA, 19 nt, Homo sapiens
  misc_RNA (1)...(19): siRNA sense strand
cuauaaaugcagugagugu

SEQ ID NO: 2650771 - RNA, 19 nt, Homo sapiens
  misc_RNA (1)...(19): siRNA sense strand
gcuuaucggucuagaaaau

SEQ ID NO: 2650772 - RNA, 19 nt, Homo sapiens
  misc_RNA (1)...(19): siRNA sense strand
agugagggcuugaggcaca

SEQ ID NO: 2650773 - RNA, 19 nt, Homo sapiens
  misc_RNA (1)...(19): siRNA sense strand
guugcacacaggagagaaa

SEQ ID NO: 2650774 - RNA, 19 nt, Homo sapiens
  misc_RNA (1)...(19): siRNA sense strand
gugggaaggguuucagaua

SEQ ID NO: 2650775 - RNA, 19 nt, Homo sapiens
  misc_RNA (1)...(19): siRNA sense strand
guguggugugugugggaaa

SEQ ID NO: 2650776 - RNA, 19 nt, Homo sapiens
  misc_RNA (1)...(19): siRNA sense strand
ggaagagguggcaggugaa

SEQ ID NO: 2650777 - RNA, 19 nt, Homo sapiens
  misc_RNA (1)...(19): siRNA sense strand
cugucaauaugaugaguuu

SEQ ID NO: 2650778 - RNA, 19 nt, Homo sapiens
  misc_RNA (1)...(19): siRNA sense strand
gugaaugugggaaggguuu

SEQ ID NO: 2650779 - RNA, 19 nt, Homo sapiens
  misc_RNA (1)...(19): siRNA sense strand
aagaugugaugcaggagaa

SEQ ID NO: 2650780 - RNA, 19 nt, Homo sapiens
  misc_RNA (1)...(19): siRNA sense strand
ggaaagggauucagcugca

SEQ ID NO: 2650781 - RNA, 19 nt, Homo sapiens
  misc_RNA (1)...(19): siRNA sense strand
cccaagauagggaggagaa

SEQ ID NO: 2650782 - RNA, 19 nt, Homo sapiens
  misc_RNA (1)...(19): siRNA sense strand
gugggaaaggcuucaguua

SEQ ID NO: 2650783 - RNA, 19 nt, Homo sapiens
  misc_RNA (1)...(19): siRNA sense strand
gcucacaucuucaagguca

SEQ ID NO: 2650784 - RNA, 19 nt, Homo sapiens
  misc_RNA (1)...(19): siRNA sense strand
ugggagacaagaauggaaa

SEQ ID NO: 2650785 - RNA, 19 nt, Homo sapiens
  misc_RNA (1)...(19): siRNA sense strand
cuggagagcuauaagacca

SEQ ID NO: 2650786 - RNA, 19 nt, Homo sapiens
  misc_RNA (1)...(19): siRNA sense strand
aguaaaucugcaaggaaaa

SEQ ID NO: 2650787 - RNA, 19 nt, Homo sapiens
  misc_RNA (1)...(19): siRNA sense strand
ggcaaagguuucagucaca

SEQ ID NO: 2650788 - RNA, 19 nt, Homo sapiens
  misc_RNA (1)...(19): siRNA sense strand
acugcacacaggagagaaa

SEQ ID NO: 2650789 - RNA, 19 nt, Homo sapiens
  misc_RNA (1)...(19): siRNA sense strand
aagauagggaggagaagau

SEQ ID NO: 2650790 - RNA, 19 nt, Homo sapiens
  misc_RNA (1)...(19): siRNA sense strand
auggaaaggauacggagua

SEQ ID NO: 2650791 - RNA, 19 nt, Homo sapiens
  misc_RNA (1)...(19): siRNA sense strand
cagaaaagacugcauuaaa

SEQ ID NO: 2650792 - RNA, 19 nt, Homo sapiens
  misc_RNA (1)...(19): siRNA sense strand
guggcaaaggcuucaguua

SEQ ID NO: 2650793 - RNA, 19 nt, Homo sapiens
  misc_RNA (1)...(19): siRNA sense strand
guggcaagggauucaguua

SEQ ID NO: 2650794 - RNA, 19 nt, Homo sapiens
  misc_RNA (1)...(19): siRNA sense strand
augugaugcaggagaauuu

SEQ ID NO: 2650795 - RNA, 19 nt, Homo sapiens
  misc_RNA (1)...(19): siRNA sense strand
gcgaguguggaaagggauu

SEQ ID NO: 2650796 - RNA, 19 nt, Homo sapiens
  misc_RNA (1)...(19): siRNA sense strand
ccuucaagcucaccagaga

SEQ ID NO: 2650797 - RNA, 19 nt, Homo sapiens
  misc_RNA (1)...(19): siRNA sense strand
aguccacacaggcgagaaa

SEQ ID NO: 2650798 - RNA, 19 nt, Homo sapiens
  misc_RNA (1)...(19): siRNA sense strand
ggcuuuaggugcacaucaa

SEQ ID NO: 2650799 - RNA, 19 nt, Homo sapiens
  misc_RNA (1)...(19): siRNA sense strand
ucacugaggaggagcuaga

SEQ ID NO: 2650800 - RNA, 19 nt, Homo sapiens
  misc_RNA (1)...(19): siRNA sense strand
uggagagaauggcuugaaa

SEQ ID NO: 2650801 - RNA, 19 nt, Homo sapiens
  misc_RNA (1)...(19): siRNA sense strand
ggagagaauggcuugaaaa

SEQ ID NO: 2650802 - RNA, 19 nt, Homo sapiens
  misc_RNA (1)...(19): siRNA sense strand
cugcagcgaguguggcaaa

SEQ ID NO: 2650803 - RNA, 19 nt, Homo sapiens
  misc_RNA (1)...(19): siRNA sense strand
agaguaaaucugcaaggaa

SEQ ID NO: 2650804 - RNA, 19 nt, Homo sapiens
  misc_RNA (1)...(19): siRNA sense strand
gcauuuggucgaaguucaa

SEQ ID NO: 2650805 - RNA, 19 nt, Homo sapiens
  misc_RNA (1)...(19): siRNA sense strand
cccuauaaaugcagugagu

SEQ ID NO: 2650806 - RNA, 19 nt, Homo sapiens
  misc_RNA (1)...(19): siRNA sense strand
gggcagcaucuguacaaau

SEQ ID NO: 2650807 - RNA, 19 nt, Homo sapiens
  misc_RNA (1)...(19): siRNA sense strand
gcucagugcuucaagucca

SEQ ID NO: 2650808 - RNA, 19 nt, Homo sapiens
  misc_RNA (1)...(19): siRNA sense strand
gcuugaaaaguaacgaaua

SEQ ID NO: 2650809 - RNA, 19 nt, Homo sapiens
  misc_RNA (1)...(19): siRNA sense strand
caggagagaaaucuguuaa

SEQ ID NO: 2650810 - RNA, 19 nt, Homo sapiens
  misc_RNA (1)...(19): siRNA sense strand
auauaaaugcagcgagugu

SEQ ID NO: 2650811 - RNA, 19 nt, Homo sapiens
  misc_RNA (1)...(19): siRNA sense strand
agaaauggcuucagggacg

SEQ ID NO: 2650812 - RNA, 19 nt, Homo sapiens
  misc_RNA (1)...(19): siRNA sense strand
aggaaggagacccuauaaa

SEQ ID NO: 2650813 - RNA, 19 nt, Homo sapiens
  misc_RNA (1)...(19): siRNA sense strand
uggagagaaaccauauaaa

SEQ ID NO: 2650814 - RNA, 19 nt, Homo sapiens
  misc_RNA (1)...(19): siRNA sense strand
gcuucaaggacguggcugu

SEQ ID NO: 2650815 - RNA, 19 nt, Homo sapiens
  misc_RNA (1)...(19): siRNA sense strand
ggaugggcuuaucggucua

SEQ ID NO: 2650816 - RNA, 19 nt, Homo sapiens
  misc_RNA (1)...(19): siRNA sense strand
cacagaagacacaguauau

SEQ ID NO: 2650817 - RNA, 19 nt, Homo sapiens
  misc_RNA (1)...(19): siRNA sense strand
gggaagagcuuuggccgga

SEQ ID NO: 2650818 - RNA, 19 nt, Homo sapiens
  misc_RNA (1)...(19): siRNA sense strand
gcauuaacccuggagagaa

SEQ ID NO: 2650819 - RNA, 19 nt, Homo sapiens
  misc_RNA (1)...(19): siRNA sense strand
cuauaaaugugaggagugu

SEQ ID NO: 2650820 - RNA, 19 nt, Homo sapiens
  misc_RNA (1)...(19): siRNA sense strand
ccaagaacgugaaggagga

SEQ ID NO: 2650821 - RNA, 19 nt, Homo sapiens
  misc_RNA (1)...(19): siRNA sense strand
gcaccaagaacgugaagga

SEQ ID NO: 2650822 - RNA, 19 nt, Homo sapiens
  misc_RNA (1)...(19): siRNA sense strand
agagauacgagaagggcga

SEQ ID NO: 2650823 - RNA, 19 nt, Homo sapiens
  misc_RNA (1)...(19): siRNA sense strand
ccgggaauacaaaggagaa

SEQ ID NO: 2650824 - RNA, 19 nt, Homo sapiens
  misc_RNA (1)...(19): siRNA sense strand
ccaugaaggucaaggggca

SEQ ID NO: 2650825 - RNA, 19 nt, Homo sapiens
  misc_RNA (1)...(19): siRNA sense strand
gcgauagcuccaaggccaa

SEQ ID NO: 2650826 - RNA, 19 nt, Homo sapiens
  misc_RNA (1)...(19): siRNA sense strand
gcaccuacucacagaacca

SEQ ID NO: 2650827 - RNA, 19 nt, Homo sapiens
  misc_RNA (1)...(19): siRNA sense strand
ggaugaggccagugagggu

SEQ ID NO: 2650828 - RNA, 19 nt, Homo sapiens
  misc_RNA (1)...(19): siRNA sense strand
uuugaagcgcagagggaca

SEQ ID NO: 2650829 - RNA, 19 nt, Homo sapiens
  misc_RNA (1)...(19): siRNA sense strand
uggucaagaucuucagcuu

SEQ ID NO: 2650830 - RNA, 19 nt, Homo sapiens
  misc_RNA (1)...(19): siRNA sense strand
gcgugguagaugagugcau

SEQ ID NO: 2650831 - RNA, 19 nt, Homo sapiens
  misc_RNA (1)...(19): siRNA sense strand
acgugaaggaggagacugu

SEQ ID NO: 2650832 - RNA, 19 nt, Homo sapiens
  misc_RNA (1)...(19): siRNA sense strand
ccgcaagagauacgagaag

SEQ ID NO: 2650833 - RNA, 19 nt, Homo sapiens
  misc_RNA (1)...(19): siRNA sense strand
ccgcggaagaggagaccau

SEQ ID NO: 2650834 - RNA, 19 nt, Homo sapiens
  misc_RNA (1)...(19): siRNA sense strand
gaagagaaccagauccuga

SEQ ID NO: 2650835 - RNA, 19 nt, Homo sapiens
  misc_RNA (1)...(19): siRNA sense strand
cagaagcgcuggaacgacu

SEQ ID NO: 2650836 - RNA, 19 nt, Homo sapiens
  misc_RNA (1)...(19): siRNA sense strand
auacaucagcccacagcaa

SEQ ID NO: 2650837 - RNA, 19 nt, Homo sapiens
  misc_RNA (1)...(19): siRNA sense strand
ccacacaagcggagaaaag

SEQ ID NO: 2650838 - RNA, 19 nt, Homo sapiens
  misc_RNA (1)...(19): siRNA sense strand
cggaaagagcgaacggaaa

SEQ ID NO: 2650839 - RNA, 19 nt, Homo sapiens
  misc_RNA (1)...(19): siRNA sense strand
gcaucaucacugagguaaa

SEQ ID NO: 2650840 - RNA, 19 nt, Homo sapiens
  misc_RNA (1)...(19): siRNA sense strand
aguaugaggaugagaucaa

SEQ ID NO: 2650841 - RNA, 19 nt, Homo sapiens
  misc_RNA (1)...(19): siRNA sense strand
aggagaaggagcagaucaa

SEQ ID NO: 2650842 - RNA, 19 nt, Homo sapiens
  misc_RNA (1)...(19): siRNA sense strand
cuguauacacccaggagaa

SEQ ID NO: 2650843 - RNA, 19 nt, Homo sapiens
  misc_RNA (1)...(19): siRNA sense strand
gcggaaagagcgaacggaa

SEQ ID NO: 2650844 - RNA, 19 nt, Homo sapiens
  misc_RNA (1)...(19): siRNA sense strand
agguaaagaggcaguacaa

SEQ ID NO: 2650845 - RNA, 19 nt, Homo sapiens
  misc_RNA (1)...(19): siRNA sense strand
ucacugagguaaagaggca

SEQ ID NO: 2650846 - RNA, 19 nt, Homo sapiens
  misc_RNA (1)...(19): siRNA sense strand
ggaaagagcgaacggaaag

SEQ ID NO: 2650847 - RNA, 19 nt, Homo sapiens
  misc_RNA (1)...(19): siRNA sense strand
agaucaagacccucaacaa

SEQ ID NO: 2650848 - RNA, 19 nt, Homo sapiens
  misc_RNA (1)...(19): siRNA sense strand
acaacauguucgggagcua

SEQ ID NO: 2650849 - RNA, 19 nt, Homo sapiens
  misc_RNA (1)...(19): siRNA sense strand
gggagagcuaggagagcca

SEQ ID NO: 2650850 - RNA, 19 nt, Homo sapiens
  misc_RNA (1)...(19): siRNA sense strand
gcuaggaagcacagggaug

SEQ ID NO: 2650851 - RNA, 19 nt, Homo sapiens
  misc_RNA (1)...(19): siRNA sense strand
acaagauggcugggagcaa

SEQ ID NO: 2650852 - RNA, 19 nt, Homo sapiens
  misc_RNA (1)...(19): siRNA sense strand
aguacaaggagguugccaa

SEQ ID NO: 2650853 - RNA, 19 nt, Homo sapiens
  misc_RNA (1)...(19): siRNA sense strand
agguaugguuccuggagca

SEQ ID NO: 2650854 - RNA, 19 nt, Homo sapiens
  misc_RNA (1)...(19): siRNA sense strand
gaugagaucaauaagccua

SEQ ID NO: 2650855 - RNA, 19 nt, Homo sapiens
  misc_RNA (1)...(19): siRNA sense strand
aucaauaagccuacagaga

SEQ ID NO: 2650856 - RNA, 19 nt, Homo sapiens
  misc_RNA (1)...(19): siRNA sense strand
gagcgaacggaaaggggaa

SEQ ID NO: 2650857 - RNA, 19 nt, Homo sapiens
  misc_RNA (1)...(19): siRNA sense strand
gcugagagcacguaccaga

SEQ ID NO: 2650858 - RNA, 19 nt, Homo sapiens
  misc_RNA (1)...(19): siRNA sense strand
ucuccaagaugaaccggaa

SEQ ID NO: 2650859 - RNA, 19 nt, Homo sapiens
  misc_RNA (1)...(19): siRNA sense strand
agaacaaggugcuggagac

SEQ ID NO: 2650860 - RNA, 19 nt, Homo sapiens
  misc_RNA (1)...(19): siRNA sense strand
cggcauacaaagacucaga

SEQ ID NO: 2650861 - RNA, 19 nt, Homo sapiens
  misc_RNA (1)...(19): siRNA sense strand
ccucugacuuccugcccaa

SEQ ID NO: 2650862 - RNA, 19 nt, Homo sapiens
  misc_RNA (1)...(19): siRNA sense strand
cagaaguccuacaaggugu

SEQ ID NO: 2650863 - RNA, 19 nt, Homo sapiens
  misc_RNA (1)...(19): siRNA sense strand
ggaaaggggaagcgaacga

SEQ ID NO: 2650864 - RNA, 19 nt, Homo sapiens
  misc_RNA (1)...(19): siRNA sense strand
ugguggaggacuucaggaa

SEQ ID NO: 2650865 - RNA, 19 nt, Homo sapiens
  misc_RNA (1)...(19): siRNA sense strand
uacagaaagcugcgggaga

SEQ ID NO: 2650866 - RNA, 19 nt, Homo sapiens
  misc_RNA (1)...(19): siRNA sense strand
gagcagaucaagacccuca

SEQ ID NO: 2650867 - RNA, 19 nt, Homo sapiens
  misc_RNA (1)...(19): siRNA sense strand
cagaacaaggugcuggaga

SEQ ID NO: 2650868 - RNA, 19 nt, Homo sapiens
  misc_RNA (1)...(19): siRNA sense strand
ucaaguauguggagcugca

SEQ ID NO: 2650869 - RNA, 19 nt, Homo sapiens
  misc_RNA (1)...(19): siRNA sense strand
guggagaagaugaggacuu

SEQ ID NO: 2650870 - RNA, 19 nt, Homo sapiens
  misc_RNA (1)...(19): siRNA sense strand
guuugaacuuggaaggaga

SEQ ID NO: 2650871 - RNA, 19 nt, Homo sapiens
  misc_RNA (1)...(19): siRNA sense strand
aggaugagaucuauggaca

SEQ ID NO: 2650872 - RNA, 19 nt, Homo sapiens
  misc_RNA (1)...(19): siRNA sense strand
ggcccuggucuuugagaaa

SEQ ID NO: 2650873 - RNA, 19 nt, Homo sapiens
  misc_RNA (1)...(19): siRNA sense strand
ccaugaggauagugggucu

SEQ ID NO: 2650874 - RNA, 19 nt, Homo sapiens
  misc_RNA (1)...(19): siRNA sense strand
agaaacagcuggcgcagga

SEQ ID NO: 2650875 - RNA, 19 nt, Homo sapiens
  misc_RNA (1)...(19): siRNA sense strand
ccggagacgcaucgugcaa

SEQ ID NO: 2650876 - RNA, 19 nt, Homo sapiens
  misc_RNA (1)...(19): siRNA sense strand
gagaaaugugaacuggcua

SEQ ID NO: 2650877 - RNA, 19 nt, Homo sapiens
  misc_RNA (1)...(19): siRNA sense strand
cugaagagggagaaggaug

SEQ ID NO: 2650878 - RNA, 19 nt, Homo sapiens
  misc_RNA (1)...(19): siRNA sense strand
aagaugaggacuuggacca

SEQ ID NO: 2650879 - RNA, 19 nt, Homo sapiens
  misc_RNA (1)...(19): siRNA sense strand
ccagaauaauauguggauu

SEQ ID NO: 2650880 - RNA, 19 nt, Homo sapiens
  misc_RNA (1)...(19): siRNA sense strand
gaucaguggggaugaguuu

SEQ ID NO: 2650881 - RNA, 19 nt, Homo sapiens
  misc_RNA (1)...(19): siRNA sense strand
agaagaaacagcuggcgca

SEQ ID NO: 2650882 - RNA, 19 nt, Homo sapiens
  misc_RNA (1)...(19): siRNA sense strand
ggauagcagagaugggcaa

SEQ ID NO: 2650883 - RNA, 19 nt, Homo sapiens
  misc_RNA (1)...(19): siRNA sense strand
cgaacuuggccuugguaau

SEQ ID NO: 2650884 - RNA, 19 nt, Homo sapiens
  misc_RNA (1)...(19): siRNA sense strand
cgucaaaagagaaggagau

SEQ ID NO: 2650885 - RNA, 19 nt, Homo sapiens
  misc_RNA (1)...(19): siRNA sense strand
gcaccuucuacguggacua

SEQ ID NO: 2650886 - RNA, 19 nt, Homo sapiens
  misc_RNA (1)...(19): siRNA sense strand
uggagcagcuggugggcau

SEQ ID NO: 2650887 - RNA, 19 nt, Homo sapiens
  misc_RNA (1)...(19): siRNA sense strand
cggacaaggaucuggagca

SEQ ID NO: 2650888 - RNA, 19 nt, Homo sapiens
  misc_RNA (1)...(19): siRNA sense strand
ugaagauaguugaugacga

SEQ ID NO: 2650889 - RNA, 19 nt, Homo sapiens
  misc_RNA (1)...(19): siRNA sense strand
acgaggaggaggaggagga

SEQ ID NO: 2650890 - RNA, 19 nt, Homo sapiens
  misc_RNA (1)...(19): siRNA sense strand
agaucaagcaccugagagu

SEQ ID NO: 2650891 - RNA, 19 nt, Homo sapiens
  misc_RNA (1)...(19): siRNA sense strand
ucaacauguuuguggucau

SEQ ID NO: 2650892 - RNA, 19 nt, Homo sapiens
  misc_RNA (1)...(19): siRNA sense strand
cgaagagcaucgagcugga

SEQ ID NO: 2650893 - RNA, 19 nt, Homo sapiens
  misc_RNA (1)...(19): siRNA sense strand
agcagaagcacccggacaa

SEQ ID NO: 2650894 - RNA, 19 nt, Homo sapiens
  misc_RNA (1)...(19): siRNA sense strand
acgacaucuucgaggagga

SEQ ID NO: 2650895 - RNA, 19 nt, Homo sapiens
  misc_RNA (1)...(19): siRNA sense strand
guggcuuaagcgagggauu

SEQ ID NO: 2650896 - RNA, 19 nt, Homo sapiens
  misc_RNA (1)...(19): siRNA sense strand
ucaucaucgaggagucaua

SEQ ID NO: 2650897 - RNA, 19 nt, Homo sapiens
  misc_RNA (1)...(19): siRNA sense strand
gcuccaacgcggugaacgu

SEQ ID NO: 2650898 - RNA, 19 nt, Homo sapiens
  misc_RNA (1)...(19): siRNA sense strand
ugguguacuuuguggccau

SEQ ID NO: 2650899 - RNA, 19 nt, Homo sapiens
  misc_RNA (1)...(19): siRNA sense strand
gaagauaguugaugacgag

SEQ ID NO: 2650900 - RNA, 19 nt, Homo sapiens
  misc_RNA (1)...(19): siRNA sense strand
ggacaaggaucuggagcag

SEQ ID NO: 2650901 - RNA, 19 nt, Homo sapiens
  misc_RNA (1)...(19): siRNA sense strand
ggaaggugauccugggaga

SEQ ID NO: 2650902 - RNA, 19 nt, Homo sapiens
  misc_RNA (1)...(19): siRNA sense strand
aggagaaagcgcuggagaa

SEQ ID NO: 2650903 - RNA, 19 nt, Homo sapiens
  misc_RNA (1)...(19): siRNA sense strand
uggaagaagaagaggagga

SEQ ID NO: 2650904 - RNA, 19 nt, Homo sapiens
  misc_RNA (1)...(19): siRNA sense strand
aagaagaagaggaggagga

SEQ ID NO: 2650905 - RNA, 19 nt, Homo sapiens
  misc_RNA (1)...(19): siRNA sense strand
aagaagaggaggaggagga

SEQ ID NO: 2650906 - RNA, 19 nt, Homo sapiens
  misc_RNA (1)...(19): siRNA sense strand
cgcaaaggccggaugggua

SEQ ID NO: 2650907 - RNA, 19 nt, Homo sapiens
  misc_RNA (1)...(19): siRNA sense strand
ccgagagagaagagaaagu

SEQ ID NO: 2650908 - RNA, 19 nt, Homo sapiens
  misc_RNA (1)...(19): siRNA sense strand
ccccaaagagcgaggacaa

SEQ ID NO: 2650909 - RNA, 19 nt, Homo sapiens
  misc_RNA (1)...(19): siRNA sense strand
gagaagagaaagugcugga

SEQ ID NO: 2650910 - RNA, 19 nt, Homo sapiens
  misc_RNA (1)...(19): siRNA sense strand
aggacgaggacgaggacga

SEQ ID NO: 2650911 - RNA, 19 nt, Homo sapiens
  misc_RNA (1)...(19): siRNA sense strand
aggacgaggaggaggacga

SEQ ID NO: 2650912 - RNA, 19 nt, Homo sapiens
  misc_RNA (1)...(19): siRNA sense strand
aguccugggcaacgggaaa

SEQ ID NO: 2650913 - RNA, 19 nt, Homo sapiens
  misc_RNA (1)...(19): siRNA sense strand
agagaaagugcuggagaau

SEQ ID NO: 2650914 - RNA, 19 nt, Homo sapiens
  misc_RNA (1)...(19): siRNA sense strand
aggacgaggacgaggagga

SEQ ID NO: 2650915 - RNA, 19 nt, Homo sapiens
  misc_RNA (1)...(19): siRNA sense strand
acuacaaggaggacuacua

SEQ ID NO: 2650916 - RNA, 19 nt, Homo sapiens
  misc_RNA (1)...(19): siRNA sense strand
ggguggaagaagaagagga

SEQ ID NO: 2650917 - RNA, 19 nt, Homo sapiens
  misc_RNA (1)...(19): siRNA sense strand
gaagagaaagugcuggaga

SEQ ID NO: 2650918 - RNA, 19 nt, Homo sapiens
  misc_RNA (1)...(19): siRNA sense strand
cuggagaggaagcgcaaga

SEQ ID NO: 2650919 - RNA, 19 nt, Homo sapiens
  misc_RNA (1)...(19): siRNA sense strand
ggaccuucaugguggugga

SEQ ID NO: 2650920 - RNA, 19 nt, Homo sapiens
  misc_RNA (1)...(19): siRNA sense strand
gaggagaaagcgcuggaga

SEQ ID NO: 2650921 - RNA, 19 nt, Homo sapiens
  misc_RNA (1)...(19): siRNA sense strand
ccccgagagagaagagaaa

SEQ ID NO: 2650922 - RNA, 19 nt, Homo sapiens
  misc_RNA (1)...(19): siRNA sense strand
acgaggacgaggaggagga

SEQ ID NO: 2650923 - RNA, 19 nt, Homo sapiens
  misc_RNA (1)...(19): siRNA sense strand
gggaguggcugguuuggga

SEQ ID NO: 2650924 - RNA, 19 nt, Homo sapiens
  misc_RNA (1)...(19): siRNA sense strand
acaacuacgugcacagcga

SEQ ID NO: 2650925 - RNA, 19 nt, Homo sapiens
  misc_RNA (1)...(19): siRNA sense strand
gggagaagaucgaggccaa

SEQ ID NO: 2650926 - RNA, 19 nt, Homo sapiens
  misc_RNA (1)...(19): siRNA sense strand
aggaaaaggagaaggagaa

SEQ ID NO: 2650927 - RNA, 19 nt, Homo sapiens
  misc_RNA (1)...(19): siRNA sense strand
cuaccaaggugaaggcuga

SEQ ID NO: 2650928 - RNA, 19 nt, Homo sapiens
  misc_RNA (1)...(19): siRNA sense strand
augaggagcugaagcggaa

SEQ ID NO: 2650929 - RNA, 19 nt, Homo sapiens
  misc_RNA (1)...(19): siRNA sense strand
agauuaaggagguggagga

SEQ ID NO: 2650930 - RNA, 19 nt, Homo sapiens
  misc_RNA (1)...(19): siRNA sense strand
ccaagaagcuguacgccca

SEQ ID NO: 2650931 - RNA, 19 nt, Homo sapiens
  misc_RNA (1)...(19): siRNA sense strand
cugaaugagcacaagaaga

SEQ ID NO: 2650932 - RNA, 19 nt, Homo sapiens
  misc_RNA (1)...(19): siRNA sense strand
ggcgaaacgugaugggcca

SEQ ID NO: 2650933 - RNA, 19 nt, Homo sapiens
  misc_RNA (1)...(19): siRNA sense strand
gaggagaagcagccggaga

SEQ ID NO: 2650934 - RNA, 19 nt, Homo sapiens
  misc_RNA (1)...(19): siRNA sense strand
cugcagagagugagggucu

SEQ ID NO: 2650935 - RNA, 19 nt, Homo sapiens
  misc_RNA (1)...(19): siRNA sense strand
cggagaugaagucggguuu

SEQ ID NO: 2650936 - RNA, 19 nt, Homo sapiens
  misc_RNA (1)...(19): siRNA sense strand
uuacgagaggucagcgaaa

SEQ ID NO: 2650937 - RNA, 19 nt, Homo sapiens
  misc_RNA (1)...(19): siRNA sense strand
aggaagacucugucgccaa

SEQ ID NO: 2650938 - RNA, 19 nt, Homo sapiens
  misc_RNA (1)...(19): siRNA sense strand
gcacagcacuugacccaga

SEQ ID NO: 2650939 - RNA, 19 nt, Homo sapiens
  misc_RNA (1)...(19): siRNA sense strand
caaaggugguuauggagca

SEQ ID NO: 2650940 - RNA, 19 nt, Homo sapiens
  misc_RNA (1)...(19): siRNA sense strand
ccaccauggaggagauguu

SEQ ID NO: 2650941 - RNA, 19 nt, Homo sapiens
  misc_RNA (1)...(19): siRNA sense strand
cggccuguugagaaggaaa

SEQ ID NO: 2650942 - RNA, 19 nt, Homo sapiens
  misc_RNA (1)...(19): siRNA sense strand
aguacgaguucgaggcgga

SEQ ID NO: 2650943 - RNA, 19 nt, Homo sapiens
  misc_RNA (1)...(19): siRNA sense strand
ggguggugguggagguuac

SEQ ID NO: 2650944 - RNA, 19 nt, Homo sapiens
  misc_RNA (1)...(19): siRNA sense strand
ccgcaguccuuccuggcaa

SEQ ID NO: 2650945 - RNA, 19 nt, Homo sapiens
  misc_RNA (1)...(19): siRNA sense strand
agccaaagaagcugcucaa

SEQ ID NO: 2650946 - RNA, 19 nt, Homo sapiens
  misc_RNA (1)...(19): siRNA sense strand
aggccaagauuaaggaggu

SEQ ID NO: 2650947 - RNA, 19 nt, Homo sapiens
  misc_RNA (1)...(19): siRNA sense strand
gagcacagcacuugaccca

SEQ ID NO: 2650948 - RNA, 19 nt, Homo sapiens
  misc_RNA (1)...(19): siRNA sense strand
agauagacggccugcugaa

SEQ ID NO: 2650949 - RNA, 19 nt, Homo sapiens
  misc_RNA (1)...(19): siRNA sense strand
ucgaggcggacgaggacaa

SEQ ID NO: 2650950 - RNA, 19 nt, Homo sapiens
  misc_RNA (1)...(19): siRNA sense strand
aggagaagcagccggagau

SEQ ID NO: 2650951 - RNA, 19 nt, Homo sapiens
  misc_RNA (1)...(19): siRNA sense strand
augucaauaagaaggacua

SEQ ID NO: 2650952 - RNA, 19 nt, Homo sapiens
  misc_RNA (1)...(19): siRNA sense strand
gggagauguaccggagcua

SEQ ID NO: 2650953 - RNA, 19 nt, Homo sapiens
  misc_RNA (1)...(19): siRNA sense strand
gagaccugcaggagagcau

SEQ ID NO: 2650954 - RNA, 19 nt, Homo sapiens
  misc_RNA (1)...(19): siRNA sense strand
cagaaauucacuccggaga

SEQ ID NO: 2650955 - RNA, 19 nt, Homo sapiens
  misc_RNA (1)...(19): siRNA sense strand
uugagaaggaaaaggagaa

SEQ ID NO: 2650956 - RNA, 19 nt, Homo sapiens
  misc_RNA (1)...(19): siRNA sense strand
aaggaaaaggagaaggaga

SEQ ID NO: 2650957 - RNA, 19 nt, Homo sapiens
  misc_RNA (1)...(19): siRNA sense strand
aaggagaaggagaagcaga

SEQ ID NO: 2650958 - RNA, 19 nt, Homo sapiens
  misc_RNA (1)...(19): siRNA sense strand
guguaacaaaugugagaaa

SEQ ID NO: 2650959 - RNA, 19 nt, Homo sapiens
  misc_RNA (1)...(19): siRNA sense strand
guguaacgaacgugggaaa

SEQ ID NO: 2650960 - RNA, 19 nt, Homo sapiens
  misc_RNA (1)...(19): siRNA sense strand
ccaucaagagugugagcaa

SEQ ID NO: 2650961 - RNA, 19 nt, Homo sapiens
  misc_RNA (1)...(19): siRNA sense strand
ccagcuaagucuaaggaau

SEQ ID NO: 2650962 - RNA, 19 nt, Homo sapiens
  misc_RNA (1)...(19): siRNA sense strand
auguagugaaugugggaaa

SEQ ID NO: 2650963 - RNA, 19 nt, Homo sapiens
  misc_RNA (1)...(19): siRNA sense strand
gggaaaagcuucaguggga

SEQ ID NO: 2650964 - RNA, 19 nt, Homo sapiens
  misc_RNA (1)...(19): siRNA sense strand
guguaacgaaugcgggaaa

SEQ ID NO: 2650965 - RNA, 19 nt, Homo sapiens
  misc_RNA (1)...(19): siRNA sense strand
cuguaauguguguggcaaa

SEQ ID NO: 2650966 - RNA, 19 nt, Homo sapiens
  misc_RNA (1)...(19): siRNA sense strand
gugucaacguugccagaaa

SEQ ID NO: 2650967 - RNA, 19 nt, Homo sapiens
  misc_RNA (1)...(19): siRNA sense strand
guauaaauggggugagcaa

SEQ ID NO: 2650968 - RNA, 19 nt, Homo sapiens
  misc_RNA (1)...(19): siRNA sense strand
cagaaaacucacacagaua

SEQ ID NO: 2650969 - RNA, 19 nt, Homo sapiens
  misc_RNA (1)...(19): siRNA sense strand
guguaaugaauaugggaca

SEQ ID NO: 2650970 - RNA, 19 nt, Homo sapiens
  misc_RNA (1)...(19): siRNA sense strand
gagucuucacccagagaaa

SEQ ID NO: 2650971 - RNA, 19 nt, Homo sapiens
  misc_RNA (1)...(19): siRNA sense strand
gggacacagcguuggacaa

SEQ ID NO: 2650972 - RNA, 19 nt, Homo sapiens
  misc_RNA (1)...(19): siRNA sense strand
ccuuauaaguguaacgaac

SEQ ID NO: 2650973 - RNA, 19 nt, Homo sapiens
  misc_RNA (1)...(19): siRNA sense strand
agaaagaagccguuggugu

SEQ ID NO: 2650974 - RNA, 19 nt, Homo sapiens
  misc_RNA (1)...(19): siRNA sense strand
ccacggaaugcaagaguca

SEQ ID NO: 2650975 - RNA, 19 nt, Homo sapiens
  misc_RNA (1)...(19): siRNA sense strand
ggaauauaggggugaguuu

SEQ ID NO: 2650976 - RNA, 19 nt, Homo sapiens
  misc_RNA (1)...(19): siRNA sense strand
uuacaaaugcagugagugu

SEQ ID NO: 2650977 - RNA, 19 nt, Homo sapiens
  misc_RNA (1)...(19): siRNA sense strand
uguaaugaauaugggacaa

SEQ ID NO: 2650978 - RNA, 19 nt, Homo sapiens
  misc_RNA (1)...(19): siRNA sense strand
cggccugagugcugagcuu

SEQ ID NO: 2650979 - RNA, 19 nt, Homo sapiens
  misc_RNA (1)...(19): siRNA sense strand
gggaaagccuucacccaga

SEQ ID NO: 2650980 - RNA, 19 nt, Homo sapiens
  misc_RNA (1)...(19): siRNA sense strand
gugaagaucuggagccucu

SEQ ID NO: 2650981 - RNA, 19 nt, Homo sapiens
  misc_RNA (1)...(19): siRNA sense strand
cugaaugcaaggagacuuu

SEQ ID NO: 2650982 - RNA, 19 nt, Homo sapiens
  misc_RNA (1)...(19): siRNA sense strand
auguggugaaugugggaaa

SEQ ID NO: 2650983 - RNA, 19 nt, Homo sapiens
  misc_RNA (1)...(19): siRNA sense strand
auguaagagucaagauagu

SEQ ID NO: 2650984 - RNA, 19 nt, Homo sapiens
  misc_RNA (1)...(19): siRNA sense strand
cugaugugacugagaccaa

SEQ ID NO: 2650985 - RNA, 19 nt, Homo sapiens
  misc_RNA (1)...(19): siRNA sense strand
gagaaaaccuuuagcugca

SEQ ID NO: 2650986 - RNA, 19 nt, Homo sapiens
  misc_RNA (1)...(19): siRNA sense strand
aaauguaguaagugugaca

SEQ ID NO: 2650987 - RNA, 19 nt, Homo sapiens
  misc_RNA (1)...(19): siRNA sense strand
gguucacaguggagagaag

SEQ ID NO: 2650988 - RNA, 19 nt, Homo sapiens
  misc_RNA (1)...(19): siRNA sense strand
aggaaugcgucaggaguuu

SEQ ID NO: 2650989 - RNA, 19 nt, Homo sapiens
  misc_RNA (1)...(19): siRNA sense strand
gcaaggagacuuucagcga

SEQ ID NO: 2650990 - RNA, 19 nt, Homo sapiens
  misc_RNA (1)...(19): siRNA sense strand
accuuuagcugcagcaaau

SEQ ID NO: 2650991 - RNA, 19 nt, Homo sapiens
  misc_RNA (1)...(19): siRNA sense strand
gagucaugaauuaaagaga

SEQ ID NO: 2650992 - RNA, 19 nt, Homo sapiens
  misc_RNA (1)...(19): siRNA sense strand
aaauguaacgaaugcggaa

SEQ ID NO: 2650993 - RNA, 19 nt, Homo sapiens
  misc_RNA (1)...(19): siRNA sense strand
ccuuauguuugucaggaau

SEQ ID NO: 2650994 - RNA, 19 nt, Homo sapiens
  misc_RNA (1)...(19): siRNA sense strand
aggaggaagcccagaagca

SEQ ID NO: 2650995 - RNA, 19 nt, Homo sapiens
  misc_RNA (1)...(19): siRNA sense strand
cacucauacuagggagaaa

SEQ ID NO: 2650996 - RNA, 19 nt, Homo sapiens
  misc_RNA (1)...(19): siRNA sense strand
ccuuacaaaugcagugagu

SEQ ID NO: 2650997 - RNA, 19 nt, Homo sapiens
  misc_RNA (1)...(19): siRNA sense strand
ggccaaaguacucggcuca

SEQ ID NO: 2650998 - RNA, 19 nt, Homo sapiens
  misc_RNA (1)...(19): siRNA sense strand
ccaggagauuauagagaug

SEQ ID NO: 2650999 - RNA, 19 nt, Homo sapiens
  misc_RNA (1)...(19): siRNA sense strand
ccauaugaaugucaggagu

SEQ ID NO: 2651000 - RNA, 19 nt, Homo sapiens
  misc_RNA (1)...(19): siRNA sense strand
gcucaacccugaagugcca

SEQ ID NO: 2651001 - RNA, 19 nt, Homo sapiens
  misc_RNA (1)...(19): siRNA sense strand
ccucauccaacaucagaaa

SEQ ID NO: 2651002 - RNA, 19 nt, Homo sapiens
  misc_RNA (1)...(19): siRNA sense strand
caggaaugcgucaggaguu

SEQ ID NO: 2651003 - RNA, 19 nt, Homo sapiens
  misc_RNA (1)...(19): siRNA sense strand
acccagaacagaaagagaa

SEQ ID NO: 2651004 - RNA, 19 nt, Homo sapiens
  misc_RNA (1)...(19): siRNA sense strand
gccuuauguuugucaggaa

SEQ ID NO: 2651005 - RNA, 19 nt, Homo sapiens
  misc_RNA (1)...(19): siRNA sense strand
aggagauuauagagauguu

SEQ ID NO: 2651006 - RNA, 19 nt, Homo sapiens
  misc_RNA (1)...(19): siRNA sense strand
cugguuagauaguuugcua

SEQ ID NO: 2651007 - RNA, 19 nt, Homo sapiens
  misc_RNA (1)...(19): siRNA sense strand
gagaagauuccauggugca

SEQ ID NO: 2651008 - RNA, 19 nt, Homo sapiens
  misc_RNA (1)...(19): siRNA sense strand
cuacaaauucuaugugugu

SEQ ID NO: 2651009 - RNA, 19 nt, Homo sapiens
  misc_RNA (1)...(19): siRNA sense strand
ugucaggagugugggaaga

SEQ ID NO: 2651010 - RNA, 19 nt, Homo sapiens
  misc_RNA (1)...(19): siRNA sense strand
cuuaaugaacaucggcgaa

SEQ ID NO: 2651011 - RNA, 19 nt, Homo sapiens
  misc_RNA (1)...(19): siRNA sense strand
gugcuuuaaguguaacaaa

SEQ ID NO: 2651012 - RNA, 19 nt, Homo sapiens
  misc_RNA (1)...(19): siRNA sense strand
cuagagugaggcuguauaa

SEQ ID NO: 2651013 - RNA, 19 nt, Homo sapiens
  misc_RNA (1)...(19): siRNA sense strand
gcgaauucauacaggcuac

SEQ ID NO: 2651014 - RNA, 19 nt, Homo sapiens
  misc_RNA (1)...(19): siRNA sense strand
gaaaaugcacacugucaaa

SEQ ID NO: 2651015 - RNA, 19 nt, Homo sapiens
  misc_RNA (1)...(19): siRNA sense strand
gcaaauaccuaacucagca

SEQ ID NO: 2651016 - RNA, 19 nt, Homo sapiens
  misc_RNA (1)...(19): siRNA sense strand
uaacucagcacgagaggau

SEQ ID NO: 2651017 - RNA, 19 nt, Homo sapiens
  misc_RNA (1)...(19): siRNA sense strand
ccucagagccacugggaac

SEQ ID NO: 2651018 - RNA, 19 nt, Homo sapiens
  misc_RNA (1)...(19): siRNA sense strand
gggaacugacagcggccaa

SEQ ID NO: 2651019 - RNA, 19 nt, Homo sapiens
  misc_RNA (1)...(19): siRNA sense strand
ugguacaggcucugcggaa

SEQ ID NO: 2651020 - RNA, 19 nt, Homo sapiens
  misc_RNA (1)...(19): siRNA sense strand
gggcagagaccacagcuga

SEQ ID NO: 2651021 - RNA, 19 nt, Homo sapiens
  misc_RNA (1)...(19): siRNA sense strand
cagugaaggcagcgaccau

SEQ ID NO: 2651022 - RNA, 19 nt, Homo sapiens
  misc_RNA (1)...(19): siRNA sense strand
cguacauucgggagcagua

SEQ ID NO: 2651023 - RNA, 19 nt, Homo sapiens
  misc_RNA (1)...(19): siRNA sense strand
aggcuacagcgaagggaca

SEQ ID NO: 2651024 - RNA, 19 nt, Homo sapiens
  misc_RNA (1)...(19): siRNA sense strand
ggacguuggugcagccacu

SEQ ID NO: 2651025 - RNA, 19 nt, Homo sapiens
  misc_RNA (1)...(19): siRNA sense strand
cuaaaggacuucagagagg

SEQ ID NO: 2651026 - RNA, 19 nt, Homo sapiens
  misc_RNA (1)...(19): siRNA sense strand
gcaagaaccuggugcgcaa

SEQ ID NO: 2651027 - RNA, 19 nt, Homo sapiens
  misc_RNA (1)...(19): siRNA sense strand
ucaucaacguggaggacga

SEQ ID NO: 2651028 - RNA, 19 nt, Homo sapiens
  misc_RNA (1)...(19): siRNA sense strand
cggugaugcucguggccuu

SEQ ID NO: 2651029 - RNA, 19 nt, Homo sapiens
  misc_RNA (1)...(19): siRNA sense strand
agcucaagcggcuggaaua

SEQ ID NO: 2651030 - RNA, 19 nt, Homo sapiens
  misc_RNA (1)...(19): siRNA sense strand
ugugcaaccucaaggacau

SEQ ID NO: 2651031 - RNA, 19 nt, Homo sapiens
  misc_RNA (1)...(19): siRNA sense strand
caguacacgugcaugguga

SEQ ID NO: 2651032 - RNA, 19 nt, Homo sapiens
  misc_RNA (1)...(19): siRNA sense strand
ugacgaacucagccggcaa

SEQ ID NO: 2651033 - RNA, 19 nt, Homo sapiens
  misc_RNA (1)...(19): siRNA sense strand
ggguaguggcugugaagau

SEQ ID NO: 2651034 - RNA, 19 nt, Homo sapiens
  misc_RNA (1)...(19): siRNA sense strand
agguugaggagaauguaua

SEQ ID NO: 2651035 - RNA, 19 nt, Homo sapiens
  misc_RNA (1)...(19): siRNA sense strand
guggcgagaggaagaacaa

SEQ ID NO: 2651036 - RNA, 19 nt, Homo sapiens
  misc_RNA (1)...(19): siRNA sense strand
ggcgagaggaagaacaaaa

SEQ ID NO: 2651037 - RNA, 19 nt, Homo sapiens
  misc_RNA (1)...(19): siRNA sense strand
gggcaguggagguugagga

SEQ ID NO: 2651038 - RNA, 19 nt, Homo sapiens
  misc_RNA (1)...(19): siRNA sense strand
gcaagauuccggcuggaga

SEQ ID NO: 2651039 - RNA, 19 nt, Homo sapiens
  misc_RNA (1)...(19): siRNA sense strand
uggauugggaccugggaaa

SEQ ID NO: 2651040 - RNA, 19 nt, Homo sapiens
  misc_RNA (1)...(19): siRNA sense strand
ggucaaauguuucugcuga

SEQ ID NO: 2651041 - RNA, 19 nt, Homo sapiens
  misc_RNA (1)...(19): siRNA sense strand
ucagaaaagaagaugcaua

SEQ ID NO: 2651042 - RNA, 19 nt, Homo sapiens
  misc_RNA (1)...(19): siRNA sense strand
ggaaacuccacaucggcaa

SEQ ID NO: 2651043 - RNA, 19 nt, Homo sapiens
  misc_RNA (1)...(19): siRNA sense strand
gaaagaagcucgaggucca

SEQ ID NO: 2651044 - RNA, 19 nt, Homo sapiens
  misc_RNA (1)...(19): siRNA sense strand
acugggagacagaguacua

SEQ ID NO: 2651045 - RNA, 19 nt, Homo sapiens
  misc_RNA (1)...(19): siRNA sense strand
gagaaaaugaagaagguca

SEQ ID NO: 2651046 - RNA, 19 nt, Homo sapiens
  misc_RNA (1)...(19): siRNA sense strand
gggacguucuccugcguga

SEQ ID NO: 2651047 - RNA, 19 nt, Homo sapiens
  misc_RNA (1)...(19): siRNA sense strand
uauucauacuggagagaaa

SEQ ID NO: 2651048 - RNA, 19 nt, Homo sapiens
  misc_RNA (1)...(19): siRNA sense strand
aguccauacaagagggaaa

SEQ ID NO: 2651049 - RNA, 19 nt, Homo sapiens
  misc_RNA (1)...(19): siRNA sense strand
aguucauacuggagacaaa

SEQ ID NO: 2651050 - RNA, 19 nt, Homo sapiens
  misc_RNA (1)...(19): siRNA sense strand
gaacaguaacacaggagaa

SEQ ID NO: 2651051 - RNA, 19 nt, Homo sapiens
  misc_RNA (1)...(19): siRNA sense strand
acgugauguuggagaacua

SEQ ID NO: 2651052 - RNA, 19 nt, Homo sapiens
  misc_RNA (1)...(19): siRNA sense strand
agguaaugaguguggcaaa

SEQ ID NO: 2651053 - RNA, 19 nt, Homo sapiens
  misc_RNA (1)...(19): siRNA sense strand
gaaaacaagcauauggaaa

SEQ ID NO: 2651054 - RNA, 19 nt, Homo sapiens
  misc_RNA (1)...(19): siRNA sense strand
auguaaugaauguggcaaa

SEQ ID NO: 2651055 - RNA, 19 nt, Homo sapiens
  misc_RNA (1)...(19): siRNA sense strand
uggaaggacaugaaagcua

SEQ ID NO: 2651056 - RNA, 19 nt, Homo sapiens
  misc_RNA (1)...(19): siRNA sense strand
aauucauacuggagagaca

SEQ ID NO: 2651057 - RNA, 19 nt, Homo sapiens
  misc_RNA (1)...(19): siRNA sense strand
aaacaaucuuacuggucaa

SEQ ID NO: 2651058 - RNA, 19 nt, Homo sapiens
  misc_RNA (1)...(19): siRNA sense strand
aauccaugcaggaaagaaa

SEQ ID NO: 2651059 - RNA, 19 nt, Homo sapiens
  misc_RNA (1)...(19): siRNA sense strand
aagucacacuggagacaaa

SEQ ID NO: 2651060 - RNA, 19 nt, Homo sapiens
  misc_RNA (1)...(19): siRNA sense strand
cgaugugggaagugcuuua

SEQ ID NO: 2651061 - RNA, 19 nt, Homo sapiens
  misc_RNA (1)...(19): siRNA sense strand
auguaaugaguguggcaaa

SEQ ID NO: 2651062 - RNA, 19 nt, Homo sapiens
  misc_RNA (1)...(19): siRNA sense strand
gggauguggcuguagaauu

SEQ ID NO: 2651063 - RNA, 19 nt, Homo sapiens
  misc_RNA (1)...(19): siRNA sense strand
auguaaugaguguggcaaa

SEQ ID NO: 2651064 - RNA, 19 nt, Homo sapiens
  misc_RNA (1)...(19): siRNA sense strand
caccaauacagaacaguaa

SEQ ID NO: 2651065 - RNA, 19 nt, Homo sapiens
  misc_RNA (1)...(19): siRNA sense strand
cagugauguuggaaggaca

SEQ ID NO: 2651066 - RNA, 19 nt, Homo sapiens
  misc_RNA (1)...(19): siRNA sense strand
cgucauuggaguauucaua

SEQ ID NO: 2651067 - RNA, 19 nt, Homo sapiens
  misc_RNA (1)...(19): siRNA sense strand
guggcaaguccuuuaguaa

SEQ ID NO: 2651068 - RNA, 19 nt, Homo sapiens
  misc_RNA (1)...(19): siRNA sense strand
ucucaggaggaguggaaau

SEQ ID NO: 2651069 - RNA, 19 nt, Homo sapiens
  misc_RNA (1)...(19): siRNA sense strand
augcaaugagucugguaaa

SEQ ID NO: 2651070 - RNA, 19 nt, Homo sapiens
  misc_RNA (1)...(19): siRNA sense strand
acuaacaguacaucagaua

SEQ ID NO: 2651071 - RNA, 19 nt, Homo sapiens
  misc_RNA (1)...(19): siRNA sense strand
auauaauccaugcaggaaa

SEQ ID NO: 2651072 - RNA, 19 nt, Homo sapiens
  misc_RNA (1)...(19): siRNA sense strand
cauguuggagcaagggaaa

SEQ ID NO: 2651073 - RNA, 19 nt, Homo sapiens
  misc_RNA (1)...(19): siRNA sense strand
aggaaauaugggaaugauu

SEQ ID NO: 2651074 - RNA, 19 nt, Homo sapiens
  misc_RNA (1)...(19): siRNA sense strand
aaaccauacuggagagaag

SEQ ID NO: 2651075 - RNA, 19 nt, Homo sapiens
  misc_RNA (1)...(19): siRNA sense strand
ucacuaaacaccaacgaau

SEQ ID NO: 2651076 - RNA, 19 nt, Homo sapiens
  misc_RNA (1)...(19): siRNA sense strand
caacuaaacucaaugugga

SEQ ID NO: 2651077 - RNA, 19 nt, Homo sapiens
  misc_RNA (1)...(19): siRNA sense strand
uuguaaggcaccagauaau

SEQ ID NO: 2651078 - RNA, 19 nt, Homo sapiens
  misc_RNA (1)...(19): siRNA sense strand
ccaccaauacagaacagua

SEQ ID NO: 2651079 - RNA, 19 nt, Homo sapiens
  misc_RNA (1)...(19): siRNA sense strand
ggacaugaaagcuaugaca

SEQ ID NO: 2651080 - RNA, 19 nt, Homo sapiens
  misc_RNA (1)...(19): siRNA sense strand
gaaaacacauauuagggaa

SEQ ID NO: 2651081 - RNA, 19 nt, Homo sapiens
  misc_RNA (1)...(19): siRNA sense strand
aaacggaacucaagccuca

SEQ ID NO: 2651082 - RNA, 19 nt, Homo sapiens
  misc_RNA (1)...(19): siRNA sense strand
ccucagggaucuuugacau

SEQ ID NO: 2651083 - RNA, 19 nt, Homo sapiens
  misc_RNA (1)...(19): siRNA sense strand
aagugaaaauagcgaggaa

SEQ ID NO: 2651084 - RNA, 19 nt, Homo sapiens
  misc_RNA (1)...(19): siRNA sense strand
uguaaugaguguggcaaau

SEQ ID NO: 2651085 - RNA, 19 nt, Homo sapiens
  misc_RNA (1)...(19): siRNA sense strand
uguggugagccaagugaaa

SEQ ID NO: 2651086 - RNA, 19 nt, Homo sapiens
  misc_RNA (1)...(19): siRNA sense strand
cuuuagaguacguucaauu

SEQ ID NO: 2651087 - RNA, 19 nt, Homo sapiens
  misc_RNA (1)...(19): siRNA sense strand
ccauguuggagcaagggaa

SEQ ID NO: 2651088 - RNA, 19 nt, Homo sapiens
  misc_RNA (1)...(19): siRNA sense strand
cuucagggaaauccggaaa

SEQ ID NO: 2651089 - RNA, 19 nt, Homo sapiens
  misc_RNA (1)...(19): siRNA sense strand
ccucacuaaacaucagaua

SEQ ID NO: 2651090 - RNA, 19 nt, Homo sapiens
  misc_RNA (1)...(19): siRNA sense strand
gggaaagagcccuggacug

SEQ ID NO: 2651091 - RNA, 19 nt, Homo sapiens
  misc_RNA (1)...(19): siRNA sense strand
auacaagagggaaaccaua

SEQ ID NO: 2651092 - RNA, 19 nt, Homo sapiens
  misc_RNA (1)...(19): siRNA sense strand
guggaaaggccguuagaug

SEQ ID NO: 2651093 - RNA, 19 nt, Homo sapiens
  misc_RNA (1)...(19): siRNA sense strand
ggaaaugccuggacccugu

SEQ ID NO: 2651094 - RNA, 19 nt, Homo sapiens
  misc_RNA (1)...(19): siRNA sense strand
uugagaggacaguuaauaa

SEQ ID NO: 2651095 - RNA, 19 nt, Homo sapiens
  misc_RNA (1)...(19): siRNA sense strand
aaugugugaucaaggaauu

SEQ ID NO: 2651096 - RNA, 19 nt, Homo sapiens
  misc_RNA (1)...(19): siRNA sense strand
cagagaaaccuuacagaug

SEQ ID NO: 2651097 - RNA, 19 nt, Homo sapiens
  misc_RNA (1)...(19): siRNA sense strand
agauaaaacaugcuggaga

SEQ ID NO: 2651098 - RNA, 19 nt, Homo sapiens
  misc_RNA (1)...(19): siRNA sense strand
uugcaguucaucagagaau

SEQ ID NO: 2651099 - RNA, 19 nt, Homo sapiens
  misc_RNA (1)...(19): siRNA sense strand
ucauauaauccaugcagga

SEQ ID NO: 2651100 - RNA, 19 nt, Homo sapiens
  misc_RNA (1)...(19): siRNA sense strand
cuuguaaggcaccagauaa

SEQ ID NO: 2651101 - RNA, 19 nt, Homo sapiens
  misc_RNA (1)...(19): siRNA sense strand
cacuaaacaccaacgaauu

SEQ ID NO: 2651102 - RNA, 19 nt, Homo sapiens
  misc_RNA (1)...(19): siRNA sense strand
gggaaugcaugaaaggcgu

SEQ ID NO: 2651103 - RNA, 19 nt, Homo sapiens
  misc_RNA (1)...(19): siRNA sense strand
cagacaaaauucagaucuu

SEQ ID NO: 2651104 - RNA, 19 nt, Homo sapiens
  misc_RNA (1)...(19): siRNA sense strand
aggaaagaaaccauauaca

SEQ ID NO: 2651105 - RNA, 19 nt, Homo sapiens
  misc_RNA (1)...(19): siRNA sense strand
ccuuacaacuaaacucaau

SEQ ID NO: 2651106 - RNA, 19 nt, Homo sapiens
  misc_RNA (1)...(19): siRNA sense strand
ccuggacccuguucagaaa

SEQ ID NO: 2651107 - RNA, 19 nt, Homo sapiens
  misc_RNA (1)...(19): siRNA sense strand
gagaaaccuuacagaugca

SEQ ID NO: 2651108 - RNA, 19 nt, Homo sapiens
  misc_RNA (1)...(19): siRNA sense strand
aguucauacuggagagaaa

SEQ ID NO: 2651109 - RNA, 19 nt, Homo sapiens
  misc_RNA (1)...(19): siRNA sense strand
aauucauaguggagagaaa

SEQ ID NO: 2651110 - RNA, 19 nt, Homo sapiens
  misc_RNA (1)...(19): siRNA sense strand
aguccauacaagagggaaa

SEQ ID NO: 2651111 - RNA, 19 nt, Homo sapiens
  misc_RNA (1)...(19): siRNA sense strand
auggaaagauggugaaaca

SEQ ID NO: 2651112 - RNA, 19 nt, Homo sapiens
  misc_RNA (1)...(19): siRNA sense strand
aauucauaccggagagaaa

SEQ ID NO: 2651113 - RNA, 19 nt, Homo sapiens
  misc_RNA (1)...(19): siRNA sense strand
auguaaugagugugggaaa

SEQ ID NO: 2651114 - RNA, 19 nt, Homo sapiens
  misc_RNA (1)...(19): siRNA sense strand
auucaaggauguagccaua

SEQ ID NO: 2651115 - RNA, 19 nt, Homo sapiens
  misc_RNA (1)...(19): siRNA sense strand
ccaacagagaacaguaaua

SEQ ID NO: 2651116 - RNA, 19 nt, Homo sapiens
  misc_RNA (1)...(19): siRNA sense strand
aguucauacuggagagaga

SEQ ID NO: 2651117 - RNA, 19 nt, Homo sapiens
  misc_RNA (1)...(19): siRNA sense strand
aauucauacuggacagaaa

SEQ ID NO: 2651118 - RNA, 19 nt, Homo sapiens
  misc_RNA (1)...(19): siRNA sense strand
aauucacacuguagagaaa

SEQ ID NO: 2651119 - RNA, 19 nt, Homo sapiens
  misc_RNA (1)...(19): siRNA sense strand
augcaaugaauguggcaaa

SEQ ID NO: 2651120 - RNA, 19 nt, Homo sapiens
  misc_RNA (1)...(19): siRNA sense strand
auguaaugaauguggcaaa

SEQ ID NO: 2651121 - RNA, 19 nt, Homo sapiens
  misc_RNA (1)...(19): siRNA sense strand
ccuuacaaaugcaaagaau

SEQ ID NO: 2651122 - RNA, 19 nt, Homo sapiens
  misc_RNA (1)...(19): siRNA sense strand
ccuuacaaaugcaaagaau

SEQ ID NO: 2651123 - RNA, 19 nt, Homo sapiens
  misc_RNA (1)...(19): siRNA sense strand
uggaaagacaucaaagcua

SEQ ID NO: 2651124 - RNA, 19 nt, Homo sapiens
  misc_RNA (1)...(19): siRNA sense strand
cuucaaauguaaugagugu

SEQ ID NO: 2651125 - RNA, 19 nt, Homo sapiens
  misc_RNA (1)...(19): siRNA sense strand
cuucagggaaauacagaaa

SEQ ID NO: 2651126 - RNA, 19 nt, Homo sapiens
  misc_RNA (1)...(19): siRNA sense strand
ucaauagacaucagagaau

SEQ ID NO: 2651127 - RNA, 19 nt, Homo sapiens
  misc_RNA (1)...(19): siRNA sense strand
agauaauucaugcaggaaa

SEQ ID NO: 2651128 - RNA, 19 nt, Homo sapiens
  misc_RNA (1)...(19): siRNA sense strand
augugauguuggagaacua

SEQ ID NO: 2651129 - RNA, 19 nt, Homo sapiens
  misc_RNA (1)...(19): siRNA sense strand
augcaaugaguguggcaaa

SEQ ID NO: 2651130 - RNA, 19 nt, Homo sapiens
  misc_RNA (1)...(19): siRNA sense strand
aauccaugcaggaaagaaa

SEQ ID NO: 2651131 - RNA, 19 nt, Homo sapiens
  misc_RNA (1)...(19): siRNA sense strand
gcggcaaggucuacaguca

SEQ ID NO: 2651132 - RNA, 19 nt, Homo sapiens
  misc_RNA (1)...(19): siRNA sense strand
ggaaaugccuggagccugu

SEQ ID NO: 2651133 - RNA, 19 nt, Homo sapiens
  misc_RNA (1)...(19): siRNA sense strand
auguaaucugugugggaaa

SEQ ID NO: 2651134 - RNA, 19 nt, Homo sapiens
  misc_RNA (1)...(19): siRNA sense strand
aggaugugauguuggagaa

SEQ ID NO: 2651135 - RNA, 19 nt, Homo sapiens
  misc_RNA (1)...(19): siRNA sense strand
auguauugaauguggcaaa

SEQ ID NO: 2651136 - RNA, 19 nt, Homo sapiens
  misc_RNA (1)...(19): siRNA sense strand
auguaaugaguguggcaaa

SEQ ID NO: 2651137 - RNA, 19 nt, Homo sapiens
  misc_RNA (1)...(19): siRNA sense strand
agguaauccaugcaggaaa

SEQ ID NO: 2651138 - RNA, 19 nt, Homo sapiens
  misc_RNA (1)...(19): siRNA sense strand
auguaaugaguguggcaaa

SEQ ID NO: 2651139 - RNA, 19 nt, Homo sapiens
  misc_RNA (1)...(19): siRNA sense strand
aauucaugcaggaaagaaa

SEQ ID NO: 2651140 - RNA, 19 nt, Homo sapiens
  misc_RNA (1)...(19): siRNA sense strand
caguaaacguucaagucuu

SEQ ID NO: 2651141 - RNA, 19 nt, Homo sapiens
  misc_RNA (1)...(19): siRNA sense strand
caguaaacguucaagucuu

SEQ ID NO: 2651142 - RNA, 19 nt, Homo sapiens
  misc_RNA (1)...(19): siRNA sense strand
gcauucagacauagaucaa

SEQ ID NO: 2651143 - RNA, 19 nt, Homo sapiens
  misc_RNA (1)...(19): siRNA sense strand
aauucauaccggcgagaaa

SEQ ID NO: 2651144 - RNA, 19 nt, Homo sapiens
  misc_RNA (1)...(19): siRNA sense strand
cggagaagacagguaauaa

SEQ ID NO: 2651145 - RNA, 19 nt, Homo sapiens
  misc_RNA (1)...(19): siRNA sense strand
guggcaaguccuuuaguaa

SEQ ID NO: 2651146 - RNA, 19 nt, Homo sapiens
  misc_RNA (1)...(19): siRNA sense strand
uggcugaacugcagaaagu

SEQ ID NO: 2651147 - RNA, 19 nt, Homo sapiens
  misc_RNA (1)...(19): siRNA sense strand
ucucaggaggaguggaaau

SEQ ID NO: 2651148 - RNA, 19 nt, Homo sapiens
  misc_RNA (1)...(19): siRNA sense strand
gaaacggagaagacaggua

SEQ ID NO: 2651149 - RNA, 19 nt, Homo sapiens
  misc_RNA (1)...(19): siRNA sense strand
ucagggaaauacagaaaca

SEQ ID NO: 2651150 - RNA, 19 nt, Homo sapiens
  misc_RNA (1)...(19): siRNA sense strand
ucuccacacauuagggaaa

SEQ ID NO: 2651151 - RNA, 19 nt, Homo sapiens
  misc_RNA (1)...(19): siRNA sense strand
uguucauacuggagacaga

SEQ ID NO: 2651152 - RNA, 19 nt, Homo sapiens
  misc_RNA (1)...(19): siRNA sense strand
gguaaaagagaucaacaua

SEQ ID NO: 2651153 - RNA, 19 nt, Homo sapiens
  misc_RNA (1)...(19): siRNA sense strand
ggacagaaaacuuacaaau

SEQ ID NO: 2651154 - RNA, 19 nt, Homo sapiens
  misc_RNA (1)...(19): siRNA sense strand
uggcaaaguuuucagcaua

SEQ ID NO: 2651155 - RNA, 19 nt, Homo sapiens
  misc_RNA (1)...(19): siRNA sense strand
ccuuacaaaugcaaugaau

SEQ ID NO: 2651156 - RNA, 19 nt, Homo sapiens
  misc_RNA (1)...(19): siRNA sense strand
ccuuacaaaugcaaugaau

SEQ ID NO: 2651157 - RNA, 19 nt, Homo sapiens
  misc_RNA (1)...(19): siRNA sense strand
guggcaaggucuucaguga

SEQ ID NO: 2651158 - RNA, 19 nt, Homo sapiens
  misc_RNA (1)...(19): siRNA sense strand
gcucaaaccucacugcaca

SEQ ID NO: 2651159 - RNA, 19 nt, Homo sapiens
  misc_RNA (1)...(19): siRNA sense strand
uggcaaggucuucaguaaa

SEQ ID NO: 2651160 - RNA, 19 nt, Homo sapiens
  misc_RNA (1)...(19): siRNA sense strand
uggcaaggucuucaguaaa

SEQ ID NO: 2651161 - RNA, 19 nt, Homo sapiens
  misc_RNA (1)...(19): siRNA sense strand
gaauaagacauacuggaga

SEQ ID NO: 2651162 - RNA, 19 nt, Homo sapiens
  misc_RNA (1)...(19): siRNA sense strand
augcaaucagugugggaau

SEQ ID NO: 2651163 - RNA, 19 nt, Homo sapiens
  misc_RNA (1)...(19): siRNA sense strand
caaagaauuuagugggcau

SEQ ID NO: 2651164 - RNA, 19 nt, Homo sapiens
  misc_RNA (1)...(19): siRNA sense strand
aauucauacaggagagaaa

SEQ ID NO: 2651165 - RNA, 19 nt, Homo sapiens
  misc_RNA (1)...(19): siRNA sense strand
uugcaaaucaucagagaau

SEQ ID NO: 2651166 - RNA, 19 nt, Homo sapiens
  misc_RNA (1)...(19): siRNA sense strand
augugauguuggagaacua

SEQ ID NO: 2651167 - RNA, 19 nt, Homo sapiens
  misc_RNA (1)...(19): siRNA sense strand
aauucguacaggagagaaa

SEQ ID NO: 2651168 - RNA, 19 nt, Homo sapiens
  misc_RNA (1)...(19): siRNA sense strand
auguaaugaguguggcaaa

SEQ ID NO: 2651169 - RNA, 19 nt, Homo sapiens
  misc_RNA (1)...(19): siRNA sense strand
ccuuguacgacaucagaaa

SEQ ID NO: 2651170 - RNA, 19 nt, Homo sapiens
  misc_RNA (1)...(19): siRNA sense strand
ucucaggaggaguggaaau

SEQ ID NO: 2651171 - RNA, 19 nt, Homo sapiens
  misc_RNA (1)...(19): siRNA sense strand
ugggaaagaaucaguaaga

SEQ ID NO: 2651172 - RNA, 19 nt, Homo sapiens
  misc_RNA (1)...(19): siRNA sense strand
agagaaaucauaauggaga

SEQ ID NO: 2651173 - RNA, 19 nt, Homo sapiens
  misc_RNA (1)...(19): siRNA sense strand
ggacuguggagaaugaaau

SEQ ID NO: 2651174 - RNA, 19 nt, Homo sapiens
  misc_RNA (1)...(19): siRNA sense strand
ucgcagaacauuggagaau

SEQ ID NO: 2651175 - RNA, 19 nt, Homo sapiens
  misc_RNA (1)...(19): siRNA sense strand
cagauaggugggaagguau

SEQ ID NO: 2651176 - RNA, 19 nt, Homo sapiens
  misc_RNA (1)...(19): siRNA sense strand
aagcacacauuaggagaaa

SEQ ID NO: 2651177 - RNA, 19 nt, Homo sapiens
  misc_RNA (1)...(19): siRNA sense strand
ggagaagcccagaagagga

SEQ ID NO: 2651178 - RNA, 19 nt, Homo sapiens
  misc_RNA (1)...(19): siRNA sense strand
ugagaagcaaagcaggaaa

SEQ ID NO: 2651179 - RNA, 19 nt, Homo sapiens
  misc_RNA (1)...(19): siRNA sense strand
agggaagauuuaugaaugu

SEQ ID NO: 2651180 - RNA, 19 nt, Homo sapiens
  misc_RNA (1)...(19): siRNA sense strand
aaggugaagggaagauuua

SEQ ID NO: 2651181 - RNA, 19 nt, Homo sapiens
  misc_RNA (1)...(19): siRNA sense strand
aauguaaugagcagggcaa

SEQ ID NO: 2651182 - RNA, 19 nt, Homo sapiens
  misc_RNA (1)...(19): siRNA sense strand
cuuccuaaucaucaaguaa

SEQ ID NO: 2651183 - RNA, 19 nt, Homo sapiens
  misc_RNA (1)...(19): siRNA sense strand
augucaugaaugugguaaa

SEQ ID NO: 2651184 - RNA, 19 nt, Homo sapiens
  misc_RNA (1)...(19): siRNA sense strand
agugcauacuggagagagu

SEQ ID NO: 2651185 - RNA, 19 nt, Homo sapiens
  misc_RNA (1)...(19): siRNA sense strand
gggacguggccauagaauu

SEQ ID NO: 2651186 - RNA, 19 nt, Homo sapiens
  misc_RNA (1)...(19): siRNA sense strand
gugcagaaggcuuuauaca

SEQ ID NO: 2651187 - RNA, 19 nt, Homo sapiens
  misc_RNA (1)...(19): siRNA sense strand
uguggagaaugaaaugaaa

SEQ ID NO: 2651188 - RNA, 19 nt, Homo sapiens
  misc_RNA (1)...(19): siRNA sense strand
uggagauauuucaagguga

SEQ ID NO: 2651189 - RNA, 19 nt, Homo sapiens
  misc_RNA (1)...(19): siRNA sense strand
aggagagaaacuuuacaaa

SEQ ID NO: 2651190 - RNA, 19 nt, Homo sapiens
  misc_RNA (1)...(19): siRNA sense strand
ggaaaugccuggacccugu

SEQ ID NO: 2651191 - RNA, 19 nt, Homo sapiens
  misc_RNA (1)...(19): siRNA sense strand
guuuauaguagcaguucau

SEQ ID NO: 2651192 - RNA, 19 nt, Homo sapiens
  misc_RNA (1)...(19): siRNA sense strand
augucaugaauguggcaaa

SEQ ID NO: 2651193 - RNA, 19 nt, Homo sapiens
  misc_RNA (1)...(19): siRNA sense strand
aagcaaagcaggaaacaag

SEQ ID NO: 2651194 - RNA, 19 nt, Homo sapiens
  misc_RNA (1)...(19): siRNA sense strand
uggcaaagucuucacucaa

SEQ ID NO: 2651195 - RNA, 19 nt, Homo sapiens
  misc_RNA (1)...(19): siRNA sense strand
gaagcaaagcaggaaacaa

SEQ ID NO: 2651196 - RNA, 19 nt, Homo sapiens
  misc_RNA (1)...(19): siRNA sense strand
gguuuauaguagcaguuca

SEQ ID NO: 2651197 - RNA, 19 nt, Homo sapiens
  misc_RNA (1)...(19): siRNA sense strand
cuguggagaaugaaaugaa

SEQ ID NO: 2651198 - RNA, 19 nt, Homo sapiens
  misc_RNA (1)...(19): siRNA sense strand
agucaggccucgcagaaca

SEQ ID NO: 2651199 - RNA, 19 nt, Homo sapiens
  misc_RNA (1)...(19): siRNA sense strand
ccuugcacgacacgagaaa

SEQ ID NO: 2651200 - RNA, 19 nt, Homo sapiens
  misc_RNA (1)...(19): siRNA sense strand
auacaggagagaaacuuua

SEQ ID NO: 2651201 - RNA, 19 nt, Homo sapiens
  misc_RNA (1)...(19): siRNA sense strand
gagaauucguacaggagag

SEQ ID NO: 2651202 - RNA, 19 nt, Homo sapiens
  misc_RNA (1)...(19): siRNA sense strand
ggagaauucauacaggaga

SEQ ID NO: 2651203 - RNA, 19 nt, Homo sapiens
  misc_RNA (1)...(19): siRNA sense strand
uguuggagaacuacaggaa

SEQ ID NO: 2651204 - RNA, 19 nt, Homo sapiens
  misc_RNA (1)...(19): siRNA sense strand
guauuaucuccaugaugaa

SEQ ID NO: 2651205 - RNA, 19 nt, Homo sapiens
  misc_RNA (1)...(19): siRNA sense strand
aagcagaggagucaggcau

SEQ ID NO: 2651206 - RNA, 19 nt, Homo sapiens
  misc_RNA (1)...(19): siRNA sense strand
guguaaugaauguggcaua

SEQ ID NO: 2651207 - RNA, 19 nt, Homo sapiens
  misc_RNA (1)...(19): siRNA sense strand
ccacacagauguaagguuu

SEQ ID NO: 2651208 - RNA, 19 nt, Homo sapiens
  misc_RNA (1)...(19): siRNA sense strand
gauguaagguuuaugacaa

SEQ ID NO: 2651209 - RNA, 19 nt, Homo sapiens
  misc_RNA (1)...(19): siRNA sense strand
gcagagaaaucuuacaaau

SEQ ID NO: 2651210 - RNA, 19 nt, Homo sapiens
  misc_RNA (1)...(19): siRNA sense strand
ucuucauacugcagagaaa

SEQ ID NO: 2651211 - RNA, 19 nt, Homo sapiens
  misc_RNA (1)...(19): siRNA sense strand
augugaagacugugacaaa

SEQ ID NO: 2651212 - RNA, 19 nt, Homo sapiens
  misc_RNA (1)...(19): siRNA sense strand
aaucacagcuugaaagaca

SEQ ID NO: 2651213 - RNA, 19 nt, Homo sapiens
  misc_RNA (1)...(19): siRNA sense strand
uuacaaaugugaugagugu

SEQ ID NO: 2651214 - RNA, 19 nt, Homo sapiens
  misc_RNA (1)...(19): siRNA sense strand
uggcaacaccuuuggucaa

SEQ ID NO: 2651215 - RNA, 19 nt, Homo sapiens
  misc_RNA (1)...(19): siRNA sense strand
uuacaaaugugaagacugu

SEQ ID NO: 2651216 - RNA, 19 nt, Homo sapiens
  misc_RNA (1)...(19): siRNA sense strand
gcuugaaagacaggagaau

SEQ ID NO: 2651217 - RNA, 19 nt, Homo sapiens
  misc_RNA (1)...(19): siRNA sense strand
gagaaaccacacagaugua

SEQ ID NO: 2651218 - RNA, 19 nt, Homo sapiens
  misc_RNA (1)...(19): siRNA sense strand
uugaaagacaggagaauuc

SEQ ID NO: 2651219 - RNA, 19 nt, Homo sapiens
  misc_RNA (1)...(19): siRNA sense strand
agucacaccuugcaaguca

SEQ ID NO: 2651220 - RNA, 19 nt, Homo sapiens
  misc_RNA (1)...(19): siRNA sense strand
gugaagacugugacaaagu

SEQ ID NO: 2651221 - RNA, 19 nt, Homo sapiens
  misc_RNA (1)...(19): siRNA sense strand
gcuucauaguggagagaaa

SEQ ID NO: 2651222 - RNA, 19 nt, Homo sapiens
  misc_RNA (1)...(19): siRNA sense strand
aguucauacuggagagaaa

SEQ ID NO: 2651223 - RNA, 19 nt, Homo sapiens
  misc_RNA (1)...(19): siRNA sense strand
aguucauacuggagagaaa

SEQ ID NO: 2651224 - RNA, 19 nt, Homo sapiens
  misc_RNA (1)...(19): siRNA sense strand
aguucauacuggagagaaa

SEQ ID NO: 2651225 - RNA, 19 nt, Homo sapiens
  misc_RNA (1)...(19): siRNA sense strand
acuucauaguggagagaaa

SEQ ID NO: 2651226 - RNA, 19 nt, Homo sapiens
  misc_RNA (1)...(19): siRNA sense strand
uguaaugaguguggcaaga

SEQ ID NO: 2651227 - RNA, 19 nt, Homo sapiens
  misc_RNA (1)...(19): siRNA sense strand
uguaaugaguguggcaaga

SEQ ID NO: 2651228 - RNA, 19 nt, Homo sapiens
  misc_RNA (1)...(19): siRNA sense strand
uguaaugaguguggcaaga

SEQ ID NO: 2651229 - RNA, 19 nt, Homo sapiens
  misc_RNA (1)...(19): siRNA sense strand
uguaaugaguguggcaaga

SEQ ID NO: 2651230 - RNA, 19 nt, Homo sapiens
  misc_RNA (1)...(19): siRNA sense strand
gauucauaguggagagaaa

SEQ ID NO: 2651231 - RNA, 19 nt, Homo sapiens
  misc_RNA (1)...(19): siRNA sense strand
aguucauacuggagagaaa

SEQ ID NO: 2651232 - RNA, 19 nt, Homo sapiens
  misc_RNA (1)...(19): siRNA sense strand
acuucauacuggagagaaa

SEQ ID NO: 2651233 - RNA, 19 nt, Homo sapiens
  misc_RNA (1)...(19): siRNA sense strand
gggaaguacacaugagaga

SEQ ID NO: 2651234 - RNA, 19 nt, Homo sapiens
  misc_RNA (1)...(19): siRNA sense strand
acuucacacuggagagaaa

SEQ ID NO: 2651235 - RNA, 19 nt, Homo sapiens
  misc_RNA (1)...(19): siRNA sense strand
guggaaagaagaugaaaca

SEQ ID NO: 2651236 - RNA, 19 nt, Homo sapiens
  misc_RNA (1)...(19): siRNA sense strand
auguaaugaauguggcaaa

SEQ ID NO: 2651237 - RNA, 19 nt, Homo sapiens
  misc_RNA (1)...(19): siRNA sense strand
augugaagaaugugacaaa

SEQ ID NO: 2651238 - RNA, 19 nt, Homo sapiens
  misc_RNA (1)...(19): siRNA sense strand
gcuucgaguuucaguggaa

SEQ ID NO: 2651239 - RNA, 19 nt, Homo sapiens
  misc_RNA (1)...(19): siRNA sense strand
agaaagacauucauggcuu

SEQ ID NO: 2651240 - RNA, 19 nt, Homo sapiens
  misc_RNA (1)...(19): siRNA sense strand
augugaagagugugacaaa

SEQ ID NO: 2651241 - RNA, 19 nt, Homo sapiens
  misc_RNA (1)...(19): siRNA sense strand
cuugaaagacauaggagga

SEQ ID NO: 2651242 - RNA, 19 nt, Homo sapiens
  misc_RNA (1)...(19): siRNA sense strand
gcacaacaucagagaguuc

SEQ ID NO: 2651243 - RNA, 19 nt, Homo sapiens
  misc_RNA (1)...(19): siRNA sense strand
ucucaggaggaguggaaau

SEQ ID NO: 2651244 - RNA, 19 nt, Homo sapiens
  misc_RNA (1)...(19): siRNA sense strand
acaaaugugaagaguguga

SEQ ID NO: 2651245 - RNA, 19 nt, Homo sapiens
  misc_RNA (1)...(19): siRNA sense strand
ccaacaugaucaaaggcau

SEQ ID NO: 2651246 - RNA, 19 nt, Homo sapiens
  misc_RNA (1)...(19): siRNA sense strand
agggaaaauugguaaucaa

SEQ ID NO: 2651247 - RNA, 19 nt, Homo sapiens
  misc_RNA (1)...(19): siRNA sense strand
uugaaagacauaagaggau

SEQ ID NO: 2651248 - RNA, 19 nt, Homo sapiens
  misc_RNA (1)...(19): siRNA sense strand
cuggaaagacacaggagga

SEQ ID NO: 2651249 - RNA, 19 nt, Homo sapiens
  misc_RNA (1)...(19): siRNA sense strand
cgucaacagggcaaggcaa

SEQ ID NO: 2651250 - RNA, 19 nt, Homo sapiens
  misc_RNA (1)...(19): siRNA sense strand
gggcaaggcaauacagaag

SEQ ID NO: 2651251 - RNA, 19 nt, Homo sapiens
  misc_RNA (1)...(19): siRNA sense strand
ucaucacauuggagaauuu

SEQ ID NO: 2651252 - RNA, 19 nt, Homo sapiens
  misc_RNA (1)...(19): siRNA sense strand
caugaaauugagaaagaca

SEQ ID NO: 2651253 - RNA, 19 nt, Homo sapiens
  misc_RNA (1)...(19): siRNA sense strand
gugaagagugugacaaagu

SEQ ID NO: 2651254 - RNA, 19 nt, Homo sapiens
  misc_RNA (1)...(19): siRNA sense strand
gggacguggccauagaauu

SEQ ID NO: 2651255 - RNA, 19 nt, Homo sapiens
  misc_RNA (1)...(19): siRNA sense strand
gcacagacaagcaagucau

SEQ ID NO: 2651256 - RNA, 19 nt, Homo sapiens
  misc_RNA (1)...(19): siRNA sense strand
agaugaaacaaauggccau

SEQ ID NO: 2651257 - RNA, 19 nt, Homo sapiens
  misc_RNA (1)...(19): siRNA sense strand
gcagcacccaugacagaaa

SEQ ID NO: 2651258 - RNA, 19 nt, Homo sapiens
  misc_RNA (1)...(19): siRNA sense strand
ucaacaucccaaagaauuu

SEQ ID NO: 2651259 - RNA, 19 nt, Homo sapiens
  misc_RNA (1)...(19): siRNA sense strand
gaauguauacagagcuuca

SEQ ID NO: 2651260 - RNA, 19 nt, Homo sapiens
  misc_RNA (1)...(19): siRNA sense strand
augugaagaauguugcaaa

SEQ ID NO: 2651261 - RNA, 19 nt, Homo sapiens
  misc_RNA (1)...(19): siRNA sense strand
uugaauguauacagagcuu

SEQ ID NO: 2651262 - RNA, 19 nt, Homo sapiens
  misc_RNA (1)...(19): siRNA sense strand
ccuuaugaaugugaagaau

SEQ ID NO: 2651263 - RNA, 19 nt, Homo sapiens
  misc_RNA (1)...(19): siRNA sense strand
agaauuuguuguaggccca

SEQ ID NO: 2651264 - RNA, 19 nt, Homo sapiens
  misc_RNA (1)...(19): siRNA sense strand
uggcacaacaucagagagu

SEQ ID NO: 2651265 - RNA, 19 nt, Homo sapiens
  misc_RNA (1)...(19): siRNA sense strand
cauucauggcuucgaguuu

SEQ ID NO: 2651266 - RNA, 19 nt, Homo sapiens
  misc_RNA (1)...(19): siRNA sense strand
cuugaaagacauaagagga

SEQ ID NO: 2651267 - RNA, 19 nt, Homo sapiens
  misc_RNA (1)...(19): siRNA sense strand
aaauguaagguuugugaca

SEQ ID NO: 2651268 - RNA, 19 nt, Homo sapiens
  misc_RNA (1)...(19): siRNA sense strand
ggcugguaguacaggccaa

SEQ ID NO: 2651269 - RNA, 19 nt, Homo sapiens
  misc_RNA (1)...(19): siRNA sense strand
uguaaugaguguggcaaga

SEQ ID NO: 2651270 - RNA, 19 nt, Homo sapiens
  misc_RNA (1)...(19): siRNA sense strand
uguaaugaguguggcaaga

SEQ ID NO: 2651271 - RNA, 19 nt, Homo sapiens
  misc_RNA (1)...(19): siRNA sense strand
uguaaugaguguggcaaga

SEQ ID NO: 2651272 - RNA, 19 nt, Homo sapiens
  misc_RNA (1)...(19): siRNA sense strand
aucaaaggcaugcuggaaa

SEQ ID NO: 2651273 - RNA, 19 nt, Homo sapiens
  misc_RNA (1)...(19): siRNA sense strand
uggagagaaaccauacaaa

SEQ ID NO: 2651274 - RNA, 19 nt, Homo sapiens
  misc_RNA (1)...(19): siRNA sense strand
uggagagaaaccauacaaa

SEQ ID NO: 2651275 - RNA, 19 nt, Homo sapiens
  misc_RNA (1)...(19): siRNA sense strand
ccagaaaugaagaaagaua

SEQ ID NO: 2651276 - RNA, 19 nt, Homo sapiens
  misc_RNA (1)...(19): siRNA sense strand
aguucauacuggagagaaa

SEQ ID NO: 2651277 - RNA, 19 nt, Homo sapiens
  misc_RNA (1)...(19): siRNA sense strand
aguucauacuggagagaaa

SEQ ID NO: 2651278 - RNA, 19 nt, Homo sapiens
  misc_RNA (1)...(19): siRNA sense strand
aguucauacuggagagaaa

SEQ ID NO: 2651279 - RNA, 19 nt, Homo sapiens
  misc_RNA (1)...(19): siRNA sense strand
gcacaguauuacaggagaa

SEQ ID NO: 2651280 - RNA, 19 nt, Homo sapiens
  misc_RNA (1)...(19): siRNA sense strand
acuucauacuggagagaaa

SEQ ID NO: 2651281 - RNA, 19 nt, Homo sapiens
  misc_RNA (1)...(19): siRNA sense strand
acuucauacuggagagaaa

SEQ ID NO: 2651282 - RNA, 19 nt, Homo sapiens
  misc_RNA (1)...(19): siRNA sense strand
acuucaugcuggagagaaa

SEQ ID NO: 2651283 - RNA, 19 nt, Homo sapiens
  misc_RNA (1)...(19): siRNA sense strand
aguucauacugcagagaaa

SEQ ID NO: 2651284 - RNA, 19 nt, Homo sapiens
  misc_RNA (1)...(19): siRNA sense strand
cuugaaagacauaggagaa

SEQ ID NO: 2651285 - RNA, 19 nt, Homo sapiens
  misc_RNA (1)...(19): siRNA sense strand
auccauggguguagggaaa

SEQ ID NO: 2651286 - RNA, 19 nt, Homo sapiens
  misc_RNA (1)...(19): siRNA sense strand
acuucacacuggagagaaa

SEQ ID NO: 2651287 - RNA, 19 nt, Homo sapiens
  misc_RNA (1)...(19): siRNA sense strand
acuucacacuggagagaaa

SEQ ID NO: 2651288 - RNA, 19 nt, Homo sapiens
  misc_RNA (1)...(19): siRNA sense strand
ucacacaaauacaggaaau

SEQ ID NO: 2651289 - RNA, 19 nt, Homo sapiens
  misc_RNA (1)...(19): siRNA sense strand
cuugaaagacauaggaaga

SEQ ID NO: 2651290 - RNA, 19 nt, Homo sapiens
  misc_RNA (1)...(19): siRNA sense strand
guguaaugaguguggcaaa

SEQ ID NO: 2651291 - RNA, 19 nt, Homo sapiens
  misc_RNA (1)...(19): siRNA sense strand
cugugauguuggagaacua

SEQ ID NO: 2651292 - RNA, 19 nt, Homo sapiens
  misc_RNA (1)...(19): siRNA sense strand
gggcugugauguuggagaa

SEQ ID NO: 2651293 - RNA, 19 nt, Homo sapiens
  misc_RNA (1)...(19): siRNA sense strand
aaguaaugaguguggcaaa

SEQ ID NO: 2651294 - RNA, 19 nt, Homo sapiens
  misc_RNA (1)...(19): siRNA sense strand
accaagaagagcaaagaaa

SEQ ID NO: 2651295 - RNA, 19 nt, Homo sapiens
  misc_RNA (1)...(19): siRNA sense strand
cuucagaaucccaaagaau

SEQ ID NO: 2651296 - RNA, 19 nt, Homo sapiens
  misc_RNA (1)...(19): siRNA sense strand
augugaagaaugugacaaa

SEQ ID NO: 2651297 - RNA, 19 nt, Homo sapiens
  misc_RNA (1)...(19): siRNA sense strand
ucuaauaaguaugggaaga

SEQ ID NO: 2651298 - RNA, 19 nt, Homo sapiens
  misc_RNA (1)...(19): siRNA sense strand
gauucauacuggagaggga

SEQ ID NO: 2651299 - RNA, 19 nt, Homo sapiens
  misc_RNA (1)...(19): siRNA sense strand
aggaaauaugcaugagaga

SEQ ID NO: 2651300 - RNA, 19 nt, Homo sapiens
  misc_RNA (1)...(19): siRNA sense strand
ucccagaaaugaagaaaga

SEQ ID NO: 2651301 - RNA, 19 nt, Homo sapiens
  misc_RNA (1)...(19): siRNA sense strand
ccaagaagagcaaagaaaa

SEQ ID NO: 2651302 - RNA, 19 nt, Homo sapiens
  misc_RNA (1)...(19): siRNA sense strand
gggacguugcaaagacaua

SEQ ID NO: 2651303 - RNA, 19 nt, Homo sapiens
  misc_RNA (1)...(19): siRNA sense strand
ggaaauaugcaugagagaa

SEQ ID NO: 2651304 - RNA, 19 nt, Homo sapiens
  misc_RNA (1)...(19): siRNA sense strand
gcacaacaucagagaguuc

SEQ ID NO: 2651305 - RNA, 19 nt, Homo sapiens
  misc_RNA (1)...(19): siRNA sense strand
guggauagcucuuuaaaau

SEQ ID NO: 2651306 - RNA, 19 nt, Homo sapiens
  misc_RNA (1)...(19): siRNA sense strand
gagaauucauacuggggaa

SEQ ID NO: 2651307 - RNA, 19 nt, Homo sapiens
  misc_RNA (1)...(19): siRNA sense strand
aauaaaugugcgaagguuu

SEQ ID NO: 2651308 - RNA, 19 nt, Homo sapiens
  misc_RNA (1)...(19): siRNA sense strand
cuaauaaguaugggaagaa

SEQ ID NO: 2651309 - RNA, 19 nt, Homo sapiens
  misc_RNA (1)...(19): siRNA sense strand
ucagaaucccaaagaauuu

SEQ ID NO: 2651310 - RNA, 19 nt, Homo sapiens
  misc_RNA (1)...(19): siRNA sense strand
ccuugaaagacauaggaga

SEQ ID NO: 2651311 - RNA, 19 nt, Homo sapiens
  misc_RNA (1)...(19): siRNA sense strand
guggcaagaaguugaaaga

SEQ ID NO: 2651312 - RNA, 19 nt, Homo sapiens
  misc_RNA (1)...(19): siRNA sense strand
agugagaagucaucccuua

SEQ ID NO: 2651313 - RNA, 19 nt, Homo sapiens
  misc_RNA (1)...(19): siRNA sense strand
aagaaauggccaugaagca

SEQ ID NO: 2651314 - RNA, 19 nt, Homo sapiens
  misc_RNA (1)...(19): siRNA sense strand
auucauaccuugcagaaca

SEQ ID NO: 2651315 - RNA, 19 nt, Homo sapiens
  misc_RNA (1)...(19): siRNA sense strand
augaagcacccaugacaaa

SEQ ID NO: 2651316 - RNA, 19 nt, Homo sapiens
  misc_RNA (1)...(19): siRNA sense strand
agggaaaauuaguaaccaa

SEQ ID NO: 2651317 - RNA, 19 nt, Homo sapiens
  misc_RNA (1)...(19): siRNA sense strand
augugaagaaugugacaau

SEQ ID NO: 2651318 - RNA, 19 nt, Homo sapiens
  misc_RNA (1)...(19): siRNA sense strand
uugcagaacaucagagagu

SEQ ID NO: 2651319 - RNA, 19 nt, Homo sapiens
  misc_RNA (1)...(19): siRNA sense strand
uaauaaauguggcaggagu

SEQ ID NO: 2651320 - RNA, 19 nt, Homo sapiens
  misc_RNA (1)...(19): siRNA sense strand
cagacuaaagggaaaauua

SEQ ID NO: 2651321 - RNA, 19 nt, Homo sapiens
  misc_RNA (1)...(19): siRNA sense strand
gagaaaaccuugcacguca

SEQ ID NO: 2651322 - RNA, 19 nt, Homo sapiens
  misc_RNA (1)...(19): siRNA sense strand
ucaaccaggcacaguauua

SEQ ID NO: 2651323 - RNA, 19 nt, Homo sapiens
  misc_RNA (1)...(19): siRNA sense strand
uucaagagagagagaauau

SEQ ID NO: 2651324 - RNA, 19 nt, Homo sapiens
  misc_RNA (1)...(19): siRNA sense strand
ccuucaaugccaucauaua

SEQ ID NO: 2651325 - RNA, 19 nt, Homo sapiens
  misc_RNA (1)...(19): siRNA sense strand
gugaagaaugugacaaugu

SEQ ID NO: 2651326 - RNA, 19 nt, Homo sapiens
  misc_RNA (1)...(19): siRNA sense strand
gaggaagccaccaagaaga

SEQ ID NO: 2651327 - RNA, 19 nt, Homo sapiens
  misc_RNA (1)...(19): siRNA sense strand
uuaguaaccaauuggacaa

SEQ ID NO: 2651328 - RNA, 19 nt, Homo sapiens
  misc_RNA (1)...(19): siRNA sense strand
uggagagggaucauacaaa

SEQ ID NO: 2651329 - RNA, 19 nt, Homo sapiens
  misc_RNA (1)...(19): siRNA sense strand
gcaaagacauaaaagucau

SEQ ID NO: 2651330 - RNA, 19 nt, Homo sapiens
  misc_RNA (1)...(19): siRNA sense strand
ccgaagugaucacaggcau

SEQ ID NO: 2651331 - RNA, 19 nt, Homo sapiens
  misc_RNA (1)...(19): siRNA sense strand
guggcaagaucuuuaauca

SEQ ID NO: 2651332 - RNA, 19 nt, Homo sapiens
  misc_RNA (1)...(19): siRNA sense strand
ugacaaggcuuuccggagu

SEQ ID NO: 2651333 - RNA, 19 nt, Homo sapiens
  misc_RNA (1)...(19): siRNA sense strand
uugccaaaguaaugagugu

SEQ ID NO: 2651334 - RNA, 19 nt, Homo sapiens
  misc_RNA (1)...(19): siRNA sense strand
ucucuuuggaggaguggaa

SEQ ID NO: 2651335 - RNA, 19 nt, Homo sapiens
  misc_RNA (1)...(19): siRNA sense strand
aaauguaagguuugugaca

SEQ ID NO: 2651336 - RNA, 19 nt, Homo sapiens
  misc_RNA (1)...(19): siRNA sense strand
aaauguaagguuugugaca

SEQ ID NO: 2651337 - RNA, 19 nt, Homo sapiens
  misc_RNA (1)...(19): siRNA sense strand
guauguggcaagaucuuua

SEQ ID NO: 2651338 - RNA, 19 nt, Homo sapiens
  misc_RNA (1)...(19): siRNA sense strand
guguaaugagugugggaag

SEQ ID NO: 2651339 - RNA, 19 nt, Homo sapiens
  misc_RNA (1)...(19): siRNA sense strand
acgagaacccaguggacau

SEQ ID NO: 2651340 - RNA, 19 nt, Homo sapiens
  misc_RNA (1)...(19): siRNA sense strand
ggcaagagcuuuagccacu

SEQ ID NO: 2651341 - RNA, 19 nt, Homo sapiens
  misc_RNA (1)...(19): siRNA sense strand
gcagcuucacucagagcaa

SEQ ID NO: 2651342 - RNA, 19 nt, Homo sapiens
  misc_RNA (1)...(19): siRNA sense strand
gcuccaaccucaugcagca

SEQ ID NO: 2651343 - RNA, 19 nt, Homo sapiens
  misc_RNA (1)...(19): siRNA sense strand
ggcaagaccuucucgcaga

SEQ ID NO: 2651344 - RNA, 19 nt, Homo sapiens
  misc_RNA (1)...(19): siRNA sense strand
aggaggaggacgacgacga

SEQ ID NO: 2651345 - RNA, 19 nt, Homo sapiens
  misc_RNA (1)...(19): siRNA sense strand
acauggagcugcgggaaga

SEQ ID NO: 2651346 - RNA, 19 nt, Homo sapiens
  misc_RNA (1)...(19): siRNA sense strand
ccaaagacugggaggcugu

SEQ ID NO: 2651347 - RNA, 19 nt, Homo sapiens
  misc_RNA (1)...(19): siRNA sense strand
aggaagaugacgaaucaga

SEQ ID NO: 2651348 - RNA, 19 nt, Homo sapiens
  misc_RNA (1)...(19): siRNA sense strand
augacagugaugagaaaga

SEQ ID NO: 2651349 - RNA, 19 nt, Homo sapiens
  misc_RNA (1)...(19): siRNA sense strand
cgguggaggaagaugacga

SEQ ID NO: 2651350 - RNA, 19 nt, Homo sapiens
  misc_RNA (1)...(19): siRNA sense strand
augcaaagaauguggaaaa

SEQ ID NO: 2651351 - RNA, 19 nt, Homo sapiens
  misc_RNA (1)...(19): siRNA sense strand
gcgcaaaccuuauucgaca

SEQ ID NO: 2651352 - RNA, 19 nt, Homo sapiens
  misc_RNA (1)...(19): siRNA sense strand
cuugauucgcgaagagaaa

SEQ ID NO: 2651353 - RNA, 19 nt, Homo sapiens
  misc_RNA (1)...(19): siRNA sense strand
ccacuugaaaauagggaua

SEQ ID NO: 2651354 - RNA, 19 nt, Homo sapiens
  misc_RNA (1)...(19): siRNA sense strand
ggaacuuuuauuagggaaa

SEQ ID NO: 2651355 - RNA, 19 nt, Homo sapiens
  misc_RNA (1)...(19): siRNA sense strand
ggucauaccucacguggca

SEQ ID NO: 2651356 - RNA, 19 nt, Homo sapiens
  misc_RNA (1)...(19): siRNA sense strand
cccuaugaaugcaaagaau

SEQ ID NO: 2651357 - RNA, 19 nt, Homo sapiens
  misc_RNA (1)...(19): siRNA sense strand
ccguaugaaugcagugagu

SEQ ID NO: 2651358 - RNA, 19 nt, Homo sapiens
  misc_RNA (1)...(19): siRNA sense strand
guaugaaugcagugagugu

SEQ ID NO: 2651359 - RNA, 19 nt, Homo sapiens
  misc_RNA (1)...(19): siRNA sense strand
gggaaggcguucaaccgua

SEQ ID NO: 2651360 - RNA, 19 nt, Homo sapiens
  misc_RNA (1)...(19): siRNA sense strand
ccuauaaaugugaggaaug

SEQ ID NO: 2651361 - RNA, 19 nt, Homo sapiens
  misc_RNA (1)...(19): siRNA sense strand
augugaggaaugcgggaaa

SEQ ID NO: 2651362 - RNA, 19 nt, Homo sapiens
  misc_RNA (1)...(19): siRNA sense strand
ggucacaccucaagcagca

SEQ ID NO: 2651363 - RNA, 19 nt, Homo sapiens
  misc_RNA (1)...(19): siRNA sense strand
gggcagaccucauucgcca

SEQ ID NO: 2651364 - RNA, 19 nt, Homo sapiens
  misc_RNA (1)...(19): siRNA sense strand
cagucaacauccaggaacu

SEQ ID NO: 2651365 - RNA, 19 nt, Homo sapiens
  misc_RNA (1)...(19): siRNA sense strand
augcauccagugugggaaa

SEQ ID NO: 2651366 - RNA, 19 nt, Homo sapiens
  misc_RNA (1)...(19): siRNA sense strand
aaggauucauacugggaga

SEQ ID NO: 2651367 - RNA, 19 nt, Homo sapiens
  misc_RNA (1)...(19): siRNA sense strand
cccuauaagugcauggagu

SEQ ID NO: 2651368 - RNA, 19 nt, Homo sapiens
  misc_RNA (1)...(19): siRNA sense strand
cccuauaagugcauggagu

SEQ ID NO: 2651369 - RNA, 19 nt, Homo sapiens
  misc_RNA (1)...(19): siRNA sense strand
gauucacaguggagagaag

SEQ ID NO: 2651370 - RNA, 19 nt, Homo sapiens
  misc_RNA (1)...(19): siRNA sense strand
ggggagaagccuuaugaau

SEQ ID NO: 2651371 - RNA, 19 nt, Homo sapiens
  misc_RNA (1)...(19): siRNA sense strand
cugaaaugcaagaagucca

SEQ ID NO: 2651372 - RNA, 19 nt, Homo sapiens
  misc_RNA (1)...(19): siRNA sense strand
cuaugaaugcaaagaaugu

SEQ ID NO: 2651373 - RNA, 19 nt, Homo sapiens
  misc_RNA (1)...(19): siRNA sense strand
cuaugaaugcacagagugu

SEQ ID NO: 2651374 - RNA, 19 nt, Homo sapiens
  misc_RNA (1)...(19): siRNA sense strand
gugcagugaauguggaaag

SEQ ID NO: 2651375 - RNA, 19 nt, Homo sapiens
  misc_RNA (1)...(19): siRNA sense strand
gaaugcagugaguguggaa

SEQ ID NO: 2651376 - RNA, 19 nt, Homo sapiens
  misc_RNA (1)...(19): siRNA sense strand
gugcauggagugugggaag

SEQ ID NO: 2651377 - RNA, 19 nt, Homo sapiens
  misc_RNA (1)...(19): siRNA sense strand
gugcauugagugugggaag

SEQ ID NO: 2651378 - RNA, 19 nt, Homo sapiens
  misc_RNA (1)...(19): siRNA sense strand
gugcauggagugugggaag

SEQ ID NO: 2651379 - RNA, 19 nt, Homo sapiens
  misc_RNA (1)...(19): siRNA sense strand
augcaacgaguguggaaaa

SEQ ID NO: 2651380 - RNA, 19 nt, Homo sapiens
  misc_RNA (1)...(19): siRNA sense strand
augcaaugaaugugggaaa

SEQ ID NO: 2651381 - RNA, 19 nt, Homo sapiens
  misc_RNA (1)...(19): siRNA sense strand
ccuuaugaguguagugaau

SEQ ID NO: 2651382 - RNA, 19 nt, Homo sapiens
  misc_RNA (1)...(19): siRNA sense strand
gggaaauucuuuauggaca

SEQ ID NO: 2651383 - RNA, 19 nt, Homo sapiens
  misc_RNA (1)...(19): siRNA sense strand
ccuuauguguguagugaau

SEQ ID NO: 2651384 - RNA, 19 nt, Homo sapiens
  misc_RNA (1)...(19): siRNA sense strand
augcaacgaaugugggaaa

SEQ ID NO: 2651385 - RNA, 19 nt, Homo sapiens
  misc_RNA (1)...(19): siRNA sense strand
gggaaguucuuuauggaca

SEQ ID NO: 2651386 - RNA, 19 nt, Homo sapiens
  misc_RNA (1)...(19): siRNA sense strand
augcaacaaaugugggaaa

SEQ ID NO: 2651387 - RNA, 19 nt, Homo sapiens
  misc_RNA (1)...(19): siRNA sense strand
ggucacaacuuuaaagcca

SEQ ID NO: 2651388 - RNA, 19 nt, Homo sapiens
  misc_RNA (1)...(19): siRNA sense strand
ggcaaauuguuuagguaca

SEQ ID NO: 2651389 - RNA, 19 nt, Homo sapiens
  misc_RNA (1)...(19): siRNA sense strand
acucauuagacaucagaaa

SEQ ID NO: 2651390 - RNA, 19 nt, Homo sapiens
  misc_RNA (1)...(19): siRNA sense strand
acucauuagacaucagaaa

SEQ ID NO: 2651391 - RNA, 19 nt, Homo sapiens
  misc_RNA (1)...(19): siRNA sense strand
cgaaaucauacuggagaaa

SEQ ID NO: 2651392 - RNA, 19 nt, Homo sapiens
  misc_RNA (1)...(19): siRNA sense strand
guguagugaauguggaaaa

SEQ ID NO: 2651393 - RNA, 19 nt, Homo sapiens
  misc_RNA (1)...(19): siRNA sense strand
ccuuaugaaugcaacgaau

SEQ ID NO: 2651394 - RNA, 19 nt, Homo sapiens
  misc_RNA (1)...(19): siRNA sense strand
cagaauaauuacagcugca

SEQ ID NO: 2651395 - RNA, 19 nt, Homo sapiens
  misc_RNA (1)...(19): siRNA sense strand
ccuuauggaugcaaugaau

SEQ ID NO: 2651396 - RNA, 19 nt, Homo sapiens
  misc_RNA (1)...(19): siRNA sense strand
ccuuaugaaugcaacaaau

SEQ ID NO: 2651397 - RNA, 19 nt, Homo sapiens
  misc_RNA (1)...(19): siRNA sense strand
gcaacaaaugugggaaauu

SEQ ID NO: 2651398 - RNA, 19 nt, Homo sapiens
  misc_RNA (1)...(19): siRNA sense strand
gggaauucuuaaugacguu

SEQ ID NO: 2651399 - RNA, 19 nt, Homo sapiens
  misc_RNA (1)...(19): siRNA sense strand
augugaugcuggagaacuu

SEQ ID NO: 2651400 - RNA, 19 nt, Homo sapiens
  misc_RNA (1)...(19): siRNA sense strand
uugcugugaaugugggaaa

SEQ ID NO: 2651401 - RNA, 19 nt, Homo sapiens
  misc_RNA (1)...(19): siRNA sense strand
acucauuauucaucagaga

SEQ ID NO: 2651402 - RNA, 19 nt, Homo sapiens
  misc_RNA (1)...(19): siRNA sense strand
agagagaagcucaccagaa

SEQ ID NO: 2651403 - RNA, 19 nt, Homo sapiens
  misc_RNA (1)...(19): siRNA sense strand
ggauuuuacuggugauuca

SEQ ID NO: 2651404 - RNA, 19 nt, Homo sapiens
  misc_RNA (1)...(19): siRNA sense strand
uuucaaaguggacagaaua

SEQ ID NO: 2651405 - RNA, 19 nt, Homo sapiens
  misc_RNA (1)...(19): siRNA sense strand
ggaaaagccuucagccuca

SEQ ID NO: 2651406 - RNA, 19 nt, Homo sapiens
  misc_RNA (1)...(19): siRNA sense strand
ugggaaauucuuuagguau

SEQ ID NO: 2651407 - RNA, 19 nt, Homo sapiens
  misc_RNA (1)...(19): siRNA sense strand
ggaaauucuuuauggacag

SEQ ID NO: 2651408 - RNA, 19 nt, Homo sapiens
  misc_RNA (1)...(19): siRNA sense strand
gcaacgaaugugggaaauu

SEQ ID NO: 2651409 - RNA, 19 nt, Homo sapiens
  misc_RNA (1)...(19): siRNA sense strand
ggagcaucuuagagagaag

SEQ ID NO: 2651410 - RNA, 19 nt, Homo sapiens
  misc_RNA (1)...(19): siRNA sense strand
gggaaauucuuuagauacc

SEQ ID NO: 2651411 - RNA, 19 nt, Homo sapiens
  misc_RNA (1)...(19): siRNA sense strand
agguauugcuucacacuga

SEQ ID NO: 2651412 - RNA, 19 nt, Homo sapiens
  misc_RNA (1)...(19): siRNA sense strand
ggaaaggccuuaugagugc

SEQ ID NO: 2651413 - RNA, 19 nt, Homo sapiens
  misc_RNA (1)...(19): siRNA sense strand
gguacaacuccgaccuuau

SEQ ID NO: 2651414 - RNA, 19 nt, Homo sapiens
  misc_RNA (1)...(19): siRNA sense strand
agaaaagccuuaugagugu

SEQ ID NO: 2651415 - RNA, 19 nt, Homo sapiens
  misc_RNA (1)...(19): siRNA sense strand
acacagaggaaaggccuua

SEQ ID NO: 2651416 - RNA, 19 nt, Homo sapiens
  misc_RNA (1)...(19): siRNA sense strand
ggcauggagccaaggauga

SEQ ID NO: 2651417 - RNA, 19 nt, Homo sapiens
  misc_RNA (1)...(19): siRNA sense strand
gaaaauccacacagaggaa

SEQ ID NO: 2651418 - RNA, 19 nt, Homo sapiens
  misc_RNA (1)...(19): siRNA sense strand
ucuuaaugacguucagaga

SEQ ID NO: 2651419 - RNA, 19 nt, Homo sapiens
  misc_RNA (1)...(19): siRNA sense strand
acucauuauucaccagaga

SEQ ID NO: 2651420 - RNA, 19 nt, Homo sapiens
  misc_RNA (1)...(19): siRNA sense strand
guguagugaaugugggaag

SEQ ID NO: 2651421 - RNA, 19 nt, Homo sapiens
  misc_RNA (1)...(19): siRNA sense strand
guguagugaaugugggaag

SEQ ID NO: 2651422 - RNA, 19 nt, Homo sapiens
  misc_RNA (1)...(19): siRNA sense strand
uucaaaguggacagaauaa

SEQ ID NO: 2651423 - RNA, 19 nt, Homo sapiens
  misc_RNA (1)...(19): siRNA sense strand
guguagugaaugugggaaa

SEQ ID NO: 2651424 - RNA, 19 nt, Homo sapiens
  misc_RNA (1)...(19): siRNA sense strand
augcaaugaaugugggaaa

SEQ ID NO: 2651425 - RNA, 19 nt, Homo sapiens
  misc_RNA (1)...(19): siRNA sense strand
gggaaauucuuuaggcaca

SEQ ID NO: 2651426 - RNA, 19 nt, Homo sapiens
  misc_RNA (1)...(19): siRNA sense strand
ccuuaugaguguagugaau

SEQ ID NO: 2651427 - RNA, 19 nt, Homo sapiens
  misc_RNA (1)...(19): siRNA sense strand
ccuuaugaguguagugaau

SEQ ID NO: 2651428 - RNA, 19 nt, Homo sapiens
  misc_RNA (1)...(19): siRNA sense strand
gggaaauucuuuauggaca

SEQ ID NO: 2651429 - RNA, 19 nt, Homo sapiens
  misc_RNA (1)...(19): siRNA sense strand
ccuuauguguguagugaau

SEQ ID NO: 2651430 - RNA, 19 nt, Homo sapiens
  misc_RNA (1)...(19): siRNA sense strand
gggaaguucuuuauggaca

SEQ ID NO: 2651431 - RNA, 19 nt, Homo sapiens
  misc_RNA (1)...(19): siRNA sense strand
augcaacaaaugugggaaa

SEQ ID NO: 2651432 - RNA, 19 nt, Homo sapiens
  misc_RNA (1)...(19): siRNA sense strand
ggagaaaucacuuuggaga

SEQ ID NO: 2651433 - RNA, 19 nt, Homo sapiens
  misc_RNA (1)...(19): siRNA sense strand
ggucacaacuuuaaagcca

SEQ ID NO: 2651434 - RNA, 19 nt, Homo sapiens
  misc_RNA (1)...(19): siRNA sense strand
ggcaaauuguuuagguaca

SEQ ID NO: 2651435 - RNA, 19 nt, Homo sapiens
  misc_RNA (1)...(19): siRNA sense strand
gugcagugaauguggaaga

SEQ ID NO: 2651436 - RNA, 19 nt, Homo sapiens
  misc_RNA (1)...(19): siRNA sense strand
acucauuagacaucagaaa

SEQ ID NO: 2651437 - RNA, 19 nt, Homo sapiens
  misc_RNA (1)...(19): siRNA sense strand
acucauuagacaucagaaa

SEQ ID NO: 2651438 - RNA, 19 nt, Homo sapiens
  misc_RNA (1)...(19): siRNA sense strand
cgaaaucauacuggagaaa

SEQ ID NO: 2651439 - RNA, 19 nt, Homo sapiens
  misc_RNA (1)...(19): siRNA sense strand
guguagugaauguggaaaa

SEQ ID NO: 2651440 - RNA, 19 nt, Homo sapiens
  misc_RNA (1)...(19): siRNA sense strand
augcagugaauguggcaaa

SEQ ID NO: 2651441 - RNA, 19 nt, Homo sapiens
  misc_RNA (1)...(19): siRNA sense strand
cagaauaauuacagcugca

SEQ ID NO: 2651442 - RNA, 19 nt, Homo sapiens
  misc_RNA (1)...(19): siRNA sense strand
augcagcaaaugugggaaa

SEQ ID NO: 2651443 - RNA, 19 nt, Homo sapiens
  misc_RNA (1)...(19): siRNA sense strand
ccuuauggaugcaaugaau

SEQ ID NO: 2651444 - RNA, 19 nt, Homo sapiens
  misc_RNA (1)...(19): siRNA sense strand
ccuuaugaaugcaacaaau

SEQ ID NO: 2651445 - RNA, 19 nt, Homo sapiens
  misc_RNA (1)...(19): siRNA sense strand
acuuacaaaugcagcaaau

SEQ ID NO: 2651446 - RNA, 19 nt, Homo sapiens
  misc_RNA (1)...(19): siRNA sense strand
gcaacaaaugugggaaauu

SEQ ID NO: 2651447 - RNA, 19 nt, Homo sapiens
  misc_RNA (1)...(19): siRNA sense strand
aguucacacuggagaaaga

SEQ ID NO: 2651448 - RNA, 19 nt, Homo sapiens
  misc_RNA (1)...(19): siRNA sense strand
gggaauucuuaaugacguu

SEQ ID NO: 2651449 - RNA, 19 nt, Homo sapiens
  misc_RNA (1)...(19): siRNA sense strand
agggaaagaacuuacaaau

SEQ ID NO: 2651450 - RNA, 19 nt, Homo sapiens
  misc_RNA (1)...(19): siRNA sense strand
augugaugcuggagaacuu

SEQ ID NO: 2651451 - RNA, 19 nt, Homo sapiens
  misc_RNA (1)...(19): siRNA sense strand
aaaguucacacuagggaaa

SEQ ID NO: 2651452 - RNA, 19 nt, Homo sapiens
  misc_RNA (1)...(19): siRNA sense strand
uugcugugaaugugggaaa

SEQ ID NO: 2651453 - RNA, 19 nt, Homo sapiens
  misc_RNA (1)...(19): siRNA sense strand
acucauuauucaucagaga

SEQ ID NO: 2651454 - RNA, 19 nt, Homo sapiens
  misc_RNA (1)...(19): siRNA sense strand
agauacaacuccagccuca

SEQ ID NO: 2651455 - RNA, 19 nt, Homo sapiens
  misc_RNA (1)...(19): siRNA sense strand
agagagaagcucaccagaa

SEQ ID NO: 2651456 - RNA, 19 nt, Homo sapiens
  misc_RNA (1)...(19): siRNA sense strand
ggauuuuacuggugauuca

SEQ ID NO: 2651457 - RNA, 19 nt, Homo sapiens
  misc_RNA (1)...(19): siRNA sense strand
uuucaaaguggacagaaua

SEQ ID NO: 2651458 - RNA, 19 nt, Homo sapiens
  misc_RNA (1)...(19): siRNA sense strand
ggaaaagccuucagccuca

SEQ ID NO: 2651459 - RNA, 19 nt, Homo sapiens
  misc_RNA (1)...(19): siRNA sense strand
ugggaaauucuuuagguau

SEQ ID NO: 2651460 - RNA, 19 nt, Homo sapiens
  misc_RNA (1)...(19): siRNA sense strand
ggaaauucuuuauggacag

SEQ ID NO: 2651461 - RNA, 19 nt, Homo sapiens
  misc_RNA (1)...(19): siRNA sense strand
acugagugugggagaguuu

SEQ ID NO: 2651462 - RNA, 19 nt, Homo sapiens
  misc_RNA (1)...(19): siRNA sense strand
ccagaaaguucacaccaga

SEQ ID NO: 2651463 - RNA, 19 nt, Homo sapiens
  misc_RNA (1)...(19): siRNA sense strand
ggagcaucuuagagagaag

SEQ ID NO: 2651464 - RNA, 19 nt, Homo sapiens
  misc_RNA (1)...(19): siRNA sense strand
gggaaauucuuuagauacc

SEQ ID NO: 2651465 - RNA, 19 nt, Homo sapiens
  misc_RNA (1)...(19): siRNA sense strand
agguauugcuucacacuga

SEQ ID NO: 2651466 - RNA, 19 nt, Homo sapiens
  misc_RNA (1)...(19): siRNA sense strand
ccucauuaaacaucggaga

SEQ ID NO: 2651467 - RNA, 19 nt, Homo sapiens
  misc_RNA (1)...(19): siRNA sense strand
ggaaaggccuuaugagugc

SEQ ID NO: 2651468 - RNA, 19 nt, Homo sapiens
  misc_RNA (1)...(19): siRNA sense strand
agaaaagccuuaugagugu

SEQ ID NO: 2651469 - RNA, 19 nt, Homo sapiens
  misc_RNA (1)...(19): siRNA sense strand
acacagaggaaaggccuua

SEQ ID NO: 2651470 - RNA, 19 nt, Homo sapiens
  misc_RNA (1)...(19): siRNA sense strand
ggagaaaggccuugggagu

SEQ ID NO: 2651471 - RNA, 19 nt, Homo sapiens
  misc_RNA (1)...(19): siRNA sense strand
ccuuaugagugcagcgaau

SEQ ID NO: 2651472 - RNA, 19 nt, Homo sapiens
  misc_RNA (1)...(19): siRNA sense strand
cuuuaugaguguagcaaau

SEQ ID NO: 2651473 - RNA, 19 nt, Homo sapiens
  misc_RNA (1)...(19): siRNA sense strand
gugcaaugaauguggaaaa

SEQ ID NO: 2651474 - RNA, 19 nt, Homo sapiens
  misc_RNA (1)...(19): siRNA sense strand
guguagcaaaugugggaaa

SEQ ID NO: 2651475 - RNA, 19 nt, Homo sapiens
  misc_RNA (1)...(19): siRNA sense strand
guguggugacugugggaaa

SEQ ID NO: 2651476 - RNA, 19 nt, Homo sapiens
  misc_RNA (1)...(19): siRNA sense strand
gugcaacaaaugugggaau

SEQ ID NO: 2651477 - RNA, 19 nt, Homo sapiens
  misc_RNA (1)...(19): siRNA sense strand
ggacauggacagagccuca

SEQ ID NO: 2651478 - RNA, 19 nt, Homo sapiens
  misc_RNA (1)...(19): siRNA sense strand
ccuuauaaguguggugaau

SEQ ID NO: 2651479 - RNA, 19 nt, Homo sapiens
  misc_RNA (1)...(19): siRNA sense strand
uugaagugaugcuggagaa

SEQ ID NO: 2651480 - RNA, 19 nt, Homo sapiens
  misc_RNA (1)...(19): siRNA sense strand
cugaaugaucaucggagaa

SEQ ID NO: 2651481 - RNA, 19 nt, Homo sapiens
  misc_RNA (1)...(19): siRNA sense strand
ccugaaugaucaucggaga

SEQ ID NO: 2651482 - RNA, 19 nt, Homo sapiens
  misc_RNA (1)...(19): siRNA sense strand
gaguguggccaguguggaa

SEQ ID NO: 2651483 - RNA, 19 nt, Homo sapiens
  misc_RNA (1)...(19): siRNA sense strand
guguagccagugugggaaa

SEQ ID NO: 2651484 - RNA, 19 nt, Homo sapiens
  misc_RNA (1)...(19): siRNA sense strand
gagaauucauacuggagca

SEQ ID NO: 2651485 - RNA, 19 nt, Homo sapiens
  misc_RNA (1)...(19): siRNA sense strand
ggguuguggccauggaaca

SEQ ID NO: 2651486 - RNA, 19 nt, Homo sapiens
  misc_RNA (1)...(19): siRNA sense strand
ucauuaaacaccagagagu

SEQ ID NO: 2651487 - RNA, 19 nt, Homo sapiens
  misc_RNA (1)...(19): siRNA sense strand
cauugaagcccuuucgcaa

SEQ ID NO: 2651488 - RNA, 19 nt, Homo sapiens
  misc_RNA (1)...(19): siRNA sense strand
gaacagaggaugaagagac

SEQ ID NO: 2651489 - RNA, 19 nt, Homo sapiens
  misc_RNA (1)...(19): siRNA sense strand
guguggugaaugugggaau

SEQ ID NO: 2651490 - RNA, 19 nt, Homo sapiens
  misc_RNA (1)...(19): siRNA sense strand
gcuuuaugaguguagcaaa

SEQ ID NO: 2651491 - RNA, 19 nt, Homo sapiens
  misc_RNA (1)...(19): siRNA sense strand
gugcagcgaauguggaaaa

SEQ ID NO: 2651492 - RNA, 19 nt, Homo sapiens
  misc_RNA (1)...(19): siRNA sense strand
ccuuaugaguguagccagu

SEQ ID NO: 2651493 - RNA, 19 nt, Homo sapiens
  misc_RNA (1)...(19): siRNA sense strand
cagaagcaucacagugcaa

SEQ ID NO: 2651494 - RNA, 19 nt, Homo sapiens
  misc_RNA (1)...(19): siRNA sense strand
gaguguagccaguguggga

SEQ ID NO: 2651495 - RNA, 19 nt, Homo sapiens
  misc_RNA (1)...(19): siRNA sense strand
ggugaaugugggaaggcuu

SEQ ID NO: 2651496 - RNA, 19 nt, Homo sapiens
  misc_RNA (1)...(19): siRNA sense strand
agaaauccuugaagaggga

SEQ ID NO: 2651497 - RNA, 19 nt, Homo sapiens
  misc_RNA (1)...(19): siRNA sense strand
ugggaaauccuuuagucaa

SEQ ID NO: 2651498 - RNA, 19 nt, Homo sapiens
  misc_RNA (1)...(19): siRNA sense strand
ugggaaauccuuuagucaa

SEQ ID NO: 2651499 - RNA, 19 nt, Homo sapiens
  misc_RNA (1)...(19): siRNA sense strand
caucacagugcaaagaaau

SEQ ID NO: 2651500 - RNA, 19 nt, Homo sapiens
  misc_RNA (1)...(19): siRNA sense strand
ugggaaauccuuuagccaa

SEQ ID NO: 2651501 - RNA, 19 nt, Homo sapiens
  misc_RNA (1)...(19): siRNA sense strand
aacagaggaugaagagaca

SEQ ID NO: 2651502 - RNA, 19 nt, Homo sapiens
  misc_RNA (1)...(19): siRNA sense strand
gagcaaagccuuaugagug

SEQ ID NO: 2651503 - RNA, 19 nt, Homo sapiens
  misc_RNA (1)...(19): siRNA sense strand
ccuuauaaguguggugacu

SEQ ID NO: 2651504 - RNA, 19 nt, Homo sapiens
  misc_RNA (1)...(19): siRNA sense strand
gccauggaacagaggauga

SEQ ID NO: 2651505 - RNA, 19 nt, Homo sapiens
  misc_RNA (1)...(19): siRNA sense strand
cauuacaagucaggugaau

SEQ ID NO: 2651506 - RNA, 19 nt, Homo sapiens
  misc_RNA (1)...(19): siRNA sense strand
ccuugggagugcaaugaau

SEQ ID NO: 2651507 - RNA, 19 nt, Homo sapiens
  misc_RNA (1)...(19): siRNA sense strand
uugaagagggacauggaca

SEQ ID NO: 2651508 - RNA, 19 nt, Homo sapiens
  misc_RNA (1)...(19): siRNA sense strand
ccucauaugugaagugcug

SEQ ID NO: 2651509 - RNA, 19 nt, Homo sapiens
  misc_RNA (1)...(19): siRNA sense strand
ggucuuuccuggaggcaag

SEQ ID NO: 2651510 - RNA, 19 nt, Homo sapiens
  misc_RNA (1)...(19): siRNA sense strand
gaaaauacacacuggagca

SEQ ID NO: 2651511 - RNA, 19 nt, Homo sapiens
  misc_RNA (1)...(19): siRNA sense strand
gugugaccuuugaggacau

SEQ ID NO: 2651512 - RNA, 19 nt, Homo sapiens
  misc_RNA (1)...(19): siRNA sense strand
ccuuaugagugcagcgaau

SEQ ID NO: 2651513 - RNA, 19 nt, Homo sapiens
  misc_RNA (1)...(19): siRNA sense strand
augcagugaaugugggaaa

SEQ ID NO: 2651514 - RNA, 19 nt, Homo sapiens
  misc_RNA (1)...(19): siRNA sense strand
gugcacggaaugugggaaa

SEQ ID NO: 2651515 - RNA, 19 nt, Homo sapiens
  misc_RNA (1)...(19): siRNA sense strand
ccuuaugagugcacggaau

SEQ ID NO: 2651516 - RNA, 19 nt, Homo sapiens
  misc_RNA (1)...(19): siRNA sense strand
gagcaaucaaauagcaaaa

SEQ ID NO: 2651517 - RNA, 19 nt, Homo sapiens
  misc_RNA (1)...(19): siRNA sense strand
caucagucacagaggaaaa

SEQ ID NO: 2651518 - RNA, 19 nt, Homo sapiens
  misc_RNA (1)...(19): siRNA sense strand
cccuaugagugcagugaau

SEQ ID NO: 2651519 - RNA, 19 nt, Homo sapiens
  misc_RNA (1)...(19): siRNA sense strand
augugaugcuggagaacuu

SEQ ID NO: 2651520 - RNA, 19 nt, Homo sapiens
  misc_RNA (1)...(19): siRNA sense strand
ccuuaugaaugucgagagu

SEQ ID NO: 2651521 - RNA, 19 nt, Homo sapiens
  misc_RNA (1)...(19): siRNA sense strand
gggagcaaucaaauagcaa

SEQ ID NO: 2651522 - RNA, 19 nt, Homo sapiens
  misc_RNA (1)...(19): siRNA sense strand
gugggaaauccuuuagcaa

SEQ ID NO: 2651523 - RNA, 19 nt, Homo sapiens
  misc_RNA (1)...(19): siRNA sense strand
acaaaagcauucagcggua

SEQ ID NO: 2651524 - RNA, 19 nt, Homo sapiens
  misc_RNA (1)...(19): siRNA sense strand
cugcagagaaguugggaag

SEQ ID NO: 2651525 - RNA, 19 nt, Homo sapiens
  misc_RNA (1)...(19): siRNA sense strand
ccucauuaaacaucggaga

SEQ ID NO: 2651526 - RNA, 19 nt, Homo sapiens
  misc_RNA (1)...(19): siRNA sense strand
ucauaaaacaccagaaagu

SEQ ID NO: 2651527 - RNA, 19 nt, Homo sapiens
  misc_RNA (1)...(19): siRNA sense strand
ugggaaauccuuuagccaa

SEQ ID NO: 2651528 - RNA, 19 nt, Homo sapiens
  misc_RNA (1)...(19): siRNA sense strand
ugggaaauccuuuagccaa

SEQ ID NO: 2651529 - RNA, 19 nt, Homo sapiens
  misc_RNA (1)...(19): siRNA sense strand
ccuuauuaaacaucagaga

SEQ ID NO: 2651530 - RNA, 19 nt, Homo sapiens
  misc_RNA (1)...(19): siRNA sense strand
gugcagugaaugugggaag

SEQ ID NO: 2651531 - RNA, 19 nt, Homo sapiens
  misc_RNA (1)...(19): siRNA sense strand
gugcagugaaugugggaag

SEQ ID NO: 2651532 - RNA, 19 nt, Homo sapiens
  misc_RNA (1)...(19): siRNA sense strand
ucauuacaacuguggagaa

SEQ ID NO: 2651533 - RNA, 19 nt, Homo sapiens
  misc_RNA (1)...(19): siRNA sense strand
gagacuucacacuggagaa

SEQ ID NO: 2651534 - RNA, 19 nt, Homo sapiens
  misc_RNA (1)...(19): siRNA sense strand
ugggaaguccuuuaggcaa

SEQ ID NO: 2651535 - RNA, 19 nt, Homo sapiens
  misc_RNA (1)...(19): siRNA sense strand
cgaaaacaccagagaguuc

SEQ ID NO: 2651536 - RNA, 19 nt, Homo sapiens
  misc_RNA (1)...(19): siRNA sense strand
gccaucagucacagaggaa

SEQ ID NO: 2651537 - RNA, 19 nt, Homo sapiens
  misc_RNA (1)...(19): siRNA sense strand
gugugaagaaugugggaaa

SEQ ID NO: 2651538 - RNA, 19 nt, Homo sapiens
  misc_RNA (1)...(19): siRNA sense strand
ccuuaugagugcagagaau

SEQ ID NO: 2651539 - RNA, 19 nt, Homo sapiens
  misc_RNA (1)...(19): siRNA sense strand
ccuuaugaaugcagggaau

SEQ ID NO: 2651540 - RNA, 19 nt, Homo sapiens
  misc_RNA (1)...(19): siRNA sense strand
guguggagaaugugggaaa

SEQ ID NO: 2651541 - RNA, 19 nt, Homo sapiens
  misc_RNA (1)...(19): siRNA sense strand
guguggagaaugugggaaa

SEQ ID NO: 2651542 - RNA, 19 nt, Homo sapiens
  misc_RNA (1)...(19): siRNA sense strand
guguggagaaugugggaaa

SEQ ID NO: 2651543 - RNA, 19 nt, Homo sapiens
  misc_RNA (1)...(19): siRNA sense strand
guguagagaguguaggaaa

SEQ ID NO: 2651544 - RNA, 19 nt, Homo sapiens
  misc_RNA (1)...(19): siRNA sense strand
auguaaugaaugugggaaa

SEQ ID NO: 2651545 - RNA, 19 nt, Homo sapiens
  misc_RNA (1)...(19): siRNA sense strand
uguagagaguguaggaaau

SEQ ID NO: 2651546 - RNA, 19 nt, Homo sapiens
  misc_RNA (1)...(19): siRNA sense strand
gggagaagucaaacagcaa

SEQ ID NO: 2651547 - RNA, 19 nt, Homo sapiens
  misc_RNA (1)...(19): siRNA sense strand
ccuuaugaguguagagagu

SEQ ID NO: 2651548 - RNA, 19 nt, Homo sapiens
  misc_RNA (1)...(19): siRNA sense strand
gaauguuauugcugggaau

SEQ ID NO: 2651549 - RNA, 19 nt, Homo sapiens
  misc_RNA (1)...(19): siRNA sense strand
aguucauacuggagaaaga

SEQ ID NO: 2651550 - RNA, 19 nt, Homo sapiens
  misc_RNA (1)...(19): siRNA sense strand
gggaaaucuuuuagucaaa

SEQ ID NO: 2651551 - RNA, 19 nt, Homo sapiens
  misc_RNA (1)...(19): siRNA sense strand
gggaaaucuuuuagucaua

SEQ ID NO: 2651552 - RNA, 19 nt, Homo sapiens
  misc_RNA (1)...(19): siRNA sense strand
gggaaaucuuuuagucaua

SEQ ID NO: 2651553 - RNA, 19 nt, Homo sapiens
  misc_RNA (1)...(19): siRNA sense strand
auguggagaaugugggaaa

SEQ ID NO: 2651554 - RNA, 19 nt, Homo sapiens
  misc_RNA (1)...(19): siRNA sense strand
auguggagaaugugggaaa

SEQ ID NO: 2651555 - RNA, 19 nt, Homo sapiens
  misc_RNA (1)...(19): siRNA sense strand
gugugaagaauguggaaaa

SEQ ID NO: 2651556 - RNA, 19 nt, Homo sapiens
  misc_RNA (1)...(19): siRNA sense strand
ccguuugaguguagugaau

SEQ ID NO: 2651557 - RNA, 19 nt, Homo sapiens
  misc_RNA (1)...(19): siRNA sense strand
gcgaguucacacugggaaa

SEQ ID NO: 2651558 - RNA, 19 nt, Homo sapiens
  misc_RNA (1)...(19): siRNA sense strand
gagaguucacacugggaaa

SEQ ID NO: 2651559 - RNA, 19 nt, Homo sapiens
  misc_RNA (1)...(19): siRNA sense strand
gugcagugaauguggaaaa

SEQ ID NO: 2651560 - RNA, 19 nt, Homo sapiens
  misc_RNA (1)...(19): siRNA sense strand
gggaaaagaccuuaugaau

SEQ ID NO: 2651561 - RNA, 19 nt, Homo sapiens
  misc_RNA (1)...(19): siRNA sense strand
gggaaaagaccuuaugaau

SEQ ID NO: 2651562 - RNA, 19 nt, Homo sapiens
  misc_RNA (1)...(19): siRNA sense strand
ccuuaugaguguggagaau

SEQ ID NO: 2651563 - RNA, 19 nt, Homo sapiens
  misc_RNA (1)...(19): siRNA sense strand
ccuuaugaguguggagaau

SEQ ID NO: 2651564 - RNA, 19 nt, Homo sapiens
  misc_RNA (1)...(19): siRNA sense strand
cgucaguaaucaucagaga

SEQ ID NO: 2651565 - RNA, 19 nt, Homo sapiens
  misc_RNA (1)...(19): siRNA sense strand
ucaguaccuuggagagaaa

SEQ ID NO: 2651566 - RNA, 19 nt, Homo sapiens
  misc_RNA (1)...(19): siRNA sense strand
gcgaguucauacuggagaa

SEQ ID NO: 2651567 - RNA, 19 nt, Homo sapiens
  misc_RNA (1)...(19): siRNA sense strand
ccuuaugaauguggagaau

SEQ ID NO: 2651568 - RNA, 19 nt, Homo sapiens
  misc_RNA (1)...(19): siRNA sense strand
ccuuaugaauguggagaau

SEQ ID NO: 2651569 - RNA, 19 nt, Homo sapiens
  misc_RNA (1)...(19): siRNA sense strand
ccuuaugaauguggagaau

SEQ ID NO: 2651570 - RNA, 19 nt, Homo sapiens
  misc_RNA (1)...(19): siRNA sense strand
aggucacacuggagaaaga

SEQ ID NO: 2651571 - RNA, 19 nt, Homo sapiens
  misc_RNA (1)...(19): siRNA sense strand
ccuuacgagugcagcgaau

SEQ ID NO: 2651572 - RNA, 19 nt, Homo sapiens
  misc_RNA (1)...(19): siRNA sense strand
cauuacagcuguggagaau

SEQ ID NO: 2651573 - RNA, 19 nt, Homo sapiens
  misc_RNA (1)...(19): siRNA sense strand
ggagaaagaccuuacgagu

SEQ ID NO: 2651574 - RNA, 19 nt, Homo sapiens
  misc_RNA (1)...(19): siRNA sense strand
aguucacacuggagaaaga

SEQ ID NO: 2651575 - RNA, 19 nt, Homo sapiens
  misc_RNA (1)...(19): siRNA sense strand
acagcaaaccugaguguga

SEQ ID NO: 2651576 - RNA, 19 nt, Homo sapiens
  misc_RNA (1)...(19): siRNA sense strand
guggagaaugcaugaaaca

SEQ ID NO: 2651577 - RNA, 19 nt, Homo sapiens
  misc_RNA (1)...(19): siRNA sense strand
uugcugggaaugugggaaa

SEQ ID NO: 2651578 - RNA, 19 nt, Homo sapiens
  misc_RNA (1)...(19): siRNA sense strand
gggaaaucuuuuagucgaa

SEQ ID NO: 2651579 - RNA, 19 nt, Homo sapiens
  misc_RNA (1)...(19): siRNA sense strand
gggaaaucuuuuagucgaa

SEQ ID NO: 2651580 - RNA, 19 nt, Homo sapiens
  misc_RNA (1)...(19): siRNA sense strand
cagagaguucacacagaaa

SEQ ID NO: 2651581 - RNA, 19 nt, Homo sapiens
  misc_RNA (1)...(19): siRNA sense strand
augcagggaauguggaaaa

SEQ ID NO: 2651582 - RNA, 19 nt, Homo sapiens
  misc_RNA (1)...(19): siRNA sense strand
gugggaaauccuuuagcaa

SEQ ID NO: 2651583 - RNA, 19 nt, Homo sapiens
  misc_RNA (1)...(19): siRNA sense strand
ccuuaugagugugaagaau

SEQ ID NO: 2651584 - RNA, 19 nt, Homo sapiens
  misc_RNA (1)...(19): siRNA sense strand
ccuuaugagugugaagaau

SEQ ID NO: 2651585 - RNA, 19 nt, Homo sapiens
  misc_RNA (1)...(19): siRNA sense strand
gagaguucacacagaaaga

SEQ ID NO: 2651586 - RNA, 19 nt, Homo sapiens
  misc_RNA (1)...(19): siRNA sense strand
ugggaaauccuuugcugaa

SEQ ID NO: 2651587 - RNA, 19 nt, Homo sapiens
  misc_RNA (1)...(19): siRNA sense strand
ggaauguuauugcugggaa

SEQ ID NO: 2651588 - RNA, 19 nt, Homo sapiens
  misc_RNA (1)...(19): siRNA sense strand
ucauuacagcuguggagaa

SEQ ID NO: 2651589 - RNA, 19 nt, Homo sapiens
  misc_RNA (1)...(19): siRNA sense strand
gggcaaucucauucaacau

SEQ ID NO: 2651590 - RNA, 19 nt, Homo sapiens
  misc_RNA (1)...(19): siRNA sense strand
cggcggagcaccagaaaga

SEQ ID NO: 2651591 - RNA, 19 nt, Homo sapiens
  misc_RNA (1)...(19): siRNA sense strand
ucaaggaccacgaguacaa

SEQ ID NO: 2651592 - RNA, 19 nt, Homo sapiens
  misc_RNA (1)...(19): siRNA sense strand
ugaacuauugcgugggauu

SEQ ID NO: 2651593 - RNA, 19 nt, Homo sapiens
  misc_RNA (1)...(19): siRNA sense strand
gcaaggccuucgugcgcaa

SEQ ID NO: 2651594 - RNA, 19 nt, Homo sapiens
  misc_RNA (1)...(19): siRNA sense strand
ggauugaggaugugggccu

SEQ ID NO: 2651595 - RNA, 19 nt, Homo sapiens
  misc_RNA (1)...(19): siRNA sense strand
guacaaccgcauaguucaa

SEQ ID NO: 2651596 - RNA, 19 nt, Homo sapiens
  misc_RNA (1)...(19): siRNA sense strand
cugcagaacuuguccaacu

SEQ ID NO: 2651597 - RNA, 19 nt, Homo sapiens
  misc_RNA (1)...(19): siRNA sense strand
acaucaaggaccacgagua

SEQ ID NO: 2651598 - RNA, 19 nt, Homo sapiens
  misc_RNA (1)...(19): siRNA sense strand
gccaagaugcccugcugaa

SEQ ID NO: 2651599 - RNA, 19 nt, Homo sapiens
  misc_RNA (1)...(19): siRNA sense strand
ccgcauaguucaaaccaag

SEQ ID NO: 2651600 - RNA, 19 nt, Homo sapiens
  misc_RNA (1)...(19): siRNA sense strand
uauaugacaucaaggacca

SEQ ID NO: 2651601 - RNA, 19 nt, Homo sapiens
  misc_RNA (1)...(19): siRNA sense strand
guguaaggucugugggaaa

SEQ ID NO: 2651602 - RNA, 19 nt, Homo sapiens
  misc_RNA (1)...(19): siRNA sense strand
guguaaggaaugugggaaa

SEQ ID NO: 2651603 - RNA, 19 nt, Homo sapiens
  misc_RNA (1)...(19): siRNA sense strand
auguaaagggugugggaaa

SEQ ID NO: 2651604 - RNA, 19 nt, Homo sapiens
  misc_RNA (1)...(19): siRNA sense strand
guguagugaaugugggaaa

SEQ ID NO: 2651605 - RNA, 19 nt, Homo sapiens
  misc_RNA (1)...(19): siRNA sense strand
aaugcauacuggagagaaa

SEQ ID NO: 2651606 - RNA, 19 nt, Homo sapiens
  misc_RNA (1)...(19): siRNA sense strand
ggaacaaucuucaggcaga

SEQ ID NO: 2651607 - RNA, 19 nt, Homo sapiens
  misc_RNA (1)...(19): siRNA sense strand
uuguaaugaaugugggaaa

SEQ ID NO: 2651608 - RNA, 19 nt, Homo sapiens
  misc_RNA (1)...(19): siRNA sense strand
aagccauacaggugagaaa

SEQ ID NO: 2651609 - RNA, 19 nt, Homo sapiens
  misc_RNA (1)...(19): siRNA sense strand
cuuuaaauguagugagugu

SEQ ID NO: 2651610 - RNA, 19 nt, Homo sapiens
  misc_RNA (1)...(19): siRNA sense strand
uauucauacaggagagaaa

SEQ ID NO: 2651611 - RNA, 19 nt, Homo sapiens
  misc_RNA (1)...(19): siRNA sense strand
gcuuuuagccagaaggaaa

SEQ ID NO: 2651612 - RNA, 19 nt, Homo sapiens
  misc_RNA (1)...(19): siRNA sense strand
ccuuaucaguguagugaau

SEQ ID NO: 2651613 - RNA, 19 nt, Homo sapiens
  misc_RNA (1)...(19): siRNA sense strand
auguaaggaauguggcaaa

SEQ ID NO: 2651614 - RNA, 19 nt, Homo sapiens
  misc_RNA (1)...(19): siRNA sense strand
gggaaagccuucaguggca

SEQ ID NO: 2651615 - RNA, 19 nt, Homo sapiens
  misc_RNA (1)...(19): siRNA sense strand
acauuagacaccagagaau

SEQ ID NO: 2651616 - RNA, 19 nt, Homo sapiens
  misc_RNA (1)...(19): siRNA sense strand
aagucacacaggagagaaa

SEQ ID NO: 2651617 - RNA, 19 nt, Homo sapiens
  misc_RNA (1)...(19): siRNA sense strand
ccuuguagagcauaagaaa

SEQ ID NO: 2651618 - RNA, 19 nt, Homo sapiens
  misc_RNA (1)...(19): siRNA sense strand
aggaaagaaggcauauaaa

SEQ ID NO: 2651619 - RNA, 19 nt, Homo sapiens
  misc_RNA (1)...(19): siRNA sense strand
ggaaaagccuucagccaga

SEQ ID NO: 2651620 - RNA, 19 nt, Homo sapiens
  misc_RNA (1)...(19): siRNA sense strand
auguaaugaauguggaaca

SEQ ID NO: 2651621 - RNA, 19 nt, Homo sapiens
  misc_RNA (1)...(19): siRNA sense strand
ucacugagcaugagaaaau

SEQ ID NO: 2651622 - RNA, 19 nt, Homo sapiens
  misc_RNA (1)...(19): siRNA sense strand
auucagaagucaagccuca

SEQ ID NO: 2651623 - RNA, 19 nt, Homo sapiens
  misc_RNA (1)...(19): siRNA sense strand
gcaaaaccuuguagagcau

SEQ ID NO: 2651624 - RNA, 19 nt, Homo sapiens
  misc_RNA (1)...(19): siRNA sense strand
cuuagaagucacacaggaa

SEQ ID NO: 2651625 - RNA, 19 nt, Homo sapiens
  misc_RNA (1)...(19): siRNA sense strand
guuggaaagucuucagcau

SEQ ID NO: 2651626 - RNA, 19 nt, Homo sapiens
  misc_RNA (1)...(19): siRNA sense strand
aaauguagugaguguggaa

SEQ ID NO: 2651627 - RNA, 19 nt, Homo sapiens
  misc_RNA (1)...(19): siRNA sense strand
augcacugaaugugguaaa

SEQ ID NO: 2651628 - RNA, 19 nt, Homo sapiens
  misc_RNA (1)...(19): siRNA sense strand
cccuaugcauguaaggaau

SEQ ID NO: 2651629 - RNA, 19 nt, Homo sapiens
  misc_RNA (1)...(19): siRNA sense strand
ccucauuauacaucagaga

SEQ ID NO: 2651630 - RNA, 19 nt, Homo sapiens
  misc_RNA (1)...(19): siRNA sense strand
cccuaugguuguaaugaau

SEQ ID NO: 2651631 - RNA, 19 nt, Homo sapiens
  misc_RNA (1)...(19): siRNA sense strand
aaaucauacaggaaccaaa

SEQ ID NO: 2651632 - RNA, 19 nt, Homo sapiens
  misc_RNA (1)...(19): siRNA sense strand
acuuuuagccugaagcaaa

SEQ ID NO: 2651633 - RNA, 19 nt, Homo sapiens
  misc_RNA (1)...(19): siRNA sense strand
uuaugaauguaaagggugu

SEQ ID NO: 2651634 - RNA, 19 nt, Homo sapiens
  misc_RNA (1)...(19): siRNA sense strand
ugggaaagccuucugucaa

SEQ ID NO: 2651635 - RNA, 19 nt, Homo sapiens
  misc_RNA (1)...(19): siRNA sense strand
aggaaaaccucauuauaca

SEQ ID NO: 2651636 - RNA, 19 nt, Homo sapiens
  misc_RNA (1)...(19): siRNA sense strand
agagaaaccuuauacgugu

SEQ ID NO: 2651637 - RNA, 19 nt, Homo sapiens
  misc_RNA (1)...(19): siRNA sense strand
gaauguaaaggguguggga

SEQ ID NO: 2651638 - RNA, 19 nt, Homo sapiens
  misc_RNA (1)...(19): siRNA sense strand
auguaaucaguguggaaga

SEQ ID NO: 2651639 - RNA, 19 nt, Homo sapiens
  misc_RNA (1)...(19): siRNA sense strand
auguagugaguguggaaaa

SEQ ID NO: 2651640 - RNA, 19 nt, Homo sapiens
  misc_RNA (1)...(19): siRNA sense strand
ccucauuagacaccagaga

SEQ ID NO: 2651641 - RNA, 19 nt, Homo sapiens
  misc_RNA (1)...(19): siRNA sense strand
agucaaaucucacagagca

SEQ ID NO: 2651642 - RNA, 19 nt, Homo sapiens
  misc_RNA (1)...(19): siRNA sense strand
ccucauuaaacaucacaau

SEQ ID NO: 2651643 - RNA, 19 nt, Homo sapiens
  misc_RNA (1)...(19): siRNA sense strand
acuuauuguacaugugaga

SEQ ID NO: 2651644 - RNA, 19 nt, Homo sapiens
  misc_RNA (1)...(19): siRNA sense strand
ccaacaaggucacgggcaa

SEQ ID NO: 2651645 - RNA, 19 nt, Homo sapiens
  misc_RNA (1)...(19): siRNA sense strand
uggaagaguucuaugcacu

SEQ ID NO: 2651646 - RNA, 19 nt, Homo sapiens
  misc_RNA (1)...(19): siRNA sense strand
gcagcaagcuucagcggcu

SEQ ID NO: 2651647 - RNA, 19 nt, Homo sapiens
  misc_RNA (1)...(19): siRNA sense strand
gggaggaagaggaggaaga

SEQ ID NO: 2651648 - RNA, 19 nt, Homo sapiens
  misc_RNA (1)...(19): siRNA sense strand
aggaagaggaggaagagga

SEQ ID NO: 2651649 - RNA, 19 nt, Homo sapiens
  misc_RNA (1)...(19): siRNA sense strand
ccaccaagcucacgugcga

SEQ ID NO: 2651650 - RNA, 19 nt, Homo sapiens
  misc_RNA (1)...(19): siRNA sense strand
agcuguaccuggcggacaa

SEQ ID NO: 2651651 - RNA, 19 nt, Homo sapiens
  misc_RNA (1)...(19): siRNA sense strand
agacuggaccuucgggaga

SEQ ID NO: 2651652 - RNA, 19 nt, Homo sapiens
  misc_RNA (1)...(19): siRNA sense strand
cugaagaaguacagggaau

SEQ ID NO: 2651653 - RNA, 19 nt, Homo sapiens
  misc_RNA (1)...(19): siRNA sense strand
ucgaagaagaggaggaaau

SEQ ID NO: 2651654 - RNA, 19 nt, Homo sapiens
  misc_RNA (1)...(19): siRNA sense strand
cggaagaaagagcgggaga

SEQ ID NO: 2651655 - RNA, 19 nt, Homo sapiens
  misc_RNA (1)...(19): siRNA sense strand
gcgacgaggaggaggacau

SEQ ID NO: 2651656 - RNA, 19 nt, Homo sapiens
  misc_RNA (1)...(19): siRNA sense strand
cggaggaugaagaggauuu

SEQ ID NO: 2651657 - RNA, 19 nt, Homo sapiens
  misc_RNA (1)...(19): siRNA sense strand
aggaggaggacaugggcaa

SEQ ID NO: 2651658 - RNA, 19 nt, Homo sapiens
  misc_RNA (1)...(19): siRNA sense strand
ccaagggugcugagggcaa

SEQ ID NO: 2651659 - RNA, 19 nt, Homo sapiens
  misc_RNA (1)...(19): siRNA sense strand
cggaaugaacgaugacgaa

SEQ ID NO: 2651660 - RNA, 19 nt, Homo sapiens
  misc_RNA (1)...(19): siRNA sense strand
gugaggagccaaugggaga

SEQ ID NO: 2651661 - RNA, 19 nt, Homo sapiens
  misc_RNA (1)...(19): siRNA sense strand
acgaggaagagauggacua

SEQ ID NO: 2651662 - RNA, 19 nt, Homo sapiens
  misc_RNA (1)...(19): siRNA sense strand
gugauucggaugaggagaa

SEQ ID NO: 2651663 - RNA, 19 nt, Homo sapiens
  misc_RNA (1)...(19): siRNA sense strand
acaggagacugaagcggaa

SEQ ID NO: 2651664 - RNA, 19 nt, Homo sapiens
  misc_RNA (1)...(19): siRNA sense strand
gagaguuggaagaagguga

SEQ ID NO: 2651665 - RNA, 19 nt, Homo sapiens
  misc_RNA (1)...(19): siRNA sense strand
agguggaggaacugaagaa

SEQ ID NO: 2651666 - RNA, 19 nt, Homo sapiens
  misc_RNA (1)...(19): siRNA sense strand
aagcaggugccgaggauga

SEQ ID NO: 2651667 - RNA, 19 nt, Homo sapiens
  misc_RNA (1)...(19): siRNA sense strand
uggauaagauguuggccga

SEQ ID NO: 2651668 - RNA, 19 nt, Homo sapiens
  misc_RNA (1)...(19): siRNA sense strand
ggaugaggguggaagcagu

SEQ ID NO: 2651669 - RNA, 19 nt, Homo sapiens
  misc_RNA (1)...(19): siRNA sense strand
ggucgaagaagaggaggaa

SEQ ID NO: 2651670 - RNA, 19 nt, Homo sapiens
  misc_RNA (1)...(19): siRNA sense strand
acuacgagaaugagcagua

SEQ ID NO: 2651671 - RNA, 19 nt, Homo sapiens
  misc_RNA (1)...(19): siRNA sense strand
gcaaggaggacuaugacga

SEQ ID NO: 2651672 - RNA, 19 nt, Homo sapiens
  misc_RNA (1)...(19): siRNA sense strand
gugccgaggaugagaagga

SEQ ID NO: 2651673 - RNA, 19 nt, Homo sapiens
  misc_RNA (1)...(19): siRNA sense strand
acgaggacuacgagaauga

SEQ ID NO: 2651674 - RNA, 19 nt, Homo sapiens
  misc_RNA (1)...(19): siRNA sense strand
gaggaggaggagagagcga

SEQ ID NO: 2651675 - RNA, 19 nt, Homo sapiens
  misc_RNA (1)...(19): siRNA sense strand
ggaccgggagaaugaggaa

SEQ ID NO: 2651676 - RNA, 19 nt, Homo sapiens
  misc_RNA (1)...(19): siRNA sense strand
cagcaagaguuauggcaug

SEQ ID NO: 2651677 - RNA, 19 nt, Homo sapiens
  misc_RNA (1)...(19): siRNA sense strand
gggaugaacaagggcggaa

SEQ ID NO: 2651678 - RNA, 19 nt, Homo sapiens
  misc_RNA (1)...(19): siRNA sense strand
uggacuauggagagaguga

SEQ ID NO: 2651679 - RNA, 19 nt, Homo sapiens
  misc_RNA (1)...(19): siRNA sense strand
ggaacugcaucaaugguga

SEQ ID NO: 2651680 - RNA, 19 nt, Homo sapiens
  misc_RNA (1)...(19): siRNA sense strand
agagcgggagaaagagaaa

SEQ ID NO: 2651681 - RNA, 19 nt, Homo sapiens
  misc_RNA (1)...(19): siRNA sense strand
aagaaggugaauuggaaga

SEQ ID NO: 2651682 - RNA, 19 nt, Homo sapiens
  misc_RNA (1)...(19): siRNA sense strand
gugcugagggcaauggcaa

SEQ ID NO: 2651683 - RNA, 19 nt, Homo sapiens
  misc_RNA (1)...(19): siRNA sense strand
cggacagauacaacagcua

SEQ ID NO: 2651684 - RNA, 19 nt, Homo sapiens
  misc_RNA (1)...(19): siRNA sense strand
aagaagaggaggaaaucca

SEQ ID NO: 2651685 - RNA, 19 nt, Homo sapiens
  misc_RNA (1)...(19): siRNA sense strand
gagagagugaggagccaau

SEQ ID NO: 2651686 - RNA, 19 nt, Homo sapiens
  misc_RNA (1)...(19): siRNA sense strand
caaugggagacgacgacua

SEQ ID NO: 2651687 - RNA, 19 nt, Homo sapiens
  misc_RNA (1)...(19): siRNA sense strand
gggaagauggagaguugga

SEQ ID NO: 2651688 - RNA, 19 nt, Homo sapiens
  misc_RNA (1)...(19): siRNA sense strand
aggauuucuacgaggaaga

SEQ ID NO: 2651689 - RNA, 19 nt, Homo sapiens
  misc_RNA (1)...(19): siRNA sense strand
augagaaggagguggagga

SEQ ID NO: 2651690 - RNA, 19 nt, Homo sapiens
  misc_RNA (1)...(19): siRNA sense strand
aggaggaaauccaagcaca

SEQ ID NO: 2651691 - RNA, 19 nt, Homo sapiens
  misc_RNA (1)...(19): siRNA sense strand
uguacgaggacuacgagaa

SEQ ID NO: 2651692 - RNA, 19 nt, Homo sapiens
  misc_RNA (1)...(19): siRNA sense strand
aggacgugacccugagcaa

SEQ ID NO: 2651693 - RNA, 19 nt, Homo sapiens
  misc_RNA (1)...(19): siRNA sense strand
ggagaagucccacaggaga

SEQ ID NO: 2651694 - RNA, 19 nt, Homo sapiens
  misc_RNA (1)...(19): siRNA sense strand
aagauggagaguuggaaga

SEQ ID NO: 2651695 - RNA, 19 nt, Homo sapiens
  misc_RNA (1)...(19): siRNA sense strand
aggucgaagaagaggagga

SEQ ID NO: 2651696 - RNA, 19 nt, Homo sapiens
  misc_RNA (1)...(19): siRNA sense strand
gcggaaugaacgaugacga

SEQ ID NO: 2651697 - RNA, 19 nt, Homo sapiens
  misc_RNA (1)...(19): siRNA sense strand
cuaccggagucgugaccau

SEQ ID NO: 2651698 - RNA, 19 nt, Homo sapiens
  misc_RNA (1)...(19): siRNA sense strand
acgagggagcucuuggaua

SEQ ID NO: 2651699 - RNA, 19 nt, Homo sapiens
  misc_RNA (1)...(19): siRNA sense strand
agaagcagcaggaggagga

SEQ ID NO: 2651700 - RNA, 19 nt, Homo sapiens
  misc_RNA (1)...(19): siRNA sense strand
acgcagacaugcacgcaga

SEQ ID NO: 2651701 - RNA, 19 nt, Homo sapiens
  misc_RNA (1)...(19): siRNA sense strand
ugaagaaguacagggaauu

SEQ ID NO: 2651702 - RNA, 19 nt, Homo sapiens
  misc_RNA (1)...(19): siRNA sense strand
acaugggcaaggaggacua

SEQ ID NO: 2651703 - RNA, 19 nt, Homo sapiens
  misc_RNA (1)...(19): siRNA sense strand
aggaugagaaggaggugga

SEQ ID NO: 2651704 - RNA, 19 nt, Homo sapiens
  misc_RNA (1)...(19): siRNA sense strand
acgacagggaagauggaga

SEQ ID NO: 2651705 - RNA, 19 nt, Homo sapiens
  misc_RNA (1)...(19): siRNA sense strand
cugaagaagcagggcauca

SEQ ID NO: 2651706 - RNA, 19 nt, Homo sapiens
  misc_RNA (1)...(19): siRNA sense strand
cagcaggagggcauggaga

SEQ ID NO: 2651707 - RNA, 19 nt, Homo sapiens
  misc_RNA (1)...(19): siRNA sense strand
ucaccaaagagcugaacca

SEQ ID NO: 2651708 - RNA, 19 nt, Homo sapiens
  misc_RNA (1)...(19): siRNA sense strand
aagagauggacuauggaga

SEQ ID NO: 2651709 - RNA, 19 nt, Homo sapiens
  misc_RNA (1)...(19): siRNA sense strand
agaaaaggaggucgaagaa

SEQ ID NO: 2651710 - RNA, 19 nt, Homo sapiens
  misc_RNA (1)...(19): siRNA sense strand
aggaugaagaggauuucua

SEQ ID NO: 2651711 - RNA, 19 nt, Homo sapiens
  misc_RNA (1)...(19): siRNA sense strand
acuucuaugacgaggacau

SEQ ID NO: 2651712 - RNA, 19 nt, Homo sapiens
  misc_RNA (1)...(19): siRNA sense strand
cugcagaaacccacagacu

SEQ ID NO: 2651713 - RNA, 19 nt, Homo sapiens
  misc_RNA (1)...(19): siRNA sense strand
acauguacaacaagaagau

SEQ ID NO: 2651714 - RNA, 19 nt, Homo sapiens
  misc_RNA (1)...(19): siRNA sense strand
cugaagaccuugaggcagc

SEQ ID NO: 2651715 - RNA, 19 nt, Homo sapiens
  misc_RNA (1)...(19): siRNA sense strand
cuugaaagacauaggauaa

SEQ ID NO: 2651716 - RNA, 19 nt, Homo sapiens
  misc_RNA (1)...(19): siRNA sense strand
acuucauacuggagagaaa

SEQ ID NO: 2651717 - RNA, 19 nt, Homo sapiens
  misc_RNA (1)...(19): siRNA sense strand
acuucauacuggagagaaa

SEQ ID NO: 2651718 - RNA, 19 nt, Homo sapiens
  misc_RNA (1)...(19): siRNA sense strand
acuucauacuggagagaaa

SEQ ID NO: 2651719 - RNA, 19 nt, Homo sapiens
  misc_RNA (1)...(19): siRNA sense strand
acuucauacuggagagaaa

SEQ ID NO: 2651720 - RNA, 19 nt, Homo sapiens
  misc_RNA (1)...(19): siRNA sense strand
acuucauacuggagagaaa

SEQ ID NO: 2651721 - RNA, 19 nt, Homo sapiens
  misc_RNA (1)...(19): siRNA sense strand
acuucauacuggagagaaa

SEQ ID NO: 2651722 - RNA, 19 nt, Homo sapiens
  misc_RNA (1)...(19): siRNA sense strand
cuucaaagacauaggagaa

SEQ ID NO: 2651723 - RNA, 19 nt, Homo sapiens
  misc_RNA (1)...(19): siRNA sense strand
acuucauacuggagagaaa

SEQ ID NO: 2651724 - RNA, 19 nt, Homo sapiens
  misc_RNA (1)...(19): siRNA sense strand
acuucauacuggagagaaa

SEQ ID NO: 2651725 - RNA, 19 nt, Homo sapiens
  misc_RNA (1)...(19): siRNA sense strand
acuucauacuggagagaaa

SEQ ID NO: 2651726 - RNA, 19 nt, Homo sapiens
  misc_RNA (1)...(19): siRNA sense strand
aauucauaguggagagaaa

SEQ ID NO: 2651727 - RNA, 19 nt, Homo sapiens
  misc_RNA (1)...(19): siRNA sense strand
aauccaugguauagggaaa

SEQ ID NO: 2651728 - RNA, 19 nt, Homo sapiens
  misc_RNA (1)...(19): siRNA sense strand
guguaauagauguggcaaa

SEQ ID NO: 2651729 - RNA, 19 nt, Homo sapiens
  misc_RNA (1)...(19): siRNA sense strand
caggaaauggagaaagaua

SEQ ID NO: 2651730 - RNA, 19 nt, Homo sapiens
  misc_RNA (1)...(19): siRNA sense strand
cuugaaagacauaggagaa

SEQ ID NO: 2651731 - RNA, 19 nt, Homo sapiens
  misc_RNA (1)...(19): siRNA sense strand
ccuugaaagacauaggaaa

SEQ ID NO: 2651732 - RNA, 19 nt, Homo sapiens
  misc_RNA (1)...(19): siRNA sense strand
guguaaugaguguggcaaa

SEQ ID NO: 2651733 - RNA, 19 nt, Homo sapiens
  misc_RNA (1)...(19): siRNA sense strand
guguaaugaguguggcaaa

SEQ ID NO: 2651734 - RNA, 19 nt, Homo sapiens
  misc_RNA (1)...(19): siRNA sense strand
cuugaaagacauaggaaaa

SEQ ID NO: 2651735 - RNA, 19 nt, Homo sapiens
  misc_RNA (1)...(19): siRNA sense strand
ccuugaaagacauaggaua

SEQ ID NO: 2651736 - RNA, 19 nt, Homo sapiens
  misc_RNA (1)...(19): siRNA sense strand
guggaaagaagaugaaaga

SEQ ID NO: 2651737 - RNA, 19 nt, Homo sapiens
  misc_RNA (1)...(19): siRNA sense strand
cgucauaccuuguguacca

SEQ ID NO: 2651738 - RNA, 19 nt, Homo sapiens
  misc_RNA (1)...(19): siRNA sense strand
aacucauaguggagagaaa

SEQ ID NO: 2651739 - RNA, 19 nt, Homo sapiens
  misc_RNA (1)...(19): siRNA sense strand
augugaagaaugugacaaa

SEQ ID NO: 2651740 - RNA, 19 nt, Homo sapiens
  misc_RNA (1)...(19): siRNA sense strand
augugaagaaugugacaaa

SEQ ID NO: 2651741 - RNA, 19 nt, Homo sapiens
  misc_RNA (1)...(19): siRNA sense strand
aggaaauggagaaagauau

SEQ ID NO: 2651742 - RNA, 19 nt, Homo sapiens
  misc_RNA (1)...(19): siRNA sense strand
aggaaguacacaugagaga

SEQ ID NO: 2651743 - RNA, 19 nt, Homo sapiens
  misc_RNA (1)...(19): siRNA sense strand
aaucgaaccuugaaagaca

SEQ ID NO: 2651744 - RNA, 19 nt, Homo sapiens
  misc_RNA (1)...(19): siRNA sense strand
ggcaauucauacuggagaa

SEQ ID NO: 2651745 - RNA, 19 nt, Homo sapiens
  misc_RNA (1)...(19): siRNA sense strand
auguaaugagaguggcaaa

SEQ ID NO: 2651746 - RNA, 19 nt, Homo sapiens
  misc_RNA (1)...(19): siRNA sense strand
gugacaaagcuuucaguuu

SEQ ID NO: 2651747 - RNA, 19 nt, Homo sapiens
  misc_RNA (1)...(19): siRNA sense strand
cuuaaggaaacaucagaua

SEQ ID NO: 2651748 - RNA, 19 nt, Homo sapiens
  misc_RNA (1)...(19): siRNA sense strand
uguaauagauguggcaaau

SEQ ID NO: 2651749 - RNA, 19 nt, Homo sapiens
  misc_RNA (1)...(19): siRNA sense strand
aauccauaaugaagagaga

SEQ ID NO: 2651750 - RNA, 19 nt, Homo sapiens
  misc_RNA (1)...(19): siRNA sense strand
ccuuguaauucauaagaca

SEQ ID NO: 2651751 - RNA, 19 nt, Homo sapiens
  misc_RNA (1)...(19): siRNA sense strand
cuaagaacuaugggaauaa

SEQ ID NO: 2651752 - RNA, 19 nt, Homo sapiens
  misc_RNA (1)...(19): siRNA sense strand
caucaacagcacaaggcaa

SEQ ID NO: 2651753 - RNA, 19 nt, Homo sapiens
  misc_RNA (1)...(19): siRNA sense strand
guacaaaccgacaugauca

SEQ ID NO: 2651754 - RNA, 19 nt, Homo sapiens
  misc_RNA (1)...(19): siRNA sense strand
agucaggaguuaacccuua

SEQ ID NO: 2651755 - RNA, 19 nt, Homo sapiens
  misc_RNA (1)...(19): siRNA sense strand
ccuugaaagacauaggaga

SEQ ID NO: 2651756 - RNA, 19 nt, Homo sapiens
  misc_RNA (1)...(19): siRNA sense strand
ggagaauccauaaugaaga

SEQ ID NO: 2651757 - RNA, 19 nt, Homo sapiens
  misc_RNA (1)...(19): siRNA sense strand
gcacaaggcaauacagaag

SEQ ID NO: 2651758 - RNA, 19 nt, Homo sapiens
  misc_RNA (1)...(19): siRNA sense strand
agggaaaauugguaaucaa

SEQ ID NO: 2651759 - RNA, 19 nt, Homo sapiens
  misc_RNA (1)...(19): siRNA sense strand
aagaaauagccaugaagca

SEQ ID NO: 2651760 - RNA, 19 nt, Homo sapiens
  misc_RNA (1)...(19): siRNA sense strand
uggcaaggucuuuaaucaa

SEQ ID NO: 2651761 - RNA, 19 nt, Homo sapiens
  misc_RNA (1)...(19): siRNA sense strand
guguaaugauuguggcaag

SEQ ID NO: 2651762 - RNA, 19 nt, Homo sapiens
  misc_RNA (1)...(19): siRNA sense strand
guguaaugauuguggcaag

SEQ ID NO: 2651763 - RNA, 19 nt, Homo sapiens
  misc_RNA (1)...(19): siRNA sense strand
augugaagaaugugaugaa

SEQ ID NO: 2651764 - RNA, 19 nt, Homo sapiens
  misc_RNA (1)...(19): siRNA sense strand
guguaaugauuguggcaag

SEQ ID NO: 2651765 - RNA, 19 nt, Homo sapiens
  misc_RNA (1)...(19): siRNA sense strand
augugaagaaugugaugaa

SEQ ID NO: 2651766 - RNA, 19 nt, Homo sapiens
  misc_RNA (1)...(19): siRNA sense strand
auguaaugauugucaccaa

SEQ ID NO: 2651767 - RNA, 19 nt, Homo sapiens
  misc_RNA (1)...(19): siRNA sense strand
augugaagaaugugaugaa

SEQ ID NO: 2651768 - RNA, 19 nt, Homo sapiens
  misc_RNA (1)...(19): siRNA sense strand
ccuucaaagacauaggaga

SEQ ID NO: 2651769 - RNA, 19 nt, Homo sapiens
  misc_RNA (1)...(19): siRNA sense strand
ccgacaugaucaaaggcau

SEQ ID NO: 2651770 - RNA, 19 nt, Homo sapiens
  misc_RNA (1)...(19): siRNA sense strand
cauuacaagugcagugagu

SEQ ID NO: 2651771 - RNA, 19 nt, Homo sapiens
  misc_RNA (1)...(19): siRNA sense strand
aggcagggccacaggaaau

SEQ ID NO: 2651772 - RNA, 19 nt, Homo sapiens
  misc_RNA (1)...(19): siRNA sense strand
cguacaggagguagaaaca

SEQ ID NO: 2651773 - RNA, 19 nt, Homo sapiens
  misc_RNA (1)...(19): siRNA sense strand
gggcagagccucaucguuc

SEQ ID NO: 2651774 - RNA, 19 nt, Homo sapiens
  misc_RNA (1)...(19): siRNA sense strand
ccacugagcugcuggacag

SEQ ID NO: 2651775 - RNA, 19 nt, Homo sapiens
  misc_RNA (1)...(19): siRNA sense strand
guggcaaggccuuccgcaa

SEQ ID NO: 2651776 - RNA, 19 nt, Homo sapiens
  misc_RNA (1)...(19): siRNA sense strand
aggcaaagcuggagaccaa

SEQ ID NO: 2651777 - RNA, 19 nt, Homo sapiens
  misc_RNA (1)...(19): siRNA sense strand
ggaaauuugcugugggaga

SEQ ID NO: 2651778 - RNA, 19 nt, Homo sapiens
  misc_RNA (1)...(19): siRNA sense strand
caucgaaggacuugguaaa

SEQ ID NO: 2651779 - RNA, 19 nt, Homo sapiens
  misc_RNA (1)...(19): siRNA sense strand
cgaaaaggguaaaaugaaa

SEQ ID NO: 2651780 - RNA, 19 nt, Homo sapiens
  misc_RNA (1)...(19): siRNA sense strand
aggaaauggucaugguaga

SEQ ID NO: 2651781 - RNA, 19 nt, Homo sapiens
  misc_RNA (1)...(19): siRNA sense strand
caucaaugugcuagauuua

SEQ ID NO: 2651782 - RNA, 19 nt, Homo sapiens
  misc_RNA (1)...(19): siRNA sense strand
caguagucaucgugagauu

SEQ ID NO: 2651783 - RNA, 19 nt, Homo sapiens
  misc_RNA (1)...(19): siRNA sense strand
gggaaugacuaaaagcaaa

SEQ ID NO: 2651784 - RNA, 19 nt, Homo sapiens
  misc_RNA (1)...(19): siRNA sense strand
cucuaaacauagugcauaa

SEQ ID NO: 2651785 - RNA, 19 nt, Homo sapiens
  misc_RNA (1)...(19): siRNA sense strand
gaauuaacgggcagagaau

SEQ ID NO: 2651786 - RNA, 19 nt, Homo sapiens
  misc_RNA (1)...(19): siRNA sense strand
agacaaagaccuggaacaa

SEQ ID NO: 2651787 - RNA, 19 nt, Homo sapiens
  misc_RNA (1)...(19): siRNA sense strand
ccucacagcuuuagaaaau

SEQ ID NO: 2651788 - RNA, 19 nt, Homo sapiens
  misc_RNA (1)...(19): siRNA sense strand
gcaugaaggaauaguugaa

SEQ ID NO: 2651789 - RNA, 19 nt, Homo sapiens
  misc_RNA (1)...(19): siRNA sense strand
aguugaagccucagaguuu

SEQ ID NO: 2651790 - RNA, 19 nt, Homo sapiens
  misc_RNA (1)...(19): siRNA sense strand
cccaagagaagcugauaaa

SEQ ID NO: 2651791 - RNA, 19 nt, Homo sapiens
  misc_RNA (1)...(19): siRNA sense strand
ccucagaguuugaaaugau

SEQ ID NO: 2651792 - RNA, 19 nt, Homo sapiens
  misc_RNA (1)...(19): siRNA sense strand
gaagaagaugagugggaca

SEQ ID NO: 2651793 - RNA, 19 nt, Homo sapiens
  misc_RNA (1)...(19): siRNA sense strand
gggaggaggaggaugaaaa

SEQ ID NO: 2651794 - RNA, 19 nt, Homo sapiens
  misc_RNA (1)...(19): siRNA sense strand
uguagagacucgacagcua

SEQ ID NO: 2651795 - RNA, 19 nt, Homo sapiens
  misc_RNA (1)...(19): siRNA sense strand
gcugagaagcaauagaaau

SEQ ID NO: 2651796 - RNA, 19 nt, Homo sapiens
  misc_RNA (1)...(19): siRNA sense strand
cuacauucuuccaagcaaa

SEQ ID NO: 2651797 - RNA, 19 nt, Homo sapiens
  misc_RNA (1)...(19): siRNA sense strand
cauaauauucgaugcacua

SEQ ID NO: 2651798 - RNA, 19 nt, Homo sapiens
  misc_RNA (1)...(19): siRNA sense strand
ugucugaaguagaaaucaa

SEQ ID NO: 2651799 - RNA, 19 nt, Homo sapiens
  misc_RNA (1)...(19): siRNA sense strand
agauaucagaugagaucaa

SEQ ID NO: 2651800 - RNA, 19 nt, Homo sapiens
  misc_RNA (1)...(19): siRNA sense strand
cuauagaggaugaguuuga

SEQ ID NO: 2651801 - RNA, 19 nt, Homo sapiens
  misc_RNA (1)...(19): siRNA sense strand
caacgauacaacagaauuu

SEQ ID NO: 2651802 - RNA, 19 nt, Homo sapiens
  misc_RNA (1)...(19): siRNA sense strand
ccuccaggccaaaguguaa

SEQ ID NO: 2651803 - RNA, 19 nt, Homo sapiens
  misc_RNA (1)...(19): siRNA sense strand
gagacuggcagauggcaaa

SEQ ID NO: 2651804 - RNA, 19 nt, Homo sapiens
  misc_RNA (1)...(19): siRNA sense strand
acacacaccuccaggccaa

SEQ ID NO: 2651805 - RNA, 19 nt, Homo sapiens
  misc_RNA (1)...(19): siRNA sense strand
ucauuuagggaguggagaa

SEQ ID NO: 2651806 - RNA, 19 nt, Homo sapiens
  misc_RNA (1)...(19): siRNA sense strand
guaaauugcgggugguuca

SEQ ID NO: 2651807 - RNA, 19 nt, Homo sapiens
  misc_RNA (1)...(19): siRNA sense strand
acuucaaauagcagacaaa

SEQ ID NO: 2651808 - RNA, 19 nt, Homo sapiens
  misc_RNA (1)...(19): siRNA sense strand
ggacacaggaccagaaucu

SEQ ID NO: 2651809 - RNA, 19 nt, Homo sapiens
  misc_RNA (1)...(19): siRNA sense strand
ggccaauaccugaacacaa

SEQ ID NO: 2651810 - RNA, 19 nt, Homo sapiens
  misc_RNA (1)...(19): siRNA sense strand
uggaagaagaugaguggga

SEQ ID NO: 2651811 - RNA, 19 nt, Homo sapiens
  misc_RNA (1)...(19): siRNA sense strand
cauuugggacauagauaua

SEQ ID NO: 2651812 - RNA, 19 nt, Homo sapiens
  misc_RNA (1)...(19): siRNA sense strand
cagcaggauguaugggcaa

SEQ ID NO: 2651813 - RNA, 19 nt, Homo sapiens
  misc_RNA (1)...(19): siRNA sense strand
cgcaagagaaggagcugaa

SEQ ID NO: 2651814 - RNA, 19 nt, Homo sapiens
  misc_RNA (1)...(19): siRNA sense strand
cgaauuaacgggcagagaa

SEQ ID NO: 2651815 - RNA, 19 nt, Homo sapiens
  misc_RNA (1)...(19): siRNA sense strand
cggccgagacugugaacau

SEQ ID NO: 2651816 - RNA, 19 nt, Homo sapiens
  misc_RNA (1)...(19): siRNA sense strand
gguaguagaccguguagau

SEQ ID NO: 2651817 - RNA, 19 nt, Homo sapiens
  misc_RNA (1)...(19): siRNA sense strand
uguagaugcugcacugaaa

SEQ ID NO: 2651818 - RNA, 19 nt, Homo sapiens
  misc_RNA (1)...(19): siRNA sense strand
cgacagcuacucaggcaaa

SEQ ID NO: 2651819 - RNA, 19 nt, Homo sapiens
  misc_RNA (1)...(19): siRNA sense strand
guguggaugagguggaaau

SEQ ID NO: 2651820 - RNA, 19 nt, Homo sapiens
  misc_RNA (1)...(19): siRNA sense strand
cauugagcgcuuugugaaa

SEQ ID NO: 2651821 - RNA, 19 nt, Homo sapiens
  misc_RNA (1)...(19): siRNA sense strand
agaccaaguugcuggagga

SEQ ID NO: 2651822 - RNA, 19 nt, Homo sapiens
  misc_RNA (1)...(19): siRNA sense strand
guucucagcuauagaggau

SEQ ID NO: 2651823 - RNA, 19 nt, Homo sapiens
  misc_RNA (1)...(19): siRNA sense strand
uauuauauauggugggcca

SEQ ID NO: 2651824 - RNA, 19 nt, Homo sapiens
  misc_RNA (1)...(19): siRNA sense strand
agcuauaucugcaggauga

SEQ ID NO: 2651825 - RNA, 19 nt, Homo sapiens
  misc_RNA (1)...(19): siRNA sense strand
ugauaaagaugggcccaaa

SEQ ID NO: 2651826 - RNA, 19 nt, Homo sapiens
  misc_RNA (1)...(19): siRNA sense strand
gguagacagugaaggaagu

SEQ ID NO: 2651827 - RNA, 19 nt, Homo sapiens
  misc_RNA (1)...(19): siRNA sense strand
aagcaguauucaagcauga

SEQ ID NO: 2651828 - RNA, 19 nt, Homo sapiens
  misc_RNA (1)...(19): siRNA sense strand
aggaaguaucaccaagaaa

SEQ ID NO: 2651829 - RNA, 19 nt, Homo sapiens
  misc_RNA (1)...(19): siRNA sense strand
gggcuuugaugaugggagu

SEQ ID NO: 2651830 - RNA, 19 nt, Homo sapiens
  misc_RNA (1)...(19): siRNA sense strand
aaacaaggucacugcauuu

SEQ ID NO: 2651831 - RNA, 19 nt, Homo sapiens
  misc_RNA (1)...(19): siRNA sense strand
auaccuucguggugggaau

SEQ ID NO: 2651832 - RNA, 19 nt, Homo sapiens
  misc_RNA (1)...(19): siRNA sense strand
aggcuacucccaagaaaua

SEQ ID NO: 2651833 - RNA, 19 nt, Homo sapiens
  misc_RNA (1)...(19): siRNA sense strand
ccuucaacauucaucauua

SEQ ID NO: 2651834 - RNA, 19 nt, Homo sapiens
  misc_RNA (1)...(19): siRNA sense strand
gugaaauggaacuggagga

SEQ ID NO: 2651835 - RNA, 19 nt, Homo sapiens
  misc_RNA (1)...(19): siRNA sense strand
ccgucuucaacgaggauuu

SEQ ID NO: 2651836 - RNA, 19 nt, Homo sapiens
  misc_RNA (1)...(19): siRNA sense strand
gcucaaagguuucgcccag

SEQ ID NO: 2651837 - RNA, 19 nt, Homo sapiens
  misc_RNA (1)...(19): siRNA sense strand
ccgagagcgaggaggacuu

SEQ ID NO: 2651838 - RNA, 19 nt, Homo sapiens
  misc_RNA (1)...(19): siRNA sense strand
cucacuacuucgagaacau

SEQ ID NO: 2651839 - RNA, 19 nt, Homo sapiens
  misc_RNA (1)...(19): siRNA sense strand
ccgagagcgaggaggacuu

SEQ ID NO: 2651840 - RNA, 19 nt, Homo sapiens
  misc_RNA (1)...(19): siRNA sense strand
cagcgaagauggcggcagu

SEQ ID NO: 2651841 - RNA, 19 nt, Homo sapiens
  misc_RNA (1)...(19): siRNA sense strand
agauggcggcaguggagaa

SEQ ID NO: 2651842 - RNA, 19 nt, Homo sapiens
  misc_RNA (1)...(19): siRNA sense strand
cucacuacuucgagaacau

SEQ ID NO: 2651843 - RNA, 19 nt, Homo sapiens
  misc_RNA (1)...(19): siRNA sense strand
gcaucgaagucgcgcguga

SEQ ID NO: 2651844 - RNA, 19 nt, Homo sapiens
  misc_RNA (1)...(19): siRNA sense strand
ccacagauucucagaggga

SEQ ID NO: 2651845 - RNA, 19 nt, Homo sapiens
  misc_RNA (1)...(19): siRNA sense strand
cgaaggaggagacggcaga

SEQ ID NO: 2651846 - RNA, 19 nt, Homo sapiens
  misc_RNA (1)...(19): siRNA sense strand
cauccaugacauugugcaa

SEQ ID NO: 2651847 - RNA, 19 nt, Homo sapiens
  misc_RNA (1)...(19): siRNA sense strand
agcuguaccucguggguga

SEQ ID NO: 2651848 - RNA, 19 nt, Homo sapiens
  misc_RNA (1)...(19): siRNA sense strand
gggacaagaccuucgagga

SEQ ID NO: 2651849 - RNA, 19 nt, Homo sapiens
  misc_RNA (1)...(19): siRNA sense strand
ccaucgacgccgacugcaa

SEQ ID NO: 2651850 - RNA, 19 nt, Homo sapiens
  misc_RNA (1)...(19): siRNA sense strand
ggacaagaccuucgaggag

SEQ ID NO: 2651851 - RNA, 19 nt, Homo sapiens
  misc_RNA (1)...(19): siRNA sense strand
acgccuucaucauggacaa

SEQ ID NO: 2651852 - RNA, 19 nt, Homo sapiens
  misc_RNA (1)...(19): siRNA sense strand
ccuucgccauugagggcua

SEQ ID NO: 2651853 - RNA, 19 nt, Homo sapiens
  misc_RNA (1)...(19): siRNA sense strand
gcaagugcugcuacggcua

SEQ ID NO: 2651854 - RNA, 19 nt, Homo sapiens
  misc_RNA (1)...(19): siRNA sense strand
cguacaucaagaagagcuu

SEQ ID NO: 2651855 - RNA, 19 nt, Homo sapiens
  misc_RNA (1)...(19): siRNA sense strand
cgcugagggccuugagaaa

SEQ ID NO: 2651856 - RNA, 19 nt, Homo sapiens
  misc_RNA (1)...(19): siRNA sense strand
agggaaaggcagccggaau

SEQ ID NO: 2651857 - RNA, 19 nt, Homo sapiens
  misc_RNA (1)...(19): siRNA sense strand
gagaagcgcaggaaggaga

SEQ ID NO: 2651858 - RNA, 19 nt, Homo sapiens
  misc_RNA (1)...(19): siRNA sense strand
ccgaguuccucauggguga

SEQ ID NO: 2651859 - RNA, 19 nt, Homo sapiens
  misc_RNA (1)...(19): siRNA sense strand
agguggagcaggacaacaa

SEQ ID NO: 2651860 - RNA, 19 nt, Homo sapiens
  misc_RNA (1)...(19): siRNA sense strand
aggucaaagccuuccauua

SEQ ID NO: 2651861 - RNA, 19 nt, Homo sapiens
  misc_RNA (1)...(19): siRNA sense strand
ugcaagaggcggaguccaa

SEQ ID NO: 2651862 - RNA, 19 nt, Homo sapiens
  misc_RNA (1)...(19): siRNA sense strand
uggagguggagcaggacaa

SEQ ID NO: 2651863 - RNA, 19 nt, Homo sapiens
  misc_RNA (1)...(19): siRNA sense strand
ccgcacugcuguaugccaa

SEQ ID NO: 2651864 - RNA, 19 nt, Homo sapiens
  misc_RNA (1)...(19): siRNA sense strand
ggucaaugggguaaagaca

SEQ ID NO: 2651865 - RNA, 19 nt, Homo sapiens
  misc_RNA (1)...(19): siRNA sense strand
ccaaguacaugaaggaccu

SEQ ID NO: 2651866 - RNA, 19 nt, Homo sapiens
  misc_RNA (1)...(19): siRNA sense strand
cacaagaaaugucuggaga

SEQ ID NO: 2651867 - RNA, 19 nt, Homo sapiens
  misc_RNA (1)...(19): siRNA sense strand
aagcaggagcuggaggaua

SEQ ID NO: 2651868 - RNA, 19 nt, Homo sapiens
  misc_RNA (1)...(19): siRNA sense strand
gcaggaucguggaggugga

SEQ ID NO: 2651869 - RNA, 19 nt, Homo sapiens
  misc_RNA (1)...(19): siRNA sense strand
ucguggagguggagcagga

SEQ ID NO: 2651870 - RNA, 19 nt, Homo sapiens
  misc_RNA (1)...(19): siRNA sense strand
gagcugagguagucgucca

SEQ ID NO: 2651871 - RNA, 19 nt, Homo sapiens
  misc_RNA (1)...(19): siRNA sense strand
agaacaaggcggaggaagc

SEQ ID NO: 2651872 - RNA, 19 nt, Homo sapiens
  misc_RNA (1)...(19): siRNA sense strand
uggagaaacaggaguucga

SEQ ID NO: 2651873 - RNA, 19 nt, Homo sapiens
  misc_RNA (1)...(19): siRNA sense strand
agaacauggccaaguacau

SEQ ID NO: 2651874 - RNA, 19 nt, Homo sapiens
  misc_RNA (1)...(19): siRNA sense strand
ccaagaacaaggcggagga

SEQ ID NO: 2651875 - RNA, 19 nt, Homo sapiens
  misc_RNA (1)...(19): siRNA sense strand
acgcgaagacgcagaagca

SEQ ID NO: 2651876 - RNA, 19 nt, Homo sapiens
  misc_RNA (1)...(19): siRNA sense strand
ccuuccauuaugagagcaa

SEQ ID NO: 2651877 - RNA, 19 nt, Homo sapiens
  misc_RNA (1)...(19): siRNA sense strand
gagaaacaggaguucgaga

SEQ ID NO: 2651878 - RNA, 19 nt, Homo sapiens
  misc_RNA (1)...(19): siRNA sense strand
gcugcgaggaccacgacaa

SEQ ID NO: 2651879 - RNA, 19 nt, Homo sapiens
  misc_RNA (1)...(19): siRNA sense strand
aggcugaccucaacggcau

SEQ ID NO: 2651880 - RNA, 19 nt, Homo sapiens
  misc_RNA (1)...(19): siRNA sense strand
aagaagugcgucugcgaga

SEQ ID NO: 2651881 - RNA, 19 nt, Homo sapiens
  misc_RNA (1)...(19): siRNA sense strand
ggaucguggagguggagca

SEQ ID NO: 2651882 - RNA, 19 nt, Homo sapiens
  misc_RNA (1)...(19): siRNA sense strand
cugggcuccugcagggaaa

SEQ ID NO: 2651883 - RNA, 19 nt, Homo sapiens
  misc_RNA (1)...(19): siRNA sense strand
ccucauugccaaggucaaa

SEQ ID NO: 2651884 - RNA, 19 nt, Homo sapiens
  misc_RNA (1)...(19): siRNA sense strand
cggcuucggcagacagaaa

SEQ ID NO: 2651885 - RNA, 19 nt, Homo sapiens
  misc_RNA (1)...(19): siRNA sense strand
agaacuaccuccugcgaga

SEQ ID NO: 2651886 - RNA, 19 nt, Homo sapiens
  misc_RNA (1)...(19): siRNA sense strand
gcgccgucaucgagagcuu

SEQ ID NO: 2651887 - RNA, 19 nt, Homo sapiens
  misc_RNA (1)...(19): siRNA sense strand
uguggaagccagaagucaa

SEQ ID NO: 2651888 - RNA, 19 nt, Homo sapiens
  misc_RNA (1)...(19): siRNA sense strand
ucgaggacuccguguggaa

SEQ ID NO: 2651889 - RNA, 19 nt, Homo sapiens
  misc_RNA (1)...(19): siRNA sense strand
gggacuaccugauggcugu

SEQ ID NO: 2651890 - RNA, 19 nt, Homo sapiens
  misc_RNA (1)...(19): siRNA sense strand
gcuggguacuggaacguga

SEQ ID NO: 2651891 - RNA, 19 nt, Homo sapiens
  misc_RNA (1)...(19): siRNA sense strand
guggcgagggugaggguuu

SEQ ID NO: 2651892 - RNA, 19 nt, Homo sapiens
  misc_RNA (1)...(19): siRNA sense strand
uggcaaaggaagaaauaca

SEQ ID NO: 2651893 - RNA, 19 nt, Homo sapiens
  misc_RNA (1)...(19): siRNA sense strand
gggagguggcugaggacau

SEQ ID NO: 2651894 - RNA, 19 nt, Homo sapiens
  misc_RNA (1)...(19): siRNA sense strand
agaaauacucccuggacau

SEQ ID NO: 2651895 - RNA, 19 nt, Homo sapiens
  misc_RNA (1)...(19): siRNA sense strand
acggagacuuccuggacaa

SEQ ID NO: 2651896 - RNA, 19 nt, Homo sapiens
  misc_RNA (1)...(19): siRNA sense strand
ucaaagaauucaaagacca

SEQ ID NO: 2651897 - RNA, 19 nt, Homo sapiens
  misc_RNA (1)...(19): siRNA sense strand
aggaaacggcugugaacau

SEQ ID NO: 2651898 - RNA, 19 nt, Homo sapiens
  misc_RNA (1)...(19): siRNA sense strand
aggaagaaauacaagacca

SEQ ID NO: 2651899 - RNA, 19 nt, Homo sapiens
  misc_RNA (1)...(19): siRNA sense strand
ggccaguccaggagggauu

SEQ ID NO: 2651900 - RNA, 19 nt, Homo sapiens
  misc_RNA (1)...(19): siRNA sense strand
gggagacacaagagugaca

SEQ ID NO: 2651901 - RNA, 19 nt, Homo sapiens
  misc_RNA (1)...(19): siRNA sense strand
cagaagaaauggcaggauc

SEQ ID NO: 2651902 - RNA, 19 nt, Homo sapiens
  misc_RNA (1)...(19): siRNA sense strand
gaauacaucuucucggaca

SEQ ID NO: 2651903 - RNA, 19 nt, Homo sapiens
  misc_RNA (1)...(19): siRNA sense strand
gaauggaaugacaagaaau

SEQ ID NO: 2651904 - RNA, 19 nt, Homo sapiens
  misc_RNA (1)...(19): siRNA sense strand
aagaaauacucccuggaca

SEQ ID NO: 2651905 - RNA, 19 nt, Homo sapiens
  misc_RNA (1)...(19): siRNA sense strand
cagucaaagaauucaaaga

SEQ ID NO: 2651906 - RNA, 19 nt, Homo sapiens
  misc_RNA (1)...(19): siRNA sense strand
ccaaggaggagaaggugga

SEQ ID NO: 2651907 - RNA, 19 nt, Homo sapiens
  misc_RNA (1)...(19): siRNA sense strand
aagaagagcaacaucaaaa

SEQ ID NO: 2651908 - RNA, 19 nt, Homo sapiens
  misc_RNA (1)...(19): siRNA sense strand
ggcagaaggacgagcucuu

SEQ ID NO: 2651909 - RNA, 19 nt, Homo sapiens
  misc_RNA (1)...(19): siRNA sense strand
cgacccgaccuaaggagaa

SEQ ID NO: 2651910 - RNA, 19 nt, Homo sapiens
  misc_RNA (1)...(19): siRNA sense strand
ucugcaaguuccugcgcua

SEQ ID NO: 2651911 - RNA, 19 nt, Homo sapiens
  misc_RNA (1)...(19): siRNA sense strand
gugacagagccaucaacaa

SEQ ID NO: 2651912 - RNA, 19 nt, Homo sapiens
  misc_RNA (1)...(19): siRNA sense strand
ccuacagggagguggcuga

SEQ ID NO: 2651913 - RNA, 19 nt, Homo sapiens
  misc_RNA (1)...(19): siRNA sense strand
gugccaaggaggagaaggu

SEQ ID NO: 2651914 - RNA, 19 nt, Homo sapiens
  misc_RNA (1)...(19): siRNA sense strand
cgggcuaggaaguaugaau

SEQ ID NO: 2651915 - RNA, 19 nt, Homo sapiens
  misc_RNA (1)...(19): siRNA sense strand
ccauggaggucauucuuau

SEQ ID NO: 2651916 - RNA, 19 nt, Homo sapiens
  misc_RNA (1)...(19): siRNA sense strand
aggaggagaagguggagga

SEQ ID NO: 2651917 - RNA, 19 nt, Homo sapiens
  misc_RNA (1)...(19): siRNA sense strand
agaagaaauggcaggaucu

SEQ ID NO: 2651918 - RNA, 19 nt, Homo sapiens
  misc_RNA (1)...(19): siRNA sense strand
acgggcaguucaaggagaa

SEQ ID NO: 2651919 - RNA, 19 nt, Homo sapiens
  misc_RNA (1)...(19): siRNA sense strand
acaaguucgccgacgggaa

SEQ ID NO: 2651920 - RNA, 19 nt, Homo sapiens
  misc_RNA (1)...(19): siRNA sense strand
ccaucaaaugucucaagaa

SEQ ID NO: 2651921 - RNA, 19 nt, Homo sapiens
  misc_RNA (1)...(19): siRNA sense strand
ucaucauccugcagagcau

SEQ ID NO: 2651922 - RNA, 19 nt, Homo sapiens
  misc_RNA (1)...(19): siRNA sense strand
ccauggagcccuugccuca

SEQ ID NO: 2651923 - RNA, 19 nt, Homo sapiens
  misc_RNA (1)...(19): siRNA sense strand
gaggcagcuucgagcccaa

SEQ ID NO: 2651924 - RNA, 19 nt, Homo sapiens
  misc_RNA (1)...(19): siRNA sense strand
guaugaauggagaccagaa

SEQ ID NO: 2651925 - RNA, 19 nt, Homo sapiens
  misc_RNA (1)...(19): siRNA sense strand
aauacaucuucucggacaa

SEQ ID NO: 2651926 - RNA, 19 nt, Homo sapiens
  misc_RNA (1)...(19): siRNA sense strand
ggacacugugccuggccua

SEQ ID NO: 2651927 - RNA, 19 nt, Homo sapiens
  misc_RNA (1)...(19): siRNA sense strand
cugcugaguguguccauaa

SEQ ID NO: 2651928 - RNA, 19 nt, Homo sapiens
  misc_RNA (1)...(19): siRNA sense strand
ccuacaacgggcaguucaa

SEQ ID NO: 2651929 - RNA, 19 nt, Homo sapiens
  misc_RNA (1)...(19): siRNA sense strand
aguucaaggagaaggugau

SEQ ID NO: 2651930 - RNA, 19 nt, Homo sapiens
  misc_RNA (1)...(19): siRNA sense strand
caagaugaggacaggaacu

SEQ ID NO: 2651931 - RNA, 19 nt, Homo sapiens
  misc_RNA (1)...(19): siRNA sense strand
uggcccuggucaagaagua

SEQ ID NO: 2651932 - RNA, 19 nt, Homo sapiens
  misc_RNA (1)...(19): siRNA sense strand
uccaagaugaggacaggaa

SEQ ID NO: 2651933 - RNA, 19 nt, Homo sapiens
  misc_RNA (1)...(19): siRNA sense strand
gagaaggagauuagccgca

SEQ ID NO: 2651934 - RNA, 19 nt, Homo sapiens
  misc_RNA (1)...(19): siRNA sense strand
uggcaaaggaagaaauaca

SEQ ID NO: 2651935 - RNA, 19 nt, Homo sapiens
  misc_RNA (1)...(19): siRNA sense strand
gggagguggcugaggacau

SEQ ID NO: 2651936 - RNA, 19 nt, Homo sapiens
  misc_RNA (1)...(19): siRNA sense strand
agaaauacucccuggacau

SEQ ID NO: 2651937 - RNA, 19 nt, Homo sapiens
  misc_RNA (1)...(19): siRNA sense strand
acggagacuuccuggacaa

SEQ ID NO: 2651938 - RNA, 19 nt, Homo sapiens
  misc_RNA (1)...(19): siRNA sense strand
ucaaagaauucaaagacca

SEQ ID NO: 2651939 - RNA, 19 nt, Homo sapiens
  misc_RNA (1)...(19): siRNA sense strand
aggaaacggcugugaacau

SEQ ID NO: 2651940 - RNA, 19 nt, Homo sapiens
  misc_RNA (1)...(19): siRNA sense strand
aggaagaaauacaagacca

SEQ ID NO: 2651941 - RNA, 19 nt, Homo sapiens
  misc_RNA (1)...(19): siRNA sense strand
ggccaguccaggagggauu

SEQ ID NO: 2651942 - RNA, 19 nt, Homo sapiens
  misc_RNA (1)...(19): siRNA sense strand
gggagacacaagagugaca

SEQ ID NO: 2651943 - RNA, 19 nt, Homo sapiens
  misc_RNA (1)...(19): siRNA sense strand
cagaagaaauggcaggauc

SEQ ID NO: 2651944 - RNA, 19 nt, Homo sapiens
  misc_RNA (1)...(19): siRNA sense strand
gaauacaucuucucggaca

SEQ ID NO: 2651945 - RNA, 19 nt, Homo sapiens
  misc_RNA (1)...(19): siRNA sense strand
gaauggaaugacaagaaau

SEQ ID NO: 2651946 - RNA, 19 nt, Homo sapiens
  misc_RNA (1)...(19): siRNA sense strand
aagaaauacucccuggaca

SEQ ID NO: 2651947 - RNA, 19 nt, Homo sapiens
  misc_RNA (1)...(19): siRNA sense strand
cagucaaagaauucaaaga

SEQ ID NO: 2651948 - RNA, 19 nt, Homo sapiens
  misc_RNA (1)...(19): siRNA sense strand
aagaagagcaacaucaaaa

SEQ ID NO: 2651949 - RNA, 19 nt, Homo sapiens
  misc_RNA (1)...(19): siRNA sense strand
ggcagaaggacgagcucuu

SEQ ID NO: 2651950 - RNA, 19 nt, Homo sapiens
  misc_RNA (1)...(19): siRNA sense strand
cgacccgaccuaaggagaa

SEQ ID NO: 2651951 - RNA, 19 nt, Homo sapiens
  misc_RNA (1)...(19): siRNA sense strand
ucugcaaguuccugcgcua

SEQ ID NO: 2651952 - RNA, 19 nt, Homo sapiens
  misc_RNA (1)...(19): siRNA sense strand
gugacagagccaucaacaa

SEQ ID NO: 2651953 - RNA, 19 nt, Homo sapiens
  misc_RNA (1)...(19): siRNA sense strand
ccuacagggagguggcuga

SEQ ID NO: 2651954 - RNA, 19 nt, Homo sapiens
  misc_RNA (1)...(19): siRNA sense strand
cgggcuaggaaguaugaau

SEQ ID NO: 2651955 - RNA, 19 nt, Homo sapiens
  misc_RNA (1)...(19): siRNA sense strand
ccauggaggucauucuuau

SEQ ID NO: 2651956 - RNA, 19 nt, Homo sapiens
  misc_RNA (1)...(19): siRNA sense strand
agaagaaauggcaggaucu

SEQ ID NO: 2651957 - RNA, 19 nt, Homo sapiens
  misc_RNA (1)...(19): siRNA sense strand
acgggcaguucaaggagaa

SEQ ID NO: 2651958 - RNA, 19 nt, Homo sapiens
  misc_RNA (1)...(19): siRNA sense strand
acaaguucgccgacgggaa

SEQ ID NO: 2651959 - RNA, 19 nt, Homo sapiens
  misc_RNA (1)...(19): siRNA sense strand
ccaucaaaugucucaagaa

SEQ ID NO: 2651960 - RNA, 19 nt, Homo sapiens
  misc_RNA (1)...(19): siRNA sense strand
ucaucauccugcagagcau

SEQ ID NO: 2651961 - RNA, 19 nt, Homo sapiens
  misc_RNA (1)...(19): siRNA sense strand
ccauggagcccuugccuca

SEQ ID NO: 2651962 - RNA, 19 nt, Homo sapiens
  misc_RNA (1)...(19): siRNA sense strand
gaggcagcuucgagcccaa

SEQ ID NO: 2651963 - RNA, 19 nt, Homo sapiens
  misc_RNA (1)...(19): siRNA sense strand
guaugaauggagaccagaa

SEQ ID NO: 2651964 - RNA, 19 nt, Homo sapiens
  misc_RNA (1)...(19): siRNA sense strand
aauacaucuucucggacaa

SEQ ID NO: 2651965 - RNA, 19 nt, Homo sapiens
  misc_RNA (1)...(19): siRNA sense strand
ggacacugugccuggccua

SEQ ID NO: 2651966 - RNA, 19 nt, Homo sapiens
  misc_RNA (1)...(19): siRNA sense strand
cugcugaguguguccauaa

SEQ ID NO: 2651967 - RNA, 19 nt, Homo sapiens
  misc_RNA (1)...(19): siRNA sense strand
ccuacaacgggcaguucaa

SEQ ID NO: 2651968 - RNA, 19 nt, Homo sapiens
  misc_RNA (1)...(19): siRNA sense strand
aguucaaggagaaggugau

SEQ ID NO: 2651969 - RNA, 19 nt, Homo sapiens
  misc_RNA (1)...(19): siRNA sense strand
caagaugaggacaggaacu

SEQ ID NO: 2651970 - RNA, 19 nt, Homo sapiens
  misc_RNA (1)...(19): siRNA sense strand
uggcccuggucaagaagua

SEQ ID NO: 2651971 - RNA, 19 nt, Homo sapiens
  misc_RNA (1)...(19): siRNA sense strand
uccaagaugaggacaggaa

SEQ ID NO: 2651972 - RNA, 19 nt, Homo sapiens
  misc_RNA (1)...(19): siRNA sense strand
gagaaggagauuagccgca

SEQ ID NO: 2651973 - RNA, 19 nt, Homo sapiens
  misc_RNA (1)...(19): siRNA sense strand
ccuagcaccugaaggauca

SEQ ID NO: 2651974 - RNA, 19 nt, Homo sapiens
  misc_RNA (1)...(19): siRNA sense strand
gccaagaucacccgggaga

SEQ ID NO: 2651975 - RNA, 19 nt, Homo sapiens
  misc_RNA (1)...(19): siRNA sense strand
cagccuagcaccugaagga

SEQ ID NO: 2651976 - RNA, 19 nt, Homo sapiens
  misc_RNA (1)...(19): siRNA sense strand
cagcaguguaccagaugau

SEQ ID NO: 2651977 - RNA, 19 nt, Homo sapiens
  misc_RNA (1)...(19): siRNA sense strand
cggaauauguggaggaggu

SEQ ID NO: 2651978 - RNA, 19 nt, Homo sapiens
  misc_RNA (1)...(19): siRNA sense strand
gccgagaggaagaggguga

SEQ ID NO: 2651979 - RNA, 19 nt, Homo sapiens
  misc_RNA (1)...(19): siRNA sense strand
agacaggcgugcagcccaa

SEQ ID NO: 2651980 - RNA, 19 nt, Homo sapiens
  misc_RNA (1)...(19): siRNA sense strand
gaguaggcauccuggcgaa

SEQ ID NO: 2651981 - RNA, 19 nt, Homo sapiens
  misc_RNA (1)...(19): siRNA sense strand
ggaagaaagugaacccgga

SEQ ID NO: 2651982 - RNA, 19 nt, Homo sapiens
  misc_RNA (1)...(19): siRNA sense strand
agauggugaccgaggauga

SEQ ID NO: 2651983 - RNA, 19 nt, Homo sapiens
  misc_RNA (1)...(19): siRNA sense strand
ccauggagcugcuggugga

SEQ ID NO: 2651984 - RNA, 19 nt, Homo sapiens
  misc_RNA (1)...(19): siRNA sense strand
cgguguucaucgaguguca

SEQ ID NO: 2651985 - RNA, 19 nt, Homo sapiens
  misc_RNA (1)...(19): siRNA sense strand
cgguguucauugaguguca

SEQ ID NO: 2651986 - RNA, 19 nt, Homo sapiens
  misc_RNA (1)...(19): siRNA sense strand
cgguguucaucgaguguca

SEQ ID NO: 2651987 - RNA, 19 nt, Homo sapiens
  misc_RNA (1)...(19): siRNA sense strand
cagucaugguguucaucaa

SEQ ID NO: 2651988 - RNA, 19 nt, Homo sapiens
  misc_RNA (1)...(19): siRNA sense strand
cggcaggguacgguggaua

SEQ ID NO: 2651989 - RNA, 19 nt, Homo sapiens
  misc_RNA (1)...(19): siRNA sense strand
gcgaaggaccugcacguga

SEQ ID NO: 2651990 - RNA, 19 nt, Homo sapiens
  misc_RNA (1)...(19): siRNA sense strand
ugaaaggcgucaugcgagu

SEQ ID NO: 2651991 - RNA, 19 nt, Homo sapiens
  misc_RNA (1)...(19): siRNA sense strand
ucuucaagcugcacgccaa

SEQ ID NO: 2651992 - RNA, 19 nt, Homo sapiens
  misc_RNA (1)...(19): siRNA sense strand
uggaggagguguucagcga

SEQ ID NO: 2651993 - RNA, 19 nt, Homo sapiens
  misc_RNA (1)...(19): siRNA sense strand
acacacuggccgaggagga

SEQ ID NO: 2651994 - RNA, 19 nt, Homo sapiens
  misc_RNA (1)...(19): siRNA sense strand
ccuccgacccugaagccaa

SEQ ID NO: 2651995 - RNA, 19 nt, Homo sapiens
  misc_RNA (1)...(19): siRNA sense strand
uggagaaggcugugagcag

SEQ ID NO: 2651996 - RNA, 19 nt, Homo sapiens
  misc_RNA (1)...(19): siRNA sense strand
ccauaguggaguccggaca

SEQ ID NO: 2651997 - RNA, 19 nt, Homo sapiens
  misc_RNA (1)...(19): siRNA sense strand
aagcagaaaugcaggccua

SEQ ID NO: 2651998 - RNA, 19 nt, Homo sapiens
  misc_RNA (1)...(19): siRNA sense strand
ccgcagaggccucggaaaa

SEQ ID NO: 2651999 - RNA, 19 nt, Homo sapiens
  misc_RNA (1)...(19): siRNA sense strand
uggacaaggccaaggagaa

SEQ ID NO: 2652000 - RNA, 19 nt, Homo sapiens
  misc_RNA (1)...(19): siRNA sense strand
aggccaaggagaaggacaa

SEQ ID NO: 2652001 - RNA, 19 nt, Homo sapiens
  misc_RNA (1)...(19): siRNA sense strand
agacaagaggagaaggaga

SEQ ID NO: 2652002 - RNA, 19 nt, Homo sapiens
  misc_RNA (1)...(19): siRNA sense strand
uggagagacaagaggagaa

SEQ ID NO: 2652003 - RNA, 19 nt, Homo sapiens
  misc_RNA (1)...(19): siRNA sense strand
aggagaaggacaagaagau

SEQ ID NO: 2652004 - RNA, 19 nt, Homo sapiens
  misc_RNA (1)...(19): siRNA sense strand
ccacaaacauggaggccac

SEQ ID NO: 2652005 - RNA, 19 nt, Homo sapiens
  misc_RNA (1)...(19): siRNA sense strand
aagcagaggaagcagaaau

SEQ ID NO: 2652006 - RNA, 19 nt, Homo sapiens
  misc_RNA (1)...(19): siRNA sense strand
cagaagaagaagcaaacau

SEQ ID NO: 2652007 - RNA, 19 nt, Homo sapiens
  misc_RNA (1)...(19): siRNA sense strand
uuaagaagacagagcguca

SEQ ID NO: 2652008 - RNA, 19 nt, Homo sapiens
  misc_RNA (1)...(19): siRNA sense strand
uugagaaggacgagacaca

SEQ ID NO: 2652009 - RNA, 19 nt, Homo sapiens
  misc_RNA (1)...(19): siRNA sense strand
ucaugaagagugagcgaca

SEQ ID NO: 2652010 - RNA, 19 nt, Homo sapiens
  misc_RNA (1)...(19): siRNA sense strand
augaagaugugcagcggau

SEQ ID NO: 2652011 - RNA, 19 nt, Homo sapiens
  misc_RNA (1)...(19): siRNA sense strand
cuggagaacgagcgggaga

SEQ ID NO: 2652012 - RNA, 19 nt, Homo sapiens
  misc_RNA (1)...(19): siRNA sense strand
ccgaaacaguggagguccu

SEQ ID NO: 2652013 - RNA, 19 nt, Homo sapiens
  misc_RNA (1)...(19): siRNA sense strand
agagacaagaggagaagga

SEQ ID NO: 2652014 - RNA, 19 nt, Homo sapiens
  misc_RNA (1)...(19): siRNA sense strand
guucaugaagagugagcga

SEQ ID NO: 2652015 - RNA, 19 nt, Homo sapiens
  misc_RNA (1)...(19): siRNA sense strand
acacagagaccacgggagu

SEQ ID NO: 2652016 - RNA, 19 nt, Homo sapiens
  misc_RNA (1)...(19): siRNA sense strand
uggagagacaggugcaaga

SEQ ID NO: 2652017 - RNA, 19 nt, Homo sapiens
  misc_RNA (1)...(19): siRNA sense strand
aguugcugguggagagaca

SEQ ID NO: 2652018 - RNA, 19 nt, Homo sapiens
  misc_RNA (1)...(19): siRNA sense strand
agacacagauggaagugga

SEQ ID NO: 2652019 - RNA, 19 nt, Homo sapiens
  misc_RNA (1)...(19): siRNA sense strand
uagggaagaucgugggugu

SEQ ID NO: 2652020 - RNA, 19 nt, Homo sapiens
  misc_RNA (1)...(19): siRNA sense strand
agccaaggucacagaaaca

SEQ ID NO: 2652021 - RNA, 19 nt, Homo sapiens
  misc_RNA (1)...(19): siRNA sense strand
ccuccuaauuccucacaau

SEQ ID NO: 2652022 - RNA, 19 nt, Homo sapiens
  misc_RNA (1)...(19): siRNA sense strand
ucucagaacucuaugucca

SEQ ID NO: 2652023 - RNA, 19 nt, Homo sapiens
  misc_RNA (1)...(19): siRNA sense strand
ugcacauccuggagagaca

SEQ ID NO: 2652024 - RNA, 19 nt, Homo sapiens
  misc_RNA (1)...(19): siRNA sense strand
gggcaagagugacgagagg

SEQ ID NO: 2652025 - RNA, 19 nt, Homo sapiens
  misc_RNA (1)...(19): siRNA sense strand
aaguggaagcuuuggcaga

SEQ ID NO: 2652026 - RNA, 19 nt, Homo sapiens
  misc_RNA (1)...(19): siRNA sense strand
aauggagaccacagaagaa

SEQ ID NO: 2652027 - RNA, 19 nt, Homo sapiens
  misc_RNA (1)...(19): siRNA sense strand
gcgcagaggucuuccaggu

SEQ ID NO: 2652028 - RNA, 19 nt, Homo sapiens
  misc_RNA (1)...(19): siRNA sense strand
agcuagaccccgagggcaa

SEQ ID NO: 2652029 - RNA, 19 nt, Homo sapiens
  misc_RNA (1)...(19): siRNA sense strand
gaacggaggcagcaggagu

SEQ ID NO: 2652030 - RNA, 19 nt, Homo sapiens
  misc_RNA (1)...(19): siRNA sense strand
acuccagcgugguggcuuu

SEQ ID NO: 2652031 - RNA, 19 nt, Homo sapiens
  misc_RNA (1)...(19): siRNA sense strand
gcuaaauggcucaguggcu

SEQ ID NO: 2652032 - RNA, 19 nt, Homo sapiens
  misc_RNA (1)...(19): siRNA sense strand
aaggagaaggacaagaaga

SEQ ID NO: 2652033 - RNA, 19 nt, Homo sapiens
  misc_RNA (1)...(19): siRNA sense strand
ugcuacaagccguggaaaa

SEQ ID NO: 2652034 - RNA, 19 nt, Homo sapiens
  misc_RNA (1)...(19): siRNA sense strand
cggaugaucgagaugccua

SEQ ID NO: 2652035 - RNA, 19 nt, Homo sapiens
  misc_RNA (1)...(19): siRNA sense strand
ccacagacacagagaccac

SEQ ID NO: 2652036 - RNA, 19 nt, Homo sapiens
  misc_RNA (1)...(19): siRNA sense strand
cggacuacaccgagagcga

SEQ ID NO: 2652037 - RNA, 19 nt, Homo sapiens
  misc_RNA (1)...(19): siRNA sense strand
agguggaggcugcggauau

SEQ ID NO: 2652038 - RNA, 19 nt, Homo sapiens
  misc_RNA (1)...(19): siRNA sense strand
agaagaaccuggacuuuga

SEQ ID NO: 2652039 - RNA, 19 nt, Homo sapiens
  misc_RNA (1)...(19): siRNA sense strand
ccaggaagaugaacggcca

SEQ ID NO: 2652040 - RNA, 19 nt, Homo sapiens
  misc_RNA (1)...(19): siRNA sense strand
gagugaacuucccggcaga

SEQ ID NO: 2652041 - RNA, 19 nt, Homo sapiens
  misc_RNA (1)...(19): siRNA sense strand
ccugggaguggaagaaaga

SEQ ID NO: 2652042 - RNA, 19 nt, Homo sapiens
  misc_RNA (1)...(19): siRNA sense strand
cgcagaagaaccuggacuu

SEQ ID NO: 2652043 - RNA, 19 nt, Homo sapiens
  misc_RNA (1)...(19): siRNA sense strand
gugaggagcuagaggccaa

SEQ ID NO: 2652044 - RNA, 19 nt, Homo sapiens
  misc_RNA (1)...(19): siRNA sense strand
caaccaaggccaagagcga

SEQ ID NO: 2652045 - RNA, 19 nt, Homo sapiens
  misc_RNA (1)...(19): siRNA sense strand
ucaacaaauacguggccua

SEQ ID NO: 2652046 - RNA, 19 nt, Homo sapiens
  misc_RNA (1)...(19): siRNA sense strand
ccgcaggucucaccggaaa

SEQ ID NO: 2652047 - RNA, 19 nt, Homo sapiens
  misc_RNA (1)...(19): siRNA sense strand
aggccaagagcgagcggaa

SEQ ID NO: 2652048 - RNA, 19 nt, Homo sapiens
  misc_RNA (1)...(19): siRNA sense strand
cggcauaagaugacccuca

SEQ ID NO: 2652049 - RNA, 19 nt, Homo sapiens
  misc_RNA (1)...(19): siRNA sense strand
uggccaacagcgagaagua

SEQ ID NO: 2652050 - RNA, 19 nt, Homo sapiens
  misc_RNA (1)...(19): siRNA sense strand
uggacaugguggagcgcga

SEQ ID NO: 2652051 - RNA, 19 nt, Homo sapiens
  misc_RNA (1)...(19): siRNA sense strand
guggauugacuacggcaaa

SEQ ID NO: 2652052 - RNA, 19 nt, Homo sapiens
  misc_RNA (1)...(19): siRNA sense strand
ccaagaagccgaagcccga

SEQ ID NO: 2652053 - RNA, 19 nt, Homo sapiens
  misc_RNA (1)...(19): siRNA sense strand
ucacauuucccuacggcua

SEQ ID NO: 2652054 - RNA, 19 nt, Homo sapiens
  misc_RNA (1)...(19): siRNA sense strand
gcaccaucaucgagggcgu

SEQ ID NO: 2652055 - RNA, 19 nt, Homo sapiens
  misc_RNA (1)...(19): siRNA sense strand
gcgacaaccuguacccuga

SEQ ID NO: 2652056 - RNA, 19 nt, Homo sapiens
  misc_RNA (1)...(19): siRNA sense strand
ggaaacggagccagcccaa

SEQ ID NO: 2652057 - RNA, 19 nt, Homo sapiens
  misc_RNA (1)...(19): siRNA sense strand
gccggaaggacauggucaa

SEQ ID NO: 2652058 - RNA, 19 nt, Homo sapiens
  misc_RNA (1)...(19): siRNA sense strand
gguccaugccaguugcuau

SEQ ID NO: 2652059 - RNA, 19 nt, Homo sapiens
  misc_RNA (1)...(19): siRNA sense strand
ugaacgugauugagcgcca

SEQ ID NO: 2652060 - RNA, 19 nt, Homo sapiens
  misc_RNA (1)...(19): siRNA sense strand
ccuaaguccugguacgcca

SEQ ID NO: 2652061 - RNA, 19 nt, Homo sapiens
  misc_RNA (1)...(19): siRNA sense strand
acaucuaccagguggaguu

SEQ ID NO: 2652062 - RNA, 19 nt, Homo sapiens
  misc_RNA (1)...(19): siRNA sense strand
gugaggagcuagaggccaa

SEQ ID NO: 2652063 - RNA, 19 nt, Homo sapiens
  misc_RNA (1)...(19): siRNA sense strand
caaccaaggccaagagcga

SEQ ID NO: 2652064 - RNA, 19 nt, Homo sapiens
  misc_RNA (1)...(19): siRNA sense strand
ccgcaggucucaccggaaa

SEQ ID NO: 2652065 - RNA, 19 nt, Homo sapiens
  misc_RNA (1)...(19): siRNA sense strand
aggccaagagcgagcggaa

SEQ ID NO: 2652066 - RNA, 19 nt, Homo sapiens
  misc_RNA (1)...(19): siRNA sense strand
cggcauaagaugacccuca

SEQ ID NO: 2652067 - RNA, 19 nt, Homo sapiens
  misc_RNA (1)...(19): siRNA sense strand
uggccaacagcgagaagua

SEQ ID NO: 2652068 - RNA, 19 nt, Homo sapiens
  misc_RNA (1)...(19): siRNA sense strand
uggacaugguggagcgcga

SEQ ID NO: 2652069 - RNA, 19 nt, Homo sapiens
  misc_RNA (1)...(19): siRNA sense strand
guggauugacuacggcaaa

SEQ ID NO: 2652070 - RNA, 19 nt, Homo sapiens
  misc_RNA (1)...(19): siRNA sense strand
ccaagaagccgaagcccga

SEQ ID NO: 2652071 - RNA, 19 nt, Homo sapiens
  misc_RNA (1)...(19): siRNA sense strand
ucacauuucccuacggcua

SEQ ID NO: 2652072 - RNA, 19 nt, Homo sapiens
  misc_RNA (1)...(19): siRNA sense strand
gcaccaucaucgagggcgu

SEQ ID NO: 2652073 - RNA, 19 nt, Homo sapiens
  misc_RNA (1)...(19): siRNA sense strand
ggaaacggagccagcccaa

SEQ ID NO: 2652074 - RNA, 19 nt, Homo sapiens
  misc_RNA (1)...(19): siRNA sense strand
gccggaaggacauggucaa

SEQ ID NO: 2652075 - RNA, 19 nt, Homo sapiens
  misc_RNA (1)...(19): siRNA sense strand
gguccaugccaguugcuau

SEQ ID NO: 2652076 - RNA, 19 nt, Homo sapiens
  misc_RNA (1)...(19): siRNA sense strand
ugaacgugauugagcgcca

SEQ ID NO: 2652077 - RNA, 19 nt, Homo sapiens
  misc_RNA (1)...(19): siRNA sense strand
ccuaaguccugguacgcca

SEQ ID NO: 2652078 - RNA, 19 nt, Homo sapiens
  misc_RNA (1)...(19): siRNA sense strand
acaucuaccagguggaguu

SEQ ID NO: 2652079 - RNA, 19 nt, Homo sapiens
  misc_RNA (1)...(19): siRNA sense strand
cggauaaggagaagaaggu

SEQ ID NO: 2652080 - RNA, 19 nt, Homo sapiens
  misc_RNA (1)...(19): siRNA sense strand
ccaaggaucugcaggucca

SEQ ID NO: 2652081 - RNA, 19 nt, Homo sapiens
  misc_RNA (1)...(19): siRNA sense strand
ugaugauccgggagaagaa

SEQ ID NO: 2652082 - RNA, 19 nt, Homo sapiens
  misc_RNA (1)...(19): siRNA sense strand
gauaaggagaagaaggucu

SEQ ID NO: 2652083 - RNA, 19 nt, Homo sapiens
  misc_RNA (1)...(19): siRNA sense strand
gcggaaguauggagagcag

SEQ ID NO: 2652084 - RNA, 19 nt, Homo sapiens
  misc_RNA (1)...(19): siRNA sense strand
aggaggacgaggaggaugu

SEQ ID NO: 2652085 - RNA, 19 nt, Homo sapiens
  misc_RNA (1)...(19): siRNA sense strand
aggacaaggaccugguguu

SEQ ID NO: 2652086 - RNA, 19 nt, Homo sapiens
  misc_RNA (1)...(19): siRNA sense strand
gagcaaguaaugacggacu

SEQ ID NO: 2652087 - RNA, 19 nt, Homo sapiens
  misc_RNA (1)...(19): siRNA sense strand
cggugaugauccgggagaa

SEQ ID NO: 2652088 - RNA, 19 nt, Homo sapiens
  misc_RNA (1)...(19): siRNA sense strand
ggaagaagucggagcgcua

SEQ ID NO: 2652089 - RNA, 19 nt, Homo sapiens
  misc_RNA (1)...(19): siRNA sense strand
cagacaagcccaaggagga

SEQ ID NO: 2652090 - RNA, 19 nt, Homo sapiens
  misc_RNA (1)...(19): siRNA sense strand
acaaagaacaaauagcgaa

SEQ ID NO: 2652091 - RNA, 19 nt, Homo sapiens
  misc_RNA (1)...(19): siRNA sense strand
cagacaugacccuggacaa

SEQ ID NO: 2652092 - RNA, 19 nt, Homo sapiens
  misc_RNA (1)...(19): siRNA sense strand
aagaagaggaagagacgca

SEQ ID NO: 2652093 - RNA, 19 nt, Homo sapiens
  misc_RNA (1)...(19): siRNA sense strand
ccaacaaauguaagaagga

SEQ ID NO: 2652094 - RNA, 19 nt, Homo sapiens
  misc_RNA (1)...(19): siRNA sense strand
gggaagaagaggaagagac

SEQ ID NO: 2652095 - RNA, 19 nt, Homo sapiens
  misc_RNA (1)...(19): siRNA sense strand
gcacagauccacugagcgu

SEQ ID NO: 2652096 - RNA, 19 nt, Homo sapiens
  misc_RNA (1)...(19): siRNA sense strand
cgugaaagacagugagcag

SEQ ID NO: 2652097 - RNA, 19 nt, Homo sapiens
  misc_RNA (1)...(19): siRNA sense strand
ggucagugggcgagugugu

SEQ ID NO: 2652098 - RNA, 19 nt, Homo sapiens
  misc_RNA (1)...(19): siRNA sense strand
ggauuugcuuucaggggaa

SEQ ID NO: 2652099 - RNA, 19 nt, Homo sapiens
  misc_RNA (1)...(19): siRNA sense strand
acgaguuggugaaaugcaa

SEQ ID NO: 2652100 - RNA, 19 nt, Homo sapiens
  misc_RNA (1)...(19): siRNA sense strand
cugcgaaggcugcgguuca

SEQ ID NO: 2652101 - RNA, 19 nt, Homo sapiens
  misc_RNA (1)...(19): siRNA sense strand
acgugaaggugauccgaga

SEQ ID NO: 2652102 - RNA, 19 nt, Homo sapiens
  misc_RNA (1)...(19): siRNA sense strand
ugaugaagacagagagccu

SEQ ID NO: 2652103 - RNA, 19 nt, Homo sapiens
  misc_RNA (1)...(19): siRNA sense strand
acaaauguaagaaggagau

SEQ ID NO: 2652104 - RNA, 19 nt, Homo sapiens
  misc_RNA (1)...(19): siRNA sense strand
agaagaucuacgagaacga

SEQ ID NO: 2652105 - RNA, 19 nt, Homo sapiens
  misc_RNA (1)...(19): siRNA sense strand
aacaaauguaagaaggaga

SEQ ID NO: 2652106 - RNA, 19 nt, Homo sapiens
  misc_RNA (1)...(19): siRNA sense strand
aauguaagaaggagaucau

SEQ ID NO: 2652107 - RNA, 19 nt, Homo sapiens
  misc_RNA (1)...(19): siRNA sense strand
caaagaacaaauagcgaag

SEQ ID NO: 2652108 - RNA, 19 nt, Homo sapiens
  misc_RNA (1)...(19): siRNA sense strand
cugagagggagguggagga

SEQ ID NO: 2652109 - RNA, 19 nt, Homo sapiens
  misc_RNA (1)...(19): siRNA sense strand
cuggagaccaucaguucaa

SEQ ID NO: 2652110 - RNA, 19 nt, Homo sapiens
  misc_RNA (1)...(19): siRNA sense strand
caggggaagaagaggaaga

SEQ ID NO: 2652111 - RNA, 19 nt, Homo sapiens
  misc_RNA (1)...(19): siRNA sense strand
uggcugaugaagacagaga

SEQ ID NO: 2652112 - RNA, 19 nt, Homo sapiens
  misc_RNA (1)...(19): siRNA sense strand
ggaagaagucggagcgcua

SEQ ID NO: 2652113 - RNA, 19 nt, Homo sapiens
  misc_RNA (1)...(19): siRNA sense strand
cagacaagcccaaggagga

SEQ ID NO: 2652114 - RNA, 19 nt, Homo sapiens
  misc_RNA (1)...(19): siRNA sense strand
acaaagaacaaauagcgaa

SEQ ID NO: 2652115 - RNA, 19 nt, Homo sapiens
  misc_RNA (1)...(19): siRNA sense strand
cagacaugacccuggacaa

SEQ ID NO: 2652116 - RNA, 19 nt, Homo sapiens
  misc_RNA (1)...(19): siRNA sense strand
aagaagaggaagagacgca

SEQ ID NO: 2652117 - RNA, 19 nt, Homo sapiens
  misc_RNA (1)...(19): siRNA sense strand
ccaacaaauguaagaagga

SEQ ID NO: 2652118 - RNA, 19 nt, Homo sapiens
  misc_RNA (1)...(19): siRNA sense strand
gggaagaagaggaagagac

SEQ ID NO: 2652119 - RNA, 19 nt, Homo sapiens
  misc_RNA (1)...(19): siRNA sense strand
gcacagauccacugagcgu

SEQ ID NO: 2652120 - RNA, 19 nt, Homo sapiens
  misc_RNA (1)...(19): siRNA sense strand
cgugaaagacagugagcag

SEQ ID NO: 2652121 - RNA, 19 nt, Homo sapiens
  misc_RNA (1)...(19): siRNA sense strand
ggucagugggcgagugugu

SEQ ID NO: 2652122 - RNA, 19 nt, Homo sapiens
  misc_RNA (1)...(19): siRNA sense strand
ggauuugcuuucaggggaa

SEQ ID NO: 2652123 - RNA, 19 nt, Homo sapiens
  misc_RNA (1)...(19): siRNA sense strand
acgaguuggugaaaugcaa

SEQ ID NO: 2652124 - RNA, 19 nt, Homo sapiens
  misc_RNA (1)...(19): siRNA sense strand
cugcgaaggcugcgguuca

SEQ ID NO: 2652125 - RNA, 19 nt, Homo sapiens
  misc_RNA (1)...(19): siRNA sense strand
acgugaaggugauccgaga

SEQ ID NO: 2652126 - RNA, 19 nt, Homo sapiens
  misc_RNA (1)...(19): siRNA sense strand
ugaugaagacagagagccu

SEQ ID NO: 2652127 - RNA, 19 nt, Homo sapiens
  misc_RNA (1)...(19): siRNA sense strand
acaaauguaagaaggagau

SEQ ID NO: 2652128 - RNA, 19 nt, Homo sapiens
  misc_RNA (1)...(19): siRNA sense strand
agaagaucuacgagaacga

SEQ ID NO: 2652129 - RNA, 19 nt, Homo sapiens
  misc_RNA (1)...(19): siRNA sense strand
aacaaauguaagaaggaga

SEQ ID NO: 2652130 - RNA, 19 nt, Homo sapiens
  misc_RNA (1)...(19): siRNA sense strand
aauguaagaaggagaucau

SEQ ID NO: 2652131 - RNA, 19 nt, Homo sapiens
  misc_RNA (1)...(19): siRNA sense strand
caaagaacaaauagcgaag

SEQ ID NO: 2652132 - RNA, 19 nt, Homo sapiens
  misc_RNA (1)...(19): siRNA sense strand
cugagagggagguggagga

SEQ ID NO: 2652133 - RNA, 19 nt, Homo sapiens
  misc_RNA (1)...(19): siRNA sense strand
cuggagaccaucaguucaa

SEQ ID NO: 2652134 - RNA, 19 nt, Homo sapiens
  misc_RNA (1)...(19): siRNA sense strand
caggggaagaagaggaaga

SEQ ID NO: 2652135 - RNA, 19 nt, Homo sapiens
  misc_RNA (1)...(19): siRNA sense strand
uggcugaugaagacagaga

SEQ ID NO: 2652136 - RNA, 19 nt, Homo sapiens
  misc_RNA (1)...(19): siRNA sense strand
gggcagugaauguggccaa

SEQ ID NO: 2652137 - RNA, 19 nt, Homo sapiens
  misc_RNA (1)...(19): siRNA sense strand
gggcagugaauguggccaa

SEQ ID NO: 2652138 - RNA, 19 nt, Homo sapiens
  misc_RNA (1)...(19): siRNA sense strand
gggcagugaacuuggccaa

SEQ ID NO: 2652139 - RNA, 19 nt, Homo sapiens
  misc_RNA (1)...(19): siRNA sense strand
gcgugguggacguggcuaa

SEQ ID NO: 2652140 - RNA, 19 nt, Homo sapiens
  misc_RNA (1)...(19): siRNA sense strand
gugaauguggccagaggaa

SEQ ID NO: 2652141 - RNA, 19 nt, Homo sapiens
  misc_RNA (1)...(19): siRNA sense strand
ccuccaaggcugugcuuau

SEQ ID NO: 2652142 - RNA, 19 nt, Homo sapiens
  misc_RNA (1)...(19): siRNA sense strand
gggcagcgaauguggccaa

SEQ ID NO: 2652143 - RNA, 19 nt, Homo sapiens
  misc_RNA (1)...(19): siRNA sense strand
gggcagcgaauguggccaa

SEQ ID NO: 2652144 - RNA, 19 nt, Homo sapiens
  misc_RNA (1)...(19): siRNA sense strand
ccaugaaugcggaggagca

SEQ ID NO: 2652145 - RNA, 19 nt, Homo sapiens
  misc_RNA (1)...(19): siRNA sense strand
gggcugugaacguggccaa

SEQ ID NO: 2652146 - RNA, 19 nt, Homo sapiens
  misc_RNA (1)...(19): siRNA sense strand
gggcagugaaugucgccaa

SEQ ID NO: 2652147 - RNA, 19 nt, Homo sapiens
  misc_RNA (1)...(19): siRNA sense strand
gggcagugaaugucgccaa

SEQ ID NO: 2652148 - RNA, 19 nt, Homo sapiens
  misc_RNA (1)...(19): siRNA sense strand
gaacuuggccaaagggacu

SEQ ID NO: 2652149 - RNA, 19 nt, Homo sapiens
  misc_RNA (1)...(19): siRNA sense strand
gcaacagguacaaaggaca

SEQ ID NO: 2652150 - RNA, 19 nt, Homo sapiens
  misc_RNA (1)...(19): siRNA sense strand
gaacuuggccaaagggacu

SEQ ID NO: 2652151 - RNA, 19 nt, Homo sapiens
  misc_RNA (1)...(19): siRNA sense strand
gggcugugaacuuggccaa

SEQ ID NO: 2652152 - RNA, 19 nt, Homo sapiens
  misc_RNA (1)...(19): siRNA sense strand
gggcugugaaguuggccaa

SEQ ID NO: 2652153 - RNA, 19 nt, Homo sapiens
  misc_RNA (1)...(19): siRNA sense strand
augaauuuggccagaggaa

SEQ ID NO: 2652154 - RNA, 19 nt, Homo sapiens
  misc_RNA (1)...(19): siRNA sense strand
cugaaaacgacccaaaaua

SEQ ID NO: 2652155 - RNA, 19 nt, Homo sapiens
  misc_RNA (1)...(19): siRNA sense strand
cugaaaacgacccaaaaua

SEQ ID NO: 2652156 - RNA, 19 nt, Homo sapiens
  misc_RNA (1)...(19): siRNA sense strand
ggacggagaaggagcugca

SEQ ID NO: 2652157 - RNA, 19 nt, Homo sapiens
  misc_RNA (1)...(19): siRNA sense strand
gcgacagguacaaagaaca

SEQ ID NO: 2652158 - RNA, 19 nt, Homo sapiens
  misc_RNA (1)...(19): siRNA sense strand
uggagggccuacagcacaa

SEQ ID NO: 2652159 - RNA, 19 nt, Homo sapiens
  misc_RNA (1)...(19): siRNA sense strand
gugcugugaacguggccaa

SEQ ID NO: 2652160 - RNA, 19 nt, Homo sapiens
  misc_RNA (1)...(19): siRNA sense strand
gugcugugaauguggccaa

SEQ ID NO: 2652161 - RNA, 19 nt, Homo sapiens
  misc_RNA (1)...(19): siRNA sense strand
agucuauggucauggguac

SEQ ID NO: 2652162 - RNA, 19 nt, Homo sapiens
  misc_RNA (1)...(19): siRNA sense strand
gugcaaacugggcugaaaa

SEQ ID NO: 2652163 - RNA, 19 nt, Homo sapiens
  misc_RNA (1)...(19): siRNA sense strand
gugcaaacugggcugaaaa

SEQ ID NO: 2652164 - RNA, 19 nt, Homo sapiens
  misc_RNA (1)...(19): siRNA sense strand
cuggauaccaccaagucua

SEQ ID NO: 2652165 - RNA, 19 nt, Homo sapiens
  misc_RNA (1)...(19): siRNA sense strand
gaaguuggccaaagggacu

SEQ ID NO: 2652166 - RNA, 19 nt, Homo sapiens
  misc_RNA (1)...(19): siRNA sense strand
uccaagauguccagggcca

SEQ ID NO: 2652167 - RNA, 19 nt, Homo sapiens
  misc_RNA (1)...(19): siRNA sense strand
caccaaagacacagugacu

SEQ ID NO: 2652168 - RNA, 19 nt, Homo sapiens
  misc_RNA (1)...(19): siRNA sense strand
gggcugaaaacgacccaaa

SEQ ID NO: 2652169 - RNA, 19 nt, Homo sapiens
  misc_RNA (1)...(19): siRNA sense strand
gggcugaaaacgacccaaa

SEQ ID NO: 2652170 - RNA, 19 nt, Homo sapiens
  misc_RNA (1)...(19): siRNA sense strand
gcauggaauugaaggcaga

SEQ ID NO: 2652171 - RNA, 19 nt, Homo sapiens
  misc_RNA (1)...(19): siRNA sense strand
auagaaugguaaacagcaa

SEQ ID NO: 2652172 - RNA, 19 nt, Homo sapiens
  misc_RNA (1)...(19): siRNA sense strand
ggaaagaaauugaugaugc

SEQ ID NO: 2652173 - RNA, 19 nt, Homo sapiens
  misc_RNA (1)...(19): siRNA sense strand
agguugugcuaaaggaaaa

SEQ ID NO: 2652174 - RNA, 19 nt, Homo sapiens
  misc_RNA (1)...(19): siRNA sense strand
aggcagaucagcuguacaa

SEQ ID NO: 2652175 - RNA, 19 nt, Homo sapiens
  misc_RNA (1)...(19): siRNA sense strand
acgagaagaaauucaggaa

SEQ ID NO: 2652176 - RNA, 19 nt, Homo sapiens
  misc_RNA (1)...(19): siRNA sense strand
gcagagugcugguggcauc

SEQ ID NO: 2652177 - RNA, 19 nt, Homo sapiens
  misc_RNA (1)...(19): siRNA sense strand
ccacugauccugagccaca

SEQ ID NO: 2652178 - RNA, 19 nt, Homo sapiens
  misc_RNA (1)...(19): siRNA sense strand
ucgcagagcugacgggaag

SEQ ID NO: 2652179 - RNA, 19 nt, Homo sapiens
  misc_RNA (1)...(19): siRNA sense strand
uguggaagaauuaaaggaa

SEQ ID NO: 2652180 - RNA, 19 nt, Homo sapiens
  misc_RNA (1)...(19): siRNA sense strand
cuccaagauagaaugguaa

SEQ ID NO: 2652181 - RNA, 19 nt, Homo sapiens
  misc_RNA (1)...(19): siRNA sense strand
ggagguugugcuaaaggaa

SEQ ID NO: 2652182 - RNA, 19 nt, Homo sapiens
  misc_RNA (1)...(19): siRNA sense strand
gggcuuaaauacuacagga

SEQ ID NO: 2652183 - RNA, 19 nt, Homo sapiens
  misc_RNA (1)...(19): siRNA sense strand
gggcucauggugugugcua

SEQ ID NO: 2652184 - RNA, 19 nt, Homo sapiens
  misc_RNA (1)...(19): siRNA sense strand
uuucaauauggcagcuuua

SEQ ID NO: 2652185 - RNA, 19 nt, Homo sapiens
  misc_RNA (1)...(19): siRNA sense strand
ggaucaaguuuaaguccgu

SEQ ID NO: 2652186 - RNA, 19 nt, Homo sapiens
  misc_RNA (1)...(19): siRNA sense strand
ccagaaaucagcucgcaga

SEQ ID NO: 2652187 - RNA, 19 nt, Homo sapiens
  misc_RNA (1)...(19): siRNA sense strand
ugaggugaggaaagaaauu

SEQ ID NO: 2652188 - RNA, 19 nt, Homo sapiens
  misc_RNA (1)...(19): siRNA sense strand
ggacaaggaacuagcagaa

SEQ ID NO: 2652189 - RNA, 19 nt, Homo sapiens
  misc_RNA (1)...(19): siRNA sense strand
acacagaacuuacgggcca

SEQ ID NO: 2652190 - RNA, 19 nt, Homo sapiens
  misc_RNA (1)...(19): siRNA sense strand
uagcagaaguuaucaaaca

SEQ ID NO: 2652191 - RNA, 19 nt, Homo sapiens
  misc_RNA (1)...(19): siRNA sense strand
cgacagcauucgaccuuua

SEQ ID NO: 2652192 - RNA, 19 nt, Homo sapiens
  misc_RNA (1)...(19): siRNA sense strand
gggccaaucucuuuacaca

SEQ ID NO: 2652193 - RNA, 19 nt, Homo sapiens
  misc_RNA (1)...(19): siRNA sense strand
gauuaaggcuacauaucga

SEQ ID NO: 2652194 - RNA, 19 nt, Homo sapiens
  misc_RNA (1)...(19): siRNA sense strand
uagagaaaccaaaggacca

SEQ ID NO: 2652195 - RNA, 19 nt, Homo sapiens
  misc_RNA (1)...(19): siRNA sense strand
ucaagaggaacuuaugaaa

SEQ ID NO: 2652196 - RNA, 19 nt, Homo sapiens
  misc_RNA (1)...(19): siRNA sense strand
gaaaucgaauugugagcca

SEQ ID NO: 2652197 - RNA, 19 nt, Homo sapiens
  misc_RNA (1)...(19): siRNA sense strand
aaucgaauugugagccaaa

SEQ ID NO: 2652198 - RNA, 19 nt, Homo sapiens
  misc_RNA (1)...(19): siRNA sense strand
aucaaacauucaagaggaa

SEQ ID NO: 2652199 - RNA, 19 nt, Homo sapiens
  misc_RNA (1)...(19): siRNA sense strand
cagacaagccccuacaaaa

SEQ ID NO: 2652200 - RNA, 19 nt, Homo sapiens
  misc_RNA (1)...(19): siRNA sense strand
uaucaaacauucaagagga

SEQ ID NO: 2652201 - RNA, 19 nt, Homo sapiens
  misc_RNA (1)...(19): siRNA sense strand
ucucugaagccaacagcua

SEQ ID NO: 2652202 - RNA, 19 nt, Homo sapiens
  misc_RNA (1)...(19): siRNA sense strand
gcacugagcugcaaacucu

SEQ ID NO: 2652203 - RNA, 19 nt, Homo sapiens
  misc_RNA (1)...(19): siRNA sense strand
cuucagacguuacacagaa

SEQ ID NO: 2652204 - RNA, 19 nt, Homo sapiens
  misc_RNA (1)...(19): siRNA sense strand
acaaggaacuagcagaagu

SEQ ID NO: 2652205 - RNA, 19 nt, Homo sapiens
  misc_RNA (1)...(19): siRNA sense strand
caaacauucaagaggaacu

SEQ ID NO: 2652206 - RNA, 19 nt, Homo sapiens
  misc_RNA (1)...(19): siRNA sense strand
aggccagcaggauggguaa

SEQ ID NO: 2652207 - RNA, 19 nt, Homo sapiens
  misc_RNA (1)...(19): siRNA sense strand
cagcaggaagaauguguuu

SEQ ID NO: 2652208 - RNA, 19 nt, Homo sapiens
  misc_RNA (1)...(19): siRNA sense strand
gcagaaguuaucaaacauu

SEQ ID NO: 2652209 - RNA, 19 nt, Homo sapiens
  misc_RNA (1)...(19): siRNA sense strand
aaucucagcacaagggaca

SEQ ID NO: 2652210 - RNA, 19 nt, Homo sapiens
  misc_RNA (1)...(19): siRNA sense strand
agaaagaggaagaguguga

SEQ ID NO: 2652211 - RNA, 19 nt, Homo sapiens
  misc_RNA (1)...(19): siRNA sense strand
gaggaaaaccugaggauga

SEQ ID NO: 2652212 - RNA, 19 nt, Homo sapiens
  misc_RNA (1)...(19): siRNA sense strand
ucgagaauuuggaggaaaa

SEQ ID NO: 2652213 - RNA, 19 nt, Homo sapiens
  misc_RNA (1)...(19): siRNA sense strand
ucagaaaucccauggcaaa

SEQ ID NO: 2652214 - RNA, 19 nt, Homo sapiens
  misc_RNA (1)...(19): siRNA sense strand
gggccuuacaacagauaua

SEQ ID NO: 2652215 - RNA, 19 nt, Homo sapiens
  misc_RNA (1)...(19): siRNA sense strand
cccaaaagaggaagagaaa

SEQ ID NO: 2652216 - RNA, 19 nt, Homo sapiens
  misc_RNA (1)...(19): siRNA sense strand
aaaggaaacuagaagccaa

SEQ ID NO: 2652217 - RNA, 19 nt, Homo sapiens
  misc_RNA (1)...(19): siRNA sense strand
agagaagacaaucgagaau

SEQ ID NO: 2652218 - RNA, 19 nt, Homo sapiens
  misc_RNA (1)...(19): siRNA sense strand
caaaagaggaagagaaacu

SEQ ID NO: 2652219 - RNA, 19 nt, Homo sapiens
  misc_RNA (1)...(19): siRNA sense strand
cuggagaacagcucaaaua

SEQ ID NO: 2652220 - RNA, 19 nt, Homo sapiens
  misc_RNA (1)...(19): siRNA sense strand
gugcagaggacaacgauga

SEQ ID NO: 2652221 - RNA, 19 nt, Homo sapiens
  misc_RNA (1)...(19): siRNA sense strand
aggcuaaacaguuggcaga

SEQ ID NO: 2652222 - RNA, 19 nt, Homo sapiens
  misc_RNA (1)...(19): siRNA sense strand
aaagaggaagagugugaaa

SEQ ID NO: 2652223 - RNA, 19 nt, Homo sapiens
  misc_RNA (1)...(19): siRNA sense strand
gcaccaacauauaagaaac

SEQ ID NO: 2652224 - RNA, 19 nt, Homo sapiens
  misc_RNA (1)...(19): siRNA sense strand
cguucugccuuuauacaaa

SEQ ID NO: 2652225 - RNA, 19 nt, Homo sapiens
  misc_RNA (1)...(19): siRNA sense strand
ugagaaagaggaagagugu

SEQ ID NO: 2652226 - RNA, 19 nt, Homo sapiens
  misc_RNA (1)...(19): siRNA sense strand
ccuuuaaagaaucccaaua

SEQ ID NO: 2652227 - RNA, 19 nt, Homo sapiens
  misc_RNA (1)...(19): siRNA sense strand
gaaaccuaucaguggacaa

SEQ ID NO: 2652228 - RNA, 19 nt, Homo sapiens
  misc_RNA (1)...(19): siRNA sense strand
auacuuagguuauggaaac

SEQ ID NO: 2652229 - RNA, 19 nt, Homo sapiens
  misc_RNA (1)...(19): siRNA sense strand
aguuguaccauuagaccaa

SEQ ID NO: 2652230 - RNA, 19 nt, Homo sapiens
  misc_RNA (1)...(19): siRNA sense strand
ggaagagugugaaaaguau

SEQ ID NO: 2652231 - RNA, 19 nt, Homo sapiens
  misc_RNA (1)...(19): siRNA sense strand
agagcaugaaugagccaaa

SEQ ID NO: 2652232 - RNA, 19 nt, Homo sapiens
  misc_RNA (1)...(19): siRNA sense strand
agacuaugugccucagaaa

SEQ ID NO: 2652233 - RNA, 19 nt, Homo sapiens
  misc_RNA (1)...(19): siRNA sense strand
uggaagcucaggaggagaa

SEQ ID NO: 2652234 - RNA, 19 nt, Homo sapiens
  misc_RNA (1)...(19): siRNA sense strand
ggaaacuagaagccaagaa

SEQ ID NO: 2652235 - RNA, 19 nt, Homo sapiens
  misc_RNA (1)...(19): siRNA sense strand
uggcuuggcucuuugggaa

SEQ ID NO: 2652236 - RNA, 19 nt, Homo sapiens
  misc_RNA (1)...(19): siRNA sense strand
cgacaaaggaaacuagaag

SEQ ID NO: 2652237 - RNA, 19 nt, Homo sapiens
  misc_RNA (1)...(19): siRNA sense strand
guauagguauccaagccaa

SEQ ID NO: 2652238 - RNA, 19 nt, Homo sapiens
  misc_RNA (1)...(19): siRNA sense strand
aggaagagugugaaaagua

SEQ ID NO: 2652239 - RNA, 19 nt, Homo sapiens
  misc_RNA (1)...(19): siRNA sense strand
cguacaaaacaaacugaaa

SEQ ID NO: 2652240 - RNA, 19 nt, Homo sapiens
  misc_RNA (1)...(19): siRNA sense strand
cuagagaagacaaucgaga

SEQ ID NO: 2652241 - RNA, 19 nt, Homo sapiens
  misc_RNA (1)...(19): siRNA sense strand
gcgaaaagucaggauguua

SEQ ID NO: 2652242 - RNA, 19 nt, Homo sapiens
  misc_RNA (1)...(19): siRNA sense strand
cauaucaaugcaauggaaa

SEQ ID NO: 2652243 - RNA, 19 nt, Homo sapiens
  misc_RNA (1)...(19): siRNA sense strand
accacagacuccacaguaa

SEQ ID NO: 2652244 - RNA, 19 nt, Homo sapiens
  misc_RNA (1)...(19): siRNA sense strand
gcaccagcccuaugaacuu

SEQ ID NO: 2652245 - RNA, 19 nt, Homo sapiens
  misc_RNA (1)...(19): siRNA sense strand
ggauguaaguuugccagaa

SEQ ID NO: 2652246 - RNA, 19 nt, Homo sapiens
  misc_RNA (1)...(19): siRNA sense strand
uagaacugcuuguguccaa

SEQ ID NO: 2652247 - RNA, 19 nt, Homo sapiens
  misc_RNA (1)...(19): siRNA sense strand
ggcaccaacauauaagaaa

SEQ ID NO: 2652248 - RNA, 19 nt, Homo sapiens
  misc_RNA (1)...(19): siRNA sense strand
uagagaagacaaucgagaa

SEQ ID NO: 2652249 - RNA, 19 nt, Homo sapiens
  misc_RNA (1)...(19): siRNA sense strand
aaagaaucccaauaggaau

SEQ ID NO: 2652250 - RNA, 19 nt, Homo sapiens
  misc_RNA (1)...(19): siRNA sense strand
gaauaugaacacagagcac

SEQ ID NO: 2652251 - RNA, 19 nt, Homo sapiens
  misc_RNA (1)...(19): siRNA sense strand
guguggaagcucaggagga

SEQ ID NO: 2652252 - RNA, 19 nt, Homo sapiens
  misc_RNA (1)...(19): siRNA sense strand
ccgacaaaggaaacuagaa

SEQ ID NO: 2652253 - RNA, 19 nt, Homo sapiens
  misc_RNA (1)...(19): siRNA sense strand
accaaaauaugcagggaga

SEQ ID NO: 2652254 - RNA, 19 nt, Homo sapiens
  misc_RNA (1)...(19): siRNA sense strand
gaugcuaauggucaggaaa

SEQ ID NO: 2652255 - RNA, 19 nt, Homo sapiens
  misc_RNA (1)...(19): siRNA sense strand
cagcauaagagcaugaaug

SEQ ID NO: 2652256 - RNA, 19 nt, Homo sapiens
  misc_RNA (1)...(19): siRNA sense strand
acagagacuugcacaacau

SEQ ID NO: 2652257 - RNA, 19 nt, Homo sapiens
  misc_RNA (1)...(19): siRNA sense strand
uggagaacagcucaaauaa

SEQ ID NO: 2652258 - RNA, 19 nt, Homo sapiens
  misc_RNA (1)...(19): siRNA sense strand
uuggaaauagccagaguuu

SEQ ID NO: 2652259 - RNA, 19 nt, Homo sapiens
  misc_RNA (1)...(19): siRNA sense strand
gcaccugaugcauauaaua

SEQ ID NO: 2652260 - RNA, 19 nt, Homo sapiens
  misc_RNA (1)...(19): siRNA sense strand
caccugaugcauauaauaa

SEQ ID NO: 2652261 - RNA, 19 nt, Homo sapiens
  misc_RNA (1)...(19): siRNA sense strand
caaucgagaauuuggagga

SEQ ID NO: 2652262 - RNA, 19 nt, Homo sapiens
  misc_RNA (1)...(19): siRNA sense strand
uggcagaacuuuugcgacu

SEQ ID NO: 2652263 - RNA, 19 nt, Homo sapiens
  misc_RNA (1)...(19): siRNA sense strand
cagcuaauggguuaucaaa

SEQ ID NO: 2652264 - RNA, 19 nt, Homo sapiens
  misc_RNA (1)...(19): siRNA sense strand
acccaaaagaggaagagaa

SEQ ID NO: 2652265 - RNA, 19 nt, Homo sapiens
  misc_RNA (1)...(19): siRNA sense strand
uauccaaacucuucacaca

SEQ ID NO: 2652266 - RNA, 19 nt, Homo sapiens
  misc_RNA (1)...(19): siRNA sense strand
gaguggugccauucaggua

SEQ ID NO: 2652267 - RNA, 19 nt, Homo sapiens
  misc_RNA (1)...(19): siRNA sense strand
ggauguuagcagagccagu

SEQ ID NO: 2652268 - RNA, 19 nt, Homo sapiens
  misc_RNA (1)...(19): siRNA sense strand
augcuaauggucaggaaaa

SEQ ID NO: 2652269 - RNA, 19 nt, Homo sapiens
  misc_RNA (1)...(19): siRNA sense strand
ggguguggcuucuggugca

SEQ ID NO: 2652270 - RNA, 19 nt, Homo sapiens
  misc_RNA (1)...(19): siRNA sense strand
ggccauggcuggaggcaaa

SEQ ID NO: 2652271 - RNA, 19 nt, Homo sapiens
  misc_RNA (1)...(19): siRNA sense strand
gcaaauguaaagaaggaua

SEQ ID NO: 2652272 - RNA, 19 nt, Homo sapiens
  misc_RNA (1)...(19): siRNA sense strand
gugcaaauguaaagaagga

SEQ ID NO: 2652273 - RNA, 19 nt, Homo sapiens
  misc_RNA (1)...(19): siRNA sense strand
cauguauauuggaggcaaa

SEQ ID NO: 2652274 - RNA, 19 nt, Homo sapiens
  misc_RNA (1)...(19): siRNA sense strand
ggacccagcagguggacaa

SEQ ID NO: 2652275 - RNA, 19 nt, Homo sapiens
  misc_RNA (1)...(19): siRNA sense strand
gcaaauagugucaucgauu

SEQ ID NO: 2652276 - RNA, 19 nt, Homo sapiens
  misc_RNA (1)...(19): siRNA sense strand
gcuacugucucaacggaua

SEQ ID NO: 2652277 - RNA, 19 nt, Homo sapiens
  misc_RNA (1)...(19): siRNA sense strand
cuguguagauguugaugaa

SEQ ID NO: 2652278 - RNA, 19 nt, Homo sapiens
  misc_RNA (1)...(19): siRNA sense strand
ugaaugugcuacaggaaga

SEQ ID NO: 2652279 - RNA, 19 nt, Homo sapiens
  misc_RNA (1)...(19): siRNA sense strand
ggacaauaucugacagugu

SEQ ID NO: 2652280 - RNA, 19 nt, Homo sapiens
  misc_RNA (1)...(19): siRNA sense strand
gggcugacaucaagagcga

SEQ ID NO: 2652281 - RNA, 19 nt, Homo sapiens
  misc_RNA (1)...(19): siRNA sense strand
ucagaaacccagaggagau

SEQ ID NO: 2652282 - RNA, 19 nt, Homo sapiens
  misc_RNA (1)...(19): siRNA sense strand
ggaucagggagaaagacaa

SEQ ID NO: 2652283 - RNA, 19 nt, Homo sapiens
  misc_RNA (1)...(19): siRNA sense strand
ggacaaauacggugccagu

SEQ ID NO: 2652284 - RNA, 19 nt, Homo sapiens
  misc_RNA (1)...(19): siRNA sense strand
gggagaaagacaaugacuu

SEQ ID NO: 2652285 - RNA, 19 nt, Homo sapiens
  misc_RNA (1)...(19): siRNA sense strand
gugccaaccacgaugcaaa

SEQ ID NO: 2652286 - RNA, 19 nt, Homo sapiens
  misc_RNA (1)...(19): siRNA sense strand
ggaagagccuccugcccua

SEQ ID NO: 2652287 - RNA, 19 nt, Homo sapiens
  misc_RNA (1)...(19): siRNA sense strand
acaacaggguacagacaga

SEQ ID NO: 2652288 - RNA, 19 nt, Homo sapiens
  misc_RNA (1)...(19): siRNA sense strand
gggccaaacaagugcaagu

SEQ ID NO: 2652289 - RNA, 19 nt, Homo sapiens
  misc_RNA (1)...(19): siRNA sense strand
guguauaucccaaaaguua

SEQ ID NO: 2652290 - RNA, 19 nt, Homo sapiens
  misc_RNA (1)...(19): siRNA sense strand
uccagguguuugugagaaa

SEQ ID NO: 2652291 - RNA, 19 nt, Homo sapiens
  misc_RNA (1)...(19): siRNA sense strand
caucaagagcgaaucacaa

SEQ ID NO: 2652292 - RNA, 19 nt, Homo sapiens
  misc_RNA (1)...(19): siRNA sense strand
uggacugacuuguguguau

SEQ ID NO: 2652293 - RNA, 19 nt, Homo sapiens
  misc_RNA (1)...(19): siRNA sense strand
caacaagaccuacaccaaa

SEQ ID NO: 2652294 - RNA, 19 nt, Homo sapiens
  misc_RNA (1)...(19): siRNA sense strand
gaucagggagaaagacaau

SEQ ID NO: 2652295 - RNA, 19 nt, Homo sapiens
  misc_RNA (1)...(19): siRNA sense strand
cagcuuugcucgauguuau

SEQ ID NO: 2652296 - RNA, 19 nt, Homo sapiens
  misc_RNA (1)...(19): siRNA sense strand
gcugacaucaagagcgaau

SEQ ID NO: 2652297 - RNA, 19 nt, Homo sapiens
  misc_RNA (1)...(19): siRNA sense strand
caaacaagugcaaguguca

SEQ ID NO: 2652298 - RNA, 19 nt, Homo sapiens
  misc_RNA (1)...(19): siRNA sense strand
aagaaggauaccaggguga

SEQ ID NO: 2652299 - RNA, 19 nt, Homo sapiens
  misc_RNA (1)...(19): siRNA sense strand
ccggaugguuccugcucaa

SEQ ID NO: 2652300 - RNA, 19 nt, Homo sapiens
  misc_RNA (1)...(19): siRNA sense strand
uggcugugauguuguuaaa

SEQ ID NO: 2652301 - RNA, 19 nt, Homo sapiens
  misc_RNA (1)...(19): siRNA sense strand
acaacaagaccuacaccaa

SEQ ID NO: 2652302 - RNA, 19 nt, Homo sapiens
  misc_RNA (1)...(19): siRNA sense strand
gcuucgaucucauguauau

SEQ ID NO: 2652303 - RNA, 19 nt, Homo sapiens
  misc_RNA (1)...(19): siRNA sense strand
aggcaaauaucaaugucau

SEQ ID NO: 2652304 - RNA, 19 nt, Homo sapiens
  misc_RNA (1)...(19): siRNA sense strand
gaugaaugugcuacaggaa

SEQ ID NO: 2652305 - RNA, 19 nt, Homo sapiens
  misc_RNA (1)...(19): siRNA sense strand
acagacagacccucagaaa

SEQ ID NO: 2652306 - RNA, 19 nt, Homo sapiens
  misc_RNA (1)...(19): siRNA sense strand
gagcgaaucacaaagauga

SEQ ID NO: 2652307 - RNA, 19 nt, Homo sapiens
  misc_RNA (1)...(19): siRNA sense strand
agauuuaggcaauguguca

SEQ ID NO: 2652308 - RNA, 19 nt, Homo sapiens
  misc_RNA (1)...(19): siRNA sense strand
ggagaaagacaaugacuug

SEQ ID NO: 2652309 - RNA, 19 nt, Homo sapiens
  misc_RNA (1)...(19): siRNA sense strand
acaccaaagccaacaccaa

SEQ ID NO: 2652310 - RNA, 19 nt, Homo sapiens
  misc_RNA (1)...(19): siRNA sense strand
gugaauguaucgggccaaa

SEQ ID NO: 2652311 - RNA, 19 nt, Homo sapiens
  misc_RNA (1)...(19): siRNA sense strand
guguagauguugaugaaug

SEQ ID NO: 2652312 - RNA, 19 nt, Homo sapiens
  misc_RNA (1)...(19): siRNA sense strand
ugacauagacgaaugcuca

SEQ ID NO: 2652313 - RNA, 19 nt, Homo sapiens
  misc_RNA (1)...(19): siRNA sense strand
ggacuuuguggauggauca

SEQ ID NO: 2652314 - RNA, 19 nt, Homo sapiens
  misc_RNA (1)...(19): siRNA sense strand
ggaccuguguagauguuga

SEQ ID NO: 2652315 - RNA, 19 nt, Homo sapiens
  misc_RNA (1)...(19): siRNA sense strand
ggucaguaucagugcagca

SEQ ID NO: 2652316 - RNA, 19 nt, Homo sapiens
  misc_RNA (1)...(19): siRNA sense strand
aggccuacuucuaagccaa

SEQ ID NO: 2652317 - RNA, 19 nt, Homo sapiens
  misc_RNA (1)...(19): siRNA sense strand
acuucuaagccaacaacaa

SEQ ID NO: 2652318 - RNA, 19 nt, Homo sapiens
  misc_RNA (1)...(19): siRNA sense strand
ccuguaaucaagaucuaaa

SEQ ID NO: 2652319 - RNA, 19 nt, Homo sapiens
  misc_RNA (1)...(19): siRNA sense strand
ggacugacuuguguguaua

SEQ ID NO: 2652320 - RNA, 19 nt, Homo sapiens
  misc_RNA (1)...(19): siRNA sense strand
gggugacacaggaaauaau

SEQ ID NO: 2652321 - RNA, 19 nt, Homo sapiens
  misc_RNA (1)...(19): siRNA sense strand
gaggagauguguucagugu

SEQ ID NO: 2652322 - RNA, 19 nt, Homo sapiens
  misc_RNA (1)...(19): siRNA sense strand
uggauggaucagggagaaa

SEQ ID NO: 2652323 - RNA, 19 nt, Homo sapiens
  misc_RNA (1)...(19): siRNA sense strand
gugauguuguuaaaggaca

SEQ ID NO: 2652324 - RNA, 19 nt, Homo sapiens
  misc_RNA (1)...(19): siRNA sense strand
aagccaacaacaagaccua

SEQ ID NO: 2652325 - RNA, 19 nt, Homo sapiens
  misc_RNA (1)...(19): siRNA sense strand
ggagauguguucaguguuc

SEQ ID NO: 2652326 - RNA, 19 nt, Homo sapiens
  misc_RNA (1)...(19): siRNA sense strand
ggaaguacuugguggccuc

SEQ ID NO: 2652327 - RNA, 19 nt, Homo sapiens
  misc_RNA (1)...(19): siRNA sense strand
guggauggaucagggagaa

SEQ ID NO: 2652328 - RNA, 19 nt, Homo sapiens
  misc_RNA (1)...(19): siRNA sense strand
ugacaacaggguacagaca

SEQ ID NO: 2652329 - RNA, 19 nt, Homo sapiens
  misc_RNA (1)...(19): siRNA sense strand
cccagcagguggacaauau

SEQ ID NO: 2652330 - RNA, 19 nt, Homo sapiens
  misc_RNA (1)...(19): siRNA sense strand
cguuauggugggaggauug

SEQ ID NO: 2652331 - RNA, 19 nt, Homo sapiens
  misc_RNA (1)...(19): siRNA sense strand
ugaccugcuccauggcaaa

SEQ ID NO: 2652332 - RNA, 19 nt, Homo sapiens
  misc_RNA (1)...(19): siRNA sense strand
uguagauguugaugaaugu

SEQ ID NO: 2652333 - RNA, 19 nt, Homo sapiens
  misc_RNA (1)...(19): siRNA sense strand
uucauguaccaaagggaaa

SEQ ID NO: 2652334 - RNA, 19 nt, Homo sapiens
  misc_RNA (1)...(19): siRNA sense strand
gauggaucagggagaaaga

SEQ ID NO: 2652335 - RNA, 19 nt, Homo sapiens
  misc_RNA (1)...(19): siRNA sense strand
agugaaagccugucagaaa

SEQ ID NO: 2652336 - RNA, 19 nt, Homo sapiens
  misc_RNA (1)...(19): siRNA sense strand
gaauauugcaggaggccaa

SEQ ID NO: 2652337 - RNA, 19 nt, Homo sapiens
  misc_RNA (1)...(19): siRNA sense strand
gggacaagauggagauguu

SEQ ID NO: 2652338 - RNA, 19 nt, Homo sapiens
  misc_RNA (1)...(19): siRNA sense strand
ccagaggauuggaaugaaa

SEQ ID NO: 2652339 - RNA, 19 nt, Homo sapiens
  misc_RNA (1)...(19): siRNA sense strand
guggaaggcaagaguauaa

SEQ ID NO: 2652340 - RNA, 19 nt, Homo sapiens
  misc_RNA (1)...(19): siRNA sense strand
aaucagagguggaugaaga

SEQ ID NO: 2652341 - RNA, 19 nt, Homo sapiens
  misc_RNA (1)...(19): siRNA sense strand
gagcugaucuuaagggaga

SEQ ID NO: 2652342 - RNA, 19 nt, Homo sapiens
  misc_RNA (1)...(19): siRNA sense strand
ccaagaggagggagagaau

SEQ ID NO: 2652343 - RNA, 19 nt, Homo sapiens
  misc_RNA (1)...(19): siRNA sense strand
agucgagaauggagaagua

SEQ ID NO: 2652344 - RNA, 19 nt, Homo sapiens
  misc_RNA (1)...(19): siRNA sense strand
ggcagagaguugagaguga

SEQ ID NO: 2652345 - RNA, 19 nt, Homo sapiens
  misc_RNA (1)...(19): siRNA sense strand
cggcucaggaggagugaaa

SEQ ID NO: 2652346 - RNA, 19 nt, Homo sapiens
  misc_RNA (1)...(19): siRNA sense strand
agagguggaugaagaguua

SEQ ID NO: 2652347 - RNA, 19 nt, Homo sapiens
  misc_RNA (1)...(19): siRNA sense strand
ggagaagguagaagcggua

SEQ ID NO: 2652348 - RNA, 19 nt, Homo sapiens
  misc_RNA (1)...(19): siRNA sense strand
ggaggauacaugugaagua

SEQ ID NO: 2652349 - RNA, 19 nt, Homo sapiens
  misc_RNA (1)...(19): siRNA sense strand
gcuuguaauuucaugcaaa

SEQ ID NO: 2652350 - RNA, 19 nt, Homo sapiens
  misc_RNA (1)...(19): siRNA sense strand
aggaauccauuguggcaaa

SEQ ID NO: 2652351 - RNA, 19 nt, Homo sapiens
  misc_RNA (1)...(19): siRNA sense strand
gcuaaaaggcagucgagaa

SEQ ID NO: 2652352 - RNA, 19 nt, Homo sapiens
  misc_RNA (1)...(19): siRNA sense strand
ggaaagugaagcaggagau

SEQ ID NO: 2652353 - RNA, 19 nt, Homo sapiens
  misc_RNA (1)...(19): siRNA sense strand
uuuaaagagcccaaaguaa

SEQ ID NO: 2652354 - RNA, 19 nt, Homo sapiens
  misc_RNA (1)...(19): siRNA sense strand
cuuacaaguugcaaagauu

SEQ ID NO: 2652355 - RNA, 19 nt, Homo sapiens
  misc_RNA (1)...(19): siRNA sense strand
gaucccuacuaaugagaaa

SEQ ID NO: 2652356 - RNA, 19 nt, Homo sapiens
  misc_RNA (1)...(19): siRNA sense strand
gcgaaucagagguggauga

SEQ ID NO: 2652357 - RNA, 19 nt, Homo sapiens
  misc_RNA (1)...(19): siRNA sense strand
cgucggagggccaggaaau

SEQ ID NO: 2652358 - RNA, 19 nt, Homo sapiens
  misc_RNA (1)...(19): siRNA sense strand
agucaucagucaaggucaa

SEQ ID NO: 2652359 - RNA, 19 nt, Homo sapiens
  misc_RNA (1)...(19): siRNA sense strand
gggcucauguggaaggcaa

SEQ ID NO: 2652360 - RNA, 19 nt, Homo sapiens
  misc_RNA (1)...(19): siRNA sense strand
ccagaaacauccaggaauc

SEQ ID NO: 2652361 - RNA, 19 nt, Homo sapiens
  misc_RNA (1)...(19): siRNA sense strand
gcgaauagcuucccgagau

SEQ ID NO: 2652362 - RNA, 19 nt, Homo sapiens
  misc_RNA (1)...(19): siRNA sense strand
aggcaagaguauaauguca

SEQ ID NO: 2652363 - RNA, 19 nt, Homo sapiens
  misc_RNA (1)...(19): siRNA sense strand
ggaaaggaguguguggauu

SEQ ID NO: 2652364 - RNA, 19 nt, Homo sapiens
  misc_RNA (1)...(19): siRNA sense strand
aaagcaaacaagagaccaa

SEQ ID NO: 2652365 - RNA, 19 nt, Homo sapiens
  misc_RNA (1)...(19): siRNA sense strand
gaacaggaauauugcagga

SEQ ID NO: 2652366 - RNA, 19 nt, Homo sapiens
  misc_RNA (1)...(19): siRNA sense strand
ggccaaaguucucagccaa

SEQ ID NO: 2652367 - RNA, 19 nt, Homo sapiens
  misc_RNA (1)...(19): siRNA sense strand
aggaaauacacccuaguua

SEQ ID NO: 2652368 - RNA, 19 nt, Homo sapiens
  misc_RNA (1)...(19): siRNA sense strand
cuggcgagcuugagcgaga

SEQ ID NO: 2652369 - RNA, 19 nt, Homo sapiens
  misc_RNA (1)...(19): siRNA sense strand
cauuagaugucaugaagca

SEQ ID NO: 2652370 - RNA, 19 nt, Homo sapiens
  misc_RNA (1)...(19): siRNA sense strand
aggcggacgaggaggaaga

SEQ ID NO: 2652371 - RNA, 19 nt, Homo sapiens
  misc_RNA (1)...(19): siRNA sense strand
caagaaaaguggugucaca

SEQ ID NO: 2652372 - RNA, 19 nt, Homo sapiens
  misc_RNA (1)...(19): siRNA sense strand
aaccgauggacuagagaaa

SEQ ID NO: 2652373 - RNA, 19 nt, Homo sapiens
  misc_RNA (1)...(19): siRNA sense strand
guauaaugucacagccaau

SEQ ID NO: 2652374 - RNA, 19 nt, Homo sapiens
  misc_RNA (1)...(19): siRNA sense strand
ccaggaaagugaagcagga

SEQ ID NO: 2652375 - RNA, 19 nt, Homo sapiens
  misc_RNA (1)...(19): siRNA sense strand
gcacagagcagggagaaga

SEQ ID NO: 2652376 - RNA, 19 nt, Homo sapiens
  misc_RNA (1)...(19): siRNA sense strand
gugaaagccugucagaaaa

SEQ ID NO: 2652377 - RNA, 19 nt, Homo sapiens
  misc_RNA (1)...(19): siRNA sense strand
ggguguugauguuuaagaa

SEQ ID NO: 2652378 - RNA, 19 nt, Homo sapiens
  misc_RNA (1)...(19): siRNA sense strand
aaugaaagacuguccuaua

SEQ ID NO: 2652379 - RNA, 19 nt, Homo sapiens
  misc_RNA (1)...(19): siRNA sense strand
ccaaagaggacgcguggca

SEQ ID NO: 2652380 - RNA, 19 nt, Homo sapiens
  misc_RNA (1)...(19): siRNA sense strand
accaaagaaaggaggaaga

SEQ ID NO: 2652381 - RNA, 19 nt, Homo sapiens
  misc_RNA (1)...(19): siRNA sense strand
agagaaagcaaacaagaga

SEQ ID NO: 2652382 - RNA, 19 nt, Homo sapiens
  misc_RNA (1)...(19): siRNA sense strand
cuaaaaggcagucgagaau

SEQ ID NO: 2652383 - RNA, 19 nt, Homo sapiens
  misc_RNA (1)...(19): siRNA sense strand
acgaggaggaagaagguga

SEQ ID NO: 2652384 - RNA, 19 nt, Homo sapiens
  misc_RNA (1)...(19): siRNA sense strand
augaagaguuauugucuga

SEQ ID NO: 2652385 - RNA, 19 nt, Homo sapiens
  misc_RNA (1)...(19): siRNA sense strand
gcuacaucgaggugaguca

SEQ ID NO: 2652386 - RNA, 19 nt, Homo sapiens
  misc_RNA (1)...(19): siRNA sense strand
gcaaagcuccucugccaaa

SEQ ID NO: 2652387 - RNA, 19 nt, Homo sapiens
  misc_RNA (1)...(19): siRNA sense strand
ggguauaccagccuacuua

SEQ ID NO: 2652388 - RNA, 19 nt, Homo sapiens
  misc_RNA (1)...(19): siRNA sense strand
ucuuaagggagaagguaga

SEQ ID NO: 2652389 - RNA, 19 nt, Homo sapiens
  misc_RNA (1)...(19): siRNA sense strand
gggagaagguagaagcggu

SEQ ID NO: 2652390 - RNA, 19 nt, Homo sapiens
  misc_RNA (1)...(19): siRNA sense strand
guggaauaagugaggcuuu

SEQ ID NO: 2652391 - RNA, 19 nt, Homo sapiens
  misc_RNA (1)...(19): siRNA sense strand
ggauacaugugaaguagca

SEQ ID NO: 2652392 - RNA, 19 nt, Homo sapiens
  misc_RNA (1)...(19): siRNA sense strand
gggagagaauggaucagau

SEQ ID NO: 2652393 - RNA, 19 nt, Homo sapiens
  misc_RNA (1)...(19): siRNA sense strand
aggaagagucgguaagaac

SEQ ID NO: 2652394 - RNA, 19 nt, Homo sapiens
  misc_RNA (1)...(19): siRNA sense strand
gggcagaggcuuguaauuu

SEQ ID NO: 2652395 - RNA, 19 nt, Homo sapiens
  misc_RNA (1)...(19): siRNA sense strand
ccacaaagacccagugcac

SEQ ID NO: 2652396 - RNA, 19 nt, Homo sapiens
  misc_RNA (1)...(19): siRNA sense strand
aggaagaaggugacaagga

SEQ ID NO: 2652397 - RNA, 19 nt, Homo sapiens
  misc_RNA (1)...(19): siRNA sense strand
ucaaaauucagaaggcaaa

SEQ ID NO: 2652398 - RNA, 19 nt, Homo sapiens
  misc_RNA (1)...(19): siRNA sense strand
cagcuugaaagaagaaaca

SEQ ID NO: 2652399 - RNA, 19 nt, Homo sapiens
  misc_RNA (1)...(19): siRNA sense strand
gaggaagagucgguaagaa

SEQ ID NO: 2652400 - RNA, 19 nt, Homo sapiens
  misc_RNA (1)...(19): siRNA sense strand
ggaaugaaagacuguccua

SEQ ID NO: 2652401 - RNA, 19 nt, Homo sapiens
  misc_RNA (1)...(19): siRNA sense strand
gcucugugagggagaugaa

SEQ ID NO: 2652402 - RNA, 19 nt, Homo sapiens
  misc_RNA (1)...(19): siRNA sense strand
ucaucaagcucauggaaag

SEQ ID NO: 2652403 - RNA, 19 nt, Homo sapiens
  misc_RNA (1)...(19): siRNA sense strand
caagguagguggaacgcca

SEQ ID NO: 2652404 - RNA, 19 nt, Homo sapiens
  misc_RNA (1)...(19): siRNA sense strand
aggaaaggaguguguggau

SEQ ID NO: 2652405 - RNA, 19 nt, Homo sapiens
  misc_RNA (1)...(19): siRNA sense strand
ccucaaacccagaaggccu

SEQ ID NO: 2652406 - RNA, 19 nt, Homo sapiens
  misc_RNA (1)...(19): siRNA sense strand
ccugagguccagcaagaua

SEQ ID NO: 2652407 - RNA, 19 nt, Homo sapiens
  misc_RNA (1)...(19): siRNA sense strand
cuacgguacuggcgagcuu

SEQ ID NO: 2652408 - RNA, 19 nt, Homo sapiens
  misc_RNA (1)...(19): siRNA sense strand
ggagggagagaauggauca

SEQ ID NO: 2652409 - RNA, 19 nt, Homo sapiens
  misc_RNA (1)...(19): siRNA sense strand
cuucaaaggaccacaagca

SEQ ID NO: 2652410 - RNA, 19 nt, Homo sapiens
  misc_RNA (1)...(19): siRNA sense strand
ccuuacaaguugcaaagau

SEQ ID NO: 2652411 - RNA, 19 nt, Homo sapiens
  misc_RNA (1)...(19): siRNA sense strand
cgagaauggagaaguaugu

SEQ ID NO: 2652412 - RNA, 19 nt, Homo sapiens
  misc_RNA (1)...(19): siRNA sense strand
gacuagagaaagcaaacaa

SEQ ID NO: 2652413 - RNA, 19 nt, Homo sapiens
  misc_RNA (1)...(19): siRNA sense strand
gaaaggaguguguggauuc

SEQ ID NO: 2652414 - RNA, 19 nt, Homo sapiens
  misc_RNA (1)...(19): siRNA sense strand
caguagccagucagaauua

SEQ ID NO: 2652415 - RNA, 19 nt, Homo sapiens
  misc_RNA (1)...(19): siRNA sense strand
auguggaaggcaagaguau

SEQ ID NO: 2652416 - RNA, 19 nt, Homo sapiens
  misc_RNA (1)...(19): siRNA sense strand
gagugauccaggaaaguga

SEQ ID NO: 2652417 - RNA, 19 nt, Homo sapiens
  misc_RNA (1)...(19): siRNA sense strand
uggagaaguauguggucga

SEQ ID NO: 2652418 - RNA, 19 nt, Homo sapiens
  misc_RNA (1)...(19): siRNA sense strand
uauaugggcucauguggaa

SEQ ID NO: 2652419 - RNA, 19 nt, Homo sapiens
  misc_RNA (1)...(19): siRNA sense strand
gaguauaaugucacagcca

SEQ ID NO: 2652420 - RNA, 19 nt, Homo sapiens
  misc_RNA (1)...(19): siRNA sense strand
gcauauuauaggcaggcuu

SEQ ID NO: 2652421 - RNA, 19 nt, Homo sapiens
  misc_RNA (1)...(19): siRNA sense strand
aggaaagugaagcaggaga

SEQ ID NO: 2652422 - RNA, 19 nt, Homo sapiens
  misc_RNA (1)...(19): siRNA sense strand
cgaggugagucauggucuu

SEQ ID NO: 2652423 - RNA, 19 nt, Homo sapiens
  misc_RNA (1)...(19): siRNA sense strand
agcaguagccagucagaau

SEQ ID NO: 2652424 - RNA, 19 nt, Homo sapiens
  misc_RNA (1)...(19): siRNA sense strand
uaaaccaaccgauggacua

SEQ ID NO: 2652425 - RNA, 19 nt, Homo sapiens
  misc_RNA (1)...(19): siRNA sense strand
acaggauuguccacauaaa

SEQ ID NO: 2652426 - RNA, 19 nt, Homo sapiens
  misc_RNA (1)...(19): siRNA sense strand
cacauaaauucgaucccua

SEQ ID NO: 2652427 - RNA, 19 nt, Homo sapiens
  misc_RNA (1)...(19): siRNA sense strand
gagaugaagugguuuccau

SEQ ID NO: 2652428 - RNA, 19 nt, Homo sapiens
  misc_RNA (1)...(19): siRNA sense strand
gaagauccacgcucggaaa

SEQ ID NO: 2652429 - RNA, 19 nt, Homo sapiens
  misc_RNA (1)...(19): siRNA sense strand
ggaggaagaaggugacaag

SEQ ID NO: 2652430 - RNA, 19 nt, Homo sapiens
  misc_RNA (1)...(19): siRNA sense strand
ggacaagguagguggaacg

SEQ ID NO: 2652431 - RNA, 19 nt, Homo sapiens
  misc_RNA (1)...(19): siRNA sense strand
cacuggagcuggaggugau

SEQ ID NO: 2652432 - RNA, 19 nt, Homo sapiens
  misc_RNA (1)...(19): siRNA sense strand
ggaaugagugggagaggag

SEQ ID NO: 2652433 - RNA, 19 nt, Homo sapiens
  misc_RNA (1)...(19): siRNA sense strand
gaaaaguggugucacaauu

SEQ ID NO: 2652434 - RNA, 19 nt, Homo sapiens
  misc_RNA (1)...(19): siRNA sense strand
auucuggacugguggacau

SEQ ID NO: 2652435 - RNA, 19 nt, Homo sapiens
  misc_RNA (1)...(19): siRNA sense strand
gauuagacuaugagagaga

SEQ ID NO: 2652436 - RNA, 19 nt, Homo sapiens
  misc_RNA (1)...(19): siRNA sense strand
cugagagcaugguggaaua

SEQ ID NO: 2652437 - RNA, 19 nt, Homo sapiens
  misc_RNA (1)...(19): siRNA sense strand
gagauuagacuaugagaga

SEQ ID NO: 2652438 - RNA, 19 nt, Homo sapiens
  misc_RNA (1)...(19): siRNA sense strand
agacuaugagagagagauu

SEQ ID NO: 2652439 - RNA, 19 nt, Homo sapiens
  misc_RNA (1)...(19): siRNA sense strand
ugaaagaggaccugacaca

SEQ ID NO: 2652440 - RNA, 19 nt, Homo sapiens
  misc_RNA (1)...(19): siRNA sense strand
cauaagaggcagcaaugaa

SEQ ID NO: 2652441 - RNA, 19 nt, Homo sapiens
  misc_RNA (1)...(19): siRNA sense strand
ugaaaggacucaugaaauc

SEQ ID NO: 2652442 - RNA, 19 nt, Homo sapiens
  misc_RNA (1)...(19): siRNA sense strand
guggaugacuugaaggguu

SEQ ID NO: 2652443 - RNA, 19 nt, Homo sapiens
  misc_RNA (1)...(19): siRNA sense strand
acacaagccaccugggaca

SEQ ID NO: 2652444 - RNA, 19 nt, Homo sapiens
  misc_RNA (1)...(19): siRNA sense strand
ggggauuccuauucagaua

SEQ ID NO: 2652445 - RNA, 19 nt, Homo sapiens
  misc_RNA (1)...(19): siRNA sense strand
cagcagccuucuuuggaua

SEQ ID NO: 2652446 - RNA, 19 nt, Homo sapiens
  misc_RNA (1)...(19): siRNA sense strand
uggcaguggcaguucguua

SEQ ID NO: 2652447 - RNA, 19 nt, Homo sapiens
  misc_RNA (1)...(19): siRNA sense strand
cuguuauccuccugcuaaa

SEQ ID NO: 2652448 - RNA, 19 nt, Homo sapiens
  misc_RNA (1)...(19): siRNA sense strand
ccgucagagauuagacuau

SEQ ID NO: 2652449 - RNA, 19 nt, Homo sapiens
  misc_RNA (1)...(19): siRNA sense strand
ccaacacugucuauuguaa

SEQ ID NO: 2652450 - RNA, 19 nt, Homo sapiens
  misc_RNA (1)...(19): siRNA sense strand
ggccauaagaggcagcaau

SEQ ID NO: 2652451 - RNA, 19 nt, Homo sapiens
  misc_RNA (1)...(19): siRNA sense strand
cgcccagggugcagaugua

SEQ ID NO: 2652452 - RNA, 19 nt, Homo sapiens
  misc_RNA (1)...(19): siRNA sense strand
guucguuaguugugaucca

SEQ ID NO: 2652453 - RNA, 19 nt, Homo sapiens
  misc_RNA (1)...(19): siRNA sense strand
uggauagccgucagagauu

SEQ ID NO: 2652454 - RNA, 19 nt, Homo sapiens
  misc_RNA (1)...(19): siRNA sense strand
ccaccugggacaugcagua

SEQ ID NO: 2652455 - RNA, 19 nt, Homo sapiens
  misc_RNA (1)...(19): siRNA sense strand
acuaugagagagagauuca

SEQ ID NO: 2652456 - RNA, 19 nt, Homo sapiens
  misc_RNA (1)...(19): siRNA sense strand
gggucaggguaaaccauca

SEQ ID NO: 2652457 - RNA, 19 nt, Homo sapiens
  misc_RNA (1)...(19): siRNA sense strand
gugcaaguguggagaaugc

SEQ ID NO: 2652458 - RNA, 19 nt, Homo sapiens
  misc_RNA (1)...(19): siRNA sense strand
gcugagagcaugguggaau

SEQ ID NO: 2652459 - RNA, 19 nt, Homo sapiens
  misc_RNA (1)...(19): siRNA sense strand
ggauagccgucagagauua

SEQ ID NO: 2652460 - RNA, 19 nt, Homo sapiens
  misc_RNA (1)...(19): siRNA sense strand
agacaagaaaagcaugaaa

SEQ ID NO: 2652461 - RNA, 19 nt, Homo sapiens
  misc_RNA (1)...(19): siRNA sense strand
agcaacugauuguggauga

SEQ ID NO: 2652462 - RNA, 19 nt, Homo sapiens
  misc_RNA (1)...(19): siRNA sense strand
gaauauggaaccugcaugu

SEQ ID NO: 2652463 - RNA, 19 nt, Homo sapiens
  misc_RNA (1)...(19): siRNA sense strand
gauuagacuaugagagaga

SEQ ID NO: 2652464 - RNA, 19 nt, Homo sapiens
  misc_RNA (1)...(19): siRNA sense strand
cugagagcaugguggaaua

SEQ ID NO: 2652465 - RNA, 19 nt, Homo sapiens
  misc_RNA (1)...(19): siRNA sense strand
gagauuagacuaugagaga

SEQ ID NO: 2652466 - RNA, 19 nt, Homo sapiens
  misc_RNA (1)...(19): siRNA sense strand
agacuaugagagagagauu

SEQ ID NO: 2652467 - RNA, 19 nt, Homo sapiens
  misc_RNA (1)...(19): siRNA sense strand
ugaaagaggaccugacaca

SEQ ID NO: 2652468 - RNA, 19 nt, Homo sapiens
  misc_RNA (1)...(19): siRNA sense strand
cauaagaggcagcaaugaa

SEQ ID NO: 2652469 - RNA, 19 nt, Homo sapiens
  misc_RNA (1)...(19): siRNA sense strand
ugaaaggacucaugaaauc

SEQ ID NO: 2652470 - RNA, 19 nt, Homo sapiens
  misc_RNA (1)...(19): siRNA sense strand
guggaugacuugaaggguu

SEQ ID NO: 2652471 - RNA, 19 nt, Homo sapiens
  misc_RNA (1)...(19): siRNA sense strand
acacaagccaccugggaca

SEQ ID NO: 2652472 - RNA, 19 nt, Homo sapiens
  misc_RNA (1)...(19): siRNA sense strand
ggggauuccuauucagaua

SEQ ID NO: 2652473 - RNA, 19 nt, Homo sapiens
  misc_RNA (1)...(19): siRNA sense strand
cagcagccuucuuuggaua

SEQ ID NO: 2652474 - RNA, 19 nt, Homo sapiens
  misc_RNA (1)...(19): siRNA sense strand
uggcaguggcaguucguua

SEQ ID NO: 2652475 - RNA, 19 nt, Homo sapiens
  misc_RNA (1)...(19): siRNA sense strand
cuguuauccuccugcuaaa

SEQ ID NO: 2652476 - RNA, 19 nt, Homo sapiens
  misc_RNA (1)...(19): siRNA sense strand
ccgucagagauuagacuau

SEQ ID NO: 2652477 - RNA, 19 nt, Homo sapiens
  misc_RNA (1)...(19): siRNA sense strand
ccaacacugucuauuguaa

SEQ ID NO: 2652478 - RNA, 19 nt, Homo sapiens
  misc_RNA (1)...(19): siRNA sense strand
ggccauaagaggcagcaau

SEQ ID NO: 2652479 - RNA, 19 nt, Homo sapiens
  misc_RNA (1)...(19): siRNA sense strand
cgcccagggugcagaugua

SEQ ID NO: 2652480 - RNA, 19 nt, Homo sapiens
  misc_RNA (1)...(19): siRNA sense strand
guucguuaguugugaucca

SEQ ID NO: 2652481 - RNA, 19 nt, Homo sapiens
  misc_RNA (1)...(19): siRNA sense strand
uggauagccgucagagauu

SEQ ID NO: 2652482 - RNA, 19 nt, Homo sapiens
  misc_RNA (1)...(19): siRNA sense strand
ccaccugggacaugcagua

SEQ ID NO: 2652483 - RNA, 19 nt, Homo sapiens
  misc_RNA (1)...(19): siRNA sense strand
acuaugagagagagauuca

SEQ ID NO: 2652484 - RNA, 19 nt, Homo sapiens
  misc_RNA (1)...(19): siRNA sense strand
gggucaggguaaaccauca

SEQ ID NO: 2652485 - RNA, 19 nt, Homo sapiens
  misc_RNA (1)...(19): siRNA sense strand
gugcaaguguggagaaugc

SEQ ID NO: 2652486 - RNA, 19 nt, Homo sapiens
  misc_RNA (1)...(19): siRNA sense strand
gcugagagcaugguggaau

SEQ ID NO: 2652487 - RNA, 19 nt, Homo sapiens
  misc_RNA (1)...(19): siRNA sense strand
ggauagccgucagagauua

SEQ ID NO: 2652488 - RNA, 19 nt, Homo sapiens
  misc_RNA (1)...(19): siRNA sense strand
agacaagaaaagcaugaaa

SEQ ID NO: 2652489 - RNA, 19 nt, Homo sapiens
  misc_RNA (1)...(19): siRNA sense strand
agcaacugauuguggauga

SEQ ID NO: 2652490 - RNA, 19 nt, Homo sapiens
  misc_RNA (1)...(19): siRNA sense strand
gaauauggaaccugcaugu

SEQ ID NO: 2652491 - RNA, 19 nt, Homo sapiens
  misc_RNA (1)...(19): siRNA sense strand
aggaaguguuggagggaua

SEQ ID NO: 2652492 - RNA, 19 nt, Homo sapiens
  misc_RNA (1)...(19): siRNA sense strand
gggaacagaagaagagaaa

SEQ ID NO: 2652493 - RNA, 19 nt, Homo sapiens
  misc_RNA (1)...(19): siRNA sense strand
gggagcagauuuagagaua

SEQ ID NO: 2652494 - RNA, 19 nt, Homo sapiens
  misc_RNA (1)...(19): siRNA sense strand
gaacaaagcugauaaugaa

SEQ ID NO: 2652495 - RNA, 19 nt, Homo sapiens
  misc_RNA (1)...(19): siRNA sense strand
caguauagcuucagcacaa

SEQ ID NO: 2652496 - RNA, 19 nt, Homo sapiens
  misc_RNA (1)...(19): siRNA sense strand
gaagaagagaaauggaaua

SEQ ID NO: 2652497 - RNA, 19 nt, Homo sapiens
  misc_RNA (1)...(19): siRNA sense strand
ggauagaggguuagaugaa

SEQ ID NO: 2652498 - RNA, 19 nt, Homo sapiens
  misc_RNA (1)...(19): siRNA sense strand
gaacaaggugcuagaacaa

SEQ ID NO: 2652499 - RNA, 19 nt, Homo sapiens
  misc_RNA (1)...(19): siRNA sense strand
cgucaaugcugcagacaau

SEQ ID NO: 2652500 - RNA, 19 nt, Homo sapiens
  misc_RNA (1)...(19): siRNA sense strand
gagcagauuuagagauaga

SEQ ID NO: 2652501 - RNA, 19 nt, Homo sapiens
  misc_RNA (1)...(19): siRNA sense strand
ggaaauuggucgaucucaa

SEQ ID NO: 2652502 - RNA, 19 nt, Homo sapiens
  misc_RNA (1)...(19): siRNA sense strand
caguagaagucgacaguca

SEQ ID NO: 2652503 - RNA, 19 nt, Homo sapiens
  misc_RNA (1)...(19): siRNA sense strand
ggacauucucagauaauua

SEQ ID NO: 2652504 - RNA, 19 nt, Homo sapiens
  misc_RNA (1)...(19): siRNA sense strand
gaugaaggguguaacauua

SEQ ID NO: 2652505 - RNA, 19 nt, Homo sapiens
  misc_RNA (1)...(19): siRNA sense strand
ggagaacauuauuggcuaa

SEQ ID NO: 2652506 - RNA, 19 nt, Homo sapiens
  misc_RNA (1)...(19): siRNA sense strand
gaauguuggcuaugaguua

SEQ ID NO: 2652507 - RNA, 19 nt, Homo sapiens
  misc_RNA (1)...(19): siRNA sense strand
gaacagaagaagagaaaug

SEQ ID NO: 2652508 - RNA, 19 nt, Homo sapiens
  misc_RNA (1)...(19): siRNA sense strand
agguagaacugcuuugaua

SEQ ID NO: 2652509 - RNA, 19 nt, Homo sapiens
  misc_RNA (1)...(19): siRNA sense strand
gaacaaaugagauugacaa

SEQ ID NO: 2652510 - RNA, 19 nt, Homo sapiens
  misc_RNA (1)...(19): siRNA sense strand
uaacauuacugaaggugaa

SEQ ID NO: 2652511 - RNA, 19 nt, Homo sapiens
  misc_RNA (1)...(19): siRNA sense strand
auagagagauuguggaaca

SEQ ID NO: 2652512 - RNA, 19 nt, Homo sapiens
  misc_RNA (1)...(19): siRNA sense strand
gggaagagaaagucugcaa

SEQ ID NO: 2652513 - RNA, 19 nt, Homo sapiens
  misc_RNA (1)...(19): siRNA sense strand
ucguuuagaucaagaagaa

SEQ ID NO: 2652514 - RNA, 19 nt, Homo sapiens
  misc_RNA (1)...(19): siRNA sense strand
gggagaacauuauuggcua

SEQ ID NO: 2652515 - RNA, 19 nt, Homo sapiens
  misc_RNA (1)...(19): siRNA sense strand
ggaccauggagcagaagua

SEQ ID NO: 2652516 - RNA, 19 nt, Homo sapiens
  misc_RNA (1)...(19): siRNA sense strand
gagcagaaguaaaucauga

SEQ ID NO: 2652517 - RNA, 19 nt, Homo sapiens
  misc_RNA (1)...(19): siRNA sense strand
agaaguaaaucaugaggau

SEQ ID NO: 2652518 - RNA, 19 nt, Homo sapiens
  misc_RNA (1)...(19): siRNA sense strand
ggacacagaauguuggcua

SEQ ID NO: 2652519 - RNA, 19 nt, Homo sapiens
  misc_RNA (1)...(19): siRNA sense strand
ucgacaagccuuagaaaga

SEQ ID NO: 2652520 - RNA, 19 nt, Homo sapiens
  misc_RNA (1)...(19): siRNA sense strand
gauaauggagcuucaguaa

SEQ ID NO: 2652521 - RNA, 19 nt, Homo sapiens
  misc_RNA (1)...(19): siRNA sense strand
aagaagaagcuuugcgaca

SEQ ID NO: 2652522 - RNA, 19 nt, Homo sapiens
  misc_RNA (1)...(19): siRNA sense strand
ggauaugaggacaagcuaa

SEQ ID NO: 2652523 - RNA, 19 nt, Homo sapiens
  misc_RNA (1)...(19): siRNA sense strand
cugcagagauguuaaauca

SEQ ID NO: 2652524 - RNA, 19 nt, Homo sapiens
  misc_RNA (1)...(19): siRNA sense strand
uugcaaagguucagccuau

SEQ ID NO: 2652525 - RNA, 19 nt, Homo sapiens
  misc_RNA (1)...(19): siRNA sense strand
caugggacauagagagauu

SEQ ID NO: 2652526 - RNA, 19 nt, Homo sapiens
  misc_RNA (1)...(19): siRNA sense strand
aagaggaccuauagccaaa

SEQ ID NO: 2652527 - RNA, 19 nt, Homo sapiens
  misc_RNA (1)...(19): siRNA sense strand
cagaagaagagaaauggaa

SEQ ID NO: 2652528 - RNA, 19 nt, Homo sapiens
  misc_RNA (1)...(19): siRNA sense strand
ccacgaacaaugcaagaua

SEQ ID NO: 2652529 - RNA, 19 nt, Homo sapiens
  misc_RNA (1)...(19): siRNA sense strand
ugaucgaggugcugaagua

SEQ ID NO: 2652530 - RNA, 19 nt, Homo sapiens
  misc_RNA (1)...(19): siRNA sense strand
gugcagucauuaacaauua

SEQ ID NO: 2652531 - RNA, 19 nt, Homo sapiens
  misc_RNA (1)...(19): siRNA sense strand
ggauaguauugauagugaa

SEQ ID NO: 2652532 - RNA, 19 nt, Homo sapiens
  misc_RNA (1)...(19): siRNA sense strand
ucaaagagguuaugaugga

SEQ ID NO: 2652533 - RNA, 19 nt, Homo sapiens
  misc_RNA (1)...(19): siRNA sense strand
agccaaagguuuuagaaua

SEQ ID NO: 2652534 - RNA, 19 nt, Homo sapiens
  misc_RNA (1)...(19): siRNA sense strand
aaaaguaacugcugcaaua

SEQ ID NO: 2652535 - RNA, 19 nt, Homo sapiens
  misc_RNA (1)...(19): siRNA sense strand
cagcagaaggacacagaau

SEQ ID NO: 2652536 - RNA, 19 nt, Homo sapiens
  misc_RNA (1)...(19): siRNA sense strand
agaagaugcucauggacau

SEQ ID NO: 2652537 - RNA, 19 nt, Homo sapiens
  misc_RNA (1)...(19): siRNA sense strand
ggaauuauaucacgcagua

SEQ ID NO: 2652538 - RNA, 19 nt, Homo sapiens
  misc_RNA (1)...(19): siRNA sense strand
gagaaauggaauaaugaca

SEQ ID NO: 2652539 - RNA, 19 nt, Homo sapiens
  misc_RNA (1)...(19): siRNA sense strand
ugaacaaggugcuagaaca

SEQ ID NO: 2652540 - RNA, 19 nt, Homo sapiens
  misc_RNA (1)...(19): siRNA sense strand
agguuaugauggaagaaau

SEQ ID NO: 2652541 - RNA, 19 nt, Homo sapiens
  misc_RNA (1)...(19): siRNA sense strand
uaauggagcuucaguaaau

SEQ ID NO: 2652542 - RNA, 19 nt, Homo sapiens
  misc_RNA (1)...(19): siRNA sense strand
ugaacaaagcugauaauga

SEQ ID NO: 2652543 - RNA, 19 nt, Homo sapiens
  misc_RNA (1)...(19): siRNA sense strand
ccauggagcagaaguaaau

SEQ ID NO: 2652544 - RNA, 19 nt, Homo sapiens
  misc_RNA (1)...(19): siRNA sense strand
ucaaauagcucugguagua

SEQ ID NO: 2652545 - RNA, 19 nt, Homo sapiens
  misc_RNA (1)...(19): siRNA sense strand
gaaaugacucaguuugaua

SEQ ID NO: 2652546 - RNA, 19 nt, Homo sapiens
  misc_RNA (1)...(19): siRNA sense strand
cagcagaaucucaaugcaa

SEQ ID NO: 2652547 - RNA, 19 nt, Homo sapiens
  misc_RNA (1)...(19): siRNA sense strand
agauggaguuguagaaaau

SEQ ID NO: 2652548 - RNA, 19 nt, Homo sapiens
  misc_RNA (1)...(19): siRNA sense strand
agaugaugcuggauggaca

SEQ ID NO: 2652549 - RNA, 19 nt, Homo sapiens
  misc_RNA (1)...(19): siRNA sense strand
gccaaagguuuuagaauau

SEQ ID NO: 2652550 - RNA, 19 nt, Homo sapiens
  misc_RNA (1)...(19): siRNA sense strand
cugcaauagugcugucaau

SEQ ID NO: 2652551 - RNA, 19 nt, Homo sapiens
  misc_RNA (1)...(19): siRNA sense strand
cgagagaaacccagccgaa

SEQ ID NO: 2652552 - RNA, 19 nt, Homo sapiens
  misc_RNA (1)...(19): siRNA sense strand
guacauucuucaucguuua

SEQ ID NO: 2652553 - RNA, 19 nt, Homo sapiens
  misc_RNA (1)...(19): siRNA sense strand
caagaugguuggacagcau

SEQ ID NO: 2652554 - RNA, 19 nt, Homo sapiens
  misc_RNA (1)...(19): siRNA sense strand
agucauaauucaccaagua

SEQ ID NO: 2652555 - RNA, 19 nt, Homo sapiens
  misc_RNA (1)...(19): siRNA sense strand
gauucaaaugggagaacau

SEQ ID NO: 2652556 - RNA, 19 nt, Homo sapiens
  misc_RNA (1)...(19): siRNA sense strand
ugaucaagaugguuggaca

SEQ ID NO: 2652557 - RNA, 19 nt, Homo sapiens
  misc_RNA (1)...(19): siRNA sense strand
acauagagagauuguggaa

SEQ ID NO: 2652558 - RNA, 19 nt, Homo sapiens
  misc_RNA (1)...(19): siRNA sense strand
gcacagggacauuguugaa

SEQ ID NO: 2652559 - RNA, 19 nt, Homo sapiens
  misc_RNA (1)...(19): siRNA sense strand
ggacauuguugaauugcuu

SEQ ID NO: 2652560 - RNA, 19 nt, Homo sapiens
  misc_RNA (1)...(19): siRNA sense strand
agucaucacugucaaauaa

SEQ ID NO: 2652561 - RNA, 19 nt, Homo sapiens
  misc_RNA (1)...(19): siRNA sense strand
gaacaaauucagcagcauu

SEQ ID NO: 2652562 - RNA, 19 nt, Homo sapiens
  misc_RNA (1)...(19): siRNA sense strand
agauagagggcaucaggaa

SEQ ID NO: 2652563 - RNA, 19 nt, Homo sapiens
  misc_RNA (1)...(19): siRNA sense strand
aaguaaaucaugaggaugu

SEQ ID NO: 2652564 - RNA, 19 nt, Homo sapiens
  misc_RNA (1)...(19): siRNA sense strand
agaagaagagaaauggaau

SEQ ID NO: 2652565 - RNA, 19 nt, Homo sapiens
  misc_RNA (1)...(19): siRNA sense strand
ugcuacagcuguugguuaa

SEQ ID NO: 2652566 - RNA, 19 nt, Homo sapiens
  misc_RNA (1)...(19): siRNA sense strand
gauuggguguggagcaaau

SEQ ID NO: 2652567 - RNA, 19 nt, Homo sapiens
  misc_RNA (1)...(19): siRNA sense strand
ucaaggauguucagcagua

SEQ ID NO: 2652568 - RNA, 19 nt, Homo sapiens
  misc_RNA (1)...(19): siRNA sense strand
cguuaacuuuggaagauuu

SEQ ID NO: 2652569 - RNA, 19 nt, Homo sapiens
  misc_RNA (1)...(19): siRNA sense strand
uguugauggacuaggaaau

SEQ ID NO: 2652570 - RNA, 19 nt, Homo sapiens
  misc_RNA (1)...(19): siRNA sense strand
acaaggugcuagaacaaau

SEQ ID NO: 2652571 - RNA, 19 nt, Homo sapiens
  misc_RNA (1)...(19): siRNA sense strand
cuucaaaagugcagucauu

SEQ ID NO: 2652572 - RNA, 19 nt, Homo sapiens
  misc_RNA (1)...(19): siRNA sense strand
gcagaaggacacagaaugu

SEQ ID NO: 2652573 - RNA, 19 nt, Homo sapiens
  misc_RNA (1)...(19): siRNA sense strand
ugaagcacuuauugaacaa

SEQ ID NO: 2652574 - RNA, 19 nt, Homo sapiens
  misc_RNA (1)...(19): siRNA sense strand
gaagagaaagucugcaaaa

SEQ ID NO: 2652575 - RNA, 19 nt, Homo sapiens
  misc_RNA (1)...(19): siRNA sense strand
agaagaagcuuugcgacaa

SEQ ID NO: 2652576 - RNA, 19 nt, Homo sapiens
  misc_RNA (1)...(19): siRNA sense strand
ggggaggacacgaggauau

SEQ ID NO: 2652577 - RNA, 19 nt, Homo sapiens
  misc_RNA (1)...(19): siRNA sense strand
gcuacaacauggcgcugaa

SEQ ID NO: 2652578 - RNA, 19 nt, Homo sapiens
  misc_RNA (1)...(19): siRNA sense strand
gugcaaacguagaagcaag

SEQ ID NO: 2652579 - RNA, 19 nt, Homo sapiens
  misc_RNA (1)...(19): siRNA sense strand
gaauaaugcuagugguguc

SEQ ID NO: 2652580 - RNA, 19 nt, Homo sapiens
  misc_RNA (1)...(19): siRNA sense strand
ggacgaaucccuuucauau

SEQ ID NO: 2652581 - RNA, 19 nt, Homo sapiens
  misc_RNA (1)...(19): siRNA sense strand
ggaauaaugacaaauccaa

SEQ ID NO: 2652582 - RNA, 19 nt, Homo sapiens
  misc_RNA (1)...(19): siRNA sense strand
cauuacugaaggugaacaa

SEQ ID NO: 2652583 - RNA, 19 nt, Homo sapiens
  misc_RNA (1)...(19): siRNA sense strand
gaauuuaacaccauuggaa

SEQ ID NO: 2652584 - RNA, 19 nt, Homo sapiens
  misc_RNA (1)...(19): siRNA sense strand
ugcuagaacaaaugagauu

SEQ ID NO: 2652585 - RNA, 19 nt, Homo sapiens
  misc_RNA (1)...(19): siRNA sense strand
ugacaaugauggacgaauc

SEQ ID NO: 2652586 - RNA, 19 nt, Homo sapiens
  misc_RNA (1)...(19): siRNA sense strand
gauguagaucacacagaua

SEQ ID NO: 2652587 - RNA, 19 nt, Homo sapiens
  misc_RNA (1)...(19): siRNA sense strand
uuagaagggcacagggaca

SEQ ID NO: 2652588 - RNA, 19 nt, Homo sapiens
  misc_RNA (1)...(19): siRNA sense strand
ggaagagaaagucugcaaa

SEQ ID NO: 2652589 - RNA, 19 nt, Homo sapiens
  misc_RNA (1)...(19): siRNA sense strand
gaagagaaauggaauaaug

SEQ ID NO: 2652590 - RNA, 19 nt, Homo sapiens
  misc_RNA (1)...(19): siRNA sense strand
aggcauauaucgucaagga

SEQ ID NO: 2652591 - RNA, 19 nt, Homo sapiens
  misc_RNA (1)...(19): siRNA sense strand
ccaagaaaguggaggcaca

SEQ ID NO: 2652592 - RNA, 19 nt, Homo sapiens
  misc_RNA (1)...(19): siRNA sense strand
aauaagaagcucagaggaa

SEQ ID NO: 2652593 - RNA, 19 nt, Homo sapiens
  misc_RNA (1)...(19): siRNA sense strand
cgucagaugucaagguuca

SEQ ID NO: 2652594 - RNA, 19 nt, Homo sapiens
  misc_RNA (1)...(19): siRNA sense strand
caaccaagcugaaagugaa

SEQ ID NO: 2652595 - RNA, 19 nt, Homo sapiens
  misc_RNA (1)...(19): siRNA sense strand
aaucagggaacaugagaaa

SEQ ID NO: 2652596 - RNA, 19 nt, Homo sapiens
  misc_RNA (1)...(19): siRNA sense strand
gcacagaaucagcugcuaa

SEQ ID NO: 2652597 - RNA, 19 nt, Homo sapiens
  misc_RNA (1)...(19): siRNA sense strand
ucacagagaaccucaaaua

SEQ ID NO: 2652598 - RNA, 19 nt, Homo sapiens
  misc_RNA (1)...(19): siRNA sense strand
ggagagcaccuuagaagaa

SEQ ID NO: 2652599 - RNA, 19 nt, Homo sapiens
  misc_RNA (1)...(19): siRNA sense strand
gggaagagucaacugcuaa

SEQ ID NO: 2652600 - RNA, 19 nt, Homo sapiens
  misc_RNA (1)...(19): siRNA sense strand
gagcaaaaguuaaauguga

SEQ ID NO: 2652601 - RNA, 19 nt, Homo sapiens
  misc_RNA (1)...(19): siRNA sense strand
gcaaagacaaaucagggaa

SEQ ID NO: 2652602 - RNA, 19 nt, Homo sapiens
  misc_RNA (1)...(19): siRNA sense strand
ucagggaacaugagaaauu

SEQ ID NO: 2652603 - RNA, 19 nt, Homo sapiens
  misc_RNA (1)...(19): siRNA sense strand
cagcauacguguaaagaag

SEQ ID NO: 2652604 - RNA, 19 nt, Homo sapiens
  misc_RNA (1)...(19): siRNA sense strand
uaaagaagaugggagguua

SEQ ID NO: 2652605 - RNA, 19 nt, Homo sapiens
  misc_RNA (1)...(19): siRNA sense strand
ggaagagucaacugcuaaa

SEQ ID NO: 2652606 - RNA, 19 nt, Homo sapiens
  misc_RNA (1)...(19): siRNA sense strand
uaaaggagaugcaagggaa

SEQ ID NO: 2652607 - RNA, 19 nt, Homo sapiens
  misc_RNA (1)...(19): siRNA sense strand
ccugaaagcuaccgccauu

SEQ ID NO: 2652608 - RNA, 19 nt, Homo sapiens
  misc_RNA (1)...(19): siRNA sense strand
aaacagacccagauugcaa

SEQ ID NO: 2652609 - RNA, 19 nt, Homo sapiens
  misc_RNA (1)...(19): siRNA sense strand
ggaagaaccaggagagcac

SEQ ID NO: 2652610 - RNA, 19 nt, Homo sapiens
  misc_RNA (1)...(19): siRNA sense strand
ucaauuuggucuccaguaa

SEQ ID NO: 2652611 - RNA, 19 nt, Homo sapiens
  misc_RNA (1)...(19): siRNA sense strand
aauccuaaaucccaagaaa

SEQ ID NO: 2652612 - RNA, 19 nt, Homo sapiens
  misc_RNA (1)...(19): siRNA sense strand
gaaaugagguccuguaaac

SEQ ID NO: 2652613 - RNA, 19 nt, Homo sapiens
  misc_RNA (1)...(19): siRNA sense strand
guaaagaagaugggagguu

SEQ ID NO: 2652614 - RNA, 19 nt, Homo sapiens
  misc_RNA (1)...(19): siRNA sense strand
cagaaacaauccagggaac

SEQ ID NO: 2652615 - RNA, 19 nt, Homo sapiens
  misc_RNA (1)...(19): siRNA sense strand
aaaggagaugcaagggaaa

SEQ ID NO: 2652616 - RNA, 19 nt, Homo sapiens
  misc_RNA (1)...(19): siRNA sense strand
cggaaaagaagacgaucua

SEQ ID NO: 2652617 - RNA, 19 nt, Homo sapiens
  misc_RNA (1)...(19): siRNA sense strand
agggaagagucaacugcua

SEQ ID NO: 2652618 - RNA, 19 nt, Homo sapiens
  misc_RNA (1)...(19): siRNA sense strand
gcucaauccuaaaucccaa

SEQ ID NO: 2652619 - RNA, 19 nt, Homo sapiens
  misc_RNA (1)...(19): siRNA sense strand
uagagagcaaccugagaaa

SEQ ID NO: 2652620 - RNA, 19 nt, Homo sapiens
  misc_RNA (1)...(19): siRNA sense strand
gcauacguguaaagaagau

SEQ ID NO: 2652621 - RNA, 19 nt, Homo sapiens
  misc_RNA (1)...(19): siRNA sense strand
aguccaugcugcagaacuu

SEQ ID NO: 2652622 - RNA, 19 nt, Homo sapiens
  misc_RNA (1)...(19): siRNA sense strand
cagccaggguggucaguca

SEQ ID NO: 2652623 - RNA, 19 nt, Homo sapiens
  misc_RNA (1)...(19): siRNA sense strand
ccaaccaagcugaaaguga

SEQ ID NO: 2652624 - RNA, 19 nt, Homo sapiens
  misc_RNA (1)...(19): siRNA sense strand
gcacagcgucagaugucaa

SEQ ID NO: 2652625 - RNA, 19 nt, Homo sapiens
  misc_RNA (1)...(19): siRNA sense strand
agacagaccaagacagcca

SEQ ID NO: 2652626 - RNA, 19 nt, Homo sapiens
  misc_RNA (1)...(19): siRNA sense strand
acagagaaccucaaauaga

SEQ ID NO: 2652627 - RNA, 19 nt, Homo sapiens
  misc_RNA (1)...(19): siRNA sense strand
ugaaacaaguuauggauug

SEQ ID NO: 2652628 - RNA, 19 nt, Homo sapiens
  misc_RNA (1)...(19): siRNA sense strand
ccucaaggagcaaaaguua

SEQ ID NO: 2652629 - RNA, 19 nt, Homo sapiens
  misc_RNA (1)...(19): siRNA sense strand
aagaagacgaucuaggaga

SEQ ID NO: 2652630 - RNA, 19 nt, Homo sapiens
  misc_RNA (1)...(19): siRNA sense strand
aaccucaaauagagagcaa

SEQ ID NO: 2652631 - RNA, 19 nt, Homo sapiens
  misc_RNA (1)...(19): siRNA sense strand
aaguggaggcacagaauca

SEQ ID NO: 2652632 - RNA, 19 nt, Homo sapiens
  misc_RNA (1)...(19): siRNA sense strand
caucugaucccauggguga

SEQ ID NO: 2652633 - RNA, 19 nt, Homo sapiens
  misc_RNA (1)...(19): siRNA sense strand
aaagugaaaucaaggaagu

SEQ ID NO: 2652634 - RNA, 19 nt, Homo sapiens
  misc_RNA (1)...(19): siRNA sense strand
ccagaaacaauccagggaa

SEQ ID NO: 2652635 - RNA, 19 nt, Homo sapiens
  misc_RNA (1)...(19): siRNA sense strand
gaaaguggaggcacagaau

SEQ ID NO: 2652636 - RNA, 19 nt, Homo sapiens
  misc_RNA (1)...(19): siRNA sense strand
ggcaagaugcggaggugca

SEQ ID NO: 2652637 - RNA, 19 nt, Homo sapiens
  misc_RNA (1)...(19): siRNA sense strand
ggaaggcagcacaguguuu

SEQ ID NO: 2652638 - RNA, 19 nt, Homo sapiens
  misc_RNA (1)...(19): siRNA sense strand
gauugcagcuuccggaaaa

SEQ ID NO: 2652639 - RNA, 19 nt, Homo sapiens
  misc_RNA (1)...(19): siRNA sense strand
ugaaagugaaaucaaggaa

SEQ ID NO: 2652640 - RNA, 19 nt, Homo sapiens
  misc_RNA (1)...(19): siRNA sense strand
agaaaguggaggcacagaa

SEQ ID NO: 2652641 - RNA, 19 nt, Homo sapiens
  misc_RNA (1)...(19): siRNA sense strand
uagagaaucuggauguuca

SEQ ID NO: 2652642 - RNA, 19 nt, Homo sapiens
  misc_RNA (1)...(19): siRNA sense strand
cuuaaaaccucaucaauca

SEQ ID NO: 2652643 - RNA, 19 nt, Homo sapiens
  misc_RNA (1)...(19): siRNA sense strand
cagucaagcugaaacaagu

SEQ ID NO: 2652644 - RNA, 19 nt, Homo sapiens
  misc_RNA (1)...(19): siRNA sense strand
gaagauucccugaugagau

SEQ ID NO: 2652645 - RNA, 19 nt, Homo sapiens
  misc_RNA (1)...(19): siRNA sense strand
ugaaaugagguccuguaaa

SEQ ID NO: 2652646 - RNA, 19 nt, Homo sapiens
  misc_RNA (1)...(19): siRNA sense strand
gaccagcucuccuguguaa

SEQ ID NO: 2652647 - RNA, 19 nt, Homo sapiens
  misc_RNA (1)...(19): siRNA sense strand
caaagaagccaguacgaug

SEQ ID NO: 2652648 - RNA, 19 nt, Homo sapiens
  misc_RNA (1)...(19): siRNA sense strand
cugaaacaaguuauggauu

SEQ ID NO: 2652649 - RNA, 19 nt, Homo sapiens
  misc_RNA (1)...(19): siRNA sense strand
agacccagauugcaaacua

SEQ ID NO: 2652650 - RNA, 19 nt, Homo sapiens
  misc_RNA (1)...(19): siRNA sense strand
gcuuggaucccacuaauaa

SEQ ID NO: 2652651 - RNA, 19 nt, Homo sapiens
  misc_RNA (1)...(19): siRNA sense strand
ucaaggagcaaaaguuaaa

SEQ ID NO: 2652652 - RNA, 19 nt, Homo sapiens
  misc_RNA (1)...(19): siRNA sense strand
cguccucaguagcagcaaa

SEQ ID NO: 2652653 - RNA, 19 nt, Homo sapiens
  misc_RNA (1)...(19): siRNA sense strand
aagcugaaagugaaaucaa

SEQ ID NO: 2652654 - RNA, 19 nt, Homo sapiens
  misc_RNA (1)...(19): siRNA sense strand
gagagcaccuuagaagaaa

SEQ ID NO: 2652655 - RNA, 19 nt, Homo sapiens
  misc_RNA (1)...(19): siRNA sense strand
gcgcagacuccaagcucca

SEQ ID NO: 2652656 - RNA, 19 nt, Homo sapiens
  misc_RNA (1)...(19): siRNA sense strand
agggaacaugagaaauuaa

SEQ ID NO: 2652657 - RNA, 19 nt, Homo sapiens
  misc_RNA (1)...(19): siRNA sense strand
gggaacaugagaaauuaau

SEQ ID NO: 2652658 - RNA, 19 nt, Homo sapiens
  misc_RNA (1)...(19): siRNA sense strand
cugaaaugagguccuguaa

SEQ ID NO: 2652659 - RNA, 19 nt, Homo sapiens
  misc_RNA (1)...(19): siRNA sense strand
ccuuagaagaaaacagaca

SEQ ID NO: 2652660 - RNA, 19 nt, Homo sapiens
  misc_RNA (1)...(19): siRNA sense strand
ggaagggaucuuauacaca

SEQ ID NO: 2652661 - RNA, 19 nt, Homo sapiens
  misc_RNA (1)...(19): siRNA sense strand
agugcagacuccagugaca

SEQ ID NO: 2652662 - RNA, 19 nt, Homo sapiens
  misc_RNA (1)...(19): siRNA sense strand
ccagcauacguguaaagaa

SEQ ID NO: 2652663 - RNA, 19 nt, Homo sapiens
  misc_RNA (1)...(19): siRNA sense strand
auccagaaccauuugcaaa

SEQ ID NO: 2652664 - RNA, 19 nt, Homo sapiens
  misc_RNA (1)...(19): siRNA sense strand
agauccauuuccucagaua

SEQ ID NO: 2652665 - RNA, 19 nt, Homo sapiens
  misc_RNA (1)...(19): siRNA sense strand
ccuaagaacuguuggguua

SEQ ID NO: 2652666 - RNA, 19 nt, Homo sapiens
  misc_RNA (1)...(19): siRNA sense strand
gcaaugagguugaaagaau

SEQ ID NO: 2652667 - RNA, 19 nt, Homo sapiens
  misc_RNA (1)...(19): siRNA sense strand
ggaagagagugaacaguaa

SEQ ID NO: 2652668 - RNA, 19 nt, Homo sapiens
  misc_RNA (1)...(19): siRNA sense strand
cagcauaguccaagacaua

SEQ ID NO: 2652669 - RNA, 19 nt, Homo sapiens
  misc_RNA (1)...(19): siRNA sense strand
caggcaaagcagagagaaa

SEQ ID NO: 2652670 - RNA, 19 nt, Homo sapiens
  misc_RNA (1)...(19): siRNA sense strand
cgacgaagcuugcggguuu

SEQ ID NO: 2652671 - RNA, 19 nt, Homo sapiens
  misc_RNA (1)...(19): siRNA sense strand
gauuggaacuagauggaaa

SEQ ID NO: 2652672 - RNA, 19 nt, Homo sapiens
  misc_RNA (1)...(19): siRNA sense strand
ggauaucagugguguuaaa

SEQ ID NO: 2652673 - RNA, 19 nt, Homo sapiens
  misc_RNA (1)...(19): siRNA sense strand
uggaaaaggagcagagaaa

SEQ ID NO: 2652674 - RNA, 19 nt, Homo sapiens
  misc_RNA (1)...(19): siRNA sense strand
agccaagauucuagggaua

SEQ ID NO: 2652675 - RNA, 19 nt, Homo sapiens
  misc_RNA (1)...(19): siRNA sense strand
guugaaagaauguuggaaa

SEQ ID NO: 2652676 - RNA, 19 nt, Homo sapiens
  misc_RNA (1)...(19): siRNA sense strand
acagaugacuauaggaaau

SEQ ID NO: 2652677 - RNA, 19 nt, Homo sapiens
  misc_RNA (1)...(19): siRNA sense strand
gauaauuggcagaugcaaa

SEQ ID NO: 2652678 - RNA, 19 nt, Homo sapiens
  misc_RNA (1)...(19): siRNA sense strand
ccauaaugcaagagaacau

SEQ ID NO: 2652679 - RNA, 19 nt, Homo sapiens
  misc_RNA (1)...(19): siRNA sense strand
guuaaaugaaccaggacaa

SEQ ID NO: 2652680 - RNA, 19 nt, Homo sapiens
  misc_RNA (1)...(19): siRNA sense strand
uuacagaauuugugcggua

SEQ ID NO: 2652681 - RNA, 19 nt, Homo sapiens
  misc_RNA (1)...(19): siRNA sense strand
uggaaaccuaugagagaaa

SEQ ID NO: 2652682 - RNA, 19 nt, Homo sapiens
  misc_RNA (1)...(19): siRNA sense strand
acggaaaccugguggcaau

SEQ ID NO: 2652683 - RNA, 19 nt, Homo sapiens
  misc_RNA (1)...(19): siRNA sense strand
ggaaagauguugucuccaa

SEQ ID NO: 2652684 - RNA, 19 nt, Homo sapiens
  misc_RNA (1)...(19): siRNA sense strand
gaugaaaugaagcaggaaa

SEQ ID NO: 2652685 - RNA, 19 nt, Homo sapiens
  misc_RNA (1)...(19): siRNA sense strand
gggaagagagugaacagua

SEQ ID NO: 2652686 - RNA, 19 nt, Homo sapiens
  misc_RNA (1)...(19): siRNA sense strand
gaucaaagggaaaagauaa

SEQ ID NO: 2652687 - RNA, 19 nt, Homo sapiens
  misc_RNA (1)...(19): siRNA sense strand
gggaaaagauaaaagacau

SEQ ID NO: 2652688 - RNA, 19 nt, Homo sapiens
  misc_RNA (1)...(19): siRNA sense strand
ugacaauggcacuggauau

SEQ ID NO: 2652689 - RNA, 19 nt, Homo sapiens
  misc_RNA (1)...(19): siRNA sense strand
cgacaagcaaccuaaauaa

SEQ ID NO: 2652690 - RNA, 19 nt, Homo sapiens
  misc_RNA (1)...(19): siRNA sense strand
caacagaugacuauaggaa

SEQ ID NO: 2652691 - RNA, 19 nt, Homo sapiens
  misc_RNA (1)...(19): siRNA sense strand
gggacaaagaaaagauuua

SEQ ID NO: 2652692 - RNA, 19 nt, Homo sapiens
  misc_RNA (1)...(19): siRNA sense strand
gcauaguccaagacauaaa

SEQ ID NO: 2652693 - RNA, 19 nt, Homo sapiens
  misc_RNA (1)...(19): siRNA sense strand
ugaagacaauggaaaguua

SEQ ID NO: 2652694 - RNA, 19 nt, Homo sapiens
  misc_RNA (1)...(19): siRNA sense strand
gagauuugguugaugaaga

SEQ ID NO: 2652695 - RNA, 19 nt, Homo sapiens
  misc_RNA (1)...(19): siRNA sense strand
acuuagaaggcuuuagaaa

SEQ ID NO: 2652696 - RNA, 19 nt, Homo sapiens
  misc_RNA (1)...(19): siRNA sense strand
ucacauugaucaaagggaa

SEQ ID NO: 2652697 - RNA, 19 nt, Homo sapiens
  misc_RNA (1)...(19): siRNA sense strand
ggaaauaggaagcagaagu

SEQ ID NO: 2652698 - RNA, 19 nt, Homo sapiens
  misc_RNA (1)...(19): siRNA sense strand
ggaccauaaugcaagagaa

SEQ ID NO: 2652699 - RNA, 19 nt, Homo sapiens
  misc_RNA (1)...(19): siRNA sense strand
gaaaauaugggaugugaaa

SEQ ID NO: 2652700 - RNA, 19 nt, Homo sapiens
  misc_RNA (1)...(19): siRNA sense strand
ggaacuagauggaaagaug

SEQ ID NO: 2652701 - RNA, 19 nt, Homo sapiens
  misc_RNA (1)...(19): siRNA sense strand
gaaaggaccagcuaaguua

SEQ ID NO: 2652702 - RNA, 19 nt, Homo sapiens
  misc_RNA (1)...(19): siRNA sense strand
uagagaagggacaaagaaa

SEQ ID NO: 2652703 - RNA, 19 nt, Homo sapiens
  misc_RNA (1)...(19): siRNA sense strand
cuggcaaaguuaagaguga

SEQ ID NO: 2652704 - RNA, 19 nt, Homo sapiens
  misc_RNA (1)...(19): siRNA sense strand
agaggaaacagcugugaua

SEQ ID NO: 2652705 - RNA, 19 nt, Homo sapiens
  misc_RNA (1)...(19): siRNA sense strand
ccuugaaucuaauggaaaa

SEQ ID NO: 2652706 - RNA, 19 nt, Homo sapiens
  misc_RNA (1)...(19): siRNA sense strand
cugaaauguuugcagaauu

SEQ ID NO: 2652707 - RNA, 19 nt, Homo sapiens
  misc_RNA (1)...(19): siRNA sense strand
aaggaaagauuuagagaag

SEQ ID NO: 2652708 - RNA, 19 nt, Homo sapiens
  misc_RNA (1)...(19): siRNA sense strand
gaccauauaugaagaugaa

SEQ ID NO: 2652709 - RNA, 19 nt, Homo sapiens
  misc_RNA (1)...(19): siRNA sense strand
aagaaaagauuuaggacga

SEQ ID NO: 2652710 - RNA, 19 nt, Homo sapiens
  misc_RNA (1)...(19): siRNA sense strand
augaaaugaagcaggaaau

SEQ ID NO: 2652711 - RNA, 19 nt, Homo sapiens
  misc_RNA (1)...(19): siRNA sense strand
cgauggaaaugguacagua

SEQ ID NO: 2652712 - RNA, 19 nt, Homo sapiens
  misc_RNA (1)...(19): siRNA sense strand
cuaccaaaggcuuguuaaa

SEQ ID NO: 2652713 - RNA, 19 nt, Homo sapiens
  misc_RNA (1)...(19): siRNA sense strand
gaaagcuauugaacagaaa

SEQ ID NO: 2652714 - RNA, 19 nt, Homo sapiens
  misc_RNA (1)...(19): siRNA sense strand
ucaaagaugagcagcgauu

SEQ ID NO: 2652715 - RNA, 19 nt, Homo sapiens
  misc_RNA (1)...(19): siRNA sense strand
aaagagaauccaaagcaaa

SEQ ID NO: 2652716 - RNA, 19 nt, Homo sapiens
  misc_RNA (1)...(19): siRNA sense strand
cagcagaucugaugggugu

SEQ ID NO: 2652717 - RNA, 19 nt, Homo sapiens
  misc_RNA (1)...(19): siRNA sense strand
aaacauuucaagugagaga

SEQ ID NO: 2652718 - RNA, 19 nt, Homo sapiens
  misc_RNA (1)...(19): siRNA sense strand
ggguaaagugcauggugau

SEQ ID NO: 2652719 - RNA, 19 nt, Homo sapiens
  misc_RNA (1)...(19): siRNA sense strand
ccagucagaugaacagaaa

SEQ ID NO: 2652720 - RNA, 19 nt, Homo sapiens
  misc_RNA (1)...(19): siRNA sense strand
gauggaaaugguacaguaa

SEQ ID NO: 2652721 - RNA, 19 nt, Homo sapiens
  misc_RNA (1)...(19): siRNA sense strand
guuggaaaccuaugagaga

SEQ ID NO: 2652722 - RNA, 19 nt, Homo sapiens
  misc_RNA (1)...(19): siRNA sense strand
gguaaagugcauggugaua

SEQ ID NO: 2652723 - RNA, 19 nt, Homo sapiens
  misc_RNA (1)...(19): siRNA sense strand
agaaaagaacucaggaauu

SEQ ID NO: 2652724 - RNA, 19 nt, Homo sapiens
  misc_RNA (1)...(19): siRNA sense strand
gaaaagaacucaggaauuu

SEQ ID NO: 2652725 - RNA, 19 nt, Homo sapiens
  misc_RNA (1)...(19): siRNA sense strand
acggauacauauagauuga

SEQ ID NO: 2652726 - RNA, 19 nt, Homo sapiens
  misc_RNA (1)...(19): siRNA sense strand
ccaaaggcuuguuaaauga

SEQ ID NO: 2652727 - RNA, 19 nt, Homo sapiens
  misc_RNA (1)...(19): siRNA sense strand
ugaugaugcaaaugugaaa

SEQ ID NO: 2652728 - RNA, 19 nt, Homo sapiens
  misc_RNA (1)...(19): siRNA sense strand
gaaagagauuggaacuaga

SEQ ID NO: 2652729 - RNA, 19 nt, Homo sapiens
  misc_RNA (1)...(19): siRNA sense strand
cagaaauuuccaacugaua

SEQ ID NO: 2652730 - RNA, 19 nt, Homo sapiens
  misc_RNA (1)...(19): siRNA sense strand
gcagagagaaaaucagaaa

SEQ ID NO: 2652731 - RNA, 19 nt, Homo sapiens
  misc_RNA (1)...(19): siRNA sense strand
uaucagugguguuaaagaa

SEQ ID NO: 2652732 - RNA, 19 nt, Homo sapiens
  misc_RNA (1)...(19): siRNA sense strand
ggaauuuggaagcaggcua

SEQ ID NO: 2652733 - RNA, 19 nt, Homo sapiens
  misc_RNA (1)...(19): siRNA sense strand
ccuaguaacuguggccaaa

SEQ ID NO: 2652734 - RNA, 19 nt, Homo sapiens
  misc_RNA (1)...(19): siRNA sense strand
gugaaagagauuggaacua

SEQ ID NO: 2652735 - RNA, 19 nt, Homo sapiens
  misc_RNA (1)...(19): siRNA sense strand
cacauugaucaaagggaaa

SEQ ID NO: 2652736 - RNA, 19 nt, Homo sapiens
  misc_RNA (1)...(19): siRNA sense strand
aaagacauuuccagagaau

SEQ ID NO: 2652737 - RNA, 19 nt, Homo sapiens
  misc_RNA (1)...(19): siRNA sense strand
agagaaaauaacuggcaaa

SEQ ID NO: 2652738 - RNA, 19 nt, Homo sapiens
  misc_RNA (1)...(19): siRNA sense strand
cuuagaaggcuuuagaaaa

SEQ ID NO: 2652739 - RNA, 19 nt, Homo sapiens
  misc_RNA (1)...(19): siRNA sense strand
gaaauaggaagcagaaguu

SEQ ID NO: 2652740 - RNA, 19 nt, Homo sapiens
  misc_RNA (1)...(19): siRNA sense strand
acagagguguuuaaagcua

SEQ ID NO: 2652741 - RNA, 19 nt, Homo sapiens
  misc_RNA (1)...(19): siRNA sense strand
augcaaaugugaaagagau

SEQ ID NO: 2652742 - RNA, 19 nt, Homo sapiens
  misc_RNA (1)...(19): siRNA sense strand
gggagaugccuguauauuu

SEQ ID NO: 2652743 - RNA, 19 nt, Homo sapiens
  misc_RNA (1)...(19): siRNA sense strand
gcuuuaaaccugaaauguu

SEQ ID NO: 2652744 - RNA, 19 nt, Homo sapiens
  misc_RNA (1)...(19): siRNA sense strand
agagaagggacaaagaaaa

SEQ ID NO: 2652745 - RNA, 19 nt, Homo sapiens
  misc_RNA (1)...(19): siRNA sense strand
ggcuauaaaucucaugaau

SEQ ID NO: 2652746 - RNA, 19 nt, Homo sapiens
  misc_RNA (1)...(19): siRNA sense strand
ccaccaaagaaauaugcua

SEQ ID NO: 2652747 - RNA, 19 nt, Homo sapiens
  misc_RNA (1)...(19): siRNA sense strand
gcuacaagcagcaaauaca

SEQ ID NO: 2652748 - RNA, 19 nt, Homo sapiens
  misc_RNA (1)...(19): siRNA sense strand
guuaagucacauugaucaa

SEQ ID NO: 2652749 - RNA, 19 nt, Homo sapiens
  misc_RNA (1)...(19): siRNA sense strand
caagcaaccuaaauaaaga

SEQ ID NO: 2652750 - RNA, 19 nt, Homo sapiens
  misc_RNA (1)...(19): siRNA sense strand
agauuuaggacgacauaga

SEQ ID NO: 2652751 - RNA, 19 nt, Homo sapiens
  misc_RNA (1)...(19): siRNA sense strand
ugugauagcagcaguaaaa

SEQ ID NO: 2652752 - RNA, 19 nt, Homo sapiens
  misc_RNA (1)...(19): siRNA sense strand
gcaggaaauaggaagcaga

SEQ ID NO: 2652753 - RNA, 19 nt, Homo sapiens
  misc_RNA (1)...(19): siRNA sense strand
caggaaauaggaagcagaa

SEQ ID NO: 2652754 - RNA, 19 nt, Homo sapiens
  misc_RNA (1)...(19): siRNA sense strand
aggguaaagugcaugguga

SEQ ID NO: 2652755 - RNA, 19 nt, Homo sapiens
  misc_RNA (1)...(19): siRNA sense strand
caaccuaaauaaagaacgu

SEQ ID NO: 2652756 - RNA, 19 nt, Homo sapiens
  misc_RNA (1)...(19): siRNA sense strand
aaguacagcuucagaacca

SEQ ID NO: 2652757 - RNA, 19 nt, Homo sapiens
  misc_RNA (1)...(19): siRNA sense strand
gauagcugcaugacggaua

SEQ ID NO: 2652758 - RNA, 19 nt, Homo sapiens
  misc_RNA (1)...(19): siRNA sense strand
aaugaauugcccagagauu

SEQ ID NO: 2652759 - RNA, 19 nt, Homo sapiens
  misc_RNA (1)...(19): siRNA sense strand
gaaagauguugucuccaaa

SEQ ID NO: 2652760 - RNA, 19 nt, Homo sapiens
  misc_RNA (1)...(19): siRNA sense strand
gaaugugcucugaaagcua

SEQ ID NO: 2652761 - RNA, 19 nt, Homo sapiens
  misc_RNA (1)...(19): siRNA sense strand
ugaaaugaagcaggaaaua

SEQ ID NO: 2652762 - RNA, 19 nt, Homo sapiens
  misc_RNA (1)...(19): siRNA sense strand
guaaagugcauggugauaa

SEQ ID NO: 2652763 - RNA, 19 nt, Homo sapiens
  misc_RNA (1)...(19): siRNA sense strand
uaaagugcauggugauaau

SEQ ID NO: 2652764 - RNA, 19 nt, Homo sapiens
  misc_RNA (1)...(19): siRNA sense strand
ccagaaucacauuuacaaa

SEQ ID NO: 2652765 - RNA, 19 nt, Homo sapiens
  misc_RNA (1)...(19): siRNA sense strand
aaguaaagaagguggucaa

SEQ ID NO: 2652766 - RNA, 19 nt, Homo sapiens
  misc_RNA (1)...(19): siRNA sense strand
aagucacacuggagagaaa

SEQ ID NO: 2652767 - RNA, 19 nt, Homo sapiens
  misc_RNA (1)...(19): siRNA sense strand
gagagaaacccuaugagaa

SEQ ID NO: 2652768 - RNA, 19 nt, Homo sapiens
  misc_RNA (1)...(19): siRNA sense strand
ccaaaugaauaucaggaau

SEQ ID NO: 2652769 - RNA, 19 nt, Homo sapiens
  misc_RNA (1)...(19): siRNA sense strand
auguaaggugugugggaaa

SEQ ID NO: 2652770 - RNA, 19 nt, Homo sapiens
  misc_RNA (1)...(19): siRNA sense strand
augcaagcaaugugggaaa

SEQ ID NO: 2652771 - RNA, 19 nt, Homo sapiens
  misc_RNA (1)...(19): siRNA sense strand
auguaaggugugugggaaa

SEQ ID NO: 2652772 - RNA, 19 nt, Homo sapiens
  misc_RNA (1)...(19): siRNA sense strand
gacccacacuggagagaaa

SEQ ID NO: 2652773 - RNA, 19 nt, Homo sapiens
  misc_RNA (1)...(19): siRNA sense strand
gaauguaaacagugcggua

SEQ ID NO: 2652774 - RNA, 19 nt, Homo sapiens
  misc_RNA (1)...(19): siRNA sense strand
ggaguaaaaccgugugaaa

SEQ ID NO: 2652775 - RNA, 19 nt, Homo sapiens
  misc_RNA (1)...(19): siRNA sense strand
auguaagcaaugugggaaa

SEQ ID NO: 2652776 - RNA, 19 nt, Homo sapiens
  misc_RNA (1)...(19): siRNA sense strand
uguaaggaauguggagaaa

SEQ ID NO: 2652777 - RNA, 19 nt, Homo sapiens
  misc_RNA (1)...(19): siRNA sense strand
augcaagcagugugggaaa

SEQ ID NO: 2652778 - RNA, 19 nt, Homo sapiens
  misc_RNA (1)...(19): siRNA sense strand
uuguaagcaaugugggaaa

SEQ ID NO: 2652779 - RNA, 19 nt, Homo sapiens
  misc_RNA (1)...(19): siRNA sense strand
ggagauaaacccuaugaau

SEQ ID NO: 2652780 - RNA, 19 nt, Homo sapiens
  misc_RNA (1)...(19): siRNA sense strand
agaagguggucaaggugaa

SEQ ID NO: 2652781 - RNA, 19 nt, Homo sapiens
  misc_RNA (1)...(19): siRNA sense strand
agacacauguuaacgcaua

SEQ ID NO: 2652782 - RNA, 19 nt, Homo sapiens
  misc_RNA (1)...(19): siRNA sense strand
ugauaaagcacacuggcaa

SEQ ID NO: 2652783 - RNA, 19 nt, Homo sapiens
  misc_RNA (1)...(19): siRNA sense strand
agggaugugaugcgggaaa

SEQ ID NO: 2652784 - RNA, 19 nt, Homo sapiens
  misc_RNA (1)...(19): siRNA sense strand
guggacgagccuugaguua

SEQ ID NO: 2652785 - RNA, 19 nt, Homo sapiens
  misc_RNA (1)...(19): siRNA sense strand
gacucacacuggagauaaa

SEQ ID NO: 2652786 - RNA, 19 nt, Homo sapiens
  misc_RNA (1)...(19): siRNA sense strand
gauaaagcacacuggcaau

SEQ ID NO: 2652787 - RNA, 19 nt, Homo sapiens
  misc_RNA (1)...(19): siRNA sense strand
uggcaauggaccuuauaaa

SEQ ID NO: 2652788 - RNA, 19 nt, Homo sapiens
  misc_RNA (1)...(19): siRNA sense strand
gggaaagccuucagucgau

SEQ ID NO: 2652789 - RNA, 19 nt, Homo sapiens
  misc_RNA (1)...(19): siRNA sense strand
uuguaaggaauguggagaa

SEQ ID NO: 2652790 - RNA, 19 nt, Homo sapiens
  misc_RNA (1)...(19): siRNA sense strand
gggaagaccagaacauuga

SEQ ID NO: 2652791 - RNA, 19 nt, Homo sapiens
  misc_RNA (1)...(19): siRNA sense strand
ccuuaugaaugcaagcaau

SEQ ID NO: 2652792 - RNA, 19 nt, Homo sapiens
  misc_RNA (1)...(19): siRNA sense strand
auguaaacagugcgguaaa

SEQ ID NO: 2652793 - RNA, 19 nt, Homo sapiens
  misc_RNA (1)...(19): siRNA sense strand
gacucacaccggagagaaa

SEQ ID NO: 2652794 - RNA, 19 nt, Homo sapiens
  misc_RNA (1)...(19): siRNA sense strand
cccuaugauuguaaggaau

SEQ ID NO: 2652795 - RNA, 19 nt, Homo sapiens
  misc_RNA (1)...(19): siRNA sense strand
ggaggaaagcccuaugauu

SEQ ID NO: 2652796 - RNA, 19 nt, Homo sapiens
  misc_RNA (1)...(19): siRNA sense strand
aacucacacuggagagaaa

SEQ ID NO: 2652797 - RNA, 19 nt, Homo sapiens
  misc_RNA (1)...(19): siRNA sense strand
ggagagaaacccuaugaga

SEQ ID NO: 2652798 - RNA, 19 nt, Homo sapiens
  misc_RNA (1)...(19): siRNA sense strand
caggagaaauauaagucau

SEQ ID NO: 2652799 - RNA, 19 nt, Homo sapiens
  misc_RNA (1)...(19): siRNA sense strand
agaagaaucucuacaggga

SEQ ID NO: 2652800 - RNA, 19 nt, Homo sapiens
  misc_RNA (1)...(19): siRNA sense strand
aagucauauuccagagaga

SEQ ID NO: 2652801 - RNA, 19 nt, Homo sapiens
  misc_RNA (1)...(19): siRNA sense strand
aagcaguguguguggagaa

SEQ ID NO: 2652802 - RNA, 19 nt, Homo sapiens
  misc_RNA (1)...(19): siRNA sense strand
gaauauggaaagaagucau

SEQ ID NO: 2652803 - RNA, 19 nt, Homo sapiens
  misc_RNA (1)...(19): siRNA sense strand
ggaaagaagucauauacac

SEQ ID NO: 2652804 - RNA, 19 nt, Homo sapiens
  misc_RNA (1)...(19): siRNA sense strand
gcccuaugauuguaaggaa

SEQ ID NO: 2652805 - RNA, 19 nt, Homo sapiens
  misc_RNA (1)...(19): siRNA sense strand
agagaaacccuaugagaac

SEQ ID NO: 2652806 - RNA, 19 nt, Homo sapiens
  misc_RNA (1)...(19): siRNA sense strand
acgugaaccaaaugaauau

SEQ ID NO: 2652807 - RNA, 19 nt, Homo sapiens
  misc_RNA (1)...(19): siRNA sense strand
uguuagaagacacaugaua

SEQ ID NO: 2652808 - RNA, 19 nt, Homo sapiens
  misc_RNA (1)...(19): siRNA sense strand
ggacgugaaccaaaugaau

SEQ ID NO: 2652809 - RNA, 19 nt, Homo sapiens
  misc_RNA (1)...(19): siRNA sense strand
caguguguguggagaaguu

SEQ ID NO: 2652810 - RNA, 19 nt, Homo sapiens
  misc_RNA (1)...(19): siRNA sense strand
uagaauacaugaaaggacu

SEQ ID NO: 2652811 - RNA, 19 nt, Homo sapiens
  misc_RNA (1)...(19): siRNA sense strand
gagauaaacccuaugaaug

SEQ ID NO: 2652812 - RNA, 19 nt, Homo sapiens
  misc_RNA (1)...(19): siRNA sense strand
auguacaaaaugugggaaa

SEQ ID NO: 2652813 - RNA, 19 nt, Homo sapiens
  misc_RNA (1)...(19): siRNA sense strand
cugugaaaguaaagaaggu

SEQ ID NO: 2652814 - RNA, 19 nt, Homo sapiens
  misc_RNA (1)...(19): siRNA sense strand
ccagauuccagaugguauu

SEQ ID NO: 2652815 - RNA, 19 nt, Homo sapiens
  misc_RNA (1)...(19): siRNA sense strand
gagacucugugaaaguaaa

SEQ ID NO: 2652816 - RNA, 19 nt, Homo sapiens
  misc_RNA (1)...(19): siRNA sense strand
gaggaaagcccuaugauug

SEQ ID NO: 2652817 - RNA, 19 nt, Homo sapiens
  misc_RNA (1)...(19): siRNA sense strand
aggauguggcugugaacuu

SEQ ID NO: 2652818 - RNA, 19 nt, Homo sapiens
  misc_RNA (1)...(19): siRNA sense strand
cuuccgaauccaugaaaga

SEQ ID NO: 2652819 - RNA, 19 nt, Homo sapiens
  misc_RNA (1)...(19): siRNA sense strand
gaauguaagcaauguggga

SEQ ID NO: 2652820 - RNA, 19 nt, Homo sapiens
  misc_RNA (1)...(19): siRNA sense strand
gugugaaagcagugugugu

SEQ ID NO: 2652821 - RNA, 19 nt, Homo sapiens
  misc_RNA (1)...(19): siRNA sense strand
ggacgagccuugaguuauc

SEQ ID NO: 2652822 - RNA, 19 nt, Homo sapiens
  misc_RNA (1)...(19): siRNA sense strand
cgggaaaccuucaggaacc

SEQ ID NO: 2652823 - RNA, 19 nt, Homo sapiens
  misc_RNA (1)...(19): siRNA sense strand
gacgugaaccaaaugaaua

SEQ ID NO: 2652824 - RNA, 19 nt, Homo sapiens
  misc_RNA (1)...(19): siRNA sense strand
auucgaagacacauguuaa

SEQ ID NO: 2652825 - RNA, 19 nt, Homo sapiens
  misc_RNA (1)...(19): siRNA sense strand
ucguauacaugaaagaagu

SEQ ID NO: 2652826 - RNA, 19 nt, Homo sapiens
  misc_RNA (1)...(19): siRNA sense strand
agagaaacccuaugauugu

SEQ ID NO: 2652827 - RNA, 19 nt, Homo sapiens
  misc_RNA (1)...(19): siRNA sense strand
cccuaugaauguaagcaau

SEQ ID NO: 2652828 - RNA, 19 nt, Homo sapiens
  misc_RNA (1)...(19): siRNA sense strand
aggaaugcgggaaggcuuu

SEQ ID NO: 2652829 - RNA, 19 nt, Homo sapiens
  misc_RNA (1)...(19): siRNA sense strand
ggcaauggaccuuauaaau

SEQ ID NO: 2652830 - RNA, 19 nt, Homo sapiens
  misc_RNA (1)...(19): siRNA sense strand
acccuaugauuguaagcaa

SEQ ID NO: 2652831 - RNA, 19 nt, Homo sapiens
  misc_RNA (1)...(19): siRNA sense strand
ccagaacauugaagaccca

SEQ ID NO: 2652832 - RNA, 19 nt, Homo sapiens
  misc_RNA (1)...(19): siRNA sense strand
aacucacacaggagagaaa

SEQ ID NO: 2652833 - RNA, 19 nt, Homo sapiens
  misc_RNA (1)...(19): siRNA sense strand
aagaagucauauacacgua

SEQ ID NO: 2652834 - RNA, 19 nt, Homo sapiens
  misc_RNA (1)...(19): siRNA sense strand
uaaagaagguggucaaggu

SEQ ID NO: 2652835 - RNA, 19 nt, Homo sapiens
  misc_RNA (1)...(19): siRNA sense strand
gaauguaaggaaugcggga

SEQ ID NO: 2652836 - RNA, 19 nt, Homo sapiens
  misc_RNA (1)...(19): siRNA sense strand
aaguaaagaagguggucaa

SEQ ID NO: 2652837 - RNA, 19 nt, Homo sapiens
  misc_RNA (1)...(19): siRNA sense strand
aagucacacuggagagaaa

SEQ ID NO: 2652838 - RNA, 19 nt, Homo sapiens
  misc_RNA (1)...(19): siRNA sense strand
gagagaaacccuaugagaa

SEQ ID NO: 2652839 - RNA, 19 nt, Homo sapiens
  misc_RNA (1)...(19): siRNA sense strand
ccaaaugaauaucaggaau

SEQ ID NO: 2652840 - RNA, 19 nt, Homo sapiens
  misc_RNA (1)...(19): siRNA sense strand
auguaaggugugugggaaa

SEQ ID NO: 2652841 - RNA, 19 nt, Homo sapiens
  misc_RNA (1)...(19): siRNA sense strand
augcaagcaaugugggaaa

SEQ ID NO: 2652842 - RNA, 19 nt, Homo sapiens
  misc_RNA (1)...(19): siRNA sense strand
auguaaggugugugggaaa

SEQ ID NO: 2652843 - RNA, 19 nt, Homo sapiens
  misc_RNA (1)...(19): siRNA sense strand
gacccacacuggagagaaa

SEQ ID NO: 2652844 - RNA, 19 nt, Homo sapiens
  misc_RNA (1)...(19): siRNA sense strand
gaauguaaacagugcggua

SEQ ID NO: 2652845 - RNA, 19 nt, Homo sapiens
  misc_RNA (1)...(19): siRNA sense strand
ggaguaaaaccgugugaaa

SEQ ID NO: 2652846 - RNA, 19 nt, Homo sapiens
  misc_RNA (1)...(19): siRNA sense strand
auguaagcaaugugggaaa

SEQ ID NO: 2652847 - RNA, 19 nt, Homo sapiens
  misc_RNA (1)...(19): siRNA sense strand
uguaaggaauguggagaaa

SEQ ID NO: 2652848 - RNA, 19 nt, Homo sapiens
  misc_RNA (1)...(19): siRNA sense strand
augcaagcagugugggaaa

SEQ ID NO: 2652849 - RNA, 19 nt, Homo sapiens
  misc_RNA (1)...(19): siRNA sense strand
uuguaagcaaugugggaaa

SEQ ID NO: 2652850 - RNA, 19 nt, Homo sapiens
  misc_RNA (1)...(19): siRNA sense strand
ggagauaaacccuaugaau

SEQ ID NO: 2652851 - RNA, 19 nt, Homo sapiens
  misc_RNA (1)...(19): siRNA sense strand
agaagguggucaaggugaa

SEQ ID NO: 2652852 - RNA, 19 nt, Homo sapiens
  misc_RNA (1)...(19): siRNA sense strand
agacacauguuaacgcaua

SEQ ID NO: 2652853 - RNA, 19 nt, Homo sapiens
  misc_RNA (1)...(19): siRNA sense strand
ugauaaagcacacuggcaa

SEQ ID NO: 2652854 - RNA, 19 nt, Homo sapiens
  misc_RNA (1)...(19): siRNA sense strand
agggaugugaugcgggaaa

SEQ ID NO: 2652855 - RNA, 19 nt, Homo sapiens
  misc_RNA (1)...(19): siRNA sense strand
guggacgagccuugaguua

SEQ ID NO: 2652856 - RNA, 19 nt, Homo sapiens
  misc_RNA (1)...(19): siRNA sense strand
gacucacacuggagauaaa

SEQ ID NO: 2652857 - RNA, 19 nt, Homo sapiens
  misc_RNA (1)...(19): siRNA sense strand
gauaaagcacacuggcaau

SEQ ID NO: 2652858 - RNA, 19 nt, Homo sapiens
  misc_RNA (1)...(19): siRNA sense strand
uggcaauggaccuuauaaa

SEQ ID NO: 2652859 - RNA, 19 nt, Homo sapiens
  misc_RNA (1)...(19): siRNA sense strand
gggaaagccuucagucgau

SEQ ID NO: 2652860 - RNA, 19 nt, Homo sapiens
  misc_RNA (1)...(19): siRNA sense strand
uuguaaggaauguggagaa

SEQ ID NO: 2652861 - RNA, 19 nt, Homo sapiens
  misc_RNA (1)...(19): siRNA sense strand
gggaagaccagaacauuga

SEQ ID NO: 2652862 - RNA, 19 nt, Homo sapiens
  misc_RNA (1)...(19): siRNA sense strand
ccuuaugaaugcaagcaau

SEQ ID NO: 2652863 - RNA, 19 nt, Homo sapiens
  misc_RNA (1)...(19): siRNA sense strand
auguaaacagugcgguaaa

SEQ ID NO: 2652864 - RNA, 19 nt, Homo sapiens
  misc_RNA (1)...(19): siRNA sense strand
gacucacaccggagagaaa

SEQ ID NO: 2652865 - RNA, 19 nt, Homo sapiens
  misc_RNA (1)...(19): siRNA sense strand
cccuaugauuguaaggaau

SEQ ID NO: 2652866 - RNA, 19 nt, Homo sapiens
  misc_RNA (1)...(19): siRNA sense strand
ggaggaaagcccuaugauu

SEQ ID NO: 2652867 - RNA, 19 nt, Homo sapiens
  misc_RNA (1)...(19): siRNA sense strand
aacucacacuggagagaaa

SEQ ID NO: 2652868 - RNA, 19 nt, Homo sapiens
  misc_RNA (1)...(19): siRNA sense strand
ggagagaaacccuaugaga

SEQ ID NO: 2652869 - RNA, 19 nt, Homo sapiens
  misc_RNA (1)...(19): siRNA sense strand
caggagaaauauaagucau

SEQ ID NO: 2652870 - RNA, 19 nt, Homo sapiens
  misc_RNA (1)...(19): siRNA sense strand
aagucauauuccagagaga

SEQ ID NO: 2652871 - RNA, 19 nt, Homo sapiens
  misc_RNA (1)...(19): siRNA sense strand
aagcaguguguguggagaa

SEQ ID NO: 2652872 - RNA, 19 nt, Homo sapiens
  misc_RNA (1)...(19): siRNA sense strand
gaauauggaaagaagucau

SEQ ID NO: 2652873 - RNA, 19 nt, Homo sapiens
  misc_RNA (1)...(19): siRNA sense strand
ggaaagaagucauauacac

SEQ ID NO: 2652874 - RNA, 19 nt, Homo sapiens
  misc_RNA (1)...(19): siRNA sense strand
gcccuaugauuguaaggaa

SEQ ID NO: 2652875 - RNA, 19 nt, Homo sapiens
  misc_RNA (1)...(19): siRNA sense strand
agagaaacccuaugagaac

SEQ ID NO: 2652876 - RNA, 19 nt, Homo sapiens
  misc_RNA (1)...(19): siRNA sense strand
acgugaaccaaaugaauau

SEQ ID NO: 2652877 - RNA, 19 nt, Homo sapiens
  misc_RNA (1)...(19): siRNA sense strand
uguuagaagacacaugaua

SEQ ID NO: 2652878 - RNA, 19 nt, Homo sapiens
  misc_RNA (1)...(19): siRNA sense strand
ggacgugaaccaaaugaau

SEQ ID NO: 2652879 - RNA, 19 nt, Homo sapiens
  misc_RNA (1)...(19): siRNA sense strand
caguguguguggagaaguu

SEQ ID NO: 2652880 - RNA, 19 nt, Homo sapiens
  misc_RNA (1)...(19): siRNA sense strand
cuguacaggucgcgggagu

SEQ ID NO: 2652881 - RNA, 19 nt, Homo sapiens
  misc_RNA (1)...(19): siRNA sense strand
uagaauacaugaaaggacu

SEQ ID NO: 2652882 - RNA, 19 nt, Homo sapiens
  misc_RNA (1)...(19): siRNA sense strand
acaccuggaagccgagaaa

SEQ ID NO: 2652883 - RNA, 19 nt, Homo sapiens
  misc_RNA (1)...(19): siRNA sense strand
gagauaaacccuaugaaug

SEQ ID NO: 2652884 - RNA, 19 nt, Homo sapiens
  misc_RNA (1)...(19): siRNA sense strand
auguacaaaaugugggaaa

SEQ ID NO: 2652885 - RNA, 19 nt, Homo sapiens
  misc_RNA (1)...(19): siRNA sense strand
cugugaaaguaaagaaggu

SEQ ID NO: 2652886 - RNA, 19 nt, Homo sapiens
  misc_RNA (1)...(19): siRNA sense strand
ccagauuccagaugguauu

SEQ ID NO: 2652887 - RNA, 19 nt, Homo sapiens
  misc_RNA (1)...(19): siRNA sense strand
gagacucugugaaaguaaa

SEQ ID NO: 2652888 - RNA, 19 nt, Homo sapiens
  misc_RNA (1)...(19): siRNA sense strand
gaggaaagcccuaugauug

SEQ ID NO: 2652889 - RNA, 19 nt, Homo sapiens
  misc_RNA (1)...(19): siRNA sense strand
cuuccgaauccaugaaaga

SEQ ID NO: 2652890 - RNA, 19 nt, Homo sapiens
  misc_RNA (1)...(19): siRNA sense strand
aggauguggcugugaacuu

SEQ ID NO: 2652891 - RNA, 19 nt, Homo sapiens
  misc_RNA (1)...(19): siRNA sense strand
gaauguaagcaauguggga

SEQ ID NO: 2652892 - RNA, 19 nt, Homo sapiens
  misc_RNA (1)...(19): siRNA sense strand
gugugaaagcagugugugu

SEQ ID NO: 2652893 - RNA, 19 nt, Homo sapiens
  misc_RNA (1)...(19): siRNA sense strand
ggacgagccuugaguuauc

SEQ ID NO: 2652894 - RNA, 19 nt, Homo sapiens
  misc_RNA (1)...(19): siRNA sense strand
cgggaaaccuucaggaacc

SEQ ID NO: 2652895 - RNA, 19 nt, Homo sapiens
  misc_RNA (1)...(19): siRNA sense strand
gacgugaaccaaaugaaua

SEQ ID NO: 2652896 - RNA, 19 nt, Homo sapiens
  misc_RNA (1)...(19): siRNA sense strand
auucgaagacacauguuaa

SEQ ID NO: 2652897 - RNA, 19 nt, Homo sapiens
  misc_RNA (1)...(19): siRNA sense strand
ucguauacaugaaagaagu

SEQ ID NO: 2652898 - RNA, 19 nt, Homo sapiens
  misc_RNA (1)...(19): siRNA sense strand
agagaaacccuaugauugu

SEQ ID NO: 2652899 - RNA, 19 nt, Homo sapiens
  misc_RNA (1)...(19): siRNA sense strand
cccuaugaauguaagcaau

SEQ ID NO: 2652900 - RNA, 19 nt, Homo sapiens
  misc_RNA (1)...(19): siRNA sense strand
aggaaugcgggaaggcuuu

SEQ ID NO: 2652901 - RNA, 19 nt, Homo sapiens
  misc_RNA (1)...(19): siRNA sense strand
ggcaauggaccuuauaaau

SEQ ID NO: 2652902 - RNA, 19 nt, Homo sapiens
  misc_RNA (1)...(19): siRNA sense strand
acccuaugauuguaagcaa

SEQ ID NO: 2652903 - RNA, 19 nt, Homo sapiens
  misc_RNA (1)...(19): siRNA sense strand
ccagaacauugaagaccca

SEQ ID NO: 2652904 - RNA, 19 nt, Homo sapiens
  misc_RNA (1)...(19): siRNA sense strand
aacucacacaggagagaaa

SEQ ID NO: 2652905 - RNA, 19 nt, Homo sapiens
  misc_RNA (1)...(19): siRNA sense strand
aagaagucauauacacgua

SEQ ID NO: 2652906 - RNA, 19 nt, Homo sapiens
  misc_RNA (1)...(19): siRNA sense strand
uaaagaagguggucaaggu

SEQ ID NO: 2652907 - RNA, 19 nt, Homo sapiens
  misc_RNA (1)...(19): siRNA sense strand
gaauguaaggaaugcggga

SEQ ID NO: 2652908 - RNA, 19 nt, Homo sapiens
  misc_RNA (1)...(19): siRNA sense strand
aauugauacuggagagaaa

SEQ ID NO: 2652909 - RNA, 19 nt, Homo sapiens
  misc_RNA (1)...(19): siRNA sense strand
aauucauaguggagagaaa

SEQ ID NO: 2652910 - RNA, 19 nt, Homo sapiens
  misc_RNA (1)...(19): siRNA sense strand
auguaaagaauguggcaaa

SEQ ID NO: 2652911 - RNA, 19 nt, Homo sapiens
  misc_RNA (1)...(19): siRNA sense strand
gauucauacgggagagaaa

SEQ ID NO: 2652912 - RNA, 19 nt, Homo sapiens
  misc_RNA (1)...(19): siRNA sense strand
gaacauaagacaacucaua

SEQ ID NO: 2652913 - RNA, 19 nt, Homo sapiens
  misc_RNA (1)...(19): siRNA sense strand
aacucauacuagagagaaa

SEQ ID NO: 2652914 - RNA, 19 nt, Homo sapiens
  misc_RNA (1)...(19): siRNA sense strand
aacucauacuggagagaaa

SEQ ID NO: 2652915 - RNA, 19 nt, Homo sapiens
  misc_RNA (1)...(19): siRNA sense strand
aacucauacuggagagaaa

SEQ ID NO: 2652916 - RNA, 19 nt, Homo sapiens
  misc_RNA (1)...(19): siRNA sense strand
ggacagaaaccaagaacgu

SEQ ID NO: 2652917 - RNA, 19 nt, Homo sapiens
  misc_RNA (1)...(19): siRNA sense strand
gaauaaaaccucugacuau

SEQ ID NO: 2652918 - RNA, 19 nt, Homo sapiens
  misc_RNA (1)...(19): siRNA sense strand
uggccagagcagagcauaa

SEQ ID NO: 2652919 - RNA, 19 nt, Homo sapiens
  misc_RNA (1)...(19): siRNA sense strand
augugauguuagagaacua

SEQ ID NO: 2652920 - RNA, 19 nt, Homo sapiens
  misc_RNA (1)...(19): siRNA sense strand
augugaagaauguggcaaa

SEQ ID NO: 2652921 - RNA, 19 nt, Homo sapiens
  misc_RNA (1)...(19): siRNA sense strand
augugaagaauguggcaaa

SEQ ID NO: 2652922 - RNA, 19 nt, Homo sapiens
  misc_RNA (1)...(19): siRNA sense strand
augugaagaauguggcaaa

SEQ ID NO: 2652923 - RNA, 19 nt, Homo sapiens
  misc_RNA (1)...(19): siRNA sense strand
augugaagaauguggcaaa

SEQ ID NO: 2652924 - RNA, 19 nt, Homo sapiens
  misc_RNA (1)...(19): siRNA sense strand
augugaagaauguggcaaa

SEQ ID NO: 2652925 - RNA, 19 nt, Homo sapiens
  misc_RNA (1)...(19): siRNA sense strand
aaacauaggagaacucaua

SEQ ID NO: 2652926 - RNA, 19 nt, Homo sapiens
  misc_RNA (1)...(19): siRNA sense strand
gugugauaaauguggcaaa

SEQ ID NO: 2652927 - RNA, 19 nt, Homo sapiens
  misc_RNA (1)...(19): siRNA sense strand
ccuuagaagccuagaaaug

SEQ ID NO: 2652928 - RNA, 19 nt, Homo sapiens
  misc_RNA (1)...(19): siRNA sense strand
uugugaagaauguggcaaa

SEQ ID NO: 2652929 - RNA, 19 nt, Homo sapiens
  misc_RNA (1)...(19): siRNA sense strand
ccucaaaucuaacugaaca

SEQ ID NO: 2652930 - RNA, 19 nt, Homo sapiens
  misc_RNA (1)...(19): siRNA sense strand
acaacuacccagagcaaaa

SEQ ID NO: 2652931 - RNA, 19 nt, Homo sapiens
  misc_RNA (1)...(19): siRNA sense strand
aaaccguacacgugugaua

SEQ ID NO: 2652932 - RNA, 19 nt, Homo sapiens
  misc_RNA (1)...(19): siRNA sense strand
gagauguggcuguagaauu

SEQ ID NO: 2652933 - RNA, 19 nt, Homo sapiens
  misc_RNA (1)...(19): siRNA sense strand
ugacaacuacccagagcaa

SEQ ID NO: 2652934 - RNA, 19 nt, Homo sapiens
  misc_RNA (1)...(19): siRNA sense strand
cagaauuuauauagggaug

SEQ ID NO: 2652935 - RNA, 19 nt, Homo sapiens
  misc_RNA (1)...(19): siRNA sense strand
gguaaauaugugaaagucu

SEQ ID NO: 2652936 - RNA, 19 nt, Homo sapiens
  misc_RNA (1)...(19): siRNA sense strand
uguuagagaacuacagaca

SEQ ID NO: 2652937 - RNA, 19 nt, Homo sapiens
  misc_RNA (1)...(19): siRNA sense strand
agaauguggcaaagcguau

SEQ ID NO: 2652938 - RNA, 19 nt, Homo sapiens
  misc_RNA (1)...(19): siRNA sense strand
acagaaaccaagaacguga

SEQ ID NO: 2652939 - RNA, 19 nt, Homo sapiens
  misc_RNA (1)...(19): siRNA sense strand
cugucuggagcaaggaaua

SEQ ID NO: 2652940 - RNA, 19 nt, Homo sapiens
  misc_RNA (1)...(19): siRNA sense strand
ugaagagacaugagaugau

SEQ ID NO: 2652941 - RNA, 19 nt, Homo sapiens
  misc_RNA (1)...(19): siRNA sense strand
ugacaaagcuuuuaaccau

SEQ ID NO: 2652942 - RNA, 19 nt, Homo sapiens
  misc_RNA (1)...(19): siRNA sense strand
guaaacaugagaagauuca

SEQ ID NO: 2652943 - RNA, 19 nt, Homo sapiens
  misc_RNA (1)...(19): siRNA sense strand
gcugugaaaguguggauga

SEQ ID NO: 2652944 - RNA, 19 nt, Homo sapiens
  misc_RNA (1)...(19): siRNA sense strand
gugguaaauaugugaaagu

SEQ ID NO: 2652945 - RNA, 19 nt, Homo sapiens
  misc_RNA (1)...(19): siRNA sense strand
ccauacaaaugugaagaau

SEQ ID NO: 2652946 - RNA, 19 nt, Homo sapiens
  misc_RNA (1)...(19): siRNA sense strand
agagagaaacccuacaaau

SEQ ID NO: 2652947 - RNA, 19 nt, Homo sapiens
  misc_RNA (1)...(19): siRNA sense strand
ccauacaaaugugaagaau

SEQ ID NO: 2652948 - RNA, 19 nt, Homo sapiens
  misc_RNA (1)...(19): siRNA sense strand
cuaacugaacauaagacaa

SEQ ID NO: 2652949 - RNA, 19 nt, Homo sapiens
  misc_RNA (1)...(19): siRNA sense strand
agauguggcuguagaauuc

SEQ ID NO: 2652950 - RNA, 19 nt, Homo sapiens
  misc_RNA (1)...(19): siRNA sense strand
ggaauaaaaccucugacua

SEQ ID NO: 2652951 - RNA, 19 nt, Homo sapiens
  misc_RNA (1)...(19): siRNA sense strand
cugcaggccuccauaaaca

SEQ ID NO: 2652952 - RNA, 19 nt, Homo sapiens
  misc_RNA (1)...(19): siRNA sense strand
aaguacuucucuagcuuua

SEQ ID NO: 2652953 - RNA, 19 nt, Homo sapiens
  misc_RNA (1)...(19): siRNA sense strand
gggagagaaacccuacaaa

SEQ ID NO: 2652954 - RNA, 19 nt, Homo sapiens
  misc_RNA (1)...(19): siRNA sense strand
uggagagaaaccauacaaa

SEQ ID NO: 2652955 - RNA, 19 nt, Homo sapiens
  misc_RNA (1)...(19): siRNA sense strand
uggagagaaaccauacaaa

SEQ ID NO: 2652956 - RNA, 19 nt, Homo sapiens
  misc_RNA (1)...(19): siRNA sense strand
cauccucgauccuuaguaa

SEQ ID NO: 2652957 - RNA, 19 nt, Homo sapiens
  misc_RNA (1)...(19): siRNA sense strand
ggaugugauguuagagaac

SEQ ID NO: 2652958 - RNA, 19 nt, Homo sapiens
  misc_RNA (1)...(19): siRNA sense strand
ccauaaacauaggagaacu

SEQ ID NO: 2652959 - RNA, 19 nt, Homo sapiens
  misc_RNA (1)...(19): siRNA sense strand
gcguauacuacauccucaa

SEQ ID NO: 2652960 - RNA, 19 nt, Homo sapiens
  misc_RNA (1)...(19): siRNA sense strand
gagaauucauauuggacag

SEQ ID NO: 2652961 - RNA, 19 nt, Homo sapiens
  misc_RNA (1)...(19): siRNA sense strand
acaugagaugauugccaaa

SEQ ID NO: 2652962 - RNA, 19 nt, Homo sapiens
  misc_RNA (1)...(19): siRNA sense strand
ggacauggcaauuuacacu

SEQ ID NO: 2652963 - RNA, 19 nt, Homo sapiens
  misc_RNA (1)...(19): siRNA sense strand
gcaacucuuucuucacaua

SEQ ID NO: 2652964 - RNA, 19 nt, Homo sapiens
  misc_RNA (1)...(19): siRNA sense strand
ggcaaagcguauacuacau

SEQ ID NO: 2652965 - RNA, 19 nt, Homo sapiens
  misc_RNA (1)...(19): siRNA sense strand
uggcaaagcguauacuaca

SEQ ID NO: 2652966 - RNA, 19 nt, Homo sapiens
  misc_RNA (1)...(19): siRNA sense strand
aagcaauacugcagagaaa

SEQ ID NO: 2652967 - RNA, 19 nt, Homo sapiens
  misc_RNA (1)...(19): siRNA sense strand
cuguaaagaaugugguaaa

SEQ ID NO: 2652968 - RNA, 19 nt, Homo sapiens
  misc_RNA (1)...(19): siRNA sense strand
auguaaagagugugggaaa

SEQ ID NO: 2652969 - RNA, 19 nt, Homo sapiens
  misc_RNA (1)...(19): siRNA sense strand
caagagaaauugugugaau

SEQ ID NO: 2652970 - RNA, 19 nt, Homo sapiens
  misc_RNA (1)...(19): siRNA sense strand
gagaaaagccauaugaaua

SEQ ID NO: 2652971 - RNA, 19 nt, Homo sapiens
  misc_RNA (1)...(19): siRNA sense strand
gggaaagccuucaguaauu

SEQ ID NO: 2652972 - RNA, 19 nt, Homo sapiens
  misc_RNA (1)...(19): siRNA sense strand
gaggauaaucagaguggaa

SEQ ID NO: 2652973 - RNA, 19 nt, Homo sapiens
  misc_RNA (1)...(19): siRNA sense strand
ggaaaagccuuaagaaaga

SEQ ID NO: 2652974 - RNA, 19 nt, Homo sapiens
  misc_RNA (1)...(19): siRNA sense strand
auguaaggaaugugggaaa

SEQ ID NO: 2652975 - RNA, 19 nt, Homo sapiens
  misc_RNA (1)...(19): siRNA sense strand
ccuuauaggacauggaaga

SEQ ID NO: 2652976 - RNA, 19 nt, Homo sapiens
  misc_RNA (1)...(19): siRNA sense strand
ggaaagaagcccuauguau

SEQ ID NO: 2652977 - RNA, 19 nt, Homo sapiens
  misc_RNA (1)...(19): siRNA sense strand
ggauaaucagaguggaaaa

SEQ ID NO: 2652978 - RNA, 19 nt, Homo sapiens
  misc_RNA (1)...(19): siRNA sense strand
guggaaaagccuuaagaaa

SEQ ID NO: 2652979 - RNA, 19 nt, Homo sapiens
  misc_RNA (1)...(19): siRNA sense strand
ugcaaagacuguuggagaa

SEQ ID NO: 2652980 - RNA, 19 nt, Homo sapiens
  misc_RNA (1)...(19): siRNA sense strand
gaguacaauuggagagaag

SEQ ID NO: 2652981 - RNA, 19 nt, Homo sapiens
  misc_RNA (1)...(19): siRNA sense strand
gcgaauucacacuggagaa

SEQ ID NO: 2652982 - RNA, 19 nt, Homo sapiens
  misc_RNA (1)...(19): siRNA sense strand
augugauguuggagaacua

SEQ ID NO: 2652983 - RNA, 19 nt, Homo sapiens
  misc_RNA (1)...(19): siRNA sense strand
gaaauugugugaaugcaaa

SEQ ID NO: 2652984 - RNA, 19 nt, Homo sapiens
  misc_RNA (1)...(19): siRNA sense strand
augcaaagacuguuggaga

SEQ ID NO: 2652985 - RNA, 19 nt, Homo sapiens
  misc_RNA (1)...(19): siRNA sense strand
caggaguucugcaggaauu

SEQ ID NO: 2652986 - RNA, 19 nt, Homo sapiens
  misc_RNA (1)...(19): siRNA sense strand
gaauaaaacucacacacaa

SEQ ID NO: 2652987 - RNA, 19 nt, Homo sapiens
  misc_RNA (1)...(19): siRNA sense strand
gauuggaacaaauggaaga

SEQ ID NO: 2652988 - RNA, 19 nt, Homo sapiens
  misc_RNA (1)...(19): siRNA sense strand
ugguaaagcuuucacucaa

SEQ ID NO: 2652989 - RNA, 19 nt, Homo sapiens
  misc_RNA (1)...(19): siRNA sense strand
gggaaagccuucacccauu

SEQ ID NO: 2652990 - RNA, 19 nt, Homo sapiens
  misc_RNA (1)...(19): siRNA sense strand
agaaauugugugaaugcaa

SEQ ID NO: 2652991 - RNA, 19 nt, Homo sapiens
  misc_RNA (1)...(19): siRNA sense strand
gcugaggacaggagugaca

SEQ ID NO: 2652992 - RNA, 19 nt, Homo sapiens
  misc_RNA (1)...(19): siRNA sense strand
ccacaggacuuaaauuaca

SEQ ID NO: 2652993 - RNA, 19 nt, Homo sapiens
  misc_RNA (1)...(19): siRNA sense strand
ggacaggagugacaggagu

SEQ ID NO: 2652994 - RNA, 19 nt, Homo sapiens
  misc_RNA (1)...(19): siRNA sense strand
uauaggacauggaagaauu

SEQ ID NO: 2652995 - RNA, 19 nt, Homo sapiens
  misc_RNA (1)...(19): siRNA sense strand
guacaauuggagagaagca

SEQ ID NO: 2652996 - RNA, 19 nt, Homo sapiens
  misc_RNA (1)...(19): siRNA sense strand
ccucacaccuuauaggaca

SEQ ID NO: 2652997 - RNA, 19 nt, Homo sapiens
  misc_RNA (1)...(19): siRNA sense strand
gguaaagcuuucacucaau

SEQ ID NO: 2652998 - RNA, 19 nt, Homo sapiens
  misc_RNA (1)...(19): siRNA sense strand
auguauggaauguggaaaa

SEQ ID NO: 2652999 - RNA, 19 nt, Homo sapiens
  misc_RNA (1)...(19): siRNA sense strand
cuguaugacucuaaccauu

SEQ ID NO: 2653000 - RNA, 19 nt, Homo sapiens
  misc_RNA (1)...(19): siRNA sense strand
ucuuaugacucacaugaua

SEQ ID NO: 2653001 - RNA, 19 nt, Homo sapiens
  misc_RNA (1)...(19): siRNA sense strand
cccuaugucuguaaagaau

SEQ ID NO: 2653002 - RNA, 19 nt, Homo sapiens
  misc_RNA (1)...(19): siRNA sense strand
ggacuuaaauuacacauca

SEQ ID NO: 2653003 - RNA, 19 nt, Homo sapiens
  misc_RNA (1)...(19): siRNA sense strand
cgaauucacacuggagaaa

SEQ ID NO: 2653004 - RNA, 19 nt, Homo sapiens
  misc_RNA (1)...(19): siRNA sense strand
aacucacauuggagagaaa

SEQ ID NO: 2653005 - RNA, 19 nt, Homo sapiens
  misc_RNA (1)...(19): siRNA sense strand
cugcagagaaacuguauga

SEQ ID NO: 2653006 - RNA, 19 nt, Homo sapiens
  misc_RNA (1)...(19): siRNA sense strand
acacuauguauguaaggaa

SEQ ID NO: 2653007 - RNA, 19 nt, Homo sapiens
  misc_RNA (1)...(19): siRNA sense strand
uggaucaagcccagagaga

SEQ ID NO: 2653008 - RNA, 19 nt, Homo sapiens
  misc_RNA (1)...(19): siRNA sense strand
cagaacucacaguggagaa

SEQ ID NO: 2653009 - RNA, 19 nt, Homo sapiens
  misc_RNA (1)...(19): siRNA sense strand
acucuaaccauucuggaaa

SEQ ID NO: 2653010 - RNA, 19 nt, Homo sapiens
  misc_RNA (1)...(19): siRNA sense strand
ggaaaaugccuaagugugu

SEQ ID NO: 2653011 - RNA, 19 nt, Homo sapiens
  misc_RNA (1)...(19): siRNA sense strand
acuagcagggucugaauua

SEQ ID NO: 2653012 - RNA, 19 nt, Homo sapiens
  misc_RNA (1)...(19): siRNA sense strand
cuggaaaagucuucaauga

SEQ ID NO: 2653013 - RNA, 19 nt, Homo sapiens
  misc_RNA (1)...(19): siRNA sense strand
agacaaacacuauguaugu

SEQ ID NO: 2653014 - RNA, 19 nt, Homo sapiens
  misc_RNA (1)...(19): siRNA sense strand
ugggaaagccuucaguaau

SEQ ID NO: 2653015 - RNA, 19 nt, Homo sapiens
  misc_RNA (1)...(19): siRNA sense strand
ucucaugucuggauuggaa

SEQ ID NO: 2653016 - RNA, 19 nt, Homo sapiens
  misc_RNA (1)...(19): siRNA sense strand
ugacaggaguucugcagga

SEQ ID NO: 2653017 - RNA, 19 nt, Homo sapiens
  misc_RNA (1)...(19): siRNA sense strand
gcagaaagaucaccaaaug

SEQ ID NO: 2653018 - RNA, 19 nt, Homo sapiens
  misc_RNA (1)...(19): siRNA sense strand
cuuacuaggcagaauaaaa

SEQ ID NO: 2653019 - RNA, 19 nt, Homo sapiens
  misc_RNA (1)...(19): siRNA sense strand
aaagacuguuggagaacuu

SEQ ID NO: 2653020 - RNA, 19 nt, Homo sapiens
  misc_RNA (1)...(19): siRNA sense strand
aggauguggcuguggacuu

SEQ ID NO: 2653021 - RNA, 19 nt, Homo sapiens
  misc_RNA (1)...(19): siRNA sense strand
cauuauacuagcagggucu

SEQ ID NO: 2653022 - RNA, 19 nt, Homo sapiens
  misc_RNA (1)...(19): siRNA sense strand
gcagagaaacuguaugacu

SEQ ID NO: 2653023 - RNA, 19 nt, Homo sapiens
  misc_RNA (1)...(19): siRNA sense strand
cacuauguauguaaggaau

SEQ ID NO: 2653024 - RNA, 19 nt, Homo sapiens
  misc_RNA (1)...(19): siRNA sense strand
gcaauacugcagagaaacu

SEQ ID NO: 2653025 - RNA, 19 nt, Homo sapiens
  misc_RNA (1)...(19): siRNA sense strand
ccaaaucuuacuaggcaga

SEQ ID NO: 2653026 - RNA, 19 nt, Homo sapiens
  misc_RNA (1)...(19): siRNA sense strand
cuucauaccuuacugauca

SEQ ID NO: 2653027 - RNA, 19 nt, Homo sapiens
  misc_RNA (1)...(19): siRNA sense strand
gaaagaagcccuauguaug

SEQ ID NO: 2653028 - RNA, 19 nt, Homo sapiens
  misc_RNA (1)...(19): siRNA sense strand
aggaauuggauuugcaacu

SEQ ID NO: 2653029 - RNA, 19 nt, Homo sapiens
  misc_RNA (1)...(19): siRNA sense strand
aaucuuacuaggcagaaua

SEQ ID NO: 2653030 - RNA, 19 nt, Homo sapiens
  misc_RNA (1)...(19): siRNA sense strand
ugucuggauuggaacaaau

SEQ ID NO: 2653031 - RNA, 19 nt, Homo sapiens
  misc_RNA (1)...(19): siRNA sense strand
cagagaaacuguaugacuc

SEQ ID NO: 2653032 - RNA, 19 nt, Homo sapiens
  misc_RNA (1)...(19): siRNA sense strand
cuuagugaccuuugaggau

SEQ ID NO: 2653033 - RNA, 19 nt, Homo sapiens
  misc_RNA (1)...(19): siRNA sense strand
ggaacaaauggaagagcug

SEQ ID NO: 2653034 - RNA, 19 nt, Homo sapiens
  misc_RNA (1)...(19): siRNA sense strand
cuuaaucagucaucccuua

SEQ ID NO: 2653035 - RNA, 19 nt, Homo sapiens
  misc_RNA (1)...(19): siRNA sense strand
ggagacaaacacuauguau

SEQ ID NO: 2653036 - RNA, 19 nt, Homo sapiens
  misc_RNA (1)...(19): siRNA sense strand
cccuauguauguauggaau

SEQ ID NO: 2653037 - RNA, 19 nt, Homo sapiens
  misc_RNA (1)...(19): siRNA sense strand
guauguauggaauguggaa

SEQ ID NO: 2653038 - RNA, 19 nt, Homo sapiens
  misc_RNA (1)...(19): siRNA sense strand
ggacauggaagaauucaca

SEQ ID NO: 2653039 - RNA, 19 nt, Homo sapiens
  misc_RNA (1)...(19): siRNA sense strand
caucagaacucacagugga

SEQ ID NO: 2653040 - RNA, 19 nt, Homo sapiens
  misc_RNA (1)...(19): siRNA sense strand
uguuggagaacuacaagaa

SEQ ID NO: 2653041 - RNA, 19 nt, Homo sapiens
  misc_RNA (1)...(19): siRNA sense strand
caauggagacaaacacuau

SEQ ID NO: 2653042 - RNA, 19 nt, Homo sapiens
  misc_RNA (1)...(19): siRNA sense strand
aguaauuccucacaccuua

SEQ ID NO: 2653043 - RNA, 19 nt, Homo sapiens
  misc_RNA (1)...(19): siRNA sense strand
agaacaugaugcaggacua

SEQ ID NO: 2653044 - RNA, 19 nt, Homo sapiens
  misc_RNA (1)...(19): siRNA sense strand
acgcugaggucuuggugaa

SEQ ID NO: 2653045 - RNA, 19 nt, Homo sapiens
  misc_RNA (1)...(19): siRNA sense strand
acaccgacuucaaggacaa

SEQ ID NO: 2653046 - RNA, 19 nt, Homo sapiens
  misc_RNA (1)...(19): siRNA sense strand
cgaccaacaccaugcacua

SEQ ID NO: 2653047 - RNA, 19 nt, Homo sapiens
  misc_RNA (1)...(19): siRNA sense strand
gauagaaaucccauucaaa

SEQ ID NO: 2653048 - RNA, 19 nt, Homo sapiens
  misc_RNA (1)...(19): siRNA sense strand
cuuagaagccaaagaagga

SEQ ID NO: 2653049 - RNA, 19 nt, Homo sapiens
  misc_RNA (1)...(19): siRNA sense strand
ccaacaaaagacagagcua

SEQ ID NO: 2653050 - RNA, 19 nt, Homo sapiens
  misc_RNA (1)...(19): siRNA sense strand
gauuugcacaggauagaaa

SEQ ID NO: 2653051 - RNA, 19 nt, Homo sapiens
  misc_RNA (1)...(19): siRNA sense strand
ggacacgcucucagggaca

SEQ ID NO: 2653052 - RNA, 19 nt, Homo sapiens
  misc_RNA (1)...(19): siRNA sense strand
agcgcaugcuggagagcua

SEQ ID NO: 2653053 - RNA, 19 nt, Homo sapiens
  misc_RNA (1)...(19): siRNA sense strand
uggccaagucugucaagua

SEQ ID NO: 2653054 - RNA, 19 nt, Homo sapiens
  misc_RNA (1)...(19): siRNA sense strand
ucggaaaacauguggaaca

SEQ ID NO: 2653055 - RNA, 19 nt, Homo sapiens
  misc_RNA (1)...(19): siRNA sense strand
ccgcgguggaugaguauuu

SEQ ID NO: 2653056 - RNA, 19 nt, Homo sapiens
  misc_RNA (1)...(19): siRNA sense strand
ccaagcuggagcacggaaa

SEQ ID NO: 2653057 - RNA, 19 nt, Homo sapiens
  misc_RNA (1)...(19): siRNA sense strand
gcuacaugcucuucaacga

SEQ ID NO: 2653058 - RNA, 19 nt, Homo sapiens
  misc_RNA (1)...(19): siRNA sense strand
gagcaguguuauugccagu

SEQ ID NO: 2653059 - RNA, 19 nt, Homo sapiens
  misc_RNA (1)...(19): siRNA sense strand
ugacuugagcaguguuauu

SEQ ID NO: 2653060 - RNA, 19 nt, Homo sapiens
  misc_RNA (1)...(19): siRNA sense strand
ccgagcagguggacaucau

SEQ ID NO: 2653061 - RNA, 19 nt, Homo sapiens
  misc_RNA (1)...(19): siRNA sense strand
cggccuggcuuucugguuu

SEQ ID NO: 2653062 - RNA, 19 nt, Homo sapiens
  misc_RNA (1)...(19): siRNA sense strand
gugaagaguaacaaccuga

SEQ ID NO: 2653063 - RNA, 19 nt, Homo sapiens
  misc_RNA (1)...(19): siRNA sense strand
gaagcuugcccgagagaaa

SEQ ID NO: 2653064 - RNA, 19 nt, Homo sapiens
  misc_RNA (1)...(19): siRNA sense strand
gagaagaggaggaaggagu

SEQ ID NO: 2653065 - RNA, 19 nt, Homo sapiens
  misc_RNA (1)...(19): siRNA sense strand
ccucagcagcagagagauu

SEQ ID NO: 2653066 - RNA, 19 nt, Homo sapiens
  misc_RNA (1)...(19): siRNA sense strand
gagaaaagcucaucaccua

SEQ ID NO: 2653067 - RNA, 19 nt, Homo sapiens
  misc_RNA (1)...(19): siRNA sense strand
gaucccaagaagaggacaa

SEQ ID NO: 2653068 - RNA, 19 nt, Homo sapiens
  misc_RNA (1)...(19): siRNA sense strand
aggaggaaggagugggaga

SEQ ID NO: 2653069 - RNA, 19 nt, Homo sapiens
  misc_RNA (1)...(19): siRNA sense strand
ucaccgaggagcagagcua

SEQ ID NO: 2653070 - RNA, 19 nt, Homo sapiens
  misc_RNA (1)...(19): siRNA sense strand
gugcgaagcuugcccgaga

SEQ ID NO: 2653071 - RNA, 19 nt, Homo sapiens
  misc_RNA (1)...(19): siRNA sense strand
ucauagacuuggagcucuu

SEQ ID NO: 2653072 - RNA, 19 nt, Homo sapiens
  misc_RNA (1)...(19): siRNA sense strand
gcuccugauuccugacaau

SEQ ID NO: 2653073 - RNA, 19 nt, Homo sapiens
  misc_RNA (1)...(19): siRNA sense strand
gagccuugcagaagcacaa

SEQ ID NO: 2653074 - RNA, 19 nt, Homo sapiens
  misc_RNA (1)...(19): siRNA sense strand
cgacaaugaccacgggaac

SEQ ID NO: 2653075 - RNA, 19 nt, Homo sapiens
  misc_RNA (1)...(19): siRNA sense strand
cugcagaggcgcugucaga

SEQ ID NO: 2653076 - RNA, 19 nt, Homo sapiens
  misc_RNA (1)...(19): siRNA sense strand
gcgucagcaucgacaauga

SEQ ID NO: 2653077 - RNA, 19 nt, Homo sapiens
  misc_RNA (1)...(19): siRNA sense strand
auguaaggauugugggaaa

SEQ ID NO: 2653078 - RNA, 19 nt, Homo sapiens
  misc_RNA (1)...(19): siRNA sense strand
gggaaagccuucagaucua

SEQ ID NO: 2653079 - RNA, 19 nt, Homo sapiens
  misc_RNA (1)...(19): siRNA sense strand
guguaagcaaugugggaaa

SEQ ID NO: 2653080 - RNA, 19 nt, Homo sapiens
  misc_RNA (1)...(19): siRNA sense strand
guguaagcaaugugggaaa

SEQ ID NO: 2653081 - RNA, 19 nt, Homo sapiens
  misc_RNA (1)...(19): siRNA sense strand
guguaagcaaugugggaaa

SEQ ID NO: 2653082 - RNA, 19 nt, Homo sapiens
  misc_RNA (1)...(19): siRNA sense strand
gaauguagcaaaugugaua

SEQ ID NO: 2653083 - RNA, 19 nt, Homo sapiens
  misc_RNA (1)...(19): siRNA sense strand
agaaugaacucuggagaaa

SEQ ID NO: 2653084 - RNA, 19 nt, Homo sapiens
  misc_RNA (1)...(19): siRNA sense strand
ccauaugaauguaaggauu

SEQ ID NO: 2653085 - RNA, 19 nt, Homo sapiens
  misc_RNA (1)...(19): siRNA sense strand
auguaaggaaugugggaaa

SEQ ID NO: 2653086 - RNA, 19 nt, Homo sapiens
  misc_RNA (1)...(19): siRNA sense strand
auguaaggaaugugggaaa

SEQ ID NO: 2653087 - RNA, 19 nt, Homo sapiens
  misc_RNA (1)...(19): siRNA sense strand
auguaagauaugugggaaa

SEQ ID NO: 2653088 - RNA, 19 nt, Homo sapiens
  misc_RNA (1)...(19): siRNA sense strand
gaauguaaggaaugcgaaa

SEQ ID NO: 2653089 - RNA, 19 nt, Homo sapiens
  misc_RNA (1)...(19): siRNA sense strand
guguaagcagugugggaaa

SEQ ID NO: 2653090 - RNA, 19 nt, Homo sapiens
  misc_RNA (1)...(19): siRNA sense strand
augcaaagaauguggaaaa

SEQ ID NO: 2653091 - RNA, 19 nt, Homo sapiens
  misc_RNA (1)...(19): siRNA sense strand
ggagaaagaccuuauaaau

SEQ ID NO: 2653092 - RNA, 19 nt, Homo sapiens
  misc_RNA (1)...(19): siRNA sense strand
ggagaaagaccuuauaaau

SEQ ID NO: 2653093 - RNA, 19 nt, Homo sapiens
  misc_RNA (1)...(19): siRNA sense strand
cguaugaauguaagcaaua

SEQ ID NO: 2653094 - RNA, 19 nt, Homo sapiens
  misc_RNA (1)...(19): siRNA sense strand
uuguaaagucuguggaaaa

SEQ ID NO: 2653095 - RNA, 19 nt, Homo sapiens
  misc_RNA (1)...(19): siRNA sense strand
auguaagcauugugggaau

SEQ ID NO: 2653096 - RNA, 19 nt, Homo sapiens
  misc_RNA (1)...(19): siRNA sense strand
ccucaaaccuucagaugca

SEQ ID NO: 2653097 - RNA, 19 nt, Homo sapiens
  misc_RNA (1)...(19): siRNA sense strand
ucaaauacaugcaagaaca

SEQ ID NO: 2653098 - RNA, 19 nt, Homo sapiens
  misc_RNA (1)...(19): siRNA sense strand
gcggaaaagcauucaauua

SEQ ID NO: 2653099 - RNA, 19 nt, Homo sapiens
  misc_RNA (1)...(19): siRNA sense strand
auucaugaaaggacagaaa

SEQ ID NO: 2653100 - RNA, 19 nt, Homo sapiens
  misc_RNA (1)...(19): siRNA sense strand
ccguaugaauguaagcaau

SEQ ID NO: 2653101 - RNA, 19 nt, Homo sapiens
  misc_RNA (1)...(19): siRNA sense strand
gggaagugaugcuggaaac

SEQ ID NO: 2653102 - RNA, 19 nt, Homo sapiens
  misc_RNA (1)...(19): siRNA sense strand
augcaagcaaugugguaaa

SEQ ID NO: 2653103 - RNA, 19 nt, Homo sapiens
  misc_RNA (1)...(19): siRNA sense strand
gaguggacauugcuggaua

SEQ ID NO: 2653104 - RNA, 19 nt, Homo sapiens
  misc_RNA (1)...(19): siRNA sense strand
aagaaugaacucuggagaa

SEQ ID NO: 2653105 - RNA, 19 nt, Homo sapiens
  misc_RNA (1)...(19): siRNA sense strand
gaauguaaggaaugcggaa

SEQ ID NO: 2653106 - RNA, 19 nt, Homo sapiens
  misc_RNA (1)...(19): siRNA sense strand
cccuaugaauguagcaaau

SEQ ID NO: 2653107 - RNA, 19 nt, Homo sapiens
  misc_RNA (1)...(19): siRNA sense strand
uggagaaagaccuuauaaa

SEQ ID NO: 2653108 - RNA, 19 nt, Homo sapiens
  misc_RNA (1)...(19): siRNA sense strand
uggagaaagaccuuauaaa

SEQ ID NO: 2653109 - RNA, 19 nt, Homo sapiens
  misc_RNA (1)...(19): siRNA sense strand
ggacauugcuggauauuuc

SEQ ID NO: 2653110 - RNA, 19 nt, Homo sapiens
  misc_RNA (1)...(19): siRNA sense strand
ucauagaagagaaagucaa

SEQ ID NO: 2653111 - RNA, 19 nt, Homo sapiens
  misc_RNA (1)...(19): siRNA sense strand
ccuuaucaaugcaaagaau

SEQ ID NO: 2653112 - RNA, 19 nt, Homo sapiens
  misc_RNA (1)...(19): siRNA sense strand
uggaaaagcauuugcauau

SEQ ID NO: 2653113 - RNA, 19 nt, Homo sapiens
  misc_RNA (1)...(19): siRNA sense strand
gacugaacuuccaggagaa

SEQ ID NO: 2653114 - RNA, 19 nt, Homo sapiens
  misc_RNA (1)...(19): siRNA sense strand
acacuggacacaaggcaua

SEQ ID NO: 2653115 - RNA, 19 nt, Homo sapiens
  misc_RNA (1)...(19): siRNA sense strand
auaagaaagccuucaggua

SEQ ID NO: 2653116 - RNA, 19 nt, Homo sapiens
  misc_RNA (1)...(19): siRNA sense strand
cgcuauaaaugcaagcaau

SEQ ID NO: 2653117 - RNA, 19 nt, Homo sapiens
  misc_RNA (1)...(19): siRNA sense strand
cccuaugaauguaaggaau

SEQ ID NO: 2653118 - RNA, 19 nt, Homo sapiens
  misc_RNA (1)...(19): siRNA sense strand
cccuaugaauguaaggaau

SEQ ID NO: 2653119 - RNA, 19 nt, Homo sapiens
  misc_RNA (1)...(19): siRNA sense strand
cccuaugaauguaaggaau

SEQ ID NO: 2653120 - RNA, 19 nt, Homo sapiens
  misc_RNA (1)...(19): siRNA sense strand
aacacacauuggagagaaa

SEQ ID NO: 2653121 - RNA, 19 nt, Homo sapiens
  misc_RNA (1)...(19): siRNA sense strand
ggauggaacuuauaaaugu

SEQ ID NO: 2653122 - RNA, 19 nt, Homo sapiens
  misc_RNA (1)...(19): siRNA sense strand
cacuaugaauguaaggaau

SEQ ID NO: 2653123 - RNA, 19 nt, Homo sapiens
  misc_RNA (1)...(19): siRNA sense strand
aacucacacuggagagaaa

SEQ ID NO: 2653124 - RNA, 19 nt, Homo sapiens
  misc_RNA (1)...(19): siRNA sense strand
aacucacacuggagagaaa

SEQ ID NO: 2653125 - RNA, 19 nt, Homo sapiens
  misc_RNA (1)...(19): siRNA sense strand
ucaaauucaugaaaggaca

SEQ ID NO: 2653126 - RNA, 19 nt, Homo sapiens
  misc_RNA (1)...(19): siRNA sense strand
aagaaugcccucuggagaa

SEQ ID NO: 2653127 - RNA, 19 nt, Homo sapiens
  misc_RNA (1)...(19): siRNA sense strand
aacucacacuggagagaaa

SEQ ID NO: 2653128 - RNA, 19 nt, Homo sapiens
  misc_RNA (1)...(19): siRNA sense strand
uaagaaagccuucagguau

SEQ ID NO: 2653129 - RNA, 19 nt, Homo sapiens
  misc_RNA (1)...(19): siRNA sense strand
cagaaguuggcauagguaa

SEQ ID NO: 2653130 - RNA, 19 nt, Homo sapiens
  misc_RNA (1)...(19): siRNA sense strand
auucgaagacacaugguaa

SEQ ID NO: 2653131 - RNA, 19 nt, Homo sapiens
  misc_RNA (1)...(19): siRNA sense strand
aaugaacucuggagaaaga

SEQ ID NO: 2653132 - RNA, 19 nt, Homo sapiens
  misc_RNA (1)...(19): siRNA sense strand
uagaagagaaagucaauga

SEQ ID NO: 2653133 - RNA, 19 nt, Homo sapiens
  misc_RNA (1)...(19): siRNA sense strand
gugcaugguaggacucaua

SEQ ID NO: 2653134 - RNA, 19 nt, Homo sapiens
  misc_RNA (1)...(19): siRNA sense strand
gugggaaagcauucagcua

SEQ ID NO: 2653135 - RNA, 19 nt, Homo sapiens
  misc_RNA (1)...(19): siRNA sense strand
agacugaacuuccaggaga

SEQ ID NO: 2653136 - RNA, 19 nt, Homo sapiens
  misc_RNA (1)...(19): siRNA sense strand
gcauauacacgcaaggacu

SEQ ID NO: 2653137 - RNA, 19 nt, Homo sapiens
  misc_RNA (1)...(19): siRNA sense strand
gcaauauggggaaggcuua

SEQ ID NO: 2653138 - RNA, 19 nt, Homo sapiens
  misc_RNA (1)...(19): siRNA sense strand
gagaaagaccuuauaaaug

SEQ ID NO: 2653139 - RNA, 19 nt, Homo sapiens
  misc_RNA (1)...(19): siRNA sense strand
auguaaggauugugggaaa

SEQ ID NO: 2653140 - RNA, 19 nt, Homo sapiens
  misc_RNA (1)...(19): siRNA sense strand
ccuauaaggaauauggaaa

SEQ ID NO: 2653141 - RNA, 19 nt, Homo sapiens
  misc_RNA (1)...(19): siRNA sense strand
auguaaacaaugugggaaa

SEQ ID NO: 2653142 - RNA, 19 nt, Homo sapiens
  misc_RNA (1)...(19): siRNA sense strand
guguaagcaaugugggaaa

SEQ ID NO: 2653143 - RNA, 19 nt, Homo sapiens
  misc_RNA (1)...(19): siRNA sense strand
guguaagcaaugugggaaa

SEQ ID NO: 2653144 - RNA, 19 nt, Homo sapiens
  misc_RNA (1)...(19): siRNA sense strand
auguaaggaaugugggaaa

SEQ ID NO: 2653145 - RNA, 19 nt, Homo sapiens
  misc_RNA (1)...(19): siRNA sense strand
aguucacacuggagagaaa

SEQ ID NO: 2653146 - RNA, 19 nt, Homo sapiens
  misc_RNA (1)...(19): siRNA sense strand
auguaaagagugugacaaa

SEQ ID NO: 2653147 - RNA, 19 nt, Homo sapiens
  misc_RNA (1)...(19): siRNA sense strand
gaauguaagcaguguggua

SEQ ID NO: 2653148 - RNA, 19 nt, Homo sapiens
  misc_RNA (1)...(19): siRNA sense strand
gagaaacccuauaaggaau

SEQ ID NO: 2653149 - RNA, 19 nt, Homo sapiens
  misc_RNA (1)...(19): siRNA sense strand
caggaaaccuugaggaauc

SEQ ID NO: 2653150 - RNA, 19 nt, Homo sapiens
  misc_RNA (1)...(19): siRNA sense strand
ccguaugaguguaagcaau

SEQ ID NO: 2653151 - RNA, 19 nt, Homo sapiens
  misc_RNA (1)...(19): siRNA sense strand
agaaaaucauuguggagaa

SEQ ID NO: 2653152 - RNA, 19 nt, Homo sapiens
  misc_RNA (1)...(19): siRNA sense strand
gcacaauggagauggaacu

SEQ ID NO: 2653153 - RNA, 19 nt, Homo sapiens
  misc_RNA (1)...(19): siRNA sense strand
ccauaugaaugcaaacaau

SEQ ID NO: 2653154 - RNA, 19 nt, Homo sapiens
  misc_RNA (1)...(19): siRNA sense strand
gacacacccuggagagaaa

SEQ ID NO: 2653155 - RNA, 19 nt, Homo sapiens
  misc_RNA (1)...(19): siRNA sense strand
gcggaaaagcguucaauua

SEQ ID NO: 2653156 - RNA, 19 nt, Homo sapiens
  misc_RNA (1)...(19): siRNA sense strand
augcaaacaauguggaaaa

SEQ ID NO: 2653157 - RNA, 19 nt, Homo sapiens
  misc_RNA (1)...(19): siRNA sense strand
augcaagcacugugguaaa

SEQ ID NO: 2653158 - RNA, 19 nt, Homo sapiens
  misc_RNA (1)...(19): siRNA sense strand
agagaaacccuauaaggaa

SEQ ID NO: 2653159 - RNA, 19 nt, Homo sapiens
  misc_RNA (1)...(19): siRNA sense strand
gacucacacucaagagaaa

SEQ ID NO: 2653160 - RNA, 19 nt, Homo sapiens
  misc_RNA (1)...(19): siRNA sense strand
auguaaguuuugugggaaa

SEQ ID NO: 2653161 - RNA, 19 nt, Homo sapiens
  misc_RNA (1)...(19): siRNA sense strand
gaauguaaggaaugcggaa

SEQ ID NO: 2653162 - RNA, 19 nt, Homo sapiens
  misc_RNA (1)...(19): siRNA sense strand
ugucagaaaccuucaaauu

SEQ ID NO: 2653163 - RNA, 19 nt, Homo sapiens
  misc_RNA (1)...(19): siRNA sense strand
cagaugacacacugaacaa

SEQ ID NO: 2653164 - RNA, 19 nt, Homo sapiens
  misc_RNA (1)...(19): siRNA sense strand
agagaagugaugcaggaaa

SEQ ID NO: 2653165 - RNA, 19 nt, Homo sapiens
  misc_RNA (1)...(19): siRNA sense strand
ggaaagcaacuguaugaau

SEQ ID NO: 2653166 - RNA, 19 nt, Homo sapiens
  misc_RNA (1)...(19): siRNA sense strand
cuaugaauguaaagagugu

SEQ ID NO: 2653167 - RNA, 19 nt, Homo sapiens
  misc_RNA (1)...(19): siRNA sense strand
gaauguaaagagugugaca

SEQ ID NO: 2653168 - RNA, 19 nt, Homo sapiens
  misc_RNA (1)...(19): siRNA sense strand
cccuaugaauguaaggaau

SEQ ID NO: 2653169 - RNA, 19 nt, Homo sapiens
  misc_RNA (1)...(19): siRNA sense strand
acacaagccgucugaguau

SEQ ID NO: 2653170 - RNA, 19 nt, Homo sapiens
  misc_RNA (1)...(19): siRNA sense strand
ugauaaugcacaauggaga

SEQ ID NO: 2653171 - RNA, 19 nt, Homo sapiens
  misc_RNA (1)...(19): siRNA sense strand
caauggagauggaacuuau

SEQ ID NO: 2653172 - RNA, 19 nt, Homo sapiens
  misc_RNA (1)...(19): siRNA sense strand
gaaaaucauuguggagaaa

SEQ ID NO: 2653173 - RNA, 19 nt, Homo sapiens
  misc_RNA (1)...(19): siRNA sense strand
aacucacacuggagagaaa

SEQ ID NO: 2653174 - RNA, 19 nt, Homo sapiens
  misc_RNA (1)...(19): siRNA sense strand
gagagaaacccuauaagga

SEQ ID NO: 2653175 - RNA, 19 nt, Homo sapiens
  misc_RNA (1)...(19): siRNA sense strand
acauugaagaucaguacaa

SEQ ID NO: 2653176 - RNA, 19 nt, Homo sapiens
  misc_RNA (1)...(19): siRNA sense strand
aauguaagacuguggaaaa

SEQ ID NO: 2653177 - RNA, 19 nt, Homo sapiens
  misc_RNA (1)...(19): siRNA sense strand
aagcaguguguguggagaa

SEQ ID NO: 2653178 - RNA, 19 nt, Homo sapiens
  misc_RNA (1)...(19): siRNA sense strand
agaaaccguaugaguguaa

SEQ ID NO: 2653179 - RNA, 19 nt, Homo sapiens
  misc_RNA (1)...(19): siRNA sense strand
ggaaaagcauucaacaauu

SEQ ID NO: 2653180 - RNA, 19 nt, Homo sapiens
  misc_RNA (1)...(19): siRNA sense strand
auguaagcagugugguaaa

SEQ ID NO: 2653181 - RNA, 19 nt, Homo sapiens
  misc_RNA (1)...(19): siRNA sense strand
ggagauggaacuuauaaau

SEQ ID NO: 2653182 - RNA, 19 nt, Homo sapiens
  misc_RNA (1)...(19): siRNA sense strand
cuggaaagcaacuguauga

SEQ ID NO: 2653183 - RNA, 19 nt, Homo sapiens
  misc_RNA (1)...(19): siRNA sense strand
caggaauaaucuaagaagu

SEQ ID NO: 2653184 - RNA, 19 nt, Homo sapiens
  misc_RNA (1)...(19): siRNA sense strand
acagagaagugaugcagga

SEQ ID NO: 2653185 - RNA, 19 nt, Homo sapiens
  misc_RNA (1)...(19): siRNA sense strand
ggucauucuucccuuaaua

SEQ ID NO: 2653186 - RNA, 19 nt, Homo sapiens
  misc_RNA (1)...(19): siRNA sense strand
caagagaaacccuaugaau

SEQ ID NO: 2653187 - RNA, 19 nt, Homo sapiens
  misc_RNA (1)...(19): siRNA sense strand
ucagaaaccuucaaauuca

SEQ ID NO: 2653188 - RNA, 19 nt, Homo sapiens
  misc_RNA (1)...(19): siRNA sense strand
aacacacccuggagagaaa

SEQ ID NO: 2653189 - RNA, 19 nt, Homo sapiens
  misc_RNA (1)...(19): siRNA sense strand
aaacaaugugggaaagcau

SEQ ID NO: 2653190 - RNA, 19 nt, Homo sapiens
  misc_RNA (1)...(19): siRNA sense strand
gauaaugcacaauggagau

SEQ ID NO: 2653191 - RNA, 19 nt, Homo sapiens
  misc_RNA (1)...(19): siRNA sense strand
gcaacuguaugaaucuaaa

SEQ ID NO: 2653192 - RNA, 19 nt, Homo sapiens
  misc_RNA (1)...(19): siRNA sense strand
gcacauuagagcugacacu

SEQ ID NO: 2653193 - RNA, 19 nt, Homo sapiens
  misc_RNA (1)...(19): siRNA sense strand
ccauauaagugucaacaac

SEQ ID NO: 2653194 - RNA, 19 nt, Homo sapiens
  misc_RNA (1)...(19): siRNA sense strand
ucaaaugcauggaaggacu

SEQ ID NO: 2653195 - RNA, 19 nt, Homo sapiens
  misc_RNA (1)...(19): siRNA sense strand
cccuaugaguguaagcaau

SEQ ID NO: 2653196 - RNA, 19 nt, Homo sapiens
  misc_RNA (1)...(19): siRNA sense strand
ggaaaagcguucaauuauu

SEQ ID NO: 2653197 - RNA, 19 nt, Homo sapiens
  misc_RNA (1)...(19): siRNA sense strand
gugggaaagcauucaguuu

SEQ ID NO: 2653198 - RNA, 19 nt, Homo sapiens
  misc_RNA (1)...(19): siRNA sense strand
gauuguaaagaauguggaa

SEQ ID NO: 2653199 - RNA, 19 nt, Homo sapiens
  misc_RNA (1)...(19): siRNA sense strand
agaaacccuauaaggaaua

SEQ ID NO: 2653200 - RNA, 19 nt, Homo sapiens
  misc_RNA (1)...(19): siRNA sense strand
cauucaaagacacaugaua

SEQ ID NO: 2653201 - RNA, 19 nt, Homo sapiens
  misc_RNA (1)...(19): siRNA sense strand
aggauguggcugugaacuu

SEQ ID NO: 2653202 - RNA, 19 nt, Homo sapiens
  misc_RNA (1)...(19): siRNA sense strand
aggaauaaucuaagaaguc

SEQ ID NO: 2653203 - RNA, 19 nt, Homo sapiens
  misc_RNA (1)...(19): siRNA sense strand
auucaagcauucaaagaca

SEQ ID NO: 2653204 - RNA, 19 nt, Homo sapiens
  misc_RNA (1)...(19): siRNA sense strand
gacacaugauaaugcacaa

SEQ ID NO: 2653205 - RNA, 19 nt, Homo sapiens
  misc_RNA (1)...(19): siRNA sense strand
guuccauuccuuucaaaua

SEQ ID NO: 2653206 - RNA, 19 nt, Homo sapiens
  misc_RNA (1)...(19): siRNA sense strand
agagaaaccguaugagugu

SEQ ID NO: 2653207 - RNA, 19 nt, Homo sapiens
  misc_RNA (1)...(19): siRNA sense strand
auguaaggaaugcggaaaa

SEQ ID NO: 2653208 - RNA, 19 nt, Homo sapiens
  misc_RNA (1)...(19): siRNA sense strand
aaaucauuguggagaaacu

SEQ ID NO: 2653209 - RNA, 19 nt, Homo sapiens
  misc_RNA (1)...(19): siRNA sense strand
ugggaaagcauuaucuuau

SEQ ID NO: 2653210 - RNA, 19 nt, Homo sapiens
  misc_RNA (1)...(19): siRNA sense strand
gaaugcaagcacuguggua

SEQ ID NO: 2653211 - RNA, 19 nt, Homo sapiens
  misc_RNA (1)...(19): siRNA sense strand
agaaacccuaugaguguaa

SEQ ID NO: 2653212 - RNA, 19 nt, Homo sapiens
  misc_RNA (1)...(19): siRNA sense strand
aauggaaagaccagaacau

SEQ ID NO: 2653213 - RNA, 19 nt, Homo sapiens
  misc_RNA (1)...(19): siRNA sense strand
ugcaggaaaccuugaggaa

SEQ ID NO: 2653214 - RNA, 19 nt, Homo sapiens
  misc_RNA (1)...(19): siRNA sense strand
uggagauggaacuuauaaa

SEQ ID NO: 2653215 - RNA, 19 nt, Homo sapiens
  misc_RNA (1)...(19): siRNA sense strand
gcauaaacaacgugggaaa

SEQ ID NO: 2653216 - RNA, 19 nt, Homo sapiens
  misc_RNA (1)...(19): siRNA sense strand
guguaaggaaugugggaaa

SEQ ID NO: 2653217 - RNA, 19 nt, Homo sapiens
  misc_RNA (1)...(19): siRNA sense strand
ccucauaaguguaagauau

SEQ ID NO: 2653218 - RNA, 19 nt, Homo sapiens
  misc_RNA (1)...(19): siRNA sense strand
ccauaugaguguaaggaau

SEQ ID NO: 2653219 - RNA, 19 nt, Homo sapiens
  misc_RNA (1)...(19): siRNA sense strand
auguaaacaaugugggaaa

SEQ ID NO: 2653220 - RNA, 19 nt, Homo sapiens
  misc_RNA (1)...(19): siRNA sense strand
augcaagauaugugggaaa

SEQ ID NO: 2653221 - RNA, 19 nt, Homo sapiens
  misc_RNA (1)...(19): siRNA sense strand
auguaaggaaugugggaaa

SEQ ID NO: 2653222 - RNA, 19 nt, Homo sapiens
  misc_RNA (1)...(19): siRNA sense strand
auguaaggaaugugggaaa

SEQ ID NO: 2653223 - RNA, 19 nt, Homo sapiens
  misc_RNA (1)...(19): siRNA sense strand
auguaaggaaugugggaaa

SEQ ID NO: 2653224 - RNA, 19 nt, Homo sapiens
  misc_RNA (1)...(19): siRNA sense strand
ggagaaacaucuagccaga

SEQ ID NO: 2653225 - RNA, 19 nt, Homo sapiens
  misc_RNA (1)...(19): siRNA sense strand
ccguaugaauguaaggaau

SEQ ID NO: 2653226 - RNA, 19 nt, Homo sapiens
  misc_RNA (1)...(19): siRNA sense strand
ccguaugaauguaaggaau

SEQ ID NO: 2653227 - RNA, 19 nt, Homo sapiens
  misc_RNA (1)...(19): siRNA sense strand
gcuucacacuggaaagaaa

SEQ ID NO: 2653228 - RNA, 19 nt, Homo sapiens
  misc_RNA (1)...(19): siRNA sense strand
aaguaaagauggaacucaa

SEQ ID NO: 2653229 - RNA, 19 nt, Homo sapiens
  misc_RNA (1)...(19): siRNA sense strand
auguaaacaauguggcaaa

SEQ ID NO: 2653230 - RNA, 19 nt, Homo sapiens
  misc_RNA (1)...(19): siRNA sense strand
gauuacaguucuugucuaa

SEQ ID NO: 2653231 - RNA, 19 nt, Homo sapiens
  misc_RNA (1)...(19): siRNA sense strand
guguaagauauguggaaaa

SEQ ID NO: 2653232 - RNA, 19 nt, Homo sapiens
  misc_RNA (1)...(19): siRNA sense strand
aacucauacuggagagaaa

SEQ ID NO: 2653233 - RNA, 19 nt, Homo sapiens
  misc_RNA (1)...(19): siRNA sense strand
uuucaaagacacaugguaa

SEQ ID NO: 2653234 - RNA, 19 nt, Homo sapiens
  misc_RNA (1)...(19): siRNA sense strand
gagaagucaucauggguca

SEQ ID NO: 2653235 - RNA, 19 nt, Homo sapiens
  misc_RNA (1)...(19): siRNA sense strand
gugucaacaaugugguaaa

SEQ ID NO: 2653236 - RNA, 19 nt, Homo sapiens
  misc_RNA (1)...(19): siRNA sense strand
augcaagcagugugggaaa

SEQ ID NO: 2653237 - RNA, 19 nt, Homo sapiens
  misc_RNA (1)...(19): siRNA sense strand
gggagaaacuguaugaaug

SEQ ID NO: 2653238 - RNA, 19 nt, Homo sapiens
  misc_RNA (1)...(19): siRNA sense strand
ccucacaaaugcaagauau

SEQ ID NO: 2653239 - RNA, 19 nt, Homo sapiens
  misc_RNA (1)...(19): siRNA sense strand
auguaaguugugugggaaa

SEQ ID NO: 2653240 - RNA, 19 nt, Homo sapiens
  misc_RNA (1)...(19): siRNA sense strand
acugaaaagucaugaaaga

SEQ ID NO: 2653241 - RNA, 19 nt, Homo sapiens
  misc_RNA (1)...(19): siRNA sense strand
ggaaagaaacccuauacau

SEQ ID NO: 2653242 - RNA, 19 nt, Homo sapiens
  misc_RNA (1)...(19): siRNA sense strand
gacucacacugcagagaaa

SEQ ID NO: 2653243 - RNA, 19 nt, Homo sapiens
  misc_RNA (1)...(19): siRNA sense strand
ccuucaguucuuugggaaa

SEQ ID NO: 2653244 - RNA, 19 nt, Homo sapiens
  misc_RNA (1)...(19): siRNA sense strand
cuaucuaagacaugaaaga

SEQ ID NO: 2653245 - RNA, 19 nt, Homo sapiens
  misc_RNA (1)...(19): siRNA sense strand
agaauucacaugagagaga

SEQ ID NO: 2653246 - RNA, 19 nt, Homo sapiens
  misc_RNA (1)...(19): siRNA sense strand
agagagauuuguugaaagu

SEQ ID NO: 2653247 - RNA, 19 nt, Homo sapiens
  misc_RNA (1)...(19): siRNA sense strand
ggaguagguccauaugaaa

SEQ ID NO: 2653248 - RNA, 19 nt, Homo sapiens
  misc_RNA (1)...(19): siRNA sense strand
ucaugaauguggagagaag

SEQ ID NO: 2653249 - RNA, 19 nt, Homo sapiens
  misc_RNA (1)...(19): siRNA sense strand
aacucacacuggagagaaa

SEQ ID NO: 2653250 - RNA, 19 nt, Homo sapiens
  misc_RNA (1)...(19): siRNA sense strand
uaaaugcaaaugugggaaa

SEQ ID NO: 2653251 - RNA, 19 nt, Homo sapiens
  misc_RNA (1)...(19): siRNA sense strand
acaaagaugugaugcagga

SEQ ID NO: 2653252 - RNA, 19 nt, Homo sapiens
  misc_RNA (1)...(19): siRNA sense strand
gacucacacaggagagaaa

SEQ ID NO: 2653253 - RNA, 19 nt, Homo sapiens
  misc_RNA (1)...(19): siRNA sense strand
aaauguaaguuguguggga

SEQ ID NO: 2653254 - RNA, 19 nt, Homo sapiens
  misc_RNA (1)...(19): siRNA sense strand
ugaaauggaaagaccagaa

SEQ ID NO: 2653255 - RNA, 19 nt, Homo sapiens
  misc_RNA (1)...(19): siRNA sense strand
aagauaguauugugaccaa

SEQ ID NO: 2653256 - RNA, 19 nt, Homo sapiens
  misc_RNA (1)...(19): siRNA sense strand
ggagaaacuguaugaaugu

SEQ ID NO: 2653257 - RNA, 19 nt, Homo sapiens
  misc_RNA (1)...(19): siRNA sense strand
ugguaaugcacacgagaga

SEQ ID NO: 2653258 - RNA, 19 nt, Homo sapiens
  misc_RNA (1)...(19): siRNA sense strand
gcagugugggaaagcguua

SEQ ID NO: 2653259 - RNA, 19 nt, Homo sapiens
  misc_RNA (1)...(19): siRNA sense strand
gucguauguuagagagauu

SEQ ID NO: 2653260 - RNA, 19 nt, Homo sapiens
  misc_RNA (1)...(19): siRNA sense strand
gcaaugugggaaagcguuu

SEQ ID NO: 2653261 - RNA, 19 nt, Homo sapiens
  misc_RNA (1)...(19): siRNA sense strand
uguugaaaguaaagaugga

SEQ ID NO: 2653262 - RNA, 19 nt, Homo sapiens
  misc_RNA (1)...(19): siRNA sense strand
cccuauacauguaaacaau

SEQ ID NO: 2653263 - RNA, 19 nt, Homo sapiens
  misc_RNA (1)...(19): siRNA sense strand
gaaagaacucacacuggaa

SEQ ID NO: 2653264 - RNA, 19 nt, Homo sapiens
  misc_RNA (1)...(19): siRNA sense strand
aaagaauucacaugagaga

SEQ ID NO: 2653265 - RNA, 19 nt, Homo sapiens
  misc_RNA (1)...(19): siRNA sense strand
ccauaugaauguaagcagu

SEQ ID NO: 2653266 - RNA, 19 nt, Homo sapiens
  misc_RNA (1)...(19): siRNA sense strand
aacucaauguggagaaaca

SEQ ID NO: 2653267 - RNA, 19 nt, Homo sapiens
  misc_RNA (1)...(19): siRNA sense strand
augucagcaaugugggaaa

SEQ ID NO: 2653268 - RNA, 19 nt, Homo sapiens
  misc_RNA (1)...(19): siRNA sense strand
aauucacaugagagagaaa

SEQ ID NO: 2653269 - RNA, 19 nt, Homo sapiens
  misc_RNA (1)...(19): siRNA sense strand
uuguaaagaaugugggaag

SEQ ID NO: 2653270 - RNA, 19 nt, Homo sapiens
  misc_RNA (1)...(19): siRNA sense strand
aacgcacacuggagagaaa

SEQ ID NO: 2653271 - RNA, 19 nt, Homo sapiens
  misc_RNA (1)...(19): siRNA sense strand
aaagaugugaugcaggaaa

SEQ ID NO: 2653272 - RNA, 19 nt, Homo sapiens
  misc_RNA (1)...(19): siRNA sense strand
aggauguggcugugaacuu

SEQ ID NO: 2653273 - RNA, 19 nt, Homo sapiens
  misc_RNA (1)...(19): siRNA sense strand
aaguguaagauauguggaa

SEQ ID NO: 2653274 - RNA, 19 nt, Homo sapiens
  misc_RNA (1)...(19): siRNA sense strand
gagagaagccagauacgca

SEQ ID NO: 2653275 - RNA, 19 nt, Homo sapiens
  misc_RNA (1)...(19): siRNA sense strand
aguguaagauauguggaaa

SEQ ID NO: 2653276 - RNA, 19 nt, Homo sapiens
  misc_RNA (1)...(19): siRNA sense strand
cuuuagaggauguggcugu

SEQ ID NO: 2653277 - RNA, 19 nt, Homo sapiens
  misc_RNA (1)...(19): siRNA sense strand
cuggaaagaaaccauauaa

SEQ ID NO: 2653278 - RNA, 19 nt, Homo sapiens
  misc_RNA (1)...(19): siRNA sense strand
aggacaagguggugcgcaa

SEQ ID NO: 2653279 - RNA, 19 nt, Homo sapiens
  misc_RNA (1)...(19): siRNA sense strand
ccgcaagcccugaugaaua

SEQ ID NO: 2653280 - RNA, 19 nt, Homo sapiens
  misc_RNA (1)...(19): siRNA sense strand
ccuacaagggcaagaagaa

SEQ ID NO: 2653281 - RNA, 19 nt, Homo sapiens
  misc_RNA (1)...(19): siRNA sense strand
cggaugacucugaacguaa

SEQ ID NO: 2653282 - RNA, 19 nt, Homo sapiens
  misc_RNA (1)...(19): siRNA sense strand
gcguguugcaagugggauu

SEQ ID NO: 2653283 - RNA, 19 nt, Homo sapiens
  misc_RNA (1)...(19): siRNA sense strand
ucaucgaauuccugggcaa

SEQ ID NO: 2653284 - RNA, 19 nt, Homo sapiens
  misc_RNA (1)...(19): siRNA sense strand
gggaccagcugcagaaguu

SEQ ID NO: 2653285 - RNA, 19 nt, Homo sapiens
  misc_RNA (1)...(19): siRNA sense strand
cuacaagggcaagaagaaa

SEQ ID NO: 2653286 - RNA, 19 nt, Homo sapiens
  misc_RNA (1)...(19): siRNA sense strand
acgcagugaacgggaaaua

SEQ ID NO: 2653287 - RNA, 19 nt, Homo sapiens
  misc_RNA (1)...(19): siRNA sense strand
ggcuguacgcccaggacaa

SEQ ID NO: 2653288 - RNA, 19 nt, Homo sapiens
  misc_RNA (1)...(19): siRNA sense strand
gcgcuuggcugaugagauc

SEQ ID NO: 2653289 - RNA, 19 nt, Homo sapiens
  misc_RNA (1)...(19): siRNA sense strand
cuacucagcaggugggaca

SEQ ID NO: 2653290 - RNA, 19 nt, Homo sapiens
  misc_RNA (1)...(19): siRNA sense strand
aaacagaccuacaagggca

SEQ ID NO: 2653291 - RNA, 19 nt, Homo sapiens
  misc_RNA (1)...(19): siRNA sense strand
agaagaaacucaugcuuuu

SEQ ID NO: 2653292 - RNA, 19 nt, Homo sapiens
  misc_RNA (1)...(19): siRNA sense strand
ccacgcagugaacgggaaa

SEQ ID NO: 2653293 - RNA, 19 nt, Homo sapiens
  misc_RNA (1)...(19): siRNA sense strand
uggaggagguggaguugga

SEQ ID NO: 2653294 - RNA, 19 nt, Homo sapiens
  misc_RNA (1)...(19): siRNA sense strand
aagaagaaacucaugcuuu

SEQ ID NO: 2653295 - RNA, 19 nt, Homo sapiens
  misc_RNA (1)...(19): siRNA sense strand
cgggaaauauguauguacu

SEQ ID NO: 2653296 - RNA, 19 nt, Homo sapiens
  misc_RNA (1)...(19): siRNA sense strand
ccacugcaaaccagaggaa

SEQ ID NO: 2653297 - RNA, 19 nt, Homo sapiens
  misc_RNA (1)...(19): siRNA sense strand
cgcaagcccugaugaauau

SEQ ID NO: 2653298 - RNA, 19 nt, Homo sapiens
  misc_RNA (1)...(19): siRNA sense strand
aggagguggaguuggauga

SEQ ID NO: 2653299 - RNA, 19 nt, Homo sapiens
  misc_RNA (1)...(19): siRNA sense strand
ccgagaucaacuuggugaa

SEQ ID NO: 2653300 - RNA, 19 nt, Homo sapiens
  misc_RNA (1)...(19): siRNA sense strand
ccagaagcgcaucguguuu

SEQ ID NO: 2653301 - RNA, 19 nt, Homo sapiens
  misc_RNA (1)...(19): siRNA sense strand
ccuucgagcagguggagga

SEQ ID NO: 2653302 - RNA, 19 nt, Homo sapiens
  misc_RNA (1)...(19): siRNA sense strand
caggaaucgaggacgccaa

SEQ ID NO: 2653303 - RNA, 19 nt, Homo sapiens
  misc_RNA (1)...(19): siRNA sense strand
ugaagcagcuacuguccaa

SEQ ID NO: 2653304 - RNA, 19 nt, Homo sapiens
  misc_RNA (1)...(19): siRNA sense strand
gggacaagcucgacgucug

SEQ ID NO: 2653305 - RNA, 19 nt, Homo sapiens
  misc_RNA (1)...(19): siRNA sense strand
cuggaggaggagacacuua

SEQ ID NO: 2653306 - RNA, 19 nt, Homo sapiens
  misc_RNA (1)...(19): siRNA sense strand
gcuccauccagcagaacau

SEQ ID NO: 2653307 - RNA, 19 nt, Homo sapiens
  misc_RNA (1)...(19): siRNA sense strand
ggaugacucugaacguaau

SEQ ID NO: 2653308 - RNA, 19 nt, Homo sapiens
  misc_RNA (1)...(19): siRNA sense strand
cgaugaaggacccucagaa

SEQ ID NO: 2653309 - RNA, 19 nt, Homo sapiens
  misc_RNA (1)...(19): siRNA sense strand
ccgcaaaggacguggagau

SEQ ID NO: 2653310 - RNA, 19 nt, Homo sapiens
  misc_RNA (1)...(19): siRNA sense strand
uggagauccuggagcaaga

SEQ ID NO: 2653311 - RNA, 19 nt, Homo sapiens
  misc_RNA (1)...(19): siRNA sense strand
uggagcaggaggagcgcaa

SEQ ID NO: 2653312 - RNA, 19 nt, Homo sapiens
  misc_RNA (1)...(19): siRNA sense strand
gagcgaaguccucgagcca

SEQ ID NO: 2653313 - RNA, 19 nt, Homo sapiens
  misc_RNA (1)...(19): siRNA sense strand
gcgaaguccucgagccauc

SEQ ID NO: 2653314 - RNA, 19 nt, Homo sapiens
  misc_RNA (1)...(19): siRNA sense strand
gaggagcgguucauggaga

SEQ ID NO: 2653315 - RNA, 19 nt, Homo sapiens
  misc_RNA (1)...(19): siRNA sense strand
cuuugagaguccugagcca

SEQ ID NO: 2653316 - RNA, 19 nt, Homo sapiens
  misc_RNA (1)...(19): siRNA sense strand
gcgagaagcauguaaagaa

SEQ ID NO: 2653317 - RNA, 19 nt, Homo sapiens
  misc_RNA (1)...(19): siRNA sense strand
acaugaagcucguggcaca

SEQ ID NO: 2653318 - RNA, 19 nt, Homo sapiens
  misc_RNA (1)...(19): siRNA sense strand
gcucagaguuugauucaga

SEQ ID NO: 2653319 - RNA, 19 nt, Homo sapiens
  misc_RNA (1)...(19): siRNA sense strand
uaaaugagauggagagaac

SEQ ID NO: 2653320 - RNA, 19 nt, Homo sapiens
  misc_RNA (1)...(19): siRNA sense strand
ucaagaggcugaaagagaa

SEQ ID NO: 2653321 - RNA, 19 nt, Homo sapiens
  misc_RNA (1)...(19): siRNA sense strand
cucaagaggcugaaagaga

SEQ ID NO: 2653322 - RNA, 19 nt, Homo sapiens
  misc_RNA (1)...(19): siRNA sense strand
gcucugggcucuagggagu

SEQ ID NO: 2653323 - RNA, 19 nt, Homo sapiens
  misc_RNA (1)...(19): siRNA sense strand
acaaggagcuggcggaguu

SEQ ID NO: 2653324 - RNA, 19 nt, Homo sapiens
  misc_RNA (1)...(19): siRNA sense strand
aggacaacguggagcggga

SEQ ID NO: 2653325 - RNA, 19 nt, Homo sapiens
  misc_RNA (1)...(19): siRNA sense strand
ccaccaaggcuaucgauga

SEQ ID NO: 2653326 - RNA, 19 nt, Homo sapiens
  misc_RNA (1)...(19): siRNA sense strand
cgggaagagacauggcuga

SEQ ID NO: 2653327 - RNA, 19 nt, Homo sapiens
  misc_RNA (1)...(19): siRNA sense strand
gcgaggaggucuucgaaac

SEQ ID NO: 2653328 - RNA, 19 nt, Homo sapiens
  misc_RNA (1)...(19): siRNA sense strand
cgagaagcauguaaagaac

SEQ ID NO: 2653329 - RNA, 19 nt, Homo sapiens
  misc_RNA (1)...(19): siRNA sense strand
gagacauggcugagcgugu

SEQ ID NO: 2653330 - RNA, 19 nt, Homo sapiens
  misc_RNA (1)...(19): siRNA sense strand
aguuugauucagagcacaa

SEQ ID NO: 2653331 - RNA, 19 nt, Homo sapiens
  misc_RNA (1)...(19): siRNA sense strand
caaccuaacaagcaaugaa

SEQ ID NO: 2653332 - RNA, 19 nt, Homo sapiens
  misc_RNA (1)...(19): siRNA sense strand
aggcugaaagagaagaaaa

SEQ ID NO: 2653333 - RNA, 19 nt, Homo sapiens
  misc_RNA (1)...(19): siRNA sense strand
ccuaaaugagauggagaga

SEQ ID NO: 2653334 - RNA, 19 nt, Homo sapiens
  misc_RNA (1)...(19): siRNA sense strand
gcuacaaggagcuggcgga

SEQ ID NO: 2653335 - RNA, 19 nt, Homo sapiens
  misc_RNA (1)...(19): siRNA sense strand
cuaaaugagauggagagaa

SEQ ID NO: 2653336 - RNA, 19 nt, Homo sapiens
  misc_RNA (1)...(19): siRNA sense strand
gagccauugaggagggcca

SEQ ID NO: 2653337 - RNA, 19 nt, Homo sapiens
  misc_RNA (1)...(19): siRNA sense strand
auguaaagaacguggcucu

SEQ ID NO: 2653338 - RNA, 19 nt, Homo sapiens
  misc_RNA (1)...(19): siRNA sense strand
ucggugagaaggaggccua

SEQ ID NO: 2653339 - RNA, 19 nt, Homo sapiens
  misc_RNA (1)...(19): siRNA sense strand
ugacggagcagcaggagca

SEQ ID NO: 2653340 - RNA, 19 nt, Homo sapiens
  misc_RNA (1)...(19): siRNA sense strand
cgccuaaaugagauggaga

SEQ ID NO: 2653341 - RNA, 19 nt, Homo sapiens
  misc_RNA (1)...(19): siRNA sense strand
cagaaagugcccagggaaa

SEQ ID NO: 2653342 - RNA, 19 nt, Homo sapiens
  misc_RNA (1)...(19): siRNA sense strand
aaucauggcugaaggcaaa

SEQ ID NO: 2653343 - RNA, 19 nt, Homo sapiens
  misc_RNA (1)...(19): siRNA sense strand
ggaaauucgagaugagcua

SEQ ID NO: 2653344 - RNA, 19 nt, Homo sapiens
  misc_RNA (1)...(19): siRNA sense strand
cgggaaaacuucaggggaa

SEQ ID NO: 2653345 - RNA, 19 nt, Homo sapiens
  misc_RNA (1)...(19): siRNA sense strand
caacauauguccagcauca

SEQ ID NO: 2653346 - RNA, 19 nt, Homo sapiens
  misc_RNA (1)...(19): siRNA sense strand
uggcagaaggcgaggaaca

SEQ ID NO: 2653347 - RNA, 19 nt, Homo sapiens
  misc_RNA (1)...(19): siRNA sense strand
gggacagauugcuggagaa

SEQ ID NO: 2653348 - RNA, 19 nt, Homo sapiens
  misc_RNA (1)...(19): siRNA sense strand
ggaaaugaaaccaaaucaa

SEQ ID NO: 2653349 - RNA, 19 nt, Homo sapiens
  misc_RNA (1)...(19): siRNA sense strand
gcaaggagcugcugcgcuu

SEQ ID NO: 2653350 - RNA, 19 nt, Homo sapiens
  misc_RNA (1)...(19): siRNA sense strand
ggcugaaggcaaaggagaa

SEQ ID NO: 2653351 - RNA, 19 nt, Homo sapiens
  misc_RNA (1)...(19): siRNA sense strand
caaucauggcugaaggcaa

SEQ ID NO: 2653352 - RNA, 19 nt, Homo sapiens
  misc_RNA (1)...(19): siRNA sense strand
ggagaagcaaagaggcaca

SEQ ID NO: 2653353 - RNA, 19 nt, Homo sapiens
  misc_RNA (1)...(19): siRNA sense strand
uugaagaccugcuggauga

SEQ ID NO: 2653354 - RNA, 19 nt, Homo sapiens
  misc_RNA (1)...(19): siRNA sense strand
gaacaagauucccuggaca

SEQ ID NO: 2653355 - RNA, 19 nt, Homo sapiens
  misc_RNA (1)...(19): siRNA sense strand
aggagaagcugcuggugau

SEQ ID NO: 2653356 - RNA, 19 nt, Homo sapiens
  misc_RNA (1)...(19): siRNA sense strand
cuuaaaggaucgcucuaua

SEQ ID NO: 2653357 - RNA, 19 nt, Homo sapiens
  misc_RNA (1)...(19): siRNA sense strand
gcagaaacuucgagucucu

SEQ ID NO: 2653358 - RNA, 19 nt, Homo sapiens
  misc_RNA (1)...(19): siRNA sense strand
ccagggaaaugaaaccaaa

SEQ ID NO: 2653359 - RNA, 19 nt, Homo sapiens
  misc_RNA (1)...(19): siRNA sense strand
cggacuaccgcguggucua

SEQ ID NO: 2653360 - RNA, 19 nt, Homo sapiens
  misc_RNA (1)...(19): siRNA sense strand
gagaugagcuacacgaguu

SEQ ID NO: 2653361 - RNA, 19 nt, Homo sapiens
  misc_RNA (1)...(19): siRNA sense strand
aggcggagcugaaggaugu

SEQ ID NO: 2653362 - RNA, 19 nt, Homo sapiens
  misc_RNA (1)...(19): siRNA sense strand
aggcaaaggagaagcaaag

SEQ ID NO: 2653363 - RNA, 19 nt, Homo sapiens
  misc_RNA (1)...(19): siRNA sense strand
ggaagaucggugcggauau

SEQ ID NO: 2653364 - RNA, 19 nt, Homo sapiens
  misc_RNA (1)...(19): siRNA sense strand
agucauugagugggagaua

SEQ ID NO: 2653365 - RNA, 19 nt, Homo sapiens
  misc_RNA (1)...(19): siRNA sense strand
cacugaacuuggaccgaaa

SEQ ID NO: 2653366 - RNA, 19 nt, Homo sapiens
  misc_RNA (1)...(19): siRNA sense strand
gagaauuuccagugccuuu

SEQ ID NO: 2653367 - RNA, 19 nt, Homo sapiens
  misc_RNA (1)...(19): siRNA sense strand
aggcaauguggauggucaa

SEQ ID NO: 2653368 - RNA, 19 nt, Homo sapiens
  misc_RNA (1)...(19): siRNA sense strand
gauccaagaccuccacaaa

SEQ ID NO: 2653369 - RNA, 19 nt, Homo sapiens
  misc_RNA (1)...(19): siRNA sense strand
agaggugaggugugugaaa

SEQ ID NO: 2653370 - RNA, 19 nt, Homo sapiens
  misc_RNA (1)...(19): siRNA sense strand
cagcaucaaagaagaaaca

SEQ ID NO: 2653371 - RNA, 19 nt, Homo sapiens
  misc_RNA (1)...(19): siRNA sense strand
caggauguguaccgagauu

SEQ ID NO: 2653372 - RNA, 19 nt, Homo sapiens
  misc_RNA (1)...(19): siRNA sense strand
ucuccaaggaugacaagua

SEQ ID NO: 2653373 - RNA, 19 nt, Homo sapiens
  misc_RNA (1)...(19): siRNA sense strand
ggucaaauccaggcagaga

SEQ ID NO: 2653374 - RNA, 19 nt, Homo sapiens
  misc_RNA (1)...(19): siRNA sense strand
gcucagaggaccgggaaca

SEQ ID NO: 2653375 - RNA, 19 nt, Homo sapiens
  misc_RNA (1)...(19): siRNA sense strand
agacagcccugaugugcaa

SEQ ID NO: 2653376 - RNA, 19 nt, Homo sapiens
  misc_RNA (1)...(19): siRNA sense strand
gaggagaagcugcugguga

SEQ ID NO: 2653377 - RNA, 19 nt, Homo sapiens
  misc_RNA (1)...(19): siRNA sense strand
ggagaggugagguguguga

SEQ ID NO: 2653378 - RNA, 19 nt, Homo sapiens
  misc_RNA (1)...(19): siRNA sense strand
gcucaaagaucaaugcuug

SEQ ID NO: 2653379 - RNA, 19 nt, Homo sapiens
  misc_RNA (1)...(19): siRNA sense strand
ccgagagagccaagaggca

SEQ ID NO: 2653380 - RNA, 19 nt, Homo sapiens
  misc_RNA (1)...(19): siRNA sense strand
agaaagugcccagggaaau

SEQ ID NO: 2653381 - RNA, 19 nt, Homo sapiens
  misc_RNA (1)...(19): siRNA sense strand
gggaaaugaaaccaaauca

SEQ ID NO: 2653382 - RNA, 19 nt, Homo sapiens
  misc_RNA (1)...(19): siRNA sense strand
aaggagaagcaaagaggca

SEQ ID NO: 2653383 - RNA, 19 nt, Homo sapiens
  misc_RNA (1)...(19): siRNA sense strand
uggcagagcucggagguca

SEQ ID NO: 2653384 - RNA, 19 nt, Homo sapiens
  misc_RNA (1)...(19): siRNA sense strand
aaggcaaaggagaagcaaa

SEQ ID NO: 2653385 - RNA, 19 nt, Homo sapiens
  misc_RNA (1)...(19): siRNA sense strand
uuaucugauccgagagaau

SEQ ID NO: 2653386 - RNA, 19 nt, Homo sapiens
  misc_RNA (1)...(19): siRNA sense strand
acagauugcuggagaagcu

SEQ ID NO: 2653387 - RNA, 19 nt, Homo sapiens
  misc_RNA (1)...(19): siRNA sense strand
ggaaagcaaucaacugcau

SEQ ID NO: 2653388 - RNA, 19 nt, Homo sapiens
  misc_RNA (1)...(19): siRNA sense strand
ucaagaaggcaauguggau

SEQ ID NO: 2653389 - RNA, 19 nt, Homo sapiens
  misc_RNA (1)...(19): siRNA sense strand
ucucggaggcggagcugaa

SEQ ID NO: 2653390 - RNA, 19 nt, Homo sapiens
  misc_RNA (1)...(19): siRNA sense strand
gggacauggaagagcagca

SEQ ID NO: 2653391 - RNA, 19 nt, Homo sapiens
  misc_RNA (1)...(19): siRNA sense strand
cauuugggauggaggcuca

SEQ ID NO: 2653392 - RNA, 19 nt, Homo sapiens
  misc_RNA (1)...(19): siRNA sense strand
gggacuuggcagaaggcga

SEQ ID NO: 2653393 - RNA, 19 nt, Homo sapiens
  misc_RNA (1)...(19): siRNA sense strand
ucauugagugggagauaga

SEQ ID NO: 2653394 - RNA, 19 nt, Homo sapiens
  misc_RNA (1)...(19): siRNA sense strand
cagaaggcgaggaacaaga

SEQ ID NO: 2653395 - RNA, 19 nt, Homo sapiens
  misc_RNA (1)...(19): siRNA sense strand
ccaagaagcucaucacucu

SEQ ID NO: 2653396 - RNA, 19 nt, Homo sapiens
  misc_RNA (1)...(19): siRNA sense strand
caugcuaacuggacacaca

SEQ ID NO: 2653397 - RNA, 19 nt, Homo sapiens
  misc_RNA (1)...(19): siRNA sense strand
caucuuacaugguggcagu

SEQ ID NO: 2653398 - RNA, 19 nt, Homo sapiens
  misc_RNA (1)...(19): siRNA sense strand
caguccagaagcaaggaaa

SEQ ID NO: 2653399 - RNA, 19 nt, Homo sapiens
  misc_RNA (1)...(19): siRNA sense strand
ggcagaaggcgaggaacaa

SEQ ID NO: 2653400 - RNA, 19 nt, Homo sapiens
  misc_RNA (1)...(19): siRNA sense strand
acaaacacauccuugaaga

SEQ ID NO: 2653401 - RNA, 19 nt, Homo sapiens
  misc_RNA (1)...(19): siRNA sense strand
gaggcuggcguuugaggaa

SEQ ID NO: 2653402 - RNA, 19 nt, Homo sapiens
  misc_RNA (1)...(19): siRNA sense strand
gcaucauggcuguguggga

SEQ ID NO: 2653403 - RNA, 19 nt, Homo sapiens
  misc_RNA (1)...(19): siRNA sense strand
guacgugggcuuaaaggau

SEQ ID NO: 2653404 - RNA, 19 nt, Homo sapiens
  misc_RNA (1)...(19): siRNA sense strand
uggugaaccccaagaacaa

SEQ ID NO: 2653405 - RNA, 19 nt, Homo sapiens
  misc_RNA (1)...(19): siRNA sense strand
aggccuacugggaggugaa

SEQ ID NO: 2653406 - RNA, 19 nt, Homo sapiens
  misc_RNA (1)...(19): siRNA sense strand
cugcggaagcugaaggagu

SEQ ID NO: 2653407 - RNA, 19 nt, Homo sapiens
  misc_RNA (1)...(19): siRNA sense strand
uggcagucauugaguggga

SEQ ID NO: 2653408 - RNA, 19 nt, Homo sapiens
  misc_RNA (1)...(19): siRNA sense strand
uggcugaaggcaaaggaga

SEQ ID NO: 2653409 - RNA, 19 nt, Homo sapiens
  misc_RNA (1)...(19): siRNA sense strand
ccacaaacacauccuugaa

SEQ ID NO: 2653410 - RNA, 19 nt, Homo sapiens
  misc_RNA (1)...(19): siRNA sense strand
cugugugggacauggaaga

SEQ ID NO: 2653411 - RNA, 19 nt, Homo sapiens
  misc_RNA (1)...(19): siRNA sense strand
aaggcaauguggaugguca

SEQ ID NO: 2653412 - RNA, 19 nt, Homo sapiens
  misc_RNA (1)...(19): siRNA sense strand
gggagaagcugcuguguga

SEQ ID NO: 2653413 - RNA, 19 nt, Homo sapiens
  misc_RNA (1)...(19): siRNA sense strand
uggaaagugugcagaagaa

SEQ ID NO: 2653414 - RNA, 19 nt, Homo sapiens
  misc_RNA (1)...(19): siRNA sense strand
aaguggagcuggaggagua

SEQ ID NO: 2653415 - RNA, 19 nt, Homo sapiens
  misc_RNA (1)...(19): siRNA sense strand
uggacaagcuggugcagaa

SEQ ID NO: 2653416 - RNA, 19 nt, Homo sapiens
  misc_RNA (1)...(19): siRNA sense strand
cggaagaccaggagaaguu

SEQ ID NO: 2653417 - RNA, 19 nt, Homo sapiens
  misc_RNA (1)...(19): siRNA sense strand
gcaaggagguacugaacga

SEQ ID NO: 2653418 - RNA, 19 nt, Homo sapiens
  misc_RNA (1)...(19): siRNA sense strand
ggacgagcgcuucgaguua

SEQ ID NO: 2653419 - RNA, 19 nt, Homo sapiens
  misc_RNA (1)...(19): siRNA sense strand
ccagaaaucuacaggucau

SEQ ID NO: 2653420 - RNA, 19 nt, Homo sapiens
  misc_RNA (1)...(19): siRNA sense strand
gcaaagggcaggugaucau

SEQ ID NO: 2653421 - RNA, 19 nt, Homo sapiens
  misc_RNA (1)...(19): siRNA sense strand
ccaagaauggcaaguuaaa

SEQ ID NO: 2653422 - RNA, 19 nt, Homo sapiens
  misc_RNA (1)...(19): siRNA sense strand
gugaggaggacgaggacau

SEQ ID NO: 2653423 - RNA, 19 nt, Homo sapiens
  misc_RNA (1)...(19): siRNA sense strand
cggauauagaauagacauu

SEQ ID NO: 2653424 - RNA, 19 nt, Homo sapiens
  misc_RNA (1)...(19): siRNA sense strand
ccaucagcuaugugaauaa

SEQ ID NO: 2653425 - RNA, 19 nt, Homo sapiens
  misc_RNA (1)...(19): siRNA sense strand
ugaaaagacugaaggccaa

SEQ ID NO: 2653426 - RNA, 19 nt, Homo sapiens
  misc_RNA (1)...(19): siRNA sense strand
cgggauaagccgggaaauu

SEQ ID NO: 2653427 - RNA, 19 nt, Homo sapiens
  misc_RNA (1)...(19): siRNA sense strand
ucgagagccucaagaagaa

SEQ ID NO: 2653428 - RNA, 19 nt, Homo sapiens
  misc_RNA (1)...(19): siRNA sense strand
ugaaggugguggagcucua

SEQ ID NO: 2653429 - RNA, 19 nt, Homo sapiens
  misc_RNA (1)...(19): siRNA sense strand
ucgugaacuccgaggacua

SEQ ID NO: 2653430 - RNA, 19 nt, Homo sapiens
  misc_RNA (1)...(19): siRNA sense strand
gaaacuucgugguaccaaa

SEQ ID NO: 2653431 - RNA, 19 nt, Homo sapiens
  misc_RNA (1)...(19): siRNA sense strand
gacugaaggccaaggaaga

SEQ ID NO: 2653432 - RNA, 19 nt, Homo sapiens
  misc_RNA (1)...(19): siRNA sense strand
cagcagggcuucaacaaga

SEQ ID NO: 2653433 - RNA, 19 nt, Homo sapiens
  misc_RNA (1)...(19): siRNA sense strand
gagaacugcuucaagguga

SEQ ID NO: 2653434 - RNA, 19 nt, Homo sapiens
  misc_RNA (1)...(19): siRNA sense strand
ggauaagccgggaaauuga

SEQ ID NO: 2653435 - RNA, 19 nt, Homo sapiens
  misc_RNA (1)...(19): siRNA sense strand
gcuccaggcugcugaagau

SEQ ID NO: 2653436 - RNA, 19 nt, Homo sapiens
  misc_RNA (1)...(19): siRNA sense strand
aggacuggcugauggguga

SEQ ID NO: 2653437 - RNA, 19 nt, Homo sapiens
  misc_RNA (1)...(19): siRNA sense strand
agaagaacgagcacgacaa

SEQ ID NO: 2653438 - RNA, 19 nt, Homo sapiens
  misc_RNA (1)...(19): siRNA sense strand
cagcagcgcucaucagcua

SEQ ID NO: 2653439 - RNA, 19 nt, Homo sapiens
  misc_RNA (1)...(19): siRNA sense strand
gccaggagguguaugaaaa

SEQ ID NO: 2653440 - RNA, 19 nt, Homo sapiens
  misc_RNA (1)...(19): siRNA sense strand
ggucauuccuggagauccu

SEQ ID NO: 2653441 - RNA, 19 nt, Homo sapiens
  misc_RNA (1)...(19): siRNA sense strand
ucccaagaauggcaaguua

SEQ ID NO: 2653442 - RNA, 19 nt, Homo sapiens
  misc_RNA (1)...(19): siRNA sense strand
aagaauggcaaguuaaaca

SEQ ID NO: 2653443 - RNA, 19 nt, Homo sapiens
  misc_RNA (1)...(19): siRNA sense strand
ugaagagccaggaggugua

SEQ ID NO: 2653444 - RNA, 19 nt, Homo sapiens
  misc_RNA (1)...(19): siRNA sense strand
cgccggaagaccaggagaa

SEQ ID NO: 2653445 - RNA, 19 nt, Homo sapiens
  misc_RNA (1)...(19): siRNA sense strand
ucaacgagaucgagagcgu

SEQ ID NO: 2653446 - RNA, 19 nt, Homo sapiens
  misc_RNA (1)...(19): siRNA sense strand
gcugugaggacgagcgcuu

SEQ ID NO: 2653447 - RNA, 19 nt, Homo sapiens
  misc_RNA (1)...(19): siRNA sense strand
gcuacuacgugaagcggca

SEQ ID NO: 2653448 - RNA, 19 nt, Homo sapiens
  misc_RNA (1)...(19): siRNA sense strand
agacgaaccuggccacaau

SEQ ID NO: 2653449 - RNA, 19 nt, Homo sapiens
  misc_RNA (1)...(19): siRNA sense strand
ugauguuccugcagcgcaa

SEQ ID NO: 2653450 - RNA, 19 nt, Homo sapiens
  misc_RNA (1)...(19): siRNA sense strand
cccaagaauggcaaguuaa

SEQ ID NO: 2653451 - RNA, 19 nt, Homo sapiens
  misc_RNA (1)...(19): siRNA sense strand
ugacaagccaggagaauuc

SEQ ID NO: 2653452 - RNA, 19 nt, Homo sapiens
  misc_RNA (1)...(19): siRNA sense strand
cagaagaacgagcacgaca

SEQ ID NO: 2653453 - RNA, 19 nt, Homo sapiens
  misc_RNA (1)...(19): siRNA sense strand
ccgagaaggagcgggagaa

SEQ ID NO: 2653454 - RNA, 19 nt, Homo sapiens
  misc_RNA (1)...(19): siRNA sense strand
gggacggugcagaggacuu

SEQ ID NO: 2653455 - RNA, 19 nt, Homo sapiens
  misc_RNA (1)...(19): siRNA sense strand
ucaacaacgccaucagcua

SEQ ID NO: 2653456 - RNA, 19 nt, Homo sapiens
  misc_RNA (1)...(19): siRNA sense strand
cggagaucaucgagagccu

SEQ ID NO: 2653457 - RNA, 19 nt, Homo sapiens
  misc_RNA (1)...(19): siRNA sense strand
acguuguccuggagacgaa

SEQ ID NO: 2653458 - RNA, 19 nt, Homo sapiens
  misc_RNA (1)...(19): siRNA sense strand
cugaaaagacugaaggcca

SEQ ID NO: 2653459 - RNA, 19 nt, Homo sapiens
  misc_RNA (1)...(19): siRNA sense strand
gcugcauggccgacgagaa

SEQ ID NO: 2653460 - RNA, 19 nt, Homo sapiens
  misc_RNA (1)...(19): siRNA sense strand
gugcagaggacuucaagca

SEQ ID NO: 2653461 - RNA, 19 nt, Homo sapiens
  misc_RNA (1)...(19): siRNA sense strand
cagaaggagcagcugaaca

SEQ ID NO: 2653462 - RNA, 19 nt, Homo sapiens
  misc_RNA (1)...(19): siRNA sense strand
gugaaguggagcuggagga

SEQ ID NO: 2653463 - RNA, 19 nt, Homo sapiens
  misc_RNA (1)...(19): siRNA sense strand
ugcaagacgcugugugaga

SEQ ID NO: 2653464 - RNA, 19 nt, Homo sapiens
  misc_RNA (1)...(19): siRNA sense strand
agaagaagcuaucucggau

SEQ ID NO: 2653465 - RNA, 19 nt, Homo sapiens
  misc_RNA (1)...(19): siRNA sense strand
ugucugaagaggagguguu

SEQ ID NO: 2653466 - RNA, 19 nt, Homo sapiens
  misc_RNA (1)...(19): siRNA sense strand
agaucuggcgggagcagua

SEQ ID NO: 2653467 - RNA, 19 nt, Homo sapiens
  misc_RNA (1)...(19): siRNA sense strand
uggagaucaugaaggaguu

SEQ ID NO: 2653468 - RNA, 19 nt, Homo sapiens
  misc_RNA (1)...(19): siRNA sense strand
cguacgaggagcagcuuca

SEQ ID NO: 2653469 - RNA, 19 nt, Homo sapiens
  misc_RNA (1)...(19): siRNA sense strand
ccaggcugcugaagaucua

SEQ ID NO: 2653470 - RNA, 19 nt, Homo sapiens
  misc_RNA (1)...(19): siRNA sense strand
ugguggagcucuaccugaa

SEQ ID NO: 2653471 - RNA, 19 nt, Homo sapiens
  misc_RNA (1)...(19): siRNA sense strand
ggaaauugauuaugcaucc

SEQ ID NO: 2653472 - RNA, 19 nt, Homo sapiens
  misc_RNA (1)...(19): siRNA sense strand
acaagcuggugcagaacau

SEQ ID NO: 2653473 - RNA, 19 nt, Homo sapiens
  misc_RNA (1)...(19): siRNA sense strand
ccguaaagauggagaacaa

SEQ ID NO: 2653474 - RNA, 19 nt, Homo sapiens
  misc_RNA (1)...(19): siRNA sense strand
gggaagagacccagggcau

SEQ ID NO: 2653475 - RNA, 19 nt, Homo sapiens
  misc_RNA (1)...(19): siRNA sense strand
gaacaaucuugcugaguuu

SEQ ID NO: 2653476 - RNA, 19 nt, Homo sapiens
  misc_RNA (1)...(19): siRNA sense strand
gugccaagaagaaggauaa

SEQ ID NO: 2653477 - RNA, 19 nt, Homo sapiens
  misc_RNA (1)...(19): siRNA sense strand
gucugaagguggaaggaaa

SEQ ID NO: 2653478 - RNA, 19 nt, Homo sapiens
  misc_RNA (1)...(19): siRNA sense strand
uggaaaugauggagucuca

SEQ ID NO: 2653479 - RNA, 19 nt, Homo sapiens
  misc_RNA (1)...(19): siRNA sense strand
guucaagguggaagaguga

SEQ ID NO: 2653480 - RNA, 19 nt, Homo sapiens
  misc_RNA (1)...(19): siRNA sense strand
gaaaagaagacaacccaaa

SEQ ID NO: 2653481 - RNA, 19 nt, Homo sapiens
  misc_RNA (1)...(19): siRNA sense strand
uguguaaggagaaggagaa

SEQ ID NO: 2653482 - RNA, 19 nt, Homo sapiens
  misc_RNA (1)...(19): siRNA sense strand
gaaggagaagcuacagaaa

SEQ ID NO: 2653483 - RNA, 19 nt, Homo sapiens
  misc_RNA (1)...(19): siRNA sense strand
uaucugaagcaauggaaau

SEQ ID NO: 2653484 - RNA, 19 nt, Homo sapiens
  misc_RNA (1)...(19): siRNA sense strand
agacagugccugcagagaa

SEQ ID NO: 2653485 - RNA, 19 nt, Homo sapiens
  misc_RNA (1)...(19): siRNA sense strand
aggagaaggagaagcuaca

SEQ ID NO: 2653486 - RNA, 19 nt, Homo sapiens
  misc_RNA (1)...(19): siRNA sense strand
gacagugccugcagagaau

SEQ ID NO: 2653487 - RNA, 19 nt, Homo sapiens
  misc_RNA (1)...(19): siRNA sense strand
cgguaucugcaguaugaaa

SEQ ID NO: 2653488 - RNA, 19 nt, Homo sapiens
  misc_RNA (1)...(19): siRNA sense strand
ccacguugcuggaagggca

SEQ ID NO: 2653489 - RNA, 19 nt, Homo sapiens
  misc_RNA (1)...(19): siRNA sense strand
caaagaaaccugagucaac

SEQ ID NO: 2653490 - RNA, 19 nt, Homo sapiens
  misc_RNA (1)...(19): siRNA sense strand
ggauuuaucugaagcaaug

SEQ ID NO: 2653491 - RNA, 19 nt, Homo sapiens
  misc_RNA (1)...(19): siRNA sense strand
ucaagguggaagagugauu

SEQ ID NO: 2653492 - RNA, 19 nt, Homo sapiens
  misc_RNA (1)...(19): siRNA sense strand
cggauuuaucugaagcaau

SEQ ID NO: 2653493 - RNA, 19 nt, Homo sapiens
  misc_RNA (1)...(19): siRNA sense strand
gaagaugucugaaggugga

SEQ ID NO: 2653494 - RNA, 19 nt, Homo sapiens
  misc_RNA (1)...(19): siRNA sense strand
ucugaagguggaaggaaau

SEQ ID NO: 2653495 - RNA, 19 nt, Homo sapiens
  misc_RNA (1)...(19): siRNA sense strand
ccagaaaagcaaagcagau

SEQ ID NO: 2653496 - RNA, 19 nt, Homo sapiens
  misc_RNA (1)...(19): siRNA sense strand
cagaaaagcaaagcagaua

SEQ ID NO: 2653497 - RNA, 19 nt, Homo sapiens
  misc_RNA (1)...(19): siRNA sense strand
caguaugaaaagaagacaa

SEQ ID NO: 2653498 - RNA, 19 nt, Homo sapiens
  misc_RNA (1)...(19): siRNA sense strand
agugccaagaagaaggaua

SEQ ID NO: 2653499 - RNA, 19 nt, Homo sapiens
  misc_RNA (1)...(19): siRNA sense strand
aaagaagggcagaaaagaa

SEQ ID NO: 2653500 - RNA, 19 nt, Homo sapiens
  misc_RNA (1)...(19): siRNA sense strand
agaacuugauguuggugau

SEQ ID NO: 2653501 - RNA, 19 nt, Homo sapiens
  misc_RNA (1)...(19): siRNA sense strand
gcuggaagggcauggcaca

SEQ ID NO: 2653502 - RNA, 19 nt, Homo sapiens
  misc_RNA (1)...(19): siRNA sense strand
guaaggagaaggagaagcu

SEQ ID NO: 2653503 - RNA, 19 nt, Homo sapiens
  misc_RNA (1)...(19): siRNA sense strand
uaaaagaguucaaggugga

SEQ ID NO: 2653504 - RNA, 19 nt, Homo sapiens
  misc_RNA (1)...(19): siRNA sense strand
auguguaaggagaaggaga

SEQ ID NO: 2653505 - RNA, 19 nt, Homo sapiens
  misc_RNA (1)...(19): siRNA sense strand
agaacaaucuugcugaguu

SEQ ID NO: 2653506 - RNA, 19 nt, Homo sapiens
  misc_RNA (1)...(19): siRNA sense strand
gagaaggagaagcuacaga

SEQ ID NO: 2653507 - RNA, 19 nt, Homo sapiens
  misc_RNA (1)...(19): siRNA sense strand
cuagcagugccaagaagaa

SEQ ID NO: 2653508 - RNA, 19 nt, Homo sapiens
  misc_RNA (1)...(19): siRNA sense strand
gggcugagcuggcauauaa

SEQ ID NO: 2653509 - RNA, 19 nt, Homo sapiens
  misc_RNA (1)...(19): siRNA sense strand
cguccggaguucuggauaa

SEQ ID NO: 2653510 - RNA, 19 nt, Homo sapiens
  misc_RNA (1)...(19): siRNA sense strand
ggacuuuaucuaugagaau

SEQ ID NO: 2653511 - RNA, 19 nt, Homo sapiens
  misc_RNA (1)...(19): siRNA sense strand
ccaacaacgucaugaaguu

SEQ ID NO: 2653512 - RNA, 19 nt, Homo sapiens
  misc_RNA (1)...(19): siRNA sense strand
cuggagagcuguaugaaga

SEQ ID NO: 2653513 - RNA, 19 nt, Homo sapiens
  misc_RNA (1)...(19): siRNA sense strand
gugcaggccgugugugaaa

SEQ ID NO: 2653514 - RNA, 19 nt, Homo sapiens
  misc_RNA (1)...(19): siRNA sense strand
agaggaaggcucagggaca

SEQ ID NO: 2653515 - RNA, 19 nt, Homo sapiens
  misc_RNA (1)...(19): siRNA sense strand
ggacauggagcgcuugaaa

SEQ ID NO: 2653516 - RNA, 19 nt, Homo sapiens
  misc_RNA (1)...(19): siRNA sense strand
augagaauguggagagcga

SEQ ID NO: 2653517 - RNA, 19 nt, Homo sapiens
  misc_RNA (1)...(19): siRNA sense strand
aggaggacgaggaggaaga

SEQ ID NO: 2653518 - RNA, 19 nt, Homo sapiens
  misc_RNA (1)...(19): siRNA sense strand
gugugagugccgagggcua

SEQ ID NO: 2653519 - RNA, 19 nt, Homo sapiens
  misc_RNA (1)...(19): siRNA sense strand
gcuggguggccgaggaaau

SEQ ID NO: 2653520 - RNA, 19 nt, Homo sapiens
  misc_RNA (1)...(19): siRNA sense strand
aggaggaggacgaggacga

SEQ ID NO: 2653521 - RNA, 19 nt, Homo sapiens
  misc_RNA (1)...(19): siRNA sense strand
gcaaagcagugaaggccga

SEQ ID NO: 2653522 - RNA, 19 nt, Homo sapiens
  misc_RNA (1)...(19): siRNA sense strand
aggaggaagaggaggacga

SEQ ID NO: 2653523 - RNA, 19 nt, Homo sapiens
  misc_RNA (1)...(19): siRNA sense strand
uggccaagcuggaguacca

SEQ ID NO: 2653524 - RNA, 19 nt, Homo sapiens
  misc_RNA (1)...(19): siRNA sense strand
guuucuaccucaaggacau

SEQ ID NO: 2653525 - RNA, 19 nt, Homo sapiens
  misc_RNA (1)...(19): siRNA sense strand
cggcagaaccggucgucuu

SEQ ID NO: 2653526 - RNA, 19 nt, Homo sapiens
  misc_RNA (1)...(19): siRNA sense strand
aggaggaggacgaggagga

SEQ ID NO: 2653527 - RNA, 19 nt, Homo sapiens
  misc_RNA (1)...(19): siRNA sense strand
aggaagaggaggacgagga

SEQ ID NO: 2653528 - RNA, 19 nt, Homo sapiens
  misc_RNA (1)...(19): siRNA sense strand
gcgaggaggacuuuaucua

SEQ ID NO: 2653529 - RNA, 19 nt, Homo sapiens
  misc_RNA (1)...(19): siRNA sense strand
ugauuacuuuggugugaaa

SEQ ID NO: 2653530 - RNA, 19 nt, Homo sapiens
  misc_RNA (1)...(19): siRNA sense strand
acauggagcgcuugaaaga

SEQ ID NO: 2653531 - RNA, 19 nt, Homo sapiens
  misc_RNA (1)...(19): siRNA sense strand
acgaggaggaggaggacga

SEQ ID NO: 2653532 - RNA, 19 nt, Homo sapiens
  misc_RNA (1)...(19): siRNA sense strand
aggacacguuccaggacua

SEQ ID NO: 2653533 - RNA, 19 nt, Homo sapiens
  misc_RNA (1)...(19): siRNA sense strand
ucaugaaguugaagcagau

SEQ ID NO: 2653534 - RNA, 19 nt, Homo sapiens
  misc_RNA (1)...(19): siRNA sense strand
gcaaggaggaggacgagga

SEQ ID NO: 2653535 - RNA, 19 nt, Homo sapiens
  misc_RNA (1)...(19): siRNA sense strand
ucaaggacauggagcgcuu

SEQ ID NO: 2653536 - RNA, 19 nt, Homo sapiens
  misc_RNA (1)...(19): siRNA sense strand
cugcagaauuugcgugcca

SEQ ID NO: 2653537 - RNA, 19 nt, Homo sapiens
  misc_RNA (1)...(19): siRNA sense strand
cgauuguggucaacugcua

SEQ ID NO: 2653538 - RNA, 19 nt, Homo sapiens
  misc_RNA (1)...(19): siRNA sense strand
acgaggaggaagaggagga

SEQ ID NO: 2653539 - RNA, 19 nt, Homo sapiens
  misc_RNA (1)...(19): siRNA sense strand
aagaggaggacgaggagga

SEQ ID NO: 2653540 - RNA, 19 nt, Homo sapiens
  misc_RNA (1)...(19): siRNA sense strand
ccgcgaggccuuuaagaga

SEQ ID NO: 2653541 - RNA, 19 nt, Homo sapiens
  misc_RNA (1)...(19): siRNA sense strand
gaauguggagagcgagcua

SEQ ID NO: 2653542 - RNA, 19 nt, Homo sapiens
  misc_RNA (1)...(19): siRNA sense strand
acacauucacagaggcuga

SEQ ID NO: 2653543 - RNA, 19 nt, Homo sapiens
  misc_RNA (1)...(19): siRNA sense strand
aggagauguucgugcaguu

SEQ ID NO: 2653544 - RNA, 19 nt, Homo sapiens
  misc_RNA (1)...(19): siRNA sense strand
caggaacgccagagcauca

SEQ ID NO: 2653545 - RNA, 19 nt, Homo sapiens
  misc_RNA (1)...(19): siRNA sense strand
acgacgaggaggaggagga

SEQ ID NO: 2653546 - RNA, 19 nt, Homo sapiens
  misc_RNA (1)...(19): siRNA sense strand
gcaugauucugguggccga

SEQ ID NO: 2653547 - RNA, 19 nt, Homo sapiens
  misc_RNA (1)...(19): siRNA sense strand
acacgucggcuaugguaua

SEQ ID NO: 2653548 - RNA, 19 nt, Homo sapiens
  misc_RNA (1)...(19): siRNA sense strand
gucaugaaguugaagcaga

SEQ ID NO: 2653549 - RNA, 19 nt, Homo sapiens
  misc_RNA (1)...(19): siRNA sense strand
gggccgaggaguucuacua

SEQ ID NO: 2653550 - RNA, 19 nt, Homo sapiens
  misc_RNA (1)...(19): siRNA sense strand
gauucgacccguaggcaga

SEQ ID NO: 2653551 - RNA, 19 nt, Homo sapiens
  misc_RNA (1)...(19): siRNA sense strand
cacaaggcguggaugaaga

SEQ ID NO: 2653552 - RNA, 19 nt, Homo sapiens
  misc_RNA (1)...(19): siRNA sense strand
gcgaggccuuuaagagaca

SEQ ID NO: 2653553 - RNA, 19 nt, Homo sapiens
  misc_RNA (1)...(19): siRNA sense strand
ccgagaaggccucugccaa

SEQ ID NO: 2653554 - RNA, 19 nt, Homo sapiens
  misc_RNA (1)...(19): siRNA sense strand
gugccgagggcuacaagaa

SEQ ID NO: 2653555 - RNA, 19 nt, Homo sapiens
  misc_RNA (1)...(19): siRNA sense strand
gcgacgugcugaugaccuu

SEQ ID NO: 2653556 - RNA, 19 nt, Homo sapiens
  misc_RNA (1)...(19): siRNA sense strand
ugaagaaguacgaggacac

SEQ ID NO: 2653557 - RNA, 19 nt, Homo sapiens
  misc_RNA (1)...(19): siRNA sense strand
ggucuguccuguacacauu

SEQ ID NO: 2653558 - RNA, 19 nt, Homo sapiens
  misc_RNA (1)...(19): siRNA sense strand
gagcuggugcugagcguga

SEQ ID NO: 2653559 - RNA, 19 nt, Homo sapiens
  misc_RNA (1)...(19): siRNA sense strand
aggaaauggccaagcugga

SEQ ID NO: 2653560 - RNA, 19 nt, Homo sapiens
  misc_RNA (1)...(19): siRNA sense strand
ccaucuggcucaaugacau

SEQ ID NO: 2653561 - RNA, 19 nt, Homo sapiens
  misc_RNA (1)...(19): siRNA sense strand
agagcuguaugaagaagua

SEQ ID NO: 2653562 - RNA, 19 nt, Homo sapiens
  misc_RNA (1)...(19): siRNA sense strand
gaaaauuaccggcuggaga

SEQ ID NO: 2653563 - RNA, 19 nt, Homo sapiens
  misc_RNA (1)...(19): siRNA sense strand
ggaugaagacggugccuac

SEQ ID NO: 2653564 - RNA, 19 nt, Homo sapiens
  misc_RNA (1)...(19): siRNA sense strand
aggacuaccaggagauguu

SEQ ID NO: 2653565 - RNA, 19 nt, Homo sapiens
  misc_RNA (1)...(19): siRNA sense strand
acgaggacgacgaggagga

SEQ ID NO: 2653566 - RNA, 19 nt, Homo sapiens
  misc_RNA (1)...(19): siRNA sense strand
auggagcgcuugaaagaga

SEQ ID NO: 2653567 - RNA, 19 nt, Homo sapiens
  misc_RNA (1)...(19): siRNA sense strand
ugaaagagaugcuggccac

SEQ ID NO: 2653568 - RNA, 19 nt, Homo sapiens
  misc_RNA (1)...(19): siRNA sense strand
aggacgacgaggaggagga

SEQ ID NO: 2653569 - RNA, 19 nt, Homo sapiens
  misc_RNA (1)...(19): siRNA sense strand
ggcucaaugacauggaaaa

SEQ ID NO: 2653570 - RNA, 19 nt, Homo sapiens
  misc_RNA (1)...(19): siRNA sense strand
guaugaagaaguacgagga

SEQ ID NO: 2653571 - RNA, 19 nt, Homo sapiens
  misc_RNA (1)...(19): siRNA sense strand
gguaaaggacugugugaaa

SEQ ID NO: 2653572 - RNA, 19 nt, Homo sapiens
  misc_RNA (1)...(19): siRNA sense strand
aggaagagcuggaggagga

SEQ ID NO: 2653573 - RNA, 19 nt, Homo sapiens
  misc_RNA (1)...(19): siRNA sense strand
cgaccaaauccaagaacaa

SEQ ID NO: 2653574 - RNA, 19 nt, Homo sapiens
  misc_RNA (1)...(19): siRNA sense strand
ggacaagcgaacugacaaa

SEQ ID NO: 2653575 - RNA, 19 nt, Homo sapiens
  misc_RNA (1)...(19): siRNA sense strand
caucaaaucccgcgugaaa

SEQ ID NO: 2653576 - RNA, 19 nt, Homo sapiens
  misc_RNA (1)...(19): siRNA sense strand
gcaacaagcccgagaucuu

SEQ ID NO: 2653577 - RNA, 19 nt, Homo sapiens
  misc_RNA (1)...(19): siRNA sense strand
ucgggaaccucuugagaaa

SEQ ID NO: 2653578 - RNA, 19 nt, Homo sapiens
  misc_RNA (1)...(19): siRNA sense strand
aggaggaggaggaggacaa

SEQ ID NO: 2653579 - RNA, 19 nt, Homo sapiens
  misc_RNA (1)...(19): siRNA sense strand
gaauaacacucaacagcua

SEQ ID NO: 2653580 - RNA, 19 nt, Homo sapiens
  misc_RNA (1)...(19): siRNA sense strand
gguuaagggcacaggcaau

SEQ ID NO: 2653581 - RNA, 19 nt, Homo sapiens
  misc_RNA (1)...(19): siRNA sense strand
gcgcugaagugauguggaa

SEQ ID NO: 2653582 - RNA, 19 nt, Homo sapiens
  misc_RNA (1)...(19): siRNA sense strand
agaucaaaggcgaggagaa

SEQ ID NO: 2653583 - RNA, 19 nt, Homo sapiens
  misc_RNA (1)...(19): siRNA sense strand
ucacaugguacgagaagaa

SEQ ID NO: 2653584 - RNA, 19 nt, Homo sapiens
  misc_RNA (1)...(19): siRNA sense strand
ucaauaacgucuuggauga

SEQ ID NO: 2653585 - RNA, 19 nt, Homo sapiens
  misc_RNA (1)...(19): siRNA sense strand
ugaaauggcucuacaauga

SEQ ID NO: 2653586 - RNA, 19 nt, Homo sapiens
  misc_RNA (1)...(19): siRNA sense strand
ggaaagagcgcuucgugaa

SEQ ID NO: 2653587 - RNA, 19 nt, Homo sapiens
  misc_RNA (1)...(19): siRNA sense strand
ugauggugcccaagagaaa

SEQ ID NO: 2653588 - RNA, 19 nt, Homo sapiens
  misc_RNA (1)...(19): siRNA sense strand
cgguggagguguggaauaa

SEQ ID NO: 2653589 - RNA, 19 nt, Homo sapiens
  misc_RNA (1)...(19): siRNA sense strand
uguccaaacucaaggauca

SEQ ID NO: 2653590 - RNA, 19 nt, Homo sapiens
  misc_RNA (1)...(19): siRNA sense strand
aggaggagcuggaggagga

SEQ ID NO: 2653591 - RNA, 19 nt, Homo sapiens
  misc_RNA (1)...(19): siRNA sense strand
ugaccgacgugcagaacaa

SEQ ID NO: 2653592 - RNA, 19 nt, Homo sapiens
  misc_RNA (1)...(19): siRNA sense strand
gaaaggagcuggaugcuga

SEQ ID NO: 2653593 - RNA, 19 nt, Homo sapiens
  misc_RNA (1)...(19): siRNA sense strand
ggaugaagguacaagaacu

SEQ ID NO: 2653594 - RNA, 19 nt, Homo sapiens
  misc_RNA (1)...(19): siRNA sense strand
gggaccaggaugaggaaga

SEQ ID NO: 2653595 - RNA, 19 nt, Homo sapiens
  misc_RNA (1)...(19): siRNA sense strand
ggacacgcgcuuugagcua

SEQ ID NO: 2653596 - RNA, 19 nt, Homo sapiens
  misc_RNA (1)...(19): siRNA sense strand
aggaggaccuggaggacuu

SEQ ID NO: 2653597 - RNA, 19 nt, Homo sapiens
  misc_RNA (1)...(19): siRNA sense strand
gagaaggagagaugucuaa

SEQ ID NO: 2653598 - RNA, 19 nt, Homo sapiens
  misc_RNA (1)...(19): siRNA sense strand
ccaaguacaaugagagcuu

SEQ ID NO: 2653599 - RNA, 19 nt, Homo sapiens
  misc_RNA (1)...(19): siRNA sense strand
cggugugggaggagaauuu

SEQ ID NO: 2653600 - RNA, 19 nt, Homo sapiens
  misc_RNA (1)...(19): siRNA sense strand
gagccagccaggugguaaa

SEQ ID NO: 2653601 - RNA, 19 nt, Homo sapiens
  misc_RNA (1)...(19): siRNA sense strand
acgaguacaucuucaauaa

SEQ ID NO: 2653602 - RNA, 19 nt, Homo sapiens
  misc_RNA (1)...(19): siRNA sense strand
gcaaaggacaagacaggau

SEQ ID NO: 2653603 - RNA, 19 nt, Homo sapiens
  misc_RNA (1)...(19): siRNA sense strand
gcgagauggacguguggua

SEQ ID NO: 2653604 - RNA, 19 nt, Homo sapiens
  misc_RNA (1)...(19): siRNA sense strand
gaaagagcgcuucgugaaa

SEQ ID NO: 2653605 - RNA, 19 nt, Homo sapiens
  misc_RNA (1)...(19): siRNA sense strand
ggaaguucucccagaggaa

SEQ ID NO: 2653606 - RNA, 19 nt, Homo sapiens
  misc_RNA (1)...(19): siRNA sense strand
ccaaggagaaggagaaagu

SEQ ID NO: 2653607 - RNA, 19 nt, Homo sapiens
  misc_RNA (1)...(19): siRNA sense strand
gaguucagcuggagaagau

SEQ ID NO: 2653608 - RNA, 19 nt, Homo sapiens
  misc_RNA (1)...(19): siRNA sense strand
gcaacgacgagguggccaa

SEQ ID NO: 2653609 - RNA, 19 nt, Homo sapiens
  misc_RNA (1)...(19): siRNA sense strand
gugagaagacugugcugaa

SEQ ID NO: 2653610 - RNA, 19 nt, Homo sapiens
  misc_RNA (1)...(19): siRNA sense strand
acaucaguguggagaucaa

SEQ ID NO: 2653611 - RNA, 19 nt, Homo sapiens
  misc_RNA (1)...(19): siRNA sense strand
gugucaaacagauggguga

SEQ ID NO: 2653612 - RNA, 19 nt, Homo sapiens
  misc_RNA (1)...(19): siRNA sense strand
ggagaaggagagaugucua

SEQ ID NO: 2653613 - RNA, 19 nt, Homo sapiens
  misc_RNA (1)...(19): siRNA sense strand
gagauuaaccgucuggauu

SEQ ID NO: 2653614 - RNA, 19 nt, Homo sapiens
  misc_RNA (1)...(19): siRNA sense strand
gggacgaggaugacgacau

SEQ ID NO: 2653615 - RNA, 19 nt, Homo sapiens
  misc_RNA (1)...(19): siRNA sense strand
cagagguucaagagggaau

SEQ ID NO: 2653616 - RNA, 19 nt, Homo sapiens
  misc_RNA (1)...(19): siRNA sense strand
aggugugcgucaaggacua

SEQ ID NO: 2653617 - RNA, 19 nt, Homo sapiens
  misc_RNA (1)...(19): siRNA sense strand
gggaaagagcgcuucguga

SEQ ID NO: 2653618 - RNA, 19 nt, Homo sapiens
  misc_RNA (1)...(19): siRNA sense strand
ugaacaacgaggagcugaa

SEQ ID NO: 2653619 - RNA, 19 nt, Homo sapiens
  misc_RNA (1)...(19): siRNA sense strand
ccauggaggagcacgacaa

SEQ ID NO: 2653620 - RNA, 19 nt, Homo sapiens
  misc_RNA (1)...(19): siRNA sense strand
aggaggaggaggaggagga

SEQ ID NO: 2653621 - RNA, 19 nt, Homo sapiens
  misc_RNA (1)...(19): siRNA sense strand
aggaggaggaggaggagga

SEQ ID NO: 2653622 - RNA, 19 nt, Homo sapiens
  misc_RNA (1)...(19): siRNA sense strand
ggagaggccgagagaggau

SEQ ID NO: 2653623 - RNA, 19 nt, Homo sapiens
  misc_RNA (1)...(19): siRNA sense strand
uguccaucauugaggaaga

SEQ ID NO: 2653624 - RNA, 19 nt, Homo sapiens
  misc_RNA (1)...(19): siRNA sense strand
ccaaggaguucgugaagcu

SEQ ID NO: 2653625 - RNA, 19 nt, Homo sapiens
  misc_RNA (1)...(19): siRNA sense strand
aagagaaauucaacacgua

SEQ ID NO: 2653626 - RNA, 19 nt, Homo sapiens
  misc_RNA (1)...(19): siRNA sense strand
gagacaagaaggauggguu

SEQ ID NO: 2653627 - RNA, 19 nt, Homo sapiens
  misc_RNA (1)...(19): siRNA sense strand
gggaagaccaagaaacgga

SEQ ID NO: 2653628 - RNA, 19 nt, Homo sapiens
  misc_RNA (1)...(19): siRNA sense strand
ucauugaggaagacaagaa

SEQ ID NO: 2653629 - RNA, 19 nt, Homo sapiens
  misc_RNA (1)...(19): siRNA sense strand
gaggaggugucccgggauu

SEQ ID NO: 2653630 - RNA, 19 nt, Homo sapiens
  misc_RNA (1)...(19): siRNA sense strand
ccaaugaccucaaguggca

SEQ ID NO: 2653631 - RNA, 19 nt, Homo sapiens
  misc_RNA (1)...(19): siRNA sense strand
agauuaaccgucuggauuu

SEQ ID NO: 2653632 - RNA, 19 nt, Homo sapiens
  misc_RNA (1)...(19): siRNA sense strand
ggagauuguggacgaguuu

SEQ ID NO: 2653633 - RNA, 19 nt, Homo sapiens
  misc_RNA (1)...(19): siRNA sense strand
cugaagaggaggcucgcua

SEQ ID NO: 2653634 - RNA, 19 nt, Homo sapiens
  misc_RNA (1)...(19): siRNA sense strand
uggaggaggaggaggagga

SEQ ID NO: 2653635 - RNA, 19 nt, Homo sapiens
  misc_RNA (1)...(19): siRNA sense strand
ucgugaaacuccuggacca

SEQ ID NO: 2653636 - RNA, 19 nt, Homo sapiens
  misc_RNA (1)...(19): siRNA sense strand
aggagcugaauguggguaa

SEQ ID NO: 2653637 - RNA, 19 nt, Homo sapiens
  misc_RNA (1)...(19): siRNA sense strand
ccaccgaccugcuaaucaa

SEQ ID NO: 2653638 - RNA, 19 nt, Homo sapiens
  misc_RNA (1)...(19): siRNA sense strand
ugaagauccgggagcgcaa

SEQ ID NO: 2653639 - RNA, 19 nt, Homo sapiens
  misc_RNA (1)...(19): siRNA sense strand
uguggaagcugguuaugaa

SEQ ID NO: 2653640 - RNA, 19 nt, Homo sapiens
  misc_RNA (1)...(19): siRNA sense strand
agaaaagggcagggugaaa

SEQ ID NO: 2653641 - RNA, 19 nt, Homo sapiens
  misc_RNA (1)...(19): siRNA sense strand
ccgacagugcaguggauga

SEQ ID NO: 2653642 - RNA, 19 nt, Homo sapiens
  misc_RNA (1)...(19): siRNA sense strand
cagacauccgcaagaggaa

SEQ ID NO: 2653643 - RNA, 19 nt, Homo sapiens
  misc_RNA (1)...(19): siRNA sense strand
guuaugaacaccauggaga

SEQ ID NO: 2653644 - RNA, 19 nt, Homo sapiens
  misc_RNA (1)...(19): siRNA sense strand
ugaaagugcagaaugucaa

SEQ ID NO: 2653645 - RNA, 19 nt, Homo sapiens
  misc_RNA (1)...(19): siRNA sense strand
ggccguucaucgaggucaa

SEQ ID NO: 2653646 - RNA, 19 nt, Homo sapiens
  misc_RNA (1)...(19): siRNA sense strand
acgguggagguguggaaua

SEQ ID NO: 2653647 - RNA, 19 nt, Homo sapiens
  misc_RNA (1)...(19): siRNA sense strand
ccgccaguccaaugagauu

SEQ ID NO: 2653648 - RNA, 19 nt, Homo sapiens
  misc_RNA (1)...(19): siRNA sense strand
gggccaagaagcuggagca

SEQ ID NO: 2653649 - RNA, 19 nt, Homo sapiens
  misc_RNA (1)...(19): siRNA sense strand
ccuccagcacguugaacaa

SEQ ID NO: 2653650 - RNA, 19 nt, Homo sapiens
  misc_RNA (1)...(19): siRNA sense strand
caaguuugauggugcccaa

SEQ ID NO: 2653651 - RNA, 19 nt, Homo sapiens
  misc_RNA (1)...(19): siRNA sense strand
ccaucauugaggaagacaa

SEQ ID NO: 2653652 - RNA, 19 nt, Homo sapiens
  misc_RNA (1)...(19): siRNA sense strand
ggagcugaauguggguaaa

SEQ ID NO: 2653653 - RNA, 19 nt, Homo sapiens
  misc_RNA (1)...(19): siRNA sense strand
agaagauguucgaagccau

SEQ ID NO: 2653654 - RNA, 19 nt, Homo sapiens
  misc_RNA (1)...(19): siRNA sense strand
gccgagagaggaugaggaa

SEQ ID NO: 2653655 - RNA, 19 nt, Homo sapiens
  misc_RNA (1)...(19): siRNA sense strand
cccaggagauuguggacga

SEQ ID NO: 2653656 - RNA, 19 nt, Homo sapiens
  misc_RNA (1)...(19): siRNA sense strand
ggauugaccucuccaugua

SEQ ID NO: 2653657 - RNA, 19 nt, Homo sapiens
  misc_RNA (1)...(19): siRNA sense strand
uugccaagaccaucaguaa

SEQ ID NO: 2653658 - RNA, 19 nt, Homo sapiens
  misc_RNA (1)...(19): siRNA sense strand
gaaaacauggcaagggauu

SEQ ID NO: 2653659 - RNA, 19 nt, Homo sapiens
  misc_RNA (1)...(19): siRNA sense strand
uggacaccaucaagcaaua

SEQ ID NO: 2653660 - RNA, 19 nt, Homo sapiens
  misc_RNA (1)...(19): siRNA sense strand
cagaaugucaagagcacga

SEQ ID NO: 2653661 - RNA, 19 nt, Homo sapiens
  misc_RNA (1)...(19): siRNA sense strand
gcgaccaaauccaagaaca

SEQ ID NO: 2653662 - RNA, 19 nt, Homo sapiens
  misc_RNA (1)...(19): siRNA sense strand
gacgaugccuggaagguuu

SEQ ID NO: 2653663 - RNA, 19 nt, Homo sapiens
  misc_RNA (1)...(19): siRNA sense strand
accaaauccaagaacaaua

SEQ ID NO: 2653664 - RNA, 19 nt, Homo sapiens
  misc_RNA (1)...(19): siRNA sense strand
agugacuaccgcagugaaa

SEQ ID NO: 2653665 - RNA, 19 nt, Homo sapiens
  misc_RNA (1)...(19): siRNA sense strand
cccugaaagugcagaaugu

SEQ ID NO: 2653666 - RNA, 19 nt, Homo sapiens
  misc_RNA (1)...(19): siRNA sense strand
cgagagaggaugaggaagg

SEQ ID NO: 2653667 - RNA, 19 nt, Homo sapiens
  misc_RNA (1)...(19): siRNA sense strand
ggacaagacaggauccagu

SEQ ID NO: 2653668 - RNA, 19 nt, Homo sapiens
  misc_RNA (1)...(19): siRNA sense strand
gggcuuggguguagaagac

SEQ ID NO: 2653669 - RNA, 19 nt, Homo sapiens
  misc_RNA (1)...(19): siRNA sense strand
gugcaguggaugaucguga

SEQ ID NO: 2653670 - RNA, 19 nt, Homo sapiens
  misc_RNA (1)...(19): siRNA sense strand
gagauggacgugugguaca

SEQ ID NO: 2653671 - RNA, 19 nt, Homo sapiens
  misc_RNA (1)...(19): siRNA sense strand
cggaggaagccaugcgaaa

SEQ ID NO: 2653672 - RNA, 19 nt, Homo sapiens
  misc_RNA (1)...(19): siRNA sense strand
ccaucaaacucauuagcaa

SEQ ID NO: 2653673 - RNA, 19 nt, Homo sapiens
  misc_RNA (1)...(19): siRNA sense strand
agaacuugauccugcguaa

SEQ ID NO: 2653674 - RNA, 19 nt, Homo sapiens
  misc_RNA (1)...(19): siRNA sense strand
uauguauggucauggaaua

SEQ ID NO: 2653675 - RNA, 19 nt, Homo sapiens
  misc_RNA (1)...(19): siRNA sense strand
gaagaaucguccacagaga

SEQ ID NO: 2653676 - RNA, 19 nt, Homo sapiens
  misc_RNA (1)...(19): siRNA sense strand
gcucagagaaugugcuuga

SEQ ID NO: 2653677 - RNA, 19 nt, Homo sapiens
  misc_RNA (1)...(19): siRNA sense strand
ucaagaagaucaacaaaca

SEQ ID NO: 2653678 - RNA, 19 nt, Homo sapiens
  misc_RNA (1)...(19): siRNA sense strand
ccgaggacgacgagaccaa

SEQ ID NO: 2653679 - RNA, 19 nt, Homo sapiens
  misc_RNA (1)...(19): siRNA sense strand
gaaugugcuugaugaggaa

SEQ ID NO: 2653680 - RNA, 19 nt, Homo sapiens
  misc_RNA (1)...(19): siRNA sense strand
aguuugacccugaggaauu

SEQ ID NO: 2653681 - RNA, 19 nt, Homo sapiens
  misc_RNA (1)...(19): siRNA sense strand
cgacgagaccaaugaugaa

SEQ ID NO: 2653682 - RNA, 19 nt, Homo sapiens
  misc_RNA (1)...(19): siRNA sense strand
gcgccacgcuccugaagaa

SEQ ID NO: 2653683 - RNA, 19 nt, Homo sapiens
  misc_RNA (1)...(19): siRNA sense strand
ggaguuugacccugaggaa

SEQ ID NO: 2653684 - RNA, 19 nt, Homo sapiens
  misc_RNA (1)...(19): siRNA sense strand
aggccgagcucguggucau

SEQ ID NO: 2653685 - RNA, 19 nt, Homo sapiens
  misc_RNA (1)...(19): siRNA sense strand
ucauguggccagagggaga

SEQ ID NO: 2653686 - RNA, 19 nt, Homo sapiens
  misc_RNA (1)...(19): siRNA sense strand
uggaguaccugcauaacua

SEQ ID NO: 2653687 - RNA, 19 nt, Homo sapiens
  misc_RNA (1)...(19): siRNA sense strand
ggaccacagcccuggagaa

SEQ ID NO: 2653688 - RNA, 19 nt, Homo sapiens
  misc_RNA (1)...(19): siRNA sense strand
ccaucaagaagaucaacaa

SEQ ID NO: 2653689 - RNA, 19 nt, Homo sapiens
  misc_RNA (1)...(19): siRNA sense strand
ccugagaaguccagagccu

SEQ ID NO: 2653690 - RNA, 19 nt, Homo sapiens
  misc_RNA (1)...(19): siRNA sense strand
aagaagaucuccaagcaga

SEQ ID NO: 2653691 - RNA, 19 nt, Homo sapiens
  misc_RNA (1)...(19): siRNA sense strand
ggucauggaauacguggaa

SEQ ID NO: 2653692 - RNA, 19 nt, Homo sapiens
  misc_RNA (1)...(19): siRNA sense strand
aggagaagcuggagcggcu

SEQ ID NO: 2653693 - RNA, 19 nt, Homo sapiens
  misc_RNA (1)...(19): siRNA sense strand
gggccaaggcauuaagacu

SEQ ID NO: 2653694 - RNA, 19 nt, Homo sapiens
  misc_RNA (1)...(19): siRNA sense strand
cagagaaugugcuugauga

SEQ ID NO: 2653695 - RNA, 19 nt, Homo sapiens
  misc_RNA (1)...(19): siRNA sense strand
cgguguuggcgcuggagua

SEQ ID NO: 2653696 - RNA, 19 nt, Homo sapiens
  misc_RNA (1)...(19): siRNA sense strand
cguccagcuuguccggaaa

SEQ ID NO: 2653697 - RNA, 19 nt, Homo sapiens
  misc_RNA (1)...(19): siRNA sense strand
caucaagaagaucaacaaa

SEQ ID NO: 2653698 - RNA, 19 nt, Homo sapiens
  misc_RNA (1)...(19): siRNA sense strand
cugaagagcggcaacaaga

SEQ ID NO: 2653699 - RNA, 19 nt, Homo sapiens
  misc_RNA (1)...(19): siRNA sense strand
gaagagcggcaacaagaua

SEQ ID NO: 2653700 - RNA, 19 nt, Homo sapiens
  misc_RNA (1)...(19): siRNA sense strand
cgagaccaaugaugaagaa

SEQ ID NO: 2653701 - RNA, 19 nt, Homo sapiens
  misc_RNA (1)...(19): siRNA sense strand
uuggauaguccucggaauu

SEQ ID NO: 2653702 - RNA, 19 nt, Homo sapiens
  misc_RNA (1)...(19): siRNA sense strand
gugccuuucuuuggagaua

SEQ ID NO: 2653703 - RNA, 19 nt, Homo sapiens
  misc_RNA (1)...(19): siRNA sense strand
agaaugugcuugaugagga

SEQ ID NO: 2653704 - RNA, 19 nt, Homo sapiens
  misc_RNA (1)...(19): siRNA sense strand
gcuacuuccuagagaugca

SEQ ID NO: 2653705 - RNA, 19 nt, Homo sapiens
  misc_RNA (1)...(19): siRNA sense strand
gccaaggcauuaagacuga

SEQ ID NO: 2653706 - RNA, 19 nt, Homo sapiens
  misc_RNA (1)...(19): siRNA sense strand
agaucaacaaacagaacuu

SEQ ID NO: 2653707 - RNA, 19 nt, Homo sapiens
  misc_RNA (1)...(19): siRNA sense strand
cugauggcgucuugggcuu

SEQ ID NO: 2653708 - RNA, 19 nt, Homo sapiens
  misc_RNA (1)...(19): siRNA sense strand
gcgcuggaguaccugcaua

SEQ ID NO: 2653709 - RNA, 19 nt, Homo sapiens
  misc_RNA (1)...(19): siRNA sense strand
ggacacaaugcccaaguuu

SEQ ID NO: 2653710 - RNA, 19 nt, Homo sapiens
  misc_RNA (1)...(19): siRNA sense strand
ucguggagcugcugcugaa

SEQ ID NO: 2653711 - RNA, 19 nt, Homo sapiens
  misc_RNA (1)...(19): siRNA sense strand
aggucuuuguggagcguga

SEQ ID NO: 2653712 - RNA, 19 nt, Homo sapiens
  misc_RNA (1)...(19): siRNA sense strand
cgcuggaguaccugcauaa

SEQ ID NO: 2653713 - RNA, 19 nt, Homo sapiens
  misc_RNA (1)...(19): siRNA sense strand
gaucauguggccagaggga

SEQ ID NO: 2653714 - RNA, 19 nt, Homo sapiens
  misc_RNA (1)...(19): siRNA sense strand
aagaagaucaacaaacaga

SEQ ID NO: 2653715 - RNA, 19 nt, Homo sapiens
  misc_RNA (1)...(19): siRNA sense strand
ucgaugagccgcaggagga

SEQ ID NO: 2653716 - RNA, 19 nt, Homo sapiens
  misc_RNA (1)...(19): siRNA sense strand
gcccaugagcguucggaca

SEQ ID NO: 2653717 - RNA, 19 nt, Homo sapiens
  misc_RNA (1)...(19): siRNA sense strand
agauggugccacugaguca

SEQ ID NO: 2653718 - RNA, 19 nt, Homo sapiens
  misc_RNA (1)...(19): siRNA sense strand
ccagcaagucguugguaaa

SEQ ID NO: 2653719 - RNA, 19 nt, Homo sapiens
  misc_RNA (1)...(19): siRNA sense strand
ccacauagagggugacuca

SEQ ID NO: 2653720 - RNA, 19 nt, Homo sapiens
  misc_RNA (1)...(19): siRNA sense strand
gacaaaaguugcugaggaa

SEQ ID NO: 2653721 - RNA, 19 nt, Homo sapiens
  misc_RNA (1)...(19): siRNA sense strand
gugaagaccaaacguguaa

SEQ ID NO: 2653722 - RNA, 19 nt, Homo sapiens
  misc_RNA (1)...(19): siRNA sense strand
ugaccaagauccagguaca

SEQ ID NO: 2653723 - RNA, 19 nt, Homo sapiens
  misc_RNA (1)...(19): siRNA sense strand
gagcugaccuguccgguaa

SEQ ID NO: 2653724 - RNA, 19 nt, Homo sapiens
  misc_RNA (1)...(19): siRNA sense strand
cugcaaagguggugaaagc

SEQ ID NO: 2653725 - RNA, 19 nt, Homo sapiens
  misc_RNA (1)...(19): siRNA sense strand
gcaaauggcagcgaagaua

SEQ ID NO: 2653726 - RNA, 19 nt, Homo sapiens
  misc_RNA (1)...(19): siRNA sense strand
gcaagucguugguaaagaa

SEQ ID NO: 2653727 - RNA, 19 nt, Homo sapiens
  misc_RNA (1)...(19): siRNA sense strand
cagaugaggcagcagcaaa

SEQ ID NO: 2653728 - RNA, 19 nt, Homo sapiens
  misc_RNA (1)...(19): siRNA sense strand
cagugagucuggacgcaaa

SEQ ID NO: 2653729 - RNA, 19 nt, Homo sapiens
  misc_RNA (1)...(19): siRNA sense strand
agacucuacuccagacaua

SEQ ID NO: 2653730 - RNA, 19 nt, Homo sapiens
  misc_RNA (1)...(19): siRNA sense strand
ccacaaugaccaagaucca

SEQ ID NO: 2653731 - RNA, 19 nt, Homo sapiens
  misc_RNA (1)...(19): siRNA sense strand
ccaguguggcaguggaaau

SEQ ID NO: 2653732 - RNA, 19 nt, Homo sapiens
  misc_RNA (1)...(19): siRNA sense strand
ggacaaaaguugcugagga

SEQ ID NO: 2653733 - RNA, 19 nt, Homo sapiens
  misc_RNA (1)...(19): siRNA sense strand
ucaagaacauccugguaga

SEQ ID NO: 2653734 - RNA, 19 nt, Homo sapiens
  misc_RNA (1)...(19): siRNA sense strand
caacaguggcaaaugucaa

SEQ ID NO: 2653735 - RNA, 19 nt, Homo sapiens
  misc_RNA (1)...(19): siRNA sense strand
aaacagacauggcauuuaa

SEQ ID NO: 2653736 - RNA, 19 nt, Homo sapiens
  misc_RNA (1)...(19): siRNA sense strand
ccuauuuggcugaggggaa

SEQ ID NO: 2653737 - RNA, 19 nt, Homo sapiens
  misc_RNA (1)...(19): siRNA sense strand
agaugaggcagcagcaaau

SEQ ID NO: 2653738 - RNA, 19 nt, Homo sapiens
  misc_RNA (1)...(19): siRNA sense strand
cuuuggaagccgagaaaau

SEQ ID NO: 2653739 - RNA, 19 nt, Homo sapiens
  misc_RNA (1)...(19): siRNA sense strand
gugacucagugaagaccaa

SEQ ID NO: 2653740 - RNA, 19 nt, Homo sapiens
  misc_RNA (1)...(19): siRNA sense strand
ugguagacgagauggacau

SEQ ID NO: 2653741 - RNA, 19 nt, Homo sapiens
  misc_RNA (1)...(19): siRNA sense strand
gguccaagguguccaacca

SEQ ID NO: 2653742 - RNA, 19 nt, Homo sapiens
  misc_RNA (1)...(19): siRNA sense strand
ccacaauguccaagacuuc

SEQ ID NO: 2653743 - RNA, 19 nt, Homo sapiens
  misc_RNA (1)...(19): siRNA sense strand
ccgugaagguccaguccca

SEQ ID NO: 2653744 - RNA, 19 nt, Homo sapiens
  misc_RNA (1)...(19): siRNA sense strand
agguaugaccaggcaguua

SEQ ID NO: 2653745 - RNA, 19 nt, Homo sapiens
  misc_RNA (1)...(19): siRNA sense strand
cgaaaacagacauggcauu

SEQ ID NO: 2653746 - RNA, 19 nt, Homo sapiens
  misc_RNA (1)...(19): siRNA sense strand
gcacccagaaacaggcgaa

SEQ ID NO: 2653747 - RNA, 19 nt, Homo sapiens
  misc_RNA (1)...(19): siRNA sense strand
cuaacaggguccaaggugu

SEQ ID NO: 2653748 - RNA, 19 nt, Homo sapiens
  misc_RNA (1)...(19): siRNA sense strand
gggagacaacggagccaca

SEQ ID NO: 2653749 - RNA, 19 nt, Homo sapiens
  misc_RNA (1)...(19): siRNA sense strand
agaacauccugguagacga

SEQ ID NO: 2653750 - RNA, 19 nt, Homo sapiens
  misc_RNA (1)...(19): siRNA sense strand
uccagcaagucguugguaa

SEQ ID NO: 2653751 - RNA, 19 nt, Homo sapiens
  misc_RNA (1)...(19): siRNA sense strand
ugucugagcaagaugcauu

SEQ ID NO: 2653752 - RNA, 19 nt, Homo sapiens
  misc_RNA (1)...(19): siRNA sense strand
gagaaagaguguuuggaga

SEQ ID NO: 2653753 - RNA, 19 nt, Homo sapiens
  misc_RNA (1)...(19): siRNA sense strand
gagcagagauguaugauga

SEQ ID NO: 2653754 - RNA, 19 nt, Homo sapiens
  misc_RNA (1)...(19): siRNA sense strand
gaacaauucagcauagaaa

SEQ ID NO: 2653755 - RNA, 19 nt, Homo sapiens
  misc_RNA (1)...(19): siRNA sense strand
agaaagaguguuuggagaa

SEQ ID NO: 2653756 - RNA, 19 nt, Homo sapiens
  misc_RNA (1)...(19): siRNA sense strand
aauggagacugcagagaaa

SEQ ID NO: 2653757 - RNA, 19 nt, Homo sapiens
  misc_RNA (1)...(19): siRNA sense strand
cagagaaacuggcuagauu

SEQ ID NO: 2653758 - RNA, 19 nt, Homo sapiens
  misc_RNA (1)...(19): siRNA sense strand
cgacagaggaugaugcaga

SEQ ID NO: 2653759 - RNA, 19 nt, Homo sapiens
  misc_RNA (1)...(19): siRNA sense strand
agaagaaacccaaggacuu

SEQ ID NO: 2653760 - RNA, 19 nt, Homo sapiens
  misc_RNA (1)...(19): siRNA sense strand
ggucauuggccaccggaaa

SEQ ID NO: 2653761 - RNA, 19 nt, Homo sapiens
  misc_RNA (1)...(19): siRNA sense strand
gcagaaaugcagcggauga

SEQ ID NO: 2653762 - RNA, 19 nt, Homo sapiens
  misc_RNA (1)...(19): siRNA sense strand
gagaaggagagucgggauu

SEQ ID NO: 2653763 - RNA, 19 nt, Homo sapiens
  misc_RNA (1)...(19): siRNA sense strand
agacaaaggugcugugaag

SEQ ID NO: 2653764 - RNA, 19 nt, Homo sapiens
  misc_RNA (1)...(19): siRNA sense strand
ggacuuggcucuugcccua

SEQ ID NO: 2653765 - RNA, 19 nt, Homo sapiens
  misc_RNA (1)...(19): siRNA sense strand
gaccagagaucgaacaauu

SEQ ID NO: 2653766 - RNA, 19 nt, Homo sapiens
  misc_RNA (1)...(19): siRNA sense strand
gcuuugacaucauagauaa

SEQ ID NO: 2653767 - RNA, 19 nt, Homo sapiens
  misc_RNA (1)...(19): siRNA sense strand
agaugaagacccucaguaa

SEQ ID NO: 2653768 - RNA, 19 nt, Homo sapiens
  misc_RNA (1)...(19): siRNA sense strand
gaaagaaaguguuugaacu

SEQ ID NO: 2653769 - RNA, 19 nt, Homo sapiens
  misc_RNA (1)...(19): siRNA sense strand
ggaacaagacuuuggccau

SEQ ID NO: 2653770 - RNA, 19 nt, Homo sapiens
  misc_RNA (1)...(19): siRNA sense strand
cagaguugauaaugaguuu

SEQ ID NO: 2653771 - RNA, 19 nt, Homo sapiens
  misc_RNA (1)...(19): siRNA sense strand
ggacaaacccagggacaga

SEQ ID NO: 2653772 - RNA, 19 nt, Homo sapiens
  misc_RNA (1)...(19): siRNA sense strand
ggucacaggaguauaguuu

SEQ ID NO: 2653773 - RNA, 19 nt, Homo sapiens
  misc_RNA (1)...(19): siRNA sense strand
cugcaaugccuacgagcua

SEQ ID NO: 2653774 - RNA, 19 nt, Homo sapiens
  misc_RNA (1)...(19): siRNA sense strand
aagcagaguuugaagacga

SEQ ID NO: 2653775 - RNA, 19 nt, Homo sapiens
  misc_RNA (1)...(19): siRNA sense strand
gauccagagcagagaugua

SEQ ID NO: 2653776 - RNA, 19 nt, Homo sapiens
  misc_RNA (1)...(19): siRNA sense strand
uggcagaaaugcagcggau

SEQ ID NO: 2653777 - RNA, 19 nt, Homo sapiens
  misc_RNA (1)...(19): siRNA sense strand
gggccuuccuucagaucaa

SEQ ID NO: 2653778 - RNA, 19 nt, Homo sapiens
  misc_RNA (1)...(19): siRNA sense strand
cggaagaggaucagcagca

SEQ ID NO: 2653779 - RNA, 19 nt, Homo sapiens
  misc_RNA (1)...(19): siRNA sense strand
ccgauaagaaccugggcuu

SEQ ID NO: 2653780 - RNA, 19 nt, Homo sapiens
  misc_RNA (1)...(19): siRNA sense strand
aaaccagagcacagagauu

SEQ ID NO: 2653781 - RNA, 19 nt, Homo sapiens
  misc_RNA (1)...(19): siRNA sense strand
ccugagaagugacguauuu

SEQ ID NO: 2653782 - RNA, 19 nt, Homo sapiens
  misc_RNA (1)...(19): siRNA sense strand
gggauuaugacguggacca

SEQ ID NO: 2653783 - RNA, 19 nt, Homo sapiens
  misc_RNA (1)...(19): siRNA sense strand
guuuaaagcucaagaucuc

SEQ ID NO: 2653784 - RNA, 19 nt, Homo sapiens
  misc_RNA (1)...(19): siRNA sense strand
aggaggaggacgaggacga

SEQ ID NO: 2653785 - RNA, 19 nt, Homo sapiens
  misc_RNA (1)...(19): siRNA sense strand
ggacgaggacgaugaggau

SEQ ID NO: 2653786 - RNA, 19 nt, Homo sapiens
  misc_RNA (1)...(19): siRNA sense strand
guacauaaugagacuucaa

SEQ ID NO: 2653787 - RNA, 19 nt, Homo sapiens
  misc_RNA (1)...(19): siRNA sense strand
ggugaggcuguaagcgaaa

SEQ ID NO: 2653788 - RNA, 19 nt, Homo sapiens
  misc_RNA (1)...(19): siRNA sense strand
ugauugagaaagaguguuu

SEQ ID NO: 2653789 - RNA, 19 nt, Homo sapiens
  misc_RNA (1)...(19): siRNA sense strand
ccagaagaaagaugagcuu

SEQ ID NO: 2653790 - RNA, 19 nt, Homo sapiens
  misc_RNA (1)...(19): siRNA sense strand
augcagauguacagacaca

SEQ ID NO: 2653791 - RNA, 19 nt, Homo sapiens
  misc_RNA (1)...(19): siRNA sense strand
aagcugaaguuggcagaaa

SEQ ID NO: 2653792 - RNA, 19 nt, Homo sapiens
  misc_RNA (1)...(19): siRNA sense strand
ggacagaagauauccaguu

SEQ ID NO: 2653793 - RNA, 19 nt, Homo sapiens
  misc_RNA (1)...(19): siRNA sense strand
agaaauaaucaaaugggca

SEQ ID NO: 2653794 - RNA, 19 nt, Homo sapiens
  misc_RNA (1)...(19): siRNA sense strand
gaauuacacaggagacuuu

SEQ ID NO: 2653795 - RNA, 19 nt, Homo sapiens
  misc_RNA (1)...(19): siRNA sense strand
gcccagaggugaugccuga

SEQ ID NO: 2653796 - RNA, 19 nt, Homo sapiens
  misc_RNA (1)...(19): siRNA sense strand
cgaugcgagaggaggagaa

SEQ ID NO: 2653797 - RNA, 19 nt, Homo sapiens
  misc_RNA (1)...(19): siRNA sense strand
agaggaugaugcagaugua

SEQ ID NO: 2653798 - RNA, 19 nt, Homo sapiens
  misc_RNA (1)...(19): siRNA sense strand
ccucuuggucacaggagua

SEQ ID NO: 2653799 - RNA, 19 nt, Homo sapiens
  misc_RNA (1)...(19): siRNA sense strand
gaaaauagucuggaguaua

SEQ ID NO: 2653800 - RNA, 19 nt, Homo sapiens
  misc_RNA (1)...(19): siRNA sense strand
uagagaugccggaagagaa

SEQ ID NO: 2653801 - RNA, 19 nt, Homo sapiens
  misc_RNA (1)...(19): siRNA sense strand
cggaagagaaggccugaga

SEQ ID NO: 2653802 - RNA, 19 nt, Homo sapiens
  misc_RNA (1)...(19): siRNA sense strand
acaaguacauaaugagacu

SEQ ID NO: 2653803 - RNA, 19 nt, Homo sapiens
  misc_RNA (1)...(19): siRNA sense strand
gagcuaagugucaagauga

SEQ ID NO: 2653804 - RNA, 19 nt, Homo sapiens
  misc_RNA (1)...(19): siRNA sense strand
ccaaguagucugagugaug

SEQ ID NO: 2653805 - RNA, 19 nt, Homo sapiens
  misc_RNA (1)...(19): siRNA sense strand
agcagaagcugaccgauaa

SEQ ID NO: 2653806 - RNA, 19 nt, Homo sapiens
  misc_RNA (1)...(19): siRNA sense strand
ucuuugaacuugaaacaga

SEQ ID NO: 2653807 - RNA, 19 nt, Homo sapiens
  misc_RNA (1)...(19): siRNA sense strand
gaagagaaggccugagaag

SEQ ID NO: 2653808 - RNA, 19 nt, Homo sapiens
  misc_RNA (1)...(19): siRNA sense strand
ccaggcugauugagaaaga

SEQ ID NO: 2653809 - RNA, 19 nt, Homo sapiens
  misc_RNA (1)...(19): siRNA sense strand
acucagggcacuaaccaaa

SEQ ID NO: 2653810 - RNA, 19 nt, Homo sapiens
  misc_RNA (1)...(19): siRNA sense strand
agcuaagugucaagaugaa

SEQ ID NO: 2653811 - RNA, 19 nt, Homo sapiens
  misc_RNA (1)...(19): siRNA sense strand
ucaaagaggacccugcuua

SEQ ID NO: 2653812 - RNA, 19 nt, Homo sapiens
  misc_RNA (1)...(19): siRNA sense strand
uggaaggcgaggagagcga

SEQ ID NO: 2653813 - RNA, 19 nt, Homo sapiens
  misc_RNA (1)...(19): siRNA sense strand
gcacuaaccaaauccagaa

SEQ ID NO: 2653814 - RNA, 19 nt, Homo sapiens
  misc_RNA (1)...(19): siRNA sense strand
gggcaggauuccacaccau

SEQ ID NO: 2653815 - RNA, 19 nt, Homo sapiens
  misc_RNA (1)...(19): siRNA sense strand
aaugauuccuccuacgaaa

SEQ ID NO: 2653816 - RNA, 19 nt, Homo sapiens
  misc_RNA (1)...(19): siRNA sense strand
ugaaaauagucuggaguau

SEQ ID NO: 2653817 - RNA, 19 nt, Homo sapiens
  misc_RNA (1)...(19): siRNA sense strand
gaacuauguccaucaauuu

SEQ ID NO: 2653818 - RNA, 19 nt, Homo sapiens
  misc_RNA (1)...(19): siRNA sense strand
ggaagaggaucagcagcaa

SEQ ID NO: 2653819 - RNA, 19 nt, Homo sapiens
  misc_RNA (1)...(19): siRNA sense strand
ucaagauuugggauagaaa

SEQ ID NO: 2653820 - RNA, 19 nt, Homo sapiens
  misc_RNA (1)...(19): siRNA sense strand
caauggagacugcagagaa

SEQ ID NO: 2653821 - RNA, 19 nt, Homo sapiens
  misc_RNA (1)...(19): siRNA sense strand
gggaagcagaguuugaaga

SEQ ID NO: 2653822 - RNA, 19 nt, Homo sapiens
  misc_RNA (1)...(19): siRNA sense strand
cugacgggcaggagcacaa

SEQ ID NO: 2653823 - RNA, 19 nt, Homo sapiens
  misc_RNA (1)...(19): siRNA sense strand
cugcugacauugacaugaa

SEQ ID NO: 2653824 - RNA, 19 nt, Homo sapiens
  misc_RNA (1)...(19): siRNA sense strand
ucacaggccuccucaggua

SEQ ID NO: 2653825 - RNA, 19 nt, Homo sapiens
  misc_RNA (1)...(19): siRNA sense strand
gggaacaagacuuuggcca

SEQ ID NO: 2653826 - RNA, 19 nt, Homo sapiens
  misc_RNA (1)...(19): siRNA sense strand
gcuccgugguucuugggaa

SEQ ID NO: 2653827 - RNA, 19 nt, Homo sapiens
  misc_RNA (1)...(19): siRNA sense strand
ggagaaggagagucgggau

SEQ ID NO: 2653828 - RNA, 19 nt, Homo sapiens
  misc_RNA (1)...(19): siRNA sense strand
gacauugacaugaagacaa

SEQ ID NO: 2653829 - RNA, 19 nt, Homo sapiens
  misc_RNA (1)...(19): siRNA sense strand
gaucgaacaauucagcaua

SEQ ID NO: 2653830 - RNA, 19 nt, Homo sapiens
  misc_RNA (1)...(19): siRNA sense strand
ugaacuauguccaucaauu

SEQ ID NO: 2653831 - RNA, 19 nt, Homo sapiens
  misc_RNA (1)...(19): siRNA sense strand
uggugaggcuguaagcgaa

SEQ ID NO: 2653832 - RNA, 19 nt, Homo sapiens
  misc_RNA (1)...(19): siRNA sense strand
gaaggagagucgggauuau

SEQ ID NO: 2653833 - RNA, 19 nt, Homo sapiens
  misc_RNA (1)...(19): siRNA sense strand
caucccugccagacagaaa

SEQ ID NO: 2653834 - RNA, 19 nt, Homo sapiens
  misc_RNA (1)...(19): siRNA sense strand
aggugaugccugaggagga

SEQ ID NO: 2653835 - RNA, 19 nt, Homo sapiens
  misc_RNA (1)...(19): siRNA sense strand
aagaagaaacccaaggacu

SEQ ID NO: 2653836 - RNA, 19 nt, Homo sapiens
  misc_RNA (1)...(19): siRNA sense strand
ggaaagggcaucagggagc

SEQ ID NO: 2653837 - RNA, 19 nt, Homo sapiens
  misc_RNA (1)...(19): siRNA sense strand
ggcaggagcacaaagaaga

SEQ ID NO: 2653838 - RNA, 19 nt, Homo sapiens
  misc_RNA (1)...(19): siRNA sense strand
cucuagagaugccggaaga

SEQ ID NO: 2653839 - RNA, 19 nt, Homo sapiens
  misc_RNA (1)...(19): siRNA sense strand
cuuugaacuugaaacagaa

SEQ ID NO: 2653840 - RNA, 19 nt, Homo sapiens
  misc_RNA (1)...(19): siRNA sense strand
ggaaggggaagcagaguuu

SEQ ID NO: 2653841 - RNA, 19 nt, Homo sapiens
  misc_RNA (1)...(19): siRNA sense strand
gcuuccagaugcugcagaa

SEQ ID NO: 2653842 - RNA, 19 nt, Homo sapiens
  misc_RNA (1)...(19): siRNA sense strand
gggcaggagcacaaagaag

SEQ ID NO: 2653843 - RNA, 19 nt, Homo sapiens
  misc_RNA (1)...(19): siRNA sense strand
cuuccaggcugauugagaa

SEQ ID NO: 2653844 - RNA, 19 nt, Homo sapiens
  misc_RNA (1)...(19): siRNA sense strand
ggagaaaaucuuagaagcu

SEQ ID NO: 2653845 - RNA, 19 nt, Homo sapiens
  misc_RNA (1)...(19): siRNA sense strand
aaccagagccgaugcgaga

SEQ ID NO: 2653846 - RNA, 19 nt, Homo sapiens
  misc_RNA (1)...(19): siRNA sense strand
gcgagcagaucacagggua

SEQ ID NO: 2653847 - RNA, 19 nt, Homo sapiens
  misc_RNA (1)...(19): siRNA sense strand
ugacaaguacauaaugaga

SEQ ID NO: 2653848 - RNA, 19 nt, Homo sapiens
  misc_RNA (1)...(19): siRNA sense strand
ggccaaggcuccaaguagu

SEQ ID NO: 2653849 - RNA, 19 nt, Homo sapiens
  misc_RNA (1)...(19): siRNA sense strand
gcaccaggcugaaacacca

SEQ ID NO: 2653850 - RNA, 19 nt, Homo sapiens
  misc_RNA (1)...(19): siRNA sense strand
gggaccagagaucgaacaa

SEQ ID NO: 2653851 - RNA, 19 nt, Homo sapiens
  misc_RNA (1)...(19): siRNA sense strand
auagaaaacagcaccgaua

SEQ ID NO: 2653852 - RNA, 19 nt, Homo sapiens
  misc_RNA (1)...(19): siRNA sense strand
cgaaggaaauguacagcaa

SEQ ID NO: 2653853 - RNA, 19 nt, Homo sapiens
  misc_RNA (1)...(19): siRNA sense strand
gcgcacacgaggaguacaa

SEQ ID NO: 2653854 - RNA, 19 nt, Homo sapiens
  misc_RNA (1)...(19): siRNA sense strand
ggguaauggugugaaggaa

SEQ ID NO: 2653855 - RNA, 19 nt, Homo sapiens
  misc_RNA (1)...(19): siRNA sense strand
aaggaaauguacagcaaca

SEQ ID NO: 2653856 - RNA, 19 nt, Homo sapiens
  misc_RNA (1)...(19): siRNA sense strand
uacaaaggcuugagcauga

SEQ ID NO: 2653857 - RNA, 19 nt, Homo sapiens
  misc_RNA (1)...(19): siRNA sense strand
ucuacaaaggcuugagcau

SEQ ID NO: 2653858 - RNA, 19 nt, Homo sapiens
  misc_RNA (1)...(19): siRNA sense strand
gguaauggugugaaggaag

SEQ ID NO: 2653859 - RNA, 19 nt, Homo sapiens
  misc_RNA (1)...(19): siRNA sense strand
cugauugucucuagagcuu

SEQ ID NO: 2653860 - RNA, 19 nt, Homo sapiens
  misc_RNA (1)...(19): siRNA sense strand
gaauaaagccugugggaac

SEQ ID NO: 2653861 - RNA, 19 nt, Homo sapiens
  misc_RNA (1)...(19): siRNA sense strand
ccaugcagcucgccagcaa

SEQ ID NO: 2653862 - RNA, 19 nt, Homo sapiens
  misc_RNA (1)...(19): siRNA sense strand
ccagcaagaucccggacau

SEQ ID NO: 2653863 - RNA, 19 nt, Homo sapiens
  misc_RNA (1)...(19): siRNA sense strand
gcugagagaccugaauaaa

SEQ ID NO: 2653864 - RNA, 19 nt, Homo sapiens
  misc_RNA (1)...(19): siRNA sense strand
ugcugagagaccugaauaa

SEQ ID NO: 2653865 - RNA, 19 nt, Homo sapiens
  misc_RNA (1)...(19): siRNA sense strand
cugaauaaagccuguggga

SEQ ID NO: 2653866 - RNA, 19 nt, Homo sapiens
  misc_RNA (1)...(19): siRNA sense strand
gugugaagaauguggcaaa

SEQ ID NO: 2653867 - RNA, 19 nt, Homo sapiens
  misc_RNA (1)...(19): siRNA sense strand
agcucauacuggagagaaa

SEQ ID NO: 2653868 - RNA, 19 nt, Homo sapiens
  misc_RNA (1)...(19): siRNA sense strand
auguagagaauguggcaaa

SEQ ID NO: 2653869 - RNA, 19 nt, Homo sapiens
  misc_RNA (1)...(19): siRNA sense strand
augugaagaaugugguaaa

SEQ ID NO: 2653870 - RNA, 19 nt, Homo sapiens
  misc_RNA (1)...(19): siRNA sense strand
aaaccauacaagugugaua

SEQ ID NO: 2653871 - RNA, 19 nt, Homo sapiens
  misc_RNA (1)...(19): siRNA sense strand
augugauguuagagaacua

SEQ ID NO: 2653872 - RNA, 19 nt, Homo sapiens
  misc_RNA (1)...(19): siRNA sense strand
agauaagagauacuggaaa

SEQ ID NO: 2653873 - RNA, 19 nt, Homo sapiens
  misc_RNA (1)...(19): siRNA sense strand
augugaagaauguggcaaa

SEQ ID NO: 2653874 - RNA, 19 nt, Homo sapiens
  misc_RNA (1)...(19): siRNA sense strand
augugaagaauguggcaaa

SEQ ID NO: 2653875 - RNA, 19 nt, Homo sapiens
  misc_RNA (1)...(19): siRNA sense strand
uggcaacuacccagagaaa

SEQ ID NO: 2653876 - RNA, 19 nt, Homo sapiens
  misc_RNA (1)...(19): siRNA sense strand
gugugauaaauguggcaaa

SEQ ID NO: 2653877 - RNA, 19 nt, Homo sapiens
  misc_RNA (1)...(19): siRNA sense strand
uggucagagcagagcauaa

SEQ ID NO: 2653878 - RNA, 19 nt, Homo sapiens
  misc_RNA (1)...(19): siRNA sense strand
ccuuacuaaacaugagaua

SEQ ID NO: 2653879 - RNA, 19 nt, Homo sapiens
  misc_RNA (1)...(19): siRNA sense strand
aauucauacuggagaugua

SEQ ID NO: 2653880 - RNA, 19 nt, Homo sapiens
  misc_RNA (1)...(19): siRNA sense strand
uagugaagaauguggaaaa

SEQ ID NO: 2653881 - RNA, 19 nt, Homo sapiens
  misc_RNA (1)...(19): siRNA sense strand
acgcuauaaaugugaagaa

SEQ ID NO: 2653882 - RNA, 19 nt, Homo sapiens
  misc_RNA (1)...(19): siRNA sense strand
gguaaagccuauaagcagu

SEQ ID NO: 2653883 - RNA, 19 nt, Homo sapiens
  misc_RNA (1)...(19): siRNA sense strand
ccguacuacauauaagaaa

SEQ ID NO: 2653884 - RNA, 19 nt, Homo sapiens
  misc_RNA (1)...(19): siRNA sense strand
gcaugagaugauugccaaa

SEQ ID NO: 2653885 - RNA, 19 nt, Homo sapiens
  misc_RNA (1)...(19): siRNA sense strand
augugaggaauguggcaaa

SEQ ID NO: 2653886 - RNA, 19 nt, Homo sapiens
  misc_RNA (1)...(19): siRNA sense strand
cgcuauaaaugugaagaau

SEQ ID NO: 2653887 - RNA, 19 nt, Homo sapiens
  misc_RNA (1)...(19): siRNA sense strand
ccuacaaaugugaggaaug

SEQ ID NO: 2653888 - RNA, 19 nt, Homo sapiens
  misc_RNA (1)...(19): siRNA sense strand
cggaaucuauauagggaug

SEQ ID NO: 2653889 - RNA, 19 nt, Homo sapiens
  misc_RNA (1)...(19): siRNA sense strand
ugguauuguugucucuaaa

SEQ ID NO: 2653890 - RNA, 19 nt, Homo sapiens
  misc_RNA (1)...(19): siRNA sense strand
ugaaaguguagaugagugu

SEQ ID NO: 2653891 - RNA, 19 nt, Homo sapiens
  misc_RNA (1)...(19): siRNA sense strand
ccguacaaaugugaagaau

SEQ ID NO: 2653892 - RNA, 19 nt, Homo sapiens
  misc_RNA (1)...(19): siRNA sense strand
gccuauaagcaguccugua

SEQ ID NO: 2653893 - RNA, 19 nt, Homo sapiens
  misc_RNA (1)...(19): siRNA sense strand
ggaugugauguuagagaac

SEQ ID NO: 2653894 - RNA, 19 nt, Homo sapiens
  misc_RNA (1)...(19): siRNA sense strand
ccugcauagugaagaaugu

SEQ ID NO: 2653895 - RNA, 19 nt, Homo sapiens
  misc_RNA (1)...(19): siRNA sense strand
aagauaagagauacuggaa

SEQ ID NO: 2653896 - RNA, 19 nt, Homo sapiens
  misc_RNA (1)...(19): siRNA sense strand
aauucauaguggagagaaa

SEQ ID NO: 2653897 - RNA, 19 nt, Homo sapiens
  misc_RNA (1)...(19): siRNA sense strand
aauucauaguggagagaaa

SEQ ID NO: 2653898 - RNA, 19 nt, Homo sapiens
  misc_RNA (1)...(19): siRNA sense strand
aauucguacuggagagaaa

SEQ ID NO: 2653899 - RNA, 19 nt, Homo sapiens
  misc_RNA (1)...(19): siRNA sense strand
agauaauucaugcgggaaa

SEQ ID NO: 2653900 - RNA, 19 nt, Homo sapiens
  misc_RNA (1)...(19): siRNA sense strand
auguauagaauguggcaaa

SEQ ID NO: 2653901 - RNA, 19 nt, Homo sapiens
  misc_RNA (1)...(19): siRNA sense strand
aauucauagcggagagaaa

SEQ ID NO: 2653902 - RNA, 19 nt, Homo sapiens
  misc_RNA (1)...(19): siRNA sense strand
augugaagacuguggcaaa

SEQ ID NO: 2653903 - RNA, 19 nt, Homo sapiens
  misc_RNA (1)...(19): siRNA sense strand
uggccagagcagagcauaa

SEQ ID NO: 2653904 - RNA, 19 nt, Homo sapiens
  misc_RNA (1)...(19): siRNA sense strand
augugauguuagagaacua

SEQ ID NO: 2653905 - RNA, 19 nt, Homo sapiens
  misc_RNA (1)...(19): siRNA sense strand
agauaagacauacuggaaa

SEQ ID NO: 2653906 - RNA, 19 nt, Homo sapiens
  misc_RNA (1)...(19): siRNA sense strand
augugaagaauguggcaaa

SEQ ID NO: 2653907 - RNA, 19 nt, Homo sapiens
  misc_RNA (1)...(19): siRNA sense strand
augugaagaauguggcaaa

SEQ ID NO: 2653908 - RNA, 19 nt, Homo sapiens
  misc_RNA (1)...(19): siRNA sense strand
augugaagaauguggcaaa

SEQ ID NO: 2653909 - RNA, 19 nt, Homo sapiens
  misc_RNA (1)...(19): siRNA sense strand
augugaagaauguggcaaa

SEQ ID NO: 2653910 - RNA, 19 nt, Homo sapiens
  misc_RNA (1)...(19): siRNA sense strand
augugaagaauguggcaaa

SEQ ID NO: 2653911 - RNA, 19 nt, Homo sapiens
  misc_RNA (1)...(19): siRNA sense strand
cggaauuuauauaggaaug

SEQ ID NO: 2653912 - RNA, 19 nt, Homo sapiens
  misc_RNA (1)...(19): siRNA sense strand
aauucaugcgggaaagaaa

SEQ ID NO: 2653913 - RNA, 19 nt, Homo sapiens
  misc_RNA (1)...(19): siRNA sense strand
aaaguguagaugaguguaa

SEQ ID NO: 2653914 - RNA, 19 nt, Homo sapiens
  misc_RNA (1)...(19): siRNA sense strand
ggagagaaacccugugagu

SEQ ID NO: 2653915 - RNA, 19 nt, Homo sapiens
  misc_RNA (1)...(19): siRNA sense strand
cgggaaagaaacccaacaa

SEQ ID NO: 2653916 - RNA, 19 nt, Homo sapiens
  misc_RNA (1)...(19): siRNA sense strand
uguccuuacuacacauaaa

SEQ ID NO: 2653917 - RNA, 19 nt, Homo sapiens
  misc_RNA (1)...(19): siRNA sense strand
aggaaugugauguuagaga

SEQ ID NO: 2653918 - RNA, 19 nt, Homo sapiens
  misc_RNA (1)...(19): siRNA sense strand
aaacuauggacaugacaau

SEQ ID NO: 2653919 - RNA, 19 nt, Homo sapiens
  misc_RNA (1)...(19): siRNA sense strand
aagauaagacauacuggaa

SEQ ID NO: 2653920 - RNA, 19 nt, Homo sapiens
  misc_RNA (1)...(19): siRNA sense strand
augugaagaauguggcgaa

SEQ ID NO: 2653921 - RNA, 19 nt, Homo sapiens
  misc_RNA (1)...(19): siRNA sense strand
agaauguggcagagccuuu

SEQ ID NO: 2653922 - RNA, 19 nt, Homo sapiens
  misc_RNA (1)...(19): siRNA sense strand
ggccauugcaauuuagaga

SEQ ID NO: 2653923 - RNA, 19 nt, Homo sapiens
  misc_RNA (1)...(19): siRNA sense strand
gcggaauuuauauaggaau

SEQ ID NO: 2653924 - RNA, 19 nt, Homo sapiens
  misc_RNA (1)...(19): siRNA sense strand
ugaagaaacaugagauggu

SEQ ID NO: 2653925 - RNA, 19 nt, Homo sapiens
  misc_RNA (1)...(19): siRNA sense strand
acaacuacucaaagcaaaa

SEQ ID NO: 2653926 - RNA, 19 nt, Homo sapiens
  misc_RNA (1)...(19): siRNA sense strand
gagacguggccauagaauu

SEQ ID NO: 2653927 - RNA, 19 nt, Homo sapiens
  misc_RNA (1)...(19): siRNA sense strand
augugaagaauguggcaga

SEQ ID NO: 2653928 - RNA, 19 nt, Homo sapiens
  misc_RNA (1)...(19): siRNA sense strand
ugaaaguguagaugagugu

SEQ ID NO: 2653929 - RNA, 19 nt, Homo sapiens
  misc_RNA (1)...(19): siRNA sense strand
uuagauaauucaugcggga

SEQ ID NO: 2653930 - RNA, 19 nt, Homo sapiens
  misc_RNA (1)...(19): siRNA sense strand
ugacaacuacucaaagcaa

SEQ ID NO: 2653931 - RNA, 19 nt, Homo sapiens
  misc_RNA (1)...(19): siRNA sense strand
uggcagagccuuuaaguac

SEQ ID NO: 2653932 - RNA, 19 nt, Homo sapiens
  misc_RNA (1)...(19): siRNA sense strand
gauaauucauaguggagag

SEQ ID NO: 2653933 - RNA, 19 nt, Homo sapiens
  misc_RNA (1)...(19): siRNA sense strand
gauaauucauaguggagag

SEQ ID NO: 2653934 - RNA, 19 nt, Homo sapiens
  misc_RNA (1)...(19): siRNA sense strand
uggaauaugaagagacaca

SEQ ID NO: 2653935 - RNA, 19 nt, Homo sapiens
  misc_RNA (1)...(19): siRNA sense strand
aggaaagugauguuagaga

SEQ ID NO: 2653936 - RNA, 19 nt, Homo sapiens
  misc_RNA (1)...(19): siRNA sense strand
aggaaaagaucccuggaau

SEQ ID NO: 2653937 - RNA, 19 nt, Homo sapiens
  misc_RNA (1)...(19): siRNA sense strand
ccguugacauuuagggaug

SEQ ID NO: 2653938 - RNA, 19 nt, Homo sapiens
  misc_RNA (1)...(19): siRNA sense strand
ucucaggaggaguggcaau

SEQ ID NO: 2653939 - RNA, 19 nt, Homo sapiens
  misc_RNA (1)...(19): siRNA sense strand
cauuuagggauguggucau

SEQ ID NO: 2653940 - RNA, 19 nt, Homo sapiens
  misc_RNA (1)...(19): siRNA sense strand
gauuuguauaggaaaguga

SEQ ID NO: 2653941 - RNA, 19 nt, Homo sapiens
  misc_RNA (1)...(19): siRNA sense strand
auguaaagaaugugggaaa

SEQ ID NO: 2653942 - RNA, 19 nt, Homo sapiens
  misc_RNA (1)...(19): siRNA sense strand
aauucauaguggagagaaa

SEQ ID NO: 2653943 - RNA, 19 nt, Homo sapiens
  misc_RNA (1)...(19): siRNA sense strand
cgauaagacauacuggaaa

SEQ ID NO: 2653944 - RNA, 19 nt, Homo sapiens
  misc_RNA (1)...(19): siRNA sense strand
augugaagaauguggcaaa

SEQ ID NO: 2653945 - RNA, 19 nt, Homo sapiens
  misc_RNA (1)...(19): siRNA sense strand
augugaagaauguggcaaa

SEQ ID NO: 2653946 - RNA, 19 nt, Homo sapiens
  misc_RNA (1)...(19): siRNA sense strand
augugaagaauguggcaaa

SEQ ID NO: 2653947 - RNA, 19 nt, Homo sapiens
  misc_RNA (1)...(19): siRNA sense strand
cuuggaaugugaagagaca

SEQ ID NO: 2653948 - RNA, 19 nt, Homo sapiens
  misc_RNA (1)...(19): siRNA sense strand
aaagcauggaugaguguaa

SEQ ID NO: 2653949 - RNA, 19 nt, Homo sapiens
  misc_RNA (1)...(19): siRNA sense strand
gugacaaauaugugaaagu

SEQ ID NO: 2653950 - RNA, 19 nt, Homo sapiens
  misc_RNA (1)...(19): siRNA sense strand
gaagaauguggcagagcuu

SEQ ID NO: 2653951 - RNA, 19 nt, Homo sapiens
  misc_RNA (1)...(19): siRNA sense strand
gguaaggccuuuagccagu

SEQ ID NO: 2653952 - RNA, 19 nt, Homo sapiens
  misc_RNA (1)...(19): siRNA sense strand
augcgaagaguguggaaaa

SEQ ID NO: 2653953 - RNA, 19 nt, Homo sapiens
  misc_RNA (1)...(19): siRNA sense strand
augugaaguauguagcaaa

SEQ ID NO: 2653954 - RNA, 19 nt, Homo sapiens
  misc_RNA (1)...(19): siRNA sense strand
acgauaagacauacuggaa

SEQ ID NO: 2653955 - RNA, 19 nt, Homo sapiens
  misc_RNA (1)...(19): siRNA sense strand
aggaaaagaaccuuggaau

SEQ ID NO: 2653956 - RNA, 19 nt, Homo sapiens
  misc_RNA (1)...(19): siRNA sense strand
ggaaaagaaccuuggaaug

SEQ ID NO: 2653957 - RNA, 19 nt, Homo sapiens
  misc_RNA (1)...(19): siRNA sense strand
ccucuauucuuaacagaca

SEQ ID NO: 2653958 - RNA, 19 nt, Homo sapiens
  misc_RNA (1)...(19): siRNA sense strand
agugauacugagaagauau

SEQ ID NO: 2653959 - RNA, 19 nt, Homo sapiens
  misc_RNA (1)...(19): siRNA sense strand
uguaaggugcacaaagaau

SEQ ID NO: 2653960 - RNA, 19 nt, Homo sapiens
  misc_RNA (1)...(19): siRNA sense strand
aauucauacuggagagaag

SEQ ID NO: 2653961 - RNA, 19 nt, Homo sapiens
  misc_RNA (1)...(19): siRNA sense strand
aauucauacuggagagaag

SEQ ID NO: 2653962 - RNA, 19 nt, Homo sapiens
  misc_RNA (1)...(19): siRNA sense strand
uggaaagaaacccuacaaa

SEQ ID NO: 2653963 - RNA, 19 nt, Homo sapiens
  misc_RNA (1)...(19): siRNA sense strand
uggaaagaaacccuacaaa

SEQ ID NO: 2653964 - RNA, 19 nt, Homo sapiens
  misc_RNA (1)...(19): siRNA sense strand
augugaagaauguggcaga

SEQ ID NO: 2653965 - RNA, 19 nt, Homo sapiens
  misc_RNA (1)...(19): siRNA sense strand
gcccgagaccuuuggccaa

SEQ ID NO: 2653966 - RNA, 19 nt, Homo sapiens
  misc_RNA (1)...(19): siRNA sense strand
ccuuacaaaugugaagaau

SEQ ID NO: 2653967 - RNA, 19 nt, Homo sapiens
  misc_RNA (1)...(19): siRNA sense strand
agauaauucaugcuggaga

SEQ ID NO: 2653968 - RNA, 19 nt, Homo sapiens
  misc_RNA (1)...(19): siRNA sense strand
acauaaacaacgugggaaa

SEQ ID NO: 2653969 - RNA, 19 nt, Homo sapiens
  misc_RNA (1)...(19): siRNA sense strand
guguaaggaaugugggaaa

SEQ ID NO: 2653970 - RNA, 19 nt, Homo sapiens
  misc_RNA (1)...(19): siRNA sense strand
ccauaugaguguaaggaau

SEQ ID NO: 2653971 - RNA, 19 nt, Homo sapiens
  misc_RNA (1)...(19): siRNA sense strand
augcaagauaugugggaaa

SEQ ID NO: 2653972 - RNA, 19 nt, Homo sapiens
  misc_RNA (1)...(19): siRNA sense strand
auguaaggaaugugggaaa

SEQ ID NO: 2653973 - RNA, 19 nt, Homo sapiens
  misc_RNA (1)...(19): siRNA sense strand
auguaagauaugugggaaa

SEQ ID NO: 2653974 - RNA, 19 nt, Homo sapiens
  misc_RNA (1)...(19): siRNA sense strand
gagaagucgucuuggguca

SEQ ID NO: 2653975 - RNA, 19 nt, Homo sapiens
  misc_RNA (1)...(19): siRNA sense strand
gccaaaaugccaagagaaa

SEQ ID NO: 2653976 - RNA, 19 nt, Homo sapiens
  misc_RNA (1)...(19): siRNA sense strand
auguaagcaaugugggaaa

SEQ ID NO: 2653977 - RNA, 19 nt, Homo sapiens
  misc_RNA (1)...(19): siRNA sense strand
cuguaugaauguaaggaau

SEQ ID NO: 2653978 - RNA, 19 nt, Homo sapiens
  misc_RNA (1)...(19): siRNA sense strand
aggacucacuggaaagaua

SEQ ID NO: 2653979 - RNA, 19 nt, Homo sapiens
  misc_RNA (1)...(19): siRNA sense strand
agaaaugucaugcaggaaa

SEQ ID NO: 2653980 - RNA, 19 nt, Homo sapiens
  misc_RNA (1)...(19): siRNA sense strand
auguaagcagugugggaaa

SEQ ID NO: 2653981 - RNA, 19 nt, Homo sapiens
  misc_RNA (1)...(19): siRNA sense strand
acacaagaggagugggcuu

SEQ ID NO: 2653982 - RNA, 19 nt, Homo sapiens
  misc_RNA (1)...(19): siRNA sense strand
cagucaauguggagaaacu

SEQ ID NO: 2653983 - RNA, 19 nt, Homo sapiens
  misc_RNA (1)...(19): siRNA sense strand
auguaaguugugugggaaa

SEQ ID NO: 2653984 - RNA, 19 nt, Homo sapiens
  misc_RNA (1)...(19): siRNA sense strand
cuaucuaagacaugagaga

SEQ ID NO: 2653985 - RNA, 19 nt, Homo sapiens
  misc_RNA (1)...(19): siRNA sense strand
ggacuguauagaaaugaaa

SEQ ID NO: 2653986 - RNA, 19 nt, Homo sapiens
  misc_RNA (1)...(19): siRNA sense strand
cuaucuaagacaugaaaga

SEQ ID NO: 2653987 - RNA, 19 nt, Homo sapiens
  misc_RNA (1)...(19): siRNA sense strand
ugaaaugggaggaccagaa

SEQ ID NO: 2653988 - RNA, 19 nt, Homo sapiens
  misc_RNA (1)...(19): siRNA sense strand
caauguaaacaauguggua

SEQ ID NO: 2653989 - RNA, 19 nt, Homo sapiens
  misc_RNA (1)...(19): siRNA sense strand
auguaaggaauguggaaaa

SEQ ID NO: 2653990 - RNA, 19 nt, Homo sapiens
  misc_RNA (1)...(19): siRNA sense strand
cccuauaaauguacacaau

SEQ ID NO: 2653991 - RNA, 19 nt, Homo sapiens
  misc_RNA (1)...(19): siRNA sense strand
cgaguaaauccaugugaca

SEQ ID NO: 2653992 - RNA, 19 nt, Homo sapiens
  misc_RNA (1)...(19): siRNA sense strand
ggaccagaacauuggagau

SEQ ID NO: 2653993 - RNA, 19 nt, Homo sapiens
  misc_RNA (1)...(19): siRNA sense strand
gaauguaagcaguguggga

SEQ ID NO: 2653994 - RNA, 19 nt, Homo sapiens
  misc_RNA (1)...(19): siRNA sense strand
guauagaaaugaaauggga

SEQ ID NO: 2653995 - RNA, 19 nt, Homo sapiens
  misc_RNA (1)...(19): siRNA sense strand
aaauguaaguuguguggga

SEQ ID NO: 2653996 - RNA, 19 nt, Homo sapiens
  misc_RNA (1)...(19): siRNA sense strand
uaaaugucagugugggaaa

SEQ ID NO: 2653997 - RNA, 19 nt, Homo sapiens
  misc_RNA (1)...(19): siRNA sense strand
aguugacacuggacacaaa

SEQ ID NO: 2653998 - RNA, 19 nt, Homo sapiens
  misc_RNA (1)...(19): siRNA sense strand
uacucacacuggagagaaa

SEQ ID NO: 2653999 - RNA, 19 nt, Homo sapiens
  misc_RNA (1)...(19): siRNA sense strand
gcagugugggaaaguguua

SEQ ID NO: 2654000 - RNA, 19 nt, Homo sapiens
  misc_RNA (1)...(19): siRNA sense strand
ucaaagacaugaaaggacu

SEQ ID NO: 2654001 - RNA, 19 nt, Homo sapiens
  misc_RNA (1)...(19): siRNA sense strand
acagaaaugucaugcagga

SEQ ID NO: 2654002 - RNA, 19 nt, Homo sapiens
  misc_RNA (1)...(19): siRNA sense strand
caucaggaauauggagaga

SEQ ID NO: 2654003 - RNA, 19 nt, Homo sapiens
  misc_RNA (1)...(19): siRNA sense strand
gauuguaaagaaugugcaa

SEQ ID NO: 2654004 - RNA, 19 nt, Homo sapiens
  misc_RNA (1)...(19): siRNA sense strand
uuucgaagacacaugauaa

SEQ ID NO: 2654005 - RNA, 19 nt, Homo sapiens
  misc_RNA (1)...(19): siRNA sense strand
gcguaugaauguaagcagu

SEQ ID NO: 2654006 - RNA, 19 nt, Homo sapiens
  misc_RNA (1)...(19): siRNA sense strand
uuucgaagucacaugauaa

SEQ ID NO: 2654007 - RNA, 19 nt, Homo sapiens
  misc_RNA (1)...(19): siRNA sense strand
ccuucuacgacaugaaaga

SEQ ID NO: 2654008 - RNA, 19 nt, Homo sapiens
  misc_RNA (1)...(19): siRNA sense strand
augucuacaaugugguaaa

SEQ ID NO: 2654009 - RNA, 19 nt, Homo sapiens
  misc_RNA (1)...(19): siRNA sense strand
aaaugaaaugggaggacca

SEQ ID NO: 2654010 - RNA, 19 nt, Homo sapiens
  misc_RNA (1)...(19): siRNA sense strand
gagaaaucuaagaagucau

SEQ ID NO: 2654011 - RNA, 19 nt, Homo sapiens
  misc_RNA (1)...(19): siRNA sense strand
gcauguaagcaauguggga

SEQ ID NO: 2654012 - RNA, 19 nt, Homo sapiens
  misc_RNA (1)...(19): siRNA sense strand
gauaacacacacaggagau

SEQ ID NO: 2654013 - RNA, 19 nt, Homo sapiens
  misc_RNA (1)...(19): siRNA sense strand
ucgaagacaugaagcaacu

SEQ ID NO: 2654014 - RNA, 19 nt, Homo sapiens
  misc_RNA (1)...(19): siRNA sense strand
agaagucauacaugugaaa

SEQ ID NO: 2654015 - RNA, 19 nt, Homo sapiens
  misc_RNA (1)...(19): siRNA sense strand
aaccuggacuguauagaaa

SEQ ID NO: 2654016 - RNA, 19 nt, Homo sapiens
  misc_RNA (1)...(19): siRNA sense strand
ccaguuuauuucaaagaca

SEQ ID NO: 2654017 - RNA, 19 nt, Homo sapiens
  misc_RNA (1)...(19): siRNA sense strand
gcuguaugaauguaaggaa

SEQ ID NO: 2654018 - RNA, 19 nt, Homo sapiens
  misc_RNA (1)...(19): siRNA sense strand
gaauguaagcaguguucca

SEQ ID NO: 2654019 - RNA, 19 nt, Homo sapiens
  misc_RNA (1)...(19): siRNA sense strand
cuuucgaagucacaugaua

SEQ ID NO: 2654020 - RNA, 19 nt, Homo sapiens
  misc_RNA (1)...(19): siRNA sense strand
ucacacaagcuuucgaaga

SEQ ID NO: 2654021 - RNA, 19 nt, Homo sapiens
  misc_RNA (1)...(19): siRNA sense strand
guagaaaagccuucaguca

SEQ ID NO: 2654022 - RNA, 19 nt, Homo sapiens
  misc_RNA (1)...(19): siRNA sense strand
agaaaagccuucagucauu

SEQ ID NO: 2654023 - RNA, 19 nt, Homo sapiens
  misc_RNA (1)...(19): siRNA sense strand
gaagacacauggcggcaca

SEQ ID NO: 2654024 - RNA, 19 nt, Homo sapiens
  misc_RNA (1)...(19): siRNA sense strand
uggagauggaccuuauaaa

SEQ ID NO: 2654025 - RNA, 19 nt, Homo sapiens
  misc_RNA (1)...(19): siRNA sense strand
cuuucaaaaucaugagaca

SEQ ID NO: 2654026 - RNA, 19 nt, Homo sapiens
  misc_RNA (1)...(19): siRNA sense strand
ccuuaugaguguaaaacau

SEQ ID NO: 2654027 - RNA, 19 nt, Homo sapiens
  misc_RNA (1)...(19): siRNA sense strand
aagucauacuggagagaaa

SEQ ID NO: 2654028 - RNA, 19 nt, Homo sapiens
  misc_RNA (1)...(19): siRNA sense strand
aauucauaguggagagaaa

SEQ ID NO: 2654029 - RNA, 19 nt, Homo sapiens
  misc_RNA (1)...(19): siRNA sense strand
aauucauacuggagagaua

SEQ ID NO: 2654030 - RNA, 19 nt, Homo sapiens
  misc_RNA (1)...(19): siRNA sense strand
aagucauacugaagagaaa

SEQ ID NO: 2654031 - RNA, 19 nt, Homo sapiens
  misc_RNA (1)...(19): siRNA sense strand
aagucauacugaagagaaa

SEQ ID NO: 2654032 - RNA, 19 nt, Homo sapiens
  misc_RNA (1)...(19): siRNA sense strand
aagucauacugaagagaaa

SEQ ID NO: 2654033 - RNA, 19 nt, Homo sapiens
  misc_RNA (1)...(19): siRNA sense strand
gauucauauuggacagaaa

SEQ ID NO: 2654034 - RNA, 19 nt, Homo sapiens
  misc_RNA (1)...(19): siRNA sense strand
augugaagauuguggcaaa

SEQ ID NO: 2654035 - RNA, 19 nt, Homo sapiens
  misc_RNA (1)...(19): siRNA sense strand
augugaagauuguggcaaa

SEQ ID NO: 2654036 - RNA, 19 nt, Homo sapiens
  misc_RNA (1)...(19): siRNA sense strand
auguauagaauguggcaaa

SEQ ID NO: 2654037 - RNA, 19 nt, Homo sapiens
  misc_RNA (1)...(19): siRNA sense strand
aauucauacuggagcgaaa

SEQ ID NO: 2654038 - RNA, 19 nt, Homo sapiens
  misc_RNA (1)...(19): siRNA sense strand
agauuguggcaaagaauua

SEQ ID NO: 2654039 - RNA, 19 nt, Homo sapiens
  misc_RNA (1)...(19): siRNA sense strand
agauuguggcaaagaauua

SEQ ID NO: 2654040 - RNA, 19 nt, Homo sapiens
  misc_RNA (1)...(19): siRNA sense strand
ccuacauagugaagaacau

SEQ ID NO: 2654041 - RNA, 19 nt, Homo sapiens
  misc_RNA (1)...(19): siRNA sense strand
augugauguuagagaacua

SEQ ID NO: 2654042 - RNA, 19 nt, Homo sapiens
  misc_RNA (1)...(19): siRNA sense strand
aaaguguggaugaggguaa

SEQ ID NO: 2654043 - RNA, 19 nt, Homo sapiens
  misc_RNA (1)...(19): siRNA sense strand
agauaagagauacuggaaa

SEQ ID NO: 2654044 - RNA, 19 nt, Homo sapiens
  misc_RNA (1)...(19): siRNA sense strand
augugaagaauguggcaaa

SEQ ID NO: 2654045 - RNA, 19 nt, Homo sapiens
  misc_RNA (1)...(19): siRNA sense strand
gauaaauguggcagagcau

SEQ ID NO: 2654046 - RNA, 19 nt, Homo sapiens
  misc_RNA (1)...(19): siRNA sense strand
augugaagaauguggcaaa

SEQ ID NO: 2654047 - RNA, 19 nt, Homo sapiens
  misc_RNA (1)...(19): siRNA sense strand
augugaagaauguggcaaa

SEQ ID NO: 2654048 - RNA, 19 nt, Homo sapiens
  misc_RNA (1)...(19): siRNA sense strand
augugaagaauguggcaaa

SEQ ID NO: 2654049 - RNA, 19 nt, Homo sapiens
  misc_RNA (1)...(19): siRNA sense strand
augugaagaauguggcaaa

SEQ ID NO: 2654050 - RNA, 19 nt, Homo sapiens
  misc_RNA (1)...(19): siRNA sense strand
augugaagaauguggcaaa

SEQ ID NO: 2654051 - RNA, 19 nt, Homo sapiens
  misc_RNA (1)...(19): siRNA sense strand
augugaagaauguggcaaa

SEQ ID NO: 2654052 - RNA, 19 nt, Homo sapiens
  misc_RNA (1)...(19): siRNA sense strand
augugaagaauguggcaaa

SEQ ID NO: 2654053 - RNA, 19 nt, Homo sapiens
  misc_RNA (1)...(19): siRNA sense strand
aagccuacauagugaagaa

SEQ ID NO: 2654054 - RNA, 19 nt, Homo sapiens
  misc_RNA (1)...(19): siRNA sense strand
gugacaaagccuucaagua

SEQ ID NO: 2654055 - RNA, 19 nt, Homo sapiens
  misc_RNA (1)...(19): siRNA sense strand
uagugaagaacauggcaaa

SEQ ID NO: 2654056 - RNA, 19 nt, Homo sapiens
  misc_RNA (1)...(19): siRNA sense strand
ugugaaagucucucauaua

SEQ ID NO: 2654057 - RNA, 19 nt, Homo sapiens
  misc_RNA (1)...(19): siRNA sense strand
aaccaauguuugacagcua

SEQ ID NO: 2654058 - RNA, 19 nt, Homo sapiens
  misc_RNA (1)...(19): siRNA sense strand
aagugauagugacaagaua

SEQ ID NO: 2654059 - RNA, 19 nt, Homo sapiens
  misc_RNA (1)...(19): siRNA sense strand
cagaauuuauauagggaug

SEQ ID NO: 2654060 - RNA, 19 nt, Homo sapiens
  misc_RNA (1)...(19): siRNA sense strand
uguuagagaacuacagaca

SEQ ID NO: 2654061 - RNA, 19 nt, Homo sapiens
  misc_RNA (1)...(19): siRNA sense strand
gaagauuguggcaaagaau

SEQ ID NO: 2654062 - RNA, 19 nt, Homo sapiens
  misc_RNA (1)...(19): siRNA sense strand
gaagauuguggcaaagaau

SEQ ID NO: 2654063 - RNA, 19 nt, Homo sapiens
  misc_RNA (1)...(19): siRNA sense strand
uguccagagcagagccuaa

SEQ ID NO: 2654064 - RNA, 19 nt, Homo sapiens
  misc_RNA (1)...(19): siRNA sense strand
ugaagagacaugagaugau

SEQ ID NO: 2654065 - RNA, 19 nt, Homo sapiens
  misc_RNA (1)...(19): siRNA sense strand
ugauaaauguggcagagca

SEQ ID NO: 2654066 - RNA, 19 nt, Homo sapiens
  misc_RNA (1)...(19): siRNA sense strand
gauagugacaagauaugaa

SEQ ID NO: 2654067 - RNA, 19 nt, Homo sapiens
  misc_RNA (1)...(19): siRNA sense strand
guggcaaagaauuaaagua

SEQ ID NO: 2654068 - RNA, 19 nt, Homo sapiens
  misc_RNA (1)...(19): siRNA sense strand
guggcaaagaauuaaagua

SEQ ID NO: 2654069 - RNA, 19 nt, Homo sapiens
  misc_RNA (1)...(19): siRNA sense strand
ccauuggaauuuagagaug

SEQ ID NO: 2654070 - RNA, 19 nt, Homo sapiens
  misc_RNA (1)...(19): siRNA sense strand
aaguauuccucuacccuua

SEQ ID NO: 2654071 - RNA, 19 nt, Homo sapiens
  misc_RNA (1)...(19): siRNA sense strand
aaguauuccucuacccuua

SEQ ID NO: 2654072 - RNA, 19 nt, Homo sapiens
  misc_RNA (1)...(19): siRNA sense strand
agugauagugacaagauau

SEQ ID NO: 2654073 - RNA, 19 nt, Homo sapiens
  misc_RNA (1)...(19): siRNA sense strand
ugacagcuacccagagcaa

SEQ ID NO: 2654074 - RNA, 19 nt, Homo sapiens
  misc_RNA (1)...(19): siRNA sense strand
ggguaaaguacacaaaaga

SEQ ID NO: 2654075 - RNA, 19 nt, Homo sapiens
  misc_RNA (1)...(19): siRNA sense strand
cgguacaaaugugaagauu

SEQ ID NO: 2654076 - RNA, 19 nt, Homo sapiens
  misc_RNA (1)...(19): siRNA sense strand
cgguacaaaugugaagauu

SEQ ID NO: 2654077 - RNA, 19 nt, Homo sapiens
  misc_RNA (1)...(19): siRNA sense strand
cuaaaagauuccuuccaaa

SEQ ID NO: 2654078 - RNA, 19 nt, Homo sapiens
  misc_RNA (1)...(19): siRNA sense strand
aguagaaugugcagagaua

SEQ ID NO: 2654079 - RNA, 19 nt, Homo sapiens
  misc_RNA (1)...(19): siRNA sense strand
ggaugaagcagcuggguau

SEQ ID NO: 2654080 - RNA, 19 nt, Homo sapiens
  misc_RNA (1)...(19): siRNA sense strand
gaacauaguuuauccacaa

SEQ ID NO: 2654081 - RNA, 19 nt, Homo sapiens
  misc_RNA (1)...(19): siRNA sense strand
gguugaaaugggagaggaa

SEQ ID NO: 2654082 - RNA, 19 nt, Homo sapiens
  misc_RNA (1)...(19): siRNA sense strand
acuuaagaauccagaguau

SEQ ID NO: 2654083 - RNA, 19 nt, Homo sapiens
  misc_RNA (1)...(19): siRNA sense strand
gauaaagccuggagaccau

SEQ ID NO: 2654084 - RNA, 19 nt, Homo sapiens
  misc_RNA (1)...(19): siRNA sense strand
cguguaugccugugaguua

SEQ ID NO: 2654085 - RNA, 19 nt, Homo sapiens
  misc_RNA (1)...(19): siRNA sense strand
ucaacaaccuucaggaauu

SEQ ID NO: 2654086 - RNA, 19 nt, Homo sapiens
  misc_RNA (1)...(19): siRNA sense strand
gugaaauggauguugcaaa

SEQ ID NO: 2654087 - RNA, 19 nt, Homo sapiens
  misc_RNA (1)...(19): siRNA sense strand
aaggaauuguggagaguuu

SEQ ID NO: 2654088 - RNA, 19 nt, Homo sapiens
  misc_RNA (1)...(19): siRNA sense strand
ugaaauggauguugcaaaa

SEQ ID NO: 2654089 - RNA, 19 nt, Homo sapiens
  misc_RNA (1)...(19): siRNA sense strand
cagaaauugcuuugcuuaa

SEQ ID NO: 2654090 - RNA, 19 nt, Homo sapiens
  misc_RNA (1)...(19): siRNA sense strand
gaugaagugauuugcaaua

SEQ ID NO: 2654091 - RNA, 19 nt, Homo sapiens
  misc_RNA (1)...(19): siRNA sense strand
ggacauuggagcaggaacu

SEQ ID NO: 2654092 - RNA, 19 nt, Homo sapiens
  misc_RNA (1)...(19): siRNA sense strand
uguagauacugaagaaaca

SEQ ID NO: 2654093 - RNA, 19 nt, Homo sapiens
  misc_RNA (1)...(19): siRNA sense strand
ugucaagacuguuacuuaa

SEQ ID NO: 2654094 - RNA, 19 nt, Homo sapiens
  misc_RNA (1)...(19): siRNA sense strand
gaggaaacauguugggaac

SEQ ID NO: 2654095 - RNA, 19 nt, Homo sapiens
  misc_RNA (1)...(19): siRNA sense strand
guauuagugucuuggguuu

SEQ ID NO: 2654096 - RNA, 19 nt, Homo sapiens
  misc_RNA (1)...(19): siRNA sense strand
auaaagcagugaagcuaaa

SEQ ID NO: 2654097 - RNA, 19 nt, Homo sapiens
  misc_RNA (1)...(19): siRNA sense strand
aaugacaccaagaggaaua

SEQ ID NO: 2654098 - RNA, 19 nt, Homo sapiens
  misc_RNA (1)...(19): siRNA sense strand
gccaaagaccaaaggugaa

SEQ ID NO: 2654099 - RNA, 19 nt, Homo sapiens
  misc_RNA (1)...(19): siRNA sense strand
gaaagugcuaauugugaaa

SEQ ID NO: 2654100 - RNA, 19 nt, Homo sapiens
  misc_RNA (1)...(19): siRNA sense strand
ccaaagaccaaaggugaaa

SEQ ID NO: 2654101 - RNA, 19 nt, Homo sapiens
  misc_RNA (1)...(19): siRNA sense strand
gaaaaguaugggaaaguua

SEQ ID NO: 2654102 - RNA, 19 nt, Homo sapiens
  misc_RNA (1)...(19): siRNA sense strand
cagaugggcugaagagcuu

SEQ ID NO: 2654103 - RNA, 19 nt, Homo sapiens
  misc_RNA (1)...(19): siRNA sense strand
gauaagaagacaucauaga

SEQ ID NO: 2654104 - RNA, 19 nt, Homo sapiens
  misc_RNA (1)...(19): siRNA sense strand
cuugcagacuacuggauaa

SEQ ID NO: 2654105 - RNA, 19 nt, Homo sapiens
  misc_RNA (1)...(19): siRNA sense strand
ggacauugcugguauccau

SEQ ID NO: 2654106 - RNA, 19 nt, Homo sapiens
  misc_RNA (1)...(19): siRNA sense strand
cauaaagcagugaagcuaa

SEQ ID NO: 2654107 - RNA, 19 nt, Homo sapiens
  misc_RNA (1)...(19): siRNA sense strand
gggaugaagcagcugggua

SEQ ID NO: 2654108 - RNA, 19 nt, Homo sapiens
  misc_RNA (1)...(19): siRNA sense strand
caguaaaccagaugcugua

SEQ ID NO: 2654109 - RNA, 19 nt, Homo sapiens
  misc_RNA (1)...(19): siRNA sense strand
uggagcaggaacuggaaua

SEQ ID NO: 2654110 - RNA, 19 nt, Homo sapiens
  misc_RNA (1)...(19): siRNA sense strand
caucauagaguggguauua

SEQ ID NO: 2654111 - RNA, 19 nt, Homo sapiens
  misc_RNA (1)...(19): siRNA sense strand
ugacagagugcuuugaaau

SEQ ID NO: 2654112 - RNA, 19 nt, Homo sapiens
  misc_RNA (1)...(19): siRNA sense strand
cguuaggaaaugaggcuga

SEQ ID NO: 2654113 - RNA, 19 nt, Homo sapiens
  misc_RNA (1)...(19): siRNA sense strand
ugaaagugcuaauugugaa

SEQ ID NO: 2654114 - RNA, 19 nt, Homo sapiens
  misc_RNA (1)...(19): siRNA sense strand
gggagcaucucuucagaau

SEQ ID NO: 2654115 - RNA, 19 nt, Homo sapiens
  misc_RNA (1)...(19): siRNA sense strand
ugacaguagauuucaacaa

SEQ ID NO: 2654116 - RNA, 19 nt, Homo sapiens
  misc_RNA (1)...(19): siRNA sense strand
caacaaccuucaggaauua

SEQ ID NO: 2654117 - RNA, 19 nt, Homo sapiens
  misc_RNA (1)...(19): siRNA sense strand
cagaaugggcuuuagggau

SEQ ID NO: 2654118 - RNA, 19 nt, Homo sapiens
  misc_RNA (1)...(19): siRNA sense strand
gauauuuggcuuugacaga

SEQ ID NO: 2654119 - RNA, 19 nt, Homo sapiens
  misc_RNA (1)...(19): siRNA sense strand
ggauaaagccuggagacca

SEQ ID NO: 2654120 - RNA, 19 nt, Homo sapiens
  misc_RNA (1)...(19): siRNA sense strand
agguuuauuuggagaagga

SEQ ID NO: 2654121 - RNA, 19 nt, Homo sapiens
  misc_RNA (1)...(19): siRNA sense strand
agagauaagaagacaucau

SEQ ID NO: 2654122 - RNA, 19 nt, Homo sapiens
  misc_RNA (1)...(19): siRNA sense strand
ugaggaaacauguugggaa

SEQ ID NO: 2654123 - RNA, 19 nt, Homo sapiens
  misc_RNA (1)...(19): siRNA sense strand
uuaaaauggcaaugagcaa

SEQ ID NO: 2654124 - RNA, 19 nt, Homo sapiens
  misc_RNA (1)...(19): siRNA sense strand
agaaugggcuuuagggaug

SEQ ID NO: 2654125 - RNA, 19 nt, Homo sapiens
  misc_RNA (1)...(19): siRNA sense strand
uuaaugacaccaagaggaa

SEQ ID NO: 2654126 - RNA, 19 nt, Homo sapiens
  misc_RNA (1)...(19): siRNA sense strand
uucacugacuccagagaaa

SEQ ID NO: 2654127 - RNA, 19 nt, Homo sapiens
  misc_RNA (1)...(19): siRNA sense strand
agccaaagaccaaagguga

SEQ ID NO: 2654128 - RNA, 19 nt, Homo sapiens
  misc_RNA (1)...(19): siRNA sense strand
gaaccuuauacaacugaaa

SEQ ID NO: 2654129 - RNA, 19 nt, Homo sapiens
  misc_RNA (1)...(19): siRNA sense strand
gcagacauguauauuggaa

SEQ ID NO: 2654130 - RNA, 19 nt, Homo sapiens
  misc_RNA (1)...(19): siRNA sense strand
ucauaaagcagugaagcua

SEQ ID NO: 2654131 - RNA, 19 nt, Homo sapiens
  misc_RNA (1)...(19): siRNA sense strand
ggaucaaacucuuacauac

SEQ ID NO: 2654132 - RNA, 19 nt, Homo sapiens
  misc_RNA (1)...(19): siRNA sense strand
guuuauuuggagaaggaau

SEQ ID NO: 2654133 - RNA, 19 nt, Homo sapiens
  misc_RNA (1)...(19): siRNA sense strand
gcuuauucuucuguagaua

SEQ ID NO: 2654134 - RNA, 19 nt, Homo sapiens
  misc_RNA (1)...(19): siRNA sense strand
gcuccagcuugaugaugaa

SEQ ID NO: 2654135 - RNA, 19 nt, Homo sapiens
  misc_RNA (1)...(19): siRNA sense strand
gagaaggaauuguggagag

SEQ ID NO: 2654136 - RNA, 19 nt, Homo sapiens
  misc_RNA (1)...(19): siRNA sense strand
gggaaaguuauaccagcaa

SEQ ID NO: 2654137 - RNA, 19 nt, Homo sapiens
  misc_RNA (1)...(19): siRNA sense strand
aggaaaugaggcugaacuu

SEQ ID NO: 2654138 - RNA, 19 nt, Homo sapiens
  misc_RNA (1)...(19): siRNA sense strand
cagacaaguuauggagcau

SEQ ID NO: 2654139 - RNA, 19 nt, Homo sapiens
  misc_RNA (1)...(19): siRNA sense strand
agacauguauauuggaauc

SEQ ID NO: 2654140 - RNA, 19 nt, Homo sapiens
  misc_RNA (1)...(19): siRNA sense strand
gcuuugaaauuaugacagu

SEQ ID NO: 2654141 - RNA, 19 nt, Homo sapiens
  misc_RNA (1)...(19): siRNA sense strand
agcaggaaauaauggaaaa

SEQ ID NO: 2654142 - RNA, 19 nt, Homo sapiens
  misc_RNA (1)...(19): siRNA sense strand
agcaggaacuggaauacua

SEQ ID NO: 2654143 - RNA, 19 nt, Homo sapiens
  misc_RNA (1)...(19): siRNA sense strand
gugcagagauaagaagaca

SEQ ID NO: 2654144 - RNA, 19 nt, Homo sapiens
  misc_RNA (1)...(19): siRNA sense strand
gagauaagaagacaucaua

SEQ ID NO: 2654145 - RNA, 19 nt, Homo sapiens
  misc_RNA (1)...(19): siRNA sense strand
cagagugcuuugaaauuau

SEQ ID NO: 2654146 - RNA, 19 nt, Homo sapiens
  misc_RNA (1)...(19): siRNA sense strand
gguuugugcuccagcuuga

SEQ ID NO: 2654147 - RNA, 19 nt, Homo sapiens
  misc_RNA (1)...(19): siRNA sense strand
agacuuacuugguugcuau

SEQ ID NO: 2654148 - RNA, 19 nt, Homo sapiens
  misc_RNA (1)...(19): siRNA sense strand
accaagaggaauacaauuu

SEQ ID NO: 2654149 - RNA, 19 nt, Homo sapiens
  misc_RNA (1)...(19): siRNA sense strand
gggaucaaacucuuacaua

SEQ ID NO: 2654150 - RNA, 19 nt, Homo sapiens
  misc_RNA (1)...(19): siRNA sense strand
acuuguuaucguuaggaaa

SEQ ID NO: 2654151 - RNA, 19 nt, Homo sapiens
  misc_RNA (1)...(19): siRNA sense strand
ggauacucacugucagaau

SEQ ID NO: 2654152 - RNA, 19 nt, Homo sapiens
  misc_RNA (1)...(19): siRNA sense strand
gaacuggaauacuaagcau

SEQ ID NO: 2654153 - RNA, 19 nt, Homo sapiens
  misc_RNA (1)...(19): siRNA sense strand
acagagugcuuugaaauua

SEQ ID NO: 2654154 - RNA, 19 nt, Homo sapiens
  misc_RNA (1)...(19): siRNA sense strand
cuggaacuggacagaguaa

SEQ ID NO: 2654155 - RNA, 19 nt, Homo sapiens
  misc_RNA (1)...(19): siRNA sense strand
gggcucauucagcaggaaa

SEQ ID NO: 2654156 - RNA, 19 nt, Homo sapiens
  misc_RNA (1)...(19): siRNA sense strand
cugcaguuguuuuagauaa

SEQ ID NO: 2654157 - RNA, 19 nt, Homo sapiens
  misc_RNA (1)...(19): siRNA sense strand
uugaaaugggagaggaacu

SEQ ID NO: 2654158 - RNA, 19 nt, Homo sapiens
  misc_RNA (1)...(19): siRNA sense strand
gacaaagggaagagagcaa

SEQ ID NO: 2654159 - RNA, 19 nt, Homo sapiens
  misc_RNA (1)...(19): siRNA sense strand
augaagaccuaguggagaa

SEQ ID NO: 2654160 - RNA, 19 nt, Homo sapiens
  misc_RNA (1)...(19): siRNA sense strand
cggaggagauugagaggga

SEQ ID NO: 2654161 - RNA, 19 nt, Homo sapiens
  misc_RNA (1)...(19): siRNA sense strand
guucagaugaugaggugua

SEQ ID NO: 2654162 - RNA, 19 nt, Homo sapiens
  misc_RNA (1)...(19): siRNA sense strand
caaugagggauuugaacaa

SEQ ID NO: 2654163 - RNA, 19 nt, Homo sapiens
  misc_RNA (1)...(19): siRNA sense strand
gagccuaaagccagacaaa

SEQ ID NO: 2654164 - RNA, 19 nt, Homo sapiens
  misc_RNA (1)...(19): siRNA sense strand
gaggagauugagagggauu

SEQ ID NO: 2654165 - RNA, 19 nt, Homo sapiens
  misc_RNA (1)...(19): siRNA sense strand
gagcaaauucccaagaaaa

SEQ ID NO: 2654166 - RNA, 19 nt, Homo sapiens
  misc_RNA (1)...(19): siRNA sense strand
cguaauuauuugagacugu

SEQ ID NO: 2654167 - RNA, 19 nt, Homo sapiens
  misc_RNA (1)...(19): siRNA sense strand
ucuuagacaaugagggauu

SEQ ID NO: 2654168 - RNA, 19 nt, Homo sapiens
  misc_RNA (1)...(19): siRNA sense strand
ccagcaaggaggagaacuu

SEQ ID NO: 2654169 - RNA, 19 nt, Homo sapiens
  misc_RNA (1)...(19): siRNA sense strand
ugauugaacagaugagauu

SEQ ID NO: 2654170 - RNA, 19 nt, Homo sapiens
  misc_RNA (1)...(19): siRNA sense strand
agagcaaauucccaagaaa

SEQ ID NO: 2654171 - RNA, 19 nt, Homo sapiens
  misc_RNA (1)...(19): siRNA sense strand
ucaaagaaugcaaaggauu

SEQ ID NO: 2654172 - RNA, 19 nt, Homo sapiens
  misc_RNA (1)...(19): siRNA sense strand
caacauagccaugaggcaa

SEQ ID NO: 2654173 - RNA, 19 nt, Homo sapiens
  misc_RNA (1)...(19): siRNA sense strand
gguacgaaccauugugaca

SEQ ID NO: 2654174 - RNA, 19 nt, Homo sapiens
  misc_RNA (1)...(19): siRNA sense strand
auguaaaggaagaugauga

SEQ ID NO: 2654175 - RNA, 19 nt, Homo sapiens
  misc_RNA (1)...(19): siRNA sense strand
ucgagcaguucaagggaau

SEQ ID NO: 2654176 - RNA, 19 nt, Homo sapiens
  misc_RNA (1)...(19): siRNA sense strand
ggaguuugucucugggcua

SEQ ID NO: 2654177 - RNA, 19 nt, Homo sapiens
  misc_RNA (1)...(19): siRNA sense strand
caggauuaccagugcaaaa

SEQ ID NO: 2654178 - RNA, 19 nt, Homo sapiens
  misc_RNA (1)...(19): siRNA sense strand
gacaaauggaggacaucaa

SEQ ID NO: 2654179 - RNA, 19 nt, Homo sapiens
  misc_RNA (1)...(19): siRNA sense strand
augcaaauguggacaaacu

SEQ ID NO: 2654180 - RNA, 19 nt, Homo sapiens
  misc_RNA (1)...(19): siRNA sense strand
uggauguaccucagcauua

SEQ ID NO: 2654181 - RNA, 19 nt, Homo sapiens
  misc_RNA (1)...(19): siRNA sense strand
gcucugaugcugauggaga

SEQ ID NO: 2654182 - RNA, 19 nt, Homo sapiens
  misc_RNA (1)...(19): siRNA sense strand
cagaacuuccuacgagaaa

SEQ ID NO: 2654183 - RNA, 19 nt, Homo sapiens
  misc_RNA (1)...(19): siRNA sense strand
cuguguaagacaauguaua

SEQ ID NO: 2654184 - RNA, 19 nt, Homo sapiens
  misc_RNA (1)...(19): siRNA sense strand
gcaaguuguucguggccca

SEQ ID NO: 2654185 - RNA, 19 nt, Homo sapiens
  misc_RNA (1)...(19): siRNA sense strand
auggagacucuuugauuaa

SEQ ID NO: 2654186 - RNA, 19 nt, Homo sapiens
  misc_RNA (1)...(19): siRNA sense strand
gcccaaacucaaaaggaaa

SEQ ID NO: 2654187 - RNA, 19 nt, Homo sapiens
  misc_RNA (1)...(19): siRNA sense strand
caaagggaagagagcaaau

SEQ ID NO: 2654188 - RNA, 19 nt, Homo sapiens
  misc_RNA (1)...(19): siRNA sense strand
ccuucaaguuaauggagca

SEQ ID NO: 2654189 - RNA, 19 nt, Homo sapiens
  misc_RNA (1)...(19): siRNA sense strand
gaggcaacucuuagacaau

SEQ ID NO: 2654190 - RNA, 19 nt, Homo sapiens
  misc_RNA (1)...(19): siRNA sense strand
gggcaagggaucugcaugu

SEQ ID NO: 2654191 - RNA, 19 nt, Homo sapiens
  misc_RNA (1)...(19): siRNA sense strand
acaucaagcuggaggacuc

SEQ ID NO: 2654192 - RNA, 19 nt, Homo sapiens
  misc_RNA (1)...(19): siRNA sense strand
gaugccagaggaagagaaa

SEQ ID NO: 2654193 - RNA, 19 nt, Homo sapiens
  misc_RNA (1)...(19): siRNA sense strand
aggaagagaaacucgucaa

SEQ ID NO: 2654194 - RNA, 19 nt, Homo sapiens
  misc_RNA (1)...(19): siRNA sense strand
aggugacaauuguggaaaa

SEQ ID NO: 2654195 - RNA, 19 nt, Homo sapiens
  misc_RNA (1)...(19): siRNA sense strand
cgaaccauugugacagaaa

SEQ ID NO: 2654196 - RNA, 19 nt, Homo sapiens
  misc_RNA (1)...(19): siRNA sense strand
ccauugaugagcuggaaga

SEQ ID NO: 2654197 - RNA, 19 nt, Homo sapiens
  misc_RNA (1)...(19): siRNA sense strand
gcuaagugcugcaugccau

SEQ ID NO: 2654198 - RNA, 19 nt, Homo sapiens
  misc_RNA (1)...(19): siRNA sense strand
acggagaaguuuaaagaag

SEQ ID NO: 2654199 - RNA, 19 nt, Homo sapiens
  misc_RNA (1)...(19): siRNA sense strand
cuguauuccucaacaucaa

SEQ ID NO: 2654200 - RNA, 19 nt, Homo sapiens
  misc_RNA (1)...(19): siRNA sense strand
ccaacuugaaagauagaga

SEQ ID NO: 2654201 - RNA, 19 nt, Homo sapiens
  misc_RNA (1)...(19): siRNA sense strand
ucucagauuuccugcaaca

SEQ ID NO: 2654202 - RNA, 19 nt, Homo sapiens
  misc_RNA (1)...(19): siRNA sense strand
gcucaaacuccuguacaaa

SEQ ID NO: 2654203 - RNA, 19 nt, Homo sapiens
  misc_RNA (1)...(19): siRNA sense strand
uuaaagaagccauugugaa

SEQ ID NO: 2654204 - RNA, 19 nt, Homo sapiens
  misc_RNA (1)...(19): siRNA sense strand
augcaaaggauuuacccaa

SEQ ID NO: 2654205 - RNA, 19 nt, Homo sapiens
  misc_RNA (1)...(19): siRNA sense strand
cauguaccgcacagagaaa

SEQ ID NO: 2654206 - RNA, 19 nt, Homo sapiens
  misc_RNA (1)...(19): siRNA sense strand
cugggaauggcuugagcaa

SEQ ID NO: 2654207 - RNA, 19 nt, Homo sapiens
  misc_RNA (1)...(19): siRNA sense strand
acacagacccugaugacca

SEQ ID NO: 2654208 - RNA, 19 nt, Homo sapiens
  misc_RNA (1)...(19): siRNA sense strand
ccgagagggccaacccaua

SEQ ID NO: 2654209 - RNA, 19 nt, Homo sapiens
  misc_RNA (1)...(19): siRNA sense strand
uggaagaacuuuaugcucu

SEQ ID NO: 2654210 - RNA, 19 nt, Homo sapiens
  misc_RNA (1)...(19): siRNA sense strand
ugccagaggaagagaaacu

SEQ ID NO: 2654211 - RNA, 19 nt, Homo sapiens
  misc_RNA (1)...(19): siRNA sense strand
uaugggaagggaagcgaaa

SEQ ID NO: 2654212 - RNA, 19 nt, Homo sapiens
  misc_RNA (1)...(19): siRNA sense strand
ccaacauagccaugaggca

SEQ ID NO: 2654213 - RNA, 19 nt, Homo sapiens
  misc_RNA (1)...(19): siRNA sense strand
uuugccaacuugaaagaua

SEQ ID NO: 2654214 - RNA, 19 nt, Homo sapiens
  misc_RNA (1)...(19): siRNA sense strand
auggagagcgccaguuuaa

SEQ ID NO: 2654215 - RNA, 19 nt, Homo sapiens
  misc_RNA (1)...(19): siRNA sense strand
gaugagauucaaacagaga

SEQ ID NO: 2654216 - RNA, 19 nt, Homo sapiens
  misc_RNA (1)...(19): siRNA sense strand
gcaaagaucucugcaauaa

SEQ ID NO: 2654217 - RNA, 19 nt, Homo sapiens
  misc_RNA (1)...(19): siRNA sense strand
caucucaagccaagggaaa

SEQ ID NO: 2654218 - RNA, 19 nt, Homo sapiens
  misc_RNA (1)...(19): siRNA sense strand
ggacugugaagaagugaaa

SEQ ID NO: 2654219 - RNA, 19 nt, Homo sapiens
  misc_RNA (1)...(19): siRNA sense strand
caggaaaacaagagaaaga

SEQ ID NO: 2654220 - RNA, 19 nt, Homo sapiens
  misc_RNA (1)...(19): siRNA sense strand
ggaaggaccucaauaccaa

SEQ ID NO: 2654221 - RNA, 19 nt, Homo sapiens
  misc_RNA (1)...(19): siRNA sense strand
gaugaagcauuuagaacau

SEQ ID NO: 2654222 - RNA, 19 nt, Homo sapiens
  misc_RNA (1)...(19): siRNA sense strand
ccgagaaggaggaauggua

SEQ ID NO: 2654223 - RNA, 19 nt, Homo sapiens
  misc_RNA (1)...(19): siRNA sense strand
gaacauucuuaaagcccua

SEQ ID NO: 2654224 - RNA, 19 nt, Homo sapiens
  misc_RNA (1)...(19): siRNA sense strand
ccaagaaagcccacucaaa

SEQ ID NO: 2654225 - RNA, 19 nt, Homo sapiens
  misc_RNA (1)...(19): siRNA sense strand
cggcaguacuuccagcaaa

SEQ ID NO: 2654226 - RNA, 19 nt, Homo sapiens
  misc_RNA (1)...(19): siRNA sense strand
cauaaugauuccugagcca

SEQ ID NO: 2654227 - RNA, 19 nt, Homo sapiens
  misc_RNA (1)...(19): siRNA sense strand
ucuuaaagcccuagggauc

SEQ ID NO: 2654228 - RNA, 19 nt, Homo sapiens
  misc_RNA (1)...(19): siRNA sense strand
ugaccaggacugugaagaa

SEQ ID NO: 2654229 - RNA, 19 nt, Homo sapiens
  misc_RNA (1)...(19): siRNA sense strand
gagcaauugaugaagcauu

SEQ ID NO: 2654230 - RNA, 19 nt, Homo sapiens
  misc_RNA (1)...(19): siRNA sense strand
aagaagggugacaaggaaa

SEQ ID NO: 2654231 - RNA, 19 nt, Homo sapiens
  misc_RNA (1)...(19): siRNA sense strand
aagcaaagaucucugcaau

SEQ ID NO: 2654232 - RNA, 19 nt, Homo sapiens
  misc_RNA (1)...(19): siRNA sense strand
uagaagacaucguggccau

SEQ ID NO: 2654233 - RNA, 19 nt, Homo sapiens
  misc_RNA (1)...(19): siRNA sense strand
aagccaagggaaaggauau

SEQ ID NO: 2654234 - RNA, 19 nt, Homo sapiens
  misc_RNA (1)...(19): siRNA sense strand
agcaaagaucucugcaaua

SEQ ID NO: 2654235 - RNA, 19 nt, Homo sapiens
  misc_RNA (1)...(19): siRNA sense strand
aagcagugauucugacauu

SEQ ID NO: 2654236 - RNA, 19 nt, Homo sapiens
  misc_RNA (1)...(19): siRNA sense strand
ggaaggagauaguaagccu

SEQ ID NO: 2654237 - RNA, 19 nt, Homo sapiens
  misc_RNA (1)...(19): siRNA sense strand
gagaaggaggaaugguaca

SEQ ID NO: 2654238 - RNA, 19 nt, Homo sapiens
  misc_RNA (1)...(19): siRNA sense strand
uaugcaaaugccagggaua

SEQ ID NO: 2654239 - RNA, 19 nt, Homo sapiens
  misc_RNA (1)...(19): siRNA sense strand
ggaccaucaagaaggguga

SEQ ID NO: 2654240 - RNA, 19 nt, Homo sapiens
  misc_RNA (1)...(19): siRNA sense strand
ugaugaagcauuuagaaca

SEQ ID NO: 2654241 - RNA, 19 nt, Homo sapiens
  misc_RNA (1)...(19): siRNA sense strand
ggaaaacaagagaaagaau

SEQ ID NO: 2654242 - RNA, 19 nt, Homo sapiens
  misc_RNA (1)...(19): siRNA sense strand
uacuaacauuggagguuua

SEQ ID NO: 2654243 - RNA, 19 nt, Homo sapiens
  misc_RNA (1)...(19): siRNA sense strand
agcaauugaugaagcauuu

SEQ ID NO: 2654244 - RNA, 19 nt, Homo sapiens
  misc_RNA (1)...(19): siRNA sense strand
ggcacauacauuugcuaaa

SEQ ID NO: 2654245 - RNA, 19 nt, Homo sapiens
  misc_RNA (1)...(19): siRNA sense strand
ugacaaggaaacagagucu

SEQ ID NO: 2654246 - RNA, 19 nt, Homo sapiens
  misc_RNA (1)...(19): siRNA sense strand
caguuuguauugaagggua

SEQ ID NO: 2654247 - RNA, 19 nt, Homo sapiens
  misc_RNA (1)...(19): siRNA sense strand
aauugguauuccagaggua

SEQ ID NO: 2654248 - RNA, 19 nt, Homo sapiens
  misc_RNA (1)...(19): siRNA sense strand
gggagcaauugaugaagca

SEQ ID NO: 2654249 - RNA, 19 nt, Homo sapiens
  misc_RNA (1)...(19): siRNA sense strand
aggcacagcuguuccaaaa

SEQ ID NO: 2654250 - RNA, 19 nt, Homo sapiens
  misc_RNA (1)...(19): siRNA sense strand
ccaaugacguuguccggau

SEQ ID NO: 2654251 - RNA, 19 nt, Homo sapiens
  misc_RNA (1)...(19): siRNA sense strand
ugagggagcaauugaugaa

SEQ ID NO: 2654252 - RNA, 19 nt, Homo sapiens
  misc_RNA (1)...(19): siRNA sense strand
ccacugacuucgagggcuc

SEQ ID NO: 2654253 - RNA, 19 nt, Homo sapiens
  misc_RNA (1)...(19): siRNA sense strand
gccaaaagggaaggagaua

SEQ ID NO: 2654254 - RNA, 19 nt, Homo sapiens
  misc_RNA (1)...(19): siRNA sense strand
gcaauaagcacaugccauc

SEQ ID NO: 2654255 - RNA, 19 nt, Homo sapiens
  misc_RNA (1)...(19): siRNA sense strand
caagccaagggaaaggaua

SEQ ID NO: 2654256 - RNA, 19 nt, Homo sapiens
  misc_RNA (1)...(19): siRNA sense strand
acacuuuggccuuaggaca

SEQ ID NO: 2654257 - RNA, 19 nt, Homo sapiens
  misc_RNA (1)...(19): siRNA sense strand
cuacuaacauuggagguuu

SEQ ID NO: 2654258 - RNA, 19 nt, Homo sapiens
  misc_RNA (1)...(19): siRNA sense strand
gaacaggaaaacaagagaa

SEQ ID NO: 2654259 - RNA, 19 nt, Homo sapiens
  misc_RNA (1)...(19): siRNA sense strand
gcacaugccaucaucguca

SEQ ID NO: 2654260 - RNA, 19 nt, Homo sapiens
  misc_RNA (1)...(19): siRNA sense strand
acucaaagcgagacugcca

SEQ ID NO: 2654261 - RNA, 19 nt, Homo sapiens
  misc_RNA (1)...(19): siRNA sense strand
aguuauucccguacucaaa

SEQ ID NO: 2654262 - RNA, 19 nt, Homo sapiens
  misc_RNA (1)...(19): siRNA sense strand
aacugcacguacagggaua

SEQ ID NO: 2654263 - RNA, 19 nt, Homo sapiens
  misc_RNA (1)...(19): siRNA sense strand
gcacguacagggauaagau

SEQ ID NO: 2654264 - RNA, 19 nt, Homo sapiens
  misc_RNA (1)...(19): siRNA sense strand
ccacugaccaggacuguga

SEQ ID NO: 2654265 - RNA, 19 nt, Homo sapiens
  misc_RNA (1)...(19): siRNA sense strand
agaaggaggaaaugggaaa

SEQ ID NO: 2654266 - RNA, 19 nt, Homo sapiens
  misc_RNA (1)...(19): siRNA sense strand
aggagaaguucgaggcaga

SEQ ID NO: 2654267 - RNA, 19 nt, Homo sapiens
  misc_RNA (1)...(19): siRNA sense strand
ggaaaugggaaaagagaau

SEQ ID NO: 2654268 - RNA, 19 nt, Homo sapiens
  misc_RNA (1)...(19): siRNA sense strand
uuaaaguguuugaggguca

SEQ ID NO: 2654269 - RNA, 19 nt, Homo sapiens
  misc_RNA (1)...(19): siRNA sense strand
cauuaugaacacagaacaa

SEQ ID NO: 2654270 - RNA, 19 nt, Homo sapiens
  misc_RNA (1)...(19): siRNA sense strand
cuggaugaguggagaacuu

SEQ ID NO: 2654271 - RNA, 19 nt, Homo sapiens
  misc_RNA (1)...(19): siRNA sense strand
gggagaagacacuggcaga

SEQ ID NO: 2654272 - RNA, 19 nt, Homo sapiens
  misc_RNA (1)...(19): siRNA sense strand
cauacaagucacugggaga

SEQ ID NO: 2654273 - RNA, 19 nt, Homo sapiens
  misc_RNA (1)...(19): siRNA sense strand
ccuuauacgaaguguuaau

SEQ ID NO: 2654274 - RNA, 19 nt, Homo sapiens
  misc_RNA (1)...(19): siRNA sense strand
aguaauguugagagaacua

SEQ ID NO: 2654275 - RNA, 19 nt, Homo sapiens
  misc_RNA (1)...(19): siRNA sense strand
caucuuagaagcagaccaa

SEQ ID NO: 2654276 - RNA, 19 nt, Homo sapiens
  misc_RNA (1)...(19): siRNA sense strand
gggaaaagagaauguguuu

SEQ ID NO: 2654277 - RNA, 19 nt, Homo sapiens
  misc_RNA (1)...(19): siRNA sense strand
ucucaaaagccaagaguca

SEQ ID NO: 2654278 - RNA, 19 nt, Homo sapiens
  misc_RNA (1)...(19): siRNA sense strand
gagaacagacucaagguga

SEQ ID NO: 2654279 - RNA, 19 nt, Homo sapiens
  misc_RNA (1)...(19): siRNA sense strand
acagauugguacagaggga

SEQ ID NO: 2654280 - RNA, 19 nt, Homo sapiens
  misc_RNA (1)...(19): siRNA sense strand
gaacacagaacaaagccaa

SEQ ID NO: 2654281 - RNA, 19 nt, Homo sapiens
  misc_RNA (1)...(19): siRNA sense strand
guugagagaacuagaaacu

SEQ ID NO: 2654282 - RNA, 19 nt, Homo sapiens
  misc_RNA (1)...(19): siRNA sense strand
cagaaggaggaaaugggaa

SEQ ID NO: 2654283 - RNA, 19 nt, Homo sapiens
  misc_RNA (1)...(19): siRNA sense strand
agauagauacagauuggua

SEQ ID NO: 2654284 - RNA, 19 nt, Homo sapiens
  misc_RNA (1)...(19): siRNA sense strand
ccuccaaagccuacuguuu

SEQ ID NO: 2654285 - RNA, 19 nt, Homo sapiens
  misc_RNA (1)...(19): siRNA sense strand
uuggagagcagaaggauga

SEQ ID NO: 2654286 - RNA, 19 nt, Homo sapiens
  misc_RNA (1)...(19): siRNA sense strand
agaacuagaaacuuggaau

SEQ ID NO: 2654287 - RNA, 19 nt, Homo sapiens
  misc_RNA (1)...(19): siRNA sense strand
uguuaaaggcucaagaugu

SEQ ID NO: 2654288 - RNA, 19 nt, Homo sapiens
  misc_RNA (1)...(19): siRNA sense strand
gggagaaugaagaugaacu

SEQ ID NO: 2654289 - RNA, 19 nt, Homo sapiens
  misc_RNA (1)...(19): siRNA sense strand
cacaaagguaccacugaaa

SEQ ID NO: 2654290 - RNA, 19 nt, Homo sapiens
  misc_RNA (1)...(19): siRNA sense strand
gugaaugaggaaugggcca

SEQ ID NO: 2654291 - RNA, 19 nt, Homo sapiens
  misc_RNA (1)...(19): siRNA sense strand
guaaauacaugcugucugu

SEQ ID NO: 2654292 - RNA, 19 nt, Homo sapiens
  misc_RNA (1)...(19): siRNA sense strand
aauaaaagaacgagcaguu

SEQ ID NO: 2654293 - RNA, 19 nt, Homo sapiens
  misc_RNA (1)...(19): siRNA sense strand
auaauuacuuggagugcca

SEQ ID NO: 2654294 - RNA, 19 nt, Homo sapiens
  misc_RNA (1)...(19): siRNA sense strand
guagaaaccagauuggcau

SEQ ID NO: 2654295 - RNA, 19 nt, Homo sapiens
  misc_RNA (1)...(19): siRNA sense strand
gguuugaauauauuggaga

SEQ ID NO: 2654296 - RNA, 19 nt, Homo sapiens
  misc_RNA (1)...(19): siRNA sense strand
gcaagaagcgggaagcauc

SEQ ID NO: 2654297 - RNA, 19 nt, Homo sapiens
  misc_RNA (1)...(19): siRNA sense strand
ugaauauauuggagagcag

SEQ ID NO: 2654298 - RNA, 19 nt, Homo sapiens
  misc_RNA (1)...(19): siRNA sense strand
ugacuggaugaguggagaa

SEQ ID NO: 2654299 - RNA, 19 nt, Homo sapiens
  misc_RNA (1)...(19): siRNA sense strand
guagaugaugacuggauga

SEQ ID NO: 2654300 - RNA, 19 nt, Homo sapiens
  misc_RNA (1)...(19): siRNA sense strand
agacaaacauagaaaccuc

SEQ ID NO: 2654301 - RNA, 19 nt, Homo sapiens
  misc_RNA (1)...(19): siRNA sense strand
agauauaauaacagagcug

SEQ ID NO: 2654302 - RNA, 19 nt, Homo sapiens
  misc_RNA (1)...(19): siRNA sense strand
guuucaucucauuguguua

SEQ ID NO: 2654303 - RNA, 19 nt, Homo sapiens
  misc_RNA (1)...(19): siRNA sense strand
uaucccagaaggaggaaau

SEQ ID NO: 2654304 - RNA, 19 nt, Homo sapiens
  misc_RNA (1)...(19): siRNA sense strand
agaguaugugaaugaggaa

SEQ ID NO: 2654305 - RNA, 19 nt, Homo sapiens
  misc_RNA (1)...(19): siRNA sense strand
gggauguacuugugaugcu

SEQ ID NO: 2654306 - RNA, 19 nt, Homo sapiens
  misc_RNA (1)...(19): siRNA sense strand
ugaagcagacggaaaauaa

SEQ ID NO: 2654307 - RNA, 19 nt, Homo sapiens
  misc_RNA (1)...(19): siRNA sense strand
uagaaaccagauuggcaua

SEQ ID NO: 2654308 - RNA, 19 nt, Homo sapiens
  misc_RNA (1)...(19): siRNA sense strand
uggagaacuuaugggaaaa

SEQ ID NO: 2654309 - RNA, 19 nt, Homo sapiens
  misc_RNA (1)...(19): siRNA sense strand
ccucagagaacgagagcau

SEQ ID NO: 2654310 - RNA, 19 nt, Homo sapiens
  misc_RNA (1)...(19): siRNA sense strand
caugaaugcaggaggguau

SEQ ID NO: 2654311 - RNA, 19 nt, Homo sapiens
  misc_RNA (1)...(19): siRNA sense strand
gaucagagaccuugcgaga

SEQ ID NO: 2654312 - RNA, 19 nt, Homo sapiens
  misc_RNA (1)...(19): siRNA sense strand
agucagaagagguaaagaa

SEQ ID NO: 2654313 - RNA, 19 nt, Homo sapiens
  misc_RNA (1)...(19): siRNA sense strand
ggucagugauaaagaaaau

SEQ ID NO: 2654314 - RNA, 19 nt, Homo sapiens
  misc_RNA (1)...(19): siRNA sense strand
gcuuaauucaggugccaaa

SEQ ID NO: 2654315 - RNA, 19 nt, Homo sapiens
  misc_RNA (1)...(19): siRNA sense strand
agacagaagccugaggaaa

SEQ ID NO: 2654316 - RNA, 19 nt, Homo sapiens
  misc_RNA (1)...(19): siRNA sense strand
cagagucagaagagguaaa

SEQ ID NO: 2654317 - RNA, 19 nt, Homo sapiens
  misc_RNA (1)...(19): siRNA sense strand
gguccauuguagaagauau

SEQ ID NO: 2654318 - RNA, 19 nt, Homo sapiens
  misc_RNA (1)...(19): siRNA sense strand
gaacaaagauccuagaccu

SEQ ID NO: 2654319 - RNA, 19 nt, Homo sapiens
  misc_RNA (1)...(19): siRNA sense strand
aagcagcgcuccugggcaa

SEQ ID NO: 2654320 - RNA, 19 nt, Homo sapiens
  misc_RNA (1)...(19): siRNA sense strand
gaaagauguuguagcacca

SEQ ID NO: 2654321 - RNA, 19 nt, Homo sapiens
  misc_RNA (1)...(19): siRNA sense strand
gcucaaauuggcagacaca

SEQ ID NO: 2654322 - RNA, 19 nt, Homo sapiens
  misc_RNA (1)...(19): siRNA sense strand
cgaaagagguacagugagc

SEQ ID NO: 2654323 - RNA, 19 nt, Homo sapiens
  misc_RNA (1)...(19): siRNA sense strand
ccggagcagcagugagaau

SEQ ID NO: 2654324 - RNA, 19 nt, Homo sapiens
  misc_RNA (1)...(19): siRNA sense strand
uggagaacacggaggcaga

SEQ ID NO: 2654325 - RNA, 19 nt, Homo sapiens
  misc_RNA (1)...(19): siRNA sense strand
acaggaagcccaaaagaaa

SEQ ID NO: 2654326 - RNA, 19 nt, Homo sapiens
  misc_RNA (1)...(19): siRNA sense strand
gugccaaaccacucaggaa

SEQ ID NO: 2654327 - RNA, 19 nt, Homo sapiens
  misc_RNA (1)...(19): siRNA sense strand
auguggagcugcugaccaa

SEQ ID NO: 2654328 - RNA, 19 nt, Homo sapiens
  misc_RNA (1)...(19): siRNA sense strand
gcgucaguguccuccgaaa

SEQ ID NO: 2654329 - RNA, 19 nt, Homo sapiens
  misc_RNA (1)...(19): siRNA sense strand
agaacgagagcaugcgcaa

SEQ ID NO: 2654330 - RNA, 19 nt, Homo sapiens
  misc_RNA (1)...(19): siRNA sense strand
caacaaagcaguuaaggac

SEQ ID NO: 2654331 - RNA, 19 nt, Homo sapiens
  misc_RNA (1)...(19): siRNA sense strand
gcuacagccaccuugguaa

SEQ ID NO: 2654332 - RNA, 19 nt, Homo sapiens
  misc_RNA (1)...(19): siRNA sense strand
ccuaggagaggaagaacuu

SEQ ID NO: 2654333 - RNA, 19 nt, Homo sapiens
  misc_RNA (1)...(19): siRNA sense strand
cagacagaagccugaggaa

SEQ ID NO: 2654334 - RNA, 19 nt, Homo sapiens
  misc_RNA (1)...(19): siRNA sense strand
ccaauaaguuccacagccu

SEQ ID NO: 2654335 - RNA, 19 nt, Homo sapiens
  misc_RNA (1)...(19): siRNA sense strand
ccggcaaugcaguaggauu

SEQ ID NO: 2654336 - RNA, 19 nt, Homo sapiens
  misc_RNA (1)...(19): siRNA sense strand
gagcauuauggaucagaga

SEQ ID NO: 2654337 - RNA, 19 nt, Homo sapiens
  misc_RNA (1)...(19): siRNA sense strand
aagccauggugcuaaagaa

SEQ ID NO: 2654338 - RNA, 19 nt, Homo sapiens
  misc_RNA (1)...(19): siRNA sense strand
gcauuuggccggagcagca

SEQ ID NO: 2654339 - RNA, 19 nt, Homo sapiens
  misc_RNA (1)...(19): siRNA sense strand
uguuguagcaccaaagaga

SEQ ID NO: 2654340 - RNA, 19 nt, Homo sapiens
  misc_RNA (1)...(19): siRNA sense strand
gggauauuucuuaagcaau

SEQ ID NO: 2654341 - RNA, 19 nt, Homo sapiens
  misc_RNA (1)...(19): siRNA sense strand
guaaagaaguuaaaagcgu

SEQ ID NO: 2654342 - RNA, 19 nt, Homo sapiens
  misc_RNA (1)...(19): siRNA sense strand
uugaagccauggugcuaaa

SEQ ID NO: 2654343 - RNA, 19 nt, Homo sapiens
  misc_RNA (1)...(19): siRNA sense strand
caagaagcgcccagagucu

SEQ ID NO: 2654344 - RNA, 19 nt, Homo sapiens
  misc_RNA (1)...(19): siRNA sense strand
gugauaaagaaaaugggaa

SEQ ID NO: 2654345 - RNA, 19 nt, Homo sapiens
  misc_RNA (1)...(19): siRNA sense strand
aagcaugagaacagaucuu

SEQ ID NO: 2654346 - RNA, 19 nt, Homo sapiens
  misc_RNA (1)...(19): siRNA sense strand
guccauuguagaagauauu

SEQ ID NO: 2654347 - RNA, 19 nt, Homo sapiens
  misc_RNA (1)...(19): siRNA sense strand
auagaaaagcugagggaac

SEQ ID NO: 2654348 - RNA, 19 nt, Homo sapiens
  misc_RNA (1)...(19): siRNA sense strand
cuccuuggucagugauaaa

SEQ ID NO: 2654349 - RNA, 19 nt, Homo sapiens
  misc_RNA (1)...(19): siRNA sense strand
gucccaaagaagagcccaa

SEQ ID NO: 2654350 - RNA, 19 nt, Homo sapiens
  misc_RNA (1)...(19): siRNA sense strand
auacaaagaccauugagga

SEQ ID NO: 2654351 - RNA, 19 nt, Homo sapiens
  misc_RNA (1)...(19): siRNA sense strand
cuucaguuugccauagaaa

SEQ ID NO: 2654352 - RNA, 19 nt, Homo sapiens
  misc_RNA (1)...(19): siRNA sense strand
cugcugaccuucuuggaga

SEQ ID NO: 2654353 - RNA, 19 nt, Homo sapiens
  misc_RNA (1)...(19): siRNA sense strand
ucaacaaagcaguuaagga

SEQ ID NO: 2654354 - RNA, 19 nt, Homo sapiens
  misc_RNA (1)...(19): siRNA sense strand
ggaaagauguuguagcacc

SEQ ID NO: 2654355 - RNA, 19 nt, Homo sapiens
  misc_RNA (1)...(19): siRNA sense strand
agagaggcucccugaaaga

SEQ ID NO: 2654356 - RNA, 19 nt, Homo sapiens
  misc_RNA (1)...(19): siRNA sense strand
agagagaguucaagcgcau

SEQ ID NO: 2654357 - RNA, 19 nt, Homo sapiens
  misc_RNA (1)...(19): siRNA sense strand
ccgacaugcuugagugcga

SEQ ID NO: 2654358 - RNA, 19 nt, Homo sapiens
  misc_RNA (1)...(19): siRNA sense strand
aaaucauccuggagaccaa

SEQ ID NO: 2654359 - RNA, 19 nt, Homo sapiens
  misc_RNA (1)...(19): siRNA sense strand
gcaucgaauaccagaacau

SEQ ID NO: 2654360 - RNA, 19 nt, Homo sapiens
  misc_RNA (1)...(19): siRNA sense strand
cgacauaauggaaacgcuu

SEQ ID NO: 2654361 - RNA, 19 nt, Homo sapiens
  misc_RNA (1)...(19): siRNA sense strand
cuggagaccaagagcaaga

SEQ ID NO: 2654362 - RNA, 19 nt, Homo sapiens
  misc_RNA (1)...(19): siRNA sense strand
ccuaucuggucaugggaca

SEQ ID NO: 2654363 - RNA, 19 nt, Homo sapiens
  misc_RNA (1)...(19): siRNA sense strand
cagaaggggcagagagagu

SEQ ID NO: 2654364 - RNA, 19 nt, Homo sapiens
  misc_RNA (1)...(19): siRNA sense strand
auggaaacgcuuuguaaaa

SEQ ID NO: 2654365 - RNA, 19 nt, Homo sapiens
  misc_RNA (1)...(19): siRNA sense strand
ccaugaaggaggugcugga

SEQ ID NO: 2654366 - RNA, 19 nt, Homo sapiens
  misc_RNA (1)...(19): siRNA sense strand
agaccaagagcaagaccau

SEQ ID NO: 2654367 - RNA, 19 nt, Homo sapiens
  misc_RNA (1)...(19): siRNA sense strand
aggagauaaccuacaucaa

SEQ ID NO: 2654368 - RNA, 19 nt, Homo sapiens
  misc_RNA (1)...(19): siRNA sense strand
ccaagaaguuccugugcuc

SEQ ID NO: 2654369 - RNA, 19 nt, Homo sapiens
  misc_RNA (1)...(19): siRNA sense strand
ucuacaaggaugaagacaa

SEQ ID NO: 2654370 - RNA, 19 nt, Homo sapiens
  misc_RNA (1)...(19): siRNA sense strand
aagacaagccugaggacga

SEQ ID NO: 2654371 - RNA, 19 nt, Homo sapiens
  misc_RNA (1)...(19): siRNA sense strand
gaggagaaacgcagagcca

SEQ ID NO: 2654372 - RNA, 19 nt, Homo sapiens
  misc_RNA (1)...(19): siRNA sense strand
uggugaaggcagaggcuga

SEQ ID NO: 2654373 - RNA, 19 nt, Homo sapiens
  misc_RNA (1)...(19): siRNA sense strand
ccgccaugguggaaggcau

SEQ ID NO: 2654374 - RNA, 19 nt, Homo sapiens
  misc_RNA (1)...(19): siRNA sense strand
ggagaaacgcagagccauc

SEQ ID NO: 2654375 - RNA, 19 nt, Homo sapiens
  misc_RNA (1)...(19): siRNA sense strand
aggagaagaccgagcagga

SEQ ID NO: 2654376 - RNA, 19 nt, Homo sapiens
  misc_RNA (1)...(19): siRNA sense strand
ucuggaggaaauugagaaa

SEQ ID NO: 2654377 - RNA, 19 nt, Homo sapiens
  misc_RNA (1)...(19): siRNA sense strand
ccucagaacaacagcggca

SEQ ID NO: 2654378 - RNA, 19 nt, Homo sapiens
  misc_RNA (1)...(19): siRNA sense strand
uggaugucgucaugggaga

SEQ ID NO: 2654379 - RNA, 19 nt, Homo sapiens
  misc_RNA (1)...(19): siRNA sense strand
aggagguggagaaggaaca

SEQ ID NO: 2654380 - RNA, 19 nt, Homo sapiens
  misc_RNA (1)...(19): siRNA sense strand
aggucaacuugguggugau

SEQ ID NO: 2654381 - RNA, 19 nt, Homo sapiens
  misc_RNA (1)...(19): siRNA sense strand
cgcgaacgggacugggaaa

SEQ ID NO: 2654382 - RNA, 19 nt, Homo sapiens
  misc_RNA (1)...(19): siRNA sense strand
aguacaacucggaccgcaa

SEQ ID NO: 2654383 - RNA, 19 nt, Homo sapiens
  misc_RNA (1)...(19): siRNA sense strand
agaucaagucgcuggacca

SEQ ID NO: 2654384 - RNA, 19 nt, Homo sapiens
  misc_RNA (1)...(19): siRNA sense strand
cgggacaugcagaggcuca

SEQ ID NO: 2654385 - RNA, 19 nt, Homo sapiens
  misc_RNA (1)...(19): siRNA sense strand
aggaugaagacaagccuga

SEQ ID NO: 2654386 - RNA, 19 nt, Homo sapiens
  misc_RNA (1)...(19): siRNA sense strand
cgcaagaaacagcugguga

SEQ ID NO: 2654387 - RNA, 19 nt, Homo sapiens
  misc_RNA (1)...(19): siRNA sense strand
ccaccaagagccagagcga

SEQ ID NO: 2654388 - RNA, 19 nt, Homo sapiens
  misc_RNA (1)...(19): siRNA sense strand
uggacagccucauggacau

SEQ ID NO: 2654389 - RNA, 19 nt, Homo sapiens
  misc_RNA (1)...(19): siRNA sense strand
acauaggagugccuggaaa

SEQ ID NO: 2654390 - RNA, 19 nt, Homo sapiens
  misc_RNA (1)...(19): siRNA sense strand
cauaggagugccuggaaaa

SEQ ID NO: 2654391 - RNA, 19 nt, Homo sapiens
  misc_RNA (1)...(19): siRNA sense strand
ucggcaaggaggcggacaa

SEQ ID NO: 2654392 - RNA, 19 nt, Homo sapiens
  misc_RNA (1)...(19): siRNA sense strand
ccaaagagcuacacgguuc

SEQ ID NO: 2654393 - RNA, 19 nt, Homo sapiens
  misc_RNA (1)...(19): siRNA sense strand
ucacaaaguuucugcagga

SEQ ID NO: 2654394 - RNA, 19 nt, Homo sapiens
  misc_RNA (1)...(19): siRNA sense strand
cuggauaaggugacacaau

SEQ ID NO: 2654395 - RNA, 19 nt, Homo sapiens
  misc_RNA (1)...(19): siRNA sense strand
gauuugugaagcugggaau

SEQ ID NO: 2654396 - RNA, 19 nt, Homo sapiens
  misc_RNA (1)...(19): siRNA sense strand
ggaucauggauuaguuuca

SEQ ID NO: 2654397 - RNA, 19 nt, Homo sapiens
  misc_RNA (1)...(19): siRNA sense strand
gggcacaaaagaaacauaa

SEQ ID NO: 2654398 - RNA, 19 nt, Homo sapiens
  misc_RNA (1)...(19): siRNA sense strand
cugaaggaugauaugagaa

SEQ ID NO: 2654399 - RNA, 19 nt, Homo sapiens
  misc_RNA (1)...(19): siRNA sense strand
ucggaacgcaagagagcau

SEQ ID NO: 2654400 - RNA, 19 nt, Homo sapiens
  misc_RNA (1)...(19): siRNA sense strand
uggaaaagagagugcuaga

SEQ ID NO: 2654401 - RNA, 19 nt, Homo sapiens
  misc_RNA (1)...(19): siRNA sense strand
gugaagaggaggagcgaga

SEQ ID NO: 2654402 - RNA, 19 nt, Homo sapiens
  misc_RNA (1)...(19): siRNA sense strand
gggcacuaguggagagcga

SEQ ID NO: 2654403 - RNA, 19 nt, Homo sapiens
  misc_RNA (1)...(19): siRNA sense strand
ucaaaggagagaagggaga

SEQ ID NO: 2654404 - RNA, 19 nt, Homo sapiens
  misc_RNA (1)...(19): siRNA sense strand
ccgcaggaagugaggaaga

SEQ ID NO: 2654405 - RNA, 19 nt, Homo sapiens
  misc_RNA (1)...(19): siRNA sense strand
ccuucagccugguggaaaa

SEQ ID NO: 2654406 - RNA, 19 nt, Homo sapiens
  misc_RNA (1)...(19): siRNA sense strand
agacagaggcuccugggaa

SEQ ID NO: 2654407 - RNA, 19 nt, Homo sapiens
  misc_RNA (1)...(19): siRNA sense strand
cggaacaggaggugauacu

SEQ ID NO: 2654408 - RNA, 19 nt, Homo sapiens
  misc_RNA (1)...(19): siRNA sense strand
uggcuugggacccgagaaa

SEQ ID NO: 2654409 - RNA, 19 nt, Homo sapiens
  misc_RNA (1)...(19): siRNA sense strand
ugucaaaguucgacuccuu

SEQ ID NO: 2654410 - RNA, 19 nt, Homo sapiens
  misc_RNA (1)...(19): siRNA sense strand
gaagggagaccaugggcuu

SEQ ID NO: 2654411 - RNA, 19 nt, Homo sapiens
  misc_RNA (1)...(19): siRNA sense strand
ugagaggccuggagggaac

SEQ ID NO: 2654412 - RNA, 19 nt, Homo sapiens
  misc_RNA (1)...(19): siRNA sense strand
cacccugggaagagagcaa

SEQ ID NO: 2654413 - RNA, 19 nt, Homo sapiens
  misc_RNA (1)...(19): siRNA sense strand
ggcccugguuccuggagaa

SEQ ID NO: 2654414 - RNA, 19 nt, Homo sapiens
  misc_RNA (1)...(19): siRNA sense strand
acucggaacaggaggugau

SEQ ID NO: 2654415 - RNA, 19 nt, Homo sapiens
  misc_RNA (1)...(19): siRNA sense strand
aagaaagcucccagcccaa

SEQ ID NO: 2654416 - RNA, 19 nt, Homo sapiens
  misc_RNA (1)...(19): siRNA sense strand
aagaguagcucccuggaca

SEQ ID NO: 2654417 - RNA, 19 nt, Homo sapiens
  misc_RNA (1)...(19): siRNA sense strand
caagaaagcucccagccca

SEQ ID NO: 2654418 - RNA, 19 nt, Homo sapiens
  misc_RNA (1)...(19): siRNA sense strand
ucgcugugggugugaagaa

SEQ ID NO: 2654419 - RNA, 19 nt, Homo sapiens
  misc_RNA (1)...(19): siRNA sense strand
ggucaaaggagagaaggga

SEQ ID NO: 2654420 - RNA, 19 nt, Homo sapiens
  misc_RNA (1)...(19): siRNA sense strand
aguuugugauugaggaucu

SEQ ID NO: 2654421 - RNA, 19 nt, Homo sapiens
  misc_RNA (1)...(19): siRNA sense strand
ucuaccagcuugugagcca

SEQ ID NO: 2654422 - RNA, 19 nt, Homo sapiens
  misc_RNA (1)...(19): siRNA sense strand
gugaagaggaggagcgaga

SEQ ID NO: 2654423 - RNA, 19 nt, Homo sapiens
  misc_RNA (1)...(19): siRNA sense strand
gggcacuaguggagagcga

SEQ ID NO: 2654424 - RNA, 19 nt, Homo sapiens
  misc_RNA (1)...(19): siRNA sense strand
ucaaaggagagaagggaga

SEQ ID NO: 2654425 - RNA, 19 nt, Homo sapiens
  misc_RNA (1)...(19): siRNA sense strand
ccgcaggaagugaggaaga

SEQ ID NO: 2654426 - RNA, 19 nt, Homo sapiens
  misc_RNA (1)...(19): siRNA sense strand
ccuucagccugguggaaaa

SEQ ID NO: 2654427 - RNA, 19 nt, Homo sapiens
  misc_RNA (1)...(19): siRNA sense strand
agacagaggcuccugggaa

SEQ ID NO: 2654428 - RNA, 19 nt, Homo sapiens
  misc_RNA (1)...(19): siRNA sense strand
cggaacaggaggugauacu

SEQ ID NO: 2654429 - RNA, 19 nt, Homo sapiens
  misc_RNA (1)...(19): siRNA sense strand
uggcuugggacccgagaaa

SEQ ID NO: 2654430 - RNA, 19 nt, Homo sapiens
  misc_RNA (1)...(19): siRNA sense strand
gaagggagaccaugggcuu

SEQ ID NO: 2654431 - RNA, 19 nt, Homo sapiens
  misc_RNA (1)...(19): siRNA sense strand
ugagaggccuggagggaac

SEQ ID NO: 2654432 - RNA, 19 nt, Homo sapiens
  misc_RNA (1)...(19): siRNA sense strand
cacccugggaagagagcaa

SEQ ID NO: 2654433 - RNA, 19 nt, Homo sapiens
  misc_RNA (1)...(19): siRNA sense strand
acucggaacaggaggugau

SEQ ID NO: 2654434 - RNA, 19 nt, Homo sapiens
  misc_RNA (1)...(19): siRNA sense strand
aagaaagcucccagcccaa

SEQ ID NO: 2654435 - RNA, 19 nt, Homo sapiens
  misc_RNA (1)...(19): siRNA sense strand
aagaguagcucccuggaca

SEQ ID NO: 2654436 - RNA, 19 nt, Homo sapiens
  misc_RNA (1)...(19): siRNA sense strand
caagaaagcucccagccca

SEQ ID NO: 2654437 - RNA, 19 nt, Homo sapiens
  misc_RNA (1)...(19): siRNA sense strand
ucgcugugggugugaagaa

SEQ ID NO: 2654438 - RNA, 19 nt, Homo sapiens
  misc_RNA (1)...(19): siRNA sense strand
ggucaaaggagagaaggga

SEQ ID NO: 2654439 - RNA, 19 nt, Homo sapiens
  misc_RNA (1)...(19): siRNA sense strand
acgcacagaugguggccuu

SEQ ID NO: 2654440 - RNA, 19 nt, Homo sapiens
  misc_RNA (1)...(19): siRNA sense strand
gcacaggagcugcaggagu

SEQ ID NO: 2654441 - RNA, 19 nt, Homo sapiens
  misc_RNA (1)...(19): siRNA sense strand
gagcuaauaccgaggcacu

SEQ ID NO: 2654442 - RNA, 19 nt, Homo sapiens
  misc_RNA (1)...(19): siRNA sense strand
ggguuauucuauggaguau

SEQ ID NO: 2654443 - RNA, 19 nt, Homo sapiens
  misc_RNA (1)...(19): siRNA sense strand
gcggacaaguuuaaggaga

SEQ ID NO: 2654444 - RNA, 19 nt, Homo sapiens
  misc_RNA (1)...(19): siRNA sense strand
ccgaggaucuggaggcaca

SEQ ID NO: 2654445 - RNA, 19 nt, Homo sapiens
  misc_RNA (1)...(19): siRNA sense strand
aguuuaaggagaucaacaa

SEQ ID NO: 2654446 - RNA, 19 nt, Homo sapiens
  misc_RNA (1)...(19): siRNA sense strand
ggguuggacaagaacgcaa

SEQ ID NO: 2654447 - RNA, 19 nt, Homo sapiens
  misc_RNA (1)...(19): siRNA sense strand
ggacaagaacgcaaccuca

SEQ ID NO: 2654448 - RNA, 19 nt, Homo sapiens
  misc_RNA (1)...(19): siRNA sense strand
acaaguuuaaggagaucaa

SEQ ID NO: 2654449 - RNA, 19 nt, Homo sapiens
  misc_RNA (1)...(19): siRNA sense strand
gcgggaaguguaagcccaa

SEQ ID NO: 2654450 - RNA, 19 nt, Homo sapiens
  misc_RNA (1)...(19): siRNA sense strand
gcggacaaguuuaaggaga

SEQ ID NO: 2654451 - RNA, 19 nt, Homo sapiens
  misc_RNA (1)...(19): siRNA sense strand
ccgaggaucuggaggcaca

SEQ ID NO: 2654452 - RNA, 19 nt, Homo sapiens
  misc_RNA (1)...(19): siRNA sense strand
aguuuaaggagaucaacaa

SEQ ID NO: 2654453 - RNA, 19 nt, Homo sapiens
  misc_RNA (1)...(19): siRNA sense strand
ggguuggacaagaacgcaa

SEQ ID NO: 2654454 - RNA, 19 nt, Homo sapiens
  misc_RNA (1)...(19): siRNA sense strand
ggacaagaacgcaaccuca

SEQ ID NO: 2654455 - RNA, 19 nt, Homo sapiens
  misc_RNA (1)...(19): siRNA sense strand
acaaguuuaaggagaucaa

SEQ ID NO: 2654456 - RNA, 19 nt, Homo sapiens
  misc_RNA (1)...(19): siRNA sense strand
gcgggaaguguaagcccaa

SEQ ID NO: 2654457 - RNA, 19 nt, Homo sapiens
  misc_RNA (1)...(19): siRNA sense strand
aggagaaaguugugaagaa

SEQ ID NO: 2654458 - RNA, 19 nt, Homo sapiens
  misc_RNA (1)...(19): siRNA sense strand
ggaccaaagacuaagguaa

SEQ ID NO: 2654459 - RNA, 19 nt, Homo sapiens
  misc_RNA (1)...(19): siRNA sense strand
gggcaaaagacuugacuaa

SEQ ID NO: 2654460 - RNA, 19 nt, Homo sapiens
  misc_RNA (1)...(19): siRNA sense strand
gcaaaagacuugacuaaaa

SEQ ID NO: 2654461 - RNA, 19 nt, Homo sapiens
  misc_RNA (1)...(19): siRNA sense strand
cgaacaacaaagacagaaa

SEQ ID NO: 2654462 - RNA, 19 nt, Homo sapiens
  misc_RNA (1)...(19): siRNA sense strand
ggagguagcaauugugaaa

SEQ ID NO: 2654463 - RNA, 19 nt, Homo sapiens
  misc_RNA (1)...(19): siRNA sense strand
cggaauaccuucagagugu

SEQ ID NO: 2654464 - RNA, 19 nt, Homo sapiens
  misc_RNA (1)...(19): siRNA sense strand
agguagcaauugugaaaua

SEQ ID NO: 2654465 - RNA, 19 nt, Homo sapiens
  misc_RNA (1)...(19): siRNA sense strand
ugaagaaagaagagaauga

SEQ ID NO: 2654466 - RNA, 19 nt, Homo sapiens
  misc_RNA (1)...(19): siRNA sense strand
gcacagauagcaaggacaa

SEQ ID NO: 2654467 - RNA, 19 nt, Homo sapiens
  misc_RNA (1)...(19): siRNA sense strand
gcuauguguuuaaaggaaa

SEQ ID NO: 2654468 - RNA, 19 nt, Homo sapiens
  misc_RNA (1)...(19): siRNA sense strand
gggcugugucaaagaauaa

SEQ ID NO: 2654469 - RNA, 19 nt, Homo sapiens
  misc_RNA (1)...(19): siRNA sense strand
gugaaauacugaagaccau

SEQ ID NO: 2654470 - RNA, 19 nt, Homo sapiens
  misc_RNA (1)...(19): siRNA sense strand
gggcgaaggcgcagcauuu

SEQ ID NO: 2654471 - RNA, 19 nt, Homo sapiens
  misc_RNA (1)...(19): siRNA sense strand
gauauuggccgaagagcaa

SEQ ID NO: 2654472 - RNA, 19 nt, Homo sapiens
  misc_RNA (1)...(19): siRNA sense strand
gugaagaugggaugguaaa

SEQ ID NO: 2654473 - RNA, 19 nt, Homo sapiens
  misc_RNA (1)...(19): siRNA sense strand
ccgaaauugccauggaaau

SEQ ID NO: 2654474 - RNA, 19 nt, Homo sapiens
  misc_RNA (1)...(19): siRNA sense strand
uguuauaccuggagaaagu

SEQ ID NO: 2654475 - RNA, 19 nt, Homo sapiens
  misc_RNA (1)...(19): siRNA sense strand
ggucacaacagauggagaa

SEQ ID NO: 2654476 - RNA, 19 nt, Homo sapiens
  misc_RNA (1)...(19): siRNA sense strand
ggcaacacccuuagaauua

SEQ ID NO: 2654477 - RNA, 19 nt, Homo sapiens
  misc_RNA (1)...(19): siRNA sense strand
ugaugaaacuggauggaca

SEQ ID NO: 2654478 - RNA, 19 nt, Homo sapiens
  misc_RNA (1)...(19): siRNA sense strand
gagaagaagaugucagcau

SEQ ID NO: 2654479 - RNA, 19 nt, Homo sapiens
  misc_RNA (1)...(19): siRNA sense strand
gugaagaagcugacuguau

SEQ ID NO: 2654480 - RNA, 19 nt, Homo sapiens
  misc_RNA (1)...(19): siRNA sense strand
ggacaaugaaggagaugga

SEQ ID NO: 2654481 - RNA, 19 nt, Homo sapiens
  misc_RNA (1)...(19): siRNA sense strand
guauacuguacaagggaaa

SEQ ID NO: 2654482 - RNA, 19 nt, Homo sapiens
  misc_RNA (1)...(19): siRNA sense strand
gguucaggcucuagggcuu

SEQ ID NO: 2654483 - RNA, 19 nt, Homo sapiens
  misc_RNA (1)...(19): siRNA sense strand
ggauaaaacagaugcauau

SEQ ID NO: 2654484 - RNA, 19 nt, Homo sapiens
  misc_RNA (1)...(19): siRNA sense strand
gcauauaaucagaaagucu

SEQ ID NO: 2654485 - RNA, 19 nt, Homo sapiens
  misc_RNA (1)...(19): siRNA sense strand
cggguaaccaagagagaga

SEQ ID NO: 2654486 - RNA, 19 nt, Homo sapiens
  misc_RNA (1)...(19): siRNA sense strand
cgucaaaggggcacggaaa

SEQ ID NO: 2654487 - RNA, 19 nt, Homo sapiens
  misc_RNA (1)...(19): siRNA sense strand
caugaagaaagaagagaau

SEQ ID NO: 2654488 - RNA, 19 nt, Homo sapiens
  misc_RNA (1)...(19): siRNA sense strand
ggaaauggagaaugcguuu

SEQ ID NO: 2654489 - RNA, 19 nt, Homo sapiens
  misc_RNA (1)...(19): siRNA sense strand
caacuggaguggucacaaa

SEQ ID NO: 2654490 - RNA, 19 nt, Homo sapiens
  misc_RNA (1)...(19): siRNA sense strand
gguacaagucggagggucu

SEQ ID NO: 2654491 - RNA, 19 nt, Homo sapiens
  misc_RNA (1)...(19): siRNA sense strand
ugaagaagcugacuguaua

SEQ ID NO: 2654492 - RNA, 19 nt, Homo sapiens
  misc_RNA (1)...(19): siRNA sense strand
gaagaaaauuaaccggaua

SEQ ID NO: 2654493 - RNA, 19 nt, Homo sapiens
  misc_RNA (1)...(19): siRNA sense strand
cagcaaugacaaugauauu

SEQ ID NO: 2654494 - RNA, 19 nt, Homo sapiens
  misc_RNA (1)...(19): siRNA sense strand
caacauggguggcuggaca

SEQ ID NO: 2654495 - RNA, 19 nt, Homo sapiens
  misc_RNA (1)...(19): siRNA sense strand
ucagaaagucuauggucua

SEQ ID NO: 2654496 - RNA, 19 nt, Homo sapiens
  misc_RNA (1)...(19): siRNA sense strand
gaugaaacuggauggacaa

SEQ ID NO: 2654497 - RNA, 19 nt, Homo sapiens
  misc_RNA (1)...(19): siRNA sense strand
gcucaggguuaauggcaga

SEQ ID NO: 2654498 - RNA, 19 nt, Homo sapiens
  misc_RNA (1)...(19): siRNA sense strand
cuacagaguuccugccaga

SEQ ID NO: 2654499 - RNA, 19 nt, Homo sapiens
  misc_RNA (1)...(19): siRNA sense strand
gaccugacucugugggaaa

SEQ ID NO: 2654500 - RNA, 19 nt, Homo sapiens
  misc_RNA (1)...(19): siRNA sense strand
gagaaagagauuaugacau

SEQ ID NO: 2654501 - RNA, 19 nt, Homo sapiens
  misc_RNA (1)...(19): siRNA sense strand
gggauaaaacagaugcaua

SEQ ID NO: 2654502 - RNA, 19 nt, Homo sapiens
  misc_RNA (1)...(19): siRNA sense strand
aggcaccacuagcgagaaa

SEQ ID NO: 2654503 - RNA, 19 nt, Homo sapiens
  misc_RNA (1)...(19): siRNA sense strand
accauuagauacaggcaaa

SEQ ID NO: 2654504 - RNA, 19 nt, Homo sapiens
  misc_RNA (1)...(19): siRNA sense strand
ccagacugcucaaacgaaa

SEQ ID NO: 2654505 - RNA, 19 nt, Homo sapiens
  misc_RNA (1)...(19): siRNA sense strand
gcaaggacaaugaaggaga

SEQ ID NO: 2654506 - RNA, 19 nt, Homo sapiens
  misc_RNA (1)...(19): siRNA sense strand
aaggaauggcaguugauaa

SEQ ID NO: 2654507 - RNA, 19 nt, Homo sapiens
  misc_RNA (1)...(19): siRNA sense strand
cugaaacugaugagaagaa

SEQ ID NO: 2654508 - RNA, 19 nt, Homo sapiens
  misc_RNA (1)...(19): siRNA sense strand
ugauauuacugcugugaca

SEQ ID NO: 2654509 - RNA, 19 nt, Homo sapiens
  misc_RNA (1)...(19): siRNA sense strand
guucaagaucaguuaagaa

SEQ ID NO: 2654510 - RNA, 19 nt, Homo sapiens
  misc_RNA (1)...(19): siRNA sense strand
gaaaguagauuaugacgga

SEQ ID NO: 2654511 - RNA, 19 nt, Homo sapiens
  misc_RNA (1)...(19): siRNA sense strand
aagagcaauucaagagauu

SEQ ID NO: 2654512 - RNA, 19 nt, Homo sapiens
  misc_RNA (1)...(19): siRNA sense strand
uggcuggacauuagauaaa

SEQ ID NO: 2654513 - RNA, 19 nt, Homo sapiens
  misc_RNA (1)...(19): siRNA sense strand
ccacugaccuagccauuaa

SEQ ID NO: 2654514 - RNA, 19 nt, Homo sapiens
  misc_RNA (1)...(19): siRNA sense strand
acaaacacccgcagaauuu

SEQ ID NO: 2654515 - RNA, 19 nt, Homo sapiens
  misc_RNA (1)...(19): siRNA sense strand
uggaauauccuguggggaa

SEQ ID NO: 2654516 - RNA, 19 nt, Homo sapiens
  misc_RNA (1)...(19): siRNA sense strand
cagugaaggucgucugaca

SEQ ID NO: 2654517 - RNA, 19 nt, Homo sapiens
  misc_RNA (1)...(19): siRNA sense strand
ggaagauggccgaggugca

SEQ ID NO: 2654518 - RNA, 19 nt, Homo sapiens
  misc_RNA (1)...(19): siRNA sense strand
uggaguauauggccggaaa

SEQ ID NO: 2654519 - RNA, 19 nt, Homo sapiens
  misc_RNA (1)...(19): siRNA sense strand
ucaugaagaaagaagagaa

SEQ ID NO: 2654520 - RNA, 19 nt, Homo sapiens
  misc_RNA (1)...(19): siRNA sense strand
uuccagagcugcaggguau

SEQ ID NO: 2654521 - RNA, 19 nt, Homo sapiens
  misc_RNA (1)...(19): siRNA sense strand
ggacauuagauaaacauca

SEQ ID NO: 2654522 - RNA, 19 nt, Homo sapiens
  misc_RNA (1)...(19): siRNA sense strand
gggacauggacaaggcuau

SEQ ID NO: 2654523 - RNA, 19 nt, Homo sapiens
  misc_RNA (1)...(19): siRNA sense strand
ggucaaaacuugguggaau

SEQ ID NO: 2654524 - RNA, 19 nt, Homo sapiens
  misc_RNA (1)...(19): siRNA sense strand
gugcaacagcaauggaaga

SEQ ID NO: 2654525 - RNA, 19 nt, Homo sapiens
  misc_RNA (1)...(19): siRNA sense strand
gauuaggaaaguugaccaa

SEQ ID NO: 2654526 - RNA, 19 nt, Homo sapiens
  misc_RNA (1)...(19): siRNA sense strand
caacaaagacagaaaagau

SEQ ID NO: 2654527 - RNA, 19 nt, Homo sapiens
  misc_RNA (1)...(19): siRNA sense strand
gguauaagucaguucucaa

SEQ ID NO: 2654528 - RNA, 19 nt, Homo sapiens
  misc_RNA (1)...(19): siRNA sense strand
agugaagaugggaugguaa

SEQ ID NO: 2654529 - RNA, 19 nt, Homo sapiens
  misc_RNA (1)...(19): siRNA sense strand
aaguugagcaguuuggaaa

SEQ ID NO: 2654530 - RNA, 19 nt, Homo sapiens
  misc_RNA (1)...(19): siRNA sense strand
gcagcuguguugauguaaa

SEQ ID NO: 2654531 - RNA, 19 nt, Homo sapiens
  misc_RNA (1)...(19): siRNA sense strand
gggucuuugcugaugguaa

SEQ ID NO: 2654532 - RNA, 19 nt, Homo sapiens
  misc_RNA (1)...(19): siRNA sense strand
cagaaaagaucuaugacga

SEQ ID NO: 2654533 - RNA, 19 nt, Homo sapiens
  misc_RNA (1)...(19): siRNA sense strand
ucaaagaagaucagaacaa

SEQ ID NO: 2654534 - RNA, 19 nt, Homo sapiens
  misc_RNA (1)...(19): siRNA sense strand
gagaaagugcugagggaga

SEQ ID NO: 2654535 - RNA, 19 nt, Homo sapiens
  misc_RNA (1)...(19): siRNA sense strand
agaaugaugaugugggaaa

SEQ ID NO: 2654536 - RNA, 19 nt, Homo sapiens
  misc_RNA (1)...(19): siRNA sense strand
cagagaaguuggagcaaaa

SEQ ID NO: 2654537 - RNA, 19 nt, Homo sapiens
  misc_RNA (1)...(19): siRNA sense strand
gaauaaggaaauuggaaga

SEQ ID NO: 2654538 - RNA, 19 nt, Homo sapiens
  misc_RNA (1)...(19): siRNA sense strand
caagauuauggaagagaaa

SEQ ID NO: 2654539 - RNA, 19 nt, Homo sapiens
  misc_RNA (1)...(19): siRNA sense strand
ggaaugauaugauggaaga

SEQ ID NO: 2654540 - RNA, 19 nt, Homo sapiens
  misc_RNA (1)...(19): siRNA sense strand
uggaaagcacagacagaaa

SEQ ID NO: 2654541 - RNA, 19 nt, Homo sapiens
  misc_RNA (1)...(19): siRNA sense strand
acugaaauuaccaggaaua

SEQ ID NO: 2654542 - RNA, 19 nt, Homo sapiens
  misc_RNA (1)...(19): siRNA sense strand
ggagaaugaaacagugauu

SEQ ID NO: 2654543 - RNA, 19 nt, Homo sapiens
  misc_RNA (1)...(19): siRNA sense strand
augaacaaguggugugaau

SEQ ID NO: 2654544 - RNA, 19 nt, Homo sapiens
  misc_RNA (1)...(19): siRNA sense strand
ugaaaguacucaagaacca

SEQ ID NO: 2654545 - RNA, 19 nt, Homo sapiens
  misc_RNA (1)...(19): siRNA sense strand
ucugauaggagaugacaaa

SEQ ID NO: 2654546 - RNA, 19 nt, Homo sapiens
  misc_RNA (1)...(19): siRNA sense strand
gcuuuaaugaucuggcaaa

SEQ ID NO: 2654547 - RNA, 19 nt, Homo sapiens
  misc_RNA (1)...(19): siRNA sense strand
uugaagaggagaugaagaa

SEQ ID NO: 2654548 - RNA, 19 nt, Homo sapiens
  misc_RNA (1)...(19): siRNA sense strand
cuauugaagaggagaugaa

SEQ ID NO: 2654549 - RNA, 19 nt, Homo sapiens
  misc_RNA (1)...(19): siRNA sense strand
agaacaaagcucagcaaaa

SEQ ID NO: 2654550 - RNA, 19 nt, Homo sapiens
  misc_RNA (1)...(19): siRNA sense strand
agugaaauuuggaguugaa

SEQ ID NO: 2654551 - RNA, 19 nt, Homo sapiens
  misc_RNA (1)...(19): siRNA sense strand
ucaaaagaguacugaagaa

SEQ ID NO: 2654552 - RNA, 19 nt, Homo sapiens
  misc_RNA (1)...(19): siRNA sense strand
cagaaaaggaucacuaaaa

SEQ ID NO: 2654553 - RNA, 19 nt, Homo sapiens
  misc_RNA (1)...(19): siRNA sense strand
gauucagagugcauauaaa

SEQ ID NO: 2654554 - RNA, 19 nt, Homo sapiens
  misc_RNA (1)...(19): siRNA sense strand
cuugauaagagaugaaaga

SEQ ID NO: 2654555 - RNA, 19 nt, Homo sapiens
  misc_RNA (1)...(19): siRNA sense strand
ggcaaaauuucgaaagauu

SEQ ID NO: 2654556 - RNA, 19 nt, Homo sapiens
  misc_RNA (1)...(19): siRNA sense strand
ggucagaaggaucggacau

SEQ ID NO: 2654557 - RNA, 19 nt, Homo sapiens
  misc_RNA (1)...(19): siRNA sense strand
uggagaaagugcugaggga

SEQ ID NO: 2654558 - RNA, 19 nt, Homo sapiens
  misc_RNA (1)...(19): siRNA sense strand
gagaacaacaagaagacau

SEQ ID NO: 2654559 - RNA, 19 nt, Homo sapiens
  misc_RNA (1)...(19): siRNA sense strand
gugucuuagugcacaguaa

SEQ ID NO: 2654560 - RNA, 19 nt, Homo sapiens
  misc_RNA (1)...(19): siRNA sense strand
gaagaggagaugaagaaca

SEQ ID NO: 2654561 - RNA, 19 nt, Homo sapiens
  misc_RNA (1)...(19): siRNA sense strand
ggguggaaaggaucagaua

SEQ ID NO: 2654562 - RNA, 19 nt, Homo sapiens
  misc_RNA (1)...(19): siRNA sense strand
gcacguaugcugaugucaa

SEQ ID NO: 2654563 - RNA, 19 nt, Homo sapiens
  misc_RNA (1)...(19): siRNA sense strand
acaccugguuaaagaauuu

SEQ ID NO: 2654564 - RNA, 19 nt, Homo sapiens
  misc_RNA (1)...(19): siRNA sense strand
uggauuaggaacagugauu

SEQ ID NO: 2654565 - RNA, 19 nt, Homo sapiens
  misc_RNA (1)...(19): siRNA sense strand
acucaguacgucagagaau

SEQ ID NO: 2654566 - RNA, 19 nt, Homo sapiens
  misc_RNA (1)...(19): siRNA sense strand
ucauacaacacuuggaaga

SEQ ID NO: 2654567 - RNA, 19 nt, Homo sapiens
  misc_RNA (1)...(19): siRNA sense strand
aagaaaucuccuuggaaaa

SEQ ID NO: 2654568 - RNA, 19 nt, Homo sapiens
  misc_RNA (1)...(19): siRNA sense strand
acaagauuauggaagagaa

SEQ ID NO: 2654569 - RNA, 19 nt, Homo sapiens
  misc_RNA (1)...(19): siRNA sense strand
agaaguuggaugcuagaaa

SEQ ID NO: 2654570 - RNA, 19 nt, Homo sapiens
  misc_RNA (1)...(19): siRNA sense strand
uggaugugguagauaagaa

SEQ ID NO: 2654571 - RNA, 19 nt, Homo sapiens
  misc_RNA (1)...(19): siRNA sense strand
auacaacacuuggaagaaa

SEQ ID NO: 2654572 - RNA, 19 nt, Homo sapiens
  misc_RNA (1)...(19): siRNA sense strand
ugacuuguaugaugagcaa

SEQ ID NO: 2654573 - RNA, 19 nt, Homo sapiens
  misc_RNA (1)...(19): siRNA sense strand
ggauuaauugccugcuuua

SEQ ID NO: 2654574 - RNA, 19 nt, Homo sapiens
  misc_RNA (1)...(19): siRNA sense strand
gaauaaagacucaguacgu

SEQ ID NO: 2654575 - RNA, 19 nt, Homo sapiens
  misc_RNA (1)...(19): siRNA sense strand
cauuugaauuugggagauu

SEQ ID NO: 2654576 - RNA, 19 nt, Homo sapiens
  misc_RNA (1)...(19): siRNA sense strand
agaacaacaagaagacauu

SEQ ID NO: 2654577 - RNA, 19 nt, Homo sapiens
  misc_RNA (1)...(19): siRNA sense strand
ugggaaaucguuagaauca

SEQ ID NO: 2654578 - RNA, 19 nt, Homo sapiens
  misc_RNA (1)...(19): siRNA sense strand
gaggagaugaagaacaauu

SEQ ID NO: 2654579 - RNA, 19 nt, Homo sapiens
  misc_RNA (1)...(19): siRNA sense strand
acaaugauuuagagaagca

SEQ ID NO: 2654580 - RNA, 19 nt, Homo sapiens
  misc_RNA (1)...(19): siRNA sense strand
guucacuauccuugagaau

SEQ ID NO: 2654581 - RNA, 19 nt, Homo sapiens
  misc_RNA (1)...(19): siRNA sense strand
gauucaggauuaucagcaa

SEQ ID NO: 2654582 - RNA, 19 nt, Homo sapiens
  misc_RNA (1)...(19): siRNA sense strand
ggaaaggaucagauauguu

SEQ ID NO: 2654583 - RNA, 19 nt, Homo sapiens
  misc_RNA (1)...(19): siRNA sense strand
aucacaugcucuuggauua

SEQ ID NO: 2654584 - RNA, 19 nt, Homo sapiens
  misc_RNA (1)...(19): siRNA sense strand
uggaauaaggaaauuggaa

SEQ ID NO: 2654585 - RNA, 19 nt, Homo sapiens
  misc_RNA (1)...(19): siRNA sense strand
aagaaaacuuaaaggcaga

SEQ ID NO: 2654586 - RNA, 19 nt, Homo sapiens
  misc_RNA (1)...(19): siRNA sense strand
acacugaaugucauaguua

SEQ ID NO: 2654587 - RNA, 19 nt, Homo sapiens
  misc_RNA (1)...(19): siRNA sense strand
ucaguacgucagagaauua

SEQ ID NO: 2654588 - RNA, 19 nt, Homo sapiens
  misc_RNA (1)...(19): siRNA sense strand
agacaagagaaaucgguca

SEQ ID NO: 2654589 - RNA, 19 nt, Homo sapiens
  misc_RNA (1)...(19): siRNA sense strand
ggaugugguagauaagaau

SEQ ID NO: 2654590 - RNA, 19 nt, Homo sapiens
  misc_RNA (1)...(19): siRNA sense strand
gguagauaagaaugaguca

SEQ ID NO: 2654591 - RNA, 19 nt, Homo sapiens
  misc_RNA (1)...(19): siRNA sense strand
acucaaacuacucggccaa

SEQ ID NO: 2654592 - RNA, 19 nt, Homo sapiens
  misc_RNA (1)...(19): siRNA sense strand
ggaauaaggaaauuggaag

SEQ ID NO: 2654593 - RNA, 19 nt, Homo sapiens
  misc_RNA (1)...(19): siRNA sense strand
gccaagugaagaaggucaa

SEQ ID NO: 2654594 - RNA, 19 nt, Homo sapiens
  misc_RNA (1)...(19): siRNA sense strand
gauucauugucuaguucaa

SEQ ID NO: 2654595 - RNA, 19 nt, Homo sapiens
  misc_RNA (1)...(19): siRNA sense strand
ccucugagaacaacaagaa

SEQ ID NO: 2654596 - RNA, 19 nt, Homo sapiens
  misc_RNA (1)...(19): siRNA sense strand
ugaugaaggauuugccuau

SEQ ID NO: 2654597 - RNA, 19 nt, Homo sapiens
  misc_RNA (1)...(19): siRNA sense strand
gggaaaucguuagaaucaa

SEQ ID NO: 2654598 - RNA, 19 nt, Homo sapiens
  misc_RNA (1)...(19): siRNA sense strand
gguccauuaucuuggcaga

SEQ ID NO: 2654599 - RNA, 19 nt, Homo sapiens
  misc_RNA (1)...(19): siRNA sense strand
uggcagagaaguuggagca

SEQ ID NO: 2654600 - RNA, 19 nt, Homo sapiens
  misc_RNA (1)...(19): siRNA sense strand
acuuguaugaugagcaauu

SEQ ID NO: 2654601 - RNA, 19 nt, Homo sapiens
  misc_RNA (1)...(19): siRNA sense strand
uguacuaaacugucaggua

SEQ ID NO: 2654602 - RNA, 19 nt, Homo sapiens
  misc_RNA (1)...(19): siRNA sense strand
gggcuuuauuccaaugaca

SEQ ID NO: 2654603 - RNA, 19 nt, Homo sapiens
  misc_RNA (1)...(19): siRNA sense strand
uugaugaguuuguuggaga

SEQ ID NO: 2654604 - RNA, 19 nt, Homo sapiens
  misc_RNA (1)...(19): siRNA sense strand
ucagcaauuuuaugggaaa

SEQ ID NO: 2654605 - RNA, 19 nt, Homo sapiens
  misc_RNA (1)...(19): siRNA sense strand
gaaugaugaugugggaaaa

SEQ ID NO: 2654606 - RNA, 19 nt, Homo sapiens
  misc_RNA (1)...(19): siRNA sense strand
cugaaauuaccaggaauaa

SEQ ID NO: 2654607 - RNA, 19 nt, Homo sapiens
  misc_RNA (1)...(19): siRNA sense strand
acguuacaguugugacauu

SEQ ID NO: 2654608 - RNA, 19 nt, Homo sapiens
  misc_RNA (1)...(19): siRNA sense strand
gaauaaagcucgagccgaa

SEQ ID NO: 2654609 - RNA, 19 nt, Homo sapiens
  misc_RNA (1)...(19): siRNA sense strand
caguaaagaaagagaagaa

SEQ ID NO: 2654610 - RNA, 19 nt, Homo sapiens
  misc_RNA (1)...(19): siRNA sense strand
aggaaagguuggaaagaau

SEQ ID NO: 2654611 - RNA, 19 nt, Homo sapiens
  misc_RNA (1)...(19): siRNA sense strand
agugaauacuggagaagaa

SEQ ID NO: 2654612 - RNA, 19 nt, Homo sapiens
  misc_RNA (1)...(19): siRNA sense strand
gcuaaauggaaaagagaaa

SEQ ID NO: 2654613 - RNA, 19 nt, Homo sapiens
  misc_RNA (1)...(19): siRNA sense strand
ggagaagaaaggaggaaaa

SEQ ID NO: 2654614 - RNA, 19 nt, Homo sapiens
  misc_RNA (1)...(19): siRNA sense strand
aagaacaacuagaacgaaa

SEQ ID NO: 2654615 - RNA, 19 nt, Homo sapiens
  misc_RNA (1)...(19): siRNA sense strand
caaacaaagaugagagcuu

SEQ ID NO: 2654616 - RNA, 19 nt, Homo sapiens
  misc_RNA (1)...(19): siRNA sense strand
gggaaaaguccgacagauu

SEQ ID NO: 2654617 - RNA, 19 nt, Homo sapiens
  misc_RNA (1)...(19): siRNA sense strand
cuuugagguuuaugagaaa

SEQ ID NO: 2654618 - RNA, 19 nt, Homo sapiens
  misc_RNA (1)...(19): siRNA sense strand
gcuuauugcagaagaauuu

SEQ ID NO: 2654619 - RNA, 19 nt, Homo sapiens
  misc_RNA (1)...(19): siRNA sense strand
ugguggaaguggugaagua

SEQ ID NO: 2654620 - RNA, 19 nt, Homo sapiens
  misc_RNA (1)...(19): siRNA sense strand
ccgaaggacauaugguuua

SEQ ID NO: 2654621 - RNA, 19 nt, Homo sapiens
  misc_RNA (1)...(19): siRNA sense strand
ccaacagauuaaagccaaa

SEQ ID NO: 2654622 - RNA, 19 nt, Homo sapiens
  misc_RNA (1)...(19): siRNA sense strand
gcaacaaagagcagaagau

SEQ ID NO: 2654623 - RNA, 19 nt, Homo sapiens
  misc_RNA (1)...(19): siRNA sense strand
cuacaagagccaaguggaa

SEQ ID NO: 2654624 - RNA, 19 nt, Homo sapiens
  misc_RNA (1)...(19): siRNA sense strand
gagccuaccaagaagauaa

SEQ ID NO: 2654625 - RNA, 19 nt, Homo sapiens
  misc_RNA (1)...(19): siRNA sense strand
cagaagauaaugaagcuaa

SEQ ID NO: 2654626 - RNA, 19 nt, Homo sapiens
  misc_RNA (1)...(19): siRNA sense strand
gagcuaaacaaguagaaga

SEQ ID NO: 2654627 - RNA, 19 nt, Homo sapiens
  misc_RNA (1)...(19): siRNA sense strand
ugaagaauacagugaagaa

SEQ ID NO: 2654628 - RNA, 19 nt, Homo sapiens
  misc_RNA (1)...(19): siRNA sense strand
gagagugaauacuggagaa

SEQ ID NO: 2654629 - RNA, 19 nt, Homo sapiens
  misc_RNA (1)...(19): siRNA sense strand
gggaacaaggauggagaaa

SEQ ID NO: 2654630 - RNA, 19 nt, Homo sapiens
  misc_RNA (1)...(19): siRNA sense strand
cuggcaagacugaggcaaa

SEQ ID NO: 2654631 - RNA, 19 nt, Homo sapiens
  misc_RNA (1)...(19): siRNA sense strand
gugaaaagaaagaagcuaa

SEQ ID NO: 2654632 - RNA, 19 nt, Homo sapiens
  misc_RNA (1)...(19): siRNA sense strand
aacuagaacgaaagagaaa

SEQ ID NO: 2654633 - RNA, 19 nt, Homo sapiens
  misc_RNA (1)...(19): siRNA sense strand
ccaucaaacuccagagaag

SEQ ID NO: 2654634 - RNA, 19 nt, Homo sapiens
  misc_RNA (1)...(19): siRNA sense strand
ggugaaauugcuagugaau

SEQ ID NO: 2654635 - RNA, 19 nt, Homo sapiens
  misc_RNA (1)...(19): siRNA sense strand
cugaggaagcagcaagaaa

SEQ ID NO: 2654636 - RNA, 19 nt, Homo sapiens
  misc_RNA (1)...(19): siRNA sense strand
aacaaagagcagaagauaa

SEQ ID NO: 2654637 - RNA, 19 nt, Homo sapiens
  misc_RNA (1)...(19): siRNA sense strand
cuaaacaaguagaagaguu

SEQ ID NO: 2654638 - RNA, 19 nt, Homo sapiens
  misc_RNA (1)...(19): siRNA sense strand
agacauuguguuugaagaa

SEQ ID NO: 2654639 - RNA, 19 nt, Homo sapiens
  misc_RNA (1)...(19): siRNA sense strand
agauaacagugauggugaa

SEQ ID NO: 2654640 - RNA, 19 nt, Homo sapiens
  misc_RNA (1)...(19): siRNA sense strand
ggaagcagcaagaaagaga

SEQ ID NO: 2654641 - RNA, 19 nt, Homo sapiens
  misc_RNA (1)...(19): siRNA sense strand
agccaaacuucguggugaa

SEQ ID NO: 2654642 - RNA, 19 nt, Homo sapiens
  misc_RNA (1)...(19): siRNA sense strand
ucuaaagauacuuggagaa

SEQ ID NO: 2654643 - RNA, 19 nt, Homo sapiens
  misc_RNA (1)...(19): siRNA sense strand
gagaagguucauuuggaaa

SEQ ID NO: 2654644 - RNA, 19 nt, Homo sapiens
  misc_RNA (1)...(19): siRNA sense strand
ccauauuggagaaagguuu

SEQ ID NO: 2654645 - RNA, 19 nt, Homo sapiens
  misc_RNA (1)...(19): siRNA sense strand
agaaagagaaggcuggaau

SEQ ID NO: 2654646 - RNA, 19 nt, Homo sapiens
  misc_RNA (1)...(19): siRNA sense strand
cuaaacaagccaaugcaaa

SEQ ID NO: 2654647 - RNA, 19 nt, Homo sapiens
  misc_RNA (1)...(19): siRNA sense strand
gaggcuuaugagagagaaa

SEQ ID NO: 2654648 - RNA, 19 nt, Homo sapiens
  misc_RNA (1)...(19): siRNA sense strand
gaaaaggaaagguuggaaa

SEQ ID NO: 2654649 - RNA, 19 nt, Homo sapiens
  misc_RNA (1)...(19): siRNA sense strand
aagaguuccugcagcgaaa

SEQ ID NO: 2654650 - RNA, 19 nt, Homo sapiens
  misc_RNA (1)...(19): siRNA sense strand
cagugaagaagaagaguca

SEQ ID NO: 2654651 - RNA, 19 nt, Homo sapiens
  misc_RNA (1)...(19): siRNA sense strand
uguuaugccugcucagaaa

SEQ ID NO: 2654652 - RNA, 19 nt, Homo sapiens
  misc_RNA (1)...(19): siRNA sense strand
cuuuaaccauuuagaggaa

SEQ ID NO: 2654653 - RNA, 19 nt, Homo sapiens
  misc_RNA (1)...(19): siRNA sense strand
agaagauggcagacaguau

SEQ ID NO: 2654654 - RNA, 19 nt, Homo sapiens
  misc_RNA (1)...(19): siRNA sense strand
gaaagaauaaauagggcca

SEQ ID NO: 2654655 - RNA, 19 nt, Homo sapiens
  misc_RNA (1)...(19): siRNA sense strand
acaacuagaacgaaagaga

SEQ ID NO: 2654656 - RNA, 19 nt, Homo sapiens
  misc_RNA (1)...(19): siRNA sense strand
agaaacugacacagauuua

SEQ ID NO: 2654657 - RNA, 19 nt, Homo sapiens
  misc_RNA (1)...(19): siRNA sense strand
uggaauugcuagaguucuu

SEQ ID NO: 2654658 - RNA, 19 nt, Homo sapiens
  misc_RNA (1)...(19): siRNA sense strand
agaauguccaguaaagaaa

SEQ ID NO: 2654659 - RNA, 19 nt, Homo sapiens
  misc_RNA (1)...(19): siRNA sense strand
caguauguuaucaaggaaa

SEQ ID NO: 2654660 - RNA, 19 nt, Homo sapiens
  misc_RNA (1)...(19): siRNA sense strand
cguaggagauguucgucaa

SEQ ID NO: 2654661 - RNA, 19 nt, Homo sapiens
  misc_RNA (1)...(19): siRNA sense strand
uggcagaugaagaugacaa

SEQ ID NO: 2654662 - RNA, 19 nt, Homo sapiens
  misc_RNA (1)...(19): siRNA sense strand
gagaagaaucaaggagaga

SEQ ID NO: 2654663 - RNA, 19 nt, Homo sapiens
  misc_RNA (1)...(19): siRNA sense strand
aagaccagcuucaggacaa

SEQ ID NO: 2654664 - RNA, 19 nt, Homo sapiens
  misc_RNA (1)...(19): siRNA sense strand
aaaagaaaccacugcaaaa

SEQ ID NO: 2654665 - RNA, 19 nt, Homo sapiens
  misc_RNA (1)...(19): siRNA sense strand
gaggaaaauaucugaggaa

SEQ ID NO: 2654666 - RNA, 19 nt, Homo sapiens
  misc_RNA (1)...(19): siRNA sense strand
uaaugaaggcugaacaaau

SEQ ID NO: 2654667 - RNA, 19 nt, Homo sapiens
  misc_RNA (1)...(19): siRNA sense strand
ggaacaaggauggagaaau

SEQ ID NO: 2654668 - RNA, 19 nt, Homo sapiens
  misc_RNA (1)...(19): siRNA sense strand
cgggaaagggguugagcaa

SEQ ID NO: 2654669 - RNA, 19 nt, Homo sapiens
  misc_RNA (1)...(19): siRNA sense strand
gcuuuaugcaaucuggaaa

SEQ ID NO: 2654670 - RNA, 19 nt, Homo sapiens
  misc_RNA (1)...(19): siRNA sense strand
aagacaaugaggucagcua

SEQ ID NO: 2654671 - RNA, 19 nt, Homo sapiens
  misc_RNA (1)...(19): siRNA sense strand
caaugaggucagcuagaau

SEQ ID NO: 2654672 - RNA, 19 nt, Homo sapiens
  misc_RNA (1)...(19): siRNA sense strand
ucugauucucugaaguaua

SEQ ID NO: 2654673 - RNA, 19 nt, Homo sapiens
  misc_RNA (1)...(19): siRNA sense strand
acuacaggagagaagacaa

SEQ ID NO: 2654674 - RNA, 19 nt, Homo sapiens
  misc_RNA (1)...(19): siRNA sense strand
gggaaguagagauggaaau

SEQ ID NO: 2654675 - RNA, 19 nt, Homo sapiens
  misc_RNA (1)...(19): siRNA sense strand
gaaagaauaaggaggacca

SEQ ID NO: 2654676 - RNA, 19 nt, Homo sapiens
  misc_RNA (1)...(19): siRNA sense strand
cgggaaguagagauggaaa

SEQ ID NO: 2654677 - RNA, 19 nt, Homo sapiens
  misc_RNA (1)...(19): siRNA sense strand
acaagaggaaagagauauu

SEQ ID NO: 2654678 - RNA, 19 nt, Homo sapiens
  misc_RNA (1)...(19): siRNA sense strand
agaccaaacagcuggccaa

SEQ ID NO: 2654679 - RNA, 19 nt, Homo sapiens
  misc_RNA (1)...(19): siRNA sense strand
agaacacagaggaggagaa

SEQ ID NO: 2654680 - RNA, 19 nt, Homo sapiens
  misc_RNA (1)...(19): siRNA sense strand
cgggagaaggaaagagacu

SEQ ID NO: 2654681 - RNA, 19 nt, Homo sapiens
  misc_RNA (1)...(19): siRNA sense strand
ucaugaagaaacuggaaga

SEQ ID NO: 2654682 - RNA, 19 nt, Homo sapiens
  misc_RNA (1)...(19): siRNA sense strand
acaagaacacagaggagga

SEQ ID NO: 2654683 - RNA, 19 nt, Homo sapiens
  misc_RNA (1)...(19): siRNA sense strand
cgacaguacuuuaaggccu

SEQ ID NO: 2654684 - RNA, 19 nt, Homo sapiens
  misc_RNA (1)...(19): siRNA sense strand
uugcagaggaaauuugaaa

SEQ ID NO: 2654685 - RNA, 19 nt, Homo sapiens
  misc_RNA (1)...(19): siRNA sense strand
ugggaaagaauaaggagga

SEQ ID NO: 2654686 - RNA, 19 nt, Homo sapiens
  misc_RNA (1)...(19): siRNA sense strand
gauauuuagcaaagacaca

SEQ ID NO: 2654687 - RNA, 19 nt, Homo sapiens
  misc_RNA (1)...(19): siRNA sense strand
gcuaaaaggagaacugaga

SEQ ID NO: 2654688 - RNA, 19 nt, Homo sapiens
  misc_RNA (1)...(19): siRNA sense strand
agaaacuggaagaagaaaa

SEQ ID NO: 2654689 - RNA, 19 nt, Homo sapiens
  misc_RNA (1)...(19): siRNA sense strand
cugaaagagaguaugacuu

SEQ ID NO: 2654690 - RNA, 19 nt, Homo sapiens
  misc_RNA (1)...(19): siRNA sense strand
gaggaguggcugaagggau

SEQ ID NO: 2654691 - RNA, 19 nt, Homo sapiens
  misc_RNA (1)...(19): siRNA sense strand
gaaagagacuugcagagga

SEQ ID NO: 2654692 - RNA, 19 nt, Homo sapiens
  misc_RNA (1)...(19): siRNA sense strand
caagaaagccugucaccca

SEQ ID NO: 2654693 - RNA, 19 nt, Homo sapiens
  misc_RNA (1)...(19): siRNA sense strand
gguccaggaaugagagauc

SEQ ID NO: 2654694 - RNA, 19 nt, Homo sapiens
  misc_RNA (1)...(19): siRNA sense strand
aaggagagauccaggucga

SEQ ID NO: 2654695 - RNA, 19 nt, Homo sapiens
  misc_RNA (1)...(19): siRNA sense strand
agucaguggcagcaaggaa

SEQ ID NO: 2654696 - RNA, 19 nt, Homo sapiens
  misc_RNA (1)...(19): siRNA sense strand
ggcuaaaguuauuccgguu

SEQ ID NO: 2654697 - RNA, 19 nt, Homo sapiens
  misc_RNA (1)...(19): siRNA sense strand
augacuauuuccagugcaa

SEQ ID NO: 2654698 - RNA, 19 nt, Homo sapiens
  misc_RNA (1)...(19): siRNA sense strand
aggaguggcugaagggauc

SEQ ID NO: 2654699 - RNA, 19 nt, Homo sapiens
  misc_RNA (1)...(19): siRNA sense strand
ucauugaacacaaaggaga

SEQ ID NO: 2654700 - RNA, 19 nt, Homo sapiens
  misc_RNA (1)...(19): siRNA sense strand
agagacuugcagaggaaau

SEQ ID NO: 2654701 - RNA, 19 nt, Homo sapiens
  misc_RNA (1)...(19): siRNA sense strand
cauugaacacaaaggagau

SEQ ID NO: 2654702 - RNA, 19 nt, Homo sapiens
  misc_RNA (1)...(19): siRNA sense strand
cugcaaaggaagucugcca

SEQ ID NO: 2654703 - RNA, 19 nt, Homo sapiens
  misc_RNA (1)...(19): siRNA sense strand
ccaacaaagccaaggagag

SEQ ID NO: 2654704 - RNA, 19 nt, Homo sapiens
  misc_RNA (1)...(19): siRNA sense strand
gcucaugaagaaacuggaa

SEQ ID NO: 2654705 - RNA, 19 nt, Homo sapiens
  misc_RNA (1)...(19): siRNA sense strand
gccaggccgaugugagaaa

SEQ ID NO: 2654706 - RNA, 19 nt, Homo sapiens
  misc_RNA (1)...(19): siRNA sense strand
cugagaagcuacagaaacc

SEQ ID NO: 2654707 - RNA, 19 nt, Homo sapiens
  misc_RNA (1)...(19): siRNA sense strand
ccucauaagaacuaacagu

SEQ ID NO: 2654708 - RNA, 19 nt, Homo sapiens
  misc_RNA (1)...(19): siRNA sense strand
gcagagaagacgugcacag

SEQ ID NO: 2654709 - RNA, 19 nt, Homo sapiens
  misc_RNA (1)...(19): siRNA sense strand
ccuauaagacagaaacucu

SEQ ID NO: 2654710 - RNA, 19 nt, Homo sapiens
  misc_RNA (1)...(19): siRNA sense strand
agacagaucgaucgggaaa

SEQ ID NO: 2654711 - RNA, 19 nt, Homo sapiens
  misc_RNA (1)...(19): siRNA sense strand
gagauauauuagaagguga

SEQ ID NO: 2654712 - RNA, 19 nt, Homo sapiens
  misc_RNA (1)...(19): siRNA sense strand
agaagggaaaugaaagaaa

SEQ ID NO: 2654713 - RNA, 19 nt, Homo sapiens
  misc_RNA (1)...(19): siRNA sense strand
acaacaaaggauugagaga

SEQ ID NO: 2654714 - RNA, 19 nt, Homo sapiens
  misc_RNA (1)...(19): siRNA sense strand
acacaauggaucugaauca

SEQ ID NO: 2654715 - RNA, 19 nt, Homo sapiens
  misc_RNA (1)...(19): siRNA sense strand
aaugaugacccaaaggaaa

SEQ ID NO: 2654716 - RNA, 19 nt, Homo sapiens
  misc_RNA (1)...(19): siRNA sense strand
ggaaaugaaagaaacguga

SEQ ID NO: 2654717 - RNA, 19 nt, Homo sapiens
  misc_RNA (1)...(19): siRNA sense strand
auaugaagauguugaggau

SEQ ID NO: 2654718 - RNA, 19 nt, Homo sapiens
  misc_RNA (1)...(19): siRNA sense strand
ggaaaagccgggaagcaaa

SEQ ID NO: 2654719 - RNA, 19 nt, Homo sapiens
  misc_RNA (1)...(19): siRNA sense strand
aguuuagaccacagacaua

SEQ ID NO: 2654720 - RNA, 19 nt, Homo sapiens
  misc_RNA (1)...(19): siRNA sense strand
ugagaagggaaaugaaaga

SEQ ID NO: 2654721 - RNA, 19 nt, Homo sapiens
  misc_RNA (1)...(19): siRNA sense strand
aggaaagaaaugugaaacu

SEQ ID NO: 2654722 - RNA, 19 nt, Homo sapiens
  misc_RNA (1)...(19): siRNA sense strand
agagaagaggugagacaga

SEQ ID NO: 2654723 - RNA, 19 nt, Homo sapiens
  misc_RNA (1)...(19): siRNA sense strand
gugacuuugaagaaggaaa

SEQ ID NO: 2654724 - RNA, 19 nt, Homo sapiens
  misc_RNA (1)...(19): siRNA sense strand
cgggaaaaucagaggcuuu

SEQ ID NO: 2654725 - RNA, 19 nt, Homo sapiens
  misc_RNA (1)...(19): siRNA sense strand
aagaaggugaagaugauua

SEQ ID NO: 2654726 - RNA, 19 nt, Homo sapiens
  misc_RNA (1)...(19): siRNA sense strand
caccaaaacacaaguauaa

SEQ ID NO: 2654727 - RNA, 19 nt, Homo sapiens
  misc_RNA (1)...(19): siRNA sense strand
cugaagauacugugacuga

SEQ ID NO: 2654728 - RNA, 19 nt, Homo sapiens
  misc_RNA (1)...(19): siRNA sense strand
acugagaagggaaaugaaa

SEQ ID NO: 2654729 - RNA, 19 nt, Homo sapiens
  misc_RNA (1)...(19): siRNA sense strand
ugaacugggcauagcaaau

SEQ ID NO: 2654730 - RNA, 19 nt, Homo sapiens
  misc_RNA (1)...(19): siRNA sense strand
uguaaaagaaggugaagau

SEQ ID NO: 2654731 - RNA, 19 nt, Homo sapiens
  misc_RNA (1)...(19): siRNA sense strand
cagugaugaugggaagaaa

SEQ ID NO: 2654732 - RNA, 19 nt, Homo sapiens
  misc_RNA (1)...(19): siRNA sense strand
cggaaaagccgggaagcaa

SEQ ID NO: 2654733 - RNA, 19 nt, Homo sapiens
  misc_RNA (1)...(19): siRNA sense strand
auuaagagcuuccaggaca

SEQ ID NO: 2654734 - RNA, 19 nt, Homo sapiens
  misc_RNA (1)...(19): siRNA sense strand
agaggaaagcagugaugau

SEQ ID NO: 2654735 - RNA, 19 nt, Homo sapiens
  misc_RNA (1)...(19): siRNA sense strand
ucaacagacagaaggaaca

SEQ ID NO: 2654736 - RNA, 19 nt, Homo sapiens
  misc_RNA (1)...(19): siRNA sense strand
acacagauggagaggaaag

SEQ ID NO: 2654737 - RNA, 19 nt, Homo sapiens
  misc_RNA (1)...(19): siRNA sense strand
agaaggaacaacaaaggau

SEQ ID NO: 2654738 - RNA, 19 nt, Homo sapiens
  misc_RNA (1)...(19): siRNA sense strand
guaaauucgaacacuggaa

SEQ ID NO: 2654739 - RNA, 19 nt, Homo sapiens
  misc_RNA (1)...(19): siRNA sense strand
agugaugaugggaagaaau

SEQ ID NO: 2654740 - RNA, 19 nt, Homo sapiens
  misc_RNA (1)...(19): siRNA sense strand
gcaauaugggcuaucucaa

SEQ ID NO: 2654741 - RNA, 19 nt, Homo sapiens
  misc_RNA (1)...(19): siRNA sense strand
ccuaauguccguacagcuu

SEQ ID NO: 2654742 - RNA, 19 nt, Homo sapiens
  misc_RNA (1)...(19): siRNA sense strand
uaaaagaaggugaagauga

SEQ ID NO: 2654743 - RNA, 19 nt, Homo sapiens
  misc_RNA (1)...(19): siRNA sense strand
gagacagaucgaucgggaa

SEQ ID NO: 2654744 - RNA, 19 nt, Homo sapiens
  misc_RNA (1)...(19): siRNA sense strand
caacagacagaaggaacaa

SEQ ID NO: 2654745 - RNA, 19 nt, Homo sapiens
  misc_RNA (1)...(19): siRNA sense strand
aaaugaugacccaaaggaa

SEQ ID NO: 2654746 - RNA, 19 nt, Homo sapiens
  misc_RNA (1)...(19): siRNA sense strand
aagcagugaugaugggaag

SEQ ID NO: 2654747 - RNA, 19 nt, Homo sapiens
  misc_RNA (1)...(19): siRNA sense strand
gugaaguccaaguccgcua

SEQ ID NO: 2654748 - RNA, 19 nt, Homo sapiens
  misc_RNA (1)...(19): siRNA sense strand
cgacagaaacacagccuuc

SEQ ID NO: 2654749 - RNA, 19 nt, Homo sapiens
  misc_RNA (1)...(19): siRNA sense strand
gaaaagccgggaagcaaaa

SEQ ID NO: 2654750 - RNA, 19 nt, Homo sapiens
  misc_RNA (1)...(19): siRNA sense strand
gaaugauguuacacaaacu

SEQ ID NO: 2654751 - RNA, 19 nt, Homo sapiens
  misc_RNA (1)...(19): siRNA sense strand
cuaagucaucuaagaaaca

SEQ ID NO: 2654752 - RNA, 19 nt, Homo sapiens
  misc_RNA (1)...(19): siRNA sense strand
cagaaaauguggagguaau

SEQ ID NO: 2654753 - RNA, 19 nt, Homo sapiens
  misc_RNA (1)...(19): siRNA sense strand
caguagaagaccugaagaa

SEQ ID NO: 2654754 - RNA, 19 nt, Homo sapiens
  misc_RNA (1)...(19): siRNA sense strand
guuuaaagaaggaugggaa

SEQ ID NO: 2654755 - RNA, 19 nt, Homo sapiens
  misc_RNA (1)...(19): siRNA sense strand
uugaguacacagaggaaua

SEQ ID NO: 2654756 - RNA, 19 nt, Homo sapiens
  misc_RNA (1)...(19): siRNA sense strand
ccaaugaaaugaacgccaa

SEQ ID NO: 2654757 - RNA, 19 nt, Homo sapiens
  misc_RNA (1)...(19): siRNA sense strand
ccuuauaccuguuggguuc

SEQ ID NO: 2654758 - RNA, 19 nt, Homo sapiens
  misc_RNA (1)...(19): siRNA sense strand
cuguauaggucaaaaguuu

SEQ ID NO: 2654759 - RNA, 19 nt, Homo sapiens
  misc_RNA (1)...(19): siRNA sense strand
ccagaaaagagaagagcuu

SEQ ID NO: 2654760 - RNA, 19 nt, Homo sapiens
  misc_RNA (1)...(19): siRNA sense strand
caugaaugaacaagcaaau

SEQ ID NO: 2654761 - RNA, 19 nt, Homo sapiens
  misc_RNA (1)...(19): siRNA sense strand
aguaauggcaucuggauca

SEQ ID NO: 2654762 - RNA, 19 nt, Homo sapiens
  misc_RNA (1)...(19): siRNA sense strand
caggaacuguauaggucaa

SEQ ID NO: 2654763 - RNA, 19 nt, Homo sapiens
  misc_RNA (1)...(19): siRNA sense strand
gacgaagggaacaggcuaa

SEQ ID NO: 2654764 - RNA, 19 nt, Homo sapiens
  misc_RNA (1)...(19): siRNA sense strand
aagagaagagcuuggucua

SEQ ID NO: 2654765 - RNA, 19 nt, Homo sapiens
  misc_RNA (1)...(19): siRNA sense strand
ugacugaugacgaagggaa

SEQ ID NO: 2654766 - RNA, 19 nt, Homo sapiens
  misc_RNA (1)...(19): siRNA sense strand
aguagaagaccugaagaaa

SEQ ID NO: 2654767 - RNA, 19 nt, Homo sapiens
  misc_RNA (1)...(19): siRNA sense strand
ggaaacaaauggcgcucca

SEQ ID NO: 2654768 - RNA, 19 nt, Homo sapiens
  misc_RNA (1)...(19): siRNA sense strand
agaaugagugagaugauau

SEQ ID NO: 2654769 - RNA, 19 nt, Homo sapiens
  misc_RNA (1)...(19): siRNA sense strand
ccgaggaguuccagccuga

SEQ ID NO: 2654770 - RNA, 19 nt, Homo sapiens
  misc_RNA (1)...(19): siRNA sense strand
aggcuaagucaugaagaua

SEQ ID NO: 2654771 - RNA, 19 nt, Homo sapiens
  misc_RNA (1)...(19): siRNA sense strand
ggcuaagucaugaagauau

SEQ ID NO: 2654772 - RNA, 19 nt, Homo sapiens
  misc_RNA (1)...(19): siRNA sense strand
agauauucgagaagaaguu

SEQ ID NO: 2654773 - RNA, 19 nt, Homo sapiens
  misc_RNA (1)...(19): siRNA sense strand
ugcagaggguggcgagcua

SEQ ID NO: 2654774 - RNA, 19 nt, Homo sapiens
  misc_RNA (1)...(19): siRNA sense strand
agaaagauguuaacaccca

SEQ ID NO: 2654775 - RNA, 19 nt, Homo sapiens
  misc_RNA (1)...(19): siRNA sense strand
gcgcggaaauggcagcaga

SEQ ID NO: 2654776 - RNA, 19 nt, Homo sapiens
  misc_RNA (1)...(19): siRNA sense strand
gugaaacagcuauggggaa

SEQ ID NO: 2654777 - RNA, 19 nt, Homo sapiens
  misc_RNA (1)...(19): siRNA sense strand
cgugcaguuuauagaauga

SEQ ID NO: 2654778 - RNA, 19 nt, Homo sapiens
  misc_RNA (1)...(19): siRNA sense strand
cauugaguacacagaggaa

SEQ ID NO: 2654779 - RNA, 19 nt, Homo sapiens
  misc_RNA (1)...(19): siRNA sense strand
aagugugacugaugacgaa

SEQ ID NO: 2654780 - RNA, 19 nt, Homo sapiens
  misc_RNA (1)...(19): siRNA sense strand
gaaaugcagaugaacgcua

SEQ ID NO: 2654781 - RNA, 19 nt, Homo sapiens
  misc_RNA (1)...(19): siRNA sense strand
aaaugaacgccaaugaaga

SEQ ID NO: 2654782 - RNA, 19 nt, Homo sapiens
  misc_RNA (1)...(19): siRNA sense strand
agagcuuggucuagaagga

SEQ ID NO: 2654783 - RNA, 19 nt, Homo sapiens
  misc_RNA (1)...(19): siRNA sense strand
aagaaggaugggaacacaa

SEQ ID NO: 2654784 - RNA, 19 nt, Homo sapiens
  misc_RNA (1)...(19): siRNA sense strand
cgguaucuggaauguguua

SEQ ID NO: 2654785 - RNA, 19 nt, Homo sapiens
  misc_RNA (1)...(19): siRNA sense strand
gcagaaaauguggagguaa

SEQ ID NO: 2654786 - RNA, 19 nt, Homo sapiens
  misc_RNA (1)...(19): siRNA sense strand
ugacgaagggaacaggcua

SEQ ID NO: 2654787 - RNA, 19 nt, Homo sapiens
  misc_RNA (1)...(19): siRNA sense strand
acacagaggaauaccgcca

SEQ ID NO: 2654788 - RNA, 19 nt, Homo sapiens
  misc_RNA (1)...(19): siRNA sense strand
cagaagggcacccgaggaa

SEQ ID NO: 2654789 - RNA, 19 nt, Homo sapiens
  misc_RNA (1)...(19): siRNA sense strand
cggaagugcagcugccuca

SEQ ID NO: 2654790 - RNA, 19 nt, Homo sapiens
  misc_RNA (1)...(19): siRNA sense strand
gagaacaaguccagugaua

SEQ ID NO: 2654791 - RNA, 19 nt, Homo sapiens
  misc_RNA (1)...(19): siRNA sense strand
agaaagagauggagggugu

SEQ ID NO: 2654792 - RNA, 19 nt, Homo sapiens
  misc_RNA (1)...(19): siRNA sense strand
ccugaaacccgaaggacaa

SEQ ID NO: 2654793 - RNA, 19 nt, Homo sapiens
  misc_RNA (1)...(19): siRNA sense strand
ggcgagaacuggaggccaa

SEQ ID NO: 2654794 - RNA, 19 nt, Homo sapiens
  misc_RNA (1)...(19): siRNA sense strand
gaagugagauggaagagaa

SEQ ID NO: 2654795 - RNA, 19 nt, Homo sapiens
  misc_RNA (1)...(19): siRNA sense strand
gggcaagaauaucaaguuu

SEQ ID NO: 2654796 - RNA, 19 nt, Homo sapiens
  misc_RNA (1)...(19): siRNA sense strand
aagaagaagaagaggcaca

SEQ ID NO: 2654797 - RNA, 19 nt, Homo sapiens
  misc_RNA (1)...(19): siRNA sense strand
agucaaaacucuucagcaa

SEQ ID NO: 2654798 - RNA, 19 nt, Homo sapiens
  misc_RNA (1)...(19): siRNA sense strand
ccauggaaauugugacuca

SEQ ID NO: 2654799 - RNA, 19 nt, Homo sapiens
  misc_RNA (1)...(19): siRNA sense strand
gcaaaggcuuggagcgacu

SEQ ID NO: 2654800 - RNA, 19 nt, Homo sapiens
  misc_RNA (1)...(19): siRNA sense strand
ggaagagagaagacgccaa

SEQ ID NO: 2654801 - RNA, 19 nt, Homo sapiens
  misc_RNA (1)...(19): siRNA sense strand
cugcaaacgggauagcaaa

SEQ ID NO: 2654802 - RNA, 19 nt, Homo sapiens
  misc_RNA (1)...(19): siRNA sense strand
gaagagagcagcagggaag

SEQ ID NO: 2654803 - RNA, 19 nt, Homo sapiens
  misc_RNA (1)...(19): siRNA sense strand
cgaagagagcagcagggaa

SEQ ID NO: 2654804 - RNA, 19 nt, Homo sapiens
  misc_RNA (1)...(19): siRNA sense strand
aggagguggacgagagaca

SEQ ID NO: 2654805 - RNA, 19 nt, Homo sapiens
  misc_RNA (1)...(19): siRNA sense strand
agaagaagaagaagaggca

SEQ ID NO: 2654806 - RNA, 19 nt, Homo sapiens
  misc_RNA (1)...(19): siRNA sense strand
gccaagugcaagcggcaaa

SEQ ID NO: 2654807 - RNA, 19 nt, Homo sapiens
  misc_RNA (1)...(19): siRNA sense strand
ggacaacauccugggcaaa

SEQ ID NO: 2654808 - RNA, 19 nt, Homo sapiens
  misc_RNA (1)...(19): siRNA sense strand
ccgaggaaaggaagggaca

SEQ ID NO: 2654809 - RNA, 19 nt, Homo sapiens
  misc_RNA (1)...(19): siRNA sense strand
aggaggaggaggaggcuga

SEQ ID NO: 2654810 - RNA, 19 nt, Homo sapiens
  misc_RNA (1)...(19): siRNA sense strand
ggagagaaagcaagccaga

SEQ ID NO: 2654811 - RNA, 19 nt, Homo sapiens
  misc_RNA (1)...(19): siRNA sense strand
agaagagggacgaggagga

SEQ ID NO: 2654812 - RNA, 19 nt, Homo sapiens
  misc_RNA (1)...(19): siRNA sense strand
acgacaaggcagcaaacaa

SEQ ID NO: 2654813 - RNA, 19 nt, Homo sapiens
  misc_RNA (1)...(19): siRNA sense strand
gccugaaacccgaaggaca

SEQ ID NO: 2654814 - RNA, 19 nt, Homo sapiens
  misc_RNA (1)...(19): siRNA sense strand
cgaggaaaagagagaagaa

SEQ ID NO: 2654815 - RNA, 19 nt, Homo sapiens
  misc_RNA (1)...(19): siRNA sense strand
ggaagggacagaagaggga

SEQ ID NO: 2654816 - RNA, 19 nt, Homo sapiens
  misc_RNA (1)...(19): siRNA sense strand
gagaggaggcuuugggaag

SEQ ID NO: 2654817 - RNA, 19 nt, Homo sapiens
  misc_RNA (1)...(19): siRNA sense strand
agagggacgaggaggaaga

SEQ ID NO: 2654818 - RNA, 19 nt, Homo sapiens
  misc_RNA (1)...(19): siRNA sense strand
ggagaggaggcuuugggaa

SEQ ID NO: 2654819 - RNA, 19 nt, Homo sapiens
  misc_RNA (1)...(19): siRNA sense strand
ggaggaggaggaaggaaga

SEQ ID NO: 2654820 - RNA, 19 nt, Homo sapiens
  misc_RNA (1)...(19): siRNA sense strand
aagaggaggaggagggcca

SEQ ID NO: 2654821 - RNA, 19 nt, Homo sapiens
  misc_RNA (1)...(19): siRNA sense strand
aggaggaggcugagggaug

SEQ ID NO: 2654822 - RNA, 19 nt, Homo sapiens
  misc_RNA (1)...(19): siRNA sense strand
aggagaggcucgaagacca

SEQ ID NO: 2654823 - RNA, 19 nt, Homo sapiens
  misc_RNA (1)...(19): siRNA sense strand
guuaaaccgucucggccaa

SEQ ID NO: 2654824 - RNA, 19 nt, Homo sapiens
  misc_RNA (1)...(19): siRNA sense strand
gagcagacaguucaagcaa

SEQ ID NO: 2654825 - RNA, 19 nt, Homo sapiens
  misc_RNA (1)...(19): siRNA sense strand
cgcagaaagugguggccca

SEQ ID NO: 2654826 - RNA, 19 nt, Homo sapiens
  misc_RNA (1)...(19): siRNA sense strand
ggagaagaagcacgcggaa

SEQ ID NO: 2654827 - RNA, 19 nt, Homo sapiens
  misc_RNA (1)...(19): siRNA sense strand
guggagagaaagagaugga

SEQ ID NO: 2654828 - RNA, 19 nt, Homo sapiens
  misc_RNA (1)...(19): siRNA sense strand
cauccugggcaaagucaaa

SEQ ID NO: 2654829 - RNA, 19 nt, Homo sapiens
  misc_RNA (1)...(19): siRNA sense strand
guauuugcgaggagcagaa

SEQ ID NO: 2654830 - RNA, 19 nt, Homo sapiens
  misc_RNA (1)...(19): siRNA sense strand
ccugaagaacgcagagagu

SEQ ID NO: 2654831 - RNA, 19 nt, Homo sapiens
  misc_RNA (1)...(19): siRNA sense strand
aagaagaggcacagcagca

SEQ ID NO: 2654832 - RNA, 19 nt, Homo sapiens
  misc_RNA (1)...(19): siRNA sense strand
ggauccacaacaugagcaa

SEQ ID NO: 2654833 - RNA, 19 nt, Homo sapiens
  misc_RNA (1)...(19): siRNA sense strand
gaugggaagagcuggaaca

SEQ ID NO: 2654834 - RNA, 19 nt, Homo sapiens
  misc_RNA (1)...(19): siRNA sense strand
uuacagagaaaguggaaac

SEQ ID NO: 2654835 - RNA, 19 nt, Homo sapiens
  misc_RNA (1)...(19): siRNA sense strand
gcgggaggagagaaagcaa

SEQ ID NO: 2654836 - RNA, 19 nt, Homo sapiens
  misc_RNA (1)...(19): siRNA sense strand
ggcaaacaguggagaggcu

SEQ ID NO: 2654837 - RNA, 19 nt, Homo sapiens
  misc_RNA (1)...(19): siRNA sense strand
ggaggaaagagaagccgau

SEQ ID NO: 2654838 - RNA, 19 nt, Homo sapiens
  misc_RNA (1)...(19): siRNA sense strand
ugaccagucccauggaaau

SEQ ID NO: 2654839 - RNA, 19 nt, Homo sapiens
  misc_RNA (1)...(19): siRNA sense strand
aggaggaagaggcgacaga

SEQ ID NO: 2654840 - RNA, 19 nt, Homo sapiens
  misc_RNA (1)...(19): siRNA sense strand
gcaagucccuccugggcuu

SEQ ID NO: 2654841 - RNA, 19 nt, Homo sapiens
  misc_RNA (1)...(19): siRNA sense strand
ugggcuuggaggagaagaa

SEQ ID NO: 2654842 - RNA, 19 nt, Homo sapiens
  misc_RNA (1)...(19): siRNA sense strand
gcuuagaagaggaucuguu

SEQ ID NO: 2654843 - RNA, 19 nt, Homo sapiens
  misc_RNA (1)...(19): siRNA sense strand
ucuuggaggaggagggcga

SEQ ID NO: 2654844 - RNA, 19 nt, Homo sapiens
  misc_RNA (1)...(19): siRNA sense strand
ucaaaaggcaggaggagga

SEQ ID NO: 2654845 - RNA, 19 nt, Homo sapiens
  misc_RNA (1)...(19): siRNA sense strand
acugcaaacgggauagcaa

SEQ ID NO: 2654846 - RNA, 19 nt, Homo sapiens
  misc_RNA (1)...(19): siRNA sense strand
gcagacaguucaagcaaug

SEQ ID NO: 2654847 - RNA, 19 nt, Homo sapiens
  misc_RNA (1)...(19): siRNA sense strand
aggccaaacaggcagaaaa

SEQ ID NO: 2654848 - RNA, 19 nt, Homo sapiens
  misc_RNA (1)...(19): siRNA sense strand
cugaccagucccauggaaa

SEQ ID NO: 2654849 - RNA, 19 nt, Homo sapiens
  misc_RNA (1)...(19): siRNA sense strand
cuggaagugagauggaaga

SEQ ID NO: 2654850 - RNA, 19 nt, Homo sapiens
  misc_RNA (1)...(19): siRNA sense strand
aagaggcgacagagaggaa

SEQ ID NO: 2654851 - RNA, 19 nt, Homo sapiens
  misc_RNA (1)...(19): siRNA sense strand
ccaacuauuccuugcgcuu

SEQ ID NO: 2654852 - RNA, 19 nt, Homo sapiens
  misc_RNA (1)...(19): siRNA sense strand
gaagagacgccuagaggag

SEQ ID NO: 2654853 - RNA, 19 nt, Homo sapiens
  misc_RNA (1)...(19): siRNA sense strand
gcaguugggcugagagaga

SEQ ID NO: 2654854 - RNA, 19 nt, Homo sapiens
  misc_RNA (1)...(19): siRNA sense strand
cggaggaagaugaggacga

SEQ ID NO: 2654855 - RNA, 19 nt, Homo sapiens
  misc_RNA (1)...(19): siRNA sense strand
ggagaaaagucuucgccaa

SEQ ID NO: 2654856 - RNA, 19 nt, Homo sapiens
  misc_RNA (1)...(19): siRNA sense strand
agagagaagaggagaagca

SEQ ID NO: 2654857 - RNA, 19 nt, Homo sapiens
  misc_RNA (1)...(19): siRNA sense strand
agguguugcugcugggaau

SEQ ID NO: 2654858 - RNA, 19 nt, Homo sapiens
  misc_RNA (1)...(19): siRNA sense strand
aggcagcaccagagaaaga

SEQ ID NO: 2654859 - RNA, 19 nt, Homo sapiens
  misc_RNA (1)...(19): siRNA sense strand
uggaggaggaaguggucaa

SEQ ID NO: 2654860 - RNA, 19 nt, Homo sapiens
  misc_RNA (1)...(19): siRNA sense strand
ccauugaccugaaggcuga

SEQ ID NO: 2654861 - RNA, 19 nt, Homo sapiens
  misc_RNA (1)...(19): siRNA sense strand
agagggagaugcaaggcaa

SEQ ID NO: 2654862 - RNA, 19 nt, Homo sapiens
  misc_RNA (1)...(19): siRNA sense strand
aggagagacccucggcaaa

SEQ ID NO: 2654863 - RNA, 19 nt, Homo sapiens
  misc_RNA (1)...(19): siRNA sense strand
ggacgaggauggacgagga

SEQ ID NO: 2654864 - RNA, 19 nt, Homo sapiens
  misc_RNA (1)...(19): siRNA sense strand
ccggagaauuuauagacau

SEQ ID NO: 2654865 - RNA, 19 nt, Homo sapiens
  misc_RNA (1)...(19): siRNA sense strand
ugagggagcugaagacaga

SEQ ID NO: 2654866 - RNA, 19 nt, Homo sapiens
  misc_RNA (1)...(19): siRNA sense strand
guuugugggugcuggucaa

SEQ ID NO: 2654867 - RNA, 19 nt, Homo sapiens
  misc_RNA (1)...(19): siRNA sense strand
gcgagguggaggaggaagu

SEQ ID NO: 2654868 - RNA, 19 nt, Homo sapiens
  misc_RNA (1)...(19): siRNA sense strand
gggaagaagaggagguacc

SEQ ID NO: 2654869 - RNA, 19 nt, Homo sapiens
  misc_RNA (1)...(19): siRNA sense strand
ucaccaaccugaaggcuca

SEQ ID NO: 2654870 - RNA, 19 nt, Homo sapiens
  misc_RNA (1)...(19): siRNA sense strand
uggagcucguacugagaaa

SEQ ID NO: 2654871 - RNA, 19 nt, Homo sapiens
  misc_RNA (1)...(19): siRNA sense strand
aaacaggugucuugaucuu

SEQ ID NO: 2654872 - RNA, 19 nt, Homo sapiens
  misc_RNA (1)...(19): siRNA sense strand
augaaggaacugaagaaaa

SEQ ID NO: 2654873 - RNA, 19 nt, Homo sapiens
  misc_RNA (1)...(19): siRNA sense strand
ugacggagguagagagcug

SEQ ID NO: 2654874 - RNA, 19 nt, Homo sapiens
  misc_RNA (1)...(19): siRNA sense strand
gcucguggauccagcgcuu

SEQ ID NO: 2654875 - RNA, 19 nt, Homo sapiens
  misc_RNA (1)...(19): siRNA sense strand
cggagaauuuauagacaug

SEQ ID NO: 2654876 - RNA, 19 nt, Homo sapiens
  misc_RNA (1)...(19): siRNA sense strand
aauacaaggagcuggacau

SEQ ID NO: 2654877 - RNA, 19 nt, Homo sapiens
  misc_RNA (1)...(19): siRNA sense strand
gagcguugccagagccaca

SEQ ID NO: 2654878 - RNA, 19 nt, Homo sapiens
  misc_RNA (1)...(19): siRNA sense strand
agucagugccugcguauuu

SEQ ID NO: 2654879 - RNA, 19 nt, Homo sapiens
  misc_RNA (1)...(19): siRNA sense strand
gaggagaagcagaagcacu

SEQ ID NO: 2654880 - RNA, 19 nt, Homo sapiens
  misc_RNA (1)...(19): siRNA sense strand
agagaagaggagaagcaga

SEQ ID NO: 2654881 - RNA, 19 nt, Homo sapiens
  misc_RNA (1)...(19): siRNA sense strand
gcaaacaccguaaccacua

SEQ ID NO: 2654882 - RNA, 19 nt, Homo sapiens
  misc_RNA (1)...(19): siRNA sense strand
cguaaccacuaaagccaau

SEQ ID NO: 2654883 - RNA, 19 nt, Homo sapiens
  misc_RNA (1)...(19): siRNA sense strand
gcaucagaauucagacgca

SEQ ID NO: 2654884 - RNA, 19 nt, Homo sapiens
  misc_RNA (1)...(19): siRNA sense strand
cugagaaaaugaaggaacu

SEQ ID NO: 2654885 - RNA, 19 nt, Homo sapiens
  misc_RNA (1)...(19): siRNA sense strand
ccgggaaguuugagccugu

SEQ ID NO: 2654886 - RNA, 19 nt, Homo sapiens
  misc_RNA (1)...(19): siRNA sense strand
cgaaguugguagaagagcu

SEQ ID NO: 2654887 - RNA, 19 nt, Homo sapiens
  misc_RNA (1)...(19): siRNA sense strand
cgacuaaauccugagaaaa

SEQ ID NO: 2654888 - RNA, 19 nt, Homo sapiens
  misc_RNA (1)...(19): siRNA sense strand
ggacaucgagccugaggga

SEQ ID NO: 2654889 - RNA, 19 nt, Homo sapiens
  misc_RNA (1)...(19): siRNA sense strand
augaggacgaugaggacuu

SEQ ID NO: 2654890 - RNA, 19 nt, Homo sapiens
  misc_RNA (1)...(19): siRNA sense strand
cagaugaggacgaggacag

SEQ ID NO: 2654891 - RNA, 19 nt, Homo sapiens
  misc_RNA (1)...(19): siRNA sense strand
gauauggaucagaaacuuu

SEQ ID NO: 2654892 - RNA, 19 nt, Homo sapiens
  misc_RNA (1)...(19): siRNA sense strand
aggcaguugggcugagaga

SEQ ID NO: 2654893 - RNA, 19 nt, Homo sapiens
  misc_RNA (1)...(19): siRNA sense strand
gggagggcgaugacugcaa

SEQ ID NO: 2654894 - RNA, 19 nt, Homo sapiens
  misc_RNA (1)...(19): siRNA sense strand
aguucaaggccacgcgcua

SEQ ID NO: 2654895 - RNA, 19 nt, Homo sapiens
  misc_RNA (1)...(19): siRNA sense strand
cggaaaaggaggaggacuu

SEQ ID NO: 2654896 - RNA, 19 nt, Homo sapiens
  misc_RNA (1)...(19): siRNA sense strand
aggaggaggacuugagcaa

SEQ ID NO: 2654897 - RNA, 19 nt, Homo sapiens
  misc_RNA (1)...(19): siRNA sense strand
gggcuaagguguuggcagu

SEQ ID NO: 2654898 - RNA, 19 nt, Homo sapiens
  misc_RNA (1)...(19): siRNA sense strand
ccaaagacccggaugcaga

SEQ ID NO: 2654899 - RNA, 19 nt, Homo sapiens
  misc_RNA (1)...(19): siRNA sense strand
gggaugaagcguugcccua

SEQ ID NO: 2654900 - RNA, 19 nt, Homo sapiens
  misc_RNA (1)...(19): siRNA sense strand
ggacgaagauguagggagc

SEQ ID NO: 2654901 - RNA, 19 nt, Homo sapiens
  misc_RNA (1)...(19): siRNA sense strand
acaacaaucucgaggccga

SEQ ID NO: 2654902 - RNA, 19 nt, Homo sapiens
  misc_RNA (1)...(19): siRNA sense strand
acacagagaagaugaggga

SEQ ID NO: 2654903 - RNA, 19 nt, Homo sapiens
  misc_RNA (1)...(19): siRNA sense strand
acagagaagaugagggaag

SEQ ID NO: 2654904 - RNA, 19 nt, Homo sapiens
  misc_RNA (1)...(19): siRNA sense strand
cgagugggcugcaaggaga

SEQ ID NO: 2654905 - RNA, 19 nt, Homo sapiens
  misc_RNA (1)...(19): siRNA sense strand
gaagagagacggaggacag

SEQ ID NO: 2654906 - RNA, 19 nt, Homo sapiens
  misc_RNA (1)...(19): siRNA sense strand
acgaagauguagggagcuu

SEQ ID NO: 2654907 - RNA, 19 nt, Homo sapiens
  misc_RNA (1)...(19): siRNA sense strand
ccgcagagaaaggaagauu

SEQ ID NO: 2654908 - RNA, 19 nt, Homo sapiens
  misc_RNA (1)...(19): siRNA sense strand
uguggaaggaauacagcaa

SEQ ID NO: 2654909 - RNA, 19 nt, Homo sapiens
  misc_RNA (1)...(19): siRNA sense strand
gagcagguuuggaguggca

SEQ ID NO: 2654910 - RNA, 19 nt, Homo sapiens
  misc_RNA (1)...(19): siRNA sense strand
acaccuacacagagaagau

SEQ ID NO: 2654911 - RNA, 19 nt, Homo sapiens
  misc_RNA (1)...(19): siRNA sense strand
cagcagugucugaggugga

SEQ ID NO: 2654912 - RNA, 19 nt, Homo sapiens
  misc_RNA (1)...(19): siRNA sense strand
cggcgaugaugaacagguu

SEQ ID NO: 2654913 - RNA, 19 nt, Homo sapiens
  misc_RNA (1)...(19): siRNA sense strand
ucgcuaacuggaagagaga

SEQ ID NO: 2654914 - RNA, 19 nt, Homo sapiens
  misc_RNA (1)...(19): siRNA sense strand
ccgaaaguggcucuacaaa

SEQ ID NO: 2654915 - RNA, 19 nt, Homo sapiens
  misc_RNA (1)...(19): siRNA sense strand
ccgacgaggagcugaacca

SEQ ID NO: 2654916 - RNA, 19 nt, Homo sapiens
  misc_RNA (1)...(19): siRNA sense strand
accgggagcuggagagcau

SEQ ID NO: 2654917 - RNA, 19 nt, Homo sapiens
  misc_RNA (1)...(19): siRNA sense strand
aggcauuugaccacgggaa

SEQ ID NO: 2654918 - RNA, 19 nt, Homo sapiens
  misc_RNA (1)...(19): siRNA sense strand
gggaguacuacgugcagca

SEQ ID NO: 2654919 - RNA, 19 nt, Homo sapiens
  misc_RNA (1)...(19): siRNA sense strand
aaggaauacagcaaaucaa

SEQ ID NO: 2654920 - RNA, 19 nt, Homo sapiens
  misc_RNA (1)...(19): siRNA sense strand
ucaaguucccugaggagau

SEQ ID NO: 2654921 - RNA, 19 nt, Homo sapiens
  misc_RNA (1)...(19): siRNA sense strand
cggacggaccucugaacuu

SEQ ID NO: 2654922 - RNA, 19 nt, Homo sapiens
  misc_RNA (1)...(19): siRNA sense strand
ccucagaagaugccuccaa

SEQ ID NO: 2654923 - RNA, 19 nt, Homo sapiens
  misc_RNA (1)...(19): siRNA sense strand
ggaagagagacggaggaca

SEQ ID NO: 2654924 - RNA, 19 nt, Homo sapiens
  misc_RNA (1)...(19): siRNA sense strand
cgucagucaccgcagagaa

SEQ ID NO: 2654925 - RNA, 19 nt, Homo sapiens
  misc_RNA (1)...(19): siRNA sense strand
uggagagggcccuggacuu

SEQ ID NO: 2654926 - RNA, 19 nt, Homo sapiens
  misc_RNA (1)...(19): siRNA sense strand
cgugggaagcuguggaaau

SEQ ID NO: 2654927 - RNA, 19 nt, Homo sapiens
  misc_RNA (1)...(19): siRNA sense strand
aggaaggacgccuggaauu

SEQ ID NO: 2654928 - RNA, 19 nt, Homo sapiens
  misc_RNA (1)...(19): siRNA sense strand
cuucauggaggauggcaaa

SEQ ID NO: 2654929 - RNA, 19 nt, Homo sapiens
  misc_RNA (1)...(19): siRNA sense strand
gcaccaaccuaaacagcca

SEQ ID NO: 2654930 - RNA, 19 nt, Homo sapiens
  misc_RNA (1)...(19): siRNA sense strand
ggaacaacuucgacuggga

SEQ ID NO: 2654931 - RNA, 19 nt, Homo sapiens
  misc_RNA (1)...(19): siRNA sense strand
caggaaaucuucacgcaca

SEQ ID NO: 2654932 - RNA, 19 nt, Homo sapiens
  misc_RNA (1)...(19): siRNA sense strand
cagugaaucuggaggcugu

SEQ ID NO: 2654933 - RNA, 19 nt, Homo sapiens
  misc_RNA (1)...(19): siRNA sense strand
gugagagacauguacgcaa

SEQ ID NO: 2654934 - RNA, 19 nt, Homo sapiens
  misc_RNA (1)...(19): siRNA sense strand
ccuucauggaggauggcaa

SEQ ID NO: 2654935 - RNA, 19 nt, Homo sapiens
  misc_RNA (1)...(19): siRNA sense strand
cuaugaaacauuugggauc

SEQ ID NO: 2654936 - RNA, 19 nt, Homo sapiens
  misc_RNA (1)...(19): siRNA sense strand
acucagacaacaacggcua

SEQ ID NO: 2654937 - RNA, 19 nt, Homo sapiens
  misc_RNA (1)...(19): siRNA sense strand
uggagauuguggcgggaca

SEQ ID NO: 2654938 - RNA, 19 nt, Homo sapiens
  misc_RNA (1)...(19): siRNA sense strand
cuguggaaauggagauugu

SEQ ID NO: 2654939 - RNA, 19 nt, Homo sapiens
  misc_RNA (1)...(19): siRNA sense strand
caguacuucuacaggaaca

SEQ ID NO: 2654940 - RNA, 19 nt, Homo sapiens
  misc_RNA (1)...(19): siRNA sense strand
cuaaacagccagcagguca

SEQ ID NO: 2654941 - RNA, 19 nt, Homo sapiens
  misc_RNA (1)...(19): siRNA sense strand
ucgcagauccagaacucaa

SEQ ID NO: 2654942 - RNA, 19 nt, Homo sapiens
  misc_RNA (1)...(19): siRNA sense strand
cgucaacggggaugugaaa

SEQ ID NO: 2654943 - RNA, 19 nt, Homo sapiens
  misc_RNA (1)...(19): siRNA sense strand
ccguggugcuguucggaga

SEQ ID NO: 2654944 - RNA, 19 nt, Homo sapiens
  misc_RNA (1)...(19): siRNA sense strand
agaaauaccagguccgcca

SEQ ID NO: 2654945 - RNA, 19 nt, Homo sapiens
  misc_RNA (1)...(19): siRNA sense strand
caauuuggccgcaggcuga

SEQ ID NO: 2654946 - RNA, 19 nt, Homo sapiens
  misc_RNA (1)...(19): siRNA sense strand
ucaucuacucagacaacaa

SEQ ID NO: 2654947 - RNA, 19 nt, Homo sapiens
  misc_RNA (1)...(19): siRNA sense strand
ucgacugggaccugggcua

SEQ ID NO: 2654948 - RNA, 19 nt, Homo sapiens
  misc_RNA (1)...(19): siRNA sense strand
gaaaggccaucgaggggaa

SEQ ID NO: 2654949 - RNA, 19 nt, Homo sapiens
  misc_RNA (1)...(19): siRNA sense strand
aggaaaucuucacgcacau

SEQ ID NO: 2654950 - RNA, 19 nt, Homo sapiens
  misc_RNA (1)...(19): siRNA sense strand
ccucagugguggaagagcu

SEQ ID NO: 2654951 - RNA, 19 nt, Homo sapiens
  misc_RNA (1)...(19): siRNA sense strand
ccguccacccaaaggaaau

SEQ ID NO: 2654952 - RNA, 19 nt, Homo sapiens
  misc_RNA (1)...(19): siRNA sense strand
cggcaguacuucuacagga

SEQ ID NO: 2654953 - RNA, 19 nt, Homo sapiens
  misc_RNA (1)...(19): siRNA sense strand
ggaaugggcagguggaggu

SEQ ID NO: 2654954 - RNA, 19 nt, Homo sapiens
  misc_RNA (1)...(19): siRNA sense strand
gagaaaacccagagcaaaa

SEQ ID NO: 2654955 - RNA, 19 nt, Homo sapiens
  misc_RNA (1)...(19): siRNA sense strand
acacaaggcacgagagauu

SEQ ID NO: 2654956 - RNA, 19 nt, Homo sapiens
  misc_RNA (1)...(19): siRNA sense strand
caucagaggcaguggaaga

SEQ ID NO: 2654957 - RNA, 19 nt, Homo sapiens
  misc_RNA (1)...(19): siRNA sense strand
gggacaagagcucgagaaa

SEQ ID NO: 2654958 - RNA, 19 nt, Homo sapiens
  misc_RNA (1)...(19): siRNA sense strand
acacaaaugccaagggaga

SEQ ID NO: 2654959 - RNA, 19 nt, Homo sapiens
  misc_RNA (1)...(19): siRNA sense strand
gcauaguguuagaugguau

SEQ ID NO: 2654960 - RNA, 19 nt, Homo sapiens
  misc_RNA (1)...(19): siRNA sense strand
aagaagaugcagagaaaga

SEQ ID NO: 2654961 - RNA, 19 nt, Homo sapiens
  misc_RNA (1)...(19): siRNA sense strand
gugaaaaggcugaaaggaa

SEQ ID NO: 2654962 - RNA, 19 nt, Homo sapiens
  misc_RNA (1)...(19): siRNA sense strand
cugagaaagaugaagcaaa

SEQ ID NO: 2654963 - RNA, 19 nt, Homo sapiens
  misc_RNA (1)...(19): siRNA sense strand
gagcaaagucagauggcuu

SEQ ID NO: 2654964 - RNA, 19 nt, Homo sapiens
  misc_RNA (1)...(19): siRNA sense strand
agaaagagagccuggagaa

SEQ ID NO: 2654965 - RNA, 19 nt, Homo sapiens
  misc_RNA (1)...(19): siRNA sense strand
aggaaugaauagaagucaa

SEQ ID NO: 2654966 - RNA, 19 nt, Homo sapiens
  misc_RNA (1)...(19): siRNA sense strand
caaagauggcagacacaaa

SEQ ID NO: 2654967 - RNA, 19 nt, Homo sapiens
  misc_RNA (1)...(19): siRNA sense strand
caaaggaucaaguggaaau

SEQ ID NO: 2654968 - RNA, 19 nt, Homo sapiens
  misc_RNA (1)...(19): siRNA sense strand
gugaagaauguuacacaaa

SEQ ID NO: 2654969 - RNA, 19 nt, Homo sapiens
  misc_RNA (1)...(19): siRNA sense strand
acgagagauucgaaacaaa

SEQ ID NO: 2654970 - RNA, 19 nt, Homo sapiens
  misc_RNA (1)...(19): siRNA sense strand
guuuaaugccgaagauauu

SEQ ID NO: 2654971 - RNA, 19 nt, Homo sapiens
  misc_RNA (1)...(19): siRNA sense strand
gggaaaauggguuaaauaa

SEQ ID NO: 2654972 - RNA, 19 nt, Homo sapiens
  misc_RNA (1)...(19): siRNA sense strand
agaaauggggaaagaguaa

SEQ ID NO: 2654973 - RNA, 19 nt, Homo sapiens
  misc_RNA (1)...(19): siRNA sense strand
uagaaaggacacagaguau

SEQ ID NO: 2654974 - RNA, 19 nt, Homo sapiens
  misc_RNA (1)...(19): siRNA sense strand
uaaugaaggaucugguaua

SEQ ID NO: 2654975 - RNA, 19 nt, Homo sapiens
  misc_RNA (1)...(19): siRNA sense strand
gggauguagcccaagauaa

SEQ ID NO: 2654976 - RNA, 19 nt, Homo sapiens
  misc_RNA (1)...(19): siRNA sense strand
uggaggaguuuauggagaa

SEQ ID NO: 2654977 - RNA, 19 nt, Homo sapiens
  misc_RNA (1)...(19): siRNA sense strand
gcacaaugcgaggaagaaa

SEQ ID NO: 2654978 - RNA, 19 nt, Homo sapiens
  misc_RNA (1)...(19): siRNA sense strand
aagaauauccagaugcuaa

SEQ ID NO: 2654979 - RNA, 19 nt, Homo sapiens
  misc_RNA (1)...(19): siRNA sense strand
acauaaaccugaaggaaag

SEQ ID NO: 2654980 - RNA, 19 nt, Homo sapiens
  misc_RNA (1)...(19): siRNA sense strand
aaauagugccuuugaagaa

SEQ ID NO: 2654981 - RNA, 19 nt, Homo sapiens
  misc_RNA (1)...(19): siRNA sense strand
gaaacaaugcaaggagaaa

SEQ ID NO: 2654982 - RNA, 19 nt, Homo sapiens
  misc_RNA (1)...(19): siRNA sense strand
caguagaaauagaaagaac

SEQ ID NO: 2654983 - RNA, 19 nt, Homo sapiens
  misc_RNA (1)...(19): siRNA sense strand
gcuuauaagaaauggggaa

SEQ ID NO: 2654984 - RNA, 19 nt, Homo sapiens
  misc_RNA (1)...(19): siRNA sense strand
ggaggaagcgagucagaau

SEQ ID NO: 2654985 - RNA, 19 nt, Homo sapiens
  misc_RNA (1)...(19): siRNA sense strand
cgucaaauuauguagauga

SEQ ID NO: 2654986 - RNA, 19 nt, Homo sapiens
  misc_RNA (1)...(19): siRNA sense strand
cagcaaaacaguagaacuu

SEQ ID NO: 2654987 - RNA, 19 nt, Homo sapiens
  misc_RNA (1)...(19): siRNA sense strand
agaguaagcaagaagagaa

SEQ ID NO: 2654988 - RNA, 19 nt, Homo sapiens
  misc_RNA (1)...(19): siRNA sense strand
agaaacaaugcaaggagaa

SEQ ID NO: 2654989 - RNA, 19 nt, Homo sapiens
  misc_RNA (1)...(19): siRNA sense strand
auuugaaccugaagggauu

SEQ ID NO: 2654990 - RNA, 19 nt, Homo sapiens
  misc_RNA (1)...(19): siRNA sense strand
ggaaaagagugcucagaca

SEQ ID NO: 2654991 - RNA, 19 nt, Homo sapiens
  misc_RNA (1)...(19): siRNA sense strand
ggggaaaauggguuaaaua

SEQ ID NO: 2654992 - RNA, 19 nt, Homo sapiens
  misc_RNA (1)...(19): siRNA sense strand
ugaaugaaucccuggaaau

SEQ ID NO: 2654993 - RNA, 19 nt, Homo sapiens
  misc_RNA (1)...(19): siRNA sense strand
ugaaguggauauugaucaa

SEQ ID NO: 2654994 - RNA, 19 nt, Homo sapiens
  misc_RNA (1)...(19): siRNA sense strand
cagaaacaaugcaaggaga

SEQ ID NO: 2654995 - RNA, 19 nt, Homo sapiens
  misc_RNA (1)...(19): siRNA sense strand
cguggaugguggugauuau

SEQ ID NO: 2654996 - RNA, 19 nt, Homo sapiens
  misc_RNA (1)...(19): siRNA sense strand
ugggaaucagggagaauua

SEQ ID NO: 2654997 - RNA, 19 nt, Homo sapiens
  misc_RNA (1)...(19): siRNA sense strand
acaauaaauaccuggauga

SEQ ID NO: 2654998 - RNA, 19 nt, Homo sapiens
  misc_RNA (1)...(19): siRNA sense strand
agcaaaggaucaaguggaa

SEQ ID NO: 2654999 - RNA, 19 nt, Homo sapiens
  misc_RNA (1)...(19): siRNA sense strand
cgacauaaaccugaaggaa

SEQ ID NO: 2655000 - RNA, 19 nt, Homo sapiens
  misc_RNA (1)...(19): siRNA sense strand
ggacaaagauggcagacac

SEQ ID NO: 2655001 - RNA, 19 nt, Homo sapiens
  misc_RNA (1)...(19): siRNA sense strand
agaacacaauacagggcua

SEQ ID NO: 2655002 - RNA, 19 nt, Homo sapiens
  misc_RNA (1)...(19): siRNA sense strand
uggaagaagaugcagagaa

SEQ ID NO: 2655003 - RNA, 19 nt, Homo sapiens
  misc_RNA (1)...(19): siRNA sense strand
caaauuuaguaauggcaca

SEQ ID NO: 2655004 - RNA, 19 nt, Homo sapiens
  misc_RNA (1)...(19): siRNA sense strand
ccacauaccgaaacagaca

SEQ ID NO: 2655005 - RNA, 19 nt, Homo sapiens
  misc_RNA (1)...(19): siRNA sense strand
uagaaagcucagaagcaaa

SEQ ID NO: 2655006 - RNA, 19 nt, Homo sapiens
  misc_RNA (1)...(19): siRNA sense strand
aaagcaaauccgacauaaa

SEQ ID NO: 2655007 - RNA, 19 nt, Homo sapiens
  misc_RNA (1)...(19): siRNA sense strand
cgugcaauauggacagauu

SEQ ID NO: 2655008 - RNA, 19 nt, Homo sapiens
  misc_RNA (1)...(19): siRNA sense strand
gagagagauucuggagcaa

SEQ ID NO: 2655009 - RNA, 19 nt, Homo sapiens
  misc_RNA (1)...(19): siRNA sense strand
aauacagauucuagugcua

SEQ ID NO: 2655010 - RNA, 19 nt, Homo sapiens
  misc_RNA (1)...(19): siRNA sense strand
gcacgagagauucgaaaca

SEQ ID NO: 2655011 - RNA, 19 nt, Homo sapiens
  misc_RNA (1)...(19): siRNA sense strand
guggaagaauugucugaau

SEQ ID NO: 2655012 - RNA, 19 nt, Homo sapiens
  misc_RNA (1)...(19): siRNA sense strand
gcuaauaugcuugggaaaa

SEQ ID NO: 2655013 - RNA, 19 nt, Homo sapiens
  misc_RNA (1)...(19): siRNA sense strand
cgucugugguauucagcua

SEQ ID NO: 2655014 - RNA, 19 nt, Homo sapiens
  misc_RNA (1)...(19): siRNA sense strand
augaaugaaucccuggaaa

SEQ ID NO: 2655015 - RNA, 19 nt, Homo sapiens
  misc_RNA (1)...(19): siRNA sense strand
agagagagauucuggagca

SEQ ID NO: 2655016 - RNA, 19 nt, Homo sapiens
  misc_RNA (1)...(19): siRNA sense strand
agaauguugcauaguguua

SEQ ID NO: 2655017 - RNA, 19 nt, Homo sapiens
  misc_RNA (1)...(19): siRNA sense strand
agaaagaaggccauuacua

SEQ ID NO: 2655018 - RNA, 19 nt, Homo sapiens
  misc_RNA (1)...(19): siRNA sense strand
gggaaggacaagaaggaga

SEQ ID NO: 2655019 - RNA, 19 nt, Homo sapiens
  misc_RNA (1)...(19): siRNA sense strand
gggaagaaguacugcgugu

SEQ ID NO: 2655020 - RNA, 19 nt, Homo sapiens
  misc_RNA (1)...(19): siRNA sense strand
acaagaaggagaaggaaaa

SEQ ID NO: 2655021 - RNA, 19 nt, Homo sapiens
  misc_RNA (1)...(19): siRNA sense strand
cgggagaagaggaaggaga

SEQ ID NO: 2655022 - RNA, 19 nt, Homo sapiens
  misc_RNA (1)...(19): siRNA sense strand
ggggaaaggaggacggcaa

SEQ ID NO: 2655023 - RNA, 19 nt, Homo sapiens
  misc_RNA (1)...(19): siRNA sense strand
gcauguacauccacgggaa

SEQ ID NO: 2655024 - RNA, 19 nt, Homo sapiens
  misc_RNA (1)...(19): siRNA sense strand
acguggagaucgagcugaa

SEQ ID NO: 2655025 - RNA, 19 nt, Homo sapiens
  misc_RNA (1)...(19): siRNA sense strand
aggacaagaaggagaagga

SEQ ID NO: 2655026 - RNA, 19 nt, Homo sapiens
  misc_RNA (1)...(19): siRNA sense strand
cccaagaggugauggagca

SEQ ID NO: 2655027 - RNA, 19 nt, Homo sapiens
  misc_RNA (1)...(19): siRNA sense strand
ggaagcugaaagagagaca

SEQ ID NO: 2655028 - RNA, 19 nt, Homo sapiens
  misc_RNA (1)...(19): siRNA sense strand
ggaagaacaucgcccguga

SEQ ID NO: 2655029 - RNA, 19 nt, Homo sapiens
  misc_RNA (1)...(19): siRNA sense strand
gcggaagcugaaagagaga

SEQ ID NO: 2655030 - RNA, 19 nt, Homo sapiens
  misc_RNA (1)...(19): siRNA sense strand
auaaacgggagaagaggaa

SEQ ID NO: 2655031 - RNA, 19 nt, Homo sapiens
  misc_RNA (1)...(19): siRNA sense strand
gggaugauuacgagaucga

SEQ ID NO: 2655032 - RNA, 19 nt, Homo sapiens
  misc_RNA (1)...(19): siRNA sense strand
gcaaggaguuugaugaccu

SEQ ID NO: 2655033 - RNA, 19 nt, Homo sapiens
  misc_RNA (1)...(19): siRNA sense strand
acgacgacguggagaucga

SEQ ID NO: 2655034 - RNA, 19 nt, Homo sapiens
  misc_RNA (1)...(19): siRNA sense strand
uccgagaacugcagcggua

SEQ ID NO: 2655035 - RNA, 19 nt, Homo sapiens
  misc_RNA (1)...(19): siRNA sense strand
gagaaggagcugcgccuga

SEQ ID NO: 2655036 - RNA, 19 nt, Homo sapiens
  misc_RNA (1)...(19): siRNA sense strand
ucggaaacugggaagauau

SEQ ID NO: 2655037 - RNA, 19 nt, Homo sapiens
  misc_RNA (1)...(19): siRNA sense strand
uggacauguacgugcggaa

SEQ ID NO: 2655038 - RNA, 19 nt, Homo sapiens
  misc_RNA (1)...(19): siRNA sense strand
gcaagaucaccaaggagga

SEQ ID NO: 2655039 - RNA, 19 nt, Homo sapiens
  misc_RNA (1)...(19): siRNA sense strand
cuccagaagcggcaaggaa

SEQ ID NO: 2655040 - RNA, 19 nt, Homo sapiens
  misc_RNA (1)...(19): siRNA sense strand
gggaagauauggcugccca

SEQ ID NO: 2655041 - RNA, 19 nt, Homo sapiens
  misc_RNA (1)...(19): siRNA sense strand
ccaaggaggagaaggagcu

SEQ ID NO: 2655042 - RNA, 19 nt, Homo sapiens
  misc_RNA (1)...(19): siRNA sense strand
aaacaagagaagagggaga

SEQ ID NO: 2655043 - RNA, 19 nt, Homo sapiens
  misc_RNA (1)...(19): siRNA sense strand
ggaugaagacggaggcaga

SEQ ID NO: 2655044 - RNA, 19 nt, Homo sapiens
  misc_RNA (1)...(19): siRNA sense strand
gaguacaaagaaagggaua

SEQ ID NO: 2655045 - RNA, 19 nt, Homo sapiens
  misc_RNA (1)...(19): siRNA sense strand
cagaauuggcaaaggaaga

SEQ ID NO: 2655046 - RNA, 19 nt, Homo sapiens
  misc_RNA (1)...(19): siRNA sense strand
gagaaauccgcaaggacaa

SEQ ID NO: 2655047 - RNA, 19 nt, Homo sapiens
  misc_RNA (1)...(19): siRNA sense strand
agauaaacgcuucggagaa

SEQ ID NO: 2655048 - RNA, 19 nt, Homo sapiens
  misc_RNA (1)...(19): siRNA sense strand
caggaaaggaagaggcuga

SEQ ID NO: 2655049 - RNA, 19 nt, Homo sapiens
  misc_RNA (1)...(19): siRNA sense strand
ccagugacccugagagcaa

SEQ ID NO: 2655050 - RNA, 19 nt, Homo sapiens
  misc_RNA (1)...(19): siRNA sense strand
gcaacgaggaagaagguga

SEQ ID NO: 2655051 - RNA, 19 nt, Homo sapiens
  misc_RNA (1)...(19): siRNA sense strand
gcaaaagagcagaggcaga

SEQ ID NO: 2655052 - RNA, 19 nt, Homo sapiens
  misc_RNA (1)...(19): siRNA sense strand
ggagaauacaacagcaaca

SEQ ID NO: 2655053 - RNA, 19 nt, Homo sapiens
  misc_RNA (1)...(19): siRNA sense strand
uuggaaaggaugaggauga

SEQ ID NO: 2655054 - RNA, 19 nt, Homo sapiens
  misc_RNA (1)...(19): siRNA sense strand
aagagaagagggagagaca

SEQ ID NO: 2655055 - RNA, 19 nt, Homo sapiens
  misc_RNA (1)...(19): siRNA sense strand
cgagaaauccgcaaggaca

SEQ ID NO: 2655056 - RNA, 19 nt, Homo sapiens
  misc_RNA (1)...(19): siRNA sense strand
uggcagacaucgagaagca

SEQ ID NO: 2655057 - RNA, 19 nt, Homo sapiens
  misc_RNA (1)...(19): siRNA sense strand
uggcaaaggaagagcagga

SEQ ID NO: 2655058 - RNA, 19 nt, Homo sapiens
  misc_RNA (1)...(19): siRNA sense strand
aggaggaacaggaaaggaa

SEQ ID NO: 2655059 - RNA, 19 nt, Homo sapiens
  misc_RNA (1)...(19): siRNA sense strand
cagaaggaaacaaagcaaa

SEQ ID NO: 2655060 - RNA, 19 nt, Homo sapiens
  misc_RNA (1)...(19): siRNA sense strand
acaaagauggaaagaugaa

SEQ ID NO: 2655061 - RNA, 19 nt, Homo sapiens
  misc_RNA (1)...(19): siRNA sense strand
gagauaaacgcuucggaga

SEQ ID NO: 2655062 - RNA, 19 nt, Homo sapiens
  misc_RNA (1)...(19): siRNA sense strand
uugauaagcggcaaggaaa

SEQ ID NO: 2655063 - RNA, 19 nt, Homo sapiens
  misc_RNA (1)...(19): siRNA sense strand
caaggaaagagcuggaaaa

SEQ ID NO: 2655064 - RNA, 19 nt, Homo sapiens
  misc_RNA (1)...(19): siRNA sense strand
guugauaagcggcaaggaa

SEQ ID NO: 2655065 - RNA, 19 nt, Homo sapiens
  misc_RNA (1)...(19): siRNA sense strand
gguuuauaccugagcuuau

SEQ ID NO: 2655066 - RNA, 19 nt, Homo sapiens
  misc_RNA (1)...(19): siRNA sense strand
gagaagagggagagacaag

SEQ ID NO: 2655067 - RNA, 19 nt, Homo sapiens
  misc_RNA (1)...(19): siRNA sense strand
gcuuugucccagagguuua

SEQ ID NO: 2655068 - RNA, 19 nt, Homo sapiens
  misc_RNA (1)...(19): siRNA sense strand
caacguggagagugaggaa

SEQ ID NO: 2655069 - RNA, 19 nt, Homo sapiens
  misc_RNA (1)...(19): siRNA sense strand
gucagagaacagagacaaa

SEQ ID NO: 2655070 - RNA, 19 nt, Homo sapiens
  misc_RNA (1)...(19): siRNA sense strand
agaaggaaacaaagcaaaa

SEQ ID NO: 2655071 - RNA, 19 nt, Homo sapiens
  misc_RNA (1)...(19): siRNA sense strand
cagacaucgagaagcauaa

SEQ ID NO: 2655072 - RNA, 19 nt, Homo sapiens
  misc_RNA (1)...(19): siRNA sense strand
ccgaggagaagaugaugaa

SEQ ID NO: 2655073 - RNA, 19 nt, Homo sapiens
  misc_RNA (1)...(19): siRNA sense strand
uugaagagcucauugccaa

SEQ ID NO: 2655074 - RNA, 19 nt, Homo sapiens
  misc_RNA (1)...(19): siRNA sense strand
caugaugguucgcgagcuu

SEQ ID NO: 2655075 - RNA, 19 nt, Homo sapiens
  misc_RNA (1)...(19): siRNA sense strand
aguacaaagaaagggauaa

SEQ ID NO: 2655076 - RNA, 19 nt, Homo sapiens
  misc_RNA (1)...(19): siRNA sense strand
gcuucgugcuagauaaaga

SEQ ID NO: 2655077 - RNA, 19 nt, Homo sapiens
  misc_RNA (1)...(19): siRNA sense strand
agagaauucagaagugcaa

SEQ ID NO: 2655078 - RNA, 19 nt, Homo sapiens
  misc_RNA (1)...(19): siRNA sense strand
caaaggaagagcaggagca

SEQ ID NO: 2655079 - RNA, 19 nt, Homo sapiens
  misc_RNA (1)...(19): siRNA sense strand
aagaaugcuuggaaaggau

SEQ ID NO: 2655080 - RNA, 19 nt, Homo sapiens
  misc_RNA (1)...(19): siRNA sense strand
acacugaccgaaauggaaa

SEQ ID NO: 2655081 - RNA, 19 nt, Homo sapiens
  misc_RNA (1)...(19): siRNA sense strand
aggcaguaguaaggaggaa

SEQ ID NO: 2655082 - RNA, 19 nt, Homo sapiens
  misc_RNA (1)...(19): siRNA sense strand
aggaagaggcugauccaca

SEQ ID NO: 2655083 - RNA, 19 nt, Homo sapiens
  misc_RNA (1)...(19): siRNA sense strand
cggaggcagaauuggcaaa

SEQ ID NO: 2655084 - RNA, 19 nt, Homo sapiens
  misc_RNA (1)...(19): siRNA sense strand
acguggagagugaggaaga

SEQ ID NO: 2655085 - RNA, 19 nt, Homo sapiens
  misc_RNA (1)...(19): siRNA sense strand
cagcaaaagagcagaggca

SEQ ID NO: 2655086 - RNA, 19 nt, Homo sapiens
  misc_RNA (1)...(19): siRNA sense strand
aguaaggaggaacaggaaa

SEQ ID NO: 2655087 - RNA, 19 nt, Homo sapiens
  misc_RNA (1)...(19): siRNA sense strand
gcaguaguaaggaggaaca

SEQ ID NO: 2655088 - RNA, 19 nt, Homo sapiens
  misc_RNA (1)...(19): siRNA sense strand
gaggaacaggaaaggaaga

SEQ ID NO: 2655089 - RNA, 19 nt, Homo sapiens
  misc_RNA (1)...(19): siRNA sense strand
gcggaaagaaagcggaaag

SEQ ID NO: 2655090 - RNA, 19 nt, Homo sapiens
  misc_RNA (1)...(19): siRNA sense strand
aggcagaauuggcaaagga

SEQ ID NO: 2655091 - RNA, 19 nt, Homo sapiens
  misc_RNA (1)...(19): siRNA sense strand
cugagagcaacgaggaaga

SEQ ID NO: 2655092 - RNA, 19 nt, Homo sapiens
  misc_RNA (1)...(19): siRNA sense strand
ugaccgaaauggaaagcca

SEQ ID NO: 2655093 - RNA, 19 nt, Homo sapiens
  misc_RNA (1)...(19): siRNA sense strand
ccucgaguuuggaagaaaa

SEQ ID NO: 2655094 - RNA, 19 nt, Homo sapiens
  misc_RNA (1)...(19): siRNA sense strand
cagaaaucauggaacggga

SEQ ID NO: 2655095 - RNA, 19 nt, Homo sapiens
  misc_RNA (1)...(19): siRNA sense strand
ggaaaggaugaggaugaaa

SEQ ID NO: 2655096 - RNA, 19 nt, Homo sapiens
  misc_RNA (1)...(19): siRNA sense strand
cggcaaggaaagagcugga

SEQ ID NO: 2655097 - RNA, 19 nt, Homo sapiens
  misc_RNA (1)...(19): siRNA sense strand
aggaagagcaggagcaccu

SEQ ID NO: 2655098 - RNA, 19 nt, Homo sapiens
  misc_RNA (1)...(19): siRNA sense strand
cggcgaaggccaacuccaa

SEQ ID NO: 2655099 - RNA, 19 nt, Homo sapiens
  misc_RNA (1)...(19): siRNA sense strand
gcauaugacaugaugguuc

SEQ ID NO: 2655100 - RNA, 19 nt, Homo sapiens
  misc_RNA (1)...(19): siRNA sense strand
ggaagagcaaagcaaggaa

SEQ ID NO: 2655101 - RNA, 19 nt, Homo sapiens
  misc_RNA (1)...(19): siRNA sense strand
caacuucgacagaggccaa

SEQ ID NO: 2655102 - RNA, 19 nt, Homo sapiens
  misc_RNA (1)...(19): siRNA sense strand
ucggagaauacaacagcaa

SEQ ID NO: 2655103 - RNA, 19 nt, Homo sapiens
  misc_RNA (1)...(19): siRNA sense strand
aaacaaagauagaggugaa

SEQ ID NO: 2655104 - RNA, 19 nt, Homo sapiens
  misc_RNA (1)...(19): siRNA sense strand
ggagaaaggucaaucuuaa

SEQ ID NO: 2655105 - RNA, 19 nt, Homo sapiens
  misc_RNA (1)...(19): siRNA sense strand
agauagaggugaagaccaa

SEQ ID NO: 2655106 - RNA, 19 nt, Homo sapiens
  misc_RNA (1)...(19): siRNA sense strand
acagugacuuugagggaaa

SEQ ID NO: 2655107 - RNA, 19 nt, Homo sapiens
  misc_RNA (1)...(19): siRNA sense strand
ggugaagaccaaagagaga

SEQ ID NO: 2655108 - RNA, 19 nt, Homo sapiens
  misc_RNA (1)...(19): siRNA sense strand
gcccagaguuuguggauga

SEQ ID NO: 2655109 - RNA, 19 nt, Homo sapiens
  misc_RNA (1)...(19): siRNA sense strand
cauuagaggcacuggauuu

SEQ ID NO: 2655110 - RNA, 19 nt, Homo sapiens
  misc_RNA (1)...(19): siRNA sense strand
uaggaaacccagagaauau

SEQ ID NO: 2655111 - RNA, 19 nt, Homo sapiens
  misc_RNA (1)...(19): siRNA sense strand
gggaugaaguuguggucca

SEQ ID NO: 2655112 - RNA, 19 nt, Homo sapiens
  misc_RNA (1)...(19): siRNA sense strand
gcacaaugggcccuggaaa

SEQ ID NO: 2655113 - RNA, 19 nt, Homo sapiens
  misc_RNA (1)...(19): siRNA sense strand
agaguuuggccaaggguaa

SEQ ID NO: 2655114 - RNA, 19 nt, Homo sapiens
  misc_RNA (1)...(19): siRNA sense strand
gcacaaagccagaaagcuc

SEQ ID NO: 2655115 - RNA, 19 nt, Homo sapiens
  misc_RNA (1)...(19): siRNA sense strand
ggaaaucgggcuugcacaa

SEQ ID NO: 2655116 - RNA, 19 nt, Homo sapiens
  misc_RNA (1)...(19): siRNA sense strand
caaagagagaaaugggaga

SEQ ID NO: 2655117 - RNA, 19 nt, Homo sapiens
  misc_RNA (1)...(19): siRNA sense strand
ugaagaccaaagagagaaa

SEQ ID NO: 2655118 - RNA, 19 nt, Homo sapiens
  misc_RNA (1)...(19): siRNA sense strand
gccaggacuucgagggaga

SEQ ID NO: 2655119 - RNA, 19 nt, Homo sapiens
  misc_RNA (1)...(19): siRNA sense strand
guuuggagacaguggagaa

SEQ ID NO: 2655120 - RNA, 19 nt, Homo sapiens
  misc_RNA (1)...(19): siRNA sense strand
gagaaaggucaaucuuaaa

SEQ ID NO: 2655121 - RNA, 19 nt, Homo sapiens
  misc_RNA (1)...(19): siRNA sense strand
gaacagaacuuuccaggca

SEQ ID NO: 2655122 - RNA, 19 nt, Homo sapiens
  misc_RNA (1)...(19): siRNA sense strand
ucuaggaaacccagagaau

SEQ ID NO: 2655123 - RNA, 19 nt, Homo sapiens
  misc_RNA (1)...(19): siRNA sense strand
ggagauagcuggaacuaag

SEQ ID NO: 2655124 - RNA, 19 nt, Homo sapiens
  misc_RNA (1)...(19): siRNA sense strand
gcucaggccuggaccaaga

SEQ ID NO: 2655125 - RNA, 19 nt, Homo sapiens
  misc_RNA (1)...(19): siRNA sense strand
ggaacaacucagaccaaaa

SEQ ID NO: 2655126 - RNA, 19 nt, Homo sapiens
  misc_RNA (1)...(19): siRNA sense strand
caacagugacuuugaggga

SEQ ID NO: 2655127 - RNA, 19 nt, Homo sapiens
  misc_RNA (1)...(19): siRNA sense strand
ccucugaaacaaagauaga

SEQ ID NO: 2655128 - RNA, 19 nt, Homo sapiens
  misc_RNA (1)...(19): siRNA sense strand
aauuugggcuucaggagaa

SEQ ID NO: 2655129 - RNA, 19 nt, Homo sapiens
  misc_RNA (1)...(19): siRNA sense strand
ucaccaagcuacuguccua

SEQ ID NO: 2655130 - RNA, 19 nt, Homo sapiens
  misc_RNA (1)...(19): siRNA sense strand
gcagggaccucuaggaaac

SEQ ID NO: 2655131 - RNA, 19 nt, Homo sapiens
  misc_RNA (1)...(19): siRNA sense strand
gaggagaggcccuauaauu

SEQ ID NO: 2655132 - RNA, 19 nt, Homo sapiens
  misc_RNA (1)...(19): siRNA sense strand
ggggaaagcuggaacaacu

SEQ ID NO: 2655133 - RNA, 19 nt, Homo sapiens
  misc_RNA (1)...(19): siRNA sense strand
gcgacuggauggagcagga

SEQ ID NO: 2655134 - RNA, 19 nt, Homo sapiens
  misc_RNA (1)...(19): siRNA sense strand
ggauggagcaggaaggaag

SEQ ID NO: 2655135 - RNA, 19 nt, Homo sapiens
  misc_RNA (1)...(19): siRNA sense strand
gauaaccagcccagaguuu

SEQ ID NO: 2655136 - RNA, 19 nt, Homo sapiens
  misc_RNA (1)...(19): siRNA sense strand
aggagaggcccuauaauuu

SEQ ID NO: 2655137 - RNA, 19 nt, Homo sapiens
  misc_RNA (1)...(19): siRNA sense strand
gaggugaagaccaaagaga

SEQ ID NO: 2655138 - RNA, 19 nt, Homo sapiens
  misc_RNA (1)...(19): siRNA sense strand
ccaacagccuccuggggaa

SEQ ID NO: 2655139 - RNA, 19 nt, Homo sapiens
  misc_RNA (1)...(19): siRNA sense strand
ucuuauugcgccaggguga

SEQ ID NO: 2655140 - RNA, 19 nt, Homo sapiens
  misc_RNA (1)...(19): siRNA sense strand
ggacuucgagggagacuau

SEQ ID NO: 2655141 - RNA, 19 nt, Homo sapiens
  misc_RNA (1)...(19): siRNA sense strand
aggagaaaggucaaucuua

SEQ ID NO: 2655142 - RNA, 19 nt, Homo sapiens
  misc_RNA (1)...(19): siRNA sense strand
gggcaggugucucacaaga

SEQ ID NO: 2655143 - RNA, 19 nt, Homo sapiens
  misc_RNA (1)...(19): siRNA sense strand
ccccaggccugaagauaaa

SEQ ID NO: 2655144 - RNA, 19 nt, Homo sapiens
  misc_RNA (1)...(19): siRNA sense strand
gcuucaggagaaaggucaa

SEQ ID NO: 2655145 - RNA, 19 nt, Homo sapiens
  misc_RNA (1)...(19): siRNA sense strand
gagagaaaugggagacuuc

SEQ ID NO: 2655146 - RNA, 19 nt, Homo sapiens
  misc_RNA (1)...(19): siRNA sense strand
gagcaaguauccaggacuc

SEQ ID NO: 2655147 - RNA, 19 nt, Homo sapiens
  misc_RNA (1)...(19): siRNA sense strand
uggacgagguggucagcca

SEQ ID NO: 2655148 - RNA, 19 nt, Homo sapiens
  misc_RNA (1)...(19): siRNA sense strand
cgacacagccauccagcau

SEQ ID NO: 2655149 - RNA, 19 nt, Homo sapiens
  misc_RNA (1)...(19): siRNA sense strand
gcccacugacugaggaaaa

SEQ ID NO: 2655150 - RNA, 19 nt, Homo sapiens
  misc_RNA (1)...(19): siRNA sense strand
uguacagccuuguggacga

SEQ ID NO: 2655151 - RNA, 19 nt, Homo sapiens
  misc_RNA (1)...(19): siRNA sense strand
gggugugaguguagagguc

SEQ ID NO: 2655152 - RNA, 19 nt, Homo sapiens
  misc_RNA (1)...(19): siRNA sense strand
ggguaagggcaggacauau

SEQ ID NO: 2655153 - RNA, 19 nt, Homo sapiens
  misc_RNA (1)...(19): siRNA sense strand
agacauuaccugacgucca

SEQ ID NO: 2655154 - RNA, 19 nt, Homo sapiens
  misc_RNA (1)...(19): siRNA sense strand
uggagaaagcccacgcaga

SEQ ID NO: 2655155 - RNA, 19 nt, Homo sapiens
  misc_RNA (1)...(19): siRNA sense strand
ugugugagcaagugcgaga

SEQ ID NO: 2655156 - RNA, 19 nt, Homo sapiens
  misc_RNA (1)...(19): siRNA sense strand
cugcagccucugaaacaaa

SEQ ID NO: 2655157 - RNA, 19 nt, Homo sapiens
  misc_RNA (1)...(19): siRNA sense strand
gcucuaggugucaagguuu

SEQ ID NO: 2655158 - RNA, 19 nt, Homo sapiens
  misc_RNA (1)...(19): siRNA sense strand
cuaggaaacccagagaaua

SEQ ID NO: 2655159 - RNA, 19 nt, Homo sapiens
  misc_RNA (1)...(19): siRNA sense strand
gcagaggagacgagcgagu

SEQ ID NO: 2655160 - RNA, 19 nt, Homo sapiens
  misc_RNA (1)...(19): siRNA sense strand
ccagcaaauacuuucacaa

SEQ ID NO: 2655161 - RNA, 19 nt, Homo sapiens
  misc_RNA (1)...(19): siRNA sense strand
agacugagaagaugggcaa

SEQ ID NO: 2655162 - RNA, 19 nt, Homo sapiens
  misc_RNA (1)...(19): siRNA sense strand
uggcggaagaggagagguu

SEQ ID NO: 2655163 - RNA, 19 nt, Homo sapiens
  misc_RNA (1)...(19): siRNA sense strand
acuauuuggcagagcggua

SEQ ID NO: 2655164 - RNA, 19 nt, Homo sapiens
  misc_RNA (1)...(19): siRNA sense strand
ggcaggaccuuaagggcuu

SEQ ID NO: 2655165 - RNA, 19 nt, Homo sapiens
  misc_RNA (1)...(19): siRNA sense strand
caauacaacucaugagggu

SEQ ID NO: 2655166 - RNA, 19 nt, Homo sapiens
  misc_RNA (1)...(19): siRNA sense strand
auuggaaggaagaagaaau

SEQ ID NO: 2655167 - RNA, 19 nt, Homo sapiens
  misc_RNA (1)...(19): siRNA sense strand
gauuacauuucuugccaga

SEQ ID NO: 2655168 - RNA, 19 nt, Homo sapiens
  misc_RNA (1)...(19): siRNA sense strand
gaauuuauuuucuggguca

SEQ ID NO: 2655169 - RNA, 19 nt, Homo sapiens
  misc_RNA (1)...(19): siRNA sense strand
gaugucaguggguggcaaa

SEQ ID NO: 2655170 - RNA, 19 nt, Homo sapiens
  misc_RNA (1)...(19): siRNA sense strand
agaagauggcggaagagga

SEQ ID NO: 2655171 - RNA, 19 nt, Homo sapiens
  misc_RNA (1)...(19): siRNA sense strand
uggcgaauuggaaggaaga

SEQ ID NO: 2655172 - RNA, 19 nt, Homo sapiens
  misc_RNA (1)...(19): siRNA sense strand
agcugaagguuuaacaaga

SEQ ID NO: 2655173 - RNA, 19 nt, Homo sapiens
  misc_RNA (1)...(19): siRNA sense strand
gcuuguacuauuuggcaga

SEQ ID NO: 2655174 - RNA, 19 nt, Homo sapiens
  misc_RNA (1)...(19): siRNA sense strand
ucaugggagcaguuauaaa

SEQ ID NO: 2655175 - RNA, 19 nt, Homo sapiens
  misc_RNA (1)...(19): siRNA sense strand
cggcacucucacuggcuua

SEQ ID NO: 2655176 - RNA, 19 nt, Homo sapiens
  misc_RNA (1)...(19): siRNA sense strand
ccggcaaaccagaggaaua

SEQ ID NO: 2655177 - RNA, 19 nt, Homo sapiens
  misc_RNA (1)...(19): siRNA sense strand
gcauagaaguuucagggaa

SEQ ID NO: 2655178 - RNA, 19 nt, Homo sapiens
  misc_RNA (1)...(19): siRNA sense strand
ggcucaaaguacaggacua

SEQ ID NO: 2655179 - RNA, 19 nt, Homo sapiens
  misc_RNA (1)...(19): siRNA sense strand
gcaaauagccguaaccuca

SEQ ID NO: 2655180 - RNA, 19 nt, Homo sapiens
  misc_RNA (1)...(19): siRNA sense strand
aguuaauggcauagaaguu

SEQ ID NO: 2655181 - RNA, 19 nt, Homo sapiens
  misc_RNA (1)...(19): siRNA sense strand
cauagaaguuucagggaag

SEQ ID NO: 2655182 - RNA, 19 nt, Homo sapiens
  misc_RNA (1)...(19): siRNA sense strand
agggaagagccuugaucaa

SEQ ID NO: 2655183 - RNA, 19 nt, Homo sapiens
  misc_RNA (1)...(19): siRNA sense strand
cgcuaauaaagaagaagaa

SEQ ID NO: 2655184 - RNA, 19 nt, Homo sapiens
  misc_RNA (1)...(19): siRNA sense strand
ccucuaaugaagugagcuu

SEQ ID NO: 2655185 - RNA, 19 nt, Homo sapiens
  misc_RNA (1)...(19): siRNA sense strand
cuggaaaauuugaggaguu

SEQ ID NO: 2655186 - RNA, 19 nt, Homo sapiens
  misc_RNA (1)...(19): siRNA sense strand
cuuagaagaagauggaaca

SEQ ID NO: 2655187 - RNA, 19 nt, Homo sapiens
  misc_RNA (1)...(19): siRNA sense strand
cuacagugccuuugguaca

SEQ ID NO: 2655188 - RNA, 19 nt, Homo sapiens
  misc_RNA (1)...(19): siRNA sense strand
agacaugaugauugcaaau

SEQ ID NO: 2655189 - RNA, 19 nt, Homo sapiens
  misc_RNA (1)...(19): siRNA sense strand
agucauuaacacagauaga

SEQ ID NO: 2655190 - RNA, 19 nt, Homo sapiens
  misc_RNA (1)...(19): siRNA sense strand
agaaggaagaagcagacua

SEQ ID NO: 2655191 - RNA, 19 nt, Homo sapiens
  misc_RNA (1)...(19): siRNA sense strand
agaaacgcaucguagggua

SEQ ID NO: 2655192 - RNA, 19 nt, Homo sapiens
  misc_RNA (1)...(19): siRNA sense strand
augcagacauccauggaga

SEQ ID NO: 2655193 - RNA, 19 nt, Homo sapiens
  misc_RNA (1)...(19): siRNA sense strand
cggagaaaccccuaggauu

SEQ ID NO: 2655194 - RNA, 19 nt, Homo sapiens
  misc_RNA (1)...(19): siRNA sense strand
agaaaagguuccagggauc

SEQ ID NO: 2655195 - RNA, 19 nt, Homo sapiens
  misc_RNA (1)...(19): siRNA sense strand
acacgcuaauaaagaagaa

SEQ ID NO: 2655196 - RNA, 19 nt, Homo sapiens
  misc_RNA (1)...(19): siRNA sense strand
acgcuaauaaagaagaaga

SEQ ID NO: 2655197 - RNA, 19 nt, Homo sapiens
  misc_RNA (1)...(19): siRNA sense strand
augaagacagcgaagaaga

SEQ ID NO: 2655198 - RNA, 19 nt, Homo sapiens
  misc_RNA (1)...(19): siRNA sense strand
auuaacacagauagagcua

SEQ ID NO: 2655199 - RNA, 19 nt, Homo sapiens
  misc_RNA (1)...(19): siRNA sense strand
ggguaacaccacauggcuu

SEQ ID NO: 2655200 - RNA, 19 nt, Homo sapiens
  misc_RNA (1)...(19): siRNA sense strand
aacacaugcuccagaucaa

SEQ ID NO: 2655201 - RNA, 19 nt, Homo sapiens
  misc_RNA (1)...(19): siRNA sense strand
uaacagugagaccggcaaa

SEQ ID NO: 2655202 - RNA, 19 nt, Homo sapiens
  misc_RNA (1)...(19): siRNA sense strand
uggaaggaaaggaaggaaa

SEQ ID NO: 2655203 - RNA, 19 nt, Homo sapiens
  misc_RNA (1)...(19): siRNA sense strand
ggacggaaagugugggcuu

SEQ ID NO: 2655204 - RNA, 19 nt, Homo sapiens
  misc_RNA (1)...(19): siRNA sense strand
cugguacaguggacggaaa

SEQ ID NO: 2655205 - RNA, 19 nt, Homo sapiens
  misc_RNA (1)...(19): siRNA sense strand
gggugcucgugguggcaaa

SEQ ID NO: 2655206 - RNA, 19 nt, Homo sapiens
  misc_RNA (1)...(19): siRNA sense strand
augacugguuggaggaaga

SEQ ID NO: 2655207 - RNA, 19 nt, Homo sapiens
  misc_RNA (1)...(19): siRNA sense strand
aggcugaggccgagaagca

SEQ ID NO: 2655208 - RNA, 19 nt, Homo sapiens
  misc_RNA (1)...(19): siRNA sense strand
agucggaguucgugcacau

SEQ ID NO: 2655209 - RNA, 19 nt, Homo sapiens
  misc_RNA (1)...(19): siRNA sense strand
acucaauggacgaaguaca

SEQ ID NO: 2655210 - RNA, 19 nt, Homo sapiens
  misc_RNA (1)...(19): siRNA sense strand
gaugaaucaacuggagaaa

SEQ ID NO: 2655211 - RNA, 19 nt, Homo sapiens
  misc_RNA (1)...(19): siRNA sense strand
cguacuuacucacagacaa

SEQ ID NO: 2655212 - RNA, 19 nt, Homo sapiens
  misc_RNA (1)...(19): siRNA sense strand
acgcagaagagccaaauau

SEQ ID NO: 2655213 - RNA, 19 nt, Homo sapiens
  misc_RNA (1)...(19): siRNA sense strand
ccacggugaucgagagccu

SEQ ID NO: 2655214 - RNA, 19 nt, Homo sapiens
  misc_RNA (1)...(19): siRNA sense strand
cggaaguugccaugcugua

SEQ ID NO: 2655215 - RNA, 19 nt, Homo sapiens
  misc_RNA (1)...(19): siRNA sense strand
uugcagaggagcaguauca

SEQ ID NO: 2655216 - RNA, 19 nt, Homo sapiens
  misc_RNA (1)...(19): siRNA sense strand
ccagaaaccaagacaucca

SEQ ID NO: 2655217 - RNA, 19 nt, Homo sapiens
  misc_RNA (1)...(19): siRNA sense strand
gagccugagcauagagaac

SEQ ID NO: 2655218 - RNA, 19 nt, Homo sapiens
  misc_RNA (1)...(19): siRNA sense strand
gggaugaaucaacuggaga

SEQ ID NO: 2655219 - RNA, 19 nt, Homo sapiens
  misc_RNA (1)...(19): siRNA sense strand
cgcuggagacccugaggaa

SEQ ID NO: 2655220 - RNA, 19 nt, Homo sapiens
  misc_RNA (1)...(19): siRNA sense strand
caaagaugucaaaucggaa

SEQ ID NO: 2655221 - RNA, 19 nt, Homo sapiens
  misc_RNA (1)...(19): siRNA sense strand
cucaauggacgaaguacaa

SEQ ID NO: 2655222 - RNA, 19 nt, Homo sapiens
  misc_RNA (1)...(19): siRNA sense strand
uggacgaaguacaaagcca

SEQ ID NO: 2655223 - RNA, 19 nt, Homo sapiens
  misc_RNA (1)...(19): siRNA sense strand
cuggagacccugaggaaug

SEQ ID NO: 2655224 - RNA, 19 nt, Homo sapiens
  misc_RNA (1)...(19): siRNA sense strand
acucuuacccagaacgaga

SEQ ID NO: 2655225 - RNA, 19 nt, Homo sapiens
  misc_RNA (1)...(19): siRNA sense strand
ccuaugaaagcaaacguau

SEQ ID NO: 2655226 - RNA, 19 nt, Homo sapiens
  misc_RNA (1)...(19): siRNA sense strand
ggaaggugcaauacggaga

SEQ ID NO: 2655227 - RNA, 19 nt, Homo sapiens
  misc_RNA (1)...(19): siRNA sense strand
gugagaagaauaaggagca

SEQ ID NO: 2655228 - RNA, 19 nt, Homo sapiens
  misc_RNA (1)...(19): siRNA sense strand
gcagaguccuccuggccuu

SEQ ID NO: 2655229 - RNA, 19 nt, Homo sapiens
  misc_RNA (1)...(19): siRNA sense strand
cggagagcacuuucggauu

SEQ ID NO: 2655230 - RNA, 19 nt, Homo sapiens
  misc_RNA (1)...(19): siRNA sense strand
ccuuuaucuucgagaggau

SEQ ID NO: 2655231 - RNA, 19 nt, Homo sapiens
  misc_RNA (1)...(19): siRNA sense strand
acuuagacgacuauggauu

SEQ ID NO: 2655232 - RNA, 19 nt, Homo sapiens
  misc_RNA (1)...(19): siRNA sense strand
aaguaugcuuucagcgaga

SEQ ID NO: 2655233 - RNA, 19 nt, Homo sapiens
  misc_RNA (1)...(19): siRNA sense strand
cagcaaagccugugcggag

SEQ ID NO: 2655234 - RNA, 19 nt, Homo sapiens
  misc_RNA (1)...(19): siRNA sense strand
gauuauugccagagggcug

SEQ ID NO: 2655235 - RNA, 19 nt, Homo sapiens
  misc_RNA (1)...(19): siRNA sense strand
ccuucaaccggcagauuau

SEQ ID NO: 2655236 - RNA, 19 nt, Homo sapiens
  misc_RNA (1)...(19): siRNA sense strand
agucagauugucagaagau

SEQ ID NO: 2655237 - RNA, 19 nt, Homo sapiens
  misc_RNA (1)...(19): siRNA sense strand
agauccaaacaaucagaua

SEQ ID NO: 2655238 - RNA, 19 nt, Homo sapiens
  misc_RNA (1)...(19): siRNA sense strand
ggaucagauuccugggccu

SEQ ID NO: 2655239 - RNA, 19 nt, Homo sapiens
  misc_RNA (1)...(19): siRNA sense strand
ccuuuaagacccagagcaa

SEQ ID NO: 2655240 - RNA, 19 nt, Homo sapiens
  misc_RNA (1)...(19): siRNA sense strand
aggaagugacgguaggaaa

SEQ ID NO: 2655241 - RNA, 19 nt, Homo sapiens
  misc_RNA (1)...(19): siRNA sense strand
ggaaggaaugagaaagcaa

SEQ ID NO: 2655242 - RNA, 19 nt, Homo sapiens
  misc_RNA (1)...(19): siRNA sense strand
ccgcggagcagaaggcaaa

SEQ ID NO: 2655243 - RNA, 19 nt, Homo sapiens
  misc_RNA (1)...(19): siRNA sense strand
agagaaaacugaagaucaa

SEQ ID NO: 2655244 - RNA, 19 nt, Homo sapiens
  misc_RNA (1)...(19): siRNA sense strand
gugggaaggaagagaagaa

SEQ ID NO: 2655245 - RNA, 19 nt, Homo sapiens
  misc_RNA (1)...(19): siRNA sense strand
ucaagaauugucagggaaa

SEQ ID NO: 2655246 - RNA, 19 nt, Homo sapiens
  misc_RNA (1)...(19): siRNA sense strand
ggaagaagcugaaagugga

SEQ ID NO: 2655247 - RNA, 19 nt, Homo sapiens
  misc_RNA (1)...(19): siRNA sense strand
gggccaagggacaaggcua

SEQ ID NO: 2655248 - RNA, 19 nt, Homo sapiens
  misc_RNA (1)...(19): siRNA sense strand
ggaggauggaccuggacaa

SEQ ID NO: 2655249 - RNA, 19 nt, Homo sapiens
  misc_RNA (1)...(19): siRNA sense strand
gcaaagaugucucguggga

SEQ ID NO: 2655250 - RNA, 19 nt, Homo sapiens
  misc_RNA (1)...(19): siRNA sense strand
uggauuaaucacucggaaa

SEQ ID NO: 2655251 - RNA, 19 nt, Homo sapiens
  misc_RNA (1)...(19): siRNA sense strand
ugguacaaguucaagaauu

SEQ ID NO: 2655252 - RNA, 19 nt, Homo sapiens
  misc_RNA (1)...(19): siRNA sense strand
ccuaaaagguacaaaggga

SEQ ID NO: 2655253 - RNA, 19 nt, Homo sapiens
  misc_RNA (1)...(19): siRNA sense strand
ccgcauuugccgacagaga

SEQ ID NO: 2655254 - RNA, 19 nt, Homo sapiens
  misc_RNA (1)...(19): siRNA sense strand
aagagaagaaggaagguga

SEQ ID NO: 2655255 - RNA, 19 nt, Homo sapiens
  misc_RNA (1)...(19): siRNA sense strand
aagccagggaggugggaau

SEQ ID NO: 2655256 - RNA, 19 nt, Homo sapiens
  misc_RNA (1)...(19): siRNA sense strand
ggccacaggaugggagaaa

SEQ ID NO: 2655257 - RNA, 19 nt, Homo sapiens
  misc_RNA (1)...(19): siRNA sense strand
cagaggacacagacgcaaa

SEQ ID NO: 2655258 - RNA, 19 nt, Homo sapiens
  misc_RNA (1)...(19): siRNA sense strand
guucaagaauugucaggga

SEQ ID NO: 2655259 - RNA, 19 nt, Homo sapiens
  misc_RNA (1)...(19): siRNA sense strand
caguauggguguggggaaa

SEQ ID NO: 2655260 - RNA, 19 nt, Homo sapiens
  misc_RNA (1)...(19): siRNA sense strand
cgguaggaaacgucaggua

SEQ ID NO: 2655261 - RNA, 19 nt, Homo sapiens
  misc_RNA (1)...(19): siRNA sense strand
acacagacgcaaagagaac

SEQ ID NO: 2655262 - RNA, 19 nt, Homo sapiens
  misc_RNA (1)...(19): siRNA sense strand
gggaggacucugacaucaa

SEQ ID NO: 2655263 - RNA, 19 nt, Homo sapiens
  misc_RNA (1)...(19): siRNA sense strand
aggagaaguggcaggugua

SEQ ID NO: 2655264 - RNA, 19 nt, Homo sapiens
  misc_RNA (1)...(19): siRNA sense strand
ggacugaagccaugcagga

SEQ ID NO: 2655265 - RNA, 19 nt, Homo sapiens
  misc_RNA (1)...(19): siRNA sense strand
gucuggaaggaaugagaaa

SEQ ID NO: 2655266 - RNA, 19 nt, Homo sapiens
  misc_RNA (1)...(19): siRNA sense strand
ggacauauccgcaggggca

SEQ ID NO: 2655267 - RNA, 19 nt, Homo sapiens
  misc_RNA (1)...(19): siRNA sense strand
gagaggagacagugaccga

SEQ ID NO: 2655268 - RNA, 19 nt, Homo sapiens
  misc_RNA (1)...(19): siRNA sense strand
gcacuggguggcagagaca

SEQ ID NO: 2655269 - RNA, 19 nt, Homo sapiens
  misc_RNA (1)...(19): siRNA sense strand
gggaaauggacaaacgaac

SEQ ID NO: 2655270 - RNA, 19 nt, Homo sapiens
  misc_RNA (1)...(19): siRNA sense strand
ggaagugacgguaggaaac

SEQ ID NO: 2655271 - RNA, 19 nt, Homo sapiens
  misc_RNA (1)...(19): siRNA sense strand
cuggacaagcccuggagaa

SEQ ID NO: 2655272 - RNA, 19 nt, Homo sapiens
  misc_RNA (1)...(19): siRNA sense strand
acgucagguaucuggauua

SEQ ID NO: 2655273 - RNA, 19 nt, Homo sapiens
  misc_RNA (1)...(19): siRNA sense strand
agaagaagcggcuggagga

SEQ ID NO: 2655274 - RNA, 19 nt, Homo sapiens
  misc_RNA (1)...(19): siRNA sense strand
cagcaaagucacagaagag

SEQ ID NO: 2655275 - RNA, 19 nt, Homo sapiens
  misc_RNA (1)...(19): siRNA sense strand
caggagaaguggcaggugu

SEQ ID NO: 2655276 - RNA, 19 nt, Homo sapiens
  misc_RNA (1)...(19): siRNA sense strand
agagcagcccauagaaauu

SEQ ID NO: 2655277 - RNA, 19 nt, Homo sapiens
  misc_RNA (1)...(19): siRNA sense strand
ggggaugagacguucaaaa

SEQ ID NO: 2655278 - RNA, 19 nt, Homo sapiens
  misc_RNA (1)...(19): siRNA sense strand
ccugaagcccaguguucua

SEQ ID NO: 2655279 - RNA, 19 nt, Homo sapiens
  misc_RNA (1)...(19): siRNA sense strand
cggugaacaucgugggcac

SEQ ID NO: 2655280 - RNA, 19 nt, Homo sapiens
  misc_RNA (1)...(19): siRNA sense strand
aaagaugucucgugggaac

SEQ ID NO: 2655281 - RNA, 19 nt, Homo sapiens
  misc_RNA (1)...(19): siRNA sense strand
cuaaaagguacaaagggaa

SEQ ID NO: 2655282 - RNA, 19 nt, Homo sapiens
  misc_RNA (1)...(19): siRNA sense strand
gcgacgaugaagaccgauu

SEQ ID NO: 2655283 - RNA, 19 nt, Homo sapiens
  misc_RNA (1)...(19): siRNA sense strand
ucuaaaucccucaagaaga

SEQ ID NO: 2655284 - RNA, 19 nt, Homo sapiens
  misc_RNA (1)...(19): siRNA sense strand
caagaagaggagucuggaa

SEQ ID NO: 2655285 - RNA, 19 nt, Homo sapiens
  misc_RNA (1)...(19): siRNA sense strand
cagagaggaagaagcugaa

SEQ ID NO: 2655286 - RNA, 19 nt, Homo sapiens
  misc_RNA (1)...(19): siRNA sense strand
cagagaaaacugaagauca

SEQ ID NO: 2655287 - RNA, 19 nt, Homo sapiens
  misc_RNA (1)...(19): siRNA sense strand
cuucagaaauagcaggucu

SEQ ID NO: 2655288 - RNA, 19 nt, Homo sapiens
  misc_RNA (1)...(19): siRNA sense strand
caaaaggaucuaccagaaa

SEQ ID NO: 2655289 - RNA, 19 nt, Homo sapiens
  misc_RNA (1)...(19): siRNA sense strand
gaaggaaggugacugcaga

SEQ ID NO: 2655290 - RNA, 19 nt, Homo sapiens
  misc_RNA (1)...(19): siRNA sense strand
cgccagagccuuggggaaa

SEQ ID NO: 2655291 - RNA, 19 nt, Homo sapiens
  misc_RNA (1)...(19): siRNA sense strand
caggugaggcggacagcau

SEQ ID NO: 2655292 - RNA, 19 nt, Homo sapiens
  misc_RNA (1)...(19): siRNA sense strand
ucaucuggacaaagaauuu

SEQ ID NO: 2655293 - RNA, 19 nt, Homo sapiens
  misc_RNA (1)...(19): siRNA sense strand
ggacuaagcucgacugacg

SEQ ID NO: 2655294 - RNA, 19 nt, Homo sapiens
  misc_RNA (1)...(19): siRNA sense strand
uggaagaggcugugucauc

SEQ ID NO: 2655295 - RNA, 19 nt, Homo sapiens
  misc_RNA (1)...(19): siRNA sense strand
agacagagccagagggcca

SEQ ID NO: 2655296 - RNA, 19 nt, Homo sapiens
  misc_RNA (1)...(19): siRNA sense strand
aggagggagcggagagcua

SEQ ID NO: 2655297 - RNA, 19 nt, Homo sapiens
  misc_RNA (1)...(19): siRNA sense strand
uggaacgccuggaggguga

SEQ ID NO: 2655298 - RNA, 19 nt, Homo sapiens
  misc_RNA (1)...(19): siRNA sense strand
ggcaaugugaggaggguca

SEQ ID NO: 2655299 - RNA, 19 nt, Homo sapiens
  misc_RNA (1)...(19): siRNA sense strand
aggugacagaggugagcaa

SEQ ID NO: 2655300 - RNA, 19 nt, Homo sapiens
  misc_RNA (1)...(19): siRNA sense strand
uggaugagcgggaacgcaa

SEQ ID NO: 2655301 - RNA, 19 nt, Homo sapiens
  misc_RNA (1)...(19): siRNA sense strand
gugacagaggugagcaaca

SEQ ID NO: 2655302 - RNA, 19 nt, Homo sapiens
  misc_RNA (1)...(19): siRNA sense strand
cagcccucauggaaggaaa

SEQ ID NO: 2655303 - RNA, 19 nt, Homo sapiens
  misc_RNA (1)...(19): siRNA sense strand
uggacagccucguggcaga

SEQ ID NO: 2655304 - RNA, 19 nt, Homo sapiens
  misc_RNA (1)...(19): siRNA sense strand
gggaugagcuuacgaggcu

SEQ ID NO: 2655305 - RNA, 19 nt, Homo sapiens
  misc_RNA (1)...(19): siRNA sense strand
agagcuacguaaaggcuga

SEQ ID NO: 2655306 - RNA, 19 nt, Homo sapiens
  misc_RNA (1)...(19): siRNA sense strand
ggcaacuagccuugaucaa

SEQ ID NO: 2655307 - RNA, 19 nt, Homo sapiens
  misc_RNA (1)...(19): siRNA sense strand
aagccgaaguccaggccau

SEQ ID NO: 2655308 - RNA, 19 nt, Homo sapiens
  misc_RNA (1)...(19): siRNA sense strand
gcucaaugggacagagggu

SEQ ID NO: 2655309 - RNA, 19 nt, Homo sapiens
  misc_RNA (1)...(19): siRNA sense strand
gggacagaggguggagcaa

SEQ ID NO: 2655310 - RNA, 19 nt, Homo sapiens
  misc_RNA (1)...(19): siRNA sense strand
cgaggagcgccuagcaaca

SEQ ID NO: 2655311 - RNA, 19 nt, Homo sapiens
  misc_RNA (1)...(19): siRNA sense strand
acgcaagguggaagccgaa

SEQ ID NO: 2655312 - RNA, 19 nt, Homo sapiens
  misc_RNA (1)...(19): siRNA sense strand
agacagagccagagggcca

SEQ ID NO: 2655313 - RNA, 19 nt, Homo sapiens
  misc_RNA (1)...(19): siRNA sense strand
aggagggagcggagagcua

SEQ ID NO: 2655314 - RNA, 19 nt, Homo sapiens
  misc_RNA (1)...(19): siRNA sense strand
uggaacgccuggaggguga

SEQ ID NO: 2655315 - RNA, 19 nt, Homo sapiens
  misc_RNA (1)...(19): siRNA sense strand
ggcaaugugaggaggguca

SEQ ID NO: 2655316 - RNA, 19 nt, Homo sapiens
  misc_RNA (1)...(19): siRNA sense strand
aggugacagaggugagcaa

SEQ ID NO: 2655317 - RNA, 19 nt, Homo sapiens
  misc_RNA (1)...(19): siRNA sense strand
uggaugagcgggaacgcaa

SEQ ID NO: 2655318 - RNA, 19 nt, Homo sapiens
  misc_RNA (1)...(19): siRNA sense strand
gugacagaggugagcaaca

SEQ ID NO: 2655319 - RNA, 19 nt, Homo sapiens
  misc_RNA (1)...(19): siRNA sense strand
cagcccucauggaaggaaa

SEQ ID NO: 2655320 - RNA, 19 nt, Homo sapiens
  misc_RNA (1)...(19): siRNA sense strand
gggaugagcuuacgaggcu

SEQ ID NO: 2655321 - RNA, 19 nt, Homo sapiens
  misc_RNA (1)...(19): siRNA sense strand
agagcuacguaaaggcuga

SEQ ID NO: 2655322 - RNA, 19 nt, Homo sapiens
  misc_RNA (1)...(19): siRNA sense strand
ggcaacuagccuugaucaa

SEQ ID NO: 2655323 - RNA, 19 nt, Homo sapiens
  misc_RNA (1)...(19): siRNA sense strand
aagccgaaguccaggccau

SEQ ID NO: 2655324 - RNA, 19 nt, Homo sapiens
  misc_RNA (1)...(19): siRNA sense strand
gcucaaugggacagagggu

SEQ ID NO: 2655325 - RNA, 19 nt, Homo sapiens
  misc_RNA (1)...(19): siRNA sense strand
gggacagaggguggagcaa

SEQ ID NO: 2655326 - RNA, 19 nt, Homo sapiens
  misc_RNA (1)...(19): siRNA sense strand
cgaggagcgccuagcaaca

SEQ ID NO: 2655327 - RNA, 19 nt, Homo sapiens
  misc_RNA (1)...(19): siRNA sense strand
acgcaagguggaagccgaa

SEQ ID NO: 2655328 - RNA, 19 nt, Homo sapiens
  misc_RNA (1)...(19): siRNA sense strand
ccaugaaagaucagagaua

SEQ ID NO: 2655329 - RNA, 19 nt, Homo sapiens
  misc_RNA (1)...(19): siRNA sense strand
agaagaaagcagagagaga

SEQ ID NO: 2655330 - RNA, 19 nt, Homo sapiens
  misc_RNA (1)...(19): siRNA sense strand
aagcagagagagaggaaua

SEQ ID NO: 2655331 - RNA, 19 nt, Homo sapiens
  misc_RNA (1)...(19): siRNA sense strand
agaaagaggaagaaaggaa

SEQ ID NO: 2655332 - RNA, 19 nt, Homo sapiens
  misc_RNA (1)...(19): siRNA sense strand
cugaaagaagagugggaaa

SEQ ID NO: 2655333 - RNA, 19 nt, Homo sapiens
  misc_RNA (1)...(19): siRNA sense strand
cagaagagaaguuggagaa

SEQ ID NO: 2655334 - RNA, 19 nt, Homo sapiens
  misc_RNA (1)...(19): siRNA sense strand
uggaagagucguagaagaa

SEQ ID NO: 2655335 - RNA, 19 nt, Homo sapiens
  misc_RNA (1)...(19): siRNA sense strand
caagaaugaugguggaaaa

SEQ ID NO: 2655336 - RNA, 19 nt, Homo sapiens
  misc_RNA (1)...(19): siRNA sense strand
gcgcaaaaggcuagagcaa

SEQ ID NO: 2655337 - RNA, 19 nt, Homo sapiens
  misc_RNA (1)...(19): siRNA sense strand
cgggaaagucagugugaau

SEQ ID NO: 2655338 - RNA, 19 nt, Homo sapiens
  misc_RNA (1)...(19): siRNA sense strand
cugaaacgauagaggaaga

SEQ ID NO: 2655339 - RNA, 19 nt, Homo sapiens
  misc_RNA (1)...(19): siRNA sense strand
gggagaugacagugacuua

SEQ ID NO: 2655340 - RNA, 19 nt, Homo sapiens
  misc_RNA (1)...(19): siRNA sense strand
acuaugaggaggagcguaa

SEQ ID NO: 2655341 - RNA, 19 nt, Homo sapiens
  misc_RNA (1)...(19): siRNA sense strand
gugaauuccugcaugguaa

SEQ ID NO: 2655342 - RNA, 19 nt, Homo sapiens
  misc_RNA (1)...(19): siRNA sense strand
cgaauagucaagaggacaa

SEQ ID NO: 2655343 - RNA, 19 nt, Homo sapiens
  misc_RNA (1)...(19): siRNA sense strand
aagagaaguuggagaagau

SEQ ID NO: 2655344 - RNA, 19 nt, Homo sapiens
  misc_RNA (1)...(19): siRNA sense strand
uugcugaagacuagggaaa

SEQ ID NO: 2655345 - RNA, 19 nt, Homo sapiens
  misc_RNA (1)...(19): siRNA sense strand
agaaaucauuccagggaga

SEQ ID NO: 2655346 - RNA, 19 nt, Homo sapiens
  misc_RNA (1)...(19): siRNA sense strand
aaagaaaggggcagagaaa

SEQ ID NO: 2655347 - RNA, 19 nt, Homo sapiens
  misc_RNA (1)...(19): siRNA sense strand
acacagaagaggugaaguu

SEQ ID NO: 2655348 - RNA, 19 nt, Homo sapiens
  misc_RNA (1)...(19): siRNA sense strand
agacagaagauggaagaaa

SEQ ID NO: 2655349 - RNA, 19 nt, Homo sapiens
  misc_RNA (1)...(19): siRNA sense strand
agugaaaggcggaagaaaa

SEQ ID NO: 2655350 - RNA, 19 nt, Homo sapiens
  misc_RNA (1)...(19): siRNA sense strand
cgauggugggugugaauua

SEQ ID NO: 2655351 - RNA, 19 nt, Homo sapiens
  misc_RNA (1)...(19): siRNA sense strand
ggacaagaaugauggugga

SEQ ID NO: 2655352 - RNA, 19 nt, Homo sapiens
  misc_RNA (1)...(19): siRNA sense strand
aggacaagcugaaagaaga

SEQ ID NO: 2655353 - RNA, 19 nt, Homo sapiens
  misc_RNA (1)...(19): siRNA sense strand
gauacauccaacagaguaa

SEQ ID NO: 2655354 - RNA, 19 nt, Homo sapiens
  misc_RNA (1)...(19): siRNA sense strand
ggaaagugaaccuguggaa

SEQ ID NO: 2655355 - RNA, 19 nt, Homo sapiens
  misc_RNA (1)...(19): siRNA sense strand
gacaagugaacgaaggaaa

SEQ ID NO: 2655356 - RNA, 19 nt, Homo sapiens
  misc_RNA (1)...(19): siRNA sense strand
agagaggaggagaaggaaa

SEQ ID NO: 2655357 - RNA, 19 nt, Homo sapiens
  misc_RNA (1)...(19): siRNA sense strand
ggagaaggaaagagagugu

SEQ ID NO: 2655358 - RNA, 19 nt, Homo sapiens
  misc_RNA (1)...(19): siRNA sense strand
auaagauagaccugggaaa

SEQ ID NO: 2655359 - RNA, 19 nt, Homo sapiens
  misc_RNA (1)...(19): siRNA sense strand
ccauuuacuggcugggaaa

SEQ ID NO: 2655360 - RNA, 19 nt, Homo sapiens
  misc_RNA (1)...(19): siRNA sense strand
gaaagcagagagagaggaa

SEQ ID NO: 2655361 - RNA, 19 nt, Homo sapiens
  misc_RNA (1)...(19): siRNA sense strand
cuagagaggaugaagaaga

SEQ ID NO: 2655362 - RNA, 19 nt, Homo sapiens
  misc_RNA (1)...(19): siRNA sense strand
gugugaggcuucagggaca

SEQ ID NO: 2655363 - RNA, 19 nt, Homo sapiens
  misc_RNA (1)...(19): siRNA sense strand
cuuuaagguagacgggaaa

SEQ ID NO: 2655364 - RNA, 19 nt, Homo sapiens
  misc_RNA (1)...(19): siRNA sense strand
gugaagagaaagaagcuau

SEQ ID NO: 2655365 - RNA, 19 nt, Homo sapiens
  misc_RNA (1)...(19): siRNA sense strand
ccacaggcuuuaaccguaa

SEQ ID NO: 2655366 - RNA, 19 nt, Homo sapiens
  misc_RNA (1)...(19): siRNA sense strand
gggaagcagcgaugggaga

SEQ ID NO: 2655367 - RNA, 19 nt, Homo sapiens
  misc_RNA (1)...(19): siRNA sense strand
gcuuaaagggccaccaaau

SEQ ID NO: 2655368 - RNA, 19 nt, Homo sapiens
  misc_RNA (1)...(19): siRNA sense strand
uaaucaagaaagaggaaga

SEQ ID NO: 2655369 - RNA, 19 nt, Homo sapiens
  misc_RNA (1)...(19): siRNA sense strand
aucaaaaccuacagagaaa

SEQ ID NO: 2655370 - RNA, 19 nt, Homo sapiens
  misc_RNA (1)...(19): siRNA sense strand
gaggagaagggcagccuaa

SEQ ID NO: 2655371 - RNA, 19 nt, Homo sapiens
  misc_RNA (1)...(19): siRNA sense strand
gcucagaugcgaaaggaca

SEQ ID NO: 2655372 - RNA, 19 nt, Homo sapiens
  misc_RNA (1)...(19): siRNA sense strand
gcagauacuaugaggagga

SEQ ID NO: 2655373 - RNA, 19 nt, Homo sapiens
  misc_RNA (1)...(19): siRNA sense strand
acucauggaauaauggaaa

SEQ ID NO: 2655374 - RNA, 19 nt, Homo sapiens
  misc_RNA (1)...(19): siRNA sense strand
guuacuggcuggagaagau

SEQ ID NO: 2655375 - RNA, 19 nt, Homo sapiens
  misc_RNA (1)...(19): siRNA sense strand
cuacagagaaauuguucaa

SEQ ID NO: 2655376 - RNA, 19 nt, Homo sapiens
  misc_RNA (1)...(19): siRNA sense strand
gucaagaggacaagaauga

SEQ ID NO: 2655377 - RNA, 19 nt, Homo sapiens
  misc_RNA (1)...(19): siRNA sense strand
gaauauagaacuugccuca

SEQ ID NO: 2655378 - RNA, 19 nt, Homo sapiens
  misc_RNA (1)...(19): siRNA sense strand
gaaaaugaaaugaguggaa

SEQ ID NO: 2655379 - RNA, 19 nt, Homo sapiens
  misc_RNA (1)...(19): siRNA sense strand
gugaucgacuggaggagaa

SEQ ID NO: 2655380 - RNA, 19 nt, Homo sapiens
  misc_RNA (1)...(19): siRNA sense strand
gauuauaguaggaagcuga

SEQ ID NO: 2655381 - RNA, 19 nt, Homo sapiens
  misc_RNA (1)...(19): siRNA sense strand
cuuaaagggccaccaaaua

SEQ ID NO: 2655382 - RNA, 19 nt, Homo sapiens
  misc_RNA (1)...(19): siRNA sense strand
cccagaaauuaaagcagaa

SEQ ID NO: 2655383 - RNA, 19 nt, Homo sapiens
  misc_RNA (1)...(19): siRNA sense strand
aggacuuaaucaagaaaga

SEQ ID NO: 2655384 - RNA, 19 nt, Homo sapiens
  misc_RNA (1)...(19): siRNA sense strand
auucagaggcagaagguga

SEQ ID NO: 2655385 - RNA, 19 nt, Homo sapiens
  misc_RNA (1)...(19): siRNA sense strand
ugucaaaggcagaaagauc

SEQ ID NO: 2655386 - RNA, 19 nt, Homo sapiens
  misc_RNA (1)...(19): siRNA sense strand
gacugaaaggccagcgaaa

SEQ ID NO: 2655387 - RNA, 19 nt, Homo sapiens
  misc_RNA (1)...(19): siRNA sense strand
cacuaaaccugaaggaguu

SEQ ID NO: 2655388 - RNA, 19 nt, Homo sapiens
  misc_RNA (1)...(19): siRNA sense strand
cgaggugacuauugcagaa

SEQ ID NO: 2655389 - RNA, 19 nt, Homo sapiens
  misc_RNA (1)...(19): siRNA sense strand
aaagaagaaagcagagaga

SEQ ID NO: 2655390 - RNA, 19 nt, Homo sapiens
  misc_RNA (1)...(19): siRNA sense strand
ggagagacucaaaguguca

SEQ ID NO: 2655391 - RNA, 19 nt, Homo sapiens
  misc_RNA (1)...(19): siRNA sense strand
agagagaggaauaccgcaa

SEQ ID NO: 2655392 - RNA, 19 nt, Homo sapiens
  misc_RNA (1)...(19): siRNA sense strand
gcaacgauucagaggcaga

SEQ ID NO: 2655393 - RNA, 19 nt, Homo sapiens
  misc_RNA (1)...(19): siRNA sense strand
gcagaaagaucagaggaca

SEQ ID NO: 2655394 - RNA, 19 nt, Homo sapiens
  misc_RNA (1)...(19): siRNA sense strand
gaggagaaggaaagagagu

SEQ ID NO: 2655395 - RNA, 19 nt, Homo sapiens
  misc_RNA (1)...(19): siRNA sense strand
acacuaaaccugaaggagu

SEQ ID NO: 2655396 - RNA, 19 nt, Homo sapiens
  misc_RNA (1)...(19): siRNA sense strand
aggaggagaaggaaagaga

SEQ ID NO: 2655397 - RNA, 19 nt, Homo sapiens
  misc_RNA (1)...(19): siRNA sense strand
gaccagaagaaaccagaaa

SEQ ID NO: 2655398 - RNA, 19 nt, Homo sapiens
  misc_RNA (1)...(19): siRNA sense strand
cccaaaaggagguggaaga

SEQ ID NO: 2655399 - RNA, 19 nt, Homo sapiens
  misc_RNA (1)...(19): siRNA sense strand
cgaaaucagcagugccuuu

SEQ ID NO: 2655400 - RNA, 19 nt, Homo sapiens
  misc_RNA (1)...(19): siRNA sense strand
agaaagaagcuauucguga

SEQ ID NO: 2655401 - RNA, 19 nt, Homo sapiens
  misc_RNA (1)...(19): siRNA sense strand
agagcaaggaugaaccaaa

SEQ ID NO: 2655402 - RNA, 19 nt, Homo sapiens
  misc_RNA (1)...(19): siRNA sense strand
ccaagaaaggacagaccaa

SEQ ID NO: 2655403 - RNA, 19 nt, Homo sapiens
  misc_RNA (1)...(19): siRNA sense strand
uggaaaugaaauugagaga

SEQ ID NO: 2655404 - RNA, 19 nt, Homo sapiens
  misc_RNA (1)...(19): siRNA sense strand
gggucaacugugaugguua

SEQ ID NO: 2655405 - RNA, 19 nt, Homo sapiens
  misc_RNA (1)...(19): siRNA sense strand
gaaaugaaauugagagacc

SEQ ID NO: 2655406 - RNA, 19 nt, Homo sapiens
  misc_RNA (1)...(19): siRNA sense strand
cugugaaaggccugggaau

SEQ ID NO: 2655407 - RNA, 19 nt, Homo sapiens
  misc_RNA (1)...(19): siRNA sense strand
auuaaggagcugauagaau

SEQ ID NO: 2655408 - RNA, 19 nt, Homo sapiens
  misc_RNA (1)...(19): siRNA sense strand
ugugaaaggccugggaauu

SEQ ID NO: 2655409 - RNA, 19 nt, Homo sapiens
  misc_RNA (1)...(19): siRNA sense strand
gggaaaauaggcugcauau

SEQ ID NO: 2655410 - RNA, 19 nt, Homo sapiens
  misc_RNA (1)...(19): siRNA sense strand
uggcaugacagcuggagau

SEQ ID NO: 2655411 - RNA, 19 nt, Homo sapiens
  misc_RNA (1)...(19): siRNA sense strand
ggaagaaagucuccggcaa

SEQ ID NO: 2655412 - RNA, 19 nt, Homo sapiens
  misc_RNA (1)...(19): siRNA sense strand
gaaagaugacaguuggaaa

SEQ ID NO: 2655413 - RNA, 19 nt, Homo sapiens
  misc_RNA (1)...(19): siRNA sense strand
cagugaaagcauuuaguaa

SEQ ID NO: 2655414 - RNA, 19 nt, Homo sapiens
  misc_RNA (1)...(19): siRNA sense strand
gggaauagaauauaguaga

SEQ ID NO: 2655415 - RNA, 19 nt, Homo sapiens
  misc_RNA (1)...(19): siRNA sense strand
gcaaauccucccagcaaua

SEQ ID NO: 2655416 - RNA, 19 nt, Homo sapiens
  misc_RNA (1)...(19): siRNA sense strand
gagcacagucucagcaaau

SEQ ID NO: 2655417 - RNA, 19 nt, Homo sapiens
  misc_RNA (1)...(19): siRNA sense strand
acaaguugacucagugaaa

SEQ ID NO: 2655418 - RNA, 19 nt, Homo sapiens
  misc_RNA (1)...(19): siRNA sense strand
caguauacccugcuguuaa

SEQ ID NO: 2655419 - RNA, 19 nt, Homo sapiens
  misc_RNA (1)...(19): siRNA sense strand
cagcagaagugacucaaau

SEQ ID NO: 2655420 - RNA, 19 nt, Homo sapiens
  misc_RNA (1)...(19): siRNA sense strand
ugaaaagcucagacagaaa

SEQ ID NO: 2655421 - RNA, 19 nt, Homo sapiens
  misc_RNA (1)...(19): siRNA sense strand
guuuagaugaugaagauga

SEQ ID NO: 2655422 - RNA, 19 nt, Homo sapiens
  misc_RNA (1)...(19): siRNA sense strand
cagcaaauccucccagcaa

SEQ ID NO: 2655423 - RNA, 19 nt, Homo sapiens
  misc_RNA (1)...(19): siRNA sense strand
uggugaagaagcuggagaa

SEQ ID NO: 2655424 - RNA, 19 nt, Homo sapiens
  misc_RNA (1)...(19): siRNA sense strand
aaccagaccugcagggaca

SEQ ID NO: 2655425 - RNA, 19 nt, Homo sapiens
  misc_RNA (1)...(19): siRNA sense strand
agugccaaacggaggaaua

SEQ ID NO: 2655426 - RNA, 19 nt, Homo sapiens
  misc_RNA (1)...(19): siRNA sense strand
ccgaacaucuaauacacaa

SEQ ID NO: 2655427 - RNA, 19 nt, Homo sapiens
  misc_RNA (1)...(19): siRNA sense strand
acagacaagcaauguuaaa

SEQ ID NO: 2655428 - RNA, 19 nt, Homo sapiens
  misc_RNA (1)...(19): siRNA sense strand
ccacagauuuacagacaag

SEQ ID NO: 2655429 - RNA, 19 nt, Homo sapiens
  misc_RNA (1)...(19): siRNA sense strand
aggccaucccacagauuua

SEQ ID NO: 2655430 - RNA, 19 nt, Homo sapiens
  misc_RNA (1)...(19): siRNA sense strand
agcaauaucaacagcgcua

SEQ ID NO: 2655431 - RNA, 19 nt, Homo sapiens
  misc_RNA (1)...(19): siRNA sense strand
ucaggaacuugaugcacaa

SEQ ID NO: 2655432 - RNA, 19 nt, Homo sapiens
  misc_RNA (1)...(19): siRNA sense strand
gggacaacugcaaugagaa

SEQ ID NO: 2655433 - RNA, 19 nt, Homo sapiens
  misc_RNA (1)...(19): siRNA sense strand
gcaugaaagaugacaguug

SEQ ID NO: 2655434 - RNA, 19 nt, Homo sapiens
  misc_RNA (1)...(19): siRNA sense strand
gaaagauggcuguuacuga

SEQ ID NO: 2655435 - RNA, 19 nt, Homo sapiens
  misc_RNA (1)...(19): siRNA sense strand
uuacagacaagcaauguua

SEQ ID NO: 2655436 - RNA, 19 nt, Homo sapiens
  misc_RNA (1)...(19): siRNA sense strand
ccaaaugccaguagcccau

SEQ ID NO: 2655437 - RNA, 19 nt, Homo sapiens
  misc_RNA (1)...(19): siRNA sense strand
ugcacaaaguuuagaugau

SEQ ID NO: 2655438 - RNA, 19 nt, Homo sapiens
  misc_RNA (1)...(19): siRNA sense strand
cacaaaguuuagaugauga

SEQ ID NO: 2655439 - RNA, 19 nt, Homo sapiens
  misc_RNA (1)...(19): siRNA sense strand
ugauguugagugugcuaaa

SEQ ID NO: 2655440 - RNA, 19 nt, Homo sapiens
  misc_RNA (1)...(19): siRNA sense strand
agaugaugaagaugacaau

SEQ ID NO: 2655441 - RNA, 19 nt, Homo sapiens
  misc_RNA (1)...(19): siRNA sense strand
ggacaacugcaaugagaag

SEQ ID NO: 2655442 - RNA, 19 nt, Homo sapiens
  misc_RNA (1)...(19): siRNA sense strand
uagaugaugaagaugacaa

SEQ ID NO: 2655443 - RNA, 19 nt, Homo sapiens
  misc_RNA (1)...(19): siRNA sense strand
gauuagccgcuuacagcaa

SEQ ID NO: 2655444 - RNA, 19 nt, Homo sapiens
  misc_RNA (1)...(19): siRNA sense strand
gcagaagugacucaaauuu

SEQ ID NO: 2655445 - RNA, 19 nt, Homo sapiens
  misc_RNA (1)...(19): siRNA sense strand
cauaccuucuccaggcaaa

SEQ ID NO: 2655446 - RNA, 19 nt, Homo sapiens
  misc_RNA (1)...(19): siRNA sense strand
cuugaaaagcucagacaga

SEQ ID NO: 2655447 - RNA, 19 nt, Homo sapiens
  misc_RNA (1)...(19): siRNA sense strand
gccuaugauuagccgcuua

SEQ ID NO: 2655448 - RNA, 19 nt, Homo sapiens
  misc_RNA (1)...(19): siRNA sense strand
gaugacaguuggaaagaug

SEQ ID NO: 2655449 - RNA, 19 nt, Homo sapiens
  misc_RNA (1)...(19): siRNA sense strand
ggaauagaauauaguagag

SEQ ID NO: 2655450 - RNA, 19 nt, Homo sapiens
  misc_RNA (1)...(19): siRNA sense strand
agggacaacugcaaugaga

SEQ ID NO: 2655451 - RNA, 19 nt, Homo sapiens
  misc_RNA (1)...(19): siRNA sense strand
gcaaccagugaaagcauuu

SEQ ID NO: 2655452 - RNA, 19 nt, Homo sapiens
  misc_RNA (1)...(19): siRNA sense strand
ggacaaagaaguugggaga

SEQ ID NO: 2655453 - RNA, 19 nt, Homo sapiens
  misc_RNA (1)...(19): siRNA sense strand
gaacugagcucgagaaaga

SEQ ID NO: 2655454 - RNA, 19 nt, Homo sapiens
  misc_RNA (1)...(19): siRNA sense strand
ggaagaaguuugugacaga

SEQ ID NO: 2655455 - RNA, 19 nt, Homo sapiens
  misc_RNA (1)...(19): siRNA sense strand
cagcgaagaacaagagaaa

SEQ ID NO: 2655456 - RNA, 19 nt, Homo sapiens
  misc_RNA (1)...(19): siRNA sense strand
ugucaaaccuggugaauau

SEQ ID NO: 2655457 - RNA, 19 nt, Homo sapiens
  misc_RNA (1)...(19): siRNA sense strand
ggaaauacucuucguguaa

SEQ ID NO: 2655458 - RNA, 19 nt, Homo sapiens
  misc_RNA (1)...(19): siRNA sense strand
agauaauagcagugaacaa

SEQ ID NO: 2655459 - RNA, 19 nt, Homo sapiens
  misc_RNA (1)...(19): siRNA sense strand
ccguaaagauguugguaca

SEQ ID NO: 2655460 - RNA, 19 nt, Homo sapiens
  misc_RNA (1)...(19): siRNA sense strand
ccauuaauccagagagaau

SEQ ID NO: 2655461 - RNA, 19 nt, Homo sapiens
  misc_RNA (1)...(19): siRNA sense strand
gagaagaugcacagggauu

SEQ ID NO: 2655462 - RNA, 19 nt, Homo sapiens
  misc_RNA (1)...(19): siRNA sense strand
aggccaaaccaaugggaaa

SEQ ID NO: 2655463 - RNA, 19 nt, Homo sapiens
  misc_RNA (1)...(19): siRNA sense strand
agaaauaacuaaugaggca

SEQ ID NO: 2655464 - RNA, 19 nt, Homo sapiens
  misc_RNA (1)...(19): siRNA sense strand
acauaaaucaagaggaaga

SEQ ID NO: 2655465 - RNA, 19 nt, Homo sapiens
  misc_RNA (1)...(19): siRNA sense strand
cggauaaaccauagcagua

SEQ ID NO: 2655466 - RNA, 19 nt, Homo sapiens
  misc_RNA (1)...(19): siRNA sense strand
gaauauaggccucggucua

SEQ ID NO: 2655467 - RNA, 19 nt, Homo sapiens
  misc_RNA (1)...(19): siRNA sense strand
ggacauuuacaguggacua

SEQ ID NO: 2655468 - RNA, 19 nt, Homo sapiens
  misc_RNA (1)...(19): siRNA sense strand
gccaagaauccuagcauaa

SEQ ID NO: 2655469 - RNA, 19 nt, Homo sapiens
  misc_RNA (1)...(19): siRNA sense strand
agaugaaagaugugaagaa

SEQ ID NO: 2655470 - RNA, 19 nt, Homo sapiens
  misc_RNA (1)...(19): siRNA sense strand
ggccaagacccauggauua

SEQ ID NO: 2655471 - RNA, 19 nt, Homo sapiens
  misc_RNA (1)...(19): siRNA sense strand
ggauacuaguacugaggaa

SEQ ID NO: 2655472 - RNA, 19 nt, Homo sapiens
  misc_RNA (1)...(19): siRNA sense strand
caguggagcaggauggaaa

SEQ ID NO: 2655473 - RNA, 19 nt, Homo sapiens
  misc_RNA (1)...(19): siRNA sense strand
ggaagaaguagcuguggaa

SEQ ID NO: 2655474 - RNA, 19 nt, Homo sapiens
  misc_RNA (1)...(19): siRNA sense strand
uggaagaugcagaggguga

SEQ ID NO: 2655475 - RNA, 19 nt, Homo sapiens
  misc_RNA (1)...(19): siRNA sense strand
ugacagaugaagaagcaaa

SEQ ID NO: 2655476 - RNA, 19 nt, Homo sapiens
  misc_RNA (1)...(19): siRNA sense strand
uggaaauaccuaaggguga

SEQ ID NO: 2655477 - RNA, 19 nt, Homo sapiens
  misc_RNA (1)...(19): siRNA sense strand
ggaagaaaugggaaaccaa

SEQ ID NO: 2655478 - RNA, 19 nt, Homo sapiens
  misc_RNA (1)...(19): siRNA sense strand
gcgacaugaugaagaugaa

SEQ ID NO: 2655479 - RNA, 19 nt, Homo sapiens
  misc_RNA (1)...(19): siRNA sense strand
cugcaaugguuuugaacaa

SEQ ID NO: 2655480 - RNA, 19 nt, Homo sapiens
  misc_RNA (1)...(19): siRNA sense strand
caguauuaaaggaggaaca

SEQ ID NO: 2655481 - RNA, 19 nt, Homo sapiens
  misc_RNA (1)...(19): siRNA sense strand
aagaagagcaagaugguuu

SEQ ID NO: 2655482 - RNA, 19 nt, Homo sapiens
  misc_RNA (1)...(19): siRNA sense strand
cuuuaaagccauugcuaau

SEQ ID NO: 2655483 - RNA, 19 nt, Homo sapiens
  misc_RNA (1)...(19): siRNA sense strand
agaauauugaagagagcua

SEQ ID NO: 2655484 - RNA, 19 nt, Homo sapiens
  misc_RNA (1)...(19): siRNA sense strand
aagaagaagaagcggauuu

SEQ ID NO: 2655485 - RNA, 19 nt, Homo sapiens
  misc_RNA (1)...(19): siRNA sense strand
uggaaauacuagcagaauu

SEQ ID NO: 2655486 - RNA, 19 nt, Homo sapiens
  misc_RNA (1)...(19): siRNA sense strand
uguacaaaugguuggauaa

SEQ ID NO: 2655487 - RNA, 19 nt, Homo sapiens
  misc_RNA (1)...(19): siRNA sense strand
ggauaaacacagaugcaca

SEQ ID NO: 2655488 - RNA, 19 nt, Homo sapiens
  misc_RNA (1)...(19): siRNA sense strand
cugagaagacgguggauga

SEQ ID NO: 2655489 - RNA, 19 nt, Homo sapiens
  misc_RNA (1)...(19): siRNA sense strand
ggcuggaagaaaugggaaa

SEQ ID NO: 2655490 - RNA, 19 nt, Homo sapiens
  misc_RNA (1)...(19): siRNA sense strand
aagaaguagcuguggaaga

SEQ ID NO: 2655491 - RNA, 19 nt, Homo sapiens
  misc_RNA (1)...(19): siRNA sense strand
ucagaauguuccagauaau

SEQ ID NO: 2655492 - RNA, 19 nt, Homo sapiens
  misc_RNA (1)...(19): siRNA sense strand
cuacaacagaagacauaaa

SEQ ID NO: 2655493 - RNA, 19 nt, Homo sapiens
  misc_RNA (1)...(19): siRNA sense strand
aggaaauacucuucgugua

SEQ ID NO: 2655494 - RNA, 19 nt, Homo sapiens
  misc_RNA (1)...(19): siRNA sense strand
aagcaaaagucauaggaau

SEQ ID NO: 2655495 - RNA, 19 nt, Homo sapiens
  misc_RNA (1)...(19): siRNA sense strand
acaaaugguuggauaacau

SEQ ID NO: 2655496 - RNA, 19 nt, Homo sapiens
  misc_RNA (1)...(19): siRNA sense strand
gcacuggaaucuuuguaua

SEQ ID NO: 2655497 - RNA, 19 nt, Homo sapiens
  misc_RNA (1)...(19): siRNA sense strand
caguguccuuagagaaaua

SEQ ID NO: 2655498 - RNA, 19 nt, Homo sapiens
  misc_RNA (1)...(19): siRNA sense strand
ggauguucuuucaggauuu

SEQ ID NO: 2655499 - RNA, 19 nt, Homo sapiens
  misc_RNA (1)...(19): siRNA sense strand
cggaguaacacacuggaua

SEQ ID NO: 2655500 - RNA, 19 nt, Homo sapiens
  misc_RNA (1)...(19): siRNA sense strand
caaccaaguaaauacgaua

SEQ ID NO: 2655501 - RNA, 19 nt, Homo sapiens
  misc_RNA (1)...(19): siRNA sense strand
ggaaccaauuucugucaua

SEQ ID NO: 2655502 - RNA, 19 nt, Homo sapiens
  misc_RNA (1)...(19): siRNA sense strand
cuuaaaagaccgagaacuu

SEQ ID NO: 2655503 - RNA, 19 nt, Homo sapiens
  misc_RNA (1)...(19): siRNA sense strand
gcugaaaccaugaagcauu

SEQ ID NO: 2655504 - RNA, 19 nt, Homo sapiens
  misc_RNA (1)...(19): siRNA sense strand
caccauuaauccagagaga

SEQ ID NO: 2655505 - RNA, 19 nt, Homo sapiens
  misc_RNA (1)...(19): siRNA sense strand
gagcagaacugaccugauu

SEQ ID NO: 2655506 - RNA, 19 nt, Homo sapiens
  misc_RNA (1)...(19): siRNA sense strand
gaacugaccugauugaauu

SEQ ID NO: 2655507 - RNA, 19 nt, Homo sapiens
  misc_RNA (1)...(19): siRNA sense strand
ucagagaacagauggagua

SEQ ID NO: 2655508 - RNA, 19 nt, Homo sapiens
  misc_RNA (1)...(19): siRNA sense strand
acaucgagcugguggacuu

SEQ ID NO: 2655509 - RNA, 19 nt, Homo sapiens
  misc_RNA (1)...(19): siRNA sense strand
guauaugacagcaaaguau

SEQ ID NO: 2655510 - RNA, 19 nt, Homo sapiens
  misc_RNA (1)...(19): siRNA sense strand
auaugaugaugaagaggaa

SEQ ID NO: 2655511 - RNA, 19 nt, Homo sapiens
  misc_RNA (1)...(19): siRNA sense strand
ggaaaguauccucaaagaa

SEQ ID NO: 2655512 - RNA, 19 nt, Homo sapiens
  misc_RNA (1)...(19): siRNA sense strand
gguugaaggcuuugcgcuu

SEQ ID NO: 2655513 - RNA, 19 nt, Homo sapiens
  misc_RNA (1)...(19): siRNA sense strand
gcauaaagagugcugaaca

SEQ ID NO: 2655514 - RNA, 19 nt, Homo sapiens
  misc_RNA (1)...(19): siRNA sense strand
ggaguaacacacuggauau

SEQ ID NO: 2655515 - RNA, 19 nt, Homo sapiens
  misc_RNA (1)...(19): siRNA sense strand
gggugaaaguauggacaau

SEQ ID NO: 2655516 - RNA, 19 nt, Homo sapiens
  misc_RNA (1)...(19): siRNA sense strand
cagcaucacaacagaggaa

SEQ ID NO: 2655517 - RNA, 19 nt, Homo sapiens
  misc_RNA (1)...(19): siRNA sense strand
gauaaacacagaugcacaa

SEQ ID NO: 2655518 - RNA, 19 nt, Homo sapiens
  misc_RNA (1)...(19): siRNA sense strand
aaacacagaugcacaacaa

SEQ ID NO: 2655519 - RNA, 19 nt, Homo sapiens
  misc_RNA (1)...(19): siRNA sense strand
uuguacaaaugguuggaua

SEQ ID NO: 2655520 - RNA, 19 nt, Homo sapiens
  misc_RNA (1)...(19): siRNA sense strand
cguuguuacuggagcugaa

SEQ ID NO: 2655521 - RNA, 19 nt, Homo sapiens
  misc_RNA (1)...(19): siRNA sense strand
gcaaauugaaauggacuaa

SEQ ID NO: 2655522 - RNA, 19 nt, Homo sapiens
  misc_RNA (1)...(19): siRNA sense strand
ugcacgaggaagagggaau

SEQ ID NO: 2655523 - RNA, 19 nt, Homo sapiens
  misc_RNA (1)...(19): siRNA sense strand
uuguagaaaucgaggcaag

SEQ ID NO: 2655524 - RNA, 19 nt, Homo sapiens
  misc_RNA (1)...(19): siRNA sense strand
caagaagagcaaugccuga

SEQ ID NO: 2655525 - RNA, 19 nt, Homo sapiens
  misc_RNA (1)...(19): siRNA sense strand
ccacuaaauguguaaggca

SEQ ID NO: 2655526 - RNA, 19 nt, Homo sapiens
  misc_RNA (1)...(19): siRNA sense strand
agggaaucgugguggcagu

SEQ ID NO: 2655527 - RNA, 19 nt, Homo sapiens
  misc_RNA (1)...(19): siRNA sense strand
ugagcugcauggagcggaa

SEQ ID NO: 2655528 - RNA, 19 nt, Homo sapiens
  misc_RNA (1)...(19): siRNA sense strand
gcagugaugucuuggccca

SEQ ID NO: 2655529 - RNA, 19 nt, Homo sapiens
  misc_RNA (1)...(19): siRNA sense strand
ugaaagggcaggugcgaaa

SEQ ID NO: 2655530 - RNA, 19 nt, Homo sapiens
  misc_RNA (1)...(19): siRNA sense strand
ggugaaacacacaggcaua

SEQ ID NO: 2655531 - RNA, 19 nt, Homo sapiens
  misc_RNA (1)...(19): siRNA sense strand
uugccaagcuggagccaaa

SEQ ID NO: 2655532 - RNA, 19 nt, Homo sapiens
  misc_RNA (1)...(19): siRNA sense strand
ccaugcaaauaaagacaaa

SEQ ID NO: 2655533 - RNA, 19 nt, Homo sapiens
  misc_RNA (1)...(19): siRNA sense strand
ggacauaauuccuugacca

SEQ ID NO: 2655534 - RNA, 19 nt, Homo sapiens
  misc_RNA (1)...(19): siRNA sense strand
cagaaagauagcucaguua

SEQ ID NO: 2655535 - RNA, 19 nt, Homo sapiens
  misc_RNA (1)...(19): siRNA sense strand
gggcaggcaucaaagggaa

SEQ ID NO: 2655536 - RNA, 19 nt, Homo sapiens
  misc_RNA (1)...(19): siRNA sense strand
gcagaaggguacagggaag

SEQ ID NO: 2655537 - RNA, 19 nt, Homo sapiens
  misc_RNA (1)...(19): siRNA sense strand
gagggauaauggagguaau

SEQ ID NO: 2655538 - RNA, 19 nt, Homo sapiens
  misc_RNA (1)...(19): siRNA sense strand
cagcaaggaagcagugaau

SEQ ID NO: 2655539 - RNA, 19 nt, Homo sapiens
  misc_RNA (1)...(19): siRNA sense strand
auaggaagcaggaagauaa

SEQ ID NO: 2655540 - RNA, 19 nt, Homo sapiens
  misc_RNA (1)...(19): siRNA sense strand
cuugaagcugggagggaua

SEQ ID NO: 2655541 - RNA, 19 nt, Homo sapiens
  misc_RNA (1)...(19): siRNA sense strand
ggcaaaugauguugaaaau

SEQ ID NO: 2655542 - RNA, 19 nt, Homo sapiens
  misc_RNA (1)...(19): siRNA sense strand
gaacuuuaagccaggcaaa

SEQ ID NO: 2655543 - RNA, 19 nt, Homo sapiens
  misc_RNA (1)...(19): siRNA sense strand
uguugaaguagaaguguua

SEQ ID NO: 2655544 - RNA, 19 nt, Homo sapiens
  misc_RNA (1)...(19): siRNA sense strand
aggaagaguggaugaguca

SEQ ID NO: 2655545 - RNA, 19 nt, Homo sapiens
  misc_RNA (1)...(19): siRNA sense strand
guacagggaaggacgguau

SEQ ID NO: 2655546 - RNA, 19 nt, Homo sapiens
  misc_RNA (1)...(19): siRNA sense strand
aggcaaaugauguugaaaa

SEQ ID NO: 2655547 - RNA, 19 nt, Homo sapiens
  misc_RNA (1)...(19): siRNA sense strand
guauacgaaaggagaguuu

SEQ ID NO: 2655548 - RNA, 19 nt, Homo sapiens
  misc_RNA (1)...(19): siRNA sense strand
aaauagacaagaagcacaa

SEQ ID NO: 2655549 - RNA, 19 nt, Homo sapiens
  misc_RNA (1)...(19): siRNA sense strand
uguaugaagaccaggaaga

SEQ ID NO: 2655550 - RNA, 19 nt, Homo sapiens
  misc_RNA (1)...(19): siRNA sense strand
ggagaguuucagaggcauu

SEQ ID NO: 2655551 - RNA, 19 nt, Homo sapiens
  misc_RNA (1)...(19): siRNA sense strand
ugcugaaaguggaagaaau

SEQ ID NO: 2655552 - RNA, 19 nt, Homo sapiens
  misc_RNA (1)...(19): siRNA sense strand
gcggaagaagccagucaaa

SEQ ID NO: 2655553 - RNA, 19 nt, Homo sapiens
  misc_RNA (1)...(19): siRNA sense strand
cuaauaggaagcaggaaga

SEQ ID NO: 2655554 - RNA, 19 nt, Homo sapiens
  misc_RNA (1)...(19): siRNA sense strand
guaucaaggcucagaggca

SEQ ID NO: 2655555 - RNA, 19 nt, Homo sapiens
  misc_RNA (1)...(19): siRNA sense strand
caagauuugcagaagggua

SEQ ID NO: 2655556 - RNA, 19 nt, Homo sapiens
  misc_RNA (1)...(19): siRNA sense strand
gacucauguuggaaauaaa

SEQ ID NO: 2655557 - RNA, 19 nt, Homo sapiens
  misc_RNA (1)...(19): siRNA sense strand
agucaaagcuguugccaag

SEQ ID NO: 2655558 - RNA, 19 nt, Homo sapiens
  misc_RNA (1)...(19): siRNA sense strand
uaccugaaccaaaggaaua

SEQ ID NO: 2655559 - RNA, 19 nt, Homo sapiens
  misc_RNA (1)...(19): siRNA sense strand
ugacgggaauguuggaaaa

SEQ ID NO: 2655560 - RNA, 19 nt, Homo sapiens
  misc_RNA (1)...(19): siRNA sense strand
ggggauaagccuuuggaau

SEQ ID NO: 2655561 - RNA, 19 nt, Homo sapiens
  misc_RNA (1)...(19): siRNA sense strand
auuaaauaagcaagggaga

SEQ ID NO: 2655562 - RNA, 19 nt, Homo sapiens
  misc_RNA (1)...(19): siRNA sense strand
aaggagaguuucagaggca

SEQ ID NO: 2655563 - RNA, 19 nt, Homo sapiens
  misc_RNA (1)...(19): siRNA sense strand
gugaaauggguaaggucuu

SEQ ID NO: 2655564 - RNA, 19 nt, Homo sapiens
  misc_RNA (1)...(19): siRNA sense strand
aggaagauaaccagacaga

SEQ ID NO: 2655565 - RNA, 19 nt, Homo sapiens
  misc_RNA (1)...(19): siRNA sense strand
uugcagugaaagacaguua

SEQ ID NO: 2655566 - RNA, 19 nt, Homo sapiens
  misc_RNA (1)...(19): siRNA sense strand
auagaagcaacuagagauu

SEQ ID NO: 2655567 - RNA, 19 nt, Homo sapiens
  misc_RNA (1)...(19): siRNA sense strand
ugauagaugugaagguugu

SEQ ID NO: 2655568 - RNA, 19 nt, Homo sapiens
  misc_RNA (1)...(19): siRNA sense strand
cacagguacucuucagaaa

SEQ ID NO: 2655569 - RNA, 19 nt, Homo sapiens
  misc_RNA (1)...(19): siRNA sense strand
agauggcaguaauaggaaa

SEQ ID NO: 2655570 - RNA, 19 nt, Homo sapiens
  misc_RNA (1)...(19): siRNA sense strand
ccucuuguauggacagcaa

SEQ ID NO: 2655571 - RNA, 19 nt, Homo sapiens
  misc_RNA (1)...(19): siRNA sense strand
cuauggugcuauuagaaau

SEQ ID NO: 2655572 - RNA, 19 nt, Homo sapiens
  misc_RNA (1)...(19): siRNA sense strand
cugaacguauggugaaaga

SEQ ID NO: 2655573 - RNA, 19 nt, Homo sapiens
  misc_RNA (1)...(19): siRNA sense strand
caaauagacaagaagcaca

SEQ ID NO: 2655574 - RNA, 19 nt, Homo sapiens
  misc_RNA (1)...(19): siRNA sense strand
cagucaaagcuguugccaa

SEQ ID NO: 2655575 - RNA, 19 nt, Homo sapiens
  misc_RNA (1)...(19): siRNA sense strand
ggauaauggagguaauucu

SEQ ID NO: 2655576 - RNA, 19 nt, Homo sapiens
  misc_RNA (1)...(19): siRNA sense strand
agcaauaauuccagugcga

SEQ ID NO: 2655577 - RNA, 19 nt, Homo sapiens
  misc_RNA (1)...(19): siRNA sense strand
acgaagagaguacaugaaa

SEQ ID NO: 2655578 - RNA, 19 nt, Homo sapiens
  misc_RNA (1)...(19): siRNA sense strand
ucaacauaagagugaguau

SEQ ID NO: 2655579 - RNA, 19 nt, Homo sapiens
  misc_RNA (1)...(19): siRNA sense strand
aagaauucugaaaggacua

SEQ ID NO: 2655580 - RNA, 19 nt, Homo sapiens
  misc_RNA (1)...(19): siRNA sense strand
acucagacuuacagccuuu

SEQ ID NO: 2655581 - RNA, 19 nt, Homo sapiens
  misc_RNA (1)...(19): siRNA sense strand
accaaugugaugaagguaa

SEQ ID NO: 2655582 - RNA, 19 nt, Homo sapiens
  misc_RNA (1)...(19): siRNA sense strand
cagucaaauuaaaaggcaa

SEQ ID NO: 2655583 - RNA, 19 nt, Homo sapiens
  misc_RNA (1)...(19): siRNA sense strand
gguaaggaacuuuaagcca

SEQ ID NO: 2655584 - RNA, 19 nt, Homo sapiens
  misc_RNA (1)...(19): siRNA sense strand
uggaaaacucguaggcauu

SEQ ID NO: 2655585 - RNA, 19 nt, Homo sapiens
  misc_RNA (1)...(19): siRNA sense strand
guauuuaagugcugguuuu

SEQ ID NO: 2655586 - RNA, 19 nt, Homo sapiens
  misc_RNA (1)...(19): siRNA sense strand
gugugaguauugugacuau

SEQ ID NO: 2655587 - RNA, 19 nt, Homo sapiens
  misc_RNA (1)...(19): siRNA sense strand
gccaaauagacaagaagca

SEQ ID NO: 2655588 - RNA, 19 nt, Homo sapiens
  misc_RNA (1)...(19): siRNA sense strand
ccgagggcauuaaguggaa

SEQ ID NO: 2655589 - RNA, 19 nt, Homo sapiens
  misc_RNA (1)...(19): siRNA sense strand
gagggcauuaaguggaaua

SEQ ID NO: 2655590 - RNA, 19 nt, Homo sapiens
  misc_RNA (1)...(19): siRNA sense strand
ugauagaagcaacuagaga

SEQ ID NO: 2655591 - RNA, 19 nt, Homo sapiens
  misc_RNA (1)...(19): siRNA sense strand
caauaauuccagugcgacu

SEQ ID NO: 2655592 - RNA, 19 nt, Homo sapiens
  misc_RNA (1)...(19): siRNA sense strand
ucguaggcauugauaguuu

SEQ ID NO: 2655593 - RNA, 19 nt, Homo sapiens
  misc_RNA (1)...(19): siRNA sense strand
ucugaaaggacuaacaaca

SEQ ID NO: 2655594 - RNA, 19 nt, Homo sapiens
  misc_RNA (1)...(19): siRNA sense strand
agccagucauuguguuaaa

SEQ ID NO: 2655595 - RNA, 19 nt, Homo sapiens
  misc_RNA (1)...(19): siRNA sense strand
aggaaauggaugaggaaga

SEQ ID NO: 2655596 - RNA, 19 nt, Homo sapiens
  misc_RNA (1)...(19): siRNA sense strand
cugcagauggaaagagaaa

SEQ ID NO: 2655597 - RNA, 19 nt, Homo sapiens
  misc_RNA (1)...(19): siRNA sense strand
acacaggagcagagcauua

SEQ ID NO: 2655598 - RNA, 19 nt, Homo sapiens
  misc_RNA (1)...(19): siRNA sense strand
uugcaagacaccagagaaa

SEQ ID NO: 2655599 - RNA, 19 nt, Homo sapiens
  misc_RNA (1)...(19): siRNA sense strand
cauugauauuucaggguua

SEQ ID NO: 2655600 - RNA, 19 nt, Homo sapiens
  misc_RNA (1)...(19): siRNA sense strand
cgagaagggaggauguaaa

SEQ ID NO: 2655601 - RNA, 19 nt, Homo sapiens
  misc_RNA (1)...(19): siRNA sense strand
cuacaagacaggauugaaa

SEQ ID NO: 2655602 - RNA, 19 nt, Homo sapiens
  misc_RNA (1)...(19): siRNA sense strand
aggagaagauguagaagau

SEQ ID NO: 2655603 - RNA, 19 nt, Homo sapiens
  misc_RNA (1)...(19): siRNA sense strand
ggaaagagguagaaaggac

SEQ ID NO: 2655604 - RNA, 19 nt, Homo sapiens
  misc_RNA (1)...(19): siRNA sense strand
gagcaggaggugagggaga

SEQ ID NO: 2655605 - RNA, 19 nt, Homo sapiens
  misc_RNA (1)...(19): siRNA sense strand
cagaaggaucagaggaaaa

SEQ ID NO: 2655606 - RNA, 19 nt, Homo sapiens
  misc_RNA (1)...(19): siRNA sense strand
caucugacucgguggaaua

SEQ ID NO: 2655607 - RNA, 19 nt, Homo sapiens
  misc_RNA (1)...(19): siRNA sense strand
augcaguacuauuguguaa

SEQ ID NO: 2655608 - RNA, 19 nt, Homo sapiens
  misc_RNA (1)...(19): siRNA sense strand
gcauuaaggcagagcuuga

SEQ ID NO: 2655609 - RNA, 19 nt, Homo sapiens
  misc_RNA (1)...(19): siRNA sense strand
aguccaagcucgacccaaa

SEQ ID NO: 2655610 - RNA, 19 nt, Homo sapiens
  misc_RNA (1)...(19): siRNA sense strand
gcaagacaccagagaaaca

SEQ ID NO: 2655611 - RNA, 19 nt, Homo sapiens
  misc_RNA (1)...(19): siRNA sense strand
gugcaaagggccaagaaga

SEQ ID NO: 2655612 - RNA, 19 nt, Homo sapiens
  misc_RNA (1)...(19): siRNA sense strand
uaauagaaaccaaggaaca

SEQ ID NO: 2655613 - RNA, 19 nt, Homo sapiens
  misc_RNA (1)...(19): siRNA sense strand
acgaagucccaguaagaaa

SEQ ID NO: 2655614 - RNA, 19 nt, Homo sapiens
  misc_RNA (1)...(19): siRNA sense strand
gcgaaauuucuuacugaua

SEQ ID NO: 2655615 - RNA, 19 nt, Homo sapiens
  misc_RNA (1)...(19): siRNA sense strand
gggcagugauagagcagga

SEQ ID NO: 2655616 - RNA, 19 nt, Homo sapiens
  misc_RNA (1)...(19): siRNA sense strand
acaaggaggaggaaaggaa

SEQ ID NO: 2655617 - RNA, 19 nt, Homo sapiens
  misc_RNA (1)...(19): siRNA sense strand
cgugaaagaggaaguggaa

SEQ ID NO: 2655618 - RNA, 19 nt, Homo sapiens
  misc_RNA (1)...(19): siRNA sense strand
gcacagaagauggaagaau

SEQ ID NO: 2655619 - RNA, 19 nt, Homo sapiens
  misc_RNA (1)...(19): siRNA sense strand
guuuaacacuucaggucua

SEQ ID NO: 2655620 - RNA, 19 nt, Homo sapiens
  misc_RNA (1)...(19): siRNA sense strand
agucuaugaccgagaaauu

SEQ ID NO: 2655621 - RNA, 19 nt, Homo sapiens
  misc_RNA (1)...(19): siRNA sense strand
cagaacaggcuuugcagaa

SEQ ID NO: 2655622 - RNA, 19 nt, Homo sapiens
  misc_RNA (1)...(19): siRNA sense strand
ggaaacaagcagcagaaga

SEQ ID NO: 2655623 - RNA, 19 nt, Homo sapiens
  misc_RNA (1)...(19): siRNA sense strand
gaacuaaucaagaggagga

SEQ ID NO: 2655624 - RNA, 19 nt, Homo sapiens
  misc_RNA (1)...(19): siRNA sense strand
agagaaacaaggcgaaauu

SEQ ID NO: 2655625 - RNA, 19 nt, Homo sapiens
  misc_RNA (1)...(19): siRNA sense strand
aagcagaugaagaagcaua

SEQ ID NO: 2655626 - RNA, 19 nt, Homo sapiens
  misc_RNA (1)...(19): siRNA sense strand
ugaaagaggaaguggaauc

SEQ ID NO: 2655627 - RNA, 19 nt, Homo sapiens
  misc_RNA (1)...(19): siRNA sense strand
ccagcagguuagagaauca

SEQ ID NO: 2655628 - RNA, 19 nt, Homo sapiens
  misc_RNA (1)...(19): siRNA sense strand
gguagaaaggacucaacaa

SEQ ID NO: 2655629 - RNA, 19 nt, Homo sapiens
  misc_RNA (1)...(19): siRNA sense strand
gaaaggaaauggaugagga

SEQ ID NO: 2655630 - RNA, 19 nt, Homo sapiens
  misc_RNA (1)...(19): siRNA sense strand
agacauagagcgggaacua

SEQ ID NO: 2655631 - RNA, 19 nt, Homo sapiens
  misc_RNA (1)...(19): siRNA sense strand
aggcagagcuugaaacacu

SEQ ID NO: 2655632 - RNA, 19 nt, Homo sapiens
  misc_RNA (1)...(19): siRNA sense strand
ugcaaagggccaagaagaa

SEQ ID NO: 2655633 - RNA, 19 nt, Homo sapiens
  misc_RNA (1)...(19): siRNA sense strand
gcaugaugucuuagaggau

SEQ ID NO: 2655634 - RNA, 19 nt, Homo sapiens
  misc_RNA (1)...(19): siRNA sense strand
agaagaaccaccugcacaa

SEQ ID NO: 2655635 - RNA, 19 nt, Homo sapiens
  misc_RNA (1)...(19): siRNA sense strand
ccgugaugcugaacaagaa

SEQ ID NO: 2655636 - RNA, 19 nt, Homo sapiens
  misc_RNA (1)...(19): siRNA sense strand
gugaugaugccgaggacuu

SEQ ID NO: 2655637 - RNA, 19 nt, Homo sapiens
  misc_RNA (1)...(19): siRNA sense strand
ccagagaaacaaggcgaaa

SEQ ID NO: 2655638 - RNA, 19 nt, Homo sapiens
  misc_RNA (1)...(19): siRNA sense strand
cugauaugauaguagaaga

SEQ ID NO: 2655639 - RNA, 19 nt, Homo sapiens
  misc_RNA (1)...(19): siRNA sense strand
cugcagaagaggccuauaa

SEQ ID NO: 2655640 - RNA, 19 nt, Homo sapiens
  misc_RNA (1)...(19): siRNA sense strand
gagcauuaaggcagagcuu

SEQ ID NO: 2655641 - RNA, 19 nt, Homo sapiens
  misc_RNA (1)...(19): siRNA sense strand
gggccauaguagccaagua

SEQ ID NO: 2655642 - RNA, 19 nt, Homo sapiens
  misc_RNA (1)...(19): siRNA sense strand
ggaccaaacccuagcugga

SEQ ID NO: 2655643 - RNA, 19 nt, Homo sapiens
  misc_RNA (1)...(19): siRNA sense strand
ccugacaauauuugguuua

SEQ ID NO: 2655644 - RNA, 19 nt, Homo sapiens
  misc_RNA (1)...(19): siRNA sense strand
cugaagaaguggaguuuag

SEQ ID NO: 2655645 - RNA, 19 nt, Homo sapiens
  misc_RNA (1)...(19): siRNA sense strand
auuccaggacuaugagaaa

SEQ ID NO: 2655646 - RNA, 19 nt, Homo sapiens
  misc_RNA (1)...(19): siRNA sense strand
gagaaauuacuucaagcaa

SEQ ID NO: 2655647 - RNA, 19 nt, Homo sapiens
  misc_RNA (1)...(19): siRNA sense strand
ggaggaaggggaagaagaa

SEQ ID NO: 2655648 - RNA, 19 nt, Homo sapiens
  misc_RNA (1)...(19): siRNA sense strand
aaucagaacaucauggaga

SEQ ID NO: 2655649 - RNA, 19 nt, Homo sapiens
  misc_RNA (1)...(19): siRNA sense strand
cuacugaagaaguggaguu

SEQ ID NO: 2655650 - RNA, 19 nt, Homo sapiens
  misc_RNA (1)...(19): siRNA sense strand
cagaacugguggcucgaua

SEQ ID NO: 2655651 - RNA, 19 nt, Homo sapiens
  misc_RNA (1)...(19): siRNA sense strand
accagaaggaucagaggaa

SEQ ID NO: 2655652 - RNA, 19 nt, Homo sapiens
  misc_RNA (1)...(19): siRNA sense strand
aagcagaaauucaagcuga

SEQ ID NO: 2655653 - RNA, 19 nt, Homo sapiens
  misc_RNA (1)...(19): siRNA sense strand
guaauugauauaagcggaa

SEQ ID NO: 2655654 - RNA, 19 nt, Homo sapiens
  misc_RNA (1)...(19): siRNA sense strand
ccaauaaucuacaggcaac

SEQ ID NO: 2655655 - RNA, 19 nt, Homo sapiens
  misc_RNA (1)...(19): siRNA sense strand
acauagagcgggaacuaau

SEQ ID NO: 2655656 - RNA, 19 nt, Homo sapiens
  misc_RNA (1)...(19): siRNA sense strand
gcagcauauugaagagaau

SEQ ID NO: 2655657 - RNA, 19 nt, Homo sapiens
  misc_RNA (1)...(19): siRNA sense strand
ggaaaacauagcagaguaa

SEQ ID NO: 2655658 - RNA, 19 nt, Homo sapiens
  misc_RNA (1)...(19): siRNA sense strand
agggaaaacaguuggguaa

SEQ ID NO: 2655659 - RNA, 19 nt, Homo sapiens
  misc_RNA (1)...(19): siRNA sense strand
cugaagaagagaaugaauu

SEQ ID NO: 2655660 - RNA, 19 nt, Homo sapiens
  misc_RNA (1)...(19): siRNA sense strand
gcaaaagagaaaauagcua

SEQ ID NO: 2655661 - RNA, 19 nt, Homo sapiens
  misc_RNA (1)...(19): siRNA sense strand
ugaugaaagcacugauauu

SEQ ID NO: 2655662 - RNA, 19 nt, Homo sapiens
  misc_RNA (1)...(19): siRNA sense strand
agaaagaggaauagugaag

SEQ ID NO: 2655663 - RNA, 19 nt, Homo sapiens
  misc_RNA (1)...(19): siRNA sense strand
gcauuuuggaugaagguaa

SEQ ID NO: 2655664 - RNA, 19 nt, Homo sapiens
  misc_RNA (1)...(19): siRNA sense strand
ccuaaugauaacacaguau

SEQ ID NO: 2655665 - RNA, 19 nt, Homo sapiens
  misc_RNA (1)...(19): siRNA sense strand
ggaauugugaauagugaca

SEQ ID NO: 2655666 - RNA, 19 nt, Homo sapiens
  misc_RNA (1)...(19): siRNA sense strand
agugaaauauacagaagca

SEQ ID NO: 2655667 - RNA, 19 nt, Homo sapiens
  misc_RNA (1)...(19): siRNA sense strand
ggcuuuaucaaaugugaaa

SEQ ID NO: 2655668 - RNA, 19 nt, Homo sapiens
  misc_RNA (1)...(19): siRNA sense strand
uugguugucucaagggaaa

SEQ ID NO: 2655669 - RNA, 19 nt, Homo sapiens
  misc_RNA (1)...(19): siRNA sense strand
cauuuuggaugaagguaaa

SEQ ID NO: 2655670 - RNA, 19 nt, Homo sapiens
  misc_RNA (1)...(19): siRNA sense strand
ggguaacaaaauuggcaua

SEQ ID NO: 2655671 - RNA, 19 nt, Homo sapiens
  misc_RNA (1)...(19): siRNA sense strand
uggaaugaacuuaugaaca

SEQ ID NO: 2655672 - RNA, 19 nt, Homo sapiens
  misc_RNA (1)...(19): siRNA sense strand
aguaagugcaagacguuau

SEQ ID NO: 2655673 - RNA, 19 nt, Homo sapiens
  misc_RNA (1)...(19): siRNA sense strand
aauuacaagugauggcaca

SEQ ID NO: 2655674 - RNA, 19 nt, Homo sapiens
  misc_RNA (1)...(19): siRNA sense strand
ugaagaugauacuugggua

SEQ ID NO: 2655675 - RNA, 19 nt, Homo sapiens
  misc_RNA (1)...(19): siRNA sense strand
ggguuuaugagcucaggaa

SEQ ID NO: 2655676 - RNA, 19 nt, Homo sapiens
  misc_RNA (1)...(19): siRNA sense strand
gggaaaacaguuggguaaa

SEQ ID NO: 2655677 - RNA, 19 nt, Homo sapiens
  misc_RNA (1)...(19): siRNA sense strand
uggaaaacauagcagagua

SEQ ID NO: 2655678 - RNA, 19 nt, Homo sapiens
  misc_RNA (1)...(19): siRNA sense strand
ccugaagaagagaaugaau

SEQ ID NO: 2655679 - RNA, 19 nt, Homo sapiens
  misc_RNA (1)...(19): siRNA sense strand
gcguacaauauuugaugau

SEQ ID NO: 2655680 - RNA, 19 nt, Homo sapiens
  misc_RNA (1)...(19): siRNA sense strand
aguaaucguccuagcuauu

SEQ ID NO: 2655681 - RNA, 19 nt, Homo sapiens
  misc_RNA (1)...(19): siRNA sense strand
ugccugaagaagagaauga

SEQ ID NO: 2655682 - RNA, 19 nt, Homo sapiens
  misc_RNA (1)...(19): siRNA sense strand
ccauuguuaaguagaaaga

SEQ ID NO: 2655683 - RNA, 19 nt, Homo sapiens
  misc_RNA (1)...(19): siRNA sense strand
aagaaagaggaauagugaa

SEQ ID NO: 2655684 - RNA, 19 nt, Homo sapiens
  misc_RNA (1)...(19): siRNA sense strand
augcagugaaaguuguuaa

SEQ ID NO: 2655685 - RNA, 19 nt, Homo sapiens
  misc_RNA (1)...(19): siRNA sense strand
guuuaugagcucaggaaug

SEQ ID NO: 2655686 - RNA, 19 nt, Homo sapiens
  misc_RNA (1)...(19): siRNA sense strand
caacuucauuugagccaca

SEQ ID NO: 2655687 - RNA, 19 nt, Homo sapiens
  misc_RNA (1)...(19): siRNA sense strand
agcuaaacuuggugccuga

SEQ ID NO: 2655688 - RNA, 19 nt, Homo sapiens
  misc_RNA (1)...(19): siRNA sense strand
ucguguggcaaaagagaaa

SEQ ID NO: 2655689 - RNA, 19 nt, Homo sapiens
  misc_RNA (1)...(19): siRNA sense strand
gugaagugaaauauacaga

SEQ ID NO: 2655690 - RNA, 19 nt, Homo sapiens
  misc_RNA (1)...(19): siRNA sense strand
aaguaaucguccuagcuau

SEQ ID NO: 2655691 - RNA, 19 nt, Homo sapiens
  misc_RNA (1)...(19): siRNA sense strand
cugcaaacuucaacuucau

SEQ ID NO: 2655692 - RNA, 19 nt, Homo sapiens
  misc_RNA (1)...(19): siRNA sense strand
gaaagaaacugcagaggga

SEQ ID NO: 2655693 - RNA, 19 nt, Homo sapiens
  misc_RNA (1)...(19): siRNA sense strand
ccguggaggcugaaagaaa

SEQ ID NO: 2655694 - RNA, 19 nt, Homo sapiens
  misc_RNA (1)...(19): siRNA sense strand
agauaaagcagcuggaaga

SEQ ID NO: 2655695 - RNA, 19 nt, Homo sapiens
  misc_RNA (1)...(19): siRNA sense strand
gacuagaagacuugguaaa

SEQ ID NO: 2655696 - RNA, 19 nt, Homo sapiens
  misc_RNA (1)...(19): siRNA sense strand
acucaaggccacagaggaa

SEQ ID NO: 2655697 - RNA, 19 nt, Homo sapiens
  misc_RNA (1)...(19): siRNA sense strand
ggaaggagaugcaggccau

SEQ ID NO: 2655698 - RNA, 19 nt, Homo sapiens
  misc_RNA (1)...(19): siRNA sense strand
ggcaagagcugcaggagga

SEQ ID NO: 2655699 - RNA, 19 nt, Homo sapiens
  misc_RNA (1)...(19): siRNA sense strand
gugaggaagaaaucagaaa

SEQ ID NO: 2655700 - RNA, 19 nt, Homo sapiens
  misc_RNA (1)...(19): siRNA sense strand
gcccagaagcugaaggaga

SEQ ID NO: 2655701 - RNA, 19 nt, Homo sapiens
  misc_RNA (1)...(19): siRNA sense strand
aguuggaggaagugaggaa

SEQ ID NO: 2655702 - RNA, 19 nt, Homo sapiens
  misc_RNA (1)...(19): siRNA sense strand
agaaccagcaggagaggaa

SEQ ID NO: 2655703 - RNA, 19 nt, Homo sapiens
  misc_RNA (1)...(19): siRNA sense strand
cgugcaggcuggagacgaa

SEQ ID NO: 2655704 - RNA, 19 nt, Homo sapiens
  misc_RNA (1)...(19): siRNA sense strand
guugaaaggcacugcaaaa

SEQ ID NO: 2655705 - RNA, 19 nt, Homo sapiens
  misc_RNA (1)...(19): siRNA sense strand
agauaagugaccugaagaa

SEQ ID NO: 2655706 - RNA, 19 nt, Homo sapiens
  misc_RNA (1)...(19): siRNA sense strand
gcaagaacuuccaggucca

SEQ ID NO: 2655707 - RNA, 19 nt, Homo sapiens
  misc_RNA (1)...(19): siRNA sense strand
aggcaagugcugagacaga

SEQ ID NO: 2655708 - RNA, 19 nt, Homo sapiens
  misc_RNA (1)...(19): siRNA sense strand
ccacaggagcugaggaaag

SEQ ID NO: 2655709 - RNA, 19 nt, Homo sapiens
  misc_RNA (1)...(19): siRNA sense strand
ccagagaaccagcaggaga

SEQ ID NO: 2655710 - RNA, 19 nt, Homo sapiens
  misc_RNA (1)...(19): siRNA sense strand
gugaaaaugugcaagaaga

SEQ ID NO: 2655711 - RNA, 19 nt, Homo sapiens
  misc_RNA (1)...(19): siRNA sense strand
aguuaguuucagagaacaa

SEQ ID NO: 2655712 - RNA, 19 nt, Homo sapiens
  misc_RNA (1)...(19): siRNA sense strand
gaacaaaguccugcgggaa

SEQ ID NO: 2655713 - RNA, 19 nt, Homo sapiens
  misc_RNA (1)...(19): siRNA sense strand
aagcacaguuggaggaagu

SEQ ID NO: 2655714 - RNA, 19 nt, Homo sapiens
  misc_RNA (1)...(19): siRNA sense strand
gaggaagugaggaagaaau

SEQ ID NO: 2655715 - RNA, 19 nt, Homo sapiens
  misc_RNA (1)...(19): siRNA sense strand
ggagaaaacgagagagucu

SEQ ID NO: 2655716 - RNA, 19 nt, Homo sapiens
  misc_RNA (1)...(19): siRNA sense strand
agaacaaaguccugcggga

SEQ ID NO: 2655717 - RNA, 19 nt, Homo sapiens
  misc_RNA (1)...(19): siRNA sense strand
cgagaggagaggaguauca

SEQ ID NO: 2655718 - RNA, 19 nt, Homo sapiens
  misc_RNA (1)...(19): siRNA sense strand
augaaaggaggcacagaua

SEQ ID NO: 2655719 - RNA, 19 nt, Homo sapiens
  misc_RNA (1)...(19): siRNA sense strand
aggaggagcgugagaggau

SEQ ID NO: 2655720 - RNA, 19 nt, Homo sapiens
  misc_RNA (1)...(19): siRNA sense strand
agacagaauauaugaagca

SEQ ID NO: 2655721 - RNA, 19 nt, Homo sapiens
  misc_RNA (1)...(19): siRNA sense strand
agaaaggaccaaagugcuu

SEQ ID NO: 2655722 - RNA, 19 nt, Homo sapiens
  misc_RNA (1)...(19): siRNA sense strand
gugagaggaugcaggcaca

SEQ ID NO: 2655723 - RNA, 19 nt, Homo sapiens
  misc_RNA (1)...(19): siRNA sense strand
ccagggagguggagacacu

SEQ ID NO: 2655724 - RNA, 19 nt, Homo sapiens
  misc_RNA (1)...(19): siRNA sense strand
ggcaaagccagaaggccaa

SEQ ID NO: 2655725 - RNA, 19 nt, Homo sapiens
  misc_RNA (1)...(19): siRNA sense strand
ugaaggagagagaggacau

SEQ ID NO: 2655726 - RNA, 19 nt, Homo sapiens
  misc_RNA (1)...(19): siRNA sense strand
cgacuagaagacuugguaa

SEQ ID NO: 2655727 - RNA, 19 nt, Homo sapiens
  misc_RNA (1)...(19): siRNA sense strand
ggaggaagugaggaagaaa

SEQ ID NO: 2655728 - RNA, 19 nt, Homo sapiens
  misc_RNA (1)...(19): siRNA sense strand
aaaucaaacaucagacaga

SEQ ID NO: 2655729 - RNA, 19 nt, Homo sapiens
  misc_RNA (1)...(19): siRNA sense strand
cugaaagauuccggagaga

SEQ ID NO: 2655730 - RNA, 19 nt, Homo sapiens
  misc_RNA (1)...(19): siRNA sense strand
ggaggcugaaagaaagaaa

SEQ ID NO: 2655731 - RNA, 19 nt, Homo sapiens
  misc_RNA (1)...(19): siRNA sense strand
ggggagaaaacgagagagu

SEQ ID NO: 2655732 - RNA, 19 nt, Homo sapiens
  misc_RNA (1)...(19): siRNA sense strand
cuagaggaggacuggcaaa

SEQ ID NO: 2655733 - RNA, 19 nt, Homo sapiens
  misc_RNA (1)...(19): siRNA sense strand
agaagcacaccguggaaau

SEQ ID NO: 2655734 - RNA, 19 nt, Homo sapiens
  misc_RNA (1)...(19): siRNA sense strand
agagggaaguagaagcaca

SEQ ID NO: 2655735 - RNA, 19 nt, Homo sapiens
  misc_RNA (1)...(19): siRNA sense strand
caggaacaccggaaggaga

SEQ ID NO: 2655736 - RNA, 19 nt, Homo sapiens
  misc_RNA (1)...(19): siRNA sense strand
agagagaggacaucaucaa

SEQ ID NO: 2655737 - RNA, 19 nt, Homo sapiens
  misc_RNA (1)...(19): siRNA sense strand
ccaugaagacugaguuagu

SEQ ID NO: 2655738 - RNA, 19 nt, Homo sapiens
  misc_RNA (1)...(19): siRNA sense strand
aagaaguccagcagaaaca

SEQ ID NO: 2655739 - RNA, 19 nt, Homo sapiens
  misc_RNA (1)...(19): siRNA sense strand
ugaguuaguuucagagaac

SEQ ID NO: 2655740 - RNA, 19 nt, Homo sapiens
  misc_RNA (1)...(19): siRNA sense strand
uggaggaagugaggaagaa

SEQ ID NO: 2655741 - RNA, 19 nt, Homo sapiens
  misc_RNA (1)...(19): siRNA sense strand
aggaaaguccccaggaauu

SEQ ID NO: 2655742 - RNA, 19 nt, Homo sapiens
  misc_RNA (1)...(19): siRNA sense strand
aagaaggaauccagccaca

SEQ ID NO: 2655743 - RNA, 19 nt, Homo sapiens
  misc_RNA (1)...(19): siRNA sense strand
agaaggacuuggaggcacu

SEQ ID NO: 2655744 - RNA, 19 nt, Homo sapiens
  misc_RNA (1)...(19): siRNA sense strand
gugaaacggcccaagccaa

SEQ ID NO: 2655745 - RNA, 19 nt, Homo sapiens
  misc_RNA (1)...(19): siRNA sense strand
uggagacgaaggagagaga

SEQ ID NO: 2655746 - RNA, 19 nt, Homo sapiens
  misc_RNA (1)...(19): siRNA sense strand
agaggcaagugcugagaca

SEQ ID NO: 2655747 - RNA, 19 nt, Homo sapiens
  misc_RNA (1)...(19): siRNA sense strand
ggaagaaaucagaaaagga

SEQ ID NO: 2655748 - RNA, 19 nt, Homo sapiens
  misc_RNA (1)...(19): siRNA sense strand
cgacaggagaauucagagu

SEQ ID NO: 2655749 - RNA, 19 nt, Homo sapiens
  misc_RNA (1)...(19): siRNA sense strand
gcaagugcugagacagaau

SEQ ID NO: 2655750 - RNA, 19 nt, Homo sapiens
  misc_RNA (1)...(19): siRNA sense strand
cgccgagaggagaggagua

SEQ ID NO: 2655751 - RNA, 19 nt, Homo sapiens
  misc_RNA (1)...(19): siRNA sense strand
ccuccuaugcaaagaacuu

SEQ ID NO: 2655752 - RNA, 19 nt, Homo sapiens
  misc_RNA (1)...(19): siRNA sense strand
cgaucugaguuccaggauu

SEQ ID NO: 2655753 - RNA, 19 nt, Homo sapiens
  misc_RNA (1)...(19): siRNA sense strand
acagauaugcagaccaaga

SEQ ID NO: 2655754 - RNA, 19 nt, Homo sapiens
  misc_RNA (1)...(19): siRNA sense strand
agaaacaucucaaagacca

SEQ ID NO: 2655755 - RNA, 19 nt, Homo sapiens
  misc_RNA (1)...(19): siRNA sense strand
uuuuaaggcuggaagaauu

SEQ ID NO: 2655756 - RNA, 19 nt, Homo sapiens
  misc_RNA (1)...(19): siRNA sense strand
ggguaaaggagaagaacau

SEQ ID NO: 2655757 - RNA, 19 nt, Homo sapiens
  misc_RNA (1)...(19): siRNA sense strand
ggucuuugugggaggaaua

SEQ ID NO: 2655758 - RNA, 19 nt, Homo sapiens
  misc_RNA (1)...(19): siRNA sense strand
cggaggagcaacagagauu

SEQ ID NO: 2655759 - RNA, 19 nt, Homo sapiens
  misc_RNA (1)...(19): siRNA sense strand
acccacaggaugagagaaa

SEQ ID NO: 2655760 - RNA, 19 nt, Homo sapiens
  misc_RNA (1)...(19): siRNA sense strand
ccggaaacccacaggauga

SEQ ID NO: 2655761 - RNA, 19 nt, Homo sapiens
  misc_RNA (1)...(19): siRNA sense strand
ggagaauaguugaaaccga

SEQ ID NO: 2655762 - RNA, 19 nt, Homo sapiens
  misc_RNA (1)...(19): siRNA sense strand
cgucauugucaguuacaua

SEQ ID NO: 2655763 - RNA, 19 nt, Homo sapiens
  misc_RNA (1)...(19): siRNA sense strand
cgggauaccagguguguuu

SEQ ID NO: 2655764 - RNA, 19 nt, Homo sapiens
  misc_RNA (1)...(19): siRNA sense strand
gggaauaauacgaggacug

SEQ ID NO: 2655765 - RNA, 19 nt, Homo sapiens
  misc_RNA (1)...(19): siRNA sense strand
gcauguacuuucugagcau

SEQ ID NO: 2655766 - RNA, 19 nt, Homo sapiens
  misc_RNA (1)...(19): siRNA sense strand
ggcgggauccagagggaaa

SEQ ID NO: 2655767 - RNA, 19 nt, Homo sapiens
  misc_RNA (1)...(19): siRNA sense strand
ucgaauaggaugucugaau

SEQ ID NO: 2655768 - RNA, 19 nt, Homo sapiens
  misc_RNA (1)...(19): siRNA sense strand
uggcagaaaugauugaaaa

SEQ ID NO: 2655769 - RNA, 19 nt, Homo sapiens
  misc_RNA (1)...(19): siRNA sense strand
aguaaaggacaccgggcaa

SEQ ID NO: 2655770 - RNA, 19 nt, Homo sapiens
  misc_RNA (1)...(19): siRNA sense strand
agaccaaacgugggaauaa

SEQ ID NO: 2655771 - RNA, 19 nt, Homo sapiens
  misc_RNA (1)...(19): siRNA sense strand
gugcaauguuucaaauaca

SEQ ID NO: 2655772 - RNA, 19 nt, Homo sapiens
  misc_RNA (1)...(19): siRNA sense strand
cuccagagagggugguaaa

SEQ ID NO: 2655773 - RNA, 19 nt, Homo sapiens
  misc_RNA (1)...(19): siRNA sense strand
gagaauaguugaaaccgau

SEQ ID NO: 2655774 - RNA, 19 nt, Homo sapiens
  misc_RNA (1)...(19): siRNA sense strand
cagagggaaaccuggauaa

SEQ ID NO: 2655775 - RNA, 19 nt, Homo sapiens
  misc_RNA (1)...(19): siRNA sense strand
aaacagaaguaaaggacac

SEQ ID NO: 2655776 - RNA, 19 nt, Homo sapiens
  misc_RNA (1)...(19): siRNA sense strand
agacauauuucgaggacuc

SEQ ID NO: 2655777 - RNA, 19 nt, Homo sapiens
  misc_RNA (1)...(19): siRNA sense strand
caauguuaggacuggauua

SEQ ID NO: 2655778 - RNA, 19 nt, Homo sapiens
  misc_RNA (1)...(19): siRNA sense strand
cuacaucagccuuggaaaa

SEQ ID NO: 2655779 - RNA, 19 nt, Homo sapiens
  misc_RNA (1)...(19): siRNA sense strand
guuaagucuccuugaaaga

SEQ ID NO: 2655780 - RNA, 19 nt, Homo sapiens
  misc_RNA (1)...(19): siRNA sense strand
ggauuauggaaacacgaaa

SEQ ID NO: 2655781 - RNA, 19 nt, Homo sapiens
  misc_RNA (1)...(19): siRNA sense strand
ggguuaagucuccuugaaa

SEQ ID NO: 2655782 - RNA, 19 nt, Homo sapiens
  misc_RNA (1)...(19): siRNA sense strand
guaaaggagaagaacauca

SEQ ID NO: 2655783 - RNA, 19 nt, Homo sapiens
  misc_RNA (1)...(19): siRNA sense strand
ugguugacauugcaaguaa

SEQ ID NO: 2655784 - RNA, 19 nt, Homo sapiens
  misc_RNA (1)...(19): siRNA sense strand
gcggagucuucaugcacaa

SEQ ID NO: 2655785 - RNA, 19 nt, Homo sapiens
  misc_RNA (1)...(19): siRNA sense strand
ggcuaaaccuuucggggaa

SEQ ID NO: 2655786 - RNA, 19 nt, Homo sapiens
  misc_RNA (1)...(19): siRNA sense strand
gcgugaagcaggagcuguu

SEQ ID NO: 2655787 - RNA, 19 nt, Homo sapiens
  misc_RNA (1)...(19): siRNA sense strand
agggaaaccuggauaagca

SEQ ID NO: 2655788 - RNA, 19 nt, Homo sapiens
  misc_RNA (1)...(19): siRNA sense strand
ucuacaaacaagucacuaa

SEQ ID NO: 2655789 - RNA, 19 nt, Homo sapiens
  misc_RNA (1)...(19): siRNA sense strand
auacgaggacuguggauau

SEQ ID NO: 2655790 - RNA, 19 nt, Homo sapiens
  misc_RNA (1)...(19): siRNA sense strand
cuguggauauugugguauu

SEQ ID NO: 2655791 - RNA, 19 nt, Homo sapiens
  misc_RNA (1)...(19): siRNA sense strand
cccaaaaguagcagaaauu

SEQ ID NO: 2655792 - RNA, 19 nt, Homo sapiens
  misc_RNA (1)...(19): siRNA sense strand
ggcuggaucuacuggaaau

SEQ ID NO: 2655793 - RNA, 19 nt, Homo sapiens
  misc_RNA (1)...(19): siRNA sense strand
ugguaaacaacaaagguga

SEQ ID NO: 2655794 - RNA, 19 nt, Homo sapiens
  misc_RNA (1)...(19): siRNA sense strand
gagucuggcacuaaagaau

SEQ ID NO: 2655795 - RNA, 19 nt, Homo sapiens
  misc_RNA (1)...(19): siRNA sense strand
aaagacacccugagcgcaa

SEQ ID NO: 2655796 - RNA, 19 nt, Homo sapiens
  misc_RNA (1)...(19): siRNA sense strand
acagagagagacaguacaa

SEQ ID NO: 2655797 - RNA, 19 nt, Homo sapiens
  misc_RNA (1)...(19): siRNA sense strand
gcuggguaaaggagaagaa

SEQ ID NO: 2655798 - RNA, 19 nt, Homo sapiens
  misc_RNA (1)...(19): siRNA sense strand
ucgaggagccgaagagcuu

SEQ ID NO: 2655799 - RNA, 19 nt, Homo sapiens
  misc_RNA (1)...(19): siRNA sense strand
gagaagaacaucacgguac

SEQ ID NO: 2655800 - RNA, 19 nt, Homo sapiens
  misc_RNA (1)...(19): siRNA sense strand
uggaaggaagcgugcagaa

SEQ ID NO: 2655801 - RNA, 19 nt, Homo sapiens
  misc_RNA (1)...(19): siRNA sense strand
acaugcaaguguuguggua

SEQ ID NO: 2655802 - RNA, 19 nt, Homo sapiens
  misc_RNA (1)...(19): siRNA sense strand
ggaugggagaauaguugaa

SEQ ID NO: 2655803 - RNA, 19 nt, Homo sapiens
  misc_RNA (1)...(19): siRNA sense strand
gggcaauaacgaaggacac

SEQ ID NO: 2655804 - RNA, 19 nt, Homo sapiens
  misc_RNA (1)...(19): siRNA sense strand
aaacaaucgaauaggaugu

SEQ ID NO: 2655805 - RNA, 19 nt, Homo sapiens
  misc_RNA (1)...(19): siRNA sense strand
uauuuagccuacagagaga

SEQ ID NO: 2655806 - RNA, 19 nt, Homo sapiens
  misc_RNA (1)...(19): siRNA sense strand
cauuacggucuuuggaauu

SEQ ID NO: 2655807 - RNA, 19 nt, Homo sapiens
  misc_RNA (1)...(19): siRNA sense strand
ucacccugauucugaguaa

SEQ ID NO: 2655808 - RNA, 19 nt, Homo sapiens
  misc_RNA (1)...(19): siRNA sense strand
aaagauuggaccuccgaaa

SEQ ID NO: 2655809 - RNA, 19 nt, Homo sapiens
  misc_RNA (1)...(19): siRNA sense strand
ggagaagaacaucacggua

SEQ ID NO: 2655810 - RNA, 19 nt, Homo sapiens
  misc_RNA (1)...(19): siRNA sense strand
gguaucaggaugggagaau

SEQ ID NO: 2655811 - RNA, 19 nt, Homo sapiens
  misc_RNA (1)...(19): siRNA sense strand
cguacaggacuuucggauu

SEQ ID NO: 2655812 - RNA, 19 nt, Homo sapiens
  misc_RNA (1)...(19): siRNA sense strand
ccugauugguggugguauc

SEQ ID NO: 2655813 - RNA, 19 nt, Homo sapiens
  misc_RNA (1)...(19): siRNA sense strand
ggacacucgaggagccgaa

SEQ ID NO: 2655814 - RNA, 19 nt, Homo sapiens
  misc_RNA (1)...(19): siRNA sense strand
guuucaaccacuaguaaaa

SEQ ID NO: 2655815 - RNA, 19 nt, Homo sapiens
  misc_RNA (1)...(19): siRNA sense strand
ucagaauggaccaauuaaa

SEQ ID NO: 2655816 - RNA, 19 nt, Homo sapiens
  misc_RNA (1)...(19): siRNA sense strand
ggacuggauuauggaaaca

SEQ ID NO: 2655817 - RNA, 19 nt, Homo sapiens
  misc_RNA (1)...(19): siRNA sense strand
aaguuguguuugaaggaga

SEQ ID NO: 2655818 - RNA, 19 nt, Homo sapiens
  misc_RNA (1)...(19): siRNA sense strand
cugcaguguacgcggaaca

SEQ ID NO: 2655819 - RNA, 19 nt, Homo sapiens
  misc_RNA (1)...(19): siRNA sense strand
uguauuacccuuuggacuu

SEQ ID NO: 2655820 - RNA, 19 nt, Homo sapiens
  misc_RNA (1)...(19): siRNA sense strand
gccacaaguuuaagcuuca

SEQ ID NO: 2655821 - RNA, 19 nt, Homo sapiens
  misc_RNA (1)...(19): siRNA sense strand
agagggugguaaacaacaa

SEQ ID NO: 2655822 - RNA, 19 nt, Homo sapiens
  misc_RNA (1)...(19): siRNA sense strand
aaauagauggugugaaugu

SEQ ID NO: 2655823 - RNA, 19 nt, Homo sapiens
  misc_RNA (1)...(19): siRNA sense strand
cguauucagugcaagucaa

SEQ ID NO: 2655824 - RNA, 19 nt, Homo sapiens
  misc_RNA (1)...(19): siRNA sense strand
cagaauggaccaauuaaaa

SEQ ID NO: 2655825 - RNA, 19 nt, Homo sapiens
  misc_RNA (1)...(19): siRNA sense strand
cccuagagauccugagaaa

SEQ ID NO: 2655826 - RNA, 19 nt, Homo sapiens
  misc_RNA (1)...(19): siRNA sense strand
gguuaaaagcagaagaaau

SEQ ID NO: 2655827 - RNA, 19 nt, Homo sapiens
  misc_RNA (1)...(19): siRNA sense strand
auucaagggucaaggagua

SEQ ID NO: 2655828 - RNA, 19 nt, Homo sapiens
  misc_RNA (1)...(19): siRNA sense strand
gagaaggagcugaaagaca

SEQ ID NO: 2655829 - RNA, 19 nt, Homo sapiens
  misc_RNA (1)...(19): siRNA sense strand
gguacaaaccaaagaagau

SEQ ID NO: 2655830 - RNA, 19 nt, Homo sapiens
  misc_RNA (1)...(19): siRNA sense strand
augaaauacucaagguaca

SEQ ID NO: 2655831 - RNA, 19 nt, Homo sapiens
  misc_RNA (1)...(19): siRNA sense strand
gggaucagcugcagggcau

SEQ ID NO: 2655832 - RNA, 19 nt, Homo sapiens
  misc_RNA (1)...(19): siRNA sense strand
aggcauugcuggagaugga

SEQ ID NO: 2655833 - RNA, 19 nt, Homo sapiens
  misc_RNA (1)...(19): siRNA sense strand
ucacaaauacaguggcaga

SEQ ID NO: 2655834 - RNA, 19 nt, Homo sapiens
  misc_RNA (1)...(19): siRNA sense strand
ccacaguguccucuggaaa

SEQ ID NO: 2655835 - RNA, 19 nt, Homo sapiens
  misc_RNA (1)...(19): siRNA sense strand
gaaaggugcuggagccaca

SEQ ID NO: 2655836 - RNA, 19 nt, Homo sapiens
  misc_RNA (1)...(19): siRNA sense strand
aacuuuagcuggugaaauu

SEQ ID NO: 2655837 - RNA, 19 nt, Homo sapiens
  misc_RNA (1)...(19): siRNA sense strand
cagcaaaguacugguuaaa

SEQ ID NO: 2655838 - RNA, 19 nt, Homo sapiens
  misc_RNA (1)...(19): siRNA sense strand
aaaccaaagaagauggaga

SEQ ID NO: 2655839 - RNA, 19 nt, Homo sapiens
  misc_RNA (1)...(19): siRNA sense strand
ugcugagguucaagaaaua

SEQ ID NO: 2655840 - RNA, 19 nt, Homo sapiens
  misc_RNA (1)...(19): siRNA sense strand
cugcagggcauguuguaua

SEQ ID NO: 2655841 - RNA, 19 nt, Homo sapiens
  misc_RNA (1)...(19): siRNA sense strand
aggagauacuuggguguua

SEQ ID NO: 2655842 - RNA, 19 nt, Homo sapiens
  misc_RNA (1)...(19): siRNA sense strand
gggcaaaacauguagcuga

SEQ ID NO: 2655843 - RNA, 19 nt, Homo sapiens
  misc_RNA (1)...(19): siRNA sense strand
ugacuaugccauugugcua

SEQ ID NO: 2655844 - RNA, 19 nt, Homo sapiens
  misc_RNA (1)...(19): siRNA sense strand
auguuaaaugggaggaaaa

SEQ ID NO: 2655845 - RNA, 19 nt, Homo sapiens
  misc_RNA (1)...(19): siRNA sense strand
aagcagaagaaauggggaa

SEQ ID NO: 2655846 - RNA, 19 nt, Homo sapiens
  misc_RNA (1)...(19): siRNA sense strand
agacaaauuuagcacacau

SEQ ID NO: 2655847 - RNA, 19 nt, Homo sapiens
  misc_RNA (1)...(19): siRNA sense strand
gggcgagagacaagaagca

SEQ ID NO: 2655848 - RNA, 19 nt, Homo sapiens
  misc_RNA (1)...(19): siRNA sense strand
ccuggaagguucauggcau

SEQ ID NO: 2655849 - RNA, 19 nt, Homo sapiens
  misc_RNA (1)...(19): siRNA sense strand
acucaagguacaaaccaaa

SEQ ID NO: 2655850 - RNA, 19 nt, Homo sapiens
  misc_RNA (1)...(19): siRNA sense strand
gcaauugagugguacgcca

SEQ ID NO: 2655851 - RNA, 19 nt, Homo sapiens
  misc_RNA (1)...(19): siRNA sense strand
aagugugccuugaguggaa

SEQ ID NO: 2655852 - RNA, 19 nt, Homo sapiens
  misc_RNA (1)...(19): siRNA sense strand
ugcaaggagaucaggcaua

SEQ ID NO: 2655853 - RNA, 19 nt, Homo sapiens
  misc_RNA (1)...(19): siRNA sense strand
cugcguuaaucuaugacua

SEQ ID NO: 2655854 - RNA, 19 nt, Homo sapiens
  misc_RNA (1)...(19): siRNA sense strand
cauauuugaagaugggaga

SEQ ID NO: 2655855 - RNA, 19 nt, Homo sapiens
  misc_RNA (1)...(19): siRNA sense strand
cgauaaucccacaccauau

SEQ ID NO: 2655856 - RNA, 19 nt, Homo sapiens
  misc_RNA (1)...(19): siRNA sense strand
ggccaaccucugugggauu

SEQ ID NO: 2655857 - RNA, 19 nt, Homo sapiens
  misc_RNA (1)...(19): siRNA sense strand
caacauugccaccaagaca

SEQ ID NO: 2655858 - RNA, 19 nt, Homo sapiens
  misc_RNA (1)...(19): siRNA sense strand
gaaggagcugaaagacaaa

SEQ ID NO: 2655859 - RNA, 19 nt, Homo sapiens
  misc_RNA (1)...(19): siRNA sense strand
guuaaaagcagaagaaaug

SEQ ID NO: 2655860 - RNA, 19 nt, Homo sapiens
  misc_RNA (1)...(19): siRNA sense strand
uugaguggaacauggguua

SEQ ID NO: 2655861 - RNA, 19 nt, Homo sapiens
  misc_RNA (1)...(19): siRNA sense strand
ccagcuuguuccaggcauu

SEQ ID NO: 2655862 - RNA, 19 nt, Homo sapiens
  misc_RNA (1)...(19): siRNA sense strand
acgccaaagcagcaaagua

SEQ ID NO: 2655863 - RNA, 19 nt, Homo sapiens
  misc_RNA (1)...(19): siRNA sense strand
gaaucaaacuuuagcuggu

SEQ ID NO: 2655864 - RNA, 19 nt, Homo sapiens
  misc_RNA (1)...(19): siRNA sense strand
agcagaaacuggaauugaa

SEQ ID NO: 2655865 - RNA, 19 nt, Homo sapiens
  misc_RNA (1)...(19): siRNA sense strand
gcacacacugcaaggagau

SEQ ID NO: 2655866 - RNA, 19 nt, Homo sapiens
  misc_RNA (1)...(19): siRNA sense strand
aaaacauguagcugagaaa

SEQ ID NO: 2655867 - RNA, 19 nt, Homo sapiens
  misc_RNA (1)...(19): siRNA sense strand
aauguuaaaugggaggaaa

SEQ ID NO: 2655868 - RNA, 19 nt, Homo sapiens
  misc_RNA (1)...(19): siRNA sense strand
agguacaaaccaaagaaga

SEQ ID NO: 2655869 - RNA, 19 nt, Homo sapiens
  misc_RNA (1)...(19): siRNA sense strand
ucaaugaaucuuggguaua

SEQ ID NO: 2655870 - RNA, 19 nt, Homo sapiens
  misc_RNA (1)...(19): siRNA sense strand
ggcaugaagcuuugcugua

SEQ ID NO: 2655871 - RNA, 19 nt, Homo sapiens
  misc_RNA (1)...(19): siRNA sense strand
gaguggaacauggguuaua

SEQ ID NO: 2655872 - RNA, 19 nt, Homo sapiens
  misc_RNA (1)...(19): siRNA sense strand
uaucagaaaucggugggaa

SEQ ID NO: 2655873 - RNA, 19 nt, Homo sapiens
  misc_RNA (1)...(19): siRNA sense strand
ugaugaaauacucaaggua

SEQ ID NO: 2655874 - RNA, 19 nt, Homo sapiens
  misc_RNA (1)...(19): siRNA sense strand
auuuggaaccuucgggcaa

SEQ ID NO: 2655875 - RNA, 19 nt, Homo sapiens
  misc_RNA (1)...(19): siRNA sense strand
gguucaagaaauaguaucu

SEQ ID NO: 2655876 - RNA, 19 nt, Homo sapiens
  misc_RNA (1)...(19): siRNA sense strand
ccugggagaaggagcugaa

SEQ ID NO: 2655877 - RNA, 19 nt, Homo sapiens
  misc_RNA (1)...(19): siRNA sense strand
aaccaaagaagauggagau

SEQ ID NO: 2655878 - RNA, 19 nt, Homo sapiens
  misc_RNA (1)...(19): siRNA sense strand
ugaagaugggagaccuuua

SEQ ID NO: 2655879 - RNA, 19 nt, Homo sapiens
  misc_RNA (1)...(19): siRNA sense strand
cuccaggaacuguacgaaa

SEQ ID NO: 2655880 - RNA, 19 nt, Homo sapiens
  misc_RNA (1)...(19): siRNA sense strand
cuucauuauuggagggagc

SEQ ID NO: 2655881 - RNA, 19 nt, Homo sapiens
  misc_RNA (1)...(19): siRNA sense strand
agugagaggcugucuucaa

SEQ ID NO: 2655882 - RNA, 19 nt, Homo sapiens
  misc_RNA (1)...(19): siRNA sense strand
gggaacugucguaugccua

SEQ ID NO: 2655883 - RNA, 19 nt, Homo sapiens
  misc_RNA (1)...(19): siRNA sense strand
cggaggauccugcguuaau

SEQ ID NO: 2655884 - RNA, 19 nt, Homo sapiens
  misc_RNA (1)...(19): siRNA sense strand
gguuuacagagaugauuau

SEQ ID NO: 2655885 - RNA, 19 nt, Homo sapiens
  misc_RNA (1)...(19): siRNA sense strand
agucacaagaccuggaguu

SEQ ID NO: 2655886 - RNA, 19 nt, Homo sapiens
  misc_RNA (1)...(19): siRNA sense strand
gaauguuaaaugggaggaa

SEQ ID NO: 2655887 - RNA, 19 nt, Homo sapiens
  misc_RNA (1)...(19): siRNA sense strand
gggccaugucauccgcaaa

SEQ ID NO: 2655888 - RNA, 19 nt, Homo sapiens
  misc_RNA (1)...(19): siRNA sense strand
ggaagagggcuauuugcau

SEQ ID NO: 2655889 - RNA, 19 nt, Homo sapiens
  misc_RNA (1)...(19): siRNA sense strand
ugaagcuacccgaggcaau

SEQ ID NO: 2655890 - RNA, 19 nt, Homo sapiens
  misc_RNA (1)...(19): siRNA sense strand
ggccaagaaucccgaagca

SEQ ID NO: 2655891 - RNA, 19 nt, Homo sapiens
  misc_RNA (1)...(19): siRNA sense strand
cgccaaagcagcaaaguac

SEQ ID NO: 2655892 - RNA, 19 nt, Homo sapiens
  misc_RNA (1)...(19): siRNA sense strand
gagacauucccuagagauc

SEQ ID NO: 2655893 - RNA, 19 nt, Homo sapiens
  misc_RNA (1)...(19): siRNA sense strand
agaagaaucugcugaagua

SEQ ID NO: 2655894 - RNA, 19 nt, Homo sapiens
  misc_RNA (1)...(19): siRNA sense strand
gcucaaguauccacugaaa

SEQ ID NO: 2655895 - RNA, 19 nt, Homo sapiens
  misc_RNA (1)...(19): siRNA sense strand
ggaucuacuuaaagcacau

SEQ ID NO: 2655896 - RNA, 19 nt, Homo sapiens
  misc_RNA (1)...(19): siRNA sense strand
ccaagaagaaucugcugaa

SEQ ID NO: 2655897 - RNA, 19 nt, Homo sapiens
  misc_RNA (1)...(19): siRNA sense strand
aaggaaggaucuacuuaaa

SEQ ID NO: 2655898 - RNA, 19 nt, Homo sapiens
  misc_RNA (1)...(19): siRNA sense strand
cagcaucucccaagaagaa

SEQ ID NO: 2655899 - RNA, 19 nt, Homo sapiens
  misc_RNA (1)...(19): siRNA sense strand
aaguauucccugagacgaa

SEQ ID NO: 2655900 - RNA, 19 nt, Homo sapiens
  misc_RNA (1)...(19): siRNA sense strand
gaaggaaggaucuacuuaa

SEQ ID NO: 2655901 - RNA, 19 nt, Homo sapiens
  misc_RNA (1)...(19): siRNA sense strand
acuuaaagcacauggaauc

SEQ ID NO: 2655902 - RNA, 19 nt, Homo sapiens
  misc_RNA (1)...(19): siRNA sense strand
ggaaggaaggaucuacuua

SEQ ID NO: 2655903 - RNA, 19 nt, Homo sapiens
  misc_RNA (1)...(19): siRNA sense strand
ccauuuagaagaacaugua

SEQ ID NO: 2655904 - RNA, 19 nt, Homo sapiens
  misc_RNA (1)...(19): siRNA sense strand
caguuuauccaguggggaa

SEQ ID NO: 2655905 - RNA, 19 nt, Homo sapiens
  misc_RNA (1)...(19): siRNA sense strand
agaagaacauguaagauuc

SEQ ID NO: 2655906 - RNA, 19 nt, Homo sapiens
  misc_RNA (1)...(19): siRNA sense strand
aggaaaacaccuacccaua

SEQ ID NO: 2655907 - RNA, 19 nt, Homo sapiens
  misc_RNA (1)...(19): siRNA sense strand
caaugaacugacuaaggaa

SEQ ID NO: 2655908 - RNA, 19 nt, Homo sapiens
  misc_RNA (1)...(19): siRNA sense strand
ucuaugagccuguggaauc

SEQ ID NO: 2655909 - RNA, 19 nt, Homo sapiens
  misc_RNA (1)...(19): siRNA sense strand
gaaaacaccuacccauaua

SEQ ID NO: 2655910 - RNA, 19 nt, Homo sapiens
  misc_RNA (1)...(19): siRNA sense strand
ucaucgacuucguggaaaa

SEQ ID NO: 2655911 - RNA, 19 nt, Homo sapiens
  misc_RNA (1)...(19): siRNA sense strand
ccuacaaguccaagcaguu

SEQ ID NO: 2655912 - RNA, 19 nt, Homo sapiens
  misc_RNA (1)...(19): siRNA sense strand
ggcugaaccugaaggagga

SEQ ID NO: 2655913 - RNA, 19 nt, Homo sapiens
  misc_RNA (1)...(19): siRNA sense strand
gggucuggcacgagcacau

SEQ ID NO: 2655914 - RNA, 19 nt, Homo sapiens
  misc_RNA (1)...(19): siRNA sense strand
ccaccauugacuacggauu

SEQ ID NO: 2655915 - RNA, 19 nt, Homo sapiens
  misc_RNA (1)...(19): siRNA sense strand
auuccagaggcuacagaaa

SEQ ID NO: 2655916 - RNA, 19 nt, Homo sapiens
  misc_RNA (1)...(19): siRNA sense strand
ccggaagagcuguggcaac

SEQ ID NO: 2655917 - RNA, 19 nt, Homo sapiens
  misc_RNA (1)...(19): siRNA sense strand
gcauaaggaauguggcaga

SEQ ID NO: 2655918 - RNA, 19 nt, Homo sapiens
  misc_RNA (1)...(19): siRNA sense strand
cgggaaauugagaaguaua

SEQ ID NO: 2655919 - RNA, 19 nt, Homo sapiens
  misc_RNA (1)...(19): siRNA sense strand
gugaauaaucagggaagaa

SEQ ID NO: 2655920 - RNA, 19 nt, Homo sapiens
  misc_RNA (1)...(19): siRNA sense strand
ggaagaagccaaccgggaa

SEQ ID NO: 2655921 - RNA, 19 nt, Homo sapiens
  misc_RNA (1)...(19): siRNA sense strand
ucuggaaacagcaggauaa

SEQ ID NO: 2655922 - RNA, 19 nt, Homo sapiens
  misc_RNA (1)...(19): siRNA sense strand
auagaaagugacaagguaa

SEQ ID NO: 2655923 - RNA, 19 nt, Homo sapiens
  misc_RNA (1)...(19): siRNA sense strand
uuaucuaacaggaggagaa

SEQ ID NO: 2655924 - RNA, 19 nt, Homo sapiens
  misc_RNA (1)...(19): siRNA sense strand
aggaggagaaggagcauau

SEQ ID NO: 2655925 - RNA, 19 nt, Homo sapiens
  misc_RNA (1)...(19): siRNA sense strand
uaacaaaggccaaggaggu

SEQ ID NO: 2655926 - RNA, 19 nt, Homo sapiens
  misc_RNA (1)...(19): siRNA sense strand
caaggagguagcagagcaa

SEQ ID NO: 2655927 - RNA, 19 nt, Homo sapiens
  misc_RNA (1)...(19): siRNA sense strand
cagaauagaaagugacaag

SEQ ID NO: 2655928 - RNA, 19 nt, Homo sapiens
  misc_RNA (1)...(19): siRNA sense strand
ugaaugacuacguggaaga

SEQ ID NO: 2655929 - RNA, 19 nt, Homo sapiens
  misc_RNA (1)...(19): siRNA sense strand
cccuagaggcccagcagaa

SEQ ID NO: 2655930 - RNA, 19 nt, Homo sapiens
  misc_RNA (1)...(19): siRNA sense strand
uagaaagugacaagguaau

SEQ ID NO: 2655931 - RNA, 19 nt, Homo sapiens
  misc_RNA (1)...(19): siRNA sense strand
uggcugguaugaagguaaa

SEQ ID NO: 2655932 - RNA, 19 nt, Homo sapiens
  misc_RNA (1)...(19): siRNA sense strand
gcuacaacacacuggccaa

SEQ ID NO: 2655933 - RNA, 19 nt, Homo sapiens
  misc_RNA (1)...(19): siRNA sense strand
uggaacagcaggaguauca

SEQ ID NO: 2655934 - RNA, 19 nt, Homo sapiens
  misc_RNA (1)...(19): siRNA sense strand
cagcauguguggagcccau

SEQ ID NO: 2655935 - RNA, 19 nt, Homo sapiens
  misc_RNA (1)...(19): siRNA sense strand
ccaagaaaacugaacaaau

SEQ ID NO: 2655936 - RNA, 19 nt, Homo sapiens
  misc_RNA (1)...(19): siRNA sense strand
caacaggagaucaggagca

SEQ ID NO: 2655937 - RNA, 19 nt, Homo sapiens
  misc_RNA (1)...(19): siRNA sense strand
gcuacauggagcacagauu

SEQ ID NO: 2655938 - RNA, 19 nt, Homo sapiens
  misc_RNA (1)...(19): siRNA sense strand
ccggaaacaucuaccacau

SEQ ID NO: 2655939 - RNA, 19 nt, Homo sapiens
  misc_RNA (1)...(19): siRNA sense strand
augaagacauugagcugau

SEQ ID NO: 2655940 - RNA, 19 nt, Homo sapiens
  misc_RNA (1)...(19): siRNA sense strand
cauuuguucucuuugguaa

SEQ ID NO: 2655941 - RNA, 19 nt, Homo sapiens
  misc_RNA (1)...(19): siRNA sense strand
ucuaacaggaggagaagga

SEQ ID NO: 2655942 - RNA, 19 nt, Homo sapiens
  misc_RNA (1)...(19): siRNA sense strand
ggagaaacggaguucccua

SEQ ID NO: 2655943 - RNA, 19 nt, Homo sapiens
  misc_RNA (1)...(19): siRNA sense strand
acggaguucccuaaaguua

SEQ ID NO: 2655944 - RNA, 19 nt, Homo sapiens
  misc_RNA (1)...(19): siRNA sense strand
ccugaaugcuggcaacuuu

SEQ ID NO: 2655945 - RNA, 19 nt, Homo sapiens
  misc_RNA (1)...(19): siRNA sense strand
ugcuauugucccagauaua

SEQ ID NO: 2655946 - RNA, 19 nt, Homo sapiens
  misc_RNA (1)...(19): siRNA sense strand
ugacuuacugggaggcaau

SEQ ID NO: 2655947 - RNA, 19 nt, Homo sapiens
  misc_RNA (1)...(19): siRNA sense strand
ccuggcugguggaagauaa

SEQ ID NO: 2655948 - RNA, 19 nt, Homo sapiens
  misc_RNA (1)...(19): siRNA sense strand
cagcuaagcagaagccuca

SEQ ID NO: 2655949 - RNA, 19 nt, Homo sapiens
  misc_RNA (1)...(19): siRNA sense strand
ucuuugagcugaagcccua

SEQ ID NO: 2655950 - RNA, 19 nt, Homo sapiens
  misc_RNA (1)...(19): siRNA sense strand
ccaaggagguagcagagca

SEQ ID NO: 2655951 - RNA, 19 nt, Homo sapiens
  misc_RNA (1)...(19): siRNA sense strand
accgggaaauugagaagua

SEQ ID NO: 2655952 - RNA, 19 nt, Homo sapiens
  misc_RNA (1)...(19): siRNA sense strand
aggaaagcccugaagacca

SEQ ID NO: 2655953 - RNA, 19 nt, Homo sapiens
  misc_RNA (1)...(19): siRNA sense strand
gauuaucuguggaacaaaa

SEQ ID NO: 2655954 - RNA, 19 nt, Homo sapiens
  misc_RNA (1)...(19): siRNA sense strand
cgaagauauaccaagcauu

SEQ ID NO: 2655955 - RNA, 19 nt, Homo sapiens
  misc_RNA (1)...(19): siRNA sense strand
aggcaaugguuguuuagga

SEQ ID NO: 2655956 - RNA, 19 nt, Homo sapiens
  misc_RNA (1)...(19): siRNA sense strand
agauauaugcugcuguuau

SEQ ID NO: 2655957 - RNA, 19 nt, Homo sapiens
  misc_RNA (1)...(19): siRNA sense strand
aggccaaggagguagcaga

SEQ ID NO: 2655958 - RNA, 19 nt, Homo sapiens
  misc_RNA (1)...(19): siRNA sense strand
gggaagaauuguaccgcug

SEQ ID NO: 2655959 - RNA, 19 nt, Homo sapiens
  misc_RNA (1)...(19): siRNA sense strand
auggauuaucuguggaaca

SEQ ID NO: 2655960 - RNA, 19 nt, Homo sapiens
  misc_RNA (1)...(19): siRNA sense strand
guggccaaauguaaagcaa

SEQ ID NO: 2655961 - RNA, 19 nt, Homo sapiens
  misc_RNA (1)...(19): siRNA sense strand
uggccaacuccuugagcau

SEQ ID NO: 2655962 - RNA, 19 nt, Homo sapiens
  misc_RNA (1)...(19): siRNA sense strand
gguuagauuccuuugaguu

SEQ ID NO: 2655963 - RNA, 19 nt, Homo sapiens
  misc_RNA (1)...(19): siRNA sense strand
aaaguuacucucagccaaa

SEQ ID NO: 2655964 - RNA, 19 nt, Homo sapiens
  misc_RNA (1)...(19): siRNA sense strand
cuggcugguaugaagguaa

SEQ ID NO: 2655965 - RNA, 19 nt, Homo sapiens
  misc_RNA (1)...(19): siRNA sense strand
gguaauuaucagcauugua

SEQ ID NO: 2655966 - RNA, 19 nt, Homo sapiens
  misc_RNA (1)...(19): siRNA sense strand
cuguggaacaaaagagauu

SEQ ID NO: 2655967 - RNA, 19 nt, Homo sapiens
  misc_RNA (1)...(19): siRNA sense strand
caugaaugacuacguggaa

SEQ ID NO: 2655968 - RNA, 19 nt, Homo sapiens
  misc_RNA (1)...(19): siRNA sense strand
cugcauaaggaauguggca

SEQ ID NO: 2655969 - RNA, 19 nt, Homo sapiens
  misc_RNA (1)...(19): siRNA sense strand
uugcugaagacaagaccua

SEQ ID NO: 2655970 - RNA, 19 nt, Homo sapiens
  misc_RNA (1)...(19): siRNA sense strand
gcagagagaaggagccaag

SEQ ID NO: 2655971 - RNA, 19 nt, Homo sapiens
  misc_RNA (1)...(19): siRNA sense strand
ccggcuggguggaguacuu

SEQ ID NO: 2655972 - RNA, 19 nt, Homo sapiens
  misc_RNA (1)...(19): siRNA sense strand
aguauaaguccgagggcac

SEQ ID NO: 2655973 - RNA, 19 nt, Homo sapiens
  misc_RNA (1)...(19): siRNA sense strand
gccauggcccagaggagaa

SEQ ID NO: 2655974 - RNA, 19 nt, Homo sapiens
  misc_RNA (1)...(19): siRNA sense strand
uugcugaagacaagaccua

SEQ ID NO: 2655975 - RNA, 19 nt, Homo sapiens
  misc_RNA (1)...(19): siRNA sense strand
gcagagagaaggagccaag

SEQ ID NO: 2655976 - RNA, 19 nt, Homo sapiens
  misc_RNA (1)...(19): siRNA sense strand
gcucaaagcaauucagcau

SEQ ID NO: 2655977 - RNA, 19 nt, Homo sapiens
  misc_RNA (1)...(19): siRNA sense strand
acaucuaauuggcaggaaa

SEQ ID NO: 2655978 - RNA, 19 nt, Homo sapiens
  misc_RNA (1)...(19): siRNA sense strand
acagauauuugucgggaau

SEQ ID NO: 2655979 - RNA, 19 nt, Homo sapiens
  misc_RNA (1)...(19): siRNA sense strand
acgcuuugcuauuuggaaa

SEQ ID NO: 2655980 - RNA, 19 nt, Homo sapiens
  misc_RNA (1)...(19): siRNA sense strand
uggaagugcuggaggaaac

SEQ ID NO: 2655981 - RNA, 19 nt, Homo sapiens
  misc_RNA (1)...(19): siRNA sense strand
cuggaauauggaaggauua

SEQ ID NO: 2655982 - RNA, 19 nt, Homo sapiens
  misc_RNA (1)...(19): siRNA sense strand
acuugaaagcuauggagaa

SEQ ID NO: 2655983 - RNA, 19 nt, Homo sapiens
  misc_RNA (1)...(19): siRNA sense strand
uggaauaugaucaagcuaa

SEQ ID NO: 2655984 - RNA, 19 nt, Homo sapiens
  misc_RNA (1)...(19): siRNA sense strand
ggacaacaccauuggacca

SEQ ID NO: 2655985 - RNA, 19 nt, Homo sapiens
  misc_RNA (1)...(19): siRNA sense strand
aggaauggaauaugaucaa

SEQ ID NO: 2655986 - RNA, 19 nt, Homo sapiens
  misc_RNA (1)...(19): siRNA sense strand
ccagaagauuguacgacau

SEQ ID NO: 2655987 - RNA, 19 nt, Homo sapiens
  misc_RNA (1)...(19): siRNA sense strand
auggaauaggaauggaaua

SEQ ID NO: 2655988 - RNA, 19 nt, Homo sapiens
  misc_RNA (1)...(19): siRNA sense strand
aggaacaggaguaguaaga

SEQ ID NO: 2655989 - RNA, 19 nt, Homo sapiens
  misc_RNA (1)...(19): siRNA sense strand
uggaauaggaauggaauau

SEQ ID NO: 2655990 - RNA, 19 nt, Homo sapiens
  misc_RNA (1)...(19): siRNA sense strand
acgcauuugcuccgggaua

SEQ ID NO: 2655991 - RNA, 19 nt, Homo sapiens
  misc_RNA (1)...(19): siRNA sense strand
agaaaguggcagauuauau

SEQ ID NO: 2655992 - RNA, 19 nt, Homo sapiens
  misc_RNA (1)...(19): siRNA sense strand
agauguauuuagaggggaa

SEQ ID NO: 2655993 - RNA, 19 nt, Homo sapiens
  misc_RNA (1)...(19): siRNA sense strand
gccacugggcugagaaauu

SEQ ID NO: 2655994 - RNA, 19 nt, Homo sapiens
  misc_RNA (1)...(19): siRNA sense strand
caggaaaggucuagaucag

SEQ ID NO: 2655995 - RNA, 19 nt, Homo sapiens
  misc_RNA (1)...(19): siRNA sense strand
ggcagaaagaggagauguu

SEQ ID NO: 2655996 - RNA, 19 nt, Homo sapiens
  misc_RNA (1)...(19): siRNA sense strand
caggauuacuacaaagcau

SEQ ID NO: 2655997 - RNA, 19 nt, Homo sapiens
  misc_RNA (1)...(19): siRNA sense strand
ccauggcauuuauaggaaa

SEQ ID NO: 2655998 - RNA, 19 nt, Homo sapiens
  misc_RNA (1)...(19): siRNA sense strand
uaaaggugucugugaacua

SEQ ID NO: 2655999 - RNA, 19 nt, Homo sapiens
  misc_RNA (1)...(19): siRNA sense strand
gccagaagauuguacgaca

SEQ ID NO: 2656000 - RNA, 19 nt, Homo sapiens
  misc_RNA (1)...(19): siRNA sense strand
uuauaugaguccuuggcua

SEQ ID NO: 2656001 - RNA, 19 nt, Homo sapiens
  misc_RNA (1)...(19): siRNA sense strand
ggaaaggucuagaucagga

SEQ ID NO: 2656002 - RNA, 19 nt, Homo sapiens
  misc_RNA (1)...(19): siRNA sense strand
augaaguagcucaaagcaa

SEQ ID NO: 2656003 - RNA, 19 nt, Homo sapiens
  misc_RNA (1)...(19): siRNA sense strand
gggcaaugcaaucggccuu

SEQ ID NO: 2656004 - RNA, 19 nt, Homo sapiens
  misc_RNA (1)...(19): siRNA sense strand
cagcauugcagccaacaaa

SEQ ID NO: 2656005 - RNA, 19 nt, Homo sapiens
  misc_RNA (1)...(19): siRNA sense strand
ccugaaaaucugaguucua

SEQ ID NO: 2656006 - RNA, 19 nt, Homo sapiens
  misc_RNA (1)...(19): siRNA sense strand
cagaaagaggagauguuca

SEQ ID NO: 2656007 - RNA, 19 nt, Homo sapiens
  misc_RNA (1)...(19): siRNA sense strand
cuacucuggcucuggaaua

SEQ ID NO: 2656008 - RNA, 19 nt, Homo sapiens
  misc_RNA (1)...(19): siRNA sense strand
ucuggaauauggaaggauu

SEQ ID NO: 2656009 - RNA, 19 nt, Homo sapiens
  misc_RNA (1)...(19): siRNA sense strand
uggcuaugggacuaagaaa

SEQ ID NO: 2656010 - RNA, 19 nt, Homo sapiens
  misc_RNA (1)...(19): siRNA sense strand
agauuauauugcugacaca

SEQ ID NO: 2656011 - RNA, 19 nt, Homo sapiens
  misc_RNA (1)...(19): siRNA sense strand
gauguaugcaacaggaaca

SEQ ID NO: 2656012 - RNA, 19 nt, Homo sapiens
  misc_RNA (1)...(19): siRNA sense strand
ucuacagaauugugaaguu

SEQ ID NO: 2656013 - RNA, 19 nt, Homo sapiens
  misc_RNA (1)...(19): siRNA sense strand
acuacaaagcauuacacua

SEQ ID NO: 2656014 - RNA, 19 nt, Homo sapiens
  misc_RNA (1)...(19): siRNA sense strand
aguuaggcuucauguacua

SEQ ID NO: 2656015 - RNA, 19 nt, Homo sapiens
  misc_RNA (1)...(19): siRNA sense strand
agaaaugggguaugaagua

SEQ ID NO: 2656016 - RNA, 19 nt, Homo sapiens
  misc_RNA (1)...(19): siRNA sense strand
ugaaagcuauggagaaaau

SEQ ID NO: 2656017 - RNA, 19 nt, Homo sapiens
  misc_RNA (1)...(19): siRNA sense strand
ggauggugauauagauucu

SEQ ID NO: 2656018 - RNA, 19 nt, Homo sapiens
  misc_RNA (1)...(19): siRNA sense strand
aggcuaacauucuugaaaa

SEQ ID NO: 2656019 - RNA, 19 nt, Homo sapiens
  misc_RNA (1)...(19): siRNA sense strand
agauauuugucgggaauca

SEQ ID NO: 2656020 - RNA, 19 nt, Homo sapiens
  misc_RNA (1)...(19): siRNA sense strand
ccauuuauuaucuggccaa

SEQ ID NO: 2656021 - RNA, 19 nt, Homo sapiens
  misc_RNA (1)...(19): siRNA sense strand
gaguucuaacagugagauu

SEQ ID NO: 2656022 - RNA, 19 nt, Homo sapiens
  misc_RNA (1)...(19): siRNA sense strand
gccuauaaggauggugaua

SEQ ID NO: 2656023 - RNA, 19 nt, Homo sapiens
  misc_RNA (1)...(19): siRNA sense strand
uggcuuauauguaugaaca

SEQ ID NO: 2656024 - RNA, 19 nt, Homo sapiens
  misc_RNA (1)...(19): siRNA sense strand
auuacaagaaaguggcaga

SEQ ID NO: 2656025 - RNA, 19 nt, Homo sapiens
  misc_RNA (1)...(19): siRNA sense strand
ggaaagauguauuuagagg

SEQ ID NO: 2656026 - RNA, 19 nt, Homo sapiens
  misc_RNA (1)...(19): siRNA sense strand
augccgaagcacuuaaaua

SEQ ID NO: 2656027 - RNA, 19 nt, Homo sapiens
  misc_RNA (1)...(19): siRNA sense strand
cuuuggaagugcuggagga

SEQ ID NO: 2656028 - RNA, 19 nt, Homo sapiens
  misc_RNA (1)...(19): siRNA sense strand
aaagagaagauguauccaa

SEQ ID NO: 2656029 - RNA, 19 nt, Homo sapiens
  misc_RNA (1)...(19): siRNA sense strand
agaaaauggcugacgcuuu

SEQ ID NO: 2656030 - RNA, 19 nt, Homo sapiens
  misc_RNA (1)...(19): siRNA sense strand
gggacauauaccaauacua

SEQ ID NO: 2656031 - RNA, 19 nt, Homo sapiens
  misc_RNA (1)...(19): siRNA sense strand
ugaaguugcccuaaguuau

SEQ ID NO: 2656032 - RNA, 19 nt, Homo sapiens
  misc_RNA (1)...(19): siRNA sense strand
ccaguaagggcaaugcaau

SEQ ID NO: 2656033 - RNA, 19 nt, Homo sapiens
  misc_RNA (1)...(19): siRNA sense strand
ggaauauggaaggauuaua

SEQ ID NO: 2656034 - RNA, 19 nt, Homo sapiens
  misc_RNA (1)...(19): siRNA sense strand
ugcaacaggaacaggagua

SEQ ID NO: 2656035 - RNA, 19 nt, Homo sapiens
  misc_RNA (1)...(19): siRNA sense strand
gggaauaauaagucacaaa

SEQ ID NO: 2656036 - RNA, 19 nt, Homo sapiens
  misc_RNA (1)...(19): siRNA sense strand
gaggagaagaagagaagaa

SEQ ID NO: 2656037 - RNA, 19 nt, Homo sapiens
  misc_RNA (1)...(19): siRNA sense strand
gggaaagacagaagaguga

SEQ ID NO: 2656038 - RNA, 19 nt, Homo sapiens
  misc_RNA (1)...(19): siRNA sense strand
caaggaaaauguagggaaa

SEQ ID NO: 2656039 - RNA, 19 nt, Homo sapiens
  misc_RNA (1)...(19): siRNA sense strand
aggcaaaggcuguguucua

SEQ ID NO: 2656040 - RNA, 19 nt, Homo sapiens
  misc_RNA (1)...(19): siRNA sense strand
augcagaagccaaaggaua

SEQ ID NO: 2656041 - RNA, 19 nt, Homo sapiens
  misc_RNA (1)...(19): siRNA sense strand
uggaggagccagauagaaa

SEQ ID NO: 2656042 - RNA, 19 nt, Homo sapiens
  misc_RNA (1)...(19): siRNA sense strand
agagagaacaugaaggaau

SEQ ID NO: 2656043 - RNA, 19 nt, Homo sapiens
  misc_RNA (1)...(19): siRNA sense strand
cuguugaaguauaugguua

SEQ ID NO: 2656044 - RNA, 19 nt, Homo sapiens
  misc_RNA (1)...(19): siRNA sense strand
uggauaauguggaugcaaa

SEQ ID NO: 2656045 - RNA, 19 nt, Homo sapiens
  misc_RNA (1)...(19): siRNA sense strand
gcuuggaguggaagaauaa

SEQ ID NO: 2656046 - RNA, 19 nt, Homo sapiens
  misc_RNA (1)...(19): siRNA sense strand
gagcagagggugugugaca

SEQ ID NO: 2656047 - RNA, 19 nt, Homo sapiens
  misc_RNA (1)...(19): siRNA sense strand
guggaaaaggcaagaaaua

SEQ ID NO: 2656048 - RNA, 19 nt, Homo sapiens
  misc_RNA (1)...(19): siRNA sense strand
agaguaauugugagggaua

SEQ ID NO: 2656049 - RNA, 19 nt, Homo sapiens
  misc_RNA (1)...(19): siRNA sense strand
gguuauugcuugaugacuu

SEQ ID NO: 2656050 - RNA, 19 nt, Homo sapiens
  misc_RNA (1)...(19): siRNA sense strand
ccaacuauucucagauaua

SEQ ID NO: 2656051 - RNA, 19 nt, Homo sapiens
  misc_RNA (1)...(19): siRNA sense strand
ccaaaaugcucaagaggau

SEQ ID NO: 2656052 - RNA, 19 nt, Homo sapiens
  misc_RNA (1)...(19): siRNA sense strand
ccaaauaccuaccaggaga

SEQ ID NO: 2656053 - RNA, 19 nt, Homo sapiens
  misc_RNA (1)...(19): siRNA sense strand
agucagugccagaaguaaa

SEQ ID NO: 2656054 - RNA, 19 nt, Homo sapiens
  misc_RNA (1)...(19): siRNA sense strand
gggaaguacucuugggaug

SEQ ID NO: 2656055 - RNA, 19 nt, Homo sapiens
  misc_RNA (1)...(19): siRNA sense strand
uuacauugcugaaggucaa

SEQ ID NO: 2656056 - RNA, 19 nt, Homo sapiens
  misc_RNA (1)...(19): siRNA sense strand
cugaauuggauuugaaaga

SEQ ID NO: 2656057 - RNA, 19 nt, Homo sapiens
  misc_RNA (1)...(19): siRNA sense strand
caucagcagaauuggguaa

SEQ ID NO: 2656058 - RNA, 19 nt, Homo sapiens
  misc_RNA (1)...(19): siRNA sense strand
cuguugaagaggagaagaa

SEQ ID NO: 2656059 - RNA, 19 nt, Homo sapiens
  misc_RNA (1)...(19): siRNA sense strand
ggauaauguggaugcaaau

SEQ ID NO: 2656060 - RNA, 19 nt, Homo sapiens
  misc_RNA (1)...(19): siRNA sense strand
ugcagaagccaaaggauaa

SEQ ID NO: 2656061 - RNA, 19 nt, Homo sapiens
  misc_RNA (1)...(19): siRNA sense strand
gggauuaaccagcgaggau

SEQ ID NO: 2656062 - RNA, 19 nt, Homo sapiens
  misc_RNA (1)...(19): siRNA sense strand
aggaaaucauugaggucau

SEQ ID NO: 2656063 - RNA, 19 nt, Homo sapiens
  misc_RNA (1)...(19): siRNA sense strand
agauaagaugugaaggaau

SEQ ID NO: 2656064 - RNA, 19 nt, Homo sapiens
  misc_RNA (1)...(19): siRNA sense strand
aaagaagcaacgaggcaaa

SEQ ID NO: 2656065 - RNA, 19 nt, Homo sapiens
  misc_RNA (1)...(19): siRNA sense strand
ugacaaugcccauguggaa

SEQ ID NO: 2656066 - RNA, 19 nt, Homo sapiens
  misc_RNA (1)...(19): siRNA sense strand
ggaaaaggcaagaaauauu

SEQ ID NO: 2656067 - RNA, 19 nt, Homo sapiens
  misc_RNA (1)...(19): siRNA sense strand
ggacaugugaagagagaac

SEQ ID NO: 2656068 - RNA, 19 nt, Homo sapiens
  misc_RNA (1)...(19): siRNA sense strand
cgacacugccaaaugaaua

SEQ ID NO: 2656069 - RNA, 19 nt, Homo sapiens
  misc_RNA (1)...(19): siRNA sense strand
gaagaggagaagaagagaa

SEQ ID NO: 2656070 - RNA, 19 nt, Homo sapiens
  misc_RNA (1)...(19): siRNA sense strand
cuggauaugugaagagcuu

SEQ ID NO: 2656071 - RNA, 19 nt, Homo sapiens
  misc_RNA (1)...(19): siRNA sense strand
cccagaaucuccaggaaau

SEQ ID NO: 2656072 - RNA, 19 nt, Homo sapiens
  misc_RNA (1)...(19): siRNA sense strand
acgggauaaucuagcaaua

SEQ ID NO: 2656073 - RNA, 19 nt, Homo sapiens
  misc_RNA (1)...(19): siRNA sense strand
uagcaauaagccuggauaa

SEQ ID NO: 2656074 - RNA, 19 nt, Homo sapiens
  misc_RNA (1)...(19): siRNA sense strand
cuagcaaagauacgggaua

SEQ ID NO: 2656075 - RNA, 19 nt, Homo sapiens
  misc_RNA (1)...(19): siRNA sense strand
guaucuaacugcaacacaa

SEQ ID NO: 2656076 - RNA, 19 nt, Homo sapiens
  misc_RNA (1)...(19): siRNA sense strand
augaauauaaggaaggcaa

SEQ ID NO: 2656077 - RNA, 19 nt, Homo sapiens
  misc_RNA (1)...(19): siRNA sense strand
caagaagacaaguguucaa

SEQ ID NO: 2656078 - RNA, 19 nt, Homo sapiens
  misc_RNA (1)...(19): siRNA sense strand
aagcaauaauucagaacca

SEQ ID NO: 2656079 - RNA, 19 nt, Homo sapiens
  misc_RNA (1)...(19): siRNA sense strand
guucaaguguacagaaagu

SEQ ID NO: 2656080 - RNA, 19 nt, Homo sapiens
  misc_RNA (1)...(19): siRNA sense strand
ccaaaugaauauaaggaag

SEQ ID NO: 2656081 - RNA, 19 nt, Homo sapiens
  misc_RNA (1)...(19): siRNA sense strand
ugaauauaaggaaggcaaa

SEQ ID NO: 2656082 - RNA, 19 nt, Homo sapiens
  misc_RNA (1)...(19): siRNA sense strand
uaguucaaguguacagaaa

SEQ ID NO: 2656083 - RNA, 19 nt, Homo sapiens
  misc_RNA (1)...(19): siRNA sense strand
gugaagaaguccacccaga

SEQ ID NO: 2656084 - RNA, 19 nt, Homo sapiens
  misc_RNA (1)...(19): siRNA sense strand
caauaagccuggauaacca

SEQ ID NO: 2656085 - RNA, 19 nt, Homo sapiens
  misc_RNA (1)...(19): siRNA sense strand
gggacagaaggaagaauuu

SEQ ID NO: 2656086 - RNA, 19 nt, Homo sapiens
  misc_RNA (1)...(19): siRNA sense strand
gaguggaagaauaaggaga

SEQ ID NO: 2656087 - RNA, 19 nt, Homo sapiens
  misc_RNA (1)...(19): siRNA sense strand
cggaaugggaggaacuuau

SEQ ID NO: 2656088 - RNA, 19 nt, Homo sapiens
  misc_RNA (1)...(19): siRNA sense strand
augaaaugguacagcggau

SEQ ID NO: 2656089 - RNA, 19 nt, Homo sapiens
  misc_RNA (1)...(19): siRNA sense strand
ucaagagaauaaaggacau

SEQ ID NO: 2656090 - RNA, 19 nt, Homo sapiens
  misc_RNA (1)...(19): siRNA sense strand
uaagauaagaugugaagga

SEQ ID NO: 2656091 - RNA, 19 nt, Homo sapiens
  misc_RNA (1)...(19): siRNA sense strand
aguggaagaauaaggagaa

SEQ ID NO: 2656092 - RNA, 19 nt, Homo sapiens
  misc_RNA (1)...(19): siRNA sense strand
aagaaauauuguucgccaa

SEQ ID NO: 2656093 - RNA, 19 nt, Homo sapiens
  misc_RNA (1)...(19): siRNA sense strand
cugaaguggaggaguguca

SEQ ID NO: 2656094 - RNA, 19 nt, Homo sapiens
  misc_RNA (1)...(19): siRNA sense strand
ccagcgaggaucaggauau

SEQ ID NO: 2656095 - RNA, 19 nt, Homo sapiens
  misc_RNA (1)...(19): siRNA sense strand
aagccaaaggauaaacaaa

SEQ ID NO: 2656096 - RNA, 19 nt, Homo sapiens
  misc_RNA (1)...(19): siRNA sense strand
agaaauauuguucgccaaa

SEQ ID NO: 2656097 - RNA, 19 nt, Homo sapiens
  misc_RNA (1)...(19): siRNA sense strand
cuucagagccucagccuau

SEQ ID NO: 2656098 - RNA, 19 nt, Homo sapiens
  misc_RNA (1)...(19): siRNA sense strand
ccucuguagcauugaagaa

SEQ ID NO: 2656099 - RNA, 19 nt, Homo sapiens
  misc_RNA (1)...(19): siRNA sense strand
uagaaaagauguugcccaa

SEQ ID NO: 2656100 - RNA, 19 nt, Homo sapiens
  misc_RNA (1)...(19): siRNA sense strand
gcagcagacacaaggaaaa

SEQ ID NO: 2656101 - RNA, 19 nt, Homo sapiens
  misc_RNA (1)...(19): siRNA sense strand
ccacagauggcgaggguga

SEQ ID NO: 2656102 - RNA, 19 nt, Homo sapiens
  misc_RNA (1)...(19): siRNA sense strand
cgggaagcgaggaguuuaa

SEQ ID NO: 2656103 - RNA, 19 nt, Homo sapiens
  misc_RNA (1)...(19): siRNA sense strand
gggcugaagaggagggaug

SEQ ID NO: 2656104 - RNA, 19 nt, Homo sapiens
  misc_RNA (1)...(19): siRNA sense strand
ugucagugcauuagaccaa

SEQ ID NO: 2656105 - RNA, 19 nt, Homo sapiens
  misc_RNA (1)...(19): siRNA sense strand
gauuguuggaagagguauu

SEQ ID NO: 2656106 - RNA, 19 nt, Homo sapiens
  misc_RNA (1)...(19): siRNA sense strand
cuuaaagaagggagacaca

SEQ ID NO: 2656107 - RNA, 19 nt, Homo sapiens
  misc_RNA (1)...(19): siRNA sense strand
gcaacagaaucgaggaccu

SEQ ID NO: 2656108 - RNA, 19 nt, Homo sapiens
  misc_RNA (1)...(19): siRNA sense strand
ggugacuggagcagguaua

SEQ ID NO: 2656109 - RNA, 19 nt, Homo sapiens
  misc_RNA (1)...(19): siRNA sense strand
cggacgaggacuacaucaa

SEQ ID NO: 2656110 - RNA, 19 nt, Homo sapiens
  misc_RNA (1)...(19): siRNA sense strand
uuaaagaaguacaugcaca

SEQ ID NO: 2656111 - RNA, 19 nt, Homo sapiens
  misc_RNA (1)...(19): siRNA sense strand
cgguaauggagaaagcaca

SEQ ID NO: 2656112 - RNA, 19 nt, Homo sapiens
  misc_RNA (1)...(19): siRNA sense strand
aggacaaacccaagggaag

SEQ ID NO: 2656113 - RNA, 19 nt, Homo sapiens
  misc_RNA (1)...(19): siRNA sense strand
gaggacaaacccaagggaa

SEQ ID NO: 2656114 - RNA, 19 nt, Homo sapiens
  misc_RNA (1)...(19): siRNA sense strand
ccuucauugcaaagagauu

SEQ ID NO: 2656115 - RNA, 19 nt, Homo sapiens
  misc_RNA (1)...(19): siRNA sense strand
ggauuaucugcaaggguga

SEQ ID NO: 2656116 - RNA, 19 nt, Homo sapiens
  misc_RNA (1)...(19): siRNA sense strand
ccaaagaagcaccaaggga

SEQ ID NO: 2656117 - RNA, 19 nt, Homo sapiens
  misc_RNA (1)...(19): siRNA sense strand
cgggaacggcaaccagaaa

SEQ ID NO: 2656118 - RNA, 19 nt, Homo sapiens
  misc_RNA (1)...(19): siRNA sense strand
gcucacaagccgugguucu

SEQ ID NO: 2656119 - RNA, 19 nt, Homo sapiens
  misc_RNA (1)...(19): siRNA sense strand
ccggcuugucagugcauua

SEQ ID NO: 2656120 - RNA, 19 nt, Homo sapiens
  misc_RNA (1)...(19): siRNA sense strand
gaauaagcccagcugguca

SEQ ID NO: 2656121 - RNA, 19 nt, Homo sapiens
  misc_RNA (1)...(19): siRNA sense strand
gagaauaagcccagcuggu

SEQ ID NO: 2656122 - RNA, 19 nt, Homo sapiens
  misc_RNA (1)...(19): siRNA sense strand
aaaccaaagaucagccaga

SEQ ID NO: 2656123 - RNA, 19 nt, Homo sapiens
  misc_RNA (1)...(19): siRNA sense strand
ucguaggaggacuuagaua

SEQ ID NO: 2656124 - RNA, 19 nt, Homo sapiens
  misc_RNA (1)...(19): siRNA sense strand
acacagaaucacugcagga

SEQ ID NO: 2656125 - RNA, 19 nt, Homo sapiens
  misc_RNA (1)...(19): siRNA sense strand
cacugagauuguuggaaga

SEQ ID NO: 2656126 - RNA, 19 nt, Homo sapiens
  misc_RNA (1)...(19): siRNA sense strand
uuuccaaagcugauaucaa

SEQ ID NO: 2656127 - RNA, 19 nt, Homo sapiens
  misc_RNA (1)...(19): siRNA sense strand
agugacaccacaucagaaa

SEQ ID NO: 2656128 - RNA, 19 nt, Homo sapiens
  misc_RNA (1)...(19): siRNA sense strand
guaccucagacgacagcaa

SEQ ID NO: 2656129 - RNA, 19 nt, Homo sapiens
  misc_RNA (1)...(19): siRNA sense strand
aagaagggagacacagaau

SEQ ID NO: 2656130 - RNA, 19 nt, Homo sapiens
  misc_RNA (1)...(19): siRNA sense strand
gcacuaaagagcagaggaa

SEQ ID NO: 2656131 - RNA, 19 nt, Homo sapiens
  misc_RNA (1)...(19): siRNA sense strand
ccacagagagggaguacau

SEQ ID NO: 2656132 - RNA, 19 nt, Homo sapiens
  misc_RNA (1)...(19): siRNA sense strand
ggaagaaguaucugaggca

SEQ ID NO: 2656133 - RNA, 19 nt, Homo sapiens
  misc_RNA (1)...(19): siRNA sense strand
cggcagaggucaagagugc

SEQ ID NO: 2656134 - RNA, 19 nt, Homo sapiens
  misc_RNA (1)...(19): siRNA sense strand
cgggaugaguuuaucguuu

SEQ ID NO: 2656135 - RNA, 19 nt, Homo sapiens
  misc_RNA (1)...(19): siRNA sense strand
acgugaauuugaaggaaca

SEQ ID NO: 2656136 - RNA, 19 nt, Homo sapiens
  misc_RNA (1)...(19): siRNA sense strand
gcaaugaccugcuggccau

SEQ ID NO: 2656137 - RNA, 19 nt, Homo sapiens
  misc_RNA (1)...(19): siRNA sense strand
ggacaagcagcgggagcua

SEQ ID NO: 2656138 - RNA, 19 nt, Homo sapiens
  misc_RNA (1)...(19): siRNA sense strand
cggcggaaaucucaggaca

SEQ ID NO: 2656139 - RNA, 19 nt, Homo sapiens
  misc_RNA (1)...(19): siRNA sense strand
gcgggagcuaggugacaaa

SEQ ID NO: 2656140 - RNA, 19 nt, Homo sapiens
  misc_RNA (1)...(19): siRNA sense strand
ggaaaucucaggacaccua

SEQ ID NO: 2656141 - RNA, 19 nt, Homo sapiens
  misc_RNA (1)...(19): siRNA sense strand
acgaagagcaguuugggau

SEQ ID NO: 2656142 - RNA, 19 nt, Homo sapiens
  misc_RNA (1)...(19): siRNA sense strand
uggcuugagguuugagauu

SEQ ID NO: 2656143 - RNA, 19 nt, Homo sapiens
  misc_RNA (1)...(19): siRNA sense strand
ggacaguggcuugagguuu

SEQ ID NO: 2656144 - RNA, 19 nt, Homo sapiens
  misc_RNA (1)...(19): siRNA sense strand
gcagaggucaagagugcau

SEQ ID NO: 2656145 - RNA, 19 nt, Homo sapiens
  misc_RNA (1)...(19): siRNA sense strand
gagggaagcaccacguuau

SEQ ID NO: 2656146 - RNA, 19 nt, Homo sapiens
  misc_RNA (1)...(19): siRNA sense strand
gcuugagguuugagauuug

SEQ ID NO: 2656147 - RNA, 19 nt, Homo sapiens
  misc_RNA (1)...(19): siRNA sense strand
cgagggaagcaccacguua

SEQ ID NO: 2656148 - RNA, 19 nt, Homo sapiens
  misc_RNA (1)...(19): siRNA sense strand
gugcauggaccgaugucau

SEQ ID NO: 2656149 - RNA, 19 nt, Homo sapiens
  misc_RNA (1)...(19): siRNA sense strand
gggaggaagaaguaucuga

SEQ ID NO: 2656150 - RNA, 19 nt, Homo sapiens
  misc_RNA (1)...(19): siRNA sense strand
gagaugaucgccacagaga

SEQ ID NO: 2656151 - RNA, 19 nt, Homo sapiens
  misc_RNA (1)...(19): siRNA sense strand
gcacuaaagagcagaggaa

SEQ ID NO: 2656152 - RNA, 19 nt, Homo sapiens
  misc_RNA (1)...(19): siRNA sense strand
ccacagagagggaguacau

SEQ ID NO: 2656153 - RNA, 19 nt, Homo sapiens
  misc_RNA (1)...(19): siRNA sense strand
ggaagaaguaucugaggca

SEQ ID NO: 2656154 - RNA, 19 nt, Homo sapiens
  misc_RNA (1)...(19): siRNA sense strand
cggcagaggucaagagugc

SEQ ID NO: 2656155 - RNA, 19 nt, Homo sapiens
  misc_RNA (1)...(19): siRNA sense strand
cgggaugaguuuaucguuu

SEQ ID NO: 2656156 - RNA, 19 nt, Homo sapiens
  misc_RNA (1)...(19): siRNA sense strand
acgugaauuugaaggaaca

SEQ ID NO: 2656157 - RNA, 19 nt, Homo sapiens
  misc_RNA (1)...(19): siRNA sense strand
gcaaugaccugcuggccau

SEQ ID NO: 2656158 - RNA, 19 nt, Homo sapiens
  misc_RNA (1)...(19): siRNA sense strand
ggacaagcagcgggagcua

SEQ ID NO: 2656159 - RNA, 19 nt, Homo sapiens
  misc_RNA (1)...(19): siRNA sense strand
gcgggagcuaggugacaaa

SEQ ID NO: 2656160 - RNA, 19 nt, Homo sapiens
  misc_RNA (1)...(19): siRNA sense strand
acgaagagcaguuugggau

SEQ ID NO: 2656161 - RNA, 19 nt, Homo sapiens
  misc_RNA (1)...(19): siRNA sense strand
uggcuugagguuugagauu

SEQ ID NO: 2656162 - RNA, 19 nt, Homo sapiens
  misc_RNA (1)...(19): siRNA sense strand
ggacaguggcuugagguuu

SEQ ID NO: 2656163 - RNA, 19 nt, Homo sapiens
  misc_RNA (1)...(19): siRNA sense strand
gcagaggucaagagugcau

SEQ ID NO: 2656164 - RNA, 19 nt, Homo sapiens
  misc_RNA (1)...(19): siRNA sense strand
gagggaagcaccacguuau

SEQ ID NO: 2656165 - RNA, 19 nt, Homo sapiens
  misc_RNA (1)...(19): siRNA sense strand
gcuugagguuugagauuug

SEQ ID NO: 2656166 - RNA, 19 nt, Homo sapiens
  misc_RNA (1)...(19): siRNA sense strand
cgagggaagcaccacguua

SEQ ID NO: 2656167 - RNA, 19 nt, Homo sapiens
  misc_RNA (1)...(19): siRNA sense strand
gugcauggaccgaugucau

SEQ ID NO: 2656168 - RNA, 19 nt, Homo sapiens
  misc_RNA (1)...(19): siRNA sense strand
gggaggaagaaguaucuga

SEQ ID NO: 2656169 - RNA, 19 nt, Homo sapiens
  misc_RNA (1)...(19): siRNA sense strand
gagaugaucgccacagaga

SEQ ID NO: 2656170 - RNA, 19 nt, Homo sapiens
  misc_RNA (1)...(19): siRNA sense strand
gccucaagaaggagaacaa

SEQ ID NO: 2656171 - RNA, 19 nt, Homo sapiens
  misc_RNA (1)...(19): siRNA sense strand
acgaggaugacgaggacaa

SEQ ID NO: 2656172 - RNA, 19 nt, Homo sapiens
  misc_RNA (1)...(19): siRNA sense strand
ccgaggacgacgaggagau

SEQ ID NO: 2656173 - RNA, 19 nt, Homo sapiens
  misc_RNA (1)...(19): siRNA sense strand
agaucgaccuggaaagcau

SEQ ID NO: 2656174 - RNA, 19 nt, Homo sapiens
  misc_RNA (1)...(19): siRNA sense strand
gcaacgaggaugacgagga

SEQ ID NO: 2656175 - RNA, 19 nt, Homo sapiens
  misc_RNA (1)...(19): siRNA sense strand
ccuggaaagcaucgacauu

SEQ ID NO: 2656176 - RNA, 19 nt, Homo sapiens
  misc_RNA (1)...(19): siRNA sense strand
aagaaggagaacaagguga

SEQ ID NO: 2656177 - RNA, 19 nt, Homo sapiens
  misc_RNA (1)...(19): siRNA sense strand
acgauggcgaccagagcaa

SEQ ID NO: 2656178 - RNA, 19 nt, Homo sapiens
  misc_RNA (1)...(19): siRNA sense strand
ccaggaagauggagcgcuc

SEQ ID NO: 2656179 - RNA, 19 nt, Homo sapiens
  misc_RNA (1)...(19): siRNA sense strand
ccacgcucccagagagaga

SEQ ID NO: 2656180 - RNA, 19 nt, Homo sapiens
  misc_RNA (1)...(19): siRNA sense strand
cgaccagagcaacgaggau

SEQ ID NO: 2656181 - RNA, 19 nt, Homo sapiens
  misc_RNA (1)...(19): siRNA sense strand
gaugaaacccauauggaga

SEQ ID NO: 2656182 - RNA, 19 nt, Homo sapiens
  misc_RNA (1)...(19): siRNA sense strand
gggauaggaaggaggggaa

SEQ ID NO: 2656183 - RNA, 19 nt, Homo sapiens
  misc_RNA (1)...(19): siRNA sense strand
aggaaggaggggaaggaaa

SEQ ID NO: 2656184 - RNA, 19 nt, Homo sapiens
  misc_RNA (1)...(19): siRNA sense strand
auggaagacaggaagcaaa

SEQ ID NO: 2656185 - RNA, 19 nt, Homo sapiens
  misc_RNA (1)...(19): siRNA sense strand
gaggggaaggaaagggaaa

SEQ ID NO: 2656186 - RNA, 19 nt, Homo sapiens
  misc_RNA (1)...(19): siRNA sense strand
uggaagacaggaagcaaaa

SEQ ID NO: 2656187 - RNA, 19 nt, Homo sapiens
  misc_RNA (1)...(19): siRNA sense strand
aagaagaaacugauggaag

SEQ ID NO: 2656188 - RNA, 19 nt, Homo sapiens
  misc_RNA (1)...(19): siRNA sense strand
aggaaggaaaagaaaggaa

SEQ ID NO: 2656189 - RNA, 19 nt, Homo sapiens
  misc_RNA (1)...(19): siRNA sense strand
aaucugaaaucuaccauga

SEQ ID NO: 2656190 - RNA, 19 nt, Homo sapiens
  misc_RNA (1)...(19): siRNA sense strand
aagcagagcuagaagagaa

SEQ ID NO: 2656191 - RNA, 19 nt, Homo sapiens
  misc_RNA (1)...(19): siRNA sense strand
ucagaagagcagugggaua

SEQ ID NO: 2656192 - RNA, 19 nt, Homo sapiens
  misc_RNA (1)...(19): siRNA sense strand
gaagaaagucugagagcca

SEQ ID NO: 2656193 - RNA, 19 nt, Homo sapiens
  misc_RNA (1)...(19): siRNA sense strand
ggagaugggcagaagcaaa

SEQ ID NO: 2656194 - RNA, 19 nt, Homo sapiens
  misc_RNA (1)...(19): siRNA sense strand
cagaaaacauggagagaca

SEQ ID NO: 2656195 - RNA, 19 nt, Homo sapiens
  misc_RNA (1)...(19): siRNA sense strand
ugauaaagccauagcuaau

SEQ ID NO: 2656196 - RNA, 19 nt, Homo sapiens
  misc_RNA (1)...(19): siRNA sense strand
caaacaaagaucagucaaa

SEQ ID NO: 2656197 - RNA, 19 nt, Homo sapiens
  misc_RNA (1)...(19): siRNA sense strand
aaauaaaggaaguggcaca

SEQ ID NO: 2656198 - RNA, 19 nt, Homo sapiens
  misc_RNA (1)...(19): siRNA sense strand
gaggaaacaacuuggagaa

SEQ ID NO: 2656199 - RNA, 19 nt, Homo sapiens
  misc_RNA (1)...(19): siRNA sense strand
gagcagugggauagaauau

SEQ ID NO: 2656200 - RNA, 19 nt, Homo sapiens
  misc_RNA (1)...(19): siRNA sense strand
gaacaaagaauuaaaggca

SEQ ID NO: 2656201 - RNA, 19 nt, Homo sapiens
  misc_RNA (1)...(19): siRNA sense strand
gugaagaagcugcaaggaa

SEQ ID NO: 2656202 - RNA, 19 nt, Homo sapiens
  misc_RNA (1)...(19): siRNA sense strand
gagaauagcuugugugccu

SEQ ID NO: 2656203 - RNA, 19 nt, Homo sapiens
  misc_RNA (1)...(19): siRNA sense strand
acucaguguucuuuggaaa

SEQ ID NO: 2656204 - RNA, 19 nt, Homo sapiens
  misc_RNA (1)...(19): siRNA sense strand
ucauggaaucugaaggaaa

SEQ ID NO: 2656205 - RNA, 19 nt, Homo sapiens
  misc_RNA (1)...(19): siRNA sense strand
cagcaauccagcagaaauu

SEQ ID NO: 2656206 - RNA, 19 nt, Homo sapiens
  misc_RNA (1)...(19): siRNA sense strand
ggguagacaagguggcgaa

SEQ ID NO: 2656207 - RNA, 19 nt, Homo sapiens
  misc_RNA (1)...(19): siRNA sense strand
gagguuagggagauggaua

SEQ ID NO: 2656208 - RNA, 19 nt, Homo sapiens
  misc_RNA (1)...(19): siRNA sense strand
gggaagaagaccugccaga

SEQ ID NO: 2656209 - RNA, 19 nt, Homo sapiens
  misc_RNA (1)...(19): siRNA sense strand
cugaauacaugggaaguaa

SEQ ID NO: 2656210 - RNA, 19 nt, Homo sapiens
  misc_RNA (1)...(19): siRNA sense strand
aaagaugggcaaugugaaa

SEQ ID NO: 2656211 - RNA, 19 nt, Homo sapiens
  misc_RNA (1)...(19): siRNA sense strand
gcuaaugcccugaagaaaa

SEQ ID NO: 2656212 - RNA, 19 nt, Homo sapiens
  misc_RNA (1)...(19): siRNA sense strand
agguagagagugaggcauu

SEQ ID NO: 2656213 - RNA, 19 nt, Homo sapiens
  misc_RNA (1)...(19): siRNA sense strand
aagaaugcuugaagaguga

SEQ ID NO: 2656214 - RNA, 19 nt, Homo sapiens
  misc_RNA (1)...(19): siRNA sense strand
agguuagggagauggauaa

SEQ ID NO: 2656215 - RNA, 19 nt, Homo sapiens
  misc_RNA (1)...(19): siRNA sense strand
ugugauggauaaauggaua

SEQ ID NO: 2656216 - RNA, 19 nt, Homo sapiens
  misc_RNA (1)...(19): siRNA sense strand
accaagacauugugagaga

SEQ ID NO: 2656217 - RNA, 19 nt, Homo sapiens
  misc_RNA (1)...(19): siRNA sense strand
cugaacugcuugagagcuu

SEQ ID NO: 2656218 - RNA, 19 nt, Homo sapiens
  misc_RNA (1)...(19): siRNA sense strand
cauggaaucugaaggaaaa

SEQ ID NO: 2656219 - RNA, 19 nt, Homo sapiens
  misc_RNA (1)...(19): siRNA sense strand
agaaaauaguggcaacaaa

SEQ ID NO: 2656220 - RNA, 19 nt, Homo sapiens
  misc_RNA (1)...(19): siRNA sense strand
guguaaaggaagaaugcuu

SEQ ID NO: 2656221 - RNA, 19 nt, Homo sapiens
  misc_RNA (1)...(19): siRNA sense strand
gauccaugagugauagaaa

SEQ ID NO: 2656222 - RNA, 19 nt, Homo sapiens
  misc_RNA (1)...(19): siRNA sense strand
gucuaugcauugagagauu

SEQ ID NO: 2656223 - RNA, 19 nt, Homo sapiens
  misc_RNA (1)...(19): siRNA sense strand
acuaaguggacacgaauua

SEQ ID NO: 2656224 - RNA, 19 nt, Homo sapiens
  misc_RNA (1)...(19): siRNA sense strand
ggcaagugaaauaggagaa

SEQ ID NO: 2656225 - RNA, 19 nt, Homo sapiens
  misc_RNA (1)...(19): siRNA sense strand
aagccuaguauauggauua

SEQ ID NO: 2656226 - RNA, 19 nt, Homo sapiens
  misc_RNA (1)...(19): siRNA sense strand
acagcaacacugagagaau

SEQ ID NO: 2656227 - RNA, 19 nt, Homo sapiens
  misc_RNA (1)...(19): siRNA sense strand
aaucagaacaugaacagaa

SEQ ID NO: 2656228 - RNA, 19 nt, Homo sapiens
  misc_RNA (1)...(19): siRNA sense strand
gcaggauucaagcgggaaa

SEQ ID NO: 2656229 - RNA, 19 nt, Homo sapiens
  misc_RNA (1)...(19): siRNA sense strand
aagagaaggaaguuguuua

SEQ ID NO: 2656230 - RNA, 19 nt, Homo sapiens
  misc_RNA (1)...(19): siRNA sense strand
ccauggagauaaaggagga

SEQ ID NO: 2656231 - RNA, 19 nt, Homo sapiens
  misc_RNA (1)...(19): siRNA sense strand
ugagaagaccauucauaaa

SEQ ID NO: 2656232 - RNA, 19 nt, Homo sapiens
  misc_RNA (1)...(19): siRNA sense strand
cugcaucgguguugccuaa

SEQ ID NO: 2656233 - RNA, 19 nt, Homo sapiens
  misc_RNA (1)...(19): siRNA sense strand
ugucugagguucugaccaa

SEQ ID NO: 2656234 - RNA, 19 nt, Homo sapiens
  misc_RNA (1)...(19): siRNA sense strand
caacaaaugaggaaagaag

SEQ ID NO: 2656235 - RNA, 19 nt, Homo sapiens
  misc_RNA (1)...(19): siRNA sense strand
cggugguaguacugaauuu

SEQ ID NO: 2656236 - RNA, 19 nt, Homo sapiens
  misc_RNA (1)...(19): siRNA sense strand
gauaagagucguuugcgaa

SEQ ID NO: 2656237 - RNA, 19 nt, Homo sapiens
  misc_RNA (1)...(19): siRNA sense strand
gugauggauaaauggauaa

SEQ ID NO: 2656238 - RNA, 19 nt, Homo sapiens
  misc_RNA (1)...(19): siRNA sense strand
caaauggagguuagggaga

SEQ ID NO: 2656239 - RNA, 19 nt, Homo sapiens
  misc_RNA (1)...(19): siRNA sense strand
aagucaagauccaagaauu

SEQ ID NO: 2656240 - RNA, 19 nt, Homo sapiens
  misc_RNA (1)...(19): siRNA sense strand
agaaagucugagagccaaa

SEQ ID NO: 2656241 - RNA, 19 nt, Homo sapiens
  misc_RNA (1)...(19): siRNA sense strand
acaaagaauuaaaggcaag

SEQ ID NO: 2656242 - RNA, 19 nt, Homo sapiens
  misc_RNA (1)...(19): siRNA sense strand
aaagcaacccugugaggaa

SEQ ID NO: 2656243 - RNA, 19 nt, Homo sapiens
  misc_RNA (1)...(19): siRNA sense strand
cugaagauugcaaugguaa

SEQ ID NO: 2656244 - RNA, 19 nt, Homo sapiens
  misc_RNA (1)...(19): siRNA sense strand
guaaauaacaacaugacca

SEQ ID NO: 2656245 - RNA, 19 nt, Homo sapiens
  misc_RNA (1)...(19): siRNA sense strand
cgaucaaagauuucaaaca

SEQ ID NO: 2656246 - RNA, 19 nt, Homo sapiens
  misc_RNA (1)...(19): siRNA sense strand
ugugaagaguggauugaau

SEQ ID NO: 2656247 - RNA, 19 nt, Homo sapiens
  misc_RNA (1)...(19): siRNA sense strand
ugaagauugcaaugguaaa

SEQ ID NO: 2656248 - RNA, 19 nt, Homo sapiens
  misc_RNA (1)...(19): siRNA sense strand
gagugaaguugcucaguca

SEQ ID NO: 2656249 - RNA, 19 nt, Homo sapiens
  misc_RNA (1)...(19): siRNA sense strand
caacauccucaaagggaau

SEQ ID NO: 2656250 - RNA, 19 nt, Homo sapiens
  misc_RNA (1)...(19): siRNA sense strand
ggaucuggacgcaugauaa

SEQ ID NO: 2656251 - RNA, 19 nt, Homo sapiens
  misc_RNA (1)...(19): siRNA sense strand
ggguuugaaagaaggauuu

SEQ ID NO: 2656252 - RNA, 19 nt, Homo sapiens
  misc_RNA (1)...(19): siRNA sense strand
gaucagaagagcaguggga

SEQ ID NO: 2656253 - RNA, 19 nt, Homo sapiens
  misc_RNA (1)...(19): siRNA sense strand
gagacgacacugagguaga

SEQ ID NO: 2656254 - RNA, 19 nt, Homo sapiens
  misc_RNA (1)...(19): siRNA sense strand
gcaagugaaauaggagaaa

SEQ ID NO: 2656255 - RNA, 19 nt, Homo sapiens
  misc_RNA (1)...(19): siRNA sense strand
ggagggaggaggagguaua

SEQ ID NO: 2656256 - RNA, 19 nt, Homo sapiens
  misc_RNA (1)...(19): siRNA sense strand
agaagaaacuugaacguga

SEQ ID NO: 2656257 - RNA, 19 nt, Homo sapiens
  misc_RNA (1)...(19): siRNA sense strand
ugaauuaaacccauggcua

SEQ ID NO: 2656258 - RNA, 19 nt, Homo sapiens
  misc_RNA (1)...(19): siRNA sense strand
agguauaccccuagaaaca

SEQ ID NO: 2656259 - RNA, 19 nt, Homo sapiens
  misc_RNA (1)...(19): siRNA sense strand
gguucacagcaguugguua

SEQ ID NO: 2656260 - RNA, 19 nt, Homo sapiens
  misc_RNA (1)...(19): siRNA sense strand
guucuuacuuacugggcuu

SEQ ID NO: 2656261 - RNA, 19 nt, Homo sapiens
  misc_RNA (1)...(19): siRNA sense strand
gaauuaaacccauggcuag

SEQ ID NO: 2656262 - RNA, 19 nt, Homo sapiens
  misc_RNA (1)...(19): siRNA sense strand
ugcugcaguuggagaagaa

SEQ ID NO: 2656263 - RNA, 19 nt, Homo sapiens
  misc_RNA (1)...(19): siRNA sense strand
aggagaacuuuguggacau

SEQ ID NO: 2656264 - RNA, 19 nt, Homo sapiens
  misc_RNA (1)...(19): siRNA sense strand
ggacauuccucauuggcuu

SEQ ID NO: 2656265 - RNA, 19 nt, Homo sapiens
  misc_RNA (1)...(19): siRNA sense strand
agacaggguauguggacga

SEQ ID NO: 2656266 - RNA, 19 nt, Homo sapiens
  misc_RNA (1)...(19): siRNA sense strand
ccgggaaggccguguacau

SEQ ID NO: 2656267 - RNA, 19 nt, Homo sapiens
  misc_RNA (1)...(19): siRNA sense strand
cgagaaccagacaggguau

SEQ ID NO: 2656268 - RNA, 19 nt, Homo sapiens
  misc_RNA (1)...(19): siRNA sense strand
uguauguggugguggugau

SEQ ID NO: 2656269 - RNA, 19 nt, Homo sapiens
  misc_RNA (1)...(19): siRNA sense strand
caggagaacuuuguggaca

SEQ ID NO: 2656270 - RNA, 19 nt, Homo sapiens
  misc_RNA (1)...(19): siRNA sense strand
ggguguauguggugguggu

SEQ ID NO: 2656271 - RNA, 19 nt, Homo sapiens
  misc_RNA (1)...(19): siRNA sense strand
cggaagaacuacaugguga

SEQ ID NO: 2656272 - RNA, 19 nt, Homo sapiens
  misc_RNA (1)...(19): siRNA sense strand
ggaagcagcuggagcguga

SEQ ID NO: 2656273 - RNA, 19 nt, Homo sapiens
  misc_RNA (1)...(19): siRNA sense strand
ggguggaagugaaggacga

SEQ ID NO: 2656274 - RNA, 19 nt, Homo sapiens
  misc_RNA (1)...(19): siRNA sense strand
gcuucgagcuguacggcua

SEQ ID NO: 2656275 - RNA, 19 nt, Homo sapiens
  misc_RNA (1)...(19): siRNA sense strand
ggaagaaacaacugaggca

SEQ ID NO: 2656276 - RNA, 19 nt, Homo sapiens
  misc_RNA (1)...(19): siRNA sense strand
gagcgagagcagagagcau

SEQ ID NO: 2656277 - RNA, 19 nt, Homo sapiens
  misc_RNA (1)...(19): siRNA sense strand
auggauugucaaagggaaa

SEQ ID NO: 2656278 - RNA, 19 nt, Homo sapiens
  misc_RNA (1)...(19): siRNA sense strand
aggaagacuaugagcucaa

SEQ ID NO: 2656279 - RNA, 19 nt, Homo sapiens
  misc_RNA (1)...(19): siRNA sense strand
ccaacguggcugugcaaaa

SEQ ID NO: 2656280 - RNA, 19 nt, Homo sapiens
  misc_RNA (1)...(19): siRNA sense strand
gagacacucuucagggaca

SEQ ID NO: 2656281 - RNA, 19 nt, Homo sapiens
  misc_RNA (1)...(19): siRNA sense strand
gaagcgaggcucacgggaa

SEQ ID NO: 2656282 - RNA, 19 nt, Homo sapiens
  misc_RNA (1)...(19): siRNA sense strand
gcuccugaccugucgggaa

SEQ ID NO: 2656283 - RNA, 19 nt, Homo sapiens
  misc_RNA (1)...(19): siRNA sense strand
agcccggucucaagggaaa

SEQ ID NO: 2656284 - RNA, 19 nt, Homo sapiens
  misc_RNA (1)...(19): siRNA sense strand
cgggaagggagaagcgagu

SEQ ID NO: 2656285 - RNA, 19 nt, Homo sapiens
  misc_RNA (1)...(19): siRNA sense strand
gggaaaagagcgagagcag

SEQ ID NO: 2656286 - RNA, 19 nt, Homo sapiens
  misc_RNA (1)...(19): siRNA sense strand
augauauucccguggagaa

SEQ ID NO: 2656287 - RNA, 19 nt, Homo sapiens
  misc_RNA (1)...(19): siRNA sense strand
uggaugaacaugugcggau

SEQ ID NO: 2656288 - RNA, 19 nt, Homo sapiens
  misc_RNA (1)...(19): siRNA sense strand
cauggauugucaaagggaa

SEQ ID NO: 2656289 - RNA, 19 nt, Homo sapiens
  misc_RNA (1)...(19): siRNA sense strand
uuguagaggaguuucgcaa

SEQ ID NO: 2656290 - RNA, 19 nt, Homo sapiens
  misc_RNA (1)...(19): siRNA sense strand
uggagaacuauguggcuca

SEQ ID NO: 2656291 - RNA, 19 nt, Homo sapiens
  misc_RNA (1)...(19): siRNA sense strand
cagagugugcagaagguga

SEQ ID NO: 2656292 - RNA, 19 nt, Homo sapiens
  misc_RNA (1)...(19): siRNA sense strand
ccagcagccaggaagacua

SEQ ID NO: 2656293 - RNA, 19 nt, Homo sapiens
  misc_RNA (1)...(19): siRNA sense strand
ggcccaggaagcugagaaa

SEQ ID NO: 2656294 - RNA, 19 nt, Homo sapiens
  misc_RNA (1)...(19): siRNA sense strand
ucacgagggacuugagaca

SEQ ID NO: 2656295 - RNA, 19 nt, Homo sapiens
  misc_RNA (1)...(19): siRNA sense strand
uggcaaugaccuaagcaau

SEQ ID NO: 2656296 - RNA, 19 nt, Homo sapiens
  misc_RNA (1)...(19): siRNA sense strand
uugagaaacugaaggucga

SEQ ID NO: 2656297 - RNA, 19 nt, Homo sapiens
  misc_RNA (1)...(19): siRNA sense strand
ugucaaagcugaaccgauc

SEQ ID NO: 2656298 - RNA, 19 nt, Homo sapiens
  misc_RNA (1)...(19): siRNA sense strand
cgaugauggcaaaggccuu

SEQ ID NO: 2656299 - RNA, 19 nt, Homo sapiens
  misc_RNA (1)...(19): siRNA sense strand
caaucuuggcaaugaccua

SEQ ID NO: 2656300 - RNA, 19 nt, Homo sapiens
  misc_RNA (1)...(19): siRNA sense strand
cuggacaaacacagccaaa

SEQ ID NO: 2656301 - RNA, 19 nt, Homo sapiens
  misc_RNA (1)...(19): siRNA sense strand
ccagauuaucaaccugaaa

SEQ ID NO: 2656302 - RNA, 19 nt, Homo sapiens
  misc_RNA (1)...(19): siRNA sense strand
ggcaacuggccaagcagaa

SEQ ID NO: 2656303 - RNA, 19 nt, Homo sapiens
  misc_RNA (1)...(19): siRNA sense strand
uggauaagcuggaaccugu

SEQ ID NO: 2656304 - RNA, 19 nt, Homo sapiens
  misc_RNA (1)...(19): siRNA sense strand
acuugagacaguugacaau

SEQ ID NO: 2656305 - RNA, 19 nt, Homo sapiens
  misc_RNA (1)...(19): siRNA sense strand
ucgugaauagcgugaucaa

SEQ ID NO: 2656306 - RNA, 19 nt, Homo sapiens
  misc_RNA (1)...(19): siRNA sense strand
ggcccaggaagcugagaaa

SEQ ID NO: 2656307 - RNA, 19 nt, Homo sapiens
  misc_RNA (1)...(19): siRNA sense strand
uggcaaugaccuaagcaau

SEQ ID NO: 2656308 - RNA, 19 nt, Homo sapiens
  misc_RNA (1)...(19): siRNA sense strand
uugagaaacugaaggucga

SEQ ID NO: 2656309 - RNA, 19 nt, Homo sapiens
  misc_RNA (1)...(19): siRNA sense strand
ugucaaagcugaaccgauc

SEQ ID NO: 2656310 - RNA, 19 nt, Homo sapiens
  misc_RNA (1)...(19): siRNA sense strand
cgaugauggcaaaggccuu

SEQ ID NO: 2656311 - RNA, 19 nt, Homo sapiens
  misc_RNA (1)...(19): siRNA sense strand
caaucuuggcaaugaccua

SEQ ID NO: 2656312 - RNA, 19 nt, Homo sapiens
  misc_RNA (1)...(19): siRNA sense strand
cuggacaaacacagccaaa

SEQ ID NO: 2656313 - RNA, 19 nt, Homo sapiens
  misc_RNA (1)...(19): siRNA sense strand
ccagauuaucaaccugaaa

SEQ ID NO: 2656314 - RNA, 19 nt, Homo sapiens
  misc_RNA (1)...(19): siRNA sense strand
ggcaacuggccaagcagaa

SEQ ID NO: 2656315 - RNA, 19 nt, Homo sapiens
  misc_RNA (1)...(19): siRNA sense strand
uggauaagcuggaaccugu

SEQ ID NO: 2656316 - RNA, 19 nt, Homo sapiens
  misc_RNA (1)...(19): siRNA sense strand
acuugagacaguugacaau

SEQ ID NO: 2656317 - RNA, 19 nt, Homo sapiens
  misc_RNA (1)...(19): siRNA sense strand
ucgugaauagcgugaucaa

SEQ ID NO: 2656318 - RNA, 19 nt, Homo sapiens
  misc_RNA (1)...(19): siRNA sense strand
cguuacgggcaaaggaaua

SEQ ID NO: 2656319 - RNA, 19 nt, Homo sapiens
  misc_RNA (1)...(19): siRNA sense strand
caggaaagaaucaggcaga

SEQ ID NO: 2656320 - RNA, 19 nt, Homo sapiens
  misc_RNA (1)...(19): siRNA sense strand
gaugaaagacacaggguuc

SEQ ID NO: 2656321 - RNA, 19 nt, Homo sapiens
  misc_RNA (1)...(19): siRNA sense strand
agaaaggccucuugcgacu

SEQ ID NO: 2656322 - RNA, 19 nt, Homo sapiens
  misc_RNA (1)...(19): siRNA sense strand
cccaagaaguccugugcca

SEQ ID NO: 2656323 - RNA, 19 nt, Homo sapiens
  misc_RNA (1)...(19): siRNA sense strand
caagaaguccugugccaga

SEQ ID NO: 2656324 - RNA, 19 nt, Homo sapiens
  misc_RNA (1)...(19): siRNA sense strand
gcuuccaagaugaaagaca

SEQ ID NO: 2656325 - RNA, 19 nt, Homo sapiens
  misc_RNA (1)...(19): siRNA sense strand
acagcuggcaggaaagaau

SEQ ID NO: 2656326 - RNA, 19 nt, Homo sapiens
  misc_RNA (1)...(19): siRNA sense strand
cucaucaccagaagagaaa

SEQ ID NO: 2656327 - RNA, 19 nt, Homo sapiens
  misc_RNA (1)...(19): siRNA sense strand
ccaaaaugaaagccagaaa

SEQ ID NO: 2656328 - RNA, 19 nt, Homo sapiens
  misc_RNA (1)...(19): siRNA sense strand
aagaaaaggcacaaaagaa

SEQ ID NO: 2656329 - RNA, 19 nt, Homo sapiens
  misc_RNA (1)...(19): siRNA sense strand
gguacaggaaugaagaaaa

SEQ ID NO: 2656330 - RNA, 19 nt, Homo sapiens
  misc_RNA (1)...(19): siRNA sense strand
guguaacuacugugaacaa

SEQ ID NO: 2656331 - RNA, 19 nt, Homo sapiens
  misc_RNA (1)...(19): siRNA sense strand
agaaaagguaguagugcaa

SEQ ID NO: 2656332 - RNA, 19 nt, Homo sapiens
  misc_RNA (1)...(19): siRNA sense strand
agugaaacgggcagcacaa

SEQ ID NO: 2656333 - RNA, 19 nt, Homo sapiens
  misc_RNA (1)...(19): siRNA sense strand
aagaagggacagaagucaa

SEQ ID NO: 2656334 - RNA, 19 nt, Homo sapiens
  misc_RNA (1)...(19): siRNA sense strand
aagucaagugugaagcaaa

SEQ ID NO: 2656335 - RNA, 19 nt, Homo sapiens
  misc_RNA (1)...(19): siRNA sense strand
agcuggaggcugaggagaa

SEQ ID NO: 2656336 - RNA, 19 nt, Homo sapiens
  misc_RNA (1)...(19): siRNA sense strand
aggauaaaccagaagccau

SEQ ID NO: 2656337 - RNA, 19 nt, Homo sapiens
  misc_RNA (1)...(19): siRNA sense strand
aaugaaagccagaaaagaa

SEQ ID NO: 2656338 - RNA, 19 nt, Homo sapiens
  misc_RNA (1)...(19): siRNA sense strand
ggauaaaccagaagccaug

SEQ ID NO: 2656339 - RNA, 19 nt, Homo sapiens
  misc_RNA (1)...(19): siRNA sense strand
gagaaaaugcggaguggca

SEQ ID NO: 2656340 - RNA, 19 nt, Homo sapiens
  misc_RNA (1)...(19): siRNA sense strand
aggcacaaaagaagcaaaa

SEQ ID NO: 2656341 - RNA, 19 nt, Homo sapiens
  misc_RNA (1)...(19): siRNA sense strand
ggaaauuagaaaagguagu

SEQ ID NO: 2656342 - RNA, 19 nt, Homo sapiens
  misc_RNA (1)...(19): siRNA sense strand
augaaagccagaaaagaaa

SEQ ID NO: 2656343 - RNA, 19 nt, Homo sapiens
  misc_RNA (1)...(19): siRNA sense strand
gcucaggcaaauacaucaa

SEQ ID NO: 2656344 - RNA, 19 nt, Homo sapiens
  misc_RNA (1)...(19): siRNA sense strand
agguacaggaaugaagaaa

SEQ ID NO: 2656345 - RNA, 19 nt, Homo sapiens
  misc_RNA (1)...(19): siRNA sense strand
ucaacaaauggcagcuauu

SEQ ID NO: 2656346 - RNA, 19 nt, Homo sapiens
  misc_RNA (1)...(19): siRNA sense strand
gagucaagcaagugagaau

SEQ ID NO: 2656347 - RNA, 19 nt, Homo sapiens
  misc_RNA (1)...(19): siRNA sense strand
cagcauagacaguggugaa

SEQ ID NO: 2656348 - RNA, 19 nt, Homo sapiens
  misc_RNA (1)...(19): siRNA sense strand
ugaugaagaccgaggagaa

SEQ ID NO: 2656349 - RNA, 19 nt, Homo sapiens
  misc_RNA (1)...(19): siRNA sense strand
cugaugagcccgagaggua

SEQ ID NO: 2656350 - RNA, 19 nt, Homo sapiens
  misc_RNA (1)...(19): siRNA sense strand
ggacaauauucuaaaggga

SEQ ID NO: 2656351 - RNA, 19 nt, Homo sapiens
  misc_RNA (1)...(19): siRNA sense strand
uuggaaacuucauggaaua

SEQ ID NO: 2656352 - RNA, 19 nt, Homo sapiens
  misc_RNA (1)...(19): siRNA sense strand
ccaaagaccuggcugggaa

SEQ ID NO: 2656353 - RNA, 19 nt, Homo sapiens
  misc_RNA (1)...(19): siRNA sense strand
aaaugcaaauccagagaaa

SEQ ID NO: 2656354 - RNA, 19 nt, Homo sapiens
  misc_RNA (1)...(19): siRNA sense strand
uguauauguucaagagcaa

SEQ ID NO: 2656355 - RNA, 19 nt, Homo sapiens
  misc_RNA (1)...(19): siRNA sense strand
uuacauaagaagaggacuu

SEQ ID NO: 2656356 - RNA, 19 nt, Homo sapiens
  misc_RNA (1)...(19): siRNA sense strand
aggaacagauuaaaggcaa

SEQ ID NO: 2656357 - RNA, 19 nt, Homo sapiens
  misc_RNA (1)...(19): siRNA sense strand
gggccaaggagcagcagaa

SEQ ID NO: 2656358 - RNA, 19 nt, Homo sapiens
  misc_RNA (1)...(19): siRNA sense strand
cagacaacagagagacaua

SEQ ID NO: 2656359 - RNA, 19 nt, Homo sapiens
  misc_RNA (1)...(19): siRNA sense strand
acagaugagaagaagauua

SEQ ID NO: 2656360 - RNA, 19 nt, Homo sapiens
  misc_RNA (1)...(19): siRNA sense strand
ccacggagucugugugaau

SEQ ID NO: 2656361 - RNA, 19 nt, Homo sapiens
  misc_RNA (1)...(19): siRNA sense strand
acacaaaggcacuggggaa

SEQ ID NO: 2656362 - RNA, 19 nt, Homo sapiens
  misc_RNA (1)...(19): siRNA sense strand
agacagaaugagaugggaa

SEQ ID NO: 2656363 - RNA, 19 nt, Homo sapiens
  misc_RNA (1)...(19): siRNA sense strand
gacagaaugagaugggaaa

SEQ ID NO: 2656364 - RNA, 19 nt, Homo sapiens
  misc_RNA (1)...(19): siRNA sense strand
cgccagcauccgagagaaa

SEQ ID NO: 2656365 - RNA, 19 nt, Homo sapiens
  misc_RNA (1)...(19): siRNA sense strand
ugcaaggguacgagggaua

SEQ ID NO: 2656366 - RNA, 19 nt, Homo sapiens
  misc_RNA (1)...(19): siRNA sense strand
gugcugauaacaaggauaa

SEQ ID NO: 2656367 - RNA, 19 nt, Homo sapiens
  misc_RNA (1)...(19): siRNA sense strand
gcuaugaccuuaaugggaa

SEQ ID NO: 2656368 - RNA, 19 nt, Homo sapiens
  misc_RNA (1)...(19): siRNA sense strand
cagcagggccagacggauu

SEQ ID NO: 2656369 - RNA, 19 nt, Homo sapiens
  misc_RNA (1)...(19): siRNA sense strand
ccaacagacaacagagaga

SEQ ID NO: 2656370 - RNA, 19 nt, Homo sapiens
  misc_RNA (1)...(19): siRNA sense strand
acuacagcaucgagggcaa

SEQ ID NO: 2656371 - RNA, 19 nt, Homo sapiens
  misc_RNA (1)...(19): siRNA sense strand
caucauuccuggagagaac

SEQ ID NO: 2656372 - RNA, 19 nt, Homo sapiens
  misc_RNA (1)...(19): siRNA sense strand
gggaaaguguggagcuacu

SEQ ID NO: 2656373 - RNA, 19 nt, Homo sapiens
  misc_RNA (1)...(19): siRNA sense strand
ugaucaagagggagcuaaa

SEQ ID NO: 2656374 - RNA, 19 nt, Homo sapiens
  misc_RNA (1)...(19): siRNA sense strand
ggacugagggcgagaagca

SEQ ID NO: 2656375 - RNA, 19 nt, Homo sapiens
  misc_RNA (1)...(19): siRNA sense strand
cuucaauacuguuguccua

SEQ ID NO: 2656376 - RNA, 19 nt, Homo sapiens
  misc_RNA (1)...(19): siRNA sense strand
ggaucagggcggucagcaa

SEQ ID NO: 2656377 - RNA, 19 nt, Homo sapiens
  misc_RNA (1)...(19): siRNA sense strand
ccuaagaaaggaacagauu

SEQ ID NO: 2656378 - RNA, 19 nt, Homo sapiens
  misc_RNA (1)...(19): siRNA sense strand
gcucauuacagguguccaa

SEQ ID NO: 2656379 - RNA, 19 nt, Homo sapiens
  misc_RNA (1)...(19): siRNA sense strand
agaccuugguucagaauga

SEQ ID NO: 2656380 - RNA, 19 nt, Homo sapiens
  misc_RNA (1)...(19): siRNA sense strand
gggacaagacagaugcgua

SEQ ID NO: 2656381 - RNA, 19 nt, Homo sapiens
  misc_RNA (1)...(19): siRNA sense strand
agacagaugagaagaagau

SEQ ID NO: 2656382 - RNA, 19 nt, Homo sapiens
  misc_RNA (1)...(19): siRNA sense strand
cgacagaucaaguucggaa

SEQ ID NO: 2656383 - RNA, 19 nt, Homo sapiens
  misc_RNA (1)...(19): siRNA sense strand
augaauugucagagaguca

SEQ ID NO: 2656384 - RNA, 19 nt, Homo sapiens
  misc_RNA (1)...(19): siRNA sense strand
gacuauaccauguggaaaa

SEQ ID NO: 2656385 - RNA, 19 nt, Homo sapiens
  misc_RNA (1)...(19): siRNA sense strand
ccuucuacaaugauggaaa

SEQ ID NO: 2656386 - RNA, 19 nt, Homo sapiens
  misc_RNA (1)...(19): siRNA sense strand
gugcagugggaauggacaa

SEQ ID NO: 2656387 - RNA, 19 nt, Homo sapiens
  misc_RNA (1)...(19): siRNA sense strand
ggaaaggugcagagugcga

SEQ ID NO: 2656388 - RNA, 19 nt, Homo sapiens
  misc_RNA (1)...(19): siRNA sense strand
gugcaacgguaacgggaga

SEQ ID NO: 2656389 - RNA, 19 nt, Homo sapiens
  misc_RNA (1)...(19): siRNA sense strand
uaacaaggauaaugaggga

SEQ ID NO: 2656390 - RNA, 19 nt, Homo sapiens
  misc_RNA (1)...(19): siRNA sense strand
cugaaaagaucuaugauga

SEQ ID NO: 2656391 - RNA, 19 nt, Homo sapiens
  misc_RNA (1)...(19): siRNA sense strand
ggaucaaggagguccagua

SEQ ID NO: 2656392 - RNA, 19 nt, Homo sapiens
  misc_RNA (1)...(19): siRNA sense strand
cgggaaauggagaaaucua

SEQ ID NO: 2656393 - RNA, 19 nt, Homo sapiens
  misc_RNA (1)...(19): siRNA sense strand
gcguauggccaaagggugu

SEQ ID NO: 2656394 - RNA, 19 nt, Homo sapiens
  misc_RNA (1)...(19): siRNA sense strand
agcuagauuugaagaacua

SEQ ID NO: 2656395 - RNA, 19 nt, Homo sapiens
  misc_RNA (1)...(19): siRNA sense strand
ccauugacuaugaucgaaa

SEQ ID NO: 2656396 - RNA, 19 nt, Homo sapiens
  misc_RNA (1)...(19): siRNA sense strand
gcauacagaccuugguuca

SEQ ID NO: 2656397 - RNA, 19 nt, Homo sapiens
  misc_RNA (1)...(19): siRNA sense strand
ccaaacagcuuuaugccau

SEQ ID NO: 2656398 - RNA, 19 nt, Homo sapiens
  misc_RNA (1)...(19): siRNA sense strand
cccgagagguauugcagua

SEQ ID NO: 2656399 - RNA, 19 nt, Homo sapiens
  misc_RNA (1)...(19): siRNA sense strand
agguggaacacuuugguaa

SEQ ID NO: 2656400 - RNA, 19 nt, Homo sapiens
  misc_RNA (1)...(19): siRNA sense strand
cggcaggacucgaagguuc

SEQ ID NO: 2656401 - RNA, 19 nt, Homo sapiens
  misc_RNA (1)...(19): siRNA sense strand
gguacaagucacugcugaa

SEQ ID NO: 2656402 - RNA, 19 nt, Homo sapiens
  misc_RNA (1)...(19): siRNA sense strand
ggucagaacagcuggcagu

SEQ ID NO: 2656403 - RNA, 19 nt, Homo sapiens
  misc_RNA (1)...(19): siRNA sense strand
cugaagauccgucgggaca

SEQ ID NO: 2656404 - RNA, 19 nt, Homo sapiens
  misc_RNA (1)...(19): siRNA sense strand
gggaaauggagaaaucuau

SEQ ID NO: 2656405 - RNA, 19 nt, Homo sapiens
  misc_RNA (1)...(19): siRNA sense strand
cugagacagaugagaagaa

SEQ ID NO: 2656406 - RNA, 19 nt, Homo sapiens
  misc_RNA (1)...(19): siRNA sense strand
ccgaggaaggcauggucaa

SEQ ID NO: 2656407 - RNA, 19 nt, Homo sapiens
  misc_RNA (1)...(19): siRNA sense strand
gcacugugaggaagaauau

SEQ ID NO: 2656408 - RNA, 19 nt, Homo sapiens
  misc_RNA (1)...(19): siRNA sense strand
cugaagaagcccuccaaau

SEQ ID NO: 2656409 - RNA, 19 nt, Homo sapiens
  misc_RNA (1)...(19): siRNA sense strand
cuguaaagauggcaaaugu

SEQ ID NO: 2656410 - RNA, 19 nt, Homo sapiens
  misc_RNA (1)...(19): siRNA sense strand
uggcaucugugcugaacaa

SEQ ID NO: 2656411 - RNA, 19 nt, Homo sapiens
  misc_RNA (1)...(19): siRNA sense strand
cagaaugagaugggaaaga

SEQ ID NO: 2656412 - RNA, 19 nt, Homo sapiens
  misc_RNA (1)...(19): siRNA sense strand
ucaccagcaucaugggcaa

SEQ ID NO: 2656413 - RNA, 19 nt, Homo sapiens
  misc_RNA (1)...(19): siRNA sense strand
gcaacaacccagcacacaa

SEQ ID NO: 2656414 - RNA, 19 nt, Homo sapiens
  misc_RNA (1)...(19): siRNA sense strand
caccaagagcgaugaaaca

SEQ ID NO: 2656415 - RNA, 19 nt, Homo sapiens
  misc_RNA (1)...(19): siRNA sense strand
gagcuagauuugaagaacu

SEQ ID NO: 2656416 - RNA, 19 nt, Homo sapiens
  misc_RNA (1)...(19): siRNA sense strand
ccuacuaccuggacaagau

SEQ ID NO: 2656417 - RNA, 19 nt, Homo sapiens
  misc_RNA (1)...(19): siRNA sense strand
aggcgagcacugugaggaa

SEQ ID NO: 2656418 - RNA, 19 nt, Homo sapiens
  misc_RNA (1)...(19): siRNA sense strand
ggagaugcacacuggguca

SEQ ID NO: 2656419 - RNA, 19 nt, Homo sapiens
  misc_RNA (1)...(19): siRNA sense strand
cguucgaccugaucgcaaa

SEQ ID NO: 2656420 - RNA, 19 nt, Homo sapiens
  misc_RNA (1)...(19): siRNA sense strand
ucacugagacagaugagaa

SEQ ID NO: 2656421 - RNA, 19 nt, Homo sapiens
  misc_RNA (1)...(19): siRNA sense strand
ccguugaccucuaccgcua

SEQ ID NO: 2656422 - RNA, 19 nt, Homo sapiens
  misc_RNA (1)...(19): siRNA sense strand
ggagcaauacccagagcuu

SEQ ID NO: 2656423 - RNA, 19 nt, Homo sapiens
  misc_RNA (1)...(19): siRNA sense strand
uggcaaaggcaucauguuu

SEQ ID NO: 2656424 - RNA, 19 nt, Homo sapiens
  misc_RNA (1)...(19): siRNA sense strand
ggaccggcuuaccaggaaa

SEQ ID NO: 2656425 - RNA, 19 nt, Homo sapiens
  misc_RNA (1)...(19): siRNA sense strand
caaugauggaaaagacaaa

SEQ ID NO: 2656426 - RNA, 19 nt, Homo sapiens
  misc_RNA (1)...(19): siRNA sense strand
gcaagaacuucgagcagga

SEQ ID NO: 2656427 - RNA, 19 nt, Homo sapiens
  misc_RNA (1)...(19): siRNA sense strand
uguacaucgucaagaacaa

SEQ ID NO: 2656428 - RNA, 19 nt, Homo sapiens
  misc_RNA (1)...(19): siRNA sense strand
ucacagugucggaggcuga

SEQ ID NO: 2656429 - RNA, 19 nt, Homo sapiens
  misc_RNA (1)...(19): siRNA sense strand
ccaagagucagaaggccua

SEQ ID NO: 2656430 - RNA, 19 nt, Homo sapiens
  misc_RNA (1)...(19): siRNA sense strand
ggaauggcacgcagcggua

SEQ ID NO: 2656431 - RNA, 19 nt, Homo sapiens
  misc_RNA (1)...(19): siRNA sense strand
ucgagugcuuugaggugaa

SEQ ID NO: 2656432 - RNA, 19 nt, Homo sapiens
  misc_RNA (1)...(19): siRNA sense strand
gggcagaauguccagaaaa

SEQ ID NO: 2656433 - RNA, 19 nt, Homo sapiens
  misc_RNA (1)...(19): siRNA sense strand
ggaacgaggaccuggugga

SEQ ID NO: 2656434 - RNA, 19 nt, Homo sapiens
  misc_RNA (1)...(19): siRNA sense strand
gcuuugcccuggugggaga

SEQ ID NO: 2656435 - RNA, 19 nt, Homo sapiens
  misc_RNA (1)...(19): siRNA sense strand
ugguggagcccgaggaugu

SEQ ID NO: 2656436 - RNA, 19 nt, Homo sapiens
  misc_RNA (1)...(19): siRNA sense strand
cagugcugcuugugugcaa

SEQ ID NO: 2656437 - RNA, 19 nt, Homo sapiens
  misc_RNA (1)...(19): siRNA sense strand
agaucuucuucaagugcaa

SEQ ID NO: 2656438 - RNA, 19 nt, Homo sapiens
  misc_RNA (1)...(19): siRNA sense strand
gcauuaaugucucaaggca

SEQ ID NO: 2656439 - RNA, 19 nt, Homo sapiens
  misc_RNA (1)...(19): siRNA sense strand
gcucccuguggaagaguaa

SEQ ID NO: 2656440 - RNA, 19 nt, Homo sapiens
  misc_RNA (1)...(19): siRNA sense strand
uggcagaaacggagccgga

SEQ ID NO: 2656441 - RNA, 19 nt, Homo sapiens
  misc_RNA (1)...(19): siRNA sense strand
uggugcagcuggagaagca

SEQ ID NO: 2656442 - RNA, 19 nt, Homo sapiens
  misc_RNA (1)...(19): siRNA sense strand
gguuaagaaaggaagcaau

SEQ ID NO: 2656443 - RNA, 19 nt, Homo sapiens
  misc_RNA (1)...(19): siRNA sense strand
gcuugauauugcuggaauu

SEQ ID NO: 2656444 - RNA, 19 nt, Homo sapiens
  misc_RNA (1)...(19): siRNA sense strand
gaaacaaaguauaggacag

SEQ ID NO: 2656445 - RNA, 19 nt, Homo sapiens
  misc_RNA (1)...(19): siRNA sense strand
acaaaguauaggacagaau

SEQ ID NO: 2656446 - RNA, 19 nt, Homo sapiens
  misc_RNA (1)...(19): siRNA sense strand
aggaagucagguagugaaa

SEQ ID NO: 2656447 - RNA, 19 nt, Homo sapiens
  misc_RNA (1)...(19): siRNA sense strand
gaacacagaaauuugggaa

SEQ ID NO: 2656448 - RNA, 19 nt, Homo sapiens
  misc_RNA (1)...(19): siRNA sense strand
ggaaacaaaguauaggaca

SEQ ID NO: 2656449 - RNA, 19 nt, Homo sapiens
  misc_RNA (1)...(19): siRNA sense strand
cagaaggaaccaaggaagu

SEQ ID NO: 2656450 - RNA, 19 nt, Homo sapiens
  misc_RNA (1)...(19): siRNA sense strand
gcuuaaaacccauaugaau

SEQ ID NO: 2656451 - RNA, 19 nt, Homo sapiens
  misc_RNA (1)...(19): siRNA sense strand
ggaauaauuuuaagggucu

SEQ ID NO: 2656452 - RNA, 19 nt, Homo sapiens
  misc_RNA (1)...(19): siRNA sense strand
ccauaugaauccaagagca

SEQ ID NO: 2656453 - RNA, 19 nt, Homo sapiens
  misc_RNA (1)...(19): siRNA sense strand
auacagacaaagcaguaaa

SEQ ID NO: 2656454 - RNA, 19 nt, Homo sapiens
  misc_RNA (1)...(19): siRNA sense strand
aacacagaaauuugggaaa

SEQ ID NO: 2656455 - RNA, 19 nt, Homo sapiens
  misc_RNA (1)...(19): siRNA sense strand
auggaaagggauuggcaga

SEQ ID NO: 2656456 - RNA, 19 nt, Homo sapiens
  misc_RNA (1)...(19): siRNA sense strand
agagugauggaaagggauu

SEQ ID NO: 2656457 - RNA, 19 nt, Homo sapiens
  misc_RNA (1)...(19): siRNA sense strand
uuggcagaauacagacaaa

SEQ ID NO: 2656458 - RNA, 19 nt, Homo sapiens
  misc_RNA (1)...(19): siRNA sense strand
cguuaucaucagaaacauu

SEQ ID NO: 2656459 - RNA, 19 nt, Homo sapiens
  misc_RNA (1)...(19): siRNA sense strand
ccauuauaaacuacccuaa

SEQ ID NO: 2656460 - RNA, 19 nt, Homo sapiens
  misc_RNA (1)...(19): siRNA sense strand
cguguggaagcguggacaa

SEQ ID NO: 2656461 - RNA, 19 nt, Homo sapiens
  misc_RNA (1)...(19): siRNA sense strand
aaggcaggcccaugguuaa

SEQ ID NO: 2656462 - RNA, 19 nt, Homo sapiens
  misc_RNA (1)...(19): siRNA sense strand
cuuaacagaaucuuggaau

SEQ ID NO: 2656463 - RNA, 19 nt, Homo sapiens
  misc_RNA (1)...(19): siRNA sense strand
ucagagugauggaaaggga

SEQ ID NO: 2656464 - RNA, 19 nt, Homo sapiens
  misc_RNA (1)...(19): siRNA sense strand
ggcagaaggaaccaaggaa

SEQ ID NO: 2656465 - RNA, 19 nt, Homo sapiens
  misc_RNA (1)...(19): siRNA sense strand
uaugaagacacgugggacu

SEQ ID NO: 2656466 - RNA, 19 nt, Homo sapiens
  misc_RNA (1)...(19): siRNA sense strand
uggucaccuuugucagaaa

SEQ ID NO: 2656467 - RNA, 19 nt, Homo sapiens
  misc_RNA (1)...(19): siRNA sense strand
aaacagaggcugagacaua

SEQ ID NO: 2656468 - RNA, 19 nt, Homo sapiens
  misc_RNA (1)...(19): siRNA sense strand
gcauauugguggaggauac

SEQ ID NO: 2656469 - RNA, 19 nt, Homo sapiens
  misc_RNA (1)...(19): siRNA sense strand
gagaaagcauugagaucau

SEQ ID NO: 2656470 - RNA, 19 nt, Homo sapiens
  misc_RNA (1)...(19): siRNA sense strand
cagcaagguuggucaguau

SEQ ID NO: 2656471 - RNA, 19 nt, Homo sapiens
  misc_RNA (1)...(19): siRNA sense strand
gaacauagauccugauucu

SEQ ID NO: 2656472 - RNA, 19 nt, Homo sapiens
  misc_RNA (1)...(19): siRNA sense strand
gguuaugagccaggagaaa

SEQ ID NO: 2656473 - RNA, 19 nt, Homo sapiens
  misc_RNA (1)...(19): siRNA sense strand
aggaugaguuuguggccua

SEQ ID NO: 2656474 - RNA, 19 nt, Homo sapiens
  misc_RNA (1)...(19): siRNA sense strand
cuaaagaauuauccaggaa

SEQ ID NO: 2656475 - RNA, 19 nt, Homo sapiens
  misc_RNA (1)...(19): siRNA sense strand
ggcaagagcugguggccuu

SEQ ID NO: 2656476 - RNA, 19 nt, Homo sapiens
  misc_RNA (1)...(19): siRNA sense strand
ccaaaugaucugagugcau

SEQ ID NO: 2656477 - RNA, 19 nt, Homo sapiens
  misc_RNA (1)...(19): siRNA sense strand
gggagaaagcauugagauc

SEQ ID NO: 2656478 - RNA, 19 nt, Homo sapiens
  misc_RNA (1)...(19): siRNA sense strand
augagaaggcuuuggaauu

SEQ ID NO: 2656479 - RNA, 19 nt, Homo sapiens
  misc_RNA (1)...(19): siRNA sense strand
gguugaaggcggugagaac

SEQ ID NO: 2656480 - RNA, 19 nt, Homo sapiens
  misc_RNA (1)...(19): siRNA sense strand
aggaggaggcugagaacuu

SEQ ID NO: 2656481 - RNA, 19 nt, Homo sapiens
  misc_RNA (1)...(19): siRNA sense strand
gaugauaaacaccuggaaa

SEQ ID NO: 2656482 - RNA, 19 nt, Homo sapiens
  misc_RNA (1)...(19): siRNA sense strand
gcaucaagaaagugggcca

SEQ ID NO: 2656483 - RNA, 19 nt, Homo sapiens
  misc_RNA (1)...(19): siRNA sense strand
gagaaaaggaugaacugaa

SEQ ID NO: 2656484 - RNA, 19 nt, Homo sapiens
  misc_RNA (1)...(19): siRNA sense strand
gaucaucggcuuugucaua

SEQ ID NO: 2656485 - RNA, 19 nt, Homo sapiens
  misc_RNA (1)...(19): siRNA sense strand
caucugaauacaaggaaaa

SEQ ID NO: 2656486 - RNA, 19 nt, Homo sapiens
  misc_RNA (1)...(19): siRNA sense strand
ucaucugaauacaaggaaa

SEQ ID NO: 2656487 - RNA, 19 nt, Homo sapiens
  misc_RNA (1)...(19): siRNA sense strand
agugguuccuaaagaauua

SEQ ID NO: 2656488 - RNA, 19 nt, Homo sapiens
  misc_RNA (1)...(19): siRNA sense strand
guucaggacaagugggcuu

SEQ ID NO: 2656489 - RNA, 19 nt, Homo sapiens
  misc_RNA (1)...(19): siRNA sense strand
ugacagagcugcagauuag

SEQ ID NO: 2656490 - RNA, 19 nt, Homo sapiens
  misc_RNA (1)...(19): siRNA sense strand
ggguuaugagccaggagaa

SEQ ID NO: 2656491 - RNA, 19 nt, Homo sapiens
  misc_RNA (1)...(19): siRNA sense strand
ggagacagacauggaauua

SEQ ID NO: 2656492 - RNA, 19 nt, Homo sapiens
  misc_RNA (1)...(19): siRNA sense strand
uggaauuaguacagguguu

SEQ ID NO: 2656493 - RNA, 19 nt, Homo sapiens
  misc_RNA (1)...(19): siRNA sense strand
ucaagaccauggaggaaau

SEQ ID NO: 2656494 - RNA, 19 nt, Homo sapiens
  misc_RNA (1)...(19): siRNA sense strand
auaaacaccuggaaacaau

SEQ ID NO: 2656495 - RNA, 19 nt, Homo sapiens
  misc_RNA (1)...(19): siRNA sense strand
gaggaaaucuggaaguucu

SEQ ID NO: 2656496 - RNA, 19 nt, Homo sapiens
  misc_RNA (1)...(19): siRNA sense strand
gcauugagaucaucggcuu

SEQ ID NO: 2656497 - RNA, 19 nt, Homo sapiens
  misc_RNA (1)...(19): siRNA sense strand
caagaaagugggccaagaa

SEQ ID NO: 2656498 - RNA, 19 nt, Homo sapiens
  misc_RNA (1)...(19): siRNA sense strand
gucgacaaguucaggacaa

SEQ ID NO: 2656499 - RNA, 19 nt, Homo sapiens
  misc_RNA (1)...(19): siRNA sense strand
aggugggagaugugcauaa

SEQ ID NO: 2656500 - RNA, 19 nt, Homo sapiens
  misc_RNA (1)...(19): siRNA sense strand
acauagauccugauucuua

SEQ ID NO: 2656501 - RNA, 19 nt, Homo sapiens
  misc_RNA (1)...(19): siRNA sense strand
ugagaaggcuuuggaauuu

SEQ ID NO: 2656502 - RNA, 19 nt, Homo sapiens
  misc_RNA (1)...(19): siRNA sense strand
gggcccagguaaagaaacu

SEQ ID NO: 2656503 - RNA, 19 nt, Homo sapiens
  misc_RNA (1)...(19): siRNA sense strand
cuuaaggcaucgacaucua

SEQ ID NO: 2656504 - RNA, 19 nt, Homo sapiens
  misc_RNA (1)...(19): siRNA sense strand
guguauagccucaucugaa

SEQ ID NO: 2656505 - RNA, 19 nt, Homo sapiens
  misc_RNA (1)...(19): siRNA sense strand
ccaagugucuguagaugau

SEQ ID NO: 2656506 - RNA, 19 nt, Homo sapiens
  misc_RNA (1)...(19): siRNA sense strand
agaaagugggccaagaaga

SEQ ID NO: 2656507 - RNA, 19 nt, Homo sapiens
  misc_RNA (1)...(19): siRNA sense strand
ugaaacagaggcugagaca

SEQ ID NO: 2656508 - RNA, 19 nt, Homo sapiens
  misc_RNA (1)...(19): siRNA sense strand
uggcauugcuguuuggcuu

SEQ ID NO: 2656509 - RNA, 19 nt, Homo sapiens
  misc_RNA (1)...(19): siRNA sense strand
ccucgaaggcuaugagaag

SEQ ID NO: 2656510 - RNA, 19 nt, Homo sapiens
  misc_RNA (1)...(19): siRNA sense strand
ggggaaugcuugacacuuu

SEQ ID NO: 2656511 - RNA, 19 nt, Homo sapiens
  misc_RNA (1)...(19): siRNA sense strand
ggagaaagcauugagauca

SEQ ID NO: 2656512 - RNA, 19 nt, Homo sapiens
  misc_RNA (1)...(19): siRNA sense strand
cagcacagucacaggagau

SEQ ID NO: 2656513 - RNA, 19 nt, Homo sapiens
  misc_RNA (1)...(19): siRNA sense strand
cuucaagaccauggaggaa

SEQ ID NO: 2656514 - RNA, 19 nt, Homo sapiens
  misc_RNA (1)...(19): siRNA sense strand
agaaaaggaugaacugaau

SEQ ID NO: 2656515 - RNA, 19 nt, Homo sapiens
  misc_RNA (1)...(19): siRNA sense strand
cuucagugguucauuggaa

SEQ ID NO: 2656516 - RNA, 19 nt, Homo sapiens
  misc_RNA (1)...(19): siRNA sense strand
cugacagagcugcagauua

SEQ ID NO: 2656517 - RNA, 19 nt, Homo sapiens
  misc_RNA (1)...(19): siRNA sense strand
gcaucgacaucuaaagagu

SEQ ID NO: 2656518 - RNA, 19 nt, Homo sapiens
  misc_RNA (1)...(19): siRNA sense strand
aggaugaacugaauuucua

SEQ ID NO: 2656519 - RNA, 19 nt, Homo sapiens
  misc_RNA (1)...(19): siRNA sense strand
gagccugggaggagcauca

SEQ ID NO: 2656520 - RNA, 19 nt, Homo sapiens
  misc_RNA (1)...(19): siRNA sense strand
ucuauaaccuccugggacu

SEQ ID NO: 2656521 - RNA, 19 nt, Homo sapiens
  misc_RNA (1)...(19): siRNA sense strand
ugauaaacaccuggaaaca

SEQ ID NO: 2656522 - RNA, 19 nt, Homo sapiens
  misc_RNA (1)...(19): siRNA sense strand
aaacaauauaccugggacu

SEQ ID NO: 2656523 - RNA, 19 nt, Homo sapiens
  misc_RNA (1)...(19): siRNA sense strand
uguaaggccuugacggguu

SEQ ID NO: 2656524 - RNA, 19 nt, Homo sapiens
  misc_RNA (1)...(19): siRNA sense strand
gguggaggauacagagauc

SEQ ID NO: 2656525 - RNA, 19 nt, Homo sapiens
  misc_RNA (1)...(19): siRNA sense strand
gauaaacaccuggaaacaa

SEQ ID NO: 2656526 - RNA, 19 nt, Homo sapiens
  misc_RNA (1)...(19): siRNA sense strand
aggagacagacauggaauu

SEQ ID NO: 2656527 - RNA, 19 nt, Homo sapiens
  misc_RNA (1)...(19): siRNA sense strand
agacagacauggaauuagu

SEQ ID NO: 2656528 - RNA, 19 nt, Homo sapiens
  misc_RNA (1)...(19): siRNA sense strand
ggaauuaguacagguguuu

SEQ ID NO: 2656529 - RNA, 19 nt, Homo sapiens
  misc_RNA (1)...(19): siRNA sense strand
uguacuaugccaaggugua

SEQ ID NO: 2656530 - RNA, 19 nt, Homo sapiens
  misc_RNA (1)...(19): siRNA sense strand
guaaggccuugacggguua

SEQ ID NO: 2656531 - RNA, 19 nt, Homo sapiens
  misc_RNA (1)...(19): siRNA sense strand
ccagaauccuccaaaugau

SEQ ID NO: 2656532 - RNA, 19 nt, Homo sapiens
  misc_RNA (1)...(19): siRNA sense strand
cagcuuuaucggaaccuaa

SEQ ID NO: 2656533 - RNA, 19 nt, Homo sapiens
  misc_RNA (1)...(19): siRNA sense strand
ucacaggagaucagaggca

SEQ ID NO: 2656534 - RNA, 19 nt, Homo sapiens
  misc_RNA (1)...(19): siRNA sense strand
ccuucaagaccauggagga

SEQ ID NO: 2656535 - RNA, 19 nt, Homo sapiens
  misc_RNA (1)...(19): siRNA sense strand
ccaacuguaucgagugagu

SEQ ID NO: 2656536 - RNA, 19 nt, Homo sapiens
  misc_RNA (1)...(19): siRNA sense strand
ccagagugcccaagggaug

SEQ ID NO: 2656537 - RNA, 19 nt, Homo sapiens
  misc_RNA (1)...(19): siRNA sense strand
gcauccagccagaaacuau

SEQ ID NO: 2656538 - RNA, 19 nt, Homo sapiens
  misc_RNA (1)...(19): siRNA sense strand
gccaguaaggagacagaca

SEQ ID NO: 2656539 - RNA, 19 nt, Homo sapiens
  misc_RNA (1)...(19): siRNA sense strand
gcaacaugguauccagagu

SEQ ID NO: 2656540 - RNA, 19 nt, Homo sapiens
  misc_RNA (1)...(19): siRNA sense strand
gaacauuaauccagaccug

SEQ ID NO: 2656541 - RNA, 19 nt, Homo sapiens
  misc_RNA (1)...(19): siRNA sense strand
cucucaaacuuuaugaaga

SEQ ID NO: 2656542 - RNA, 19 nt, Homo sapiens
  misc_RNA (1)...(19): siRNA sense strand
gaccacaaguacuggcuca

SEQ ID NO: 2656543 - RNA, 19 nt, Homo sapiens
  misc_RNA (1)...(19): siRNA sense strand
gcuccgaguuggaaggcgu

SEQ ID NO: 2656544 - RNA, 19 nt, Homo sapiens
  misc_RNA (1)...(19): siRNA sense strand
ccuaaagaauuauccagga

SEQ ID NO: 2656545 - RNA, 19 nt, Homo sapiens
  misc_RNA (1)...(19): siRNA sense strand
ugaauuucuaccagggaga

SEQ ID NO: 2656546 - RNA, 19 nt, Homo sapiens
  misc_RNA (1)...(19): siRNA sense strand
gcacuggucaggaggagga

SEQ ID NO: 2656547 - RNA, 19 nt, Homo sapiens
  misc_RNA (1)...(19): siRNA sense strand
aggaggaggaggcugagaa

SEQ ID NO: 2656548 - RNA, 19 nt, Homo sapiens
  misc_RNA (1)...(19): siRNA sense strand
cuucaggccaguaaggaga

SEQ ID NO: 2656549 - RNA, 19 nt, Homo sapiens
  misc_RNA (1)...(19): siRNA sense strand
auuggaaagucgacaaguu

SEQ ID NO: 2656550 - RNA, 19 nt, Homo sapiens
  misc_RNA (1)...(19): siRNA sense strand
gguuugaauccauccagaa

SEQ ID NO: 2656551 - RNA, 19 nt, Homo sapiens
  misc_RNA (1)...(19): siRNA sense strand
uaugagaaggcuuuggaau

SEQ ID NO: 2656552 - RNA, 19 nt, Homo sapiens
  misc_RNA (1)...(19): siRNA sense strand
ccauggaggaaaucuggaa

SEQ ID NO: 2656553 - RNA, 19 nt, Homo sapiens
  misc_RNA (1)...(19): siRNA sense strand
ccugaaggagacagagagu

SEQ ID NO: 2656554 - RNA, 19 nt, Homo sapiens
  misc_RNA (1)...(19): siRNA sense strand
caaacuuuaugaagaagca

SEQ ID NO: 2656555 - RNA, 19 nt, Homo sapiens
  misc_RNA (1)...(19): siRNA sense strand
agaacugagcuccggauuu

SEQ ID NO: 2656556 - RNA, 19 nt, Homo sapiens
  misc_RNA (1)...(19): siRNA sense strand
aggaucggguuuacagcaa

SEQ ID NO: 2656557 - RNA, 19 nt, Homo sapiens
  misc_RNA (1)...(19): siRNA sense strand
aggaaaaggaagagguuac

SEQ ID NO: 2656558 - RNA, 19 nt, Homo sapiens
  misc_RNA (1)...(19): siRNA sense strand
acgaaggacacgugagaaa

SEQ ID NO: 2656559 - RNA, 19 nt, Homo sapiens
  misc_RNA (1)...(19): siRNA sense strand
caacaagauaugaggaaaa

SEQ ID NO: 2656560 - RNA, 19 nt, Homo sapiens
  misc_RNA (1)...(19): siRNA sense strand
aggacaaaccugagaaaga

SEQ ID NO: 2656561 - RNA, 19 nt, Homo sapiens
  misc_RNA (1)...(19): siRNA sense strand
guuuaagagugaaaggaau

SEQ ID NO: 2656562 - RNA, 19 nt, Homo sapiens
  misc_RNA (1)...(19): siRNA sense strand
aagaagaagucaaggagga

SEQ ID NO: 2656563 - RNA, 19 nt, Homo sapiens
  misc_RNA (1)...(19): siRNA sense strand
aguaagagucggaguaaga

SEQ ID NO: 2656564 - RNA, 19 nt, Homo sapiens
  misc_RNA (1)...(19): siRNA sense strand
ccaaauuagaagucaagaa

SEQ ID NO: 2656565 - RNA, 19 nt, Homo sapiens
  misc_RNA (1)...(19): siRNA sense strand
cugaagaagaagaagucaa

SEQ ID NO: 2656566 - RNA, 19 nt, Homo sapiens
  misc_RNA (1)...(19): siRNA sense strand
ggacaagugcagugcccaa

SEQ ID NO: 2656567 - RNA, 19 nt, Homo sapiens
  misc_RNA (1)...(19): siRNA sense strand
acaccaaauuagaagucaa

SEQ ID NO: 2656568 - RNA, 19 nt, Homo sapiens
  misc_RNA (1)...(19): siRNA sense strand
cagcagaggaagaacgaga

SEQ ID NO: 2656569 - RNA, 19 nt, Homo sapiens
  misc_RNA (1)...(19): siRNA sense strand
ggaaugaauuguaccguga

SEQ ID NO: 2656570 - RNA, 19 nt, Homo sapiens
  misc_RNA (1)...(19): siRNA sense strand
agacaggaaguguuagaaa

SEQ ID NO: 2656571 - RNA, 19 nt, Homo sapiens
  misc_RNA (1)...(19): siRNA sense strand
cgggaaauggagagacuau

SEQ ID NO: 2656572 - RNA, 19 nt, Homo sapiens
  misc_RNA (1)...(19): siRNA sense strand
cuggagauauggauguaaa

SEQ ID NO: 2656573 - RNA, 19 nt, Homo sapiens
  misc_RNA (1)...(19): siRNA sense strand
ggaagaacgagauggcaga

SEQ ID NO: 2656574 - RNA, 19 nt, Homo sapiens
  misc_RNA (1)...(19): siRNA sense strand
ggagaagaggcaggaguaa

SEQ ID NO: 2656575 - RNA, 19 nt, Homo sapiens
  misc_RNA (1)...(19): siRNA sense strand
cucucaaggucgaggaaga

SEQ ID NO: 2656576 - RNA, 19 nt, Homo sapiens
  misc_RNA (1)...(19): siRNA sense strand
cagaagacucguucagaau

SEQ ID NO: 2656577 - RNA, 19 nt, Homo sapiens
  misc_RNA (1)...(19): siRNA sense strand
acaacaagauaugaggaaa

SEQ ID NO: 2656578 - RNA, 19 nt, Homo sapiens
  misc_RNA (1)...(19): siRNA sense strand
auuuaaagaccgucggcua

SEQ ID NO: 2656579 - RNA, 19 nt, Homo sapiens
  misc_RNA (1)...(19): siRNA sense strand
ucgaaguuuaagagugaaa

SEQ ID NO: 2656580 - RNA, 19 nt, Homo sapiens
  misc_RNA (1)...(19): siRNA sense strand
cuacagauaucauggcaca

SEQ ID NO: 2656581 - RNA, 19 nt, Homo sapiens
  misc_RNA (1)...(19): siRNA sense strand
gagaaguaugacuggagaa

SEQ ID NO: 2656582 - RNA, 19 nt, Homo sapiens
  misc_RNA (1)...(19): siRNA sense strand
agaagaggcaggaguaaga

SEQ ID NO: 2656583 - RNA, 19 nt, Homo sapiens
  misc_RNA (1)...(19): siRNA sense strand
ccucaggaauugaacaaca

SEQ ID NO: 2656584 - RNA, 19 nt, Homo sapiens
  misc_RNA (1)...(19): siRNA sense strand
uccagaagaugaugagcaa

SEQ ID NO: 2656585 - RNA, 19 nt, Homo sapiens
  misc_RNA (1)...(19): siRNA sense strand
ccaucuaaagugaagacaa

SEQ ID NO: 2656586 - RNA, 19 nt, Homo sapiens
  misc_RNA (1)...(19): siRNA sense strand
uggagaagaggcaggagua

SEQ ID NO: 2656587 - RNA, 19 nt, Homo sapiens
  misc_RNA (1)...(19): siRNA sense strand
gggcguggaggaagaggaa

SEQ ID NO: 2656588 - RNA, 19 nt, Homo sapiens
  misc_RNA (1)...(19): siRNA sense strand
ccgcaaaccaagggccaaa

SEQ ID NO: 2656589 - RNA, 19 nt, Homo sapiens
  misc_RNA (1)...(19): siRNA sense strand
aguuuaagagugaaaggaa

SEQ ID NO: 2656590 - RNA, 19 nt, Homo sapiens
  misc_RNA (1)...(19): siRNA sense strand
ggagagacuaugaccggua

SEQ ID NO: 2656591 - RNA, 19 nt, Homo sapiens
  misc_RNA (1)...(19): siRNA sense strand
aggaguaagagucggagua

SEQ ID NO: 2656592 - RNA, 19 nt, Homo sapiens
  misc_RNA (1)...(19): siRNA sense strand
aauguugagcacagggaaa

SEQ ID NO: 2656593 - RNA, 19 nt, Homo sapiens
  misc_RNA (1)...(19): siRNA sense strand
ccaaugaggaggccaggaa

SEQ ID NO: 2656594 - RNA, 19 nt, Homo sapiens
  misc_RNA (1)...(19): siRNA sense strand
auucgagucuuguggcaua

SEQ ID NO: 2656595 - RNA, 19 nt, Homo sapiens
  misc_RNA (1)...(19): siRNA sense strand
cagcauuucucaaccgcaa

SEQ ID NO: 2656596 - RNA, 19 nt, Homo sapiens
  misc_RNA (1)...(19): siRNA sense strand
aagcaaauagaaugccaaa

SEQ ID NO: 2656597 - RNA, 19 nt, Homo sapiens
  misc_RNA (1)...(19): siRNA sense strand
ugggaaagcaaggaaauaa

SEQ ID NO: 2656598 - RNA, 19 nt, Homo sapiens
  misc_RNA (1)...(19): siRNA sense strand
agaaaaucccucaggaauu

SEQ ID NO: 2656599 - RNA, 19 nt, Homo sapiens
  misc_RNA (1)...(19): siRNA sense strand
cacugagacugaagaagaa

SEQ ID NO: 2656600 - RNA, 19 nt, Homo sapiens
  misc_RNA (1)...(19): siRNA sense strand
gcucauagaggauguggau

SEQ ID NO: 2656601 - RNA, 19 nt, Homo sapiens
  misc_RNA (1)...(19): siRNA sense strand
gucuuguggcauagggaaa

SEQ ID NO: 2656602 - RNA, 19 nt, Homo sapiens
  misc_RNA (1)...(19): siRNA sense strand
agaacgagauggcagaaaa

SEQ ID NO: 2656603 - RNA, 19 nt, Homo sapiens
  misc_RNA (1)...(19): siRNA sense strand
ccaaguuacuggagccgau

SEQ ID NO: 2656604 - RNA, 19 nt, Homo sapiens
  misc_RNA (1)...(19): siRNA sense strand
gcugggaaagcaaggaaau

SEQ ID NO: 2656605 - RNA, 19 nt, Homo sapiens
  misc_RNA (1)...(19): siRNA sense strand
cagaagaugaugagcaaac

SEQ ID NO: 2656606 - RNA, 19 nt, Homo sapiens
  misc_RNA (1)...(19): siRNA sense strand
acgaugaagaugaagauga

SEQ ID NO: 2656607 - RNA, 19 nt, Homo sapiens
  misc_RNA (1)...(19): siRNA sense strand
acuaacaguuggaggauuc

SEQ ID NO: 2656608 - RNA, 19 nt, Homo sapiens
  misc_RNA (1)...(19): siRNA sense strand
gauuaugaugaaagaggau

SEQ ID NO: 2656609 - RNA, 19 nt, Homo sapiens
  misc_RNA (1)...(19): siRNA sense strand
aauuguaccgugagaagua

SEQ ID NO: 2656610 - RNA, 19 nt, Homo sapiens
  misc_RNA (1)...(19): siRNA sense strand
gaguaagagucgaggccug

SEQ ID NO: 2656611 - RNA, 19 nt, Homo sapiens
  misc_RNA (1)...(19): siRNA sense strand
uggaagggccacucacaaa

SEQ ID NO: 2656612 - RNA, 19 nt, Homo sapiens
  misc_RNA (1)...(19): siRNA sense strand
caccacagaauuacggaaa

SEQ ID NO: 2656613 - RNA, 19 nt, Homo sapiens
  misc_RNA (1)...(19): siRNA sense strand
gggacaugccagaggauga

SEQ ID NO: 2656614 - RNA, 19 nt, Homo sapiens
  misc_RNA (1)...(19): siRNA sense strand
gggugaacggcgagcuuaa

SEQ ID NO: 2656615 - RNA, 19 nt, Homo sapiens
  misc_RNA (1)...(19): siRNA sense strand
aggaaugggaaaugaagaa

SEQ ID NO: 2656616 - RNA, 19 nt, Homo sapiens
  misc_RNA (1)...(19): siRNA sense strand
aggaagggugcuacagaaa

SEQ ID NO: 2656617 - RNA, 19 nt, Homo sapiens
  misc_RNA (1)...(19): siRNA sense strand
ggacagagcugauagcacu

SEQ ID NO: 2656618 - RNA, 19 nt, Homo sapiens
  misc_RNA (1)...(19): siRNA sense strand
aagaggaggaggaagggaa

SEQ ID NO: 2656619 - RNA, 19 nt, Homo sapiens
  misc_RNA (1)...(19): siRNA sense strand
agacaggagaagagggaac

SEQ ID NO: 2656620 - RNA, 19 nt, Homo sapiens
  misc_RNA (1)...(19): siRNA sense strand
ucaauaaagcagaauguga

SEQ ID NO: 2656621 - RNA, 19 nt, Homo sapiens
  misc_RNA (1)...(19): siRNA sense strand
gaucaaccuuacaucaaua

SEQ ID NO: 2656622 - RNA, 19 nt, Homo sapiens
  misc_RNA (1)...(19): siRNA sense strand
gaggaguggcugaagguca

SEQ ID NO: 2656623 - RNA, 19 nt, Homo sapiens
  misc_RNA (1)...(19): siRNA sense strand
guuucugagcugaggaaga

SEQ ID NO: 2656624 - RNA, 19 nt, Homo sapiens
  misc_RNA (1)...(19): siRNA sense strand
uggcagaacugaagggcuc

SEQ ID NO: 2656625 - RNA, 19 nt, Homo sapiens
  misc_RNA (1)...(19): siRNA sense strand
acgaugaagaggaggagga

SEQ ID NO: 2656626 - RNA, 19 nt, Homo sapiens
  misc_RNA (1)...(19): siRNA sense strand
augaaaagaugcaggacga

SEQ ID NO: 2656627 - RNA, 19 nt, Homo sapiens
  misc_RNA (1)...(19): siRNA sense strand
cuggagaaagagaaagaga

SEQ ID NO: 2656628 - RNA, 19 nt, Homo sapiens
  misc_RNA (1)...(19): siRNA sense strand
caucaauaaagcagaaugu

SEQ ID NO: 2656629 - RNA, 19 nt, Homo sapiens
  misc_RNA (1)...(19): siRNA sense strand
aggaguggcugaaggucau

SEQ ID NO: 2656630 - RNA, 19 nt, Homo sapiens
  misc_RNA (1)...(19): siRNA sense strand
acucgauuguggauggcua

SEQ ID NO: 2656631 - RNA, 19 nt, Homo sapiens
  misc_RNA (1)...(19): siRNA sense strand
cacgaguaccucagcgaua

SEQ ID NO: 2656632 - RNA, 19 nt, Homo sapiens
  misc_RNA (1)...(19): siRNA sense strand
caaccaaggaagggugcua

SEQ ID NO: 2656633 - RNA, 19 nt, Homo sapiens
  misc_RNA (1)...(19): siRNA sense strand
gagaucaaccuuacaucaa

SEQ ID NO: 2656634 - RNA, 19 nt, Homo sapiens
  misc_RNA (1)...(19): siRNA sense strand
gaaagagacgauucggaca

SEQ ID NO: 2656635 - RNA, 19 nt, Homo sapiens
  misc_RNA (1)...(19): siRNA sense strand
gagcagcccaggagcaaaa

SEQ ID NO: 2656636 - RNA, 19 nt, Homo sapiens
  misc_RNA (1)...(19): siRNA sense strand
uggggaaacugcaaauaaa

SEQ ID NO: 2656637 - RNA, 19 nt, Homo sapiens
  misc_RNA (1)...(19): siRNA sense strand
gaagcucagugucgggcaa

SEQ ID NO: 2656638 - RNA, 19 nt, Homo sapiens
  misc_RNA (1)...(19): siRNA sense strand
caaccagggugaacggcga

SEQ ID NO: 2656639 - RNA, 19 nt, Homo sapiens
  misc_RNA (1)...(19): siRNA sense strand
cgaugaagaggaggaggaa

SEQ ID NO: 2656640 - RNA, 19 nt, Homo sapiens
  misc_RNA (1)...(19): siRNA sense strand
ggcugaaggucauccgaga

SEQ ID NO: 2656641 - RNA, 19 nt, Homo sapiens
  misc_RNA (1)...(19): siRNA sense strand
ggcaaagggaagaagagca

SEQ ID NO: 2656642 - RNA, 19 nt, Homo sapiens
  misc_RNA (1)...(19): siRNA sense strand
acguggauguggagaccuu

SEQ ID NO: 2656643 - RNA, 19 nt, Homo sapiens
  misc_RNA (1)...(19): siRNA sense strand
gcuuaagagcuccuauaau

SEQ ID NO: 2656644 - RNA, 19 nt, Homo sapiens
  misc_RNA (1)...(19): siRNA sense strand
gcaaagggaagaagagcag

SEQ ID NO: 2656645 - RNA, 19 nt, Homo sapiens
  misc_RNA (1)...(19): siRNA sense strand
agaagaagacacuggccga

SEQ ID NO: 2656646 - RNA, 19 nt, Homo sapiens
  misc_RNA (1)...(19): siRNA sense strand
ccuacgaugaagaggagga

SEQ ID NO: 2656647 - RNA, 19 nt, Homo sapiens
  misc_RNA (1)...(19): siRNA sense strand
aggagaagagggaacugaa

SEQ ID NO: 2656648 - RNA, 19 nt, Homo sapiens
  misc_RNA (1)...(19): siRNA sense strand
agcuggagaaagagaaaga

SEQ ID NO: 2656649 - RNA, 19 nt, Homo sapiens
  misc_RNA (1)...(19): siRNA sense strand
ggagaaagagaaagagacg

SEQ ID NO: 2656650 - RNA, 19 nt, Homo sapiens
  misc_RNA (1)...(19): siRNA sense strand
aaagccaaggaaugggaaa

SEQ ID NO: 2656651 - RNA, 19 nt, Homo sapiens
  misc_RNA (1)...(19): siRNA sense strand
gcuacuaugaggacgcaga

SEQ ID NO: 2656652 - RNA, 19 nt, Homo sapiens
  misc_RNA (1)...(19): siRNA sense strand
gcugaaggucauccgagaa

SEQ ID NO: 2656653 - RNA, 19 nt, Homo sapiens
  misc_RNA (1)...(19): siRNA sense strand
aggucaaagucaaacgcca

SEQ ID NO: 2656654 - RNA, 19 nt, Homo sapiens
  misc_RNA (1)...(19): siRNA sense strand
agaagagggaacugaagga

SEQ ID NO: 2656655 - RNA, 19 nt, Homo sapiens
  misc_RNA (1)...(19): siRNA sense strand
cugagugaccuucgggaca

SEQ ID NO: 2656656 - RNA, 19 nt, Homo sapiens
  misc_RNA (1)...(19): siRNA sense strand
gaggaugcccggagguacu

SEQ ID NO: 2656657 - RNA, 19 nt, Homo sapiens
  misc_RNA (1)...(19): siRNA sense strand
cugaggaagaggagcccau

SEQ ID NO: 2656658 - RNA, 19 nt, Homo sapiens
  misc_RNA (1)...(19): siRNA sense strand
ccaaagagagacacggcua

SEQ ID NO: 2656659 - RNA, 19 nt, Homo sapiens
  misc_RNA (1)...(19): siRNA sense strand
gcagagagggacaggcaga

SEQ ID NO: 2656660 - RNA, 19 nt, Homo sapiens
  misc_RNA (1)...(19): siRNA sense strand
acuucaggcuccagggaau

SEQ ID NO: 2656661 - RNA, 19 nt, Homo sapiens
  misc_RNA (1)...(19): siRNA sense strand
gagaaaacauccuuggcaa

SEQ ID NO: 2656662 - RNA, 19 nt, Homo sapiens
  misc_RNA (1)...(19): siRNA sense strand
gccaaggacuccaagggaa

SEQ ID NO: 2656663 - RNA, 19 nt, Homo sapiens
  misc_RNA (1)...(19): siRNA sense strand
guuucauuacuguggguua

SEQ ID NO: 2656664 - RNA, 19 nt, Homo sapiens
  misc_RNA (1)...(19): siRNA sense strand
gcaagaauggcaaagguga

SEQ ID NO: 2656665 - RNA, 19 nt, Homo sapiens
  misc_RNA (1)...(19): siRNA sense strand
cugaggugguagagcugaa

SEQ ID NO: 2656666 - RNA, 19 nt, Homo sapiens
  misc_RNA (1)...(19): siRNA sense strand
uggucaagcuacacugaau

SEQ ID NO: 2656667 - RNA, 19 nt, Homo sapiens
  misc_RNA (1)...(19): siRNA sense strand
ugaaaagggaagcugaaua

SEQ ID NO: 2656668 - RNA, 19 nt, Homo sapiens
  misc_RNA (1)...(19): siRNA sense strand
gaaugaaagcagagacccu

SEQ ID NO: 2656669 - RNA, 19 nt, Homo sapiens
  misc_RNA (1)...(19): siRNA sense strand
gaaucgaacaugagcagca

SEQ ID NO: 2656670 - RNA, 19 nt, Homo sapiens
  misc_RNA (1)...(19): siRNA sense strand
accaauauacagaugacaa

SEQ ID NO: 2656671 - RNA, 19 nt, Homo sapiens
  misc_RNA (1)...(19): siRNA sense strand
uugaggaggagcuggagaa

SEQ ID NO: 2656672 - RNA, 19 nt, Homo sapiens
  misc_RNA (1)...(19): siRNA sense strand
ccagaaagauacaccucca

SEQ ID NO: 2656673 - RNA, 19 nt, Homo sapiens
  misc_RNA (1)...(19): siRNA sense strand
agcaaagcccagaugaauu

SEQ ID NO: 2656674 - RNA, 19 nt, Homo sapiens
  misc_RNA (1)...(19): siRNA sense strand
gccuguaacucaucgguga

SEQ ID NO: 2656675 - RNA, 19 nt, Homo sapiens
  misc_RNA (1)...(19): siRNA sense strand
caauugaggaggagcugga

SEQ ID NO: 2656676 - RNA, 19 nt, Homo sapiens
  misc_RNA (1)...(19): siRNA sense strand
ccaaggacuccaagggaag

SEQ ID NO: 2656677 - RNA, 19 nt, Homo sapiens
  misc_RNA (1)...(19): siRNA sense strand
ggucagaaggaaaggagca

SEQ ID NO: 2656678 - RNA, 19 nt, Homo sapiens
  misc_RNA (1)...(19): siRNA sense strand
ccguccaaguuaugggaga

SEQ ID NO: 2656679 - RNA, 19 nt, Homo sapiens
  misc_RNA (1)...(19): siRNA sense strand
agacacuggaggugguauu

SEQ ID NO: 2656680 - RNA, 19 nt, Homo sapiens
  misc_RNA (1)...(19): siRNA sense strand
cagcagugguggacgguuc

SEQ ID NO: 2656681 - RNA, 19 nt, Homo sapiens
  misc_RNA (1)...(19): siRNA sense strand
cagaaaguggaaaugaaaa

SEQ ID NO: 2656682 - RNA, 19 nt, Homo sapiens
  misc_RNA (1)...(19): siRNA sense strand
auccagugauccugaacaa

SEQ ID NO: 2656683 - RNA, 19 nt, Homo sapiens
  misc_RNA (1)...(19): siRNA sense strand
ugagaaggucaguaauaca

SEQ ID NO: 2656684 - RNA, 19 nt, Homo sapiens
  misc_RNA (1)...(19): siRNA sense strand
cguuguuguuucugcugua

SEQ ID NO: 2656685 - RNA, 19 nt, Homo sapiens
  misc_RNA (1)...(19): siRNA sense strand
aggaggaauucuaaggaaa

SEQ ID NO: 2656686 - RNA, 19 nt, Homo sapiens
  misc_RNA (1)...(19): siRNA sense strand
gcauaaaggaggaauucua

SEQ ID NO: 2656687 - RNA, 19 nt, Homo sapiens
  misc_RNA (1)...(19): siRNA sense strand
cagaauuguugguguugaa

SEQ ID NO: 2656688 - RNA, 19 nt, Homo sapiens
  misc_RNA (1)...(19): siRNA sense strand
ccacagagcuucacgcuga

SEQ ID NO: 2656689 - RNA, 19 nt, Homo sapiens
  misc_RNA (1)...(19): siRNA sense strand
aggugaaggugaucgagaa

SEQ ID NO: 2656690 - RNA, 19 nt, Homo sapiens
  misc_RNA (1)...(19): siRNA sense strand
ggugaugagcugucagaga

SEQ ID NO: 2656691 - RNA, 19 nt, Homo sapiens
  misc_RNA (1)...(19): siRNA sense strand
ucaugugggaagaggaauu

SEQ ID NO: 2656692 - RNA, 19 nt, Homo sapiens
  misc_RNA (1)...(19): siRNA sense strand
ggaaccuggugaauugaaa

SEQ ID NO: 2656693 - RNA, 19 nt, Homo sapiens
  misc_RNA (1)...(19): siRNA sense strand
gagcuagacuccugggacu

SEQ ID NO: 2656694 - RNA, 19 nt, Homo sapiens
  misc_RNA (1)...(19): siRNA sense strand
ccguuaauauccagcccaa

SEQ ID NO: 2656695 - RNA, 19 nt, Homo sapiens
  misc_RNA (1)...(19): siRNA sense strand
ugaaggugaucgagaagga

SEQ ID NO: 2656696 - RNA, 19 nt, Homo sapiens
  misc_RNA (1)...(19): siRNA sense strand
ggaccagguggcugagaca

SEQ ID NO: 2656697 - RNA, 19 nt, Homo sapiens
  misc_RNA (1)...(19): siRNA sense strand
cgacaguuccucuggacuu

SEQ ID NO: 2656698 - RNA, 19 nt, Homo sapiens
  misc_RNA (1)...(19): siRNA sense strand
cuguaaaggaagcucagaa

SEQ ID NO: 2656699 - RNA, 19 nt, Homo sapiens
  misc_RNA (1)...(19): siRNA sense strand
cggaagaaaagcacuauua

SEQ ID NO: 2656700 - RNA, 19 nt, Homo sapiens
  misc_RNA (1)...(19): siRNA sense strand
gaauugaaauccuggccca

SEQ ID NO: 2656701 - RNA, 19 nt, Homo sapiens
  misc_RNA (1)...(19): siRNA sense strand
aaagcauaaaggaggaauu

SEQ ID NO: 2656702 - RNA, 19 nt, Homo sapiens
  misc_RNA (1)...(19): siRNA sense strand
ggugaugcccugugggacu

SEQ ID NO: 2656703 - RNA, 19 nt, Homo sapiens
  misc_RNA (1)...(19): siRNA sense strand
cauaaaggaggaauucuaa

SEQ ID NO: 2656704 - RNA, 19 nt, Homo sapiens
  misc_RNA (1)...(19): siRNA sense strand
ggaaaggugcaaagcuguu

SEQ ID NO: 2656705 - RNA, 19 nt, Homo sapiens
  misc_RNA (1)...(19): siRNA sense strand
aggacaucuugaagcauuu

SEQ ID NO: 2656706 - RNA, 19 nt, Homo sapiens
  misc_RNA (1)...(19): siRNA sense strand
ccacggaagaaaagcacua

SEQ ID NO: 2656707 - RNA, 19 nt, Homo sapiens
  misc_RNA (1)...(19): siRNA sense strand
aaggaggaauucuaaggaa

SEQ ID NO: 2656708 - RNA, 19 nt, Homo sapiens
  misc_RNA (1)...(19): siRNA sense strand
ccuucgaguugaaugccaa

SEQ ID NO: 2656709 - RNA, 19 nt, Homo sapiens
  misc_RNA (1)...(19): siRNA sense strand
ccugggacuuggagaagga

SEQ ID NO: 2656710 - RNA, 19 nt, Homo sapiens
  misc_RNA (1)...(19): siRNA sense strand
gaaacaagaacaccaugaa

SEQ ID NO: 2656711 - RNA, 19 nt, Homo sapiens
  misc_RNA (1)...(19): siRNA sense strand
uuacauggaaccuggugaa

SEQ ID NO: 2656712 - RNA, 19 nt, Homo sapiens
  misc_RNA (1)...(19): siRNA sense strand
cauggaaccuggugaauug

SEQ ID NO: 2656713 - RNA, 19 nt, Homo sapiens
  misc_RNA (1)...(19): siRNA sense strand
guucagagguucuccagca

SEQ ID NO: 2656714 - RNA, 19 nt, Homo sapiens
  misc_RNA (1)...(19): siRNA sense strand
ggaggaauucuaaggaaag

SEQ ID NO: 2656715 - RNA, 19 nt, Homo sapiens
  misc_RNA (1)...(19): siRNA sense strand
aggcacagaaacaagaaca

SEQ ID NO: 2656716 - RNA, 19 nt, Homo sapiens
  misc_RNA (1)...(19): siRNA sense strand
aguuccacaugaaggagaa

SEQ ID NO: 2656717 - RNA, 19 nt, Homo sapiens
  misc_RNA (1)...(19): siRNA sense strand
guucggauccaguggcuga

SEQ ID NO: 2656718 - RNA, 19 nt, Homo sapiens
  misc_RNA (1)...(19): siRNA sense strand
agaaagugcauguaggcaa

SEQ ID NO: 2656719 - RNA, 19 nt, Homo sapiens
  misc_RNA (1)...(19): siRNA sense strand
acgaagugacgguggaaca

SEQ ID NO: 2656720 - RNA, 19 nt, Homo sapiens
  misc_RNA (1)...(19): siRNA sense strand
aggauauacaugcaggaaa

SEQ ID NO: 2656721 - RNA, 19 nt, Homo sapiens
  misc_RNA (1)...(19): siRNA sense strand
cagcaugacaauagagacu

SEQ ID NO: 2656722 - RNA, 19 nt, Homo sapiens
  misc_RNA (1)...(19): siRNA sense strand
gugauaaagucaacgaagu

SEQ ID NO: 2656723 - RNA, 19 nt, Homo sapiens
  misc_RNA (1)...(19): siRNA sense strand
augaaaccgugauggaaau

SEQ ID NO: 2656724 - RNA, 19 nt, Homo sapiens
  misc_RNA (1)...(19): siRNA sense strand
gggcgauacagcaugacaa

SEQ ID NO: 2656725 - RNA, 19 nt, Homo sapiens
  misc_RNA (1)...(19): siRNA sense strand
guaaagaaaucacagacca

SEQ ID NO: 2656726 - RNA, 19 nt, Homo sapiens
  misc_RNA (1)...(19): siRNA sense strand
acugauagccauugggcga

SEQ ID NO: 2656727 - RNA, 19 nt, Homo sapiens
  misc_RNA (1)...(19): siRNA sense strand
agcuaagggcugucugaaa

SEQ ID NO: 2656728 - RNA, 19 nt, Homo sapiens
  misc_RNA (1)...(19): siRNA sense strand
ggaaaacaaauuagugaca

SEQ ID NO: 2656729 - RNA, 19 nt, Homo sapiens
  misc_RNA (1)...(19): siRNA sense strand
gaugaaggcaugaucguca

SEQ ID NO: 2656730 - RNA, 19 nt, Homo sapiens
  misc_RNA (1)...(19): siRNA sense strand
ggagagagccuaucagaug

SEQ ID NO: 2656731 - RNA, 19 nt, Homo sapiens
  misc_RNA (1)...(19): siRNA sense strand
ggacaaaaccugaaagagc

SEQ ID NO: 2656732 - RNA, 19 nt, Homo sapiens
  misc_RNA (1)...(19): siRNA sense strand
cgucauagcuaagggcugu

SEQ ID NO: 2656733 - RNA, 19 nt, Homo sapiens
  misc_RNA (1)...(19): siRNA sense strand
cguauguguuuuagcauuu

SEQ ID NO: 2656734 - RNA, 19 nt, Homo sapiens
  misc_RNA (1)...(19): siRNA sense strand
gaaagugcauguaggcaac

SEQ ID NO: 2656735 - RNA, 19 nt, Homo sapiens
  misc_RNA (1)...(19): siRNA sense strand
auguaggcaaccaggacaa

SEQ ID NO: 2656736 - RNA, 19 nt, Homo sapiens
  misc_RNA (1)...(19): siRNA sense strand
ugcagagaacucaaagaua

SEQ ID NO: 2656737 - RNA, 19 nt, Homo sapiens
  misc_RNA (1)...(19): siRNA sense strand
gaucagucagugaaagcau

SEQ ID NO: 2656738 - RNA, 19 nt, Homo sapiens
  misc_RNA (1)...(19): siRNA sense strand
cauugcaaaggaaggacaa

SEQ ID NO: 2656739 - RNA, 19 nt, Homo sapiens
  misc_RNA (1)...(19): siRNA sense strand
gguguaaagaaaucacaga

SEQ ID NO: 2656740 - RNA, 19 nt, Homo sapiens
  misc_RNA (1)...(19): siRNA sense strand
agaaagugcauguaggcaa

SEQ ID NO: 2656741 - RNA, 19 nt, Homo sapiens
  misc_RNA (1)...(19): siRNA sense strand
cugaugaauuguuggaaaa

SEQ ID NO: 2656742 - RNA, 19 nt, Homo sapiens
  misc_RNA (1)...(19): siRNA sense strand
acgaagugacgguggaaca

SEQ ID NO: 2656743 - RNA, 19 nt, Homo sapiens
  misc_RNA (1)...(19): siRNA sense strand
aggauauacaugcaggaaa

SEQ ID NO: 2656744 - RNA, 19 nt, Homo sapiens
  misc_RNA (1)...(19): siRNA sense strand
cagcaugacaauagagacu

SEQ ID NO: 2656745 - RNA, 19 nt, Homo sapiens
  misc_RNA (1)...(19): siRNA sense strand
gugauaaagucaacgaagu

SEQ ID NO: 2656746 - RNA, 19 nt, Homo sapiens
  misc_RNA (1)...(19): siRNA sense strand
augaaaccgugauggaaau

SEQ ID NO: 2656747 - RNA, 19 nt, Homo sapiens
  misc_RNA (1)...(19): siRNA sense strand
gggcgauacagcaugacaa

SEQ ID NO: 2656748 - RNA, 19 nt, Homo sapiens
  misc_RNA (1)...(19): siRNA sense strand
guaaagaaaucacagacca

SEQ ID NO: 2656749 - RNA, 19 nt, Homo sapiens
  misc_RNA (1)...(19): siRNA sense strand
acugauagccauugggcga

SEQ ID NO: 2656750 - RNA, 19 nt, Homo sapiens
  misc_RNA (1)...(19): siRNA sense strand
ccaauuugucacuggauga

SEQ ID NO: 2656751 - RNA, 19 nt, Homo sapiens
  misc_RNA (1)...(19): siRNA sense strand
agcuaagggcugucugaaa

SEQ ID NO: 2656752 - RNA, 19 nt, Homo sapiens
  misc_RNA (1)...(19): siRNA sense strand
ggaaaacaaauuagugaca

SEQ ID NO: 2656753 - RNA, 19 nt, Homo sapiens
  misc_RNA (1)...(19): siRNA sense strand
gaugaaggcaugaucguca

SEQ ID NO: 2656754 - RNA, 19 nt, Homo sapiens
  misc_RNA (1)...(19): siRNA sense strand
ccauccugcucaagauauu

SEQ ID NO: 2656755 - RNA, 19 nt, Homo sapiens
  misc_RNA (1)...(19): siRNA sense strand
ggagagagccuaucagaug

SEQ ID NO: 2656756 - RNA, 19 nt, Homo sapiens
  misc_RNA (1)...(19): siRNA sense strand
ggacaaaaccugaaagagc

SEQ ID NO: 2656757 - RNA, 19 nt, Homo sapiens
  misc_RNA (1)...(19): siRNA sense strand
cgucauagcuaagggcugu

SEQ ID NO: 2656758 - RNA, 19 nt, Homo sapiens
  misc_RNA (1)...(19): siRNA sense strand
cguauguguuuuagcauuu

SEQ ID NO: 2656759 - RNA, 19 nt, Homo sapiens
  misc_RNA (1)...(19): siRNA sense strand
gaaagugcauguaggcaac

SEQ ID NO: 2656760 - RNA, 19 nt, Homo sapiens
  misc_RNA (1)...(19): siRNA sense strand
auguaggcaaccaggacaa

SEQ ID NO: 2656761 - RNA, 19 nt, Homo sapiens
  misc_RNA (1)...(19): siRNA sense strand
ugcagagaacucaaagaua

SEQ ID NO: 2656762 - RNA, 19 nt, Homo sapiens
  misc_RNA (1)...(19): siRNA sense strand
gaucagucagugaaagcau

SEQ ID NO: 2656763 - RNA, 19 nt, Homo sapiens
  misc_RNA (1)...(19): siRNA sense strand
cauugcaaaggaaggacaa

SEQ ID NO: 2656764 - RNA, 19 nt, Homo sapiens
  misc_RNA (1)...(19): siRNA sense strand
gguguaaagaaaucacaga

SEQ ID NO: 2656765 - RNA, 19 nt, Homo sapiens
  misc_RNA (1)...(19): siRNA sense strand
uggacaaagaagagaauaa

SEQ ID NO: 2656766 - RNA, 19 nt, Homo sapiens
  misc_RNA (1)...(19): siRNA sense strand
gaggauaguccgaggaaaa

SEQ ID NO: 2656767 - RNA, 19 nt, Homo sapiens
  misc_RNA (1)...(19): siRNA sense strand
aaucaauggaggagagcaa

SEQ ID NO: 2656768 - RNA, 19 nt, Homo sapiens
  misc_RNA (1)...(19): siRNA sense strand
auucagggcucaugggaaa

SEQ ID NO: 2656769 - RNA, 19 nt, Homo sapiens
  misc_RNA (1)...(19): siRNA sense strand
gugaggaaggauugaguaa

SEQ ID NO: 2656770 - RNA, 19 nt, Homo sapiens
  misc_RNA (1)...(19): siRNA sense strand
agcgaaagcuaaaggacaa

SEQ ID NO: 2656771 - RNA, 19 nt, Homo sapiens
  misc_RNA (1)...(19): siRNA sense strand
gcauuaaagaggagcccaa

SEQ ID NO: 2656772 - RNA, 19 nt, Homo sapiens
  misc_RNA (1)...(19): siRNA sense strand
agaaggagucugaggaaga

SEQ ID NO: 2656773 - RNA, 19 nt, Homo sapiens
  misc_RNA (1)...(19): siRNA sense strand
gggaaauccaggaaggaca

SEQ ID NO: 2656774 - RNA, 19 nt, Homo sapiens
  misc_RNA (1)...(19): siRNA sense strand
aggaagaggaggaggagga

SEQ ID NO: 2656775 - RNA, 19 nt, Homo sapiens
  misc_RNA (1)...(19): siRNA sense strand
ggaaaagcaaagaggagaa

SEQ ID NO: 2656776 - RNA, 19 nt, Homo sapiens
  misc_RNA (1)...(19): siRNA sense strand
ugggaagaauucuggcaaa

SEQ ID NO: 2656777 - RNA, 19 nt, Homo sapiens
  misc_RNA (1)...(19): siRNA sense strand
ccuugaaagagcugggcaa

SEQ ID NO: 2656778 - RNA, 19 nt, Homo sapiens
  misc_RNA (1)...(19): siRNA sense strand
cagcaaaucaaaagugaaa

SEQ ID NO: 2656779 - RNA, 19 nt, Homo sapiens
  misc_RNA (1)...(19): siRNA sense strand
gagauaaagaaaagggcaa

SEQ ID NO: 2656780 - RNA, 19 nt, Homo sapiens
  misc_RNA (1)...(19): siRNA sense strand
acuggaagcagaaggauua

SEQ ID NO: 2656781 - RNA, 19 nt, Homo sapiens
  misc_RNA (1)...(19): siRNA sense strand
aggagaagcgaaagcuaaa

SEQ ID NO: 2656782 - RNA, 19 nt, Homo sapiens
  misc_RNA (1)...(19): siRNA sense strand
gaggagagccacaggcgaa

SEQ ID NO: 2656783 - RNA, 19 nt, Homo sapiens
  misc_RNA (1)...(19): siRNA sense strand
gggaagaauucuggcaaaa

SEQ ID NO: 2656784 - RNA, 19 nt, Homo sapiens
  misc_RNA (1)...(19): siRNA sense strand
agaaugaagggcuggcaaa

SEQ ID NO: 2656785 - RNA, 19 nt, Homo sapiens
  misc_RNA (1)...(19): siRNA sense strand
aaagcuaagcagauggaaa

SEQ ID NO: 2656786 - RNA, 19 nt, Homo sapiens
  misc_RNA (1)...(19): siRNA sense strand
ggauaaggaugcggggaaa

SEQ ID NO: 2656787 - RNA, 19 nt, Homo sapiens
  misc_RNA (1)...(19): siRNA sense strand
gcagaaagggaaagggauc

SEQ ID NO: 2656788 - RNA, 19 nt, Homo sapiens
  misc_RNA (1)...(19): siRNA sense strand
gggagaggagacugugaaa

SEQ ID NO: 2656789 - RNA, 19 nt, Homo sapiens
  misc_RNA (1)...(19): siRNA sense strand
gggcaaggaggaaacuaaa

SEQ ID NO: 2656790 - RNA, 19 nt, Homo sapiens
  misc_RNA (1)...(19): siRNA sense strand
cagaaggauuaauugacaa

SEQ ID NO: 2656791 - RNA, 19 nt, Homo sapiens
  misc_RNA (1)...(19): siRNA sense strand
gggauaaggaugcggggaa

SEQ ID NO: 2656792 - RNA, 19 nt, Homo sapiens
  misc_RNA (1)...(19): siRNA sense strand
ccgcauggccaguaucaaa

SEQ ID NO: 2656793 - RNA, 19 nt, Homo sapiens
  misc_RNA (1)...(19): siRNA sense strand
ggaaauccaggaaggacaa

SEQ ID NO: 2656794 - RNA, 19 nt, Homo sapiens
  misc_RNA (1)...(19): siRNA sense strand
gcuaaagcugggaagaauu

SEQ ID NO: 2656795 - RNA, 19 nt, Homo sapiens
  misc_RNA (1)...(19): siRNA sense strand
cgggaggcagaaagggaaa

SEQ ID NO: 2656796 - RNA, 19 nt, Homo sapiens
  misc_RNA (1)...(19): siRNA sense strand
uaaagaaggaagaggagga

SEQ ID NO: 2656797 - RNA, 19 nt, Homo sapiens
  misc_RNA (1)...(19): siRNA sense strand
ccacaggcgaaucaagaaa

SEQ ID NO: 2656798 - RNA, 19 nt, Homo sapiens
  misc_RNA (1)...(19): siRNA sense strand
ccaaauaucuggaucagca

SEQ ID NO: 2656799 - RNA, 19 nt, Homo sapiens
  misc_RNA (1)...(19): siRNA sense strand
aagcuaagcagauggaaaa

SEQ ID NO: 2656800 - RNA, 19 nt, Homo sapiens
  misc_RNA (1)...(19): siRNA sense strand
gggaauucacacaaagaga

SEQ ID NO: 2656801 - RNA, 19 nt, Homo sapiens
  misc_RNA (1)...(19): siRNA sense strand
ggaaacucuauguugguaa

SEQ ID NO: 2656802 - RNA, 19 nt, Homo sapiens
  misc_RNA (1)...(19): siRNA sense strand
agaaggaagaggaggagga

SEQ ID NO: 2656803 - RNA, 19 nt, Homo sapiens
  misc_RNA (1)...(19): siRNA sense strand
gguaugagaucaaaggcca

SEQ ID NO: 2656804 - RNA, 19 nt, Homo sapiens
  misc_RNA (1)...(19): siRNA sense strand
ugucaauacaugugaaguu

SEQ ID NO: 2656805 - RNA, 19 nt, Homo sapiens
  misc_RNA (1)...(19): siRNA sense strand
gggaaaucgggguuggaaa

SEQ ID NO: 2656806 - RNA, 19 nt, Homo sapiens
  misc_RNA (1)...(19): siRNA sense strand
gaguaaaacuucuaaggau

SEQ ID NO: 2656807 - RNA, 19 nt, Homo sapiens
  misc_RNA (1)...(19): siRNA sense strand
gcagacagguguagaccca

SEQ ID NO: 2656808 - RNA, 19 nt, Homo sapiens
  misc_RNA (1)...(19): siRNA sense strand
aggaggaggaggagagcca

SEQ ID NO: 2656809 - RNA, 19 nt, Homo sapiens
  misc_RNA (1)...(19): siRNA sense strand
gugcuaaagcugggaagaa

SEQ ID NO: 2656810 - RNA, 19 nt, Homo sapiens
  misc_RNA (1)...(19): siRNA sense strand
aaggagaagcgaaagcuaa

SEQ ID NO: 2656811 - RNA, 19 nt, Homo sapiens
  misc_RNA (1)...(19): siRNA sense strand
cuugauagagagaagaaau

SEQ ID NO: 2656812 - RNA, 19 nt, Homo sapiens
  misc_RNA (1)...(19): siRNA sense strand
agucauacauacaguacuu

SEQ ID NO: 2656813 - RNA, 19 nt, Homo sapiens
  misc_RNA (1)...(19): siRNA sense strand
cgacaagugaccuggagau

SEQ ID NO: 2656814 - RNA, 19 nt, Homo sapiens
  misc_RNA (1)...(19): siRNA sense strand
gcaaauggacugucggagu

SEQ ID NO: 2656815 - RNA, 19 nt, Homo sapiens
  misc_RNA (1)...(19): siRNA sense strand
gaggagacugugaaaggaa

SEQ ID NO: 2656816 - RNA, 19 nt, Homo sapiens
  misc_RNA (1)...(19): siRNA sense strand
acacaaagagaccagcaaa

SEQ ID NO: 2656817 - RNA, 19 nt, Homo sapiens
  misc_RNA (1)...(19): siRNA sense strand
cugaacaaccuuccaguaa

SEQ ID NO: 2656818 - RNA, 19 nt, Homo sapiens
  misc_RNA (1)...(19): siRNA sense strand
guaucaaagcugaggccga

SEQ ID NO: 2656819 - RNA, 19 nt, Homo sapiens
  misc_RNA (1)...(19): siRNA sense strand
aggagacugugaaaggaaa

SEQ ID NO: 2656820 - RNA, 19 nt, Homo sapiens
  misc_RNA (1)...(19): siRNA sense strand
cacaaagagaccagcaaau

SEQ ID NO: 2656821 - RNA, 19 nt, Homo sapiens
  misc_RNA (1)...(19): siRNA sense strand
acucuauguugguaaagaa

SEQ ID NO: 2656822 - RNA, 19 nt, Homo sapiens
  misc_RNA (1)...(19): siRNA sense strand
ccucaaugccagcggacga

SEQ ID NO: 2656823 - RNA, 19 nt, Homo sapiens
  misc_RNA (1)...(19): siRNA sense strand
caacaagaaugaagggcug

SEQ ID NO: 2656824 - RNA, 19 nt, Homo sapiens
  misc_RNA (1)...(19): siRNA sense strand
gugaaaaggaguaaaacuu

SEQ ID NO: 2656825 - RNA, 19 nt, Homo sapiens
  misc_RNA (1)...(19): siRNA sense strand
ugguaaagaaggaagagga

SEQ ID NO: 2656826 - RNA, 19 nt, Homo sapiens
  misc_RNA (1)...(19): siRNA sense strand
gaguagugacagagccaga

SEQ ID NO: 2656827 - RNA, 19 nt, Homo sapiens
  misc_RNA (1)...(19): siRNA sense strand
aagcgaaagcuaaaggaca

SEQ ID NO: 2656828 - RNA, 19 nt, Homo sapiens
  misc_RNA (1)...(19): siRNA sense strand
gggagagaagagacagaga

SEQ ID NO: 2656829 - RNA, 19 nt, Homo sapiens
  misc_RNA (1)...(19): siRNA sense strand
gcuaauaaaucucugccuu

SEQ ID NO: 2656830 - RNA, 19 nt, Homo sapiens
  misc_RNA (1)...(19): siRNA sense strand
ugggcaaggaggaaacuaa

SEQ ID NO: 2656831 - RNA, 19 nt, Homo sapiens
  misc_RNA (1)...(19): siRNA sense strand
uuaaggaggcuguagaaau

SEQ ID NO: 2656832 - RNA, 19 nt, Homo sapiens
  misc_RNA (1)...(19): siRNA sense strand
ggaagaugucagggagaga

SEQ ID NO: 2656833 - RNA, 19 nt, Homo sapiens
  misc_RNA (1)...(19): siRNA sense strand
ggaaaucgggguuggaaau

SEQ ID NO: 2656834 - RNA, 19 nt, Homo sapiens
  misc_RNA (1)...(19): siRNA sense strand
ccaaacagcaauaguacca

SEQ ID NO: 2656835 - RNA, 19 nt, Homo sapiens
  misc_RNA (1)...(19): siRNA sense strand
aagacaaggcagagcaguu

SEQ ID NO: 2656836 - RNA, 19 nt, Homo sapiens
  misc_RNA (1)...(19): siRNA sense strand
agaacuugauagagagaag

SEQ ID NO: 2656837 - RNA, 19 nt, Homo sapiens
  misc_RNA (1)...(19): siRNA sense strand
aggacaaggacaagaagaa

SEQ ID NO: 2656838 - RNA, 19 nt, Homo sapiens
  misc_RNA (1)...(19): siRNA sense strand
gaggaagagaugaggcaga

SEQ ID NO: 2656839 - RNA, 19 nt, Homo sapiens
  misc_RNA (1)...(19): siRNA sense strand
cugaaaggaagcagaugaa

SEQ ID NO: 2656840 - RNA, 19 nt, Homo sapiens
  misc_RNA (1)...(19): siRNA sense strand
cagaugaaucccagccuaa

SEQ ID NO: 2656841 - RNA, 19 nt, Homo sapiens
  misc_RNA (1)...(19): siRNA sense strand
gaguggugcagguggagaa

SEQ ID NO: 2656842 - RNA, 19 nt, Homo sapiens
  misc_RNA (1)...(19): siRNA sense strand
agguggagaaugagaauca

SEQ ID NO: 2656843 - RNA, 19 nt, Homo sapiens
  misc_RNA (1)...(19): siRNA sense strand
agcgcaagguggaggaaaa

SEQ ID NO: 2656844 - RNA, 19 nt, Homo sapiens
  misc_RNA (1)...(19): siRNA sense strand
aggcuguugcagagauuaa

SEQ ID NO: 2656845 - RNA, 19 nt, Homo sapiens
  misc_RNA (1)...(19): siRNA sense strand
ggguccaccaggaggagaa

SEQ ID NO: 2656846 - RNA, 19 nt, Homo sapiens
  misc_RNA (1)...(19): siRNA sense strand
uccacaaguucaagaucaa

SEQ ID NO: 2656847 - RNA, 19 nt, Homo sapiens
  misc_RNA (1)...(19): siRNA sense strand
gaaaggaagcagaugaauc

SEQ ID NO: 2656848 - RNA, 19 nt, Homo sapiens
  misc_RNA (1)...(19): siRNA sense strand
agauuaacgcagucaugaa

SEQ ID NO: 2656849 - RNA, 19 nt, Homo sapiens
  misc_RNA (1)...(19): siRNA sense strand
gagaugggcuuucaggaca

SEQ ID NO: 2656850 - RNA, 19 nt, Homo sapiens
  misc_RNA (1)...(19): siRNA sense strand
agaggaaggaggaagagau

SEQ ID NO: 2656851 - RNA, 19 nt, Homo sapiens
  misc_RNA (1)...(19): siRNA sense strand
cagaucagauauaggagca

SEQ ID NO: 2656852 - RNA, 19 nt, Homo sapiens
  misc_RNA (1)...(19): siRNA sense strand
ugggcgaguuggucagcaa

SEQ ID NO: 2656853 - RNA, 19 nt, Homo sapiens
  misc_RNA (1)...(19): siRNA sense strand
gcagaugaaucccagccua

SEQ ID NO: 2656854 - RNA, 19 nt, Homo sapiens
  misc_RNA (1)...(19): siRNA sense strand
ucaacaaagugaaggagac

SEQ ID NO: 2656855 - RNA, 19 nt, Homo sapiens
  misc_RNA (1)...(19): siRNA sense strand
gaugcgacguggagggaag

SEQ ID NO: 2656856 - RNA, 19 nt, Homo sapiens
  misc_RNA (1)...(19): siRNA sense strand
aggugaagguggggaacaa

SEQ ID NO: 2656857 - RNA, 19 nt, Homo sapiens
  misc_RNA (1)...(19): siRNA sense strand
gggugaacauggaagaccu

SEQ ID NO: 2656858 - RNA, 19 nt, Homo sapiens
  misc_RNA (1)...(19): siRNA sense strand
aguuggaggagaugggcuu

SEQ ID NO: 2656859 - RNA, 19 nt, Homo sapiens
  misc_RNA (1)...(19): siRNA sense strand
aggccaagaggaaggaguu

SEQ ID NO: 2656860 - RNA, 19 nt, Homo sapiens
  misc_RNA (1)...(19): siRNA sense strand
aggaggaagagaugaggca

SEQ ID NO: 2656861 - RNA, 19 nt, Homo sapiens
  misc_RNA (1)...(19): siRNA sense strand
ugaaggagaaggaaaggga

SEQ ID NO: 2656862 - RNA, 19 nt, Homo sapiens
  misc_RNA (1)...(19): siRNA sense strand
ccaagacacccgcagacua

SEQ ID NO: 2656863 - RNA, 19 nt, Homo sapiens
  misc_RNA (1)...(19): siRNA sense strand
aggagaagcgcaaggugga

SEQ ID NO: 2656864 - RNA, 19 nt, Homo sapiens
  misc_RNA (1)...(19): siRNA sense strand
aaacuagacagcaagguga

SEQ ID NO: 2656865 - RNA, 19 nt, Homo sapiens
  misc_RNA (1)...(19): siRNA sense strand
ggaacaagcugguccgagc

SEQ ID NO: 2656866 - RNA, 19 nt, Homo sapiens
  misc_RNA (1)...(19): siRNA sense strand
ggaaagaggaucaccguca

SEQ ID NO: 2656867 - RNA, 19 nt, Homo sapiens
  misc_RNA (1)...(19): siRNA sense strand
acuuagaugcagauggcaa

SEQ ID NO: 2656868 - RNA, 19 nt, Homo sapiens
  misc_RNA (1)...(19): siRNA sense strand
cacaagaagagaagggcuu

SEQ ID NO: 2656869 - RNA, 19 nt, Homo sapiens
  misc_RNA (1)...(19): siRNA sense strand
cacagaaucaugagggaca

SEQ ID NO: 2656870 - RNA, 19 nt, Homo sapiens
  misc_RNA (1)...(19): siRNA sense strand
gcagaguccuuguggucga

SEQ ID NO: 2656871 - RNA, 19 nt, Homo sapiens
  misc_RNA (1)...(19): siRNA sense strand
uugaagacucagcuagaaa

SEQ ID NO: 2656872 - RNA, 19 nt, Homo sapiens
  misc_RNA (1)...(19): siRNA sense strand
gugugaggugucagguaua

SEQ ID NO: 2656873 - RNA, 19 nt, Homo sapiens
  misc_RNA (1)...(19): siRNA sense strand
augaaguggguguggauga

SEQ ID NO: 2656874 - RNA, 19 nt, Homo sapiens
  misc_RNA (1)...(19): siRNA sense strand
ugaagaaaucuguccucaa

SEQ ID NO: 2656875 - RNA, 19 nt, Homo sapiens
  misc_RNA (1)...(19): siRNA sense strand
gugucuauccagagagcca

SEQ ID NO: 2656876 - RNA, 19 nt, Homo sapiens
  misc_RNA (1)...(19): siRNA sense strand
cuuugaagucacaagaaga

SEQ ID NO: 2656877 - RNA, 19 nt, Homo sapiens
  misc_RNA (1)...(19): siRNA sense strand
cgaccaagucuccagguga

SEQ ID NO: 2656878 - RNA, 19 nt, Homo sapiens
  misc_RNA (1)...(19): siRNA sense strand
ggugugggugggugaggua

SEQ ID NO: 2656879 - RNA, 19 nt, Homo sapiens
  misc_RNA (1)...(19): siRNA sense strand
cuuagaugcagauggcaau

SEQ ID NO: 2656880 - RNA, 19 nt, Homo sapiens
  misc_RNA (1)...(19): siRNA sense strand
ccaagaaggagacagcaga

SEQ ID NO: 2656881 - RNA, 19 nt, Homo sapiens
  misc_RNA (1)...(19): siRNA sense strand
ugggcaugcugaagaacuu

SEQ ID NO: 2656882 - RNA, 19 nt, Homo sapiens
  misc_RNA (1)...(19): siRNA sense strand
cugaagaacuuaaaggagc

SEQ ID NO: 2656883 - RNA, 19 nt, Homo sapiens
  misc_RNA (1)...(19): siRNA sense strand
cuucauagucagugcugca

SEQ ID NO: 2656884 - RNA, 19 nt, Homo sapiens
  misc_RNA (1)...(19): siRNA sense strand
cugaaagcaaucaauacaa

SEQ ID NO: 2656885 - RNA, 19 nt, Homo sapiens
  misc_RNA (1)...(19): siRNA sense strand
guucagggacuuagaugca

SEQ ID NO: 2656886 - RNA, 19 nt, Homo sapiens
  misc_RNA (1)...(19): siRNA sense strand
aggugggcaugcugaagaa

SEQ ID NO: 2656887 - RNA, 19 nt, Homo sapiens
  misc_RNA (1)...(19): siRNA sense strand
cggugugaggugucaggua

SEQ ID NO: 2656888 - RNA, 19 nt, Homo sapiens
  misc_RNA (1)...(19): siRNA sense strand
ccugaaaccacgagaggaa

SEQ ID NO: 2656889 - RNA, 19 nt, Homo sapiens
  misc_RNA (1)...(19): siRNA sense strand
gggauggauuagaggcaau

SEQ ID NO: 2656890 - RNA, 19 nt, Homo sapiens
  misc_RNA (1)...(19): siRNA sense strand
uuucaaagacuuagugcaa

SEQ ID NO: 2656891 - RNA, 19 nt, Homo sapiens
  misc_RNA (1)...(19): siRNA sense strand
gaaccaaaccacaggucau

SEQ ID NO: 2656892 - RNA, 19 nt, Homo sapiens
  misc_RNA (1)...(19): siRNA sense strand
cagaagaccagaaguucaa

SEQ ID NO: 2656893 - RNA, 19 nt, Homo sapiens
  misc_RNA (1)...(19): siRNA sense strand
aagaagaauucguguucau

SEQ ID NO: 2656894 - RNA, 19 nt, Homo sapiens
  misc_RNA (1)...(19): siRNA sense strand
caguccaaguacagaaauu

SEQ ID NO: 2656895 - RNA, 19 nt, Homo sapiens
  misc_RNA (1)...(19): siRNA sense strand
agaaauuacagaaggaacu

SEQ ID NO: 2656896 - RNA, 19 nt, Homo sapiens
  misc_RNA (1)...(19): siRNA sense strand
ggagguggcuuauuggcaa

SEQ ID NO: 2656897 - RNA, 19 nt, Homo sapiens
  misc_RNA (1)...(19): siRNA sense strand
ccgaaguguuggauauuca

SEQ ID NO: 2656898 - RNA, 19 nt, Homo sapiens
  misc_RNA (1)...(19): siRNA sense strand
cccaacaguucaagugcaa

SEQ ID NO: 2656899 - RNA, 19 nt, Homo sapiens
  misc_RNA (1)...(19): siRNA sense strand
agucagugagccaaggaua

SEQ ID NO: 2656900 - RNA, 19 nt, Homo sapiens
  misc_RNA (1)...(19): siRNA sense strand
uguaauaagggaugagagu

SEQ ID NO: 2656901 - RNA, 19 nt, Homo sapiens
  misc_RNA (1)...(19): siRNA sense strand
gaagauuggcuuugaggca

SEQ ID NO: 2656902 - RNA, 19 nt, Homo sapiens
  misc_RNA (1)...(19): siRNA sense strand
ugaccagaguuuauggaga

SEQ ID NO: 2656903 - RNA, 19 nt, Homo sapiens
  misc_RNA (1)...(19): siRNA sense strand
ugcuaugugucaagugaaa

SEQ ID NO: 2656904 - RNA, 19 nt, Homo sapiens
  misc_RNA (1)...(19): siRNA sense strand
gguuguauuucucgguauu

SEQ ID NO: 2656905 - RNA, 19 nt, Homo sapiens
  misc_RNA (1)...(19): siRNA sense strand
caacaguucaagugcaaga

SEQ ID NO: 2656906 - RNA, 19 nt, Homo sapiens
  misc_RNA (1)...(19): siRNA sense strand
uggcaacacuagaacaaaa

SEQ ID NO: 2656907 - RNA, 19 nt, Homo sapiens
  misc_RNA (1)...(19): siRNA sense strand
aaguaaagagcucgugcaa

SEQ ID NO: 2656908 - RNA, 19 nt, Homo sapiens
  misc_RNA (1)...(19): siRNA sense strand
agcaaaggcgaaagaagaa

SEQ ID NO: 2656909 - RNA, 19 nt, Homo sapiens
  misc_RNA (1)...(19): siRNA sense strand
gggucuaagaguugucaau

SEQ ID NO: 2656910 - RNA, 19 nt, Homo sapiens
  misc_RNA (1)...(19): siRNA sense strand
augaagacauccagaaacu

SEQ ID NO: 2656911 - RNA, 19 nt, Homo sapiens
  misc_RNA (1)...(19): siRNA sense strand
aaacaugauagaagacaga

SEQ ID NO: 2656912 - RNA, 19 nt, Homo sapiens
  misc_RNA (1)...(19): siRNA sense strand
caagaagguauuacaucaa

SEQ ID NO: 2656913 - RNA, 19 nt, Homo sapiens
  misc_RNA (1)...(19): siRNA sense strand
cgucagcuuucuugaucaa

SEQ ID NO: 2656914 - RNA, 19 nt, Homo sapiens
  misc_RNA (1)...(19): siRNA sense strand
cuucauaacauuugacagu

SEQ ID NO: 2656915 - RNA, 19 nt, Homo sapiens
  misc_RNA (1)...(19): siRNA sense strand
cacaagagucagugagcca

SEQ ID NO: 2656916 - RNA, 19 nt, Homo sapiens
  misc_RNA (1)...(19): siRNA sense strand
uggauuaagucuacaacca

SEQ ID NO: 2656917 - RNA, 19 nt, Homo sapiens
  misc_RNA (1)...(19): siRNA sense strand
gaugaaaaguaaccagaau

SEQ ID NO: 2656918 - RNA, 19 nt, Homo sapiens
  misc_RNA (1)...(19): siRNA sense strand
caaauuugcaugaagacau

SEQ ID NO: 2656919 - RNA, 19 nt, Homo sapiens
  misc_RNA (1)...(19): siRNA sense strand
ucgggaugcucuagugaau

SEQ ID NO: 2656920 - RNA, 19 nt, Homo sapiens
  misc_RNA (1)...(19): siRNA sense strand
ugccagaguuuguuagaca

SEQ ID NO: 2656921 - RNA, 19 nt, Homo sapiens
  misc_RNA (1)...(19): siRNA sense strand
gugcaagauuuacugaaaa

SEQ ID NO: 2656922 - RNA, 19 nt, Homo sapiens
  misc_RNA (1)...(19): siRNA sense strand
uuucaggguuauuggccaa

SEQ ID NO: 2656923 - RNA, 19 nt, Homo sapiens
  misc_RNA (1)...(19): siRNA sense strand
cagaaugggcaggaagaau

SEQ ID NO: 2656924 - RNA, 19 nt, Homo sapiens
  misc_RNA (1)...(19): siRNA sense strand
cugucaaccaagaagguau

SEQ ID NO: 2656925 - RNA, 19 nt, Homo sapiens
  misc_RNA (1)...(19): siRNA sense strand
ccuggcaacacuagaacaa

SEQ ID NO: 2656926 - RNA, 19 nt, Homo sapiens
  misc_RNA (1)...(19): siRNA sense strand
aaaugaaaguaaagagcuc

SEQ ID NO: 2656927 - RNA, 19 nt, Homo sapiens
  misc_RNA (1)...(19): siRNA sense strand
acagaaggaacuacagaga

SEQ ID NO: 2656928 - RNA, 19 nt, Homo sapiens
  misc_RNA (1)...(19): siRNA sense strand
cauuuaaccacaagcauga

SEQ ID NO: 2656929 - RNA, 19 nt, Homo sapiens
  misc_RNA (1)...(19): siRNA sense strand
aagcaaacuuccuucaaaa

SEQ ID NO: 2656930 - RNA, 19 nt, Homo sapiens
  misc_RNA (1)...(19): siRNA sense strand
agucaaugauguuccugaa

SEQ ID NO: 2656931 - RNA, 19 nt, Homo sapiens
  misc_RNA (1)...(19): siRNA sense strand
ugucaguggaagagagucu

SEQ ID NO: 2656932 - RNA, 19 nt, Homo sapiens
  misc_RNA (1)...(19): siRNA sense strand
aaaugcacgucuagaugaa

SEQ ID NO: 2656933 - RNA, 19 nt, Homo sapiens
  misc_RNA (1)...(19): siRNA sense strand
auagaagacagaacagaau

SEQ ID NO: 2656934 - RNA, 19 nt, Homo sapiens
  misc_RNA (1)...(19): siRNA sense strand
ccauuguccucgugcauca

SEQ ID NO: 2656935 - RNA, 19 nt, Homo sapiens
  misc_RNA (1)...(19): siRNA sense strand
aaacagaaaucauuccaga

SEQ ID NO: 2656936 - RNA, 19 nt, Homo sapiens
  misc_RNA (1)...(19): siRNA sense strand
acagaagaccagaaguuca

SEQ ID NO: 2656937 - RNA, 19 nt, Homo sapiens
  misc_RNA (1)...(19): siRNA sense strand
ggguuguauuucucgguau

SEQ ID NO: 2656938 - RNA, 19 nt, Homo sapiens
  misc_RNA (1)...(19): siRNA sense strand
ccucauggaugcaggcucu

SEQ ID NO: 2656939 - RNA, 19 nt, Homo sapiens
  misc_RNA (1)...(19): siRNA sense strand
ucaaauaccaauaacggau

SEQ ID NO: 2656940 - RNA, 19 nt, Homo sapiens
  misc_RNA (1)...(19): siRNA sense strand
cgacgagauugaaggaggu

SEQ ID NO: 2656941 - RNA, 19 nt, Homo sapiens
  misc_RNA (1)...(19): siRNA sense strand
cuuagagagcagagaccau

SEQ ID NO: 2656942 - RNA, 19 nt, Homo sapiens
  misc_RNA (1)...(19): siRNA sense strand
ucuuggagcugauguucaa

SEQ ID NO: 2656943 - RNA, 19 nt, Homo sapiens
  misc_RNA (1)...(19): siRNA sense strand
caucaauuccacagccuau

SEQ ID NO: 2656944 - RNA, 19 nt, Homo sapiens
  misc_RNA (1)...(19): siRNA sense strand
acuuaauggcaaagagaau

SEQ ID NO: 2656945 - RNA, 19 nt, Homo sapiens
  misc_RNA (1)...(19): siRNA sense strand
uaagaaagccucagggaca

SEQ ID NO: 2656946 - RNA, 19 nt, Homo sapiens
  misc_RNA (1)...(19): siRNA sense strand
uggccaaggaagaggagaa

SEQ ID NO: 2656947 - RNA, 19 nt, Homo sapiens
  misc_RNA (1)...(19): siRNA sense strand
aggaagaggagaaguuaca

SEQ ID NO: 2656948 - RNA, 19 nt, Homo sapiens
  misc_RNA (1)...(19): siRNA sense strand
aagaagaguuccaggcagu

SEQ ID NO: 2656949 - RNA, 19 nt, Homo sapiens
  misc_RNA (1)...(19): siRNA sense strand
ucuccagugucaagagcaa

SEQ ID NO: 2656950 - RNA, 19 nt, Homo sapiens
  misc_RNA (1)...(19): siRNA sense strand
agaaagagaagcuggccuu

SEQ ID NO: 2656951 - RNA, 19 nt, Homo sapiens
  misc_RNA (1)...(19): siRNA sense strand
ccaagguccuccuggccaa

SEQ ID NO: 2656952 - RNA, 19 nt, Homo sapiens
  misc_RNA (1)...(19): siRNA sense strand
ggucaggaucugugugucu

SEQ ID NO: 2656953 - RNA, 19 nt, Homo sapiens
  misc_RNA (1)...(19): siRNA sense strand
agauuaaagaguugcagca

SEQ ID NO: 2656954 - RNA, 19 nt, Homo sapiens
  misc_RNA (1)...(19): siRNA sense strand
cccaagaaggagagggaaa

SEQ ID NO: 2656955 - RNA, 19 nt, Homo sapiens
  misc_RNA (1)...(19): siRNA sense strand
agguauauccgaugugcaa

SEQ ID NO: 2656956 - RNA, 19 nt, Homo sapiens
  misc_RNA (1)...(19): siRNA sense strand
ccuaguaagucgagcugga

SEQ ID NO: 2656957 - RNA, 19 nt, Homo sapiens
  misc_RNA (1)...(19): siRNA sense strand
cuuuauugaugguggggaa

SEQ ID NO: 2656958 - RNA, 19 nt, Homo sapiens
  misc_RNA (1)...(19): siRNA sense strand
uagagaaaccuaugcguga

SEQ ID NO: 2656959 - RNA, 19 nt, Homo sapiens
  misc_RNA (1)...(19): siRNA sense strand
gcgacaugugcgcggacaa

SEQ ID NO: 2656960 - RNA, 19 nt, Homo sapiens
  misc_RNA (1)...(19): siRNA sense strand
cccaaugagugcaagccaa

SEQ ID NO: 2656961 - RNA, 19 nt, Homo sapiens
  misc_RNA (1)...(19): siRNA sense strand
ucgagcuggaugagguaua

SEQ ID NO: 2656962 - RNA, 19 nt, Homo sapiens
  misc_RNA (1)...(19): siRNA sense strand
aagcaaaagcagaugacuu

SEQ ID NO: 2656963 - RNA, 19 nt, Homo sapiens
  misc_RNA (1)...(19): siRNA sense strand
aguaagucgagcuggauga

SEQ ID NO: 2656964 - RNA, 19 nt, Homo sapiens
  misc_RNA (1)...(19): siRNA sense strand
ugguacaaugacagcuaua

SEQ ID NO: 2656965 - RNA, 19 nt, Homo sapiens
  misc_RNA (1)...(19): siRNA sense strand
cgauggaguugcuggaggu

SEQ ID NO: 2656966 - RNA, 19 nt, Homo sapiens
  misc_RNA (1)...(19): siRNA sense strand
cagaaucaaucgaagugga

SEQ ID NO: 2656967 - RNA, 19 nt, Homo sapiens
  misc_RNA (1)...(19): siRNA sense strand
agaggaaggaagagauuuc

SEQ ID NO: 2656968 - RNA, 19 nt, Homo sapiens
  misc_RNA (1)...(19): siRNA sense strand
cuacaguggaaauaaggau

SEQ ID NO: 2656969 - RNA, 19 nt, Homo sapiens
  misc_RNA (1)...(19): siRNA sense strand
acuauuaccuguauggcca

SEQ ID NO: 2656970 - RNA, 19 nt, Homo sapiens
  misc_RNA (1)...(19): siRNA sense strand
gggagagagaggaggacaa

SEQ ID NO: 2656971 - RNA, 19 nt, Homo sapiens
  misc_RNA (1)...(19): siRNA sense strand
ccagagaggaggugcggaa

SEQ ID NO: 2656972 - RNA, 19 nt, Homo sapiens
  misc_RNA (1)...(19): siRNA sense strand
gugagagagaggaggaaga

SEQ ID NO: 2656973 - RNA, 19 nt, Homo sapiens
  misc_RNA (1)...(19): siRNA sense strand
ugucggaagaugaggagaa

SEQ ID NO: 2656974 - RNA, 19 nt, Homo sapiens
  misc_RNA (1)...(19): siRNA sense strand
gguucaagcuagugcagga

SEQ ID NO: 2656975 - RNA, 19 nt, Homo sapiens
  misc_RNA (1)...(19): siRNA sense strand
gcgaagcaggcaugggcaa

SEQ ID NO: 2656976 - RNA, 19 nt, Homo sapiens
  misc_RNA (1)...(19): siRNA sense strand
gggaagagcaagaagaggu

SEQ ID NO: 2656977 - RNA, 19 nt, Homo sapiens
  misc_RNA (1)...(19): siRNA sense strand
cgcagaaacaagaaggaga

SEQ ID NO: 2656978 - RNA, 19 nt, Homo sapiens
  misc_RNA (1)...(19): siRNA sense strand
aggaggaacugaaugccaa

SEQ ID NO: 2656979 - RNA, 19 nt, Homo sapiens
  misc_RNA (1)...(19): siRNA sense strand
uggagagcguggaggagau

SEQ ID NO: 2656980 - RNA, 19 nt, Homo sapiens
  misc_RNA (1)...(19): siRNA sense strand
ccgcggaagccaaggaguu

SEQ ID NO: 2656981 - RNA, 19 nt, Homo sapiens
  misc_RNA (1)...(19): siRNA sense strand
gaaccuacacggaggagga

SEQ ID NO: 2656982 - RNA, 19 nt, Homo sapiens
  misc_RNA (1)...(19): siRNA sense strand
cggaagaugaggagaagcu

SEQ ID NO: 2656983 - RNA, 19 nt, Homo sapiens
  misc_RNA (1)...(19): siRNA sense strand
agcuagugcaggagaagaa

SEQ ID NO: 2656984 - RNA, 19 nt, Homo sapiens
  misc_RNA (1)...(19): siRNA sense strand
ugucagaagagaagcagau

SEQ ID NO: 2656985 - RNA, 19 nt, Homo sapiens
  misc_RNA (1)...(19): siRNA sense strand
ccggguacaagaaggacaa

SEQ ID NO: 2656986 - RNA, 19 nt, Homo sapiens
  misc_RNA (1)...(19): siRNA sense strand
caaagugacaccaaggaca

SEQ ID NO: 2656987 - RNA, 19 nt, Homo sapiens
  misc_RNA (1)...(19): siRNA sense strand
ugccaaagccggaaggcga

SEQ ID NO: 2656988 - RNA, 19 nt, Homo sapiens
  misc_RNA (1)...(19): siRNA sense strand
gcaaaaggcagcucggaga

SEQ ID NO: 2656989 - RNA, 19 nt, Homo sapiens
  misc_RNA (1)...(19): siRNA sense strand
ggagacaggccaagcagga

SEQ ID NO: 2656990 - RNA, 19 nt, Homo sapiens
  misc_RNA (1)...(19): siRNA sense strand
acaagaagaagaaggccga

SEQ ID NO: 2656991 - RNA, 19 nt, Homo sapiens
  misc_RNA (1)...(19): siRNA sense strand
cgacgauguccuugagaag

SEQ ID NO: 2656992 - RNA, 19 nt, Homo sapiens
  misc_RNA (1)...(19): siRNA sense strand
gcaagaaggacgaccccaa

SEQ ID NO: 2656993 - RNA, 19 nt, Homo sapiens
  misc_RNA (1)...(19): siRNA sense strand
gcuacgagucggagcugau

SEQ ID NO: 2656994 - RNA, 19 nt, Homo sapiens
  misc_RNA (1)...(19): siRNA sense strand
aagagaagcccaaagcuga

SEQ ID NO: 2656995 - RNA, 19 nt, Homo sapiens
  misc_RNA (1)...(19): siRNA sense strand
aggugguggagcagagaga

SEQ ID NO: 2656996 - RNA, 19 nt, Homo sapiens
  misc_RNA (1)...(19): siRNA sense strand
ccuccaacaugaagacacu

SEQ ID NO: 2656997 - RNA, 19 nt, Homo sapiens
  misc_RNA (1)...(19): siRNA sense strand
caguggaagaucaccuuaa

SEQ ID NO: 2656998 - RNA, 19 nt, Homo sapiens
  misc_RNA (1)...(19): siRNA sense strand
gagaggaggacaaggaccu

SEQ ID NO: 2656999 - RNA, 19 nt, Homo sapiens
  misc_RNA (1)...(19): siRNA sense strand
ggagaaaucaccugaggag

SEQ ID NO: 2657000 - RNA, 19 nt, Homo sapiens
  misc_RNA (1)...(19): siRNA sense strand
ggugguuguuauugagaaa

SEQ ID NO: 2657001 - RNA, 19 nt, Homo sapiens
  misc_RNA (1)...(19): siRNA sense strand
ccuaaaugccgaggagaaa

SEQ ID NO: 2657002 - RNA, 19 nt, Homo sapiens
  misc_RNA (1)...(19): siRNA sense strand
ccgaaauacaacagcagaa

SEQ ID NO: 2657003 - RNA, 19 nt, Homo sapiens
  misc_RNA (1)...(19): siRNA sense strand
uggccaaauuugaagagaa

SEQ ID NO: 2657004 - RNA, 19 nt, Homo sapiens
  misc_RNA (1)...(19): siRNA sense strand
aacuaaagccaaaggacua

SEQ ID NO: 2657005 - RNA, 19 nt, Homo sapiens
  misc_RNA (1)...(19): siRNA sense strand
gcugggaagaggagaaaga

SEQ ID NO: 2657006 - RNA, 19 nt, Homo sapiens
  misc_RNA (1)...(19): siRNA sense strand
gggaagaggagaaagacca

SEQ ID NO: 2657007 - RNA, 19 nt, Homo sapiens
  misc_RNA (1)...(19): siRNA sense strand
agcaaaauguggagaagaa

SEQ ID NO: 2657008 - RNA, 19 nt, Homo sapiens
  misc_RNA (1)...(19): siRNA sense strand
uggcagagagggaaaguau

SEQ ID NO: 2657009 - RNA, 19 nt, Homo sapiens
  misc_RNA (1)...(19): siRNA sense strand
accuaaaugccgaggagaa

SEQ ID NO: 2657010 - RNA, 19 nt, Homo sapiens
  misc_RNA (1)...(19): siRNA sense strand
cugagaaggaauugggcau

SEQ ID NO: 2657011 - RNA, 19 nt, Homo sapiens
  misc_RNA (1)...(19): siRNA sense strand
gaacuaaagccaaaggacu

SEQ ID NO: 2657012 - RNA, 19 nt, Homo sapiens
  misc_RNA (1)...(19): siRNA sense strand
gggccacagaggagaaaga

SEQ ID NO: 2657013 - RNA, 19 nt, Homo sapiens
  misc_RNA (1)...(19): siRNA sense strand
agacucaggccgagcacaa

SEQ ID NO: 2657014 - RNA, 19 nt, Homo sapiens
  misc_RNA (1)...(19): siRNA sense strand
gugcuggcagagagggaaa

SEQ ID NO: 2657015 - RNA, 19 nt, Homo sapiens
  misc_RNA (1)...(19): siRNA sense strand
ggugcugggaagaggagaa

SEQ ID NO: 2657016 - RNA, 19 nt, Homo sapiens
  misc_RNA (1)...(19): siRNA sense strand
cugaggaccaagagaauga

SEQ ID NO: 2657017 - RNA, 19 nt, Homo sapiens
  misc_RNA (1)...(19): siRNA sense strand
ccugagaaugugaguaaga

SEQ ID NO: 2657018 - RNA, 19 nt, Homo sapiens
  misc_RNA (1)...(19): siRNA sense strand
aguaagaacuucagccagu

SEQ ID NO: 2657019 - RNA, 19 nt, Homo sapiens
  misc_RNA (1)...(19): siRNA sense strand
auacaacagcagaagcuaa

SEQ ID NO: 2657020 - RNA, 19 nt, Homo sapiens
  misc_RNA (1)...(19): siRNA sense strand
caaaauguggagaagaaua

SEQ ID NO: 2657021 - RNA, 19 nt, Homo sapiens
  misc_RNA (1)...(19): siRNA sense strand
aggagaaagaccagucaau

SEQ ID NO: 2657022 - RNA, 19 nt, Homo sapiens
  misc_RNA (1)...(19): siRNA sense strand
agaggaagcaugagaccau

SEQ ID NO: 2657023 - RNA, 19 nt, Homo sapiens
  misc_RNA (1)...(19): siRNA sense strand
gcuggacaaaggagugaua

SEQ ID NO: 2657024 - RNA, 19 nt, Homo sapiens
  misc_RNA (1)...(19): siRNA sense strand
ggggauggucggaggaaca

SEQ ID NO: 2657025 - RNA, 19 nt, Homo sapiens
  misc_RNA (1)...(19): siRNA sense strand
auaugauacuggcgaaaca

SEQ ID NO: 2657026 - RNA, 19 nt, Homo sapiens
  misc_RNA (1)...(19): siRNA sense strand
ggacguugccguugggaac

SEQ ID NO: 2657027 - RNA, 19 nt, Homo sapiens
  misc_RNA (1)...(19): siRNA sense strand
ccguugggaaccagaacaa

SEQ ID NO: 2657028 - RNA, 19 nt, Homo sapiens
  misc_RNA (1)...(19): siRNA sense strand
cuuuggaagugcuggcaga

SEQ ID NO: 2657029 - RNA, 19 nt, Homo sapiens
  misc_RNA (1)...(19): siRNA sense strand
accuggaacuaaagccaaa

SEQ ID NO: 2657030 - RNA, 19 nt, Homo sapiens
  misc_RNA (1)...(19): siRNA sense strand
agaacaucguuuacuacaa

SEQ ID NO: 2657031 - RNA, 19 nt, Homo sapiens
  misc_RNA (1)...(19): siRNA sense strand
gagaaaacguggaccagga

SEQ ID NO: 2657032 - RNA, 19 nt, Homo sapiens
  misc_RNA (1)...(19): siRNA sense strand
cagcagaagcuaaagugga

SEQ ID NO: 2657033 - RNA, 19 nt, Homo sapiens
  misc_RNA (1)...(19): siRNA sense strand
aaagauauucaccuggaaa

SEQ ID NO: 2657034 - RNA, 19 nt, Homo sapiens
  misc_RNA (1)...(19): siRNA sense strand
cagaagcuaaaguggaaga

SEQ ID NO: 2657035 - RNA, 19 nt, Homo sapiens
  misc_RNA (1)...(19): siRNA sense strand
ccccugagaaugugaguaa

SEQ ID NO: 2657036 - RNA, 19 nt, Homo sapiens
  misc_RNA (1)...(19): siRNA sense strand
cagaacaaagugaaguaca

SEQ ID NO: 2657037 - RNA, 19 nt, Homo sapiens
  misc_RNA (1)...(19): siRNA sense strand
acuacaaagaugacacaca

SEQ ID NO: 2657038 - RNA, 19 nt, Homo sapiens
  misc_RNA (1)...(19): siRNA sense strand
gcgacaccuuggaccuaaa

SEQ ID NO: 2657039 - RNA, 19 nt, Homo sapiens
  misc_RNA (1)...(19): siRNA sense strand
cuuaacuacuggaaagcca

SEQ ID NO: 2657040 - RNA, 19 nt, Homo sapiens
  misc_RNA (1)...(19): siRNA sense strand
aagauauucaccuggaaau

SEQ ID NO: 2657041 - RNA, 19 nt, Homo sapiens
  misc_RNA (1)...(19): siRNA sense strand
gauaagcuguccaugguga

SEQ ID NO: 2657042 - RNA, 19 nt, Homo sapiens
  misc_RNA (1)...(19): siRNA sense strand
gcacaaaggaagagaccgg

SEQ ID NO: 2657043 - RNA, 19 nt, Homo sapiens
  misc_RNA (1)...(19): siRNA sense strand
ggaacgagcccuuuggaag

SEQ ID NO: 2657044 - RNA, 19 nt, Homo sapiens
  misc_RNA (1)...(19): siRNA sense strand
gagaaugugaguaagaacu

SEQ ID NO: 2657045 - RNA, 19 nt, Homo sapiens
  misc_RNA (1)...(19): siRNA sense strand
ccuuggugcgggagcagaa

SEQ ID NO: 2657046 - RNA, 19 nt, Homo sapiens
  misc_RNA (1)...(19): siRNA sense strand
uggcgaaacaaaagauauu

SEQ ID NO: 2657047 - RNA, 19 nt, Homo sapiens
  misc_RNA (1)...(19): siRNA sense strand
agaauaaccaacuggccuu

SEQ ID NO: 2657048 - RNA, 19 nt, Homo sapiens
  misc_RNA (1)...(19): siRNA sense strand
accagaacaaagugaagua

SEQ ID NO: 2657049 - RNA, 19 nt, Homo sapiens
  misc_RNA (1)...(19): siRNA sense strand
ugucagaguaugaauuuga

SEQ ID NO: 2657050 - RNA, 19 nt, Homo sapiens
  misc_RNA (1)...(19): siRNA sense strand
uacaacagcagaagcuaaa

SEQ ID NO: 2657051 - RNA, 19 nt, Homo sapiens
  misc_RNA (1)...(19): siRNA sense strand
cagguauugacuuggagaa

SEQ ID NO: 2657052 - RNA, 19 nt, Homo sapiens
  misc_RNA (1)...(19): siRNA sense strand
ccuuugacauugcugagaa

SEQ ID NO: 2657053 - RNA, 19 nt, Homo sapiens
  misc_RNA (1)...(19): siRNA sense strand
ggaaaguauuuacagguug

SEQ ID NO: 2657054 - RNA, 19 nt, Homo sapiens
  misc_RNA (1)...(19): siRNA sense strand
cggccuacgccuacgacau

SEQ ID NO: 2657055 - RNA, 19 nt, Homo sapiens
  misc_RNA (1)...(19): siRNA sense strand
ugucuggaaaggaggccaa

SEQ ID NO: 2657056 - RNA, 19 nt, Homo sapiens
  misc_RNA (1)...(19): siRNA sense strand
gcaacaggcaagugggcaa

SEQ ID NO: 2657057 - RNA, 19 nt, Homo sapiens
  misc_RNA (1)...(19): siRNA sense strand
gagacguggucaugguuua

SEQ ID NO: 2657058 - RNA, 19 nt, Homo sapiens
  misc_RNA (1)...(19): siRNA sense strand
cagaaaaggcaguugcuaa

SEQ ID NO: 2657059 - RNA, 19 nt, Homo sapiens
  misc_RNA (1)...(19): siRNA sense strand
aggcagacgagaaggugaa

SEQ ID NO: 2657060 - RNA, 19 nt, Homo sapiens
  misc_RNA (1)...(19): siRNA sense strand
gggcaggagacguggucau

SEQ ID NO: 2657061 - RNA, 19 nt, Homo sapiens
  misc_RNA (1)...(19): siRNA sense strand
ccacagcaggcaaggacaa

SEQ ID NO: 2657062 - RNA, 19 nt, Homo sapiens
  misc_RNA (1)...(19): siRNA sense strand
gcuuaagguuugugagguc

SEQ ID NO: 2657063 - RNA, 19 nt, Homo sapiens
  misc_RNA (1)...(19): siRNA sense strand
caguauaacuacaacccau

SEQ ID NO: 2657064 - RNA, 19 nt, Homo sapiens
  misc_RNA (1)...(19): siRNA sense strand
ggagcaccguauuggaauu

SEQ ID NO: 2657065 - RNA, 19 nt, Homo sapiens
  misc_RNA (1)...(19): siRNA sense strand
gcaagaugcccaaggguuc

SEQ ID NO: 2657066 - RNA, 19 nt, Homo sapiens
  misc_RNA (1)...(19): siRNA sense strand
ccaacuucguggagcagau

SEQ ID NO: 2657067 - RNA, 19 nt, Homo sapiens
  misc_RNA (1)...(19): siRNA sense strand
uggaugaccuggagccuga

SEQ ID NO: 2657068 - RNA, 19 nt, Homo sapiens
  misc_RNA (1)...(19): siRNA sense strand
gcagaaugucacagccaca

SEQ ID NO: 2657069 - RNA, 19 nt, Homo sapiens
  misc_RNA (1)...(19): siRNA sense strand
ugauagcagcucuggacua

SEQ ID NO: 2657070 - RNA, 19 nt, Homo sapiens
  misc_RNA (1)...(19): siRNA sense strand
ccugaacagcccugggaga

SEQ ID NO: 2657071 - RNA, 19 nt, Homo sapiens
  misc_RNA (1)...(19): siRNA sense strand
gggcugugccagaugguca

SEQ ID NO: 2657072 - RNA, 19 nt, Homo sapiens
  misc_RNA (1)...(19): siRNA sense strand
ggacacagccagugaggug

SEQ ID NO: 2657073 - RNA, 19 nt, Homo sapiens
  misc_RNA (1)...(19): siRNA sense strand
ccauccaccuacagaguca

SEQ ID NO: 2657074 - RNA, 19 nt, Homo sapiens
  misc_RNA (1)...(19): siRNA sense strand
ccauggaugaccaaggauu

SEQ ID NO: 2657075 - RNA, 19 nt, Homo sapiens
  misc_RNA (1)...(19): siRNA sense strand
gcgagcugcaggagaccaa

SEQ ID NO: 2657076 - RNA, 19 nt, Homo sapiens
  misc_RNA (1)...(19): siRNA sense strand
aggacaagcagaucgaaga

SEQ ID NO: 2657077 - RNA, 19 nt, Homo sapiens
  misc_RNA (1)...(19): siRNA sense strand
acgcacggccugaagacua

SEQ ID NO: 2657078 - RNA, 19 nt, Homo sapiens
  misc_RNA (1)...(19): siRNA sense strand
ucuucauggcucaguauaa

SEQ ID NO: 2657079 - RNA, 19 nt, Homo sapiens
  misc_RNA (1)...(19): siRNA sense strand
cugcagguguauuggggaa

SEQ ID NO: 2657080 - RNA, 19 nt, Homo sapiens
  misc_RNA (1)...(19): siRNA sense strand
ggaaggagauacaggcgcu

SEQ ID NO: 2657081 - RNA, 19 nt, Homo sapiens
  misc_RNA (1)...(19): siRNA sense strand
acugauaggagguggcguu

SEQ ID NO: 2657082 - RNA, 19 nt, Homo sapiens
  misc_RNA (1)...(19): siRNA sense strand
ccuaccaggcagacgagaa

SEQ ID NO: 2657083 - RNA, 19 nt, Homo sapiens
  misc_RNA (1)...(19): siRNA sense strand
aggaugaagcucuggagga

SEQ ID NO: 2657084 - RNA, 19 nt, Homo sapiens
  misc_RNA (1)...(19): siRNA sense strand
ucuugaugaccgagagcau

SEQ ID NO: 2657085 - RNA, 19 nt, Homo sapiens
  misc_RNA (1)...(19): siRNA sense strand
gggagaaggaaaauugcua

SEQ ID NO: 2657086 - RNA, 19 nt, Homo sapiens
  misc_RNA (1)...(19): siRNA sense strand
agguggaggcugagaauag

SEQ ID NO: 2657087 - RNA, 19 nt, Homo sapiens
  misc_RNA (1)...(19): siRNA sense strand
cagccagugagguggauga

SEQ ID NO: 2657088 - RNA, 19 nt, Homo sapiens
  misc_RNA (1)...(19): siRNA sense strand
aggaggagcaggaggcacu

SEQ ID NO: 2657089 - RNA, 19 nt, Homo sapiens
  misc_RNA (1)...(19): siRNA sense strand
cccugcaagaggagaacaa

SEQ ID NO: 2657090 - RNA, 19 nt, Homo sapiens
  misc_RNA (1)...(19): siRNA sense strand
uggccaaggacaagcagau

SEQ ID NO: 2657091 - RNA, 19 nt, Homo sapiens
  misc_RNA (1)...(19): siRNA sense strand
ugcggaagguggaggcuga

SEQ ID NO: 2657092 - RNA, 19 nt, Homo sapiens
  misc_RNA (1)...(19): siRNA sense strand
ggacagggacacagccagu

SEQ ID NO: 2657093 - RNA, 19 nt, Homo sapiens
  misc_RNA (1)...(19): siRNA sense strand
aagaggagaugcagcggga

SEQ ID NO: 2657094 - RNA, 19 nt, Homo sapiens
  misc_RNA (1)...(19): siRNA sense strand
cagaggaggagcuggucuu

SEQ ID NO: 2657095 - RNA, 19 nt, Homo sapiens
  misc_RNA (1)...(19): siRNA sense strand
acgagaaggugaagcggcu

SEQ ID NO: 2657096 - RNA, 19 nt, Homo sapiens
  misc_RNA (1)...(19): siRNA sense strand
gguauaucuugaugaccga

SEQ ID NO: 2657097 - RNA, 19 nt, Homo sapiens
  misc_RNA (1)...(19): siRNA sense strand
uggccgaggagcuggugaa

SEQ ID NO: 2657098 - RNA, 19 nt, Homo sapiens
  misc_RNA (1)...(19): siRNA sense strand
ugauaaagcugaacuggcu

SEQ ID NO: 2657099 - RNA, 19 nt, Homo sapiens
  misc_RNA (1)...(19): siRNA sense strand
acgcagugucacagcccaa

SEQ ID NO: 2657100 - RNA, 19 nt, Homo sapiens
  misc_RNA (1)...(19): siRNA sense strand
gaggagaugcagcgggaac

SEQ ID NO: 2657101 - RNA, 19 nt, Homo sapiens
  misc_RNA (1)...(19): siRNA sense strand
uggcccaccucgaggacuu

SEQ ID NO: 2657102 - RNA, 19 nt, Homo sapiens
  misc_RNA (1)...(19): siRNA sense strand
gugaaaagcaggaagaaaa

SEQ ID NO: 2657103 - RNA, 19 nt, Homo sapiens
  misc_RNA (1)...(19): siRNA sense strand
ggaagaaacugcaggagga

SEQ ID NO: 2657104 - RNA, 19 nt, Homo sapiens
  misc_RNA (1)...(19): siRNA sense strand
guaaagcaaugaagggcaa

SEQ ID NO: 2657105 - RNA, 19 nt, Homo sapiens
  misc_RNA (1)...(19): siRNA sense strand
ugcuaaaggaagagaggaa

SEQ ID NO: 2657106 - RNA, 19 nt, Homo sapiens
  misc_RNA (1)...(19): siRNA sense strand
aggucaaggcaguggaaga

SEQ ID NO: 2657107 - RNA, 19 nt, Homo sapiens
  misc_RNA (1)...(19): siRNA sense strand
aggaagagaagcuggauga

SEQ ID NO: 2657108 - RNA, 19 nt, Homo sapiens
  misc_RNA (1)...(19): siRNA sense strand
aggaauugucgaaaguaua

SEQ ID NO: 2657109 - RNA, 19 nt, Homo sapiens
  misc_RNA (1)...(19): siRNA sense strand
aggaagaaggccuggguca

SEQ ID NO: 2657110 - RNA, 19 nt, Homo sapiens
  misc_RNA (1)...(19): siRNA sense strand
gaucgagcgaagaggagaa

SEQ ID NO: 2657111 - RNA, 19 nt, Homo sapiens
  misc_RNA (1)...(19): siRNA sense strand
caggaaauguacagaccau

SEQ ID NO: 2657112 - RNA, 19 nt, Homo sapiens
  misc_RNA (1)...(19): siRNA sense strand
aggagaaggucaaggcagu

SEQ ID NO: 2657113 - RNA, 19 nt, Homo sapiens
  misc_RNA (1)...(19): siRNA sense strand
gcgaagaggagaaagcuca

SEQ ID NO: 2657114 - RNA, 19 nt, Homo sapiens
  misc_RNA (1)...(19): siRNA sense strand
gugccagacagaagaggaa

SEQ ID NO: 2657115 - RNA, 19 nt, Homo sapiens
  misc_RNA (1)...(19): siRNA sense strand
guguggagccauuggguga

SEQ ID NO: 2657116 - RNA, 19 nt, Homo sapiens
  misc_RNA (1)...(19): siRNA sense strand
aggagauucuguugaguga

SEQ ID NO: 2657117 - RNA, 19 nt, Homo sapiens
  misc_RNA (1)...(19): siRNA sense strand
cagaagaggaauggagaca

SEQ ID NO: 2657118 - RNA, 19 nt, Homo sapiens
  misc_RNA (1)...(19): siRNA sense strand
guaaaugacaugaagacca

SEQ ID NO: 2657119 - RNA, 19 nt, Homo sapiens
  misc_RNA (1)...(19): siRNA sense strand
ccagaaggguccagcagga

SEQ ID NO: 2657120 - RNA, 19 nt, Homo sapiens
  misc_RNA (1)...(19): siRNA sense strand
caccagaggagaagcaaau

SEQ ID NO: 2657121 - RNA, 19 nt, Homo sapiens
  misc_RNA (1)...(19): siRNA sense strand
aggaggaagaagagcguca

SEQ ID NO: 2657122 - RNA, 19 nt, Homo sapiens
  misc_RNA (1)...(19): siRNA sense strand
gcuaaaggaagagaggaaa

SEQ ID NO: 2657123 - RNA, 19 nt, Homo sapiens
  misc_RNA (1)...(19): siRNA sense strand
agaagaaggagcaggagca

SEQ ID NO: 2657124 - RNA, 19 nt, Homo sapiens
  misc_RNA (1)...(19): siRNA sense strand
agaaggagcaggagcagau

SEQ ID NO: 2657125 - RNA, 19 nt, Homo sapiens
  misc_RNA (1)...(19): siRNA sense strand
acagcuaccuagaggacau

SEQ ID NO: 2657126 - RNA, 19 nt, Homo sapiens
  misc_RNA (1)...(19): siRNA sense strand
uggggaaaguagugaguau

SEQ ID NO: 2657127 - RNA, 19 nt, Homo sapiens
  misc_RNA (1)...(19): siRNA sense strand
aggaaugggauuugguuca

SEQ ID NO: 2657128 - RNA, 19 nt, Homo sapiens
  misc_RNA (1)...(19): siRNA sense strand
gagcagggaaagugaagga

SEQ ID NO: 2657129 - RNA, 19 nt, Homo sapiens
  misc_RNA (1)...(19): siRNA sense strand
guauaaaguucuagacgug

SEQ ID NO: 2657130 - RNA, 19 nt, Homo sapiens
  misc_RNA (1)...(19): siRNA sense strand
agauggagacacagaugaa

SEQ ID NO: 2657131 - RNA, 19 nt, Homo sapiens
  misc_RNA (1)...(19): siRNA sense strand
ggaugaaaagcgggagaaa

SEQ ID NO: 2657132 - RNA, 19 nt, Homo sapiens
  misc_RNA (1)...(19): siRNA sense strand
gaacggagucauuggggaa

SEQ ID NO: 2657133 - RNA, 19 nt, Homo sapiens
  misc_RNA (1)...(19): siRNA sense strand
ucgaagaagggaagcccaa

SEQ ID NO: 2657134 - RNA, 19 nt, Homo sapiens
  misc_RNA (1)...(19): siRNA sense strand
aguuggaggagaaggucaa

SEQ ID NO: 2657135 - RNA, 19 nt, Homo sapiens
  misc_RNA (1)...(19): siRNA sense strand
gagaaagcucagggaagaa

SEQ ID NO: 2657136 - RNA, 19 nt, Homo sapiens
  misc_RNA (1)...(19): siRNA sense strand
gggacagaacgcagcgaca

SEQ ID NO: 2657137 - RNA, 19 nt, Homo sapiens
  misc_RNA (1)...(19): siRNA sense strand
agaaacugcaggaggagau

SEQ ID NO: 2657138 - RNA, 19 nt, Homo sapiens
  misc_RNA (1)...(19): siRNA sense strand
guaaaggcucacaaggauu

SEQ ID NO: 2657139 - RNA, 19 nt, Homo sapiens
  misc_RNA (1)...(19): siRNA sense strand
ucugcaaggcugugagaca

SEQ ID NO: 2657140 - RNA, 19 nt, Homo sapiens
  misc_RNA (1)...(19): siRNA sense strand
cuggaugaaucuauggaga

SEQ ID NO: 2657141 - RNA, 19 nt, Homo sapiens
  misc_RNA (1)...(19): siRNA sense strand
aggagaaagcucagggaag

SEQ ID NO: 2657142 - RNA, 19 nt, Homo sapiens
  misc_RNA (1)...(19): siRNA sense strand
ccagaugaggccagcagua

SEQ ID NO: 2657143 - RNA, 19 nt, Homo sapiens
  misc_RNA (1)...(19): siRNA sense strand
ucuuggaaccuguggauga

SEQ ID NO: 2657144 - RNA, 19 nt, Homo sapiens
  misc_RNA (1)...(19): siRNA sense strand
acaccagaggagaagcaaa

SEQ ID NO: 2657145 - RNA, 19 nt, Homo sapiens
  misc_RNA (1)...(19): siRNA sense strand
cugugaugauggaacaaau

SEQ ID NO: 2657146 - RNA, 19 nt, Homo sapiens
  misc_RNA (1)...(19): siRNA sense strand
gagacacagaugaagaauu

SEQ ID NO: 2657147 - RNA, 19 nt, Homo sapiens
  misc_RNA (1)...(19): siRNA sense strand
gcagggaaagugaaggaca

SEQ ID NO: 2657148 - RNA, 19 nt, Homo sapiens
  misc_RNA (1)...(19): siRNA sense strand
gaugaaaagcgggagaaaa

SEQ ID NO: 2657149 - RNA, 19 nt, Homo sapiens
  misc_RNA (1)...(19): siRNA sense strand
gcgaguaucucuauggaac

SEQ ID NO: 2657150 - RNA, 19 nt, Homo sapiens
  misc_RNA (1)...(19): siRNA sense strand
gaagaaaauuccuuggcau

SEQ ID NO: 2657151 - RNA, 19 nt, Homo sapiens
  misc_RNA (1)...(19): siRNA sense strand
acagagaugacguggaguu

SEQ ID NO: 2657152 - RNA, 19 nt, Homo sapiens
  misc_RNA (1)...(19): siRNA sense strand
ugguaaaggcucacaagga

SEQ ID NO: 2657153 - RNA, 19 nt, Homo sapiens
  misc_RNA (1)...(19): siRNA sense strand
cgaaaguauaauggggaaa

SEQ ID NO: 2657154 - RNA, 19 nt, Homo sapiens
  misc_RNA (1)...(19): siRNA sense strand
ccugcauuguggugggaca

SEQ ID NO: 2657155 - RNA, 19 nt, Homo sapiens
  misc_RNA (1)...(19): siRNA sense strand
cuaaaggaagagaggaaac

SEQ ID NO: 2657156 - RNA, 19 nt, Homo sapiens
  misc_RNA (1)...(19): siRNA sense strand
ucaccacaagaaagggaaa

SEQ ID NO: 2657157 - RNA, 19 nt, Homo sapiens
  misc_RNA (1)...(19): siRNA sense strand
gcacacggguggagauccu

SEQ ID NO: 2657158 - RNA, 19 nt, Homo sapiens
  misc_RNA (1)...(19): siRNA sense strand
ggucaaggcaguggaagau

SEQ ID NO: 2657159 - RNA, 19 nt, Homo sapiens
  misc_RNA (1)...(19): siRNA sense strand
ucuuugaguuggaugauga

SEQ ID NO: 2657160 - RNA, 19 nt, Homo sapiens
  misc_RNA (1)...(19): siRNA sense strand
cccaagggugcgugagaga

SEQ ID NO: 2657161 - RNA, 19 nt, Homo sapiens
  misc_RNA (1)...(19): siRNA sense strand
gaggagaaagcucagggaa

SEQ ID NO: 2657162 - RNA, 19 nt, Homo sapiens
  misc_RNA (1)...(19): siRNA sense strand
ccaccuacgcagcagacaa

SEQ ID NO: 2657163 - RNA, 19 nt, Homo sapiens
  misc_RNA (1)...(19): siRNA sense strand
ggaugaucguccagaggaa

SEQ ID NO: 2657164 - RNA, 19 nt, Homo sapiens
  misc_RNA (1)...(19): siRNA sense strand
gcauaaaggaugaagagga

SEQ ID NO: 2657165 - RNA, 19 nt, Homo sapiens
  misc_RNA (1)...(19): siRNA sense strand
caggagaguuucagggaca

SEQ ID NO: 2657166 - RNA, 19 nt, Homo sapiens
  misc_RNA (1)...(19): siRNA sense strand
ggcaguuggcagagaaaua

SEQ ID NO: 2657167 - RNA, 19 nt, Homo sapiens
  misc_RNA (1)...(19): siRNA sense strand
ccauauagcccugaggaaa

SEQ ID NO: 2657168 - RNA, 19 nt, Homo sapiens
  misc_RNA (1)...(19): siRNA sense strand
gagauggagaauaaagaaa

SEQ ID NO: 2657169 - RNA, 19 nt, Homo sapiens
  misc_RNA (1)...(19): siRNA sense strand
gaacgaaugaucagggaga

SEQ ID NO: 2657170 - RNA, 19 nt, Homo sapiens
  misc_RNA (1)...(19): siRNA sense strand
gggagaaacugaaggcaac

SEQ ID NO: 2657171 - RNA, 19 nt, Homo sapiens
  misc_RNA (1)...(19): siRNA sense strand
agggagaaacugaaggcaa

SEQ ID NO: 2657172 - RNA, 19 nt, Homo sapiens
  misc_RNA (1)...(19): siRNA sense strand
agaagaguguagaagaaau

SEQ ID NO: 2657173 - RNA, 19 nt, Homo sapiens
  misc_RNA (1)...(19): siRNA sense strand
gugcaaaggccaagcagga

SEQ ID NO: 2657174 - RNA, 19 nt, Homo sapiens
  misc_RNA (1)...(19): siRNA sense strand
aguagaagcacuaagagaa

SEQ ID NO: 2657175 - RNA, 19 nt, Homo sapiens
  misc_RNA (1)...(19): siRNA sense strand
agcacuaagagaagagaua

SEQ ID NO: 2657176 - RNA, 19 nt, Homo sapiens
  misc_RNA (1)...(19): siRNA sense strand
agauaagaaugaugagcca

SEQ ID NO: 2657177 - RNA, 19 nt, Homo sapiens
  misc_RNA (1)...(19): siRNA sense strand
cugaauggcugaaagguca

SEQ ID NO: 2657178 - RNA, 19 nt, Homo sapiens
  misc_RNA (1)...(19): siRNA sense strand
agagaagagauaagaauga

SEQ ID NO: 2657179 - RNA, 19 nt, Homo sapiens
  misc_RNA (1)...(19): siRNA sense strand
gguugaaaauggagaagau

SEQ ID NO: 2657180 - RNA, 19 nt, Homo sapiens
  misc_RNA (1)...(19): siRNA sense strand
acgaaugaucagggagaaa

SEQ ID NO: 2657181 - RNA, 19 nt, Homo sapiens
  misc_RNA (1)...(19): siRNA sense strand
ugguuggaaaggagaaaua

SEQ ID NO: 2657182 - RNA, 19 nt, Homo sapiens
  misc_RNA (1)...(19): siRNA sense strand
guguagaagaaauagagaa

SEQ ID NO: 2657183 - RNA, 19 nt, Homo sapiens
  misc_RNA (1)...(19): siRNA sense strand
cugaagaagaagaagcuuu

SEQ ID NO: 2657184 - RNA, 19 nt, Homo sapiens
  misc_RNA (1)...(19): siRNA sense strand
uggaaggagcugugaugua

SEQ ID NO: 2657185 - RNA, 19 nt, Homo sapiens
  misc_RNA (1)...(19): siRNA sense strand
agccaaugguucaaacaaa

SEQ ID NO: 2657186 - RNA, 19 nt, Homo sapiens
  misc_RNA (1)...(19): siRNA sense strand
cugaaaaggcugaaaauga

SEQ ID NO: 2657187 - RNA, 19 nt, Homo sapiens
  misc_RNA (1)...(19): siRNA sense strand
ccuucuaguucaacaacaa

SEQ ID NO: 2657188 - RNA, 19 nt, Homo sapiens
  misc_RNA (1)...(19): siRNA sense strand
aaucaaaagugcaaagaga

SEQ ID NO: 2657189 - RNA, 19 nt, Homo sapiens
  misc_RNA (1)...(19): siRNA sense strand
uagaagaaauagagaaccu

SEQ ID NO: 2657190 - RNA, 19 nt, Homo sapiens
  misc_RNA (1)...(19): siRNA sense strand
gggcccugcuguuggcaaa

SEQ ID NO: 2657191 - RNA, 19 nt, Homo sapiens
  misc_RNA (1)...(19): siRNA sense strand
aagcacgaaugguuggaaa

SEQ ID NO: 2657192 - RNA, 19 nt, Homo sapiens
  misc_RNA (1)...(19): siRNA sense strand
uugcagaugagguggaaau

SEQ ID NO: 2657193 - RNA, 19 nt, Homo sapiens
  misc_RNA (1)...(19): siRNA sense strand
agauggaagcugaagaaga

SEQ ID NO: 2657194 - RNA, 19 nt, Homo sapiens
  misc_RNA (1)...(19): siRNA sense strand
gaaaacuggaaaaggauua

SEQ ID NO: 2657195 - RNA, 19 nt, Homo sapiens
  misc_RNA (1)...(19): siRNA sense strand
aagaagaagcuuuagcaau

SEQ ID NO: 2657196 - RNA, 19 nt, Homo sapiens
  misc_RNA (1)...(19): siRNA sense strand
ccuacaaagaugaugugaa

SEQ ID NO: 2657197 - RNA, 19 nt, Homo sapiens
  misc_RNA (1)...(19): siRNA sense strand
agaagaaguaguagaagca

SEQ ID NO: 2657198 - RNA, 19 nt, Homo sapiens
  misc_RNA (1)...(19): siRNA sense strand
cggaaagaaucaaacuuca

SEQ ID NO: 2657199 - RNA, 19 nt, Homo sapiens
  misc_RNA (1)...(19): siRNA sense strand
aagagaagauggaagcuga

SEQ ID NO: 2657200 - RNA, 19 nt, Homo sapiens
  misc_RNA (1)...(19): siRNA sense strand
ggaacaagcugcaccacca

SEQ ID NO: 2657201 - RNA, 19 nt, Homo sapiens
  misc_RNA (1)...(19): siRNA sense strand
agcauagacuucagggauu

SEQ ID NO: 2657202 - RNA, 19 nt, Homo sapiens
  misc_RNA (1)...(19): siRNA sense strand
ccacgugugagaagagcaa

SEQ ID NO: 2657203 - RNA, 19 nt, Homo sapiens
  misc_RNA (1)...(19): siRNA sense strand
uguuagaaaugcugagugu

SEQ ID NO: 2657204 - RNA, 19 nt, Homo sapiens
  misc_RNA (1)...(19): siRNA sense strand
cccaacaacuaucuggaaa

SEQ ID NO: 2657205 - RNA, 19 nt, Homo sapiens
  misc_RNA (1)...(19): siRNA sense strand
uaaaggaugaagaggaaca

SEQ ID NO: 2657206 - RNA, 19 nt, Homo sapiens
  misc_RNA (1)...(19): siRNA sense strand
acagauaggccuuggagca

SEQ ID NO: 2657207 - RNA, 19 nt, Homo sapiens
  misc_RNA (1)...(19): siRNA sense strand
ggaaaggagaaauaggcga

SEQ ID NO: 2657208 - RNA, 19 nt, Homo sapiens
  misc_RNA (1)...(19): siRNA sense strand
cagaagaguguagaagaaa

SEQ ID NO: 2657209 - RNA, 19 nt, Homo sapiens
  misc_RNA (1)...(19): siRNA sense strand
ggaacugugcaaaggccaa

SEQ ID NO: 2657210 - RNA, 19 nt, Homo sapiens
  misc_RNA (1)...(19): siRNA sense strand
agagaaaacuggaaaagga

SEQ ID NO: 2657211 - RNA, 19 nt, Homo sapiens
  misc_RNA (1)...(19): siRNA sense strand
ccaaaugugaugacagcuu

SEQ ID NO: 2657212 - RNA, 19 nt, Homo sapiens
  misc_RNA (1)...(19): siRNA sense strand
caucauuauucaacaggau

SEQ ID NO: 2657213 - RNA, 19 nt, Homo sapiens
  misc_RNA (1)...(19): siRNA sense strand
gaguaaauauggagccuuc

SEQ ID NO: 2657214 - RNA, 19 nt, Homo sapiens
  misc_RNA (1)...(19): siRNA sense strand
cuucaaagaaucaguaguu

SEQ ID NO: 2657215 - RNA, 19 nt, Homo sapiens
  misc_RNA (1)...(19): siRNA sense strand
acccaauguuauggagaaa

SEQ ID NO: 2657216 - RNA, 19 nt, Homo sapiens
  misc_RNA (1)...(19): siRNA sense strand
caacaacagagcaaccaaa

SEQ ID NO: 2657217 - RNA, 19 nt, Homo sapiens
  misc_RNA (1)...(19): siRNA sense strand
ccacucaaugguuggcaaa

SEQ ID NO: 2657218 - RNA, 19 nt, Homo sapiens
  misc_RNA (1)...(19): siRNA sense strand
cagcugugcacguggaaca

SEQ ID NO: 2657219 - RNA, 19 nt, Homo sapiens
  misc_RNA (1)...(19): siRNA sense strand
gcaaaggccaagcaggaga

SEQ ID NO: 2657220 - RNA, 19 nt, Homo sapiens
  misc_RNA (1)...(19): siRNA sense strand
auuuugagguugagaguuu

SEQ ID NO: 2657221 - RNA, 19 nt, Homo sapiens
  misc_RNA (1)...(19): siRNA sense strand
guauauacuccuugccaca

SEQ ID NO: 2657222 - RNA, 19 nt, Homo sapiens
  misc_RNA (1)...(19): siRNA sense strand
aagcugagccuguugaaau

SEQ ID NO: 2657223 - RNA, 19 nt, Homo sapiens
  misc_RNA (1)...(19): siRNA sense strand
cucuacaauuccacagaaa

SEQ ID NO: 2657224 - RNA, 19 nt, Homo sapiens
  misc_RNA (1)...(19): siRNA sense strand
ggauaagaaacaaggaaaa

SEQ ID NO: 2657225 - RNA, 19 nt, Homo sapiens
  misc_RNA (1)...(19): siRNA sense strand
aggauaagaaacaaggaaa

SEQ ID NO: 2657226 - RNA, 19 nt, Homo sapiens
  misc_RNA (1)...(19): siRNA sense strand
ggaagaaguaaaagagcaa

SEQ ID NO: 2657227 - RNA, 19 nt, Homo sapiens
  misc_RNA (1)...(19): siRNA sense strand
auucugaagaugaggauaa

SEQ ID NO: 2657228 - RNA, 19 nt, Homo sapiens
  misc_RNA (1)...(19): siRNA sense strand
aaaucauggcagugaauua

SEQ ID NO: 2657229 - RNA, 19 nt, Homo sapiens
  misc_RNA (1)...(19): siRNA sense strand
ggaaagagagcauggagga

SEQ ID NO: 2657230 - RNA, 19 nt, Homo sapiens
  misc_RNA (1)...(19): siRNA sense strand
auauagugguuuaggugaa

SEQ ID NO: 2657231 - RNA, 19 nt, Homo sapiens
  misc_RNA (1)...(19): siRNA sense strand
gaaauaauccaucgggaga

SEQ ID NO: 2657232 - RNA, 19 nt, Homo sapiens
  misc_RNA (1)...(19): siRNA sense strand
ggaaaacagagaaagaaaa

SEQ ID NO: 2657233 - RNA, 19 nt, Homo sapiens
  misc_RNA (1)...(19): siRNA sense strand
aggaaaacagagaaagaaa

SEQ ID NO: 2657234 - RNA, 19 nt, Homo sapiens
  misc_RNA (1)...(19): siRNA sense strand
gcuguacacacaagagaaa

SEQ ID NO: 2657235 - RNA, 19 nt, Homo sapiens
  misc_RNA (1)...(19): siRNA sense strand
agugcaagucucuggaaua

SEQ ID NO: 2657236 - RNA, 19 nt, Homo sapiens
  misc_RNA (1)...(19): siRNA sense strand
aagaaaggcuccaaggcuu

SEQ ID NO: 2657237 - RNA, 19 nt, Homo sapiens
  misc_RNA (1)...(19): siRNA sense strand
uggcugaauuugaagaaaa

SEQ ID NO: 2657238 - RNA, 19 nt, Homo sapiens
  misc_RNA (1)...(19): siRNA sense strand
cagcaaagcccgagagacc

SEQ ID NO: 2657239 - RNA, 19 nt, Homo sapiens
  misc_RNA (1)...(19): siRNA sense strand
gggacaaucggguggccua

SEQ ID NO: 2657240 - RNA, 19 nt, Homo sapiens
  misc_RNA (1)...(19): siRNA sense strand
uuauagaguuccucagcaa

SEQ ID NO: 2657241 - RNA, 19 nt, Homo sapiens
  misc_RNA (1)...(19): siRNA sense strand
ccgcauugaugaugagaac

SEQ ID NO: 2657242 - RNA, 19 nt, Homo sapiens
  misc_RNA (1)...(19): siRNA sense strand
uuacagagaauaugggaca

SEQ ID NO: 2657243 - RNA, 19 nt, Homo sapiens
  misc_RNA (1)...(19): siRNA sense strand
aaacaaaucuacaaaggca

SEQ ID NO: 2657244 - RNA, 19 nt, Homo sapiens
  misc_RNA (1)...(19): siRNA sense strand
acacagagagaaauuguua

SEQ ID NO: 2657245 - RNA, 19 nt, Homo sapiens
  misc_RNA (1)...(19): siRNA sense strand
ccagagaagcacugagacu

SEQ ID NO: 2657246 - RNA, 19 nt, Homo sapiens
  misc_RNA (1)...(19): siRNA sense strand
ggguauacauuaaacaguu

SEQ ID NO: 2657247 - RNA, 19 nt, Homo sapiens
  misc_RNA (1)...(19): siRNA sense strand
cauagucaguggaggcauu

SEQ ID NO: 2657248 - RNA, 19 nt, Homo sapiens
  misc_RNA (1)...(19): siRNA sense strand
acaucuggguguaggcaau

SEQ ID NO: 2657249 - RNA, 19 nt, Homo sapiens
  misc_RNA (1)...(19): siRNA sense strand
gcacuuagaugaagagcag

SEQ ID NO: 2657250 - RNA, 19 nt, Homo sapiens
  misc_RNA (1)...(19): siRNA sense strand
acugcaaguuggagcaaaa

SEQ ID NO: 2657251 - RNA, 19 nt, Homo sapiens
  misc_RNA (1)...(19): siRNA sense strand
agcagaaacaguuggaaau

SEQ ID NO: 2657252 - RNA, 19 nt, Homo sapiens
  misc_RNA (1)...(19): siRNA sense strand
cuaccugggaagaaguaaa

SEQ ID NO: 2657253 - RNA, 19 nt, Homo sapiens
  misc_RNA (1)...(19): siRNA sense strand
ccugcaagucggugaguca

SEQ ID NO: 2657254 - RNA, 19 nt, Homo sapiens
  misc_RNA (1)...(19): siRNA sense strand
gggaagaaguaaaagagca

SEQ ID NO: 2657255 - RNA, 19 nt, Homo sapiens
  misc_RNA (1)...(19): siRNA sense strand
uggaagaaagaacuggaaa

SEQ ID NO: 2657256 - RNA, 19 nt, Homo sapiens
  misc_RNA (1)...(19): siRNA sense strand
ccuugauaacagagcaauu

SEQ ID NO: 2657257 - RNA, 19 nt, Homo sapiens
  misc_RNA (1)...(19): siRNA sense strand
acgacuggcaugagcuaua

SEQ ID NO: 2657258 - RNA, 19 nt, Homo sapiens
  misc_RNA (1)...(19): siRNA sense strand
caguuugaaggaagauaaa

SEQ ID NO: 2657259 - RNA, 19 nt, Homo sapiens
  misc_RNA (1)...(19): siRNA sense strand
acaaaucuacaaaggcaaa

SEQ ID NO: 2657260 - RNA, 19 nt, Homo sapiens
  misc_RNA (1)...(19): siRNA sense strand
caaggaaaacagagaaaga

SEQ ID NO: 2657261 - RNA, 19 nt, Homo sapiens
  misc_RNA (1)...(19): siRNA sense strand
aaaagauggaacugagaaa

SEQ ID NO: 2657262 - RNA, 19 nt, Homo sapiens
  misc_RNA (1)...(19): siRNA sense strand
gguaaaggccuucuucuua

SEQ ID NO: 2657263 - RNA, 19 nt, Homo sapiens
  misc_RNA (1)...(19): siRNA sense strand
ggcuaaaacagcugaagaa

SEQ ID NO: 2657264 - RNA, 19 nt, Homo sapiens
  misc_RNA (1)...(19): siRNA sense strand
ggaaaagaggaguuggaga

SEQ ID NO: 2657265 - RNA, 19 nt, Homo sapiens
  misc_RNA (1)...(19): siRNA sense strand
cuucaugggaggaggaacu

SEQ ID NO: 2657266 - RNA, 19 nt, Homo sapiens
  misc_RNA (1)...(19): siRNA sense strand
caauacaaucggagccaga

SEQ ID NO: 2657267 - RNA, 19 nt, Homo sapiens
  misc_RNA (1)...(19): siRNA sense strand
cauuaucagcagugaccua

SEQ ID NO: 2657268 - RNA, 19 nt, Homo sapiens
  misc_RNA (1)...(19): siRNA sense strand
agaauaugggacagugcaa

SEQ ID NO: 2657269 - RNA, 19 nt, Homo sapiens
  misc_RNA (1)...(19): siRNA sense strand
augaaugagaacuggaaga

SEQ ID NO: 2657270 - RNA, 19 nt, Homo sapiens
  misc_RNA (1)...(19): siRNA sense strand
caguaaccuuucugccaaa

SEQ ID NO: 2657271 - RNA, 19 nt, Homo sapiens
  misc_RNA (1)...(19): siRNA sense strand
guggaaacaaggacauauu

SEQ ID NO: 2657272 - RNA, 19 nt, Homo sapiens
  misc_RNA (1)...(19): siRNA sense strand
gcaaugaugcagaugacuu

SEQ ID NO: 2657273 - RNA, 19 nt, Homo sapiens
  misc_RNA (1)...(19): siRNA sense strand
cugagaaagaaaaggauau

SEQ ID NO: 2657274 - RNA, 19 nt, Homo sapiens
  misc_RNA (1)...(19): siRNA sense strand
uauaugaacccaauagcaa

SEQ ID NO: 2657275 - RNA, 19 nt, Homo sapiens
  misc_RNA (1)...(19): siRNA sense strand
agggcaggguauacauuaa

SEQ ID NO: 2657276 - RNA, 19 nt, Homo sapiens
  misc_RNA (1)...(19): siRNA sense strand
auuaaaggacucagcaaaa

SEQ ID NO: 2657277 - RNA, 19 nt, Homo sapiens
  misc_RNA (1)...(19): siRNA sense strand
acaguuugaaggaagauaa

SEQ ID NO: 2657278 - RNA, 19 nt, Homo sapiens
  misc_RNA (1)...(19): siRNA sense strand
auguuaaagaugagggacu

SEQ ID NO: 2657279 - RNA, 19 nt, Homo sapiens
  misc_RNA (1)...(19): siRNA sense strand
aagaaaucugguagguauu

SEQ ID NO: 2657280 - RNA, 19 nt, Homo sapiens
  misc_RNA (1)...(19): siRNA sense strand
agugacagaaccugcaaua

SEQ ID NO: 2657281 - RNA, 19 nt, Homo sapiens
  misc_RNA (1)...(19): siRNA sense strand
ugucaagugugcaacggua

SEQ ID NO: 2657282 - RNA, 19 nt, Homo sapiens
  misc_RNA (1)...(19): siRNA sense strand
aagaggaguuggagacacu

SEQ ID NO: 2657283 - RNA, 19 nt, Homo sapiens
  misc_RNA (1)...(19): siRNA sense strand
gaaacaaggaaaacagaga

SEQ ID NO: 2657284 - RNA, 19 nt, Homo sapiens
  misc_RNA (1)...(19): siRNA sense strand
aagagagcauggaggaguu

SEQ ID NO: 2657285 - RNA, 19 nt, Homo sapiens
  misc_RNA (1)...(19): siRNA sense strand
auacaaucggagccagaaa

SEQ ID NO: 2657286 - RNA, 19 nt, Homo sapiens
  misc_RNA (1)...(19): siRNA sense strand
ccugaaacuucgaaggaaa

SEQ ID NO: 2657287 - RNA, 19 nt, Homo sapiens
  misc_RNA (1)...(19): siRNA sense strand
gcgacaagcugaaggccaa

SEQ ID NO: 2657288 - RNA, 19 nt, Homo sapiens
  misc_RNA (1)...(19): siRNA sense strand
ccaaagaaggacaggguau

SEQ ID NO: 2657289 - RNA, 19 nt, Homo sapiens
  misc_RNA (1)...(19): siRNA sense strand
cgaaggaaaccucgggaaa

SEQ ID NO: 2657290 - RNA, 19 nt, Homo sapiens
  misc_RNA (1)...(19): siRNA sense strand
aggaagaagaugacacaaa

SEQ ID NO: 2657291 - RNA, 19 nt, Homo sapiens
  misc_RNA (1)...(19): siRNA sense strand
cagcagaagagaaggaaga

SEQ ID NO: 2657292 - RNA, 19 nt, Homo sapiens
  misc_RNA (1)...(19): siRNA sense strand
gugaaaaguuagacagcaa

SEQ ID NO: 2657293 - RNA, 19 nt, Homo sapiens
  misc_RNA (1)...(19): siRNA sense strand
gagagugagaagagugaaa

SEQ ID NO: 2657294 - RNA, 19 nt, Homo sapiens
  misc_RNA (1)...(19): siRNA sense strand
caacagagggagagcaaga

SEQ ID NO: 2657295 - RNA, 19 nt, Homo sapiens
  misc_RNA (1)...(19): siRNA sense strand
uggaagagagagagaagaa

SEQ ID NO: 2657296 - RNA, 19 nt, Homo sapiens
  misc_RNA (1)...(19): siRNA sense strand
aggaagacucuguggacaa

SEQ ID NO: 2657297 - RNA, 19 nt, Homo sapiens
  misc_RNA (1)...(19): siRNA sense strand
acugaaagcaacagacaua

SEQ ID NO: 2657298 - RNA, 19 nt, Homo sapiens
  misc_RNA (1)...(19): siRNA sense strand
gcucaugaucguucagaaa

SEQ ID NO: 2657299 - RNA, 19 nt, Homo sapiens
  misc_RNA (1)...(19): siRNA sense strand
aggccaaggugguggugaa

SEQ ID NO: 2657300 - RNA, 19 nt, Homo sapiens
  misc_RNA (1)...(19): siRNA sense strand
gugagaaggagcugggcaa

SEQ ID NO: 2657301 - RNA, 19 nt, Homo sapiens
  misc_RNA (1)...(19): siRNA sense strand
gggaauaaggugucaauca

SEQ ID NO: 2657302 - RNA, 19 nt, Homo sapiens
  misc_RNA (1)...(19): siRNA sense strand
cggucuuggccuuggaaua

SEQ ID NO: 2657303 - RNA, 19 nt, Homo sapiens
  misc_RNA (1)...(19): siRNA sense strand
cgucuggaauguagaagaa

SEQ ID NO: 2657304 - RNA, 19 nt, Homo sapiens
  misc_RNA (1)...(19): siRNA sense strand
cgauuagaaagcacagaaa

SEQ ID NO: 2657305 - RNA, 19 nt, Homo sapiens
  misc_RNA (1)...(19): siRNA sense strand
ggaccagccaggagaaaca

SEQ ID NO: 2657306 - RNA, 19 nt, Homo sapiens
  misc_RNA (1)...(19): siRNA sense strand
acagaagggcggaagggaa

SEQ ID NO: 2657307 - RNA, 19 nt, Homo sapiens
  misc_RNA (1)...(19): siRNA sense strand
ggucauggaauauguggaa

SEQ ID NO: 2657308 - RNA, 19 nt, Homo sapiens
  misc_RNA (1)...(19): siRNA sense strand
ggaacaguuugcugagaca

SEQ ID NO: 2657309 - RNA, 19 nt, Homo sapiens
  misc_RNA (1)...(19): siRNA sense strand
cgaacaagcaaccggaaaa

SEQ ID NO: 2657310 - RNA, 19 nt, Homo sapiens
  misc_RNA (1)...(19): siRNA sense strand
aagccaggccugagggaau

SEQ ID NO: 2657311 - RNA, 19 nt, Homo sapiens
  misc_RNA (1)...(19): siRNA sense strand
ggaauuguacacagggauu

SEQ ID NO: 2657312 - RNA, 19 nt, Homo sapiens
  misc_RNA (1)...(19): siRNA sense strand
acacaaaugaugaagacuu

SEQ ID NO: 2657313 - RNA, 19 nt, Homo sapiens
  misc_RNA (1)...(19): siRNA sense strand
ggaaaagcuuaauaggcaa

SEQ ID NO: 2657314 - RNA, 19 nt, Homo sapiens
  misc_RNA (1)...(19): siRNA sense strand
cagaggagcuauuuggaca

SEQ ID NO: 2657315 - RNA, 19 nt, Homo sapiens
  misc_RNA (1)...(19): siRNA sense strand
uauaagagccggaugguga

SEQ ID NO: 2657316 - RNA, 19 nt, Homo sapiens
  misc_RNA (1)...(19): siRNA sense strand
agaagaaagucuauccgaa

SEQ ID NO: 2657317 - RNA, 19 nt, Homo sapiens
  misc_RNA (1)...(19): siRNA sense strand
ccucaaagccauccaguga

SEQ ID NO: 2657318 - RNA, 19 nt, Homo sapiens
  misc_RNA (1)...(19): siRNA sense strand
ccgaacaagcaaccggaaa

SEQ ID NO: 2657319 - RNA, 19 nt, Homo sapiens
  misc_RNA (1)...(19): siRNA sense strand
acugaaggcuggagaucuu

SEQ ID NO: 2657320 - RNA, 19 nt, Homo sapiens
  misc_RNA (1)...(19): siRNA sense strand
gcagaaagauggugccaag

SEQ ID NO: 2657321 - RNA, 19 nt, Homo sapiens
  misc_RNA (1)...(19): siRNA sense strand
gggaaagagaguuugcgua

SEQ ID NO: 2657322 - RNA, 19 nt, Homo sapiens
  misc_RNA (1)...(19): siRNA sense strand
gcgugcaguccgaggagaa

SEQ ID NO: 2657323 - RNA, 19 nt, Homo sapiens
  misc_RNA (1)...(19): siRNA sense strand
cgauagugggacagcagaa

SEQ ID NO: 2657324 - RNA, 19 nt, Homo sapiens
  misc_RNA (1)...(19): siRNA sense strand
ggcaggaaagugugugaua

SEQ ID NO: 2657325 - RNA, 19 nt, Homo sapiens
  misc_RNA (1)...(19): siRNA sense strand
cgauuaccuccgaaagaaa

SEQ ID NO: 2657326 - RNA, 19 nt, Homo sapiens
  misc_RNA (1)...(19): siRNA sense strand
gaguauaagcuggaaggua

SEQ ID NO: 2657327 - RNA, 19 nt, Homo sapiens
  misc_RNA (1)...(19): siRNA sense strand
guucaagagggacaggaaa

SEQ ID NO: 2657328 - RNA, 19 nt, Homo sapiens
  misc_RNA (1)...(19): siRNA sense strand
cggaaaagcuuaauaggca

SEQ ID NO: 2657329 - RNA, 19 nt, Homo sapiens
  misc_RNA (1)...(19): siRNA sense strand
cauaaagaaucccggcaga

SEQ ID NO: 2657330 - RNA, 19 nt, Homo sapiens
  misc_RNA (1)...(19): siRNA sense strand
cacauaaagcugacagauu

SEQ ID NO: 2657331 - RNA, 19 nt, Homo sapiens
  misc_RNA (1)...(19): siRNA sense strand
gugcauaugaagucaaaca

SEQ ID NO: 2657332 - RNA, 19 nt, Homo sapiens
  misc_RNA (1)...(19): siRNA sense strand
acauccaacucuucagaua

SEQ ID NO: 2657333 - RNA, 19 nt, Homo sapiens
  misc_RNA (1)...(19): siRNA sense strand
ccagaguucaagagggaca

SEQ ID NO: 2657334 - RNA, 19 nt, Homo sapiens
  misc_RNA (1)...(19): siRNA sense strand
auauggaaacggaggaaga

SEQ ID NO: 2657335 - RNA, 19 nt, Homo sapiens
  misc_RNA (1)...(19): siRNA sense strand
gcaacagggaccauaggaa

SEQ ID NO: 2657336 - RNA, 19 nt, Homo sapiens
  misc_RNA (1)...(19): siRNA sense strand
ugaaagcaacagacauaaa

SEQ ID NO: 2657337 - RNA, 19 nt, Homo sapiens
  misc_RNA (1)...(19): siRNA sense strand
gaauguagaagaaggaagu

SEQ ID NO: 2657338 - RNA, 19 nt, Homo sapiens
  misc_RNA (1)...(19): siRNA sense strand
agcaagaaauccaagaaga

SEQ ID NO: 2657339 - RNA, 19 nt, Homo sapiens
  misc_RNA (1)...(19): siRNA sense strand
aguauaagcuggaagguag

SEQ ID NO: 2657340 - RNA, 19 nt, Homo sapiens
  misc_RNA (1)...(19): siRNA sense strand
uaaauuggacgguggagaa

SEQ ID NO: 2657341 - RNA, 19 nt, Homo sapiens
  misc_RNA (1)...(19): siRNA sense strand
gagaaggaugcuagagagu

SEQ ID NO: 2657342 - RNA, 19 nt, Homo sapiens
  misc_RNA (1)...(19): siRNA sense strand
ggaggaagaagaugacaca

SEQ ID NO: 2657343 - RNA, 19 nt, Homo sapiens
  misc_RNA (1)...(19): siRNA sense strand
cuacugaagagugggaaua

SEQ ID NO: 2657344 - RNA, 19 nt, Homo sapiens
  misc_RNA (1)...(19): siRNA sense strand
ccaagaagaaagaaagucu

SEQ ID NO: 2657345 - RNA, 19 nt, Homo sapiens
  misc_RNA (1)...(19): siRNA sense strand
ggaagagagagagaagaaa

SEQ ID NO: 2657346 - RNA, 19 nt, Homo sapiens
  misc_RNA (1)...(19): siRNA sense strand
auguauugcuccuuugaaa

SEQ ID NO: 2657347 - RNA, 19 nt, Homo sapiens
  misc_RNA (1)...(19): siRNA sense strand
uuucagagcacuuggauca

SEQ ID NO: 2657348 - RNA, 19 nt, Homo sapiens
  misc_RNA (1)...(19): siRNA sense strand
aaaagaaaaucucggggaa

SEQ ID NO: 2657349 - RNA, 19 nt, Homo sapiens
  misc_RNA (1)...(19): siRNA sense strand
cugcacagaugggaagaua

SEQ ID NO: 2657350 - RNA, 19 nt, Homo sapiens
  misc_RNA (1)...(19): siRNA sense strand
aagaacgucuaaaggaaau

SEQ ID NO: 2657351 - RNA, 19 nt, Homo sapiens
  misc_RNA (1)...(19): siRNA sense strand
ucacaucaauggagaacca

SEQ ID NO: 2657352 - RNA, 19 nt, Homo sapiens
  misc_RNA (1)...(19): siRNA sense strand
ccagcuuaaagaugaauaa

SEQ ID NO: 2657353 - RNA, 19 nt, Homo sapiens
  misc_RNA (1)...(19): siRNA sense strand
agaaagaggcaaaugauaa

SEQ ID NO: 2657354 - RNA, 19 nt, Homo sapiens
  misc_RNA (1)...(19): siRNA sense strand
cagaaagaggcaaaugaua

SEQ ID NO: 2657355 - RNA, 19 nt, Homo sapiens
  misc_RNA (1)...(19): siRNA sense strand
ggaaguuggaacagagaca

SEQ ID NO: 2657356 - RNA, 19 nt, Homo sapiens
  misc_RNA (1)...(19): siRNA sense strand
ggccaaaagaugugggaau

SEQ ID NO: 2657357 - RNA, 19 nt, Homo sapiens
  misc_RNA (1)...(19): siRNA sense strand
cugcacagauagagaagau

SEQ ID NO: 2657358 - RNA, 19 nt, Homo sapiens
  misc_RNA (1)...(19): siRNA sense strand
gaugaaaagcacagaagaa

SEQ ID NO: 2657359 - RNA, 19 nt, Homo sapiens
  misc_RNA (1)...(19): siRNA sense strand
agguggaguuggagcagua

SEQ ID NO: 2657360 - RNA, 19 nt, Homo sapiens
  misc_RNA (1)...(19): siRNA sense strand
guucagaaucuuauggaga

SEQ ID NO: 2657361 - RNA, 19 nt, Homo sapiens
  misc_RNA (1)...(19): siRNA sense strand
gcagaagcuugcuggccaa

SEQ ID NO: 2657362 - RNA, 19 nt, Homo sapiens
  misc_RNA (1)...(19): siRNA sense strand
aggaaaugcuagaccuaca

SEQ ID NO: 2657363 - RNA, 19 nt, Homo sapiens
  misc_RNA (1)...(19): siRNA sense strand
uguauaugccacaggaaau

SEQ ID NO: 2657364 - RNA, 19 nt, Homo sapiens
  misc_RNA (1)...(19): siRNA sense strand
guuugaagagucugggaau

SEQ ID NO: 2657365 - RNA, 19 nt, Homo sapiens
  misc_RNA (1)...(19): siRNA sense strand
aagcagcaguuauuaguaa

SEQ ID NO: 2657366 - RNA, 19 nt, Homo sapiens
  misc_RNA (1)...(19): siRNA sense strand
uuguaaacugguucagaaa

SEQ ID NO: 2657367 - RNA, 19 nt, Homo sapiens
  misc_RNA (1)...(19): siRNA sense strand
agagacaaucaucgacaaa

SEQ ID NO: 2657368 - RNA, 19 nt, Homo sapiens
  misc_RNA (1)...(19): siRNA sense strand
uuugaagagucugggaaua

SEQ ID NO: 2657369 - RNA, 19 nt, Homo sapiens
  misc_RNA (1)...(19): siRNA sense strand
auccuauaguagauggaaa

SEQ ID NO: 2657370 - RNA, 19 nt, Homo sapiens
  misc_RNA (1)...(19): siRNA sense strand
uugauagagauguggagaa

SEQ ID NO: 2657371 - RNA, 19 nt, Homo sapiens
  misc_RNA (1)...(19): siRNA sense strand
gagauguggagaaggcauu

SEQ ID NO: 2657372 - RNA, 19 nt, Homo sapiens
  misc_RNA (1)...(19): siRNA sense strand
uggagaaggcauuuaugaa

SEQ ID NO: 2657373 - RNA, 19 nt, Homo sapiens
  misc_RNA (1)...(19): siRNA sense strand
uaguuaggguggaugaaaa

SEQ ID NO: 2657374 - RNA, 19 nt, Homo sapiens
  misc_RNA (1)...(19): siRNA sense strand
aggaguaggacuugugcau

SEQ ID NO: 2657375 - RNA, 19 nt, Homo sapiens
  misc_RNA (1)...(19): siRNA sense strand
acaggaaaugcuagaccua

SEQ ID NO: 2657376 - RNA, 19 nt, Homo sapiens
  misc_RNA (1)...(19): siRNA sense strand
gcagaaagaggcaaaugau

SEQ ID NO: 2657377 - RNA, 19 nt, Homo sapiens
  misc_RNA (1)...(19): siRNA sense strand
acauagcaacugagcauau

SEQ ID NO: 2657378 - RNA, 19 nt, Homo sapiens
  misc_RNA (1)...(19): siRNA sense strand
gugcauucaaacauagcaa

SEQ ID NO: 2657379 - RNA, 19 nt, Homo sapiens
  misc_RNA (1)...(19): siRNA sense strand
gggaauacagauauagaag

SEQ ID NO: 2657380 - RNA, 19 nt, Homo sapiens
  misc_RNA (1)...(19): siRNA sense strand
aguggcagaaagaggcaaa

SEQ ID NO: 2657381 - RNA, 19 nt, Homo sapiens
  misc_RNA (1)...(19): siRNA sense strand
gcauuuagcagggaagaga

SEQ ID NO: 2657382 - RNA, 19 nt, Homo sapiens
  misc_RNA (1)...(19): siRNA sense strand
ggcagaaagaggcaaauga

SEQ ID NO: 2657383 - RNA, 19 nt, Homo sapiens
  misc_RNA (1)...(19): siRNA sense strand
aaugaccagaauagagaua

SEQ ID NO: 2657384 - RNA, 19 nt, Homo sapiens
  misc_RNA (1)...(19): siRNA sense strand
gcugaaaacaugaagcuca

SEQ ID NO: 2657385 - RNA, 19 nt, Homo sapiens
  misc_RNA (1)...(19): siRNA sense strand
uccuauaguagauggaaaa

SEQ ID NO: 2657386 - RNA, 19 nt, Homo sapiens
  misc_RNA (1)...(19): siRNA sense strand
gugcuaccucagugcauua

SEQ ID NO: 2657387 - RNA, 19 nt, Homo sapiens
  misc_RNA (1)...(19): siRNA sense strand
aaguuggaacagagacaau

SEQ ID NO: 2657388 - RNA, 19 nt, Homo sapiens
  misc_RNA (1)...(19): siRNA sense strand
gaaagaggcaaaugauaac

SEQ ID NO: 2657389 - RNA, 19 nt, Homo sapiens
  misc_RNA (1)...(19): siRNA sense strand
gaggcaaaugauaacgauu

SEQ ID NO: 2657390 - RNA, 19 nt, Homo sapiens
  misc_RNA (1)...(19): siRNA sense strand
guggaaagaaguugcaaaa

SEQ ID NO: 2657391 - RNA, 19 nt, Homo sapiens
  misc_RNA (1)...(19): siRNA sense strand
uguggaaagaaguugcaaa

SEQ ID NO: 2657392 - RNA, 19 nt, Homo sapiens
  misc_RNA (1)...(19): siRNA sense strand
ccaccuacgcagcagacaa

SEQ ID NO: 2657393 - RNA, 19 nt, Homo sapiens
  misc_RNA (1)...(19): siRNA sense strand
cagcgaagugacaggcuca

SEQ ID NO: 2657394 - RNA, 19 nt, Homo sapiens
  misc_RNA (1)...(19): siRNA sense strand
ggaaagaacguuauggaca

SEQ ID NO: 2657395 - RNA, 19 nt, Homo sapiens
  misc_RNA (1)...(19): siRNA sense strand
ucgaagaagagaauggaaa

SEQ ID NO: 2657396 - RNA, 19 nt, Homo sapiens
  misc_RNA (1)...(19): siRNA sense strand
ucagaaaagagaagagaaa

SEQ ID NO: 2657397 - RNA, 19 nt, Homo sapiens
  misc_RNA (1)...(19): siRNA sense strand
gcuucagacaauugggaua

SEQ ID NO: 2657398 - RNA, 19 nt, Homo sapiens
  misc_RNA (1)...(19): siRNA sense strand
cuacagaguaucaggaaaa

SEQ ID NO: 2657399 - RNA, 19 nt, Homo sapiens
  misc_RNA (1)...(19): siRNA sense strand
gcaagaagaaggugaaaau

SEQ ID NO: 2657400 - RNA, 19 nt, Homo sapiens
  misc_RNA (1)...(19): siRNA sense strand
gguauggcuugguggaaau

SEQ ID NO: 2657401 - RNA, 19 nt, Homo sapiens
  misc_RNA (1)...(19): siRNA sense strand
caaacugaugacagagaaa

SEQ ID NO: 2657402 - RNA, 19 nt, Homo sapiens
  misc_RNA (1)...(19): siRNA sense strand
ccgucgaacucaaguacaa

SEQ ID NO: 2657403 - RNA, 19 nt, Homo sapiens
  misc_RNA (1)...(19): siRNA sense strand
ccuacagaguaucaggaaa

SEQ ID NO: 2657404 - RNA, 19 nt, Homo sapiens
  misc_RNA (1)...(19): siRNA sense strand
ucuagaagauguagcaaaa

SEQ ID NO: 2657405 - RNA, 19 nt, Homo sapiens
  misc_RNA (1)...(19): siRNA sense strand
aagcagaugcagaagagaa

SEQ ID NO: 2657406 - RNA, 19 nt, Homo sapiens
  misc_RNA (1)...(19): siRNA sense strand
ccauggaggagguucguaa

SEQ ID NO: 2657407 - RNA, 19 nt, Homo sapiens
  misc_RNA (1)...(19): siRNA sense strand
guucguaaagugaaugaaa

SEQ ID NO: 2657408 - RNA, 19 nt, Homo sapiens
  misc_RNA (1)...(19): siRNA sense strand
guaaagugaaugaaagcau

SEQ ID NO: 2657409 - RNA, 19 nt, Homo sapiens
  misc_RNA (1)...(19): siRNA sense strand
uuugaaugguacugggaau

SEQ ID NO: 2657410 - RNA, 19 nt, Homo sapiens
  misc_RNA (1)...(19): siRNA sense strand
cagagaaagcagaugcaga

SEQ ID NO: 2657411 - RNA, 19 nt, Homo sapiens
  misc_RNA (1)...(19): siRNA sense strand
ggagguucguaaagugaau

SEQ ID NO: 2657412 - RNA, 19 nt, Homo sapiens
  misc_RNA (1)...(19): siRNA sense strand
auaaucacccauugagaaa

SEQ ID NO: 2657413 - RNA, 19 nt, Homo sapiens
  misc_RNA (1)...(19): siRNA sense strand
ccugagaauagcaacauua

SEQ ID NO: 2657414 - RNA, 19 nt, Homo sapiens
  misc_RNA (1)...(19): siRNA sense strand
guuucaagccauggaguua

SEQ ID NO: 2657415 - RNA, 19 nt, Homo sapiens
  misc_RNA (1)...(19): siRNA sense strand
ugcaagaucaggaggguuu

SEQ ID NO: 2657416 - RNA, 19 nt, Homo sapiens
  misc_RNA (1)...(19): siRNA sense strand
auggagacuuuaagaaaca

SEQ ID NO: 2657417 - RNA, 19 nt, Homo sapiens
  misc_RNA (1)...(19): siRNA sense strand
gcacuaauugagaaugcaa

SEQ ID NO: 2657418 - RNA, 19 nt, Homo sapiens
  misc_RNA (1)...(19): siRNA sense strand
uccacuaggaacagaaaua

SEQ ID NO: 2657419 - RNA, 19 nt, Homo sapiens
  misc_RNA (1)...(19): siRNA sense strand
gguuugacccauauggauu

SEQ ID NO: 2657420 - RNA, 19 nt, Homo sapiens
  misc_RNA (1)...(19): siRNA sense strand
ugguaaaacugcauaaaca

SEQ ID NO: 2657421 - RNA, 19 nt, Homo sapiens
  misc_RNA (1)...(19): siRNA sense strand
ccuaaguaucuguguuuau

SEQ ID NO: 2657422 - RNA, 19 nt, Homo sapiens
  misc_RNA (1)...(19): siRNA sense strand
gaaagaacguuauggacac

SEQ ID NO: 2657423 - RNA, 19 nt, Homo sapiens
  misc_RNA (1)...(19): siRNA sense strand
ggauuuuaaugcagaaaca

SEQ ID NO: 2657424 - RNA, 19 nt, Homo sapiens
  misc_RNA (1)...(19): siRNA sense strand
agcauagacuugugauuau

SEQ ID NO: 2657425 - RNA, 19 nt, Homo sapiens
  misc_RNA (1)...(19): siRNA sense strand
agaagagaauggaaagaac

SEQ ID NO: 2657426 - RNA, 19 nt, Homo sapiens
  misc_RNA (1)...(19): siRNA sense strand
cagaugcagaagagaauuu

SEQ ID NO: 2657427 - RNA, 19 nt, Homo sapiens
  misc_RNA (1)...(19): siRNA sense strand
aggugaaaaucgaagaaga

SEQ ID NO: 2657428 - RNA, 19 nt, Homo sapiens
  misc_RNA (1)...(19): siRNA sense strand
aaaugaaacuagugcuacu

SEQ ID NO: 2657429 - RNA, 19 nt, Homo sapiens
  misc_RNA (1)...(19): siRNA sense strand
ucauacagcuggcagaaaa

SEQ ID NO: 2657430 - RNA, 19 nt, Homo sapiens
  misc_RNA (1)...(19): siRNA sense strand
gucuuaauuucuuggguuu

SEQ ID NO: 2657431 - RNA, 19 nt, Homo sapiens
  misc_RNA (1)...(19): siRNA sense strand
aaggcaaaggcaagaagaa

SEQ ID NO: 2657432 - RNA, 19 nt, Homo sapiens
  misc_RNA (1)...(19): siRNA sense strand
gaagaagagaauggaaaga

SEQ ID NO: 2657433 - RNA, 19 nt, Homo sapiens
  misc_RNA (1)...(19): siRNA sense strand
auacuggaauggagcaaaa

SEQ ID NO: 2657434 - RNA, 19 nt, Homo sapiens
  misc_RNA (1)...(19): siRNA sense strand
ggguuaucuacuuaugaaa

SEQ ID NO: 2657435 - RNA, 19 nt, Homo sapiens
  misc_RNA (1)...(19): siRNA sense strand
guaucagccugguggacga

SEQ ID NO: 2657436 - RNA, 19 nt, Homo sapiens
  misc_RNA (1)...(19): siRNA sense strand
cgaagaagagaauggaaag

SEQ ID NO: 2657437 - RNA, 19 nt, Homo sapiens
  misc_RNA (1)...(19): siRNA sense strand
cguucugcauucaaauaua

SEQ ID NO: 2657438 - RNA, 19 nt, Homo sapiens
  misc_RNA (1)...(19): siRNA sense strand
uggaagaugccauggagga

SEQ ID NO: 2657439 - RNA, 19 nt, Homo sapiens
  misc_RNA (1)...(19): siRNA sense strand
acuugugauuauuggaaca

SEQ ID NO: 2657440 - RNA, 19 nt, Homo sapiens
  misc_RNA (1)...(19): siRNA sense strand
agcagaugcagaagagaau

SEQ ID NO: 2657441 - RNA, 19 nt, Homo sapiens
  misc_RNA (1)...(19): siRNA sense strand
caaacuucucagauguuaa

SEQ ID NO: 2657442 - RNA, 19 nt, Homo sapiens
  misc_RNA (1)...(19): siRNA sense strand
ugaaaaucgaagaagagaa

SEQ ID NO: 2657443 - RNA, 19 nt, Homo sapiens
  misc_RNA (1)...(19): siRNA sense strand
uggacacaauagagaagau

SEQ ID NO: 2657444 - RNA, 19 nt, Homo sapiens
  misc_RNA (1)...(19): siRNA sense strand
ggauguuaguacgacaaua

SEQ ID NO: 2657445 - RNA, 19 nt, Homo sapiens
  misc_RNA (1)...(19): siRNA sense strand
ccaacugcuuauacaucua

SEQ ID NO: 2657446 - RNA, 19 nt, Homo sapiens
  misc_RNA (1)...(19): siRNA sense strand
ccuuuauugcagauggauu

SEQ ID NO: 2657447 - RNA, 19 nt, Homo sapiens
  misc_RNA (1)...(19): siRNA sense strand
uggcauuauuucugcuuca

SEQ ID NO: 2657448 - RNA, 19 nt, Homo sapiens
  misc_RNA (1)...(19): siRNA sense strand
cauggaugauuaugaagau

SEQ ID NO: 2657449 - RNA, 19 nt, Homo sapiens
  misc_RNA (1)...(19): siRNA sense strand
aguaucuauccaagugaaa

SEQ ID NO: 2657450 - RNA, 19 nt, Homo sapiens
  misc_RNA (1)...(19): siRNA sense strand
guuuaugggagaugaugau

SEQ ID NO: 2657451 - RNA, 19 nt, Homo sapiens
  misc_RNA (1)...(19): siRNA sense strand
ggagaugaugauaugacau

SEQ ID NO: 2657452 - RNA, 19 nt, Homo sapiens
  misc_RNA (1)...(19): siRNA sense strand
aagaagagaauggaaagaa

SEQ ID NO: 2657453 - RNA, 19 nt, Homo sapiens
  misc_RNA (1)...(19): siRNA sense strand
ccuccugagaauagcaaca

SEQ ID NO: 2657454 - RNA, 19 nt, Homo sapiens
  misc_RNA (1)...(19): siRNA sense strand
ucacaagaauacucaacca

SEQ ID NO: 2657455 - RNA, 19 nt, Homo sapiens
  misc_RNA (1)...(19): siRNA sense strand
aaggcaagaagaaggugaa

SEQ ID NO: 2657456 - RNA, 19 nt, Homo sapiens
  misc_RNA (1)...(19): siRNA sense strand
aggcaagaagaaggugaaa

SEQ ID NO: 2657457 - RNA, 19 nt, Homo sapiens
  misc_RNA (1)...(19): siRNA sense strand
cggaauaaaucaaagacaa

SEQ ID NO: 2657458 - RNA, 19 nt, Homo sapiens
  misc_RNA (1)...(19): siRNA sense strand
caagaaauuccaagagaaa

SEQ ID NO: 2657459 - RNA, 19 nt, Homo sapiens
  misc_RNA (1)...(19): siRNA sense strand
cgaccgaauuggagauauu

SEQ ID NO: 2657460 - RNA, 19 nt, Homo sapiens
  misc_RNA (1)...(19): siRNA sense strand
ccaagaaauuccaagagaa

SEQ ID NO: 2657461 - RNA, 19 nt, Homo sapiens
  misc_RNA (1)...(19): siRNA sense strand
uuaaagaacuccagcagaa

SEQ ID NO: 2657462 - RNA, 19 nt, Homo sapiens
  misc_RNA (1)...(19): siRNA sense strand
ggaagaagaaugggauaaa

SEQ ID NO: 2657463 - RNA, 19 nt, Homo sapiens
  misc_RNA (1)...(19): siRNA sense strand
aaaucagcauggagaaaua

SEQ ID NO: 2657464 - RNA, 19 nt, Homo sapiens
  misc_RNA (1)...(19): siRNA sense strand
guguuugguuugugauaaa

SEQ ID NO: 2657465 - RNA, 19 nt, Homo sapiens
  misc_RNA (1)...(19): siRNA sense strand
agauauaaagcgugucaaa

SEQ ID NO: 2657466 - RNA, 19 nt, Homo sapiens
  misc_RNA (1)...(19): siRNA sense strand
gugaugaagucuacgcuaa

SEQ ID NO: 2657467 - RNA, 19 nt, Homo sapiens
  misc_RNA (1)...(19): siRNA sense strand
gcaaggaugccaaagauaa

SEQ ID NO: 2657468 - RNA, 19 nt, Homo sapiens
  misc_RNA (1)...(19): siRNA sense strand
gugcagaaacugaagaaga

SEQ ID NO: 2657469 - RNA, 19 nt, Homo sapiens
  misc_RNA (1)...(19): siRNA sense strand
gaacaaagucaucuaaaga

SEQ ID NO: 2657470 - RNA, 19 nt, Homo sapiens
  misc_RNA (1)...(19): siRNA sense strand
caggaagaagaaugggaua

SEQ ID NO: 2657471 - RNA, 19 nt, Homo sapiens
  misc_RNA (1)...(19): siRNA sense strand
aggaagaagaaugggauaa

SEQ ID NO: 2657472 - RNA, 19 nt, Homo sapiens
  misc_RNA (1)...(19): siRNA sense strand
gcugaauggaggugaugaa

SEQ ID NO: 2657473 - RNA, 19 nt, Homo sapiens
  misc_RNA (1)...(19): siRNA sense strand
caaggaugccaaagauaaa

SEQ ID NO: 2657474 - RNA, 19 nt, Homo sapiens
  misc_RNA (1)...(19): siRNA sense strand
ggagggagacugugggaca

SEQ ID NO: 2657475 - RNA, 19 nt, Homo sapiens
  misc_RNA (1)...(19): siRNA sense strand
agacuuagcuuuacgugaa

SEQ ID NO: 2657476 - RNA, 19 nt, Homo sapiens
  misc_RNA (1)...(19): siRNA sense strand
ccaucaaguucgugugcuu

SEQ ID NO: 2657477 - RNA, 19 nt, Homo sapiens
  misc_RNA (1)...(19): siRNA sense strand
ccuuggagucugagaguga

SEQ ID NO: 2657478 - RNA, 19 nt, Homo sapiens
  misc_RNA (1)...(19): siRNA sense strand
ucucagagcuccucaagaa

SEQ ID NO: 2657479 - RNA, 19 nt, Homo sapiens
  misc_RNA (1)...(19): siRNA sense strand
cagagcgcaucgaggauaa

SEQ ID NO: 2657480 - RNA, 19 nt, Homo sapiens
  misc_RNA (1)...(19): siRNA sense strand
aaacagaauucaggaagaa

SEQ ID NO: 2657481 - RNA, 19 nt, Homo sapiens
  misc_RNA (1)...(19): siRNA sense strand
augacuagcccucggaaua

SEQ ID NO: 2657482 - RNA, 19 nt, Homo sapiens
  misc_RNA (1)...(19): siRNA sense strand
cauaacagcugcagaagca

SEQ ID NO: 2657483 - RNA, 19 nt, Homo sapiens
  misc_RNA (1)...(19): siRNA sense strand
cugaagaagagauuaagaa

SEQ ID NO: 2657484 - RNA, 19 nt, Homo sapiens
  misc_RNA (1)...(19): siRNA sense strand
gauaaaucagcauggagaa

SEQ ID NO: 2657485 - RNA, 19 nt, Homo sapiens
  misc_RNA (1)...(19): siRNA sense strand
guaauaggcaggagaagga

SEQ ID NO: 2657486 - RNA, 19 nt, Homo sapiens
  misc_RNA (1)...(19): siRNA sense strand
agaaacugaagaagagauu

SEQ ID NO: 2657487 - RNA, 19 nt, Homo sapiens
  misc_RNA (1)...(19): siRNA sense strand
cagaauucaggaagaagaa

SEQ ID NO: 2657488 - RNA, 19 nt, Homo sapiens
  misc_RNA (1)...(19): siRNA sense strand
cugcaugcaccaagaaauu

SEQ ID NO: 2657489 - RNA, 19 nt, Homo sapiens
  misc_RNA (1)...(19): siRNA sense strand
ccgacuggaaggagggaga

SEQ ID NO: 2657490 - RNA, 19 nt, Homo sapiens
  misc_RNA (1)...(19): siRNA sense strand
cuacagagucuuucauaau

SEQ ID NO: 2657491 - RNA, 19 nt, Homo sapiens
  misc_RNA (1)...(19): siRNA sense strand
uggaagauguuguggauuc

SEQ ID NO: 2657492 - RNA, 19 nt, Homo sapiens
  misc_RNA (1)...(19): siRNA sense strand
cagaagaaaaugcaaguaa

SEQ ID NO: 2657493 - RNA, 19 nt, Homo sapiens
  misc_RNA (1)...(19): siRNA sense strand
gaccauaacagcugcagaa

SEQ ID NO: 2657494 - RNA, 19 nt, Homo sapiens
  misc_RNA (1)...(19): siRNA sense strand
gggaugaauuggacucuuu

SEQ ID NO: 2657495 - RNA, 19 nt, Homo sapiens
  misc_RNA (1)...(19): siRNA sense strand
agaacaaaccacagaccau

SEQ ID NO: 2657496 - RNA, 19 nt, Homo sapiens
  misc_RNA (1)...(19): siRNA sense strand
gagcuaaugcaaacagaga

SEQ ID NO: 2657497 - RNA, 19 nt, Homo sapiens
  misc_RNA (1)...(19): siRNA sense strand
uggaagacgucacaaauuu

SEQ ID NO: 2657498 - RNA, 19 nt, Homo sapiens
  misc_RNA (1)...(19): siRNA sense strand
aagauaaagagaagcugaa

SEQ ID NO: 2657499 - RNA, 19 nt, Homo sapiens
  misc_RNA (1)...(19): siRNA sense strand
aagagaagcugaaucgaca

SEQ ID NO: 2657500 - RNA, 19 nt, Homo sapiens
  misc_RNA (1)...(19): siRNA sense strand
ggaaaggcaugaaagagga

SEQ ID NO: 2657501 - RNA, 19 nt, Homo sapiens
  misc_RNA (1)...(19): siRNA sense strand
uguuggaggcagauauuaa

SEQ ID NO: 2657502 - RNA, 19 nt, Homo sapiens
  misc_RNA (1)...(19): siRNA sense strand
auauuaaacucuuccggaa

SEQ ID NO: 2657503 - RNA, 19 nt, Homo sapiens
  misc_RNA (1)...(19): siRNA sense strand
uauuaaacucuuccggaaa

SEQ ID NO: 2657504 - RNA, 19 nt, Homo sapiens
  misc_RNA (1)...(19): siRNA sense strand
agugaagagcaaagagcuu

SEQ ID NO: 2657505 - RNA, 19 nt, Homo sapiens
  misc_RNA (1)...(19): siRNA sense strand
uguucuaacuguaaugcaa

SEQ ID NO: 2657506 - RNA, 19 nt, Homo sapiens
  misc_RNA (1)...(19): siRNA sense strand
gcauggagaaauaguuuau

SEQ ID NO: 2657507 - RNA, 19 nt, Homo sapiens
  misc_RNA (1)...(19): siRNA sense strand
ccucagagcagcaaacaca

SEQ ID NO: 2657508 - RNA, 19 nt, Homo sapiens
  misc_RNA (1)...(19): siRNA sense strand
cuugaaauccacaggcauu

SEQ ID NO: 2657509 - RNA, 19 nt, Homo sapiens
  misc_RNA (1)...(19): siRNA sense strand
aggaagauauaaagcgugu

SEQ ID NO: 2657510 - RNA, 19 nt, Homo sapiens
  misc_RNA (1)...(19): siRNA sense strand
aaucuacagucgaaggaau

SEQ ID NO: 2657511 - RNA, 19 nt, Homo sapiens
  misc_RNA (1)...(19): siRNA sense strand
caucauaccugccaaauca

SEQ ID NO: 2657512 - RNA, 19 nt, Homo sapiens
  misc_RNA (1)...(19): siRNA sense strand
ugccaaagauaaagagaag

SEQ ID NO: 2657513 - RNA, 19 nt, Homo sapiens
  misc_RNA (1)...(19): siRNA sense strand
cugaagaugcugaguuuua

SEQ ID NO: 2657514 - RNA, 19 nt, Homo sapiens
  misc_RNA (1)...(19): siRNA sense strand
gcaugaaagaggagcugca

SEQ ID NO: 2657515 - RNA, 19 nt, Homo sapiens
  misc_RNA (1)...(19): siRNA sense strand
aagaacuccagcagaauaa

SEQ ID NO: 2657516 - RNA, 19 nt, Homo sapiens
  misc_RNA (1)...(19): siRNA sense strand
caaguaaucuacagucgaa

SEQ ID NO: 2657517 - RNA, 19 nt, Homo sapiens
  misc_RNA (1)...(19): siRNA sense strand
gcaaaugugcacaaagguu

SEQ ID NO: 2657518 - RNA, 19 nt, Homo sapiens
  misc_RNA (1)...(19): siRNA sense strand
aaacagagaugcaucacau

SEQ ID NO: 2657519 - RNA, 19 nt, Homo sapiens
  misc_RNA (1)...(19): siRNA sense strand
gaagaaugggauaaauaca

SEQ ID NO: 2657520 - RNA, 19 nt, Homo sapiens
  misc_RNA (1)...(19): siRNA sense strand
ccaaagauaaagagaagcu

SEQ ID NO: 2657521 - RNA, 19 nt, Homo sapiens
  misc_RNA (1)...(19): siRNA sense strand
ugaccuacguggacaacau

SEQ ID NO: 2657522 - RNA, 19 nt, Homo sapiens
  misc_RNA (1)...(19): siRNA sense strand
ugguggaagacgucacaaa

SEQ ID NO: 2657523 - RNA, 19 nt, Homo sapiens
  misc_RNA (1)...(19): siRNA sense strand
gugcgugaauuaacaguau

SEQ ID NO: 2657524 - RNA, 19 nt, Homo sapiens
  misc_RNA (1)...(19): siRNA sense strand
caggagacggugacgguau

SEQ ID NO: 2657525 - RNA, 19 nt, Homo sapiens
  misc_RNA (1)...(19): siRNA sense strand
gaagaagccuccuugcauu

SEQ ID NO: 2657526 - RNA, 19 nt, Homo sapiens
  misc_RNA (1)...(19): siRNA sense strand
ucguuuggugcgugaauua

SEQ ID NO: 2657527 - RNA, 19 nt, Homo sapiens
  misc_RNA (1)...(19): siRNA sense strand
ucuacagagucuuucauaa

SEQ ID NO: 2657528 - RNA, 19 nt, Homo sapiens
  misc_RNA (1)...(19): siRNA sense strand
auaaaucagcauggagaaa

SEQ ID NO: 2657529 - RNA, 19 nt, Homo sapiens
  misc_RNA (1)...(19): siRNA sense strand
ccagaggaaagaacagcua

SEQ ID NO: 2657530 - RNA, 19 nt, Homo sapiens
  misc_RNA (1)...(19): siRNA sense strand
gcaccaagaaauuccaaga

SEQ ID NO: 2657531 - RNA, 19 nt, Homo sapiens
  misc_RNA (1)...(19): siRNA sense strand
gaguugagcugcagcgaag

SEQ ID NO: 2657532 - RNA, 19 nt, Homo sapiens
  misc_RNA (1)...(19): siRNA sense strand
caacgaagagggugccaca

SEQ ID NO: 2657533 - RNA, 19 nt, Homo sapiens
  misc_RNA (1)...(19): siRNA sense strand
auaaaacacuccuggggaa

SEQ ID NO: 2657534 - RNA, 19 nt, Homo sapiens
  misc_RNA (1)...(19): siRNA sense strand
agucugagagugaccauaa

SEQ ID NO: 2657535 - RNA, 19 nt, Homo sapiens
  misc_RNA (1)...(19): siRNA sense strand
uuagaugaguugcuugaaa

SEQ ID NO: 2657536 - RNA, 19 nt, Homo sapiens
  misc_RNA (1)...(19): siRNA sense strand
ggaacaaagucaucuaaag

SEQ ID NO: 2657537 - RNA, 19 nt, Homo sapiens
  misc_RNA (1)...(19): siRNA sense strand
ggaagggcauucugagcca

SEQ ID NO: 2657538 - RNA, 19 nt, Homo sapiens
  misc_RNA (1)...(19): siRNA sense strand
ucaggaaaggcaugaaaga

SEQ ID NO: 2657539 - RNA, 19 nt, Homo sapiens
  misc_RNA (1)...(19): siRNA sense strand
uagaugaguugcuugaaau

SEQ ID NO: 2657540 - RNA, 19 nt, Homo sapiens
  misc_RNA (1)...(19): siRNA sense strand
gaagauauaaagcguguca

SEQ ID NO: 2657541 - RNA, 19 nt, Homo sapiens
  misc_RNA (1)...(19): siRNA sense strand
acagaauucaggaagaaga

SEQ ID NO: 2657542 - RNA, 19 nt, Homo sapiens
  misc_RNA (1)...(19): siRNA sense strand
cagcauggagaaauaguuu

SEQ ID NO: 2657543 - RNA, 19 nt, Homo sapiens
  misc_RNA (1)...(19): siRNA sense strand
gagaaauaguuuaugcuug

SEQ ID NO: 2657544 - RNA, 19 nt, Homo sapiens
  misc_RNA (1)...(19): siRNA sense strand
acaaugaacaugaagacca

SEQ ID NO: 2657545 - RNA, 19 nt, Homo sapiens
  misc_RNA (1)...(19): siRNA sense strand
gauuuggauaucagcuaua

SEQ ID NO: 2657546 - RNA, 19 nt, Homo sapiens
  misc_RNA (1)...(19): siRNA sense strand
augccaaagauaaagagaa

SEQ ID NO: 2657547 - RNA, 19 nt, Homo sapiens
  misc_RNA (1)...(19): siRNA sense strand
ccaggaguuugaagcagaa

SEQ ID NO: 2657548 - RNA, 19 nt, Homo sapiens
  misc_RNA (1)...(19): siRNA sense strand
accauuagacuuagcuuua

SEQ ID NO: 2657549 - RNA, 19 nt, Homo sapiens
  misc_RNA (1)...(19): siRNA sense strand
uccugaagaugcugaguuu

SEQ ID NO: 2657550 - RNA, 19 nt, Homo sapiens
  misc_RNA (1)...(19): siRNA sense strand
ucaaaagccuggugguuca

SEQ ID NO: 2657551 - RNA, 19 nt, Homo sapiens
  misc_RNA (1)...(19): siRNA sense strand
ccacauccuuggagucuga

SEQ ID NO: 2657552 - RNA, 19 nt, Homo sapiens
  misc_RNA (1)...(19): siRNA sense strand
guggaagacgucacaaauu

SEQ ID NO: 2657553 - RNA, 19 nt, Homo sapiens
  misc_RNA (1)...(19): siRNA sense strand
gaagaagaaugggauaaau

SEQ ID NO: 2657554 - RNA, 19 nt, Homo sapiens
  misc_RNA (1)...(19): siRNA sense strand
gagauuaagaauucagugu

SEQ ID NO: 2657555 - RNA, 19 nt, Homo sapiens
  misc_RNA (1)...(19): siRNA sense strand
gaauggaggugaugaaguc

SEQ ID NO: 2657556 - RNA, 19 nt, Homo sapiens
  misc_RNA (1)...(19): siRNA sense strand
gugaagagcaaagagcuua

SEQ ID NO: 2657557 - RNA, 19 nt, Homo sapiens
  misc_RNA (1)...(19): siRNA sense strand
gguauaaaaccaaggaaaa

SEQ ID NO: 2657558 - RNA, 19 nt, Homo sapiens
  misc_RNA (1)...(19): siRNA sense strand
aggcaaacucagugggauu

SEQ ID NO: 2657559 - RNA, 19 nt, Homo sapiens
  misc_RNA (1)...(19): siRNA sense strand
guguagaacaggagcguuu

SEQ ID NO: 2657560 - RNA, 19 nt, Homo sapiens
  misc_RNA (1)...(19): siRNA sense strand
augaagaaccaaagaagua

SEQ ID NO: 2657561 - RNA, 19 nt, Homo sapiens
  misc_RNA (1)...(19): siRNA sense strand
cuccagaaauccaaggaaa

SEQ ID NO: 2657562 - RNA, 19 nt, Homo sapiens
  misc_RNA (1)...(19): siRNA sense strand
cagugggauuaaugaaaua

SEQ ID NO: 2657563 - RNA, 19 nt, Homo sapiens
  misc_RNA (1)...(19): siRNA sense strand
ccucauugaauuugaagaa

SEQ ID NO: 2657564 - RNA, 19 nt, Homo sapiens
  misc_RNA (1)...(19): siRNA sense strand
cuaccauagaggaggcaua

SEQ ID NO: 2657565 - RNA, 19 nt, Homo sapiens
  misc_RNA (1)...(19): siRNA sense strand
ccgaagaugaagaaccaaa

SEQ ID NO: 2657566 - RNA, 19 nt, Homo sapiens
  misc_RNA (1)...(19): siRNA sense strand
cuauaaacucuauguggaa

SEQ ID NO: 2657567 - RNA, 19 nt, Homo sapiens
  misc_RNA (1)...(19): siRNA sense strand
agguauaaaaccaaggaaa

SEQ ID NO: 2657568 - RNA, 19 nt, Homo sapiens
  misc_RNA (1)...(19): siRNA sense strand
gaggcauacuccaggucaa

SEQ ID NO: 2657569 - RNA, 19 nt, Homo sapiens
  misc_RNA (1)...(19): siRNA sense strand
auaaagaagcgguuugcua

SEQ ID NO: 2657570 - RNA, 19 nt, Homo sapiens
  misc_RNA (1)...(19): siRNA sense strand
ggcuaauacuacaguugaa

SEQ ID NO: 2657571 - RNA, 19 nt, Homo sapiens
  misc_RNA (1)...(19): siRNA sense strand
cagaaugauaccaaagaga

SEQ ID NO: 2657572 - RNA, 19 nt, Homo sapiens
  misc_RNA (1)...(19): siRNA sense strand
aaagcuuacuucaggcaaa

SEQ ID NO: 2657573 - RNA, 19 nt, Homo sapiens
  misc_RNA (1)...(19): siRNA sense strand
caagaagcugucagagcaa

SEQ ID NO: 2657574 - RNA, 19 nt, Homo sapiens
  misc_RNA (1)...(19): siRNA sense strand
guguugugcuucaggguga

SEQ ID NO: 2657575 - RNA, 19 nt, Homo sapiens
  misc_RNA (1)...(19): siRNA sense strand
aaacauggacagauaucaa

SEQ ID NO: 2657576 - RNA, 19 nt, Homo sapiens
  misc_RNA (1)...(19): siRNA sense strand
augaagaaggcuacaguau

SEQ ID NO: 2657577 - RNA, 19 nt, Homo sapiens
  misc_RNA (1)...(19): siRNA sense strand
caaaccauucagagcauaa

SEQ ID NO: 2657578 - RNA, 19 nt, Homo sapiens
  misc_RNA (1)...(19): siRNA sense strand
agaaaaggcagcuguuaaa

SEQ ID NO: 2657579 - RNA, 19 nt, Homo sapiens
  misc_RNA (1)...(19): siRNA sense strand
auguagaugaagaaggcua

SEQ ID NO: 2657580 - RNA, 19 nt, Homo sapiens
  misc_RNA (1)...(19): siRNA sense strand
auggagaagaacaaguaaa

SEQ ID NO: 2657581 - RNA, 19 nt, Homo sapiens
  misc_RNA (1)...(19): siRNA sense strand
agcuacacaaagagaaaua

SEQ ID NO: 2657582 - RNA, 19 nt, Homo sapiens
  misc_RNA (1)...(19): siRNA sense strand
ccuauaaacucuaugugga

SEQ ID NO: 2657583 - RNA, 19 nt, Homo sapiens
  misc_RNA (1)...(19): siRNA sense strand
uagugcaguugaagguaua

SEQ ID NO: 2657584 - RNA, 19 nt, Homo sapiens
  misc_RNA (1)...(19): siRNA sense strand
cuacaguauuaaaccagaa

SEQ ID NO: 2657585 - RNA, 19 nt, Homo sapiens
  misc_RNA (1)...(19): siRNA sense strand
aagaagaaguugcaggaac

SEQ ID NO: 2657586 - RNA, 19 nt, Homo sapiens
  misc_RNA (1)...(19): siRNA sense strand
caguacagaugaaucggaa

SEQ ID NO: 2657587 - RNA, 19 nt, Homo sapiens
  misc_RNA (1)...(19): siRNA sense strand
gaaugauaccaaagagaac

SEQ ID NO: 2657588 - RNA, 19 nt, Homo sapiens
  misc_RNA (1)...(19): siRNA sense strand
cuugcaacauacuggaaau

SEQ ID NO: 2657589 - RNA, 19 nt, Homo sapiens
  misc_RNA (1)...(19): siRNA sense strand
ucuaaugaggaguuaacaa

SEQ ID NO: 2657590 - RNA, 19 nt, Homo sapiens
  misc_RNA (1)...(19): siRNA sense strand
accaguggauggaggagua

SEQ ID NO: 2657591 - RNA, 19 nt, Homo sapiens
  misc_RNA (1)...(19): siRNA sense strand
agaaguauggagaagaaca

SEQ ID NO: 2657592 - RNA, 19 nt, Homo sapiens
  misc_RNA (1)...(19): siRNA sense strand
uggcguauuucgucgagaa

SEQ ID NO: 2657593 - RNA, 19 nt, Homo sapiens
  misc_RNA (1)...(19): siRNA sense strand
aggccagguccaugaagaa

SEQ ID NO: 2657594 - RNA, 19 nt, Homo sapiens
  misc_RNA (1)...(19): siRNA sense strand
cggauagaaauuaagccua

SEQ ID NO: 2657595 - RNA, 19 nt, Homo sapiens
  misc_RNA (1)...(19): siRNA sense strand
aagaacaaguaaagucuca

SEQ ID NO: 2657596 - RNA, 19 nt, Homo sapiens
  misc_RNA (1)...(19): siRNA sense strand
ccuuaauaaagaagcgguu

SEQ ID NO: 2657597 - RNA, 19 nt, Homo sapiens
  misc_RNA (1)...(19): siRNA sense strand
agaacaggagcguuugaaa

SEQ ID NO: 2657598 - RNA, 19 nt, Homo sapiens
  misc_RNA (1)...(19): siRNA sense strand
aaaccaaggaaaagaaaga

SEQ ID NO: 2657599 - RNA, 19 nt, Homo sapiens
  misc_RNA (1)...(19): siRNA sense strand
caauauggaaugcagaaca

SEQ ID NO: 2657600 - RNA, 19 nt, Homo sapiens
  misc_RNA (1)...(19): siRNA sense strand
caguaugggauguauucaa

SEQ ID NO: 2657601 - RNA, 19 nt, Homo sapiens
  misc_RNA (1)...(19): siRNA sense strand
uagaaaaggcagcuguuaa

SEQ ID NO: 2657602 - RNA, 19 nt, Homo sapiens
  misc_RNA (1)...(19): siRNA sense strand
ugacagaaacagcucagaa

SEQ ID NO: 2657603 - RNA, 19 nt, Homo sapiens
  misc_RNA (1)...(19): siRNA sense strand
uuauaggauccuugucaaa

SEQ ID NO: 2657604 - RNA, 19 nt, Homo sapiens
  misc_RNA (1)...(19): siRNA sense strand
guucagaaguauggagaag

SEQ ID NO: 2657605 - RNA, 19 nt, Homo sapiens
  misc_RNA (1)...(19): siRNA sense strand
cagaacaaaugaaagccuu

SEQ ID NO: 2657606 - RNA, 19 nt, Homo sapiens
  misc_RNA (1)...(19): siRNA sense strand
aagcugauuucgaacagaa

SEQ ID NO: 2657607 - RNA, 19 nt, Homo sapiens
  misc_RNA (1)...(19): siRNA sense strand
gcaaaaucugcaagcaauu

SEQ ID NO: 2657608 - RNA, 19 nt, Homo sapiens
  misc_RNA (1)...(19): siRNA sense strand
aaggaaggagcuacacaaa

SEQ ID NO: 2657609 - RNA, 19 nt, Homo sapiens
  misc_RNA (1)...(19): siRNA sense strand
caacaaaagaacuagcaga

SEQ ID NO: 2657610 - RNA, 19 nt, Homo sapiens
  misc_RNA (1)...(19): siRNA sense strand
uagcaaaaucugcaagcaa

SEQ ID NO: 2657611 - RNA, 19 nt, Homo sapiens
  misc_RNA (1)...(19): siRNA sense strand
ucucauucacauaaaggaa

SEQ ID NO: 2657612 - RNA, 19 nt, Homo sapiens
  misc_RNA (1)...(19): siRNA sense strand
uccagaaauccaaggaaaa

SEQ ID NO: 2657613 - RNA, 19 nt, Homo sapiens
  misc_RNA (1)...(19): siRNA sense strand
cuacacaaagagaaauaga

SEQ ID NO: 2657614 - RNA, 19 nt, Homo sapiens
  misc_RNA (1)...(19): siRNA sense strand
acagaaaaugacagaaaca

SEQ ID NO: 2657615 - RNA, 19 nt, Homo sapiens
  misc_RNA (1)...(19): siRNA sense strand
gcuaauacuacaguugaaa

SEQ ID NO: 2657616 - RNA, 19 nt, Homo sapiens
  misc_RNA (1)...(19): siRNA sense strand
ggaugaaagcagugauaga

SEQ ID NO: 2657617 - RNA, 19 nt, Homo sapiens
  misc_RNA (1)...(19): siRNA sense strand
acuuauaacagaagaggaa

SEQ ID NO: 2657618 - RNA, 19 nt, Homo sapiens
  misc_RNA (1)...(19): siRNA sense strand
gcugaucaguggugggcua

SEQ ID NO: 2657619 - RNA, 19 nt, Homo sapiens
  misc_RNA (1)...(19): siRNA sense strand
aggcggaauuuaagaagaa

SEQ ID NO: 2657620 - RNA, 19 nt, Homo sapiens
  misc_RNA (1)...(19): siRNA sense strand
ggaagaaaggagaggccau

SEQ ID NO: 2657621 - RNA, 19 nt, Homo sapiens
  misc_RNA (1)...(19): siRNA sense strand
ggauagcagcucagaggaa

SEQ ID NO: 2657622 - RNA, 19 nt, Homo sapiens
  misc_RNA (1)...(19): siRNA sense strand
aagcaagaacugaagacaa

SEQ ID NO: 2657623 - RNA, 19 nt, Homo sapiens
  misc_RNA (1)...(19): siRNA sense strand
aagaaaggccaaagggcau

SEQ ID NO: 2657624 - RNA, 19 nt, Homo sapiens
  misc_RNA (1)...(19): siRNA sense strand
agguaaagauuuugggcuu

SEQ ID NO: 2657625 - RNA, 19 nt, Homo sapiens
  misc_RNA (1)...(19): siRNA sense strand
aggaaauagaaguggaagu

SEQ ID NO: 2657626 - RNA, 19 nt, Homo sapiens
  misc_RNA (1)...(19): siRNA sense strand
gaagaaaggccaaagggca

SEQ ID NO: 2657627 - RNA, 19 nt, Homo sapiens
  misc_RNA (1)...(19): siRNA sense strand
ggcacauggaagagaaauu

SEQ ID NO: 2657628 - RNA, 19 nt, Homo sapiens
  misc_RNA (1)...(19): siRNA sense strand
ccuacuuccaagaaagaaa

SEQ ID NO: 2657629 - RNA, 19 nt, Homo sapiens
  misc_RNA (1)...(19): siRNA sense strand
aggagaggccauuggguuu

SEQ ID NO: 2657630 - RNA, 19 nt, Homo sapiens
  misc_RNA (1)...(19): siRNA sense strand
uggaagugccugugguaga

SEQ ID NO: 2657631 - RNA, 19 nt, Homo sapiens
  misc_RNA (1)...(19): siRNA sense strand
cuaugaauggugagauaau

SEQ ID NO: 2657632 - RNA, 19 nt, Homo sapiens
  misc_RNA (1)...(19): siRNA sense strand
uuccgaaggucaugauaaa

SEQ ID NO: 2657633 - RNA, 19 nt, Homo sapiens
  misc_RNA (1)...(19): siRNA sense strand
augcuaagauucuguggaa

SEQ ID NO: 2657634 - RNA, 19 nt, Homo sapiens
  misc_RNA (1)...(19): siRNA sense strand
guucuuugauagagguuga

SEQ ID NO: 2657635 - RNA, 19 nt, Homo sapiens
  misc_RNA (1)...(19): siRNA sense strand
cugaaaauccagaguguuu

SEQ ID NO: 2657636 - RNA, 19 nt, Homo sapiens
  misc_RNA (1)...(19): siRNA sense strand
acucauacucgaaguggua

SEQ ID NO: 2657637 - RNA, 19 nt, Homo sapiens
  misc_RNA (1)...(19): siRNA sense strand
aagagaagcaagaugguga

SEQ ID NO: 2657638 - RNA, 19 nt, Homo sapiens
  misc_RNA (1)...(19): siRNA sense strand
cugcuaagaagaaagcuaa

SEQ ID NO: 2657639 - RNA, 19 nt, Homo sapiens
  misc_RNA (1)...(19): siRNA sense strand
cauuggaagaccaggguga

SEQ ID NO: 2657640 - RNA, 19 nt, Homo sapiens
  misc_RNA (1)...(19): siRNA sense strand
ccugcuaagaagaaagcua

SEQ ID NO: 2657641 - RNA, 19 nt, Homo sapiens
  misc_RNA (1)...(19): siRNA sense strand
accuaugucuggagaauau

SEQ ID NO: 2657642 - RNA, 19 nt, Homo sapiens
  misc_RNA (1)...(19): siRNA sense strand
uuauaacagaagaggaaga

SEQ ID NO: 2657643 - RNA, 19 nt, Homo sapiens
  misc_RNA (1)...(19): siRNA sense strand
aaucugaauuagagccuau

SEQ ID NO: 2657644 - RNA, 19 nt, Homo sapiens
  misc_RNA (1)...(19): siRNA sense strand
guugauggaugaaggcaca

SEQ ID NO: 2657645 - RNA, 19 nt, Homo sapiens
  misc_RNA (1)...(19): siRNA sense strand
gcucagaggaaauagaagu

SEQ ID NO: 2657646 - RNA, 19 nt, Homo sapiens
  misc_RNA (1)...(19): siRNA sense strand
agaggaaauagaaguggaa

SEQ ID NO: 2657647 - RNA, 19 nt, Homo sapiens
  misc_RNA (1)...(19): siRNA sense strand
gccaugaggaauuggaaaa

SEQ ID NO: 2657648 - RNA, 19 nt, Homo sapiens
  misc_RNA (1)...(19): siRNA sense strand
ugauagagaugcacggcca

SEQ ID NO: 2657649 - RNA, 19 nt, Homo sapiens
  misc_RNA (1)...(19): siRNA sense strand
gcauaaaggaccugcuaag

SEQ ID NO: 2657650 - RNA, 19 nt, Homo sapiens
  misc_RNA (1)...(19): siRNA sense strand
gaaccugaacagagaggga

SEQ ID NO: 2657651 - RNA, 19 nt, Homo sapiens
  misc_RNA (1)...(19): siRNA sense strand
ccaugaacuccuuugggaa

SEQ ID NO: 2657652 - RNA, 19 nt, Homo sapiens
  misc_RNA (1)...(19): siRNA sense strand
agguagaugcaccagauaa

SEQ ID NO: 2657653 - RNA, 19 nt, Homo sapiens
  misc_RNA (1)...(19): siRNA sense strand
aagcagugauagagaugca

SEQ ID NO: 2657654 - RNA, 19 nt, Homo sapiens
  misc_RNA (1)...(19): siRNA sense strand
ucaguuaagccuacaggaa

SEQ ID NO: 2657655 - RNA, 19 nt, Homo sapiens
  misc_RNA (1)...(19): siRNA sense strand
cagagagcucagaagaauu

SEQ ID NO: 2657656 - RNA, 19 nt, Homo sapiens
  misc_RNA (1)...(19): siRNA sense strand
gaaagcacaucuugggagu

SEQ ID NO: 2657657 - RNA, 19 nt, Homo sapiens
  misc_RNA (1)...(19): siRNA sense strand
caggaaauggagagaaaug

SEQ ID NO: 2657658 - RNA, 19 nt, Homo sapiens
  misc_RNA (1)...(19): siRNA sense strand
agauaagaccccacguaua

SEQ ID NO: 2657659 - RNA, 19 nt, Homo sapiens
  misc_RNA (1)...(19): siRNA sense strand
augcaggacagaagaauca

SEQ ID NO: 2657660 - RNA, 19 nt, Homo sapiens
  misc_RNA (1)...(19): siRNA sense strand
ucauagcaguacugauuau

SEQ ID NO: 2657661 - RNA, 19 nt, Homo sapiens
  misc_RNA (1)...(19): siRNA sense strand
cagaggaaauagaagugga

SEQ ID NO: 2657662 - RNA, 19 nt, Homo sapiens
  misc_RNA (1)...(19): siRNA sense strand
ccagagcauuacaaagaga

SEQ ID NO: 2657663 - RNA, 19 nt, Homo sapiens
  misc_RNA (1)...(19): siRNA sense strand
gugaaaaggaaucugaauu

SEQ ID NO: 2657664 - RNA, 19 nt, Homo sapiens
  misc_RNA (1)...(19): siRNA sense strand
ucagaaauguugauggaug

SEQ ID NO: 2657665 - RNA, 19 nt, Homo sapiens
  misc_RNA (1)...(19): siRNA sense strand
cuguggauaugcuggaaaa

SEQ ID NO: 2657666 - RNA, 19 nt, Homo sapiens
  misc_RNA (1)...(19): siRNA sense strand
cagugaagacucuacaaau

SEQ ID NO: 2657667 - RNA, 19 nt, Homo sapiens
  misc_RNA (1)...(19): siRNA sense strand
auacgaagcaagaacugaa

SEQ ID NO: 2657668 - RNA, 19 nt, Homo sapiens
  misc_RNA (1)...(19): siRNA sense strand
gcaagcaauacuuugagaa

SEQ ID NO: 2657669 - RNA, 19 nt, Homo sapiens
  misc_RNA (1)...(19): siRNA sense strand
cagaagaugcgcuuggcuu

SEQ ID NO: 2657670 - RNA, 19 nt, Homo sapiens
  misc_RNA (1)...(19): siRNA sense strand
ucuaaagcggccaaagauu

SEQ ID NO: 2657671 - RNA, 19 nt, Homo sapiens
  misc_RNA (1)...(19): siRNA sense strand
gugguagacaggcggaauu

SEQ ID NO: 2657672 - RNA, 19 nt, Homo sapiens
  misc_RNA (1)...(19): siRNA sense strand
agaauaugguccugcaucu

SEQ ID NO: 2657673 - RNA, 19 nt, Homo sapiens
  misc_RNA (1)...(19): siRNA sense strand
aaucuaaagcggccaaaga

SEQ ID NO: 2657674 - RNA, 19 nt, Homo sapiens
  misc_RNA (1)...(19): siRNA sense strand
agggauugaauuugaggau

SEQ ID NO: 2657675 - RNA, 19 nt, Homo sapiens
  misc_RNA (1)...(19): siRNA sense strand
agagaagcaagauggugaa

SEQ ID NO: 2657676 - RNA, 19 nt, Homo sapiens
  misc_RNA (1)...(19): siRNA sense strand
ccagugaagacucuacaaa

SEQ ID NO: 2657677 - RNA, 19 nt, Homo sapiens
  misc_RNA (1)...(19): siRNA sense strand
cgaaauaucaucauggaaa

SEQ ID NO: 2657678 - RNA, 19 nt, Homo sapiens
  misc_RNA (1)...(19): siRNA sense strand
ggaacuaagugaaggcaga

SEQ ID NO: 2657679 - RNA, 19 nt, Homo sapiens
  misc_RNA (1)...(19): siRNA sense strand
guuuagaaguggaguucaa

SEQ ID NO: 2657680 - RNA, 19 nt, Homo sapiens
  misc_RNA (1)...(19): siRNA sense strand
ggaaaacagaucaggaaaa

SEQ ID NO: 2657681 - RNA, 19 nt, Homo sapiens
  misc_RNA (1)...(19): siRNA sense strand
cugaagaugcagaacaaua

SEQ ID NO: 2657682 - RNA, 19 nt, Homo sapiens
  misc_RNA (1)...(19): siRNA sense strand
cagaauauucacagaaaga

SEQ ID NO: 2657683 - RNA, 19 nt, Homo sapiens
  misc_RNA (1)...(19): siRNA sense strand
cugcaagagcaaaugaaua

SEQ ID NO: 2657684 - RNA, 19 nt, Homo sapiens
  misc_RNA (1)...(19): siRNA sense strand
cugaagaaacuaaggauga

SEQ ID NO: 2657685 - RNA, 19 nt, Homo sapiens
  misc_RNA (1)...(19): siRNA sense strand
cuguaauccaagaaagaua

SEQ ID NO: 2657686 - RNA, 19 nt, Homo sapiens
  misc_RNA (1)...(19): siRNA sense strand
agguauaggaagaagaaaa

SEQ ID NO: 2657687 - RNA, 19 nt, Homo sapiens
  misc_RNA (1)...(19): siRNA sense strand
ccaagaaagaucaagagaa

SEQ ID NO: 2657688 - RNA, 19 nt, Homo sapiens
  misc_RNA (1)...(19): siRNA sense strand
ugcaagagcaaaugaauaa

SEQ ID NO: 2657689 - RNA, 19 nt, Homo sapiens
  misc_RNA (1)...(19): siRNA sense strand
caucauuaguagagccaga

SEQ ID NO: 2657690 - RNA, 19 nt, Homo sapiens
  misc_RNA (1)...(19): siRNA sense strand
ccacuaaguaauaagagaa

SEQ ID NO: 2657691 - RNA, 19 nt, Homo sapiens
  misc_RNA (1)...(19): siRNA sense strand
agucaauaaaggaagcaaa

SEQ ID NO: 2657692 - RNA, 19 nt, Homo sapiens
  misc_RNA (1)...(19): siRNA sense strand
gugaaagcccugauagaau

SEQ ID NO: 2657693 - RNA, 19 nt, Homo sapiens
  misc_RNA (1)...(19): siRNA sense strand
ccaaaagaugagagauuua

SEQ ID NO: 2657694 - RNA, 19 nt, Homo sapiens
  misc_RNA (1)...(19): siRNA sense strand
acacaauugucucuggaaa

SEQ ID NO: 2657695 - RNA, 19 nt, Homo sapiens
  misc_RNA (1)...(19): siRNA sense strand
gcagaaagcagaaagggau

SEQ ID NO: 2657696 - RNA, 19 nt, Homo sapiens
  misc_RNA (1)...(19): siRNA sense strand
gcuaagguuaauugugaaa

SEQ ID NO: 2657697 - RNA, 19 nt, Homo sapiens
  misc_RNA (1)...(19): siRNA sense strand
aagaauuaacccaggaaau

SEQ ID NO: 2657698 - RNA, 19 nt, Homo sapiens
  misc_RNA (1)...(19): siRNA sense strand
acucaguaccucagcaaua

SEQ ID NO: 2657699 - RNA, 19 nt, Homo sapiens
  misc_RNA (1)...(19): siRNA sense strand
agaugagagugaugcuaua

SEQ ID NO: 2657700 - RNA, 19 nt, Homo sapiens
  misc_RNA (1)...(19): siRNA sense strand
uaguagagccagagaagau

SEQ ID NO: 2657701 - RNA, 19 nt, Homo sapiens
  misc_RNA (1)...(19): siRNA sense strand
auguauaagaugccagaaa

SEQ ID NO: 2657702 - RNA, 19 nt, Homo sapiens
  misc_RNA (1)...(19): siRNA sense strand
agacaaaaccaucuagaaa

SEQ ID NO: 2657703 - RNA, 19 nt, Homo sapiens
  misc_RNA (1)...(19): siRNA sense strand
cccugaagaugcagaacaa

SEQ ID NO: 2657704 - RNA, 19 nt, Homo sapiens
  misc_RNA (1)...(19): siRNA sense strand
aagaugaaacagaacgaaa

SEQ ID NO: 2657705 - RNA, 19 nt, Homo sapiens
  misc_RNA (1)...(19): siRNA sense strand
gaaaguaagcagagaugca

SEQ ID NO: 2657706 - RNA, 19 nt, Homo sapiens
  misc_RNA (1)...(19): siRNA sense strand
gggcaacaagauacaauaa

SEQ ID NO: 2657707 - RNA, 19 nt, Homo sapiens
  misc_RNA (1)...(19): siRNA sense strand
uuauaagguggcagaguua

SEQ ID NO: 2657708 - RNA, 19 nt, Homo sapiens
  misc_RNA (1)...(19): siRNA sense strand
gaugguaaagagaagaaua

SEQ ID NO: 2657709 - RNA, 19 nt, Homo sapiens
  misc_RNA (1)...(19): siRNA sense strand
uggaugaggccaaggauuu

SEQ ID NO: 2657710 - RNA, 19 nt, Homo sapiens
  misc_RNA (1)...(19): siRNA sense strand
gaauauucacagaaagaga

SEQ ID NO: 2657711 - RNA, 19 nt, Homo sapiens
  misc_RNA (1)...(19): siRNA sense strand
ccaaaagaggaaacagaaa

SEQ ID NO: 2657712 - RNA, 19 nt, Homo sapiens
  misc_RNA (1)...(19): siRNA sense strand
gaggaaugccagaggggaa

SEQ ID NO: 2657713 - RNA, 19 nt, Homo sapiens
  misc_RNA (1)...(19): siRNA sense strand
acucagaucacauguauaa

SEQ ID NO: 2657714 - RNA, 19 nt, Homo sapiens
  misc_RNA (1)...(19): siRNA sense strand
accaaaagguauaggaaga

SEQ ID NO: 2657715 - RNA, 19 nt, Homo sapiens
  misc_RNA (1)...(19): siRNA sense strand
ugagagaacaauuggccaa

SEQ ID NO: 2657716 - RNA, 19 nt, Homo sapiens
  misc_RNA (1)...(19): siRNA sense strand
gagcaaacccuaaucaaaa

SEQ ID NO: 2657717 - RNA, 19 nt, Homo sapiens
  misc_RNA (1)...(19): siRNA sense strand
gagugaugcuauagucaau

SEQ ID NO: 2657718 - RNA, 19 nt, Homo sapiens
  misc_RNA (1)...(19): siRNA sense strand
gugaugaaacugugauaga

SEQ ID NO: 2657719 - RNA, 19 nt, Homo sapiens
  misc_RNA (1)...(19): siRNA sense strand
cuagaaaggaagucacaau

SEQ ID NO: 2657720 - RNA, 19 nt, Homo sapiens
  misc_RNA (1)...(19): siRNA sense strand
caaaagaggaaacagaaaa

SEQ ID NO: 2657721 - RNA, 19 nt, Homo sapiens
  misc_RNA (1)...(19): siRNA sense strand
agaugaaacagaacgaaau

SEQ ID NO: 2657722 - RNA, 19 nt, Homo sapiens
  misc_RNA (1)...(19): siRNA sense strand
uuacauugacagagaccaa

SEQ ID NO: 2657723 - RNA, 19 nt, Homo sapiens
  misc_RNA (1)...(19): siRNA sense strand
ggcaugucauagagauuua

SEQ ID NO: 2657724 - RNA, 19 nt, Homo sapiens
  misc_RNA (1)...(19): siRNA sense strand
uuuaaaggcagcugagauu

SEQ ID NO: 2657725 - RNA, 19 nt, Homo sapiens
  misc_RNA (1)...(19): siRNA sense strand
ccaaaauauugaagggcca

SEQ ID NO: 2657726 - RNA, 19 nt, Homo sapiens
  misc_RNA (1)...(19): siRNA sense strand
cugagaaauggauuagaua

SEQ ID NO: 2657727 - RNA, 19 nt, Homo sapiens
  misc_RNA (1)...(19): siRNA sense strand
uggaaaagauggcaaagaa

SEQ ID NO: 2657728 - RNA, 19 nt, Homo sapiens
  misc_RNA (1)...(19): siRNA sense strand
caaagagaaaagaaggaaa

SEQ ID NO: 2657729 - RNA, 19 nt, Homo sapiens
  misc_RNA (1)...(19): siRNA sense strand
uggcaaaacuauugacuca

SEQ ID NO: 2657730 - RNA, 19 nt, Homo sapiens
  misc_RNA (1)...(19): siRNA sense strand
cagacaaagaccaugaauu

SEQ ID NO: 2657731 - RNA, 19 nt, Homo sapiens
  misc_RNA (1)...(19): siRNA sense strand
ugaaacagaacgaaaucaa

SEQ ID NO: 2657732 - RNA, 19 nt, Homo sapiens
  misc_RNA (1)...(19): siRNA sense strand
guucagugacggagagcga

SEQ ID NO: 2657733 - RNA, 19 nt, Homo sapiens
  misc_RNA (1)...(19): siRNA sense strand
gcacccaggaggaaagauu

SEQ ID NO: 2657734 - RNA, 19 nt, Homo sapiens
  misc_RNA (1)...(19): siRNA sense strand
ugaugaacccauugaguga

SEQ ID NO: 2657735 - RNA, 19 nt, Homo sapiens
  misc_RNA (1)...(19): siRNA sense strand
agcauuaaccggagaaaca

SEQ ID NO: 2657736 - RNA, 19 nt, Homo sapiens
  misc_RNA (1)...(19): siRNA sense strand
auuaaaagguggagcagau

SEQ ID NO: 2657737 - RNA, 19 nt, Homo sapiens
  misc_RNA (1)...(19): siRNA sense strand
auuagaaucuguugaccaa

SEQ ID NO: 2657738 - RNA, 19 nt, Homo sapiens
  misc_RNA (1)...(19): siRNA sense strand
uuaauagagaugagaguga

SEQ ID NO: 2657739 - RNA, 19 nt, Homo sapiens
  misc_RNA (1)...(19): siRNA sense strand
agagaaugaucuuacagaa

SEQ ID NO: 2657740 - RNA, 19 nt, Homo sapiens
  misc_RNA (1)...(19): siRNA sense strand
caaguuaggacaaugcaaa

SEQ ID NO: 2657741 - RNA, 19 nt, Homo sapiens
  misc_RNA (1)...(19): siRNA sense strand
aauaagaaacccugaagau

SEQ ID NO: 2657742 - RNA, 19 nt, Homo sapiens
  misc_RNA (1)...(19): siRNA sense strand
uagaaaguggucagauuua

SEQ ID NO: 2657743 - RNA, 19 nt, Homo sapiens
  misc_RNA (1)...(19): siRNA sense strand
uggaauuaugcuuggagua

SEQ ID NO: 2657744 - RNA, 19 nt, Homo sapiens
  misc_RNA (1)...(19): siRNA sense strand
ggcugaaaguccugaaguu

SEQ ID NO: 2657745 - RNA, 19 nt, Homo sapiens
  misc_RNA (1)...(19): siRNA sense strand
cgggauuggaggagccaua

SEQ ID NO: 2657746 - RNA, 19 nt, Homo sapiens
  misc_RNA (1)...(19): siRNA sense strand
gggaggacuggcagacaaa

SEQ ID NO: 2657747 - RNA, 19 nt, Homo sapiens
  misc_RNA (1)...(19): siRNA sense strand
ccuauaauggugaggccaa

SEQ ID NO: 2657748 - RNA, 19 nt, Homo sapiens
  misc_RNA (1)...(19): siRNA sense strand
augcauugcuaaccagaaa

SEQ ID NO: 2657749 - RNA, 19 nt, Homo sapiens
  misc_RNA (1)...(19): siRNA sense strand
ggaacaugguauaggaggu

SEQ ID NO: 2657750 - RNA, 19 nt, Homo sapiens
  misc_RNA (1)...(19): siRNA sense strand
augaagaagaugaugauga

SEQ ID NO: 2657751 - RNA, 19 nt, Homo sapiens
  misc_RNA (1)...(19): siRNA sense strand
aaauguggagagagauaaa

SEQ ID NO: 2657752 - RNA, 19 nt, Homo sapiens
  misc_RNA (1)...(19): siRNA sense strand
ggacauugccagagaggug

SEQ ID NO: 2657753 - RNA, 19 nt, Homo sapiens
  misc_RNA (1)...(19): siRNA sense strand
cagacaaagugggaaggaa

SEQ ID NO: 2657754 - RNA, 19 nt, Homo sapiens
  misc_RNA (1)...(19): siRNA sense strand
auagaugagcugauugaaa

SEQ ID NO: 2657755 - RNA, 19 nt, Homo sapiens
  misc_RNA (1)...(19): siRNA sense strand
aaacaguaaagaaggugaa

SEQ ID NO: 2657756 - RNA, 19 nt, Homo sapiens
  misc_RNA (1)...(19): siRNA sense strand
ccaagggcgaugaguacaa

SEQ ID NO: 2657757 - RNA, 19 nt, Homo sapiens
  misc_RNA (1)...(19): siRNA sense strand
gggcauggcucuuauggca

SEQ ID NO: 2657758 - RNA, 19 nt, Homo sapiens
  misc_RNA (1)...(19): siRNA sense strand
ugaaauugagagugacaca

SEQ ID NO: 2657759 - RNA, 19 nt, Homo sapiens
  misc_RNA (1)...(19): siRNA sense strand
agagaggugaagaaacaaa

SEQ ID NO: 2657760 - RNA, 19 nt, Homo sapiens
  misc_RNA (1)...(19): siRNA sense strand
cuggaauggaauacgacaa

SEQ ID NO: 2657761 - RNA, 19 nt, Homo sapiens
  misc_RNA (1)...(19): siRNA sense strand
uggaugauucugaaguuaa

SEQ ID NO: 2657762 - RNA, 19 nt, Homo sapiens
  misc_RNA (1)...(19): siRNA sense strand
ugacacaggaacaugguau

SEQ ID NO: 2657763 - RNA, 19 nt, Homo sapiens
  misc_RNA (1)...(19): siRNA sense strand
ugagagugacacaggaaca

SEQ ID NO: 2657764 - RNA, 19 nt, Homo sapiens
  misc_RNA (1)...(19): siRNA sense strand
gcugauugaaauugagagu

SEQ ID NO: 2657765 - RNA, 19 nt, Homo sapiens
  misc_RNA (1)...(19): siRNA sense strand
auguggagagagauaaaua

SEQ ID NO: 2657766 - RNA, 19 nt, Homo sapiens
  misc_RNA (1)...(19): siRNA sense strand
ggaauacgacaauggcaga

SEQ ID NO: 2657767 - RNA, 19 nt, Homo sapiens
  misc_RNA (1)...(19): siRNA sense strand
caacacagauuuugagcca

SEQ ID NO: 2657768 - RNA, 19 nt, Homo sapiens
  misc_RNA (1)...(19): siRNA sense strand
gguuccaagaugaagaaga

SEQ ID NO: 2657769 - RNA, 19 nt, Homo sapiens
  misc_RNA (1)...(19): siRNA sense strand
ccaagaugaagaagaugau

SEQ ID NO: 2657770 - RNA, 19 nt, Homo sapiens
  misc_RNA (1)...(19): siRNA sense strand
ucuuguuggagguuggaaa

SEQ ID NO: 2657771 - RNA, 19 nt, Homo sapiens
  misc_RNA (1)...(19): siRNA sense strand
caacgaugacgaaggcuca

SEQ ID NO: 2657772 - RNA, 19 nt, Homo sapiens
  misc_RNA (1)...(19): siRNA sense strand
agaugaagaagaugaugau

SEQ ID NO: 2657773 - RNA, 19 nt, Homo sapiens
  misc_RNA (1)...(19): siRNA sense strand
gcuggaaucagaaaggaga

SEQ ID NO: 2657774 - RNA, 19 nt, Homo sapiens
  misc_RNA (1)...(19): siRNA sense strand
caugaugaagcuuggauga

SEQ ID NO: 2657775 - RNA, 19 nt, Homo sapiens
  misc_RNA (1)...(19): siRNA sense strand
aguuaauucaugacaccaa

SEQ ID NO: 2657776 - RNA, 19 nt, Homo sapiens
  misc_RNA (1)...(19): siRNA sense strand
uugccagagaggugaagaa

SEQ ID NO: 2657777 - RNA, 19 nt, Homo sapiens
  misc_RNA (1)...(19): siRNA sense strand
ccggagggcaacaggcuuu

SEQ ID NO: 2657778 - RNA, 19 nt, Homo sapiens
  misc_RNA (1)...(19): siRNA sense strand
ggggaggacuggcagacaa

SEQ ID NO: 2657779 - RNA, 19 nt, Homo sapiens
  misc_RNA (1)...(19): siRNA sense strand
ucuuaaaugcgcuaugcaa

SEQ ID NO: 2657780 - RNA, 19 nt, Homo sapiens
  misc_RNA (1)...(19): siRNA sense strand
uggaauggaauacgacaau

SEQ ID NO: 2657781 - RNA, 19 nt, Homo sapiens
  misc_RNA (1)...(19): siRNA sense strand
aagaguuagcccagcagua

SEQ ID NO: 2657782 - RNA, 19 nt, Homo sapiens
  misc_RNA (1)...(19): siRNA sense strand
gggccaucaucccgcacua

SEQ ID NO: 2657783 - RNA, 19 nt, Homo sapiens
  misc_RNA (1)...(19): siRNA sense strand
gaugaauaugcauugcuaa

SEQ ID NO: 2657784 - RNA, 19 nt, Homo sapiens
  misc_RNA (1)...(19): siRNA sense strand
uggcagacaaagugggaag

SEQ ID NO: 2657785 - RNA, 19 nt, Homo sapiens
  misc_RNA (1)...(19): siRNA sense strand
caaacaguaaagaagguga

SEQ ID NO: 2657786 - RNA, 19 nt, Homo sapiens
  misc_RNA (1)...(19): siRNA sense strand
gagagagauaaauaugcaa

SEQ ID NO: 2657787 - RNA, 19 nt, Homo sapiens
  misc_RNA (1)...(19): siRNA sense strand
gaugaugacuauagugccu

SEQ ID NO: 2657788 - RNA, 19 nt, Homo sapiens
  misc_RNA (1)...(19): siRNA sense strand
guaugaaccaagcgaagga

SEQ ID NO: 2657789 - RNA, 19 nt, Homo sapiens
  misc_RNA (1)...(19): siRNA sense strand
ugucguuggcuucguguua

SEQ ID NO: 2657790 - RNA, 19 nt, Homo sapiens
  misc_RNA (1)...(19): siRNA sense strand
ggagaaaccuauaauggug

SEQ ID NO: 2657791 - RNA, 19 nt, Homo sapiens
  misc_RNA (1)...(19): siRNA sense strand
agaugagcugauugaaauu

SEQ ID NO: 2657792 - RNA, 19 nt, Homo sapiens
  misc_RNA (1)...(19): siRNA sense strand
gaaucaagcuguggaccga

SEQ ID NO: 2657793 - RNA, 19 nt, Homo sapiens
  misc_RNA (1)...(19): siRNA sense strand
caguauugccagggaacau

SEQ ID NO: 2657794 - RNA, 19 nt, Homo sapiens
  misc_RNA (1)...(19): siRNA sense strand
gcugaaaguaugaggaaga

SEQ ID NO: 2657795 - RNA, 19 nt, Homo sapiens
  misc_RNA (1)...(19): siRNA sense strand
acacaucaucagagagaua

SEQ ID NO: 2657796 - RNA, 19 nt, Homo sapiens
  misc_RNA (1)...(19): siRNA sense strand
gggaaguauuaaugcagaa

SEQ ID NO: 2657797 - RNA, 19 nt, Homo sapiens
  misc_RNA (1)...(19): siRNA sense strand
cucuaaagguucugggcaa

SEQ ID NO: 2657798 - RNA, 19 nt, Homo sapiens
  misc_RNA (1)...(19): siRNA sense strand
ggacaauauacgauguaau

SEQ ID NO: 2657799 - RNA, 19 nt, Homo sapiens
  misc_RNA (1)...(19): siRNA sense strand
agaccaucgugcaggauua

SEQ ID NO: 2657800 - RNA, 19 nt, Homo sapiens
  misc_RNA (1)...(19): siRNA sense strand
aggaggagcaggaugguaa

SEQ ID NO: 2657801 - RNA, 19 nt, Homo sapiens
  misc_RNA (1)...(19): siRNA sense strand
aucaagaauuugugcguaa

SEQ ID NO: 2657802 - RNA, 19 nt, Homo sapiens
  misc_RNA (1)...(19): siRNA sense strand
cuauaguguuugaagagaa

SEQ ID NO: 2657803 - RNA, 19 nt, Homo sapiens
  misc_RNA (1)...(19): siRNA sense strand
cgaggaugguugugcagaa

SEQ ID NO: 2657804 - RNA, 19 nt, Homo sapiens
  misc_RNA (1)...(19): siRNA sense strand
cgggaacgguagaagagaa

SEQ ID NO: 2657805 - RNA, 19 nt, Homo sapiens
  misc_RNA (1)...(19): siRNA sense strand
caucaaggacuaaaggcaa

SEQ ID NO: 2657806 - RNA, 19 nt, Homo sapiens
  misc_RNA (1)...(19): siRNA sense strand
gggaacgguagaagagaau

SEQ ID NO: 2657807 - RNA, 19 nt, Homo sapiens
  misc_RNA (1)...(19): siRNA sense strand
ccuaaauuugcuagaagaa

SEQ ID NO: 2657808 - RNA, 19 nt, Homo sapiens
  misc_RNA (1)...(19): siRNA sense strand
cagaauagaucaucagcca

SEQ ID NO: 2657809 - RNA, 19 nt, Homo sapiens
  misc_RNA (1)...(19): siRNA sense strand
cuauaugagcugucacuaa

SEQ ID NO: 2657810 - RNA, 19 nt, Homo sapiens
  misc_RNA (1)...(19): siRNA sense strand
acuucaaugacaugaguaa

SEQ ID NO: 2657811 - RNA, 19 nt, Homo sapiens
  misc_RNA (1)...(19): siRNA sense strand
gguggaugaagcuggauaa

SEQ ID NO: 2657812 - RNA, 19 nt, Homo sapiens
  misc_RNA (1)...(19): siRNA sense strand
aaaguaugaggaagagaaa

SEQ ID NO: 2657813 - RNA, 19 nt, Homo sapiens
  misc_RNA (1)...(19): siRNA sense strand
aggacuaaaggcaaggaua

SEQ ID NO: 2657814 - RNA, 19 nt, Homo sapiens
  misc_RNA (1)...(19): siRNA sense strand
caaaucaaagcuagaggaa

SEQ ID NO: 2657815 - RNA, 19 nt, Homo sapiens
  misc_RNA (1)...(19): siRNA sense strand
ccagaacaacagaggugaa

SEQ ID NO: 2657816 - RNA, 19 nt, Homo sapiens
  misc_RNA (1)...(19): siRNA sense strand
acgaagauccagacaucaa

SEQ ID NO: 2657817 - RNA, 19 nt, Homo sapiens
  misc_RNA (1)...(19): siRNA sense strand
ccaagaagacgaagaucca

SEQ ID NO: 2657818 - RNA, 19 nt, Homo sapiens
  misc_RNA (1)...(19): siRNA sense strand
agaaggaaauggaagacca

SEQ ID NO: 2657819 - RNA, 19 nt, Homo sapiens
  misc_RNA (1)...(19): siRNA sense strand
gagcauguggaaaggaaaa

SEQ ID NO: 2657820 - RNA, 19 nt, Homo sapiens
  misc_RNA (1)...(19): siRNA sense strand
uagaagaaguuuugcgaga

SEQ ID NO: 2657821 - RNA, 19 nt, Homo sapiens
  misc_RNA (1)...(19): siRNA sense strand
ggacaaacuucaaaagacu

SEQ ID NO: 2657822 - RNA, 19 nt, Homo sapiens
  misc_RNA (1)...(19): siRNA sense strand
gaggacagacggcggacaa

SEQ ID NO: 2657823 - RNA, 19 nt, Homo sapiens
  misc_RNA (1)...(19): siRNA sense strand
cuaaaggcaaggauagcaa

SEQ ID NO: 2657824 - RNA, 19 nt, Homo sapiens
  misc_RNA (1)...(19): siRNA sense strand
ccucccagauaaugaacua

SEQ ID NO: 2657825 - RNA, 19 nt, Homo sapiens
  misc_RNA (1)...(19): siRNA sense strand
gaguaaugcacgaugaagu

SEQ ID NO: 2657826 - RNA, 19 nt, Homo sapiens
  misc_RNA (1)...(19): siRNA sense strand
aguacuugcuugacaaaga

SEQ ID NO: 2657827 - RNA, 19 nt, Homo sapiens
  misc_RNA (1)...(19): siRNA sense strand
acacagaaaucgaaaggcu

SEQ ID NO: 2657828 - RNA, 19 nt, Homo sapiens
  misc_RNA (1)...(19): siRNA sense strand
cagacaucaagaagauuaa

SEQ ID NO: 2657829 - RNA, 19 nt, Homo sapiens
  misc_RNA (1)...(19): siRNA sense strand
ggguggaugaagcuggaua

SEQ ID NO: 2657830 - RNA, 19 nt, Homo sapiens
  misc_RNA (1)...(19): siRNA sense strand
gagaaagcugccuggauga

SEQ ID NO: 2657831 - RNA, 19 nt, Homo sapiens
  misc_RNA (1)...(19): siRNA sense strand
guauuaaugcagaaguaca

SEQ ID NO: 2657832 - RNA, 19 nt, Homo sapiens
  misc_RNA (1)...(19): siRNA sense strand
ggagaaagcugccuggaug

SEQ ID NO: 2657833 - RNA, 19 nt, Homo sapiens
  misc_RNA (1)...(19): siRNA sense strand
ccgaaugcuuugaguccuu

SEQ ID NO: 2657834 - RNA, 19 nt, Homo sapiens
  misc_RNA (1)...(19): siRNA sense strand
gguaaagaguggauggagg

SEQ ID NO: 2657835 - RNA, 19 nt, Homo sapiens
  misc_RNA (1)...(19): siRNA sense strand
gcaaccaagaagacgaaga

SEQ ID NO: 2657836 - RNA, 19 nt, Homo sapiens
  misc_RNA (1)...(19): siRNA sense strand
gcucaagacaggugggguu

SEQ ID NO: 2657837 - RNA, 19 nt, Homo sapiens
  misc_RNA (1)...(19): siRNA sense strand
gaacgguagaagagaaugu

SEQ ID NO: 2657838 - RNA, 19 nt, Homo sapiens
  misc_RNA (1)...(19): siRNA sense strand
ucacacaucaucagagaga

SEQ ID NO: 2657839 - RNA, 19 nt, Homo sapiens
  misc_RNA (1)...(19): siRNA sense strand
aaggaaggagagagacaau

SEQ ID NO: 2657840 - RNA, 19 nt, Homo sapiens
  misc_RNA (1)...(19): siRNA sense strand
ggaggagcaggaugguaaa

SEQ ID NO: 2657841 - RNA, 19 nt, Homo sapiens
  misc_RNA (1)...(19): siRNA sense strand
cgaacucaacaaugaacua

SEQ ID NO: 2657842 - RNA, 19 nt, Homo sapiens
  misc_RNA (1)...(19): siRNA sense strand
acucaaagauaggagcauu

SEQ ID NO: 2657843 - RNA, 19 nt, Homo sapiens
  misc_RNA (1)...(19): siRNA sense strand
aguucagaucguagagaca

SEQ ID NO: 2657844 - RNA, 19 nt, Homo sapiens
  misc_RNA (1)...(19): siRNA sense strand
ccucagggcccuuucacaa

SEQ ID NO: 2657845 - RNA, 19 nt, Homo sapiens
  misc_RNA (1)...(19): siRNA sense strand
ugccaacgccaucgagaaa

SEQ ID NO: 2657846 - RNA, 19 nt, Homo sapiens
  misc_RNA (1)...(19): siRNA sense strand
ugacauuugcuucaguaaa

SEQ ID NO: 2657847 - RNA, 19 nt, Homo sapiens
  misc_RNA (1)...(19): siRNA sense strand
ggggaaacucuccgacaua

SEQ ID NO: 2657848 - RNA, 19 nt, Homo sapiens
  misc_RNA (1)...(19): siRNA sense strand
ggaugguugugcagaagga

SEQ ID NO: 2657849 - RNA, 19 nt, Homo sapiens
  misc_RNA (1)...(19): siRNA sense strand
ugguugugcagaaggaaau

SEQ ID NO: 2657850 - RNA, 19 nt, Homo sapiens
  misc_RNA (1)...(19): siRNA sense strand
ggaagagaaaccagauugu

SEQ ID NO: 2657851 - RNA, 19 nt, Homo sapiens
  misc_RNA (1)...(19): siRNA sense strand
aaaaggaaggagagagaca

SEQ ID NO: 2657852 - RNA, 19 nt, Homo sapiens
  misc_RNA (1)...(19): siRNA sense strand
cuauaaacugagaagccaa

SEQ ID NO: 2657853 - RNA, 19 nt, Homo sapiens
  misc_RNA (1)...(19): siRNA sense strand
gcaaaggauuccaggcuug

SEQ ID NO: 2657854 - RNA, 19 nt, Homo sapiens
  misc_RNA (1)...(19): siRNA sense strand
gaugaugggucgagccugu

SEQ ID NO: 2657855 - RNA, 19 nt, Homo sapiens
  misc_RNA (1)...(19): siRNA sense strand
uugaagaggugaaaggaca

SEQ ID NO: 2657856 - RNA, 19 nt, Homo sapiens
  misc_RNA (1)...(19): siRNA sense strand
ccgagaccucaaagagaaa

SEQ ID NO: 2657857 - RNA, 19 nt, Homo sapiens
  misc_RNA (1)...(19): siRNA sense strand
ugaagaggugaaaggacaa

SEQ ID NO: 2657858 - RNA, 19 nt, Homo sapiens
  misc_RNA (1)...(19): siRNA sense strand
aagaggagguagaagacca

SEQ ID NO: 2657859 - RNA, 19 nt, Homo sapiens
  misc_RNA (1)...(19): siRNA sense strand
uggccaaccagcugaagaa

SEQ ID NO: 2657860 - RNA, 19 nt, Homo sapiens
  misc_RNA (1)...(19): siRNA sense strand
aggugaaggagcaggaagu

SEQ ID NO: 2657861 - RNA, 19 nt, Homo sapiens
  misc_RNA (1)...(19): siRNA sense strand
gguucaaauuucacaggca

SEQ ID NO: 2657862 - RNA, 19 nt, Homo sapiens
  misc_RNA (1)...(19): siRNA sense strand
aggaucaagaggagguaga

SEQ ID NO: 2657863 - RNA, 19 nt, Homo sapiens
  misc_RNA (1)...(19): siRNA sense strand
ccuagaaaucaaccaggaa

SEQ ID NO: 2657864 - RNA, 19 nt, Homo sapiens
  misc_RNA (1)...(19): siRNA sense strand
gguagaagaccaaagccca

SEQ ID NO: 2657865 - RNA, 19 nt, Homo sapiens
  misc_RNA (1)...(19): siRNA sense strand
aucaagaggagguagaaga

SEQ ID NO: 2657866 - RNA, 19 nt, Homo sapiens
  misc_RNA (1)...(19): siRNA sense strand
agaggagguagaagaccaa

SEQ ID NO: 2657867 - RNA, 19 nt, Homo sapiens
  misc_RNA (1)...(19): siRNA sense strand
ggaguggagacuugagcca

SEQ ID NO: 2657868 - RNA, 19 nt, Homo sapiens
  misc_RNA (1)...(19): siRNA sense strand
gcagauaucaagagaguua

SEQ ID NO: 2657869 - RNA, 19 nt, Homo sapiens
  misc_RNA (1)...(19): siRNA sense strand
agaaguagaccgagacaua

SEQ ID NO: 2657870 - RNA, 19 nt, Homo sapiens
  misc_RNA (1)...(19): siRNA sense strand
guggacagcuguagugaua

SEQ ID NO: 2657871 - RNA, 19 nt, Homo sapiens
  misc_RNA (1)...(19): siRNA sense strand
ccaacaagaugaucauaaa

SEQ ID NO: 2657872 - RNA, 19 nt, Homo sapiens
  misc_RNA (1)...(19): siRNA sense strand
ccaucacagcagagagaaa

SEQ ID NO: 2657873 - RNA, 19 nt, Homo sapiens
  misc_RNA (1)...(19): siRNA sense strand
cagcagagagaaauggaaa

SEQ ID NO: 2657874 - RNA, 19 nt, Homo sapiens
  misc_RNA (1)...(19): siRNA sense strand
guacagacaauaagagaga

SEQ ID NO: 2657875 - RNA, 19 nt, Homo sapiens
  misc_RNA (1)...(19): siRNA sense strand
ggacagcuguagugauaau

SEQ ID NO: 2657876 - RNA, 19 nt, Homo sapiens
  misc_RNA (1)...(19): siRNA sense strand
agaccgagacauagaacaa

SEQ ID NO: 2657877 - RNA, 19 nt, Homo sapiens
  misc_RNA (1)...(19): siRNA sense strand
aguaaaguguacagacaau

SEQ ID NO: 2657878 - RNA, 19 nt, Homo sapiens
  misc_RNA (1)...(19): siRNA sense strand
ggacaaagacgcagccagu

SEQ ID NO: 2657879 - RNA, 19 nt, Homo sapiens
  misc_RNA (1)...(19): siRNA sense strand
agauauacaagaaggagau

SEQ ID NO: 2657880 - RNA, 19 nt, Homo sapiens
  misc_RNA (1)...(19): siRNA sense strand
acagacaauaagagagaga

SEQ ID NO: 2657881 - RNA, 19 nt, Homo sapiens
  misc_RNA (1)...(19): siRNA sense strand
ggaauagggugguggacag

SEQ ID NO: 2657882 - RNA, 19 nt, Homo sapiens
  misc_RNA (1)...(19): siRNA sense strand
ugugccaacuaaaggaaua

SEQ ID NO: 2657883 - RNA, 19 nt, Homo sapiens
  misc_RNA (1)...(19): siRNA sense strand
agacaauaagagagagaac

SEQ ID NO: 2657884 - RNA, 19 nt, Homo sapiens
  misc_RNA (1)...(19): siRNA sense strand
uagcagauaucaagagagu

SEQ ID NO: 2657885 - RNA, 19 nt, Homo sapiens
  misc_RNA (1)...(19): siRNA sense strand
auaguaaaguguacagaca

SEQ ID NO: 2657886 - RNA, 19 nt, Homo sapiens
  misc_RNA (1)...(19): siRNA sense strand
aggaauacauuucagccaa

SEQ ID NO: 2657887 - RNA, 19 nt, Homo sapiens
  misc_RNA (1)...(19): siRNA sense strand
uaaaagaaguagaccgaga

SEQ ID NO: 2657888 - RNA, 19 nt, Homo sapiens
  misc_RNA (1)...(19): siRNA sense strand
gccaacaagaugaucauaa

SEQ ID NO: 2657889 - RNA, 19 nt, Homo sapiens
  misc_RNA (1)...(19): siRNA sense strand
cagcacaacaaaugcguuu

SEQ ID NO: 2657890 - RNA, 19 nt, Homo sapiens
  misc_RNA (1)...(19): siRNA sense strand
gagaaauggaaaauggaau

SEQ ID NO: 2657891 - RNA, 19 nt, Homo sapiens
  misc_RNA (1)...(19): siRNA sense strand
gggaauagggugguggaca

SEQ ID NO: 2657892 - RNA, 19 nt, Homo sapiens
  misc_RNA (1)...(19): siRNA sense strand
aagauauacaagaaggaga

SEQ ID NO: 2657893 - RNA, 19 nt, Homo sapiens
  misc_RNA (1)...(19): siRNA sense strand
aaguacaugcauuuggaaa

SEQ ID NO: 2657894 - RNA, 19 nt, Homo sapiens
  misc_RNA (1)...(19): siRNA sense strand
auccagaggaaaagagaaa

SEQ ID NO: 2657895 - RNA, 19 nt, Homo sapiens
  misc_RNA (1)...(19): siRNA sense strand
caguguggacgcuggacaa

SEQ ID NO: 2657896 - RNA, 19 nt, Homo sapiens
  misc_RNA (1)...(19): siRNA sense strand
ccgagacauagaacaaaua

SEQ ID NO: 2657897 - RNA, 19 nt, Homo sapiens
  misc_RNA (1)...(19): siRNA sense strand
ggccuuaacagcacaacaa

SEQ ID NO: 2657898 - RNA, 19 nt, Homo sapiens
  misc_RNA (1)...(19): siRNA sense strand
gugauaauguugauaguag

SEQ ID NO: 2657899 - RNA, 19 nt, Homo sapiens
  misc_RNA (1)...(19): siRNA sense strand
cugcucaacaggaaacaua

SEQ ID NO: 2657900 - RNA, 19 nt, Homo sapiens
  misc_RNA (1)...(19): siRNA sense strand
gguagcagauaucaagaga

SEQ ID NO: 2657901 - RNA, 19 nt, Homo sapiens
  misc_RNA (1)...(19): siRNA sense strand
gcccuuaggucuaucaaaa

SEQ ID NO: 2657902 - RNA, 19 nt, Homo sapiens
  misc_RNA (1)...(19): siRNA sense strand
acuucgauccagaggaaaa

SEQ ID NO: 2657903 - RNA, 19 nt, Homo sapiens
  misc_RNA (1)...(19): siRNA sense strand
ggaaaauggaauugugcca

SEQ ID NO: 2657904 - RNA, 19 nt, Homo sapiens
  misc_RNA (1)...(19): siRNA sense strand
guacgguagcagauaucaa

SEQ ID NO: 2657905 - RNA, 19 nt, Homo sapiens
  misc_RNA (1)...(19): siRNA sense strand
guaugaacuucgauccaga

SEQ ID NO: 2657906 - RNA, 19 nt, Homo sapiens
  misc_RNA (1)...(19): siRNA sense strand
guguacagacaauaagaga

SEQ ID NO: 2657907 - RNA, 19 nt, Homo sapiens
  misc_RNA (1)...(19): siRNA sense strand
aaguacaucaagagauaga

SEQ ID NO: 2657908 - RNA, 19 nt, Homo sapiens
  misc_RNA (1)...(19): siRNA sense strand
uggaauugugccaacuaaa

SEQ ID NO: 2657909 - RNA, 19 nt, Homo sapiens
  misc_RNA (1)...(19): siRNA sense strand
acaauaagagagagaaccu

SEQ ID NO: 2657910 - RNA, 19 nt, Homo sapiens
  misc_RNA (1)...(19): siRNA sense strand
uaguaaaguguacagacaa

SEQ ID NO: 2657911 - RNA, 19 nt, Homo sapiens
  misc_RNA (1)...(19): siRNA sense strand
agagagagaaccucaauga

SEQ ID NO: 2657912 - RNA, 19 nt, Homo sapiens
  misc_RNA (1)...(19): siRNA sense strand
ccuuaacagcacaacaaau

SEQ ID NO: 2657913 - RNA, 19 nt, Homo sapiens
  misc_RNA (1)...(19): siRNA sense strand
uggucaaguacaugcauuu

SEQ ID NO: 2657914 - RNA, 19 nt, Homo sapiens
  misc_RNA (1)...(19): siRNA sense strand
uuaacaaucucaucaguga

SEQ ID NO: 2657915 - RNA, 19 nt, Homo sapiens
  misc_RNA (1)...(19): siRNA sense strand
ccaacuaaaggaauacauu

SEQ ID NO: 2657916 - RNA, 19 nt, Homo sapiens
  misc_RNA (1)...(19): siRNA sense strand
gcuaaugauucucuugcuu

SEQ ID NO: 2657917 - RNA, 19 nt, Homo sapiens
  misc_RNA (1)...(19): siRNA sense strand
guuuugaaccugauaacaa

SEQ ID NO: 2657918 - RNA, 19 nt, Homo sapiens
  misc_RNA (1)...(19): siRNA sense strand
ugacugaggugguccgcaa

SEQ ID NO: 2657919 - RNA, 19 nt, Homo sapiens
  misc_RNA (1)...(19): siRNA sense strand
cagcaucaccaaugaguuu

SEQ ID NO: 2657920 - RNA, 19 nt, Homo sapiens
  misc_RNA (1)...(19): siRNA sense strand
cggcaguccuggaaaacaa

SEQ ID NO: 2657921 - RNA, 19 nt, Homo sapiens
  misc_RNA (1)...(19): siRNA sense strand
cgacgaucauggugggcca

SEQ ID NO: 2657922 - RNA, 19 nt, Homo sapiens
  misc_RNA (1)...(19): siRNA sense strand
ucaacauccucaaagggua

SEQ ID NO: 2657923 - RNA, 19 nt, Homo sapiens
  misc_RNA (1)...(19): siRNA sense strand
ccuacgagaugcuggccau

SEQ ID NO: 2657924 - RNA, 19 nt, Homo sapiens
  misc_RNA (1)...(19): siRNA sense strand
ugggagacgcggugcugua

SEQ ID NO: 2657925 - RNA, 19 nt, Homo sapiens
  misc_RNA (1)...(19): siRNA sense strand
gcuaugagcuggcacacca

SEQ ID NO: 2657926 - RNA, 19 nt, Homo sapiens
  misc_RNA (1)...(19): siRNA sense strand
gcccagauugugaaggaca

SEQ ID NO: 2657927 - RNA, 19 nt, Homo sapiens
  misc_RNA (1)...(19): siRNA sense strand
ggaaagagguggacgagca

SEQ ID NO: 2657928 - RNA, 19 nt, Homo sapiens
  misc_RNA (1)...(19): siRNA sense strand
augaaauggcugagcgaca

SEQ ID NO: 2657929 - RNA, 19 nt, Homo sapiens
  misc_RNA (1)...(19): siRNA sense strand
ugaucgagagcgcgagaaa

SEQ ID NO: 2657930 - RNA, 19 nt, Homo sapiens
  misc_RNA (1)...(19): siRNA sense strand
gguggaggcugaaggcaga

SEQ ID NO: 2657931 - RNA, 19 nt, Homo sapiens
  misc_RNA (1)...(19): siRNA sense strand
ggacagggacugacagcca

SEQ ID NO: 2657932 - RNA, 19 nt, Homo sapiens
  misc_RNA (1)...(19): siRNA sense strand
cagaaaggaaagaggugga

SEQ ID NO: 2657933 - RNA, 19 nt, Homo sapiens
  misc_RNA (1)...(19): siRNA sense strand
aaggcagauuggaggagaa

SEQ ID NO: 2657934 - RNA, 19 nt, Homo sapiens
  misc_RNA (1)...(19): siRNA sense strand
aggcggacagugaggacaa

SEQ ID NO: 2657935 - RNA, 19 nt, Homo sapiens
  misc_RNA (1)...(19): siRNA sense strand
ugcauuaccuuguggaaaa

SEQ ID NO: 2657936 - RNA, 19 nt, Homo sapiens
  misc_RNA (1)...(19): siRNA sense strand
caucagaacucccgugcca

SEQ ID NO: 2657937 - RNA, 19 nt, Homo sapiens
  misc_RNA (1)...(19): siRNA sense strand
gggacgacauggaggcugu

SEQ ID NO: 2657938 - RNA, 19 nt, Homo sapiens
  misc_RNA (1)...(19): siRNA sense strand
uggagcagguggaggcuga

SEQ ID NO: 2657939 - RNA, 19 nt, Homo sapiens
  misc_RNA (1)...(19): siRNA sense strand
guggaaaacagcaguaaau

SEQ ID NO: 2657940 - RNA, 19 nt, Homo sapiens
  misc_RNA (1)...(19): siRNA sense strand
uguuugagucuguggauga

SEQ ID NO: 2657941 - RNA, 19 nt, Homo sapiens
  misc_RNA (1)...(19): siRNA sense strand
gugcauuaccuuguggaaa

SEQ ID NO: 2657942 - RNA, 19 nt, Homo sapiens
  misc_RNA (1)...(19): siRNA sense strand
acuuggagaagcugcguaa

SEQ ID NO: 2657943 - RNA, 19 nt, Homo sapiens
  misc_RNA (1)...(19): siRNA sense strand
uggaguacaccaagaugaa

SEQ ID NO: 2657944 - RNA, 19 nt, Homo sapiens
  misc_RNA (1)...(19): siRNA sense strand
gaguacaccaagaugaaga

SEQ ID NO: 2657945 - RNA, 19 nt, Homo sapiens
  misc_RNA (1)...(19): siRNA sense strand
ggacagugguauuggucag

SEQ ID NO: 2657946 - RNA, 19 nt, Homo sapiens
  misc_RNA (1)...(19): siRNA sense strand
agagugaccuccuggccaa

SEQ ID NO: 2657947 - RNA, 19 nt, Homo sapiens
  misc_RNA (1)...(19): siRNA sense strand
aaaggaaagagguggacga

SEQ ID NO: 2657948 - RNA, 19 nt, Homo sapiens
  misc_RNA (1)...(19): siRNA sense strand
cuucagacaaagaugauga

SEQ ID NO: 2657949 - RNA, 19 nt, Homo sapiens
  misc_RNA (1)...(19): siRNA sense strand
ccgucaagaaggagccuga

SEQ ID NO: 2657950 - RNA, 19 nt, Homo sapiens
  misc_RNA (1)...(19): siRNA sense strand
aggcagauuggaggagaaa

SEQ ID NO: 2657951 - RNA, 19 nt, Homo sapiens
  misc_RNA (1)...(19): siRNA sense strand
ccaucaagcaucuguggau

SEQ ID NO: 2657952 - RNA, 19 nt, Homo sapiens
  misc_RNA (1)...(19): siRNA sense strand
gcgcgagaaaccagauuca

SEQ ID NO: 2657953 - RNA, 19 nt, Homo sapiens
  misc_RNA (1)...(19): siRNA sense strand
gggacuaugccaugaccau

SEQ ID NO: 2657954 - RNA, 19 nt, Homo sapiens
  misc_RNA (1)...(19): siRNA sense strand
caguucgggaugacggaaa

SEQ ID NO: 2657955 - RNA, 19 nt, Homo sapiens
  misc_RNA (1)...(19): siRNA sense strand
augaagaggaugaaccaga

SEQ ID NO: 2657956 - RNA, 19 nt, Homo sapiens
  misc_RNA (1)...(19): siRNA sense strand
cggaaguccuccuguucau

SEQ ID NO: 2657957 - RNA, 19 nt, Homo sapiens
  misc_RNA (1)...(19): siRNA sense strand
agacagagaaacauggcca

SEQ ID NO: 2657958 - RNA, 19 nt, Homo sapiens
  misc_RNA (1)...(19): siRNA sense strand
agaugaagacugcagauca

SEQ ID NO: 2657959 - RNA, 19 nt, Homo sapiens
  misc_RNA (1)...(19): siRNA sense strand
gucaagaaggagccugaaa

SEQ ID NO: 2657960 - RNA, 19 nt, Homo sapiens
  misc_RNA (1)...(19): siRNA sense strand
ugguggaagucuaccguga

SEQ ID NO: 2657961 - RNA, 19 nt, Homo sapiens
  misc_RNA (1)...(19): siRNA sense strand
cugcgaugcuggacaggga

SEQ ID NO: 2657962 - RNA, 19 nt, Homo sapiens
  misc_RNA (1)...(19): siRNA sense strand
gggauggcagcguggauga

SEQ ID NO: 2657963 - RNA, 19 nt, Homo sapiens
  misc_RNA (1)...(19): siRNA sense strand
uggaugagguggagcaggu

SEQ ID NO: 2657964 - RNA, 19 nt, Homo sapiens
  misc_RNA (1)...(19): siRNA sense strand
aggacgauguugugaugga

SEQ ID NO: 2657965 - RNA, 19 nt, Homo sapiens
  misc_RNA (1)...(19): siRNA sense strand
acaucauuuuggagaacaa

SEQ ID NO: 2657966 - RNA, 19 nt, Homo sapiens
  misc_RNA (1)...(19): siRNA sense strand
ccaacgagagcauggacga

SEQ ID NO: 2657967 - RNA, 19 nt, Homo sapiens
  misc_RNA (1)...(19): siRNA sense strand
cggaaacagaaaggaaaga

SEQ ID NO: 2657968 - RNA, 19 nt, Homo sapiens
  misc_RNA (1)...(19): siRNA sense strand
gcuuggaggagauugucua

SEQ ID NO: 2657969 - RNA, 19 nt, Homo sapiens
  misc_RNA (1)...(19): siRNA sense strand
cgacagaggcugcuacgca

SEQ ID NO: 2657970 - RNA, 19 nt, Homo sapiens
  misc_RNA (1)...(19): siRNA sense strand
cgggaugacggaaacagaa

SEQ ID NO: 2657971 - RNA, 19 nt, Homo sapiens
  misc_RNA (1)...(19): siRNA sense strand
cagccuuacuggagagaau

SEQ ID NO: 2657972 - RNA, 19 nt, Homo sapiens
  misc_RNA (1)...(19): siRNA sense strand
gaugaagggacgagagcau

SEQ ID NO: 2657973 - RNA, 19 nt, Homo sapiens
  misc_RNA (1)...(19): siRNA sense strand
gaauugaaauccaagaaga

SEQ ID NO: 2657974 - RNA, 19 nt, Homo sapiens
  misc_RNA (1)...(19): siRNA sense strand
cggcagugcuaaaggcuca

SEQ ID NO: 2657975 - RNA, 19 nt, Homo sapiens
  misc_RNA (1)...(19): siRNA sense strand
gcgccauggaccagagaau

SEQ ID NO: 2657976 - RNA, 19 nt, Homo sapiens
  misc_RNA (1)...(19): siRNA sense strand
cugaaagcuugcuggaaca

SEQ ID NO: 2657977 - RNA, 19 nt, Homo sapiens
  misc_RNA (1)...(19): siRNA sense strand
aggaggagccugaaggaga

SEQ ID NO: 2657978 - RNA, 19 nt, Homo sapiens
  misc_RNA (1)...(19): siRNA sense strand
uugcugaggaugacagaaa

SEQ ID NO: 2657979 - RNA, 19 nt, Homo sapiens
  misc_RNA (1)...(19): siRNA sense strand
cagagaaggaggagccuga

SEQ ID NO: 2657980 - RNA, 19 nt, Homo sapiens
  misc_RNA (1)...(19): siRNA sense strand
augaagaggcauuggagau

SEQ ID NO: 2657981 - RNA, 19 nt, Homo sapiens
  misc_RNA (1)...(19): siRNA sense strand
cccaguggcuaaaggaauu

SEQ ID NO: 2657982 - RNA, 19 nt, Homo sapiens
  misc_RNA (1)...(19): siRNA sense strand
ggcuaaaggaauugaaauc

SEQ ID NO: 2657983 - RNA, 19 nt, Homo sapiens
  misc_RNA (1)...(19): siRNA sense strand
aaauccaagaagaggcaaa

SEQ ID NO: 2657984 - RNA, 19 nt, Homo sapiens
  misc_RNA (1)...(19): siRNA sense strand
cagccagugccuuaagaaa

SEQ ID NO: 2657985 - RNA, 19 nt, Homo sapiens
  misc_RNA (1)...(19): siRNA sense strand
gcugaaagcuugcuggaac

SEQ ID NO: 2657986 - RNA, 19 nt, Homo sapiens
  misc_RNA (1)...(19): siRNA sense strand
aggcaaagggugugguucu

SEQ ID NO: 2657987 - RNA, 19 nt, Homo sapiens
  misc_RNA (1)...(19): siRNA sense strand
agagaacuccagaggguuu

SEQ ID NO: 2657988 - RNA, 19 nt, Homo sapiens
  misc_RNA (1)...(19): siRNA sense strand
aaagagaacuccagagggu

SEQ ID NO: 2657989 - RNA, 19 nt, Homo sapiens
  misc_RNA (1)...(19): siRNA sense strand
cuaaaggaauugaaaucca

SEQ ID NO: 2657990 - RNA, 19 nt, Homo sapiens
  misc_RNA (1)...(19): siRNA sense strand
agagauggcuacagaucca

SEQ ID NO: 2657991 - RNA, 19 nt, Homo sapiens
  misc_RNA (1)...(19): siRNA sense strand
cugaaggagaugcccgaua

SEQ ID NO: 2657992 - RNA, 19 nt, Homo sapiens
  misc_RNA (1)...(19): siRNA sense strand
cuuuggaggaugagacuga

SEQ ID NO: 2657993 - RNA, 19 nt, Homo sapiens
  misc_RNA (1)...(19): siRNA sense strand
ccagcauggacaaggauga

SEQ ID NO: 2657994 - RNA, 19 nt, Homo sapiens
  misc_RNA (1)...(19): siRNA sense strand
aaggaaagugcgaacaaga

SEQ ID NO: 2657995 - RNA, 19 nt, Homo sapiens
  misc_RNA (1)...(19): siRNA sense strand
ccucaaagcaauuggaagg

SEQ ID NO: 2657996 - RNA, 19 nt, Homo sapiens
  misc_RNA (1)...(19): siRNA sense strand
ugacacguucccagguaaa

SEQ ID NO: 2657997 - RNA, 19 nt, Homo sapiens
  misc_RNA (1)...(19): siRNA sense strand
ggagagaauuuggaggcca

SEQ ID NO: 2657998 - RNA, 19 nt, Homo sapiens
  misc_RNA (1)...(19): siRNA sense strand
cauccaaagcugagaggac

SEQ ID NO: 2657999 - RNA, 19 nt, Homo sapiens
  misc_RNA (1)...(19): siRNA sense strand
cuccagaggguuugacaau

SEQ ID NO: 2658000 - RNA, 19 nt, Homo sapiens
  misc_RNA (1)...(19): siRNA sense strand
gggacgagagcaugaaaau

SEQ ID NO: 2658001 - RNA, 19 nt, Homo sapiens
  misc_RNA (1)...(19): siRNA sense strand
acaagaggccagaggugga

SEQ ID NO: 2658002 - RNA, 19 nt, Homo sapiens
  misc_RNA (1)...(19): siRNA sense strand
uggcuaaaggaauugaaau

SEQ ID NO: 2658003 - RNA, 19 nt, Homo sapiens
  misc_RNA (1)...(19): siRNA sense strand
ggacccuguuggugggagu

SEQ ID NO: 2658004 - RNA, 19 nt, Homo sapiens
  misc_RNA (1)...(19): siRNA sense strand
gauccucuuuccagggcua

SEQ ID NO: 2658005 - RNA, 19 nt, Homo sapiens
  misc_RNA (1)...(19): siRNA sense strand
cugaaaagagaguagauga

SEQ ID NO: 2658006 - RNA, 19 nt, Homo sapiens
  misc_RNA (1)...(19): siRNA sense strand
gcagaucaccuuuggagga

SEQ ID NO: 2658007 - RNA, 19 nt, Homo sapiens
  misc_RNA (1)...(19): siRNA sense strand
agagaauugagcccagaua

SEQ ID NO: 2658008 - RNA, 19 nt, Homo sapiens
  misc_RNA (1)...(19): siRNA sense strand
cagauaugacauugugcau

SEQ ID NO: 2658009 - RNA, 19 nt, Homo sapiens
  misc_RNA (1)...(19): siRNA sense strand
acucaacggaggagaaauc

SEQ ID NO: 2658010 - RNA, 19 nt, Homo sapiens
  misc_RNA (1)...(19): siRNA sense strand
gcacaagaggccagaggug

SEQ ID NO: 2658011 - RNA, 19 nt, Homo sapiens
  misc_RNA (1)...(19): siRNA sense strand
aggaauugaaauccaagaa

SEQ ID NO: 2658012 - RNA, 19 nt, Homo sapiens
  misc_RNA (1)...(19): siRNA sense strand
gcucaggagaggaggaguc

SEQ ID NO: 2658013 - RNA, 19 nt, Homo sapiens
  misc_RNA (1)...(19): siRNA sense strand
caggagaggaggaguccca

SEQ ID NO: 2658014 - RNA, 19 nt, Homo sapiens
  misc_RNA (1)...(19): siRNA sense strand
ccacugaacccaaggacac

SEQ ID NO: 2658015 - RNA, 19 nt, Homo sapiens
  misc_RNA (1)...(19): siRNA sense strand
aagacucaacggaggagaa

SEQ ID NO: 2658016 - RNA, 19 nt, Homo sapiens
  misc_RNA (1)...(19): siRNA sense strand
aggagaaaucacccaggaa

SEQ ID NO: 2658017 - RNA, 19 nt, Homo sapiens
  misc_RNA (1)...(19): siRNA sense strand
ccaagaagaggcaaagucu

SEQ ID NO: 2658018 - RNA, 19 nt, Homo sapiens
  misc_RNA (1)...(19): siRNA sense strand
cuggaaaggaggagaaaga

SEQ ID NO: 2658019 - RNA, 19 nt, Homo sapiens
  misc_RNA (1)...(19): siRNA sense strand
cuguauaggucuugguuca

SEQ ID NO: 2658020 - RNA, 19 nt, Homo sapiens
  misc_RNA (1)...(19): siRNA sense strand
cagcaggagaugaggaaca

SEQ ID NO: 2658021 - RNA, 19 nt, Homo sapiens
  misc_RNA (1)...(19): siRNA sense strand
cgggcuacuccuagggaua

SEQ ID NO: 2658022 - RNA, 19 nt, Homo sapiens
  misc_RNA (1)...(19): siRNA sense strand
gguucaugaugcaaagcaa

SEQ ID NO: 2658023 - RNA, 19 nt, Homo sapiens
  misc_RNA (1)...(19): siRNA sense strand
uggagaaacuggccaggaa

SEQ ID NO: 2658024 - RNA, 19 nt, Homo sapiens
  misc_RNA (1)...(19): siRNA sense strand
ccucagugcaagagcaaca

SEQ ID NO: 2658025 - RNA, 19 nt, Homo sapiens
  misc_RNA (1)...(19): siRNA sense strand
guacuggaaaggaggagaa

SEQ ID NO: 2658026 - RNA, 19 nt, Homo sapiens
  misc_RNA (1)...(19): siRNA sense strand
acugagaaguguauaucaa

SEQ ID NO: 2658027 - RNA, 19 nt, Homo sapiens
  misc_RNA (1)...(19): siRNA sense strand
caucaucagcacuggcaaa

SEQ ID NO: 2658028 - RNA, 19 nt, Homo sapiens
  misc_RNA (1)...(19): siRNA sense strand
agcagagaauggagaagaa

SEQ ID NO: 2658029 - RNA, 19 nt, Homo sapiens
  misc_RNA (1)...(19): siRNA sense strand
guccagaaggagaaacaaa

SEQ ID NO: 2658030 - RNA, 19 nt, Homo sapiens
  misc_RNA (1)...(19): siRNA sense strand
gguuaagagaacugcgcau

SEQ ID NO: 2658031 - RNA, 19 nt, Homo sapiens
  misc_RNA (1)...(19): siRNA sense strand
gagugaagagacagcagaa

SEQ ID NO: 2658032 - RNA, 19 nt, Homo sapiens
  misc_RNA (1)...(19): siRNA sense strand
gggagacauuagagaagca

SEQ ID NO: 2658033 - RNA, 19 nt, Homo sapiens
  misc_RNA (1)...(19): siRNA sense strand
ucgaaugacuuuuggaaga

SEQ ID NO: 2658034 - RNA, 19 nt, Homo sapiens
  misc_RNA (1)...(19): siRNA sense strand
agaaagagcuggaacaggu

SEQ ID NO: 2658035 - RNA, 19 nt, Homo sapiens
  misc_RNA (1)...(19): siRNA sense strand
guucaugaugcaaagcaaa

SEQ ID NO: 2658036 - RNA, 19 nt, Homo sapiens
  misc_RNA (1)...(19): siRNA sense strand
augagauggcugagcgauu

SEQ ID NO: 2658037 - RNA, 19 nt, Homo sapiens
  misc_RNA (1)...(19): siRNA sense strand
ccuucucgcugcaggcaaa

SEQ ID NO: 2658038 - RNA, 19 nt, Homo sapiens
  misc_RNA (1)...(19): siRNA sense strand
ggaaaggaggagaaagaag

SEQ ID NO: 2658039 - RNA, 19 nt, Homo sapiens
  misc_RNA (1)...(19): siRNA sense strand
acucagaagaggcgguaca

SEQ ID NO: 2658040 - RNA, 19 nt, Homo sapiens
  misc_RNA (1)...(19): siRNA sense strand
gcuacaggccagagcggau

SEQ ID NO: 2658041 - RNA, 19 nt, Homo sapiens
  misc_RNA (1)...(19): siRNA sense strand
gagaaacuggccaggaaga

SEQ ID NO: 2658042 - RNA, 19 nt, Homo sapiens
  misc_RNA (1)...(19): siRNA sense strand
gcacagagacucagccgga

SEQ ID NO: 2658043 - RNA, 19 nt, Homo sapiens
  misc_RNA (1)...(19): siRNA sense strand
acauuagagccgagguuca

SEQ ID NO: 2658044 - RNA, 19 nt, Homo sapiens
  misc_RNA (1)...(19): siRNA sense strand
cagaagagcaccacaggca

SEQ ID NO: 2658045 - RNA, 19 nt, Homo sapiens
  misc_RNA (1)...(19): siRNA sense strand
guuccaagguccuggucca

SEQ ID NO: 2658046 - RNA, 19 nt, Homo sapiens
  misc_RNA (1)...(19): siRNA sense strand
gcacccaacugcuggcaca

SEQ ID NO: 2658047 - RNA, 19 nt, Homo sapiens
  misc_RNA (1)...(19): siRNA sense strand
augaggaacaaguacauua

SEQ ID NO: 2658048 - RNA, 19 nt, Homo sapiens
  misc_RNA (1)...(19): siRNA sense strand
cuguauguccagaaggaga

SEQ ID NO: 2658049 - RNA, 19 nt, Homo sapiens
  misc_RNA (1)...(19): siRNA sense strand
gagaugaggaacaaguaca

SEQ ID NO: 2658050 - RNA, 19 nt, Homo sapiens
  misc_RNA (1)...(19): siRNA sense strand
agacauuagagaagcaagu

SEQ ID NO: 2658051 - RNA, 19 nt, Homo sapiens
  misc_RNA (1)...(19): siRNA sense strand
caggagcaggaguggcaaa

SEQ ID NO: 2658052 - RNA, 19 nt, Homo sapiens
  misc_RNA (1)...(19): siRNA sense strand
cucagaagccacaggaaca

SEQ ID NO: 2658053 - RNA, 19 nt, Homo sapiens
  misc_RNA (1)...(19): siRNA sense strand
cggauuaucuuacgggugu

SEQ ID NO: 2658054 - RNA, 19 nt, Homo sapiens
  misc_RNA (1)...(19): siRNA sense strand
uggagagggcagugcaaca

SEQ ID NO: 2658055 - RNA, 19 nt, Homo sapiens
  misc_RNA (1)...(19): siRNA sense strand
cugcagugugucaggaaga

SEQ ID NO: 2658056 - RNA, 19 nt, Homo sapiens
  misc_RNA (1)...(19): siRNA sense strand
guacauuagagccgagguu

SEQ ID NO: 2658057 - RNA, 19 nt, Homo sapiens
  misc_RNA (1)...(19): siRNA sense strand
aguuugagauggcagaaga

SEQ ID NO: 2658058 - RNA, 19 nt, Homo sapiens
  misc_RNA (1)...(19): siRNA sense strand
acucauuacagaaggacca

SEQ ID NO: 2658059 - RNA, 19 nt, Homo sapiens
  misc_RNA (1)...(19): siRNA sense strand
agcuggaacagguggaaau

SEQ ID NO: 2658060 - RNA, 19 nt, Homo sapiens
  misc_RNA (1)...(19): siRNA sense strand
ccagggagagccagcacaa

SEQ ID NO: 2658061 - RNA, 19 nt, Homo sapiens
  misc_RNA (1)...(19): siRNA sense strand
gagaaaaccgccuggcaga

SEQ ID NO: 2658062 - RNA, 19 nt, Homo sapiens
  misc_RNA (1)...(19): siRNA sense strand
ccgagguucaugaugcaaa

SEQ ID NO: 2658063 - RNA, 19 nt, Homo sapiens
  misc_RNA (1)...(19): siRNA sense strand
gccuggaaguccugguuga

SEQ ID NO: 2658064 - RNA, 19 nt, Homo sapiens
  misc_RNA (1)...(19): siRNA sense strand
cgccuuuacucacuggaaa

SEQ ID NO: 2658065 - RNA, 19 nt, Homo sapiens
  misc_RNA (1)...(19): siRNA sense strand
ggccagagcggauggucau

SEQ ID NO: 2658066 - RNA, 19 nt, Homo sapiens
  misc_RNA (1)...(19): siRNA sense strand
gcucuggaguuuaggcaac

SEQ ID NO: 2658067 - RNA, 19 nt, Homo sapiens
  misc_RNA (1)...(19): siRNA sense strand
ggaguuuaggcaacggauu

SEQ ID NO: 2658068 - RNA, 19 nt, Homo sapiens
  misc_RNA (1)...(19): siRNA sense strand
gcagaagauguuucagcau

SEQ ID NO: 2658069 - RNA, 19 nt, Homo sapiens
  misc_RNA (1)...(19): siRNA sense strand
acacguuuccacagggaga

SEQ ID NO: 2658070 - RNA, 19 nt, Homo sapiens
  misc_RNA (1)...(19): siRNA sense strand
caccauggcccgaguggau

SEQ ID NO: 2658071 - RNA, 19 nt, Homo sapiens
  misc_RNA (1)...(19): siRNA sense strand
cauuacagaaggaccauau

SEQ ID NO: 2658072 - RNA, 19 nt, Homo sapiens
  misc_RNA (1)...(19): siRNA sense strand
caggcaaaggugugggcca

SEQ ID NO: 2658073 - RNA, 19 nt, Homo sapiens
  misc_RNA (1)...(19): siRNA sense strand
agcagcaggugcagaaaga

SEQ ID NO: 2658074 - RNA, 19 nt, Homo sapiens
  misc_RNA (1)...(19): siRNA sense strand
gugcaagagcaacacguuu

SEQ ID NO: 2658075 - RNA, 19 nt, Homo sapiens
  misc_RNA (1)...(19): siRNA sense strand
gcuggagagggcagugcaa

SEQ ID NO: 2658076 - RNA, 19 nt, Homo sapiens
  misc_RNA (1)...(19): siRNA sense strand
cgacagcacuggucccaca

SEQ ID NO: 2658077 - RNA, 19 nt, Homo sapiens
  misc_RNA (1)...(19): siRNA sense strand
aaguagagcagcaggugca

SEQ ID NO: 2658078 - RNA, 19 nt, Homo sapiens
  misc_RNA (1)...(19): siRNA sense strand
gaagagcaccacaggcaca

SEQ ID NO: 2658079 - RNA, 19 nt, Homo sapiens
  misc_RNA (1)...(19): siRNA sense strand
caucgcacccagcaggaaa

SEQ ID NO: 2658080 - RNA, 19 nt, Homo sapiens
  misc_RNA (1)...(19): siRNA sense strand
ugcagaaagagcuggaaca

SEQ ID NO: 2658081 - RNA, 19 nt, Homo sapiens
  misc_RNA (1)...(19): siRNA sense strand
uugaaauaccugaggccaa

SEQ ID NO: 2658082 - RNA, 19 nt, Homo sapiens
  misc_RNA (1)...(19): siRNA sense strand
uugaaauaucugaggccaa

SEQ ID NO: 2658083 - RNA, 19 nt, Homo sapiens
  misc_RNA (1)...(19): siRNA sense strand
acaucaggucucagugaaa

SEQ ID NO: 2658084 - RNA, 19 nt, Homo sapiens
  misc_RNA (1)...(19): siRNA sense strand
gucgaagaucucagugaaa

SEQ ID NO: 2658085 - RNA, 19 nt, Homo sapiens
  misc_RNA (1)...(19): siRNA sense strand
ggaggagaauauaacguca

SEQ ID NO: 2658086 - RNA, 19 nt, Homo sapiens
  misc_RNA (1)...(19): siRNA sense strand
cugccaugagugugagauu

SEQ ID NO: 2658087 - RNA, 19 nt, Homo sapiens
  misc_RNA (1)...(19): siRNA sense strand
acaucggaucucagugaaa

SEQ ID NO: 2658088 - RNA, 19 nt, Homo sapiens
  misc_RNA (1)...(19): siRNA sense strand
ggaucucagugaaagccua

SEQ ID NO: 2658089 - RNA, 19 nt, Homo sapiens
  misc_RNA (1)...(19): siRNA sense strand
gugugagauuccugagacu

SEQ ID NO: 2658090 - RNA, 19 nt, Homo sapiens
  misc_RNA (1)...(19): siRNA sense strand
acggcgguguggaggagaa

SEQ ID NO: 2658091 - RNA, 19 nt, Homo sapiens
  misc_RNA (1)...(19): siRNA sense strand
acggcgguguggaggagaa

SEQ ID NO: 2658092 - RNA, 19 nt, Homo sapiens
  misc_RNA (1)...(19): siRNA sense strand
uugccaaggagguggacaa

SEQ ID NO: 2658093 - RNA, 19 nt, Homo sapiens
  misc_RNA (1)...(19): siRNA sense strand
cucaagaacaagaaggaga

SEQ ID NO: 2658094 - RNA, 19 nt, Homo sapiens
  misc_RNA (1)...(19): siRNA sense strand
gaguacaccuucugcguga

SEQ ID NO: 2658095 - RNA, 19 nt, Homo sapiens
  misc_RNA (1)...(19): siRNA sense strand
gcuacaacaagcucagcaa

SEQ ID NO: 2658096 - RNA, 19 nt, Homo sapiens
  misc_RNA (1)...(19): siRNA sense strand
ucaccguacuccaggccaa

SEQ ID NO: 2658097 - RNA, 19 nt, Homo sapiens
  misc_RNA (1)...(19): siRNA sense strand
aggagguggacaaggucaa

SEQ ID NO: 2658098 - RNA, 19 nt, Homo sapiens
  misc_RNA (1)...(19): siRNA sense strand
ucgccaaggacgaggaucu

SEQ ID NO: 2658099 - RNA, 19 nt, Homo sapiens
  misc_RNA (1)...(19): siRNA sense strand
cgcaagaccugcagcgugu

SEQ ID NO: 2658100 - RNA, 19 nt, Homo sapiens
  misc_RNA (1)...(19): siRNA sense strand
ggcgcaugcaggaggagaa

SEQ ID NO: 2658101 - RNA, 19 nt, Homo sapiens
  misc_RNA (1)...(19): siRNA sense strand
ucaacaacgucaccaagaa

SEQ ID NO: 2658102 - RNA, 19 nt, Homo sapiens
  misc_RNA (1)...(19): siRNA sense strand
ucaacgagaacaagcucaa

SEQ ID NO: 2658103 - RNA, 19 nt, Homo sapiens
  misc_RNA (1)...(19): siRNA sense strand
gcaaccugacggagggcau

SEQ ID NO: 2658104 - RNA, 19 nt, Homo sapiens
  misc_RNA (1)...(19): siRNA sense strand
gcgccaaggucuuuagccu

SEQ ID NO: 2658105 - RNA, 19 nt, Homo sapiens
  misc_RNA (1)...(19): siRNA sense strand
acaacgucaccaagaacua

SEQ ID NO: 2658106 - RNA, 19 nt, Homo sapiens
  misc_RNA (1)...(19): siRNA sense strand
agaacaagaaggagaucgu

SEQ ID NO: 2658107 - RNA, 19 nt, Homo sapiens
  misc_RNA (1)...(19): siRNA sense strand
agaucgugacgcuggacaa

SEQ ID NO: 2658108 - RNA, 19 nt, Homo sapiens
  misc_RNA (1)...(19): siRNA sense strand
uggccuggcugguggucuu

SEQ ID NO: 2658109 - RNA, 19 nt, Homo sapiens
  misc_RNA (1)...(19): siRNA sense strand
aggucaaccagaucauuaa

SEQ ID NO: 2658110 - RNA, 19 nt, Homo sapiens
  misc_RNA (1)...(19): siRNA sense strand
aggacgaggaucugcauga

SEQ ID NO: 2658111 - RNA, 19 nt, Homo sapiens
  misc_RNA (1)...(19): siRNA sense strand
gcucaaccgcuuugggaac

SEQ ID NO: 2658112 - RNA, 19 nt, Homo sapiens
  misc_RNA (1)...(19): siRNA sense strand
ggcugguggucuucaacaa

SEQ ID NO: 2658113 - RNA, 19 nt, Homo sapiens
  misc_RNA (1)...(19): siRNA sense strand
gggacaaggaggaaagaaa

SEQ ID NO: 2658114 - RNA, 19 nt, Homo sapiens
  misc_RNA (1)...(19): siRNA sense strand
caacaauggacuaggaaau

SEQ ID NO: 2658115 - RNA, 19 nt, Homo sapiens
  misc_RNA (1)...(19): siRNA sense strand
aagugaaguuggaggucaa

SEQ ID NO: 2658116 - RNA, 19 nt, Homo sapiens
  misc_RNA (1)...(19): siRNA sense strand
acucaaaggaggaaacaau

SEQ ID NO: 2658117 - RNA, 19 nt, Homo sapiens
  misc_RNA (1)...(19): siRNA sense strand
uguuacagaaccagagaaa

SEQ ID NO: 2658118 - RNA, 19 nt, Homo sapiens
  misc_RNA (1)...(19): siRNA sense strand
acauguguguguugggaaa

SEQ ID NO: 2658119 - RNA, 19 nt, Homo sapiens
  misc_RNA (1)...(19): siRNA sense strand
ccauggagaauaagggaau

SEQ ID NO: 2658120 - RNA, 19 nt, Homo sapiens
  misc_RNA (1)...(19): siRNA sense strand
ggucagacauccagggaac

SEQ ID NO: 2658121 - RNA, 19 nt, Homo sapiens
  misc_RNA (1)...(19): siRNA sense strand
agagagaaggagcaagaaa

SEQ ID NO: 2658122 - RNA, 19 nt, Homo sapiens
  misc_RNA (1)...(19): siRNA sense strand
gggcauuggaaacagauaa

SEQ ID NO: 2658123 - RNA, 19 nt, Homo sapiens
  misc_RNA (1)...(19): siRNA sense strand
gaacaauggaaaagagaga

SEQ ID NO: 2658124 - RNA, 19 nt, Homo sapiens
  misc_RNA (1)...(19): siRNA sense strand
ccaccuaauuccaaagaca

SEQ ID NO: 2658125 - RNA, 19 nt, Homo sapiens
  misc_RNA (1)...(19): siRNA sense strand
aaugugaaucugugggaua

SEQ ID NO: 2658126 - RNA, 19 nt, Homo sapiens
  misc_RNA (1)...(19): siRNA sense strand
cagcagucaaagauggaaa

SEQ ID NO: 2658127 - RNA, 19 nt, Homo sapiens
  misc_RNA (1)...(19): siRNA sense strand
aagaacaguuaauggaaga

SEQ ID NO: 2658128 - RNA, 19 nt, Homo sapiens
  misc_RNA (1)...(19): siRNA sense strand
aggaagucgaucagacaaa

SEQ ID NO: 2658129 - RNA, 19 nt, Homo sapiens
  misc_RNA (1)...(19): siRNA sense strand
uggaaugacuacaagaaca

SEQ ID NO: 2658130 - RNA, 19 nt, Homo sapiens
  misc_RNA (1)...(19): siRNA sense strand
aggaagccuuucagauaaa

SEQ ID NO: 2658131 - RNA, 19 nt, Homo sapiens
  misc_RNA (1)...(19): siRNA sense strand
aguuaauggaagacaagaa

SEQ ID NO: 2658132 - RNA, 19 nt, Homo sapiens
  misc_RNA (1)...(19): siRNA sense strand
cagcaaagacacugaaucu

SEQ ID NO: 2658133 - RNA, 19 nt, Homo sapiens
  misc_RNA (1)...(19): siRNA sense strand
ggacauugaugauggcacu

SEQ ID NO: 2658134 - RNA, 19 nt, Homo sapiens
  misc_RNA (1)...(19): siRNA sense strand
ccacaaaguguuacuaaaa

SEQ ID NO: 2658135 - RNA, 19 nt, Homo sapiens
  misc_RNA (1)...(19): siRNA sense strand
ccguacaaccaguuugaua

SEQ ID NO: 2658136 - RNA, 19 nt, Homo sapiens
  misc_RNA (1)...(19): siRNA sense strand
ugacacagucucuggacaa

SEQ ID NO: 2658137 - RNA, 19 nt, Homo sapiens
  misc_RNA (1)...(19): siRNA sense strand
aagcaauucuggaaacaau

SEQ ID NO: 2658138 - RNA, 19 nt, Homo sapiens
  misc_RNA (1)...(19): siRNA sense strand
ccacuaguaacaaaggaaa

SEQ ID NO: 2658139 - RNA, 19 nt, Homo sapiens
  misc_RNA (1)...(19): siRNA sense strand
agucaaugguggcaacaau

SEQ ID NO: 2658140 - RNA, 19 nt, Homo sapiens
  misc_RNA (1)...(19): siRNA sense strand
gggaaaucugacaaaggaa

SEQ ID NO: 2658141 - RNA, 19 nt, Homo sapiens
  misc_RNA (1)...(19): siRNA sense strand
ccagggaacagcagucaaa

SEQ ID NO: 2658142 - RNA, 19 nt, Homo sapiens
  misc_RNA (1)...(19): siRNA sense strand
ggaaaaugcggguguuaau

SEQ ID NO: 2658143 - RNA, 19 nt, Homo sapiens
  misc_RNA (1)...(19): siRNA sense strand
acaacaauggacuaggaaa

SEQ ID NO: 2658144 - RNA, 19 nt, Homo sapiens
  misc_RNA (1)...(19): siRNA sense strand
cugcaacaccuaaggauga

SEQ ID NO: 2658145 - RNA, 19 nt, Homo sapiens
  misc_RNA (1)...(19): siRNA sense strand
gggaagaggaggaggaugg

SEQ ID NO: 2658146 - RNA, 19 nt, Homo sapiens
  misc_RNA (1)...(19): siRNA sense strand
gaagauaauccaagcagca

SEQ ID NO: 2658147 - RNA, 19 nt, Homo sapiens
  misc_RNA (1)...(19): siRNA sense strand
agucaugguuuguuuggaa

SEQ ID NO: 2658148 - RNA, 19 nt, Homo sapiens
  misc_RNA (1)...(19): siRNA sense strand
uggaaacagcacagcacaa

SEQ ID NO: 2658149 - RNA, 19 nt, Homo sapiens
  misc_RNA (1)...(19): siRNA sense strand
ggauaacaccacagggucu

SEQ ID NO: 2658150 - RNA, 19 nt, Homo sapiens
  misc_RNA (1)...(19): siRNA sense strand
cuaggaaauuggaggaaug

SEQ ID NO: 2658151 - RNA, 19 nt, Homo sapiens
  misc_RNA (1)...(19): siRNA sense strand
caaggaggaaagaaacaaa

SEQ ID NO: 2658152 - RNA, 19 nt, Homo sapiens
  misc_RNA (1)...(19): siRNA sense strand
ggucaaagcacuggaagca

SEQ ID NO: 2658153 - RNA, 19 nt, Homo sapiens
  misc_RNA (1)...(19): siRNA sense strand
acagucaauuagucggaaa

SEQ ID NO: 2658154 - RNA, 19 nt, Homo sapiens
  misc_RNA (1)...(19): siRNA sense strand
uggcaugguuggugggaag

SEQ ID NO: 2658155 - RNA, 19 nt, Homo sapiens
  misc_RNA (1)...(19): siRNA sense strand
acaaugggaacaauggaaa

SEQ ID NO: 2658156 - RNA, 19 nt, Homo sapiens
  misc_RNA (1)...(19): siRNA sense strand
ggaggaagucgaucagaca

SEQ ID NO: 2658157 - RNA, 19 nt, Homo sapiens
  misc_RNA (1)...(19): siRNA sense strand
gguaaugguggcaaugcaa

SEQ ID NO: 2658158 - RNA, 19 nt, Homo sapiens
  misc_RNA (1)...(19): siRNA sense strand
agauaauccaagcagcaaa

SEQ ID NO: 2658159 - RNA, 19 nt, Homo sapiens
  misc_RNA (1)...(19): siRNA sense strand
ggacuaggaaauuggagga

SEQ ID NO: 2658160 - RNA, 19 nt, Homo sapiens
  misc_RNA (1)...(19): siRNA sense strand
ucagaaaucaacuggguca

SEQ ID NO: 2658161 - RNA, 19 nt, Homo sapiens
  misc_RNA (1)...(19): siRNA sense strand
agagaacaacaauggacua

SEQ ID NO: 2658162 - RNA, 19 nt, Homo sapiens
  misc_RNA (1)...(19): siRNA sense strand
ggagcaagaaagggaagaa

SEQ ID NO: 2658163 - RNA, 19 nt, Homo sapiens
  misc_RNA (1)...(19): siRNA sense strand
acugaaucuucuuccgaaa

SEQ ID NO: 2658164 - RNA, 19 nt, Homo sapiens
  misc_RNA (1)...(19): siRNA sense strand
acacuaacuccuugaacuu

SEQ ID NO: 2658165 - RNA, 19 nt, Homo sapiens
  misc_RNA (1)...(19): siRNA sense strand
ccacacaggaagccaauau

SEQ ID NO: 2658166 - RNA, 19 nt, Homo sapiens
  misc_RNA (1)...(19): siRNA sense strand
gagcaugggacaaucaaaa

SEQ ID NO: 2658167 - RNA, 19 nt, Homo sapiens
  misc_RNA (1)...(19): siRNA sense strand
agaaggagcaagaaaggga

SEQ ID NO: 2658168 - RNA, 19 nt, Homo sapiens
  misc_RNA (1)...(19): siRNA sense strand
cguacaaccaguuugauau

SEQ ID NO: 2658169 - RNA, 19 nt, Homo sapiens
  misc_RNA (1)...(19): siRNA sense strand
ggguaaugguggcaaugca

SEQ ID NO: 2658170 - RNA, 19 nt, Homo sapiens
  misc_RNA (1)...(19): siRNA sense strand
accacaaaguguuacuaaa

SEQ ID NO: 2658171 - RNA, 19 nt, Homo sapiens
  misc_RNA (1)...(19): siRNA sense strand
aggaaaggggcauuggaaa

SEQ ID NO: 2658172 - RNA, 19 nt, Homo sapiens
  misc_RNA (1)...(19): siRNA sense strand
gcugggaagaggaggagga

SEQ ID NO: 2658173 - RNA, 19 nt, Homo sapiens
  misc_RNA (1)...(19): siRNA sense strand
gacaaggaggaaagaaaca

SEQ ID NO: 2658174 - RNA, 19 nt, Homo sapiens
  misc_RNA (1)...(19): siRNA sense strand
acucuugggacaacaauaa

SEQ ID NO: 2658175 - RNA, 19 nt, Homo sapiens
  misc_RNA (1)...(19): siRNA sense strand
gcuggaaugacuacaagaa

SEQ ID NO: 2658176 - RNA, 19 nt, Homo sapiens
  misc_RNA (1)...(19): siRNA sense strand
augugaaucugugggauaa

SEQ ID NO: 2658177 - RNA, 19 nt, Homo sapiens
  misc_RNA (1)...(19): siRNA sense strand
ggacaaggaggaaagaaac

SEQ ID NO: 2658178 - RNA, 19 nt, Homo sapiens
  misc_RNA (1)...(19): siRNA sense strand
cucagaaggucacggaaca

SEQ ID NO: 2658179 - RNA, 19 nt, Homo sapiens
  misc_RNA (1)...(19): siRNA sense strand
ggaaacaacuggaaggcau

SEQ ID NO: 2658180 - RNA, 19 nt, Homo sapiens
  misc_RNA (1)...(19): siRNA sense strand
cagaagucacagaagaaau

SEQ ID NO: 2658181 - RNA, 19 nt, Homo sapiens
  misc_RNA (1)...(19): siRNA sense strand
gacccaacggccagagcua

SEQ ID NO: 2658182 - RNA, 19 nt, Homo sapiens
  misc_RNA (1)...(19): siRNA sense strand
ggaaauaccucacugccuu

SEQ ID NO: 2658183 - RNA, 19 nt, Homo sapiens
  misc_RNA (1)...(19): siRNA sense strand
gcgugucguuagugcgcaa

SEQ ID NO: 2658184 - RNA, 19 nt, Homo sapiens
  misc_RNA (1)...(19): siRNA sense strand
gcaaguugguggaugccau

SEQ ID NO: 2658185 - RNA, 19 nt, Homo sapiens
  misc_RNA (1)...(19): siRNA sense strand
agauuaacugcuuggguuu

SEQ ID NO: 2658186 - RNA, 19 nt, Homo sapiens
  misc_RNA (1)...(19): siRNA sense strand
ucgaagggucaucaggaaa

SEQ ID NO: 2658187 - RNA, 19 nt, Homo sapiens
  misc_RNA (1)...(19): siRNA sense strand
gugaggagccugcagggaa

SEQ ID NO: 2658188 - RNA, 19 nt, Homo sapiens
  misc_RNA (1)...(19): siRNA sense strand
cagauuaacugcuuggguu

SEQ ID NO: 2658189 - RNA, 19 nt, Homo sapiens
  misc_RNA (1)...(19): siRNA sense strand
uaagaauaucgaaggguca

SEQ ID NO: 2658190 - RNA, 19 nt, Homo sapiens
  misc_RNA (1)...(19): siRNA sense strand
ugcuagaagccaugcuaaa

SEQ ID NO: 2658191 - RNA, 19 nt, Homo sapiens
  misc_RNA (1)...(19): siRNA sense strand
cagcauggaagaugggagu

SEQ ID NO: 2658192 - RNA, 19 nt, Homo sapiens
  misc_RNA (1)...(19): siRNA sense strand
gcaucuguugagaggcuua

SEQ ID NO: 2658193 - RNA, 19 nt, Homo sapiens
  misc_RNA (1)...(19): siRNA sense strand
aggcauaccucccugguca

SEQ ID NO: 2658194 - RNA, 19 nt, Homo sapiens
  misc_RNA (1)...(19): siRNA sense strand
uggauggugcccagacaaa

SEQ ID NO: 2658195 - RNA, 19 nt, Homo sapiens
  misc_RNA (1)...(19): siRNA sense strand
acaacauagagcugcacaa

SEQ ID NO: 2658196 - RNA, 19 nt, Homo sapiens
  misc_RNA (1)...(19): siRNA sense strand
uuguaauggagcauggcaa

SEQ ID NO: 2658197 - RNA, 19 nt, Homo sapiens
  misc_RNA (1)...(19): siRNA sense strand
cguuagugcgcaagaagca

SEQ ID NO: 2658198 - RNA, 19 nt, Homo sapiens
  misc_RNA (1)...(19): siRNA sense strand
gagcaucuguugagaggcu

SEQ ID NO: 2658199 - RNA, 19 nt, Homo sapiens
  misc_RNA (1)...(19): siRNA sense strand
ucuguuaccuuuaugggaa

SEQ ID NO: 2658200 - RNA, 19 nt, Homo sapiens
  misc_RNA (1)...(19): siRNA sense strand
gugcagagaugcuggccgu

SEQ ID NO: 2658201 - RNA, 19 nt, Homo sapiens
  misc_RNA (1)...(19): siRNA sense strand
ugaacaacauagagcugca

SEQ ID NO: 2658202 - RNA, 19 nt, Homo sapiens
  misc_RNA (1)...(19): siRNA sense strand
ggcccaggagagaggaaga

SEQ ID NO: 2658203 - RNA, 19 nt, Homo sapiens
  misc_RNA (1)...(19): siRNA sense strand
ggaaggaccaucagagcac

SEQ ID NO: 2658204 - RNA, 19 nt, Homo sapiens
  misc_RNA (1)...(19): siRNA sense strand
caggaaugugucagagcaa

SEQ ID NO: 2658205 - RNA, 19 nt, Homo sapiens
  misc_RNA (1)...(19): siRNA sense strand
cuaacaaggaccagggcga

SEQ ID NO: 2658206 - RNA, 19 nt, Homo sapiens
  misc_RNA (1)...(19): siRNA sense strand
cggacagcccugcgacaaa

SEQ ID NO: 2658207 - RNA, 19 nt, Homo sapiens
  misc_RNA (1)...(19): siRNA sense strand
gaaaauuccuagaaggcau

SEQ ID NO: 2658208 - RNA, 19 nt, Homo sapiens
  misc_RNA (1)...(19): siRNA sense strand
uggaaauggaccaaguauu

SEQ ID NO: 2658209 - RNA, 19 nt, Homo sapiens
  misc_RNA (1)...(19): siRNA sense strand
ggucagugcaaucagaaaa

SEQ ID NO: 2658210 - RNA, 19 nt, Homo sapiens
  misc_RNA (1)...(19): siRNA sense strand
cugauuagccugaggaccu

SEQ ID NO: 2658211 - RNA, 19 nt, Homo sapiens
  misc_RNA (1)...(19): siRNA sense strand
ggagagaauuccuuccuca

SEQ ID NO: 2658212 - RNA, 19 nt, Homo sapiens
  misc_RNA (1)...(19): siRNA sense strand
caauacacuacgugagacu

SEQ ID NO: 2658213 - RNA, 19 nt, Homo sapiens
  misc_RNA (1)...(19): siRNA sense strand
gcacaggccugauggagcu

SEQ ID NO: 2658214 - RNA, 19 nt, Homo sapiens
  misc_RNA (1)...(19): siRNA sense strand
cucaugaagagguggguga

SEQ ID NO: 2658215 - RNA, 19 nt, Homo sapiens
  misc_RNA (1)...(19): siRNA sense strand
gggcagaucacgaggucag

SEQ ID NO: 2658216 - RNA, 19 nt, Homo sapiens
  misc_RNA (1)...(19): siRNA sense strand
cugccaggacaaagacaau

SEQ ID NO: 2658217 - RNA, 19 nt, Homo sapiens
  misc_RNA (1)...(19): siRNA sense strand
uugcaaucugccaggacaa

SEQ ID NO: 2658218 - RNA, 19 nt, Homo sapiens
  misc_RNA (1)...(19): siRNA sense strand
cugaggaggaaugaggaua

SEQ ID NO: 2658219 - RNA, 19 nt, Homo sapiens
  misc_RNA (1)...(19): siRNA sense strand
gcuuaguaguccuguucca

SEQ ID NO: 2658220 - RNA, 19 nt, Homo sapiens
  misc_RNA (1)...(19): siRNA sense strand
cgagaugggcagaucacga

SEQ ID NO: 2658221 - RNA, 19 nt, Homo sapiens
  misc_RNA (1)...(19): siRNA sense strand
agcaagaacuggacagcgu

SEQ ID NO: 2658222 - RNA, 19 nt, Homo sapiens
  misc_RNA (1)...(19): siRNA sense strand
gguuuguccucaagggcaa

SEQ ID NO: 2658223 - RNA, 19 nt, Homo sapiens
  misc_RNA (1)...(19): siRNA sense strand
cagcggaccacaugggcuu

SEQ ID NO: 2658224 - RNA, 19 nt, Homo sapiens
  misc_RNA (1)...(19): siRNA sense strand
gaauaagagaagaaaggaa

SEQ ID NO: 2658225 - RNA, 19 nt, Homo sapiens
  misc_RNA (1)...(19): siRNA sense strand
cgauuaaaccagagcaaaa

SEQ ID NO: 2658226 - RNA, 19 nt, Homo sapiens
  misc_RNA (1)...(19): siRNA sense strand
aagaagaagcuaagaaaca

SEQ ID NO: 2658227 - RNA, 19 nt, Homo sapiens
  misc_RNA (1)...(19): siRNA sense strand
cagccacguuagaggaaua

SEQ ID NO: 2658228 - RNA, 19 nt, Homo sapiens
  misc_RNA (1)...(19): siRNA sense strand
cuauauggaauuagagcaa

SEQ ID NO: 2658229 - RNA, 19 nt, Homo sapiens
  misc_RNA (1)...(19): siRNA sense strand
cauuaaaucugaagcccaa

SEQ ID NO: 2658230 - RNA, 19 nt, Homo sapiens
  misc_RNA (1)...(19): siRNA sense strand
uugcuaagguagaggauga

SEQ ID NO: 2658231 - RNA, 19 nt, Homo sapiens
  misc_RNA (1)...(19): siRNA sense strand
ucgacgaaguagugaagaa

SEQ ID NO: 2658232 - RNA, 19 nt, Homo sapiens
  misc_RNA (1)...(19): siRNA sense strand
acacaguacaagugaggaa

SEQ ID NO: 2658233 - RNA, 19 nt, Homo sapiens
  misc_RNA (1)...(19): siRNA sense strand
aggagugacaugaaagaaa

SEQ ID NO: 2658234 - RNA, 19 nt, Homo sapiens
  misc_RNA (1)...(19): siRNA sense strand
caugaaugccguugagaga

SEQ ID NO: 2658235 - RNA, 19 nt, Homo sapiens
  misc_RNA (1)...(19): siRNA sense strand
agaaaugaacugcgagaca

SEQ ID NO: 2658236 - RNA, 19 nt, Homo sapiens
  misc_RNA (1)...(19): siRNA sense strand
aaacgaaaggcuuggagaa

SEQ ID NO: 2658237 - RNA, 19 nt, Homo sapiens
  misc_RNA (1)...(19): siRNA sense strand
ugaagaugaaguagaacaa

SEQ ID NO: 2658238 - RNA, 19 nt, Homo sapiens
  misc_RNA (1)...(19): siRNA sense strand
gccuaaagugucugcaaua

SEQ ID NO: 2658239 - RNA, 19 nt, Homo sapiens
  misc_RNA (1)...(19): siRNA sense strand
ccucagagucggaaggcau

SEQ ID NO: 2658240 - RNA, 19 nt, Homo sapiens
  misc_RNA (1)...(19): siRNA sense strand
agaaaguggcagagcugua

SEQ ID NO: 2658241 - RNA, 19 nt, Homo sapiens
  misc_RNA (1)...(19): siRNA sense strand
acacuuuagucgacagauu

SEQ ID NO: 2658242 - RNA, 19 nt, Homo sapiens
  misc_RNA (1)...(19): siRNA sense strand
acaacaucgugcugugaaa

SEQ ID NO: 2658243 - RNA, 19 nt, Homo sapiens
  misc_RNA (1)...(19): siRNA sense strand
caucauugucaaagaccaa

SEQ ID NO: 2658244 - RNA, 19 nt, Homo sapiens
  misc_RNA (1)...(19): siRNA sense strand
aaaccaaagacguagaaau

SEQ ID NO: 2658245 - RNA, 19 nt, Homo sapiens
  misc_RNA (1)...(19): siRNA sense strand
ggugacuaaugguguuaaa

SEQ ID NO: 2658246 - RNA, 19 nt, Homo sapiens
  misc_RNA (1)...(19): siRNA sense strand
cuaagguagaggaugaaua

SEQ ID NO: 2658247 - RNA, 19 nt, Homo sapiens
  misc_RNA (1)...(19): siRNA sense strand
ggguauacaauuacaugaa

SEQ ID NO: 2658248 - RNA, 19 nt, Homo sapiens
  misc_RNA (1)...(19): siRNA sense strand
agaacaagacaauaaggaa

SEQ ID NO: 2658249 - RNA, 19 nt, Homo sapiens
  misc_RNA (1)...(19): siRNA sense strand
gugaccagauagagaugaa

SEQ ID NO: 2658250 - RNA, 19 nt, Homo sapiens
  misc_RNA (1)...(19): siRNA sense strand
gaaacagaaaggagugaca

SEQ ID NO: 2658251 - RNA, 19 nt, Homo sapiens
  misc_RNA (1)...(19): siRNA sense strand
uggaauuagagcaacguua

SEQ ID NO: 2658252 - RNA, 19 nt, Homo sapiens
  misc_RNA (1)...(19): siRNA sense strand
gggaagaaucugcggaaug

SEQ ID NO: 2658253 - RNA, 19 nt, Homo sapiens
  misc_RNA (1)...(19): siRNA sense strand
aagccgaauaagagaagaa

SEQ ID NO: 2658254 - RNA, 19 nt, Homo sapiens
  misc_RNA (1)...(19): siRNA sense strand
uggaauggccggaggggua

SEQ ID NO: 2658255 - RNA, 19 nt, Homo sapiens
  misc_RNA (1)...(19): siRNA sense strand
aggccaaagugaaggaucu

SEQ ID NO: 2658256 - RNA, 19 nt, Homo sapiens
  misc_RNA (1)...(19): siRNA sense strand
gguugaaugcauugggcuu

SEQ ID NO: 2658257 - RNA, 19 nt, Homo sapiens
  misc_RNA (1)...(19): siRNA sense strand
cuuugaacuugaagaugaa

SEQ ID NO: 2658258 - RNA, 19 nt, Homo sapiens
  misc_RNA (1)...(19): siRNA sense strand
aagaugaaguagaacaaca

SEQ ID NO: 2658259 - RNA, 19 nt, Homo sapiens
  misc_RNA (1)...(19): siRNA sense strand
agaccaaacuauggggaaa

SEQ ID NO: 2658260 - RNA, 19 nt, Homo sapiens
  misc_RNA (1)...(19): siRNA sense strand
caggauaagagaaggaacu

SEQ ID NO: 2658261 - RNA, 19 nt, Homo sapiens
  misc_RNA (1)...(19): siRNA sense strand
cagaaggcuaucagaauau

SEQ ID NO: 2658262 - RNA, 19 nt, Homo sapiens
  misc_RNA (1)...(19): siRNA sense strand
ugguguuaaaggaaagaaa

SEQ ID NO: 2658263 - RNA, 19 nt, Homo sapiens
  misc_RNA (1)...(19): siRNA sense strand
cagaaaggagugacaugaa

SEQ ID NO: 2658264 - RNA, 19 nt, Homo sapiens
  misc_RNA (1)...(19): siRNA sense strand
gaagaaagcaagcaggagu

SEQ ID NO: 2658265 - RNA, 19 nt, Homo sapiens
  misc_RNA (1)...(19): siRNA sense strand
gaacaagacaauaaggaag

SEQ ID NO: 2658266 - RNA, 19 nt, Homo sapiens
  misc_RNA (1)...(19): siRNA sense strand
agaagaaaacagaaggcua

SEQ ID NO: 2658267 - RNA, 19 nt, Homo sapiens
  misc_RNA (1)...(19): siRNA sense strand
gcaauaaguaaaacgcaaa

SEQ ID NO: 2658268 - RNA, 19 nt, Homo sapiens
  misc_RNA (1)...(19): siRNA sense strand
caggaacugaauagugaaa

SEQ ID NO: 2658269 - RNA, 19 nt, Homo sapiens
  misc_RNA (1)...(19): siRNA sense strand
agacaauaaggaagcucaa

SEQ ID NO: 2658270 - RNA, 19 nt, Homo sapiens
  misc_RNA (1)...(19): siRNA sense strand
ggagcgaauuauugagucu

SEQ ID NO: 2658271 - RNA, 19 nt, Homo sapiens
  misc_RNA (1)...(19): siRNA sense strand
aagcaggaguguuggcuca

SEQ ID NO: 2658272 - RNA, 19 nt, Homo sapiens
  misc_RNA (1)...(19): siRNA sense strand
gagcacuucuacagguaau

SEQ ID NO: 2658273 - RNA, 19 nt, Homo sapiens
  misc_RNA (1)...(19): siRNA sense strand
gagcgauggaggaggaacu

SEQ ID NO: 2658274 - RNA, 19 nt, Homo sapiens
  misc_RNA (1)...(19): siRNA sense strand
gagacaaaucugauauuca

SEQ ID NO: 2658275 - RNA, 19 nt, Homo sapiens
  misc_RNA (1)...(19): siRNA sense strand
augcagagacauuccauaa

SEQ ID NO: 2658276 - RNA, 19 nt, Homo sapiens
  misc_RNA (1)...(19): siRNA sense strand
guucaagagcaucuguuaa

SEQ ID NO: 2658277 - RNA, 19 nt, Homo sapiens
  misc_RNA (1)...(19): siRNA sense strand
uggacaauuuagacaguga

SEQ ID NO: 2658278 - RNA, 19 nt, Homo sapiens
  misc_RNA (1)...(19): siRNA sense strand
caagauuagcacaggcaca

SEQ ID NO: 2658279 - RNA, 19 nt, Homo sapiens
  misc_RNA (1)...(19): siRNA sense strand
acaaaagaauuggaggaaa

SEQ ID NO: 2658280 - RNA, 19 nt, Homo sapiens
  misc_RNA (1)...(19): siRNA sense strand
agauaagagaccaaacuau

SEQ ID NO: 2658281 - RNA, 19 nt, Homo sapiens
  misc_RNA (1)...(19): siRNA sense strand
uguaaaugcaucacgaaga

SEQ ID NO: 2658282 - RNA, 19 nt, Homo sapiens
  misc_RNA (1)...(19): siRNA sense strand
acuaaugguguuaaaggaa

SEQ ID NO: 2658283 - RNA, 19 nt, Homo sapiens
  misc_RNA (1)...(19): siRNA sense strand
ugagaaaugaacugcgaga

SEQ ID NO: 2658284 - RNA, 19 nt, Homo sapiens
  misc_RNA (1)...(19): siRNA sense strand
auaaggaagcucaagaaau

SEQ ID NO: 2658285 - RNA, 19 nt, Homo sapiens
  misc_RNA (1)...(19): siRNA sense strand
aguagaagguccucgacuu

SEQ ID NO: 2658286 - RNA, 19 nt, Homo sapiens
  misc_RNA (1)...(19): siRNA sense strand
acaguaacuccauggacaa

SEQ ID NO: 2658287 - RNA, 19 nt, Homo sapiens
  misc_RNA (1)...(19): siRNA sense strand
agguaucggcgcugggauu

SEQ ID NO: 2658288 - RNA, 19 nt, Homo sapiens
  misc_RNA (1)...(19): siRNA sense strand
acacuggacauuaaugaaa

SEQ ID NO: 2658289 - RNA, 19 nt, Homo sapiens
  misc_RNA (1)...(19): siRNA sense strand
cccagaaugaagaaagcaa

SEQ ID NO: 2658290 - RNA, 19 nt, Homo sapiens
  misc_RNA (1)...(19): siRNA sense strand
gcauagagcgcucccggaa

SEQ ID NO: 2658291 - RNA, 19 nt, Homo sapiens
  misc_RNA (1)...(19): siRNA sense strand
gcucuagagaagauggaaa

SEQ ID NO: 2658292 - RNA, 19 nt, Homo sapiens
  misc_RNA (1)...(19): siRNA sense strand
ucauagaacaaaagggaaa

SEQ ID NO: 2658293 - RNA, 19 nt, Homo sapiens
  misc_RNA (1)...(19): siRNA sense strand
agaaguacauugauggaga

SEQ ID NO: 2658294 - RNA, 19 nt, Homo sapiens
  misc_RNA (1)...(19): siRNA sense strand
gggugaaauacgagggucu

SEQ ID NO: 2658295 - RNA, 19 nt, Homo sapiens
  misc_RNA (1)...(19): siRNA sense strand
cagaaaguggcucgagcaa

SEQ ID NO: 2658296 - RNA, 19 nt, Homo sapiens
  misc_RNA (1)...(19): siRNA sense strand
ggguaggaguggugaagcu

SEQ ID NO: 2658297 - RNA, 19 nt, Homo sapiens
  misc_RNA (1)...(19): siRNA sense strand
gagaugaacuacagcagca

SEQ ID NO: 2658298 - RNA, 19 nt, Homo sapiens
  misc_RNA (1)...(19): siRNA sense strand
guacauugauggagaggag

SEQ ID NO: 2658299 - RNA, 19 nt, Homo sapiens
  misc_RNA (1)...(19): siRNA sense strand
acaaugacgaagaggacuu

SEQ ID NO: 2658300 - RNA, 19 nt, Homo sapiens
  misc_RNA (1)...(19): siRNA sense strand
agaagauggaaaccagaaa

SEQ ID NO: 2658301 - RNA, 19 nt, Homo sapiens
  misc_RNA (1)...(19): siRNA sense strand
guaugaauauggcugggua

SEQ ID NO: 2658302 - RNA, 19 nt, Homo sapiens
  misc_RNA (1)...(19): siRNA sense strand
cugucauccuauugcuaaa

SEQ ID NO: 2658303 - RNA, 19 nt, Homo sapiens
  misc_RNA (1)...(19): siRNA sense strand
gcauggacucccacggcaa

SEQ ID NO: 2658304 - RNA, 19 nt, Homo sapiens
  misc_RNA (1)...(19): siRNA sense strand
gaacaaaagggaaacccaa

SEQ ID NO: 2658305 - RNA, 19 nt, Homo sapiens
  misc_RNA (1)...(19): siRNA sense strand
agaccauguaccagcacua

SEQ ID NO: 2658306 - RNA, 19 nt, Homo sapiens
  misc_RNA (1)...(19): siRNA sense strand
cugaaaacccagaagcuau

SEQ ID NO: 2658307 - RNA, 19 nt, Homo sapiens
  misc_RNA (1)...(19): siRNA sense strand
gcucugugcugccaggcua

SEQ ID NO: 2658308 - RNA, 19 nt, Homo sapiens
  misc_RNA (1)...(19): siRNA sense strand
ggacaagcauggacuccca

SEQ ID NO: 2658309 - RNA, 19 nt, Homo sapiens
  misc_RNA (1)...(19): siRNA sense strand
cagaagauccucaaggucu

SEQ ID NO: 2658310 - RNA, 19 nt, Homo sapiens
  misc_RNA (1)...(19): siRNA sense strand
agccagaauuggacccgaa

SEQ ID NO: 2658311 - RNA, 19 nt, Homo sapiens
  misc_RNA (1)...(19): siRNA sense strand
gcucugaagacccgcucaa

SEQ ID NO: 2658312 - RNA, 19 nt, Homo sapiens
  misc_RNA (1)...(19): siRNA sense strand
ccacugaauacuuugacau

SEQ ID NO: 2658313 - RNA, 19 nt, Homo sapiens
  misc_RNA (1)...(19): siRNA sense strand
caagagaaaucguggcuca

SEQ ID NO: 2658314 - RNA, 19 nt, Homo sapiens
  misc_RNA (1)...(19): siRNA sense strand
ggacagaacaagggucaaa

SEQ ID NO: 2658315 - RNA, 19 nt, Homo sapiens
  misc_RNA (1)...(19): siRNA sense strand
aggaagagguaacaacaau

SEQ ID NO: 2658316 - RNA, 19 nt, Homo sapiens
  misc_RNA (1)...(19): siRNA sense strand
ccuaugucauggaggaaga

SEQ ID NO: 2658317 - RNA, 19 nt, Homo sapiens
  misc_RNA (1)...(19): siRNA sense strand
gcgugagaggacagaacaa

SEQ ID NO: 2658318 - RNA, 19 nt, Homo sapiens
  misc_RNA (1)...(19): siRNA sense strand
ugucauggaggaagaggua

SEQ ID NO: 2658319 - RNA, 19 nt, Homo sapiens
  misc_RNA (1)...(19): siRNA sense strand
accacaaggccuaggagaa

SEQ ID NO: 2658320 - RNA, 19 nt, Homo sapiens
  misc_RNA (1)...(19): siRNA sense strand
gaggaagagguaacaacaa

SEQ ID NO: 2658321 - RNA, 19 nt, Homo sapiens
  misc_RNA (1)...(19): siRNA sense strand
caaauaccauugaagagaa

SEQ ID NO: 2658322 - RNA, 19 nt, Homo sapiens
  misc_RNA (1)...(19): siRNA sense strand
gaggacagaacaaggguca

SEQ ID NO: 2658323 - RNA, 19 nt, Homo sapiens
  misc_RNA (1)...(19): siRNA sense strand
gcucugagacuguggaugu

SEQ ID NO: 2658324 - RNA, 19 nt, Homo sapiens
  misc_RNA (1)...(19): siRNA sense strand
auuuggaccuaguggaaga

SEQ ID NO: 2658325 - RNA, 19 nt, Homo sapiens
  misc_RNA (1)...(19): siRNA sense strand
ggaagagguaacaacaauu

SEQ ID NO: 2658326 - RNA, 19 nt, Homo sapiens
  misc_RNA (1)...(19): siRNA sense strand
gaagagguaacaacaauua

SEQ ID NO: 2658327 - RNA, 19 nt, Homo sapiens
  misc_RNA (1)...(19): siRNA sense strand
ccaagacaguggaguggga

SEQ ID NO: 2658328 - RNA, 19 nt, Homo sapiens
  misc_RNA (1)...(19): siRNA sense strand
agauuuggaccuaguggaa

SEQ ID NO: 2658329 - RNA, 19 nt, Homo sapiens
  misc_RNA (1)...(19): siRNA sense strand
ggacagaagcucucagccu

SEQ ID NO: 2658330 - RNA, 19 nt, Homo sapiens
  misc_RNA (1)...(19): siRNA sense strand
ucgaagacuaagaauggua

SEQ ID NO: 2658331 - RNA, 19 nt, Homo sapiens
  misc_RNA (1)...(19): siRNA sense strand
acgaacaccacaaggccua

SEQ ID NO: 2658332 - RNA, 19 nt, Homo sapiens
  misc_RNA (1)...(19): siRNA sense strand
ggaggaagagguaacaaca

SEQ ID NO: 2658333 - RNA, 19 nt, Homo sapiens
  misc_RNA (1)...(19): siRNA sense strand
cauuacccaccaagagaaa

SEQ ID NO: 2658334 - RNA, 19 nt, Homo sapiens
  misc_RNA (1)...(19): siRNA sense strand
gagaaaucguggcucacau

SEQ ID NO: 2658335 - RNA, 19 nt, Homo sapiens
  misc_RNA (1)...(19): siRNA sense strand
gacagaagcucucagccua

SEQ ID NO: 2658336 - RNA, 19 nt, Homo sapiens
  misc_RNA (1)...(19): siRNA sense strand
aauaauaguagcagcagca

SEQ ID NO: 2658337 - RNA, 19 nt, Homo sapiens
  misc_RNA (1)...(19): siRNA sense strand
gcacggagacucauuaaca

SEQ ID NO: 2658338 - RNA, 19 nt, Homo sapiens
  misc_RNA (1)...(19): siRNA sense strand
acacacucaccuagagaca

SEQ ID NO: 2658339 - RNA, 19 nt, Homo sapiens
  misc_RNA (1)...(19): siRNA sense strand
agacuguggauguccuaaa

SEQ ID NO: 2658340 - RNA, 19 nt, Homo sapiens
  misc_RNA (1)...(19): siRNA sense strand
acaaauaccauugaagaga

SEQ ID NO: 2658341 - RNA, 19 nt, Homo sapiens
  misc_RNA (1)...(19): siRNA sense strand
ucaccuaugucauggagga

SEQ ID NO: 2658342 - RNA, 19 nt, Homo sapiens
  misc_RNA (1)...(19): siRNA sense strand
ugaagaagcucucuaggga

SEQ ID NO: 2658343 - RNA, 19 nt, Homo sapiens
  misc_RNA (1)...(19): siRNA sense strand
gcgagaaugaucaagcuga

SEQ ID NO: 2658344 - RNA, 19 nt, Homo sapiens
  misc_RNA (1)...(19): siRNA sense strand
ccgacauccacgaacaauu

SEQ ID NO: 2658345 - RNA, 19 nt, Homo sapiens
  misc_RNA (1)...(19): siRNA sense strand
cccaagaaggacagcaaga

SEQ ID NO: 2658346 - RNA, 19 nt, Homo sapiens
  misc_RNA (1)...(19): siRNA sense strand
agcaagagcaccaagaaca

SEQ ID NO: 2658347 - RNA, 19 nt, Homo sapiens
  misc_RNA (1)...(19): siRNA sense strand
cagcgaggccagagacagu

SEQ ID NO: 2658348 - RNA, 19 nt, Homo sapiens
  misc_RNA (1)...(19): siRNA sense strand
gugcacgaccagaggagga

SEQ ID NO: 2658349 - RNA, 19 nt, Homo sapiens
  misc_RNA (1)...(19): siRNA sense strand
cagggaggguacauggaca

SEQ ID NO: 2658350 - RNA, 19 nt, Homo sapiens
  misc_RNA (1)...(19): siRNA sense strand
ugaacagagcagauggaaa

SEQ ID NO: 2658351 - RNA, 19 nt, Homo sapiens
  misc_RNA (1)...(19): siRNA sense strand
cgacaugaccguaggggaa

SEQ ID NO: 2658352 - RNA, 19 nt, Homo sapiens
  misc_RNA (1)...(19): siRNA sense strand
acauggaguuugugcgcau

SEQ ID NO: 2658353 - RNA, 19 nt, Homo sapiens
  misc_RNA (1)...(19): siRNA sense strand
gaggagguguucagcgaca

SEQ ID NO: 2658354 - RNA, 19 nt, Homo sapiens
  misc_RNA (1)...(19): siRNA sense strand
cagcugagccugaggugga

SEQ ID NO: 2658355 - RNA, 19 nt, Homo sapiens
  misc_RNA (1)...(19): siRNA sense strand
gcguacuccggcagcgaaa

SEQ ID NO: 2658356 - RNA, 19 nt, Homo sapiens
  misc_RNA (1)...(19): siRNA sense strand
gcuucuacaaguacagcaa

SEQ ID NO: 2658357 - RNA, 19 nt, Homo sapiens
  misc_RNA (1)...(19): siRNA sense strand
gcuucaaggaugaccgcau

SEQ ID NO: 2658358 - RNA, 19 nt, Homo sapiens
  misc_RNA (1)...(19): siRNA sense strand
guguaugacaaccggguga

SEQ ID NO: 2658359 - RNA, 19 nt, Homo sapiens
  misc_RNA (1)...(19): siRNA sense strand
cggcagaagcccauccuga

SEQ ID NO: 2658360 - RNA, 19 nt, Homo sapiens
  misc_RNA (1)...(19): siRNA sense strand
ucgaggagguguucagcga

SEQ ID NO: 2658361 - RNA, 19 nt, Homo sapiens
  misc_RNA (1)...(19): siRNA sense strand
gcgaggaguucuuccggga

SEQ ID NO: 2658362 - RNA, 19 nt, Homo sapiens
  misc_RNA (1)...(19): siRNA sense strand
ggacagaguuugaucgacu

SEQ ID NO: 2658363 - RNA, 19 nt, Homo sapiens
  misc_RNA (1)...(19): siRNA sense strand
gguuccagcccgaggagaa

SEQ ID NO: 2658364 - RNA, 19 nt, Homo sapiens
  misc_RNA (1)...(19): siRNA sense strand
ugaaugagaucaaagguca

SEQ ID NO: 2658365 - RNA, 19 nt, Homo sapiens
  misc_RNA (1)...(19): siRNA sense strand
ccggaagcugcgagaagaa

SEQ ID NO: 2658366 - RNA, 19 nt, Homo sapiens
  misc_RNA (1)...(19): siRNA sense strand
cugacauccuggagaagau

SEQ ID NO: 2658367 - RNA, 19 nt, Homo sapiens
  misc_RNA (1)...(19): siRNA sense strand
ccgaaugcagcgacgaaau

SEQ ID NO: 2658368 - RNA, 19 nt, Homo sapiens
  misc_RNA (1)...(19): siRNA sense strand
cggacauccagaaguacaa

SEQ ID NO: 2658369 - RNA, 19 nt, Homo sapiens
  misc_RNA (1)...(19): siRNA sense strand
cuagcaauucugagguuau

SEQ ID NO: 2658370 - RNA, 19 nt, Homo sapiens
  misc_RNA (1)...(19): siRNA sense strand
cggaagaugcccacggacu

SEQ ID NO: 2658371 - RNA, 19 nt, Homo sapiens
  misc_RNA (1)...(19): siRNA sense strand
cggagaauuacuugugcuu

SEQ ID NO: 2658372 - RNA, 19 nt, Homo sapiens
  misc_RNA (1)...(19): siRNA sense strand
gagaagaaaccaacgcgga

SEQ ID NO: 2658373 - RNA, 19 nt, Homo sapiens
  misc_RNA (1)...(19): siRNA sense strand
ccacaaaggucaccacaga

SEQ ID NO: 2658374 - RNA, 19 nt, Homo sapiens
  misc_RNA (1)...(19): siRNA sense strand
ugacaaugcauuugauuca

SEQ ID NO: 2658375 - RNA, 19 nt, Homo sapiens
  misc_RNA (1)...(19): siRNA sense strand
auacagauguggcagguuu

SEQ ID NO: 2658376 - RNA, 19 nt, Homo sapiens
  misc_RNA (1)...(19): siRNA sense strand
ccucagagauugcccaagu

SEQ ID NO: 2658377 - RNA, 19 nt, Homo sapiens
  misc_RNA (1)...(19): siRNA sense strand
gagaauggcuggcaggaga

SEQ ID NO: 2658378 - RNA, 19 nt, Homo sapiens
  misc_RNA (1)...(19): siRNA sense strand
gcucauuguuugaacgcca

SEQ ID NO: 2658379 - RNA, 19 nt, Homo sapiens
  misc_RNA (1)...(19): siRNA sense strand
augccgaccaggagagcaa

SEQ ID NO: 2658380 - RNA, 19 nt, Homo sapiens
  misc_RNA (1)...(19): siRNA sense strand
ccgacugcguggaggaagu

SEQ ID NO: 2658381 - RNA, 19 nt, Homo sapiens
  misc_RNA (1)...(19): siRNA sense strand
gcguggaggaagugcagau

SEQ ID NO: 2658382 - RNA, 19 nt, Homo sapiens
  misc_RNA (1)...(19): siRNA sense strand
gcaaguucgacgugggcga

SEQ ID NO: 2658383 - RNA, 19 nt, Homo sapiens
  misc_RNA (1)...(19): siRNA sense strand
caaggaagccagaagagga

SEQ ID NO: 2658384 - RNA, 19 nt, Homo sapiens
  misc_RNA (1)...(19): siRNA sense strand
ggccaaagcaagaucagga

SEQ ID NO: 2658385 - RNA, 19 nt, Homo sapiens
  misc_RNA (1)...(19): siRNA sense strand
aggaagugcagaugaggca

SEQ ID NO: 2658386 - RNA, 19 nt, Homo sapiens
  misc_RNA (1)...(19): siRNA sense strand
ggcugcaagaggagaaaga

SEQ ID NO: 2658387 - RNA, 19 nt, Homo sapiens
  misc_RNA (1)...(19): siRNA sense strand
ucaccugacuacaaggaca

SEQ ID NO: 2658388 - RNA, 19 nt, Homo sapiens
  misc_RNA (1)...(19): siRNA sense strand
cuaacagggauguccgcaa

SEQ ID NO: 2658389 - RNA, 19 nt, Homo sapiens
  misc_RNA (1)...(19): siRNA sense strand
auacaagcggcgaguuuau

SEQ ID NO: 2658390 - RNA, 19 nt, Homo sapiens
  misc_RNA (1)...(19): siRNA sense strand
agcaagaucaggagcugua

SEQ ID NO: 2658391 - RNA, 19 nt, Homo sapiens
  misc_RNA (1)...(19): siRNA sense strand
gcuaaaggugcugaagaau

SEQ ID NO: 2658392 - RNA, 19 nt, Homo sapiens
  misc_RNA (1)...(19): siRNA sense strand
ggagaaagaucgugaccgg

SEQ ID NO: 2658393 - RNA, 19 nt, Homo sapiens
  misc_RNA (1)...(19): siRNA sense strand
cugcaagaggagaaagauc

SEQ ID NO: 2658394 - RNA, 19 nt, Homo sapiens
  misc_RNA (1)...(19): siRNA sense strand
ccugaagacgacaaaccaa

SEQ ID NO: 2658395 - RNA, 19 nt, Homo sapiens
  misc_RNA (1)...(19): siRNA sense strand
aggucauacuggagagaaa

SEQ ID NO: 2658396 - RNA, 19 nt, Homo sapiens
  misc_RNA (1)...(19): siRNA sense strand
acuucauacuggagagaaa

SEQ ID NO: 2658397 - RNA, 19 nt, Homo sapiens
  misc_RNA (1)...(19): siRNA sense strand
agucaucagucgugaaaca

SEQ ID NO: 2658398 - RNA, 19 nt, Homo sapiens
  misc_RNA (1)...(19): siRNA sense strand
auguggagauuguaggaaa

SEQ ID NO: 2658399 - RNA, 19 nt, Homo sapiens
  misc_RNA (1)...(19): siRNA sense strand
gagauuuagaugugggaga

SEQ ID NO: 2658400 - RNA, 19 nt, Homo sapiens
  misc_RNA (1)...(19): siRNA sense strand
aagaauucauacaggagaa

SEQ ID NO: 2658401 - RNA, 19 nt, Homo sapiens
  misc_RNA (1)...(19): siRNA sense strand
guguggugaaugugggaaa

SEQ ID NO: 2658402 - RNA, 19 nt, Homo sapiens
  misc_RNA (1)...(19): siRNA sense strand
gaauggagcccuauggaga

SEQ ID NO: 2658403 - RNA, 19 nt, Homo sapiens
  misc_RNA (1)...(19): siRNA sense strand
aggaaagacaccuuguaua

SEQ ID NO: 2658404 - RNA, 19 nt, Homo sapiens
  misc_RNA (1)...(19): siRNA sense strand
cuacccagacagagugaaa

SEQ ID NO: 2658405 - RNA, 19 nt, Homo sapiens
  misc_RNA (1)...(19): siRNA sense strand
uuguaguaugugugggaaa

SEQ ID NO: 2658406 - RNA, 19 nt, Homo sapiens
  misc_RNA (1)...(19): siRNA sense strand
cccuaugaauguagugaau

SEQ ID NO: 2658407 - RNA, 19 nt, Homo sapiens
  misc_RNA (1)...(19): siRNA sense strand
augugaugcuggagaccua

SEQ ID NO: 2658408 - RNA, 19 nt, Homo sapiens
  misc_RNA (1)...(19): siRNA sense strand
agugaaaggccuugaaucu

SEQ ID NO: 2658409 - RNA, 19 nt, Homo sapiens
  misc_RNA (1)...(19): siRNA sense strand
ucagaauccauauaggaaa

SEQ ID NO: 2658410 - RNA, 19 nt, Homo sapiens
  misc_RNA (1)...(19): siRNA sense strand
cauggaucauagagaguga

SEQ ID NO: 2658411 - RNA, 19 nt, Homo sapiens
  misc_RNA (1)...(19): siRNA sense strand
guguggugaauguggcaaa

SEQ ID NO: 2658412 - RNA, 19 nt, Homo sapiens
  misc_RNA (1)...(19): siRNA sense strand
ucauaggacaucaaagaau

SEQ ID NO: 2658413 - RNA, 19 nt, Homo sapiens
  misc_RNA (1)...(19): siRNA sense strand
uaagaaauuucaagccaga

SEQ ID NO: 2658414 - RNA, 19 nt, Homo sapiens
  misc_RNA (1)...(19): siRNA sense strand
agacagagugaaaggccuu

SEQ ID NO: 2658415 - RNA, 19 nt, Homo sapiens
  misc_RNA (1)...(19): siRNA sense strand
gcucauuauacaucaaaga

SEQ ID NO: 2658416 - RNA, 19 nt, Homo sapiens
  misc_RNA (1)...(19): siRNA sense strand
gggcaucagaauccauaua

SEQ ID NO: 2658417 - RNA, 19 nt, Homo sapiens
  misc_RNA (1)...(19): siRNA sense strand
gauucauacuggggagaaa

SEQ ID NO: 2658418 - RNA, 19 nt, Homo sapiens
  misc_RNA (1)...(19): siRNA sense strand
ggaucuacccagacagagu

SEQ ID NO: 2658419 - RNA, 19 nt, Homo sapiens
  misc_RNA (1)...(19): siRNA sense strand
agagagaagcccuuugaau

SEQ ID NO: 2658420 - RNA, 19 nt, Homo sapiens
  misc_RNA (1)...(19): siRNA sense strand
cccaggaaccagugacauu

SEQ ID NO: 2658421 - RNA, 19 nt, Homo sapiens
  misc_RNA (1)...(19): siRNA sense strand
agguauaaaaccagaugua

SEQ ID NO: 2658422 - RNA, 19 nt, Homo sapiens
  misc_RNA (1)...(19): siRNA sense strand
uuaaguuggaacauggaaa

SEQ ID NO: 2658423 - RNA, 19 nt, Homo sapiens
  misc_RNA (1)...(19): siRNA sense strand
uggagauagucaaugugaa

SEQ ID NO: 2658424 - RNA, 19 nt, Homo sapiens
  misc_RNA (1)...(19): siRNA sense strand
cccuauaaguguggugaau

SEQ ID NO: 2658425 - RNA, 19 nt, Homo sapiens
  misc_RNA (1)...(19): siRNA sense strand
aaacauugacugaugagau

SEQ ID NO: 2658426 - RNA, 19 nt, Homo sapiens
  misc_RNA (1)...(19): siRNA sense strand
gaaagccuucagugagaaa

SEQ ID NO: 2658427 - RNA, 19 nt, Homo sapiens
  misc_RNA (1)...(19): siRNA sense strand
uuaucauacaccagagaau

SEQ ID NO: 2658428 - RNA, 19 nt, Homo sapiens
  misc_RNA (1)...(19): siRNA sense strand
aggauguggcuguggacuu

SEQ ID NO: 2658429 - RNA, 19 nt, Homo sapiens
  misc_RNA (1)...(19): siRNA sense strand
aggaagaguggcagcaguu

SEQ ID NO: 2658430 - RNA, 19 nt, Homo sapiens
  misc_RNA (1)...(19): siRNA sense strand
ucaaagaauucauacagga

SEQ ID NO: 2658431 - RNA, 19 nt, Homo sapiens
  misc_RNA (1)...(19): siRNA sense strand
guguacugaauguggaaaa

SEQ ID NO: 2658432 - RNA, 19 nt, Homo sapiens
  misc_RNA (1)...(19): siRNA sense strand
agaaagagccccaaaggau

SEQ ID NO: 2658433 - RNA, 19 nt, Homo sapiens
  misc_RNA (1)...(19): siRNA sense strand
gguuccaaguacagugcau

SEQ ID NO: 2658434 - RNA, 19 nt, Homo sapiens
  misc_RNA (1)...(19): siRNA sense strand
gugcaucagaggauucaua

SEQ ID NO: 2658435 - RNA, 19 nt, Homo sapiens
  misc_RNA (1)...(19): siRNA sense strand
acuaaguauggaagagcau

SEQ ID NO: 2658436 - RNA, 19 nt, Homo sapiens
  misc_RNA (1)...(19): siRNA sense strand
auacuggaauggagcccua

SEQ ID NO: 2658437 - RNA, 19 nt, Homo sapiens
  misc_RNA (1)...(19): siRNA sense strand
gggagauacuagaaagagc

SEQ ID NO: 2658438 - RNA, 19 nt, Homo sapiens
  misc_RNA (1)...(19): siRNA sense strand
gagcuaugcaagaaagaac

SEQ ID NO: 2658439 - RNA, 19 nt, Homo sapiens
  misc_RNA (1)...(19): siRNA sense strand
ccauguucaguauaagaaa

SEQ ID NO: 2658440 - RNA, 19 nt, Homo sapiens
  misc_RNA (1)...(19): siRNA sense strand
agaaauuucaagccagaga

SEQ ID NO: 2658441 - RNA, 19 nt, Homo sapiens
  misc_RNA (1)...(19): siRNA sense strand
gggaagaugucaagcccuu

SEQ ID NO: 2658442 - RNA, 19 nt, Homo sapiens
  misc_RNA (1)...(19): siRNA sense strand
acgcaagagccgcgaguau

SEQ ID NO: 2658443 - RNA, 19 nt, Homo sapiens
  misc_RNA (1)...(19): siRNA sense strand
ggaagaagaacuuuggcau

SEQ ID NO: 2658444 - RNA, 19 nt, Homo sapiens
  misc_RNA (1)...(19): siRNA sense strand
cugaggaggaggagcgaga

SEQ ID NO: 2658445 - RNA, 19 nt, Homo sapiens
  misc_RNA (1)...(19): siRNA sense strand
cgacagaggcacaugcuga

SEQ ID NO: 2658446 - RNA, 19 nt, Homo sapiens
  misc_RNA (1)...(19): siRNA sense strand
gcgaccacaucaugcgcaa

SEQ ID NO: 2658447 - RNA, 19 nt, Homo sapiens
  misc_RNA (1)...(19): siRNA sense strand
uggacuacaugaaacgcaa

SEQ ID NO: 2658448 - RNA, 19 nt, Homo sapiens
  misc_RNA (1)...(19): siRNA sense strand
gaaaggugguguggcggua

SEQ ID NO: 2658449 - RNA, 19 nt, Homo sapiens
  misc_RNA (1)...(19): siRNA sense strand
cuccagcaacucagggaua

SEQ ID NO: 2658450 - RNA, 19 nt, Homo sapiens
  misc_RNA (1)...(19): siRNA sense strand
gcgcaaugggcuggauuau

SEQ ID NO: 2658451 - RNA, 19 nt, Homo sapiens
  misc_RNA (1)...(19): siRNA sense strand
ggaccggcuaggacaggaa

SEQ ID NO: 2658452 - RNA, 19 nt, Homo sapiens
  misc_RNA (1)...(19): siRNA sense strand
gggaagaagaacuuuggca

SEQ ID NO: 2658453 - RNA, 19 nt, Homo sapiens
  misc_RNA (1)...(19): siRNA sense strand
cguguugcuggcugagaaa

SEQ ID NO: 2658454 - RNA, 19 nt, Homo sapiens
  misc_RNA (1)...(19): siRNA sense strand
ccgaaagacccuggaaagu

SEQ ID NO: 2658455 - RNA, 19 nt, Homo sapiens
  misc_RNA (1)...(19): siRNA sense strand
gaagaagaacuuuggcauc

SEQ ID NO: 2658456 - RNA, 19 nt, Homo sapiens
  misc_RNA (1)...(19): siRNA sense strand
cugagaaagggaugggcaa

SEQ ID NO: 2658457 - RNA, 19 nt, Homo sapiens
  misc_RNA (1)...(19): siRNA sense strand
gggaggaacaggagcagga

SEQ ID NO: 2658458 - RNA, 19 nt, Homo sapiens
  misc_RNA (1)...(19): siRNA sense strand
aggaacaggagcaggagau

SEQ ID NO: 2658459 - RNA, 19 nt, Homo sapiens
  misc_RNA (1)...(19): siRNA sense strand
cauuggggauccugagaaa

SEQ ID NO: 2658460 - RNA, 19 nt, Homo sapiens
  misc_RNA (1)...(19): siRNA sense strand
ucgacuucguggugcgcua

SEQ ID NO: 2658461 - RNA, 19 nt, Homo sapiens
  misc_RNA (1)...(19): siRNA sense strand
gcgucaugguggagcugga

SEQ ID NO: 2658462 - RNA, 19 nt, Homo sapiens
  misc_RNA (1)...(19): siRNA sense strand
aaggaaucgccuccagaaa

SEQ ID NO: 2658463 - RNA, 19 nt, Homo sapiens
  misc_RNA (1)...(19): siRNA sense strand
augaaggggaggaggaaga

SEQ ID NO: 2658464 - RNA, 19 nt, Homo sapiens
  misc_RNA (1)...(19): siRNA sense strand
gggaugaaggggaggagga

SEQ ID NO: 2658465 - RNA, 19 nt, Homo sapiens
  misc_RNA (1)...(19): siRNA sense strand
gaggaggaacugaagacga

SEQ ID NO: 2658466 - RNA, 19 nt, Homo sapiens
  misc_RNA (1)...(19): siRNA sense strand
cuauaaagagugugggaaa

SEQ ID NO: 2658467 - RNA, 19 nt, Homo sapiens
  misc_RNA (1)...(19): siRNA sense strand
gggaaaggucuuaggcgaa

SEQ ID NO: 2658468 - RNA, 19 nt, Homo sapiens
  misc_RNA (1)...(19): siRNA sense strand
aggucauacaggagagaaa

SEQ ID NO: 2658469 - RNA, 19 nt, Homo sapiens
  misc_RNA (1)...(19): siRNA sense strand
agucaaaguucauggcaca

SEQ ID NO: 2658470 - RNA, 19 nt, Homo sapiens
  misc_RNA (1)...(19): siRNA sense strand
aauucauacaggagagaaa

SEQ ID NO: 2658471 - RNA, 19 nt, Homo sapiens
  misc_RNA (1)...(19): siRNA sense strand
acucauggcagaaggcaaa

SEQ ID NO: 2658472 - RNA, 19 nt, Homo sapiens
  misc_RNA (1)...(19): siRNA sense strand
ccucauuguccaucagaaa

SEQ ID NO: 2658473 - RNA, 19 nt, Homo sapiens
  misc_RNA (1)...(19): siRNA sense strand
auguacagaaugugggaaa

SEQ ID NO: 2658474 - RNA, 19 nt, Homo sapiens
  misc_RNA (1)...(19): siRNA sense strand
aacucauacuggagagaaa

SEQ ID NO: 2658475 - RNA, 19 nt, Homo sapiens
  misc_RNA (1)...(19): siRNA sense strand
cccuauaaauguacagaau

SEQ ID NO: 2658476 - RNA, 19 nt, Homo sapiens
  misc_RNA (1)...(19): siRNA sense strand
auguaaugaauguggcaaa

SEQ ID NO: 2658477 - RNA, 19 nt, Homo sapiens
  misc_RNA (1)...(19): siRNA sense strand
gcucauaauacaucagaga

SEQ ID NO: 2658478 - RNA, 19 nt, Homo sapiens
  misc_RNA (1)...(19): siRNA sense strand
acgugaugcuggagaccua

SEQ ID NO: 2658479 - RNA, 19 nt, Homo sapiens
  misc_RNA (1)...(19): siRNA sense strand
ugauaauggaugugcaaaa

SEQ ID NO: 2658480 - RNA, 19 nt, Homo sapiens
  misc_RNA (1)...(19): siRNA sense strand
agucuacaucagagaauua

SEQ ID NO: 2658481 - RNA, 19 nt, Homo sapiens
  misc_RNA (1)...(19): siRNA sense strand
aggaaaaccuucagcaaga

SEQ ID NO: 2658482 - RNA, 19 nt, Homo sapiens
  misc_RNA (1)...(19): siRNA sense strand
ugggaaaggucuuaggcga

SEQ ID NO: 2658483 - RNA, 19 nt, Homo sapiens
  misc_RNA (1)...(19): siRNA sense strand
cacuaaauguggagaaucu

SEQ ID NO: 2658484 - RNA, 19 nt, Homo sapiens
  misc_RNA (1)...(19): siRNA sense strand
aauacaaagacccgauaaa

SEQ ID NO: 2658485 - RNA, 19 nt, Homo sapiens
  misc_RNA (1)...(19): siRNA sense strand
ccaugaauguaaugagugu

SEQ ID NO: 2658486 - RNA, 19 nt, Homo sapiens
  misc_RNA (1)...(19): siRNA sense strand
augaacagauugagaggca

SEQ ID NO: 2658487 - RNA, 19 nt, Homo sapiens
  misc_RNA (1)...(19): siRNA sense strand
gaauguaaugaguguaaga

SEQ ID NO: 2658488 - RNA, 19 nt, Homo sapiens
  misc_RNA (1)...(19): siRNA sense strand
gggagagaaaccucauaaa

SEQ ID NO: 2658489 - RNA, 19 nt, Homo sapiens
  misc_RNA (1)...(19): siRNA sense strand
cauaguacccauacaggaa

SEQ ID NO: 2658490 - RNA, 19 nt, Homo sapiens
  misc_RNA (1)...(19): siRNA sense strand
aacucauacaggagagaaa

SEQ ID NO: 2658491 - RNA, 19 nt, Homo sapiens
  misc_RNA (1)...(19): siRNA sense strand
ucaggaugaccaagauaaa

SEQ ID NO: 2658492 - RNA, 19 nt, Homo sapiens
  misc_RNA (1)...(19): siRNA sense strand
ggcagaaggcaaagaggga

SEQ ID NO: 2658493 - RNA, 19 nt, Homo sapiens
  misc_RNA (1)...(19): siRNA sense strand
cgagaaaagucaacauuca

SEQ ID NO: 2658494 - RNA, 19 nt, Homo sapiens
  misc_RNA (1)...(19): siRNA sense strand
ggauguaccgaauguggaa

SEQ ID NO: 2658495 - RNA, 19 nt, Homo sapiens
  misc_RNA (1)...(19): siRNA sense strand
aagauguagcuguggauuu

SEQ ID NO: 2658496 - RNA, 19 nt, Homo sapiens
  misc_RNA (1)...(19): siRNA sense strand
gcucauuauacaucagaga

SEQ ID NO: 2658497 - RNA, 19 nt, Homo sapiens
  misc_RNA (1)...(19): siRNA sense strand
ucaaagaacucauacagga

SEQ ID NO: 2658498 - RNA, 19 nt, Homo sapiens
  misc_RNA (1)...(19): siRNA sense strand
gcuagugacauuugaagau

SEQ ID NO: 2658499 - RNA, 19 nt, Homo sapiens
  misc_RNA (1)...(19): siRNA sense strand
gcugaugcaaguuggauuu

SEQ ID NO: 2658500 - RNA, 19 nt, Homo sapiens
  misc_RNA (1)...(19): siRNA sense strand
ccagagaacucauacggga

SEQ ID NO: 2658501 - RNA, 19 nt, Homo sapiens
  misc_RNA (1)...(19): siRNA sense strand
gaaagaaagcccauggaag

SEQ ID NO: 2658502 - RNA, 19 nt, Homo sapiens
  misc_RNA (1)...(19): siRNA sense strand
aagaacucauacagaagaa

SEQ ID NO: 2658503 - RNA, 19 nt, Homo sapiens
  misc_RNA (1)...(19): siRNA sense strand
gagaaaagucaaagcucau

SEQ ID NO: 2658504 - RNA, 19 nt, Homo sapiens
  misc_RNA (1)...(19): siRNA sense strand
ucauaauacaucagagaac

SEQ ID NO: 2658505 - RNA, 19 nt, Homo sapiens
  misc_RNA (1)...(19): siRNA sense strand
aacucauacgggagagaaa

SEQ ID NO: 2658506 - RNA, 19 nt, Homo sapiens
  misc_RNA (1)...(19): siRNA sense strand
aacucauacgggagagaaa

SEQ ID NO: 2658507 - RNA, 19 nt, Homo sapiens
  misc_RNA (1)...(19): siRNA sense strand
gaaugugauguguguggaa

SEQ ID NO: 2658508 - RNA, 19 nt, Homo sapiens
  misc_RNA (1)...(19): siRNA sense strand
ggagagaaaccuuacgagu

SEQ ID NO: 2658509 - RNA, 19 nt, Homo sapiens
  misc_RNA (1)...(19): siRNA sense strand
uguacugcauguaggaaaa

SEQ ID NO: 2658510 - RNA, 19 nt, Homo sapiens
  misc_RNA (1)...(19): siRNA sense strand
gaacagauugagaggcaac

SEQ ID NO: 2658511 - RNA, 19 nt, Homo sapiens
  misc_RNA (1)...(19): siRNA sense strand
caagauaaaugucugcuga

SEQ ID NO: 2658512 - RNA, 19 nt, Homo sapiens
  misc_RNA (1)...(19): siRNA sense strand
auguacugcauguaggaaa

SEQ ID NO: 2658513 - RNA, 19 nt, Homo sapiens
  misc_RNA (1)...(19): siRNA sense strand
uggaaaagccuucagagaa

SEQ ID NO: 2658514 - RNA, 19 nt, Homo sapiens
  misc_RNA (1)...(19): siRNA sense strand
acucagaaguccaaccuca

SEQ ID NO: 2658515 - RNA, 19 nt, Homo sapiens
  misc_RNA (1)...(19): siRNA sense strand
ccucauuguacauuggaga

SEQ ID NO: 2658516 - RNA, 19 nt, Homo sapiens
  misc_RNA (1)...(19): siRNA sense strand
agagaaaccuuuuggaugu

SEQ ID NO: 2658517 - RNA, 19 nt, Homo sapiens
  misc_RNA (1)...(19): siRNA sense strand
gagugcaaugaaugugaaa

SEQ ID NO: 2658518 - RNA, 19 nt, Homo sapiens
  misc_RNA (1)...(19): siRNA sense strand
agagaaaagucaaagcuca

SEQ ID NO: 2658519 - RNA, 19 nt, Homo sapiens
  misc_RNA (1)...(19): siRNA sense strand
cagaaggcaaagagggaac

SEQ ID NO: 2658520 - RNA, 19 nt, Homo sapiens
  misc_RNA (1)...(19): siRNA sense strand
guggaaaagccuucagaga

SEQ ID NO: 2658521 - RNA, 19 nt, Homo sapiens
  misc_RNA (1)...(19): siRNA sense strand
gcaucaaagaacucauaca

SEQ ID NO: 2658522 - RNA, 19 nt, Homo sapiens
  misc_RNA (1)...(19): siRNA sense strand
agagaaauguggaggguga

SEQ ID NO: 2658523 - RNA, 19 nt, Homo sapiens
  misc_RNA (1)...(19): siRNA sense strand
aggaggaggaggagauaaa

SEQ ID NO: 2658524 - RNA, 19 nt, Homo sapiens
  misc_RNA (1)...(19): siRNA sense strand
ccgcguacuucgagggcaa

SEQ ID NO: 2658525 - RNA, 19 nt, Homo sapiens
  misc_RNA (1)...(19): siRNA sense strand
gcgucaaagcugaacgaaa

SEQ ID NO: 2658526 - RNA, 19 nt, Homo sapiens
  misc_RNA (1)...(19): siRNA sense strand
gcgagaaggaagcgggcua

SEQ ID NO: 2658527 - RNA, 19 nt, Homo sapiens
  misc_RNA (1)...(19): siRNA sense strand
agucaaaggaacagcaaga

SEQ ID NO: 2658528 - RNA, 19 nt, Homo sapiens
  misc_RNA (1)...(19): siRNA sense strand
aggacaagaagguggaaau

SEQ ID NO: 2658529 - RNA, 19 nt, Homo sapiens
  misc_RNA (1)...(19): siRNA sense strand
cuggagaagcagaaaggua

SEQ ID NO: 2658530 - RNA, 19 nt, Homo sapiens
  misc_RNA (1)...(19): siRNA sense strand
ucacagaacuugaggacuc

SEQ ID NO: 2658531 - RNA, 19 nt, Homo sapiens
  misc_RNA (1)...(19): siRNA sense strand
cggcagaagcaguucaaca

SEQ ID NO: 2658532 - RNA, 19 nt, Homo sapiens
  misc_RNA (1)...(19): siRNA sense strand
agguaaagucucuggcuga

SEQ ID NO: 2658533 - RNA, 19 nt, Homo sapiens
  misc_RNA (1)...(19): siRNA sense strand
ggaagcaggaggaggagga

SEQ ID NO: 2658534 - RNA, 19 nt, Homo sapiens
  misc_RNA (1)...(19): siRNA sense strand
cagcgggagacaaggcaua

SEQ ID NO: 2658535 - RNA, 19 nt, Homo sapiens
  misc_RNA (1)...(19): siRNA sense strand
ugaugaauggagagaguga

SEQ ID NO: 2658536 - RNA, 19 nt, Homo sapiens
  misc_RNA (1)...(19): siRNA sense strand
gugcaaaccccaaggccaa

SEQ ID NO: 2658537 - RNA, 19 nt, Homo sapiens
  misc_RNA (1)...(19): siRNA sense strand
cccagaaaguggagcgacu

SEQ ID NO: 2658538 - RNA, 19 nt, Homo sapiens
  misc_RNA (1)...(19): siRNA sense strand
gggcaucgaugguggugga

SEQ ID NO: 2658539 - RNA, 19 nt, Homo sapiens
  misc_RNA (1)...(19): siRNA sense strand
ucugaugaauggagagagu

SEQ ID NO: 2658540 - RNA, 19 nt, Homo sapiens
  misc_RNA (1)...(19): siRNA sense strand
ccuuugaggaguaugagaa

SEQ ID NO: 2658541 - RNA, 19 nt, Homo sapiens
  misc_RNA (1)...(19): siRNA sense strand
ugaggaagcaggaggagga

SEQ ID NO: 2658542 - RNA, 19 nt, Homo sapiens
  misc_RNA (1)...(19): siRNA sense strand
acaacaucaucgagagcca

SEQ ID NO: 2658543 - RNA, 19 nt, Homo sapiens
  misc_RNA (1)...(19): siRNA sense strand
acuucauccuggagcggaa

SEQ ID NO: 2658544 - RNA, 19 nt, Homo sapiens
  misc_RNA (1)...(19): siRNA sense strand
cagaggaguacaagagcca

SEQ ID NO: 2658545 - RNA, 19 nt, Homo sapiens
  misc_RNA (1)...(19): siRNA sense strand
gggccaaggacucagugaa

SEQ ID NO: 2658546 - RNA, 19 nt, Homo sapiens
  misc_RNA (1)...(19): siRNA sense strand
cagacuuaccagcgggaga

SEQ ID NO: 2658547 - RNA, 19 nt, Homo sapiens
  misc_RNA (1)...(19): siRNA sense strand
gaggaguacaagagccaga

SEQ ID NO: 2658548 - RNA, 19 nt, Homo sapiens
  misc_RNA (1)...(19): siRNA sense strand
uggacugugugguggauga

SEQ ID NO: 2658549 - RNA, 19 nt, Homo sapiens
  misc_RNA (1)...(19): siRNA sense strand
aagcugaacgaaagaugaa

SEQ ID NO: 2658550 - RNA, 19 nt, Homo sapiens
  misc_RNA (1)...(19): siRNA sense strand
uugcggaggugcaggagau

SEQ ID NO: 2658551 - RNA, 19 nt, Homo sapiens
  misc_RNA (1)...(19): siRNA sense strand
ggagauaacgagagccuug

SEQ ID NO: 2658552 - RNA, 19 nt, Homo sapiens
  misc_RNA (1)...(19): siRNA sense strand
aggaguaugagaaggcaca

SEQ ID NO: 2658553 - RNA, 19 nt, Homo sapiens
  misc_RNA (1)...(19): siRNA sense strand
gcuccguggaccugaguga

SEQ ID NO: 2658554 - RNA, 19 nt, Homo sapiens
  misc_RNA (1)...(19): siRNA sense strand
caaaggaacagcaagagga

SEQ ID NO: 2658555 - RNA, 19 nt, Homo sapiens
  misc_RNA (1)...(19): siRNA sense strand
acaagaacuuugagcggcu

SEQ ID NO: 2658556 - RNA, 19 nt, Homo sapiens
  misc_RNA (1)...(19): siRNA sense strand
cggaggugcaggagaugga

SEQ ID NO: 2658557 - RNA, 19 nt, Homo sapiens
  misc_RNA (1)...(19): siRNA sense strand
agcaggaggaggaggagau

SEQ ID NO: 2658558 - RNA, 19 nt, Homo sapiens
  misc_RNA (1)...(19): siRNA sense strand
aggugcaggagauggagaa

SEQ ID NO: 2658559 - RNA, 19 nt, Homo sapiens
  misc_RNA (1)...(19): siRNA sense strand
agaaauaccguguggaguc

SEQ ID NO: 2658560 - RNA, 19 nt, Homo sapiens
  misc_RNA (1)...(19): siRNA sense strand
cagaaauaaugguuggcaa

SEQ ID NO: 2658561 - RNA, 19 nt, Homo sapiens
  misc_RNA (1)...(19): siRNA sense strand
gcacaaaggaaguggcauc

SEQ ID NO: 2658562 - RNA, 19 nt, Homo sapiens
  misc_RNA (1)...(19): siRNA sense strand
acgcaggagccaagagcaa

SEQ ID NO: 2658563 - RNA, 19 nt, Homo sapiens
  misc_RNA (1)...(19): siRNA sense strand
ggaaguggcaucugucaaa

SEQ ID NO: 2658564 - RNA, 19 nt, Homo sapiens
  misc_RNA (1)...(19): siRNA sense strand
cugucaaagaugccagaua

SEQ ID NO: 2658565 - RNA, 19 nt, Homo sapiens
  misc_RNA (1)...(19): siRNA sense strand
cugacaaggaugacucaaa

SEQ ID NO: 2658566 - RNA, 19 nt, Homo sapiens
  misc_RNA (1)...(19): siRNA sense strand
caaagaugccagauacauu

SEQ ID NO: 2658567 - RNA, 19 nt, Homo sapiens
  misc_RNA (1)...(19): siRNA sense strand
gaucggaaggcccaggaaa

SEQ ID NO: 2658568 - RNA, 19 nt, Homo sapiens
  misc_RNA (1)...(19): siRNA sense strand
cagagaugaaagaguguca

SEQ ID NO: 2658569 - RNA, 19 nt, Homo sapiens
  misc_RNA (1)...(19): siRNA sense strand
uggcaaagcaguggaacau

SEQ ID NO: 2658570 - RNA, 19 nt, Homo sapiens
  misc_RNA (1)...(19): siRNA sense strand
augucuacgauuugguaaa

SEQ ID NO: 2658571 - RNA, 19 nt, Homo sapiens
  misc_RNA (1)...(19): siRNA sense strand
gggaguccgaugugggaga

SEQ ID NO: 2658572 - RNA, 19 nt, Homo sapiens
  misc_RNA (1)...(19): siRNA sense strand
uggaauacgccaaagacga

SEQ ID NO: 2658573 - RNA, 19 nt, Homo sapiens
  misc_RNA (1)...(19): siRNA sense strand
ccaggaaaauguuggacuu

SEQ ID NO: 2658574 - RNA, 19 nt, Homo sapiens
  misc_RNA (1)...(19): siRNA sense strand
uuggcaaagcaguggaaca

SEQ ID NO: 2658575 - RNA, 19 nt, Homo sapiens
  misc_RNA (1)...(19): siRNA sense strand
uuauaaagauggugaccuc

SEQ ID NO: 2658576 - RNA, 19 nt, Homo sapiens
  misc_RNA (1)...(19): siRNA sense strand
gccuauggaaagauggaga

SEQ ID NO: 2658577 - RNA, 19 nt, Homo sapiens
  misc_RNA (1)...(19): siRNA sense strand
ccucuaacacaguggaaag

SEQ ID NO: 2658578 - RNA, 19 nt, Homo sapiens
  misc_RNA (1)...(19): siRNA sense strand
ugacaaggaugacucaaaa

SEQ ID NO: 2658579 - RNA, 19 nt, Homo sapiens
  misc_RNA (1)...(19): siRNA sense strand
aggcagaggaggaggaaga

SEQ ID NO: 2658580 - RNA, 19 nt, Homo sapiens
  misc_RNA (1)...(19): siRNA sense strand
cugccuugcuaaagagaaa

SEQ ID NO: 2658581 - RNA, 19 nt, Homo sapiens
  misc_RNA (1)...(19): siRNA sense strand
aggaagaagaagaagaaga

SEQ ID NO: 2658582 - RNA, 19 nt, Homo sapiens
  misc_RNA (1)...(19): siRNA sense strand
aggaagaggaagaggagga

SEQ ID NO: 2658583 - RNA, 19 nt, Homo sapiens
  misc_RNA (1)...(19): siRNA sense strand
aggaagaggaggaggagga

SEQ ID NO: 2658584 - RNA, 19 nt, Homo sapiens
  misc_RNA (1)...(19): siRNA sense strand
aggaggaggaggaggaaga

SEQ ID NO: 2658585 - RNA, 19 nt, Homo sapiens
  misc_RNA (1)...(19): siRNA sense strand
ccaaggagcugaaggagca

SEQ ID NO: 2658586 - RNA, 19 nt, Homo sapiens
  misc_RNA (1)...(19): siRNA sense strand
aggcuuagagggacgaaua

SEQ ID NO: 2658587 - RNA, 19 nt, Homo sapiens
  misc_RNA (1)...(19): siRNA sense strand
ugguacugauagagaagaa

SEQ ID NO: 2658588 - RNA, 19 nt, Homo sapiens
  misc_RNA (1)...(19): siRNA sense strand
aggaggaggaggaggcaga

SEQ ID NO: 2658589 - RNA, 19 nt, Homo sapiens
  misc_RNA (1)...(19): siRNA sense strand
aggaggaggaggaagaaga

SEQ ID NO: 2658590 - RNA, 19 nt, Homo sapiens
  misc_RNA (1)...(19): siRNA sense strand
aggaggaggaagaagaaga

SEQ ID NO: 2658591 - RNA, 19 nt, Homo sapiens
  misc_RNA (1)...(19): siRNA sense strand
aggaggaagaagaagaaga

SEQ ID NO: 2658592 - RNA, 19 nt, Homo sapiens
  misc_RNA (1)...(19): siRNA sense strand
agaaguugguacugauaga

SEQ ID NO: 2658593 - RNA, 19 nt, Homo sapiens
  misc_RNA (1)...(19): siRNA sense strand
gauugaagauggaggcaag

SEQ ID NO: 2658594 - RNA, 19 nt, Homo sapiens
  misc_RNA (1)...(19): siRNA sense strand
gcaucgauucagaggccaa

SEQ ID NO: 2658595 - RNA, 19 nt, Homo sapiens
  misc_RNA (1)...(19): siRNA sense strand
ccguggaggucauuggaga

SEQ ID NO: 2658596 - RNA, 19 nt, Homo sapiens
  misc_RNA (1)...(19): siRNA sense strand
aggaggaggcagaggagga

SEQ ID NO: 2658597 - RNA, 19 nt, Homo sapiens
  misc_RNA (1)...(19): siRNA sense strand
ugaacaaacugaaagacca

SEQ ID NO: 2658598 - RNA, 19 nt, Homo sapiens
  misc_RNA (1)...(19): siRNA sense strand
agaccagacaaguggauga

SEQ ID NO: 2658599 - RNA, 19 nt, Homo sapiens
  misc_RNA (1)...(19): siRNA sense strand
aagaagaagaagaagagga

SEQ ID NO: 2658600 - RNA, 19 nt, Homo sapiens
  misc_RNA (1)...(19): siRNA sense strand
aagaagaagaggaagagga

SEQ ID NO: 2658601 - RNA, 19 nt, Homo sapiens
  misc_RNA (1)...(19): siRNA sense strand
ggucuuuaguuuugggaca

SEQ ID NO: 2658602 - RNA, 19 nt, Homo sapiens
  misc_RNA (1)...(19): siRNA sense strand
aggaggaggaggaggagga

SEQ ID NO: 2658603 - RNA, 19 nt, Homo sapiens
  misc_RNA (1)...(19): siRNA sense strand
aggaggaggaggaggagga

SEQ ID NO: 2658604 - RNA, 19 nt, Homo sapiens
  misc_RNA (1)...(19): siRNA sense strand
aguccagcaaagaaagaaa

SEQ ID NO: 2658605 - RNA, 19 nt, Homo sapiens
  misc_RNA (1)...(19): siRNA sense strand
uugucaagcuaccgagcaa

SEQ ID NO: 2658606 - RNA, 19 nt, Homo sapiens
  misc_RNA (1)...(19): siRNA sense strand
gcauugcagcaccgagaaa

SEQ ID NO: 2658607 - RNA, 19 nt, Homo sapiens
  misc_RNA (1)...(19): siRNA sense strand
gcaaaggugaugagaccca

SEQ ID NO: 2658608 - RNA, 19 nt, Homo sapiens
  misc_RNA (1)...(19): siRNA sense strand
ccucagugggcaugaccaa

SEQ ID NO: 2658609 - RNA, 19 nt, Homo sapiens
  misc_RNA (1)...(19): siRNA sense strand
acucauagcaacaagacuu

SEQ ID NO: 2658610 - RNA, 19 nt, Homo sapiens
  misc_RNA (1)...(19): siRNA sense strand
agccagucagggagggaaa

SEQ ID NO: 2658611 - RNA, 19 nt, Homo sapiens
  misc_RNA (1)...(19): siRNA sense strand
aggccaaccaggagaaguu

SEQ ID NO: 2658612 - RNA, 19 nt, Homo sapiens
  misc_RNA (1)...(19): siRNA sense strand
agaaagaaagaccagacaa

SEQ ID NO: 2658613 - RNA, 19 nt, Homo sapiens
  misc_RNA (1)...(19): siRNA sense strand
agaaggagaaacugagcuu

SEQ ID NO: 2658614 - RNA, 19 nt, Homo sapiens
  misc_RNA (1)...(19): siRNA sense strand
gaccaguccagcaaagaaa

SEQ ID NO: 2658615 - RNA, 19 nt, Homo sapiens
  misc_RNA (1)...(19): siRNA sense strand
agacaagcucuucaacaaa

SEQ ID NO: 2658616 - RNA, 19 nt, Homo sapiens
  misc_RNA (1)...(19): siRNA sense strand
ggugaugagcuggugaaua

SEQ ID NO: 2658617 - RNA, 19 nt, Homo sapiens
  misc_RNA (1)...(19): siRNA sense strand
cacagaggcaggugaagaa

SEQ ID NO: 2658618 - RNA, 19 nt, Homo sapiens
  misc_RNA (1)...(19): siRNA sense strand
accaaaaccuauagaccaa

SEQ ID NO: 2658619 - RNA, 19 nt, Homo sapiens
  misc_RNA (1)...(19): siRNA sense strand
aagagaaauaugaugccaa

SEQ ID NO: 2658620 - RNA, 19 nt, Homo sapiens
  misc_RNA (1)...(19): siRNA sense strand
aagaggaagaggaggagga

SEQ ID NO: 2658621 - RNA, 19 nt, Homo sapiens
  misc_RNA (1)...(19): siRNA sense strand
cauaggacccacagggcau

SEQ ID NO: 2658622 - RNA, 19 nt, Homo sapiens
  misc_RNA (1)...(19): siRNA sense strand
auggagaggcugauggaca

SEQ ID NO: 2658623 - RNA, 19 nt, Homo sapiens
  misc_RNA (1)...(19): siRNA sense strand
uaaagcagcuaguggcaca

SEQ ID NO: 2658624 - RNA, 19 nt, Homo sapiens
  misc_RNA (1)...(19): siRNA sense strand
cggcauugcagcaccgaga

SEQ ID NO: 2658625 - RNA, 19 nt, Homo sapiens
  misc_RNA (1)...(19): siRNA sense strand
caauaacaggaaacaggaa

SEQ ID NO: 2658626 - RNA, 19 nt, Homo sapiens
  misc_RNA (1)...(19): siRNA sense strand
uagcaaaggugaugagacc

SEQ ID NO: 2658627 - RNA, 19 nt, Homo sapiens
  misc_RNA (1)...(19): siRNA sense strand
cuuaaaagccgucugcaaa

SEQ ID NO: 2658628 - RNA, 19 nt, Homo sapiens
  misc_RNA (1)...(19): siRNA sense strand
agaaguugguguuuggcau

SEQ ID NO: 2658629 - RNA, 19 nt, Homo sapiens
  misc_RNA (1)...(19): siRNA sense strand
guggaaagcaccugaccca

SEQ ID NO: 2658630 - RNA, 19 nt, Homo sapiens
  misc_RNA (1)...(19): siRNA sense strand
caggugacaacaaggaauu

SEQ ID NO: 2658631 - RNA, 19 nt, Homo sapiens
  misc_RNA (1)...(19): siRNA sense strand
cagaggaggaggaagagga

SEQ ID NO: 2658632 - RNA, 19 nt, Homo sapiens
  misc_RNA (1)...(19): siRNA sense strand
acaauauuucuguggccaa

SEQ ID NO: 2658633 - RNA, 19 nt, Homo sapiens
  misc_RNA (1)...(19): siRNA sense strand
ggacaggcuuagagggacg

SEQ ID NO: 2658634 - RNA, 19 nt, Homo sapiens
  misc_RNA (1)...(19): siRNA sense strand
agaagcaacaggaggagga

SEQ ID NO: 2658635 - RNA, 19 nt, Homo sapiens
  misc_RNA (1)...(19): siRNA sense strand
ucgaaagcaucagcagaaa

SEQ ID NO: 2658636 - RNA, 19 nt, Homo sapiens
  misc_RNA (1)...(19): siRNA sense strand
agguggaggccaacuuaaa

SEQ ID NO: 2658637 - RNA, 19 nt, Homo sapiens
  misc_RNA (1)...(19): siRNA sense strand
ugauagagaagaagcagca

SEQ ID NO: 2658638 - RNA, 19 nt, Homo sapiens
  misc_RNA (1)...(19): siRNA sense strand
ugggagaaguacaggcucu

SEQ ID NO: 2658639 - RNA, 19 nt, Homo sapiens
  misc_RNA (1)...(19): siRNA sense strand
ccacugaauccgccaaaca

SEQ ID NO: 2658640 - RNA, 19 nt, Homo sapiens
  misc_RNA (1)...(19): siRNA sense strand
acuuaaaagccgucugcaa

SEQ ID NO: 2658641 - RNA, 19 nt, Homo sapiens
  misc_RNA (1)...(19): siRNA sense strand
ucacggagcugcuggagga

SEQ ID NO: 2658642 - RNA, 19 nt, Homo sapiens
  misc_RNA (1)...(19): siRNA sense strand
cgguuagcauugggaggaa

SEQ ID NO: 2658643 - RNA, 19 nt, Homo sapiens
  misc_RNA (1)...(19): siRNA sense strand
acgccgaauaucuggagaa

SEQ ID NO: 2658644 - RNA, 19 nt, Homo sapiens
  misc_RNA (1)...(19): siRNA sense strand
aggcgggagucaaggggaa

SEQ ID NO: 2658645 - RNA, 19 nt, Homo sapiens
  misc_RNA (1)...(19): siRNA sense strand
acgaagaggcgggagucaa

SEQ ID NO: 2658646 - RNA, 19 nt, Homo sapiens
  misc_RNA (1)...(19): siRNA sense strand
gcauugggaggaagcgaga

SEQ ID NO: 2658647 - RNA, 19 nt, Homo sapiens
  misc_RNA (1)...(19): siRNA sense strand
gguucaaagucgaagaugc

SEQ ID NO: 2658648 - RNA, 19 nt, Homo sapiens
  misc_RNA (1)...(19): siRNA sense strand
cuuuacaagaagagagaaa

SEQ ID NO: 2658649 - RNA, 19 nt, Homo sapiens
  misc_RNA (1)...(19): siRNA sense strand
aguccaaccaccagagaaa

SEQ ID NO: 2658650 - RNA, 19 nt, Homo sapiens
  misc_RNA (1)...(19): siRNA sense strand
cuaaagaauaugagugcuu

SEQ ID NO: 2658651 - RNA, 19 nt, Homo sapiens
  misc_RNA (1)...(19): siRNA sense strand
ggaaacaacugaagaggcu

SEQ ID NO: 2658652 - RNA, 19 nt, Homo sapiens
  misc_RNA (1)...(19): siRNA sense strand
acgugaggaagaagagaaa

SEQ ID NO: 2658653 - RNA, 19 nt, Homo sapiens
  misc_RNA (1)...(19): siRNA sense strand
cugaagagcugaaucgaca

SEQ ID NO: 2658654 - RNA, 19 nt, Homo sapiens
  misc_RNA (1)...(19): siRNA sense strand
ucaaacaggaaauggacaa

SEQ ID NO: 2658655 - RNA, 19 nt, Homo sapiens
  misc_RNA (1)...(19): siRNA sense strand
cgaugaagagccagaguca

SEQ ID NO: 2658656 - RNA, 19 nt, Homo sapiens
  misc_RNA (1)...(19): siRNA sense strand
aguuaaagcuccuccaaaa

SEQ ID NO: 2658657 - RNA, 19 nt, Homo sapiens
  misc_RNA (1)...(19): siRNA sense strand
ugaacaucguacugagcaa

SEQ ID NO: 2658658 - RNA, 19 nt, Homo sapiens
  misc_RNA (1)...(19): siRNA sense strand
aguggaaacuucaggcgaa

SEQ ID NO: 2658659 - RNA, 19 nt, Homo sapiens
  misc_RNA (1)...(19): siRNA sense strand
aggaauauuugcugaacca

SEQ ID NO: 2658660 - RNA, 19 nt, Homo sapiens
  misc_RNA (1)...(19): siRNA sense strand
guggaaacuucaggcgaaa

SEQ ID NO: 2658661 - RNA, 19 nt, Homo sapiens
  misc_RNA (1)...(19): siRNA sense strand
aggcgaaagugcugaagga

SEQ ID NO: 2658662 - RNA, 19 nt, Homo sapiens
  misc_RNA (1)...(19): siRNA sense strand
gcugaaggagcaagagaca

SEQ ID NO: 2658663 - RNA, 19 nt, Homo sapiens
  misc_RNA (1)...(19): siRNA sense strand
ucucaaggagccagagcaa

SEQ ID NO: 2658664 - RNA, 19 nt, Homo sapiens
  misc_RNA (1)...(19): siRNA sense strand
uggacaugauugaagagaa

SEQ ID NO: 2658665 - RNA, 19 nt, Homo sapiens
  misc_RNA (1)...(19): siRNA sense strand
gcucgaagcaaauuggaga

SEQ ID NO: 2658666 - RNA, 19 nt, Homo sapiens
  misc_RNA (1)...(19): siRNA sense strand
agaucgagcagcagaguga

SEQ ID NO: 2658667 - RNA, 19 nt, Homo sapiens
  misc_RNA (1)...(19): siRNA sense strand
aaaugaagaagcuggaaaa

SEQ ID NO: 2658668 - RNA, 19 nt, Homo sapiens
  misc_RNA (1)...(19): siRNA sense strand
uguccaaaccgccgugaaa

SEQ ID NO: 2658669 - RNA, 19 nt, Homo sapiens
  misc_RNA (1)...(19): siRNA sense strand
aggaagaagagaaaaggaa

SEQ ID NO: 2658670 - RNA, 19 nt, Homo sapiens
  misc_RNA (1)...(19): siRNA sense strand
agacaguccugcaggcuca

SEQ ID NO: 2658671 - RNA, 19 nt, Homo sapiens
  misc_RNA (1)...(19): siRNA sense strand
agaagcugguggaugcaaa

SEQ ID NO: 2658672 - RNA, 19 nt, Homo sapiens
  misc_RNA (1)...(19): siRNA sense strand
acaagaagagagaaacgaa

SEQ ID NO: 2658673 - RNA, 19 nt, Homo sapiens
  misc_RNA (1)...(19): siRNA sense strand
acacaaacgagaaaaggaa

SEQ ID NO: 2658674 - RNA, 19 nt, Homo sapiens
  misc_RNA (1)...(19): siRNA sense strand
caaagaaacccaacccgaa

SEQ ID NO: 2658675 - RNA, 19 nt, Homo sapiens
  misc_RNA (1)...(19): siRNA sense strand
uacagaagauggaggcaga

SEQ ID NO: 2658676 - RNA, 19 nt, Homo sapiens
  misc_RNA (1)...(19): siRNA sense strand
aaucugaacaaguugcaaa

SEQ ID NO: 2658677 - RNA, 19 nt, Homo sapiens
  misc_RNA (1)...(19): siRNA sense strand
ggaaggaaaucacaagcca

SEQ ID NO: 2658678 - RNA, 19 nt, Homo sapiens
  misc_RNA (1)...(19): siRNA sense strand
gcagaaaagcugaaaagca

SEQ ID NO: 2658679 - RNA, 19 nt, Homo sapiens
  misc_RNA (1)...(19): siRNA sense strand
aggaagcggaggagcgaca

SEQ ID NO: 2658680 - RNA, 19 nt, Homo sapiens
  misc_RNA (1)...(19): siRNA sense strand
acaaacgagaaaaggaaua

SEQ ID NO: 2658681 - RNA, 19 nt, Homo sapiens
  misc_RNA (1)...(19): siRNA sense strand
gcaacguggcugacaccaa

SEQ ID NO: 2658682 - RNA, 19 nt, Homo sapiens
  misc_RNA (1)...(19): siRNA sense strand
cauuaacacuuaugggucu

SEQ ID NO: 2658683 - RNA, 19 nt, Homo sapiens
  misc_RNA (1)...(19): siRNA sense strand
augcugaauugcuggauga

SEQ ID NO: 2658684 - RNA, 19 nt, Homo sapiens
  misc_RNA (1)...(19): siRNA sense strand
ggaccaguuacaaggugaa

SEQ ID NO: 2658685 - RNA, 19 nt, Homo sapiens
  misc_RNA (1)...(19): siRNA sense strand
cugcagagacacaacaaga

SEQ ID NO: 2658686 - RNA, 19 nt, Homo sapiens
  misc_RNA (1)...(19): siRNA sense strand
caagaaaugaugaaggaag

SEQ ID NO: 2658687 - RNA, 19 nt, Homo sapiens
  misc_RNA (1)...(19): siRNA sense strand
ccacguucaaacaggaaau

SEQ ID NO: 2658688 - RNA, 19 nt, Homo sapiens
  misc_RNA (1)...(19): siRNA sense strand
cugaagaggcuggaagaga

SEQ ID NO: 2658689 - RNA, 19 nt, Homo sapiens
  misc_RNA (1)...(19): siRNA sense strand
uugcaaacaccggaagaaa

SEQ ID NO: 2658690 - RNA, 19 nt, Homo sapiens
  misc_RNA (1)...(19): siRNA sense strand
ugaaggagcaagagacagu

SEQ ID NO: 2658691 - RNA, 19 nt, Homo sapiens
  misc_RNA (1)...(19): siRNA sense strand
ggauggggacugugaggaa

SEQ ID NO: 2658692 - RNA, 19 nt, Homo sapiens
  misc_RNA (1)...(19): siRNA sense strand
gagcagaaacccaaugcga

SEQ ID NO: 2658693 - RNA, 19 nt, Homo sapiens
  misc_RNA (1)...(19): siRNA sense strand
cggaagaaaaguuugauuu

SEQ ID NO: 2658694 - RNA, 19 nt, Homo sapiens
  misc_RNA (1)...(19): siRNA sense strand
ggaaaaggacacagccaca

SEQ ID NO: 2658695 - RNA, 19 nt, Homo sapiens
  misc_RNA (1)...(19): siRNA sense strand
aggcagaagcuuccgguca

SEQ ID NO: 2658696 - RNA, 19 nt, Homo sapiens
  misc_RNA (1)...(19): siRNA sense strand
ugccagcacagcagggaaa

SEQ ID NO: 2658697 - RNA, 19 nt, Homo sapiens
  misc_RNA (1)...(19): siRNA sense strand
cugccgugcuuuacaagaa

SEQ ID NO: 2658698 - RNA, 19 nt, Homo sapiens
  misc_RNA (1)...(19): siRNA sense strand
uggagaaggaagauggcca

SEQ ID NO: 2658699 - RNA, 19 nt, Homo sapiens
  misc_RNA (1)...(19): siRNA sense strand
gccugagaaugcagaauca

SEQ ID NO: 2658700 - RNA, 19 nt, Homo sapiens
  misc_RNA (1)...(19): siRNA sense strand
aaggaaaucacaagccauu

SEQ ID NO: 2658701 - RNA, 19 nt, Homo sapiens
  misc_RNA (1)...(19): siRNA sense strand
cagaguacccucacggaca

SEQ ID NO: 2658702 - RNA, 19 nt, Homo sapiens
  misc_RNA (1)...(19): siRNA sense strand
cacugagagcuaaagaaua

SEQ ID NO: 2658703 - RNA, 19 nt, Homo sapiens
  misc_RNA (1)...(19): siRNA sense strand
agagaaacgaacuccacaa

SEQ ID NO: 2658704 - RNA, 19 nt, Homo sapiens
  misc_RNA (1)...(19): siRNA sense strand
cgucagcaauaaggagcaa

SEQ ID NO: 2658705 - RNA, 19 nt, Homo sapiens
  misc_RNA (1)...(19): siRNA sense strand
gggcacgugaggaagaaga

SEQ ID NO: 2658706 - RNA, 19 nt, Homo sapiens
  misc_RNA (1)...(19): siRNA sense strand
cugaagaaaugcagggauu

SEQ ID NO: 2658707 - RNA, 19 nt, Homo sapiens
  misc_RNA (1)...(19): siRNA sense strand
ugauaaagcagauguacaa

SEQ ID NO: 2658708 - RNA, 19 nt, Homo sapiens
  misc_RNA (1)...(19): siRNA sense strand
agaucaagcccgagcacaa

SEQ ID NO: 2658709 - RNA, 19 nt, Homo sapiens
  misc_RNA (1)...(19): siRNA sense strand
guauugauguauugggaau

SEQ ID NO: 2658710 - RNA, 19 nt, Homo sapiens
  misc_RNA (1)...(19): siRNA sense strand
uggauguagucgauggaaa

SEQ ID NO: 2658711 - RNA, 19 nt, Homo sapiens
  misc_RNA (1)...(19): siRNA sense strand
aagaggaaguacugggcaa

SEQ ID NO: 2658712 - RNA, 19 nt, Homo sapiens
  misc_RNA (1)...(19): siRNA sense strand
ggauguagucgauggaaaa

SEQ ID NO: 2658713 - RNA, 19 nt, Homo sapiens
  misc_RNA (1)...(19): siRNA sense strand
gguuaaggaaacugcuaua

SEQ ID NO: 2658714 - RNA, 19 nt, Homo sapiens
  misc_RNA (1)...(19): siRNA sense strand
ggauacaggucauggagga

SEQ ID NO: 2658715 - RNA, 19 nt, Homo sapiens
  misc_RNA (1)...(19): siRNA sense strand
uuuagaacuuggaggagaa

SEQ ID NO: 2658716 - RNA, 19 nt, Homo sapiens
  misc_RNA (1)...(19): siRNA sense strand
ugaacaaagaacagucaaa

SEQ ID NO: 2658717 - RNA, 19 nt, Homo sapiens
  misc_RNA (1)...(19): siRNA sense strand
cggacaaacaguagcccaa

SEQ ID NO: 2658718 - RNA, 19 nt, Homo sapiens
  misc_RNA (1)...(19): siRNA sense strand
aaggaaagucagccagaaa

SEQ ID NO: 2658719 - RNA, 19 nt, Homo sapiens
  misc_RNA (1)...(19): siRNA sense strand
cgguaugacccaagcauuu

SEQ ID NO: 2658720 - RNA, 19 nt, Homo sapiens
  misc_RNA (1)...(19): siRNA sense strand
acagcaaguugaagccaaa

SEQ ID NO: 2658721 - RNA, 19 nt, Homo sapiens
  misc_RNA (1)...(19): siRNA sense strand
ccagagagagagagugaga

SEQ ID NO: 2658722 - RNA, 19 nt, Homo sapiens
  misc_RNA (1)...(19): siRNA sense strand
acaaugacacuuagaggaa

SEQ ID NO: 2658723 - RNA, 19 nt, Homo sapiens
  misc_RNA (1)...(19): siRNA sense strand
aaacaguagaaacggguua

SEQ ID NO: 2658724 - RNA, 19 nt, Homo sapiens
  misc_RNA (1)...(19): siRNA sense strand
auccaaagguaguuguuua

SEQ ID NO: 2658725 - RNA, 19 nt, Homo sapiens
  misc_RNA (1)...(19): siRNA sense strand
cggaaaucaaugacaaaga

SEQ ID NO: 2658726 - RNA, 19 nt, Homo sapiens
  misc_RNA (1)...(19): siRNA sense strand
gcuagaagaaggagaauac

SEQ ID NO: 2658727 - RNA, 19 nt, Homo sapiens
  misc_RNA (1)...(19): siRNA sense strand
gauugaacuuaaugcagaa

SEQ ID NO: 2658728 - RNA, 19 nt, Homo sapiens
  misc_RNA (1)...(19): siRNA sense strand
acgacgagguggcgccaaa

SEQ ID NO: 2658729 - RNA, 19 nt, Homo sapiens
  misc_RNA (1)...(19): siRNA sense strand
agaacuuggaggagaaaca

SEQ ID NO: 2658730 - RNA, 19 nt, Homo sapiens
  misc_RNA (1)...(19): siRNA sense strand
uguuagaggauguuggauu

SEQ ID NO: 2658731 - RNA, 19 nt, Homo sapiens
  misc_RNA (1)...(19): siRNA sense strand
aaggaaacugcuauagaaa

SEQ ID NO: 2658732 - RNA, 19 nt, Homo sapiens
  misc_RNA (1)...(19): siRNA sense strand
ccaaagaagaucuggauuc

SEQ ID NO: 2658733 - RNA, 19 nt, Homo sapiens
  misc_RNA (1)...(19): siRNA sense strand
gcacgaagaagcagagucu

SEQ ID NO: 2658734 - RNA, 19 nt, Homo sapiens
  misc_RNA (1)...(19): siRNA sense strand
caauggaaacuuagaggau

SEQ ID NO: 2658735 - RNA, 19 nt, Homo sapiens
  misc_RNA (1)...(19): siRNA sense strand
gaaaauaugugguucgaga

SEQ ID NO: 2658736 - RNA, 19 nt, Homo sapiens
  misc_RNA (1)...(19): siRNA sense strand
aggagaagaaacaguagaa

SEQ ID NO: 2658737 - RNA, 19 nt, Homo sapiens
  misc_RNA (1)...(19): siRNA sense strand
auuuaaaggagacuggaua

SEQ ID NO: 2658738 - RNA, 19 nt, Homo sapiens
  misc_RNA (1)...(19): siRNA sense strand
gagaagaaacaguagaaac

SEQ ID NO: 2658739 - RNA, 19 nt, Homo sapiens
  misc_RNA (1)...(19): siRNA sense strand
ccaaagaaauggagcaacc

SEQ ID NO: 2658740 - RNA, 19 nt, Homo sapiens
  misc_RNA (1)...(19): siRNA sense strand
aggaaugaauggagacucu

SEQ ID NO: 2658741 - RNA, 19 nt, Homo sapiens
  misc_RNA (1)...(19): siRNA sense strand
ccaagaugauaaagcagau

SEQ ID NO: 2658742 - RNA, 19 nt, Homo sapiens
  misc_RNA (1)...(19): siRNA sense strand
ugaagaaacaacaagucaa

SEQ ID NO: 2658743 - RNA, 19 nt, Homo sapiens
  misc_RNA (1)...(19): siRNA sense strand
aucaauacguguuggaaga

SEQ ID NO: 2658744 - RNA, 19 nt, Homo sapiens
  misc_RNA (1)...(19): siRNA sense strand
ccagaggaaugaauggaga

SEQ ID NO: 2658745 - RNA, 19 nt, Homo sapiens
  misc_RNA (1)...(19): siRNA sense strand
ucgucagaacaaugagaaa

SEQ ID NO: 2658746 - RNA, 19 nt, Homo sapiens
  misc_RNA (1)...(19): siRNA sense strand
agaacagggacgucacaaa

SEQ ID NO: 2658747 - RNA, 19 nt, Homo sapiens
  misc_RNA (1)...(19): siRNA sense strand
cugauaagccaguggugau

SEQ ID NO: 2658748 - RNA, 19 nt, Homo sapiens
  misc_RNA (1)...(19): siRNA sense strand
ucagguuauugguggcaua

SEQ ID NO: 2658749 - RNA, 19 nt, Homo sapiens
  misc_RNA (1)...(19): siRNA sense strand
cggaaaagaaagugaaauc

SEQ ID NO: 2658750 - RNA, 19 nt, Homo sapiens
  misc_RNA (1)...(19): siRNA sense strand
gaucuaaaagugucagaaa

SEQ ID NO: 2658751 - RNA, 19 nt, Homo sapiens
  misc_RNA (1)...(19): siRNA sense strand
caacugaagcaaacggaca

SEQ ID NO: 2658752 - RNA, 19 nt, Homo sapiens
  misc_RNA (1)...(19): siRNA sense strand
cagaauggugugcugguua

SEQ ID NO: 2658753 - RNA, 19 nt, Homo sapiens
  misc_RNA (1)...(19): siRNA sense strand
agguagugauauauaguga

SEQ ID NO: 2658754 - RNA, 19 nt, Homo sapiens
  misc_RNA (1)...(19): siRNA sense strand
agaagaaggagaauuggaa

SEQ ID NO: 2658755 - RNA, 19 nt, Homo sapiens
  misc_RNA (1)...(19): siRNA sense strand
ggaaaggcacgaagaagca

SEQ ID NO: 2658756 - RNA, 19 nt, Homo sapiens
  misc_RNA (1)...(19): siRNA sense strand
cuuugaugauacugaagaa

SEQ ID NO: 2658757 - RNA, 19 nt, Homo sapiens
  misc_RNA (1)...(19): siRNA sense strand
cagaagaggcgacuggaga

SEQ ID NO: 2658758 - RNA, 19 nt, Homo sapiens
  misc_RNA (1)...(19): siRNA sense strand
acuucuagagucuggaaua

SEQ ID NO: 2658759 - RNA, 19 nt, Homo sapiens
  misc_RNA (1)...(19): siRNA sense strand
ccagaagacaacagaagga

SEQ ID NO: 2658760 - RNA, 19 nt, Homo sapiens
  misc_RNA (1)...(19): siRNA sense strand
ugucauggagggaggugaa

SEQ ID NO: 2658761 - RNA, 19 nt, Homo sapiens
  misc_RNA (1)...(19): siRNA sense strand
ucaaaugcucacaugauaa

SEQ ID NO: 2658762 - RNA, 19 nt, Homo sapiens
  misc_RNA (1)...(19): siRNA sense strand
gcacacaguaugaucaaaa

SEQ ID NO: 2658763 - RNA, 19 nt, Homo sapiens
  misc_RNA (1)...(19): siRNA sense strand
aguagaaacggguuagaga

SEQ ID NO: 2658764 - RNA, 19 nt, Homo sapiens
  misc_RNA (1)...(19): siRNA sense strand
agagggaggucgaagcaga

SEQ ID NO: 2658765 - RNA, 19 nt, Homo sapiens
  misc_RNA (1)...(19): siRNA sense strand
acgaagaccauuuagaaaa

SEQ ID NO: 2658766 - RNA, 19 nt, Homo sapiens
  misc_RNA (1)...(19): siRNA sense strand
ggccagagcuuuggaugua

SEQ ID NO: 2658767 - RNA, 19 nt, Homo sapiens
  misc_RNA (1)...(19): siRNA sense strand
gaaaguucuaagaggcauu

SEQ ID NO: 2658768 - RNA, 19 nt, Homo sapiens
  misc_RNA (1)...(19): siRNA sense strand
cauaauaagaagcggccaa

SEQ ID NO: 2658769 - RNA, 19 nt, Homo sapiens
  misc_RNA (1)...(19): siRNA sense strand
caguaaauguccugaggga

SEQ ID NO: 2658770 - RNA, 19 nt, Homo sapiens
  misc_RNA (1)...(19): siRNA sense strand
cggaugaccuuuauaaauu

SEQ ID NO: 2658771 - RNA, 19 nt, Homo sapiens
  misc_RNA (1)...(19): siRNA sense strand
gaucagacaucacuggaau

SEQ ID NO: 2658772 - RNA, 19 nt, Homo sapiens
  misc_RNA (1)...(19): siRNA sense strand
guaaauguccugagggaac

SEQ ID NO: 2658773 - RNA, 19 nt, Homo sapiens
  misc_RNA (1)...(19): siRNA sense strand
cggccaaauaaucuaguaa

SEQ ID NO: 2658774 - RNA, 19 nt, Homo sapiens
  misc_RNA (1)...(19): siRNA sense strand
aagccaaagaagaagaaaa

SEQ ID NO: 2658775 - RNA, 19 nt, Homo sapiens
  misc_RNA (1)...(19): siRNA sense strand
gcugauauuugcuggcgau

SEQ ID NO: 2658776 - RNA, 19 nt, Homo sapiens
  misc_RNA (1)...(19): siRNA sense strand
cucucaagccaaagaagaa

SEQ ID NO: 2658777 - RNA, 19 nt, Homo sapiens
  misc_RNA (1)...(19): siRNA sense strand
agaccuaagcaaacuacaa

SEQ ID NO: 2658778 - RNA, 19 nt, Homo sapiens
  misc_RNA (1)...(19): siRNA sense strand
gcgaccugcagaaaggaua

SEQ ID NO: 2658779 - RNA, 19 nt, Homo sapiens
  misc_RNA (1)...(19): siRNA sense strand
ccaggaaaaugaagggguu

SEQ ID NO: 2658780 - RNA, 19 nt, Homo sapiens
  misc_RNA (1)...(19): siRNA sense strand
aguaaagcccaaaacgaaa

SEQ ID NO: 2658781 - RNA, 19 nt, Homo sapiens
  misc_RNA (1)...(19): siRNA sense strand
ccaugauacuuuugguaca

SEQ ID NO: 2658782 - RNA, 19 nt, Homo sapiens
  misc_RNA (1)...(19): siRNA sense strand
ggaaggauucauaugcaga

SEQ ID NO: 2658783 - RNA, 19 nt, Homo sapiens
  misc_RNA (1)...(19): siRNA sense strand
agaagcaagaccuaagcaa

SEQ ID NO: 2658784 - RNA, 19 nt, Homo sapiens
  misc_RNA (1)...(19): siRNA sense strand
aaaugaagggguugaagaa

SEQ ID NO: 2658785 - RNA, 19 nt, Homo sapiens
  misc_RNA (1)...(19): siRNA sense strand
ggaucagacaucacuggaa

SEQ ID NO: 2658786 - RNA, 19 nt, Homo sapiens
  misc_RNA (1)...(19): siRNA sense strand
ggauaacagaagaccacga

SEQ ID NO: 2658787 - RNA, 19 nt, Homo sapiens
  misc_RNA (1)...(19): siRNA sense strand
aagcaagaccuaagcaaac

SEQ ID NO: 2658788 - RNA, 19 nt, Homo sapiens
  misc_RNA (1)...(19): siRNA sense strand
acagaagauuauagaagac

SEQ ID NO: 2658789 - RNA, 19 nt, Homo sapiens
  misc_RNA (1)...(19): siRNA sense strand
cugugaaggaaguagagaa

SEQ ID NO: 2658790 - RNA, 19 nt, Homo sapiens
  misc_RNA (1)...(19): siRNA sense strand
aggaaguagagaaggaacu

SEQ ID NO: 2658791 - RNA, 19 nt, Homo sapiens
  misc_RNA (1)...(19): siRNA sense strand
aaggagaaaacucggaaaa

SEQ ID NO: 2658792 - RNA, 19 nt, Homo sapiens
  misc_RNA (1)...(19): siRNA sense strand
acgaugacagcgaguacaa

SEQ ID NO: 2658793 - RNA, 19 nt, Homo sapiens
  misc_RNA (1)...(19): siRNA sense strand
ugaucauagacuggaguaa

SEQ ID NO: 2658794 - RNA, 19 nt, Homo sapiens
  misc_RNA (1)...(19): siRNA sense strand
acuaaaacgcauggauaaa

SEQ ID NO: 2658795 - RNA, 19 nt, Homo sapiens
  misc_RNA (1)...(19): siRNA sense strand
ggauaguuucccagcgcga

SEQ ID NO: 2658796 - RNA, 19 nt, Homo sapiens
  misc_RNA (1)...(19): siRNA sense strand
uacuaaaacgcauggauaa

SEQ ID NO: 2658797 - RNA, 19 nt, Homo sapiens
  misc_RNA (1)...(19): siRNA sense strand
augaugaaauggagaacaa

SEQ ID NO: 2658798 - RNA, 19 nt, Homo sapiens
  misc_RNA (1)...(19): siRNA sense strand
agaagaagacaaugaggaa

SEQ ID NO: 2658799 - RNA, 19 nt, Homo sapiens
  misc_RNA (1)...(19): siRNA sense strand
gaugagaaugagauggaaa

SEQ ID NO: 2658800 - RNA, 19 nt, Homo sapiens
  misc_RNA (1)...(19): siRNA sense strand
gcuugaggcaguagacaaa

SEQ ID NO: 2658801 - RNA, 19 nt, Homo sapiens
  misc_RNA (1)...(19): siRNA sense strand
aagaagacaaugaggaaga

SEQ ID NO: 2658802 - RNA, 19 nt, Homo sapiens
  misc_RNA (1)...(19): siRNA sense strand
guaugaagcuugaggcagu

SEQ ID NO: 2658803 - RNA, 19 nt, Homo sapiens
  misc_RNA (1)...(19): siRNA sense strand
gggauaaauacuuagaaga

SEQ ID NO: 2658804 - RNA, 19 nt, Homo sapiens
  misc_RNA (1)...(19): siRNA sense strand
acaacugggaugagagcua

SEQ ID NO: 2658805 - RNA, 19 nt, Homo sapiens
  misc_RNA (1)...(19): siRNA sense strand
uguaaggaacauagaagaa

SEQ ID NO: 2658806 - RNA, 19 nt, Homo sapiens
  misc_RNA (1)...(19): siRNA sense strand
ccgcuuaaguggugagaug

SEQ ID NO: 2658807 - RNA, 19 nt, Homo sapiens
  misc_RNA (1)...(19): siRNA sense strand
ggaggauggagaagagaga

SEQ ID NO: 2658808 - RNA, 19 nt, Homo sapiens
  misc_RNA (1)...(19): siRNA sense strand
ggugugaagaacauggaaa

SEQ ID NO: 2658809 - RNA, 19 nt, Homo sapiens
  misc_RNA (1)...(19): siRNA sense strand
auaaagaucagaaggaaga

SEQ ID NO: 2658810 - RNA, 19 nt, Homo sapiens
  misc_RNA (1)...(19): siRNA sense strand
cagaauuuauacagagcuu

SEQ ID NO: 2658811 - RNA, 19 nt, Homo sapiens
  misc_RNA (1)...(19): siRNA sense strand
gaggaaaagacgaggggau

SEQ ID NO: 2658812 - RNA, 19 nt, Homo sapiens
  misc_RNA (1)...(19): siRNA sense strand
aagaaagggacguagaaga

SEQ ID NO: 2658813 - RNA, 19 nt, Homo sapiens
  misc_RNA (1)...(19): siRNA sense strand
gagaugaugaaauggagaa

SEQ ID NO: 2658814 - RNA, 19 nt, Homo sapiens
  misc_RNA (1)...(19): siRNA sense strand
aggauggagaagagagaga

SEQ ID NO: 2658815 - RNA, 19 nt, Homo sapiens
  misc_RNA (1)...(19): siRNA sense strand
ggaugagagcuaugacuau

SEQ ID NO: 2658816 - RNA, 19 nt, Homo sapiens
  misc_RNA (1)...(19): siRNA sense strand
gggacguagaagaagacaa

SEQ ID NO: 2658817 - RNA, 19 nt, Homo sapiens
  misc_RNA (1)...(19): siRNA sense strand
acguagaagaagacaauga

SEQ ID NO: 2658818 - RNA, 19 nt, Homo sapiens
  misc_RNA (1)...(19): siRNA sense strand
gcaugaaauuagaaggcgu

SEQ ID NO: 2658819 - RNA, 19 nt, Homo sapiens
  misc_RNA (1)...(19): siRNA sense strand
augaacaaauugauggaga

SEQ ID NO: 2658820 - RNA, 19 nt, Homo sapiens
  misc_RNA (1)...(19): siRNA sense strand
agacaaugaggaagaagau

SEQ ID NO: 2658821 - RNA, 19 nt, Homo sapiens
  misc_RNA (1)...(19): siRNA sense strand
cagagagcacggaggaaaa

SEQ ID NO: 2658822 - RNA, 19 nt, Homo sapiens
  misc_RNA (1)...(19): siRNA sense strand
ggaaacuauugcagccaga

SEQ ID NO: 2658823 - RNA, 19 nt, Homo sapiens
  misc_RNA (1)...(19): siRNA sense strand
guuuguggauaccggauaa

SEQ ID NO: 2658824 - RNA, 19 nt, Homo sapiens
  misc_RNA (1)...(19): siRNA sense strand
acagaugaucaccggguaa

SEQ ID NO: 2658825 - RNA, 19 nt, Homo sapiens
  misc_RNA (1)...(19): siRNA sense strand
agaagagagagaugaugaa

SEQ ID NO: 2658826 - RNA, 19 nt, Homo sapiens
  misc_RNA (1)...(19): siRNA sense strand
agagagaacagaaagugaa

SEQ ID NO: 2658827 - RNA, 19 nt, Homo sapiens
  misc_RNA (1)...(19): siRNA sense strand
ucaaagcugcagagaagaa

SEQ ID NO: 2658828 - RNA, 19 nt, Homo sapiens
  misc_RNA (1)...(19): siRNA sense strand
gauaaagaucagaaggaag

SEQ ID NO: 2658829 - RNA, 19 nt, Homo sapiens
  misc_RNA (1)...(19): siRNA sense strand
cugaugaugucaaagaaga

SEQ ID NO: 2658830 - RNA, 19 nt, Homo sapiens
  misc_RNA (1)...(19): siRNA sense strand
acagaaagugaaaugagaa

SEQ ID NO: 2658831 - RNA, 19 nt, Homo sapiens
  misc_RNA (1)...(19): siRNA sense strand
aagauaaagaucagaagga

SEQ ID NO: 2658832 - RNA, 19 nt, Homo sapiens
  misc_RNA (1)...(19): siRNA sense strand
aggaagaaagggacguaga

SEQ ID NO: 2658833 - RNA, 19 nt, Homo sapiens
  misc_RNA (1)...(19): siRNA sense strand
ggaaagauggagugggcac

SEQ ID NO: 2658834 - RNA, 19 nt, Homo sapiens
  misc_RNA (1)...(19): siRNA sense strand
ccuguaggcugguguucaa

SEQ ID NO: 2658835 - RNA, 19 nt, Homo sapiens
  misc_RNA (1)...(19): siRNA sense strand
ccuaaguguagucggaaga

SEQ ID NO: 2658836 - RNA, 19 nt, Homo sapiens
  misc_RNA (1)...(19): siRNA sense strand
uuugaagagagaacagaaa

SEQ ID NO: 2658837 - RNA, 19 nt, Homo sapiens
  misc_RNA (1)...(19): siRNA sense strand
aggagaaagcgguggcagu

SEQ ID NO: 2658838 - RNA, 19 nt, Homo sapiens
  misc_RNA (1)...(19): siRNA sense strand
aagagagagaugaugaaau

SEQ ID NO: 2658839 - RNA, 19 nt, Homo sapiens
  misc_RNA (1)...(19): siRNA sense strand
ggaaagaaagcguggugcu

SEQ ID NO: 2658840 - RNA, 19 nt, Homo sapiens
  misc_RNA (1)...(19): siRNA sense strand
guguaaggaacauagaaga

SEQ ID NO: 2658841 - RNA, 19 nt, Homo sapiens
  misc_RNA (1)...(19): siRNA sense strand
agaagacuuugaagagaga

SEQ ID NO: 2658842 - RNA, 19 nt, Homo sapiens
  misc_RNA (1)...(19): siRNA sense strand
gggauucggcuguacuaaa

SEQ ID NO: 2658843 - RNA, 19 nt, Homo sapiens
  misc_RNA (1)...(19): siRNA sense strand
aguuggguggugugagaaa

SEQ ID NO: 2658844 - RNA, 19 nt, Homo sapiens
  misc_RNA (1)...(19): siRNA sense strand
ccaaaaggguauaaagaag

SEQ ID NO: 2658845 - RNA, 19 nt, Homo sapiens
  misc_RNA (1)...(19): siRNA sense strand
cagaugagaaugagaugga

SEQ ID NO: 2658846 - RNA, 19 nt, Homo sapiens
  misc_RNA (1)...(19): siRNA sense strand
agguuauccaaaugugaaa

SEQ ID NO: 2658847 - RNA, 19 nt, Homo sapiens
  misc_RNA (1)...(19): siRNA sense strand
cuggauagaugcagauucu

SEQ ID NO: 2658848 - RNA, 19 nt, Homo sapiens
  misc_RNA (1)...(19): siRNA sense strand
agacgaggugucagaauuu

SEQ ID NO: 2658849 - RNA, 19 nt, Homo sapiens
  misc_RNA (1)...(19): siRNA sense strand
aagacaaugaggaagaaga

SEQ ID NO: 2658850 - RNA, 19 nt, Homo sapiens
  misc_RNA (1)...(19): siRNA sense strand
aaguguagucggaagaaaa

SEQ ID NO: 2658851 - RNA, 19 nt, Homo sapiens
  misc_RNA (1)...(19): siRNA sense strand
ucaaaguuggcaugaaauu

SEQ ID NO: 2658852 - RNA, 19 nt, Homo sapiens
  misc_RNA (1)...(19): siRNA sense strand
uggagaagagagagaugau

SEQ ID NO: 2658853 - RNA, 19 nt, Homo sapiens
  misc_RNA (1)...(19): siRNA sense strand
guaagaauccugagggguu

SEQ ID NO: 2658854 - RNA, 19 nt, Homo sapiens
  misc_RNA (1)...(19): siRNA sense strand
agaacaugguggaugcuca

SEQ ID NO: 2658855 - RNA, 19 nt, Homo sapiens
  misc_RNA (1)...(19): siRNA sense strand
gauggaaaguuaagcguga

SEQ ID NO: 2658856 - RNA, 19 nt, Homo sapiens
  misc_RNA (1)...(19): siRNA sense strand
uggaaaguuaagcgugaaa

SEQ ID NO: 2658857 - RNA, 19 nt, Homo sapiens
  misc_RNA (1)...(19): siRNA sense strand
auguggaucacgagguuaa

SEQ ID NO: 2658858 - RNA, 19 nt, Homo sapiens
  misc_RNA (1)...(19): siRNA sense strand
gcaaacagaacuacagcca

SEQ ID NO: 2658859 - RNA, 19 nt, Homo sapiens
  misc_RNA (1)...(19): siRNA sense strand
acauggagcuucagugcca

SEQ ID NO: 2658860 - RNA, 19 nt, Homo sapiens
  misc_RNA (1)...(19): siRNA sense strand
caaugaauguggaucacga

SEQ ID NO: 2658861 - RNA, 19 nt, Homo sapiens
  misc_RNA (1)...(19): siRNA sense strand
uuggauuucaguaggcaaa

SEQ ID NO: 2658862 - RNA, 19 nt, Homo sapiens
  misc_RNA (1)...(19): siRNA sense strand
gcugcaaaacgaaggaaga

SEQ ID NO: 2658863 - RNA, 19 nt, Homo sapiens
  misc_RNA (1)...(19): siRNA sense strand
ucacaaucguagaaggaaa

SEQ ID NO: 2658864 - RNA, 19 nt, Homo sapiens
  misc_RNA (1)...(19): siRNA sense strand
ggaacaagauacuggccaa

SEQ ID NO: 2658865 - RNA, 19 nt, Homo sapiens
  misc_RNA (1)...(19): siRNA sense strand
cggaaagggaucagcgcua

SEQ ID NO: 2658866 - RNA, 19 nt, Homo sapiens
  misc_RNA (1)...(19): siRNA sense strand
ccauaucggcugagaagaa

SEQ ID NO: 2658867 - RNA, 19 nt, Homo sapiens
  misc_RNA (1)...(19): siRNA sense strand
agaaaguugugguggucaa

SEQ ID NO: 2658868 - RNA, 19 nt, Homo sapiens
  misc_RNA (1)...(19): siRNA sense strand
caguacagucagaagauua

SEQ ID NO: 2658869 - RNA, 19 nt, Homo sapiens
  misc_RNA (1)...(19): siRNA sense strand
gcggaugagggcagcgaaa

SEQ ID NO: 2658870 - RNA, 19 nt, Homo sapiens
  misc_RNA (1)...(19): siRNA sense strand
ccaaauugcaacacagaau

SEQ ID NO: 2658871 - RNA, 19 nt, Homo sapiens
  misc_RNA (1)...(19): siRNA sense strand
ucaaagagacugauggaga

SEQ ID NO: 2658872 - RNA, 19 nt, Homo sapiens
  misc_RNA (1)...(19): siRNA sense strand
aaagcaucguagaggauua

SEQ ID NO: 2658873 - RNA, 19 nt, Homo sapiens
  misc_RNA (1)...(19): siRNA sense strand
guucaaggugugagaguca

SEQ ID NO: 2658874 - RNA, 19 nt, Homo sapiens
  misc_RNA (1)...(19): siRNA sense strand
cagaagggcaggaggagau

SEQ ID NO: 2658875 - RNA, 19 nt, Homo sapiens
  misc_RNA (1)...(19): siRNA sense strand
ccauaaaacuggagcugau

SEQ ID NO: 2658876 - RNA, 19 nt, Homo sapiens
  misc_RNA (1)...(19): siRNA sense strand
gcuugaugcuauagacaca

SEQ ID NO: 2658877 - RNA, 19 nt, Homo sapiens
  misc_RNA (1)...(19): siRNA sense strand
acuccaagacucacagaaa

SEQ ID NO: 2658878 - RNA, 19 nt, Homo sapiens
  misc_RNA (1)...(19): siRNA sense strand
uuggaaacauacaggauau

SEQ ID NO: 2658879 - RNA, 19 nt, Homo sapiens
  misc_RNA (1)...(19): siRNA sense strand
agaaugaggaugaugaaga

SEQ ID NO: 2658880 - RNA, 19 nt, Homo sapiens
  misc_RNA (1)...(19): siRNA sense strand
ggagaaugaggaugaugaa

SEQ ID NO: 2658881 - RNA, 19 nt, Homo sapiens
  misc_RNA (1)...(19): siRNA sense strand
gagcaaggaugaugugcca

SEQ ID NO: 2658882 - RNA, 19 nt, Homo sapiens
  misc_RNA (1)...(19): siRNA sense strand
gggauggaggccacagaua

SEQ ID NO: 2658883 - RNA, 19 nt, Homo sapiens
  misc_RNA (1)...(19): siRNA sense strand
gcaucagggaccaaacaaa

SEQ ID NO: 2658884 - RNA, 19 nt, Homo sapiens
  misc_RNA (1)...(19): siRNA sense strand
aggaugaugaagaugauua

SEQ ID NO: 2658885 - RNA, 19 nt, Homo sapiens
  misc_RNA (1)...(19): siRNA sense strand
ucaaugacaugaagcggaa

SEQ ID NO: 2658886 - RNA, 19 nt, Homo sapiens
  misc_RNA (1)...(19): siRNA sense strand
caucagaaauccaugcaca

SEQ ID NO: 2658887 - RNA, 19 nt, Homo sapiens
  misc_RNA (1)...(19): siRNA sense strand
aaagguuucuagagaggaa

SEQ ID NO: 2658888 - RNA, 19 nt, Homo sapiens
  misc_RNA (1)...(19): siRNA sense strand
cgaagaaguagaugaaauc

SEQ ID NO: 2658889 - RNA, 19 nt, Homo sapiens
  misc_RNA (1)...(19): siRNA sense strand
cagcguuuccugugagcaa

SEQ ID NO: 2658890 - RNA, 19 nt, Homo sapiens
  misc_RNA (1)...(19): siRNA sense strand
ggaugaugaagaugauuau

SEQ ID NO: 2658891 - RNA, 19 nt, Homo sapiens
  misc_RNA (1)...(19): siRNA sense strand
agagacugauggagaugaa

SEQ ID NO: 2658892 - RNA, 19 nt, Homo sapiens
  misc_RNA (1)...(19): siRNA sense strand
aaaucaagucagaagaaga

SEQ ID NO: 2658893 - RNA, 19 nt, Homo sapiens
  misc_RNA (1)...(19): siRNA sense strand
acagaguguaugaggaaca

SEQ ID NO: 2658894 - RNA, 19 nt, Homo sapiens
  misc_RNA (1)...(19): siRNA sense strand
guccagucucuaagggaaa

SEQ ID NO: 2658895 - RNA, 19 nt, Homo sapiens
  misc_RNA (1)...(19): siRNA sense strand
gcuuguuuaaccaggauaa

SEQ ID NO: 2658896 - RNA, 19 nt, Homo sapiens
  misc_RNA (1)...(19): siRNA sense strand
ccgaaaggacuuauguaca

SEQ ID NO: 2658897 - RNA, 19 nt, Homo sapiens
  misc_RNA (1)...(19): siRNA sense strand
cgaagaaagaucagcccuu

SEQ ID NO: 2658898 - RNA, 19 nt, Homo sapiens
  misc_RNA (1)...(19): siRNA sense strand
gaacaagauacuggccaaa

SEQ ID NO: 2658899 - RNA, 19 nt, Homo sapiens
  misc_RNA (1)...(19): siRNA sense strand
gaaagggaucagcgcuaaa

SEQ ID NO: 2658900 - RNA, 19 nt, Homo sapiens
  misc_RNA (1)...(19): siRNA sense strand
aagaugacuauguggaaau

SEQ ID NO: 2658901 - RNA, 19 nt, Homo sapiens
  misc_RNA (1)...(19): siRNA sense strand
cagaagaagaugagucgga

SEQ ID NO: 2658902 - RNA, 19 nt, Homo sapiens
  misc_RNA (1)...(19): siRNA sense strand
ugacaaacugaaugacuau

SEQ ID NO: 2658903 - RNA, 19 nt, Homo sapiens
  misc_RNA (1)...(19): siRNA sense strand
auagaguuguucaggaaau

SEQ ID NO: 2658904 - RNA, 19 nt, Homo sapiens
  misc_RNA (1)...(19): siRNA sense strand
guguaugaggaacaagaua

SEQ ID NO: 2658905 - RNA, 19 nt, Homo sapiens
  misc_RNA (1)...(19): siRNA sense strand
aaacagaagggcaggagga

SEQ ID NO: 2658906 - RNA, 19 nt, Homo sapiens
  misc_RNA (1)...(19): siRNA sense strand
guucaggaaauucuggaaa

SEQ ID NO: 2658907 - RNA, 19 nt, Homo sapiens
  misc_RNA (1)...(19): siRNA sense strand
gcuaaggccaagcaagcaa

SEQ ID NO: 2658908 - RNA, 19 nt, Homo sapiens
  misc_RNA (1)...(19): siRNA sense strand
cgcaggagaaugaggauga

SEQ ID NO: 2658909 - RNA, 19 nt, Homo sapiens
  misc_RNA (1)...(19): siRNA sense strand
aggccaaaucccagcaaga

SEQ ID NO: 2658910 - RNA, 19 nt, Homo sapiens
  misc_RNA (1)...(19): siRNA sense strand
cagaguuagccuucacaaa

SEQ ID NO: 2658911 - RNA, 19 nt, Homo sapiens
  misc_RNA (1)...(19): siRNA sense strand
uccaagcgguugaggagaa

SEQ ID NO: 2658912 - RNA, 19 nt, Homo sapiens
  misc_RNA (1)...(19): siRNA sense strand
ugauaaacuguccgaagaa

SEQ ID NO: 2658913 - RNA, 19 nt, Homo sapiens
  misc_RNA (1)...(19): siRNA sense strand
gauaaugucugcagcggca

SEQ ID NO: 2658914 - RNA, 19 nt, Homo sapiens
  misc_RNA (1)...(19): siRNA sense strand
gcaccuaaagagacugauu

SEQ ID NO: 2658915 - RNA, 19 nt, Homo sapiens
  misc_RNA (1)...(19): siRNA sense strand
guugacuauugaugacaua

SEQ ID NO: 2658916 - RNA, 19 nt, Homo sapiens
  misc_RNA (1)...(19): siRNA sense strand
ggaagaagcugaauccacu

SEQ ID NO: 2658917 - RNA, 19 nt, Homo sapiens
  misc_RNA (1)...(19): siRNA sense strand
aguacagucagaagauuaa

SEQ ID NO: 2658918 - RNA, 19 nt, Homo sapiens
  misc_RNA (1)...(19): siRNA sense strand
cagaagauuaagaaggcga

SEQ ID NO: 2658919 - RNA, 19 nt, Homo sapiens
  misc_RNA (1)...(19): siRNA sense strand
gcaaggaugaugugccaga

SEQ ID NO: 2658920 - RNA, 19 nt, Homo sapiens
  misc_RNA (1)...(19): siRNA sense strand
augacuauguggaaaucaa

SEQ ID NO: 2658921 - RNA, 19 nt, Homo sapiens
  misc_RNA (1)...(19): siRNA sense strand
uuugaagaccagugaaaca

SEQ ID NO: 2658922 - RNA, 19 nt, Homo sapiens
  misc_RNA (1)...(19): siRNA sense strand
aggaaauucuggaaaccga

SEQ ID NO: 2658923 - RNA, 19 nt, Homo sapiens
  misc_RNA (1)...(19): siRNA sense strand
ccaaaucccagcaagacaa

SEQ ID NO: 2658924 - RNA, 19 nt, Homo sapiens
  misc_RNA (1)...(19): siRNA sense strand
gcaugaacuccaagcgguu

SEQ ID NO: 2658925 - RNA, 19 nt, Homo sapiens
  misc_RNA (1)...(19): siRNA sense strand
uugugguggucaauagaaa

SEQ ID NO: 2658926 - RNA, 19 nt, Homo sapiens
  misc_RNA (1)...(19): siRNA sense strand
uggccauagcagaguguuu

SEQ ID NO: 2658927 - RNA, 19 nt, Homo sapiens
  misc_RNA (1)...(19): siRNA sense strand
gggaaauggaggacagcca

SEQ ID NO: 2658928 - RNA, 19 nt, Homo sapiens
  misc_RNA (1)...(19): siRNA sense strand
cccuggaguucgugggcaa

SEQ ID NO: 2658929 - RNA, 19 nt, Homo sapiens
  misc_RNA (1)...(19): siRNA sense strand
ccgucuacccgguggagaa

SEQ ID NO: 2658930 - RNA, 19 nt, Homo sapiens
  misc_RNA (1)...(19): siRNA sense strand
gugaagaggaggcggcuga

SEQ ID NO: 2658931 - RNA, 19 nt, Homo sapiens
  misc_RNA (1)...(19): siRNA sense strand
agaucauggagaagaagaa

SEQ ID NO: 2658932 - RNA, 19 nt, Homo sapiens
  misc_RNA (1)...(19): siRNA sense strand
cugacaaggaggugcguga

SEQ ID NO: 2658933 - RNA, 19 nt, Homo sapiens
  misc_RNA (1)...(19): siRNA sense strand
uggagaagauggaggaggu

SEQ ID NO: 2658934 - RNA, 19 nt, Homo sapiens
  misc_RNA (1)...(19): siRNA sense strand
acaacaaagaccaggagga

SEQ ID NO: 2658935 - RNA, 19 nt, Homo sapiens
  misc_RNA (1)...(19): siRNA sense strand
guggaaagcaggagcugga

SEQ ID NO: 2658936 - RNA, 19 nt, Homo sapiens
  misc_RNA (1)...(19): siRNA sense strand
aggacagcuucgagggcga

SEQ ID NO: 2658937 - RNA, 19 nt, Homo sapiens
  misc_RNA (1)...(19): siRNA sense strand
ucacugaguuccuggacga

SEQ ID NO: 2658938 - RNA, 19 nt, Homo sapiens
  misc_RNA (1)...(19): siRNA sense strand
gcaucaagcucauccgcca

SEQ ID NO: 2658939 - RNA, 19 nt, Homo sapiens
  misc_RNA (1)...(19): siRNA sense strand
gcaucaacgacgagcucga

SEQ ID NO: 2658940 - RNA, 19 nt, Homo sapiens
  misc_RNA (1)...(19): siRNA sense strand
uggucaagguggaggacag

SEQ ID NO: 2658941 - RNA, 19 nt, Homo sapiens
  misc_RNA (1)...(19): siRNA sense strand
ccuaccagcagcagcgcaa

SEQ ID NO: 2658942 - RNA, 19 nt, Homo sapiens
  misc_RNA (1)...(19): siRNA sense strand
ucaagcagaucguggacca

SEQ ID NO: 2658943 - RNA, 19 nt, Homo sapiens
  misc_RNA (1)...(19): siRNA sense strand
ucucaguggucaaggugga

SEQ ID NO: 2658944 - RNA, 19 nt, Homo sapiens
  misc_RNA (1)...(19): siRNA sense strand
aaguggagacagaggcuga

SEQ ID NO: 2658945 - RNA, 19 nt, Homo sapiens
  misc_RNA (1)...(19): siRNA sense strand
aaacgaaagcagcugguca

SEQ ID NO: 2658946 - RNA, 19 nt, Homo sapiens
  misc_RNA (1)...(19): siRNA sense strand
cugacaugcaggaggagga

SEQ ID NO: 2658947 - RNA, 19 nt, Homo sapiens
  misc_RNA (1)...(19): siRNA sense strand
ccagcuucuuugaggcaga

SEQ ID NO: 2658948 - RNA, 19 nt, Homo sapiens
  misc_RNA (1)...(19): siRNA sense strand
gagaggagcagcaaggacu

SEQ ID NO: 2658949 - RNA, 19 nt, Homo sapiens
  misc_RNA (1)...(19): siRNA sense strand
acucaaaggaugaaaggaa

SEQ ID NO: 2658950 - RNA, 19 nt, Homo sapiens
  misc_RNA (1)...(19): siRNA sense strand
cuucaaagaaugaugacaa

SEQ ID NO: 2658951 - RNA, 19 nt, Homo sapiens
  misc_RNA (1)...(19): siRNA sense strand
aguuaaagaaggacaagaa

SEQ ID NO: 2658952 - RNA, 19 nt, Homo sapiens
  misc_RNA (1)...(19): siRNA sense strand
ggaugaaaggaaagauaca

SEQ ID NO: 2658953 - RNA, 19 nt, Homo sapiens
  misc_RNA (1)...(19): siRNA sense strand
agcaaauaguagaagagaa

SEQ ID NO: 2658954 - RNA, 19 nt, Homo sapiens
  misc_RNA (1)...(19): siRNA sense strand
gagagguacaaaugauaaa

SEQ ID NO: 2658955 - RNA, 19 nt, Homo sapiens
  misc_RNA (1)...(19): siRNA sense strand
aaggaugaaaggaaagaua

SEQ ID NO: 2658956 - RNA, 19 nt, Homo sapiens
  misc_RNA (1)...(19): siRNA sense strand
gaacuggagucaaaggaga

SEQ ID NO: 2658957 - RNA, 19 nt, Homo sapiens
  misc_RNA (1)...(19): siRNA sense strand
auucaaagauggaaggacu

SEQ ID NO: 2658958 - RNA, 19 nt, Homo sapiens
  misc_RNA (1)...(19): siRNA sense strand
acucaaaggaugcuaagaa

SEQ ID NO: 2658959 - RNA, 19 nt, Homo sapiens
  misc_RNA (1)...(19): siRNA sense strand
acuagaagaaggccagaaa

SEQ ID NO: 2658960 - RNA, 19 nt, Homo sapiens
  misc_RNA (1)...(19): siRNA sense strand
acucugaaccgaagggaga

SEQ ID NO: 2658961 - RNA, 19 nt, Homo sapiens
  misc_RNA (1)...(19): siRNA sense strand
agaaagguucaaagaaaga

SEQ ID NO: 2658962 - RNA, 19 nt, Homo sapiens
  misc_RNA (1)...(19): siRNA sense strand
ccagagagguacaaaugau

SEQ ID NO: 2658963 - RNA, 19 nt, Homo sapiens
  misc_RNA (1)...(19): siRNA sense strand
aagaauuccaagaagacaa

SEQ ID NO: 2658964 - RNA, 19 nt, Homo sapiens
  misc_RNA (1)...(19): siRNA sense strand
agaaacacucaaaggaaaa

SEQ ID NO: 2658965 - RNA, 19 nt, Homo sapiens
  misc_RNA (1)...(19): siRNA sense strand
acaaaaugaggcagauaaa

SEQ ID NO: 2658966 - RNA, 19 nt, Homo sapiens
  misc_RNA (1)...(19): siRNA sense strand
gucaaaggagagucagaaa

SEQ ID NO: 2658967 - RNA, 19 nt, Homo sapiens
  misc_RNA (1)...(19): siRNA sense strand
cagagagguacaaaugaua

SEQ ID NO: 2658968 - RNA, 19 nt, Homo sapiens
  misc_RNA (1)...(19): siRNA sense strand
aaguauacaaagaaggaca

SEQ ID NO: 2658969 - RNA, 19 nt, Homo sapiens
  misc_RNA (1)...(19): siRNA sense strand
guaaagaaggacacagagu

SEQ ID NO: 2658970 - RNA, 19 nt, Homo sapiens
  misc_RNA (1)...(19): siRNA sense strand
augcaugguuaaggaauua

SEQ ID NO: 2658971 - RNA, 19 nt, Homo sapiens
  misc_RNA (1)...(19): siRNA sense strand
gagucaaaggagagucaga

SEQ ID NO: 2658972 - RNA, 19 nt, Homo sapiens
  misc_RNA (1)...(19): siRNA sense strand
uggaguuaaagaaggacaa

SEQ ID NO: 2658973 - RNA, 19 nt, Homo sapiens
  misc_RNA (1)...(19): siRNA sense strand
acacaaagaaguacccaga

SEQ ID NO: 2658974 - RNA, 19 nt, Homo sapiens
  misc_RNA (1)...(19): siRNA sense strand
gcaagaaaggacacagagu

SEQ ID NO: 2658975 - RNA, 19 nt, Homo sapiens
  misc_RNA (1)...(19): siRNA sense strand
aauccagaauccaagcaaa

SEQ ID NO: 2658976 - RNA, 19 nt, Homo sapiens
  misc_RNA (1)...(19): siRNA sense strand
auguaaagaaggacacaga

SEQ ID NO: 2658977 - RNA, 19 nt, Homo sapiens
  misc_RNA (1)...(19): siRNA sense strand
aguuacuagacaugacaaa

SEQ ID NO: 2658978 - RNA, 19 nt, Homo sapiens
  misc_RNA (1)...(19): siRNA sense strand
agaaagauuugaagagguc

SEQ ID NO: 2658979 - RNA, 19 nt, Homo sapiens
  misc_RNA (1)...(19): siRNA sense strand
aagaaaggacacagagucu

SEQ ID NO: 2658980 - RNA, 19 nt, Homo sapiens
  misc_RNA (1)...(19): siRNA sense strand
ucauaaauggauaaggcau

SEQ ID NO: 2658981 - RNA, 19 nt, Homo sapiens
  misc_RNA (1)...(19): siRNA sense strand
cuggagacucaaaggauga

SEQ ID NO: 2658982 - RNA, 19 nt, Homo sapiens
  misc_RNA (1)...(19): siRNA sense strand
ucaaaauccaguucagaaa

SEQ ID NO: 2658983 - RNA, 19 nt, Homo sapiens
  misc_RNA (1)...(19): siRNA sense strand
cugucaagaaugaugaaga

SEQ ID NO: 2658984 - RNA, 19 nt, Homo sapiens
  misc_RNA (1)...(19): siRNA sense strand
aaaagaaggggaagaaaga

SEQ ID NO: 2658985 - RNA, 19 nt, Homo sapiens
  misc_RNA (1)...(19): siRNA sense strand
ggagagucagaaagaugaa

SEQ ID NO: 2658986 - RNA, 19 nt, Homo sapiens
  misc_RNA (1)...(19): siRNA sense strand
cugcaaauucaaagaugga

SEQ ID NO: 2658987 - RNA, 19 nt, Homo sapiens
  misc_RNA (1)...(19): siRNA sense strand
agguagaguuccuccauca

SEQ ID NO: 2658988 - RNA, 19 nt, Homo sapiens
  misc_RNA (1)...(19): siRNA sense strand
aagaaagauuugaagaggu

SEQ ID NO: 2658989 - RNA, 19 nt, Homo sapiens
  misc_RNA (1)...(19): siRNA sense strand
agagagguacaaaugauaa

SEQ ID NO: 2658990 - RNA, 19 nt, Homo sapiens
  misc_RNA (1)...(19): siRNA sense strand
gucaaagacuaguaaugau

SEQ ID NO: 2658991 - RNA, 19 nt, Homo sapiens
  misc_RNA (1)...(19): siRNA sense strand
ccacaaagccugagcgaac

SEQ ID NO: 2658992 - RNA, 19 nt, Homo sapiens
  misc_RNA (1)...(19): siRNA sense strand
ggacaugaaccaagggagu

SEQ ID NO: 2658993 - RNA, 19 nt, Homo sapiens
  misc_RNA (1)...(19): siRNA sense strand
caauauuggcucugagaca

SEQ ID NO: 2658994 - RNA, 19 nt, Homo sapiens
  misc_RNA (1)...(19): siRNA sense strand
caaucaaguaagaaccaaa

SEQ ID NO: 2658995 - RNA, 19 nt, Homo sapiens
  misc_RNA (1)...(19): siRNA sense strand
caaucacgcaugaggcaaa

SEQ ID NO: 2658996 - RNA, 19 nt, Homo sapiens
  misc_RNA (1)...(19): siRNA sense strand
ccaauuaggcacaagccaa

SEQ ID NO: 2658997 - RNA, 19 nt, Homo sapiens
  misc_RNA (1)...(19): siRNA sense strand
uguaagaaccaaacagaca

SEQ ID NO: 2658998 - RNA, 19 nt, Homo sapiens
  misc_RNA (1)...(19): siRNA sense strand
gguaugaaccaaauggaca

SEQ ID NO: 2658999 - RNA, 19 nt, Homo sapiens
  misc_RNA (1)...(19): siRNA sense strand
gguaugaaccaaauggaca

SEQ ID NO: 2659000 - RNA, 19 nt, Homo sapiens
  misc_RNA (1)...(19): siRNA sense strand
ccaaucagguauaagccaa

SEQ ID NO: 2659001 - RNA, 19 nt, Homo sapiens
  misc_RNA (1)...(19): siRNA sense strand
aggcaaacaagcauggauu

SEQ ID NO: 2659002 - RNA, 19 nt, Homo sapiens
  misc_RNA (1)...(19): siRNA sense strand
caaucaggcacaagccaaa

SEQ ID NO: 2659003 - RNA, 19 nt, Homo sapiens
  misc_RNA (1)...(19): siRNA sense strand
gcaauuagguaggagccaa

SEQ ID NO: 2659004 - RNA, 19 nt, Homo sapiens
  misc_RNA (1)...(19): siRNA sense strand
gccaacuaguccugagcaa

SEQ ID NO: 2659005 - RNA, 19 nt, Homo sapiens
  misc_RNA (1)...(19): siRNA sense strand
gcaauuagguaggagccaa

SEQ ID NO: 2659006 - RNA, 19 nt, Homo sapiens
  misc_RNA (1)...(19): siRNA sense strand
ccaaccaggcauaaggcaa

SEQ ID NO: 2659007 - RNA, 19 nt, Homo sapiens
  misc_RNA (1)...(19): siRNA sense strand
uugcagaaguaaacgauca

SEQ ID NO: 2659008 - RNA, 19 nt, Homo sapiens
  misc_RNA (1)...(19): siRNA sense strand
ggacaugaaccaauggagu

SEQ ID NO: 2659009 - RNA, 19 nt, Homo sapiens
  misc_RNA (1)...(19): siRNA sense strand
ccaauggagugcaagccua

SEQ ID NO: 2659010 - RNA, 19 nt, Homo sapiens
  misc_RNA (1)...(19): siRNA sense strand
gcacaagccaaauaggcau

SEQ ID NO: 2659011 - RNA, 19 nt, Homo sapiens
  misc_RNA (1)...(19): siRNA sense strand
ccaaauaggcaugagccaa

SEQ ID NO: 2659012 - RNA, 19 nt, Homo sapiens
  misc_RNA (1)...(19): siRNA sense strand
gcacaagccaaauaggcau

SEQ ID NO: 2659013 - RNA, 19 nt, Homo sapiens
  misc_RNA (1)...(19): siRNA sense strand
ccaaauaggcaugagccaa

SEQ ID NO: 2659014 - RNA, 19 nt, Homo sapiens
  misc_RNA (1)...(19): siRNA sense strand
ccaagggagugcaagccua

SEQ ID NO: 2659015 - RNA, 19 nt, Homo sapiens
  misc_RNA (1)...(19): siRNA sense strand
aaaugaaccaaguggacau

SEQ ID NO: 2659016 - RNA, 19 nt, Homo sapiens
  misc_RNA (1)...(19): siRNA sense strand
aaaugaaccaaguggacau

SEQ ID NO: 2659017 - RNA, 19 nt, Homo sapiens
  misc_RNA (1)...(19): siRNA sense strand
guaugaaccaaauggacau

SEQ ID NO: 2659018 - RNA, 19 nt, Homo sapiens
  misc_RNA (1)...(19): siRNA sense strand
caugaaacaaccagacaca

SEQ ID NO: 2659019 - RNA, 19 nt, Homo sapiens
  misc_RNA (1)...(19): siRNA sense strand
guaugaaccaaauggacau

SEQ ID NO: 2659020 - RNA, 19 nt, Homo sapiens
  misc_RNA (1)...(19): siRNA sense strand
caaccagacacauggcaau

SEQ ID NO: 2659021 - RNA, 19 nt, Homo sapiens
  misc_RNA (1)...(19): siRNA sense strand
caaccaggcacauggcaau

SEQ ID NO: 2659022 - RNA, 19 nt, Homo sapiens
  misc_RNA (1)...(19): siRNA sense strand
ccaaaugggcaugaggcaa

SEQ ID NO: 2659023 - RNA, 19 nt, Homo sapiens
  misc_RNA (1)...(19): siRNA sense strand
agugcaagccuauaugaaa

SEQ ID NO: 2659024 - RNA, 19 nt, Homo sapiens
  misc_RNA (1)...(19): siRNA sense strand
caaccagacacuagccaau

SEQ ID NO: 2659025 - RNA, 19 nt, Homo sapiens
  misc_RNA (1)...(19): siRNA sense strand
agugcaagccuauaugaaa

SEQ ID NO: 2659026 - RNA, 19 nt, Homo sapiens
  misc_RNA (1)...(19): siRNA sense strand
caugaaacaaccaggcaca

SEQ ID NO: 2659027 - RNA, 19 nt, Homo sapiens
  misc_RNA (1)...(19): siRNA sense strand
caaccaggcacuagccaau

SEQ ID NO: 2659028 - RNA, 19 nt, Homo sapiens
  misc_RNA (1)...(19): siRNA sense strand
ccaaccagguccaccgcaa

SEQ ID NO: 2659029 - RNA, 19 nt, Homo sapiens
  misc_RNA (1)...(19): siRNA sense strand
gcaggaaucaacugggcau

SEQ ID NO: 2659030 - RNA, 19 nt, Homo sapiens
  misc_RNA (1)...(19): siRNA sense strand
cugagugaagcaagcauaa

SEQ ID NO: 2659031 - RNA, 19 nt, Homo sapiens
  misc_RNA (1)...(19): siRNA sense strand
aguaagaaccaaacaggca

SEQ ID NO: 2659032 - RNA, 19 nt, Homo sapiens
  misc_RNA (1)...(19): siRNA sense strand
ccaaccaggcauaugggaa

SEQ ID NO: 2659033 - RNA, 19 nt, Homo sapiens
  misc_RNA (1)...(19): siRNA sense strand
caagcuggcaugaggcaau

SEQ ID NO: 2659034 - RNA, 19 nt, Homo sapiens
  misc_RNA (1)...(19): siRNA sense strand
caacaagaacugagccaac

SEQ ID NO: 2659035 - RNA, 19 nt, Homo sapiens
  misc_RNA (1)...(19): siRNA sense strand
caaucauguaagaaccaaa

SEQ ID NO: 2659036 - RNA, 19 nt, Homo sapiens
  misc_RNA (1)...(19): siRNA sense strand
caagcuggcaugaggcaau

SEQ ID NO: 2659037 - RNA, 19 nt, Homo sapiens
  misc_RNA (1)...(19): siRNA sense strand
cccaaaugcacuaccgcaa

SEQ ID NO: 2659038 - RNA, 19 nt, Homo sapiens
  misc_RNA (1)...(19): siRNA sense strand
cagaaguaaacgaucaaca

SEQ ID NO: 2659039 - RNA, 19 nt, Homo sapiens
  misc_RNA (1)...(19): siRNA sense strand
caaaccuaccagacauaaa

SEQ ID NO: 2659040 - RNA, 19 nt, Homo sapiens
  misc_RNA (1)...(19): siRNA sense strand
caaagcaggcauaagccaa

SEQ ID NO: 2659041 - RNA, 19 nt, Homo sapiens
  misc_RNA (1)...(19): siRNA sense strand
ccaaccaggcacauggcaa

SEQ ID NO: 2659042 - RNA, 19 nt, Homo sapiens
  misc_RNA (1)...(19): siRNA sense strand
caaaccuaccagacauaaa

SEQ ID NO: 2659043 - RNA, 19 nt, Homo sapiens
  misc_RNA (1)...(19): siRNA sense strand
ccaaccaggcacauggcaa

SEQ ID NO: 2659044 - RNA, 19 nt, Homo sapiens
  misc_RNA (1)...(19): siRNA sense strand
ccugagugaagcaagcaua

SEQ ID NO: 2659045 - RNA, 19 nt, Homo sapiens
  misc_RNA (1)...(19): siRNA sense strand
ucaaggacuuagagggcaa

SEQ ID NO: 2659046 - RNA, 19 nt, Homo sapiens
  misc_RNA (1)...(19): siRNA sense strand
ccugaaggauaguggacau

SEQ ID NO: 2659047 - RNA, 19 nt, Homo sapiens
  misc_RNA (1)...(19): siRNA sense strand
uggaaaucugcgugauaaa

SEQ ID NO: 2659048 - RNA, 19 nt, Homo sapiens
  misc_RNA (1)...(19): siRNA sense strand
ccgaacucgugguggaaaa

SEQ ID NO: 2659049 - RNA, 19 nt, Homo sapiens
  misc_RNA (1)...(19): siRNA sense strand
aggcagaagacuacgauga

SEQ ID NO: 2659050 - RNA, 19 nt, Homo sapiens
  misc_RNA (1)...(19): siRNA sense strand
gggauguggaggagacaga

SEQ ID NO: 2659051 - RNA, 19 nt, Homo sapiens
  misc_RNA (1)...(19): siRNA sense strand
aauucaaggugcuggccaa

SEQ ID NO: 2659052 - RNA, 19 nt, Homo sapiens
  misc_RNA (1)...(19): siRNA sense strand
caaucaagugcaagcgaga

SEQ ID NO: 2659053 - RNA, 19 nt, Homo sapiens
  misc_RNA (1)...(19): siRNA sense strand
uggagcugauagcgagaaa

SEQ ID NO: 2659054 - RNA, 19 nt, Homo sapiens
  misc_RNA (1)...(19): siRNA sense strand
aauggaaaucugcgugaua

SEQ ID NO: 2659055 - RNA, 19 nt, Homo sapiens
  misc_RNA (1)...(19): siRNA sense strand
aggucauugugcaggagaa

SEQ ID NO: 2659056 - RNA, 19 nt, Homo sapiens
  misc_RNA (1)...(19): siRNA sense strand
cuaugaucuucguggcaau

SEQ ID NO: 2659057 - RNA, 19 nt, Homo sapiens
  misc_RNA (1)...(19): siRNA sense strand
ccauuagcgaggagcaaga

SEQ ID NO: 2659058 - RNA, 19 nt, Homo sapiens
  misc_RNA (1)...(19): siRNA sense strand
gcacagaucgagcuggaga

SEQ ID NO: 2659059 - RNA, 19 nt, Homo sapiens
  misc_RNA (1)...(19): siRNA sense strand
uugucaaggcagaagacua

SEQ ID NO: 2659060 - RNA, 19 nt, Homo sapiens
  misc_RNA (1)...(19): siRNA sense strand
cgugaauagccgagcccau

SEQ ID NO: 2659061 - RNA, 19 nt, Homo sapiens
  misc_RNA (1)...(19): siRNA sense strand
guggacaugaggagaguga

SEQ ID NO: 2659062 - RNA, 19 nt, Homo sapiens
  misc_RNA (1)...(19): siRNA sense strand
agaucaaggaccugaacga

SEQ ID NO: 2659063 - RNA, 19 nt, Homo sapiens
  misc_RNA (1)...(19): siRNA sense strand
gcgugauaaagguggagau

SEQ ID NO: 2659064 - RNA, 19 nt, Homo sapiens
  misc_RNA (1)...(19): siRNA sense strand
gcgcuuuagacuacgaaga

SEQ ID NO: 2659065 - RNA, 19 nt, Homo sapiens
  misc_RNA (1)...(19): siRNA sense strand
uagcgaggagcaagacaaa

SEQ ID NO: 2659066 - RNA, 19 nt, Homo sapiens
  misc_RNA (1)...(19): siRNA sense strand
uggccaaagacgcgcgaga

SEQ ID NO: 2659067 - RNA, 19 nt, Homo sapiens
  misc_RNA (1)...(19): siRNA sense strand
gugcaagcgagacaacaaa

SEQ ID NO: 2659068 - RNA, 19 nt, Homo sapiens
  misc_RNA (1)...(19): siRNA sense strand
aagacuacgaugagggcga

SEQ ID NO: 2659069 - RNA, 19 nt, Homo sapiens
  misc_RNA (1)...(19): siRNA sense strand
ucucgaugcccaagaguca

SEQ ID NO: 2659070 - RNA, 19 nt, Homo sapiens
  misc_RNA (1)...(19): siRNA sense strand
agugcaagcgagacaacaa

SEQ ID NO: 2659071 - RNA, 19 nt, Homo sapiens
  misc_RNA (1)...(19): siRNA sense strand
cccaaggucaacagcguua

SEQ ID NO: 2659072 - RNA, 19 nt, Homo sapiens
  misc_RNA (1)...(19): siRNA sense strand
uguucggccuggagaucaa

SEQ ID NO: 2659073 - RNA, 19 nt, Homo sapiens
  misc_RNA (1)...(19): siRNA sense strand
ccaacggccagguggucua

SEQ ID NO: 2659074 - RNA, 19 nt, Homo sapiens
  misc_RNA (1)...(19): siRNA sense strand
acgacaugaccgagggcga

SEQ ID NO: 2659075 - RNA, 19 nt, Homo sapiens
  misc_RNA (1)...(19): siRNA sense strand
ucaaguacucgguagaaga

SEQ ID NO: 2659076 - RNA, 19 nt, Homo sapiens
  misc_RNA (1)...(19): siRNA sense strand
agcagaagauugaccguga

SEQ ID NO: 2659077 - RNA, 19 nt, Homo sapiens
  misc_RNA (1)...(19): siRNA sense strand
cugaaaggcaagaggacug

SEQ ID NO: 2659078 - RNA, 19 nt, Homo sapiens
  misc_RNA (1)...(19): siRNA sense strand
aagaaaucaagcaagaaga

SEQ ID NO: 2659079 - RNA, 19 nt, Homo sapiens
  misc_RNA (1)...(19): siRNA sense strand
acaugaggagagugaccaa

SEQ ID NO: 2659080 - RNA, 19 nt, Homo sapiens
  misc_RNA (1)...(19): siRNA sense strand
accuacaacugcaguaauu

SEQ ID NO: 2659081 - RNA, 19 nt, Homo sapiens
  misc_RNA (1)...(19): siRNA sense strand
aggagacagacaagaugaa

SEQ ID NO: 2659082 - RNA, 19 nt, Homo sapiens
  misc_RNA (1)...(19): siRNA sense strand
cagaauacccgcaacacca

SEQ ID NO: 2659083 - RNA, 19 nt, Homo sapiens
  misc_RNA (1)...(19): siRNA sense strand
gaggagaggccuacccuga

SEQ ID NO: 2659084 - RNA, 19 nt, Homo sapiens
  misc_RNA (1)...(19): siRNA sense strand
cuuacgagcucacgcccaa

SEQ ID NO: 2659085 - RNA, 19 nt, Homo sapiens
  misc_RNA (1)...(19): siRNA sense strand
gaacuggacgugcaggcua

SEQ ID NO: 2659086 - RNA, 19 nt, Homo sapiens
  misc_RNA (1)...(19): siRNA sense strand
aacuggacgugcaggcuaa

SEQ ID NO: 2659087 - RNA, 19 nt, Homo sapiens
  misc_RNA (1)...(19): siRNA sense strand
ggacugucgaugugaccau

SEQ ID NO: 2659088 - RNA, 19 nt, Homo sapiens
  misc_RNA (1)...(19): siRNA sense strand
gugugaagcgucugaagga

SEQ ID NO: 2659089 - RNA, 19 nt, Homo sapiens
  misc_RNA (1)...(19): siRNA sense strand
cuuccgaaucacugcgcua

SEQ ID NO: 2659090 - RNA, 19 nt, Homo sapiens
  misc_RNA (1)...(19): siRNA sense strand
ucaucauccucgacgucaa

SEQ ID NO: 2659091 - RNA, 19 nt, Homo sapiens
  misc_RNA (1)...(19): siRNA sense strand
gagccuaaggggaaagaga

SEQ ID NO: 2659092 - RNA, 19 nt, Homo sapiens
  misc_RNA (1)...(19): siRNA sense strand
gccuaaggggaaagagaau

SEQ ID NO: 2659093 - RNA, 19 nt, Homo sapiens
  misc_RNA (1)...(19): siRNA sense strand
cugucaacgaugugcugaa

SEQ ID NO: 2659094 - RNA, 19 nt, Homo sapiens
  misc_RNA (1)...(19): siRNA sense strand
acacacaggaacagagaaa

SEQ ID NO: 2659095 - RNA, 19 nt, Homo sapiens
  misc_RNA (1)...(19): siRNA sense strand
ccgagaaagaagaacguaa

SEQ ID NO: 2659096 - RNA, 19 nt, Homo sapiens
  misc_RNA (1)...(19): siRNA sense strand
gguaugaaggaguggacaa

SEQ ID NO: 2659097 - RNA, 19 nt, Homo sapiens
  misc_RNA (1)...(19): siRNA sense strand
ccagaggacuagaggccaa

SEQ ID NO: 2659098 - RNA, 19 nt, Homo sapiens
  misc_RNA (1)...(19): siRNA sense strand
agaaaggacagaagaggaa

SEQ ID NO: 2659099 - RNA, 19 nt, Homo sapiens
  misc_RNA (1)...(19): siRNA sense strand
guguagaaucugaaguuua

SEQ ID NO: 2659100 - RNA, 19 nt, Homo sapiens
  misc_RNA (1)...(19): siRNA sense strand
ccaucaagcaggucauaaa

SEQ ID NO: 2659101 - RNA, 19 nt, Homo sapiens
  misc_RNA (1)...(19): siRNA sense strand
guagaaacacacaggaaca

SEQ ID NO: 2659102 - RNA, 19 nt, Homo sapiens
  misc_RNA (1)...(19): siRNA sense strand
acaccuagaagaaggcaaa

SEQ ID NO: 2659103 - RNA, 19 nt, Homo sapiens
  misc_RNA (1)...(19): siRNA sense strand
agcaauuaauggaggaaca

SEQ ID NO: 2659104 - RNA, 19 nt, Homo sapiens
  misc_RNA (1)...(19): siRNA sense strand
auagaauguuggagcaaaa

SEQ ID NO: 2659105 - RNA, 19 nt, Homo sapiens
  misc_RNA (1)...(19): siRNA sense strand
cuagaagaaggcaaagaaa

SEQ ID NO: 2659106 - RNA, 19 nt, Homo sapiens
  misc_RNA (1)...(19): siRNA sense strand
cagaaacaucagaagagaa

SEQ ID NO: 2659107 - RNA, 19 nt, Homo sapiens
  misc_RNA (1)...(19): siRNA sense strand
ugauguacccuccgagaaa

SEQ ID NO: 2659108 - RNA, 19 nt, Homo sapiens
  misc_RNA (1)...(19): siRNA sense strand
agacaagagcaucagacaa

SEQ ID NO: 2659109 - RNA, 19 nt, Homo sapiens
  misc_RNA (1)...(19): siRNA sense strand
cagaaagaugagagagaac

SEQ ID NO: 2659110 - RNA, 19 nt, Homo sapiens
  misc_RNA (1)...(19): siRNA sense strand
cagagaaagagcaguccaa

SEQ ID NO: 2659111 - RNA, 19 nt, Homo sapiens
  misc_RNA (1)...(19): siRNA sense strand
aggaaaugcuuugggauga

SEQ ID NO: 2659112 - RNA, 19 nt, Homo sapiens
  misc_RNA (1)...(19): siRNA sense strand
gaaagauggaagagaguuc

SEQ ID NO: 2659113 - RNA, 19 nt, Homo sapiens
  misc_RNA (1)...(19): siRNA sense strand
guaugaaggaguggacaaa

SEQ ID NO: 2659114 - RNA, 19 nt, Homo sapiens
  misc_RNA (1)...(19): siRNA sense strand
gacaaagacaagagcauca

SEQ ID NO: 2659115 - RNA, 19 nt, Homo sapiens
  misc_RNA (1)...(19): siRNA sense strand
cguaagcacaggaaagaga

SEQ ID NO: 2659116 - RNA, 19 nt, Homo sapiens
  misc_RNA (1)...(19): siRNA sense strand
cagaaagauggaagagagu

SEQ ID NO: 2659117 - RNA, 19 nt, Homo sapiens
  misc_RNA (1)...(19): siRNA sense strand
ccauauuucaccaguggaa

SEQ ID NO: 2659118 - RNA, 19 nt, Homo sapiens
  misc_RNA (1)...(19): siRNA sense strand
ggaacagagaaaugguuga

SEQ ID NO: 2659119 - RNA, 19 nt, Homo sapiens
  misc_RNA (1)...(19): siRNA sense strand
uagacaaagacaagagcau

SEQ ID NO: 2659120 - RNA, 19 nt, Homo sapiens
  misc_RNA (1)...(19): siRNA sense strand
ccuagaagaaggcaaagaa

SEQ ID NO: 2659121 - RNA, 19 nt, Homo sapiens
  misc_RNA (1)...(19): siRNA sense strand
agucucacuaugugggaaa

SEQ ID NO: 2659122 - RNA, 19 nt, Homo sapiens
  misc_RNA (1)...(19): siRNA sense strand
ggaaaagagaggaggauag

SEQ ID NO: 2659123 - RNA, 19 nt, Homo sapiens
  misc_RNA (1)...(19): siRNA sense strand
ccacaugcaaggaagugaa

SEQ ID NO: 2659124 - RNA, 19 nt, Homo sapiens
  misc_RNA (1)...(19): siRNA sense strand
caugcaaggaagugaacau

SEQ ID NO: 2659125 - RNA, 19 nt, Homo sapiens
  misc_RNA (1)...(19): siRNA sense strand
cagauuuagacaaagacaa

SEQ ID NO: 2659126 - RNA, 19 nt, Homo sapiens
  misc_RNA (1)...(19): siRNA sense strand
gaggaaaugcuuugggaug

SEQ ID NO: 2659127 - RNA, 19 nt, Homo sapiens
  misc_RNA (1)...(19): siRNA sense strand
gcauuuaguaugagaaccu

SEQ ID NO: 2659128 - RNA, 19 nt, Homo sapiens
  misc_RNA (1)...(19): siRNA sense strand
aucaagaaugugugagcaa

SEQ ID NO: 2659129 - RNA, 19 nt, Homo sapiens
  misc_RNA (1)...(19): siRNA sense strand
agagaggaggauagaguca

SEQ ID NO: 2659130 - RNA, 19 nt, Homo sapiens
  misc_RNA (1)...(19): siRNA sense strand
gauuccagacccagacaua

SEQ ID NO: 2659131 - RNA, 19 nt, Homo sapiens
  misc_RNA (1)...(19): siRNA sense strand
gaggauagagucaagguca

SEQ ID NO: 2659132 - RNA, 19 nt, Homo sapiens
  misc_RNA (1)...(19): siRNA sense strand
ggucaguucaggaaagcuu

SEQ ID NO: 2659133 - RNA, 19 nt, Homo sapiens
  misc_RNA (1)...(19): siRNA sense strand
cagagauggcauuuaguau

SEQ ID NO: 2659134 - RNA, 19 nt, Homo sapiens
  misc_RNA (1)...(19): siRNA sense strand
ggacagaagaggaaaugcu

SEQ ID NO: 2659135 - RNA, 19 nt, Homo sapiens
  misc_RNA (1)...(19): siRNA sense strand
ugaagaugcauguugagaa

SEQ ID NO: 2659136 - RNA, 19 nt, Homo sapiens
  misc_RNA (1)...(19): siRNA sense strand
ggacuagauccaaagacuu

SEQ ID NO: 2659137 - RNA, 19 nt, Homo sapiens
  misc_RNA (1)...(19): siRNA sense strand
uucagaaagaugagagaga

SEQ ID NO: 2659138 - RNA, 19 nt, Homo sapiens
  misc_RNA (1)...(19): siRNA sense strand
gguacagagaaaugguuga

SEQ ID NO: 2659139 - RNA, 19 nt, Homo sapiens
  misc_RNA (1)...(19): siRNA sense strand
aagagcaguccaagcauaa

SEQ ID NO: 2659140 - RNA, 19 nt, Homo sapiens
  misc_RNA (1)...(19): siRNA sense strand
uuggaaacccguagauaca

SEQ ID NO: 2659141 - RNA, 19 nt, Homo sapiens
  misc_RNA (1)...(19): siRNA sense strand
agccagaggacuagagcca

SEQ ID NO: 2659142 - RNA, 19 nt, Homo sapiens
  misc_RNA (1)...(19): siRNA sense strand
gauccaaagacuuguuuca

SEQ ID NO: 2659143 - RNA, 19 nt, Homo sapiens
  misc_RNA (1)...(19): siRNA sense strand
acacaggaacagagaaaug

SEQ ID NO: 2659144 - RNA, 19 nt, Homo sapiens
  misc_RNA (1)...(19): siRNA sense strand
aaagagaggaggauagagu

SEQ ID NO: 2659145 - RNA, 19 nt, Homo sapiens
  misc_RNA (1)...(19): siRNA sense strand
aagaaaggacagaagagga

SEQ ID NO: 2659146 - RNA, 19 nt, Homo sapiens
  misc_RNA (1)...(19): siRNA sense strand
aggaagugaacaucaaauu

SEQ ID NO: 2659147 - RNA, 19 nt, Homo sapiens
  misc_RNA (1)...(19): siRNA sense strand
aggagauagcucuguagaa

SEQ ID NO: 2659148 - RNA, 19 nt, Homo sapiens
  misc_RNA (1)...(19): siRNA sense strand
aauuaauggaggaacauga

SEQ ID NO: 2659149 - RNA, 19 nt, Homo sapiens
  misc_RNA (1)...(19): siRNA sense strand
aggacuagauccaaagacu

SEQ ID NO: 2659150 - RNA, 19 nt, Homo sapiens
  misc_RNA (1)...(19): siRNA sense strand
gcucaugauagcaaacaga

SEQ ID NO: 2659151 - RNA, 19 nt, Homo sapiens
  misc_RNA (1)...(19): siRNA sense strand
gagaaaugguugaugucag

SEQ ID NO: 2659152 - RNA, 19 nt, Homo sapiens
  misc_RNA (1)...(19): siRNA sense strand
agccuuaaucagcaagaaa

SEQ ID NO: 2659153 - RNA, 19 nt, Homo sapiens
  misc_RNA (1)...(19): siRNA sense strand
ggaggagaugagagagcua

SEQ ID NO: 2659154 - RNA, 19 nt, Homo sapiens
  misc_RNA (1)...(19): siRNA sense strand
aggaaauguuaaagggguu

SEQ ID NO: 2659155 - RNA, 19 nt, Homo sapiens
  misc_RNA (1)...(19): siRNA sense strand
ugauagauggagauggaga

SEQ ID NO: 2659156 - RNA, 19 nt, Homo sapiens
  misc_RNA (1)...(19): siRNA sense strand
cgcuuuaggagguggugaa

SEQ ID NO: 2659157 - RNA, 19 nt, Homo sapiens
  misc_RNA (1)...(19): siRNA sense strand
uugauaugauagauggaga

SEQ ID NO: 2659158 - RNA, 19 nt, Homo sapiens
  misc_RNA (1)...(19): siRNA sense strand
gagaugauauggaacgguu

SEQ ID NO: 2659159 - RNA, 19 nt, Homo sapiens
  misc_RNA (1)...(19): siRNA sense strand
ggaaaauguccccaaggaa

SEQ ID NO: 2659160 - RNA, 19 nt, Homo sapiens
  misc_RNA (1)...(19): siRNA sense strand
ugauaugauagauggagau

SEQ ID NO: 2659161 - RNA, 19 nt, Homo sapiens
  misc_RNA (1)...(19): siRNA sense strand
gccuggaggaaauguuaaa

SEQ ID NO: 2659162 - RNA, 19 nt, Homo sapiens
  misc_RNA (1)...(19): siRNA sense strand
aaaauguccccaaggaaaa

SEQ ID NO: 2659163 - RNA, 19 nt, Homo sapiens
  misc_RNA (1)...(19): siRNA sense strand
gaggaaaauuagggaacuu

SEQ ID NO: 2659164 - RNA, 19 nt, Homo sapiens
  misc_RNA (1)...(19): siRNA sense strand
gauuaaagauacuaggaca

SEQ ID NO: 2659165 - RNA, 19 nt, Homo sapiens
  misc_RNA (1)...(19): siRNA sense strand
gggacuaagaauaagacaa

SEQ ID NO: 2659166 - RNA, 19 nt, Homo sapiens
  misc_RNA (1)...(19): siRNA sense strand
agacaagagcccaggccaa

SEQ ID NO: 2659167 - RNA, 19 nt, Homo sapiens
  misc_RNA (1)...(19): siRNA sense strand
cugaggaggaggaggaaga

SEQ ID NO: 2659168 - RNA, 19 nt, Homo sapiens
  misc_RNA (1)...(19): siRNA sense strand
aggcagugucuaagaacaa

SEQ ID NO: 2659169 - RNA, 19 nt, Homo sapiens
  misc_RNA (1)...(19): siRNA sense strand
gggaaguuaaagagauuau

SEQ ID NO: 2659170 - RNA, 19 nt, Homo sapiens
  misc_RNA (1)...(19): siRNA sense strand
aggaggaggaggaagagaa

SEQ ID NO: 2659171 - RNA, 19 nt, Homo sapiens
  misc_RNA (1)...(19): siRNA sense strand
augcaguagcagagaugaa

SEQ ID NO: 2659172 - RNA, 19 nt, Homo sapiens
  misc_RNA (1)...(19): siRNA sense strand
agagaauguuauugggaac

SEQ ID NO: 2659173 - RNA, 19 nt, Homo sapiens
  misc_RNA (1)...(19): siRNA sense strand
agaccagggccaaagcaaa

SEQ ID NO: 2659174 - RNA, 19 nt, Homo sapiens
  misc_RNA (1)...(19): siRNA sense strand
aagagaauguuauugggaa

SEQ ID NO: 2659175 - RNA, 19 nt, Homo sapiens
  misc_RNA (1)...(19): siRNA sense strand
agaugagauuagacgucaa

SEQ ID NO: 2659176 - RNA, 19 nt, Homo sapiens
  misc_RNA (1)...(19): siRNA sense strand
aggaggaggaagagaaugu

SEQ ID NO: 2659177 - RNA, 19 nt, Homo sapiens
  misc_RNA (1)...(19): siRNA sense strand
uagcagagaugaaggcagu

SEQ ID NO: 2659178 - RNA, 19 nt, Homo sapiens
  misc_RNA (1)...(19): siRNA sense strand
gguaaaugggauuaagcca

SEQ ID NO: 2659179 - RNA, 19 nt, Homo sapiens
  misc_RNA (1)...(19): siRNA sense strand
agacagaugcaguagcaga

SEQ ID NO: 2659180 - RNA, 19 nt, Homo sapiens
  misc_RNA (1)...(19): siRNA sense strand
gggaugaaagacaacgcaa

SEQ ID NO: 2659181 - RNA, 19 nt, Homo sapiens
  misc_RNA (1)...(19): siRNA sense strand
ugggcaaagccaugggaga

SEQ ID NO: 2659182 - RNA, 19 nt, Homo sapiens
  misc_RNA (1)...(19): siRNA sense strand
agccuaagacucugggcaa

SEQ ID NO: 2659183 - RNA, 19 nt, Homo sapiens
  misc_RNA (1)...(19): siRNA sense strand
cagccagagacaugaucaa

SEQ ID NO: 2659184 - RNA, 19 nt, Homo sapiens
  misc_RNA (1)...(19): siRNA sense strand
agaaagaggcaaaagccaa

SEQ ID NO: 2659185 - RNA, 19 nt, Homo sapiens
  misc_RNA (1)...(19): siRNA sense strand
gagcagagagggaggcuac

SEQ ID NO: 2659186 - RNA, 19 nt, Homo sapiens
  misc_RNA (1)...(19): siRNA sense strand
auggagaagaggcugguaa

SEQ ID NO: 2659187 - RNA, 19 nt, Homo sapiens
  misc_RNA (1)...(19): siRNA sense strand
cagcacuaagaaugauaaa

SEQ ID NO: 2659188 - RNA, 19 nt, Homo sapiens
  misc_RNA (1)...(19): siRNA sense strand
aggcauuggcagcauuaaa

SEQ ID NO: 2659189 - RNA, 19 nt, Homo sapiens
  misc_RNA (1)...(19): siRNA sense strand
uggagaagaggcugguaau

SEQ ID NO: 2659190 - RNA, 19 nt, Homo sapiens
  misc_RNA (1)...(19): siRNA sense strand
uuaaccagaaagaggcaaa

SEQ ID NO: 2659191 - RNA, 19 nt, Homo sapiens
  misc_RNA (1)...(19): siRNA sense strand
gcaggauaguuaagccuca

SEQ ID NO: 2659192 - RNA, 19 nt, Homo sapiens
  misc_RNA (1)...(19): siRNA sense strand
ggaaauugcaaaaccagaa

SEQ ID NO: 2659193 - RNA, 19 nt, Homo sapiens
  misc_RNA (1)...(19): siRNA sense strand
gggagguaaaugggauuaa

SEQ ID NO: 2659194 - RNA, 19 nt, Homo sapiens
  misc_RNA (1)...(19): siRNA sense strand
gaccagggccaaagcaaaa

SEQ ID NO: 2659195 - RNA, 19 nt, Homo sapiens
  misc_RNA (1)...(19): siRNA sense strand
auaaaggagcauaucagaa

SEQ ID NO: 2659196 - RNA, 19 nt, Homo sapiens
  misc_RNA (1)...(19): siRNA sense strand
ggcaaagccaugggagauu

SEQ ID NO: 2659197 - RNA, 19 nt, Homo sapiens
  misc_RNA (1)...(19): siRNA sense strand
cagggagguaaaugggauu

SEQ ID NO: 2659198 - RNA, 19 nt, Homo sapiens
  misc_RNA (1)...(19): siRNA sense strand
ucauaaaauagcacggauu

SEQ ID NO: 2659199 - RNA, 19 nt, Homo sapiens
  misc_RNA (1)...(19): siRNA sense strand
gggccaaagcaaaagccaa

SEQ ID NO: 2659200 - RNA, 19 nt, Homo sapiens
  misc_RNA (1)...(19): siRNA sense strand
gcucaugcucacagccuau

SEQ ID NO: 2659201 - RNA, 19 nt, Homo sapiens
  misc_RNA (1)...(19): siRNA sense strand
ucaggaucagggagguaaa

SEQ ID NO: 2659202 - RNA, 19 nt, Homo sapiens
  misc_RNA (1)...(19): siRNA sense strand
aggaggaagagaauguuau

SEQ ID NO: 2659203 - RNA, 19 nt, Homo sapiens
  misc_RNA (1)...(19): siRNA sense strand
uguuagugguguggccaua

SEQ ID NO: 2659204 - RNA, 19 nt, Homo sapiens
  misc_RNA (1)...(19): siRNA sense strand
gggaacagcagaugaggca

SEQ ID NO: 2659205 - RNA, 19 nt, Homo sapiens
  misc_RNA (1)...(19): siRNA sense strand
uagaaagguuuguagggca

SEQ ID NO: 2659206 - RNA, 19 nt, Homo sapiens
  misc_RNA (1)...(19): siRNA sense strand
gaacagcagaugaggcacu

SEQ ID NO: 2659207 - RNA, 19 nt, Homo sapiens
  misc_RNA (1)...(19): siRNA sense strand
agaugauguagaaagguuu

SEQ ID NO: 2659208 - RNA, 19 nt, Homo sapiens
  misc_RNA (1)...(19): siRNA sense strand
caaagaggaacuagcggca

SEQ ID NO: 2659209 - RNA, 19 nt, Homo sapiens
  misc_RNA (1)...(19): siRNA sense strand
cuuccaaacuccugaaccu

SEQ ID NO: 2659210 - RNA, 19 nt, Homo sapiens
  misc_RNA (1)...(19): siRNA sense strand
cgucccagaagcagagcaa

SEQ ID NO: 2659211 - RNA, 19 nt, Homo sapiens
  misc_RNA (1)...(19): siRNA sense strand
cggaggaaggccagagcau

SEQ ID NO: 2659212 - RNA, 19 nt, Homo sapiens
  misc_RNA (1)...(19): siRNA sense strand
acaccaagcgcgugaccau

SEQ ID NO: 2659213 - RNA, 19 nt, Homo sapiens
  misc_RNA (1)...(19): siRNA sense strand
uggccaucacagagcuaaa

SEQ ID NO: 2659214 - RNA, 19 nt, Homo sapiens
  misc_RNA (1)...(19): siRNA sense strand
ugacauugccagugggagu

SEQ ID NO: 2659215 - RNA, 19 nt, Homo sapiens
  misc_RNA (1)...(19): siRNA sense strand
cuugaaagugacugaggaa

SEQ ID NO: 2659216 - RNA, 19 nt, Homo sapiens
  misc_RNA (1)...(19): siRNA sense strand
gcuucaaacuccagugcca

SEQ ID NO: 2659217 - RNA, 19 nt, Homo sapiens
  misc_RNA (1)...(19): siRNA sense strand
caacaugagucgagcacac

SEQ ID NO: 2659218 - RNA, 19 nt, Homo sapiens
  misc_RNA (1)...(19): siRNA sense strand
aggaagaccaugaagcaga

SEQ ID NO: 2659219 - RNA, 19 nt, Homo sapiens
  misc_RNA (1)...(19): siRNA sense strand
cggaaagugaguacugaga

SEQ ID NO: 2659220 - RNA, 19 nt, Homo sapiens
  misc_RNA (1)...(19): siRNA sense strand
cccuacagacagugaguuu

SEQ ID NO: 2659221 - RNA, 19 nt, Homo sapiens
  misc_RNA (1)...(19): siRNA sense strand
uguuagaugaucaggacuu

SEQ ID NO: 2659222 - RNA, 19 nt, Homo sapiens
  misc_RNA (1)...(19): siRNA sense strand
ggaacauagcccucgccaa

SEQ ID NO: 2659223 - RNA, 19 nt, Homo sapiens
  misc_RNA (1)...(19): siRNA sense strand
gaacauagcccucgccaac

SEQ ID NO: 2659224 - RNA, 19 nt, Homo sapiens
  misc_RNA (1)...(19): siRNA sense strand
guuaccaggcagugacauu

SEQ ID NO: 2659225 - RNA, 19 nt, Homo sapiens
  misc_RNA (1)...(19): siRNA sense strand
ugacaaaugaugagcaggu

SEQ ID NO: 2659226 - RNA, 19 nt, Homo sapiens
  misc_RNA (1)...(19): siRNA sense strand
gggauuggucagauagcga

SEQ ID NO: 2659227 - RNA, 19 nt, Homo sapiens
  misc_RNA (1)...(19): siRNA sense strand
gaaccuaacuucuugugga

SEQ ID NO: 2659228 - RNA, 19 nt, Homo sapiens
  misc_RNA (1)...(19): siRNA sense strand
agcggaaguuacagcagaa

SEQ ID NO: 2659229 - RNA, 19 nt, Homo sapiens
  misc_RNA (1)...(19): siRNA sense strand
aguaaaugggagugaaaga

SEQ ID NO: 2659230 - RNA, 19 nt, Homo sapiens
  misc_RNA (1)...(19): siRNA sense strand
ccucuggacaagaaguaaa

SEQ ID NO: 2659231 - RNA, 19 nt, Homo sapiens
  misc_RNA (1)...(19): siRNA sense strand
acaagaaguaaaugggagu

SEQ ID NO: 2659232 - RNA, 19 nt, Homo sapiens
  misc_RNA (1)...(19): siRNA sense strand
aggaagaugaagagcagga

SEQ ID NO: 2659233 - RNA, 19 nt, Homo sapiens
  misc_RNA (1)...(19): siRNA sense strand
aggaggaugaagaagagaa

SEQ ID NO: 2659234 - RNA, 19 nt, Homo sapiens
  misc_RNA (1)...(19): siRNA sense strand
acucagacagcgaagaaga

SEQ ID NO: 2659235 - RNA, 19 nt, Homo sapiens
  misc_RNA (1)...(19): siRNA sense strand
ccaucaaccuauacgagga

SEQ ID NO: 2659236 - RNA, 19 nt, Homo sapiens
  misc_RNA (1)...(19): siRNA sense strand
cagacagcgaagaagaaga

SEQ ID NO: 2659237 - RNA, 19 nt, Homo sapiens
  misc_RNA (1)...(19): siRNA sense strand
ggacaagaaguaaauggga

SEQ ID NO: 2659238 - RNA, 19 nt, Homo sapiens
  misc_RNA (1)...(19): siRNA sense strand
aagaugaagagcaggagga

SEQ ID NO: 2659239 - RNA, 19 nt, Homo sapiens
  misc_RNA (1)...(19): siRNA sense strand
agaggaagaugaagagcag

SEQ ID NO: 2659240 - RNA, 19 nt, Homo sapiens
  misc_RNA (1)...(19): siRNA sense strand
cuaaaauccugguggggaa

SEQ ID NO: 2659241 - RNA, 19 nt, Homo sapiens
  misc_RNA (1)...(19): siRNA sense strand
gcgacagggacguaggcaa

SEQ ID NO: 2659242 - RNA, 19 nt, Homo sapiens
  misc_RNA (1)...(19): siRNA sense strand
ggauagugcugcugcggca

SEQ ID NO: 2659243 - RNA, 19 nt, Homo sapiens
  misc_RNA (1)...(19): siRNA sense strand
gggacguaggcaagaguga

SEQ ID NO: 2659244 - RNA, 19 nt, Homo sapiens
  misc_RNA (1)...(19): siRNA sense strand
cugugcaucugguggacaa

SEQ ID NO: 2659245 - RNA, 19 nt, Homo sapiens
  misc_RNA (1)...(19): siRNA sense strand
gcuaagggccugaaugcca

SEQ ID NO: 2659246 - RNA, 19 nt, Homo sapiens
  misc_RNA (1)...(19): siRNA sense strand
ccuacgacuuccugcucaa

SEQ ID NO: 2659247 - RNA, 19 nt, Homo sapiens
  misc_RNA (1)...(19): siRNA sense strand
cgacagggacguaggcaag

SEQ ID NO: 2659248 - RNA, 19 nt, Homo sapiens
  misc_RNA (1)...(19): siRNA sense strand
gugagauccuggagagccu

SEQ ID NO: 2659249 - RNA, 19 nt, Homo sapiens
  misc_RNA (1)...(19): siRNA sense strand
ggauuaagaagauugagga

SEQ ID NO: 2659250 - RNA, 19 nt, Homo sapiens
  misc_RNA (1)...(19): siRNA sense strand
gcgaacaagccgagaguca

SEQ ID NO: 2659251 - RNA, 19 nt, Homo sapiens
  misc_RNA (1)...(19): siRNA sense strand
gaacuuaucaggagcgcua

SEQ ID NO: 2659252 - RNA, 19 nt, Homo sapiens
  misc_RNA (1)...(19): siRNA sense strand
uggagaaacagaugcaaua

SEQ ID NO: 2659253 - RNA, 19 nt, Homo sapiens
  misc_RNA (1)...(19): siRNA sense strand
agacagaacugaugaugau

SEQ ID NO: 2659254 - RNA, 19 nt, Homo sapiens
  misc_RNA (1)...(19): siRNA sense strand
gacaagagguucagauuga

SEQ ID NO: 2659255 - RNA, 19 nt, Homo sapiens
  misc_RNA (1)...(19): siRNA sense strand
ugauguuggcccagggaaa

SEQ ID NO: 2659256 - RNA, 19 nt, Homo sapiens
  misc_RNA (1)...(19): siRNA sense strand
aggaggaggaggaggaaga

SEQ ID NO: 2659257 - RNA, 19 nt, Homo sapiens
  misc_RNA (1)...(19): siRNA sense strand
caaaggaaggagcaggaaa

SEQ ID NO: 2659258 - RNA, 19 nt, Homo sapiens
  misc_RNA (1)...(19): siRNA sense strand
cagcagugccaguaagaau

SEQ ID NO: 2659259 - RNA, 19 nt, Homo sapiens
  misc_RNA (1)...(19): siRNA sense strand
gcaugaagcuggacgagca

SEQ ID NO: 2659260 - RNA, 19 nt, Homo sapiens
  misc_RNA (1)...(19): siRNA sense strand
gccgagagucagugggcaa

SEQ ID NO: 2659261 - RNA, 19 nt, Homo sapiens
  misc_RNA (1)...(19): siRNA sense strand
ccgaggagguguaccggaa

SEQ ID NO: 2659262 - RNA, 19 nt, Homo sapiens
  misc_RNA (1)...(19): siRNA sense strand
gguggcaguuggagaaaca

SEQ ID NO: 2659263 - RNA, 19 nt, Homo sapiens
  misc_RNA (1)...(19): siRNA sense strand
cgaugagauuccagugaca

SEQ ID NO: 2659264 - RNA, 19 nt, Homo sapiens
  misc_RNA (1)...(19): siRNA sense strand
ccaaggagguagaggcaag

SEQ ID NO: 2659265 - RNA, 19 nt, Homo sapiens
  misc_RNA (1)...(19): siRNA sense strand
gggacaagagguucagauu

SEQ ID NO: 2659266 - RNA, 19 nt, Homo sapiens
  misc_RNA (1)...(19): siRNA sense strand
gguauuguuucgaaagaca

SEQ ID NO: 2659267 - RNA, 19 nt, Homo sapiens
  misc_RNA (1)...(19): siRNA sense strand
ggagugaggaggaggagga

SEQ ID NO: 2659268 - RNA, 19 nt, Homo sapiens
  misc_RNA (1)...(19): siRNA sense strand
gggugguauuguuucgaaa

SEQ ID NO: 2659269 - RNA, 19 nt, Homo sapiens
  misc_RNA (1)...(19): siRNA sense strand
gcgaagaaggccaaguuga

SEQ ID NO: 2659270 - RNA, 19 nt, Homo sapiens
  misc_RNA (1)...(19): siRNA sense strand
ccggacaguucgagaucau

SEQ ID NO: 2659271 - RNA, 19 nt, Homo sapiens
  misc_RNA (1)...(19): siRNA sense strand
caauaagagucuagucacu

SEQ ID NO: 2659272 - RNA, 19 nt, Homo sapiens
  misc_RNA (1)...(19): siRNA sense strand
ccaucaauguccagcgcau

SEQ ID NO: 2659273 - RNA, 19 nt, Homo sapiens
  misc_RNA (1)...(19): siRNA sense strand
agagaagaaccuccggaaa

SEQ ID NO: 2659274 - RNA, 19 nt, Homo sapiens
  misc_RNA (1)...(19): siRNA sense strand
agucagagggccagguaca

SEQ ID NO: 2659275 - RNA, 19 nt, Homo sapiens
  misc_RNA (1)...(19): siRNA sense strand
gugaggaggaggaggagga

SEQ ID NO: 2659276 - RNA, 19 nt, Homo sapiens
  misc_RNA (1)...(19): siRNA sense strand
gaacauacuccuuggcagu

SEQ ID NO: 2659277 - RNA, 19 nt, Homo sapiens
  misc_RNA (1)...(19): siRNA sense strand
cuguaggccuggaugagaa

SEQ ID NO: 2659278 - RNA, 19 nt, Homo sapiens
  misc_RNA (1)...(19): siRNA sense strand
gccagaagaaggagacaga

SEQ ID NO: 2659279 - RNA, 19 nt, Homo sapiens
  misc_RNA (1)...(19): siRNA sense strand
augaggaagacgugaguga

SEQ ID NO: 2659280 - RNA, 19 nt, Homo sapiens
  misc_RNA (1)...(19): siRNA sense strand
ggacacacuaucauggaau

SEQ ID NO: 2659281 - RNA, 19 nt, Homo sapiens
  misc_RNA (1)...(19): siRNA sense strand
aagccaaacuucaggagca

SEQ ID NO: 2659282 - RNA, 19 nt, Homo sapiens
  misc_RNA (1)...(19): siRNA sense strand
cgcucaagaauguggagaa

SEQ ID NO: 2659283 - RNA, 19 nt, Homo sapiens
  misc_RNA (1)...(19): siRNA sense strand
aggaggaggaggaggagga

SEQ ID NO: 2659284 - RNA, 19 nt, Homo sapiens
  misc_RNA (1)...(19): siRNA sense strand
ggaggaggaagaugagaca

SEQ ID NO: 2659285 - RNA, 19 nt, Homo sapiens
  misc_RNA (1)...(19): siRNA sense strand
ggaaaugguugggaugaga

SEQ ID NO: 2659286 - RNA, 19 nt, Homo sapiens
  misc_RNA (1)...(19): siRNA sense strand
ccaaagacccuguggagcu

SEQ ID NO: 2659287 - RNA, 19 nt, Homo sapiens
  misc_RNA (1)...(19): siRNA sense strand
agguaaagcaguaugaacu

SEQ ID NO: 2659288 - RNA, 19 nt, Homo sapiens
  misc_RNA (1)...(19): siRNA sense strand
gggcagaucaagucauuca

SEQ ID NO: 2659289 - RNA, 19 nt, Homo sapiens
  misc_RNA (1)...(19): siRNA sense strand
gcccaacugcagaagguaa

SEQ ID NO: 2659290 - RNA, 19 nt, Homo sapiens
  misc_RNA (1)...(19): siRNA sense strand
ccaugaagcagcaccagaa

SEQ ID NO: 2659291 - RNA, 19 nt, Homo sapiens
  misc_RNA (1)...(19): siRNA sense strand
gugaccagauuguggcuau

SEQ ID NO: 2659292 - RNA, 19 nt, Homo sapiens
  misc_RNA (1)...(19): siRNA sense strand
ggccagaacagaaucacaa

SEQ ID NO: 2659293 - RNA, 19 nt, Homo sapiens
  misc_RNA (1)...(19): siRNA sense strand
gaauaagcuucuuucccaa

SEQ ID NO: 2659294 - RNA, 19 nt, Homo sapiens
  misc_RNA (1)...(19): siRNA sense strand
gcaggaagagagcgcaaau

SEQ ID NO: 2659295 - RNA, 19 nt, Homo sapiens
  misc_RNA (1)...(19): siRNA sense strand
augcaauaccucucagcaa

SEQ ID NO: 2659296 - RNA, 19 nt, Homo sapiens
  misc_RNA (1)...(19): siRNA sense strand
cuguuaaggaugugauguu

SEQ ID NO: 2659297 - RNA, 19 nt, Homo sapiens
  misc_RNA (1)...(19): siRNA sense strand
cuccaaugaucaaggcaga

SEQ ID NO: 2659298 - RNA, 19 nt, Homo sapiens
  misc_RNA (1)...(19): siRNA sense strand
gggaacaaaggaaggagca

SEQ ID NO: 2659299 - RNA, 19 nt, Homo sapiens
  misc_RNA (1)...(19): siRNA sense strand
cagaagaaggagacagaug

SEQ ID NO: 2659300 - RNA, 19 nt, Homo sapiens
  misc_RNA (1)...(19): siRNA sense strand
gaugagaagcagucggcca

SEQ ID NO: 2659301 - RNA, 19 nt, Homo sapiens
  misc_RNA (1)...(19): siRNA sense strand
aggaagagagcgcaaauga

SEQ ID NO: 2659302 - RNA, 19 nt, Homo sapiens
  misc_RNA (1)...(19): siRNA sense strand
cccaacugcagaagguaaa

SEQ ID NO: 2659303 - RNA, 19 nt, Homo sapiens
  misc_RNA (1)...(19): siRNA sense strand
caccaagggcucugcaauu

SEQ ID NO: 2659304 - RNA, 19 nt, Homo sapiens
  misc_RNA (1)...(19): siRNA sense strand
gguacagggagaacgaaca

SEQ ID NO: 2659305 - RNA, 19 nt, Homo sapiens
  misc_RNA (1)...(19): siRNA sense strand
cgaccuagucagaagaucu

SEQ ID NO: 2659306 - RNA, 19 nt, Homo sapiens
  misc_RNA (1)...(19): siRNA sense strand
aggucaucaaagagaagaa

SEQ ID NO: 2659307 - RNA, 19 nt, Homo sapiens
  misc_RNA (1)...(19): siRNA sense strand
ccagggaaaugguugggau

SEQ ID NO: 2659308 - RNA, 19 nt, Homo sapiens
  misc_RNA (1)...(19): siRNA sense strand
ggaagagagcgcaaaugau

SEQ ID NO: 2659309 - RNA, 19 nt, Homo sapiens
  misc_RNA (1)...(19): siRNA sense strand
uggcuauuaaugaggaaga

SEQ ID NO: 2659310 - RNA, 19 nt, Homo sapiens
  misc_RNA (1)...(19): siRNA sense strand
cagacaugucagagaugau

SEQ ID NO: 2659311 - RNA, 19 nt, Homo sapiens
  misc_RNA (1)...(19): siRNA sense strand
agggccagguacagggaga

SEQ ID NO: 2659312 - RNA, 19 nt, Homo sapiens
  misc_RNA (1)...(19): siRNA sense strand
gagaaggcgcagcuggaga

SEQ ID NO: 2659313 - RNA, 19 nt, Homo sapiens
  misc_RNA (1)...(19): siRNA sense strand
gaauggaucccaagccaga

SEQ ID NO: 2659314 - RNA, 19 nt, Homo sapiens
  misc_RNA (1)...(19): siRNA sense strand
gcucaagaauguggagaag

SEQ ID NO: 2659315 - RNA, 19 nt, Homo sapiens
  misc_RNA (1)...(19): siRNA sense strand
gaagcaagcucgaagagac

SEQ ID NO: 2659316 - RNA, 19 nt, Homo sapiens
  misc_RNA (1)...(19): siRNA sense strand
uaucaggagcgcuaaggaa

SEQ ID NO: 2659317 - RNA, 19 nt, Homo sapiens
  misc_RNA (1)...(19): siRNA sense strand
gucagaagaucucgcucaa

SEQ ID NO: 2659318 - RNA, 19 nt, Homo sapiens
  misc_RNA (1)...(19): siRNA sense strand
guuaugagguagucccuga

SEQ ID NO: 2659319 - RNA, 19 nt, Homo sapiens
  misc_RNA (1)...(19): siRNA sense strand
acgccgagcucaaggacua

SEQ ID NO: 2659320 - RNA, 19 nt, Homo sapiens
  misc_RNA (1)...(19): siRNA sense strand
acacggaaccuguggaaga

SEQ ID NO: 2659321 - RNA, 19 nt, Homo sapiens
  misc_RNA (1)...(19): siRNA sense strand
gcgcaugggacuacggcau

SEQ ID NO: 2659322 - RNA, 19 nt, Homo sapiens
  misc_RNA (1)...(19): siRNA sense strand
ggaagaacauugugguccu

SEQ ID NO: 2659323 - RNA, 19 nt, Homo sapiens
  misc_RNA (1)...(19): siRNA sense strand
acacagaagaaucgcauga

SEQ ID NO: 2659324 - RNA, 19 nt, Homo sapiens
  misc_RNA (1)...(19): siRNA sense strand
ucaccaacgccgagcucaa

SEQ ID NO: 2659325 - RNA, 19 nt, Homo sapiens
  misc_RNA (1)...(19): siRNA sense strand
ggaucuugugugugauaau

SEQ ID NO: 2659326 - RNA, 19 nt, Homo sapiens
  misc_RNA (1)...(19): siRNA sense strand
ggacacggaaccuguggaa

SEQ ID NO: 2659327 - RNA, 19 nt, Homo sapiens
  misc_RNA (1)...(19): siRNA sense strand
cggaaccuguggaagaaca

SEQ ID NO: 2659328 - RNA, 19 nt, Homo sapiens
  misc_RNA (1)...(19): siRNA sense strand
uuggauuaaucuuuggcua

SEQ ID NO: 2659329 - RNA, 19 nt, Homo sapiens
  misc_RNA (1)...(19): siRNA sense strand
ccuuguaugcuuuacgaau

SEQ ID NO: 2659330 - RNA, 19 nt, Homo sapiens
  misc_RNA (1)...(19): siRNA sense strand
uccucaaccugauuggaaa

SEQ ID NO: 2659331 - RNA, 19 nt, Homo sapiens
  misc_RNA (1)...(19): siRNA sense strand
gggaguaccucauggccaa

SEQ ID NO: 2659332 - RNA, 19 nt, Homo sapiens
  misc_RNA (1)...(19): siRNA sense strand
cugccauacuccaggccua

SEQ ID NO: 2659333 - RNA, 19 nt, Homo sapiens
  misc_RNA (1)...(19): siRNA sense strand
cuggcaaccucgugggcau

SEQ ID NO: 2659334 - RNA, 19 nt, Homo sapiens
  misc_RNA (1)...(19): siRNA sense strand
ggucuaaccuggucccuca

SEQ ID NO: 2659335 - RNA, 19 nt, Homo sapiens
  misc_RNA (1)...(19): siRNA sense strand
ccauaaggauagcaggaug

SEQ ID NO: 2659336 - RNA, 19 nt, Homo sapiens
  misc_RNA (1)...(19): siRNA sense strand
ucaacuaucugcugagcca

SEQ ID NO: 2659337 - RNA, 19 nt, Homo sapiens
  misc_RNA (1)...(19): siRNA sense strand
cauaaggauagcaggaugu

SEQ ID NO: 2659338 - RNA, 19 nt, Homo sapiens
  misc_RNA (1)...(19): siRNA sense strand
aacugauccugaagacaaa

SEQ ID NO: 2659339 - RNA, 19 nt, Homo sapiens
  misc_RNA (1)...(19): siRNA sense strand
gcacugaggccacaggcuu

SEQ ID NO: 2659340 - RNA, 19 nt, Homo sapiens
  misc_RNA (1)...(19): siRNA sense strand
agucaaagcugcugggcaa

SEQ ID NO: 2659341 - RNA, 19 nt, Homo sapiens
  misc_RNA (1)...(19): siRNA sense strand
cugaagaagauguggauaa

SEQ ID NO: 2659342 - RNA, 19 nt, Homo sapiens
  misc_RNA (1)...(19): siRNA sense strand
agaagaagaagcagagaaa

SEQ ID NO: 2659343 - RNA, 19 nt, Homo sapiens
  misc_RNA (1)...(19): siRNA sense strand
gagcaaaagcaaugggaaa

SEQ ID NO: 2659344 - RNA, 19 nt, Homo sapiens
  misc_RNA (1)...(19): siRNA sense strand
ggacaagaagaaaggcaaa

SEQ ID NO: 2659345 - RNA, 19 nt, Homo sapiens
  misc_RNA (1)...(19): siRNA sense strand
agaaagauggaaaggauaa

SEQ ID NO: 2659346 - RNA, 19 nt, Homo sapiens
  misc_RNA (1)...(19): siRNA sense strand
aagaagaagcagagaaaca

SEQ ID NO: 2659347 - RNA, 19 nt, Homo sapiens
  misc_RNA (1)...(19): siRNA sense strand
gcuuuaaaggugagaagaa

SEQ ID NO: 2659348 - RNA, 19 nt, Homo sapiens
  misc_RNA (1)...(19): siRNA sense strand
uaaagaagauggaggccua

SEQ ID NO: 2659349 - RNA, 19 nt, Homo sapiens
  misc_RNA (1)...(19): siRNA sense strand
guaaaugagaggaaggaau

SEQ ID NO: 2659350 - RNA, 19 nt, Homo sapiens
  misc_RNA (1)...(19): siRNA sense strand
uggaaaggauaauggagaa

SEQ ID NO: 2659351 - RNA, 19 nt, Homo sapiens
  misc_RNA (1)...(19): siRNA sense strand
gaugagaaauguaagggaa

SEQ ID NO: 2659352 - RNA, 19 nt, Homo sapiens
  misc_RNA (1)...(19): siRNA sense strand
caaucaagggugugagcaa

SEQ ID NO: 2659353 - RNA, 19 nt, Homo sapiens
  misc_RNA (1)...(19): siRNA sense strand
ccacaggagucuaagaaaa

SEQ ID NO: 2659354 - RNA, 19 nt, Homo sapiens
  misc_RNA (1)...(19): siRNA sense strand
ucugaaaguuggugaucua

SEQ ID NO: 2659355 - RNA, 19 nt, Homo sapiens
  misc_RNA (1)...(19): siRNA sense strand
cagacgagaaacugagaaa

SEQ ID NO: 2659356 - RNA, 19 nt, Homo sapiens
  misc_RNA (1)...(19): siRNA sense strand
ggaaaggauaauggagaaa

SEQ ID NO: 2659357 - RNA, 19 nt, Homo sapiens
  misc_RNA (1)...(19): siRNA sense strand
agucaaagcccaagacaca

SEQ ID NO: 2659358 - RNA, 19 nt, Homo sapiens
  misc_RNA (1)...(19): siRNA sense strand
guguauuaaugcuggagaa

SEQ ID NO: 2659359 - RNA, 19 nt, Homo sapiens
  misc_RNA (1)...(19): siRNA sense strand
aggcauuacuguuagacaa

SEQ ID NO: 2659360 - RNA, 19 nt, Homo sapiens
  misc_RNA (1)...(19): siRNA sense strand
uagagaagaaagauggaaa

SEQ ID NO: 2659361 - RNA, 19 nt, Homo sapiens
  misc_RNA (1)...(19): siRNA sense strand
augagaaauguaagggaaa

SEQ ID NO: 2659362 - RNA, 19 nt, Homo sapiens
  misc_RNA (1)...(19): siRNA sense strand
gcuccaaggcccugagaga

SEQ ID NO: 2659363 - RNA, 19 nt, Homo sapiens
  misc_RNA (1)...(19): siRNA sense strand
ccaccauucuccagagcaa

SEQ ID NO: 2659364 - RNA, 19 nt, Homo sapiens
  misc_RNA (1)...(19): siRNA sense strand
acuaagaaucacaggucaa

SEQ ID NO: 2659365 - RNA, 19 nt, Homo sapiens
  misc_RNA (1)...(19): siRNA sense strand
ucccaaugaaugugagaaa

SEQ ID NO: 2659366 - RNA, 19 nt, Homo sapiens
  misc_RNA (1)...(19): siRNA sense strand
aggaaggacaggaagacaa

SEQ ID NO: 2659367 - RNA, 19 nt, Homo sapiens
  misc_RNA (1)...(19): siRNA sense strand
aagaaagauggaaaggaua

SEQ ID NO: 2659368 - RNA, 19 nt, Homo sapiens
  misc_RNA (1)...(19): siRNA sense strand
ccaacaacaaagugucaaa

SEQ ID NO: 2659369 - RNA, 19 nt, Homo sapiens
  misc_RNA (1)...(19): siRNA sense strand
gcaggagacagacgagaaa

SEQ ID NO: 2659370 - RNA, 19 nt, Homo sapiens
  misc_RNA (1)...(19): siRNA sense strand
agaagaacaugcuggugaa

SEQ ID NO: 2659371 - RNA, 19 nt, Homo sapiens
  misc_RNA (1)...(19): siRNA sense strand
agaacaugcuggugaaguu

SEQ ID NO: 2659372 - RNA, 19 nt, Homo sapiens
  misc_RNA (1)...(19): siRNA sense strand
cuuuaauaauggagagauc

SEQ ID NO: 2659373 - RNA, 19 nt, Homo sapiens
  misc_RNA (1)...(19): siRNA sense strand
cuguuagacaagugcaaua

SEQ ID NO: 2659374 - RNA, 19 nt, Homo sapiens
  misc_RNA (1)...(19): siRNA sense strand
gagaagaacaugcugguga

SEQ ID NO: 2659375 - RNA, 19 nt, Homo sapiens
  misc_RNA (1)...(19): siRNA sense strand
gaaagcacauggagcgaga

SEQ ID NO: 2659376 - RNA, 19 nt, Homo sapiens
  misc_RNA (1)...(19): siRNA sense strand
gguggaugccagugagaca

SEQ ID NO: 2659377 - RNA, 19 nt, Homo sapiens
  misc_RNA (1)...(19): siRNA sense strand
acagugaauuugagugaga

SEQ ID NO: 2659378 - RNA, 19 nt, Homo sapiens
  misc_RNA (1)...(19): siRNA sense strand
gggcaagaaagcaagccaa

SEQ ID NO: 2659379 - RNA, 19 nt, Homo sapiens
  misc_RNA (1)...(19): siRNA sense strand
caaagaggaaggacaggaa

SEQ ID NO: 2659380 - RNA, 19 nt, Homo sapiens
  misc_RNA (1)...(19): siRNA sense strand
augaagaugccaagucaaa

SEQ ID NO: 2659381 - RNA, 19 nt, Homo sapiens
  misc_RNA (1)...(19): siRNA sense strand
cccaagacacagaguuuaa

SEQ ID NO: 2659382 - RNA, 19 nt, Homo sapiens
  misc_RNA (1)...(19): siRNA sense strand
caauagugguggcaguaau

SEQ ID NO: 2659383 - RNA, 19 nt, Homo sapiens
  misc_RNA (1)...(19): siRNA sense strand
aagaagaagaagcagagaa

SEQ ID NO: 2659384 - RNA, 19 nt, Homo sapiens
  misc_RNA (1)...(19): siRNA sense strand
acgacaugcucuucugaaa

SEQ ID NO: 2659385 - RNA, 19 nt, Homo sapiens
  misc_RNA (1)...(19): siRNA sense strand
acaaagaaagggaaauaca

SEQ ID NO: 2659386 - RNA, 19 nt, Homo sapiens
  misc_RNA (1)...(19): siRNA sense strand
agugaaagucaaagcccaa

SEQ ID NO: 2659387 - RNA, 19 nt, Homo sapiens
  misc_RNA (1)...(19): siRNA sense strand
agcuugaaguccugugaaa

SEQ ID NO: 2659388 - RNA, 19 nt, Homo sapiens
  misc_RNA (1)...(19): siRNA sense strand
ggucaaauuaguaccaaca

SEQ ID NO: 2659389 - RNA, 19 nt, Homo sapiens
  misc_RNA (1)...(19): siRNA sense strand
gcagaugugcagagauuca

SEQ ID NO: 2659390 - RNA, 19 nt, Homo sapiens
  misc_RNA (1)...(19): siRNA sense strand
ggcccugagagaugagaaa

SEQ ID NO: 2659391 - RNA, 19 nt, Homo sapiens
  misc_RNA (1)...(19): siRNA sense strand
ugaaguuauuccugggaca

SEQ ID NO: 2659392 - RNA, 19 nt, Homo sapiens
  misc_RNA (1)...(19): siRNA sense strand
ggaugaugaccaacgggaa

SEQ ID NO: 2659393 - RNA, 19 nt, Homo sapiens
  misc_RNA (1)...(19): siRNA sense strand
gaugaugaccaacgggaau

SEQ ID NO: 2659394 - RNA, 19 nt, Homo sapiens
  misc_RNA (1)...(19): siRNA sense strand
auauagggauucaguguau

SEQ ID NO: 2659395 - RNA, 19 nt, Homo sapiens
  misc_RNA (1)...(19): siRNA sense strand
uggacaagaagaaaggcaa

SEQ ID NO: 2659396 - RNA, 19 nt, Homo sapiens
  misc_RNA (1)...(19): siRNA sense strand
gugucaaaaucaagaaaga

SEQ ID NO: 2659397 - RNA, 19 nt, Homo sapiens
  misc_RNA (1)...(19): siRNA sense strand
guccacaaagaaagggaaa

SEQ ID NO: 2659398 - RNA, 19 nt, Homo sapiens
  misc_RNA (1)...(19): siRNA sense strand
ccugaaaauucgauaugaa

SEQ ID NO: 2659399 - RNA, 19 nt, Homo sapiens
  misc_RNA (1)...(19): siRNA sense strand
agucagauacagugaagau

SEQ ID NO: 2659400 - RNA, 19 nt, Homo sapiens
  misc_RNA (1)...(19): siRNA sense strand
gcaacgagccaguggagca

SEQ ID NO: 2659401 - RNA, 19 nt, Homo sapiens
  misc_RNA (1)...(19): siRNA sense strand
ucgacagucucgugggcaa

SEQ ID NO: 2659402 - RNA, 19 nt, Homo sapiens
  misc_RNA (1)...(19): siRNA sense strand
aaggaugaauggaagggua

SEQ ID NO: 2659403 - RNA, 19 nt, Homo sapiens
  misc_RNA (1)...(19): siRNA sense strand
aggaugaauggaaggguau

SEQ ID NO: 2659404 - RNA, 19 nt, Homo sapiens
  misc_RNA (1)...(19): siRNA sense strand
guggagcaguggaagggua

SEQ ID NO: 2659405 - RNA, 19 nt, Homo sapiens
  misc_RNA (1)...(19): siRNA sense strand
uaagagaguuuuagcgcua

SEQ ID NO: 2659406 - RNA, 19 nt, Homo sapiens
  misc_RNA (1)...(19): siRNA sense strand
gaaggaaggcaacgagcca

SEQ ID NO: 2659407 - RNA, 19 nt, Homo sapiens
  misc_RNA (1)...(19): siRNA sense strand
caacacggcuggaaggaag

SEQ ID NO: 2659408 - RNA, 19 nt, Homo sapiens
  misc_RNA (1)...(19): siRNA sense strand
guccaagagaacuggcauu

SEQ ID NO: 2659409 - RNA, 19 nt, Homo sapiens
  misc_RNA (1)...(19): siRNA sense strand
gaacaugguaccaaggaug

SEQ ID NO: 2659410 - RNA, 19 nt, Homo sapiens
  misc_RNA (1)...(19): siRNA sense strand
aggaggaaggagagaguaa

SEQ ID NO: 2659411 - RNA, 19 nt, Homo sapiens
  misc_RNA (1)...(19): siRNA sense strand
agaaagaggaggaggagga

SEQ ID NO: 2659412 - RNA, 19 nt, Homo sapiens
  misc_RNA (1)...(19): siRNA sense strand
aggaggaggaagaggaaau

SEQ ID NO: 2659413 - RNA, 19 nt, Homo sapiens
  misc_RNA (1)...(19): siRNA sense strand
agaugaagaaggaggaaga

SEQ ID NO: 2659414 - RNA, 19 nt, Homo sapiens
  misc_RNA (1)...(19): siRNA sense strand
aggaagaggaaaugaaaca

SEQ ID NO: 2659415 - RNA, 19 nt, Homo sapiens
  misc_RNA (1)...(19): siRNA sense strand
ggaacaagaaugaggagga

SEQ ID NO: 2659416 - RNA, 19 nt, Homo sapiens
  misc_RNA (1)...(19): siRNA sense strand
cagcaagagaugaaggaga

SEQ ID NO: 2659417 - RNA, 19 nt, Homo sapiens
  misc_RNA (1)...(19): siRNA sense strand
aggaggaggaggaggaaga

SEQ ID NO: 2659418 - RNA, 19 nt, Homo sapiens
  misc_RNA (1)...(19): siRNA sense strand
aggaaaugaaacagaaaga

SEQ ID NO: 2659419 - RNA, 19 nt, Homo sapiens
  misc_RNA (1)...(19): siRNA sense strand
aggaggaggaggagaugaa

SEQ ID NO: 2659420 - RNA, 19 nt, Homo sapiens
  misc_RNA (1)...(19): siRNA sense strand
aggaagagaaggaggagga

SEQ ID NO: 2659421 - RNA, 19 nt, Homo sapiens
  misc_RNA (1)...(19): siRNA sense strand
agaaugaggaggaaggaga

SEQ ID NO: 2659422 - RNA, 19 nt, Homo sapiens
  misc_RNA (1)...(19): siRNA sense strand
acuccaaggaccagaggaa

SEQ ID NO: 2659423 - RNA, 19 nt, Homo sapiens
  misc_RNA (1)...(19): siRNA sense strand
agaaggaggaggaggagau

SEQ ID NO: 2659424 - RNA, 19 nt, Homo sapiens
  misc_RNA (1)...(19): siRNA sense strand
aggagaaggaggaggagga

SEQ ID NO: 2659425 - RNA, 19 nt, Homo sapiens
  misc_RNA (1)...(19): siRNA sense strand
aggaggaggagaugaagaa

SEQ ID NO: 2659426 - RNA, 19 nt, Homo sapiens
  misc_RNA (1)...(19): siRNA sense strand
aggaggaagaaaugaagaa

SEQ ID NO: 2659427 - RNA, 19 nt, Homo sapiens
  misc_RNA (1)...(19): siRNA sense strand
gccagaaaccagaaggaga

SEQ ID NO: 2659428 - RNA, 19 nt, Homo sapiens
  misc_RNA (1)...(19): siRNA sense strand
agaaggaggaggaggagga

SEQ ID NO: 2659429 - RNA, 19 nt, Homo sapiens
  misc_RNA (1)...(19): siRNA sense strand
gaggaggagauaaggaaca

SEQ ID NO: 2659430 - RNA, 19 nt, Homo sapiens
  misc_RNA (1)...(19): siRNA sense strand
aagagaaggaggaggagga

SEQ ID NO: 2659431 - RNA, 19 nt, Homo sapiens
  misc_RNA (1)...(19): siRNA sense strand
agaggaaaugaaacagaaa

SEQ ID NO: 2659432 - RNA, 19 nt, Homo sapiens
  misc_RNA (1)...(19): siRNA sense strand
aagaggaggaggaggagau

SEQ ID NO: 2659433 - RNA, 19 nt, Homo sapiens
  misc_RNA (1)...(19): siRNA sense strand
aggaugaagaagaugaaga

SEQ ID NO: 2659434 - RNA, 19 nt, Homo sapiens
  misc_RNA (1)...(19): siRNA sense strand
agaugaaggagaaggagga

SEQ ID NO: 2659435 - RNA, 19 nt, Homo sapiens
  misc_RNA (1)...(19): siRNA sense strand
aggaggaagaggaaaugaa

SEQ ID NO: 2659436 - RNA, 19 nt, Homo sapiens
  misc_RNA (1)...(19): siRNA sense strand
cuagaugagcugauggaga

SEQ ID NO: 2659437 - RNA, 19 nt, Homo sapiens
  misc_RNA (1)...(19): siRNA sense strand
gagcccuggccgagguuaa

SEQ ID NO: 2659438 - RNA, 19 nt, Homo sapiens
  misc_RNA (1)...(19): siRNA sense strand
gugaagaugaagaccaaga

SEQ ID NO: 2659439 - RNA, 19 nt, Homo sapiens
  misc_RNA (1)...(19): siRNA sense strand
agaugaagaccaagaggca

SEQ ID NO: 2659440 - RNA, 19 nt, Homo sapiens
  misc_RNA (1)...(19): siRNA sense strand
ugaaacagaaagaggagga

SEQ ID NO: 2659441 - RNA, 19 nt, Homo sapiens
  misc_RNA (1)...(19): siRNA sense strand
augaaauccguaaggaauu

SEQ ID NO: 2659442 - RNA, 19 nt, Homo sapiens
  misc_RNA (1)...(19): siRNA sense strand
gaaaugaagaagaaggaag

SEQ ID NO: 2659443 - RNA, 19 nt, Homo sapiens
  misc_RNA (1)...(19): siRNA sense strand
cucuuauggucaacagaaa

SEQ ID NO: 2659444 - RNA, 19 nt, Homo sapiens
  misc_RNA (1)...(19): siRNA sense strand
augaagaguacuacaguga

SEQ ID NO: 2659445 - RNA, 19 nt, Homo sapiens
  misc_RNA (1)...(19): siRNA sense strand
ugaaggagaaggaggagga

SEQ ID NO: 2659446 - RNA, 19 nt, Homo sapiens
  misc_RNA (1)...(19): siRNA sense strand
agaaggaagagaaggagga

SEQ ID NO: 2659447 - RNA, 19 nt, Homo sapiens
  misc_RNA (1)...(19): siRNA sense strand
aggaggaggagauaaggaa

SEQ ID NO: 2659448 - RNA, 19 nt, Homo sapiens
  misc_RNA (1)...(19): siRNA sense strand
gcuggagcggccugagaua

SEQ ID NO: 2659449 - RNA, 19 nt, Homo sapiens
  misc_RNA (1)...(19): siRNA sense strand
augaagaaggaggaagaaa

SEQ ID NO: 2659450 - RNA, 19 nt, Homo sapiens
  misc_RNA (1)...(19): siRNA sense strand
aagaaaugaagaagaagga

SEQ ID NO: 2659451 - RNA, 19 nt, Homo sapiens
  misc_RNA (1)...(19): siRNA sense strand
aagaaagugaagaugaaga

SEQ ID NO: 2659452 - RNA, 19 nt, Homo sapiens
  misc_RNA (1)...(19): siRNA sense strand
aggaggagauaaggaacaa

SEQ ID NO: 2659453 - RNA, 19 nt, Homo sapiens
  misc_RNA (1)...(19): siRNA sense strand
cucaaaggccugucggaau

SEQ ID NO: 2659454 - RNA, 19 nt, Homo sapiens
  misc_RNA (1)...(19): siRNA sense strand
ugaggaagaaagugaagau

SEQ ID NO: 2659455 - RNA, 19 nt, Homo sapiens
  misc_RNA (1)...(19): siRNA sense strand
gaaaccagaaggagagcca

SEQ ID NO: 2659456 - RNA, 19 nt, Homo sapiens
  misc_RNA (1)...(19): siRNA sense strand
cacaggucguuuaggacaa

SEQ ID NO: 2659457 - RNA, 19 nt, Homo sapiens
  misc_RNA (1)...(19): siRNA sense strand
agagaguaaggaugaagaa

SEQ ID NO: 2659458 - RNA, 19 nt, Homo sapiens
  misc_RNA (1)...(19): siRNA sense strand
gcacaggucguuuaggaca

SEQ ID NO: 2659459 - RNA, 19 nt, Homo sapiens
  misc_RNA (1)...(19): siRNA sense strand
gaggaggaggagaugaaga

SEQ ID NO: 2659460 - RNA, 19 nt, Homo sapiens
  misc_RNA (1)...(19): siRNA sense strand
agaagaugaagaugaggau

SEQ ID NO: 2659461 - RNA, 19 nt, Homo sapiens
  misc_RNA (1)...(19): siRNA sense strand
aggcagaggaggagaggau

SEQ ID NO: 2659462 - RNA, 19 nt, Homo sapiens
  misc_RNA (1)...(19): siRNA sense strand
caaagaaggcagaggagga

SEQ ID NO: 2659463 - RNA, 19 nt, Homo sapiens
  misc_RNA (1)...(19): siRNA sense strand
ucaucaagaaccugggcaa

SEQ ID NO: 2659464 - RNA, 19 nt, Homo sapiens
  misc_RNA (1)...(19): siRNA sense strand
gagaauacgugcugggcag

SEQ ID NO: 2659465 - RNA, 19 nt, Homo sapiens
  misc_RNA (1)...(19): siRNA sense strand
auaaagaacgagaggccga

SEQ ID NO: 2659466 - RNA, 19 nt, Homo sapiens
  misc_RNA (1)...(19): siRNA sense strand
aggaggagaggaugagaga

SEQ ID NO: 2659467 - RNA, 19 nt, Homo sapiens
  misc_RNA (1)...(19): siRNA sense strand
cugaggugaccgaggcaau

SEQ ID NO: 2659468 - RNA, 19 nt, Homo sapiens
  misc_RNA (1)...(19): siRNA sense strand
gcucauugggcuacgcgua

SEQ ID NO: 2659469 - RNA, 19 nt, Homo sapiens
  misc_RNA (1)...(19): siRNA sense strand
gcauaaagaacgagaggcc

SEQ ID NO: 2659470 - RNA, 19 nt, Homo sapiens
  misc_RNA (1)...(19): siRNA sense strand
cggaugagacccucgguga

SEQ ID NO: 2659471 - RNA, 19 nt, Homo sapiens
  misc_RNA (1)...(19): siRNA sense strand
aggaagacaccgacgagga

SEQ ID NO: 2659472 - RNA, 19 nt, Homo sapiens
  misc_RNA (1)...(19): siRNA sense strand
acuaaaugugacagugaaa

SEQ ID NO: 2659473 - RNA, 19 nt, Homo sapiens
  misc_RNA (1)...(19): siRNA sense strand
ccucaucauaugugguaaa

SEQ ID NO: 2659474 - RNA, 19 nt, Homo sapiens
  misc_RNA (1)...(19): siRNA sense strand
gugaaugugaugagcaauu

SEQ ID NO: 2659475 - RNA, 19 nt, Homo sapiens
  misc_RNA (1)...(19): siRNA sense strand
ugguauuugccaagauaaa

SEQ ID NO: 2659476 - RNA, 19 nt, Homo sapiens
  misc_RNA (1)...(19): siRNA sense strand
ugguaaaugucuuagugaa

SEQ ID NO: 2659477 - RNA, 19 nt, Homo sapiens
  misc_RNA (1)...(19): siRNA sense strand
aauagauacuucaggcaau

SEQ ID NO: 2659478 - RNA, 19 nt, Homo sapiens
  misc_RNA (1)...(19): siRNA sense strand
gcucagaaauaauuggcca

SEQ ID NO: 2659479 - RNA, 19 nt, Homo sapiens
  misc_RNA (1)...(19): siRNA sense strand
uugugaaugugaugagcaa

SEQ ID NO: 2659480 - RNA, 19 nt, Homo sapiens
  misc_RNA (1)...(19): siRNA sense strand
gcaacauguaucuggaaaa

SEQ ID NO: 2659481 - RNA, 19 nt, Homo sapiens
  misc_RNA (1)...(19): siRNA sense strand
gguaaaugucuuagugaag

SEQ ID NO: 2659482 - RNA, 19 nt, Homo sapiens
  misc_RNA (1)...(19): siRNA sense strand
gcaaaauaccacaacggaa

SEQ ID NO: 2659483 - RNA, 19 nt, Homo sapiens
  misc_RNA (1)...(19): siRNA sense strand
guggcugaguguugggaca

SEQ ID NO: 2659484 - RNA, 19 nt, Homo sapiens
  misc_RNA (1)...(19): siRNA sense strand
uggcaguugcauuaauaaa

SEQ ID NO: 2659485 - RNA, 19 nt, Homo sapiens
  misc_RNA (1)...(19): siRNA sense strand
gcaucaacugucugaauga

SEQ ID NO: 2659486 - RNA, 19 nt, Homo sapiens
  misc_RNA (1)...(19): siRNA sense strand
cgaaaagugccaagggguu

SEQ ID NO: 2659487 - RNA, 19 nt, Homo sapiens
  misc_RNA (1)...(19): siRNA sense strand
uaaaugugacagugaaaca

SEQ ID NO: 2659488 - RNA, 19 nt, Homo sapiens
  misc_RNA (1)...(19): siRNA sense strand
ggaaaauacaacugaugau

SEQ ID NO: 2659489 - RNA, 19 nt, Homo sapiens
  misc_RNA (1)...(19): siRNA sense strand
uguaauuucuucugaacca

SEQ ID NO: 2659490 - RNA, 19 nt, Homo sapiens
  misc_RNA (1)...(19): siRNA sense strand
aauuggacacuaacagaaa

SEQ ID NO: 2659491 - RNA, 19 nt, Homo sapiens
  misc_RNA (1)...(19): siRNA sense strand
agaaaauugggaugagcaa

SEQ ID NO: 2659492 - RNA, 19 nt, Homo sapiens
  misc_RNA (1)...(19): siRNA sense strand
gguacugacugcaucaaaa

SEQ ID NO: 2659493 - RNA, 19 nt, Homo sapiens
  misc_RNA (1)...(19): siRNA sense strand
aaauagauacuucaggcaa

SEQ ID NO: 2659494 - RNA, 19 nt, Homo sapiens
  misc_RNA (1)...(19): siRNA sense strand
cagccaaaauggugaaacu

SEQ ID NO: 2659495 - RNA, 19 nt, Homo sapiens
  misc_RNA (1)...(19): siRNA sense strand
aagcaauugaccacuguaa

SEQ ID NO: 2659496 - RNA, 19 nt, Homo sapiens
  misc_RNA (1)...(19): siRNA sense strand
guuaauucuaaguggcuga

SEQ ID NO: 2659497 - RNA, 19 nt, Homo sapiens
  misc_RNA (1)...(19): siRNA sense strand
cagcuguauaucaggauuu

SEQ ID NO: 2659498 - RNA, 19 nt, Homo sapiens
  misc_RNA (1)...(19): siRNA sense strand
auucugagccugaugguuu

SEQ ID NO: 2659499 - RNA, 19 nt, Homo sapiens
  misc_RNA (1)...(19): siRNA sense strand
gaugaaauuaauagaccca

SEQ ID NO: 2659500 - RNA, 19 nt, Homo sapiens
  misc_RNA (1)...(19): siRNA sense strand
gggauuugcaggaucugaa

SEQ ID NO: 2659501 - RNA, 19 nt, Homo sapiens
  misc_RNA (1)...(19): siRNA sense strand
aaaggaucuuccagccaaa

SEQ ID NO: 2659502 - RNA, 19 nt, Homo sapiens
  misc_RNA (1)...(19): siRNA sense strand
aguuauggcaaguggucca

SEQ ID NO: 2659503 - RNA, 19 nt, Homo sapiens
  misc_RNA (1)...(19): siRNA sense strand
auuaguaccaugucagaau

SEQ ID NO: 2659504 - RNA, 19 nt, Homo sapiens
  misc_RNA (1)...(19): siRNA sense strand
ugagugaagaagacaguca

SEQ ID NO: 2659505 - RNA, 19 nt, Homo sapiens
  misc_RNA (1)...(19): siRNA sense strand
auguguggcaauugggauu

SEQ ID NO: 2659506 - RNA, 19 nt, Homo sapiens
  misc_RNA (1)...(19): siRNA sense strand
gggaauucuuucaggauuu

SEQ ID NO: 2659507 - RNA, 19 nt, Homo sapiens
  misc_RNA (1)...(19): siRNA sense strand
agauggagagggaggcaaa

SEQ ID NO: 2659508 - RNA, 19 nt, Homo sapiens
  misc_RNA (1)...(19): siRNA sense strand
gggagcagauggagaggga

SEQ ID NO: 2659509 - RNA, 19 nt, Homo sapiens
  misc_RNA (1)...(19): siRNA sense strand
gggaagaugcccagccaca

SEQ ID NO: 2659510 - RNA, 19 nt, Homo sapiens
  misc_RNA (1)...(19): siRNA sense strand
gguuuaagcuggacccuga

SEQ ID NO: 2659511 - RNA, 19 nt, Homo sapiens
  misc_RNA (1)...(19): siRNA sense strand
gaacagagggcacuggaau

SEQ ID NO: 2659512 - RNA, 19 nt, Homo sapiens
  misc_RNA (1)...(19): siRNA sense strand
cggagaagagggagcagau

SEQ ID NO: 2659513 - RNA, 19 nt, Homo sapiens
  misc_RNA (1)...(19): siRNA sense strand
ccugcuaaguacucugaaa

SEQ ID NO: 2659514 - RNA, 19 nt, Homo sapiens
  misc_RNA (1)...(19): siRNA sense strand
uuuaaugagcacaggaaaa

SEQ ID NO: 2659515 - RNA, 19 nt, Homo sapiens
  misc_RNA (1)...(19): siRNA sense strand
guuuaaugagcacaggaaa

SEQ ID NO: 2659516 - RNA, 19 nt, Homo sapiens
  misc_RNA (1)...(19): siRNA sense strand
gaauauuaugggaacguga

SEQ ID NO: 2659517 - RNA, 19 nt, Homo sapiens
  misc_RNA (1)...(19): siRNA sense strand
ucaccuggcacaaggacaa

SEQ ID NO: 2659518 - RNA, 19 nt, Homo sapiens
  misc_RNA (1)...(19): siRNA sense strand
aacagagggcacuggaaua

SEQ ID NO: 2659519 - RNA, 19 nt, Homo sapiens
  misc_RNA (1)...(19): siRNA sense strand
caguagggcccuggagaau

SEQ ID NO: 2659520 - RNA, 19 nt, Homo sapiens
  misc_RNA (1)...(19): siRNA sense strand
cugcagaagcaucagccaa

SEQ ID NO: 2659521 - RNA, 19 nt, Homo sapiens
  misc_RNA (1)...(19): siRNA sense strand
aguuuaaugagcacaggaa

SEQ ID NO: 2659522 - RNA, 19 nt, Homo sapiens
  misc_RNA (1)...(19): siRNA sense strand
gggagugguuuaagcugga

SEQ ID NO: 2659523 - RNA, 19 nt, Homo sapiens
  misc_RNA (1)...(19): siRNA sense strand
ugggaauucuuucaggauu

SEQ ID NO: 2659524 - RNA, 19 nt, Homo sapiens
  misc_RNA (1)...(19): siRNA sense strand
cguucaaagucaacaccca

SEQ ID NO: 2659525 - RNA, 19 nt, Homo sapiens
  misc_RNA (1)...(19): siRNA sense strand
agagggcacuggaauauua

SEQ ID NO: 2659526 - RNA, 19 nt, Homo sapiens
  misc_RNA (1)...(19): siRNA sense strand
cggcacugcagaagcauca

SEQ ID NO: 2659527 - RNA, 19 nt, Homo sapiens
  misc_RNA (1)...(19): siRNA sense strand
agggaaaagagaagagaaa

SEQ ID NO: 2659528 - RNA, 19 nt, Homo sapiens
  misc_RNA (1)...(19): siRNA sense strand
uggccaaaccuuaggaaaa

SEQ ID NO: 2659529 - RNA, 19 nt, Homo sapiens
  misc_RNA (1)...(19): siRNA sense strand
ugagaaucuucgacggcaa

SEQ ID NO: 2659530 - RNA, 19 nt, Homo sapiens
  misc_RNA (1)...(19): siRNA sense strand
gggaaaagagaagagaaaa

SEQ ID NO: 2659531 - RNA, 19 nt, Homo sapiens
  misc_RNA (1)...(19): siRNA sense strand
agguaaagggaaaagagaa

SEQ ID NO: 2659532 - RNA, 19 nt, Homo sapiens
  misc_RNA (1)...(19): siRNA sense strand
cuguaaccuuguuggccaa

SEQ ID NO: 2659533 - RNA, 19 nt, Homo sapiens
  misc_RNA (1)...(19): siRNA sense strand
gguaaagggaaaagagaag

SEQ ID NO: 2659534 - RNA, 19 nt, Homo sapiens
  misc_RNA (1)...(19): siRNA sense strand
gacaaaggauuuuaggaga

SEQ ID NO: 2659535 - RNA, 19 nt, Homo sapiens
  misc_RNA (1)...(19): siRNA sense strand
ggauuuuaggagaguggaa

SEQ ID NO: 2659536 - RNA, 19 nt, Homo sapiens
  misc_RNA (1)...(19): siRNA sense strand
gagagacgcuaccgggcuu

SEQ ID NO: 2659537 - RNA, 19 nt, Homo sapiens
  misc_RNA (1)...(19): siRNA sense strand
gcaagguaauguugggaga

SEQ ID NO: 2659538 - RNA, 19 nt, Homo sapiens
  misc_RNA (1)...(19): siRNA sense strand
cggugaagucauaauaaaa

SEQ ID NO: 2659539 - RNA, 19 nt, Homo sapiens
  misc_RNA (1)...(19): siRNA sense strand
aaggcaaauaccaaaguaa

SEQ ID NO: 2659540 - RNA, 19 nt, Homo sapiens
  misc_RNA (1)...(19): siRNA sense strand
ugucaaagaguaaugccaa

SEQ ID NO: 2659541 - RNA, 19 nt, Homo sapiens
  misc_RNA (1)...(19): siRNA sense strand
cgauucaaggucaggauga

SEQ ID NO: 2659542 - RNA, 19 nt, Homo sapiens
  misc_RNA (1)...(19): siRNA sense strand
aggaugacaaaguguauau

SEQ ID NO: 2659543 - RNA, 19 nt, Homo sapiens
  misc_RNA (1)...(19): siRNA sense strand
aucaaaagcaggaaugaaa

SEQ ID NO: 2659544 - RNA, 19 nt, Homo sapiens
  misc_RNA (1)...(19): siRNA sense strand
cuuucuucuuggugaauuu

SEQ ID NO: 2659545 - RNA, 19 nt, Homo sapiens
  misc_RNA (1)...(19): siRNA sense strand
guuuguuguuggagaugga

SEQ ID NO: 2659546 - RNA, 19 nt, Homo sapiens
  misc_RNA (1)...(19): siRNA sense strand
aagcaaaauuaggcacaaa

SEQ ID NO: 2659547 - RNA, 19 nt, Homo sapiens
  misc_RNA (1)...(19): siRNA sense strand
gcaagguaauguugggaga

SEQ ID NO: 2659548 - RNA, 19 nt, Homo sapiens
  misc_RNA (1)...(19): siRNA sense strand
cggugaagucauaauaaaa

SEQ ID NO: 2659549 - RNA, 19 nt, Homo sapiens
  misc_RNA (1)...(19): siRNA sense strand
aaggcaaauaccaaaguaa

SEQ ID NO: 2659550 - RNA, 19 nt, Homo sapiens
  misc_RNA (1)...(19): siRNA sense strand
ugucaaagaguaaugccaa

SEQ ID NO: 2659551 - RNA, 19 nt, Homo sapiens
  misc_RNA (1)...(19): siRNA sense strand
cgauucaaggucaggauga

SEQ ID NO: 2659552 - RNA, 19 nt, Homo sapiens
  misc_RNA (1)...(19): siRNA sense strand
aggaugacaaaguguauau

SEQ ID NO: 2659553 - RNA, 19 nt, Homo sapiens
  misc_RNA (1)...(19): siRNA sense strand
aucaaaagcaggaaugaaa

SEQ ID NO: 2659554 - RNA, 19 nt, Homo sapiens
  misc_RNA (1)...(19): siRNA sense strand
cuuucuucuuggugaauuu

SEQ ID NO: 2659555 - RNA, 19 nt, Homo sapiens
  misc_RNA (1)...(19): siRNA sense strand
guuuguuguuggagaugga

SEQ ID NO: 2659556 - RNA, 19 nt, Homo sapiens
  misc_RNA (1)...(19): siRNA sense strand
aagcaaaauuaggcacaaa

SEQ ID NO: 2659557 - RNA, 19 nt, Homo sapiens
  misc_RNA (1)...(19): siRNA sense strand
gcagaagaagagagagaua

SEQ ID NO: 2659558 - RNA, 19 nt, Homo sapiens
  misc_RNA (1)...(19): siRNA sense strand
ccucacagauugaaggaaa

SEQ ID NO: 2659559 - RNA, 19 nt, Homo sapiens
  misc_RNA (1)...(19): siRNA sense strand
agaagaagagagagauaaa

SEQ ID NO: 2659560 - RNA, 19 nt, Homo sapiens
  misc_RNA (1)...(19): siRNA sense strand
cggaagauuaggaggcaua

SEQ ID NO: 2659561 - RNA, 19 nt, Homo sapiens
  misc_RNA (1)...(19): siRNA sense strand
gcaaagaugcacuggaaau

SEQ ID NO: 2659562 - RNA, 19 nt, Homo sapiens
  misc_RNA (1)...(19): siRNA sense strand
ggaaagugaagcugguaaa

SEQ ID NO: 2659563 - RNA, 19 nt, Homo sapiens
  misc_RNA (1)...(19): siRNA sense strand
caagaagagaguaaagaaa

SEQ ID NO: 2659564 - RNA, 19 nt, Homo sapiens
  misc_RNA (1)...(19): siRNA sense strand
cugaagaggaggagaguca

SEQ ID NO: 2659565 - RNA, 19 nt, Homo sapiens
  misc_RNA (1)...(19): siRNA sense strand
aagcagaagaagagagaga

SEQ ID NO: 2659566 - RNA, 19 nt, Homo sapiens
  misc_RNA (1)...(19): siRNA sense strand
ugguaaagaaagugaagaa

SEQ ID NO: 2659567 - RNA, 19 nt, Homo sapiens
  misc_RNA (1)...(19): siRNA sense strand
gaccaaagccaaugggaau

SEQ ID NO: 2659568 - RNA, 19 nt, Homo sapiens
  misc_RNA (1)...(19): siRNA sense strand
ggauaaaagcaaagcagaa

SEQ ID NO: 2659569 - RNA, 19 nt, Homo sapiens
  misc_RNA (1)...(19): siRNA sense strand
uagaaagacaagugaacaa

SEQ ID NO: 2659570 - RNA, 19 nt, Homo sapiens
  misc_RNA (1)...(19): siRNA sense strand
caacugaagaaaugguaaa

SEQ ID NO: 2659571 - RNA, 19 nt, Homo sapiens
  misc_RNA (1)...(19): siRNA sense strand
cguauuaugcuguggaaau

SEQ ID NO: 2659572 - RNA, 19 nt, Homo sapiens
  misc_RNA (1)...(19): siRNA sense strand
gagaaugaugacaaagaua

SEQ ID NO: 2659573 - RNA, 19 nt, Homo sapiens
  misc_RNA (1)...(19): siRNA sense strand
acuaaaugacagugaagua

SEQ ID NO: 2659574 - RNA, 19 nt, Homo sapiens
  misc_RNA (1)...(19): siRNA sense strand
agucaagaagguagugaaa

SEQ ID NO: 2659575 - RNA, 19 nt, Homo sapiens
  misc_RNA (1)...(19): siRNA sense strand
acgaaguacacaagugaaa

SEQ ID NO: 2659576 - RNA, 19 nt, Homo sapiens
  misc_RNA (1)...(19): siRNA sense strand
cagcagaggucgaagagga

SEQ ID NO: 2659577 - RNA, 19 nt, Homo sapiens
  misc_RNA (1)...(19): siRNA sense strand
agaagaugguguauacaaa

SEQ ID NO: 2659578 - RNA, 19 nt, Homo sapiens
  misc_RNA (1)...(19): siRNA sense strand
caguauagguaaagccaca

SEQ ID NO: 2659579 - RNA, 19 nt, Homo sapiens
  misc_RNA (1)...(19): siRNA sense strand
guucagaugaugagaauga

SEQ ID NO: 2659580 - RNA, 19 nt, Homo sapiens
  misc_RNA (1)...(19): siRNA sense strand
caaaugggaaggaaagaaa

SEQ ID NO: 2659581 - RNA, 19 nt, Homo sapiens
  misc_RNA (1)...(19): siRNA sense strand
gggauuggacuaagggcaa

SEQ ID NO: 2659582 - RNA, 19 nt, Homo sapiens
  misc_RNA (1)...(19): siRNA sense strand
gcguaaagaagaagaaacu

SEQ ID NO: 2659583 - RNA, 19 nt, Homo sapiens
  misc_RNA (1)...(19): siRNA sense strand
acuuagaaucugaggguga

SEQ ID NO: 2659584 - RNA, 19 nt, Homo sapiens
  misc_RNA (1)...(19): siRNA sense strand
ccucagaguuugguggaaa

SEQ ID NO: 2659585 - RNA, 19 nt, Homo sapiens
  misc_RNA (1)...(19): siRNA sense strand
ggacuaagggcaaguaaaa

SEQ ID NO: 2659586 - RNA, 19 nt, Homo sapiens
  misc_RNA (1)...(19): siRNA sense strand
agguaaagccacaggcaga

SEQ ID NO: 2659587 - RNA, 19 nt, Homo sapiens
  misc_RNA (1)...(19): siRNA sense strand
agacuaauacuguggcuaa

SEQ ID NO: 2659588 - RNA, 19 nt, Homo sapiens
  misc_RNA (1)...(19): siRNA sense strand
gugaccaguuagaguguaa

SEQ ID NO: 2659589 - RNA, 19 nt, Homo sapiens
  misc_RNA (1)...(19): siRNA sense strand
gcacaaguguagagaccca

SEQ ID NO: 2659590 - RNA, 19 nt, Homo sapiens
  misc_RNA (1)...(19): siRNA sense strand
augaaaagcugauggagaa

SEQ ID NO: 2659591 - RNA, 19 nt, Homo sapiens
  misc_RNA (1)...(19): siRNA sense strand
ccucuuaagacauuagaaa

SEQ ID NO: 2659592 - RNA, 19 nt, Homo sapiens
  misc_RNA (1)...(19): siRNA sense strand
aagugaagcugguaaagaa

SEQ ID NO: 2659593 - RNA, 19 nt, Homo sapiens
  misc_RNA (1)...(19): siRNA sense strand
gauaaauacaucagugaca

SEQ ID NO: 2659594 - RNA, 19 nt, Homo sapiens
  misc_RNA (1)...(19): siRNA sense strand
cuguggaaauguuguauaa

SEQ ID NO: 2659595 - RNA, 19 nt, Homo sapiens
  misc_RNA (1)...(19): siRNA sense strand
agcagagaauauugagaaa

SEQ ID NO: 2659596 - RNA, 19 nt, Homo sapiens
  misc_RNA (1)...(19): siRNA sense strand
uuuagaaggcuuacagaaa

SEQ ID NO: 2659597 - RNA, 19 nt, Homo sapiens
  misc_RNA (1)...(19): siRNA sense strand
cuaagaaugaugugaaaga

SEQ ID NO: 2659598 - RNA, 19 nt, Homo sapiens
  misc_RNA (1)...(19): siRNA sense strand
gagaauggcagcugugaau

SEQ ID NO: 2659599 - RNA, 19 nt, Homo sapiens
  misc_RNA (1)...(19): siRNA sense strand
ugaugagaaugaugacaaa

SEQ ID NO: 2659600 - RNA, 19 nt, Homo sapiens
  misc_RNA (1)...(19): siRNA sense strand
gcuuugaauucaugcacaa

SEQ ID NO: 2659601 - RNA, 19 nt, Homo sapiens
  misc_RNA (1)...(19): siRNA sense strand
caucaauacacuccagaaa

SEQ ID NO: 2659602 - RNA, 19 nt, Homo sapiens
  misc_RNA (1)...(19): siRNA sense strand
guuacaagugaaagcaaua

SEQ ID NO: 2659603 - RNA, 19 nt, Homo sapiens
  misc_RNA (1)...(19): siRNA sense strand
agacauuauaagugccaua

SEQ ID NO: 2659604 - RNA, 19 nt, Homo sapiens
  misc_RNA (1)...(19): siRNA sense strand
cgaagagauuucagaaguu

SEQ ID NO: 2659605 - RNA, 19 nt, Homo sapiens
  misc_RNA (1)...(19): siRNA sense strand
ggagauauguacugcgcuu

SEQ ID NO: 2659606 - RNA, 19 nt, Homo sapiens
  misc_RNA (1)...(19): siRNA sense strand
ccaagaagagaguaaagaa

SEQ ID NO: 2659607 - RNA, 19 nt, Homo sapiens
  misc_RNA (1)...(19): siRNA sense strand
cugaagaaaugguaaaguu

SEQ ID NO: 2659608 - RNA, 19 nt, Homo sapiens
  misc_RNA (1)...(19): siRNA sense strand
gugucugccuguugaguua

SEQ ID NO: 2659609 - RNA, 19 nt, Homo sapiens
  misc_RNA (1)...(19): siRNA sense strand
acuaccaagaagagaguaa

SEQ ID NO: 2659610 - RNA, 19 nt, Homo sapiens
  misc_RNA (1)...(19): siRNA sense strand
agaagugaugcuugggaua

SEQ ID NO: 2659611 - RNA, 19 nt, Homo sapiens
  misc_RNA (1)...(19): siRNA sense strand
guguagagacccaagcuaa

SEQ ID NO: 2659612 - RNA, 19 nt, Homo sapiens
  misc_RNA (1)...(19): siRNA sense strand
ccuuguaaagaaagcgaaa

SEQ ID NO: 2659613 - RNA, 19 nt, Homo sapiens
  misc_RNA (1)...(19): siRNA sense strand
cccaggaaccauuggauaa

SEQ ID NO: 2659614 - RNA, 19 nt, Homo sapiens
  misc_RNA (1)...(19): siRNA sense strand
agaaaaucucagagugaaa

SEQ ID NO: 2659615 - RNA, 19 nt, Homo sapiens
  misc_RNA (1)...(19): siRNA sense strand
gguaaagaaagugaagaaa

SEQ ID NO: 2659616 - RNA, 19 nt, Homo sapiens
  misc_RNA (1)...(19): siRNA sense strand
uuucagaaguugauugcaa

SEQ ID NO: 2659617 - RNA, 19 nt, Homo sapiens
  misc_RNA (1)...(19): siRNA sense strand
acaaagaauuccuugguca

SEQ ID NO: 2659618 - RNA, 19 nt, Homo sapiens
  misc_RNA (1)...(19): siRNA sense strand
cccaauguguacugauaaa

SEQ ID NO: 2659619 - RNA, 19 nt, Homo sapiens
  misc_RNA (1)...(19): siRNA sense strand
gaagaaaaucucagaguga

SEQ ID NO: 2659620 - RNA, 19 nt, Homo sapiens
  misc_RNA (1)...(19): siRNA sense strand
gaaaaugguuugugcucua

SEQ ID NO: 2659621 - RNA, 19 nt, Homo sapiens
  misc_RNA (1)...(19): siRNA sense strand
caucaucaccaaauggaaa

SEQ ID NO: 2659622 - RNA, 19 nt, Homo sapiens
  misc_RNA (1)...(19): siRNA sense strand
uguauagaacuguguguaa

SEQ ID NO: 2659623 - RNA, 19 nt, Homo sapiens
  misc_RNA (1)...(19): siRNA sense strand
cagaaucagcugugaccaa

SEQ ID NO: 2659624 - RNA, 19 nt, Homo sapiens
  misc_RNA (1)...(19): siRNA sense strand
gccaaugggauuugaagua

SEQ ID NO: 2659625 - RNA, 19 nt, Homo sapiens
  misc_RNA (1)...(19): siRNA sense strand
ugacaaagaccauccgaau

SEQ ID NO: 2659626 - RNA, 19 nt, Homo sapiens
  misc_RNA (1)...(19): siRNA sense strand
agauaaauccuaugagcca

SEQ ID NO: 2659627 - RNA, 19 nt, Homo sapiens
  misc_RNA (1)...(19): siRNA sense strand
gugaaggggcauaaagaua

SEQ ID NO: 2659628 - RNA, 19 nt, Homo sapiens
  misc_RNA (1)...(19): siRNA sense strand
gaauauugacaguggcuca

SEQ ID NO: 2659629 - RNA, 19 nt, Homo sapiens
  misc_RNA (1)...(19): siRNA sense strand
ggaaaaucuaacacagaaa

SEQ ID NO: 2659630 - RNA, 19 nt, Homo sapiens
  misc_RNA (1)...(19): siRNA sense strand
aggaucaaauacaggaaau

SEQ ID NO: 2659631 - RNA, 19 nt, Homo sapiens
  misc_RNA (1)...(19): siRNA sense strand
gcagugaagcagaagaaaa

SEQ ID NO: 2659632 - RNA, 19 nt, Homo sapiens
  misc_RNA (1)...(19): siRNA sense strand
acgaagaggccgagcagga

SEQ ID NO: 2659633 - RNA, 19 nt, Homo sapiens
  misc_RNA (1)...(19): siRNA sense strand
agaagagaguaaagaaacu

SEQ ID NO: 2659634 - RNA, 19 nt, Homo sapiens
  misc_RNA (1)...(19): siRNA sense strand
aggucgaagcuguggagaa

SEQ ID NO: 2659635 - RNA, 19 nt, Homo sapiens
  misc_RNA (1)...(19): siRNA sense strand
gagagaaggucgaagcugu

SEQ ID NO: 2659636 - RNA, 19 nt, Homo sapiens
  misc_RNA (1)...(19): siRNA sense strand
gcucagaggcagaggcaag

SEQ ID NO: 2659637 - RNA, 19 nt, Homo sapiens
  misc_RNA (1)...(19): siRNA sense strand
uagcaaaacaacugggaau

SEQ ID NO: 2659638 - RNA, 19 nt, Homo sapiens
  misc_RNA (1)...(19): siRNA sense strand
caggaaaccaggauggcau

SEQ ID NO: 2659639 - RNA, 19 nt, Homo sapiens
  misc_RNA (1)...(19): siRNA sense strand
auggaaugccacagagaga

SEQ ID NO: 2659640 - RNA, 19 nt, Homo sapiens
  misc_RNA (1)...(19): siRNA sense strand
ggauuaugauggaaugcca

SEQ ID NO: 2659641 - RNA, 19 nt, Homo sapiens
  misc_RNA (1)...(19): siRNA sense strand
cgaaaugaagagagagcac

SEQ ID NO: 2659642 - RNA, 19 nt, Homo sapiens
  misc_RNA (1)...(19): siRNA sense strand
aggaggaauuacaggaaac

SEQ ID NO: 2659643 - RNA, 19 nt, Homo sapiens
  misc_RNA (1)...(19): siRNA sense strand
gcccgacugaugagggaaa

SEQ ID NO: 2659644 - RNA, 19 nt, Homo sapiens
  misc_RNA (1)...(19): siRNA sense strand
aaaugaagagagagcacuu

SEQ ID NO: 2659645 - RNA, 19 nt, Homo sapiens
  misc_RNA (1)...(19): siRNA sense strand
aaagcaaagccguggagga

SEQ ID NO: 2659646 - RNA, 19 nt, Homo sapiens
  misc_RNA (1)...(19): siRNA sense strand
uggcaauaugauggauaaa

SEQ ID NO: 2659647 - RNA, 19 nt, Homo sapiens
  misc_RNA (1)...(19): siRNA sense strand
ugauggauaaacuggcuaa

SEQ ID NO: 2659648 - RNA, 19 nt, Homo sapiens
  misc_RNA (1)...(19): siRNA sense strand
cguggaggaaauugugaau

SEQ ID NO: 2659649 - RNA, 19 nt, Homo sapiens
  misc_RNA (1)...(19): siRNA sense strand
acauggaugacgaaaugaa

SEQ ID NO: 2659650 - RNA, 19 nt, Homo sapiens
  misc_RNA (1)...(19): siRNA sense strand
ggagaaagaaauuggacca

SEQ ID NO: 2659651 - RNA, 19 nt, Homo sapiens
  misc_RNA (1)...(19): siRNA sense strand
ggaaauuaaagguggagca

SEQ ID NO: 2659652 - RNA, 19 nt, Homo sapiens
  misc_RNA (1)...(19): siRNA sense strand
cugugaaauacuauggaaa

SEQ ID NO: 2659653 - RNA, 19 nt, Homo sapiens
  misc_RNA (1)...(19): siRNA sense strand
gaaucagggcaaaggaaaa

SEQ ID NO: 2659654 - RNA, 19 nt, Homo sapiens
  misc_RNA (1)...(19): siRNA sense strand
augaugugacugugaaaua

SEQ ID NO: 2659655 - RNA, 19 nt, Homo sapiens
  misc_RNA (1)...(19): siRNA sense strand
gggcaaaggaaaagccuau

SEQ ID NO: 2659656 - RNA, 19 nt, Homo sapiens
  misc_RNA (1)...(19): siRNA sense strand
agaaaagaaaugagagcau

SEQ ID NO: 2659657 - RNA, 19 nt, Homo sapiens
  misc_RNA (1)...(19): siRNA sense strand
aaguguuccuggagaaaga

SEQ ID NO: 2659658 - RNA, 19 nt, Homo sapiens
  misc_RNA (1)...(19): siRNA sense strand
gucaaguguuccuggagaa

SEQ ID NO: 2659659 - RNA, 19 nt, Homo sapiens
  misc_RNA (1)...(19): siRNA sense strand
ccuucaggaucuacggauu

SEQ ID NO: 2659660 - RNA, 19 nt, Homo sapiens
  misc_RNA (1)...(19): siRNA sense strand
ggucaaguguuccuggaga

SEQ ID NO: 2659661 - RNA, 19 nt, Homo sapiens
  misc_RNA (1)...(19): siRNA sense strand
cacugaagcugcuggguca

SEQ ID NO: 2659662 - RNA, 19 nt, Homo sapiens
  misc_RNA (1)...(19): siRNA sense strand
ggaaggaaucagagaggac

SEQ ID NO: 2659663 - RNA, 19 nt, Homo sapiens
  misc_RNA (1)...(19): siRNA sense strand
ggaaagccuauauggaaaa

SEQ ID NO: 2659664 - RNA, 19 nt, Homo sapiens
  misc_RNA (1)...(19): siRNA sense strand
ccacccaucacaagagaau

SEQ ID NO: 2659665 - RNA, 19 nt, Homo sapiens
  misc_RNA (1)...(19): siRNA sense strand
ccaagagaagggaagccaa

SEQ ID NO: 2659666 - RNA, 19 nt, Homo sapiens
  misc_RNA (1)...(19): siRNA sense strand
agguggagcacaugauuau

SEQ ID NO: 2659667 - RNA, 19 nt, Homo sapiens
  misc_RNA (1)...(19): siRNA sense strand
guucauuucagaagauaca

SEQ ID NO: 2659668 - RNA, 19 nt, Homo sapiens
  misc_RNA (1)...(19): siRNA sense strand
ccuggagaguucaugguau

SEQ ID NO: 2659669 - RNA, 19 nt, Homo sapiens
  misc_RNA (1)...(19): siRNA sense strand
caacaacaacacucgggua

SEQ ID NO: 2659670 - RNA, 19 nt, Homo sapiens
  misc_RNA (1)...(19): siRNA sense strand
agacagcaaaugaaaccaa

SEQ ID NO: 2659671 - RNA, 19 nt, Homo sapiens
  misc_RNA (1)...(19): siRNA sense strand
guuccuggagaaagaaauu

SEQ ID NO: 2659672 - RNA, 19 nt, Homo sapiens
  misc_RNA (1)...(19): siRNA sense strand
cuucaggaucuacggauuu

SEQ ID NO: 2659673 - RNA, 19 nt, Homo sapiens
  misc_RNA (1)...(19): siRNA sense strand
aguggaaauuaaaggugga

SEQ ID NO: 2659674 - RNA, 19 nt, Homo sapiens
  misc_RNA (1)...(19): siRNA sense strand
ccaggaauagugauggaga

SEQ ID NO: 2659675 - RNA, 19 nt, Homo sapiens
  misc_RNA (1)...(19): siRNA sense strand
cagcuaaucucacugccaa

SEQ ID NO: 2659676 - RNA, 19 nt, Homo sapiens
  misc_RNA (1)...(19): siRNA sense strand
uguuaaagucgauggugua

SEQ ID NO: 2659677 - RNA, 19 nt, Homo sapiens
  misc_RNA (1)...(19): siRNA sense strand
aggaaaugccgcugcagaa

SEQ ID NO: 2659678 - RNA, 19 nt, Homo sapiens
  misc_RNA (1)...(19): siRNA sense strand
cgcaaguacuacaagacaa

SEQ ID NO: 2659679 - RNA, 19 nt, Homo sapiens
  misc_RNA (1)...(19): siRNA sense strand
agucgaugguguagcucaa

SEQ ID NO: 2659680 - RNA, 19 nt, Homo sapiens
  misc_RNA (1)...(19): siRNA sense strand
gggccaaguacaaggagga

SEQ ID NO: 2659681 - RNA, 19 nt, Homo sapiens
  misc_RNA (1)...(19): siRNA sense strand
ggacuauugugguuggcuu

SEQ ID NO: 2659682 - RNA, 19 nt, Homo sapiens
  misc_RNA (1)...(19): siRNA sense strand
cuguuaaagucgauggugu

SEQ ID NO: 2659683 - RNA, 19 nt, Homo sapiens
  misc_RNA (1)...(19): siRNA sense strand
ccaucaagggaaugaacuu

SEQ ID NO: 2659684 - RNA, 19 nt, Homo sapiens
  misc_RNA (1)...(19): siRNA sense strand
aguacaaggaggagucaga

SEQ ID NO: 2659685 - RNA, 19 nt, Homo sapiens
  misc_RNA (1)...(19): siRNA sense strand
agggaaaugugcggagauu

SEQ ID NO: 2659686 - RNA, 19 nt, Homo sapiens
  misc_RNA (1)...(19): siRNA sense strand
guguccagggagaaagaaa

SEQ ID NO: 2659687 - RNA, 19 nt, Homo sapiens
  misc_RNA (1)...(19): siRNA sense strand
acgcuaggaauauggcaaa

SEQ ID NO: 2659688 - RNA, 19 nt, Homo sapiens
  misc_RNA (1)...(19): siRNA sense strand
uggcaaacaguuaacgaau

SEQ ID NO: 2659689 - RNA, 19 nt, Homo sapiens
  misc_RNA (1)...(19): siRNA sense strand
cggagauuauuguggcuca

SEQ ID NO: 2659690 - RNA, 19 nt, Homo sapiens
  misc_RNA (1)...(19): siRNA sense strand
aggaggagucagauaguga

SEQ ID NO: 2659691 - RNA, 19 nt, Homo sapiens
  misc_RNA (1)...(19): siRNA sense strand
ggauucguguccagggaga

SEQ ID NO: 2659692 - RNA, 19 nt, Homo sapiens
  misc_RNA (1)...(19): siRNA sense strand
gauuuaugggagugacuau

SEQ ID NO: 2659693 - RNA, 19 nt, Homo sapiens
  misc_RNA (1)...(19): siRNA sense strand
ugggagugacuaugaggaa

SEQ ID NO: 2659694 - RNA, 19 nt, Homo sapiens
  misc_RNA (1)...(19): siRNA sense strand
agggagaaagaaaguguuu

SEQ ID NO: 2659695 - RNA, 19 nt, Homo sapiens
  misc_RNA (1)...(19): siRNA sense strand
agucccagcugaaagacaa

SEQ ID NO: 2659696 - RNA, 19 nt, Homo sapiens
  misc_RNA (1)...(19): siRNA sense strand
cuacauacaaucagcaacu

SEQ ID NO: 2659697 - RNA, 19 nt, Homo sapiens
  misc_RNA (1)...(19): siRNA sense strand
acgaauuacaugauccaau

SEQ ID NO: 2659698 - RNA, 19 nt, Homo sapiens
  misc_RNA (1)...(19): siRNA sense strand
ucgaguugauaccggaaau

SEQ ID NO: 2659699 - RNA, 19 nt, Homo sapiens
  misc_RNA (1)...(19): siRNA sense strand
acaccuuggccuuuguaua

SEQ ID NO: 2659700 - RNA, 19 nt, Homo sapiens
  misc_RNA (1)...(19): siRNA sense strand
aagcguaccgcgagcucaa

SEQ ID NO: 2659701 - RNA, 19 nt, Homo sapiens
  misc_RNA (1)...(19): siRNA sense strand
agcuaaagccaauucaaau

SEQ ID NO: 2659702 - RNA, 19 nt, Homo sapiens
  misc_RNA (1)...(19): siRNA sense strand
ggaccuaaagugauccaga

SEQ ID NO: 2659703 - RNA, 19 nt, Homo sapiens
  misc_RNA (1)...(19): siRNA sense strand
ugaugugauuuaugggagu

SEQ ID NO: 2659704 - RNA, 19 nt, Homo sapiens
  misc_RNA (1)...(19): siRNA sense strand
gaggaaaugccgcugcaga

SEQ ID NO: 2659705 - RNA, 19 nt, Homo sapiens
  misc_RNA (1)...(19): siRNA sense strand
uacaaggaggagucagaua

SEQ ID NO: 2659706 - RNA, 19 nt, Homo sapiens
  misc_RNA (1)...(19): siRNA sense strand
ggagaagaaaagaagaaaa

SEQ ID NO: 2659707 - RNA, 19 nt, Homo sapiens
  misc_RNA (1)...(19): siRNA sense strand
uuaauaaguccguggaaaa

SEQ ID NO: 2659708 - RNA, 19 nt, Homo sapiens
  misc_RNA (1)...(19): siRNA sense strand
gguggaaaggagcgaagaa

SEQ ID NO: 2659709 - RNA, 19 nt, Homo sapiens
  misc_RNA (1)...(19): siRNA sense strand
ggaggagaggacacggaaa

SEQ ID NO: 2659710 - RNA, 19 nt, Homo sapiens
  misc_RNA (1)...(19): siRNA sense strand
aggaacgagccaagaaauu

SEQ ID NO: 2659711 - RNA, 19 nt, Homo sapiens
  misc_RNA (1)...(19): siRNA sense strand
ggagaguguuucuuggaga

SEQ ID NO: 2659712 - RNA, 19 nt, Homo sapiens
  misc_RNA (1)...(19): siRNA sense strand
ggacagacagagagacgga

SEQ ID NO: 2659713 - RNA, 19 nt, Homo sapiens
  misc_RNA (1)...(19): siRNA sense strand
aguuagaacgcgaggccau

SEQ ID NO: 2659714 - RNA, 19 nt, Homo sapiens
  misc_RNA (1)...(19): siRNA sense strand
uggaaaggagcgaagaaca

SEQ ID NO: 2659715 - RNA, 19 nt, Homo sapiens
  misc_RNA (1)...(19): siRNA sense strand
acacagaggaggagaggac

SEQ ID NO: 2659716 - RNA, 19 nt, Homo sapiens
  misc_RNA (1)...(19): siRNA sense strand
uggucaguuuagaggauuu

SEQ ID NO: 2659717 - RNA, 19 nt, Homo sapiens
  misc_RNA (1)...(19): siRNA sense strand
ucuccaaaucccagaauga

SEQ ID NO: 2659718 - RNA, 19 nt, Homo sapiens
  misc_RNA (1)...(19): siRNA sense strand
cuggcagguuacaggaauu

SEQ ID NO: 2659719 - RNA, 19 nt, Homo sapiens
  misc_RNA (1)...(19): siRNA sense strand
gguuacaggaauuugguca

SEQ ID NO: 2659720 - RNA, 19 nt, Homo sapiens
  misc_RNA (1)...(19): siRNA sense strand
ggaguuaacugucugggau

SEQ ID NO: 2659721 - RNA, 19 nt, Homo sapiens
  misc_RNA (1)...(19): siRNA sense strand
ccuugaacucauuuguuaa

SEQ ID NO: 2659722 - RNA, 19 nt, Homo sapiens
  misc_RNA (1)...(19): siRNA sense strand
acacggacugggagcacaa

SEQ ID NO: 2659723 - RNA, 19 nt, Homo sapiens
  misc_RNA (1)...(19): siRNA sense strand
uccaaaucccagaaugaua

SEQ ID NO: 2659724 - RNA, 19 nt, Homo sapiens
  misc_RNA (1)...(19): siRNA sense strand
cuguaagaaccuugccuau

SEQ ID NO: 2659725 - RNA, 19 nt, Homo sapiens
  misc_RNA (1)...(19): siRNA sense strand
agaaauacgaagacagcgu

SEQ ID NO: 2659726 - RNA, 19 nt, Homo sapiens
  misc_RNA (1)...(19): siRNA sense strand
ucaaggaguuagaacgcga

SEQ ID NO: 2659727 - RNA, 19 nt, Homo sapiens
  misc_RNA (1)...(19): siRNA sense strand
aggcggagaaauacgaaga

SEQ ID NO: 2659728 - RNA, 19 nt, Homo sapiens
  misc_RNA (1)...(19): siRNA sense strand
acagcguuccucagaguaa

SEQ ID NO: 2659729 - RNA, 19 nt, Homo sapiens
  misc_RNA (1)...(19): siRNA sense strand
ugcuaggagccaagaauuu

SEQ ID NO: 2659730 - RNA, 19 nt, Homo sapiens
  misc_RNA (1)...(19): siRNA sense strand
cggacugggagcacaaaga

SEQ ID NO: 2659731 - RNA, 19 nt, Homo sapiens
  misc_RNA (1)...(19): siRNA sense strand
caggaaggucagugcacca

SEQ ID NO: 2659732 - RNA, 19 nt, Homo sapiens
  misc_RNA (1)...(19): siRNA sense strand
auggagaagaaaagaagaa

SEQ ID NO: 2659733 - RNA, 19 nt, Homo sapiens
  misc_RNA (1)...(19): siRNA sense strand
gaccaaauguagaagggaa

SEQ ID NO: 2659734 - RNA, 19 nt, Homo sapiens
  misc_RNA (1)...(19): siRNA sense strand
gguuauaauggcagaccaa

SEQ ID NO: 2659735 - RNA, 19 nt, Homo sapiens
  misc_RNA (1)...(19): siRNA sense strand
gauuaaacuaggaggagau

SEQ ID NO: 2659736 - RNA, 19 nt, Homo sapiens
  misc_RNA (1)...(19): siRNA sense strand
accaaauguagaagggaaa

SEQ ID NO: 2659737 - RNA, 19 nt, Homo sapiens
  misc_RNA (1)...(19): siRNA sense strand
ggauuaaacuaggaggaga

SEQ ID NO: 2659738 - RNA, 19 nt, Homo sapiens
  misc_RNA (1)...(19): siRNA sense strand
uggccaaugcccaagauaa

SEQ ID NO: 2659739 - RNA, 19 nt, Homo sapiens
  misc_RNA (1)...(19): siRNA sense strand
gguuaguauugaaugcaga

SEQ ID NO: 2659740 - RNA, 19 nt, Homo sapiens
  misc_RNA (1)...(19): siRNA sense strand
guaccuaaauaaagaccca

SEQ ID NO: 2659741 - RNA, 19 nt, Homo sapiens
  misc_RNA (1)...(19): siRNA sense strand
ucgccaaggaagagaggga

SEQ ID NO: 2659742 - RNA, 19 nt, Homo sapiens
  misc_RNA (1)...(19): siRNA sense strand
acaccuugauggaagaaca

SEQ ID NO: 2659743 - RNA, 19 nt, Homo sapiens
  misc_RNA (1)...(19): siRNA sense strand
uuauaauggcagaccaaau

SEQ ID NO: 2659744 - RNA, 19 nt, Homo sapiens
  misc_RNA (1)...(19): siRNA sense strand
gagggugaucccagaggaa

SEQ ID NO: 2659745 - RNA, 19 nt, Homo sapiens
  misc_RNA (1)...(19): siRNA sense strand
agacaagguuauaauggca

SEQ ID NO: 2659746 - RNA, 19 nt, Homo sapiens
  misc_RNA (1)...(19): siRNA sense strand
caaaguggguuguggaccu

SEQ ID NO: 2659747 - RNA, 19 nt, Homo sapiens
  misc_RNA (1)...(19): siRNA sense strand
uugagaaccuaaagcccaa

SEQ ID NO: 2659748 - RNA, 19 nt, Homo sapiens
  misc_RNA (1)...(19): siRNA sense strand
cugcaguaccuacggaaga

SEQ ID NO: 2659749 - RNA, 19 nt, Homo sapiens
  misc_RNA (1)...(19): siRNA sense strand
cgaugauggcaaccugaua

SEQ ID NO: 2659750 - RNA, 19 nt, Homo sapiens
  misc_RNA (1)...(19): siRNA sense strand
aaacaugaucccagcuaca

SEQ ID NO: 2659751 - RNA, 19 nt, Homo sapiens
  misc_RNA (1)...(19): siRNA sense strand
ggcacgacgaugauggcaa

SEQ ID NO: 2659752 - RNA, 19 nt, Homo sapiens
  misc_RNA (1)...(19): siRNA sense strand
cgaaccacuacgcggacaa

SEQ ID NO: 2659753 - RNA, 19 nt, Homo sapiens
  misc_RNA (1)...(19): siRNA sense strand
gcaaagacgccgaugggag

SEQ ID NO: 2659754 - RNA, 19 nt, Homo sapiens
  misc_RNA (1)...(19): siRNA sense strand
aagcccaacacgagguauu

SEQ ID NO: 2659755 - RNA, 19 nt, Homo sapiens
  misc_RNA (1)...(19): siRNA sense strand
acggaagaggccuacguua

SEQ ID NO: 2659756 - RNA, 19 nt, Homo sapiens
  misc_RNA (1)...(19): siRNA sense strand
cugaagaagaauuugaucu

SEQ ID NO: 2659757 - RNA, 19 nt, Homo sapiens
  misc_RNA (1)...(19): siRNA sense strand
ggcaauaugugaagcgcac

SEQ ID NO: 2659758 - RNA, 19 nt, Homo sapiens
  misc_RNA (1)...(19): siRNA sense strand
aaucaugguccgaggcaaa

SEQ ID NO: 2659759 - RNA, 19 nt, Homo sapiens
  misc_RNA (1)...(19): siRNA sense strand
ccaaacaacuugaagcaga

SEQ ID NO: 2659760 - RNA, 19 nt, Homo sapiens
  misc_RNA (1)...(19): siRNA sense strand
caguugaagaagugaagaa

SEQ ID NO: 2659761 - RNA, 19 nt, Homo sapiens
  misc_RNA (1)...(19): siRNA sense strand
ccuuggaccuagaggacuu

SEQ ID NO: 2659762 - RNA, 19 nt, Homo sapiens
  misc_RNA (1)...(19): siRNA sense strand
aaauggaaacgaaggagaa

SEQ ID NO: 2659763 - RNA, 19 nt, Homo sapiens
  misc_RNA (1)...(19): siRNA sense strand
ggacgaagaaauuagcaga

SEQ ID NO: 2659764 - RNA, 19 nt, Homo sapiens
  misc_RNA (1)...(19): siRNA sense strand
agcagaaaccggauguaaa

SEQ ID NO: 2659765 - RNA, 19 nt, Homo sapiens
  misc_RNA (1)...(19): siRNA sense strand
gaaauggaaacgaaggaga

SEQ ID NO: 2659766 - RNA, 19 nt, Homo sapiens
  misc_RNA (1)...(19): siRNA sense strand
gggaaauggaaacgaagga

SEQ ID NO: 2659767 - RNA, 19 nt, Homo sapiens
  misc_RNA (1)...(19): siRNA sense strand
agaacagagcagaaaucaa

SEQ ID NO: 2659768 - RNA, 19 nt, Homo sapiens
  misc_RNA (1)...(19): siRNA sense strand
aaacgaaggagaagccgaa

SEQ ID NO: 2659769 - RNA, 19 nt, Homo sapiens
  misc_RNA (1)...(19): siRNA sense strand
gguccgaggcaaaggcuca

SEQ ID NO: 2659770 - RNA, 19 nt, Homo sapiens
  misc_RNA (1)...(19): siRNA sense strand
guugaagaagugaagaaau

SEQ ID NO: 2659771 - RNA, 19 nt, Homo sapiens
  misc_RNA (1)...(19): siRNA sense strand
agagaaaaggagugcagaa

SEQ ID NO: 2659772 - RNA, 19 nt, Homo sapiens
  misc_RNA (1)...(19): siRNA sense strand
uguucaguuacaagagaaa

SEQ ID NO: 2659773 - RNA, 19 nt, Homo sapiens
  misc_RNA (1)...(19): siRNA sense strand
gagcaguugaagaagugaa

SEQ ID NO: 2659774 - RNA, 19 nt, Homo sapiens
  misc_RNA (1)...(19): siRNA sense strand
gugaagaaauuauugguac

SEQ ID NO: 2659775 - RNA, 19 nt, Homo sapiens
  misc_RNA (1)...(19): siRNA sense strand
gcugauggagcuugcgauu

SEQ ID NO: 2659776 - RNA, 19 nt, Homo sapiens
  misc_RNA (1)...(19): siRNA sense strand
aauuagcagaguacggaaa

SEQ ID NO: 2659777 - RNA, 19 nt, Homo sapiens
  misc_RNA (1)...(19): siRNA sense strand
ugaagagagcaguugaaga

SEQ ID NO: 2659778 - RNA, 19 nt, Homo sapiens
  misc_RNA (1)...(19): siRNA sense strand
uguacuaaucacuguggaa

SEQ ID NO: 2659779 - RNA, 19 nt, Homo sapiens
  misc_RNA (1)...(19): siRNA sense strand
aguugaagaagugaagaaa

SEQ ID NO: 2659780 - RNA, 19 nt, Homo sapiens
  misc_RNA (1)...(19): siRNA sense strand
cugaagaagaugcagcuga

SEQ ID NO: 2659781 - RNA, 19 nt, Homo sapiens
  misc_RNA (1)...(19): siRNA sense strand
cauuaaaucaccagcccuu

SEQ ID NO: 2659782 - RNA, 19 nt, Homo sapiens
  misc_RNA (1)...(19): siRNA sense strand
agacauguacaaugacaca

SEQ ID NO: 2659783 - RNA, 19 nt, Homo sapiens
  misc_RNA (1)...(19): siRNA sense strand
gagaaaaggagugcagaau

SEQ ID NO: 2659784 - RNA, 19 nt, Homo sapiens
  misc_RNA (1)...(19): siRNA sense strand
cggaaagacauguacaaug

SEQ ID NO: 2659785 - RNA, 19 nt, Homo sapiens
  misc_RNA (1)...(19): siRNA sense strand
gcaccuacagagaugccaa

SEQ ID NO: 2659786 - RNA, 19 nt, Homo sapiens
  misc_RNA (1)...(19): siRNA sense strand
gcagaguacggaaagacau

SEQ ID NO: 2659787 - RNA, 19 nt, Homo sapiens
  misc_RNA (1)...(19): siRNA sense strand
aaucaugguccgaggcaaa

SEQ ID NO: 2659788 - RNA, 19 nt, Homo sapiens
  misc_RNA (1)...(19): siRNA sense strand
ccaaacaacuugaagcaga

SEQ ID NO: 2659789 - RNA, 19 nt, Homo sapiens
  misc_RNA (1)...(19): siRNA sense strand
caguugaagaagugaagaa

SEQ ID NO: 2659790 - RNA, 19 nt, Homo sapiens
  misc_RNA (1)...(19): siRNA sense strand
ccuuggaccuagaggacuu

SEQ ID NO: 2659791 - RNA, 19 nt, Homo sapiens
  misc_RNA (1)...(19): siRNA sense strand
aaauggaaacgaaggagaa

SEQ ID NO: 2659792 - RNA, 19 nt, Homo sapiens
  misc_RNA (1)...(19): siRNA sense strand
ggacgaagaaauuagcaga

SEQ ID NO: 2659793 - RNA, 19 nt, Homo sapiens
  misc_RNA (1)...(19): siRNA sense strand
agcagaaaccggauguaaa

SEQ ID NO: 2659794 - RNA, 19 nt, Homo sapiens
  misc_RNA (1)...(19): siRNA sense strand
gaaauggaaacgaaggaga

SEQ ID NO: 2659795 - RNA, 19 nt, Homo sapiens
  misc_RNA (1)...(19): siRNA sense strand
gggaaauggaaacgaagga

SEQ ID NO: 2659796 - RNA, 19 nt, Homo sapiens
  misc_RNA (1)...(19): siRNA sense strand
agaacagagcagaaaucaa

SEQ ID NO: 2659797 - RNA, 19 nt, Homo sapiens
  misc_RNA (1)...(19): siRNA sense strand
aaacgaaggagaagccgaa

SEQ ID NO: 2659798 - RNA, 19 nt, Homo sapiens
  misc_RNA (1)...(19): siRNA sense strand
gguccgaggcaaaggcuca

SEQ ID NO: 2659799 - RNA, 19 nt, Homo sapiens
  misc_RNA (1)...(19): siRNA sense strand
guugaagaagugaagaaau

SEQ ID NO: 2659800 - RNA, 19 nt, Homo sapiens
  misc_RNA (1)...(19): siRNA sense strand
agagaaaaggagugcagaa

SEQ ID NO: 2659801 - RNA, 19 nt, Homo sapiens
  misc_RNA (1)...(19): siRNA sense strand
uguucaguuacaagagaaa

SEQ ID NO: 2659802 - RNA, 19 nt, Homo sapiens
  misc_RNA (1)...(19): siRNA sense strand
gagcaguugaagaagugaa

SEQ ID NO: 2659803 - RNA, 19 nt, Homo sapiens
  misc_RNA (1)...(19): siRNA sense strand
gugaagaaauuauugguac

SEQ ID NO: 2659804 - RNA, 19 nt, Homo sapiens
  misc_RNA (1)...(19): siRNA sense strand
gcugauggagcuugcgauu

SEQ ID NO: 2659805 - RNA, 19 nt, Homo sapiens
  misc_RNA (1)...(19): siRNA sense strand
aauuagcagaguacggaaa

SEQ ID NO: 2659806 - RNA, 19 nt, Homo sapiens
  misc_RNA (1)...(19): siRNA sense strand
ugaagagagcaguugaaga

SEQ ID NO: 2659807 - RNA, 19 nt, Homo sapiens
  misc_RNA (1)...(19): siRNA sense strand
uguacuaaucacuguggaa

SEQ ID NO: 2659808 - RNA, 19 nt, Homo sapiens
  misc_RNA (1)...(19): siRNA sense strand
aguugaagaagugaagaaa

SEQ ID NO: 2659809 - RNA, 19 nt, Homo sapiens
  misc_RNA (1)...(19): siRNA sense strand
cugaagaagaugcagcuga

SEQ ID NO: 2659810 - RNA, 19 nt, Homo sapiens
  misc_RNA (1)...(19): siRNA sense strand
cauuaaaucaccagcccuu

SEQ ID NO: 2659811 - RNA, 19 nt, Homo sapiens
  misc_RNA (1)...(19): siRNA sense strand
agacauguacaaugacaca

SEQ ID NO: 2659812 - RNA, 19 nt, Homo sapiens
  misc_RNA (1)...(19): siRNA sense strand
gagaaaaggagugcagaau

SEQ ID NO: 2659813 - RNA, 19 nt, Homo sapiens
  misc_RNA (1)...(19): siRNA sense strand
cggaaagacauguacaaug

SEQ ID NO: 2659814 - RNA, 19 nt, Homo sapiens
  misc_RNA (1)...(19): siRNA sense strand
gcaccuacagagaugccaa

SEQ ID NO: 2659815 - RNA, 19 nt, Homo sapiens
  misc_RNA (1)...(19): siRNA sense strand
gcagaguacggaaagacau

SEQ ID NO: 2659816 - RNA, 19 nt, Homo sapiens
  misc_RNA (1)...(19): siRNA sense strand
aaucaugguccgaggcaaa

SEQ ID NO: 2659817 - RNA, 19 nt, Homo sapiens
  misc_RNA (1)...(19): siRNA sense strand
ccaaacaacuugaagcaga

SEQ ID NO: 2659818 - RNA, 19 nt, Homo sapiens
  misc_RNA (1)...(19): siRNA sense strand
caguugaagaagugaagaa

SEQ ID NO: 2659819 - RNA, 19 nt, Homo sapiens
  misc_RNA (1)...(19): siRNA sense strand
ccuuggaccuagaggacuu

SEQ ID NO: 2659820 - RNA, 19 nt, Homo sapiens
  misc_RNA (1)...(19): siRNA sense strand
aaauggaaacgaaggagaa

SEQ ID NO: 2659821 - RNA, 19 nt, Homo sapiens
  misc_RNA (1)...(19): siRNA sense strand
ggacgaagaaauuagcaga

SEQ ID NO: 2659822 - RNA, 19 nt, Homo sapiens
  misc_RNA (1)...(19): siRNA sense strand
agcagaaaccggauguaaa

SEQ ID NO: 2659823 - RNA, 19 nt, Homo sapiens
  misc_RNA (1)...(19): siRNA sense strand
gaaauggaaacgaaggaga

SEQ ID NO: 2659824 - RNA, 19 nt, Homo sapiens
  misc_RNA (1)...(19): siRNA sense strand
gggaaauggaaacgaagga

SEQ ID NO: 2659825 - RNA, 19 nt, Homo sapiens
  misc_RNA (1)...(19): siRNA sense strand
agaacagagcagaaaucaa

SEQ ID NO: 2659826 - RNA, 19 nt, Homo sapiens
  misc_RNA (1)...(19): siRNA sense strand
aaacgaaggagaagccgaa

SEQ ID NO: 2659827 - RNA, 19 nt, Homo sapiens
  misc_RNA (1)...(19): siRNA sense strand
gguccgaggcaaaggcuca

SEQ ID NO: 2659828 - RNA, 19 nt, Homo sapiens
  misc_RNA (1)...(19): siRNA sense strand
guugaagaagugaagaaau

SEQ ID NO: 2659829 - RNA, 19 nt, Homo sapiens
  misc_RNA (1)...(19): siRNA sense strand
agagaaaaggagugcagaa

SEQ ID NO: 2659830 - RNA, 19 nt, Homo sapiens
  misc_RNA (1)...(19): siRNA sense strand
uguucaguuacaagagaaa

SEQ ID NO: 2659831 - RNA, 19 nt, Homo sapiens
  misc_RNA (1)...(19): siRNA sense strand
gagcaguugaagaagugaa

SEQ ID NO: 2659832 - RNA, 19 nt, Homo sapiens
  misc_RNA (1)...(19): siRNA sense strand
gugaagaaauuauugguac

SEQ ID NO: 2659833 - RNA, 19 nt, Homo sapiens
  misc_RNA (1)...(19): siRNA sense strand
gcugauggagcuugcgauu

SEQ ID NO: 2659834 - RNA, 19 nt, Homo sapiens
  misc_RNA (1)...(19): siRNA sense strand
aauuagcagaguacggaaa

SEQ ID NO: 2659835 - RNA, 19 nt, Homo sapiens
  misc_RNA (1)...(19): siRNA sense strand
ugaagagagcaguugaaga

SEQ ID NO: 2659836 - RNA, 19 nt, Homo sapiens
  misc_RNA (1)...(19): siRNA sense strand
uguacuaaucacuguggaa

SEQ ID NO: 2659837 - RNA, 19 nt, Homo sapiens
  misc_RNA (1)...(19): siRNA sense strand
aguugaagaagugaagaaa

SEQ ID NO: 2659838 - RNA, 19 nt, Homo sapiens
  misc_RNA (1)...(19): siRNA sense strand
cugaagaagaugcagcuga

SEQ ID NO: 2659839 - RNA, 19 nt, Homo sapiens
  misc_RNA (1)...(19): siRNA sense strand
cauuaaaucaccagcccuu

SEQ ID NO: 2659840 - RNA, 19 nt, Homo sapiens
  misc_RNA (1)...(19): siRNA sense strand
agacauguacaaugacaca

SEQ ID NO: 2659841 - RNA, 19 nt, Homo sapiens
  misc_RNA (1)...(19): siRNA sense strand
gagaaaaggagugcagaau

SEQ ID NO: 2659842 - RNA, 19 nt, Homo sapiens
  misc_RNA (1)...(19): siRNA sense strand
cggaaagacauguacaaug

SEQ ID NO: 2659843 - RNA, 19 nt, Homo sapiens
  misc_RNA (1)...(19): siRNA sense strand
gcaccuacagagaugccaa

SEQ ID NO: 2659844 - RNA, 19 nt, Homo sapiens
  misc_RNA (1)...(19): siRNA sense strand
gcagaguacggaaagacau

SEQ ID NO: 2659845 - RNA, 19 nt, Homo sapiens
  misc_RNA (1)...(19): siRNA sense strand
aaucaugguccgaggcaaa

SEQ ID NO: 2659846 - RNA, 19 nt, Homo sapiens
  misc_RNA (1)...(19): siRNA sense strand
ccaaacaacuugaagcaga

SEQ ID NO: 2659847 - RNA, 19 nt, Homo sapiens
  misc_RNA (1)...(19): siRNA sense strand
caguugaagaagugaagaa

SEQ ID NO: 2659848 - RNA, 19 nt, Homo sapiens
  misc_RNA (1)...(19): siRNA sense strand
ccuuggaccuagaggacuu

SEQ ID NO: 2659849 - RNA, 19 nt, Homo sapiens
  misc_RNA (1)...(19): siRNA sense strand
aaauggaaacgaaggagaa

SEQ ID NO: 2659850 - RNA, 19 nt, Homo sapiens
  misc_RNA (1)...(19): siRNA sense strand
ggacgaagaaauuagcaga

SEQ ID NO: 2659851 - RNA, 19 nt, Homo sapiens
  misc_RNA (1)...(19): siRNA sense strand
agcagaaaccggauguaaa

SEQ ID NO: 2659852 - RNA, 19 nt, Homo sapiens
  misc_RNA (1)...(19): siRNA sense strand
gaaauggaaacgaaggaga

SEQ ID NO: 2659853 - RNA, 19 nt, Homo sapiens
  misc_RNA (1)...(19): siRNA sense strand
gggaaauggaaacgaagga

SEQ ID NO: 2659854 - RNA, 19 nt, Homo sapiens
  misc_RNA (1)...(19): siRNA sense strand
agaacagagcagaaaucaa

SEQ ID NO: 2659855 - RNA, 19 nt, Homo sapiens
  misc_RNA (1)...(19): siRNA sense strand
aaacgaaggagaagccgaa

SEQ ID NO: 2659856 - RNA, 19 nt, Homo sapiens
  misc_RNA (1)...(19): siRNA sense strand
gguccgaggcaaaggcuca

SEQ ID NO: 2659857 - RNA, 19 nt, Homo sapiens
  misc_RNA (1)...(19): siRNA sense strand
guugaagaagugaagaaau

SEQ ID NO: 2659858 - RNA, 19 nt, Homo sapiens
  misc_RNA (1)...(19): siRNA sense strand
agagaaaaggagugcagaa

SEQ ID NO: 2659859 - RNA, 19 nt, Homo sapiens
  misc_RNA (1)...(19): siRNA sense strand
uguucaguuacaagagaaa

SEQ ID NO: 2659860 - RNA, 19 nt, Homo sapiens
  misc_RNA (1)...(19): siRNA sense strand
gagcaguugaagaagugaa

SEQ ID NO: 2659861 - RNA, 19 nt, Homo sapiens
  misc_RNA (1)...(19): siRNA sense strand
gugaagaaauuauugguac

SEQ ID NO: 2659862 - RNA, 19 nt, Homo sapiens
  misc_RNA (1)...(19): siRNA sense strand
gcugauggagcuugcgauu

SEQ ID NO: 2659863 - RNA, 19 nt, Homo sapiens
  misc_RNA (1)...(19): siRNA sense strand
aauuagcagaguacggaaa

SEQ ID NO: 2659864 - RNA, 19 nt, Homo sapiens
  misc_RNA (1)...(19): siRNA sense strand
ugaagagagcaguugaaga

SEQ ID NO: 2659865 - RNA, 19 nt, Homo sapiens
  misc_RNA (1)...(19): siRNA sense strand
uguacuaaucacuguggaa

SEQ ID NO: 2659866 - RNA, 19 nt, Homo sapiens
  misc_RNA (1)...(19): siRNA sense strand
aguugaagaagugaagaaa

SEQ ID NO: 2659867 - RNA, 19 nt, Homo sapiens
  misc_RNA (1)...(19): siRNA sense strand
cugaagaagaugcagcuga

SEQ ID NO: 2659868 - RNA, 19 nt, Homo sapiens
  misc_RNA (1)...(19): siRNA sense strand
cauuaaaucaccagcccuu

SEQ ID NO: 2659869 - RNA, 19 nt, Homo sapiens
  misc_RNA (1)...(19): siRNA sense strand
agacauguacaaugacaca

SEQ ID NO: 2659870 - RNA, 19 nt, Homo sapiens
  misc_RNA (1)...(19): siRNA sense strand
gagaaaaggagugcagaau

SEQ ID NO: 2659871 - RNA, 19 nt, Homo sapiens
  misc_RNA (1)...(19): siRNA sense strand
cggaaagacauguacaaug

SEQ ID NO: 2659872 - RNA, 19 nt, Homo sapiens
  misc_RNA (1)...(19): siRNA sense strand
gcaccuacagagaugccaa

SEQ ID NO: 2659873 - RNA, 19 nt, Homo sapiens
  misc_RNA (1)...(19): siRNA sense strand
gcagaguacggaaagacau

SEQ ID NO: 2659874 - RNA, 19 nt, Homo sapiens
  misc_RNA (1)...(19): siRNA sense strand
aaucaugguccgaggcaaa

SEQ ID NO: 2659875 - RNA, 19 nt, Homo sapiens
  misc_RNA (1)...(19): siRNA sense strand
ccaaacaacuugaagcaga

SEQ ID NO: 2659876 - RNA, 19 nt, Homo sapiens
  misc_RNA (1)...(19): siRNA sense strand
caguugaagaagugaagaa

SEQ ID NO: 2659877 - RNA, 19 nt, Homo sapiens
  misc_RNA (1)...(19): siRNA sense strand
ccuuggaccuagaggacuu

SEQ ID NO: 2659878 - RNA, 19 nt, Homo sapiens
  misc_RNA (1)...(19): siRNA sense strand
aaauggaaacgaaggagaa

SEQ ID NO: 2659879 - RNA, 19 nt, Homo sapiens
  misc_RNA (1)...(19): siRNA sense strand
ggacgaagaaauuagcaga

SEQ ID NO: 2659880 - RNA, 19 nt, Homo sapiens
  misc_RNA (1)...(19): siRNA sense strand
gaaauggaaacgaaggaga

SEQ ID NO: 2659881 - RNA, 19 nt, Homo sapiens
  misc_RNA (1)...(19): siRNA sense strand
agcagaaaccggauguaaa

SEQ ID NO: 2659882 - RNA, 19 nt, Homo sapiens
  misc_RNA (1)...(19): siRNA sense strand
gggaaauggaaacgaagga

SEQ ID NO: 2659883 - RNA, 19 nt, Homo sapiens
  misc_RNA (1)...(19): siRNA sense strand
agaacagagcagaaaucaa

SEQ ID NO: 2659884 - RNA, 19 nt, Homo sapiens
  misc_RNA (1)...(19): siRNA sense strand
ggaauauggucggggaaau

SEQ ID NO: 2659885 - RNA, 19 nt, Homo sapiens
  misc_RNA (1)...(19): siRNA sense strand
aaacgaaggagaagccgaa

SEQ ID NO: 2659886 - RNA, 19 nt, Homo sapiens
  misc_RNA (1)...(19): siRNA sense strand
gguccgaggcaaaggcuca

SEQ ID NO: 2659887 - RNA, 19 nt, Homo sapiens
  misc_RNA (1)...(19): siRNA sense strand
guugaagaagugaagaaau

SEQ ID NO: 2659888 - RNA, 19 nt, Homo sapiens
  misc_RNA (1)...(19): siRNA sense strand
agagaaaaggagugcagaa

SEQ ID NO: 2659889 - RNA, 19 nt, Homo sapiens
  misc_RNA (1)...(19): siRNA sense strand
uguucaguuacaagagaaa

SEQ ID NO: 2659890 - RNA, 19 nt, Homo sapiens
  misc_RNA (1)...(19): siRNA sense strand
gagcaguugaagaagugaa

SEQ ID NO: 2659891 - RNA, 19 nt, Homo sapiens
  misc_RNA (1)...(19): siRNA sense strand
gugaagaaauuauugguac

SEQ ID NO: 2659892 - RNA, 19 nt, Homo sapiens
  misc_RNA (1)...(19): siRNA sense strand
gcugauggagcuugcgauu

SEQ ID NO: 2659893 - RNA, 19 nt, Homo sapiens
  misc_RNA (1)...(19): siRNA sense strand
aauuagcagaguacggaaa

SEQ ID NO: 2659894 - RNA, 19 nt, Homo sapiens
  misc_RNA (1)...(19): siRNA sense strand
ugaagagagcaguugaaga

SEQ ID NO: 2659895 - RNA, 19 nt, Homo sapiens
  misc_RNA (1)...(19): siRNA sense strand
uguacuaaucacuguggaa

SEQ ID NO: 2659896 - RNA, 19 nt, Homo sapiens
  misc_RNA (1)...(19): siRNA sense strand
aguugaagaagugaagaaa

SEQ ID NO: 2659897 - RNA, 19 nt, Homo sapiens
  misc_RNA (1)...(19): siRNA sense strand
cugaagaagaugcagcuga

SEQ ID NO: 2659898 - RNA, 19 nt, Homo sapiens
  misc_RNA (1)...(19): siRNA sense strand
cauuaaaucaccagcccuu

SEQ ID NO: 2659899 - RNA, 19 nt, Homo sapiens
  misc_RNA (1)...(19): siRNA sense strand
agacauguacaaugacaca

SEQ ID NO: 2659900 - RNA, 19 nt, Homo sapiens
  misc_RNA (1)...(19): siRNA sense strand
gagaaaaggagugcagaau

SEQ ID NO: 2659901 - RNA, 19 nt, Homo sapiens
  misc_RNA (1)...(19): siRNA sense strand
cggaaagacauguacaaug

SEQ ID NO: 2659902 - RNA, 19 nt, Homo sapiens
  misc_RNA (1)...(19): siRNA sense strand
gcaccuacagagaugccaa

SEQ ID NO: 2659903 - RNA, 19 nt, Homo sapiens
  misc_RNA (1)...(19): siRNA sense strand
gcagaguacggaaagacau

SEQ ID NO: 2659904 - RNA, 19 nt, Homo sapiens
  misc_RNA (1)...(19): siRNA sense strand
cagagaagguccuggguuc

SEQ ID NO: 2659905 - RNA, 19 nt, Homo sapiens
  misc_RNA (1)...(19): siRNA sense strand
cagaagggccgaagcguca

SEQ ID NO: 2659906 - RNA, 19 nt, Homo sapiens
  misc_RNA (1)...(19): siRNA sense strand
ccgugugagugcagagaag

SEQ ID NO: 2659907 - RNA, 19 nt, Homo sapiens
  misc_RNA (1)...(19): siRNA sense strand
acauagaaacugugggcug

SEQ ID NO: 2659908 - RNA, 19 nt, Homo sapiens
  misc_RNA (1)...(19): siRNA sense strand
ccaaguaauugauggcaca

SEQ ID NO: 2659909 - RNA, 19 nt, Homo sapiens
  misc_RNA (1)...(19): siRNA sense strand
uguaauugacagaggaaca

SEQ ID NO: 2659910 - RNA, 19 nt, Homo sapiens
  misc_RNA (1)...(19): siRNA sense strand
gugaaaugauugugccuga

SEQ ID NO: 2659911 - RNA, 19 nt, Homo sapiens
  misc_RNA (1)...(19): siRNA sense strand
caagagaaauugaagagca

SEQ ID NO: 2659912 - RNA, 19 nt, Homo sapiens
  misc_RNA (1)...(19): siRNA sense strand
agaaugagacacugggcau

SEQ ID NO: 2659913 - RNA, 19 nt, Homo sapiens
  misc_RNA (1)...(19): siRNA sense strand
gggguaauaaagaagaaaa

SEQ ID NO: 2659914 - RNA, 19 nt, Homo sapiens
  misc_RNA (1)...(19): siRNA sense strand
uugaagaaccccagaaauu

SEQ ID NO: 2659915 - RNA, 19 nt, Homo sapiens
  misc_RNA (1)...(19): siRNA sense strand
gugagaaauacaauugcaa

SEQ ID NO: 2659916 - RNA, 19 nt, Homo sapiens
  misc_RNA (1)...(19): siRNA sense strand
cugucauggagauggcaaa

SEQ ID NO: 2659917 - RNA, 19 nt, Homo sapiens
  misc_RNA (1)...(19): siRNA sense strand
aacuaaaugcauagagcuu

SEQ ID NO: 2659918 - RNA, 19 nt, Homo sapiens
  misc_RNA (1)...(19): siRNA sense strand
ggaagagcauuuuggggau

SEQ ID NO: 2659919 - RNA, 19 nt, Homo sapiens
  misc_RNA (1)...(19): siRNA sense strand
cugaagcaguugagagccu

SEQ ID NO: 2659920 - RNA, 19 nt, Homo sapiens
  misc_RNA (1)...(19): siRNA sense strand
guugcaaaacucagugaaa

SEQ ID NO: 2659921 - RNA, 19 nt, Homo sapiens
  misc_RNA (1)...(19): siRNA sense strand
ccuuacugagcuagaaaca

SEQ ID NO: 2659922 - RNA, 19 nt, Homo sapiens
  misc_RNA (1)...(19): siRNA sense strand
cuaucaaaguggaaagcug

SEQ ID NO: 2659923 - RNA, 19 nt, Homo sapiens
  misc_RNA (1)...(19): siRNA sense strand
uaccauagcaagugggugu

SEQ ID NO: 2659924 - RNA, 19 nt, Homo sapiens
  misc_RNA (1)...(19): siRNA sense strand
cgccaaaaccagagaaaau

SEQ ID NO: 2659925 - RNA, 19 nt, Homo sapiens
  misc_RNA (1)...(19): siRNA sense strand
gaagaaaucagaaggcagu

SEQ ID NO: 2659926 - RNA, 19 nt, Homo sapiens
  misc_RNA (1)...(19): siRNA sense strand
ccgacuaagaagugggaug

SEQ ID NO: 2659927 - RNA, 19 nt, Homo sapiens
  misc_RNA (1)...(19): siRNA sense strand
acaaguuugccgaagaaau

SEQ ID NO: 2659928 - RNA, 19 nt, Homo sapiens
  misc_RNA (1)...(19): siRNA sense strand
ucauguugucccuggcaaa

SEQ ID NO: 2659929 - RNA, 19 nt, Homo sapiens
  misc_RNA (1)...(19): siRNA sense strand
cgaagaaaucagaaggcag

SEQ ID NO: 2659930 - RNA, 19 nt, Homo sapiens
  misc_RNA (1)...(19): siRNA sense strand
aggacaaagggcagcuaga

SEQ ID NO: 2659931 - RNA, 19 nt, Homo sapiens
  misc_RNA (1)...(19): siRNA sense strand
cuaagaagugggauggagu

SEQ ID NO: 2659932 - RNA, 19 nt, Homo sapiens
  misc_RNA (1)...(19): siRNA sense strand
cggcagagauggaggagga

SEQ ID NO: 2659933 - RNA, 19 nt, Homo sapiens
  misc_RNA (1)...(19): siRNA sense strand
gugagaagggacuggauaa

SEQ ID NO: 2659934 - RNA, 19 nt, Homo sapiens
  misc_RNA (1)...(19): siRNA sense strand
caacauuagugcaggcaga

SEQ ID NO: 2659935 - RNA, 19 nt, Homo sapiens
  misc_RNA (1)...(19): siRNA sense strand
gcaugaaagagaagaacau

SEQ ID NO: 2659936 - RNA, 19 nt, Homo sapiens
  misc_RNA (1)...(19): siRNA sense strand
agaagcagcaacagggaaa

SEQ ID NO: 2659937 - RNA, 19 nt, Homo sapiens
  misc_RNA (1)...(19): siRNA sense strand
cagccaaagacuuagauaa

SEQ ID NO: 2659938 - RNA, 19 nt, Homo sapiens
  misc_RNA (1)...(19): siRNA sense strand
cugggaaaggcgugaauua

SEQ ID NO: 2659939 - RNA, 19 nt, Homo sapiens
  misc_RNA (1)...(19): siRNA sense strand
aggcaagauuaaaguccaa

SEQ ID NO: 2659940 - RNA, 19 nt, Homo sapiens
  misc_RNA (1)...(19): siRNA sense strand
ggacagucaaagaugguau

SEQ ID NO: 2659941 - RNA, 19 nt, Homo sapiens
  misc_RNA (1)...(19): siRNA sense strand
caagggaggccgaagggaa

SEQ ID NO: 2659942 - RNA, 19 nt, Homo sapiens
  misc_RNA (1)...(19): siRNA sense strand
uugcaaagcuuucgagcca

SEQ ID NO: 2659943 - RNA, 19 nt, Homo sapiens
  misc_RNA (1)...(19): siRNA sense strand
ggaugggagaugacggcaa

SEQ ID NO: 2659944 - RNA, 19 nt, Homo sapiens
  misc_RNA (1)...(19): siRNA sense strand
gcauaagccaugucaucaa

SEQ ID NO: 2659945 - RNA, 19 nt, Homo sapiens
  misc_RNA (1)...(19): siRNA sense strand
cuccagaggcagagggcau

SEQ ID NO: 2659946 - RNA, 19 nt, Homo sapiens
  misc_RNA (1)...(19): siRNA sense strand
gugaugacaaugaggauga

SEQ ID NO: 2659947 - RNA, 19 nt, Homo sapiens
  misc_RNA (1)...(19): siRNA sense strand
cugaaaugacugagaguuc

SEQ ID NO: 2659948 - RNA, 19 nt, Homo sapiens
  misc_RNA (1)...(19): siRNA sense strand
acauagauucaaagcagaa

SEQ ID NO: 2659949 - RNA, 19 nt, Homo sapiens
  misc_RNA (1)...(19): siRNA sense strand
uugaaagucuaucuggaaa

SEQ ID NO: 2659950 - RNA, 19 nt, Homo sapiens
  misc_RNA (1)...(19): siRNA sense strand
cuggagaagcagagaaauc

SEQ ID NO: 2659951 - RNA, 19 nt, Homo sapiens
  misc_RNA (1)...(19): siRNA sense strand
cgguuagagagcugccaaa

SEQ ID NO: 2659952 - RNA, 19 nt, Homo sapiens
  misc_RNA (1)...(19): siRNA sense strand
ccaccaagcaaacgcagaa

SEQ ID NO: 2659953 - RNA, 19 nt, Homo sapiens
  misc_RNA (1)...(19): siRNA sense strand
cugaggaggucaucaucaa

SEQ ID NO: 2659954 - RNA, 19 nt, Homo sapiens
  misc_RNA (1)...(19): siRNA sense strand
gaaaaugggcagaccaaau

SEQ ID NO: 2659955 - RNA, 19 nt, Homo sapiens
  misc_RNA (1)...(19): siRNA sense strand
cgauauuuaacauggccaa

SEQ ID NO: 2659956 - RNA, 19 nt, Homo sapiens
  misc_RNA (1)...(19): siRNA sense strand
ugaagaaagcacaggaauc

SEQ ID NO: 2659957 - RNA, 19 nt, Homo sapiens
  misc_RNA (1)...(19): siRNA sense strand
acauggagauggagccuga

SEQ ID NO: 2659958 - RNA, 19 nt, Homo sapiens
  misc_RNA (1)...(19): siRNA sense strand
gcaaagcuuucgagccaca

SEQ ID NO: 2659959 - RNA, 19 nt, Homo sapiens
  misc_RNA (1)...(19): siRNA sense strand
gguagaacuccacgugcua

SEQ ID NO: 2659960 - RNA, 19 nt, Homo sapiens
  misc_RNA (1)...(19): siRNA sense strand
cggaagguggagaugagaa

SEQ ID NO: 2659961 - RNA, 19 nt, Homo sapiens
  misc_RNA (1)...(19): siRNA sense strand
gugacuaccacuuggccaa

SEQ ID NO: 2659962 - RNA, 19 nt, Homo sapiens
  misc_RNA (1)...(19): siRNA sense strand
aaaacaaggggaagcauaa

SEQ ID NO: 2659963 - RNA, 19 nt, Homo sapiens
  misc_RNA (1)...(19): siRNA sense strand
uccagaaggugaugacaau

SEQ ID NO: 2659964 - RNA, 19 nt, Homo sapiens
  misc_RNA (1)...(19): siRNA sense strand
aaagcaugaaagagaagaa

SEQ ID NO: 2659965 - RNA, 19 nt, Homo sapiens
  misc_RNA (1)...(19): siRNA sense strand
ucgcaaggacagucaaaga

SEQ ID NO: 2659966 - RNA, 19 nt, Homo sapiens
  misc_RNA (1)...(19): siRNA sense strand
aggccgaagggaaggaaga

SEQ ID NO: 2659967 - RNA, 19 nt, Homo sapiens
  misc_RNA (1)...(19): siRNA sense strand
agacaaugccuauaguuca

SEQ ID NO: 2659968 - RNA, 19 nt, Homo sapiens
  misc_RNA (1)...(19): siRNA sense strand
cugaugacgcggaggacga

SEQ ID NO: 2659969 - RNA, 19 nt, Homo sapiens
  misc_RNA (1)...(19): siRNA sense strand
ugaacuggccacagcacaa

SEQ ID NO: 2659970 - RNA, 19 nt, Homo sapiens
  misc_RNA (1)...(19): siRNA sense strand
agucaacaccugagcacuu

SEQ ID NO: 2659971 - RNA, 19 nt, Homo sapiens
  misc_RNA (1)...(19): siRNA sense strand
gcgccgaaggcaaguguga

SEQ ID NO: 2659972 - RNA, 19 nt, Homo sapiens
  misc_RNA (1)...(19): siRNA sense strand
uggauuagaagcagcaaca

SEQ ID NO: 2659973 - RNA, 19 nt, Homo sapiens
  misc_RNA (1)...(19): siRNA sense strand
guucagaguuguaacgaug

SEQ ID NO: 2659974 - RNA, 19 nt, Homo sapiens
  misc_RNA (1)...(19): siRNA sense strand
caagaagcccagauaacau

SEQ ID NO: 2659975 - RNA, 19 nt, Homo sapiens
  misc_RNA (1)...(19): siRNA sense strand
cugaagaaagcacaggaau

SEQ ID NO: 2659976 - RNA, 19 nt, Homo sapiens
  misc_RNA (1)...(19): siRNA sense strand
cuccagaaggugaugacaa

SEQ ID NO: 2659977 - RNA, 19 nt, Homo sapiens
  misc_RNA (1)...(19): siRNA sense strand
gcagaagagcagaccgagu

SEQ ID NO: 2659978 - RNA, 19 nt, Homo sapiens
  misc_RNA (1)...(19): siRNA sense strand
acucagaccacauggagau

SEQ ID NO: 2659979 - RNA, 19 nt, Homo sapiens
  misc_RNA (1)...(19): siRNA sense strand
ugaaagucuaucuggaaaa

SEQ ID NO: 2659980 - RNA, 19 nt, Homo sapiens
  misc_RNA (1)...(19): siRNA sense strand
cuuuauuggcgaaggggaa

SEQ ID NO: 2659981 - RNA, 19 nt, Homo sapiens
  misc_RNA (1)...(19): siRNA sense strand
gagacuucgccuuggauga

SEQ ID NO: 2659982 - RNA, 19 nt, Homo sapiens
  misc_RNA (1)...(19): siRNA sense strand
guggcauacuccugcacua

SEQ ID NO: 2659983 - RNA, 19 nt, Homo sapiens
  misc_RNA (1)...(19): siRNA sense strand
gaggaggaggccaguggua

SEQ ID NO: 2659984 - RNA, 19 nt, Homo sapiens
  misc_RNA (1)...(19): siRNA sense strand
cagugauggcucaggacuu

SEQ ID NO: 2659985 - RNA, 19 nt, Homo sapiens
  misc_RNA (1)...(19): siRNA sense strand
ccaaugacaugaagggccu

SEQ ID NO: 2659986 - RNA, 19 nt, Homo sapiens
  misc_RNA (1)...(19): siRNA sense strand
cuacagaagucuagcucag

SEQ ID NO: 2659987 - RNA, 19 nt, Homo sapiens
  misc_RNA (1)...(19): siRNA sense strand
ggaucucacuccagaggca

SEQ ID NO: 2659988 - RNA, 19 nt, Homo sapiens
  misc_RNA (1)...(19): siRNA sense strand
gccgaaggcaagugugaga

SEQ ID NO: 2659989 - RNA, 19 nt, Homo sapiens
  misc_RNA (1)...(19): siRNA sense strand
gcugggagcucuagaggcu

SEQ ID NO: 2659990 - RNA, 19 nt, Homo sapiens
  misc_RNA (1)...(19): siRNA sense strand
ccgggagaucagauuguaa

SEQ ID NO: 2659991 - RNA, 19 nt, Homo sapiens
  misc_RNA (1)...(19): siRNA sense strand
agaaaaucucccucaaaua

SEQ ID NO: 2659992 - RNA, 19 nt, Homo sapiens
  misc_RNA (1)...(19): siRNA sense strand
cagugacaauucaggugua

SEQ ID NO: 2659993 - RNA, 19 nt, Homo sapiens
  misc_RNA (1)...(19): siRNA sense strand
ugugaagauugcaaagcuu

SEQ ID NO: 2659994 - RNA, 19 nt, Homo sapiens
  misc_RNA (1)...(19): siRNA sense strand
ggaagguggagaugagaag

SEQ ID NO: 2659995 - RNA, 19 nt, Homo sapiens
  misc_RNA (1)...(19): siRNA sense strand
ugcaaagcaugaaagagaa

SEQ ID NO: 2659996 - RNA, 19 nt, Homo sapiens
  misc_RNA (1)...(19): siRNA sense strand
gaacauggccauugccgca

SEQ ID NO: 2659997 - RNA, 19 nt, Homo sapiens
  misc_RNA (1)...(19): siRNA sense strand
ugugagaagggacuggaua

SEQ ID NO: 2659998 - RNA, 19 nt, Homo sapiens
  misc_RNA (1)...(19): siRNA sense strand
acagcagaccagugacaau

SEQ ID NO: 2659999 - RNA, 19 nt, Homo sapiens
  misc_RNA (1)...(19): siRNA sense strand
ggagauggagccugaaacu

SEQ ID NO: 2660000 - RNA, 19 nt, Homo sapiens
  misc_RNA (1)...(19): siRNA sense strand
gcaagcugaucccgggaga

SEQ ID NO: 2660001 - RNA, 19 nt, Homo sapiens
  misc_RNA (1)...(19): siRNA sense strand
uggaaaaugggcagaccaa

SEQ ID NO: 2660002 - RNA, 19 nt, Homo sapiens
  misc_RNA (1)...(19): siRNA sense strand
agcagaagacgguggagau

SEQ ID NO: 2660003 - RNA, 19 nt, Homo sapiens
  misc_RNA (1)...(19): siRNA sense strand
agccaaagacuuagauaac

SEQ ID NO: 2660004 - RNA, 19 nt, Homo sapiens
  misc_RNA (1)...(19): siRNA sense strand
cauuugagguugagggaaa

SEQ ID NO: 2660005 - RNA, 19 nt, Homo sapiens
  misc_RNA (1)...(19): siRNA sense strand
caccgaaacacaagaguaa

SEQ ID NO: 2660006 - RNA, 19 nt, Homo sapiens
  misc_RNA (1)...(19): siRNA sense strand
ccgaaacacaagaguaaga

SEQ ID NO: 2660007 - RNA, 19 nt, Homo sapiens
  misc_RNA (1)...(19): siRNA sense strand
ucauaaguucagagaaaga

SEQ ID NO: 2660008 - RNA, 19 nt, Homo sapiens
  misc_RNA (1)...(19): siRNA sense strand
agaaugaagaugagcacau

SEQ ID NO: 2660009 - RNA, 19 nt, Homo sapiens
  misc_RNA (1)...(19): siRNA sense strand
ucacauagcuagugcugca

SEQ ID NO: 2660010 - RNA, 19 nt, Homo sapiens
  misc_RNA (1)...(19): siRNA sense strand
cagaaauacacaggagaau

SEQ ID NO: 2660011 - RNA, 19 nt, Homo sapiens
  misc_RNA (1)...(19): siRNA sense strand
aggcuaaguaucagcguuu

SEQ ID NO: 2660012 - RNA, 19 nt, Homo sapiens
  misc_RNA (1)...(19): siRNA sense strand
gguaaagaauguucauacu

SEQ ID NO: 2660013 - RNA, 19 nt, Homo sapiens
  misc_RNA (1)...(19): siRNA sense strand
ccaccgaaacacaagagua

SEQ ID NO: 2660014 - RNA, 19 nt, Homo sapiens
  misc_RNA (1)...(19): siRNA sense strand
caacuuuagagguggcaga

SEQ ID NO: 2660015 - RNA, 19 nt, Homo sapiens
  misc_RNA (1)...(19): siRNA sense strand
gagggaaaccaccgaaaca

SEQ ID NO: 2660016 - RNA, 19 nt, Homo sapiens
  misc_RNA (1)...(19): siRNA sense strand
gaaggaauauacagauguu

SEQ ID NO: 2660017 - RNA, 19 nt, Homo sapiens
  misc_RNA (1)...(19): siRNA sense strand
acgacaugacauugaaaga

SEQ ID NO: 2660018 - RNA, 19 nt, Homo sapiens
  misc_RNA (1)...(19): siRNA sense strand
gguugcuguuggcaggaaa

SEQ ID NO: 2660019 - RNA, 19 nt, Homo sapiens
  misc_RNA (1)...(19): siRNA sense strand
ggcagauguaaaugaaauu

SEQ ID NO: 2660020 - RNA, 19 nt, Homo sapiens
  misc_RNA (1)...(19): siRNA sense strand
ugacauugaaagaaggcga

SEQ ID NO: 2660021 - RNA, 19 nt, Homo sapiens
  misc_RNA (1)...(19): siRNA sense strand
gggaaaccaccgaaacaca

SEQ ID NO: 2660022 - RNA, 19 nt, Homo sapiens
  misc_RNA (1)...(19): siRNA sense strand
cucaacaaugcaagauaua

SEQ ID NO: 2660023 - RNA, 19 nt, Homo sapiens
  misc_RNA (1)...(19): siRNA sense strand
aagauauacacaaggcaga

SEQ ID NO: 2660024 - RNA, 19 nt, Homo sapiens
  misc_RNA (1)...(19): siRNA sense strand
cauaauuacucacaaacca

SEQ ID NO: 2660025 - RNA, 19 nt, Homo sapiens
  misc_RNA (1)...(19): siRNA sense strand
ggaaaccaccgaaacacaa

SEQ ID NO: 2660026 - RNA, 19 nt, Homo sapiens
  misc_RNA (1)...(19): siRNA sense strand
auucagauccagaaauaca

SEQ ID NO: 2660027 - RNA, 19 nt, Homo sapiens
  misc_RNA (1)...(19): siRNA sense strand
cgaaaagaacgguuacaga

SEQ ID NO: 2660028 - RNA, 19 nt, Homo sapiens
  misc_RNA (1)...(19): siRNA sense strand
aauuauacuacgcagagaa

SEQ ID NO: 2660029 - RNA, 19 nt, Homo sapiens
  misc_RNA (1)...(19): siRNA sense strand
auuauacuacgcagagaaa

SEQ ID NO: 2660030 - RNA, 19 nt, Homo sapiens
  misc_RNA (1)...(19): siRNA sense strand
auauacagauguugccaca

SEQ ID NO: 2660031 - RNA, 19 nt, Homo sapiens
  misc_RNA (1)...(19): siRNA sense strand
gcguaaacaucgagggagu

SEQ ID NO: 2660032 - RNA, 19 nt, Homo sapiens
  misc_RNA (1)...(19): siRNA sense strand
gggaacgagaucaggacaa

SEQ ID NO: 2660033 - RNA, 19 nt, Homo sapiens
  misc_RNA (1)...(19): siRNA sense strand
agaagggaccauagaacaa

SEQ ID NO: 2660034 - RNA, 19 nt, Homo sapiens
  misc_RNA (1)...(19): siRNA sense strand
agguaugacccgagacaga

SEQ ID NO: 2660035 - RNA, 19 nt, Homo sapiens
  misc_RNA (1)...(19): siRNA sense strand
cggacuauguacuggauga

SEQ ID NO: 2660036 - RNA, 19 nt, Homo sapiens
  misc_RNA (1)...(19): siRNA sense strand
ccuagaaaauugugcagaa

SEQ ID NO: 2660037 - RNA, 19 nt, Homo sapiens
  misc_RNA (1)...(19): siRNA sense strand
cuuccaaaguauucaggua

SEQ ID NO: 2660038 - RNA, 19 nt, Homo sapiens
  misc_RNA (1)...(19): siRNA sense strand
ugggagaauaagagcaaga

SEQ ID NO: 2660039 - RNA, 19 nt, Homo sapiens
  misc_RNA (1)...(19): siRNA sense strand
guugggagaauaagagcaa

SEQ ID NO: 2660040 - RNA, 19 nt, Homo sapiens
  misc_RNA (1)...(19): siRNA sense strand
ugauagaagacgcuggaga

SEQ ID NO: 2660041 - RNA, 19 nt, Homo sapiens
  misc_RNA (1)...(19): siRNA sense strand
uuaaagaaaccaagagucu

SEQ ID NO: 2660042 - RNA, 19 nt, Homo sapiens
  misc_RNA (1)...(19): siRNA sense strand
auagcaugguuaacaguaa

SEQ ID NO: 2660043 - RNA, 19 nt, Homo sapiens
  misc_RNA (1)...(19): siRNA sense strand
caagaugaauuacgcgaga

SEQ ID NO: 2660044 - RNA, 19 nt, Homo sapiens
  misc_RNA (1)...(19): siRNA sense strand
acuauagagcugaguauga

SEQ ID NO: 2660045 - RNA, 19 nt, Homo sapiens
  misc_RNA (1)...(19): siRNA sense strand
cugcaagcuggaugguuua

SEQ ID NO: 2660046 - RNA, 19 nt, Homo sapiens
  misc_RNA (1)...(19): siRNA sense strand
aguggaaggaagaugagua

SEQ ID NO: 2660047 - RNA, 19 nt, Homo sapiens
  misc_RNA (1)...(19): siRNA sense strand
uugaccaagcauugaauua

SEQ ID NO: 2660048 - RNA, 19 nt, Homo sapiens
  misc_RNA (1)...(19): siRNA sense strand
gauaugaagucaagccgca

SEQ ID NO: 2660049 - RNA, 19 nt, Homo sapiens
  misc_RNA (1)...(19): siRNA sense strand
cacuguaugaggagggauu

SEQ ID NO: 2660050 - RNA, 19 nt, Homo sapiens
  misc_RNA (1)...(19): siRNA sense strand
gcagguucccagagauaga

SEQ ID NO: 2660051 - RNA, 19 nt, Homo sapiens
  misc_RNA (1)...(19): siRNA sense strand
gaaaacaaguggaaggaag

SEQ ID NO: 2660052 - RNA, 19 nt, Homo sapiens
  misc_RNA (1)...(19): siRNA sense strand
cuagaaaauugugcagaaa

SEQ ID NO: 2660053 - RNA, 19 nt, Homo sapiens
  misc_RNA (1)...(19): siRNA sense strand
ccgcauccguucugcaaaa

SEQ ID NO: 2660054 - RNA, 19 nt, Homo sapiens
  misc_RNA (1)...(19): siRNA sense strand
cuuacaauggcaagcuuua

SEQ ID NO: 2660055 - RNA, 19 nt, Homo sapiens
  misc_RNA (1)...(19): siRNA sense strand
uauacaacccagagacuga

SEQ ID NO: 2660056 - RNA, 19 nt, Homo sapiens
  misc_RNA (1)...(19): siRNA sense strand
agguuaagacaucagaauu

SEQ ID NO: 2660057 - RNA, 19 nt, Homo sapiens
  misc_RNA (1)...(19): siRNA sense strand
cuguagguguuauugggaa

SEQ ID NO: 2660058 - RNA, 19 nt, Homo sapiens
  misc_RNA (1)...(19): siRNA sense strand
cggcguaaacaucgaggga

SEQ ID NO: 2660059 - RNA, 19 nt, Homo sapiens
  misc_RNA (1)...(19): siRNA sense strand
cgaggaaugauuggacaua

SEQ ID NO: 2660060 - RNA, 19 nt, Homo sapiens
  misc_RNA (1)...(19): siRNA sense strand
caguuaacaaauauggaca

SEQ ID NO: 2660061 - RNA, 19 nt, Homo sapiens
  misc_RNA (1)...(19): siRNA sense strand
cuuagaugauuucggcgua

SEQ ID NO: 2660062 - RNA, 19 nt, Homo sapiens
  misc_RNA (1)...(19): siRNA sense strand
agacauaccgauaccauca

SEQ ID NO: 2660063 - RNA, 19 nt, Homo sapiens
  misc_RNA (1)...(19): siRNA sense strand
gugugacugugcuggacaa

SEQ ID NO: 2660064 - RNA, 19 nt, Homo sapiens
  misc_RNA (1)...(19): siRNA sense strand
cggaugaaaacaaguggaa

SEQ ID NO: 2660065 - RNA, 19 nt, Homo sapiens
  misc_RNA (1)...(19): siRNA sense strand
acuacaguauuucgaggaa

SEQ ID NO: 2660066 - RNA, 19 nt, Homo sapiens
  misc_RNA (1)...(19): siRNA sense strand
acaaguggaaggaagauga

SEQ ID NO: 2660067 - RNA, 19 nt, Homo sapiens
  misc_RNA (1)...(19): siRNA sense strand
cgcuggagacauaccgaua

SEQ ID NO: 2660068 - RNA, 19 nt, Homo sapiens
  misc_RNA (1)...(19): siRNA sense strand
aggcagaaccagagaugag

SEQ ID NO: 2660069 - RNA, 19 nt, Homo sapiens
  misc_RNA (1)...(19): siRNA sense strand
agagauaugacaucaccaa

SEQ ID NO: 2660070 - RNA, 19 nt, Homo sapiens
  misc_RNA (1)...(19): siRNA sense strand
caccaacgauaaaugggaa

SEQ ID NO: 2660071 - RNA, 19 nt, Homo sapiens
  misc_RNA (1)...(19): siRNA sense strand
aagaagggaccauagaaca

SEQ ID NO: 2660072 - RNA, 19 nt, Homo sapiens
  misc_RNA (1)...(19): siRNA sense strand
gguucagagcacuguauga

SEQ ID NO: 2660073 - RNA, 19 nt, Homo sapiens
  misc_RNA (1)...(19): siRNA sense strand
cuggaugguuuacaaguau

SEQ ID NO: 2660074 - RNA, 19 nt, Homo sapiens
  misc_RNA (1)...(19): siRNA sense strand
gguguagcugggagagaaa

SEQ ID NO: 2660075 - RNA, 19 nt, Homo sapiens
  misc_RNA (1)...(19): siRNA sense strand
acauagaaggccuagguca

SEQ ID NO: 2660076 - RNA, 19 nt, Homo sapiens
  misc_RNA (1)...(19): siRNA sense strand
cguuaagaauggagagaaa

SEQ ID NO: 2660077 - RNA, 19 nt, Homo sapiens
  misc_RNA (1)...(19): siRNA sense strand
gcucgugaacaaagagaaa

SEQ ID NO: 2660078 - RNA, 19 nt, Homo sapiens
  misc_RNA (1)...(19): siRNA sense strand
ccgccuugcucgugaacaa

SEQ ID NO: 2660079 - RNA, 19 nt, Homo sapiens
  misc_RNA (1)...(19): siRNA sense strand
gcuccaaagaaaucagaaa

SEQ ID NO: 2660080 - RNA, 19 nt, Homo sapiens
  misc_RNA (1)...(19): siRNA sense strand
gcgaaaagagaaagaagaa

SEQ ID NO: 2660081 - RNA, 19 nt, Homo sapiens
  misc_RNA (1)...(19): siRNA sense strand
uggaggaaagacagagaaa

SEQ ID NO: 2660082 - RNA, 19 nt, Homo sapiens
  misc_RNA (1)...(19): siRNA sense strand
uuacaagaacgguuagaaa

SEQ ID NO: 2660083 - RNA, 19 nt, Homo sapiens
  misc_RNA (1)...(19): siRNA sense strand
uggcgaauucugagagcaa

SEQ ID NO: 2660084 - RNA, 19 nt, Homo sapiens
  misc_RNA (1)...(19): siRNA sense strand
gaaagaagaacaacggaga

SEQ ID NO: 2660085 - RNA, 19 nt, Homo sapiens
  misc_RNA (1)...(19): siRNA sense strand
ggagaaaaggagacagcaa

SEQ ID NO: 2660086 - RNA, 19 nt, Homo sapiens
  misc_RNA (1)...(19): siRNA sense strand
ccaucaaccaagugagaca

SEQ ID NO: 2660087 - RNA, 19 nt, Homo sapiens
  misc_RNA (1)...(19): siRNA sense strand
agaagaaagacaacgggaa

SEQ ID NO: 2660088 - RNA, 19 nt, Homo sapiens
  misc_RNA (1)...(19): siRNA sense strand
augaagaggcugaggcuga

SEQ ID NO: 2660089 - RNA, 19 nt, Homo sapiens
  misc_RNA (1)...(19): siRNA sense strand
ugauaaagaacaagccgaa

SEQ ID NO: 2660090 - RNA, 19 nt, Homo sapiens
  misc_RNA (1)...(19): siRNA sense strand
aagaacaagccgaaaggaa

SEQ ID NO: 2660091 - RNA, 19 nt, Homo sapiens
  misc_RNA (1)...(19): siRNA sense strand
ggaaguaguuucaagacca

SEQ ID NO: 2660092 - RNA, 19 nt, Homo sapiens
  misc_RNA (1)...(19): siRNA sense strand
aaucaaaagacauggcaaa

SEQ ID NO: 2660093 - RNA, 19 nt, Homo sapiens
  misc_RNA (1)...(19): siRNA sense strand
gaaagcugaaggagcgaaa

SEQ ID NO: 2660094 - RNA, 19 nt, Homo sapiens
  misc_RNA (1)...(19): siRNA sense strand
agaaaucagaaauggacaa

SEQ ID NO: 2660095 - RNA, 19 nt, Homo sapiens
  misc_RNA (1)...(19): siRNA sense strand
gaaaagagaaagaagaaca

SEQ ID NO: 2660096 - RNA, 19 nt, Homo sapiens
  misc_RNA (1)...(19): siRNA sense strand
cugacaaacgcaagaaaga

SEQ ID NO: 2660097 - RNA, 19 nt, Homo sapiens
  misc_RNA (1)...(19): siRNA sense strand
acauauaugaagaggcuga

SEQ ID NO: 2660098 - RNA, 19 nt, Homo sapiens
  misc_RNA (1)...(19): siRNA sense strand
ggagaauagcugcagaaga

SEQ ID NO: 2660099 - RNA, 19 nt, Homo sapiens
  misc_RNA (1)...(19): siRNA sense strand
gagaggagaaagaacacaa

SEQ ID NO: 2660100 - RNA, 19 nt, Homo sapiens
  misc_RNA (1)...(19): siRNA sense strand
acucaaagaugggcagcaa

SEQ ID NO: 2660101 - RNA, 19 nt, Homo sapiens
  misc_RNA (1)...(19): siRNA sense strand
aggugaauguggaaguauu

SEQ ID NO: 2660102 - RNA, 19 nt, Homo sapiens
  misc_RNA (1)...(19): siRNA sense strand
ccagaaaggcggaugaaac

SEQ ID NO: 2660103 - RNA, 19 nt, Homo sapiens
  misc_RNA (1)...(19): siRNA sense strand
cagaagaccacuugaaacu

SEQ ID NO: 2660104 - RNA, 19 nt, Homo sapiens
  misc_RNA (1)...(19): siRNA sense strand
ggaugaagcacaaaaggaa

SEQ ID NO: 2660105 - RNA, 19 nt, Homo sapiens
  misc_RNA (1)...(19): siRNA sense strand
gcgaauucugagagcaaaa

SEQ ID NO: 2660106 - RNA, 19 nt, Homo sapiens
  misc_RNA (1)...(19): siRNA sense strand
aagaacgguuagaaaggaa

SEQ ID NO: 2660107 - RNA, 19 nt, Homo sapiens
  misc_RNA (1)...(19): siRNA sense strand
caauguaugcggagagcca

SEQ ID NO: 2660108 - RNA, 19 nt, Homo sapiens
  misc_RNA (1)...(19): siRNA sense strand
ggagacagcaagacgccaa

SEQ ID NO: 2660109 - RNA, 19 nt, Homo sapiens
  misc_RNA (1)...(19): siRNA sense strand
aggaaaggaggaagcaaga

SEQ ID NO: 2660110 - RNA, 19 nt, Homo sapiens
  misc_RNA (1)...(19): siRNA sense strand
cgaucugcaucuacugaaa

SEQ ID NO: 2660111 - RNA, 19 nt, Homo sapiens
  misc_RNA (1)...(19): siRNA sense strand
ucacuguacccuugcguaa

SEQ ID NO: 2660112 - RNA, 19 nt, Homo sapiens
  misc_RNA (1)...(19): siRNA sense strand
ggagagugugaaaggguca

SEQ ID NO: 2660113 - RNA, 19 nt, Homo sapiens
  misc_RNA (1)...(19): siRNA sense strand
ucaagaggaagcugacaaa

SEQ ID NO: 2660114 - RNA, 19 nt, Homo sapiens
  misc_RNA (1)...(19): siRNA sense strand
aagaggaagaagaaagaca

SEQ ID NO: 2660115 - RNA, 19 nt, Homo sapiens
  misc_RNA (1)...(19): siRNA sense strand
agaaagacaacgggaagaa

SEQ ID NO: 2660116 - RNA, 19 nt, Homo sapiens
  misc_RNA (1)...(19): siRNA sense strand
gcacuaagcaaauccaaaa

SEQ ID NO: 2660117 - RNA, 19 nt, Homo sapiens
  misc_RNA (1)...(19): siRNA sense strand
cgggaagaaaugcagcaaa

SEQ ID NO: 2660118 - RNA, 19 nt, Homo sapiens
  misc_RNA (1)...(19): siRNA sense strand
gaagaaagcgacaaggacu

SEQ ID NO: 2660119 - RNA, 19 nt, Homo sapiens
  misc_RNA (1)...(19): siRNA sense strand
agaggaagaagaaagacaa

SEQ ID NO: 2660120 - RNA, 19 nt, Homo sapiens
  misc_RNA (1)...(19): siRNA sense strand
aaacagacaaggagagaag

SEQ ID NO: 2660121 - RNA, 19 nt, Homo sapiens
  misc_RNA (1)...(19): siRNA sense strand
uacaacagaugcaggacaa

SEQ ID NO: 2660122 - RNA, 19 nt, Homo sapiens
  misc_RNA (1)...(19): siRNA sense strand
gaggaaagacagagaaagc

SEQ ID NO: 2660123 - RNA, 19 nt, Homo sapiens
  misc_RNA (1)...(19): siRNA sense strand
aagaagaacaacggagaau

SEQ ID NO: 2660124 - RNA, 19 nt, Homo sapiens
  misc_RNA (1)...(19): siRNA sense strand
gcauagaagcacucccgaa

SEQ ID NO: 2660125 - RNA, 19 nt, Homo sapiens
  misc_RNA (1)...(19): siRNA sense strand
gaagaaagacaacgggaag

SEQ ID NO: 2660126 - RNA, 19 nt, Homo sapiens
  misc_RNA (1)...(19): siRNA sense strand
ugacauauaugaagaggcu

SEQ ID NO: 2660127 - RNA, 19 nt, Homo sapiens
  misc_RNA (1)...(19): siRNA sense strand
caagacgccaauaaagaaa

SEQ ID NO: 2660128 - RNA, 19 nt, Homo sapiens
  misc_RNA (1)...(19): siRNA sense strand
gaaggagcgaaaagagaaa

SEQ ID NO: 2660129 - RNA, 19 nt, Homo sapiens
  misc_RNA (1)...(19): siRNA sense strand
caaagaaaucagaaaugga

SEQ ID NO: 2660130 - RNA, 19 nt, Homo sapiens
  misc_RNA (1)...(19): siRNA sense strand
guguauaugacaaggaauc

SEQ ID NO: 2660131 - RNA, 19 nt, Homo sapiens
  misc_RNA (1)...(19): siRNA sense strand
aagcaucucccaaggcaaa

SEQ ID NO: 2660132 - RNA, 19 nt, Homo sapiens
  misc_RNA (1)...(19): siRNA sense strand
cuaugaagagucugguaau

SEQ ID NO: 2660133 - RNA, 19 nt, Homo sapiens
  misc_RNA (1)...(19): siRNA sense strand
ucuaaauggcacaggcuca

SEQ ID NO: 2660134 - RNA, 19 nt, Homo sapiens
  misc_RNA (1)...(19): siRNA sense strand
gaaaugcagcaaaggguca

SEQ ID NO: 2660135 - RNA, 19 nt, Homo sapiens
  misc_RNA (1)...(19): siRNA sense strand
aaagaugggcagcaacaaa

SEQ ID NO: 2660136 - RNA, 19 nt, Homo sapiens
  misc_RNA (1)...(19): siRNA sense strand
ucaaagaugggcagcaaca

SEQ ID NO: 2660137 - RNA, 19 nt, Homo sapiens
  misc_RNA (1)...(19): siRNA sense strand
acacgagagaauuauguua

SEQ ID NO: 2660138 - RNA, 19 nt, Homo sapiens
  misc_RNA (1)...(19): siRNA sense strand
aaagaagaacaacggagaa

SEQ ID NO: 2660139 - RNA, 19 nt, Homo sapiens
  misc_RNA (1)...(19): siRNA sense strand
agaagaacaacggagaaua

SEQ ID NO: 2660140 - RNA, 19 nt, Homo sapiens
  misc_RNA (1)...(19): siRNA sense strand
caauaaacgaucugcaucu

SEQ ID NO: 2660141 - RNA, 19 nt, Homo sapiens
  misc_RNA (1)...(19): siRNA sense strand
agaaaggauggcuggauca

SEQ ID NO: 2660142 - RNA, 19 nt, Homo sapiens
  misc_RNA (1)...(19): siRNA sense strand
uggacauggugguucacaa

SEQ ID NO: 2660143 - RNA, 19 nt, Homo sapiens
  misc_RNA (1)...(19): siRNA sense strand
agaacagcggagagcggaa

SEQ ID NO: 2660144 - RNA, 19 nt, Homo sapiens
  misc_RNA (1)...(19): siRNA sense strand
aggaagaagccuuaaacaa

SEQ ID NO: 2660145 - RNA, 19 nt, Homo sapiens
  misc_RNA (1)...(19): siRNA sense strand
uggcaaagcagaagcagaa

SEQ ID NO: 2660146 - RNA, 19 nt, Homo sapiens
  misc_RNA (1)...(19): siRNA sense strand
cauaagaguuugacagcga

SEQ ID NO: 2660147 - RNA, 19 nt, Homo sapiens
  misc_RNA (1)...(19): siRNA sense strand
gggcauuuacucuaagaaa

SEQ ID NO: 2660148 - RNA, 19 nt, Homo sapiens
  misc_RNA (1)...(19): siRNA sense strand
aggaaagccugcuggucaa

SEQ ID NO: 2660149 - RNA, 19 nt, Homo sapiens
  misc_RNA (1)...(19): siRNA sense strand
ggguauggccugggcgaua

SEQ ID NO: 2660150 - RNA, 19 nt, Homo sapiens
  misc_RNA (1)...(19): siRNA sense strand
ggucuaaauuccagccaca

SEQ ID NO: 2660151 - RNA, 19 nt, Homo sapiens
  misc_RNA (1)...(19): siRNA sense strand
cugcucaggccuugggaaa

SEQ ID NO: 2660152 - RNA, 19 nt, Homo sapiens
  misc_RNA (1)...(19): siRNA sense strand
gaagaagaaaagagcauaa

SEQ ID NO: 2660153 - RNA, 19 nt, Homo sapiens
  misc_RNA (1)...(19): siRNA sense strand
gagcauaaccaaaccaaaa

SEQ ID NO: 2660154 - RNA, 19 nt, Homo sapiens
  misc_RNA (1)...(19): siRNA sense strand
ggauugagugggugugaau

SEQ ID NO: 2660155 - RNA, 19 nt, Homo sapiens
  misc_RNA (1)...(19): siRNA sense strand
gggaauggacagugcagau

SEQ ID NO: 2660156 - RNA, 19 nt, Homo sapiens
  misc_RNA (1)...(19): siRNA sense strand
gggaaauaaaguccagcaa

SEQ ID NO: 2660157 - RNA, 19 nt, Homo sapiens
  misc_RNA (1)...(19): siRNA sense strand
gggugugaauucaaaggaa

SEQ ID NO: 2660158 - RNA, 19 nt, Homo sapiens
  misc_RNA (1)...(19): siRNA sense strand
acgaaaagaagcugggaau

SEQ ID NO: 2660159 - RNA, 19 nt, Homo sapiens
  misc_RNA (1)...(19): siRNA sense strand
cagcagaggcucagguguu

SEQ ID NO: 2660160 - RNA, 19 nt, Homo sapiens
  misc_RNA (1)...(19): siRNA sense strand
cagccaaaggagauguuua

SEQ ID NO: 2660161 - RNA, 19 nt, Homo sapiens
  misc_RNA (1)...(19): siRNA sense strand
gugaaagagcugaaaacua

SEQ ID NO: 2660162 - RNA, 19 nt, Homo sapiens
  misc_RNA (1)...(19): siRNA sense strand
cagcaaguguuuuggguau

SEQ ID NO: 2660163 - RNA, 19 nt, Homo sapiens
  misc_RNA (1)...(19): siRNA sense strand
ugagaguggugaugguaau

SEQ ID NO: 2660164 - RNA, 19 nt, Homo sapiens
  misc_RNA (1)...(19): siRNA sense strand
acccuaaaguggagcaaga

SEQ ID NO: 2660165 - RNA, 19 nt, Homo sapiens
  misc_RNA (1)...(19): siRNA sense strand
ccaaaagaaaucaacgaaa

SEQ ID NO: 2660166 - RNA, 19 nt, Homo sapiens
  misc_RNA (1)...(19): siRNA sense strand
gccugaagacccacagaaa

SEQ ID NO: 2660167 - RNA, 19 nt, Homo sapiens
  misc_RNA (1)...(19): siRNA sense strand
agagagagcuccugggaag

SEQ ID NO: 2660168 - RNA, 19 nt, Homo sapiens
  misc_RNA (1)...(19): siRNA sense strand
ccucacgacuagagaaaau

SEQ ID NO: 2660169 - RNA, 19 nt, Homo sapiens
  misc_RNA (1)...(19): siRNA sense strand
gauaaagaugacaugggaa

SEQ ID NO: 2660170 - RNA, 19 nt, Homo sapiens
  misc_RNA (1)...(19): siRNA sense strand
aauaauaaccagcaugcaa

SEQ ID NO: 2660171 - RNA, 19 nt, Homo sapiens
  misc_RNA (1)...(19): siRNA sense strand
aagcagaagcagaagaguu

SEQ ID NO: 2660172 - RNA, 19 nt, Homo sapiens
  misc_RNA (1)...(19): siRNA sense strand
ccugaagagcagaaugauu

SEQ ID NO: 2660173 - RNA, 19 nt, Homo sapiens
  misc_RNA (1)...(19): siRNA sense strand
gauuugaagcucagaagau

SEQ ID NO: 2660174 - RNA, 19 nt, Homo sapiens
  misc_RNA (1)...(19): siRNA sense strand
gcagauuccucaagccaga

SEQ ID NO: 2660175 - RNA, 19 nt, Homo sapiens
  misc_RNA (1)...(19): siRNA sense strand
ggacauaaaaucagaagca

SEQ ID NO: 2660176 - RNA, 19 nt, Homo sapiens
  misc_RNA (1)...(19): siRNA sense strand
agcagaagcagaagaguuu

SEQ ID NO: 2660177 - RNA, 19 nt, Homo sapiens
  misc_RNA (1)...(19): siRNA sense strand
cugaagacccacagaaagu

SEQ ID NO: 2660178 - RNA, 19 nt, Homo sapiens
  misc_RNA (1)...(19): siRNA sense strand
gugugaauucaaaggaaga

SEQ ID NO: 2660179 - RNA, 19 nt, Homo sapiens
  misc_RNA (1)...(19): siRNA sense strand
gccagaaacagaacaacaa

SEQ ID NO: 2660180 - RNA, 19 nt, Homo sapiens
  misc_RNA (1)...(19): siRNA sense strand
aagaagauggagaagaaaa

SEQ ID NO: 2660181 - RNA, 19 nt, Homo sapiens
  misc_RNA (1)...(19): siRNA sense strand
agaaaagagcauaaccaaa

SEQ ID NO: 2660182 - RNA, 19 nt, Homo sapiens
  misc_RNA (1)...(19): siRNA sense strand
gaccucacgacuagagaaa

SEQ ID NO: 2660183 - RNA, 19 nt, Homo sapiens
  misc_RNA (1)...(19): siRNA sense strand
gggaagugcagcaguuuua

SEQ ID NO: 2660184 - RNA, 19 nt, Homo sapiens
  misc_RNA (1)...(19): siRNA sense strand
aggaagagaugaagcuuuu

SEQ ID NO: 2660185 - RNA, 19 nt, Homo sapiens
  misc_RNA (1)...(19): siRNA sense strand
cugaaagcauggccaagaa

SEQ ID NO: 2660186 - RNA, 19 nt, Homo sapiens
  misc_RNA (1)...(19): siRNA sense strand
cugaagaagaaaagagcau

SEQ ID NO: 2660187 - RNA, 19 nt, Homo sapiens
  misc_RNA (1)...(19): siRNA sense strand
guuagaagaucaagaagcu

SEQ ID NO: 2660188 - RNA, 19 nt, Homo sapiens
  misc_RNA (1)...(19): siRNA sense strand
acaacaaaacugagaugua

SEQ ID NO: 2660189 - RNA, 19 nt, Homo sapiens
  misc_RNA (1)...(19): siRNA sense strand
gcauauggaagaagaugga

SEQ ID NO: 2660190 - RNA, 19 nt, Homo sapiens
  misc_RNA (1)...(19): siRNA sense strand
uguucaaacuaucugcaaa

SEQ ID NO: 2660191 - RNA, 19 nt, Homo sapiens
  misc_RNA (1)...(19): siRNA sense strand
gcagcagcucagaggaaga

SEQ ID NO: 2660192 - RNA, 19 nt, Homo sapiens
  misc_RNA (1)...(19): siRNA sense strand
ucgugaaauuuauggcaca

SEQ ID NO: 2660193 - RNA, 19 nt, Homo sapiens
  misc_RNA (1)...(19): siRNA sense strand
aggaagaaagccaaagcau

SEQ ID NO: 2660194 - RNA, 19 nt, Homo sapiens
  misc_RNA (1)...(19): siRNA sense strand
gccaaagcauggagccaca

SEQ ID NO: 2660195 - RNA, 19 nt, Homo sapiens
  misc_RNA (1)...(19): siRNA sense strand
cagugaauguaccuguaaa

SEQ ID NO: 2660196 - RNA, 19 nt, Homo sapiens
  misc_RNA (1)...(19): siRNA sense strand
gaguggugaugguaauaau

SEQ ID NO: 2660197 - RNA, 19 nt, Homo sapiens
  misc_RNA (1)...(19): siRNA sense strand
uaacuauggcaaagcagaa

SEQ ID NO: 2660198 - RNA, 19 nt, Homo sapiens
  misc_RNA (1)...(19): siRNA sense strand
ggaaguuugaagaugaaca

SEQ ID NO: 2660199 - RNA, 19 nt, Homo sapiens
  misc_RNA (1)...(19): siRNA sense strand
auaauaaccagcaugcaaa

SEQ ID NO: 2660200 - RNA, 19 nt, Homo sapiens
  misc_RNA (1)...(19): siRNA sense strand
gagaagaaaaggagcaagu

SEQ ID NO: 2660201 - RNA, 19 nt, Homo sapiens
  misc_RNA (1)...(19): siRNA sense strand
ccuucaagugauuguggaa

SEQ ID NO: 2660202 - RNA, 19 nt, Homo sapiens
  misc_RNA (1)...(19): siRNA sense strand
ccagaaacagaacaacaaa

SEQ ID NO: 2660203 - RNA, 19 nt, Homo sapiens
  misc_RNA (1)...(19): siRNA sense strand
ggguaugacaaguacuaca

SEQ ID NO: 2660204 - RNA, 19 nt, Homo sapiens
  misc_RNA (1)...(19): siRNA sense strand
aaggagauguuuaugccaa

SEQ ID NO: 2660205 - RNA, 19 nt, Homo sapiens
  misc_RNA (1)...(19): siRNA sense strand
ggggaaguuugaagaugaa

SEQ ID NO: 2660206 - RNA, 19 nt, Homo sapiens
  misc_RNA (1)...(19): siRNA sense strand
gaggaaaggaagagaagaa

SEQ ID NO: 2660207 - RNA, 19 nt, Homo sapiens
  misc_RNA (1)...(19): siRNA sense strand
gguaaagaugguaaagaaa

SEQ ID NO: 2660208 - RNA, 19 nt, Homo sapiens
  misc_RNA (1)...(19): siRNA sense strand
aagaguaaggagagagaaa

SEQ ID NO: 2660209 - RNA, 19 nt, Homo sapiens
  misc_RNA (1)...(19): siRNA sense strand
gagaaauggacaagaaaga

SEQ ID NO: 2660210 - RNA, 19 nt, Homo sapiens
  misc_RNA (1)...(19): siRNA sense strand
caagaaagggaaagagaga

SEQ ID NO: 2660211 - RNA, 19 nt, Homo sapiens
  misc_RNA (1)...(19): siRNA sense strand
gauaaagaacugggagaaa

SEQ ID NO: 2660212 - RNA, 19 nt, Homo sapiens
  misc_RNA (1)...(19): siRNA sense strand
gagagaaagaaaaggaaaa

SEQ ID NO: 2660213 - RNA, 19 nt, Homo sapiens
  misc_RNA (1)...(19): siRNA sense strand
gcaagagagaccaaggaaa

SEQ ID NO: 2660214 - RNA, 19 nt, Homo sapiens
  misc_RNA (1)...(19): siRNA sense strand
acaagaaagauuuggacaa

SEQ ID NO: 2660215 - RNA, 19 nt, Homo sapiens
  misc_RNA (1)...(19): siRNA sense strand
ugaaagaagugguacaaaa

SEQ ID NO: 2660216 - RNA, 19 nt, Homo sapiens
  misc_RNA (1)...(19): siRNA sense strand
gagaaagagauauagcaaa

SEQ ID NO: 2660217 - RNA, 19 nt, Homo sapiens
  misc_RNA (1)...(19): siRNA sense strand
gagaaauugcggaagcuaa

SEQ ID NO: 2660218 - RNA, 19 nt, Homo sapiens
  misc_RNA (1)...(19): siRNA sense strand
gugugaaagcuguuaauaa

SEQ ID NO: 2660219 - RNA, 19 nt, Homo sapiens
  misc_RNA (1)...(19): siRNA sense strand
gagauauagcaaaggaaau

SEQ ID NO: 2660220 - RNA, 19 nt, Homo sapiens
  misc_RNA (1)...(19): siRNA sense strand
ggauaaagaacugggagaa

SEQ ID NO: 2660221 - RNA, 19 nt, Homo sapiens
  misc_RNA (1)...(19): siRNA sense strand
uuggacaagucaagggaaa

SEQ ID NO: 2660222 - RNA, 19 nt, Homo sapiens
  misc_RNA (1)...(19): siRNA sense strand
auccagagaaagagagaaa

SEQ ID NO: 2660223 - RNA, 19 nt, Homo sapiens
  misc_RNA (1)...(19): siRNA sense strand
gcaaaggaaaugaaaucaa

SEQ ID NO: 2660224 - RNA, 19 nt, Homo sapiens
  misc_RNA (1)...(19): siRNA sense strand
agaggagaaaguagagaaa

SEQ ID NO: 2660225 - RNA, 19 nt, Homo sapiens
  misc_RNA (1)...(19): siRNA sense strand
ggaaaugacaauggagcaa

SEQ ID NO: 2660226 - RNA, 19 nt, Homo sapiens
  misc_RNA (1)...(19): siRNA sense strand
gcauagugauagagccaca

SEQ ID NO: 2660227 - RNA, 19 nt, Homo sapiens
  misc_RNA (1)...(19): siRNA sense strand
uguuaagagaagagaauga

SEQ ID NO: 2660228 - RNA, 19 nt, Homo sapiens
  misc_RNA (1)...(19): siRNA sense strand
cauauuagacauugagaca

SEQ ID NO: 2660229 - RNA, 19 nt, Homo sapiens
  misc_RNA (1)...(19): siRNA sense strand
agugaaaguccuugugaau

SEQ ID NO: 2660230 - RNA, 19 nt, Homo sapiens
  misc_RNA (1)...(19): siRNA sense strand
guauuuaguuucagacaca

SEQ ID NO: 2660231 - RNA, 19 nt, Homo sapiens
  misc_RNA (1)...(19): siRNA sense strand
agaagagaaugaagguuau

SEQ ID NO: 2660232 - RNA, 19 nt, Homo sapiens
  misc_RNA (1)...(19): siRNA sense strand
cuguauggccaguggaaga

SEQ ID NO: 2660233 - RNA, 19 nt, Homo sapiens
  misc_RNA (1)...(19): siRNA sense strand
aacaauagacagagccaaa

SEQ ID NO: 2660234 - RNA, 19 nt, Homo sapiens
  misc_RNA (1)...(19): siRNA sense strand
cuuaauaacaccuguagua

SEQ ID NO: 2660235 - RNA, 19 nt, Homo sapiens
  misc_RNA (1)...(19): siRNA sense strand
agagaaagagauauagcaa

SEQ ID NO: 2660236 - RNA, 19 nt, Homo sapiens
  misc_RNA (1)...(19): siRNA sense strand
aguucaacauacagagauu

SEQ ID NO: 2660237 - RNA, 19 nt, Homo sapiens
  misc_RNA (1)...(19): siRNA sense strand
gugaauuucgugaggauau

SEQ ID NO: 2660238 - RNA, 19 nt, Homo sapiens
  misc_RNA (1)...(19): siRNA sense strand
ggaaccaaauggcgagaca

SEQ ID NO: 2660239 - RNA, 19 nt, Homo sapiens
  misc_RNA (1)...(19): siRNA sense strand
agagaguucuacagagauu

SEQ ID NO: 2660240 - RNA, 19 nt, Homo sapiens
  misc_RNA (1)...(19): siRNA sense strand
ggaaaauguuaaaggagga

SEQ ID NO: 2660241 - RNA, 19 nt, Homo sapiens
  misc_RNA (1)...(19): siRNA sense strand
cguaaagaggagaauggaa

SEQ ID NO: 2660242 - RNA, 19 nt, Homo sapiens
  misc_RNA (1)...(19): siRNA sense strand
uggauaaagaacugggaga

SEQ ID NO: 2660243 - RNA, 19 nt, Homo sapiens
  misc_RNA (1)...(19): siRNA sense strand
ccuugaaacaggcgaauau

SEQ ID NO: 2660244 - RNA, 19 nt, Homo sapiens
  misc_RNA (1)...(19): siRNA sense strand
agagauauagcaaaggaaa

SEQ ID NO: 2660245 - RNA, 19 nt, Homo sapiens
  misc_RNA (1)...(19): siRNA sense strand
gagagaaauggacaagaaa

SEQ ID NO: 2660246 - RNA, 19 nt, Homo sapiens
  misc_RNA (1)...(19): siRNA sense strand
uggaugagcgagagaaaga

SEQ ID NO: 2660247 - RNA, 19 nt, Homo sapiens
  misc_RNA (1)...(19): siRNA sense strand
cgucaaaguaugaugaacu

SEQ ID NO: 2660248 - RNA, 19 nt, Homo sapiens
  misc_RNA (1)...(19): siRNA sense strand
ccaagaguaaggagagaga

SEQ ID NO: 2660249 - RNA, 19 nt, Homo sapiens
  misc_RNA (1)...(19): siRNA sense strand
gaugaacacaaacgagaaa

SEQ ID NO: 2660250 - RNA, 19 nt, Homo sapiens
  misc_RNA (1)...(19): siRNA sense strand
ggccaguggaagaaugaaa

SEQ ID NO: 2660251 - RNA, 19 nt, Homo sapiens
  misc_RNA (1)...(19): siRNA sense strand
guugaaaaguagaaaguca

SEQ ID NO: 2660252 - RNA, 19 nt, Homo sapiens
  misc_RNA (1)...(19): siRNA sense strand
ggccaggguacuugguaaa

SEQ ID NO: 2660253 - RNA, 19 nt, Homo sapiens
  misc_RNA (1)...(19): siRNA sense strand
auccagagaaagagauaua

SEQ ID NO: 2660254 - RNA, 19 nt, Homo sapiens
  misc_RNA (1)...(19): siRNA sense strand
gucaaaaucuucaggcaaa

SEQ ID NO: 2660255 - RNA, 19 nt, Homo sapiens
  misc_RNA (1)...(19): siRNA sense strand
ucauauaacuauugagccu

SEQ ID NO: 2660256 - RNA, 19 nt, Homo sapiens
  misc_RNA (1)...(19): siRNA sense strand
augagaaagacaaggaaaa

SEQ ID NO: 2660257 - RNA, 19 nt, Homo sapiens
  misc_RNA (1)...(19): siRNA sense strand
gcauuauggaugaacacaa

SEQ ID NO: 2660258 - RNA, 19 nt, Homo sapiens
  misc_RNA (1)...(19): siRNA sense strand
gcacagaacauuauggauc

SEQ ID NO: 2660259 - RNA, 19 nt, Homo sapiens
  misc_RNA (1)...(19): siRNA sense strand
augcauuggcuaugggcua

SEQ ID NO: 2660260 - RNA, 19 nt, Homo sapiens
  misc_RNA (1)...(19): siRNA sense strand
gaauucaagcaauggaaau

SEQ ID NO: 2660261 - RNA, 19 nt, Homo sapiens
  misc_RNA (1)...(19): siRNA sense strand
ggaugaacacaaacgagaa

SEQ ID NO: 2660262 - RNA, 19 nt, Homo sapiens
  misc_RNA (1)...(19): siRNA sense strand
caaacgagaaauugcggaa

SEQ ID NO: 2660263 - RNA, 19 nt, Homo sapiens
  misc_RNA (1)...(19): siRNA sense strand
aggaaagaaugaaacauga

SEQ ID NO: 2660264 - RNA, 19 nt, Homo sapiens
  misc_RNA (1)...(19): siRNA sense strand
uuacagaggaaaugacaau

SEQ ID NO: 2660265 - RNA, 19 nt, Homo sapiens
  misc_RNA (1)...(19): siRNA sense strand
gcuaugaacgagaagucaa

SEQ ID NO: 2660266 - RNA, 19 nt, Homo sapiens
  misc_RNA (1)...(19): siRNA sense strand
ggaagagcggccaaauaaa

SEQ ID NO: 2660267 - RNA, 19 nt, Homo sapiens
  misc_RNA (1)...(19): siRNA sense strand
gaugagaaauuuaagacca

SEQ ID NO: 2660268 - RNA, 19 nt, Homo sapiens
  misc_RNA (1)...(19): siRNA sense strand
ccauccagagaaagagaua

SEQ ID NO: 2660269 - RNA, 19 nt, Homo sapiens
  misc_RNA (1)...(19): siRNA sense strand
auaaagaacugggagaaau

SEQ ID NO: 2660270 - RNA, 19 nt, Homo sapiens
  misc_RNA (1)...(19): siRNA sense strand
aauggaugagcgagagaaa

SEQ ID NO: 2660271 - RNA, 19 nt, Homo sapiens
  misc_RNA (1)...(19): siRNA sense strand
gggagagagaaguggacaa

SEQ ID NO: 2660272 - RNA, 19 nt, Homo sapiens
  misc_RNA (1)...(19): siRNA sense strand
acuuaaggaaugacagaaa

SEQ ID NO: 2660273 - RNA, 19 nt, Homo sapiens
  misc_RNA (1)...(19): siRNA sense strand
gaucagagauggugcccuu

SEQ ID NO: 2660274 - RNA, 19 nt, Homo sapiens
  misc_RNA (1)...(19): siRNA sense strand
agcaagaacguuaggagaa

SEQ ID NO: 2660275 - RNA, 19 nt, Homo sapiens
  misc_RNA (1)...(19): siRNA sense strand
cagcaagaacguuaggaga

SEQ ID NO: 2660276 - RNA, 19 nt, Homo sapiens
  misc_RNA (1)...(19): siRNA sense strand
acauuguagugaagaaaga

SEQ ID NO: 2660277 - RNA, 19 nt, Homo sapiens
  misc_RNA (1)...(19): siRNA sense strand
accauaaggcuaacagaaa

SEQ ID NO: 2660278 - RNA, 19 nt, Homo sapiens
  misc_RNA (1)...(19): siRNA sense strand
cagaaagugccaucacaua

SEQ ID NO: 2660279 - RNA, 19 nt, Homo sapiens
  misc_RNA (1)...(19): siRNA sense strand
gguggaaagguuaugacaa

SEQ ID NO: 2660280 - RNA, 19 nt, Homo sapiens
  misc_RNA (1)...(19): siRNA sense strand
aguuugagguugaagcuau

SEQ ID NO: 2660281 - RNA, 19 nt, Homo sapiens
  misc_RNA (1)...(19): siRNA sense strand
aagagugaaaggugggcaa

SEQ ID NO: 2660282 - RNA, 19 nt, Homo sapiens
  misc_RNA (1)...(19): siRNA sense strand
caucacauacagagacauu

SEQ ID NO: 2660283 - RNA, 19 nt, Homo sapiens
  misc_RNA (1)...(19): siRNA sense strand
gcuaucaacuagaucgaca

SEQ ID NO: 2660284 - RNA, 19 nt, Homo sapiens
  misc_RNA (1)...(19): siRNA sense strand
gcacuucaccauaaggcua

SEQ ID NO: 2660285 - RNA, 19 nt, Homo sapiens
  misc_RNA (1)...(19): siRNA sense strand
gggacaacagacaugcaua

SEQ ID NO: 2660286 - RNA, 19 nt, Homo sapiens
  misc_RNA (1)...(19): siRNA sense strand
gugaaaggugggcaaagaa

SEQ ID NO: 2660287 - RNA, 19 nt, Homo sapiens
  misc_RNA (1)...(19): siRNA sense strand
agacauuguagugaagaaa

SEQ ID NO: 2660288 - RNA, 19 nt, Homo sapiens
  misc_RNA (1)...(19): siRNA sense strand
ugacaaaagacaggauaaa

SEQ ID NO: 2660289 - RNA, 19 nt, Homo sapiens
  misc_RNA (1)...(19): siRNA sense strand
guuugagguugaagcuauu

SEQ ID NO: 2660290 - RNA, 19 nt, Homo sapiens
  misc_RNA (1)...(19): siRNA sense strand
ggcacaaacacuucagaga

SEQ ID NO: 2660291 - RNA, 19 nt, Homo sapiens
  misc_RNA (1)...(19): siRNA sense strand
ggccaaugagagagagugu

SEQ ID NO: 2660292 - RNA, 19 nt, Homo sapiens
  misc_RNA (1)...(19): siRNA sense strand
gacacaaagaauauggaga

SEQ ID NO: 2660293 - RNA, 19 nt, Homo sapiens
  misc_RNA (1)...(19): siRNA sense strand
ccaucaagaacuuugugaa

SEQ ID NO: 2660294 - RNA, 19 nt, Homo sapiens
  misc_RNA (1)...(19): siRNA sense strand
guuaugacaaacaggauga

SEQ ID NO: 2660295 - RNA, 19 nt, Homo sapiens
  misc_RNA (1)...(19): siRNA sense strand
ugugaggugcugaggaaga

SEQ ID NO: 2660296 - RNA, 19 nt, Homo sapiens
  misc_RNA (1)...(19): siRNA sense strand
uucagaaacuugagaaacu

SEQ ID NO: 2660297 - RNA, 19 nt, Homo sapiens
  misc_RNA (1)...(19): siRNA sense strand
gauaaacaccacaggucca

SEQ ID NO: 2660298 - RNA, 19 nt, Homo sapiens
  misc_RNA (1)...(19): siRNA sense strand
ucaaggugacagaagggaa

SEQ ID NO: 2660299 - RNA, 19 nt, Homo sapiens
  misc_RNA (1)...(19): siRNA sense strand
agaacaagacucagaugca

SEQ ID NO: 2660300 - RNA, 19 nt, Homo sapiens
  misc_RNA (1)...(19): siRNA sense strand
ugguauuaauagacccauu

SEQ ID NO: 2660301 - RNA, 19 nt, Homo sapiens
  misc_RNA (1)...(19): siRNA sense strand
gccaaugggacaacagaca

SEQ ID NO: 2660302 - RNA, 19 nt, Homo sapiens
  misc_RNA (1)...(19): siRNA sense strand
uguuaauugcugggcgaaa

SEQ ID NO: 2660303 - RNA, 19 nt, Homo sapiens
  misc_RNA (1)...(19): siRNA sense strand
cuuuauaguggcacaaaca

SEQ ID NO: 2660304 - RNA, 19 nt, Homo sapiens
  misc_RNA (1)...(19): siRNA sense strand
auauuaaguuggaguugga

SEQ ID NO: 2660305 - RNA, 19 nt, Homo sapiens
  misc_RNA (1)...(19): siRNA sense strand
guucagugcagcuggaagu

SEQ ID NO: 2660306 - RNA, 19 nt, Homo sapiens
  misc_RNA (1)...(19): siRNA sense strand
aacaaugccagaagaagaa

SEQ ID NO: 2660307 - RNA, 19 nt, Homo sapiens
  misc_RNA (1)...(19): siRNA sense strand
caggaugacacuugggaac

SEQ ID NO: 2660308 - RNA, 19 nt, Homo sapiens
  misc_RNA (1)...(19): siRNA sense strand
auacagaacaagacucaga

SEQ ID NO: 2660309 - RNA, 19 nt, Homo sapiens
  misc_RNA (1)...(19): siRNA sense strand
gauucaaauuaaggagcuu

SEQ ID NO: 2660310 - RNA, 19 nt, Homo sapiens
  misc_RNA (1)...(19): siRNA sense strand
ugcagaacagacuggaaua

SEQ ID NO: 2660311 - RNA, 19 nt, Homo sapiens
  misc_RNA (1)...(19): siRNA sense strand
uuaaggaaugacagaaaca

SEQ ID NO: 2660312 - RNA, 19 nt, Homo sapiens
  misc_RNA (1)...(19): siRNA sense strand
uuaaguuggaguuggaaca

SEQ ID NO: 2660313 - RNA, 19 nt, Homo sapiens
  misc_RNA (1)...(19): siRNA sense strand
gaucuggagcucagcccaa

SEQ ID NO: 2660314 - RNA, 19 nt, Homo sapiens
  misc_RNA (1)...(19): siRNA sense strand
agaaagacacagaacgauc

SEQ ID NO: 2660315 - RNA, 19 nt, Homo sapiens
  misc_RNA (1)...(19): siRNA sense strand
cucaguuccaagagugaaa

SEQ ID NO: 2660316 - RNA, 19 nt, Homo sapiens
  misc_RNA (1)...(19): siRNA sense strand
agauggugcccuugacuuu

SEQ ID NO: 2660317 - RNA, 19 nt, Homo sapiens
  misc_RNA (1)...(19): siRNA sense strand
uuacaaugcaacaggaaca

SEQ ID NO: 2660318 - RNA, 19 nt, Homo sapiens
  misc_RNA (1)...(19): siRNA sense strand
aagaacaggaguuggguga

SEQ ID NO: 2660319 - RNA, 19 nt, Homo sapiens
  misc_RNA (1)...(19): siRNA sense strand
gguuaagagagaaagcaga

SEQ ID NO: 2660320 - RNA, 19 nt, Homo sapiens
  misc_RNA (1)...(19): siRNA sense strand
agcuggacuuuguggguua

SEQ ID NO: 2660321 - RNA, 19 nt, Homo sapiens
  misc_RNA (1)...(19): siRNA sense strand
ugcaacaggaacaaagaaa

SEQ ID NO: 2660322 - RNA, 19 nt, Homo sapiens
  misc_RNA (1)...(19): siRNA sense strand
auaacaaagaacaggaguu

SEQ ID NO: 2660323 - RNA, 19 nt, Homo sapiens
  misc_RNA (1)...(19): siRNA sense strand
uuguggguuaagagagaaa

SEQ ID NO: 2660324 - RNA, 19 nt, Homo sapiens
  misc_RNA (1)...(19): siRNA sense strand
aagggagcuuccugagcaa

SEQ ID NO: 2660325 - RNA, 19 nt, Homo sapiens
  misc_RNA (1)...(19): siRNA sense strand
agguggaauugcaggaaga

SEQ ID NO: 2660326 - RNA, 19 nt, Homo sapiens
  misc_RNA (1)...(19): siRNA sense strand
ugcaggaacucaagggcaa

SEQ ID NO: 2660327 - RNA, 19 nt, Homo sapiens
  misc_RNA (1)...(19): siRNA sense strand
ccugagaagaaacggacaa

SEQ ID NO: 2660328 - RNA, 19 nt, Homo sapiens
  misc_RNA (1)...(19): siRNA sense strand
gcacaacacuggaggggca

SEQ ID NO: 2660329 - RNA, 19 nt, Homo sapiens
  misc_RNA (1)...(19): siRNA sense strand
caacuagaggagaaggaga

SEQ ID NO: 2660330 - RNA, 19 nt, Homo sapiens
  misc_RNA (1)...(19): siRNA sense strand
agaacgucuucaugggcua

SEQ ID NO: 2660331 - RNA, 19 nt, Homo sapiens
  misc_RNA (1)...(19): siRNA sense strand
gugcaagagcuucagaaaa

SEQ ID NO: 2660332 - RNA, 19 nt, Homo sapiens
  misc_RNA (1)...(19): siRNA sense strand
acauagaacugaagagacc

SEQ ID NO: 2660333 - RNA, 19 nt, Homo sapiens
  misc_RNA (1)...(19): siRNA sense strand
ccuaaaugcagaacuaaaa

SEQ ID NO: 2660334 - RNA, 19 nt, Homo sapiens
  misc_RNA (1)...(19): siRNA sense strand
accuaaaugcagaacuaaa

SEQ ID NO: 2660335 - RNA, 19 nt, Homo sapiens
  misc_RNA (1)...(19): siRNA sense strand
augaaguguuugaagagau

SEQ ID NO: 2660336 - RNA, 19 nt, Homo sapiens
  misc_RNA (1)...(19): siRNA sense strand
agaaagaaguggacgcccu

SEQ ID NO: 2660337 - RNA, 19 nt, Homo sapiens
  misc_RNA (1)...(19): siRNA sense strand
ccugggacuuaaaggguca

SEQ ID NO: 2660338 - RNA, 19 nt, Homo sapiens
  misc_RNA (1)...(19): siRNA sense strand
uauuggaaguaaaggggaa

SEQ ID NO: 2660339 - RNA, 19 nt, Homo sapiens
  misc_RNA (1)...(19): siRNA sense strand
ggacucaaacguuggacca

SEQ ID NO: 2660340 - RNA, 19 nt, Homo sapiens
  misc_RNA (1)...(19): siRNA sense strand
agguacaggcccaggcuga

SEQ ID NO: 2660341 - RNA, 19 nt, Homo sapiens
  misc_RNA (1)...(19): siRNA sense strand
caguaugcaucuuugccua

SEQ ID NO: 2660342 - RNA, 19 nt, Homo sapiens
  misc_RNA (1)...(19): siRNA sense strand
uuaucauggcccugagcaa

SEQ ID NO: 2660343 - RNA, 19 nt, Homo sapiens
  misc_RNA (1)...(19): siRNA sense strand
gcucaggccaacaggaagu

SEQ ID NO: 2660344 - RNA, 19 nt, Homo sapiens
  misc_RNA (1)...(19): siRNA sense strand
uagccaagguacaggccca

SEQ ID NO: 2660345 - RNA, 19 nt, Homo sapiens
  misc_RNA (1)...(19): siRNA sense strand
caggaaguggacaggauga

SEQ ID NO: 2660346 - RNA, 19 nt, Homo sapiens
  misc_RNA (1)...(19): siRNA sense strand
ggcauuuagccaagguaca

SEQ ID NO: 2660347 - RNA, 19 nt, Homo sapiens
  misc_RNA (1)...(19): siRNA sense strand
aggaagaggaggaggacga

SEQ ID NO: 2660348 - RNA, 19 nt, Homo sapiens
  misc_RNA (1)...(19): siRNA sense strand
aggaagaagaaaagcgaaa

SEQ ID NO: 2660349 - RNA, 19 nt, Homo sapiens
  misc_RNA (1)...(19): siRNA sense strand
aggagaagagagagaucaa

SEQ ID NO: 2660350 - RNA, 19 nt, Homo sapiens
  misc_RNA (1)...(19): siRNA sense strand
gagaagaggaggaagagga

SEQ ID NO: 2660351 - RNA, 19 nt, Homo sapiens
  misc_RNA (1)...(19): siRNA sense strand
uggaaauggaggaagaaga

SEQ ID NO: 2660352 - RNA, 19 nt, Homo sapiens
  misc_RNA (1)...(19): siRNA sense strand
caggaggagaagagagaga

SEQ ID NO: 2660353 - RNA, 19 nt, Homo sapiens
  misc_RNA (1)...(19): siRNA sense strand
agaaauaagacaagugcca

SEQ ID NO: 2660354 - RNA, 19 nt, Homo sapiens
  misc_RNA (1)...(19): siRNA sense strand
cugcagaggaacuggaaca

SEQ ID NO: 2660355 - RNA, 19 nt, Homo sapiens
  misc_RNA (1)...(19): siRNA sense strand
gaaugauagacgagcucaa

SEQ ID NO: 2660356 - RNA, 19 nt, Homo sapiens
  misc_RNA (1)...(19): siRNA sense strand
ccgcaggagaaguaaguuu

SEQ ID NO: 2660357 - RNA, 19 nt, Homo sapiens
  misc_RNA (1)...(19): siRNA sense strand
auacaagagaagaggagga

SEQ ID NO: 2660358 - RNA, 19 nt, Homo sapiens
  misc_RNA (1)...(19): siRNA sense strand
ucggaaugaacaagaggaa

SEQ ID NO: 2660359 - RNA, 19 nt, Homo sapiens
  misc_RNA (1)...(19): siRNA sense strand
aggaacuggaacagaggaa

SEQ ID NO: 2660360 - RNA, 19 nt, Homo sapiens
  misc_RNA (1)...(19): siRNA sense strand
aggaggaagaggaggagga

SEQ ID NO: 2660361 - RNA, 19 nt, Homo sapiens
  misc_RNA (1)...(19): siRNA sense strand
aaauggaggaagaagaaaa

SEQ ID NO: 2660362 - RNA, 19 nt, Homo sapiens
  misc_RNA (1)...(19): siRNA sense strand
cugaggaaguggagaggcu

SEQ ID NO: 2660363 - RNA, 19 nt, Homo sapiens
  misc_RNA (1)...(19): siRNA sense strand
ggaaaauaucuaugaggca

SEQ ID NO: 2660364 - RNA, 19 nt, Homo sapiens
  misc_RNA (1)...(19): siRNA sense strand
aagaggaggaagaggagga

SEQ ID NO: 2660365 - RNA, 19 nt, Homo sapiens
  misc_RNA (1)...(19): siRNA sense strand
gaaaauaucuaugaggcaa

SEQ ID NO: 2660366 - RNA, 19 nt, Homo sapiens
  misc_RNA (1)...(19): siRNA sense strand
cuacagucaaggagcucaa

SEQ ID NO: 2660367 - RNA, 19 nt, Homo sapiens
  misc_RNA (1)...(19): siRNA sense strand
ugauugaaugugaugacaa

SEQ ID NO: 2660368 - RNA, 19 nt, Homo sapiens
  misc_RNA (1)...(19): siRNA sense strand
ccacauuaauggcggcauc

SEQ ID NO: 2660369 - RNA, 19 nt, Homo sapiens
  misc_RNA (1)...(19): siRNA sense strand
agagagagaucaagaggag

SEQ ID NO: 2660370 - RNA, 19 nt, Homo sapiens
  misc_RNA (1)...(19): siRNA sense strand
aggaggaggacgaagacga

SEQ ID NO: 2660371 - RNA, 19 nt, Homo sapiens
  misc_RNA (1)...(19): siRNA sense strand
acccgaaagcucagucaaa

SEQ ID NO: 2660372 - RNA, 19 nt, Homo sapiens
  misc_RNA (1)...(19): siRNA sense strand
cgggaaagaaagauccuca

SEQ ID NO: 2660373 - RNA, 19 nt, Homo sapiens
  misc_RNA (1)...(19): siRNA sense strand
gcagaaugauagacgagcu

SEQ ID NO: 2660374 - RNA, 19 nt, Homo sapiens
  misc_RNA (1)...(19): siRNA sense strand
aacaggaggagaagagaga

SEQ ID NO: 2660375 - RNA, 19 nt, Homo sapiens
  misc_RNA (1)...(19): siRNA sense strand
ggagaaguaaguuugccaa

SEQ ID NO: 2660376 - RNA, 19 nt, Homo sapiens
  misc_RNA (1)...(19): siRNA sense strand
ggaggagaagagagagauc

SEQ ID NO: 2660377 - RNA, 19 nt, Homo sapiens
  misc_RNA (1)...(19): siRNA sense strand
aagcgagagcuggaagaaa

SEQ ID NO: 2660378 - RNA, 19 nt, Homo sapiens
  misc_RNA (1)...(19): siRNA sense strand
gguaaaggaaguagggagu

SEQ ID NO: 2660379 - RNA, 19 nt, Homo sapiens
  misc_RNA (1)...(19): siRNA sense strand
uggaauauucagacagcua

SEQ ID NO: 2660380 - RNA, 19 nt, Homo sapiens
  misc_RNA (1)...(19): siRNA sense strand
gggaauuucuguugggauc

SEQ ID NO: 2660381 - RNA, 19 nt, Homo sapiens
  misc_RNA (1)...(19): siRNA sense strand
ggcuaaagugugugugcua

SEQ ID NO: 2660382 - RNA, 19 nt, Homo sapiens
  misc_RNA (1)...(19): siRNA sense strand
ccacaagcucauacgcaaa

SEQ ID NO: 2660383 - RNA, 19 nt, Homo sapiens
  misc_RNA (1)...(19): siRNA sense strand
gguucagcggaguggauaa

SEQ ID NO: 2660384 - RNA, 19 nt, Homo sapiens
  misc_RNA (1)...(19): siRNA sense strand
gaggugaacuggaagcgaa

SEQ ID NO: 2660385 - RNA, 19 nt, Homo sapiens
  misc_RNA (1)...(19): siRNA sense strand
aggugaacuggaagcgaaa

SEQ ID NO: 2660386 - RNA, 19 nt, Homo sapiens
  misc_RNA (1)...(19): siRNA sense strand
cagcuagagcggucaggaa

SEQ ID NO: 2660387 - RNA, 19 nt, Homo sapiens
  misc_RNA (1)...(19): siRNA sense strand
ggacauuagcugaugcagu

SEQ ID NO: 2660388 - RNA, 19 nt, Homo sapiens
  misc_RNA (1)...(19): siRNA sense strand
guggauaagaaugggaauu

SEQ ID NO: 2660389 - RNA, 19 nt, Homo sapiens
  misc_RNA (1)...(19): siRNA sense strand
ggguaaaggaaguagggag

SEQ ID NO: 2660390 - RNA, 19 nt, Homo sapiens
  misc_RNA (1)...(19): siRNA sense strand
agaggaggguaaaggaagu

SEQ ID NO: 2660391 - RNA, 19 nt, Homo sapiens
  misc_RNA (1)...(19): siRNA sense strand
cagacagcuacuuggcuaa

SEQ ID NO: 2660392 - RNA, 19 nt, Homo sapiens
  misc_RNA (1)...(19): siRNA sense strand
cuagcgcagaggaggguaa

SEQ ID NO: 2660393 - RNA, 19 nt, Homo sapiens
  misc_RNA (1)...(19): siRNA sense strand
ucagacagcuacuuggcua

SEQ ID NO: 2660394 - RNA, 19 nt, Homo sapiens
  misc_RNA (1)...(19): siRNA sense strand
gcuagagcggucaggaaca

SEQ ID NO: 2660395 - RNA, 19 nt, Homo sapiens
  misc_RNA (1)...(19): siRNA sense strand
caaugaaaccacaagcuca

SEQ ID NO: 2660396 - RNA, 19 nt, Homo sapiens
  misc_RNA (1)...(19): siRNA sense strand
ucagcgagcuccugggcau

SEQ ID NO: 2660397 - RNA, 19 nt, Homo sapiens
  misc_RNA (1)...(19): siRNA sense strand
cagcggaguggauaagaau

SEQ ID NO: 2660398 - RNA, 19 nt, Homo sapiens
  misc_RNA (1)...(19): siRNA sense strand
augacugguuuguccauaa

SEQ ID NO: 2660399 - RNA, 19 nt, Homo sapiens
  misc_RNA (1)...(19): siRNA sense strand
uggauuaggucgaagagcu

SEQ ID NO: 2660400 - RNA, 19 nt, Homo sapiens
  misc_RNA (1)...(19): siRNA sense strand
accacaagcucauacgcaa

SEQ ID NO: 2660401 - RNA, 19 nt, Homo sapiens
  misc_RNA (1)...(19): siRNA sense strand
uguaacaauuucaaggacu

SEQ ID NO: 2660402 - RNA, 19 nt, Homo sapiens
  misc_RNA (1)...(19): siRNA sense strand
aggaggaagaggaggaaca

SEQ ID NO: 2660403 - RNA, 19 nt, Homo sapiens
  misc_RNA (1)...(19): siRNA sense strand
cagugaagguaaaggagga

SEQ ID NO: 2660404 - RNA, 19 nt, Homo sapiens
  misc_RNA (1)...(19): siRNA sense strand
agguaaaggaggaagagga

SEQ ID NO: 2660405 - RNA, 19 nt, Homo sapiens
  misc_RNA (1)...(19): siRNA sense strand
uggaagagcaacuugggua

SEQ ID NO: 2660406 - RNA, 19 nt, Homo sapiens
  misc_RNA (1)...(19): siRNA sense strand
aagcaaagggugagcucuu

SEQ ID NO: 2660407 - RNA, 19 nt, Homo sapiens
  misc_RNA (1)...(19): siRNA sense strand
cuguagugaauguggaaaa

SEQ ID NO: 2660408 - RNA, 19 nt, Homo sapiens
  misc_RNA (1)...(19): siRNA sense strand
ugaagguaaaggaggaaga

SEQ ID NO: 2660409 - RNA, 19 nt, Homo sapiens
  misc_RNA (1)...(19): siRNA sense strand
ggguauaauuugcgagagg

SEQ ID NO: 2660410 - RNA, 19 nt, Homo sapiens
  misc_RNA (1)...(19): siRNA sense strand
uaaaggaggaagaggagga

SEQ ID NO: 2660411 - RNA, 19 nt, Homo sapiens
  misc_RNA (1)...(19): siRNA sense strand
ggcaaagccuucagccaga

SEQ ID NO: 2660412 - RNA, 19 nt, Homo sapiens
  misc_RNA (1)...(19): siRNA sense strand
ccuuaugaaugugaagaau

SEQ ID NO: 2660413 - RNA, 19 nt, Homo sapiens
  misc_RNA (1)...(19): siRNA sense strand
uggagagagagcuggauga

SEQ ID NO: 2660414 - RNA, 19 nt, Homo sapiens
  misc_RNA (1)...(19): siRNA sense strand
ccgugagggcagauuggaa

SEQ ID NO: 2660415 - RNA, 19 nt, Homo sapiens
  misc_RNA (1)...(19): siRNA sense strand
gggcagauuggaaaagcaa

SEQ ID NO: 2660416 - RNA, 19 nt, Homo sapiens
  misc_RNA (1)...(19): siRNA sense strand
ccuucagacugcagagaug

SEQ ID NO: 2660417 - RNA, 19 nt, Homo sapiens
  misc_RNA (1)...(19): siRNA sense strand
uuggaaaacagaaugguaa

SEQ ID NO: 2660418 - RNA, 19 nt, Homo sapiens
  misc_RNA (1)...(19): siRNA sense strand
auuccugaguauggagaua

SEQ ID NO: 2660419 - RNA, 19 nt, Homo sapiens
  misc_RNA (1)...(19): siRNA sense strand
cagagaugcaggaaggacu

SEQ ID NO: 2660420 - RNA, 19 nt, Homo sapiens
  misc_RNA (1)...(19): siRNA sense strand
ccucauuaagcaucagaga

SEQ ID NO: 2660421 - RNA, 19 nt, Homo sapiens
  misc_RNA (1)...(19): siRNA sense strand
uuuguaaaggagaaggcaa

SEQ ID NO: 2660422 - RNA, 19 nt, Homo sapiens
  misc_RNA (1)...(19): siRNA sense strand
uuggaaaagcaaaggguga

SEQ ID NO: 2660423 - RNA, 19 nt, Homo sapiens
  misc_RNA (1)...(19): siRNA sense strand
cagccagaggucaggccua

SEQ ID NO: 2660424 - RNA, 19 nt, Homo sapiens
  misc_RNA (1)...(19): siRNA sense strand
aagaauguggcaagaacuu

SEQ ID NO: 2660425 - RNA, 19 nt, Homo sapiens
  misc_RNA (1)...(19): siRNA sense strand
gguaaaggaggaagaggag

SEQ ID NO: 2660426 - RNA, 19 nt, Homo sapiens
  misc_RNA (1)...(19): siRNA sense strand
augcagggauugugggaaa

SEQ ID NO: 2660427 - RNA, 19 nt, Homo sapiens
  misc_RNA (1)...(19): siRNA sense strand
guguaaugagugugggaaa

SEQ ID NO: 2660428 - RNA, 19 nt, Homo sapiens
  misc_RNA (1)...(19): siRNA sense strand
uuagagaaucaaugggaaa

SEQ ID NO: 2660429 - RNA, 19 nt, Homo sapiens
  misc_RNA (1)...(19): siRNA sense strand
gugugaggagugugggaaa

SEQ ID NO: 2660430 - RNA, 19 nt, Homo sapiens
  misc_RNA (1)...(19): siRNA sense strand
cacuaaagauggaagccaa

SEQ ID NO: 2660431 - RNA, 19 nt, Homo sapiens
  misc_RNA (1)...(19): siRNA sense strand
auguuuagagugugggaaa

SEQ ID NO: 2660432 - RNA, 19 nt, Homo sapiens
  misc_RNA (1)...(19): siRNA sense strand
gcucaaaucuuacuggaca

SEQ ID NO: 2660433 - RNA, 19 nt, Homo sapiens
  misc_RNA (1)...(19): siRNA sense strand
cagaaagugcuuaguaaaa

SEQ ID NO: 2660434 - RNA, 19 nt, Homo sapiens
  misc_RNA (1)...(19): siRNA sense strand
cgucauaacuguaagcgca

SEQ ID NO: 2660435 - RNA, 19 nt, Homo sapiens
  misc_RNA (1)...(19): siRNA sense strand
uauauugacucuuggcuua

SEQ ID NO: 2660436 - RNA, 19 nt, Homo sapiens
  misc_RNA (1)...(19): siRNA sense strand
agaccuaagcaaacacaaa

SEQ ID NO: 2660437 - RNA, 19 nt, Homo sapiens
  misc_RNA (1)...(19): siRNA sense strand
cuugaugggaguaggaaau

SEQ ID NO: 2660438 - RNA, 19 nt, Homo sapiens
  misc_RNA (1)...(19): siRNA sense strand
ggacauaagaaaagaaaac

SEQ ID NO: 2660439 - RNA, 19 nt, Homo sapiens
  misc_RNA (1)...(19): siRNA sense strand
ggaugucaaauuagagaau

SEQ ID NO: 2660440 - RNA, 19 nt, Homo sapiens
  misc_RNA (1)...(19): siRNA sense strand
aauccauacucgggagaaa

SEQ ID NO: 2660441 - RNA, 19 nt, Homo sapiens
  misc_RNA (1)...(19): siRNA sense strand
gcaggagauuucauuaaua

SEQ ID NO: 2660442 - RNA, 19 nt, Homo sapiens
  misc_RNA (1)...(19): siRNA sense strand
gggaaagcauucaagacca

SEQ ID NO: 2660443 - RNA, 19 nt, Homo sapiens
  misc_RNA (1)...(19): siRNA sense strand
aggaugugauguuggaaaa

SEQ ID NO: 2660444 - RNA, 19 nt, Homo sapiens
  misc_RNA (1)...(19): siRNA sense strand
gaaacaucuauaagggaga

SEQ ID NO: 2660445 - RNA, 19 nt, Homo sapiens
  misc_RNA (1)...(19): siRNA sense strand
ggaaagaaccagaaagugc

SEQ ID NO: 2660446 - RNA, 19 nt, Homo sapiens
  misc_RNA (1)...(19): siRNA sense strand
ucaccaaacacauaagaau

SEQ ID NO: 2660447 - RNA, 19 nt, Homo sapiens
  misc_RNA (1)...(19): siRNA sense strand
ccuuaugagugcagcaagu

SEQ ID NO: 2660448 - RNA, 19 nt, Homo sapiens
  misc_RNA (1)...(19): siRNA sense strand
ucuaauucuccaugagcaa

SEQ ID NO: 2660449 - RNA, 19 nt, Homo sapiens
  misc_RNA (1)...(19): siRNA sense strand
agggagaaacugagagaag

SEQ ID NO: 2660450 - RNA, 19 nt, Homo sapiens
  misc_RNA (1)...(19): siRNA sense strand
aaggaaagaaccagaaagu

SEQ ID NO: 2660451 - RNA, 19 nt, Homo sapiens
  misc_RNA (1)...(19): siRNA sense strand
acuugaugggaguaggaaa

SEQ ID NO: 2660452 - RNA, 19 nt, Homo sapiens
  misc_RNA (1)...(19): siRNA sense strand
caagauguggccugagaau

SEQ ID NO: 2660453 - RNA, 19 nt, Homo sapiens
  misc_RNA (1)...(19): siRNA sense strand
ucuauaaggaugugauguu

SEQ ID NO: 2660454 - RNA, 19 nt, Homo sapiens
  misc_RNA (1)...(19): siRNA sense strand
aaggaugugauguuggaaa

SEQ ID NO: 2660455 - RNA, 19 nt, Homo sapiens
  misc_RNA (1)...(19): siRNA sense strand
gagugcagcaaguguggaa

SEQ ID NO: 2660456 - RNA, 19 nt, Homo sapiens
  misc_RNA (1)...(19): siRNA sense strand
aggauguagcugugaacuu

SEQ ID NO: 2660457 - RNA, 19 nt, Homo sapiens
  misc_RNA (1)...(19): siRNA sense strand
gagaagagaaagaaggcuc

SEQ ID NO: 2660458 - RNA, 19 nt, Homo sapiens
  misc_RNA (1)...(19): siRNA sense strand
ccucacgagugcagggacu

SEQ ID NO: 2660459 - RNA, 19 nt, Homo sapiens
  misc_RNA (1)...(19): siRNA sense strand
agauggaagccaaggaaac

SEQ ID NO: 2660460 - RNA, 19 nt, Homo sapiens
  misc_RNA (1)...(19): siRNA sense strand
gugcagggacugugggaag

SEQ ID NO: 2660461 - RNA, 19 nt, Homo sapiens
  misc_RNA (1)...(19): siRNA sense strand
auuagagaaucaaugggaa

SEQ ID NO: 2660462 - RNA, 19 nt, Homo sapiens
  misc_RNA (1)...(19): siRNA sense strand
agaaacugagagaagagaa

SEQ ID NO: 2660463 - RNA, 19 nt, Homo sapiens
  misc_RNA (1)...(19): siRNA sense strand
acagaaacuccaugaaugu

SEQ ID NO: 2660464 - RNA, 19 nt, Homo sapiens
  misc_RNA (1)...(19): siRNA sense strand
ggggagaagccuuacaaau

SEQ ID NO: 2660465 - RNA, 19 nt, Homo sapiens
  misc_RNA (1)...(19): siRNA sense strand
ggauccacacugaagagaa

SEQ ID NO: 2660466 - RNA, 19 nt, Homo sapiens
  misc_RNA (1)...(19): siRNA sense strand
ccuuaugaaugugaggaau

SEQ ID NO: 2660467 - RNA, 19 nt, Homo sapiens
  misc_RNA (1)...(19): siRNA sense strand
gaaugugaggaauguggaa

SEQ ID NO: 2660468 - RNA, 19 nt, Homo sapiens
  misc_RNA (1)...(19): siRNA sense strand
guucacaacaagagauuuu

SEQ ID NO: 2660469 - RNA, 19 nt, Homo sapiens
  misc_RNA (1)...(19): siRNA sense strand
ggagaaacugagagaagag

SEQ ID NO: 2660470 - RNA, 19 nt, Homo sapiens
  misc_RNA (1)...(19): siRNA sense strand
cuuucuaugcaccggauaa

SEQ ID NO: 2660471 - RNA, 19 nt, Homo sapiens
  misc_RNA (1)...(19): siRNA sense strand
caacaguagaucagcucuu

SEQ ID NO: 2660472 - RNA, 19 nt, Homo sapiens
  misc_RNA (1)...(19): siRNA sense strand
aaauguaacugcuguggga

SEQ ID NO: 2660473 - RNA, 19 nt, Homo sapiens
  misc_RNA (1)...(19): siRNA sense strand
aauuaugggaacaugguau

SEQ ID NO: 2660474 - RNA, 19 nt, Homo sapiens
  misc_RNA (1)...(19): siRNA sense strand
ucaucuggagcgagaagua

SEQ ID NO: 2660475 - RNA, 19 nt, Homo sapiens
  misc_RNA (1)...(19): siRNA sense strand
gguuagagaaguuuguguu

SEQ ID NO: 2660476 - RNA, 19 nt, Homo sapiens
  misc_RNA (1)...(19): siRNA sense strand
aagauggaagccaaggaaa

SEQ ID NO: 2660477 - RNA, 19 nt, Homo sapiens
  misc_RNA (1)...(19): siRNA sense strand
aagaaggcucugaggaagu

SEQ ID NO: 2660478 - RNA, 19 nt, Homo sapiens
  misc_RNA (1)...(19): siRNA sense strand
gaggaagugaccugcaaaa

SEQ ID NO: 2660479 - RNA, 19 nt, Homo sapiens
  misc_RNA (1)...(19): siRNA sense strand
agaccucaguagucaguau

SEQ ID NO: 2660480 - RNA, 19 nt, Homo sapiens
  misc_RNA (1)...(19): siRNA sense strand
ccuuacaaauguuuagagu

SEQ ID NO: 2660481 - RNA, 19 nt, Homo sapiens
  misc_RNA (1)...(19): siRNA sense strand
gggaaacaucuauaaggga

SEQ ID NO: 2660482 - RNA, 19 nt, Homo sapiens
  misc_RNA (1)...(19): siRNA sense strand
aaucaaugggaaacaucua

SEQ ID NO: 2660483 - RNA, 19 nt, Homo sapiens
  misc_RNA (1)...(19): siRNA sense strand
cguucgaggccgagagaaa

SEQ ID NO: 2660484 - RNA, 19 nt, Homo sapiens
  misc_RNA (1)...(19): siRNA sense strand
cggaagaaugugggagaaa

SEQ ID NO: 2660485 - RNA, 19 nt, Homo sapiens
  misc_RNA (1)...(19): siRNA sense strand
gcaacagaguggaggcuga

SEQ ID NO: 2660486 - RNA, 19 nt, Homo sapiens
  misc_RNA (1)...(19): siRNA sense strand
gcauggaaauggaggcuga

SEQ ID NO: 2660487 - RNA, 19 nt, Homo sapiens
  misc_RNA (1)...(19): siRNA sense strand
gggaagaagcgguacccaa

SEQ ID NO: 2660488 - RNA, 19 nt, Homo sapiens
  misc_RNA (1)...(19): siRNA sense strand
ggucaggagaagaaagaca

SEQ ID NO: 2660489 - RNA, 19 nt, Homo sapiens
  misc_RNA (1)...(19): siRNA sense strand
ccaacagaaggguggaaau

SEQ ID NO: 2660490 - RNA, 19 nt, Homo sapiens
  misc_RNA (1)...(19): siRNA sense strand
gcccaagaguugagccuga

SEQ ID NO: 2660491 - RNA, 19 nt, Homo sapiens
  misc_RNA (1)...(19): siRNA sense strand
ccgacgacgaagaggauga

SEQ ID NO: 2660492 - RNA, 19 nt, Homo sapiens
  misc_RNA (1)...(19): siRNA sense strand
agcagagucucgagagcaa

SEQ ID NO: 2660493 - RNA, 19 nt, Homo sapiens
  misc_RNA (1)...(19): siRNA sense strand
gaauggacacccagggaca

SEQ ID NO: 2660494 - RNA, 19 nt, Homo sapiens
  misc_RNA (1)...(19): siRNA sense strand
gaucagagccccaagggaa

SEQ ID NO: 2660495 - RNA, 19 nt, Homo sapiens
  misc_RNA (1)...(19): siRNA sense strand
ccgagggagaccagagaga

SEQ ID NO: 2660496 - RNA, 19 nt, Homo sapiens
  misc_RNA (1)...(19): siRNA sense strand
aggcugaguccuggagaaa

SEQ ID NO: 2660497 - RNA, 19 nt, Homo sapiens
  misc_RNA (1)...(19): siRNA sense strand
caagggaggcccaaggcaa

SEQ ID NO: 2660498 - RNA, 19 nt, Homo sapiens
  misc_RNA (1)...(19): siRNA sense strand
ggagaaaagagguggaaag

SEQ ID NO: 2660499 - RNA, 19 nt, Homo sapiens
  misc_RNA (1)...(19): siRNA sense strand
gagagaaagcagaacggga

SEQ ID NO: 2660500 - RNA, 19 nt, Homo sapiens
  misc_RNA (1)...(19): siRNA sense strand
ggacacaccuucaccguca

SEQ ID NO: 2660501 - RNA, 19 nt, Homo sapiens
  misc_RNA (1)...(19): siRNA sense strand
ccagggacauagaggcuca

SEQ ID NO: 2660502 - RNA, 19 nt, Homo sapiens
  misc_RNA (1)...(19): siRNA sense strand
gggcugggaagaagcggua

SEQ ID NO: 2660503 - RNA, 19 nt, Homo sapiens
  misc_RNA (1)...(19): siRNA sense strand
ugguacaacuggaggcaac

SEQ ID NO: 2660504 - RNA, 19 nt, Homo sapiens
  misc_RNA (1)...(19): siRNA sense strand
agacaagacuacucggaag

SEQ ID NO: 2660505 - RNA, 19 nt, Homo sapiens
  misc_RNA (1)...(19): siRNA sense strand
agucucaggaacagaguuu

SEQ ID NO: 2660506 - RNA, 19 nt, Homo sapiens
  misc_RNA (1)...(19): siRNA sense strand
agagucaagagaagagaga

SEQ ID NO: 2660507 - RNA, 19 nt, Homo sapiens
  misc_RNA (1)...(19): siRNA sense strand
aggaacagaguuugguaca

SEQ ID NO: 2660508 - RNA, 19 nt, Homo sapiens
  misc_RNA (1)...(19): siRNA sense strand
agcagaggccuguggaaga

SEQ ID NO: 2660509 - RNA, 19 nt, Homo sapiens
  misc_RNA (1)...(19): siRNA sense strand
gcuagggacuguagaggcu

SEQ ID NO: 2660510 - RNA, 19 nt, Homo sapiens
  misc_RNA (1)...(19): siRNA sense strand
ccccaagggaagagaguca

SEQ ID NO: 2660511 - RNA, 19 nt, Homo sapiens
  misc_RNA (1)...(19): siRNA sense strand
cugucagaggcauggaaau

SEQ ID NO: 2660512 - RNA, 19 nt, Homo sapiens
  misc_RNA (1)...(19): siRNA sense strand
cgguguggaggcuggagaa

SEQ ID NO: 2660513 - RNA, 19 nt, Homo sapiens
  misc_RNA (1)...(19): siRNA sense strand
aggccgagagaaagcagaa

SEQ ID NO: 2660514 - RNA, 19 nt, Homo sapiens
  misc_RNA (1)...(19): siRNA sense strand
ucggaagaaugugggagaa

SEQ ID NO: 2660515 - RNA, 19 nt, Homo sapiens
  misc_RNA (1)...(19): siRNA sense strand
aggugaaggcucuggguua

SEQ ID NO: 2660516 - RNA, 19 nt, Homo sapiens
  misc_RNA (1)...(19): siRNA sense strand
uguuaacagcagagacaaa

SEQ ID NO: 2660517 - RNA, 19 nt, Homo sapiens
  misc_RNA (1)...(19): siRNA sense strand
agacaaagaaagugguguu

SEQ ID NO: 2660518 - RNA, 19 nt, Homo sapiens
  misc_RNA (1)...(19): siRNA sense strand
ugguguugguggauggaaa

SEQ ID NO: 2660519 - RNA, 19 nt, Homo sapiens
  misc_RNA (1)...(19): siRNA sense strand
gagucaaugaacagaacaa

SEQ ID NO: 2660520 - RNA, 19 nt, Homo sapiens
  misc_RNA (1)...(19): siRNA sense strand
ccauugacaccgugaagaa

SEQ ID NO: 2660521 - RNA, 19 nt, Homo sapiens
  misc_RNA (1)...(19): siRNA sense strand
ccgaugaagaggaagaaga

SEQ ID NO: 2660522 - RNA, 19 nt, Homo sapiens
  misc_RNA (1)...(19): siRNA sense strand
cuuccaaaccggugccuaa

SEQ ID NO: 2660523 - RNA, 19 nt, Homo sapiens
  misc_RNA (1)...(19): siRNA sense strand
augcaaaugcugaagaaga

SEQ ID NO: 2660524 - RNA, 19 nt, Homo sapiens
  misc_RNA (1)...(19): siRNA sense strand
ccuuaugaacuguuguuaa

SEQ ID NO: 2660525 - RNA, 19 nt, Homo sapiens
  misc_RNA (1)...(19): siRNA sense strand
agaaagugguguuggugga

SEQ ID NO: 2660526 - RNA, 19 nt, Homo sapiens
  misc_RNA (1)...(19): siRNA sense strand
agagcaagagagugggcua

SEQ ID NO: 2660527 - RNA, 19 nt, Homo sapiens
  misc_RNA (1)...(19): siRNA sense strand
cggagugggaugagauuga

SEQ ID NO: 2660528 - RNA, 19 nt, Homo sapiens
  misc_RNA (1)...(19): siRNA sense strand
ccacgaacaaggaggcuga

SEQ ID NO: 2660529 - RNA, 19 nt, Homo sapiens
  misc_RNA (1)...(19): siRNA sense strand
ggagugaggccuagggaac

SEQ ID NO: 2660530 - RNA, 19 nt, Homo sapiens
  misc_RNA (1)...(19): siRNA sense strand
gugggaugagauugagaaa

SEQ ID NO: 2660531 - RNA, 19 nt, Homo sapiens
  misc_RNA (1)...(19): siRNA sense strand
uagcaaacccaaagcugaa

SEQ ID NO: 2660532 - RNA, 19 nt, Homo sapiens
  misc_RNA (1)...(19): siRNA sense strand
aggaagaagaccacauaga

SEQ ID NO: 2660533 - RNA, 19 nt, Homo sapiens
  misc_RNA (1)...(19): siRNA sense strand
ugaggcagcaggagugaaa

SEQ ID NO: 2660534 - RNA, 19 nt, Homo sapiens
  misc_RNA (1)...(19): siRNA sense strand
guuguuaacagcagagaca

SEQ ID NO: 2660535 - RNA, 19 nt, Homo sapiens
  misc_RNA (1)...(19): siRNA sense strand
caaagaucugcgagggaca

SEQ ID NO: 2660536 - RNA, 19 nt, Homo sapiens
  misc_RNA (1)...(19): siRNA sense strand
gcagcugagaugauugaaa

SEQ ID NO: 2660537 - RNA, 19 nt, Homo sapiens
  misc_RNA (1)...(19): siRNA sense strand
gaacaaggaggcugaggca

SEQ ID NO: 2660538 - RNA, 19 nt, Homo sapiens
  misc_RNA (1)...(19): siRNA sense strand
cggcagaagaucucagguu

SEQ ID NO: 2660539 - RNA, 19 nt, Homo sapiens
  misc_RNA (1)...(19): siRNA sense strand
uggagaagggauugacuuu

SEQ ID NO: 2660540 - RNA, 19 nt, Homo sapiens
  misc_RNA (1)...(19): siRNA sense strand
cacagaagucucaggguga

SEQ ID NO: 2660541 - RNA, 19 nt, Homo sapiens
  misc_RNA (1)...(19): siRNA sense strand
gacuggagguggugaaaau

SEQ ID NO: 2660542 - RNA, 19 nt, Homo sapiens
  misc_RNA (1)...(19): siRNA sense strand
augaagaggaagaagacca

SEQ ID NO: 2660543 - RNA, 19 nt, Homo sapiens
  misc_RNA (1)...(19): siRNA sense strand
acaccagagucaaugaaca

SEQ ID NO: 2660544 - RNA, 19 nt, Homo sapiens
  misc_RNA (1)...(19): siRNA sense strand
ccuagacacuguucgggaa

SEQ ID NO: 2660545 - RNA, 19 nt, Homo sapiens
  misc_RNA (1)...(19): siRNA sense strand
ccaacguggcugacucaaa

SEQ ID NO: 2660546 - RNA, 19 nt, Homo sapiens
  misc_RNA (1)...(19): siRNA sense strand
cugcaggaacugacgucaa

SEQ ID NO: 2660547 - RNA, 19 nt, Homo sapiens
  misc_RNA (1)...(19): siRNA sense strand
gaagaaaaggcuagagaag

SEQ ID NO: 2660548 - RNA, 19 nt, Homo sapiens
  misc_RNA (1)...(19): siRNA sense strand
gcuucaggauccaggagga

SEQ ID NO: 2660549 - RNA, 19 nt, Homo sapiens
  misc_RNA (1)...(19): siRNA sense strand
ccaccaugcgcaacaacaa

SEQ ID NO: 2660550 - RNA, 19 nt, Homo sapiens
  misc_RNA (1)...(19): siRNA sense strand
cagcauguggagagggcca

SEQ ID NO: 2660551 - RNA, 19 nt, Homo sapiens
  misc_RNA (1)...(19): siRNA sense strand
ccugaaacuuugacucaca

SEQ ID NO: 2660552 - RNA, 19 nt, Homo sapiens
  misc_RNA (1)...(19): siRNA sense strand
gggaagaaaaggcuagaga

SEQ ID NO: 2660553 - RNA, 19 nt, Homo sapiens
  misc_RNA (1)...(19): siRNA sense strand
cggagcacaugaagaagau

SEQ ID NO: 2660554 - RNA, 19 nt, Homo sapiens
  misc_RNA (1)...(19): siRNA sense strand
acaagaacgucauugcaga

SEQ ID NO: 2660555 - RNA, 19 nt, Homo sapiens
  misc_RNA (1)...(19): siRNA sense strand
gccauaaggauguggucga

SEQ ID NO: 2660556 - RNA, 19 nt, Homo sapiens
  misc_RNA (1)...(19): siRNA sense strand
ccacagaggacgcuaccau

SEQ ID NO: 2660557 - RNA, 19 nt, Homo sapiens
  misc_RNA (1)...(19): siRNA sense strand
agaaaaggcuagagaaguc

SEQ ID NO: 2660558 - RNA, 19 nt, Homo sapiens
  misc_RNA (1)...(19): siRNA sense strand
ucgagguucuucugaggaa

SEQ ID NO: 2660559 - RNA, 19 nt, Homo sapiens
  misc_RNA (1)...(19): siRNA sense strand
aggauguggucgagguucu

SEQ ID NO: 2660560 - RNA, 19 nt, Homo sapiens
  misc_RNA (1)...(19): siRNA sense strand
cugcagcauugggaagaaa

SEQ ID NO: 2660561 - RNA, 19 nt, Homo sapiens
  misc_RNA (1)...(19): siRNA sense strand
ggaagaaaaggcuagagaa

SEQ ID NO: 2660562 - RNA, 19 nt, Homo sapiens
  misc_RNA (1)...(19): siRNA sense strand
aagaagacgaacacccuua

SEQ ID NO: 2660563 - RNA, 19 nt, Homo sapiens
  misc_RNA (1)...(19): siRNA sense strand
gcaugcagcuggaggagac

SEQ ID NO: 2660564 - RNA, 19 nt, Homo sapiens
  misc_RNA (1)...(19): siRNA sense strand
agcaaggaauggccacaaa

SEQ ID NO: 2660565 - RNA, 19 nt, Homo sapiens
  misc_RNA (1)...(19): siRNA sense strand
cgcccgaugaagaggaaga

SEQ ID NO: 2660566 - RNA, 19 nt, Homo sapiens
  misc_RNA (1)...(19): siRNA sense strand
guucuguccaugagaccua

SEQ ID NO: 2660567 - RNA, 19 nt, Homo sapiens
  misc_RNA (1)...(19): siRNA sense strand
ggaggagacgggugugcau

SEQ ID NO: 2660568 - RNA, 19 nt, Homo sapiens
  misc_RNA (1)...(19): siRNA sense strand
augaacagaacaaugacaa

SEQ ID NO: 2660569 - RNA, 19 nt, Homo sapiens
  misc_RNA (1)...(19): siRNA sense strand
cccugguggugcugaggaa

SEQ ID NO: 2660570 - RNA, 19 nt, Homo sapiens
  misc_RNA (1)...(19): siRNA sense strand
gugaagaaccucugggagc

SEQ ID NO: 2660571 - RNA, 19 nt, Homo sapiens
  misc_RNA (1)...(19): siRNA sense strand
gagagaagcucaaacgaga

SEQ ID NO: 2660572 - RNA, 19 nt, Homo sapiens
  misc_RNA (1)...(19): siRNA sense strand
uggaagacaccguggacaa

SEQ ID NO: 2660573 - RNA, 19 nt, Homo sapiens
  misc_RNA (1)...(19): siRNA sense strand
gagcugaaguauuggcaga

SEQ ID NO: 2660574 - RNA, 19 nt, Homo sapiens
  misc_RNA (1)...(19): siRNA sense strand
aggaggaagaagaggaaga

SEQ ID NO: 2660575 - RNA, 19 nt, Homo sapiens
  misc_RNA (1)...(19): siRNA sense strand
ggaagagagagaagcucaa

SEQ ID NO: 2660576 - RNA, 19 nt, Homo sapiens
  misc_RNA (1)...(19): siRNA sense strand
cuacaauggcucaggcaga

SEQ ID NO: 2660577 - RNA, 19 nt, Homo sapiens
  misc_RNA (1)...(19): siRNA sense strand
ugcaauaguaacaaggaaa

SEQ ID NO: 2660578 - RNA, 19 nt, Homo sapiens
  misc_RNA (1)...(19): siRNA sense strand
cagugaaggaggagcugaa

SEQ ID NO: 2660579 - RNA, 19 nt, Homo sapiens
  misc_RNA (1)...(19): siRNA sense strand
cagccagcaucgaggaaga

SEQ ID NO: 2660580 - RNA, 19 nt, Homo sapiens
  misc_RNA (1)...(19): siRNA sense strand
cugaagaccuggaugcaga

SEQ ID NO: 2660581 - RNA, 19 nt, Homo sapiens
  misc_RNA (1)...(19): siRNA sense strand
gguagaccggcuugagaaa

SEQ ID NO: 2660582 - RNA, 19 nt, Homo sapiens
  misc_RNA (1)...(19): siRNA sense strand
ccugggaagacguggacaa

SEQ ID NO: 2660583 - RNA, 19 nt, Homo sapiens
  misc_RNA (1)...(19): siRNA sense strand
gcagaaagggcuaggugca

SEQ ID NO: 2660584 - RNA, 19 nt, Homo sapiens
  misc_RNA (1)...(19): siRNA sense strand
gagcaggaugagaagacaa

SEQ ID NO: 2660585 - RNA, 19 nt, Homo sapiens
  misc_RNA (1)...(19): siRNA sense strand
gugauggagaggaggaaga

SEQ ID NO: 2660586 - RNA, 19 nt, Homo sapiens
  misc_RNA (1)...(19): siRNA sense strand
uggaggaguuugaggagga

SEQ ID NO: 2660587 - RNA, 19 nt, Homo sapiens
  misc_RNA (1)...(19): siRNA sense strand
gcaauaguaacaaggaaaa

SEQ ID NO: 2660588 - RNA, 19 nt, Homo sapiens
  misc_RNA (1)...(19): siRNA sense strand
aagaagaggaagaggugga

SEQ ID NO: 2660589 - RNA, 19 nt, Homo sapiens
  misc_RNA (1)...(19): siRNA sense strand
aggcagagaacaucggcua

SEQ ID NO: 2660590 - RNA, 19 nt, Homo sapiens
  misc_RNA (1)...(19): siRNA sense strand
cagaaagguggaagaagau

SEQ ID NO: 2660591 - RNA, 19 nt, Homo sapiens
  misc_RNA (1)...(19): siRNA sense strand
agucagugcagguggccua

SEQ ID NO: 2660592 - RNA, 19 nt, Homo sapiens
  misc_RNA (1)...(19): siRNA sense strand
cggaagagagagaagcuca

SEQ ID NO: 2660593 - RNA, 19 nt, Homo sapiens
  misc_RNA (1)...(19): siRNA sense strand
agacaagugcagugaagga

SEQ ID NO: 2660594 - RNA, 19 nt, Homo sapiens
  misc_RNA (1)...(19): siRNA sense strand
ccucuuacagguugaacaa

SEQ ID NO: 2660595 - RNA, 19 nt, Homo sapiens
  misc_RNA (1)...(19): siRNA sense strand
ucaugaagauugagcccau

SEQ ID NO: 2660596 - RNA, 19 nt, Homo sapiens
  misc_RNA (1)...(19): siRNA sense strand
aagaugaguuugaagcaga

SEQ ID NO: 2660597 - RNA, 19 nt, Homo sapiens
  misc_RNA (1)...(19): siRNA sense strand
augcaauaguaacaaggaa

SEQ ID NO: 2660598 - RNA, 19 nt, Homo sapiens
  misc_RNA (1)...(19): siRNA sense strand
ggcuugagaaagagucaua

SEQ ID NO: 2660599 - RNA, 19 nt, Homo sapiens
  misc_RNA (1)...(19): siRNA sense strand
gcaucgaggaagagcgcca

SEQ ID NO: 2660600 - RNA, 19 nt, Homo sapiens
  misc_RNA (1)...(19): siRNA sense strand
ugaaggagggugauggaga

SEQ ID NO: 2660601 - RNA, 19 nt, Homo sapiens
  misc_RNA (1)...(19): siRNA sense strand
auggagaggaggaagaaga

SEQ ID NO: 2660602 - RNA, 19 nt, Homo sapiens
  misc_RNA (1)...(19): siRNA sense strand
agaggaggaagaagaggaa

SEQ ID NO: 2660603 - RNA, 19 nt, Homo sapiens
  misc_RNA (1)...(19): siRNA sense strand
agaucaagaaggagccaga

SEQ ID NO: 2660604 - RNA, 19 nt, Homo sapiens
  misc_RNA (1)...(19): siRNA sense strand
ccuccaagcagguuccuaa

SEQ ID NO: 2660605 - RNA, 19 nt, Homo sapiens
  misc_RNA (1)...(19): siRNA sense strand
cuguacaccaggagugcua

SEQ ID NO: 2660606 - RNA, 19 nt, Homo sapiens
  misc_RNA (1)...(19): siRNA sense strand
gagaggaggaagaagagga

SEQ ID NO: 2660607 - RNA, 19 nt, Homo sapiens
  misc_RNA (1)...(19): siRNA sense strand
ucgcagaaccagucaacuu

SEQ ID NO: 2660608 - RNA, 19 nt, Homo sapiens
  misc_RNA (1)...(19): siRNA sense strand
uggaaggugugaacggaga

SEQ ID NO: 2660609 - RNA, 19 nt, Homo sapiens
  misc_RNA (1)...(19): siRNA sense strand
agaugaguuugaagcagaa

SEQ ID NO: 2660610 - RNA, 19 nt, Homo sapiens
  misc_RNA (1)...(19): siRNA sense strand
cugauucggaagagagaga

SEQ ID NO: 2660611 - RNA, 19 nt, Homo sapiens
  misc_RNA (1)...(19): siRNA sense strand
ggaugaugaaugucacaau

SEQ ID NO: 2660612 - RNA, 19 nt, Homo sapiens
  misc_RNA (1)...(19): siRNA sense strand
aguuugaagcagaagauca

SEQ ID NO: 2660613 - RNA, 19 nt, Homo sapiens
  misc_RNA (1)...(19): siRNA sense strand
ccaaagaaacgcugagcag

SEQ ID NO: 2660614 - RNA, 19 nt, Homo sapiens
  misc_RNA (1)...(19): siRNA sense strand
ugauugagcugauucggaa

SEQ ID NO: 2660615 - RNA, 19 nt, Homo sapiens
  misc_RNA (1)...(19): siRNA sense strand
aggcagaggcuggagagaa

SEQ ID NO: 2660616 - RNA, 19 nt, Homo sapiens
  misc_RNA (1)...(19): siRNA sense strand
ucaccgaaugcaauaguaa

SEQ ID NO: 2660617 - RNA, 19 nt, Homo sapiens
  misc_RNA (1)...(19): siRNA sense strand
uggacauggugaaugaaaa

SEQ ID NO: 2660618 - RNA, 19 nt, Homo sapiens
  misc_RNA (1)...(19): siRNA sense strand
gcaccuuggaggaguuuga

SEQ ID NO: 2660619 - RNA, 19 nt, Homo sapiens
  misc_RNA (1)...(19): siRNA sense strand
aggaggagccagaagacga

SEQ ID NO: 2660620 - RNA, 19 nt, Homo sapiens
  misc_RNA (1)...(19): siRNA sense strand
cauuacugaagaugagcua

SEQ ID NO: 2660621 - RNA, 19 nt, Homo sapiens
  misc_RNA (1)...(19): siRNA sense strand
ugacauaugcccaggccca

SEQ ID NO: 2660622 - RNA, 19 nt, Homo sapiens
  misc_RNA (1)...(19): siRNA sense strand
aguuugaggaggacuuuaa

SEQ ID NO: 2660623 - RNA, 19 nt, Homo sapiens
  misc_RNA (1)...(19): siRNA sense strand
aagaggaagagguggagga

SEQ ID NO: 2660624 - RNA, 19 nt, Homo sapiens
  misc_RNA (1)...(19): siRNA sense strand
ucaaacgagagcaggucaa

SEQ ID NO: 2660625 - RNA, 19 nt, Homo sapiens
  misc_RNA (1)...(19): siRNA sense strand
acccauuaaugauagcaaa

SEQ ID NO: 2660626 - RNA, 19 nt, Homo sapiens
  misc_RNA (1)...(19): siRNA sense strand
aggaagaagaggaagaggu

SEQ ID NO: 2660627 - RNA, 19 nt, Homo sapiens
  misc_RNA (1)...(19): siRNA sense strand
agaaaagcaagaugaguuu

SEQ ID NO: 2660628 - RNA, 19 nt, Homo sapiens
  misc_RNA (1)...(19): siRNA sense strand
gcaagaugaguuugaagca

SEQ ID NO: 2660629 - RNA, 19 nt, Homo sapiens
  misc_RNA (1)...(19): siRNA sense strand
ugucacaauagcaauguua

SEQ ID NO: 2660630 - RNA, 19 nt, Homo sapiens
  misc_RNA (1)...(19): siRNA sense strand
gggacagagaugacuccaa

SEQ ID NO: 2660631 - RNA, 19 nt, Homo sapiens
  misc_RNA (1)...(19): siRNA sense strand
uggagaauggcgaggacca

SEQ ID NO: 2660632 - RNA, 19 nt, Homo sapiens
  misc_RNA (1)...(19): siRNA sense strand
ggaagaagaggaagaggug

SEQ ID NO: 2660633 - RNA, 19 nt, Homo sapiens
  misc_RNA (1)...(19): siRNA sense strand
cggcaagagaaccggaaga

SEQ ID NO: 2660634 - RNA, 19 nt, Homo sapiens
  misc_RNA (1)...(19): siRNA sense strand
ucuagagaucgaugggcua

SEQ ID NO: 2660635 - RNA, 19 nt, Homo sapiens
  misc_RNA (1)...(19): siRNA sense strand
ccaacuacgagaaggaacu

SEQ ID NO: 2660636 - RNA, 19 nt, Homo sapiens
  misc_RNA (1)...(19): siRNA sense strand
ccuccaacuacgagaagga

SEQ ID NO: 2660637 - RNA, 19 nt, Homo sapiens
  misc_RNA (1)...(19): siRNA sense strand
aagagaaccggaagaacau

SEQ ID NO: 2660638 - RNA, 19 nt, Homo sapiens
  misc_RNA (1)...(19): siRNA sense strand
ggucccuggagaaggagaa

SEQ ID NO: 2660639 - RNA, 19 nt, Homo sapiens
  misc_RNA (1)...(19): siRNA sense strand
cgaaggugguggugcgcaa

SEQ ID NO: 2660640 - RNA, 19 nt, Homo sapiens
  misc_RNA (1)...(19): siRNA sense strand
aggaggaguuugugugcga

SEQ ID NO: 2660641 - RNA, 19 nt, Homo sapiens
  misc_RNA (1)...(19): siRNA sense strand
accucaagagucagagaaa

SEQ ID NO: 2660642 - RNA, 19 nt, Homo sapiens
  misc_RNA (1)...(19): siRNA sense strand
ccgaaugggugauggagag

SEQ ID NO: 2660643 - RNA, 19 nt, Homo sapiens
  misc_RNA (1)...(19): siRNA sense strand
aggccuucguggucaacaa

SEQ ID NO: 2660644 - RNA, 19 nt, Homo sapiens
  misc_RNA (1)...(19): siRNA sense strand
gcucugacgaugagguacu

SEQ ID NO: 2660645 - RNA, 19 nt, Homo sapiens
  misc_RNA (1)...(19): siRNA sense strand
acucaagugcaaagccauu

SEQ ID NO: 2660646 - RNA, 19 nt, Homo sapiens
  misc_RNA (1)...(19): siRNA sense strand
gaaaguaaguacaagggaa

SEQ ID NO: 2660647 - RNA, 19 nt, Homo sapiens
  misc_RNA (1)...(19): siRNA sense strand
uggaaaaggcuauggaaaa

SEQ ID NO: 2660648 - RNA, 19 nt, Homo sapiens
  misc_RNA (1)...(19): siRNA sense strand
gaaaacagcaagugggaaa

SEQ ID NO: 2660649 - RNA, 19 nt, Homo sapiens
  misc_RNA (1)...(19): siRNA sense strand
agaaauagcaguaagccaa

SEQ ID NO: 2660650 - RNA, 19 nt, Homo sapiens
  misc_RNA (1)...(19): siRNA sense strand
aagacagcuuugugggaua

SEQ ID NO: 2660651 - RNA, 19 nt, Homo sapiens
  misc_RNA (1)...(19): siRNA sense strand
cagaagauacugggagaaa

SEQ ID NO: 2660652 - RNA, 19 nt, Homo sapiens
  misc_RNA (1)...(19): siRNA sense strand
aaaaggaggaagaggaaaa

SEQ ID NO: 2660653 - RNA, 19 nt, Homo sapiens
  misc_RNA (1)...(19): siRNA sense strand
agaaagaauuggaagccuu

SEQ ID NO: 2660654 - RNA, 19 nt, Homo sapiens
  misc_RNA (1)...(19): siRNA sense strand
ugacaagagccaagagcuu

SEQ ID NO: 2660655 - RNA, 19 nt, Homo sapiens
  misc_RNA (1)...(19): siRNA sense strand
uggagauacaggagaaauu

SEQ ID NO: 2660656 - RNA, 19 nt, Homo sapiens
  misc_RNA (1)...(19): siRNA sense strand
acacaagugaucacagaaa

SEQ ID NO: 2660657 - RNA, 19 nt, Homo sapiens
  misc_RNA (1)...(19): siRNA sense strand
aggaacaguugcuggucaa

SEQ ID NO: 2660658 - RNA, 19 nt, Homo sapiens
  misc_RNA (1)...(19): siRNA sense strand
acguaucacuuuagccaaa

SEQ ID NO: 2660659 - RNA, 19 nt, Homo sapiens
  misc_RNA (1)...(19): siRNA sense strand
gugacaucguggagcggaa

SEQ ID NO: 2660660 - RNA, 19 nt, Homo sapiens
  misc_RNA (1)...(19): siRNA sense strand
auaagaagccagacgaauu

SEQ ID NO: 2660661 - RNA, 19 nt, Homo sapiens
  misc_RNA (1)...(19): siRNA sense strand
aaauaaacuuucuggcaca

SEQ ID NO: 2660662 - RNA, 19 nt, Homo sapiens
  misc_RNA (1)...(19): siRNA sense strand
aaaguuagaugguggguca

SEQ ID NO: 2660663 - RNA, 19 nt, Homo sapiens
  misc_RNA (1)...(19): siRNA sense strand
ccagagaaaaugaugaaaa

SEQ ID NO: 2660664 - RNA, 19 nt, Homo sapiens
  misc_RNA (1)...(19): siRNA sense strand
ugggauaguggaagaacaa

SEQ ID NO: 2660665 - RNA, 19 nt, Homo sapiens
  misc_RNA (1)...(19): siRNA sense strand
gguuggagcaguagcaaga

SEQ ID NO: 2660666 - RNA, 19 nt, Homo sapiens
  misc_RNA (1)...(19): siRNA sense strand
caguagugaacaagcuaaa

SEQ ID NO: 2660667 - RNA, 19 nt, Homo sapiens
  misc_RNA (1)...(19): siRNA sense strand
cagcauuaauggacagguu

SEQ ID NO: 2660668 - RNA, 19 nt, Homo sapiens
  misc_RNA (1)...(19): siRNA sense strand
cacagaagauacugggaga

SEQ ID NO: 2660669 - RNA, 19 nt, Homo sapiens
  misc_RNA (1)...(19): siRNA sense strand
ggagaaaccaccugugcau

SEQ ID NO: 2660670 - RNA, 19 nt, Homo sapiens
  misc_RNA (1)...(19): siRNA sense strand
guggaaaaggcuauggaaa

SEQ ID NO: 2660671 - RNA, 19 nt, Homo sapiens
  misc_RNA (1)...(19): siRNA sense strand
agagaagaagacaaaguua

SEQ ID NO: 2660672 - RNA, 19 nt, Homo sapiens
  misc_RNA (1)...(19): siRNA sense strand
cuccacagucauugagaaa

SEQ ID NO: 2660673 - RNA, 19 nt, Homo sapiens
  misc_RNA (1)...(19): siRNA sense strand
agaccagcccugagaaaga

SEQ ID NO: 2660674 - RNA, 19 nt, Homo sapiens
  misc_RNA (1)...(19): siRNA sense strand
cuggaaaaguauuggcauu

SEQ ID NO: 2660675 - RNA, 19 nt, Homo sapiens
  misc_RNA (1)...(19): siRNA sense strand
ccaaacgacccuagugaga

SEQ ID NO: 2660676 - RNA, 19 nt, Homo sapiens
  misc_RNA (1)...(19): siRNA sense strand
aggagaaauuugggaucua

SEQ ID NO: 2660677 - RNA, 19 nt, Homo sapiens
  misc_RNA (1)...(19): siRNA sense strand
agaagaagacaaaguuaga

SEQ ID NO: 2660678 - RNA, 19 nt, Homo sapiens
  misc_RNA (1)...(19): siRNA sense strand
gagaaagaccuguugacca

SEQ ID NO: 2660679 - RNA, 19 nt, Homo sapiens
  misc_RNA (1)...(19): siRNA sense strand
uggcgugguuggagcagua

SEQ ID NO: 2660680 - RNA, 19 nt, Homo sapiens
  misc_RNA (1)...(19): siRNA sense strand
aaagaagggcauagauuca

SEQ ID NO: 2660681 - RNA, 19 nt, Homo sapiens
  misc_RNA (1)...(19): siRNA sense strand
cuagugagaauaagaagaa

SEQ ID NO: 2660682 - RNA, 19 nt, Homo sapiens
  misc_RNA (1)...(19): siRNA sense strand
aggaugaagcugugaagga

SEQ ID NO: 2660683 - RNA, 19 nt, Homo sapiens
  misc_RNA (1)...(19): siRNA sense strand
ggaccggugaaguuaguaa

SEQ ID NO: 2660684 - RNA, 19 nt, Homo sapiens
  misc_RNA (1)...(19): siRNA sense strand
ucaacugagcccagaggaa

SEQ ID NO: 2660685 - RNA, 19 nt, Homo sapiens
  misc_RNA (1)...(19): siRNA sense strand
uuacagagauacuggcuca

SEQ ID NO: 2660686 - RNA, 19 nt, Homo sapiens
  misc_RNA (1)...(19): siRNA sense strand
gcugcagaacagaggaaga

SEQ ID NO: 2660687 - RNA, 19 nt, Homo sapiens
  misc_RNA (1)...(19): siRNA sense strand
ccuacaagucggaacguga

SEQ ID NO: 2660688 - RNA, 19 nt, Homo sapiens
  misc_RNA (1)...(19): siRNA sense strand
gugggauaguggaagaaca

SEQ ID NO: 2660689 - RNA, 19 nt, Homo sapiens
  misc_RNA (1)...(19): siRNA sense strand
cagucaaggaugaugugaa

SEQ ID NO: 2660690 - RNA, 19 nt, Homo sapiens
  misc_RNA (1)...(19): siRNA sense strand
accaaagagaagaagacaa

SEQ ID NO: 2660691 - RNA, 19 nt, Homo sapiens
  misc_RNA (1)...(19): siRNA sense strand
ugauaagaagccagacgaa

SEQ ID NO: 2660692 - RNA, 19 nt, Homo sapiens
  misc_RNA (1)...(19): siRNA sense strand
acaaaaggaggaagaggaa

SEQ ID NO: 2660693 - RNA, 19 nt, Homo sapiens
  misc_RNA (1)...(19): siRNA sense strand
aggaagaggaaaacagcaa

SEQ ID NO: 2660694 - RNA, 19 nt, Homo sapiens
  misc_RNA (1)...(19): siRNA sense strand
ccaugaaauccauaaugua

SEQ ID NO: 2660695 - RNA, 19 nt, Homo sapiens
  misc_RNA (1)...(19): siRNA sense strand
gugugggcaucaaggacaa

SEQ ID NO: 2660696 - RNA, 19 nt, Homo sapiens
  misc_RNA (1)...(19): siRNA sense strand
gucuggagauacaggagaa

SEQ ID NO: 2660697 - RNA, 19 nt, Homo sapiens
  misc_RNA (1)...(19): siRNA sense strand
gguuuccaguagugaacaa

SEQ ID NO: 2660698 - RNA, 19 nt, Homo sapiens
  misc_RNA (1)...(19): siRNA sense strand
cggaacgugacauggacaa

SEQ ID NO: 2660699 - RNA, 19 nt, Homo sapiens
  misc_RNA (1)...(19): siRNA sense strand
cuuacaacuucaagaaacu

SEQ ID NO: 2660700 - RNA, 19 nt, Homo sapiens
  misc_RNA (1)...(19): siRNA sense strand
gggaaacccucucagccaa

SEQ ID NO: 2660701 - RNA, 19 nt, Homo sapiens
  misc_RNA (1)...(19): siRNA sense strand
aagaaauagcaguaagcca

SEQ ID NO: 2660702 - RNA, 19 nt, Homo sapiens
  misc_RNA (1)...(19): siRNA sense strand
ucauuaccuugguggcaaa

SEQ ID NO: 2660703 - RNA, 19 nt, Homo sapiens
  misc_RNA (1)...(19): siRNA sense strand
aggaaggccaggaacuuua

SEQ ID NO: 2660704 - RNA, 19 nt, Homo sapiens
  misc_RNA (1)...(19): siRNA sense strand
gaugaugugaacuuggaua

SEQ ID NO: 2660705 - RNA, 19 nt, Homo sapiens
  misc_RNA (1)...(19): siRNA sense strand
gcauuaauggacagguuca

SEQ ID NO: 2660706 - RNA, 19 nt, Homo sapiens
  misc_RNA (1)...(19): siRNA sense strand
gauacugggagaaagaauu

SEQ ID NO: 2660707 - RNA, 19 nt, Homo sapiens
  misc_RNA (1)...(19): siRNA sense strand
caguaucacuaauggacca

SEQ ID NO: 2660708 - RNA, 19 nt, Homo sapiens
  misc_RNA (1)...(19): siRNA sense strand
gcuuacaacuucaagaaac

SEQ ID NO: 2660709 - RNA, 19 nt, Homo sapiens
  misc_RNA (1)...(19): siRNA sense strand
ggauaguggaagaacaacu

SEQ ID NO: 2660710 - RNA, 19 nt, Homo sapiens
  misc_RNA (1)...(19): siRNA sense strand
ggaaccaaagagaagaaga

SEQ ID NO: 2660711 - RNA, 19 nt, Homo sapiens
  misc_RNA (1)...(19): siRNA sense strand
cugaagaagacuugagaaa

SEQ ID NO: 2660712 - RNA, 19 nt, Homo sapiens
  misc_RNA (1)...(19): siRNA sense strand
aggcagagaccgagccaaa

SEQ ID NO: 2660713 - RNA, 19 nt, Homo sapiens
  misc_RNA (1)...(19): siRNA sense strand
caguauagguucaagccaa

SEQ ID NO: 2660714 - RNA, 19 nt, Homo sapiens
  misc_RNA (1)...(19): siRNA sense strand
gauuagugguucuggucaa

SEQ ID NO: 2660715 - RNA, 19 nt, Homo sapiens
  misc_RNA (1)...(19): siRNA sense strand
cagcauggcaguaaagcaa

SEQ ID NO: 2660716 - RNA, 19 nt, Homo sapiens
  misc_RNA (1)...(19): siRNA sense strand
gacaaaagucugaggaauu

SEQ ID NO: 2660717 - RNA, 19 nt, Homo sapiens
  misc_RNA (1)...(19): siRNA sense strand
gaucaaacuuuacaggaga

SEQ ID NO: 2660718 - RNA, 19 nt, Homo sapiens
  misc_RNA (1)...(19): siRNA sense strand
ggacaaaagucugaggaau

SEQ ID NO: 2660719 - RNA, 19 nt, Homo sapiens
  misc_RNA (1)...(19): siRNA sense strand
cugacaaagagcuuggaaa

SEQ ID NO: 2660720 - RNA, 19 nt, Homo sapiens
  misc_RNA (1)...(19): siRNA sense strand
ccucaaagguguaagcaac

SEQ ID NO: 2660721 - RNA, 19 nt, Homo sapiens
  misc_RNA (1)...(19): siRNA sense strand
caugaaagggucaggcgaa

SEQ ID NO: 2660722 - RNA, 19 nt, Homo sapiens
  misc_RNA (1)...(19): siRNA sense strand
aggaaaacugccuggaaaa

SEQ ID NO: 2660723 - RNA, 19 nt, Homo sapiens
  misc_RNA (1)...(19): siRNA sense strand
ccaaguggccucagagcau

SEQ ID NO: 2660724 - RNA, 19 nt, Homo sapiens
  misc_RNA (1)...(19): siRNA sense strand
cugugcagguggagaguca

SEQ ID NO: 2660725 - RNA, 19 nt, Homo sapiens
  misc_RNA (1)...(19): siRNA sense strand
uagaagaugccaugcgaau

SEQ ID NO: 2660726 - RNA, 19 nt, Homo sapiens
  misc_RNA (1)...(19): siRNA sense strand
ugacaaagagcuuggaaac

SEQ ID NO: 2660727 - RNA, 19 nt, Homo sapiens
  misc_RNA (1)...(19): siRNA sense strand
ggucagacgcugcagccua

SEQ ID NO: 2660728 - RNA, 19 nt, Homo sapiens
  misc_RNA (1)...(19): siRNA sense strand
gagucauucgggaggacaa

SEQ ID NO: 2660729 - RNA, 19 nt, Homo sapiens
  misc_RNA (1)...(19): siRNA sense strand
cugcugagauggugaugau

SEQ ID NO: 2660730 - RNA, 19 nt, Homo sapiens
  misc_RNA (1)...(19): siRNA sense strand
caguaacacaccuggaaca

SEQ ID NO: 2660731 - RNA, 19 nt, Homo sapiens
  misc_RNA (1)...(19): siRNA sense strand
ccuuauaccuacaagccuu

SEQ ID NO: 2660732 - RNA, 19 nt, Homo sapiens
  misc_RNA (1)...(19): siRNA sense strand
cugaacagacauuggcaga

SEQ ID NO: 2660733 - RNA, 19 nt, Homo sapiens
  misc_RNA (1)...(19): siRNA sense strand
augugaacaauuugggaau

SEQ ID NO: 2660734 - RNA, 19 nt, Homo sapiens
  misc_RNA (1)...(19): siRNA sense strand
ugaagguguuguagaaacu

SEQ ID NO: 2660735 - RNA, 19 nt, Homo sapiens
  misc_RNA (1)...(19): siRNA sense strand
cauuggcagaagaggcaua

SEQ ID NO: 2660736 - RNA, 19 nt, Homo sapiens
  misc_RNA (1)...(19): siRNA sense strand
caacauggcuuuaugcaac

SEQ ID NO: 2660737 - RNA, 19 nt, Homo sapiens
  misc_RNA (1)...(19): siRNA sense strand
gucuaauagcagucagauu

SEQ ID NO: 2660738 - RNA, 19 nt, Homo sapiens
  misc_RNA (1)...(19): siRNA sense strand
aaauaguauccuagagugu

SEQ ID NO: 2660739 - RNA, 19 nt, Homo sapiens
  misc_RNA (1)...(19): siRNA sense strand
ggaucaaacuuuacaggag

SEQ ID NO: 2660740 - RNA, 19 nt, Homo sapiens
  misc_RNA (1)...(19): siRNA sense strand
ccuauggcuucacaggaaa

SEQ ID NO: 2660741 - RNA, 19 nt, Homo sapiens
  misc_RNA (1)...(19): siRNA sense strand
gcaugugccuguuggagca

SEQ ID NO: 2660742 - RNA, 19 nt, Homo sapiens
  misc_RNA (1)...(19): siRNA sense strand
ggguguacaacauggcuuu

SEQ ID NO: 2660743 - RNA, 19 nt, Homo sapiens
  misc_RNA (1)...(19): siRNA sense strand
acccacaagcauugaacua

SEQ ID NO: 2660744 - RNA, 19 nt, Homo sapiens
  misc_RNA (1)...(19): siRNA sense strand
aggauauucugcagccaau

SEQ ID NO: 2660745 - RNA, 19 nt, Homo sapiens
  misc_RNA (1)...(19): siRNA sense strand
ccagacuauaaaugggcaa

SEQ ID NO: 2660746 - RNA, 19 nt, Homo sapiens
  misc_RNA (1)...(19): siRNA sense strand
ccaacaugcucaggaccaa

SEQ ID NO: 2660747 - RNA, 19 nt, Homo sapiens
  misc_RNA (1)...(19): siRNA sense strand
agagaaggccagccggaga

SEQ ID NO: 2660748 - RNA, 19 nt, Homo sapiens
  misc_RNA (1)...(19): siRNA sense strand
cuaccagcaccuucaguaa

SEQ ID NO: 2660749 - RNA, 19 nt, Homo sapiens
  misc_RNA (1)...(19): siRNA sense strand
gggcaguauuguuauucau

SEQ ID NO: 2660750 - RNA, 19 nt, Homo sapiens
  misc_RNA (1)...(19): siRNA sense strand
cugagauggugaugaucga

SEQ ID NO: 2660751 - RNA, 19 nt, Homo sapiens
  misc_RNA (1)...(19): siRNA sense strand
ugaccagcauggcaguaaa

SEQ ID NO: 2660752 - RNA, 19 nt, Homo sapiens
  misc_RNA (1)...(19): siRNA sense strand
agccaaggcccaaggcaga

SEQ ID NO: 2660753 - RNA, 19 nt, Homo sapiens
  misc_RNA (1)...(19): siRNA sense strand
aguuucaucuagugccuaa

SEQ ID NO: 2660754 - RNA, 19 nt, Homo sapiens
  misc_RNA (1)...(19): siRNA sense strand
agagcaaacugucaagcau

SEQ ID NO: 2660755 - RNA, 19 nt, Homo sapiens
  misc_RNA (1)...(19): siRNA sense strand
agacaucaugaaaggguca

SEQ ID NO: 2660756 - RNA, 19 nt, Homo sapiens
  misc_RNA (1)...(19): siRNA sense strand
aauccuugcaagaggccaa

SEQ ID NO: 2660757 - RNA, 19 nt, Homo sapiens
  misc_RNA (1)...(19): siRNA sense strand
augcuuaacaaccagaaua

SEQ ID NO: 2660758 - RNA, 19 nt, Homo sapiens
  misc_RNA (1)...(19): siRNA sense strand
gagacaagcguuuggcacu

SEQ ID NO: 2660759 - RNA, 19 nt, Homo sapiens
  misc_RNA (1)...(19): siRNA sense strand
cuugacuaaugcaggauau

SEQ ID NO: 2660760 - RNA, 19 nt, Homo sapiens
  misc_RNA (1)...(19): siRNA sense strand
cugaggaauucuccaaaga

SEQ ID NO: 2660761 - RNA, 19 nt, Homo sapiens
  misc_RNA (1)...(19): siRNA sense strand
agaacaucuuggaacucaa

SEQ ID NO: 2660762 - RNA, 19 nt, Homo sapiens
  misc_RNA (1)...(19): siRNA sense strand
gugaagguguuguagaaac

SEQ ID NO: 2660763 - RNA, 19 nt, Homo sapiens
  misc_RNA (1)...(19): siRNA sense strand
acaacauggcuuuaugcaa

SEQ ID NO: 2660764 - RNA, 19 nt, Homo sapiens
  misc_RNA (1)...(19): siRNA sense strand
ccuacaagccuuucuguca

SEQ ID NO: 2660765 - RNA, 19 nt, Homo sapiens
  misc_RNA (1)...(19): siRNA sense strand
cccucaaagguguaagcaa

SEQ ID NO: 2660766 - RNA, 19 nt, Homo sapiens
  misc_RNA (1)...(19): siRNA sense strand
ggaaggaggaagaggagga

SEQ ID NO: 2660767 - RNA, 19 nt, Homo sapiens
  misc_RNA (1)...(19): siRNA sense strand
gagaacagcaugaaggaga

SEQ ID NO: 2660768 - RNA, 19 nt, Homo sapiens
  misc_RNA (1)...(19): siRNA sense strand
aggaagaggaggaggagga

SEQ ID NO: 2660769 - RNA, 19 nt, Homo sapiens
  misc_RNA (1)...(19): siRNA sense strand
aggaggaagaugaggaaga

SEQ ID NO: 2660770 - RNA, 19 nt, Homo sapiens
  misc_RNA (1)...(19): siRNA sense strand
aggaagaagaagaggagga

SEQ ID NO: 2660771 - RNA, 19 nt, Homo sapiens
  misc_RNA (1)...(19): siRNA sense strand
aggaagaggaagaggagga

SEQ ID NO: 2660772 - RNA, 19 nt, Homo sapiens
  misc_RNA (1)...(19): siRNA sense strand
aggaagaagaggaggagga

SEQ ID NO: 2660773 - RNA, 19 nt, Homo sapiens
  misc_RNA (1)...(19): siRNA sense strand
aggaggaggaggaggaaga

SEQ ID NO: 2660774 - RNA, 19 nt, Homo sapiens
  misc_RNA (1)...(19): siRNA sense strand
ucaagaaguugcaagggaa

SEQ ID NO: 2660775 - RNA, 19 nt, Homo sapiens
  misc_RNA (1)...(19): siRNA sense strand
aagaagaggaggaggagga

SEQ ID NO: 2660776 - RNA, 19 nt, Homo sapiens
  misc_RNA (1)...(19): siRNA sense strand
agaucaaggacaaggaaca

SEQ ID NO: 2660777 - RNA, 19 nt, Homo sapiens
  misc_RNA (1)...(19): siRNA sense strand
aagaggaggaagaggaaga

SEQ ID NO: 2660778 - RNA, 19 nt, Homo sapiens
  misc_RNA (1)...(19): siRNA sense strand
aggaugugcuacagggaga

SEQ ID NO: 2660779 - RNA, 19 nt, Homo sapiens
  misc_RNA (1)...(19): siRNA sense strand
ccacaaacucacugcccaa

SEQ ID NO: 2660780 - RNA, 19 nt, Homo sapiens
  misc_RNA (1)...(19): siRNA sense strand
gagggaaacuccaggcuca

SEQ ID NO: 2660781 - RNA, 19 nt, Homo sapiens
  misc_RNA (1)...(19): siRNA sense strand
aggaggauuucgacagcaa

SEQ ID NO: 2660782 - RNA, 19 nt, Homo sapiens
  misc_RNA (1)...(19): siRNA sense strand
cggccaacuacguggucaa

SEQ ID NO: 2660783 - RNA, 19 nt, Homo sapiens
  misc_RNA (1)...(19): siRNA sense strand
aggaugaggaagaagaaga

SEQ ID NO: 2660784 - RNA, 19 nt, Homo sapiens
  misc_RNA (1)...(19): siRNA sense strand
gggcugagauagagggcuc

SEQ ID NO: 2660785 - RNA, 19 nt, Homo sapiens
  misc_RNA (1)...(19): siRNA sense strand
gcugaauggggcugagaua

SEQ ID NO: 2660786 - RNA, 19 nt, Homo sapiens
  misc_RNA (1)...(19): siRNA sense strand
aagaagaggaggaagagga

SEQ ID NO: 2660787 - RNA, 19 nt, Homo sapiens
  misc_RNA (1)...(19): siRNA sense strand
aggaggaagaggaggagga

SEQ ID NO: 2660788 - RNA, 19 nt, Homo sapiens
  misc_RNA (1)...(19): siRNA sense strand
aggaggaagaagaggagga

SEQ ID NO: 2660789 - RNA, 19 nt, Homo sapiens
  misc_RNA (1)...(19): siRNA sense strand
aggaggaggaagaggagga

SEQ ID NO: 2660790 - RNA, 19 nt, Homo sapiens
  misc_RNA (1)...(19): siRNA sense strand
aggaggaagaggaggagga

SEQ ID NO: 2660791 - RNA, 19 nt, Homo sapiens
  misc_RNA (1)...(19): siRNA sense strand
aagaaaggacccagaggga

SEQ ID NO: 2660792 - RNA, 19 nt, Homo sapiens
  misc_RNA (1)...(19): siRNA sense strand
cagcagaacacccggcaga

SEQ ID NO: 2660793 - RNA, 19 nt, Homo sapiens
  misc_RNA (1)...(19): siRNA sense strand
ucaccaaaguugagaggac

SEQ ID NO: 2660794 - RNA, 19 nt, Homo sapiens
  misc_RNA (1)...(19): siRNA sense strand
gccaaagagcgguggagca

SEQ ID NO: 2660795 - RNA, 19 nt, Homo sapiens
  misc_RNA (1)...(19): siRNA sense strand
aagaggaggaggaggagga

SEQ ID NO: 2660796 - RNA, 19 nt, Homo sapiens
  misc_RNA (1)...(19): siRNA sense strand
aagaggaagaggaggagga

SEQ ID NO: 2660797 - RNA, 19 nt, Homo sapiens
  misc_RNA (1)...(19): siRNA sense strand
ggaaguuauuucaucccaa

SEQ ID NO: 2660798 - RNA, 19 nt, Homo sapiens
  misc_RNA (1)...(19): siRNA sense strand
ggaacagagccgaggcaug

SEQ ID NO: 2660799 - RNA, 19 nt, Homo sapiens
  misc_RNA (1)...(19): siRNA sense strand
ggucaaggaucgcuggaag

SEQ ID NO: 2660800 - RNA, 19 nt, Homo sapiens
  misc_RNA (1)...(19): siRNA sense strand
uggcagacgaucagaagga

SEQ ID NO: 2660801 - RNA, 19 nt, Homo sapiens
  misc_RNA (1)...(19): siRNA sense strand
augaagaagucgcccguca

SEQ ID NO: 2660802 - RNA, 19 nt, Homo sapiens
  misc_RNA (1)...(19): siRNA sense strand
acaaggaacagguagggau

SEQ ID NO: 2660803 - RNA, 19 nt, Homo sapiens
  misc_RNA (1)...(19): siRNA sense strand
cccuuaaggacgaaaccaa

SEQ ID NO: 2660804 - RNA, 19 nt, Homo sapiens
  misc_RNA (1)...(19): siRNA sense strand
uggaggaagaucaaggaca

SEQ ID NO: 2660805 - RNA, 19 nt, Homo sapiens
  misc_RNA (1)...(19): siRNA sense strand
ccuguguggaggaggaaca

SEQ ID NO: 2660806 - RNA, 19 nt, Homo sapiens
  misc_RNA (1)...(19): siRNA sense strand
cagucaaugcccacaagaa

SEQ ID NO: 2660807 - RNA, 19 nt, Homo sapiens
  misc_RNA (1)...(19): siRNA sense strand
agaggaugaggaagaagaa

SEQ ID NO: 2660808 - RNA, 19 nt, Homo sapiens
  misc_RNA (1)...(19): siRNA sense strand
aagaggaugaggaagaaga

SEQ ID NO: 2660809 - RNA, 19 nt, Homo sapiens
  misc_RNA (1)...(19): siRNA sense strand
ccgacuaccaguugaucau

SEQ ID NO: 2660810 - RNA, 19 nt, Homo sapiens
  misc_RNA (1)...(19): siRNA sense strand
acaccgaggaugugcuaca

SEQ ID NO: 2660811 - RNA, 19 nt, Homo sapiens
  misc_RNA (1)...(19): siRNA sense strand
ccggaucaacaucggcaaa

SEQ ID NO: 2660812 - RNA, 19 nt, Homo sapiens
  misc_RNA (1)...(19): siRNA sense strand
aggaggaagaggaagagga

SEQ ID NO: 2660813 - RNA, 19 nt, Homo sapiens
  misc_RNA (1)...(19): siRNA sense strand
aggaggaggaagaagagga

SEQ ID NO: 2660814 - RNA, 19 nt, Homo sapiens
  misc_RNA (1)...(19): siRNA sense strand
aggaggaggaggaagagga

SEQ ID NO: 2660815 - RNA, 19 nt, Homo sapiens
  misc_RNA (1)...(19): siRNA sense strand
cugagaaaguggccaccau

SEQ ID NO: 2660816 - RNA, 19 nt, Homo sapiens
  misc_RNA (1)...(19): siRNA sense strand
accuacaggaagugcuaua

SEQ ID NO: 2660817 - RNA, 19 nt, Homo sapiens
  misc_RNA (1)...(19): siRNA sense strand
gagcagaagcugaaggaag

SEQ ID NO: 2660818 - RNA, 19 nt, Homo sapiens
  misc_RNA (1)...(19): siRNA sense strand
cgggagaaggagaagguga

SEQ ID NO: 2660819 - RNA, 19 nt, Homo sapiens
  misc_RNA (1)...(19): siRNA sense strand
aaauaugcagagucagaaa

SEQ ID NO: 2660820 - RNA, 19 nt, Homo sapiens
  misc_RNA (1)...(19): siRNA sense strand
gugagcagguggaggccau

SEQ ID NO: 2660821 - RNA, 19 nt, Homo sapiens
  misc_RNA (1)...(19): siRNA sense strand
acuacaagcgggagaagga

SEQ ID NO: 2660822 - RNA, 19 nt, Homo sapiens
  misc_RNA (1)...(19): siRNA sense strand
ccaccauggacaaguucaa

SEQ ID NO: 2660823 - RNA, 19 nt, Homo sapiens
  misc_RNA (1)...(19): siRNA sense strand
ccauggaccugcugcgcau

SEQ ID NO: 2660824 - RNA, 19 nt, Homo sapiens
  misc_RNA (1)...(19): siRNA sense strand
gcuacaaggaggaugaucu

SEQ ID NO: 2660825 - RNA, 19 nt, Homo sapiens
  misc_RNA (1)...(19): siRNA sense strand
aggacuucaacguguguaa

SEQ ID NO: 2660826 - RNA, 19 nt, Homo sapiens
  misc_RNA (1)...(19): siRNA sense strand
ucuucaggauaaaggauga

SEQ ID NO: 2660827 - RNA, 19 nt, Homo sapiens
  misc_RNA (1)...(19): siRNA sense strand
gaugaugagauccgggaca

SEQ ID NO: 2660828 - RNA, 19 nt, Homo sapiens
  misc_RNA (1)...(19): siRNA sense strand
agaacaaugccuacagcuu

SEQ ID NO: 2660829 - RNA, 19 nt, Homo sapiens
  misc_RNA (1)...(19): siRNA sense strand
gaagacuacaagcgggaga

SEQ ID NO: 2660830 - RNA, 19 nt, Homo sapiens
  misc_RNA (1)...(19): siRNA sense strand
ggagaaggugaaugagaag

SEQ ID NO: 2660831 - RNA, 19 nt, Homo sapiens
  misc_RNA (1)...(19): siRNA sense strand
gggacagccaugaccggua

SEQ ID NO: 2660832 - RNA, 19 nt, Homo sapiens
  misc_RNA (1)...(19): siRNA sense strand
acuugaaaucagggaacaa

SEQ ID NO: 2660833 - RNA, 19 nt, Homo sapiens
  misc_RNA (1)...(19): siRNA sense strand
aaggagaaggugaaugaga

SEQ ID NO: 2660834 - RNA, 19 nt, Homo sapiens
  misc_RNA (1)...(19): siRNA sense strand
aggaagacuacaagcggga

SEQ ID NO: 2660835 - RNA, 19 nt, Homo sapiens
  misc_RNA (1)...(19): siRNA sense strand
aggaggaugaucuggugaa

SEQ ID NO: 2660836 - RNA, 19 nt, Homo sapiens
  misc_RNA (1)...(19): siRNA sense strand
acucagagguggacgggga

SEQ ID NO: 2660837 - RNA, 19 nt, Homo sapiens
  misc_RNA (1)...(19): siRNA sense strand
agguggaggccauugagua

SEQ ID NO: 2660838 - RNA, 19 nt, Homo sapiens
  misc_RNA (1)...(19): siRNA sense strand
ggaccaacuucuacgcaga

SEQ ID NO: 2660839 - RNA, 19 nt, Homo sapiens
  misc_RNA (1)...(19): siRNA sense strand
uggaaaggcugguggcugu

SEQ ID NO: 2660840 - RNA, 19 nt, Homo sapiens
  misc_RNA (1)...(19): siRNA sense strand
agcugaugcuggaggagaa

SEQ ID NO: 2660841 - RNA, 19 nt, Homo sapiens
  misc_RNA (1)...(19): siRNA sense strand
aggaugaggcuguguacau

SEQ ID NO: 2660842 - RNA, 19 nt, Homo sapiens
  misc_RNA (1)...(19): siRNA sense strand
ugugagagcuggaggacac

SEQ ID NO: 2660843 - RNA, 19 nt, Homo sapiens
  misc_RNA (1)...(19): siRNA sense strand
uggcugugcugcaaggcaa

SEQ ID NO: 2660844 - RNA, 19 nt, Homo sapiens
  misc_RNA (1)...(19): siRNA sense strand
gugaauauuuuaaggagga

SEQ ID NO: 2660845 - RNA, 19 nt, Homo sapiens
  misc_RNA (1)...(19): siRNA sense strand
caguucagaagcagggauu

SEQ ID NO: 2660846 - RNA, 19 nt, Homo sapiens
  misc_RNA (1)...(19): siRNA sense strand
gcaacacaacagagaggca

SEQ ID NO: 2660847 - RNA, 19 nt, Homo sapiens
  misc_RNA (1)...(19): siRNA sense strand
ugguggagacacugggaga

SEQ ID NO: 2660848 - RNA, 19 nt, Homo sapiens
  misc_RNA (1)...(19): siRNA sense strand
ugguagagcugaugcugga

SEQ ID NO: 2660849 - RNA, 19 nt, Homo sapiens
  misc_RNA (1)...(19): siRNA sense strand
cagccagaaaugugugaga

SEQ ID NO: 2660850 - RNA, 19 nt, Homo sapiens
  misc_RNA (1)...(19): siRNA sense strand
cuuugaaaugcuuggcaau

SEQ ID NO: 2660851 - RNA, 19 nt, Homo sapiens
  misc_RNA (1)...(19): siRNA sense strand
cgucuaggcugcauggcga

SEQ ID NO: 2660852 - RNA, 19 nt, Homo sapiens
  misc_RNA (1)...(19): siRNA sense strand
acucauugaagcuguggaa

SEQ ID NO: 2660853 - RNA, 19 nt, Homo sapiens
  misc_RNA (1)...(19): siRNA sense strand
ucuuugaaaugcuuggcaa

SEQ ID NO: 2660854 - RNA, 19 nt, Homo sapiens
  misc_RNA (1)...(19): siRNA sense strand
uggacaugguagagcugau

SEQ ID NO: 2660855 - RNA, 19 nt, Homo sapiens
  misc_RNA (1)...(19): siRNA sense strand
cuaugggaucccugaggaa

SEQ ID NO: 2660856 - RNA, 19 nt, Homo sapiens
  misc_RNA (1)...(19): siRNA sense strand
ucauugaagcuguggaaac

SEQ ID NO: 2660857 - RNA, 19 nt, Homo sapiens
  misc_RNA (1)...(19): siRNA sense strand
uggaugagguuuacccaga

SEQ ID NO: 2660858 - RNA, 19 nt, Homo sapiens
  misc_RNA (1)...(19): siRNA sense strand
cagaaaugugugagagcug

SEQ ID NO: 2660859 - RNA, 19 nt, Homo sapiens
  misc_RNA (1)...(19): siRNA sense strand
agacacugggagaugcuua

SEQ ID NO: 2660860 - RNA, 19 nt, Homo sapiens
  misc_RNA (1)...(19): siRNA sense strand
ucuccuacuuugaugguga

SEQ ID NO: 2660861 - RNA, 19 nt, Homo sapiens
  misc_RNA (1)...(19): siRNA sense strand
acagagaggcagauggaag

SEQ ID NO: 2660862 - RNA, 19 nt, Homo sapiens
  misc_RNA (1)...(19): siRNA sense strand
guauacagaggacgggaca

SEQ ID NO: 2660863 - RNA, 19 nt, Homo sapiens
  misc_RNA (1)...(19): siRNA sense strand
uggugaaggugguacggca

SEQ ID NO: 2660864 - RNA, 19 nt, Homo sapiens
  misc_RNA (1)...(19): siRNA sense strand
gggcauaguaauagagaaa

SEQ ID NO: 2660865 - RNA, 19 nt, Homo sapiens
  misc_RNA (1)...(19): siRNA sense strand
gcauaguaauagagaaaga

SEQ ID NO: 2660866 - RNA, 19 nt, Homo sapiens
  misc_RNA (1)...(19): siRNA sense strand
cugaagaaguagaugaaga

SEQ ID NO: 2660867 - RNA, 19 nt, Homo sapiens
  misc_RNA (1)...(19): siRNA sense strand
gauuauggagacagagaaa

SEQ ID NO: 2660868 - RNA, 19 nt, Homo sapiens
  misc_RNA (1)...(19): siRNA sense strand
cagaaagccaagagagaga

SEQ ID NO: 2660869 - RNA, 19 nt, Homo sapiens
  misc_RNA (1)...(19): siRNA sense strand
agagaaagagccaaagaaa

SEQ ID NO: 2660870 - RNA, 19 nt, Homo sapiens
  misc_RNA (1)...(19): siRNA sense strand
guucaaagucuguuaacaa

SEQ ID NO: 2660871 - RNA, 19 nt, Homo sapiens
  misc_RNA (1)...(19): siRNA sense strand
ccaaguauacugauggaaa

SEQ ID NO: 2660872 - RNA, 19 nt, Homo sapiens
  misc_RNA (1)...(19): siRNA sense strand
aagccaagagagagaauaa

SEQ ID NO: 2660873 - RNA, 19 nt, Homo sapiens
  misc_RNA (1)...(19): siRNA sense strand
cauauaaaccucagaucaa

SEQ ID NO: 2660874 - RNA, 19 nt, Homo sapiens
  misc_RNA (1)...(19): siRNA sense strand
uaauagagaaagagccaaa

SEQ ID NO: 2660875 - RNA, 19 nt, Homo sapiens
  misc_RNA (1)...(19): siRNA sense strand
agaaagagccaaagaaagu

SEQ ID NO: 2660876 - RNA, 19 nt, Homo sapiens
  misc_RNA (1)...(19): siRNA sense strand
guuuagaaguagaaguaca

SEQ ID NO: 2660877 - RNA, 19 nt, Homo sapiens
  misc_RNA (1)...(19): siRNA sense strand
augcagaauugcuuggaaa

SEQ ID NO: 2660878 - RNA, 19 nt, Homo sapiens
  misc_RNA (1)...(19): siRNA sense strand
ugauguaggacuuaagaaa

SEQ ID NO: 2660879 - RNA, 19 nt, Homo sapiens
  misc_RNA (1)...(19): siRNA sense strand
ggaagaaagcagugaugga

SEQ ID NO: 2660880 - RNA, 19 nt, Homo sapiens
  misc_RNA (1)...(19): siRNA sense strand
gaaaauuggaagugaagaa

SEQ ID NO: 2660881 - RNA, 19 nt, Homo sapiens
  misc_RNA (1)...(19): siRNA sense strand
uggaggugauggagauuua

SEQ ID NO: 2660882 - RNA, 19 nt, Homo sapiens
  misc_RNA (1)...(19): siRNA sense strand
agaugagcuugcugaaaua

SEQ ID NO: 2660883 - RNA, 19 nt, Homo sapiens
  misc_RNA (1)...(19): siRNA sense strand
gcugugaagcugagaaaca

SEQ ID NO: 2660884 - RNA, 19 nt, Homo sapiens
  misc_RNA (1)...(19): siRNA sense strand
uggauuagguugaggaaac

SEQ ID NO: 2660885 - RNA, 19 nt, Homo sapiens
  misc_RNA (1)...(19): siRNA sense strand
guguuuagaaguagaagua

SEQ ID NO: 2660886 - RNA, 19 nt, Homo sapiens
  misc_RNA (1)...(19): siRNA sense strand
cugaggaacuggaagguga

SEQ ID NO: 2660887 - RNA, 19 nt, Homo sapiens
  misc_RNA (1)...(19): siRNA sense strand
cuaagaaacacauggucua

SEQ ID NO: 2660888 - RNA, 19 nt, Homo sapiens
  misc_RNA (1)...(19): siRNA sense strand
gguuaaagaugaaugccuu

SEQ ID NO: 2660889 - RNA, 19 nt, Homo sapiens
  misc_RNA (1)...(19): siRNA sense strand
gggaagaaaacauuaguaa

SEQ ID NO: 2660890 - RNA, 19 nt, Homo sapiens
  misc_RNA (1)...(19): siRNA sense strand
ggacauugguacagagcac

SEQ ID NO: 2660891 - RNA, 19 nt, Homo sapiens
  misc_RNA (1)...(19): siRNA sense strand
agaacuauauggugacaau

SEQ ID NO: 2660892 - RNA, 19 nt, Homo sapiens
  misc_RNA (1)...(19): siRNA sense strand
ccuaaaacacagaaugaaa

SEQ ID NO: 2660893 - RNA, 19 nt, Homo sapiens
  misc_RNA (1)...(19): siRNA sense strand
auauuuggccuuugggaaa

SEQ ID NO: 2660894 - RNA, 19 nt, Homo sapiens
  misc_RNA (1)...(19): siRNA sense strand
ggacauuauuauagggcac

SEQ ID NO: 2660895 - RNA, 19 nt, Homo sapiens
  misc_RNA (1)...(19): siRNA sense strand
uuuaggaguuagucagaaa

SEQ ID NO: 2660896 - RNA, 19 nt, Homo sapiens
  misc_RNA (1)...(19): siRNA sense strand
cuugaaaagcaaagguaaa

SEQ ID NO: 2660897 - RNA, 19 nt, Homo sapiens
  misc_RNA (1)...(19): siRNA sense strand
aggcuuuaguuguagcaaa

SEQ ID NO: 2660898 - RNA, 19 nt, Homo sapiens
  misc_RNA (1)...(19): siRNA sense strand
cggaaaauguggacuggua

SEQ ID NO: 2660899 - RNA, 19 nt, Homo sapiens
  misc_RNA (1)...(19): siRNA sense strand
aguaagauacagagaagau

SEQ ID NO: 2660900 - RNA, 19 nt, Homo sapiens
  misc_RNA (1)...(19): siRNA sense strand
gcuaaugaaacaaaggaga

SEQ ID NO: 2660901 - RNA, 19 nt, Homo sapiens
  misc_RNA (1)...(19): siRNA sense strand
aucaagacucugugggaaa

SEQ ID NO: 2660902 - RNA, 19 nt, Homo sapiens
  misc_RNA (1)...(19): siRNA sense strand
aguacagacugcuggagaa

SEQ ID NO: 2660903 - RNA, 19 nt, Homo sapiens
  misc_RNA (1)...(19): siRNA sense strand
ugugucaaguggaaagaaa

SEQ ID NO: 2660904 - RNA, 19 nt, Homo sapiens
  misc_RNA (1)...(19): siRNA sense strand
ugagaaacagccagaacua

SEQ ID NO: 2660905 - RNA, 19 nt, Homo sapiens
  misc_RNA (1)...(19): siRNA sense strand
guauggagaagaugggauu

SEQ ID NO: 2660906 - RNA, 19 nt, Homo sapiens
  misc_RNA (1)...(19): siRNA sense strand
ugaccuuguuaaugcaaua

SEQ ID NO: 2660907 - RNA, 19 nt, Homo sapiens
  misc_RNA (1)...(19): siRNA sense strand
guagcagacaggagaaauu

SEQ ID NO: 2660908 - RNA, 19 nt, Homo sapiens
  misc_RNA (1)...(19): siRNA sense strand
ggaaggaaggaguuaguga

SEQ ID NO: 2660909 - RNA, 19 nt, Homo sapiens
  misc_RNA (1)...(19): siRNA sense strand
guauaggggcauaguaaua

SEQ ID NO: 2660910 - RNA, 19 nt, Homo sapiens
  misc_RNA (1)...(19): siRNA sense strand
gauaagucauugaaggcuu

SEQ ID NO: 2660911 - RNA, 19 nt, Homo sapiens
  misc_RNA (1)...(19): siRNA sense strand
agguaugcucucagugaaa

SEQ ID NO: 2660912 - RNA, 19 nt, Homo sapiens
  misc_RNA (1)...(19): siRNA sense strand
cuggagaaggagagcagaa

SEQ ID NO: 2660913 - RNA, 19 nt, Homo sapiens
  misc_RNA (1)...(19): siRNA sense strand
gcuggaaguuggaaguaca

SEQ ID NO: 2660914 - RNA, 19 nt, Homo sapiens
  misc_RNA (1)...(19): siRNA sense strand
aguuggaaguacaguagaa

SEQ ID NO: 2660915 - RNA, 19 nt, Homo sapiens
  misc_RNA (1)...(19): siRNA sense strand
aggagauucaugugacaaa

SEQ ID NO: 2660916 - RNA, 19 nt, Homo sapiens
  misc_RNA (1)...(19): siRNA sense strand
acagaagauguguuggaaa

SEQ ID NO: 2660917 - RNA, 19 nt, Homo sapiens
  misc_RNA (1)...(19): siRNA sense strand
gauagugaacccugagaau

SEQ ID NO: 2660918 - RNA, 19 nt, Homo sapiens
  misc_RNA (1)...(19): siRNA sense strand
auagauaaugcauggcaaa

SEQ ID NO: 2660919 - RNA, 19 nt, Homo sapiens
  misc_RNA (1)...(19): siRNA sense strand
aguaauagagaaagagcca

SEQ ID NO: 2660920 - RNA, 19 nt, Homo sapiens
  misc_RNA (1)...(19): siRNA sense strand
gaaaacagcaagaguagaa

SEQ ID NO: 2660921 - RNA, 19 nt, Homo sapiens
  misc_RNA (1)...(19): siRNA sense strand
ggcuuuaguuguagcaaaa

SEQ ID NO: 2660922 - RNA, 19 nt, Homo sapiens
  misc_RNA (1)...(19): siRNA sense strand
agcagaaagccaagagaga

SEQ ID NO: 2660923 - RNA, 19 nt, Homo sapiens
  misc_RNA (1)...(19): siRNA sense strand
agaagaugaagcugaaauu

SEQ ID NO: 2660924 - RNA, 19 nt, Homo sapiens
  misc_RNA (1)...(19): siRNA sense strand
ugauaugauuagcagguau

SEQ ID NO: 2660925 - RNA, 19 nt, Homo sapiens
  misc_RNA (1)...(19): siRNA sense strand
uuagcaaccuucagggcaa

SEQ ID NO: 2660926 - RNA, 19 nt, Homo sapiens
  misc_RNA (1)...(19): siRNA sense strand
agagcauggcccagguaua

SEQ ID NO: 2660927 - RNA, 19 nt, Homo sapiens
  misc_RNA (1)...(19): siRNA sense strand
cuaucagguuaaagaugaa

SEQ ID NO: 2660928 - RNA, 19 nt, Homo sapiens
  misc_RNA (1)...(19): siRNA sense strand
agguuaaggcacaggcuuu

SEQ ID NO: 2660929 - RNA, 19 nt, Homo sapiens
  misc_RNA (1)...(19): siRNA sense strand
aagaagugguggugugguu

SEQ ID NO: 2660930 - RNA, 19 nt, Homo sapiens
  misc_RNA (1)...(19): siRNA sense strand
gugaagaagaauuuguaga

SEQ ID NO: 2660931 - RNA, 19 nt, Homo sapiens
  misc_RNA (1)...(19): siRNA sense strand
uaagaguccaccugagaaa

SEQ ID NO: 2660932 - RNA, 19 nt, Homo sapiens
  misc_RNA (1)...(19): siRNA sense strand
ggaggaggaaccagaaaca

SEQ ID NO: 2660933 - RNA, 19 nt, Homo sapiens
  misc_RNA (1)...(19): siRNA sense strand
caaucuugauguaggacuu

SEQ ID NO: 2660934 - RNA, 19 nt, Homo sapiens
  misc_RNA (1)...(19): siRNA sense strand
uggucaagucuaagaaaca

SEQ ID NO: 2660935 - RNA, 19 nt, Homo sapiens
  misc_RNA (1)...(19): siRNA sense strand
guuuggaggugauggagau

SEQ ID NO: 2660936 - RNA, 19 nt, Homo sapiens
  misc_RNA (1)...(19): siRNA sense strand
uggaaaugaaacugacaaa

SEQ ID NO: 2660937 - RNA, 19 nt, Homo sapiens
  misc_RNA (1)...(19): siRNA sense strand
ggauuucaguuguaggcaa

SEQ ID NO: 2660938 - RNA, 19 nt, Homo sapiens
  misc_RNA (1)...(19): siRNA sense strand
acguaaagaucauugccaa

SEQ ID NO: 2660939 - RNA, 19 nt, Homo sapiens
  misc_RNA (1)...(19): siRNA sense strand
agacgaaagaagaagcuga

SEQ ID NO: 2660940 - RNA, 19 nt, Homo sapiens
  misc_RNA (1)...(19): siRNA sense strand
agaucauugccaagguuaa

SEQ ID NO: 2660941 - RNA, 19 nt, Homo sapiens
  misc_RNA (1)...(19): siRNA sense strand
cugucagccuggaucgaua

SEQ ID NO: 2660942 - RNA, 19 nt, Homo sapiens
  misc_RNA (1)...(19): siRNA sense strand
caaauuugccuguugccaa

SEQ ID NO: 2660943 - RNA, 19 nt, Homo sapiens
  misc_RNA (1)...(19): siRNA sense strand
acuggugguuugaaagcaa

SEQ ID NO: 2660944 - RNA, 19 nt, Homo sapiens
  misc_RNA (1)...(19): siRNA sense strand
ggaaauucaugaagagugg

SEQ ID NO: 2660945 - RNA, 19 nt, Homo sapiens
  misc_RNA (1)...(19): siRNA sense strand
cggauuuaguggcuggcuu

SEQ ID NO: 2660946 - RNA, 19 nt, Homo sapiens
  misc_RNA (1)...(19): siRNA sense strand
guuugaaagcaaccaagaa

SEQ ID NO: 2660947 - RNA, 19 nt, Homo sapiens
  misc_RNA (1)...(19): siRNA sense strand
ucuccuacguaaagaucau

SEQ ID NO: 2660948 - RNA, 19 nt, Homo sapiens
  misc_RNA (1)...(19): siRNA sense strand
aagaagaagucucuggaag

SEQ ID NO: 2660949 - RNA, 19 nt, Homo sapiens
  misc_RNA (1)...(19): siRNA sense strand
ccguaaccacagucaggaa

SEQ ID NO: 2660950 - RNA, 19 nt, Homo sapiens
  misc_RNA (1)...(19): siRNA sense strand
ucagauaauuacaggacaa

SEQ ID NO: 2660951 - RNA, 19 nt, Homo sapiens
  misc_RNA (1)...(19): siRNA sense strand
ggaaaagcccucugggaaa

SEQ ID NO: 2660952 - RNA, 19 nt, Homo sapiens
  misc_RNA (1)...(19): siRNA sense strand
aggaaguuaccaagagaaa

SEQ ID NO: 2660953 - RNA, 19 nt, Homo sapiens
  misc_RNA (1)...(19): siRNA sense strand
gaaaauuggaaaaggcaua

SEQ ID NO: 2660954 - RNA, 19 nt, Homo sapiens
  misc_RNA (1)...(19): siRNA sense strand
cuaugauaauccugagaau

SEQ ID NO: 2660955 - RNA, 19 nt, Homo sapiens
  misc_RNA (1)...(19): siRNA sense strand
ucucagaaguuaaggucau

SEQ ID NO: 2660956 - RNA, 19 nt, Homo sapiens
  misc_RNA (1)...(19): siRNA sense strand
gguuagaagcauaccaaga

SEQ ID NO: 2660957 - RNA, 19 nt, Homo sapiens
  misc_RNA (1)...(19): siRNA sense strand
gcagcauccacaagaguaa

SEQ ID NO: 2660958 - RNA, 19 nt, Homo sapiens
  misc_RNA (1)...(19): siRNA sense strand
guucagcgucucaggaaua

SEQ ID NO: 2660959 - RNA, 19 nt, Homo sapiens
  misc_RNA (1)...(19): siRNA sense strand
aguaaaaggccaagauuau

SEQ ID NO: 2660960 - RNA, 19 nt, Homo sapiens
  misc_RNA (1)...(19): siRNA sense strand
ugaugugaauaaagaggaa

SEQ ID NO: 2660961 - RNA, 19 nt, Homo sapiens
  misc_RNA (1)...(19): siRNA sense strand
cugagaauuugaaggccaa

SEQ ID NO: 2660962 - RNA, 19 nt, Homo sapiens
  misc_RNA (1)...(19): siRNA sense strand
cagaaaagcccaaagaaga

SEQ ID NO: 2660963 - RNA, 19 nt, Homo sapiens
  misc_RNA (1)...(19): siRNA sense strand
acauaagaagucacggaua

SEQ ID NO: 2660964 - RNA, 19 nt, Homo sapiens
  misc_RNA (1)...(19): siRNA sense strand
caaagaaaucguugaggca

SEQ ID NO: 2660965 - RNA, 19 nt, Homo sapiens
  misc_RNA (1)...(19): siRNA sense strand
caguaaaaggccaagauua

SEQ ID NO: 2660966 - RNA, 19 nt, Homo sapiens
  misc_RNA (1)...(19): siRNA sense strand
ccacuuuaccugagcaaaa

SEQ ID NO: 2660967 - RNA, 19 nt, Homo sapiens
  misc_RNA (1)...(19): siRNA sense strand
gauaauuacaggacaacuu

SEQ ID NO: 2660968 - RNA, 19 nt, Homo sapiens
  misc_RNA (1)...(19): siRNA sense strand
ccugagaauuugaaggcca

SEQ ID NO: 2660969 - RNA, 19 nt, Homo sapiens
  misc_RNA (1)...(19): siRNA sense strand
agaaggaaguuaaggguuc

SEQ ID NO: 2660970 - RNA, 19 nt, Homo sapiens
  misc_RNA (1)...(19): siRNA sense strand
caggaauauucgagugcga

SEQ ID NO: 2660971 - RNA, 19 nt, Homo sapiens
  misc_RNA (1)...(19): siRNA sense strand
caauaauccaccugguaau

SEQ ID NO: 2660972 - RNA, 19 nt, Homo sapiens
  misc_RNA (1)...(19): siRNA sense strand
guguaaauaagcagacaga

SEQ ID NO: 2660973 - RNA, 19 nt, Homo sapiens
  misc_RNA (1)...(19): siRNA sense strand
cuggaaauaguaagcauua

SEQ ID NO: 2660974 - RNA, 19 nt, Homo sapiens
  misc_RNA (1)...(19): siRNA sense strand
ucgaguagccauugauauu

SEQ ID NO: 2660975 - RNA, 19 nt, Homo sapiens
  misc_RNA (1)...(19): siRNA sense strand
gaaucaacagacugagaau

SEQ ID NO: 2660976 - RNA, 19 nt, Homo sapiens
  misc_RNA (1)...(19): siRNA sense strand
guucauuugcucaggaaga

SEQ ID NO: 2660977 - RNA, 19 nt, Homo sapiens
  misc_RNA (1)...(19): siRNA sense strand
acaaauggccauacugaau

SEQ ID NO: 2660978 - RNA, 19 nt, Homo sapiens
  misc_RNA (1)...(19): siRNA sense strand
aguauaaaucgcccagaaa

SEQ ID NO: 2660979 - RNA, 19 nt, Homo sapiens
  misc_RNA (1)...(19): siRNA sense strand
agccagaaacagugccaua

SEQ ID NO: 2660980 - RNA, 19 nt, Homo sapiens
  misc_RNA (1)...(19): siRNA sense strand
guuucaacccaaucagaua

SEQ ID NO: 2660981 - RNA, 19 nt, Homo sapiens
  misc_RNA (1)...(19): siRNA sense strand
gugaccgauuugagggcua

SEQ ID NO: 2660982 - RNA, 19 nt, Homo sapiens
  misc_RNA (1)...(19): siRNA sense strand
gaguaaggaagauguaaca

SEQ ID NO: 2660983 - RNA, 19 nt, Homo sapiens
  misc_RNA (1)...(19): siRNA sense strand
ggucuaguccauugcuuaa

SEQ ID NO: 2660984 - RNA, 19 nt, Homo sapiens
  misc_RNA (1)...(19): siRNA sense strand
ccacaagaguaaggaagau

SEQ ID NO: 2660985 - RNA, 19 nt, Homo sapiens
  misc_RNA (1)...(19): siRNA sense strand
gauccaauaccgagauuca

SEQ ID NO: 2660986 - RNA, 19 nt, Homo sapiens
  misc_RNA (1)...(19): siRNA sense strand
agacuuucuugcugaggaa

SEQ ID NO: 2660987 - RNA, 19 nt, Homo sapiens
  misc_RNA (1)...(19): siRNA sense strand
ccuuaaaccaaacuacaaa

SEQ ID NO: 2660988 - RNA, 19 nt, Homo sapiens
  misc_RNA (1)...(19): siRNA sense strand
cauuaguuucugaggguga

SEQ ID NO: 2660989 - RNA, 19 nt, Homo sapiens
  misc_RNA (1)...(19): siRNA sense strand
gaagaaucagcaaggguga

SEQ ID NO: 2660990 - RNA, 19 nt, Homo sapiens
  misc_RNA (1)...(19): siRNA sense strand
cagacaaacccuugccaga

SEQ ID NO: 2660991 - RNA, 19 nt, Homo sapiens
  misc_RNA (1)...(19): siRNA sense strand
aguguaaaucugacaacua

SEQ ID NO: 2660992 - RNA, 19 nt, Homo sapiens
  misc_RNA (1)...(19): siRNA sense strand
gaaucgaguuagacaacca

SEQ ID NO: 2660993 - RNA, 19 nt, Homo sapiens
  misc_RNA (1)...(19): siRNA sense strand
gggaagugagacaccuaaa

SEQ ID NO: 2660994 - RNA, 19 nt, Homo sapiens
  misc_RNA (1)...(19): siRNA sense strand
ggccauacugaaucaaaua

SEQ ID NO: 2660995 - RNA, 19 nt, Homo sapiens
  misc_RNA (1)...(19): siRNA sense strand
uugcugaggaagaaauuaa

SEQ ID NO: 2660996 - RNA, 19 nt, Homo sapiens
  misc_RNA (1)...(19): siRNA sense strand
ccucaucacgggaaggcua

SEQ ID NO: 2660997 - RNA, 19 nt, Homo sapiens
  misc_RNA (1)...(19): siRNA sense strand
gauucaucuccuagaagaa

SEQ ID NO: 2660998 - RNA, 19 nt, Homo sapiens
  misc_RNA (1)...(19): siRNA sense strand
aagaaaucguugaggcauc

SEQ ID NO: 2660999 - RNA, 19 nt, Homo sapiens
  misc_RNA (1)...(19): siRNA sense strand
aagaagucacggauacaaa

SEQ ID NO: 2661000 - RNA, 19 nt, Homo sapiens
  misc_RNA (1)...(19): siRNA sense strand
gggaacagccagaaacagu

SEQ ID NO: 2661001 - RNA, 19 nt, Homo sapiens
  misc_RNA (1)...(19): siRNA sense strand
uggaggaggaugaggagga

SEQ ID NO: 2661002 - RNA, 19 nt, Homo sapiens
  misc_RNA (1)...(19): siRNA sense strand
aaagaaacuauucggaaga

SEQ ID NO: 2661003 - RNA, 19 nt, Homo sapiens
  misc_RNA (1)...(19): siRNA sense strand
guuaguugacugccagaaa

SEQ ID NO: 2661004 - RNA, 19 nt, Homo sapiens
  misc_RNA (1)...(19): siRNA sense strand
ucagcaugguucagauaau

SEQ ID NO: 2661005 - RNA, 19 nt, Homo sapiens
  misc_RNA (1)...(19): siRNA sense strand
cucaaauggaucagcuuua

SEQ ID NO: 2661006 - RNA, 19 nt, Homo sapiens
  misc_RNA (1)...(19): siRNA sense strand
cugaaaaguucuaaaagca

SEQ ID NO: 2661007 - RNA, 19 nt, Homo sapiens
  misc_RNA (1)...(19): siRNA sense strand
guauaaaucgcccagaaau

SEQ ID NO: 2661008 - RNA, 19 nt, Homo sapiens
  misc_RNA (1)...(19): siRNA sense strand
ccaccugguaauuggaaaa

SEQ ID NO: 2661009 - RNA, 19 nt, Homo sapiens
  misc_RNA (1)...(19): siRNA sense strand
cugcuuuacuugaugugaa

SEQ ID NO: 2661010 - RNA, 19 nt, Homo sapiens
  misc_RNA (1)...(19): siRNA sense strand
auaacuuggaggaggauga

SEQ ID NO: 2661011 - RNA, 19 nt, Homo sapiens
  misc_RNA (1)...(19): siRNA sense strand
uguaagauugagagcucua

SEQ ID NO: 2661012 - RNA, 19 nt, Homo sapiens
  misc_RNA (1)...(19): siRNA sense strand
uugcuuuagugauggauau

SEQ ID NO: 2661013 - RNA, 19 nt, Homo sapiens
  misc_RNA (1)...(19): siRNA sense strand
gcucaggaagaaucagcaa

SEQ ID NO: 2661014 - RNA, 19 nt, Homo sapiens
  misc_RNA (1)...(19): siRNA sense strand
gcuuguauccacugggaaa

SEQ ID NO: 2661015 - RNA, 19 nt, Homo sapiens
  misc_RNA (1)...(19): siRNA sense strand
uugaagaaaguaugggaaa

SEQ ID NO: 2661016 - RNA, 19 nt, Homo sapiens
  misc_RNA (1)...(19): siRNA sense strand
ugaagaaaguaugggaaaa

SEQ ID NO: 2661017 - RNA, 19 nt, Homo sapiens
  misc_RNA (1)...(19): siRNA sense strand
agacacaauuggaguggga

SEQ ID NO: 2661018 - RNA, 19 nt, Homo sapiens
  misc_RNA (1)...(19): siRNA sense strand
aggaaguauuacaccgcaa

SEQ ID NO: 2661019 - RNA, 19 nt, Homo sapiens
  misc_RNA (1)...(19): siRNA sense strand
cugaaguaaugaaaggcau

SEQ ID NO: 2661020 - RNA, 19 nt, Homo sapiens
  misc_RNA (1)...(19): siRNA sense strand
gcgcagacuucucuucuaa

SEQ ID NO: 2661021 - RNA, 19 nt, Homo sapiens
  misc_RNA (1)...(19): siRNA sense strand
uaacaaaccuucacugcuu

SEQ ID NO: 2661022 - RNA, 19 nt, Homo sapiens
  misc_RNA (1)...(19): siRNA sense strand
uccuuuagcaagaagaaua

SEQ ID NO: 2661023 - RNA, 19 nt, Homo sapiens
  misc_RNA (1)...(19): siRNA sense strand
cuaagagauuguacggcau

SEQ ID NO: 2661024 - RNA, 19 nt, Homo sapiens
  misc_RNA (1)...(19): siRNA sense strand
caugaauauuccagcacga

SEQ ID NO: 2661025 - RNA, 19 nt, Homo sapiens
  misc_RNA (1)...(19): siRNA sense strand
aauuugaggagguuguuaa

SEQ ID NO: 2661026 - RNA, 19 nt, Homo sapiens
  misc_RNA (1)...(19): siRNA sense strand
ucuaagagauuguacggca

SEQ ID NO: 2661027 - RNA, 19 nt, Homo sapiens
  misc_RNA (1)...(19): siRNA sense strand
ccuuuagcaagaagaauau

SEQ ID NO: 2661028 - RNA, 19 nt, Homo sapiens
  misc_RNA (1)...(19): siRNA sense strand
acggacaagccuuagcaaa

SEQ ID NO: 2661029 - RNA, 19 nt, Homo sapiens
  misc_RNA (1)...(19): siRNA sense strand
ccaggaaguaugaaaagaa

SEQ ID NO: 2661030 - RNA, 19 nt, Homo sapiens
  misc_RNA (1)...(19): siRNA sense strand
uguuggaaagugugaugaa

SEQ ID NO: 2661031 - RNA, 19 nt, Homo sapiens
  misc_RNA (1)...(19): siRNA sense strand
guuccauugaagaaaguau

SEQ ID NO: 2661032 - RNA, 19 nt, Homo sapiens
  misc_RNA (1)...(19): siRNA sense strand
uauuccagcacgaggguau

SEQ ID NO: 2661033 - RNA, 19 nt, Homo sapiens
  misc_RNA (1)...(19): siRNA sense strand
acacaauuggagugggaac

SEQ ID NO: 2661034 - RNA, 19 nt, Homo sapiens
  misc_RNA (1)...(19): siRNA sense strand
gcuuguauccacugggaaa

SEQ ID NO: 2661035 - RNA, 19 nt, Homo sapiens
  misc_RNA (1)...(19): siRNA sense strand
uugaagaaaguaugggaaa

SEQ ID NO: 2661036 - RNA, 19 nt, Homo sapiens
  misc_RNA (1)...(19): siRNA sense strand
uuugcaaagcugugaauaa

SEQ ID NO: 2661037 - RNA, 19 nt, Homo sapiens
  misc_RNA (1)...(19): siRNA sense strand
ugaagaaaguaugggaaaa

SEQ ID NO: 2661038 - RNA, 19 nt, Homo sapiens
  misc_RNA (1)...(19): siRNA sense strand
agacacaauuggaguggga

SEQ ID NO: 2661039 - RNA, 19 nt, Homo sapiens
  misc_RNA (1)...(19): siRNA sense strand
aggaaguauuacaccgcaa

SEQ ID NO: 2661040 - RNA, 19 nt, Homo sapiens
  misc_RNA (1)...(19): siRNA sense strand
cugaaguaaugaaaggcau

SEQ ID NO: 2661041 - RNA, 19 nt, Homo sapiens
  misc_RNA (1)...(19): siRNA sense strand
aggugugaaucuauacaaa

SEQ ID NO: 2661042 - RNA, 19 nt, Homo sapiens
  misc_RNA (1)...(19): siRNA sense strand
gcgcagacuucucuucuaa

SEQ ID NO: 2661043 - RNA, 19 nt, Homo sapiens
  misc_RNA (1)...(19): siRNA sense strand
gaauuaaugugguggacuc

SEQ ID NO: 2661044 - RNA, 19 nt, Homo sapiens
  misc_RNA (1)...(19): siRNA sense strand
uaacaaaccuucacugcuu

SEQ ID NO: 2661045 - RNA, 19 nt, Homo sapiens
  misc_RNA (1)...(19): siRNA sense strand
uccuuuagcaagaagaaua

SEQ ID NO: 2661046 - RNA, 19 nt, Homo sapiens
  misc_RNA (1)...(19): siRNA sense strand
cuaagagauuguacggcau

SEQ ID NO: 2661047 - RNA, 19 nt, Homo sapiens
  misc_RNA (1)...(19): siRNA sense strand
caugaauauuccagcacga

SEQ ID NO: 2661048 - RNA, 19 nt, Homo sapiens
  misc_RNA (1)...(19): siRNA sense strand
aauuugaggagguuguuaa

SEQ ID NO: 2661049 - RNA, 19 nt, Homo sapiens
  misc_RNA (1)...(19): siRNA sense strand
ucuaagagauuguacggca

SEQ ID NO: 2661050 - RNA, 19 nt, Homo sapiens
  misc_RNA (1)...(19): siRNA sense strand
ccuuuagcaagaagaauau

SEQ ID NO: 2661051 - RNA, 19 nt, Homo sapiens
  misc_RNA (1)...(19): siRNA sense strand
acggacaagccuuagcaaa

SEQ ID NO: 2661052 - RNA, 19 nt, Homo sapiens
  misc_RNA (1)...(19): siRNA sense strand
ccaggaaguaugaaaagaa

SEQ ID NO: 2661053 - RNA, 19 nt, Homo sapiens
  misc_RNA (1)...(19): siRNA sense strand
aaaaggugcuucugggaau

SEQ ID NO: 2661054 - RNA, 19 nt, Homo sapiens
  misc_RNA (1)...(19): siRNA sense strand
uguuggaaagugugaugaa

SEQ ID NO: 2661055 - RNA, 19 nt, Homo sapiens
  misc_RNA (1)...(19): siRNA sense strand
guuccauugaagaaaguau

SEQ ID NO: 2661056 - RNA, 19 nt, Homo sapiens
  misc_RNA (1)...(19): siRNA sense strand
uauuccagcacgaggguau

SEQ ID NO: 2661057 - RNA, 19 nt, Homo sapiens
  misc_RNA (1)...(19): siRNA sense strand
acacaauuggagugggaac

SEQ ID NO: 2661058 - RNA, 19 nt, Homo sapiens
  misc_RNA (1)...(19): siRNA sense strand
ccauaagagcuuuggaaaa

SEQ ID NO: 2661059 - RNA, 19 nt, Homo sapiens
  misc_RNA (1)...(19): siRNA sense strand
caacuauagcagaguguau

SEQ ID NO: 2661060 - RNA, 19 nt, Homo sapiens
  misc_RNA (1)...(19): siRNA sense strand
caauaaauuuacuggggaa

SEQ ID NO: 2661061 - RNA, 19 nt, Homo sapiens
  misc_RNA (1)...(19): siRNA sense strand
caagaauagcagaacauau

SEQ ID NO: 2661062 - RNA, 19 nt, Homo sapiens
  misc_RNA (1)...(19): siRNA sense strand
cccuaauggcaguaauaaa

SEQ ID NO: 2661063 - RNA, 19 nt, Homo sapiens
  misc_RNA (1)...(19): siRNA sense strand
uucuaaagcccaugguaaa

SEQ ID NO: 2661064 - RNA, 19 nt, Homo sapiens
  misc_RNA (1)...(19): siRNA sense strand
caggauuuguuaaaggaau

SEQ ID NO: 2661065 - RNA, 19 nt, Homo sapiens
  misc_RNA (1)...(19): siRNA sense strand
gcaaaagaaaugaagauga

SEQ ID NO: 2661066 - RNA, 19 nt, Homo sapiens
  misc_RNA (1)...(19): siRNA sense strand
uuucuaaagcccaugguaa

SEQ ID NO: 2661067 - RNA, 19 nt, Homo sapiens
  misc_RNA (1)...(19): siRNA sense strand
gugaaaacagacacagaaa

SEQ ID NO: 2661068 - RNA, 19 nt, Homo sapiens
  misc_RNA (1)...(19): siRNA sense strand
agauacaagaguucggcaa

SEQ ID NO: 2661069 - RNA, 19 nt, Homo sapiens
  misc_RNA (1)...(19): siRNA sense strand
ccuaauggcaguaauaaaa

SEQ ID NO: 2661070 - RNA, 19 nt, Homo sapiens
  misc_RNA (1)...(19): siRNA sense strand
caugagaaucaauuggcua

SEQ ID NO: 2661071 - RNA, 19 nt, Homo sapiens
  misc_RNA (1)...(19): siRNA sense strand
ggaaaguaugaaucucaaa

SEQ ID NO: 2661072 - RNA, 19 nt, Homo sapiens
  misc_RNA (1)...(19): siRNA sense strand
cggcaaaagucaacaaaag

SEQ ID NO: 2661073 - RNA, 19 nt, Homo sapiens
  misc_RNA (1)...(19): siRNA sense strand
gcuaauacaauccugggaa

SEQ ID NO: 2661074 - RNA, 19 nt, Homo sapiens
  misc_RNA (1)...(19): siRNA sense strand
cgaagagauuagcuaacau

SEQ ID NO: 2661075 - RNA, 19 nt, Homo sapiens
  misc_RNA (1)...(19): siRNA sense strand
uauagaagagaaugccaaa

SEQ ID NO: 2661076 - RNA, 19 nt, Homo sapiens
  misc_RNA (1)...(19): siRNA sense strand
agggugagaaauaguuuaa

SEQ ID NO: 2661077 - RNA, 19 nt, Homo sapiens
  misc_RNA (1)...(19): siRNA sense strand
ggggaaagaauuagcagau

SEQ ID NO: 2661078 - RNA, 19 nt, Homo sapiens
  misc_RNA (1)...(19): siRNA sense strand
aggcaaaggaaccacauuu

SEQ ID NO: 2661079 - RNA, 19 nt, Homo sapiens
  misc_RNA (1)...(19): siRNA sense strand
cugguuuggcgaagagauu

SEQ ID NO: 2661080 - RNA, 19 nt, Homo sapiens
  misc_RNA (1)...(19): siRNA sense strand
uggcgaagagauuagcuaa

SEQ ID NO: 2661081 - RNA, 19 nt, Homo sapiens
  misc_RNA (1)...(19): siRNA sense strand
gcacaugaaccuacgccuu

SEQ ID NO: 2661082 - RNA, 19 nt, Homo sapiens
  misc_RNA (1)...(19): siRNA sense strand
guccauguguccaaggaau

SEQ ID NO: 2661083 - RNA, 19 nt, Homo sapiens
  misc_RNA (1)...(19): siRNA sense strand
gggcaagagaauuacagga

SEQ ID NO: 2661084 - RNA, 19 nt, Homo sapiens
  misc_RNA (1)...(19): siRNA sense strand
agucaacaacggaugaaaa

SEQ ID NO: 2661085 - RNA, 19 nt, Homo sapiens
  misc_RNA (1)...(19): siRNA sense strand
uuauagaagagaaugccaa

SEQ ID NO: 2661086 - RNA, 19 nt, Homo sapiens
  misc_RNA (1)...(19): siRNA sense strand
agucuggaguagcuacaaa

SEQ ID NO: 2661087 - RNA, 19 nt, Homo sapiens
  misc_RNA (1)...(19): siRNA sense strand
accauaagagcuuuggaaa

SEQ ID NO: 2661088 - RNA, 19 nt, Homo sapiens
  misc_RNA (1)...(19): siRNA sense strand
gaacauaauuuguacaagg

SEQ ID NO: 2661089 - RNA, 19 nt, Homo sapiens
  misc_RNA (1)...(19): siRNA sense strand
cagugaaggaccaucgaga

SEQ ID NO: 2661090 - RNA, 19 nt, Homo sapiens
  misc_RNA (1)...(19): siRNA sense strand
cguuacagugcaacaagaa

SEQ ID NO: 2661091 - RNA, 19 nt, Homo sapiens
  misc_RNA (1)...(19): siRNA sense strand
aaaccaagcuucuaggaac

SEQ ID NO: 2661092 - RNA, 19 nt, Homo sapiens
  misc_RNA (1)...(19): siRNA sense strand
agcuaaagaacuugaaacu

SEQ ID NO: 2661093 - RNA, 19 nt, Homo sapiens
  misc_RNA (1)...(19): siRNA sense strand
guuucaauuccuacaacua

SEQ ID NO: 2661094 - RNA, 19 nt, Homo sapiens
  misc_RNA (1)...(19): siRNA sense strand
augcaacaccguuuguaaa

SEQ ID NO: 2661095 - RNA, 19 nt, Homo sapiens
  misc_RNA (1)...(19): siRNA sense strand
gaacaauacaaauggcuug

SEQ ID NO: 2661096 - RNA, 19 nt, Homo sapiens
  misc_RNA (1)...(19): siRNA sense strand
aacaagaauagcagaacau

SEQ ID NO: 2661097 - RNA, 19 nt, Homo sapiens
  misc_RNA (1)...(19): siRNA sense strand
aacuguagcuaaagaacuu

SEQ ID NO: 2661098 - RNA, 19 nt, Homo sapiens
  misc_RNA (1)...(19): siRNA sense strand
auaauuuguacaaggguga

SEQ ID NO: 2661099 - RNA, 19 nt, Homo sapiens
  misc_RNA (1)...(19): siRNA sense strand
agaauuagcagauugggau

SEQ ID NO: 2661100 - RNA, 19 nt, Homo sapiens
  misc_RNA (1)...(19): siRNA sense strand
caaggaauggauugcauau

SEQ ID NO: 2661101 - RNA, 19 nt, Homo sapiens
  misc_RNA (1)...(19): siRNA sense strand
uggaaaguaugaaucucaa

SEQ ID NO: 2661102 - RNA, 19 nt, Homo sapiens
  misc_RNA (1)...(19): siRNA sense strand
agcagaacauauugcaaaa

SEQ ID NO: 2661103 - RNA, 19 nt, Homo sapiens
  misc_RNA (1)...(19): siRNA sense strand
ugaucaagucagauaaguu

SEQ ID NO: 2661104 - RNA, 19 nt, Homo sapiens
  misc_RNA (1)...(19): siRNA sense strand
gaugauucuauauccgaaa

SEQ ID NO: 2661105 - RNA, 19 nt, Homo sapiens
  misc_RNA (1)...(19): siRNA sense strand
ggguuuauaucgaacgcaa

SEQ ID NO: 2661106 - RNA, 19 nt, Homo sapiens
  misc_RNA (1)...(19): siRNA sense strand
gaacacaggugguggggau

SEQ ID NO: 2661107 - RNA, 19 nt, Homo sapiens
  misc_RNA (1)...(19): siRNA sense strand
ccgagaaggaugugggucu

SEQ ID NO: 2661108 - RNA, 19 nt, Homo sapiens
  misc_RNA (1)...(19): siRNA sense strand
gguacugccuucagaacuu

SEQ ID NO: 2661109 - RNA, 19 nt, Homo sapiens
  misc_RNA (1)...(19): siRNA sense strand
cgccaugacugcugaaaau

SEQ ID NO: 2661110 - RNA, 19 nt, Homo sapiens
  misc_RNA (1)...(19): siRNA sense strand
gugagcagucucuggacaa

SEQ ID NO: 2661111 - RNA, 19 nt, Homo sapiens
  misc_RNA (1)...(19): siRNA sense strand
gccuucagaacuuggauaa

SEQ ID NO: 2661112 - RNA, 19 nt, Homo sapiens
  misc_RNA (1)...(19): siRNA sense strand
aguacaugcagcuggcaau

SEQ ID NO: 2661113 - RNA, 19 nt, Homo sapiens
  misc_RNA (1)...(19): siRNA sense strand
cggaagacuacgagaagga

SEQ ID NO: 2661114 - RNA, 19 nt, Homo sapiens
  misc_RNA (1)...(19): siRNA sense strand
cagaggaggcugaaggaga

SEQ ID NO: 2661115 - RNA, 19 nt, Homo sapiens
  misc_RNA (1)...(19): siRNA sense strand
aggcugaaggagagagaga

SEQ ID NO: 2661116 - RNA, 19 nt, Homo sapiens
  misc_RNA (1)...(19): siRNA sense strand
agaaagaauaagucgucua

SEQ ID NO: 2661117 - RNA, 19 nt, Homo sapiens
  misc_RNA (1)...(19): siRNA sense strand
aguuaaagccaagaagaaa

SEQ ID NO: 2661118 - RNA, 19 nt, Homo sapiens
  misc_RNA (1)...(19): siRNA sense strand
acgagaaggaagagagcca

SEQ ID NO: 2661119 - RNA, 19 nt, Homo sapiens
  misc_RNA (1)...(19): siRNA sense strand
uguaaaagcuggaaagcga

SEQ ID NO: 2661120 - RNA, 19 nt, Homo sapiens
  misc_RNA (1)...(19): siRNA sense strand
agaagagagacgaaagaga

SEQ ID NO: 2661121 - RNA, 19 nt, Homo sapiens
  misc_RNA (1)...(19): siRNA sense strand
guuaaagccaagaagaaaa

SEQ ID NO: 2661122 - RNA, 19 nt, Homo sapiens
  misc_RNA (1)...(19): siRNA sense strand
gaagagagccaucggcaga

SEQ ID NO: 2661123 - RNA, 19 nt, Homo sapiens
  misc_RNA (1)...(19): siRNA sense strand
ucggaagaacauaggaaaa

SEQ ID NO: 2661124 - RNA, 19 nt, Homo sapiens
  misc_RNA (1)...(19): siRNA sense strand
guaaagacucagaagagga

SEQ ID NO: 2661125 - RNA, 19 nt, Homo sapiens
  misc_RNA (1)...(19): siRNA sense strand
agacaaaagagaaagauga

SEQ ID NO: 2661126 - RNA, 19 nt, Homo sapiens
  misc_RNA (1)...(19): siRNA sense strand
ugaaggagagagagaggau

SEQ ID NO: 2661127 - RNA, 19 nt, Homo sapiens
  misc_RNA (1)...(19): siRNA sense strand
cccacgaagaggugaaauu

SEQ ID NO: 2661128 - RNA, 19 nt, Homo sapiens
  misc_RNA (1)...(19): siRNA sense strand
aagacuacgagaaggaaga

SEQ ID NO: 2661129 - RNA, 19 nt, Homo sapiens
  misc_RNA (1)...(19): siRNA sense strand
cguucaagaaacaagaaaa

SEQ ID NO: 2661130 - RNA, 19 nt, Homo sapiens
  misc_RNA (1)...(19): siRNA sense strand
aagagagacgaaagagaga

SEQ ID NO: 2661131 - RNA, 19 nt, Homo sapiens
  misc_RNA (1)...(19): siRNA sense strand
ccagcuauuccgaggacau

SEQ ID NO: 2661132 - RNA, 19 nt, Homo sapiens
  misc_RNA (1)...(19): siRNA sense strand
gggaauugggagcgccuga

SEQ ID NO: 2661133 - RNA, 19 nt, Homo sapiens
  misc_RNA (1)...(19): siRNA sense strand
ccuggauggagcagccaaa

SEQ ID NO: 2661134 - RNA, 19 nt, Homo sapiens
  misc_RNA (1)...(19): siRNA sense strand
ggaggcugaaggagagaga

SEQ ID NO: 2661135 - RNA, 19 nt, Homo sapiens
  misc_RNA (1)...(19): siRNA sense strand
aggaugaagaagagguaac

SEQ ID NO: 2661136 - RNA, 19 nt, Homo sapiens
  misc_RNA (1)...(19): siRNA sense strand
uuuaauagggccagaagca

SEQ ID NO: 2661137 - RNA, 19 nt, Homo sapiens
  misc_RNA (1)...(19): siRNA sense strand
gagagagaggauuggggaa

SEQ ID NO: 2661138 - RNA, 19 nt, Homo sapiens
  misc_RNA (1)...(19): siRNA sense strand
acucggaagaacauaggaa

SEQ ID NO: 2661139 - RNA, 19 nt, Homo sapiens
  misc_RNA (1)...(19): siRNA sense strand
cuaaaagaaagcauaggaa

SEQ ID NO: 2661140 - RNA, 19 nt, Homo sapiens
  misc_RNA (1)...(19): siRNA sense strand
caugagugguagcaggcau

SEQ ID NO: 2661141 - RNA, 19 nt, Homo sapiens
  misc_RNA (1)...(19): siRNA sense strand
cuuuaaccaagaagagaga

SEQ ID NO: 2661142 - RNA, 19 nt, Homo sapiens
  misc_RNA (1)...(19): siRNA sense strand
cuguaaagacucagaagag

SEQ ID NO: 2661143 - RNA, 19 nt, Homo sapiens
  misc_RNA (1)...(19): siRNA sense strand
gaauggaggcuguacgacu

SEQ ID NO: 2661144 - RNA, 19 nt, Homo sapiens
  misc_RNA (1)...(19): siRNA sense strand
gcugaugagaagagagcuc

SEQ ID NO: 2661145 - RNA, 19 nt, Homo sapiens
  misc_RNA (1)...(19): siRNA sense strand
agauaaaguugaaggacaa

SEQ ID NO: 2661146 - RNA, 19 nt, Homo sapiens
  misc_RNA (1)...(19): siRNA sense strand
ccagaaaacaugagagaaa

SEQ ID NO: 2661147 - RNA, 19 nt, Homo sapiens
  misc_RNA (1)...(19): siRNA sense strand
ugauaaaggaagugaaaga

SEQ ID NO: 2661148 - RNA, 19 nt, Homo sapiens
  misc_RNA (1)...(19): siRNA sense strand
guaugaagcuguaaagaau

SEQ ID NO: 2661149 - RNA, 19 nt, Homo sapiens
  misc_RNA (1)...(19): siRNA sense strand
gaaagaaagaguagugaau

SEQ ID NO: 2661150 - RNA, 19 nt, Homo sapiens
  misc_RNA (1)...(19): siRNA sense strand
cagauaaaguugaaggaca

SEQ ID NO: 2661151 - RNA, 19 nt, Homo sapiens
  misc_RNA (1)...(19): siRNA sense strand
gcaaauaacuuguagccuu

SEQ ID NO: 2661152 - RNA, 19 nt, Homo sapiens
  misc_RNA (1)...(19): siRNA sense strand
cuugaugaaugcagagaua

SEQ ID NO: 2661153 - RNA, 19 nt, Homo sapiens
  misc_RNA (1)...(19): siRNA sense strand
uguaauugauggugaagua

SEQ ID NO: 2661154 - RNA, 19 nt, Homo sapiens
  misc_RNA (1)...(19): siRNA sense strand
agaaagaguuacaagcgaa

SEQ ID NO: 2661155 - RNA, 19 nt, Homo sapiens
  misc_RNA (1)...(19): siRNA sense strand
caucaaaacuuaagcgaca

SEQ ID NO: 2661156 - RNA, 19 nt, Homo sapiens
  misc_RNA (1)...(19): siRNA sense strand
gcuaaagccaucagggaca

SEQ ID NO: 2661157 - RNA, 19 nt, Homo sapiens
  misc_RNA (1)...(19): siRNA sense strand
agaaauaaguucacaacca

SEQ ID NO: 2661158 - RNA, 19 nt, Homo sapiens
  misc_RNA (1)...(19): siRNA sense strand
gcuuggaaauguuggguga

SEQ ID NO: 2661159 - RNA, 19 nt, Homo sapiens
  misc_RNA (1)...(19): siRNA sense strand
guggagauguacuggcuaa

SEQ ID NO: 2661160 - RNA, 19 nt, Homo sapiens
  misc_RNA (1)...(19): siRNA sense strand
uggaagauuuggagaggga

SEQ ID NO: 2661161 - RNA, 19 nt, Homo sapiens
  misc_RNA (1)...(19): siRNA sense strand
guguauuauuuguggagau

SEQ ID NO: 2661162 - RNA, 19 nt, Homo sapiens
  misc_RNA (1)...(19): siRNA sense strand
ucgcauggagaaagaguua

SEQ ID NO: 2661163 - RNA, 19 nt, Homo sapiens
  misc_RNA (1)...(19): siRNA sense strand
caccauagcucgacguauu

SEQ ID NO: 2661164 - RNA, 19 nt, Homo sapiens
  misc_RNA (1)...(19): siRNA sense strand
agaucaacucauagaacaa

SEQ ID NO: 2661165 - RNA, 19 nt, Homo sapiens
  misc_RNA (1)...(19): siRNA sense strand
gaaauaaguucacaaccaa

SEQ ID NO: 2661166 - RNA, 19 nt, Homo sapiens
  misc_RNA (1)...(19): siRNA sense strand
uagcaagguuacuggaaaa

SEQ ID NO: 2661167 - RNA, 19 nt, Homo sapiens
  misc_RNA (1)...(19): siRNA sense strand
gcgaaauacaagaacauca

SEQ ID NO: 2661168 - RNA, 19 nt, Homo sapiens
  misc_RNA (1)...(19): siRNA sense strand
guuacugcaugcugagaua

SEQ ID NO: 2661169 - RNA, 19 nt, Homo sapiens
  misc_RNA (1)...(19): siRNA sense strand
aguaauauuuggccagaau

SEQ ID NO: 2661170 - RNA, 19 nt, Homo sapiens
  misc_RNA (1)...(19): siRNA sense strand
ugaugaaugcagagauauu

SEQ ID NO: 2661171 - RNA, 19 nt, Homo sapiens
  misc_RNA (1)...(19): siRNA sense strand
gaaguuagaagcuuggaaa

SEQ ID NO: 2661172 - RNA, 19 nt, Homo sapiens
  misc_RNA (1)...(19): siRNA sense strand
aggaagugaaagaagcuaa

SEQ ID NO: 2661173 - RNA, 19 nt, Homo sapiens
  misc_RNA (1)...(19): siRNA sense strand
aagaaagaguagugaauug

SEQ ID NO: 2661174 - RNA, 19 nt, Homo sapiens
  misc_RNA (1)...(19): siRNA sense strand
ugaaguagguaaugaucuu

SEQ ID NO: 2661175 - RNA, 19 nt, Homo sapiens
  misc_RNA (1)...(19): siRNA sense strand
aagaguuacaagcgaaaua

SEQ ID NO: 2661176 - RNA, 19 nt, Homo sapiens
  misc_RNA (1)...(19): siRNA sense strand
cugagacacuagugaaaga

SEQ ID NO: 2661177 - RNA, 19 nt, Homo sapiens
  misc_RNA (1)...(19): siRNA sense strand
auacacaauugcugagaca

SEQ ID NO: 2661178 - RNA, 19 nt, Homo sapiens
  misc_RNA (1)...(19): siRNA sense strand
cagcaaagaagguagcuca

SEQ ID NO: 2661179 - RNA, 19 nt, Homo sapiens
  misc_RNA (1)...(19): siRNA sense strand
gagaaagaguuacaagcga

SEQ ID NO: 2661180 - RNA, 19 nt, Homo sapiens
  misc_RNA (1)...(19): siRNA sense strand
gagacuggauggcgaaaca

SEQ ID NO: 2661181 - RNA, 19 nt, Homo sapiens
  misc_RNA (1)...(19): siRNA sense strand
gagaaagucuugccaugaa

SEQ ID NO: 2661182 - RNA, 19 nt, Homo sapiens
  misc_RNA (1)...(19): siRNA sense strand
gaaaugaacucuuaguguu

SEQ ID NO: 2661183 - RNA, 19 nt, Homo sapiens
  misc_RNA (1)...(19): siRNA sense strand
acuucaagauaauggguca

SEQ ID NO: 2661184 - RNA, 19 nt, Homo sapiens
  misc_RNA (1)...(19): siRNA sense strand
aagcagaaauugaaccaga

SEQ ID NO: 2661185 - RNA, 19 nt, Homo sapiens
  misc_RNA (1)...(19): siRNA sense strand
gcugacaaagaguuagaaa

SEQ ID NO: 2661186 - RNA, 19 nt, Homo sapiens
  misc_RNA (1)...(19): siRNA sense strand
aaagaaguuugcuuggaaa

SEQ ID NO: 2661187 - RNA, 19 nt, Homo sapiens
  misc_RNA (1)...(19): siRNA sense strand
gguuugaacaugaugauga

SEQ ID NO: 2661188 - RNA, 19 nt, Homo sapiens
  misc_RNA (1)...(19): siRNA sense strand
cuucauucaucgagaaagu

SEQ ID NO: 2661189 - RNA, 19 nt, Homo sapiens
  misc_RNA (1)...(19): siRNA sense strand
gcugagauacggugguuau

SEQ ID NO: 2661190 - RNA, 19 nt, Homo sapiens
  misc_RNA (1)...(19): siRNA sense strand
caaggaaaugagaagcuaa

SEQ ID NO: 2661191 - RNA, 19 nt, Homo sapiens
  misc_RNA (1)...(19): siRNA sense strand
ugaaagaaagaguagugaa

SEQ ID NO: 2661192 - RNA, 19 nt, Homo sapiens
  misc_RNA (1)...(19): siRNA sense strand
guucaacguuucucauaua

SEQ ID NO: 2661193 - RNA, 19 nt, Homo sapiens
  misc_RNA (1)...(19): siRNA sense strand
uguaugaagcuguaaagaa

SEQ ID NO: 2661194 - RNA, 19 nt, Homo sapiens
  misc_RNA (1)...(19): siRNA sense strand
gcgaaaaguuaucagugaa

SEQ ID NO: 2661195 - RNA, 19 nt, Homo sapiens
  misc_RNA (1)...(19): siRNA sense strand
guggcugaacccagagaua

SEQ ID NO: 2661196 - RNA, 19 nt, Homo sapiens
  misc_RNA (1)...(19): siRNA sense strand
gcuaauugaggcuguaaau

SEQ ID NO: 2661197 - RNA, 19 nt, Homo sapiens
  misc_RNA (1)...(19): siRNA sense strand
guaaauggggaaacagaua

SEQ ID NO: 2661198 - RNA, 19 nt, Homo sapiens
  misc_RNA (1)...(19): siRNA sense strand
gugauaauauggaagcuga

SEQ ID NO: 2661199 - RNA, 19 nt, Homo sapiens
  misc_RNA (1)...(19): siRNA sense strand
gcauggagaaagaguuaca

SEQ ID NO: 2661200 - RNA, 19 nt, Homo sapiens
  misc_RNA (1)...(19): siRNA sense strand
ggcuaaugaagcaaugaaa

SEQ ID NO: 2661201 - RNA, 19 nt, Homo sapiens
  misc_RNA (1)...(19): siRNA sense strand
ccaaccuagauuagacaaa

SEQ ID NO: 2661202 - RNA, 19 nt, Homo sapiens
  misc_RNA (1)...(19): siRNA sense strand
gauagaauggaaugugaau

SEQ ID NO: 2661203 - RNA, 19 nt, Homo sapiens
  misc_RNA (1)...(19): siRNA sense strand
agauacuaaugaagcagaa

SEQ ID NO: 2661204 - RNA, 19 nt, Homo sapiens
  misc_RNA (1)...(19): siRNA sense strand
ccuccugagagcagacuaa

SEQ ID NO: 2661205 - RNA, 19 nt, Homo sapiens
  misc_RNA (1)...(19): siRNA sense strand
aauugauggugaaguacua

SEQ ID NO: 2661206 - RNA, 19 nt, Homo sapiens
  misc_RNA (1)...(19): siRNA sense strand
ggaagcugaucauaagcaa

SEQ ID NO: 2661207 - RNA, 19 nt, Homo sapiens
  misc_RNA (1)...(19): siRNA sense strand
aagcgaaauacaagaacau

SEQ ID NO: 2661208 - RNA, 19 nt, Homo sapiens
  misc_RNA (1)...(19): siRNA sense strand
ccagcacaaugaagaggaa

SEQ ID NO: 2661209 - RNA, 19 nt, Homo sapiens
  misc_RNA (1)...(19): siRNA sense strand
cagugaacaucuuacaaau

SEQ ID NO: 2661210 - RNA, 19 nt, Homo sapiens
  misc_RNA (1)...(19): siRNA sense strand
ccagggaggcucugaguca

SEQ ID NO: 2661211 - RNA, 19 nt, Homo sapiens
  misc_RNA (1)...(19): siRNA sense strand
aagcauggguggugauaac

SEQ ID NO: 2661212 - RNA, 19 nt, Homo sapiens
  misc_RNA (1)...(19): siRNA sense strand
ggacguacucgcauggaga

SEQ ID NO: 2661213 - RNA, 19 nt, Homo sapiens
  misc_RNA (1)...(19): siRNA sense strand
aaccaaagcagguguucaa

SEQ ID NO: 2661214 - RNA, 19 nt, Homo sapiens
  misc_RNA (1)...(19): siRNA sense strand
ucuuaaugcuucuaugcaa

SEQ ID NO: 2661215 - RNA, 19 nt, Homo sapiens
  misc_RNA (1)...(19): siRNA sense strand
cugacaaagaguuagaaaa

SEQ ID NO: 2661216 - RNA, 19 nt, Homo sapiens
  misc_RNA (1)...(19): siRNA sense strand
cuuuaagagcccaguauga

SEQ ID NO: 2661217 - RNA, 19 nt, Homo sapiens
  misc_RNA (1)...(19): siRNA sense strand
agauaaaguugaaggacaa

SEQ ID NO: 2661218 - RNA, 19 nt, Homo sapiens
  misc_RNA (1)...(19): siRNA sense strand
ccagaaaacaugagagaaa

SEQ ID NO: 2661219 - RNA, 19 nt, Homo sapiens
  misc_RNA (1)...(19): siRNA sense strand
ugauaaaggaagugaaaga

SEQ ID NO: 2661220 - RNA, 19 nt, Homo sapiens
  misc_RNA (1)...(19): siRNA sense strand
guaugaagcuguaaagaau

SEQ ID NO: 2661221 - RNA, 19 nt, Homo sapiens
  misc_RNA (1)...(19): siRNA sense strand
gaaagaaagaguagugaau

SEQ ID NO: 2661222 - RNA, 19 nt, Homo sapiens
  misc_RNA (1)...(19): siRNA sense strand
cagauaaaguugaaggaca

SEQ ID NO: 2661223 - RNA, 19 nt, Homo sapiens
  misc_RNA (1)...(19): siRNA sense strand
gcaaauaacuuguagccuu

SEQ ID NO: 2661224 - RNA, 19 nt, Homo sapiens
  misc_RNA (1)...(19): siRNA sense strand
cuugaugaaugcagagaua

SEQ ID NO: 2661225 - RNA, 19 nt, Homo sapiens
  misc_RNA (1)...(19): siRNA sense strand
uguaauugauggugaagua

SEQ ID NO: 2661226 - RNA, 19 nt, Homo sapiens
  misc_RNA (1)...(19): siRNA sense strand
agaaagaguuacaagcgaa

SEQ ID NO: 2661227 - RNA, 19 nt, Homo sapiens
  misc_RNA (1)...(19): siRNA sense strand
caucaaaacuuaagcgaca

SEQ ID NO: 2661228 - RNA, 19 nt, Homo sapiens
  misc_RNA (1)...(19): siRNA sense strand
gcuaaagccaucagggaca

SEQ ID NO: 2661229 - RNA, 19 nt, Homo sapiens
  misc_RNA (1)...(19): siRNA sense strand
agaaauaaguucacaacca

SEQ ID NO: 2661230 - RNA, 19 nt, Homo sapiens
  misc_RNA (1)...(19): siRNA sense strand
gcuuggaaauguuggguga

SEQ ID NO: 2661231 - RNA, 19 nt, Homo sapiens
  misc_RNA (1)...(19): siRNA sense strand
guggagauguacuggcuaa

SEQ ID NO: 2661232 - RNA, 19 nt, Homo sapiens
  misc_RNA (1)...(19): siRNA sense strand
uggaagauuuggagaggga

SEQ ID NO: 2661233 - RNA, 19 nt, Homo sapiens
  misc_RNA (1)...(19): siRNA sense strand
guguauuauuuguggagau

SEQ ID NO: 2661234 - RNA, 19 nt, Homo sapiens
  misc_RNA (1)...(19): siRNA sense strand
ucgcauggagaaagaguua

SEQ ID NO: 2661235 - RNA, 19 nt, Homo sapiens
  misc_RNA (1)...(19): siRNA sense strand
caccauagcucgacguauu

SEQ ID NO: 2661236 - RNA, 19 nt, Homo sapiens
  misc_RNA (1)...(19): siRNA sense strand
agaucaacucauagaacaa

SEQ ID NO: 2661237 - RNA, 19 nt, Homo sapiens
  misc_RNA (1)...(19): siRNA sense strand
gaaauaaguucacaaccaa

SEQ ID NO: 2661238 - RNA, 19 nt, Homo sapiens
  misc_RNA (1)...(19): siRNA sense strand
uagcaagguuacuggaaaa

SEQ ID NO: 2661239 - RNA, 19 nt, Homo sapiens
  misc_RNA (1)...(19): siRNA sense strand
gcgaaauacaagaacauca

SEQ ID NO: 2661240 - RNA, 19 nt, Homo sapiens
  misc_RNA (1)...(19): siRNA sense strand
guuacugcaugcugagaua

SEQ ID NO: 2661241 - RNA, 19 nt, Homo sapiens
  misc_RNA (1)...(19): siRNA sense strand
aguaauauuuggccagaau

SEQ ID NO: 2661242 - RNA, 19 nt, Homo sapiens
  misc_RNA (1)...(19): siRNA sense strand
ugaugaaugcagagauauu

SEQ ID NO: 2661243 - RNA, 19 nt, Homo sapiens
  misc_RNA (1)...(19): siRNA sense strand
gaaguuagaagcuuggaaa

SEQ ID NO: 2661244 - RNA, 19 nt, Homo sapiens
  misc_RNA (1)...(19): siRNA sense strand
aggaagugaaagaagcuaa

SEQ ID NO: 2661245 - RNA, 19 nt, Homo sapiens
  misc_RNA (1)...(19): siRNA sense strand
aagaaagaguagugaauug

SEQ ID NO: 2661246 - RNA, 19 nt, Homo sapiens
  misc_RNA (1)...(19): siRNA sense strand
ugaaguagguaaugaucuu

SEQ ID NO: 2661247 - RNA, 19 nt, Homo sapiens
  misc_RNA (1)...(19): siRNA sense strand
aagaguuacaagcgaaaua

SEQ ID NO: 2661248 - RNA, 19 nt, Homo sapiens
  misc_RNA (1)...(19): siRNA sense strand
cugagacacuagugaaaga

SEQ ID NO: 2661249 - RNA, 19 nt, Homo sapiens
  misc_RNA (1)...(19): siRNA sense strand
auacacaauugcugagaca

SEQ ID NO: 2661250 - RNA, 19 nt, Homo sapiens
  misc_RNA (1)...(19): siRNA sense strand
cagcaaagaagguagcuca

SEQ ID NO: 2661251 - RNA, 19 nt, Homo sapiens
  misc_RNA (1)...(19): siRNA sense strand
gagaaagaguuacaagcga

SEQ ID NO: 2661252 - RNA, 19 nt, Homo sapiens
  misc_RNA (1)...(19): siRNA sense strand
gagacuggauggcgaaaca

SEQ ID NO: 2661253 - RNA, 19 nt, Homo sapiens
  misc_RNA (1)...(19): siRNA sense strand
gagaaagucuugccaugaa

SEQ ID NO: 2661254 - RNA, 19 nt, Homo sapiens
  misc_RNA (1)...(19): siRNA sense strand
gaaaugaacucuuaguguu

SEQ ID NO: 2661255 - RNA, 19 nt, Homo sapiens
  misc_RNA (1)...(19): siRNA sense strand
acuucaagauaauggguca

SEQ ID NO: 2661256 - RNA, 19 nt, Homo sapiens
  misc_RNA (1)...(19): siRNA sense strand
aagcagaaauugaaccaga

SEQ ID NO: 2661257 - RNA, 19 nt, Homo sapiens
  misc_RNA (1)...(19): siRNA sense strand
gcugacaaagaguuagaaa

SEQ ID NO: 2661258 - RNA, 19 nt, Homo sapiens
  misc_RNA (1)...(19): siRNA sense strand
aaagaaguuugcuuggaaa

SEQ ID NO: 2661259 - RNA, 19 nt, Homo sapiens
  misc_RNA (1)...(19): siRNA sense strand
gguuugaacaugaugauga

SEQ ID NO: 2661260 - RNA, 19 nt, Homo sapiens
  misc_RNA (1)...(19): siRNA sense strand
cuucauucaucgagaaagu

SEQ ID NO: 2661261 - RNA, 19 nt, Homo sapiens
  misc_RNA (1)...(19): siRNA sense strand
gcugagauacggugguuau

SEQ ID NO: 2661262 - RNA, 19 nt, Homo sapiens
  misc_RNA (1)...(19): siRNA sense strand
caaggaaaugagaagcuaa

SEQ ID NO: 2661263 - RNA, 19 nt, Homo sapiens
  misc_RNA (1)...(19): siRNA sense strand
ugaaagaaagaguagugaa

SEQ ID NO: 2661264 - RNA, 19 nt, Homo sapiens
  misc_RNA (1)...(19): siRNA sense strand
guucaacguuucucauaua

SEQ ID NO: 2661265 - RNA, 19 nt, Homo sapiens
  misc_RNA (1)...(19): siRNA sense strand
uguaugaagcuguaaagaa

SEQ ID NO: 2661266 - RNA, 19 nt, Homo sapiens
  misc_RNA (1)...(19): siRNA sense strand
gcgaaaaguuaucagugaa

SEQ ID NO: 2661267 - RNA, 19 nt, Homo sapiens
  misc_RNA (1)...(19): siRNA sense strand
guggcugaacccagagaua

SEQ ID NO: 2661268 - RNA, 19 nt, Homo sapiens
  misc_RNA (1)...(19): siRNA sense strand
gcuaauugaggcuguaaau

SEQ ID NO: 2661269 - RNA, 19 nt, Homo sapiens
  misc_RNA (1)...(19): siRNA sense strand
guaaauggggaaacagaua

SEQ ID NO: 2661270 - RNA, 19 nt, Homo sapiens
  misc_RNA (1)...(19): siRNA sense strand
gugauaauauggaagcuga

SEQ ID NO: 2661271 - RNA, 19 nt, Homo sapiens
  misc_RNA (1)...(19): siRNA sense strand
gcauggagaaagaguuaca

SEQ ID NO: 2661272 - RNA, 19 nt, Homo sapiens
  misc_RNA (1)...(19): siRNA sense strand
ggcuaaugaagcaaugaaa

SEQ ID NO: 2661273 - RNA, 19 nt, Homo sapiens
  misc_RNA (1)...(19): siRNA sense strand
ccaaccuagauuagacaaa

SEQ ID NO: 2661274 - RNA, 19 nt, Homo sapiens
  misc_RNA (1)...(19): siRNA sense strand
gauagaauggaaugugaau

SEQ ID NO: 2661275 - RNA, 19 nt, Homo sapiens
  misc_RNA (1)...(19): siRNA sense strand
agauacuaaugaagcagaa

SEQ ID NO: 2661276 - RNA, 19 nt, Homo sapiens
  misc_RNA (1)...(19): siRNA sense strand
ccuccugagagcagacuaa

SEQ ID NO: 2661277 - RNA, 19 nt, Homo sapiens
  misc_RNA (1)...(19): siRNA sense strand
aauugauggugaaguacua

SEQ ID NO: 2661278 - RNA, 19 nt, Homo sapiens
  misc_RNA (1)...(19): siRNA sense strand
ggaagcugaucauaagcaa

SEQ ID NO: 2661279 - RNA, 19 nt, Homo sapiens
  misc_RNA (1)...(19): siRNA sense strand
aagcgaaauacaagaacau

SEQ ID NO: 2661280 - RNA, 19 nt, Homo sapiens
  misc_RNA (1)...(19): siRNA sense strand
ccagcacaaugaagaggaa

SEQ ID NO: 2661281 - RNA, 19 nt, Homo sapiens
  misc_RNA (1)...(19): siRNA sense strand
cagugaacaucuuacaaau

SEQ ID NO: 2661282 - RNA, 19 nt, Homo sapiens
  misc_RNA (1)...(19): siRNA sense strand
ccagggaggcucugaguca

SEQ ID NO: 2661283 - RNA, 19 nt, Homo sapiens
  misc_RNA (1)...(19): siRNA sense strand
aagcauggguggugauaac

SEQ ID NO: 2661284 - RNA, 19 nt, Homo sapiens
  misc_RNA (1)...(19): siRNA sense strand
ggacguacucgcauggaga

SEQ ID NO: 2661285 - RNA, 19 nt, Homo sapiens
  misc_RNA (1)...(19): siRNA sense strand
aaccaaagcagguguucaa

SEQ ID NO: 2661286 - RNA, 19 nt, Homo sapiens
  misc_RNA (1)...(19): siRNA sense strand
ucuuaaugcuucuaugcaa

SEQ ID NO: 2661287 - RNA, 19 nt, Homo sapiens
  misc_RNA (1)...(19): siRNA sense strand
cugacaaagaguuagaaaa

SEQ ID NO: 2661288 - RNA, 19 nt, Homo sapiens
  misc_RNA (1)...(19): siRNA sense strand
cuuuaagagcccaguauga

SEQ ID NO: 2661289 - RNA, 19 nt, Homo sapiens
  misc_RNA (1)...(19): siRNA sense strand
augcaaagaauguggcaaa

SEQ ID NO: 2661290 - RNA, 19 nt, Homo sapiens
  misc_RNA (1)...(19): siRNA sense strand
gugaauaugaggugcacaa

SEQ ID NO: 2661291 - RNA, 19 nt, Homo sapiens
  misc_RNA (1)...(19): siRNA sense strand
gaaaugagaugguagccaa

SEQ ID NO: 2661292 - RNA, 19 nt, Homo sapiens
  misc_RNA (1)...(19): siRNA sense strand
aacucauacuggagagaaa

SEQ ID NO: 2661293 - RNA, 19 nt, Homo sapiens
  misc_RNA (1)...(19): siRNA sense strand
auucagagacauagcuaua

SEQ ID NO: 2661294 - RNA, 19 nt, Homo sapiens
  misc_RNA (1)...(19): siRNA sense strand
agacauaagagaacucaua

SEQ ID NO: 2661295 - RNA, 19 nt, Homo sapiens
  misc_RNA (1)...(19): siRNA sense strand
aauucauacuggagagaga

SEQ ID NO: 2661296 - RNA, 19 nt, Homo sapiens
  misc_RNA (1)...(19): siRNA sense strand
aauucauacuggagagaga

SEQ ID NO: 2661297 - RNA, 19 nt, Homo sapiens
  misc_RNA (1)...(19): siRNA sense strand
aauucauacuggagagaga

SEQ ID NO: 2661298 - RNA, 19 nt, Homo sapiens
  misc_RNA (1)...(19): siRNA sense strand
aauucauacuggagagaga

SEQ ID NO: 2661299 - RNA, 19 nt, Homo sapiens
  misc_RNA (1)...(19): siRNA sense strand
augugauguuagagaacua

SEQ ID NO: 2661300 - RNA, 19 nt, Homo sapiens
  misc_RNA (1)...(19): siRNA sense strand
augugaagaauguggcaaa

SEQ ID NO: 2661301 - RNA, 19 nt, Homo sapiens
  misc_RNA (1)...(19): siRNA sense strand
augugaagaauguggcaaa

SEQ ID NO: 2661302 - RNA, 19 nt, Homo sapiens
  misc_RNA (1)...(19): siRNA sense strand
augugaagaauguggcaaa

SEQ ID NO: 2661303 - RNA, 19 nt, Homo sapiens
  misc_RNA (1)...(19): siRNA sense strand
augugaagaaugugagcaa

SEQ ID NO: 2661304 - RNA, 19 nt, Homo sapiens
  misc_RNA (1)...(19): siRNA sense strand
gugugaagaauguggccaa

SEQ ID NO: 2661305 - RNA, 19 nt, Homo sapiens
  misc_RNA (1)...(19): siRNA sense strand
gugugaggaauguggcaaa

SEQ ID NO: 2661306 - RNA, 19 nt, Homo sapiens
  misc_RNA (1)...(19): siRNA sense strand
ccucaaaccuuacuagaca

SEQ ID NO: 2661307 - RNA, 19 nt, Homo sapiens
  misc_RNA (1)...(19): siRNA sense strand
uuacuaaccacaagagaau

SEQ ID NO: 2661308 - RNA, 19 nt, Homo sapiens
  misc_RNA (1)...(19): siRNA sense strand
cggaauuuauauagagaug

SEQ ID NO: 2661309 - RNA, 19 nt, Homo sapiens
  misc_RNA (1)...(19): siRNA sense strand
agggagaaguccuacaaau

SEQ ID NO: 2661310 - RNA, 19 nt, Homo sapiens
  misc_RNA (1)...(19): siRNA sense strand
cugugaagaauguggccaa

SEQ ID NO: 2661311 - RNA, 19 nt, Homo sapiens
  misc_RNA (1)...(19): siRNA sense strand
augugaagaguguggcaaa

SEQ ID NO: 2661312 - RNA, 19 nt, Homo sapiens
  misc_RNA (1)...(19): siRNA sense strand
cugcaaaccuuacuagaca

SEQ ID NO: 2661313 - RNA, 19 nt, Homo sapiens
  misc_RNA (1)...(19): siRNA sense strand
cuguugacauucagagaca

SEQ ID NO: 2661314 - RNA, 19 nt, Homo sapiens
  misc_RNA (1)...(19): siRNA sense strand
guugacauucagagacaua

SEQ ID NO: 2661315 - RNA, 19 nt, Homo sapiens
  misc_RNA (1)...(19): siRNA sense strand
accaagaacauauggaaaa

SEQ ID NO: 2661316 - RNA, 19 nt, Homo sapiens
  misc_RNA (1)...(19): siRNA sense strand
gagacauagcuauagaauu

SEQ ID NO: 2661317 - RNA, 19 nt, Homo sapiens
  misc_RNA (1)...(19): siRNA sense strand
cuuacuaaccacaagagaa

SEQ ID NO: 2661318 - RNA, 19 nt, Homo sapiens
  misc_RNA (1)...(19): siRNA sense strand
uaccaagaacauauggaaa

SEQ ID NO: 2661319 - RNA, 19 nt, Homo sapiens
  misc_RNA (1)...(19): siRNA sense strand
guaauucauacuagggaga

SEQ ID NO: 2661320 - RNA, 19 nt, Homo sapiens
  misc_RNA (1)...(19): siRNA sense strand
augugaagaauguggccaa

SEQ ID NO: 2661321 - RNA, 19 nt, Homo sapiens
  misc_RNA (1)...(19): siRNA sense strand
augugaggaauguggcaaa

SEQ ID NO: 2661322 - RNA, 19 nt, Homo sapiens
  misc_RNA (1)...(19): siRNA sense strand
agaauguggccaagacuuu

SEQ ID NO: 2661323 - RNA, 19 nt, Homo sapiens
  misc_RNA (1)...(19): siRNA sense strand
aaauaaagagucccagaau

SEQ ID NO: 2661324 - RNA, 19 nt, Homo sapiens
  misc_RNA (1)...(19): siRNA sense strand
cccaagaccuucagccaga

SEQ ID NO: 2661325 - RNA, 19 nt, Homo sapiens
  misc_RNA (1)...(19): siRNA sense strand
ccuaaaucaacaucaggua

SEQ ID NO: 2661326 - RNA, 19 nt, Homo sapiens
  misc_RNA (1)...(19): siRNA sense strand
agaauucauacuagagaga

SEQ ID NO: 2661327 - RNA, 19 nt, Homo sapiens
  misc_RNA (1)...(19): siRNA sense strand
uuacuauccacaagagaau

SEQ ID NO: 2661328 - RNA, 19 nt, Homo sapiens
  misc_RNA (1)...(19): siRNA sense strand
accauauagaugugaggaa

SEQ ID NO: 2661329 - RNA, 19 nt, Homo sapiens
  misc_RNA (1)...(19): siRNA sense strand
ucaccugucuggagcaaaa

SEQ ID NO: 2661330 - RNA, 19 nt, Homo sapiens
  misc_RNA (1)...(19): siRNA sense strand
aaaugagaugguagccaaa

SEQ ID NO: 2661331 - RNA, 19 nt, Homo sapiens
  misc_RNA (1)...(19): siRNA sense strand
guaaaagugugggugaaua

SEQ ID NO: 2661332 - RNA, 19 nt, Homo sapiens
  misc_RNA (1)...(19): siRNA sense strand
acccuaugccugugaagaa

SEQ ID NO: 2661333 - RNA, 19 nt, Homo sapiens
  misc_RNA (1)...(19): siRNA sense strand
cuguaaaagugugggugaa

SEQ ID NO: 2661334 - RNA, 19 nt, Homo sapiens
  misc_RNA (1)...(19): siRNA sense strand
ccaagaacauauggaaaau

SEQ ID NO: 2661335 - RNA, 19 nt, Homo sapiens
  misc_RNA (1)...(19): siRNA sense strand
agagaugugauguuagaga

SEQ ID NO: 2661336 - RNA, 19 nt, Homo sapiens
  misc_RNA (1)...(19): siRNA sense strand
ccacaagagaauucauacu

SEQ ID NO: 2661337 - RNA, 19 nt, Homo sapiens
  misc_RNA (1)...(19): siRNA sense strand
augcaaagaauguggcaaa

SEQ ID NO: 2661338 - RNA, 19 nt, Homo sapiens
  misc_RNA (1)...(19): siRNA sense strand
gugaauaugaggugcacaa

SEQ ID NO: 2661339 - RNA, 19 nt, Homo sapiens
  misc_RNA (1)...(19): siRNA sense strand
gaaaugagaugguagccaa

SEQ ID NO: 2661340 - RNA, 19 nt, Homo sapiens
  misc_RNA (1)...(19): siRNA sense strand
aacucauacuggagagaaa

SEQ ID NO: 2661341 - RNA, 19 nt, Homo sapiens
  misc_RNA (1)...(19): siRNA sense strand
auucagagacauagcuaua

SEQ ID NO: 2661342 - RNA, 19 nt, Homo sapiens
  misc_RNA (1)...(19): siRNA sense strand
agacauaagagaacucaua

SEQ ID NO: 2661343 - RNA, 19 nt, Homo sapiens
  misc_RNA (1)...(19): siRNA sense strand
aauucauacuggagagaga

SEQ ID NO: 2661344 - RNA, 19 nt, Homo sapiens
  misc_RNA (1)...(19): siRNA sense strand
aauucauacuggagagaga

SEQ ID NO: 2661345 - RNA, 19 nt, Homo sapiens
  misc_RNA (1)...(19): siRNA sense strand
aauucauacuggagagaga

SEQ ID NO: 2661346 - RNA, 19 nt, Homo sapiens
  misc_RNA (1)...(19): siRNA sense strand
aauucauacuggagagaga

SEQ ID NO: 2661347 - RNA, 19 nt, Homo sapiens
  misc_RNA (1)...(19): siRNA sense strand
augugauguuagagaacua

SEQ ID NO: 2661348 - RNA, 19 nt, Homo sapiens
  misc_RNA (1)...(19): siRNA sense strand
augugaagaauguggcaaa

SEQ ID NO: 2661349 - RNA, 19 nt, Homo sapiens
  misc_RNA (1)...(19): siRNA sense strand
augugaagaauguggcaaa

SEQ ID NO: 2661350 - RNA, 19 nt, Homo sapiens
  misc_RNA (1)...(19): siRNA sense strand
augugaagaauguggcaaa

SEQ ID NO: 2661351 - RNA, 19 nt, Homo sapiens
  misc_RNA (1)...(19): siRNA sense strand
augugaagaaugugagcaa

SEQ ID NO: 2661352 - RNA, 19 nt, Homo sapiens
  misc_RNA (1)...(19): siRNA sense strand
gugugaagaauguggccaa

SEQ ID NO: 2661353 - RNA, 19 nt, Homo sapiens
  misc_RNA (1)...(19): siRNA sense strand
gugugaggaauguggcaaa

SEQ ID NO: 2661354 - RNA, 19 nt, Homo sapiens
  misc_RNA (1)...(19): siRNA sense strand
ccucaaaccuuacuagaca

SEQ ID NO: 2661355 - RNA, 19 nt, Homo sapiens
  misc_RNA (1)...(19): siRNA sense strand
uuacuaaccacaagagaau

SEQ ID NO: 2661356 - RNA, 19 nt, Homo sapiens
  misc_RNA (1)...(19): siRNA sense strand
cggaauuuauauagagaug

SEQ ID NO: 2661357 - RNA, 19 nt, Homo sapiens
  misc_RNA (1)...(19): siRNA sense strand
agggagaaguccuacaaau

SEQ ID NO: 2661358 - RNA, 19 nt, Homo sapiens
  misc_RNA (1)...(19): siRNA sense strand
cugugaagaauguggccaa

SEQ ID NO: 2661359 - RNA, 19 nt, Homo sapiens
  misc_RNA (1)...(19): siRNA sense strand
augugaagaguguggcaaa

SEQ ID NO: 2661360 - RNA, 19 nt, Homo sapiens
  misc_RNA (1)...(19): siRNA sense strand
cugcaaaccuuacuagaca

SEQ ID NO: 2661361 - RNA, 19 nt, Homo sapiens
  misc_RNA (1)...(19): siRNA sense strand
cuguugacauucagagaca

SEQ ID NO: 2661362 - RNA, 19 nt, Homo sapiens
  misc_RNA (1)...(19): siRNA sense strand
guugacauucagagacaua

SEQ ID NO: 2661363 - RNA, 19 nt, Homo sapiens
  misc_RNA (1)...(19): siRNA sense strand
accaagaacauauggaaaa

SEQ ID NO: 2661364 - RNA, 19 nt, Homo sapiens
  misc_RNA (1)...(19): siRNA sense strand
gagacauagcuauagaauu

SEQ ID NO: 2661365 - RNA, 19 nt, Homo sapiens
  misc_RNA (1)...(19): siRNA sense strand
cuuacuaaccacaagagaa

SEQ ID NO: 2661366 - RNA, 19 nt, Homo sapiens
  misc_RNA (1)...(19): siRNA sense strand
uaccaagaacauauggaaa

SEQ ID NO: 2661367 - RNA, 19 nt, Homo sapiens
  misc_RNA (1)...(19): siRNA sense strand
guaauucauacuagggaga

SEQ ID NO: 2661368 - RNA, 19 nt, Homo sapiens
  misc_RNA (1)...(19): siRNA sense strand
augugaagaauguggccaa

SEQ ID NO: 2661369 - RNA, 19 nt, Homo sapiens
  misc_RNA (1)...(19): siRNA sense strand
augugaggaauguggcaaa

SEQ ID NO: 2661370 - RNA, 19 nt, Homo sapiens
  misc_RNA (1)...(19): siRNA sense strand
agaauguggccaagacuuu

SEQ ID NO: 2661371 - RNA, 19 nt, Homo sapiens
  misc_RNA (1)...(19): siRNA sense strand
aaauaaagagucccagaau

SEQ ID NO: 2661372 - RNA, 19 nt, Homo sapiens
  misc_RNA (1)...(19): siRNA sense strand
cccaagaccuucagccaga

SEQ ID NO: 2661373 - RNA, 19 nt, Homo sapiens
  misc_RNA (1)...(19): siRNA sense strand
ccuaaaucaacaucaggua

SEQ ID NO: 2661374 - RNA, 19 nt, Homo sapiens
  misc_RNA (1)...(19): siRNA sense strand
agaauucauacuagagaga

SEQ ID NO: 2661375 - RNA, 19 nt, Homo sapiens
  misc_RNA (1)...(19): siRNA sense strand
uuacuauccacaagagaau

SEQ ID NO: 2661376 - RNA, 19 nt, Homo sapiens
  misc_RNA (1)...(19): siRNA sense strand
accauauagaugugaggaa

SEQ ID NO: 2661377 - RNA, 19 nt, Homo sapiens
  misc_RNA (1)...(19): siRNA sense strand
ucaccugucuggagcaaaa

SEQ ID NO: 2661378 - RNA, 19 nt, Homo sapiens
  misc_RNA (1)...(19): siRNA sense strand
aaaugagaugguagccaaa

SEQ ID NO: 2661379 - RNA, 19 nt, Homo sapiens
  misc_RNA (1)...(19): siRNA sense strand
guaaaagugugggugaaua

SEQ ID NO: 2661380 - RNA, 19 nt, Homo sapiens
  misc_RNA (1)...(19): siRNA sense strand
acccuaugccugugaagaa

SEQ ID NO: 2661381 - RNA, 19 nt, Homo sapiens
  misc_RNA (1)...(19): siRNA sense strand
cuguaaaagugugggugaa

SEQ ID NO: 2661382 - RNA, 19 nt, Homo sapiens
  misc_RNA (1)...(19): siRNA sense strand
ccaagaacauauggaaaau

SEQ ID NO: 2661383 - RNA, 19 nt, Homo sapiens
  misc_RNA (1)...(19): siRNA sense strand
agagaugugauguuagaga

SEQ ID NO: 2661384 - RNA, 19 nt, Homo sapiens
  misc_RNA (1)...(19): siRNA sense strand
ccacaagagaauucauacu

SEQ ID NO: 2661385 - RNA, 19 nt, Homo sapiens
  misc_RNA (1)...(19): siRNA sense strand
cugaaaaggcgaagacaau

SEQ ID NO: 2661386 - RNA, 19 nt, Homo sapiens
  misc_RNA (1)...(19): siRNA sense strand
ccaacagaaacuggagaaa

SEQ ID NO: 2661387 - RNA, 19 nt, Homo sapiens
  misc_RNA (1)...(19): siRNA sense strand
ccugaaaaggcgaagacaa

SEQ ID NO: 2661388 - RNA, 19 nt, Homo sapiens
  misc_RNA (1)...(19): siRNA sense strand
gagaccauugcguggguaa

SEQ ID NO: 2661389 - RNA, 19 nt, Homo sapiens
  misc_RNA (1)...(19): siRNA sense strand
ggguauuccaacagaaacu

SEQ ID NO: 2661390 - RNA, 19 nt, Homo sapiens
  misc_RNA (1)...(19): siRNA sense strand
aggcaaugcaguauggcuu

SEQ ID NO: 2661391 - RNA, 19 nt, Homo sapiens
  misc_RNA (1)...(19): siRNA sense strand
caacagaaacuggagaaaa

SEQ ID NO: 2661392 - RNA, 19 nt, Homo sapiens
  misc_RNA (1)...(19): siRNA sense strand
cagaaaacggagauuuaaa

SEQ ID NO: 2661393 - RNA, 19 nt, Homo sapiens
  misc_RNA (1)...(19): siRNA sense strand
cggagauuuaaauuggaua

SEQ ID NO: 2661394 - RNA, 19 nt, Homo sapiens
  misc_RNA (1)...(19): siRNA sense strand
ggaccucauucaagagcca

SEQ ID NO: 2661395 - RNA, 19 nt, Homo sapiens
  misc_RNA (1)...(19): siRNA sense strand
uggcaagaagugugaacca

SEQ ID NO: 2661396 - RNA, 19 nt, Homo sapiens
  misc_RNA (1)...(19): siRNA sense strand
cauaaauggggucgagaau

SEQ ID NO: 2661397 - RNA, 19 nt, Homo sapiens
  misc_RNA (1)...(19): siRNA sense strand
agaaacuggagaaaagaaa

SEQ ID NO: 2661398 - RNA, 19 nt, Homo sapiens
  misc_RNA (1)...(19): siRNA sense strand
ugcauucacuggacagaaa

SEQ ID NO: 2661399 - RNA, 19 nt, Homo sapiens
  misc_RNA (1)...(19): siRNA sense strand
agcagaaaacggagauuua

SEQ ID NO: 2661400 - RNA, 19 nt, Homo sapiens
  misc_RNA (1)...(19): siRNA sense strand
augaagcauuacaggauga

SEQ ID NO: 2661401 - RNA, 19 nt, Homo sapiens
  misc_RNA (1)...(19): siRNA sense strand
gggagaagcuggugcugug

SEQ ID NO: 2661402 - RNA, 19 nt, Homo sapiens
  misc_RNA (1)...(19): siRNA sense strand
agaaucaagaccagcaaga

SEQ ID NO: 2661403 - RNA, 19 nt, Homo sapiens
  misc_RNA (1)...(19): siRNA sense strand
ugacagcagccgagaccau

SEQ ID NO: 2661404 - RNA, 19 nt, Homo sapiens
  misc_RNA (1)...(19): siRNA sense strand
acggguauuccaacagaaa

SEQ ID NO: 2661405 - RNA, 19 nt, Homo sapiens
  misc_RNA (1)...(19): siRNA sense strand
augcaguaaagaaggcaau

SEQ ID NO: 2661406 - RNA, 19 nt, Homo sapiens
  misc_RNA (1)...(19): siRNA sense strand
guaaagaaggcaaugcagu

SEQ ID NO: 2661407 - RNA, 19 nt, Homo sapiens
  misc_RNA (1)...(19): siRNA sense strand
gaaacuggagaaaagaaaa

SEQ ID NO: 2661408 - RNA, 19 nt, Homo sapiens
  misc_RNA (1)...(19): siRNA sense strand
gaucagagaaaacaagcaa

SEQ ID NO: 2661409 - RNA, 19 nt, Homo sapiens
  misc_RNA (1)...(19): siRNA sense strand
ccaacagaaacuggagaaa

SEQ ID NO: 2661410 - RNA, 19 nt, Homo sapiens
  misc_RNA (1)...(19): siRNA sense strand
gagaccauugcguggguaa

SEQ ID NO: 2661411 - RNA, 19 nt, Homo sapiens
  misc_RNA (1)...(19): siRNA sense strand
ggguauuccaacagaaacu

SEQ ID NO: 2661412 - RNA, 19 nt, Homo sapiens
  misc_RNA (1)...(19): siRNA sense strand
aggcaaugcaguauggcuu

SEQ ID NO: 2661413 - RNA, 19 nt, Homo sapiens
  misc_RNA (1)...(19): siRNA sense strand
caacagaaacuggagaaaa

SEQ ID NO: 2661414 - RNA, 19 nt, Homo sapiens
  misc_RNA (1)...(19): siRNA sense strand
cagaaaacggagauuuaaa

SEQ ID NO: 2661415 - RNA, 19 nt, Homo sapiens
  misc_RNA (1)...(19): siRNA sense strand
cggagauuuaaauuggaua

SEQ ID NO: 2661416 - RNA, 19 nt, Homo sapiens
  misc_RNA (1)...(19): siRNA sense strand
ggaccucauucaagagcca

SEQ ID NO: 2661417 - RNA, 19 nt, Homo sapiens
  misc_RNA (1)...(19): siRNA sense strand
uggcaagaagugugaacca

SEQ ID NO: 2661418 - RNA, 19 nt, Homo sapiens
  misc_RNA (1)...(19): siRNA sense strand
cauaaauggggucgagaau

SEQ ID NO: 2661419 - RNA, 19 nt, Homo sapiens
  misc_RNA (1)...(19): siRNA sense strand
agaaacuggagaaaagaaa

SEQ ID NO: 2661420 - RNA, 19 nt, Homo sapiens
  misc_RNA (1)...(19): siRNA sense strand
ugcauucacuggacagaaa

SEQ ID NO: 2661421 - RNA, 19 nt, Homo sapiens
  misc_RNA (1)...(19): siRNA sense strand
agcagaaaacggagauuua

SEQ ID NO: 2661422 - RNA, 19 nt, Homo sapiens
  misc_RNA (1)...(19): siRNA sense strand
augaagcauuacaggauga

SEQ ID NO: 2661423 - RNA, 19 nt, Homo sapiens
  misc_RNA (1)...(19): siRNA sense strand
gggagaagcuggugcugug

SEQ ID NO: 2661424 - RNA, 19 nt, Homo sapiens
  misc_RNA (1)...(19): siRNA sense strand
agaaucaagaccagcaaga

SEQ ID NO: 2661425 - RNA, 19 nt, Homo sapiens
  misc_RNA (1)...(19): siRNA sense strand
ugacagcagccgagaccau

SEQ ID NO: 2661426 - RNA, 19 nt, Homo sapiens
  misc_RNA (1)...(19): siRNA sense strand
acggguauuccaacagaaa

SEQ ID NO: 2661427 - RNA, 19 nt, Homo sapiens
  misc_RNA (1)...(19): siRNA sense strand
augcaguaaagaaggcaau

SEQ ID NO: 2661428 - RNA, 19 nt, Homo sapiens
  misc_RNA (1)...(19): siRNA sense strand
guaaagaaggcaaugcagu

SEQ ID NO: 2661429 - RNA, 19 nt, Homo sapiens
  misc_RNA (1)...(19): siRNA sense strand
gaaacuggagaaaagaaaa

SEQ ID NO: 2661430 - RNA, 19 nt, Homo sapiens
  misc_RNA (1)...(19): siRNA sense strand
gaucagagaaaacaagcaa

SEQ ID NO: 2661431 - RNA, 19 nt, Homo sapiens
  misc_RNA (1)...(19): siRNA sense strand
ggaagaugaaagagaugaa

SEQ ID NO: 2661432 - RNA, 19 nt, Homo sapiens
  misc_RNA (1)...(19): siRNA sense strand
gggcuggaaaguagagaau

SEQ ID NO: 2661433 - RNA, 19 nt, Homo sapiens
  misc_RNA (1)...(19): siRNA sense strand
ggguccaggcugagaagaa

SEQ ID NO: 2661434 - RNA, 19 nt, Homo sapiens
  misc_RNA (1)...(19): siRNA sense strand
ccuuugaggaggagcagaa

SEQ ID NO: 2661435 - RNA, 19 nt, Homo sapiens
  misc_RNA (1)...(19): siRNA sense strand
aagagaagaaggaggagau

SEQ ID NO: 2661436 - RNA, 19 nt, Homo sapiens
  misc_RNA (1)...(19): siRNA sense strand
caaagauggacaaggacau

SEQ ID NO: 2661437 - RNA, 19 nt, Homo sapiens
  misc_RNA (1)...(19): siRNA sense strand
gugcugaaggagagcgaga

SEQ ID NO: 2661438 - RNA, 19 nt, Homo sapiens
  misc_RNA (1)...(19): siRNA sense strand
aggaaaagaggaagaaaca

SEQ ID NO: 2661439 - RNA, 19 nt, Homo sapiens
  misc_RNA (1)...(19): siRNA sense strand
ggcaaaguguacaagaaaa

SEQ ID NO: 2661440 - RNA, 19 nt, Homo sapiens
  misc_RNA (1)...(19): siRNA sense strand
acaaggagcaggaggagga

SEQ ID NO: 2661441 - RNA, 19 nt, Homo sapiens
  misc_RNA (1)...(19): siRNA sense strand
aggaggagauggagugcca

SEQ ID NO: 2661442 - RNA, 19 nt, Homo sapiens
  misc_RNA (1)...(19): siRNA sense strand
augaagacuacaagccaua

SEQ ID NO: 2661443 - RNA, 19 nt, Homo sapiens
  misc_RNA (1)...(19): siRNA sense strand
uccgagagcaagagaagaa

SEQ ID NO: 2661444 - RNA, 19 nt, Homo sapiens
  misc_RNA (1)...(19): siRNA sense strand
aagaggaggcugaggagga

SEQ ID NO: 2661445 - RNA, 19 nt, Homo sapiens
  misc_RNA (1)...(19): siRNA sense strand
uggggaagguggagcggaa

SEQ ID NO: 2661446 - RNA, 19 nt, Homo sapiens
  misc_RNA (1)...(19): siRNA sense strand
agugaaagaacuagauacu

SEQ ID NO: 2661447 - RNA, 19 nt, Homo sapiens
  misc_RNA (1)...(19): siRNA sense strand
gcaugaggagcaagagcuu

SEQ ID NO: 2661448 - RNA, 19 nt, Homo sapiens
  misc_RNA (1)...(19): siRNA sense strand
acaaagauggacaaggaca

SEQ ID NO: 2661449 - RNA, 19 nt, Homo sapiens
  misc_RNA (1)...(19): siRNA sense strand
ggaccaucacgcugaccaa

SEQ ID NO: 2661450 - RNA, 19 nt, Homo sapiens
  misc_RNA (1)...(19): siRNA sense strand
cugaggaggaaaagaggaa

SEQ ID NO: 2661451 - RNA, 19 nt, Homo sapiens
  misc_RNA (1)...(19): siRNA sense strand
uuggcaaaguguacaagaa

SEQ ID NO: 2661452 - RNA, 19 nt, Homo sapiens
  misc_RNA (1)...(19): siRNA sense strand
uggacaaggagcaggagga

SEQ ID NO: 2661453 - RNA, 19 nt, Homo sapiens
  misc_RNA (1)...(19): siRNA sense strand
cagcucagugaaagaacua

SEQ ID NO: 2661454 - RNA, 19 nt, Homo sapiens
  misc_RNA (1)...(19): siRNA sense strand
gagaugaauuagaggaucc

SEQ ID NO: 2661455 - RNA, 19 nt, Homo sapiens
  misc_RNA (1)...(19): siRNA sense strand
aagagaugaauuagaggau

SEQ ID NO: 2661456 - RNA, 19 nt, Homo sapiens
  misc_RNA (1)...(19): siRNA sense strand
ugauaaacaaggaucuaga

SEQ ID NO: 2661457 - RNA, 19 nt, Homo sapiens
  misc_RNA (1)...(19): siRNA sense strand
acaaagaaauguucgcugu

SEQ ID NO: 2661458 - RNA, 19 nt, Homo sapiens
  misc_RNA (1)...(19): siRNA sense strand
cagucugcccugaaauuaa

SEQ ID NO: 2661459 - RNA, 19 nt, Homo sapiens
  misc_RNA (1)...(19): siRNA sense strand
gccggaaggagcuggagaa

SEQ ID NO: 2661460 - RNA, 19 nt, Homo sapiens
  misc_RNA (1)...(19): siRNA sense strand
gcucagugaaagaacuaga

SEQ ID NO: 2661461 - RNA, 19 nt, Homo sapiens
  misc_RNA (1)...(19): siRNA sense strand
uggauaagaugcaugagga

SEQ ID NO: 2661462 - RNA, 19 nt, Homo sapiens
  misc_RNA (1)...(19): siRNA sense strand
agcuggagaacgagagaga

SEQ ID NO: 2661463 - RNA, 19 nt, Homo sapiens
  misc_RNA (1)...(19): siRNA sense strand
caaggaucuagaaggaaau

SEQ ID NO: 2661464 - RNA, 19 nt, Homo sapiens
  misc_RNA (1)...(19): siRNA sense strand
gaggaggaaaagaggaaga

SEQ ID NO: 2661465 - RNA, 19 nt, Homo sapiens
  misc_RNA (1)...(19): siRNA sense strand
aggacagaacgcaggcauu

SEQ ID NO: 2661466 - RNA, 19 nt, Homo sapiens
  misc_RNA (1)...(19): siRNA sense strand
gcuucagagcccugugaga

SEQ ID NO: 2661467 - RNA, 19 nt, Homo sapiens
  misc_RNA (1)...(19): siRNA sense strand
uacaggaagcugaggauga

SEQ ID NO: 2661468 - RNA, 19 nt, Homo sapiens
  misc_RNA (1)...(19): siRNA sense strand
auaagaugcaugaggagca

SEQ ID NO: 2661469 - RNA, 19 nt, Homo sapiens
  misc_RNA (1)...(19): siRNA sense strand
caagagaagaaggaggaga

SEQ ID NO: 2661470 - RNA, 19 nt, Homo sapiens
  misc_RNA (1)...(19): siRNA sense strand
cuuccaggacuuugauauu

SEQ ID NO: 2661471 - RNA, 19 nt, Homo sapiens
  misc_RNA (1)...(19): siRNA sense strand
cgaugauaaacaaggaucu

SEQ ID NO: 2661472 - RNA, 19 nt, Homo sapiens
  misc_RNA (1)...(19): siRNA sense strand
ugaaagaggaggcugagga

SEQ ID NO: 2661473 - RNA, 19 nt, Homo sapiens
  misc_RNA (1)...(19): siRNA sense strand
agccauaccaggugcccaa

SEQ ID NO: 2661474 - RNA, 19 nt, Homo sapiens
  misc_RNA (1)...(19): siRNA sense strand
agcaagagaagaaggagga

SEQ ID NO: 2661475 - RNA, 19 nt, Homo sapiens
  misc_RNA (1)...(19): siRNA sense strand
ccgacaagcuccagguggu

SEQ ID NO: 2661476 - RNA, 19 nt, Homo sapiens
  misc_RNA (1)...(19): siRNA sense strand
gcuaugugauugccggaga

SEQ ID NO: 2661477 - RNA, 19 nt, Homo sapiens
  misc_RNA (1)...(19): siRNA sense strand
ugugauugccggagagucu

SEQ ID NO: 2661478 - RNA, 19 nt, Homo sapiens
  misc_RNA (1)...(19): siRNA sense strand
cgcagaaucucaacgguca

SEQ ID NO: 2661479 - RNA, 19 nt, Homo sapiens
  misc_RNA (1)...(19): siRNA sense strand
auacggaagcgaagggaaa

SEQ ID NO: 2661480 - RNA, 19 nt, Homo sapiens
  misc_RNA (1)...(19): siRNA sense strand
gcgcaaaauuccaggcuau

SEQ ID NO: 2661481 - RNA, 19 nt, Homo sapiens
  misc_RNA (1)...(19): siRNA sense strand
caacgugcugagagagaaa

SEQ ID NO: 2661482 - RNA, 19 nt, Homo sapiens
  misc_RNA (1)...(19): siRNA sense strand
gguuuaugcuagagacgau

SEQ ID NO: 2661483 - RNA, 19 nt, Homo sapiens
  misc_RNA (1)...(19): siRNA sense strand
ggguguuacgugaggguuu

SEQ ID NO: 2661484 - RNA, 19 nt, Homo sapiens
  misc_RNA (1)...(19): siRNA sense strand
cuauaaauacggaagcgaa

SEQ ID NO: 2661485 - RNA, 19 nt, Homo sapiens
  misc_RNA (1)...(19): siRNA sense strand
cgauguuggcccugaagaa

SEQ ID NO: 2661486 - RNA, 19 nt, Homo sapiens
  misc_RNA (1)...(19): siRNA sense strand
aagccaacgugcugagaga

SEQ ID NO: 2661487 - RNA, 19 nt, Homo sapiens
  misc_RNA (1)...(19): siRNA sense strand
guggagaagcugaggaaac

SEQ ID NO: 2661488 - RNA, 19 nt, Homo sapiens
  misc_RNA (1)...(19): siRNA sense strand
aggaucagcaggagagaga

SEQ ID NO: 2661489 - RNA, 19 nt, Homo sapiens
  misc_RNA (1)...(19): siRNA sense strand
agaacaaugacaugcgcaa

SEQ ID NO: 2661490 - RNA, 19 nt, Homo sapiens
  misc_RNA (1)...(19): siRNA sense strand
aaacagaaguugaagaccu

SEQ ID NO: 2661491 - RNA, 19 nt, Homo sapiens
  misc_RNA (1)...(19): siRNA sense strand
ucacugaagcccagaccaa

SEQ ID NO: 2661492 - RNA, 19 nt, Homo sapiens
  misc_RNA (1)...(19): siRNA sense strand
ccguggagaagcugaggaa

SEQ ID NO: 2661493 - RNA, 19 nt, Homo sapiens
  misc_RNA (1)...(19): siRNA sense strand
agaaaggacaugaaugaca

SEQ ID NO: 2661494 - RNA, 19 nt, Homo sapiens
  misc_RNA (1)...(19): siRNA sense strand
gcccggaagcagaggauga

SEQ ID NO: 2661495 - RNA, 19 nt, Homo sapiens
  misc_RNA (1)...(19): siRNA sense strand
uggaggcaguggugaggaa

SEQ ID NO: 2661496 - RNA, 19 nt, Homo sapiens
  misc_RNA (1)...(19): siRNA sense strand
aggaaacugcagagagcuu

SEQ ID NO: 2661497 - RNA, 19 nt, Homo sapiens
  misc_RNA (1)...(19): siRNA sense strand
gcagcgaguuucaggacca

SEQ ID NO: 2661498 - RNA, 19 nt, Homo sapiens
  misc_RNA (1)...(19): siRNA sense strand
gugaauaugaaaggagauu

SEQ ID NO: 2661499 - RNA, 19 nt, Homo sapiens
  misc_RNA (1)...(19): siRNA sense strand
cugugaauaugaaaggaga

SEQ ID NO: 2661500 - RNA, 19 nt, Homo sapiens
  misc_RNA (1)...(19): siRNA sense strand
cggaagcagaggaugaaca

SEQ ID NO: 2661501 - RNA, 19 nt, Homo sapiens
  misc_RNA (1)...(19): siRNA sense strand
gggacaaauuucgggacuu

SEQ ID NO: 2661502 - RNA, 19 nt, Homo sapiens
  misc_RNA (1)...(19): siRNA sense strand
gcuuuaucacuuaaggaau

SEQ ID NO: 2661503 - RNA, 19 nt, Homo sapiens
  misc_RNA (1)...(19): siRNA sense strand
acgaagugucugcaaggaa

SEQ ID NO: 2661504 - RNA, 19 nt, Homo sapiens
  misc_RNA (1)...(19): siRNA sense strand
aguugaagaccucaguuua

SEQ ID NO: 2661505 - RNA, 19 nt, Homo sapiens
  misc_RNA (1)...(19): siRNA sense strand
uggaaacagaaguugaaga

SEQ ID NO: 2661506 - RNA, 19 nt, Homo sapiens
  misc_RNA (1)...(19): siRNA sense strand
aagcgaagggaaagagugu

SEQ ID NO: 2661507 - RNA, 19 nt, Homo sapiens
  misc_RNA (1)...(19): siRNA sense strand
ccuauuaauggaaacagaa

SEQ ID NO: 2661508 - RNA, 19 nt, Homo sapiens
  misc_RNA (1)...(19): siRNA sense strand
gccaacgugcugagagaga

SEQ ID NO: 2661509 - RNA, 19 nt, Homo sapiens
  misc_RNA (1)...(19): siRNA sense strand
uugcugccuucaagagaaa

SEQ ID NO: 2661510 - RNA, 19 nt, Homo sapiens
  misc_RNA (1)...(19): siRNA sense strand
caguucagcauaugggaca

SEQ ID NO: 2661511 - RNA, 19 nt, Homo sapiens
  misc_RNA (1)...(19): siRNA sense strand
cuuaaagguaguugaauuc

SEQ ID NO: 2661512 - RNA, 19 nt, Homo sapiens
  misc_RNA (1)...(19): siRNA sense strand
ugaggaaguucgaugccau

SEQ ID NO: 2661513 - RNA, 19 nt, Homo sapiens
  misc_RNA (1)...(19): siRNA sense strand
gugggcagcuggaggaacu

SEQ ID NO: 2661514 - RNA, 19 nt, Homo sapiens
  misc_RNA (1)...(19): siRNA sense strand
cuuaaggaucagcaggaga

SEQ ID NO: 2661515 - RNA, 19 nt, Homo sapiens
  misc_RNA (1)...(19): siRNA sense strand
ccagaaguccagaggagaa

SEQ ID NO: 2661516 - RNA, 19 nt, Homo sapiens
  misc_RNA (1)...(19): siRNA sense strand
ugaaagagcagaauggcua

SEQ ID NO: 2661517 - RNA, 19 nt, Homo sapiens
  misc_RNA (1)...(19): siRNA sense strand
uggacaagaauuagagauu

SEQ ID NO: 2661518 - RNA, 19 nt, Homo sapiens
  misc_RNA (1)...(19): siRNA sense strand
ucgagaaacuauagaacca

SEQ ID NO: 2661519 - RNA, 19 nt, Homo sapiens
  misc_RNA (1)...(19): siRNA sense strand
uggcuaaauaagacuguaa

SEQ ID NO: 2661520 - RNA, 19 nt, Homo sapiens
  misc_RNA (1)...(19): siRNA sense strand
acaucaaagcugacaaaga

SEQ ID NO: 2661521 - RNA, 19 nt, Homo sapiens
  misc_RNA (1)...(19): siRNA sense strand
cggucaggaaggaggaaaa

SEQ ID NO: 2661522 - RNA, 19 nt, Homo sapiens
  misc_RNA (1)...(19): siRNA sense strand
ggcacagcucgcagagaaa

SEQ ID NO: 2661523 - RNA, 19 nt, Homo sapiens
  misc_RNA (1)...(19): siRNA sense strand
gaaauuaacuggacaggac

SEQ ID NO: 2661524 - RNA, 19 nt, Homo sapiens
  misc_RNA (1)...(19): siRNA sense strand
ccaaugaaccuguguggga

SEQ ID NO: 2661525 - RNA, 19 nt, Homo sapiens
  misc_RNA (1)...(19): siRNA sense strand
cacugaaaauguagacaaa

SEQ ID NO: 2661526 - RNA, 19 nt, Homo sapiens
  misc_RNA (1)...(19): siRNA sense strand
gcagaaaccucauugccuu

SEQ ID NO: 2661527 - RNA, 19 nt, Homo sapiens
  misc_RNA (1)...(19): siRNA sense strand
ccaccaacacucagcucaa

SEQ ID NO: 2661528 - RNA, 19 nt, Homo sapiens
  misc_RNA (1)...(19): siRNA sense strand
agacacugaaagagcagaa

SEQ ID NO: 2661529 - RNA, 19 nt, Homo sapiens
  misc_RNA (1)...(19): siRNA sense strand
aggcuuuaguguaugaaca

SEQ ID NO: 2661530 - RNA, 19 nt, Homo sapiens
  misc_RNA (1)...(19): siRNA sense strand
uccaaagaggggaggaaaa

SEQ ID NO: 2661531 - RNA, 19 nt, Homo sapiens
  misc_RNA (1)...(19): siRNA sense strand
uaacagacaucaaagcuga

SEQ ID NO: 2661532 - RNA, 19 nt, Homo sapiens
  misc_RNA (1)...(19): siRNA sense strand
uagagaaguuguuucgaga

SEQ ID NO: 2661533 - RNA, 19 nt, Homo sapiens
  misc_RNA (1)...(19): siRNA sense strand
aaggagaaccucaguccaa

SEQ ID NO: 2661534 - RNA, 19 nt, Homo sapiens
  misc_RNA (1)...(19): siRNA sense strand
cugacaaagaccaagccaa

SEQ ID NO: 2661535 - RNA, 19 nt, Homo sapiens
  misc_RNA (1)...(19): siRNA sense strand
ugacaaagaccaagccaac

SEQ ID NO: 2661536 - RNA, 19 nt, Homo sapiens
  misc_RNA (1)...(19): siRNA sense strand
aggaaaacauccaucaaau

SEQ ID NO: 2661537 - RNA, 19 nt, Homo sapiens
  misc_RNA (1)...(19): siRNA sense strand
gcgccaggaccuugaaguu

SEQ ID NO: 2661538 - RNA, 19 nt, Homo sapiens
  misc_RNA (1)...(19): siRNA sense strand
ccgucagggaagaaaauaa

SEQ ID NO: 2661539 - RNA, 19 nt, Homo sapiens
  misc_RNA (1)...(19): siRNA sense strand
caacacagcuccauccaca

SEQ ID NO: 2661540 - RNA, 19 nt, Homo sapiens
  misc_RNA (1)...(19): siRNA sense strand
acaaggcccaggagagcaa

SEQ ID NO: 2661541 - RNA, 19 nt, Homo sapiens
  misc_RNA (1)...(19): siRNA sense strand
uaggaaauugugagauuga

SEQ ID NO: 2661542 - RNA, 19 nt, Homo sapiens
  misc_RNA (1)...(19): siRNA sense strand
guuaaugccaaaugcguca

SEQ ID NO: 2661543 - RNA, 19 nt, Homo sapiens
  misc_RNA (1)...(19): siRNA sense strand
gguccaaacagcaccauca

SEQ ID NO: 2661544 - RNA, 19 nt, Homo sapiens
  misc_RNA (1)...(19): siRNA sense strand
gaaugaagucuaugaggcu

SEQ ID NO: 2661545 - RNA, 19 nt, Homo sapiens
  misc_RNA (1)...(19): siRNA sense strand
acauccuggacaagaauua

SEQ ID NO: 2661546 - RNA, 19 nt, Homo sapiens
  misc_RNA (1)...(19): siRNA sense strand
acccaggagcugcggcaaa

SEQ ID NO: 2661547 - RNA, 19 nt, Homo sapiens
  misc_RNA (1)...(19): siRNA sense strand
gauugagcucuuugaugaa

SEQ ID NO: 2661548 - RNA, 19 nt, Homo sapiens
  misc_RNA (1)...(19): siRNA sense strand
cuggaguggcucacguuaa

SEQ ID NO: 2661549 - RNA, 19 nt, Homo sapiens
  misc_RNA (1)...(19): siRNA sense strand
aggacaugacugugagcca

SEQ ID NO: 2661550 - RNA, 19 nt, Homo sapiens
  misc_RNA (1)...(19): siRNA sense strand
ugugaaaaguauccagauu

SEQ ID NO: 2661551 - RNA, 19 nt, Homo sapiens
  misc_RNA (1)...(19): siRNA sense strand
agucagaccccuauggaau

SEQ ID NO: 2661552 - RNA, 19 nt, Homo sapiens
  misc_RNA (1)...(19): siRNA sense strand
gggaagaaaauaagcagca

SEQ ID NO: 2661553 - RNA, 19 nt, Homo sapiens
  misc_RNA (1)...(19): siRNA sense strand
ggaagaaaauaagcagcaa

SEQ ID NO: 2661554 - RNA, 19 nt, Homo sapiens
  misc_RNA (1)...(19): siRNA sense strand
ggcuaaauaagacuguaaa

SEQ ID NO: 2661555 - RNA, 19 nt, Homo sapiens
  misc_RNA (1)...(19): siRNA sense strand
gagaaaggccuccagacca

SEQ ID NO: 2661556 - RNA, 19 nt, Homo sapiens
  misc_RNA (1)...(19): siRNA sense strand
gggcagauccagcugacca

SEQ ID NO: 2661557 - RNA, 19 nt, Homo sapiens
  misc_RNA (1)...(19): siRNA sense strand
gcauguauuuauuaccaga

SEQ ID NO: 2661558 - RNA, 19 nt, Homo sapiens
  misc_RNA (1)...(19): siRNA sense strand
cggacaagcugcagcgacu

SEQ ID NO: 2661559 - RNA, 19 nt, Homo sapiens
  misc_RNA (1)...(19): siRNA sense strand
uagaagaggcggagcagga

SEQ ID NO: 2661560 - RNA, 19 nt, Homo sapiens
  misc_RNA (1)...(19): siRNA sense strand
ccaacuacgcgcuggccaa

SEQ ID NO: 2661561 - RNA, 19 nt, Homo sapiens
  misc_RNA (1)...(19): siRNA sense strand
ccgagaacugcgcggacaa

SEQ ID NO: 2661562 - RNA, 19 nt, Homo sapiens
  misc_RNA (1)...(19): siRNA sense strand
aggcagaggagcagaugga

SEQ ID NO: 2661563 - RNA, 19 nt, Homo sapiens
  misc_RNA (1)...(19): siRNA sense strand
cagaggagcagauggagca

SEQ ID NO: 2661564 - RNA, 19 nt, Homo sapiens
  misc_RNA (1)...(19): siRNA sense strand
cggacaagcugcagcgacu

SEQ ID NO: 2661565 - RNA, 19 nt, Homo sapiens
  misc_RNA (1)...(19): siRNA sense strand
uagaagaggcggagcagga

SEQ ID NO: 2661566 - RNA, 19 nt, Homo sapiens
  misc_RNA (1)...(19): siRNA sense strand
ccaacuacgcgcuggccaa

SEQ ID NO: 2661567 - RNA, 19 nt, Homo sapiens
  misc_RNA (1)...(19): siRNA sense strand
ccgagaacugcgcggacaa

SEQ ID NO: 2661568 - RNA, 19 nt, Homo sapiens
  misc_RNA (1)...(19): siRNA sense strand
aggcagaggagcagaugga

SEQ ID NO: 2661569 - RNA, 19 nt, Homo sapiens
  misc_RNA (1)...(19): siRNA sense strand
cagaggagcagauggagca

SEQ ID NO: 2661570 - RNA, 19 nt, Homo sapiens
  misc_RNA (1)...(19): siRNA sense strand
ggagaaugaaugugagaga

SEQ ID NO: 2661571 - RNA, 19 nt, Homo sapiens
  misc_RNA (1)...(19): siRNA sense strand
guucagaguucauggcgaa

SEQ ID NO: 2661572 - RNA, 19 nt, Homo sapiens
  misc_RNA (1)...(19): siRNA sense strand
ccgaaagcuauaagucaaa

SEQ ID NO: 2661573 - RNA, 19 nt, Homo sapiens
  misc_RNA (1)...(19): siRNA sense strand
cugggaaaacugagagaaa

SEQ ID NO: 2661574 - RNA, 19 nt, Homo sapiens
  misc_RNA (1)...(19): siRNA sense strand
ucagagacgcugugggaca

SEQ ID NO: 2661575 - RNA, 19 nt, Homo sapiens
  misc_RNA (1)...(19): siRNA sense strand
agaguuuauucuagggaca

SEQ ID NO: 2661576 - RNA, 19 nt, Homo sapiens
  misc_RNA (1)...(19): siRNA sense strand
ggaagauauucugggaaaa

SEQ ID NO: 2661577 - RNA, 19 nt, Homo sapiens
  misc_RNA (1)...(19): siRNA sense strand
ccuaagacgcugucgccaa

SEQ ID NO: 2661578 - RNA, 19 nt, Homo sapiens
  misc_RNA (1)...(19): siRNA sense strand
gcgacgacuguaagggcaa

SEQ ID NO: 2661579 - RNA, 19 nt, Homo sapiens
  misc_RNA (1)...(19): siRNA sense strand
agaaagaguggacgugcaa

SEQ ID NO: 2661580 - RNA, 19 nt, Homo sapiens
  misc_RNA (1)...(19): siRNA sense strand
agucagagaaauggugaaa

SEQ ID NO: 2661581 - RNA, 19 nt, Homo sapiens
  misc_RNA (1)...(19): siRNA sense strand
ggucagagacgcuguggga

SEQ ID NO: 2661582 - RNA, 19 nt, Homo sapiens
  misc_RNA (1)...(19): siRNA sense strand
gcgcgaggcaguaugguuu

SEQ ID NO: 2661583 - RNA, 19 nt, Homo sapiens
  misc_RNA (1)...(19): siRNA sense strand
uccgaaagcuauaagucaa

SEQ ID NO: 2661584 - RNA, 19 nt, Homo sapiens
  misc_RNA (1)...(19): siRNA sense strand
ugaugaugauggugaucuu

SEQ ID NO: 2661585 - RNA, 19 nt, Homo sapiens
  misc_RNA (1)...(19): siRNA sense strand
ugaucuuaaagguggaaau

SEQ ID NO: 2661586 - RNA, 19 nt, Homo sapiens
  misc_RNA (1)...(19): siRNA sense strand
uggaauaacagaggcgcaa

SEQ ID NO: 2661587 - RNA, 19 nt, Homo sapiens
  misc_RNA (1)...(19): siRNA sense strand
aagaaagaguggacgugca

SEQ ID NO: 2661588 - RNA, 19 nt, Homo sapiens
  misc_RNA (1)...(19): siRNA sense strand
gcucaguuaugaaucagaa

SEQ ID NO: 2661589 - RNA, 19 nt, Homo sapiens
  misc_RNA (1)...(19): siRNA sense strand
aagaacaugaagugcguau

SEQ ID NO: 2661590 - RNA, 19 nt, Homo sapiens
  misc_RNA (1)...(19): siRNA sense strand
gcaugcuguccgagcgcaa

SEQ ID NO: 2661591 - RNA, 19 nt, Homo sapiens
  misc_RNA (1)...(19): siRNA sense strand
cuagaacagaccaagcaaa

SEQ ID NO: 2661592 - RNA, 19 nt, Homo sapiens
  misc_RNA (1)...(19): siRNA sense strand
uagaacagaccaagcaaaa

SEQ ID NO: 2661593 - RNA, 19 nt, Homo sapiens
  misc_RNA (1)...(19): siRNA sense strand
cgcagaagcacaaacaaau

SEQ ID NO: 2661594 - RNA, 19 nt, Homo sapiens
  misc_RNA (1)...(19): siRNA sense strand
ccaagaacaugaagugcgu

SEQ ID NO: 2661595 - RNA, 19 nt, Homo sapiens
  misc_RNA (1)...(19): siRNA sense strand
aggaacuagaacagaccaa

SEQ ID NO: 2661596 - RNA, 19 nt, Homo sapiens
  misc_RNA (1)...(19): siRNA sense strand
uggaaauaaagcugccauu

SEQ ID NO: 2661597 - RNA, 19 nt, Homo sapiens
  misc_RNA (1)...(19): siRNA sense strand
cgugcaagucagagaaaug

SEQ ID NO: 2661598 - RNA, 19 nt, Homo sapiens
  misc_RNA (1)...(19): siRNA sense strand
gagacgugcggaaggccaa

SEQ ID NO: 2661599 - RNA, 19 nt, Homo sapiens
  misc_RNA (1)...(19): siRNA sense strand
gguucagaguucauggcga

SEQ ID NO: 2661600 - RNA, 19 nt, Homo sapiens
  misc_RNA (1)...(19): siRNA sense strand
gcgcugucucccugaagaa

SEQ ID NO: 2661601 - RNA, 19 nt, Homo sapiens
  misc_RNA (1)...(19): siRNA sense strand
gaagcucaguuaugaauca

SEQ ID NO: 2661602 - RNA, 19 nt, Homo sapiens
  misc_RNA (1)...(19): siRNA sense strand
aaugaaugugagagagguu

SEQ ID NO: 2661603 - RNA, 19 nt, Homo sapiens
  misc_RNA (1)...(19): siRNA sense strand
ugggaaaacugagagaaaa

SEQ ID NO: 2661604 - RNA, 19 nt, Homo sapiens
  misc_RNA (1)...(19): siRNA sense strand
ugugaauccgaaagcuaua

SEQ ID NO: 2661605 - RNA, 19 nt, Homo sapiens
  misc_RNA (1)...(19): siRNA sense strand
cuuuauggccuuucaccaa

SEQ ID NO: 2661606 - RNA, 19 nt, Homo sapiens
  misc_RNA (1)...(19): siRNA sense strand
agacugacuuuauggccuu

SEQ ID NO: 2661607 - RNA, 19 nt, Homo sapiens
  misc_RNA (1)...(19): siRNA sense strand
ccucaguguaaauggggaa

SEQ ID NO: 2661608 - RNA, 19 nt, Homo sapiens
  misc_RNA (1)...(19): siRNA sense strand
cguucuugcccguguugaa

SEQ ID NO: 2661609 - RNA, 19 nt, Homo sapiens
  misc_RNA (1)...(19): siRNA sense strand
ccucagaagccgugguguc

SEQ ID NO: 2661610 - RNA, 19 nt, Homo sapiens
  misc_RNA (1)...(19): siRNA sense strand
ggagaaugaaugugagaga

SEQ ID NO: 2661611 - RNA, 19 nt, Homo sapiens
  misc_RNA (1)...(19): siRNA sense strand
guucagaguucauggcgaa

SEQ ID NO: 2661612 - RNA, 19 nt, Homo sapiens
  misc_RNA (1)...(19): siRNA sense strand
ccgaaagcuauaagucaaa

SEQ ID NO: 2661613 - RNA, 19 nt, Homo sapiens
  misc_RNA (1)...(19): siRNA sense strand
cugggaaaacugagagaaa

SEQ ID NO: 2661614 - RNA, 19 nt, Homo sapiens
  misc_RNA (1)...(19): siRNA sense strand
ucagagacgcugugggaca

SEQ ID NO: 2661615 - RNA, 19 nt, Homo sapiens
  misc_RNA (1)...(19): siRNA sense strand
agaguuuauucuagggaca

SEQ ID NO: 2661616 - RNA, 19 nt, Homo sapiens
  misc_RNA (1)...(19): siRNA sense strand
ggaagauauucugggaaaa

SEQ ID NO: 2661617 - RNA, 19 nt, Homo sapiens
  misc_RNA (1)...(19): siRNA sense strand
ccuaagacgcugucgccaa

SEQ ID NO: 2661618 - RNA, 19 nt, Homo sapiens
  misc_RNA (1)...(19): siRNA sense strand
gcgacgacuguaagggcaa

SEQ ID NO: 2661619 - RNA, 19 nt, Homo sapiens
  misc_RNA (1)...(19): siRNA sense strand
agaaagaguggacgugcaa

SEQ ID NO: 2661620 - RNA, 19 nt, Homo sapiens
  misc_RNA (1)...(19): siRNA sense strand
agucagagaaauggugaaa

SEQ ID NO: 2661621 - RNA, 19 nt, Homo sapiens
  misc_RNA (1)...(19): siRNA sense strand
ggucagagacgcuguggga

SEQ ID NO: 2661622 - RNA, 19 nt, Homo sapiens
  misc_RNA (1)...(19): siRNA sense strand
gcgcgaggcaguaugguuu

SEQ ID NO: 2661623 - RNA, 19 nt, Homo sapiens
  misc_RNA (1)...(19): siRNA sense strand
uccgaaagcuauaagucaa

SEQ ID NO: 2661624 - RNA, 19 nt, Homo sapiens
  misc_RNA (1)...(19): siRNA sense strand
ugaugaugauggugaucuu

SEQ ID NO: 2661625 - RNA, 19 nt, Homo sapiens
  misc_RNA (1)...(19): siRNA sense strand
ugaucuuaaagguggaaau

SEQ ID NO: 2661626 - RNA, 19 nt, Homo sapiens
  misc_RNA (1)...(19): siRNA sense strand
uggaauaacagaggcgcaa

SEQ ID NO: 2661627 - RNA, 19 nt, Homo sapiens
  misc_RNA (1)...(19): siRNA sense strand
aagaaagaguggacgugca

SEQ ID NO: 2661628 - RNA, 19 nt, Homo sapiens
  misc_RNA (1)...(19): siRNA sense strand
gcucaguuaugaaucagaa

SEQ ID NO: 2661629 - RNA, 19 nt, Homo sapiens
  misc_RNA (1)...(19): siRNA sense strand
aagaacaugaagugcguau

SEQ ID NO: 2661630 - RNA, 19 nt, Homo sapiens
  misc_RNA (1)...(19): siRNA sense strand
gcaugcuguccgagcgcaa

SEQ ID NO: 2661631 - RNA, 19 nt, Homo sapiens
  misc_RNA (1)...(19): siRNA sense strand
cuagaacagaccaagcaaa

SEQ ID NO: 2661632 - RNA, 19 nt, Homo sapiens
  misc_RNA (1)...(19): siRNA sense strand
uagaacagaccaagcaaaa

SEQ ID NO: 2661633 - RNA, 19 nt, Homo sapiens
  misc_RNA (1)...(19): siRNA sense strand
cgcagaagcacaaacaaau

SEQ ID NO: 2661634 - RNA, 19 nt, Homo sapiens
  misc_RNA (1)...(19): siRNA sense strand
ccaagaacaugaagugcgu

SEQ ID NO: 2661635 - RNA, 19 nt, Homo sapiens
  misc_RNA (1)...(19): siRNA sense strand
aggaacuagaacagaccaa

SEQ ID NO: 2661636 - RNA, 19 nt, Homo sapiens
  misc_RNA (1)...(19): siRNA sense strand
uggaaauaaagcugccauu

SEQ ID NO: 2661637 - RNA, 19 nt, Homo sapiens
  misc_RNA (1)...(19): siRNA sense strand
cgugcaagucagagaaaug

SEQ ID NO: 2661638 - RNA, 19 nt, Homo sapiens
  misc_RNA (1)...(19): siRNA sense strand
gagacgugcggaaggccaa

SEQ ID NO: 2661639 - RNA, 19 nt, Homo sapiens
  misc_RNA (1)...(19): siRNA sense strand
gguucagaguucauggcga

SEQ ID NO: 2661640 - RNA, 19 nt, Homo sapiens
  misc_RNA (1)...(19): siRNA sense strand
gcgcugucucccugaagaa

SEQ ID NO: 2661641 - RNA, 19 nt, Homo sapiens
  misc_RNA (1)...(19): siRNA sense strand
gaagcucaguuaugaauca

SEQ ID NO: 2661642 - RNA, 19 nt, Homo sapiens
  misc_RNA (1)...(19): siRNA sense strand
aaugaaugugagagagguu

SEQ ID NO: 2661643 - RNA, 19 nt, Homo sapiens
  misc_RNA (1)...(19): siRNA sense strand
ugggaaaacugagagaaaa

SEQ ID NO: 2661644 - RNA, 19 nt, Homo sapiens
  misc_RNA (1)...(19): siRNA sense strand
ugugaauccgaaagcuaua

SEQ ID NO: 2661645 - RNA, 19 nt, Homo sapiens
  misc_RNA (1)...(19): siRNA sense strand
cuuuauggccuuucaccaa

SEQ ID NO: 2661646 - RNA, 19 nt, Homo sapiens
  misc_RNA (1)...(19): siRNA sense strand
agacugacuuuauggccuu

SEQ ID NO: 2661647 - RNA, 19 nt, Homo sapiens
  misc_RNA (1)...(19): siRNA sense strand
ccucaguguaaauggggaa

SEQ ID NO: 2661648 - RNA, 19 nt, Homo sapiens
  misc_RNA (1)...(19): siRNA sense strand
cguucuugcccguguugaa

SEQ ID NO: 2661649 - RNA, 19 nt, Homo sapiens
  misc_RNA (1)...(19): siRNA sense strand
ccucagaagccgugguguc

SEQ ID NO: 2661650 - RNA, 19 nt, Homo sapiens
  misc_RNA (1)...(19): siRNA sense strand
gcucaaagggucaggccaa

SEQ ID NO: 2661651 - RNA, 19 nt, Homo sapiens
  misc_RNA (1)...(19): siRNA sense strand
gcaaggagcagaaggccaa

SEQ ID NO: 2661652 - RNA, 19 nt, Homo sapiens
  misc_RNA (1)...(19): siRNA sense strand
cagaugugcugcagggcua

SEQ ID NO: 2661653 - RNA, 19 nt, Homo sapiens
  misc_RNA (1)...(19): siRNA sense strand
acaucauggacaagaguaa

SEQ ID NO: 2661654 - RNA, 19 nt, Homo sapiens
  misc_RNA (1)...(19): siRNA sense strand
ccaucaacuucaaggccaa

SEQ ID NO: 2661655 - RNA, 19 nt, Homo sapiens
  misc_RNA (1)...(19): siRNA sense strand
acgacgagggcgagagcaa

SEQ ID NO: 2661656 - RNA, 19 nt, Homo sapiens
  misc_RNA (1)...(19): siRNA sense strand
gagcagaacaucauggaca

SEQ ID NO: 2661657 - RNA, 19 nt, Homo sapiens
  misc_RNA (1)...(19): siRNA sense strand
acgaagagggcgaggagga

SEQ ID NO: 2661658 - RNA, 19 nt, Homo sapiens
  misc_RNA (1)...(19): siRNA sense strand
uggccaagaucaagcccaa

SEQ ID NO: 2661659 - RNA, 19 nt, Homo sapiens
  misc_RNA (1)...(19): siRNA sense strand
cauucaacccagagaacau

SEQ ID NO: 2661660 - RNA, 19 nt, Homo sapiens
  misc_RNA (1)...(19): siRNA sense strand
ccaagaagcggcagaggca

SEQ ID NO: 2661661 - RNA, 19 nt, Homo sapiens
  misc_RNA (1)...(19): siRNA sense strand
ccuacgaggaggacgagaa

SEQ ID NO: 2661662 - RNA, 19 nt, Homo sapiens
  misc_RNA (1)...(19): siRNA sense strand
gcaaaagccaggugcagaa

SEQ ID NO: 2661663 - RNA, 19 nt, Homo sapiens
  misc_RNA (1)...(19): siRNA sense strand
aaagaggagccgugcgcua

SEQ ID NO: 2661664 - RNA, 19 nt, Homo sapiens
  misc_RNA (1)...(19): siRNA sense strand
gcgagagcaaggagcagaa

SEQ ID NO: 2661665 - RNA, 19 nt, Homo sapiens
  misc_RNA (1)...(19): siRNA sense strand
agcagaacaucauggacaa

SEQ ID NO: 2661666 - RNA, 19 nt, Homo sapiens
  misc_RNA (1)...(19): siRNA sense strand
ggaggaagggcaaagguca

SEQ ID NO: 2661667 - RNA, 19 nt, Homo sapiens
  misc_RNA (1)...(19): siRNA sense strand
acaaaggagaaaagaggaa

SEQ ID NO: 2661668 - RNA, 19 nt, Homo sapiens
  misc_RNA (1)...(19): siRNA sense strand
cugaagaugcucauggaga

SEQ ID NO: 2661669 - RNA, 19 nt, Homo sapiens
  misc_RNA (1)...(19): siRNA sense strand
cggagaugcugaaccguga

SEQ ID NO: 2661670 - RNA, 19 nt, Homo sapiens
  misc_RNA (1)...(19): siRNA sense strand
cugcugaauuacaggaagu

SEQ ID NO: 2661671 - RNA, 19 nt, Homo sapiens
  misc_RNA (1)...(19): siRNA sense strand
gugaagcagcugaagguca

SEQ ID NO: 2661672 - RNA, 19 nt, Homo sapiens
  misc_RNA (1)...(19): siRNA sense strand
ugaccaacaaggacgacua

SEQ ID NO: 2661673 - RNA, 19 nt, Homo sapiens
  misc_RNA (1)...(19): siRNA sense strand
aggcaggucuugggaggaa

SEQ ID NO: 2661674 - RNA, 19 nt, Homo sapiens
  misc_RNA (1)...(19): siRNA sense strand
agaacuggcccgagaucuu

SEQ ID NO: 2661675 - RNA, 19 nt, Homo sapiens
  misc_RNA (1)...(19): siRNA sense strand
ggagguucugagugacaua

SEQ ID NO: 2661676 - RNA, 19 nt, Homo sapiens
  misc_RNA (1)...(19): siRNA sense strand
agaucuuugucaaggugua

SEQ ID NO: 2661677 - RNA, 19 nt, Homo sapiens
  misc_RNA (1)...(19): siRNA sense strand
agaucaacuuccaggccuu

SEQ ID NO: 2661678 - RNA, 19 nt, Homo sapiens
  misc_RNA (1)...(19): siRNA sense strand
acuucaaggccaaggggaa

SEQ ID NO: 2661679 - RNA, 19 nt, Homo sapiens
  misc_RNA (1)...(19): siRNA sense strand
acgaagagcucgcggagag

SEQ ID NO: 2661680 - RNA, 19 nt, Homo sapiens
  misc_RNA (1)...(19): siRNA sense strand
gcuauaaggaggugcggcu

SEQ ID NO: 2661681 - RNA, 19 nt, Homo sapiens
  misc_RNA (1)...(19): siRNA sense strand
gugcagugucugugcgagu

SEQ ID NO: 2661682 - RNA, 19 nt, Homo sapiens
  misc_RNA (1)...(19): siRNA sense strand
acgaugagagugucaggaa

SEQ ID NO: 2661683 - RNA, 19 nt, Homo sapiens
  misc_RNA (1)...(19): siRNA sense strand
gagagugucaggaagguga

SEQ ID NO: 2661684 - RNA, 19 nt, Homo sapiens
  misc_RNA (1)...(19): siRNA sense strand
aggagggcgaggaggucua

SEQ ID NO: 2661685 - RNA, 19 nt, Homo sapiens
  misc_RNA (1)...(19): siRNA sense strand
cgaacaacaugcagguccu

SEQ ID NO: 2661686 - RNA, 19 nt, Homo sapiens
  misc_RNA (1)...(19): siRNA sense strand
cggaugauguggaggugcu

SEQ ID NO: 2661687 - RNA, 19 nt, Homo sapiens
  misc_RNA (1)...(19): siRNA sense strand
ccauggagcuugcugacca

SEQ ID NO: 2661688 - RNA, 19 nt, Homo sapiens
  misc_RNA (1)...(19): siRNA sense strand
gaggacagccagacggagu

SEQ ID NO: 2661689 - RNA, 19 nt, Homo sapiens
  misc_RNA (1)...(19): siRNA sense strand
gcucaaagggucaggccaa

SEQ ID NO: 2661690 - RNA, 19 nt, Homo sapiens
  misc_RNA (1)...(19): siRNA sense strand
gcaaggagcagaaggccaa

SEQ ID NO: 2661691 - RNA, 19 nt, Homo sapiens
  misc_RNA (1)...(19): siRNA sense strand
cagaugugcugcagggcua

SEQ ID NO: 2661692 - RNA, 19 nt, Homo sapiens
  misc_RNA (1)...(19): siRNA sense strand
acaucauggacaagaguaa

SEQ ID NO: 2661693 - RNA, 19 nt, Homo sapiens
  misc_RNA (1)...(19): siRNA sense strand
ccaucaacuucaaggccaa

SEQ ID NO: 2661694 - RNA, 19 nt, Homo sapiens
  misc_RNA (1)...(19): siRNA sense strand
acgacgagggcgagagcaa

SEQ ID NO: 2661695 - RNA, 19 nt, Homo sapiens
  misc_RNA (1)...(19): siRNA sense strand
gagcagaacaucauggaca

SEQ ID NO: 2661696 - RNA, 19 nt, Homo sapiens
  misc_RNA (1)...(19): siRNA sense strand
acgaagagggcgaggagga

SEQ ID NO: 2661697 - RNA, 19 nt, Homo sapiens
  misc_RNA (1)...(19): siRNA sense strand
uggccaagaucaagcccaa

SEQ ID NO: 2661698 - RNA, 19 nt, Homo sapiens
  misc_RNA (1)...(19): siRNA sense strand
cauucaacccagagaacau

SEQ ID NO: 2661699 - RNA, 19 nt, Homo sapiens
  misc_RNA (1)...(19): siRNA sense strand
ccaagaagcggcagaggca

SEQ ID NO: 2661700 - RNA, 19 nt, Homo sapiens
  misc_RNA (1)...(19): siRNA sense strand
ccuacgaggaggacgagaa

SEQ ID NO: 2661701 - RNA, 19 nt, Homo sapiens
  misc_RNA (1)...(19): siRNA sense strand
gcaaaagccaggugcagaa

SEQ ID NO: 2661702 - RNA, 19 nt, Homo sapiens
  misc_RNA (1)...(19): siRNA sense strand
aaagaggagccgugcgcua

SEQ ID NO: 2661703 - RNA, 19 nt, Homo sapiens
  misc_RNA (1)...(19): siRNA sense strand
gcgagagcaaggagcagaa

SEQ ID NO: 2661704 - RNA, 19 nt, Homo sapiens
  misc_RNA (1)...(19): siRNA sense strand
agcagaacaucauggacaa

SEQ ID NO: 2661705 - RNA, 19 nt, Homo sapiens
  misc_RNA (1)...(19): siRNA sense strand
ggaggaagggcaaagguca

SEQ ID NO: 2661706 - RNA, 19 nt, Homo sapiens
  misc_RNA (1)...(19): siRNA sense strand
acaaaggagaaaagaggaa

SEQ ID NO: 2661707 - RNA, 19 nt, Homo sapiens
  misc_RNA (1)...(19): siRNA sense strand
cugaagaugcucauggaga

SEQ ID NO: 2661708 - RNA, 19 nt, Homo sapiens
  misc_RNA (1)...(19): siRNA sense strand
cggagaugcugaaccguga

SEQ ID NO: 2661709 - RNA, 19 nt, Homo sapiens
  misc_RNA (1)...(19): siRNA sense strand
cugcugaauuacaggaagu

SEQ ID NO: 2661710 - RNA, 19 nt, Homo sapiens
  misc_RNA (1)...(19): siRNA sense strand
gugaagcagcugaagguca

SEQ ID NO: 2661711 - RNA, 19 nt, Homo sapiens
  misc_RNA (1)...(19): siRNA sense strand
ugaccaacaaggacgacua

SEQ ID NO: 2661712 - RNA, 19 nt, Homo sapiens
  misc_RNA (1)...(19): siRNA sense strand
aggcaggucuugggaggaa

SEQ ID NO: 2661713 - RNA, 19 nt, Homo sapiens
  misc_RNA (1)...(19): siRNA sense strand
agaacuggcccgagaucuu

SEQ ID NO: 2661714 - RNA, 19 nt, Homo sapiens
  misc_RNA (1)...(19): siRNA sense strand
ggagguucugagugacaua

SEQ ID NO: 2661715 - RNA, 19 nt, Homo sapiens
  misc_RNA (1)...(19): siRNA sense strand
agaucuuugucaaggugua

SEQ ID NO: 2661716 - RNA, 19 nt, Homo sapiens
  misc_RNA (1)...(19): siRNA sense strand
agaucaacuuccaggccuu

SEQ ID NO: 2661717 - RNA, 19 nt, Homo sapiens
  misc_RNA (1)...(19): siRNA sense strand
acuucaaggccaaggggaa

SEQ ID NO: 2661718 - RNA, 19 nt, Homo sapiens
  misc_RNA (1)...(19): siRNA sense strand
acgaagagcucgcggagag

SEQ ID NO: 2661719 - RNA, 19 nt, Homo sapiens
  misc_RNA (1)...(19): siRNA sense strand
gcuauaaggaggugcggcu

SEQ ID NO: 2661720 - RNA, 19 nt, Homo sapiens
  misc_RNA (1)...(19): siRNA sense strand
gugcagugucugugcgagu

SEQ ID NO: 2661721 - RNA, 19 nt, Homo sapiens
  misc_RNA (1)...(19): siRNA sense strand
acgaugagagugucaggaa

SEQ ID NO: 2661722 - RNA, 19 nt, Homo sapiens
  misc_RNA (1)...(19): siRNA sense strand
gagagugucaggaagguga

SEQ ID NO: 2661723 - RNA, 19 nt, Homo sapiens
  misc_RNA (1)...(19): siRNA sense strand
aggagggcgaggaggucua

SEQ ID NO: 2661724 - RNA, 19 nt, Homo sapiens
  misc_RNA (1)...(19): siRNA sense strand
cgaacaacaugcagguccu

SEQ ID NO: 2661725 - RNA, 19 nt, Homo sapiens
  misc_RNA (1)...(19): siRNA sense strand
cggaugauguggaggugcu

SEQ ID NO: 2661726 - RNA, 19 nt, Homo sapiens
  misc_RNA (1)...(19): siRNA sense strand
ccauggagcuugcugacca

SEQ ID NO: 2661727 - RNA, 19 nt, Homo sapiens
  misc_RNA (1)...(19): siRNA sense strand
gaggacagccagacggagu

SEQ ID NO: 2661728 - RNA, 19 nt, Homo sapiens
  misc_RNA (1)...(19): siRNA sense strand
gggcagucaaugagccaaa

SEQ ID NO: 2661729 - RNA, 19 nt, Homo sapiens
  misc_RNA (1)...(19): siRNA sense strand
uggagacgcugcugggcua

SEQ ID NO: 2661730 - RNA, 19 nt, Homo sapiens
  misc_RNA (1)...(19): siRNA sense strand
gggaagacacugcccggaa

SEQ ID NO: 2661731 - RNA, 19 nt, Homo sapiens
  misc_RNA (1)...(19): siRNA sense strand
ccgacuaccagcaggguca

SEQ ID NO: 2661732 - RNA, 19 nt, Homo sapiens
  misc_RNA (1)...(19): siRNA sense strand
cagugggauucuacggcaa

SEQ ID NO: 2661733 - RNA, 19 nt, Homo sapiens
  misc_RNA (1)...(19): siRNA sense strand
caguuuaagcccauggaca

SEQ ID NO: 2661734 - RNA, 19 nt, Homo sapiens
  misc_RNA (1)...(19): siRNA sense strand
ccggcaucgcagugggauu

SEQ ID NO: 2661735 - RNA, 19 nt, Homo sapiens
  misc_RNA (1)...(19): siRNA sense strand
gggcacagcagauggugga

SEQ ID NO: 2661736 - RNA, 19 nt, Homo sapiens
  misc_RNA (1)...(19): siRNA sense strand
aggcacugguggagaugca

SEQ ID NO: 2661737 - RNA, 19 nt, Homo sapiens
  misc_RNA (1)...(19): siRNA sense strand
gagccaaaguccaggccuc

SEQ ID NO: 2661738 - RNA, 19 nt, Homo sapiens
  misc_RNA (1)...(19): siRNA sense strand
gggaaucuggcuucgggaa

SEQ ID NO: 2661739 - RNA, 19 nt, Homo sapiens
  misc_RNA (1)...(19): siRNA sense strand
gggcagucaaugagccaaa

SEQ ID NO: 2661740 - RNA, 19 nt, Homo sapiens
  misc_RNA (1)...(19): siRNA sense strand
uggagacgcugcugggcua

SEQ ID NO: 2661741 - RNA, 19 nt, Homo sapiens
  misc_RNA (1)...(19): siRNA sense strand
gggaagacacugcccggaa

SEQ ID NO: 2661742 - RNA, 19 nt, Homo sapiens
  misc_RNA (1)...(19): siRNA sense strand
ccgacuaccagcaggguca

SEQ ID NO: 2661743 - RNA, 19 nt, Homo sapiens
  misc_RNA (1)...(19): siRNA sense strand
cagugggauucuacggcaa

SEQ ID NO: 2661744 - RNA, 19 nt, Homo sapiens
  misc_RNA (1)...(19): siRNA sense strand
caguuuaagcccauggaca

SEQ ID NO: 2661745 - RNA, 19 nt, Homo sapiens
  misc_RNA (1)...(19): siRNA sense strand
ccggcaucgcagugggauu

SEQ ID NO: 2661746 - RNA, 19 nt, Homo sapiens
  misc_RNA (1)...(19): siRNA sense strand
gggcacagcagauggugga

SEQ ID NO: 2661747 - RNA, 19 nt, Homo sapiens
  misc_RNA (1)...(19): siRNA sense strand
aggcacugguggagaugca

SEQ ID NO: 2661748 - RNA, 19 nt, Homo sapiens
  misc_RNA (1)...(19): siRNA sense strand
gagccaaaguccaggccuc

SEQ ID NO: 2661749 - RNA, 19 nt, Homo sapiens
  misc_RNA (1)...(19): siRNA sense strand
gggaaucuggcuucgggaa

SEQ ID NO: 2661750 - RNA, 19 nt, Homo sapiens
  misc_RNA (1)...(19): siRNA sense strand
gggaaguggcagaggagga

SEQ ID NO: 2661751 - RNA, 19 nt, Homo sapiens
  misc_RNA (1)...(19): siRNA sense strand
gggauggggaagagaguua

SEQ ID NO: 2661752 - RNA, 19 nt, Homo sapiens
  misc_RNA (1)...(19): siRNA sense strand
guucagugcugcaagguca

SEQ ID NO: 2661753 - RNA, 19 nt, Homo sapiens
  misc_RNA (1)...(19): siRNA sense strand
gggagauguucacgggcca

SEQ ID NO: 2661754 - RNA, 19 nt, Homo sapiens
  misc_RNA (1)...(19): siRNA sense strand
ccgcacaggaguucagcuu

SEQ ID NO: 2661755 - RNA, 19 nt, Homo sapiens
  misc_RNA (1)...(19): siRNA sense strand
ugguagaggcagcagcaga

SEQ ID NO: 2661756 - RNA, 19 nt, Homo sapiens
  misc_RNA (1)...(19): siRNA sense strand
gggaaguggcagaggagga

SEQ ID NO: 2661757 - RNA, 19 nt, Homo sapiens
  misc_RNA (1)...(19): siRNA sense strand
gggauggggaagagaguua

SEQ ID NO: 2661758 - RNA, 19 nt, Homo sapiens
  misc_RNA (1)...(19): siRNA sense strand
guucagugcugcaagguca

SEQ ID NO: 2661759 - RNA, 19 nt, Homo sapiens
  misc_RNA (1)...(19): siRNA sense strand
gggagauguucacgggcca

SEQ ID NO: 2661760 - RNA, 19 nt, Homo sapiens
  misc_RNA (1)...(19): siRNA sense strand
ccgcacaggaguucagcuu

SEQ ID NO: 2661761 - RNA, 19 nt, Homo sapiens
  misc_RNA (1)...(19): siRNA sense strand
ugguagaggcagcagcaga

SEQ ID NO: 2661762 - RNA, 19 nt, Homo sapiens
  misc_RNA (1)...(19): siRNA sense strand
gaaauaagcucuuugugga

SEQ ID NO: 2661763 - RNA, 19 nt, Homo sapiens
  misc_RNA (1)...(19): siRNA sense strand
aggacgaggagcugaagaa

SEQ ID NO: 2661764 - RNA, 19 nt, Homo sapiens
  misc_RNA (1)...(19): siRNA sense strand
acaaguuaccagugaccua

SEQ ID NO: 2661765 - RNA, 19 nt, Homo sapiens
  misc_RNA (1)...(19): siRNA sense strand
ccagggagauccaggacga

SEQ ID NO: 2661766 - RNA, 19 nt, Homo sapiens
  misc_RNA (1)...(19): siRNA sense strand
gcaccguggagcagaucaa

SEQ ID NO: 2661767 - RNA, 19 nt, Homo sapiens
  misc_RNA (1)...(19): siRNA sense strand
ccacagagcugcugacccu

SEQ ID NO: 2661768 - RNA, 19 nt, Homo sapiens
  misc_RNA (1)...(19): siRNA sense strand
ccuacaaguuacaagggca

SEQ ID NO: 2661769 - RNA, 19 nt, Homo sapiens
  misc_RNA (1)...(19): siRNA sense strand
cgaacaguuuagccggcaa

SEQ ID NO: 2661770 - RNA, 19 nt, Homo sapiens
  misc_RNA (1)...(19): siRNA sense strand
ccguggagcagaucaacaa

SEQ ID NO: 2661771 - RNA, 19 nt, Homo sapiens
  misc_RNA (1)...(19): siRNA sense strand
gcgaauagacccugccucu

SEQ ID NO: 2661772 - RNA, 19 nt, Homo sapiens
  misc_RNA (1)...(19): siRNA sense strand
uggcccagggugacagaaa

SEQ ID NO: 2661773 - RNA, 19 nt, Homo sapiens
  misc_RNA (1)...(19): siRNA sense strand
gccccaaggaugagucaaa

SEQ ID NO: 2661774 - RNA, 19 nt, Homo sapiens
  misc_RNA (1)...(19): siRNA sense strand
ggcugaacgugcaggccuu

SEQ ID NO: 2661775 - RNA, 19 nt, Homo sapiens
  misc_RNA (1)...(19): siRNA sense strand
gcgcccagccagugaucau

SEQ ID NO: 2661776 - RNA, 19 nt, Homo sapiens
  misc_RNA (1)...(19): siRNA sense strand
uggccaaggucgugguccu

SEQ ID NO: 2661777 - RNA, 19 nt, Homo sapiens
  misc_RNA (1)...(19): siRNA sense strand
gaaauaagcucuuugugga

SEQ ID NO: 2661778 - RNA, 19 nt, Homo sapiens
  misc_RNA (1)...(19): siRNA sense strand
aggacgaggagcugaagaa

SEQ ID NO: 2661779 - RNA, 19 nt, Homo sapiens
  misc_RNA (1)...(19): siRNA sense strand
acaaguuaccagugaccua

SEQ ID NO: 2661780 - RNA, 19 nt, Homo sapiens
  misc_RNA (1)...(19): siRNA sense strand
ccagggagauccaggacga

SEQ ID NO: 2661781 - RNA, 19 nt, Homo sapiens
  misc_RNA (1)...(19): siRNA sense strand
gcaccguggagcagaucaa

SEQ ID NO: 2661782 - RNA, 19 nt, Homo sapiens
  misc_RNA (1)...(19): siRNA sense strand
ccacagagcugcugacccu

SEQ ID NO: 2661783 - RNA, 19 nt, Homo sapiens
  misc_RNA (1)...(19): siRNA sense strand
ccuacaaguuacaagggca

SEQ ID NO: 2661784 - RNA, 19 nt, Homo sapiens
  misc_RNA (1)...(19): siRNA sense strand
cgaacaguuuagccggcaa

SEQ ID NO: 2661785 - RNA, 19 nt, Homo sapiens
  misc_RNA (1)...(19): siRNA sense strand
ccguggagcagaucaacaa

SEQ ID NO: 2661786 - RNA, 19 nt, Homo sapiens
  misc_RNA (1)...(19): siRNA sense strand
gcgaauagacccugccucu

SEQ ID NO: 2661787 - RNA, 19 nt, Homo sapiens
  misc_RNA (1)...(19): siRNA sense strand
uggcccagggugacagaaa

SEQ ID NO: 2661788 - RNA, 19 nt, Homo sapiens
  misc_RNA (1)...(19): siRNA sense strand
gccccaaggaugagucaaa

SEQ ID NO: 2661789 - RNA, 19 nt, Homo sapiens
  misc_RNA (1)...(19): siRNA sense strand
ggcugaacgugcaggccuu

SEQ ID NO: 2661790 - RNA, 19 nt, Homo sapiens
  misc_RNA (1)...(19): siRNA sense strand
gcgcccagccagugaucau

SEQ ID NO: 2661791 - RNA, 19 nt, Homo sapiens
  misc_RNA (1)...(19): siRNA sense strand
uggccaaggucgugguccu

SEQ ID NO: 2661792 - RNA, 19 nt, Homo sapiens
  misc_RNA (1)...(19): siRNA sense strand
ggaagaagaagaaagggaa

SEQ ID NO: 2661793 - RNA, 19 nt, Homo sapiens
  misc_RNA (1)...(19): siRNA sense strand
gcaagaaggaggagcggau

SEQ ID NO: 2661794 - RNA, 19 nt, Homo sapiens
  misc_RNA (1)...(19): siRNA sense strand
ugguacagcuggaggccaa

SEQ ID NO: 2661795 - RNA, 19 nt, Homo sapiens
  misc_RNA (1)...(19): siRNA sense strand
ggaagaaagaggagcggca

SEQ ID NO: 2661796 - RNA, 19 nt, Homo sapiens
  misc_RNA (1)...(19): siRNA sense strand
agacacugguggaggccaa

SEQ ID NO: 2661797 - RNA, 19 nt, Homo sapiens
  misc_RNA (1)...(19): siRNA sense strand
aggaggagcucgaggagga

SEQ ID NO: 2661798 - RNA, 19 nt, Homo sapiens
  misc_RNA (1)...(19): siRNA sense strand
acucagagagcgaggucaa

SEQ ID NO: 2661799 - RNA, 19 nt, Homo sapiens
  misc_RNA (1)...(19): siRNA sense strand
ccaccaaggagcuggccaa

SEQ ID NO: 2661800 - RNA, 19 nt, Homo sapiens
  misc_RNA (1)...(19): siRNA sense strand
acucagaggaagacgaaga

SEQ ID NO: 2661801 - RNA, 19 nt, Homo sapiens
  misc_RNA (1)...(19): siRNA sense strand
aggaagaagaagaaaggga

SEQ ID NO: 2661802 - RNA, 19 nt, Homo sapiens
  misc_RNA (1)...(19): siRNA sense strand
aggaagaaccgcuggcuga

SEQ ID NO: 2661803 - RNA, 19 nt, Homo sapiens
  misc_RNA (1)...(19): siRNA sense strand
gguugaaggcgcaggagca

SEQ ID NO: 2661804 - RNA, 19 nt, Homo sapiens
  misc_RNA (1)...(19): siRNA sense strand
acacaaaagggcagccaaa

SEQ ID NO: 2661805 - RNA, 19 nt, Homo sapiens
  misc_RNA (1)...(19): siRNA sense strand
cugaaauccuccagagaag

SEQ ID NO: 2661806 - RNA, 19 nt, Homo sapiens
  misc_RNA (1)...(19): siRNA sense strand
ugagcugggagcagggaua

SEQ ID NO: 2661807 - RNA, 19 nt, Homo sapiens
  misc_RNA (1)...(19): siRNA sense strand
gagcauaaauggaaacccu

SEQ ID NO: 2661808 - RNA, 19 nt, Homo sapiens
  misc_RNA (1)...(19): siRNA sense strand
aggaggaggacgaggagga

SEQ ID NO: 2661809 - RNA, 19 nt, Homo sapiens
  misc_RNA (1)...(19): siRNA sense strand
cuuauaaaguacaguggca

SEQ ID NO: 2661810 - RNA, 19 nt, Homo sapiens
  misc_RNA (1)...(19): siRNA sense strand
uggcugagcgggaggugaa

SEQ ID NO: 2661811 - RNA, 19 nt, Homo sapiens
  misc_RNA (1)...(19): siRNA sense strand
acuuggaguuggagaagga

SEQ ID NO: 2661812 - RNA, 19 nt, Homo sapiens
  misc_RNA (1)...(19): siRNA sense strand
gaagaaagggaaagaggcu

SEQ ID NO: 2661813 - RNA, 19 nt, Homo sapiens
  misc_RNA (1)...(19): siRNA sense strand
aagaagaagaagauggcca

SEQ ID NO: 2661814 - RNA, 19 nt, Homo sapiens
  misc_RNA (1)...(19): siRNA sense strand
ccaagaagagagagggcgu

SEQ ID NO: 2661815 - RNA, 19 nt, Homo sapiens
  misc_RNA (1)...(19): siRNA sense strand
uggcugaguccaagaccaa

SEQ ID NO: 2661816 - RNA, 19 nt, Homo sapiens
  misc_RNA (1)...(19): siRNA sense strand
uguguagcaugguggcaaa

SEQ ID NO: 2661817 - RNA, 19 nt, Homo sapiens
  misc_RNA (1)...(19): siRNA sense strand
ccaagcuggcgguggagaa

SEQ ID NO: 2661818 - RNA, 19 nt, Homo sapiens
  misc_RNA (1)...(19): siRNA sense strand
agaagaagaaagggaaaga

SEQ ID NO: 2661819 - RNA, 19 nt, Homo sapiens
  misc_RNA (1)...(19): siRNA sense strand
agaagaagauggccagcga

SEQ ID NO: 2661820 - RNA, 19 nt, Homo sapiens
  misc_RNA (1)...(19): siRNA sense strand
aggugaaggcagaggugga

SEQ ID NO: 2661821 - RNA, 19 nt, Homo sapiens
  misc_RNA (1)...(19): siRNA sense strand
acaggaaggcgcuggccaa

SEQ ID NO: 2661822 - RNA, 19 nt, Homo sapiens
  misc_RNA (1)...(19): siRNA sense strand
auacggacucagaggaaga

SEQ ID NO: 2661823 - RNA, 19 nt, Homo sapiens
  misc_RNA (1)...(19): siRNA sense strand
gcucucugucgcugaguaa

SEQ ID NO: 2661824 - RNA, 19 nt, Homo sapiens
  misc_RNA (1)...(19): siRNA sense strand
acaaggagaagcagcguga

SEQ ID NO: 2661825 - RNA, 19 nt, Homo sapiens
  misc_RNA (1)...(19): siRNA sense strand
gaccaggagcaguuggcaa

SEQ ID NO: 2661826 - RNA, 19 nt, Homo sapiens
  misc_RNA (1)...(19): siRNA sense strand
aagacuuggaguuggagaa

SEQ ID NO: 2661827 - RNA, 19 nt, Homo sapiens
  misc_RNA (1)...(19): siRNA sense strand
ggaagauggaggugggguu

SEQ ID NO: 2661828 - RNA, 19 nt, Homo sapiens
  misc_RNA (1)...(19): siRNA sense strand
gcaaagaacagcaaggcag

SEQ ID NO: 2661829 - RNA, 19 nt, Homo sapiens
  misc_RNA (1)...(19): siRNA sense strand
ccauguggcucgcuggaca

SEQ ID NO: 2661830 - RNA, 19 nt, Homo sapiens
  misc_RNA (1)...(19): siRNA sense strand
gcgaggucaaggugcgcaa

SEQ ID NO: 2661831 - RNA, 19 nt, Homo sapiens
  misc_RNA (1)...(19): siRNA sense strand
aggaaggaccccaggaaga

SEQ ID NO: 2661832 - RNA, 19 nt, Homo sapiens
  misc_RNA (1)...(19): siRNA sense strand
aggagcaguuggcaagcaa

SEQ ID NO: 2661833 - RNA, 19 nt, Homo sapiens
  misc_RNA (1)...(19): siRNA sense strand
aagaaagaggagcggcaga

SEQ ID NO: 2661834 - RNA, 19 nt, Homo sapiens
  misc_RNA (1)...(19): siRNA sense strand
aggaggacgaggaggagga

SEQ ID NO: 2661835 - RNA, 19 nt, Homo sapiens
  misc_RNA (1)...(19): siRNA sense strand
cgguacugaccaugugcaa

SEQ ID NO: 2661836 - RNA, 19 nt, Homo sapiens
  misc_RNA (1)...(19): siRNA sense strand
agaguaaggagcuggcuga

SEQ ID NO: 2661837 - RNA, 19 nt, Homo sapiens
  misc_RNA (1)...(19): siRNA sense strand
agggaaagaggcugggcca

SEQ ID NO: 2661838 - RNA, 19 nt, Homo sapiens
  misc_RNA (1)...(19): siRNA sense strand
ggccaggaggagacgguuu

SEQ ID NO: 2661839 - RNA, 19 nt, Homo sapiens
  misc_RNA (1)...(19): siRNA sense strand
uagaaaugucagacuguga

SEQ ID NO: 2661840 - RNA, 19 nt, Homo sapiens
  misc_RNA (1)...(19): siRNA sense strand
gagaagaaagacuuggagu

SEQ ID NO: 2661841 - RNA, 19 nt, Homo sapiens
  misc_RNA (1)...(19): siRNA sense strand
acaccgacucagagagcga

SEQ ID NO: 2661842 - RNA, 19 nt, Homo sapiens
  misc_RNA (1)...(19): siRNA sense strand
cccugagcauaaauggaaa

SEQ ID NO: 2661843 - RNA, 19 nt, Homo sapiens
  misc_RNA (1)...(19): siRNA sense strand
gggugaggcagaagugcga

SEQ ID NO: 2661844 - RNA, 19 nt, Homo sapiens
  misc_RNA (1)...(19): siRNA sense strand
gggaugaacaugaggccuc

SEQ ID NO: 2661845 - RNA, 19 nt, Homo sapiens
  misc_RNA (1)...(19): siRNA sense strand
ggaagaagaagaaagggaa

SEQ ID NO: 2661846 - RNA, 19 nt, Homo sapiens
  misc_RNA (1)...(19): siRNA sense strand
gcaagaaggaggagcggau

SEQ ID NO: 2661847 - RNA, 19 nt, Homo sapiens
  misc_RNA (1)...(19): siRNA sense strand
ugguacagcuggaggccaa

SEQ ID NO: 2661848 - RNA, 19 nt, Homo sapiens
  misc_RNA (1)...(19): siRNA sense strand
ggaagaaagaggagcggca

SEQ ID NO: 2661849 - RNA, 19 nt, Homo sapiens
  misc_RNA (1)...(19): siRNA sense strand
agacacugguggaggccaa

SEQ ID NO: 2661850 - RNA, 19 nt, Homo sapiens
  misc_RNA (1)...(19): siRNA sense strand
aggaggagcucgaggagga

SEQ ID NO: 2661851 - RNA, 19 nt, Homo sapiens
  misc_RNA (1)...(19): siRNA sense strand
acucagagagcgaggucaa

SEQ ID NO: 2661852 - RNA, 19 nt, Homo sapiens
  misc_RNA (1)...(19): siRNA sense strand
ccaccaaggagcuggccaa

SEQ ID NO: 2661853 - RNA, 19 nt, Homo sapiens
  misc_RNA (1)...(19): siRNA sense strand
acucagaggaagacgaaga

SEQ ID NO: 2661854 - RNA, 19 nt, Homo sapiens
  misc_RNA (1)...(19): siRNA sense strand
aggaagaagaagaaaggga

SEQ ID NO: 2661855 - RNA, 19 nt, Homo sapiens
  misc_RNA (1)...(19): siRNA sense strand
aggaagaaccgcuggcuga

SEQ ID NO: 2661856 - RNA, 19 nt, Homo sapiens
  misc_RNA (1)...(19): siRNA sense strand
gguugaaggcgcaggagca

SEQ ID NO: 2661857 - RNA, 19 nt, Homo sapiens
  misc_RNA (1)...(19): siRNA sense strand
acacaaaagggcagccaaa

SEQ ID NO: 2661858 - RNA, 19 nt, Homo sapiens
  misc_RNA (1)...(19): siRNA sense strand
cugaaauccuccagagaag

SEQ ID NO: 2661859 - RNA, 19 nt, Homo sapiens
  misc_RNA (1)...(19): siRNA sense strand
ugagcugggagcagggaua

SEQ ID NO: 2661860 - RNA, 19 nt, Homo sapiens
  misc_RNA (1)...(19): siRNA sense strand
gagcauaaauggaaacccu

SEQ ID NO: 2661861 - RNA, 19 nt, Homo sapiens
  misc_RNA (1)...(19): siRNA sense strand
aggaggaggacgaggagga

SEQ ID NO: 2661862 - RNA, 19 nt, Homo sapiens
  misc_RNA (1)...(19): siRNA sense strand
cuuauaaaguacaguggca

SEQ ID NO: 2661863 - RNA, 19 nt, Homo sapiens
  misc_RNA (1)...(19): siRNA sense strand
uggcugagcgggaggugaa

SEQ ID NO: 2661864 - RNA, 19 nt, Homo sapiens
  misc_RNA (1)...(19): siRNA sense strand
acuuggaguuggagaagga

SEQ ID NO: 2661865 - RNA, 19 nt, Homo sapiens
  misc_RNA (1)...(19): siRNA sense strand
gaagaaagggaaagaggcu

SEQ ID NO: 2661866 - RNA, 19 nt, Homo sapiens
  misc_RNA (1)...(19): siRNA sense strand
aagaagaagaagauggcca

SEQ ID NO: 2661867 - RNA, 19 nt, Homo sapiens
  misc_RNA (1)...(19): siRNA sense strand
ccaagaagagagagggcgu

SEQ ID NO: 2661868 - RNA, 19 nt, Homo sapiens
  misc_RNA (1)...(19): siRNA sense strand
uggcugaguccaagaccaa

SEQ ID NO: 2661869 - RNA, 19 nt, Homo sapiens
  misc_RNA (1)...(19): siRNA sense strand
uguguagcaugguggcaaa

SEQ ID NO: 2661870 - RNA, 19 nt, Homo sapiens
  misc_RNA (1)...(19): siRNA sense strand
ccaagcuggcgguggagaa

SEQ ID NO: 2661871 - RNA, 19 nt, Homo sapiens
  misc_RNA (1)...(19): siRNA sense strand
agaagaagaaagggaaaga

SEQ ID NO: 2661872 - RNA, 19 nt, Homo sapiens
  misc_RNA (1)...(19): siRNA sense strand
agaagaagauggccagcga

SEQ ID NO: 2661873 - RNA, 19 nt, Homo sapiens
  misc_RNA (1)...(19): siRNA sense strand
aggugaaggcagaggugga

SEQ ID NO: 2661874 - RNA, 19 nt, Homo sapiens
  misc_RNA (1)...(19): siRNA sense strand
acaggaaggcgcuggccaa

SEQ ID NO: 2661875 - RNA, 19 nt, Homo sapiens
  misc_RNA (1)...(19): siRNA sense strand
auacggacucagaggaaga

SEQ ID NO: 2661876 - RNA, 19 nt, Homo sapiens
  misc_RNA (1)...(19): siRNA sense strand
gcucucugucgcugaguaa

SEQ ID NO: 2661877 - RNA, 19 nt, Homo sapiens
  misc_RNA (1)...(19): siRNA sense strand
acaaggagaagcagcguga

SEQ ID NO: 2661878 - RNA, 19 nt, Homo sapiens
  misc_RNA (1)...(19): siRNA sense strand
gaccaggagcaguuggcaa

SEQ ID NO: 2661879 - RNA, 19 nt, Homo sapiens
  misc_RNA (1)...(19): siRNA sense strand
aagacuuggaguuggagaa

SEQ ID NO: 2661880 - RNA, 19 nt, Homo sapiens
  misc_RNA (1)...(19): siRNA sense strand
ggaagauggaggugggguu

SEQ ID NO: 2661881 - RNA, 19 nt, Homo sapiens
  misc_RNA (1)...(19): siRNA sense strand
gcaaagaacagcaaggcag

SEQ ID NO: 2661882 - RNA, 19 nt, Homo sapiens
  misc_RNA (1)...(19): siRNA sense strand
ccauguggcucgcuggaca

SEQ ID NO: 2661883 - RNA, 19 nt, Homo sapiens
  misc_RNA (1)...(19): siRNA sense strand
gcgaggucaaggugcgcaa

SEQ ID NO: 2661884 - RNA, 19 nt, Homo sapiens
  misc_RNA (1)...(19): siRNA sense strand
aggaaggaccccaggaaga

SEQ ID NO: 2661885 - RNA, 19 nt, Homo sapiens
  misc_RNA (1)...(19): siRNA sense strand
aggagcaguuggcaagcaa

SEQ ID NO: 2661886 - RNA, 19 nt, Homo sapiens
  misc_RNA (1)...(19): siRNA sense strand
aagaaagaggagcggcaga

SEQ ID NO: 2661887 - RNA, 19 nt, Homo sapiens
  misc_RNA (1)...(19): siRNA sense strand
aggaggacgaggaggagga

SEQ ID NO: 2661888 - RNA, 19 nt, Homo sapiens
  misc_RNA (1)...(19): siRNA sense strand
cgguacugaccaugugcaa

SEQ ID NO: 2661889 - RNA, 19 nt, Homo sapiens
  misc_RNA (1)...(19): siRNA sense strand
agaguaaggagcuggcuga

SEQ ID NO: 2661890 - RNA, 19 nt, Homo sapiens
  misc_RNA (1)...(19): siRNA sense strand
agggaaagaggcugggcca

SEQ ID NO: 2661891 - RNA, 19 nt, Homo sapiens
  misc_RNA (1)...(19): siRNA sense strand
ggccaggaggagacgguuu

SEQ ID NO: 2661892 - RNA, 19 nt, Homo sapiens
  misc_RNA (1)...(19): siRNA sense strand
uagaaaugucagacuguga

SEQ ID NO: 2661893 - RNA, 19 nt, Homo sapiens
  misc_RNA (1)...(19): siRNA sense strand
gagaagaaagacuuggagu

SEQ ID NO: 2661894 - RNA, 19 nt, Homo sapiens
  misc_RNA (1)...(19): siRNA sense strand
acaccgacucagagagcga

SEQ ID NO: 2661895 - RNA, 19 nt, Homo sapiens
  misc_RNA (1)...(19): siRNA sense strand
cccugagcauaaauggaaa

SEQ ID NO: 2661896 - RNA, 19 nt, Homo sapiens
  misc_RNA (1)...(19): siRNA sense strand
gggugaggcagaagugcga

SEQ ID NO: 2661897 - RNA, 19 nt, Homo sapiens
  misc_RNA (1)...(19): siRNA sense strand
gggaugaacaugaggccuc

SEQ ID NO: 2661898 - RNA, 19 nt, Homo sapiens
  misc_RNA (1)...(19): siRNA sense strand
gaauagagaagaagaacua

SEQ ID NO: 2661899 - RNA, 19 nt, Homo sapiens
  misc_RNA (1)...(19): siRNA sense strand
agaaagaguuugaugugua

SEQ ID NO: 2661900 - RNA, 19 nt, Homo sapiens
  misc_RNA (1)...(19): siRNA sense strand
ccagaauagagaagaagaa

SEQ ID NO: 2661901 - RNA, 19 nt, Homo sapiens
  misc_RNA (1)...(19): siRNA sense strand
gggagugguuucagggaga

SEQ ID NO: 2661902 - RNA, 19 nt, Homo sapiens
  misc_RNA (1)...(19): siRNA sense strand
gaaagaguuugauguguaa

SEQ ID NO: 2661903 - RNA, 19 nt, Homo sapiens
  misc_RNA (1)...(19): siRNA sense strand
gggagccaguagugagaaa

SEQ ID NO: 2661904 - RNA, 19 nt, Homo sapiens
  misc_RNA (1)...(19): siRNA sense strand
aagaaagacuggaccggaa

SEQ ID NO: 2661905 - RNA, 19 nt, Homo sapiens
  misc_RNA (1)...(19): siRNA sense strand
gaccaacauuugagccaua

SEQ ID NO: 2661906 - RNA, 19 nt, Homo sapiens
  misc_RNA (1)...(19): siRNA sense strand
acacgugacuugugcagaa

SEQ ID NO: 2661907 - RNA, 19 nt, Homo sapiens
  misc_RNA (1)...(19): siRNA sense strand
gaucggacuuugucagcaa

SEQ ID NO: 2661908 - RNA, 19 nt, Homo sapiens
  misc_RNA (1)...(19): siRNA sense strand
gauggaggaggaagagaua

SEQ ID NO: 2661909 - RNA, 19 nt, Homo sapiens
  misc_RNA (1)...(19): siRNA sense strand
guguugggagugugagaaa

SEQ ID NO: 2661910 - RNA, 19 nt, Homo sapiens
  misc_RNA (1)...(19): siRNA sense strand
ccuuacaaguguugggagu

SEQ ID NO: 2661911 - RNA, 19 nt, Homo sapiens
  misc_RNA (1)...(19): siRNA sense strand
augugaugcuggagaucua

SEQ ID NO: 2661912 - RNA, 19 nt, Homo sapiens
  misc_RNA (1)...(19): siRNA sense strand
ggauggaggaggaagagau

SEQ ID NO: 2661913 - RNA, 19 nt, Homo sapiens
  misc_RNA (1)...(19): siRNA sense strand
gggaaagccuugugcugca

SEQ ID NO: 2661914 - RNA, 19 nt, Homo sapiens
  misc_RNA (1)...(19): siRNA sense strand
gagaaacccgcuagagaca

SEQ ID NO: 2661915 - RNA, 19 nt, Homo sapiens
  misc_RNA (1)...(19): siRNA sense strand
gcuagagacagaaguggua

SEQ ID NO: 2661916 - RNA, 19 nt, Homo sapiens
  misc_RNA (1)...(19): siRNA sense strand
uuuccagaauagagaagaa

SEQ ID NO: 2661917 - RNA, 19 nt, Homo sapiens
  misc_RNA (1)...(19): siRNA sense strand
cauggauggaggaggaaga

SEQ ID NO: 2661918 - RNA, 19 nt, Homo sapiens
  misc_RNA (1)...(19): siRNA sense strand
agaaagacuggaccggaaa

SEQ ID NO: 2661919 - RNA, 19 nt, Homo sapiens
  misc_RNA (1)...(19): siRNA sense strand
gagauaaggacguggagcu

SEQ ID NO: 2661920 - RNA, 19 nt, Homo sapiens
  misc_RNA (1)...(19): siRNA sense strand
aggagaaacccgcuagaga

SEQ ID NO: 2661921 - RNA, 19 nt, Homo sapiens
  misc_RNA (1)...(19): siRNA sense strand
cagcauagcaagcuuguuu

SEQ ID NO: 2661922 - RNA, 19 nt, Homo sapiens
  misc_RNA (1)...(19): siRNA sense strand
gaacucacacaaaggagaa

SEQ ID NO: 2661923 - RNA, 19 nt, Homo sapiens
  misc_RNA (1)...(19): siRNA sense strand
gcacaaauccuuuaacugu

SEQ ID NO: 2661924 - RNA, 19 nt, Homo sapiens
  misc_RNA (1)...(19): siRNA sense strand
augcacgaagugugggaaa

SEQ ID NO: 2661925 - RNA, 19 nt, Homo sapiens
  misc_RNA (1)...(19): siRNA sense strand
uagagacagaagugguaaa

SEQ ID NO: 2661926 - RNA, 19 nt, Homo sapiens
  misc_RNA (1)...(19): siRNA sense strand
cagaagaaguuuggcaagu

SEQ ID NO: 2661927 - RNA, 19 nt, Homo sapiens
  misc_RNA (1)...(19): siRNA sense strand
ggaggagauuucagugcga

SEQ ID NO: 2661928 - RNA, 19 nt, Homo sapiens
  misc_RNA (1)...(19): siRNA sense strand
gggaaugcggaaaggccuu

SEQ ID NO: 2661929 - RNA, 19 nt, Homo sapiens
  misc_RNA (1)...(19): siRNA sense strand
cgugacuugugcagaaaga

SEQ ID NO: 2661930 - RNA, 19 nt, Homo sapiens
  misc_RNA (1)...(19): siRNA sense strand
gggacauacacguguggga

SEQ ID NO: 2661931 - RNA, 19 nt, Homo sapiens
  misc_RNA (1)...(19): siRNA sense strand
ggaacucacacaaaggaga

SEQ ID NO: 2661932 - RNA, 19 nt, Homo sapiens
  misc_RNA (1)...(19): siRNA sense strand
ggaaagaguggcagcagcu

SEQ ID NO: 2661933 - RNA, 19 nt, Homo sapiens
  misc_RNA (1)...(19): siRNA sense strand
agaauagagaagaagaacu

SEQ ID NO: 2661934 - RNA, 19 nt, Homo sapiens
  misc_RNA (1)...(19): siRNA sense strand
cccagaagaaguuuggcaa

SEQ ID NO: 2661935 - RNA, 19 nt, Homo sapiens
  misc_RNA (1)...(19): siRNA sense strand
gccagauagccaacagcaa

SEQ ID NO: 2661936 - RNA, 19 nt, Homo sapiens
  misc_RNA (1)...(19): siRNA sense strand
ucaugaauguaacgaacuu

SEQ ID NO: 2661937 - RNA, 19 nt, Homo sapiens
  misc_RNA (1)...(19): siRNA sense strand
gaaacccgcuagagacaga

SEQ ID NO: 2661938 - RNA, 19 nt, Homo sapiens
  misc_RNA (1)...(19): siRNA sense strand
gaagaagaacuauggccca

SEQ ID NO: 2661939 - RNA, 19 nt, Homo sapiens
  misc_RNA (1)...(19): siRNA sense strand
gaggaagagauaaggacgu

SEQ ID NO: 2661940 - RNA, 19 nt, Homo sapiens
  misc_RNA (1)...(19): siRNA sense strand
aauguaacgaacuuggaaa

SEQ ID NO: 2661941 - RNA, 19 nt, Homo sapiens
  misc_RNA (1)...(19): siRNA sense strand
aggaugugaugcuggagau

SEQ ID NO: 2661942 - RNA, 19 nt, Homo sapiens
  misc_RNA (1)...(19): siRNA sense strand
acagcaacacgaagaccaa

SEQ ID NO: 2661943 - RNA, 19 nt, Homo sapiens
  misc_RNA (1)...(19): siRNA sense strand
ggaccggaaaugagcuuca

SEQ ID NO: 2661944 - RNA, 19 nt, Homo sapiens
  misc_RNA (1)...(19): siRNA sense strand
guugcuacccagccagaua

SEQ ID NO: 2661945 - RNA, 19 nt, Homo sapiens
  misc_RNA (1)...(19): siRNA sense strand
cagauagccaacagcaaca

SEQ ID NO: 2661946 - RNA, 19 nt, Homo sapiens
  misc_RNA (1)...(19): siRNA sense strand
gaauagagaagaagaacua

SEQ ID NO: 2661947 - RNA, 19 nt, Homo sapiens
  misc_RNA (1)...(19): siRNA sense strand
agaaagaguuugaugugua

SEQ ID NO: 2661948 - RNA, 19 nt, Homo sapiens
  misc_RNA (1)...(19): siRNA sense strand
ccagaauagagaagaagaa

SEQ ID NO: 2661949 - RNA, 19 nt, Homo sapiens
  misc_RNA (1)...(19): siRNA sense strand
gggagugguuucagggaga

SEQ ID NO: 2661950 - RNA, 19 nt, Homo sapiens
  misc_RNA (1)...(19): siRNA sense strand
gaaagaguuugauguguaa

SEQ ID NO: 2661951 - RNA, 19 nt, Homo sapiens
  misc_RNA (1)...(19): siRNA sense strand
gggagccaguagugagaaa

SEQ ID NO: 2661952 - RNA, 19 nt, Homo sapiens
  misc_RNA (1)...(19): siRNA sense strand
aagaaagacuggaccggaa

SEQ ID NO: 2661953 - RNA, 19 nt, Homo sapiens
  misc_RNA (1)...(19): siRNA sense strand
gaccaacauuugagccaua

SEQ ID NO: 2661954 - RNA, 19 nt, Homo sapiens
  misc_RNA (1)...(19): siRNA sense strand
acacgugacuugugcagaa

SEQ ID NO: 2661955 - RNA, 19 nt, Homo sapiens
  misc_RNA (1)...(19): siRNA sense strand
gaucggacuuugucagcaa

SEQ ID NO: 2661956 - RNA, 19 nt, Homo sapiens
  misc_RNA (1)...(19): siRNA sense strand
gauggaggaggaagagaua

SEQ ID NO: 2661957 - RNA, 19 nt, Homo sapiens
  misc_RNA (1)...(19): siRNA sense strand
guguugggagugugagaaa

SEQ ID NO: 2661958 - RNA, 19 nt, Homo sapiens
  misc_RNA (1)...(19): siRNA sense strand
ccuuacaaguguugggagu

SEQ ID NO: 2661959 - RNA, 19 nt, Homo sapiens
  misc_RNA (1)...(19): siRNA sense strand
augugaugcuggagaucua

SEQ ID NO: 2661960 - RNA, 19 nt, Homo sapiens
  misc_RNA (1)...(19): siRNA sense strand
ggauggaggaggaagagau

SEQ ID NO: 2661961 - RNA, 19 nt, Homo sapiens
  misc_RNA (1)...(19): siRNA sense strand
gggaaagccuugugcugca

SEQ ID NO: 2661962 - RNA, 19 nt, Homo sapiens
  misc_RNA (1)...(19): siRNA sense strand
gagaaacccgcuagagaca

SEQ ID NO: 2661963 - RNA, 19 nt, Homo sapiens
  misc_RNA (1)...(19): siRNA sense strand
gcuagagacagaaguggua

SEQ ID NO: 2661964 - RNA, 19 nt, Homo sapiens
  misc_RNA (1)...(19): siRNA sense strand
uuuccagaauagagaagaa

SEQ ID NO: 2661965 - RNA, 19 nt, Homo sapiens
  misc_RNA (1)...(19): siRNA sense strand
cauggauggaggaggaaga

SEQ ID NO: 2661966 - RNA, 19 nt, Homo sapiens
  misc_RNA (1)...(19): siRNA sense strand
agaaagacuggaccggaaa

SEQ ID NO: 2661967 - RNA, 19 nt, Homo sapiens
  misc_RNA (1)...(19): siRNA sense strand
gagauaaggacguggagcu

SEQ ID NO: 2661968 - RNA, 19 nt, Homo sapiens
  misc_RNA (1)...(19): siRNA sense strand
aggagaaacccgcuagaga

SEQ ID NO: 2661969 - RNA, 19 nt, Homo sapiens
  misc_RNA (1)...(19): siRNA sense strand
cagcauagcaagcuuguuu

SEQ ID NO: 2661970 - RNA, 19 nt, Homo sapiens
  misc_RNA (1)...(19): siRNA sense strand
gaacucacacaaaggagaa

SEQ ID NO: 2661971 - RNA, 19 nt, Homo sapiens
  misc_RNA (1)...(19): siRNA sense strand
gcacaaauccuuuaacugu

SEQ ID NO: 2661972 - RNA, 19 nt, Homo sapiens
  misc_RNA (1)...(19): siRNA sense strand
augcacgaagugugggaaa

SEQ ID NO: 2661973 - RNA, 19 nt, Homo sapiens
  misc_RNA (1)...(19): siRNA sense strand
uagagacagaagugguaaa

SEQ ID NO: 2661974 - RNA, 19 nt, Homo sapiens
  misc_RNA (1)...(19): siRNA sense strand
cagaagaaguuuggcaagu

SEQ ID NO: 2661975 - RNA, 19 nt, Homo sapiens
  misc_RNA (1)...(19): siRNA sense strand
ggaggagauuucagugcga

SEQ ID NO: 2661976 - RNA, 19 nt, Homo sapiens
  misc_RNA (1)...(19): siRNA sense strand
gggaaugcggaaaggccuu

SEQ ID NO: 2661977 - RNA, 19 nt, Homo sapiens
  misc_RNA (1)...(19): siRNA sense strand
cgugacuugugcagaaaga

SEQ ID NO: 2661978 - RNA, 19 nt, Homo sapiens
  misc_RNA (1)...(19): siRNA sense strand
gggacauacacguguggga

SEQ ID NO: 2661979 - RNA, 19 nt, Homo sapiens
  misc_RNA (1)...(19): siRNA sense strand
ggaacucacacaaaggaga

SEQ ID NO: 2661980 - RNA, 19 nt, Homo sapiens
  misc_RNA (1)...(19): siRNA sense strand
ggaaagaguggcagcagcu

SEQ ID NO: 2661981 - RNA, 19 nt, Homo sapiens
  misc_RNA (1)...(19): siRNA sense strand
agaauagagaagaagaacu

SEQ ID NO: 2661982 - RNA, 19 nt, Homo sapiens
  misc_RNA (1)...(19): siRNA sense strand
cccagaagaaguuuggcaa

SEQ ID NO: 2661983 - RNA, 19 nt, Homo sapiens
  misc_RNA (1)...(19): siRNA sense strand
gccagauagccaacagcaa

SEQ ID NO: 2661984 - RNA, 19 nt, Homo sapiens
  misc_RNA (1)...(19): siRNA sense strand
ucaugaauguaacgaacuu

SEQ ID NO: 2661985 - RNA, 19 nt, Homo sapiens
  misc_RNA (1)...(19): siRNA sense strand
gaaacccgcuagagacaga

SEQ ID NO: 2661986 - RNA, 19 nt, Homo sapiens
  misc_RNA (1)...(19): siRNA sense strand
gaagaagaacuauggccca

SEQ ID NO: 2661987 - RNA, 19 nt, Homo sapiens
  misc_RNA (1)...(19): siRNA sense strand
gaggaagagauaaggacgu

SEQ ID NO: 2661988 - RNA, 19 nt, Homo sapiens
  misc_RNA (1)...(19): siRNA sense strand
aauguaacgaacuuggaaa

SEQ ID NO: 2661989 - RNA, 19 nt, Homo sapiens
  misc_RNA (1)...(19): siRNA sense strand
aggaugugaugcuggagau

SEQ ID NO: 2661990 - RNA, 19 nt, Homo sapiens
  misc_RNA (1)...(19): siRNA sense strand
acagcaacacgaagaccaa

SEQ ID NO: 2661991 - RNA, 19 nt, Homo sapiens
  misc_RNA (1)...(19): siRNA sense strand
ggaccggaaaugagcuuca

SEQ ID NO: 2661992 - RNA, 19 nt, Homo sapiens
  misc_RNA (1)...(19): siRNA sense strand
guugcuacccagccagaua

SEQ ID NO: 2661993 - RNA, 19 nt, Homo sapiens
  misc_RNA (1)...(19): siRNA sense strand
cagauagccaacagcaaca

SEQ ID NO: 2661994 - RNA, 19 nt, Homo sapiens
  misc_RNA (1)...(19): siRNA sense strand
cggaacagcuugauggaga

SEQ ID NO: 2661995 - RNA, 19 nt, Homo sapiens
  misc_RNA (1)...(19): siRNA sense strand
gggcaaggagaaugggauu

SEQ ID NO: 2661996 - RNA, 19 nt, Homo sapiens
  misc_RNA (1)...(19): siRNA sense strand
cuagaagagccuaaagcaa

SEQ ID NO: 2661997 - RNA, 19 nt, Homo sapiens
  misc_RNA (1)...(19): siRNA sense strand
cagcaauaaauuagacaga

SEQ ID NO: 2661998 - RNA, 19 nt, Homo sapiens
  misc_RNA (1)...(19): siRNA sense strand
ggagcaagacugagggcca

SEQ ID NO: 2661999 - RNA, 19 nt, Homo sapiens
  misc_RNA (1)...(19): siRNA sense strand
cauaguaauucuuuggaga

SEQ ID NO: 2662000 - RNA, 19 nt, Homo sapiens
  misc_RNA (1)...(19): siRNA sense strand
caagaaaaucagaggacuu

SEQ ID NO: 2662001 - RNA, 19 nt, Homo sapiens
  misc_RNA (1)...(19): siRNA sense strand
agucaaaggggcugggcaa

SEQ ID NO: 2662002 - RNA, 19 nt, Homo sapiens
  misc_RNA (1)...(19): siRNA sense strand
cugaaaggcucgacggaug

SEQ ID NO: 2662003 - RNA, 19 nt, Homo sapiens
  misc_RNA (1)...(19): siRNA sense strand
gcuucaaagagguucacua

SEQ ID NO: 2662004 - RNA, 19 nt, Homo sapiens
  misc_RNA (1)...(19): siRNA sense strand
cuccagaauuugggcaaua

SEQ ID NO: 2662005 - RNA, 19 nt, Homo sapiens
  misc_RNA (1)...(19): siRNA sense strand
cuugaauggcagcaauaaa

SEQ ID NO: 2662006 - RNA, 19 nt, Homo sapiens
  misc_RNA (1)...(19): siRNA sense strand
gcaacaaacugaaaggcuc

SEQ ID NO: 2662007 - RNA, 19 nt, Homo sapiens
  misc_RNA (1)...(19): siRNA sense strand
acaaaaggaucaagcccua

SEQ ID NO: 2662008 - RNA, 19 nt, Homo sapiens
  misc_RNA (1)...(19): siRNA sense strand
gcucccagcccgugaugaa

SEQ ID NO: 2662009 - RNA, 19 nt, Homo sapiens
  misc_RNA (1)...(19): siRNA sense strand
ccuggaacguacagcucua

SEQ ID NO: 2662010 - RNA, 19 nt, Homo sapiens
  misc_RNA (1)...(19): siRNA sense strand
gugcagacagcgacaguga

SEQ ID NO: 2662011 - RNA, 19 nt, Homo sapiens
  misc_RNA (1)...(19): siRNA sense strand
cagucauguugaaaagaaa

SEQ ID NO: 2662012 - RNA, 19 nt, Homo sapiens
  misc_RNA (1)...(19): siRNA sense strand
ccaaagacaaacaccgaga

SEQ ID NO: 2662013 - RNA, 19 nt, Homo sapiens
  misc_RNA (1)...(19): siRNA sense strand
cagugauauuagaucggua

SEQ ID NO: 2662014 - RNA, 19 nt, Homo sapiens
  misc_RNA (1)...(19): siRNA sense strand
ucaacaaggcauuggagca

SEQ ID NO: 2662015 - RNA, 19 nt, Homo sapiens
  misc_RNA (1)...(19): siRNA sense strand
cuaaagcaaagaagcacaa

SEQ ID NO: 2662016 - RNA, 19 nt, Homo sapiens
  misc_RNA (1)...(19): siRNA sense strand
ggccauuacuucugcuaca

SEQ ID NO: 2662017 - RNA, 19 nt, Homo sapiens
  misc_RNA (1)...(19): siRNA sense strand
cuucaggcuuagcaacaaa

SEQ ID NO: 2662018 - RNA, 19 nt, Homo sapiens
  misc_RNA (1)...(19): siRNA sense strand
aaacacuuacggauggaaa

SEQ ID NO: 2662019 - RNA, 19 nt, Homo sapiens
  misc_RNA (1)...(19): siRNA sense strand
gcuuagcaacaaacugaaa

SEQ ID NO: 2662020 - RNA, 19 nt, Homo sapiens
  misc_RNA (1)...(19): siRNA sense strand
cuucaaagagguucacuau

SEQ ID NO: 2662021 - RNA, 19 nt, Homo sapiens
  misc_RNA (1)...(19): siRNA sense strand
ucugaaacguuuugcaaau

SEQ ID NO: 2662022 - RNA, 19 nt, Homo sapiens
  misc_RNA (1)...(19): siRNA sense strand
ccuaaagcaaagaagcaca

SEQ ID NO: 2662023 - RNA, 19 nt, Homo sapiens
  misc_RNA (1)...(19): siRNA sense strand
cagucuaccucgaacgcau

SEQ ID NO: 2662024 - RNA, 19 nt, Homo sapiens
  misc_RNA (1)...(19): siRNA sense strand
ccagagagagcaggagcaa

SEQ ID NO: 2662025 - RNA, 19 nt, Homo sapiens
  misc_RNA (1)...(19): siRNA sense strand
ggaaagucccggaaacgga

SEQ ID NO: 2662026 - RNA, 19 nt, Homo sapiens
  misc_RNA (1)...(19): siRNA sense strand
cacucuuguuugucagaua

SEQ ID NO: 2662027 - RNA, 19 nt, Homo sapiens
  misc_RNA (1)...(19): siRNA sense strand
caacaaacaggcugcgcca

SEQ ID NO: 2662028 - RNA, 19 nt, Homo sapiens
  misc_RNA (1)...(19): siRNA sense strand
acgcugaccuccacagaca

SEQ ID NO: 2662029 - RNA, 19 nt, Homo sapiens
  misc_RNA (1)...(19): siRNA sense strand
ccucagugaucccagaaca

SEQ ID NO: 2662030 - RNA, 19 nt, Homo sapiens
  misc_RNA (1)...(19): siRNA sense strand
acaaaaucuuagagaccuu

SEQ ID NO: 2662031 - RNA, 19 nt, Homo sapiens
  misc_RNA (1)...(19): siRNA sense strand
acaagugcagcaaguguaa

SEQ ID NO: 2662032 - RNA, 19 nt, Homo sapiens
  misc_RNA (1)...(19): siRNA sense strand
cuuaaaugggacuggacca

SEQ ID NO: 2662033 - RNA, 19 nt, Homo sapiens
  misc_RNA (1)...(19): siRNA sense strand
gggauugguacgauuguga

SEQ ID NO: 2662034 - RNA, 19 nt, Homo sapiens
  misc_RNA (1)...(19): siRNA sense strand
uagcaauggccucugguau

SEQ ID NO: 2662035 - RNA, 19 nt, Homo sapiens
  misc_RNA (1)...(19): siRNA sense strand
auugaaggccuaagugaca

SEQ ID NO: 2662036 - RNA, 19 nt, Homo sapiens
  misc_RNA (1)...(19): siRNA sense strand
ucguacaagugcagcaagu

SEQ ID NO: 2662037 - RNA, 19 nt, Homo sapiens
  misc_RNA (1)...(19): siRNA sense strand
acggagagccaauugucua

SEQ ID NO: 2662038 - RNA, 19 nt, Homo sapiens
  misc_RNA (1)...(19): siRNA sense strand
cggaacagcuugauggaga

SEQ ID NO: 2662039 - RNA, 19 nt, Homo sapiens
  misc_RNA (1)...(19): siRNA sense strand
gggcaaggagaaugggauu

SEQ ID NO: 2662040 - RNA, 19 nt, Homo sapiens
  misc_RNA (1)...(19): siRNA sense strand
cuagaagagccuaaagcaa

SEQ ID NO: 2662041 - RNA, 19 nt, Homo sapiens
  misc_RNA (1)...(19): siRNA sense strand
cagcaauaaauuagacaga

SEQ ID NO: 2662042 - RNA, 19 nt, Homo sapiens
  misc_RNA (1)...(19): siRNA sense strand
ggagcaagacugagggcca

SEQ ID NO: 2662043 - RNA, 19 nt, Homo sapiens
  misc_RNA (1)...(19): siRNA sense strand
cauaguaauucuuuggaga

SEQ ID NO: 2662044 - RNA, 19 nt, Homo sapiens
  misc_RNA (1)...(19): siRNA sense strand
caagaaaaucagaggacuu

SEQ ID NO: 2662045 - RNA, 19 nt, Homo sapiens
  misc_RNA (1)...(19): siRNA sense strand
agucaaaggggcugggcaa

SEQ ID NO: 2662046 - RNA, 19 nt, Homo sapiens
  misc_RNA (1)...(19): siRNA sense strand
cugaaaggcucgacggaug

SEQ ID NO: 2662047 - RNA, 19 nt, Homo sapiens
  misc_RNA (1)...(19): siRNA sense strand
gcuucaaagagguucacua

SEQ ID NO: 2662048 - RNA, 19 nt, Homo sapiens
  misc_RNA (1)...(19): siRNA sense strand
cuccagaauuugggcaaua

SEQ ID NO: 2662049 - RNA, 19 nt, Homo sapiens
  misc_RNA (1)...(19): siRNA sense strand
cuugaauggcagcaauaaa

SEQ ID NO: 2662050 - RNA, 19 nt, Homo sapiens
  misc_RNA (1)...(19): siRNA sense strand
gcaacaaacugaaaggcuc

SEQ ID NO: 2662051 - RNA, 19 nt, Homo sapiens
  misc_RNA (1)...(19): siRNA sense strand
acaaaaggaucaagcccua

SEQ ID NO: 2662052 - RNA, 19 nt, Homo sapiens
  misc_RNA (1)...(19): siRNA sense strand
gcucccagcccgugaugaa

SEQ ID NO: 2662053 - RNA, 19 nt, Homo sapiens
  misc_RNA (1)...(19): siRNA sense strand
ccuggaacguacagcucua

SEQ ID NO: 2662054 - RNA, 19 nt, Homo sapiens
  misc_RNA (1)...(19): siRNA sense strand
gugcagacagcgacaguga

SEQ ID NO: 2662055 - RNA, 19 nt, Homo sapiens
  misc_RNA (1)...(19): siRNA sense strand
cagucauguugaaaagaaa

SEQ ID NO: 2662056 - RNA, 19 nt, Homo sapiens
  misc_RNA (1)...(19): siRNA sense strand
ccaaagacaaacaccgaga

SEQ ID NO: 2662057 - RNA, 19 nt, Homo sapiens
  misc_RNA (1)...(19): siRNA sense strand
cagugauauuagaucggua

SEQ ID NO: 2662058 - RNA, 19 nt, Homo sapiens
  misc_RNA (1)...(19): siRNA sense strand
ucaacaaggcauuggagca

SEQ ID NO: 2662059 - RNA, 19 nt, Homo sapiens
  misc_RNA (1)...(19): siRNA sense strand
cuaaagcaaagaagcacaa

SEQ ID NO: 2662060 - RNA, 19 nt, Homo sapiens
  misc_RNA (1)...(19): siRNA sense strand
ggccauuacuucugcuaca

SEQ ID NO: 2662061 - RNA, 19 nt, Homo sapiens
  misc_RNA (1)...(19): siRNA sense strand
cuucaggcuuagcaacaaa

SEQ ID NO: 2662062 - RNA, 19 nt, Homo sapiens
  misc_RNA (1)...(19): siRNA sense strand
aaacacuuacggauggaaa

SEQ ID NO: 2662063 - RNA, 19 nt, Homo sapiens
  misc_RNA (1)...(19): siRNA sense strand
gcuuagcaacaaacugaaa

SEQ ID NO: 2662064 - RNA, 19 nt, Homo sapiens
  misc_RNA (1)...(19): siRNA sense strand
cuucaaagagguucacuau

SEQ ID NO: 2662065 - RNA, 19 nt, Homo sapiens
  misc_RNA (1)...(19): siRNA sense strand
ucugaaacguuuugcaaau

SEQ ID NO: 2662066 - RNA, 19 nt, Homo sapiens
  misc_RNA (1)...(19): siRNA sense strand
ccuaaagcaaagaagcaca

SEQ ID NO: 2662067 - RNA, 19 nt, Homo sapiens
  misc_RNA (1)...(19): siRNA sense strand
cagucuaccucgaacgcau

SEQ ID NO: 2662068 - RNA, 19 nt, Homo sapiens
  misc_RNA (1)...(19): siRNA sense strand
ccagagagagcaggagcaa

SEQ ID NO: 2662069 - RNA, 19 nt, Homo sapiens
  misc_RNA (1)...(19): siRNA sense strand
ggaaagucccggaaacgga

SEQ ID NO: 2662070 - RNA, 19 nt, Homo sapiens
  misc_RNA (1)...(19): siRNA sense strand
cacucuuguuugucagaua

SEQ ID NO: 2662071 - RNA, 19 nt, Homo sapiens
  misc_RNA (1)...(19): siRNA sense strand
caacaaacaggcugcgcca

SEQ ID NO: 2662072 - RNA, 19 nt, Homo sapiens
  misc_RNA (1)...(19): siRNA sense strand
acgcugaccuccacagaca

SEQ ID NO: 2662073 - RNA, 19 nt, Homo sapiens
  misc_RNA (1)...(19): siRNA sense strand
ccucagugaucccagaaca

SEQ ID NO: 2662074 - RNA, 19 nt, Homo sapiens
  misc_RNA (1)...(19): siRNA sense strand
acaaaaucuuagagaccuu

SEQ ID NO: 2662075 - RNA, 19 nt, Homo sapiens
  misc_RNA (1)...(19): siRNA sense strand
acaagugcagcaaguguaa

SEQ ID NO: 2662076 - RNA, 19 nt, Homo sapiens
  misc_RNA (1)...(19): siRNA sense strand
cuuaaaugggacuggacca

SEQ ID NO: 2662077 - RNA, 19 nt, Homo sapiens
  misc_RNA (1)...(19): siRNA sense strand
gggauugguacgauuguga

SEQ ID NO: 2662078 - RNA, 19 nt, Homo sapiens
  misc_RNA (1)...(19): siRNA sense strand
uagcaauggccucugguau

SEQ ID NO: 2662079 - RNA, 19 nt, Homo sapiens
  misc_RNA (1)...(19): siRNA sense strand
auugaaggccuaagugaca

SEQ ID NO: 2662080 - RNA, 19 nt, Homo sapiens
  misc_RNA (1)...(19): siRNA sense strand
ucguacaagugcagcaagu

SEQ ID NO: 2662081 - RNA, 19 nt, Homo sapiens
  misc_RNA (1)...(19): siRNA sense strand
acggagagccaauugucua

SEQ ID NO: 2662082 - RNA, 19 nt, Homo sapiens
  misc_RNA (1)...(19): siRNA sense strand
cugcaauguagaaggaaua

SEQ ID NO: 2662083 - RNA, 19 nt, Homo sapiens
  misc_RNA (1)...(19): siRNA sense strand
ugauaaagacagugggagu

SEQ ID NO: 2662084 - RNA, 19 nt, Homo sapiens
  misc_RNA (1)...(19): siRNA sense strand
ccugcaauguagaaggaau

SEQ ID NO: 2662085 - RNA, 19 nt, Homo sapiens
  misc_RNA (1)...(19): siRNA sense strand
agugaaggucuuugaggaa

SEQ ID NO: 2662086 - RNA, 19 nt, Homo sapiens
  misc_RNA (1)...(19): siRNA sense strand
gagugaaggucuuugagga

SEQ ID NO: 2662087 - RNA, 19 nt, Homo sapiens
  misc_RNA (1)...(19): siRNA sense strand
ucgcagaggaugaggcgca

SEQ ID NO: 2662088 - RNA, 19 nt, Homo sapiens
  misc_RNA (1)...(19): siRNA sense strand
aaaccaaacaacagcuaca

SEQ ID NO: 2662089 - RNA, 19 nt, Homo sapiens
  misc_RNA (1)...(19): siRNA sense strand
caugaaagacaaagcuacu

SEQ ID NO: 2662090 - RNA, 19 nt, Homo sapiens
  misc_RNA (1)...(19): siRNA sense strand
gaaaauaaugggaaggaag

SEQ ID NO: 2662091 - RNA, 19 nt, Homo sapiens
  misc_RNA (1)...(19): siRNA sense strand
ggauacaauaacaggaccu

SEQ ID NO: 2662092 - RNA, 19 nt, Homo sapiens
  misc_RNA (1)...(19): siRNA sense strand
acaccuagcuguugggcag

SEQ ID NO: 2662093 - RNA, 19 nt, Homo sapiens
  misc_RNA (1)...(19): siRNA sense strand
agaaaauaaugggaaggaa

SEQ ID NO: 2662094 - RNA, 19 nt, Homo sapiens
  misc_RNA (1)...(19): siRNA sense strand
ugggaguagcucaccguua

SEQ ID NO: 2662095 - RNA, 19 nt, Homo sapiens
  misc_RNA (1)...(19): siRNA sense strand
cugcaauguagaaggaaua

SEQ ID NO: 2662096 - RNA, 19 nt, Homo sapiens
  misc_RNA (1)...(19): siRNA sense strand
ugauaaagacagugggagu

SEQ ID NO: 2662097 - RNA, 19 nt, Homo sapiens
  misc_RNA (1)...(19): siRNA sense strand
ccugcaauguagaaggaau

SEQ ID NO: 2662098 - RNA, 19 nt, Homo sapiens
  misc_RNA (1)...(19): siRNA sense strand
agugaaggucuuugaggaa

SEQ ID NO: 2662099 - RNA, 19 nt, Homo sapiens
  misc_RNA (1)...(19): siRNA sense strand
gagugaaggucuuugagga

SEQ ID NO: 2662100 - RNA, 19 nt, Homo sapiens
  misc_RNA (1)...(19): siRNA sense strand
ucgcagaggaugaggcgca

SEQ ID NO: 2662101 - RNA, 19 nt, Homo sapiens
  misc_RNA (1)...(19): siRNA sense strand
aaaccaaacaacagcuaca

SEQ ID NO: 2662102 - RNA, 19 nt, Homo sapiens
  misc_RNA (1)...(19): siRNA sense strand
caugaaagacaaagcuacu

SEQ ID NO: 2662103 - RNA, 19 nt, Homo sapiens
  misc_RNA (1)...(19): siRNA sense strand
gaaaauaaugggaaggaag

SEQ ID NO: 2662104 - RNA, 19 nt, Homo sapiens
  misc_RNA (1)...(19): siRNA sense strand
ggauacaauaacaggaccu

SEQ ID NO: 2662105 - RNA, 19 nt, Homo sapiens
  misc_RNA (1)...(19): siRNA sense strand
acaccuagcuguugggcag

SEQ ID NO: 2662106 - RNA, 19 nt, Homo sapiens
  misc_RNA (1)...(19): siRNA sense strand
agaaaauaaugggaaggaa

SEQ ID NO: 2662107 - RNA, 19 nt, Homo sapiens
  misc_RNA (1)...(19): siRNA sense strand
ugggaguagcucaccguua

SEQ ID NO: 2662108 - RNA, 19 nt, Homo sapiens
  misc_RNA (1)...(19): siRNA sense strand
cccuaaugcuguugagaaa

SEQ ID NO: 2662109 - RNA, 19 nt, Homo sapiens
  misc_RNA (1)...(19): siRNA sense strand
acguauggcuggagaacua

SEQ ID NO: 2662110 - RNA, 19 nt, Homo sapiens
  misc_RNA (1)...(19): siRNA sense strand
gagaacaaauauugggaca

SEQ ID NO: 2662111 - RNA, 19 nt, Homo sapiens
  misc_RNA (1)...(19): siRNA sense strand
gggugaagaagguggaauu

SEQ ID NO: 2662112 - RNA, 19 nt, Homo sapiens
  misc_RNA (1)...(19): siRNA sense strand
gaaugaaaguacaaggaga

SEQ ID NO: 2662113 - RNA, 19 nt, Homo sapiens
  misc_RNA (1)...(19): siRNA sense strand
gaauauaaauggauggcca

SEQ ID NO: 2662114 - RNA, 19 nt, Homo sapiens
  misc_RNA (1)...(19): siRNA sense strand
ccucaaagccaauggacuu

SEQ ID NO: 2662115 - RNA, 19 nt, Homo sapiens
  misc_RNA (1)...(19): siRNA sense strand
aagaauaaagaacgggaaa

SEQ ID NO: 2662116 - RNA, 19 nt, Homo sapiens
  misc_RNA (1)...(19): siRNA sense strand
caaaagaggagaugugaaa

SEQ ID NO: 2662117 - RNA, 19 nt, Homo sapiens
  misc_RNA (1)...(19): siRNA sense strand
agaacagacaagagaacaa

SEQ ID NO: 2662118 - RNA, 19 nt, Homo sapiens
  misc_RNA (1)...(19): siRNA sense strand
cagcaaaggaguaaaggau

SEQ ID NO: 2662119 - RNA, 19 nt, Homo sapiens
  misc_RNA (1)...(19): siRNA sense strand
ucuaaauggcugcgugaaa

SEQ ID NO: 2662120 - RNA, 19 nt, Homo sapiens
  misc_RNA (1)...(19): siRNA sense strand
uggaaguguugcugggaau

SEQ ID NO: 2662121 - RNA, 19 nt, Homo sapiens
  misc_RNA (1)...(19): siRNA sense strand
agacuaaagaccuggguuu

SEQ ID NO: 2662122 - RNA, 19 nt, Homo sapiens
  misc_RNA (1)...(19): siRNA sense strand
ggugauuauacaagaacua

SEQ ID NO: 2662123 - RNA, 19 nt, Homo sapiens
  misc_RNA (1)...(19): siRNA sense strand
gcaaagugguggaugagga

SEQ ID NO: 2662124 - RNA, 19 nt, Homo sapiens
  misc_RNA (1)...(19): siRNA sense strand
caucaaggaaugcggacaa

SEQ ID NO: 2662125 - RNA, 19 nt, Homo sapiens
  misc_RNA (1)...(19): siRNA sense strand
cuuucaaggugauggaaga

SEQ ID NO: 2662126 - RNA, 19 nt, Homo sapiens
  misc_RNA (1)...(19): siRNA sense strand
uguaguaagugauggguca

SEQ ID NO: 2662127 - RNA, 19 nt, Homo sapiens
  misc_RNA (1)...(19): siRNA sense strand
gggccagaugggagacuaa

SEQ ID NO: 2662128 - RNA, 19 nt, Homo sapiens
  misc_RNA (1)...(19): siRNA sense strand
guauuuuaccagagggaaa

SEQ ID NO: 2662129 - RNA, 19 nt, Homo sapiens
  misc_RNA (1)...(19): siRNA sense strand
gaaggaagaucuugcccua

SEQ ID NO: 2662130 - RNA, 19 nt, Homo sapiens
  misc_RNA (1)...(19): siRNA sense strand
gaaaacgacagaagggaaa

SEQ ID NO: 2662131 - RNA, 19 nt, Homo sapiens
  misc_RNA (1)...(19): siRNA sense strand
guccagaauuugaagaaaa

SEQ ID NO: 2662132 - RNA, 19 nt, Homo sapiens
  misc_RNA (1)...(19): siRNA sense strand
gugaguacuuugagcccaa

SEQ ID NO: 2662133 - RNA, 19 nt, Homo sapiens
  misc_RNA (1)...(19): siRNA sense strand
ccauauagugacuggacau

SEQ ID NO: 2662134 - RNA, 19 nt, Homo sapiens
  misc_RNA (1)...(19): siRNA sense strand
gaagaauaaagaacgggaa

SEQ ID NO: 2662135 - RNA, 19 nt, Homo sapiens
  misc_RNA (1)...(19): siRNA sense strand
ggaaaaggaccgcagcaaa

SEQ ID NO: 2662136 - RNA, 19 nt, Homo sapiens
  misc_RNA (1)...(19): siRNA sense strand
aggaaugcggacaaggaua

SEQ ID NO: 2662137 - RNA, 19 nt, Homo sapiens
  misc_RNA (1)...(19): siRNA sense strand
gugagaugcaugcagaaua

SEQ ID NO: 2662138 - RNA, 19 nt, Homo sapiens
  misc_RNA (1)...(19): siRNA sense strand
gaaauauugugaagcgcuu

SEQ ID NO: 2662139 - RNA, 19 nt, Homo sapiens
  misc_RNA (1)...(19): siRNA sense strand
ccagagcagauguuagaaa

SEQ ID NO: 2662140 - RNA, 19 nt, Homo sapiens
  misc_RNA (1)...(19): siRNA sense strand
gauccagaccggugauuau

SEQ ID NO: 2662141 - RNA, 19 nt, Homo sapiens
  misc_RNA (1)...(19): siRNA sense strand
ggaccuuguacuuaugaaa

SEQ ID NO: 2662142 - RNA, 19 nt, Homo sapiens
  misc_RNA (1)...(19): siRNA sense strand
ggaaaacgacagaagggaa

SEQ ID NO: 2662143 - RNA, 19 nt, Homo sapiens
  misc_RNA (1)...(19): siRNA sense strand
acagacaagagaacaaaua

SEQ ID NO: 2662144 - RNA, 19 nt, Homo sapiens
  misc_RNA (1)...(19): siRNA sense strand
caaagaagccucaaagcca

SEQ ID NO: 2662145 - RNA, 19 nt, Homo sapiens
  misc_RNA (1)...(19): siRNA sense strand
cagcaaguccugugggagu

SEQ ID NO: 2662146 - RNA, 19 nt, Homo sapiens
  misc_RNA (1)...(19): siRNA sense strand
gcaaaacaaccgacugaaa

SEQ ID NO: 2662147 - RNA, 19 nt, Homo sapiens
  misc_RNA (1)...(19): siRNA sense strand
gguauucaggugagggaga

SEQ ID NO: 2662148 - RNA, 19 nt, Homo sapiens
  misc_RNA (1)...(19): siRNA sense strand
aguuuguggaaauggaaua

SEQ ID NO: 2662149 - RNA, 19 nt, Homo sapiens
  misc_RNA (1)...(19): siRNA sense strand
cccaauaaccagcagaauu

SEQ ID NO: 2662150 - RNA, 19 nt, Homo sapiens
  misc_RNA (1)...(19): siRNA sense strand
gcgacaggcaagagccauu

SEQ ID NO: 2662151 - RNA, 19 nt, Homo sapiens
  misc_RNA (1)...(19): siRNA sense strand
ugugaagguucguucuaaa

SEQ ID NO: 2662152 - RNA, 19 nt, Homo sapiens
  misc_RNA (1)...(19): siRNA sense strand
gcgcacucuuguuggaaaa

SEQ ID NO: 2662153 - RNA, 19 nt, Homo sapiens
  misc_RNA (1)...(19): siRNA sense strand
aaauaugguucuggaggaa

SEQ ID NO: 2662154 - RNA, 19 nt, Homo sapiens
  misc_RNA (1)...(19): siRNA sense strand
agaaacagaaacaggcaga

SEQ ID NO: 2662155 - RNA, 19 nt, Homo sapiens
  misc_RNA (1)...(19): siRNA sense strand
uggagaagaaguugacaga

SEQ ID NO: 2662156 - RNA, 19 nt, Homo sapiens
  misc_RNA (1)...(19): siRNA sense strand
cguacuguagcgagacaaa

SEQ ID NO: 2662157 - RNA, 19 nt, Homo sapiens
  misc_RNA (1)...(19): siRNA sense strand
cagacaaccagcugaugaa

SEQ ID NO: 2662158 - RNA, 19 nt, Homo sapiens
  misc_RNA (1)...(19): siRNA sense strand
caaagugguggaugaggaa

SEQ ID NO: 2662159 - RNA, 19 nt, Homo sapiens
  misc_RNA (1)...(19): siRNA sense strand
ggaucuaggcuuuggugga

SEQ ID NO: 2662160 - RNA, 19 nt, Homo sapiens
  misc_RNA (1)...(19): siRNA sense strand
aguaagacaagcaaggaga

SEQ ID NO: 2662161 - RNA, 19 nt, Homo sapiens
  misc_RNA (1)...(19): siRNA sense strand
aggagacgcgggaagaaua

SEQ ID NO: 2662162 - RNA, 19 nt, Homo sapiens
  misc_RNA (1)...(19): siRNA sense strand
guaaugaucagcaagggaa

SEQ ID NO: 2662163 - RNA, 19 nt, Homo sapiens
  misc_RNA (1)...(19): siRNA sense strand
cggaaaggaguguggucca

SEQ ID NO: 2662164 - RNA, 19 nt, Homo sapiens
  misc_RNA (1)...(19): siRNA sense strand
cgacagaagggaaacagau

SEQ ID NO: 2662165 - RNA, 19 nt, Homo sapiens
  misc_RNA (1)...(19): siRNA sense strand
gggaccagaacaaggaaca

SEQ ID NO: 2662166 - RNA, 19 nt, Homo sapiens
  misc_RNA (1)...(19): siRNA sense strand
ggaccgcagcaaaggagua

SEQ ID NO: 2662167 - RNA, 19 nt, Homo sapiens
  misc_RNA (1)...(19): siRNA sense strand
aggcagaacagacaagaga

SEQ ID NO: 2662168 - RNA, 19 nt, Homo sapiens
  misc_RNA (1)...(19): siRNA sense strand
agagagguuaugugcauua

SEQ ID NO: 2662169 - RNA, 19 nt, Homo sapiens
  misc_RNA (1)...(19): siRNA sense strand
uaaugaucagcaagggaaa

SEQ ID NO: 2662170 - RNA, 19 nt, Homo sapiens
  misc_RNA (1)...(19): siRNA sense strand
agaagaacuggcagaugaa

SEQ ID NO: 2662171 - RNA, 19 nt, Homo sapiens
  misc_RNA (1)...(19): siRNA sense strand
uggugaggaucuaggcuuu

SEQ ID NO: 2662172 - RNA, 19 nt, Homo sapiens
  misc_RNA (1)...(19): siRNA sense strand
cgacaaguaagacaagcaa

SEQ ID NO: 2662173 - RNA, 19 nt, Homo sapiens
  misc_RNA (1)...(19): siRNA sense strand
ggccuaugcgggugaagaa

SEQ ID NO: 2662174 - RNA, 19 nt, Homo sapiens
  misc_RNA (1)...(19): siRNA sense strand
gggaaugaaaguacaagga

SEQ ID NO: 2662175 - RNA, 19 nt, Homo sapiens
  misc_RNA (1)...(19): siRNA sense strand
aagugguggaugaggaauu

SEQ ID NO: 2662176 - RNA, 19 nt, Homo sapiens
  misc_RNA (1)...(19): siRNA sense strand
gugaagaaggguacacuga

SEQ ID NO: 2662177 - RNA, 19 nt, Homo sapiens
  misc_RNA (1)...(19): siRNA sense strand
cccuaaugcuguugagaaa

SEQ ID NO: 2662178 - RNA, 19 nt, Homo sapiens
  misc_RNA (1)...(19): siRNA sense strand
acguauggcuggagaacua

SEQ ID NO: 2662179 - RNA, 19 nt, Homo sapiens
  misc_RNA (1)...(19): siRNA sense strand
gagaacaaauauugggaca

SEQ ID NO: 2662180 - RNA, 19 nt, Homo sapiens
  misc_RNA (1)...(19): siRNA sense strand
gggugaagaagguggaauu

SEQ ID NO: 2662181 - RNA, 19 nt, Homo sapiens
  misc_RNA (1)...(19): siRNA sense strand
gaaugaaaguacaaggaga

SEQ ID NO: 2662182 - RNA, 19 nt, Homo sapiens
  misc_RNA (1)...(19): siRNA sense strand
gaauauaaauggauggcca

SEQ ID NO: 2662183 - RNA, 19 nt, Homo sapiens
  misc_RNA (1)...(19): siRNA sense strand
ccucaaagccaauggacuu

SEQ ID NO: 2662184 - RNA, 19 nt, Homo sapiens
  misc_RNA (1)...(19): siRNA sense strand
aagaauaaagaacgggaaa

SEQ ID NO: 2662185 - RNA, 19 nt, Homo sapiens
  misc_RNA (1)...(19): siRNA sense strand
caaaagaggagaugugaaa

SEQ ID NO: 2662186 - RNA, 19 nt, Homo sapiens
  misc_RNA (1)...(19): siRNA sense strand
agaacagacaagagaacaa

SEQ ID NO: 2662187 - RNA, 19 nt, Homo sapiens
  misc_RNA (1)...(19): siRNA sense strand
cagcaaaggaguaaaggau

SEQ ID NO: 2662188 - RNA, 19 nt, Homo sapiens
  misc_RNA (1)...(19): siRNA sense strand
ucuaaauggcugcgugaaa

SEQ ID NO: 2662189 - RNA, 19 nt, Homo sapiens
  misc_RNA (1)...(19): siRNA sense strand
uggaaguguugcugggaau

SEQ ID NO: 2662190 - RNA, 19 nt, Homo sapiens
  misc_RNA (1)...(19): siRNA sense strand
agacuaaagaccuggguuu

SEQ ID NO: 2662191 - RNA, 19 nt, Homo sapiens
  misc_RNA (1)...(19): siRNA sense strand
ggugauuauacaagaacua

SEQ ID NO: 2662192 - RNA, 19 nt, Homo sapiens
  misc_RNA (1)...(19): siRNA sense strand
gcaaagugguggaugagga

SEQ ID NO: 2662193 - RNA, 19 nt, Homo sapiens
  misc_RNA (1)...(19): siRNA sense strand
caucaaggaaugcggacaa

SEQ ID NO: 2662194 - RNA, 19 nt, Homo sapiens
  misc_RNA (1)...(19): siRNA sense strand
cuuucaaggugauggaaga

SEQ ID NO: 2662195 - RNA, 19 nt, Homo sapiens
  misc_RNA (1)...(19): siRNA sense strand
uguaguaagugauggguca

SEQ ID NO: 2662196 - RNA, 19 nt, Homo sapiens
  misc_RNA (1)...(19): siRNA sense strand
gggccagaugggagacuaa

SEQ ID NO: 2662197 - RNA, 19 nt, Homo sapiens
  misc_RNA (1)...(19): siRNA sense strand
guauuuuaccagagggaaa

SEQ ID NO: 2662198 - RNA, 19 nt, Homo sapiens
  misc_RNA (1)...(19): siRNA sense strand
gaaggaagaucuugcccua

SEQ ID NO: 2662199 - RNA, 19 nt, Homo sapiens
  misc_RNA (1)...(19): siRNA sense strand
gaaaacgacagaagggaaa

SEQ ID NO: 2662200 - RNA, 19 nt, Homo sapiens
  misc_RNA (1)...(19): siRNA sense strand
guccagaauuugaagaaaa

SEQ ID NO: 2662201 - RNA, 19 nt, Homo sapiens
  misc_RNA (1)...(19): siRNA sense strand
gugaguacuuugagcccaa

SEQ ID NO: 2662202 - RNA, 19 nt, Homo sapiens
  misc_RNA (1)...(19): siRNA sense strand
ccauauagugacuggacau

SEQ ID NO: 2662203 - RNA, 19 nt, Homo sapiens
  misc_RNA (1)...(19): siRNA sense strand
gaagaauaaagaacgggaa

SEQ ID NO: 2662204 - RNA, 19 nt, Homo sapiens
  misc_RNA (1)...(19): siRNA sense strand
ggaaaaggaccgcagcaaa

SEQ ID NO: 2662205 - RNA, 19 nt, Homo sapiens
  misc_RNA (1)...(19): siRNA sense strand
aggaaugcggacaaggaua

SEQ ID NO: 2662206 - RNA, 19 nt, Homo sapiens
  misc_RNA (1)...(19): siRNA sense strand
gugagaugcaugcagaaua

SEQ ID NO: 2662207 - RNA, 19 nt, Homo sapiens
  misc_RNA (1)...(19): siRNA sense strand
gaaauauugugaagcgcuu

SEQ ID NO: 2662208 - RNA, 19 nt, Homo sapiens
  misc_RNA (1)...(19): siRNA sense strand
ccagagcagauguuagaaa

SEQ ID NO: 2662209 - RNA, 19 nt, Homo sapiens
  misc_RNA (1)...(19): siRNA sense strand
gauccagaccggugauuau

SEQ ID NO: 2662210 - RNA, 19 nt, Homo sapiens
  misc_RNA (1)...(19): siRNA sense strand
ggaccuuguacuuaugaaa

SEQ ID NO: 2662211 - RNA, 19 nt, Homo sapiens
  misc_RNA (1)...(19): siRNA sense strand
ggaaaacgacagaagggaa

SEQ ID NO: 2662212 - RNA, 19 nt, Homo sapiens
  misc_RNA (1)...(19): siRNA sense strand
acagacaagagaacaaaua

SEQ ID NO: 2662213 - RNA, 19 nt, Homo sapiens
  misc_RNA (1)...(19): siRNA sense strand
caaagaagccucaaagcca

SEQ ID NO: 2662214 - RNA, 19 nt, Homo sapiens
  misc_RNA (1)...(19): siRNA sense strand
cagcaaguccugugggagu

SEQ ID NO: 2662215 - RNA, 19 nt, Homo sapiens
  misc_RNA (1)...(19): siRNA sense strand
gcaaaacaaccgacugaaa

SEQ ID NO: 2662216 - RNA, 19 nt, Homo sapiens
  misc_RNA (1)...(19): siRNA sense strand
gguauucaggugagggaga

SEQ ID NO: 2662217 - RNA, 19 nt, Homo sapiens
  misc_RNA (1)...(19): siRNA sense strand
aguuuguggaaauggaaua

SEQ ID NO: 2662218 - RNA, 19 nt, Homo sapiens
  misc_RNA (1)...(19): siRNA sense strand
cccaauaaccagcagaauu

SEQ ID NO: 2662219 - RNA, 19 nt, Homo sapiens
  misc_RNA (1)...(19): siRNA sense strand
gcgacaggcaagagccauu

SEQ ID NO: 2662220 - RNA, 19 nt, Homo sapiens
  misc_RNA (1)...(19): siRNA sense strand
ugugaagguucguucuaaa

SEQ ID NO: 2662221 - RNA, 19 nt, Homo sapiens
  misc_RNA (1)...(19): siRNA sense strand
gcgcacucuuguuggaaaa

SEQ ID NO: 2662222 - RNA, 19 nt, Homo sapiens
  misc_RNA (1)...(19): siRNA sense strand
aaauaugguucuggaggaa

SEQ ID NO: 2662223 - RNA, 19 nt, Homo sapiens
  misc_RNA (1)...(19): siRNA sense strand
agaaacagaaacaggcaga

SEQ ID NO: 2662224 - RNA, 19 nt, Homo sapiens
  misc_RNA (1)...(19): siRNA sense strand
uggagaagaaguugacaga

SEQ ID NO: 2662225 - RNA, 19 nt, Homo sapiens
  misc_RNA (1)...(19): siRNA sense strand
cguacuguagcgagacaaa

SEQ ID NO: 2662226 - RNA, 19 nt, Homo sapiens
  misc_RNA (1)...(19): siRNA sense strand
cagacaaccagcugaugaa

SEQ ID NO: 2662227 - RNA, 19 nt, Homo sapiens
  misc_RNA (1)...(19): siRNA sense strand
caaagugguggaugaggaa

SEQ ID NO: 2662228 - RNA, 19 nt, Homo sapiens
  misc_RNA (1)...(19): siRNA sense strand
ggaucuaggcuuuggugga

SEQ ID NO: 2662229 - RNA, 19 nt, Homo sapiens
  misc_RNA (1)...(19): siRNA sense strand
aguaagacaagcaaggaga

SEQ ID NO: 2662230 - RNA, 19 nt, Homo sapiens
  misc_RNA (1)...(19): siRNA sense strand
aggagacgcgggaagaaua

SEQ ID NO: 2662231 - RNA, 19 nt, Homo sapiens
  misc_RNA (1)...(19): siRNA sense strand
guaaugaucagcaagggaa

SEQ ID NO: 2662232 - RNA, 19 nt, Homo sapiens
  misc_RNA (1)...(19): siRNA sense strand
cggaaaggaguguggucca

SEQ ID NO: 2662233 - RNA, 19 nt, Homo sapiens
  misc_RNA (1)...(19): siRNA sense strand
cgacagaagggaaacagau

SEQ ID NO: 2662234 - RNA, 19 nt, Homo sapiens
  misc_RNA (1)...(19): siRNA sense strand
gggaccagaacaaggaaca

SEQ ID NO: 2662235 - RNA, 19 nt, Homo sapiens
  misc_RNA (1)...(19): siRNA sense strand
ggaccgcagcaaaggagua

SEQ ID NO: 2662236 - RNA, 19 nt, Homo sapiens
  misc_RNA (1)...(19): siRNA sense strand
aggcagaacagacaagaga

SEQ ID NO: 2662237 - RNA, 19 nt, Homo sapiens
  misc_RNA (1)...(19): siRNA sense strand
agagagguuaugugcauua

SEQ ID NO: 2662238 - RNA, 19 nt, Homo sapiens
  misc_RNA (1)...(19): siRNA sense strand
uaaugaucagcaagggaaa

SEQ ID NO: 2662239 - RNA, 19 nt, Homo sapiens
  misc_RNA (1)...(19): siRNA sense strand
agaagaacuggcagaugaa

SEQ ID NO: 2662240 - RNA, 19 nt, Homo sapiens
  misc_RNA (1)...(19): siRNA sense strand
uggugaggaucuaggcuuu

SEQ ID NO: 2662241 - RNA, 19 nt, Homo sapiens
  misc_RNA (1)...(19): siRNA sense strand
cgacaaguaagacaagcaa

SEQ ID NO: 2662242 - RNA, 19 nt, Homo sapiens
  misc_RNA (1)...(19): siRNA sense strand
ggccuaugcgggugaagaa

SEQ ID NO: 2662243 - RNA, 19 nt, Homo sapiens
  misc_RNA (1)...(19): siRNA sense strand
gggaaugaaaguacaagga

SEQ ID NO: 2662244 - RNA, 19 nt, Homo sapiens
  misc_RNA (1)...(19): siRNA sense strand
aagugguggaugaggaauu

SEQ ID NO: 2662245 - RNA, 19 nt, Homo sapiens
  misc_RNA (1)...(19): siRNA sense strand
gugaagaaggguacacuga

SEQ ID NO: 2662246 - RNA, 19 nt, Homo sapiens
  misc_RNA (1)...(19): siRNA sense strand
ccacaaagcuagcagauga

SEQ ID NO: 2662247 - RNA, 19 nt, Homo sapiens
  misc_RNA (1)...(19): siRNA sense strand
acaucaaaguugugggaga

SEQ ID NO: 2662248 - RNA, 19 nt, Homo sapiens
  misc_RNA (1)...(19): siRNA sense strand
gggcagaagcuuaugggua

SEQ ID NO: 2662249 - RNA, 19 nt, Homo sapiens
  misc_RNA (1)...(19): siRNA sense strand
agaaaauggcacugaggaa

SEQ ID NO: 2662250 - RNA, 19 nt, Homo sapiens
  misc_RNA (1)...(19): siRNA sense strand
ggaggaggagccaaagaaa

SEQ ID NO: 2662251 - RNA, 19 nt, Homo sapiens
  misc_RNA (1)...(19): siRNA sense strand
gcucugaaguuucugaaga

SEQ ID NO: 2662252 - RNA, 19 nt, Homo sapiens
  misc_RNA (1)...(19): siRNA sense strand
guggcaaaccauggagaua

SEQ ID NO: 2662253 - RNA, 19 nt, Homo sapiens
  misc_RNA (1)...(19): siRNA sense strand
gagaacagcuugaugcgga

SEQ ID NO: 2662254 - RNA, 19 nt, Homo sapiens
  misc_RNA (1)...(19): siRNA sense strand
caaaguugugggagagcuu

SEQ ID NO: 2662255 - RNA, 19 nt, Homo sapiens
  misc_RNA (1)...(19): siRNA sense strand
uuaccaaagugaccauaaa

SEQ ID NO: 2662256 - RNA, 19 nt, Homo sapiens
  misc_RNA (1)...(19): siRNA sense strand
gggaggaggagccaaagaa

SEQ ID NO: 2662257 - RNA, 19 nt, Homo sapiens
  misc_RNA (1)...(19): siRNA sense strand
gaggaggagccaaagaaaa

SEQ ID NO: 2662258 - RNA, 19 nt, Homo sapiens
  misc_RNA (1)...(19): siRNA sense strand
ucugggaggaggagccaaa

SEQ ID NO: 2662259 - RNA, 19 nt, Homo sapiens
  misc_RNA (1)...(19): siRNA sense strand
ucagcugagcaguggcaaa

SEQ ID NO: 2662260 - RNA, 19 nt, Homo sapiens
  misc_RNA (1)...(19): siRNA sense strand
gagucagcccugcagaaua

SEQ ID NO: 2662261 - RNA, 19 nt, Homo sapiens
  misc_RNA (1)...(19): siRNA sense strand
aguauuucguuuagacuca

SEQ ID NO: 2662262 - RNA, 19 nt, Homo sapiens
  misc_RNA (1)...(19): siRNA sense strand
cucagaugcugcuggagua

SEQ ID NO: 2662263 - RNA, 19 nt, Homo sapiens
  misc_RNA (1)...(19): siRNA sense strand
ccuuugaaaugcucaccaa

SEQ ID NO: 2662264 - RNA, 19 nt, Homo sapiens
  misc_RNA (1)...(19): siRNA sense strand
gugggagagcuuggagaua

SEQ ID NO: 2662265 - RNA, 19 nt, Homo sapiens
  misc_RNA (1)...(19): siRNA sense strand
uggagauaaacauggguga

SEQ ID NO: 2662266 - RNA, 19 nt, Homo sapiens
  misc_RNA (1)...(19): siRNA sense strand
cagugaagaggccgaauuu

SEQ ID NO: 2662267 - RNA, 19 nt, Homo sapiens
  misc_RNA (1)...(19): siRNA sense strand
agacauaugaaguggacag

SEQ ID NO: 2662268 - RNA, 19 nt, Homo sapiens
  misc_RNA (1)...(19): siRNA sense strand
cagaauacuaauaaugcga

SEQ ID NO: 2662269 - RNA, 19 nt, Homo sapiens
  misc_RNA (1)...(19): siRNA sense strand
cggcauucgagaacagcuu

SEQ ID NO: 2662270 - RNA, 19 nt, Homo sapiens
  misc_RNA (1)...(19): siRNA sense strand
gcuagcagaugaugcagau

SEQ ID NO: 2662271 - RNA, 19 nt, Homo sapiens
  misc_RNA (1)...(19): siRNA sense strand
guggaaacuaagcaagaaa

SEQ ID NO: 2662272 - RNA, 19 nt, Homo sapiens
  misc_RNA (1)...(19): siRNA sense strand
cugcuaaguggaaaggaaa

SEQ ID NO: 2662273 - RNA, 19 nt, Homo sapiens
  misc_RNA (1)...(19): siRNA sense strand
guuagaugacagugggauu

SEQ ID NO: 2662274 - RNA, 19 nt, Homo sapiens
  misc_RNA (1)...(19): siRNA sense strand
aaagauuggcucaggaaaa

SEQ ID NO: 2662275 - RNA, 19 nt, Homo sapiens
  misc_RNA (1)...(19): siRNA sense strand
agguacaaguagucaaguu

SEQ ID NO: 2662276 - RNA, 19 nt, Homo sapiens
  misc_RNA (1)...(19): siRNA sense strand
ccugaagaauaugaagaau

SEQ ID NO: 2662277 - RNA, 19 nt, Homo sapiens
  misc_RNA (1)...(19): siRNA sense strand
acuugugggcccagagaca

SEQ ID NO: 2662278 - RNA, 19 nt, Homo sapiens
  misc_RNA (1)...(19): siRNA sense strand
ggagagaauuccaggccaa

SEQ ID NO: 2662279 - RNA, 19 nt, Homo sapiens
  misc_RNA (1)...(19): siRNA sense strand
agaacaaggcaaaggaaaa

SEQ ID NO: 2662280 - RNA, 19 nt, Homo sapiens
  misc_RNA (1)...(19): siRNA sense strand
guucaguccaacagggaaa

SEQ ID NO: 2662281 - RNA, 19 nt, Homo sapiens
  misc_RNA (1)...(19): siRNA sense strand
cugacaagguggaugguga

SEQ ID NO: 2662282 - RNA, 19 nt, Homo sapiens
  misc_RNA (1)...(19): siRNA sense strand
auaaggagaacaaggcaaa

SEQ ID NO: 2662283 - RNA, 19 nt, Homo sapiens
  misc_RNA (1)...(19): siRNA sense strand
gugaagaggaugggagaga

SEQ ID NO: 2662284 - RNA, 19 nt, Homo sapiens
  misc_RNA (1)...(19): siRNA sense strand
gcacagacacggacaggau

SEQ ID NO: 2662285 - RNA, 19 nt, Homo sapiens
  misc_RNA (1)...(19): siRNA sense strand
agauggagucuuagaaaca

SEQ ID NO: 2662286 - RNA, 19 nt, Homo sapiens
  misc_RNA (1)...(19): siRNA sense strand
ugauaagggaagaggucau

SEQ ID NO: 2662287 - RNA, 19 nt, Homo sapiens
  misc_RNA (1)...(19): siRNA sense strand
ucucaguagcaaaggaaau

SEQ ID NO: 2662288 - RNA, 19 nt, Homo sapiens
  misc_RNA (1)...(19): siRNA sense strand
cugcaugggagaagauaga

SEQ ID NO: 2662289 - RNA, 19 nt, Homo sapiens
  misc_RNA (1)...(19): siRNA sense strand
acggcauagugcagaacaa

SEQ ID NO: 2662290 - RNA, 19 nt, Homo sapiens
  misc_RNA (1)...(19): siRNA sense strand
ccaccugauuggagcacau

SEQ ID NO: 2662291 - RNA, 19 nt, Homo sapiens
  misc_RNA (1)...(19): siRNA sense strand
ccuuggaugugaagaggau

SEQ ID NO: 2662292 - RNA, 19 nt, Homo sapiens
  misc_RNA (1)...(19): siRNA sense strand
caguagcaaaggaaauaaa

SEQ ID NO: 2662293 - RNA, 19 nt, Homo sapiens
  misc_RNA (1)...(19): siRNA sense strand
augacaaucuugauggaga

SEQ ID NO: 2662294 - RNA, 19 nt, Homo sapiens
  misc_RNA (1)...(19): siRNA sense strand
auggagauguacuugguaa

SEQ ID NO: 2662295 - RNA, 19 nt, Homo sapiens
  misc_RNA (1)...(19): siRNA sense strand
agaaacaagcaaagccaga

SEQ ID NO: 2662296 - RNA, 19 nt, Homo sapiens
  misc_RNA (1)...(19): siRNA sense strand
ugaagaugcaggauggaga

SEQ ID NO: 2662297 - RNA, 19 nt, Homo sapiens
  misc_RNA (1)...(19): siRNA sense strand
uauaaggagaacaaggcaa

SEQ ID NO: 2662298 - RNA, 19 nt, Homo sapiens
  misc_RNA (1)...(19): siRNA sense strand
cuacagagcucauccgcca

SEQ ID NO: 2662299 - RNA, 19 nt, Homo sapiens
  misc_RNA (1)...(19): siRNA sense strand
gcaugggagaagauagaca

SEQ ID NO: 2662300 - RNA, 19 nt, Homo sapiens
  misc_RNA (1)...(19): siRNA sense strand
uguccaaggcuguguccua

SEQ ID NO: 2662301 - RNA, 19 nt, Homo sapiens
  misc_RNA (1)...(19): siRNA sense strand
uguuugaaggagauagcaa

SEQ ID NO: 2662302 - RNA, 19 nt, Homo sapiens
  misc_RNA (1)...(19): siRNA sense strand
guggaggaugaguugauaa

SEQ ID NO: 2662303 - RNA, 19 nt, Homo sapiens
  misc_RNA (1)...(19): siRNA sense strand
cugggaaagcuguguccaa

SEQ ID NO: 2662304 - RNA, 19 nt, Homo sapiens
  misc_RNA (1)...(19): siRNA sense strand
uggagauguacuugguaau

SEQ ID NO: 2662305 - RNA, 19 nt, Homo sapiens
  misc_RNA (1)...(19): siRNA sense strand
guagaaaggcagaaaacca

SEQ ID NO: 2662306 - RNA, 19 nt, Homo sapiens
  misc_RNA (1)...(19): siRNA sense strand
guacacaggaacuugucaa

SEQ ID NO: 2662307 - RNA, 19 nt, Homo sapiens
  misc_RNA (1)...(19): siRNA sense strand
ggaugaguugauaagggaa

SEQ ID NO: 2662308 - RNA, 19 nt, Homo sapiens
  misc_RNA (1)...(19): siRNA sense strand
ccaagaagagagcgggaag

SEQ ID NO: 2662309 - RNA, 19 nt, Homo sapiens
  misc_RNA (1)...(19): siRNA sense strand
aauacaaagcagauggagu

SEQ ID NO: 2662310 - RNA, 19 nt, Homo sapiens
  misc_RNA (1)...(19): siRNA sense strand
aggaugaguugauaaggga

SEQ ID NO: 2662311 - RNA, 19 nt, Homo sapiens
  misc_RNA (1)...(19): siRNA sense strand
caaaggaaauaaagacccu

SEQ ID NO: 2662312 - RNA, 19 nt, Homo sapiens
  misc_RNA (1)...(19): siRNA sense strand
agggaaauacaaagcagau

SEQ ID NO: 2662313 - RNA, 19 nt, Homo sapiens
  misc_RNA (1)...(19): siRNA sense strand
ugggaaagcuguguccaaa

SEQ ID NO: 2662314 - RNA, 19 nt, Homo sapiens
  misc_RNA (1)...(19): siRNA sense strand
uggaaauacggcuaacaau

SEQ ID NO: 2662315 - RNA, 19 nt, Homo sapiens
  misc_RNA (1)...(19): siRNA sense strand
augugaagaggaugggaga

SEQ ID NO: 2662316 - RNA, 19 nt, Homo sapiens
  misc_RNA (1)...(19): siRNA sense strand
ucagcauaaacaacagaaa

SEQ ID NO: 2662317 - RNA, 19 nt, Homo sapiens
  misc_RNA (1)...(19): siRNA sense strand
cagagacuacacugguaaa

SEQ ID NO: 2662318 - RNA, 19 nt, Homo sapiens
  misc_RNA (1)...(19): siRNA sense strand
ucagaaagugacugggaaa

SEQ ID NO: 2662319 - RNA, 19 nt, Homo sapiens
  misc_RNA (1)...(19): siRNA sense strand
caguauagaccccggaaaa

SEQ ID NO: 2662320 - RNA, 19 nt, Homo sapiens
  misc_RNA (1)...(19): siRNA sense strand
gcaaagggcaggaacccaa

SEQ ID NO: 2662321 - RNA, 19 nt, Homo sapiens
  misc_RNA (1)...(19): siRNA sense strand
ccaucuucacaaagggaua

SEQ ID NO: 2662322 - RNA, 19 nt, Homo sapiens
  misc_RNA (1)...(19): siRNA sense strand
guaucagacaugaaguuaa

SEQ ID NO: 2662323 - RNA, 19 nt, Homo sapiens
  misc_RNA (1)...(19): siRNA sense strand
aggaaaccauggagaagau

SEQ ID NO: 2662324 - RNA, 19 nt, Homo sapiens
  misc_RNA (1)...(19): siRNA sense strand
ggcaggaaaccauggagaa

SEQ ID NO: 2662325 - RNA, 19 nt, Homo sapiens
  misc_RNA (1)...(19): siRNA sense strand
aaauggaaauggagccaca

SEQ ID NO: 2662326 - RNA, 19 nt, Homo sapiens
  misc_RNA (1)...(19): siRNA sense strand
gucugaagauggugggcuu

SEQ ID NO: 2662327 - RNA, 19 nt, Homo sapiens
  misc_RNA (1)...(19): siRNA sense strand
cauuguggaaguagaagaa

SEQ ID NO: 2662328 - RNA, 19 nt, Homo sapiens
  misc_RNA (1)...(19): siRNA sense strand
agauaucaccagagagacu

SEQ ID NO: 2662329 - RNA, 19 nt, Homo sapiens
  misc_RNA (1)...(19): siRNA sense strand
gggcccaguuugcggucua

SEQ ID NO: 2662330 - RNA, 19 nt, Homo sapiens
  misc_RNA (1)...(19): siRNA sense strand
acucacaacuacagggugu

SEQ ID NO: 2662331 - RNA, 19 nt, Homo sapiens
  misc_RNA (1)...(19): siRNA sense strand
acucauuacacaugcauau

SEQ ID NO: 2662332 - RNA, 19 nt, Homo sapiens
  misc_RNA (1)...(19): siRNA sense strand
cuguacaaccucaagcuaa

SEQ ID NO: 2662333 - RNA, 19 nt, Homo sapiens
  misc_RNA (1)...(19): siRNA sense strand
cggguuuggaagaggauca

SEQ ID NO: 2662334 - RNA, 19 nt, Homo sapiens
  misc_RNA (1)...(19): siRNA sense strand
cagugaugccauuguggaa

SEQ ID NO: 2662335 - RNA, 19 nt, Homo sapiens
  misc_RNA (1)...(19): siRNA sense strand
cagcacuugcagaaauaaa

SEQ ID NO: 2662336 - RNA, 19 nt, Homo sapiens
  misc_RNA (1)...(19): siRNA sense strand
ugguuuacuucaagcaaaa

SEQ ID NO: 2662337 - RNA, 19 nt, Homo sapiens
  misc_RNA (1)...(19): siRNA sense strand
caacuugaaagaaagggaa

SEQ ID NO: 2662338 - RNA, 19 nt, Homo sapiens
  misc_RNA (1)...(19): siRNA sense strand
ugggaucagaccagacaaa

SEQ ID NO: 2662339 - RNA, 19 nt, Homo sapiens
  misc_RNA (1)...(19): siRNA sense strand
acaucgugguggucggauu

SEQ ID NO: 2662340 - RNA, 19 nt, Homo sapiens
  misc_RNA (1)...(19): siRNA sense strand
uggcauugcagcagcauca

SEQ ID NO: 2662341 - RNA, 19 nt, Homo sapiens
  misc_RNA (1)...(19): siRNA sense strand
aaguaaggcaagcagauau

SEQ ID NO: 2662342 - RNA, 19 nt, Homo sapiens
  misc_RNA (1)...(19): siRNA sense strand
ugaauaaauuggugggugc

SEQ ID NO: 2662343 - RNA, 19 nt, Homo sapiens
  misc_RNA (1)...(19): siRNA sense strand
uagaagaagcucugaucca

SEQ ID NO: 2662344 - RNA, 19 nt, Homo sapiens
  misc_RNA (1)...(19): siRNA sense strand
ccauuguggaaguagaaga

SEQ ID NO: 2662345 - RNA, 19 nt, Homo sapiens
  misc_RNA (1)...(19): siRNA sense strand
cugcaauuagacaaugaaa

SEQ ID NO: 2662346 - RNA, 19 nt, Homo sapiens
  misc_RNA (1)...(19): siRNA sense strand
aagccaaggcacugaaagu

SEQ ID NO: 2662347 - RNA, 19 nt, Homo sapiens
  misc_RNA (1)...(19): siRNA sense strand
aguggaagacagcagcaaa

SEQ ID NO: 2662348 - RNA, 19 nt, Homo sapiens
  misc_RNA (1)...(19): siRNA sense strand
acaacuacaggguguggaa

SEQ ID NO: 2662349 - RNA, 19 nt, Homo sapiens
  misc_RNA (1)...(19): siRNA sense strand
guuuggaagaggaucagua

SEQ ID NO: 2662350 - RNA, 19 nt, Homo sapiens
  misc_RNA (1)...(19): siRNA sense strand
ccauccauuucaaggccaa

SEQ ID NO: 2662351 - RNA, 19 nt, Homo sapiens
  misc_RNA (1)...(19): siRNA sense strand
acucaguaucagacaugaa

SEQ ID NO: 2662352 - RNA, 19 nt, Homo sapiens
  misc_RNA (1)...(19): siRNA sense strand
ccacacuuuaccugaagaa

SEQ ID NO: 2662353 - RNA, 19 nt, Homo sapiens
  misc_RNA (1)...(19): siRNA sense strand
ucagaaagugacugggaaa

SEQ ID NO: 2662354 - RNA, 19 nt, Homo sapiens
  misc_RNA (1)...(19): siRNA sense strand
caguauagaccccggaaaa

SEQ ID NO: 2662355 - RNA, 19 nt, Homo sapiens
  misc_RNA (1)...(19): siRNA sense strand
gcaaagggcaggaacccaa

SEQ ID NO: 2662356 - RNA, 19 nt, Homo sapiens
  misc_RNA (1)...(19): siRNA sense strand
ccaucuucacaaagggaua

SEQ ID NO: 2662357 - RNA, 19 nt, Homo sapiens
  misc_RNA (1)...(19): siRNA sense strand
guaucagacaugaaguuaa

SEQ ID NO: 2662358 - RNA, 19 nt, Homo sapiens
  misc_RNA (1)...(19): siRNA sense strand
aggaaaccauggagaagau

SEQ ID NO: 2662359 - RNA, 19 nt, Homo sapiens
  misc_RNA (1)...(19): siRNA sense strand
ggcaggaaaccauggagaa

SEQ ID NO: 2662360 - RNA, 19 nt, Homo sapiens
  misc_RNA (1)...(19): siRNA sense strand
aaauggaaauggagccaca

SEQ ID NO: 2662361 - RNA, 19 nt, Homo sapiens
  misc_RNA (1)...(19): siRNA sense strand
gucugaagauggugggcuu

SEQ ID NO: 2662362 - RNA, 19 nt, Homo sapiens
  misc_RNA (1)...(19): siRNA sense strand
cauuguggaaguagaagaa

SEQ ID NO: 2662363 - RNA, 19 nt, Homo sapiens
  misc_RNA (1)...(19): siRNA sense strand
agauaucaccagagagacu

SEQ ID NO: 2662364 - RNA, 19 nt, Homo sapiens
  misc_RNA (1)...(19): siRNA sense strand
gggcccaguuugcggucua

SEQ ID NO: 2662365 - RNA, 19 nt, Homo sapiens
  misc_RNA (1)...(19): siRNA sense strand
acucacaacuacagggugu

SEQ ID NO: 2662366 - RNA, 19 nt, Homo sapiens
  misc_RNA (1)...(19): siRNA sense strand
acucauuacacaugcauau

SEQ ID NO: 2662367 - RNA, 19 nt, Homo sapiens
  misc_RNA (1)...(19): siRNA sense strand
cuguacaaccucaagcuaa

SEQ ID NO: 2662368 - RNA, 19 nt, Homo sapiens
  misc_RNA (1)...(19): siRNA sense strand
cggguuuggaagaggauca

SEQ ID NO: 2662369 - RNA, 19 nt, Homo sapiens
  misc_RNA (1)...(19): siRNA sense strand
cagugaugccauuguggaa

SEQ ID NO: 2662370 - RNA, 19 nt, Homo sapiens
  misc_RNA (1)...(19): siRNA sense strand
cagcacuugcagaaauaaa

SEQ ID NO: 2662371 - RNA, 19 nt, Homo sapiens
  misc_RNA (1)...(19): siRNA sense strand
ugguuuacuucaagcaaaa

SEQ ID NO: 2662372 - RNA, 19 nt, Homo sapiens
  misc_RNA (1)...(19): siRNA sense strand
caacuugaaagaaagggaa

SEQ ID NO: 2662373 - RNA, 19 nt, Homo sapiens
  misc_RNA (1)...(19): siRNA sense strand
ugggaucagaccagacaaa

SEQ ID NO: 2662374 - RNA, 19 nt, Homo sapiens
  misc_RNA (1)...(19): siRNA sense strand
acaucgugguggucggauu

SEQ ID NO: 2662375 - RNA, 19 nt, Homo sapiens
  misc_RNA (1)...(19): siRNA sense strand
uggcauugcagcagcauca

SEQ ID NO: 2662376 - RNA, 19 nt, Homo sapiens
  misc_RNA (1)...(19): siRNA sense strand
aaguaaggcaagcagauau

SEQ ID NO: 2662377 - RNA, 19 nt, Homo sapiens
  misc_RNA (1)...(19): siRNA sense strand
ugaauaaauuggugggugc

SEQ ID NO: 2662378 - RNA, 19 nt, Homo sapiens
  misc_RNA (1)...(19): siRNA sense strand
uagaagaagcucugaucca

SEQ ID NO: 2662379 - RNA, 19 nt, Homo sapiens
  misc_RNA (1)...(19): siRNA sense strand
ccauuguggaaguagaaga

SEQ ID NO: 2662380 - RNA, 19 nt, Homo sapiens
  misc_RNA (1)...(19): siRNA sense strand
cugcaauuagacaaugaaa

SEQ ID NO: 2662381 - RNA, 19 nt, Homo sapiens
  misc_RNA (1)...(19): siRNA sense strand
aagccaaggcacugaaagu

SEQ ID NO: 2662382 - RNA, 19 nt, Homo sapiens
  misc_RNA (1)...(19): siRNA sense strand
aguggaagacagcagcaaa

SEQ ID NO: 2662383 - RNA, 19 nt, Homo sapiens
  misc_RNA (1)...(19): siRNA sense strand
acaacuacaggguguggaa

SEQ ID NO: 2662384 - RNA, 19 nt, Homo sapiens
  misc_RNA (1)...(19): siRNA sense strand
guuuggaagaggaucagua

SEQ ID NO: 2662385 - RNA, 19 nt, Homo sapiens
  misc_RNA (1)...(19): siRNA sense strand
ccauccauuucaaggccaa

SEQ ID NO: 2662386 - RNA, 19 nt, Homo sapiens
  misc_RNA (1)...(19): siRNA sense strand
acucaguaucagacaugaa

SEQ ID NO: 2662387 - RNA, 19 nt, Homo sapiens
  misc_RNA (1)...(19): siRNA sense strand
ccacacuuuaccugaagaa

SEQ ID NO: 2662388 - RNA, 19 nt, Homo sapiens
  misc_RNA (1)...(19): siRNA sense strand
acucauauucucagggcua

SEQ ID NO: 2662389 - RNA, 19 nt, Homo sapiens
  misc_RNA (1)...(19): siRNA sense strand
agaucaacguugugggucu

SEQ ID NO: 2662390 - RNA, 19 nt, Homo sapiens
  misc_RNA (1)...(19): siRNA sense strand
cugaaagcugugaaggauu

SEQ ID NO: 2662391 - RNA, 19 nt, Homo sapiens
  misc_RNA (1)...(19): siRNA sense strand
gcugugaaggauugggaga

SEQ ID NO: 2662392 - RNA, 19 nt, Homo sapiens
  misc_RNA (1)...(19): siRNA sense strand
ggguauucuggcaaugaaa

SEQ ID NO: 2662393 - RNA, 19 nt, Homo sapiens
  misc_RNA (1)...(19): siRNA sense strand
acgagaauguuucgcgaga

SEQ ID NO: 2662394 - RNA, 19 nt, Homo sapiens
  misc_RNA (1)...(19): siRNA sense strand
aaagaaggggaaugggaaa

SEQ ID NO: 2662395 - RNA, 19 nt, Homo sapiens
  misc_RNA (1)...(19): siRNA sense strand
ggacaguacuuucuggaac

SEQ ID NO: 2662396 - RNA, 19 nt, Homo sapiens
  misc_RNA (1)...(19): siRNA sense strand
gaaagaaggggaaugggaa

SEQ ID NO: 2662397 - RNA, 19 nt, Homo sapiens
  misc_RNA (1)...(19): siRNA sense strand
cgcgagaaucccaagggua

SEQ ID NO: 2662398 - RNA, 19 nt, Homo sapiens
  misc_RNA (1)...(19): siRNA sense strand
gacgguuaccagaggagaa

SEQ ID NO: 2662399 - RNA, 19 nt, Homo sapiens
  misc_RNA (1)...(19): siRNA sense strand
acucauauucucagggcua

SEQ ID NO: 2662400 - RNA, 19 nt, Homo sapiens
  misc_RNA (1)...(19): siRNA sense strand
agaucaacguugugggucu

SEQ ID NO: 2662401 - RNA, 19 nt, Homo sapiens
  misc_RNA (1)...(19): siRNA sense strand
cugaaagcugugaaggauu

SEQ ID NO: 2662402 - RNA, 19 nt, Homo sapiens
  misc_RNA (1)...(19): siRNA sense strand
gcugugaaggauugggaga

SEQ ID NO: 2662403 - RNA, 19 nt, Homo sapiens
  misc_RNA (1)...(19): siRNA sense strand
ggguauucuggcaaugaaa

SEQ ID NO: 2662404 - RNA, 19 nt, Homo sapiens
  misc_RNA (1)...(19): siRNA sense strand
acgagaauguuucgcgaga

SEQ ID NO: 2662405 - RNA, 19 nt, Homo sapiens
  misc_RNA (1)...(19): siRNA sense strand
aaagaaggggaaugggaaa

SEQ ID NO: 2662406 - RNA, 19 nt, Homo sapiens
  misc_RNA (1)...(19): siRNA sense strand
ggacaguacuuucuggaac

SEQ ID NO: 2662407 - RNA, 19 nt, Homo sapiens
  misc_RNA (1)...(19): siRNA sense strand
gaaagaaggggaaugggaa

SEQ ID NO: 2662408 - RNA, 19 nt, Homo sapiens
  misc_RNA (1)...(19): siRNA sense strand
cgcgagaaucccaagggua

SEQ ID NO: 2662409 - RNA, 19 nt, Homo sapiens
  misc_RNA (1)...(19): siRNA sense strand
gacgguuaccagaggagaa

SEQ ID NO: 2662410 - RNA, 19 nt, Homo sapiens
  misc_RNA (1)...(19): siRNA sense strand
ugggaugacuaaagaggaa

SEQ ID NO: 2662411 - RNA, 19 nt, Homo sapiens
  misc_RNA (1)...(19): siRNA sense strand
cuuaaaugagcgagcuaaa

SEQ ID NO: 2662412 - RNA, 19 nt, Homo sapiens
  misc_RNA (1)...(19): siRNA sense strand
uggacuaagugaaagcaaa

SEQ ID NO: 2662413 - RNA, 19 nt, Homo sapiens
  misc_RNA (1)...(19): siRNA sense strand
gaugaguggacgaugguaa

SEQ ID NO: 2662414 - RNA, 19 nt, Homo sapiens
  misc_RNA (1)...(19): siRNA sense strand
uagaaauggccaugagaca

SEQ ID NO: 2662415 - RNA, 19 nt, Homo sapiens
  misc_RNA (1)...(19): siRNA sense strand
gaauuaaaacagagugcua

SEQ ID NO: 2662416 - RNA, 19 nt, Homo sapiens
  misc_RNA (1)...(19): siRNA sense strand
gagaaagaugaguggacga

SEQ ID NO: 2662417 - RNA, 19 nt, Homo sapiens
  misc_RNA (1)...(19): siRNA sense strand
cuaaagaggaaaugaugau

SEQ ID NO: 2662418 - RNA, 19 nt, Homo sapiens
  misc_RNA (1)...(19): siRNA sense strand
cugaauaugcugugucauu

SEQ ID NO: 2662419 - RNA, 19 nt, Homo sapiens
  misc_RNA (1)...(19): siRNA sense strand
guguacgauuguugaguuu

SEQ ID NO: 2662420 - RNA, 19 nt, Homo sapiens
  misc_RNA (1)...(19): siRNA sense strand
aggaagaaaccguucgaga

SEQ ID NO: 2662421 - RNA, 19 nt, Homo sapiens
  misc_RNA (1)...(19): siRNA sense strand
agguagaagauguguuaca

SEQ ID NO: 2662422 - RNA, 19 nt, Homo sapiens
  misc_RNA (1)...(19): siRNA sense strand
acucaagacgagaggcaga

SEQ ID NO: 2662423 - RNA, 19 nt, Homo sapiens
  misc_RNA (1)...(19): siRNA sense strand
aagauacgacacugagaaa

SEQ ID NO: 2662424 - RNA, 19 nt, Homo sapiens
  misc_RNA (1)...(19): siRNA sense strand
ggaugacuaaagaggaaau

SEQ ID NO: 2662425 - RNA, 19 nt, Homo sapiens
  misc_RNA (1)...(19): siRNA sense strand
agaacagcuuuaugaaaca

SEQ ID NO: 2662426 - RNA, 19 nt, Homo sapiens
  misc_RNA (1)...(19): siRNA sense strand
guuuacugacauaguguua

SEQ ID NO: 2662427 - RNA, 19 nt, Homo sapiens
  misc_RNA (1)...(19): siRNA sense strand
agauagcguagguggagaa

SEQ ID NO: 2662428 - RNA, 19 nt, Homo sapiens
  misc_RNA (1)...(19): siRNA sense strand
guaacuuggcaaugaauga

SEQ ID NO: 2662429 - RNA, 19 nt, Homo sapiens
  misc_RNA (1)...(19): siRNA sense strand
ucucuucaguugugaggaa

SEQ ID NO: 2662430 - RNA, 19 nt, Homo sapiens
  misc_RNA (1)...(19): siRNA sense strand
augaguggacuaagugaaa

SEQ ID NO: 2662431 - RNA, 19 nt, Homo sapiens
  misc_RNA (1)...(19): siRNA sense strand
ucggaggaccguagaaaga

SEQ ID NO: 2662432 - RNA, 19 nt, Homo sapiens
  misc_RNA (1)...(19): siRNA sense strand
uggagaaaugguugcacua

SEQ ID NO: 2662433 - RNA, 19 nt, Homo sapiens
  misc_RNA (1)...(19): siRNA sense strand
cuaaaagaaugguggagca

SEQ ID NO: 2662434 - RNA, 19 nt, Homo sapiens
  misc_RNA (1)...(19): siRNA sense strand
ugcuguggcuagaguauaa

SEQ ID NO: 2662435 - RNA, 19 nt, Homo sapiens
  misc_RNA (1)...(19): siRNA sense strand
cuaugcaauuggaggagau

SEQ ID NO: 2662436 - RNA, 19 nt, Homo sapiens
  misc_RNA (1)...(19): siRNA sense strand
ggacuaagugaaagcaaac

SEQ ID NO: 2662437 - RNA, 19 nt, Homo sapiens
  misc_RNA (1)...(19): siRNA sense strand
aggcagaucaauacugaau

SEQ ID NO: 2662438 - RNA, 19 nt, Homo sapiens
  misc_RNA (1)...(19): siRNA sense strand
ugacuaaagaggaaaugau

SEQ ID NO: 2662439 - RNA, 19 nt, Homo sapiens
  misc_RNA (1)...(19): siRNA sense strand
ccacucaagacgagaggca

SEQ ID NO: 2662440 - RNA, 19 nt, Homo sapiens
  misc_RNA (1)...(19): siRNA sense strand
cuaagugaaagcaaacaaa

SEQ ID NO: 2662441 - RNA, 19 nt, Homo sapiens
  misc_RNA (1)...(19): siRNA sense strand
uguauaaguccaugcccaa

SEQ ID NO: 2662442 - RNA, 19 nt, Homo sapiens
  misc_RNA (1)...(19): siRNA sense strand
gcguagguggagaacuuaa

SEQ ID NO: 2662443 - RNA, 19 nt, Homo sapiens
  misc_RNA (1)...(19): siRNA sense strand
guuuaugaguggacuaagu

SEQ ID NO: 2662444 - RNA, 19 nt, Homo sapiens
  misc_RNA (1)...(19): siRNA sense strand
cuguauaaguccaugccca

SEQ ID NO: 2662445 - RNA, 19 nt, Homo sapiens
  misc_RNA (1)...(19): siRNA sense strand
guuugaacuggauggagaa

SEQ ID NO: 2662446 - RNA, 19 nt, Homo sapiens
  misc_RNA (1)...(19): siRNA sense strand
acugaauucccuugucaua

SEQ ID NO: 2662447 - RNA, 19 nt, Homo sapiens
  misc_RNA (1)...(19): siRNA sense strand
acuaagugaaagcaaacaa

SEQ ID NO: 2662448 - RNA, 19 nt, Homo sapiens
  misc_RNA (1)...(19): siRNA sense strand
acuuaugcauacacgggua

SEQ ID NO: 2662449 - RNA, 19 nt, Homo sapiens
  misc_RNA (1)...(19): siRNA sense strand
acuaaagaggaaaugauga

SEQ ID NO: 2662450 - RNA, 19 nt, Homo sapiens
  misc_RNA (1)...(19): siRNA sense strand
aggcuauaucuaugcaauu

SEQ ID NO: 2662451 - RNA, 19 nt, Homo sapiens
  misc_RNA (1)...(19): siRNA sense strand
ggacuuggggagagauuuu

SEQ ID NO: 2662452 - RNA, 19 nt, Homo sapiens
  misc_RNA (1)...(19): siRNA sense strand
uguuaauuguugagggcac

SEQ ID NO: 2662453 - RNA, 19 nt, Homo sapiens
  misc_RNA (1)...(19): siRNA sense strand
cggguaacuuggcaaugaa

SEQ ID NO: 2662454 - RNA, 19 nt, Homo sapiens
  misc_RNA (1)...(19): siRNA sense strand
aaacagagugcuaaaagaa

SEQ ID NO: 2662455 - RNA, 19 nt, Homo sapiens
  misc_RNA (1)...(19): siRNA sense strand
aagacgagaggcagaucaa

SEQ ID NO: 2662456 - RNA, 19 nt, Homo sapiens
  misc_RNA (1)...(19): siRNA sense strand
ugaccuacugauagauauu

SEQ ID NO: 2662457 - RNA, 19 nt, Homo sapiens
  misc_RNA (1)...(19): siRNA sense strand
agaguauaacacagaauca

SEQ ID NO: 2662458 - RNA, 19 nt, Homo sapiens
  misc_RNA (1)...(19): siRNA sense strand
cagagaauuguguacgauu

SEQ ID NO: 2662459 - RNA, 19 nt, Homo sapiens
  misc_RNA (1)...(19): siRNA sense strand
gggaugacuaaagaggaaa

SEQ ID NO: 2662460 - RNA, 19 nt, Homo sapiens
  misc_RNA (1)...(19): siRNA sense strand
uagaaagauacgacacuga

SEQ ID NO: 2662461 - RNA, 19 nt, Homo sapiens
  misc_RNA (1)...(19): siRNA sense strand
cuagaguauaacacagaau

SEQ ID NO: 2662462 - RNA, 19 nt, Homo sapiens
  misc_RNA (1)...(19): siRNA sense strand
ggucaaguuccucugaaaa

SEQ ID NO: 2662463 - RNA, 19 nt, Homo sapiens
  misc_RNA (1)...(19): siRNA sense strand
cacuuaaaugagcgagcua

SEQ ID NO: 2662464 - RNA, 19 nt, Homo sapiens
  misc_RNA (1)...(19): siRNA sense strand
ugggaugacuaaagaggaa

SEQ ID NO: 2662465 - RNA, 19 nt, Homo sapiens
  misc_RNA (1)...(19): siRNA sense strand
cuuaaaugagcgagcuaaa

SEQ ID NO: 2662466 - RNA, 19 nt, Homo sapiens
  misc_RNA (1)...(19): siRNA sense strand
uggacuaagugaaagcaaa

SEQ ID NO: 2662467 - RNA, 19 nt, Homo sapiens
  misc_RNA (1)...(19): siRNA sense strand
gaugaguggacgaugguaa

SEQ ID NO: 2662468 - RNA, 19 nt, Homo sapiens
  misc_RNA (1)...(19): siRNA sense strand
uagaaauggccaugagaca

SEQ ID NO: 2662469 - RNA, 19 nt, Homo sapiens
  misc_RNA (1)...(19): siRNA sense strand
gaauuaaaacagagugcua

SEQ ID NO: 2662470 - RNA, 19 nt, Homo sapiens
  misc_RNA (1)...(19): siRNA sense strand
gagaaagaugaguggacga

SEQ ID NO: 2662471 - RNA, 19 nt, Homo sapiens
  misc_RNA (1)...(19): siRNA sense strand
cuaaagaggaaaugaugau

SEQ ID NO: 2662472 - RNA, 19 nt, Homo sapiens
  misc_RNA (1)...(19): siRNA sense strand
cugaauaugcugugucauu

SEQ ID NO: 2662473 - RNA, 19 nt, Homo sapiens
  misc_RNA (1)...(19): siRNA sense strand
guguacgauuguugaguuu

SEQ ID NO: 2662474 - RNA, 19 nt, Homo sapiens
  misc_RNA (1)...(19): siRNA sense strand
aggaagaaaccguucgaga

SEQ ID NO: 2662475 - RNA, 19 nt, Homo sapiens
  misc_RNA (1)...(19): siRNA sense strand
agguagaagauguguuaca

SEQ ID NO: 2662476 - RNA, 19 nt, Homo sapiens
  misc_RNA (1)...(19): siRNA sense strand
acucaagacgagaggcaga

SEQ ID NO: 2662477 - RNA, 19 nt, Homo sapiens
  misc_RNA (1)...(19): siRNA sense strand
aagauacgacacugagaaa

SEQ ID NO: 2662478 - RNA, 19 nt, Homo sapiens
  misc_RNA (1)...(19): siRNA sense strand
ggaugacuaaagaggaaau

SEQ ID NO: 2662479 - RNA, 19 nt, Homo sapiens
  misc_RNA (1)...(19): siRNA sense strand
agaacagcuuuaugaaaca

SEQ ID NO: 2662480 - RNA, 19 nt, Homo sapiens
  misc_RNA (1)...(19): siRNA sense strand
guuuacugacauaguguua

SEQ ID NO: 2662481 - RNA, 19 nt, Homo sapiens
  misc_RNA (1)...(19): siRNA sense strand
agauagcguagguggagaa

SEQ ID NO: 2662482 - RNA, 19 nt, Homo sapiens
  misc_RNA (1)...(19): siRNA sense strand
guaacuuggcaaugaauga

SEQ ID NO: 2662483 - RNA, 19 nt, Homo sapiens
  misc_RNA (1)...(19): siRNA sense strand
ucucuucaguugugaggaa

SEQ ID NO: 2662484 - RNA, 19 nt, Homo sapiens
  misc_RNA (1)...(19): siRNA sense strand
augaguggacuaagugaaa

SEQ ID NO: 2662485 - RNA, 19 nt, Homo sapiens
  misc_RNA (1)...(19): siRNA sense strand
ucggaggaccguagaaaga

SEQ ID NO: 2662486 - RNA, 19 nt, Homo sapiens
  misc_RNA (1)...(19): siRNA sense strand
uggagaaaugguugcacua

SEQ ID NO: 2662487 - RNA, 19 nt, Homo sapiens
  misc_RNA (1)...(19): siRNA sense strand
cuaaaagaaugguggagca

SEQ ID NO: 2662488 - RNA, 19 nt, Homo sapiens
  misc_RNA (1)...(19): siRNA sense strand
ugcuguggcuagaguauaa

SEQ ID NO: 2662489 - RNA, 19 nt, Homo sapiens
  misc_RNA (1)...(19): siRNA sense strand
cuaugcaauuggaggagau

SEQ ID NO: 2662490 - RNA, 19 nt, Homo sapiens
  misc_RNA (1)...(19): siRNA sense strand
ggacuaagugaaagcaaac

SEQ ID NO: 2662491 - RNA, 19 nt, Homo sapiens
  misc_RNA (1)...(19): siRNA sense strand
aggcagaucaauacugaau

SEQ ID NO: 2662492 - RNA, 19 nt, Homo sapiens
  misc_RNA (1)...(19): siRNA sense strand
ugacuaaagaggaaaugau

SEQ ID NO: 2662493 - RNA, 19 nt, Homo sapiens
  misc_RNA (1)...(19): siRNA sense strand
ccacucaagacgagaggca

SEQ ID NO: 2662494 - RNA, 19 nt, Homo sapiens
  misc_RNA (1)...(19): siRNA sense strand
cuaagugaaagcaaacaaa

SEQ ID NO: 2662495 - RNA, 19 nt, Homo sapiens
  misc_RNA (1)...(19): siRNA sense strand
uguauaaguccaugcccaa

SEQ ID NO: 2662496 - RNA, 19 nt, Homo sapiens
  misc_RNA (1)...(19): siRNA sense strand
gcguagguggagaacuuaa

SEQ ID NO: 2662497 - RNA, 19 nt, Homo sapiens
  misc_RNA (1)...(19): siRNA sense strand
guuuaugaguggacuaagu

SEQ ID NO: 2662498 - RNA, 19 nt, Homo sapiens
  misc_RNA (1)...(19): siRNA sense strand
cuguauaaguccaugccca

SEQ ID NO: 2662499 - RNA, 19 nt, Homo sapiens
  misc_RNA (1)...(19): siRNA sense strand
guuugaacuggauggagaa

SEQ ID NO: 2662500 - RNA, 19 nt, Homo sapiens
  misc_RNA (1)...(19): siRNA sense strand
acugaauucccuugucaua

SEQ ID NO: 2662501 - RNA, 19 nt, Homo sapiens
  misc_RNA (1)...(19): siRNA sense strand
acuaagugaaagcaaacaa

SEQ ID NO: 2662502 - RNA, 19 nt, Homo sapiens
  misc_RNA (1)...(19): siRNA sense strand
acuuaugcauacacgggua

SEQ ID NO: 2662503 - RNA, 19 nt, Homo sapiens
  misc_RNA (1)...(19): siRNA sense strand
acuaaagaggaaaugauga

SEQ ID NO: 2662504 - RNA, 19 nt, Homo sapiens
  misc_RNA (1)...(19): siRNA sense strand
aggcuauaucuaugcaauu

SEQ ID NO: 2662505 - RNA, 19 nt, Homo sapiens
  misc_RNA (1)...(19): siRNA sense strand
ggacuuggggagagauuuu

SEQ ID NO: 2662506 - RNA, 19 nt, Homo sapiens
  misc_RNA (1)...(19): siRNA sense strand
uguuaauuguugagggcac

SEQ ID NO: 2662507 - RNA, 19 nt, Homo sapiens
  misc_RNA (1)...(19): siRNA sense strand
cggguaacuuggcaaugaa

SEQ ID NO: 2662508 - RNA, 19 nt, Homo sapiens
  misc_RNA (1)...(19): siRNA sense strand
aaacagagugcuaaaagaa

SEQ ID NO: 2662509 - RNA, 19 nt, Homo sapiens
  misc_RNA (1)...(19): siRNA sense strand
aagacgagaggcagaucaa

SEQ ID NO: 2662510 - RNA, 19 nt, Homo sapiens
  misc_RNA (1)...(19): siRNA sense strand
ugaccuacugauagauauu

SEQ ID NO: 2662511 - RNA, 19 nt, Homo sapiens
  misc_RNA (1)...(19): siRNA sense strand
agaguauaacacagaauca

SEQ ID NO: 2662512 - RNA, 19 nt, Homo sapiens
  misc_RNA (1)...(19): siRNA sense strand
cagagaauuguguacgauu

SEQ ID NO: 2662513 - RNA, 19 nt, Homo sapiens
  misc_RNA (1)...(19): siRNA sense strand
gggaugacuaaagaggaaa

SEQ ID NO: 2662514 - RNA, 19 nt, Homo sapiens
  misc_RNA (1)...(19): siRNA sense strand
uagaaagauacgacacuga

SEQ ID NO: 2662515 - RNA, 19 nt, Homo sapiens
  misc_RNA (1)...(19): siRNA sense strand
cuagaguauaacacagaau

SEQ ID NO: 2662516 - RNA, 19 nt, Homo sapiens
  misc_RNA (1)...(19): siRNA sense strand
ggucaaguuccucugaaaa

SEQ ID NO: 2662517 - RNA, 19 nt, Homo sapiens
  misc_RNA (1)...(19): siRNA sense strand
cacuuaaaugagcgagcua

SEQ ID NO: 2662518 - RNA, 19 nt, Homo sapiens
  misc_RNA (1)...(19): siRNA sense strand
ugggaugacuaaagaggaa

SEQ ID NO: 2662519 - RNA, 19 nt, Homo sapiens
  misc_RNA (1)...(19): siRNA sense strand
cuuaaaugagcgagcuaaa

SEQ ID NO: 2662520 - RNA, 19 nt, Homo sapiens
  misc_RNA (1)...(19): siRNA sense strand
uggacuaagugaaagcaaa

SEQ ID NO: 2662521 - RNA, 19 nt, Homo sapiens
  misc_RNA (1)...(19): siRNA sense strand
gaugaguggacgaugguaa

SEQ ID NO: 2662522 - RNA, 19 nt, Homo sapiens
  misc_RNA (1)...(19): siRNA sense strand
uagaaauggccaugagaca

SEQ ID NO: 2662523 - RNA, 19 nt, Homo sapiens
  misc_RNA (1)...(19): siRNA sense strand
gaauuaaaacagagugcua

SEQ ID NO: 2662524 - RNA, 19 nt, Homo sapiens
  misc_RNA (1)...(19): siRNA sense strand
gagaaagaugaguggacga

SEQ ID NO: 2662525 - RNA, 19 nt, Homo sapiens
  misc_RNA (1)...(19): siRNA sense strand
cuaaagaggaaaugaugau

SEQ ID NO: 2662526 - RNA, 19 nt, Homo sapiens
  misc_RNA (1)...(19): siRNA sense strand
cugaauaugcugugucauu

SEQ ID NO: 2662527 - RNA, 19 nt, Homo sapiens
  misc_RNA (1)...(19): siRNA sense strand
guguacgauuguugaguuu

SEQ ID NO: 2662528 - RNA, 19 nt, Homo sapiens
  misc_RNA (1)...(19): siRNA sense strand
aggaagaaaccguucgaga

SEQ ID NO: 2662529 - RNA, 19 nt, Homo sapiens
  misc_RNA (1)...(19): siRNA sense strand
agguagaagauguguuaca

SEQ ID NO: 2662530 - RNA, 19 nt, Homo sapiens
  misc_RNA (1)...(19): siRNA sense strand
acucaagacgagaggcaga

SEQ ID NO: 2662531 - RNA, 19 nt, Homo sapiens
  misc_RNA (1)...(19): siRNA sense strand
aagauacgacacugagaaa

SEQ ID NO: 2662532 - RNA, 19 nt, Homo sapiens
  misc_RNA (1)...(19): siRNA sense strand
ggaugacuaaagaggaaau

SEQ ID NO: 2662533 - RNA, 19 nt, Homo sapiens
  misc_RNA (1)...(19): siRNA sense strand
agaacagcuuuaugaaaca

SEQ ID NO: 2662534 - RNA, 19 nt, Homo sapiens
  misc_RNA (1)...(19): siRNA sense strand
guuuacugacauaguguua

SEQ ID NO: 2662535 - RNA, 19 nt, Homo sapiens
  misc_RNA (1)...(19): siRNA sense strand
agauagcguagguggagaa

SEQ ID NO: 2662536 - RNA, 19 nt, Homo sapiens
  misc_RNA (1)...(19): siRNA sense strand
guaacuuggcaaugaauga

SEQ ID NO: 2662537 - RNA, 19 nt, Homo sapiens
  misc_RNA (1)...(19): siRNA sense strand
ucucuucaguugugaggaa

SEQ ID NO: 2662538 - RNA, 19 nt, Homo sapiens
  misc_RNA (1)...(19): siRNA sense strand
augaguggacuaagugaaa

SEQ ID NO: 2662539 - RNA, 19 nt, Homo sapiens
  misc_RNA (1)...(19): siRNA sense strand
ucggaggaccguagaaaga

SEQ ID NO: 2662540 - RNA, 19 nt, Homo sapiens
  misc_RNA (1)...(19): siRNA sense strand
uggagaaaugguugcacua

SEQ ID NO: 2662541 - RNA, 19 nt, Homo sapiens
  misc_RNA (1)...(19): siRNA sense strand
cuaaaagaaugguggagca

SEQ ID NO: 2662542 - RNA, 19 nt, Homo sapiens
  misc_RNA (1)...(19): siRNA sense strand
ugcuguggcuagaguauaa

SEQ ID NO: 2662543 - RNA, 19 nt, Homo sapiens
  misc_RNA (1)...(19): siRNA sense strand
cuaugcaauuggaggagau

SEQ ID NO: 2662544 - RNA, 19 nt, Homo sapiens
  misc_RNA (1)...(19): siRNA sense strand
ggacuaagugaaagcaaac

SEQ ID NO: 2662545 - RNA, 19 nt, Homo sapiens
  misc_RNA (1)...(19): siRNA sense strand
aggcagaucaauacugaau

SEQ ID NO: 2662546 - RNA, 19 nt, Homo sapiens
  misc_RNA (1)...(19): siRNA sense strand
ugacuaaagaggaaaugau

SEQ ID NO: 2662547 - RNA, 19 nt, Homo sapiens
  misc_RNA (1)...(19): siRNA sense strand
ccacucaagacgagaggca

SEQ ID NO: 2662548 - RNA, 19 nt, Homo sapiens
  misc_RNA (1)...(19): siRNA sense strand
cuaagugaaagcaaacaaa

SEQ ID NO: 2662549 - RNA, 19 nt, Homo sapiens
  misc_RNA (1)...(19): siRNA sense strand
uguauaaguccaugcccaa

SEQ ID NO: 2662550 - RNA, 19 nt, Homo sapiens
  misc_RNA (1)...(19): siRNA sense strand
gcguagguggagaacuuaa

SEQ ID NO: 2662551 - RNA, 19 nt, Homo sapiens
  misc_RNA (1)...(19): siRNA sense strand
guuuaugaguggacuaagu

SEQ ID NO: 2662552 - RNA, 19 nt, Homo sapiens
  misc_RNA (1)...(19): siRNA sense strand
cuguauaaguccaugccca

SEQ ID NO: 2662553 - RNA, 19 nt, Homo sapiens
  misc_RNA (1)...(19): siRNA sense strand
guuugaacuggauggagaa

SEQ ID NO: 2662554 - RNA, 19 nt, Homo sapiens
  misc_RNA (1)...(19): siRNA sense strand
acugaauucccuugucaua

SEQ ID NO: 2662555 - RNA, 19 nt, Homo sapiens
  misc_RNA (1)...(19): siRNA sense strand
acuaagugaaagcaaacaa

SEQ ID NO: 2662556 - RNA, 19 nt, Homo sapiens
  misc_RNA (1)...(19): siRNA sense strand
acuuaugcauacacgggua

SEQ ID NO: 2662557 - RNA, 19 nt, Homo sapiens
  misc_RNA (1)...(19): siRNA sense strand
acuaaagaggaaaugauga

SEQ ID NO: 2662558 - RNA, 19 nt, Homo sapiens
  misc_RNA (1)...(19): siRNA sense strand
aggcuauaucuaugcaauu

SEQ ID NO: 2662559 - RNA, 19 nt, Homo sapiens
  misc_RNA (1)...(19): siRNA sense strand
ggacuuggggagagauuuu

SEQ ID NO: 2662560 - RNA, 19 nt, Homo sapiens
  misc_RNA (1)...(19): siRNA sense strand
uguuaauuguugagggcac

SEQ ID NO: 2662561 - RNA, 19 nt, Homo sapiens
  misc_RNA (1)...(19): siRNA sense strand
cggguaacuuggcaaugaa

SEQ ID NO: 2662562 - RNA, 19 nt, Homo sapiens
  misc_RNA (1)...(19): siRNA sense strand
aaacagagugcuaaaagaa

SEQ ID NO: 2662563 - RNA, 19 nt, Homo sapiens
  misc_RNA (1)...(19): siRNA sense strand
aagacgagaggcagaucaa

SEQ ID NO: 2662564 - RNA, 19 nt, Homo sapiens
  misc_RNA (1)...(19): siRNA sense strand
ugaccuacugauagauauu

SEQ ID NO: 2662565 - RNA, 19 nt, Homo sapiens
  misc_RNA (1)...(19): siRNA sense strand
agaguauaacacagaauca

SEQ ID NO: 2662566 - RNA, 19 nt, Homo sapiens
  misc_RNA (1)...(19): siRNA sense strand
cagagaauuguguacgauu

SEQ ID NO: 2662567 - RNA, 19 nt, Homo sapiens
  misc_RNA (1)...(19): siRNA sense strand
gggaugacuaaagaggaaa

SEQ ID NO: 2662568 - RNA, 19 nt, Homo sapiens
  misc_RNA (1)...(19): siRNA sense strand
uagaaagauacgacacuga

SEQ ID NO: 2662569 - RNA, 19 nt, Homo sapiens
  misc_RNA (1)...(19): siRNA sense strand
cuagaguauaacacagaau

SEQ ID NO: 2662570 - RNA, 19 nt, Homo sapiens
  misc_RNA (1)...(19): siRNA sense strand
ggucaaguuccucugaaaa

SEQ ID NO: 2662571 - RNA, 19 nt, Homo sapiens
  misc_RNA (1)...(19): siRNA sense strand
cacuuaaaugagcgagcua

SEQ ID NO: 2662572 - RNA, 19 nt, Homo sapiens
  misc_RNA (1)...(19): siRNA sense strand
ccgaagaagugaagcgaga

SEQ ID NO: 2662573 - RNA, 19 nt, Homo sapiens
  misc_RNA (1)...(19): siRNA sense strand
caguauauguugucgggua

SEQ ID NO: 2662574 - RNA, 19 nt, Homo sapiens
  misc_RNA (1)...(19): siRNA sense strand
acucauauucucagggcua

SEQ ID NO: 2662575 - RNA, 19 nt, Homo sapiens
  misc_RNA (1)...(19): siRNA sense strand
ccuagaaguuguaaaagaa

SEQ ID NO: 2662576 - RNA, 19 nt, Homo sapiens
  misc_RNA (1)...(19): siRNA sense strand
cucaauguauagucggaaa

SEQ ID NO: 2662577 - RNA, 19 nt, Homo sapiens
  misc_RNA (1)...(19): siRNA sense strand
agauguugcuagugacuca

SEQ ID NO: 2662578 - RNA, 19 nt, Homo sapiens
  misc_RNA (1)...(19): siRNA sense strand
gcugugaaggauugggaga

SEQ ID NO: 2662579 - RNA, 19 nt, Homo sapiens
  misc_RNA (1)...(19): siRNA sense strand
ggguauucuggcaaugaaa

SEQ ID NO: 2662580 - RNA, 19 nt, Homo sapiens
  misc_RNA (1)...(19): siRNA sense strand
cagcaaaucugcaaaccca

SEQ ID NO: 2662581 - RNA, 19 nt, Homo sapiens
  misc_RNA (1)...(19): siRNA sense strand
ggaaauggccacagggagc

SEQ ID NO: 2662582 - RNA, 19 nt, Homo sapiens
  misc_RNA (1)...(19): siRNA sense strand
cuugagagccagaacaaaa

SEQ ID NO: 2662583 - RNA, 19 nt, Homo sapiens
  misc_RNA (1)...(19): siRNA sense strand
uuucaaucauggagagugu

SEQ ID NO: 2662584 - RNA, 19 nt, Homo sapiens
  misc_RNA (1)...(19): siRNA sense strand
uagcuaaacaacagacaca

SEQ ID NO: 2662585 - RNA, 19 nt, Homo sapiens
  misc_RNA (1)...(19): siRNA sense strand
cuagauaugcugggaagaa

SEQ ID NO: 2662586 - RNA, 19 nt, Homo sapiens
  misc_RNA (1)...(19): siRNA sense strand
uauugaaagcugugaagga

SEQ ID NO: 2662587 - RNA, 19 nt, Homo sapiens
  misc_RNA (1)...(19): siRNA sense strand
caauacaagguucagcaaa

SEQ ID NO: 2662588 - RNA, 19 nt, Homo sapiens
  misc_RNA (1)...(19): siRNA sense strand
gggaacucaauguuauuaa

SEQ ID NO: 2662589 - RNA, 19 nt, Homo sapiens
  misc_RNA (1)...(19): siRNA sense strand
guacuaaaccagaugcagu

SEQ ID NO: 2662590 - RNA, 19 nt, Homo sapiens
  misc_RNA (1)...(19): siRNA sense strand
cuuuauagaggaagcuuga

SEQ ID NO: 2662591 - RNA, 19 nt, Homo sapiens
  misc_RNA (1)...(19): siRNA sense strand
gguaauuauuugggguauu

SEQ ID NO: 2662592 - RNA, 19 nt, Homo sapiens
  misc_RNA (1)...(19): siRNA sense strand
acagacacauguaagaaaa

SEQ ID NO: 2662593 - RNA, 19 nt, Homo sapiens
  misc_RNA (1)...(19): siRNA sense strand
agugaagcgagaacugaua

SEQ ID NO: 2662594 - RNA, 19 nt, Homo sapiens
  misc_RNA (1)...(19): siRNA sense strand
ugaaauuugggauguagaa

SEQ ID NO: 2662595 - RNA, 19 nt, Homo sapiens
  misc_RNA (1)...(19): siRNA sense strand
aguccuagaaguuguaaaa

SEQ ID NO: 2662596 - RNA, 19 nt, Homo sapiens
  misc_RNA (1)...(19): siRNA sense strand
gacgguuaccagaggagaa

SEQ ID NO: 2662597 - RNA, 19 nt, Homo sapiens
  misc_RNA (1)...(19): siRNA sense strand
uugaaagcugugaaggauu

SEQ ID NO: 2662598 - RNA, 19 nt, Homo sapiens
  misc_RNA (1)...(19): siRNA sense strand
guuuguugcuauuguuaga

SEQ ID NO: 2662599 - RNA, 19 nt, Homo sapiens
  misc_RNA (1)...(19): siRNA sense strand
acaacagacacauguaaga

SEQ ID NO: 2662600 - RNA, 19 nt, Homo sapiens
  misc_RNA (1)...(19): siRNA sense strand
ugaagcgagaacugauaaa

SEQ ID NO: 2662601 - RNA, 19 nt, Homo sapiens
  misc_RNA (1)...(19): siRNA sense strand
aauuugggauguagaagau

SEQ ID NO: 2662602 - RNA, 19 nt, Homo sapiens
  misc_RNA (1)...(19): siRNA sense strand
uuacauucuagaagaguca

SEQ ID NO: 2662603 - RNA, 19 nt, Homo sapiens
  misc_RNA (1)...(19): siRNA sense strand
aaauuugggauguagaaga

SEQ ID NO: 2662604 - RNA, 19 nt, Homo sapiens
  misc_RNA (1)...(19): siRNA sense strand
ccgaagaagugaagcgaga

SEQ ID NO: 2662605 - RNA, 19 nt, Homo sapiens
  misc_RNA (1)...(19): siRNA sense strand
caguauauguugucgggua

SEQ ID NO: 2662606 - RNA, 19 nt, Homo sapiens
  misc_RNA (1)...(19): siRNA sense strand
acucauauucucagggcua

SEQ ID NO: 2662607 - RNA, 19 nt, Homo sapiens
  misc_RNA (1)...(19): siRNA sense strand
ccuagaaguuguaaaagaa

SEQ ID NO: 2662608 - RNA, 19 nt, Homo sapiens
  misc_RNA (1)...(19): siRNA sense strand
cucaauguauagucggaaa

SEQ ID NO: 2662609 - RNA, 19 nt, Homo sapiens
  misc_RNA (1)...(19): siRNA sense strand
agauguugcuagugacuca

SEQ ID NO: 2662610 - RNA, 19 nt, Homo sapiens
  misc_RNA (1)...(19): siRNA sense strand
gcugugaaggauugggaga

SEQ ID NO: 2662611 - RNA, 19 nt, Homo sapiens
  misc_RNA (1)...(19): siRNA sense strand
ggguauucuggcaaugaaa

SEQ ID NO: 2662612 - RNA, 19 nt, Homo sapiens
  misc_RNA (1)...(19): siRNA sense strand
cagcaaaucugcaaaccca

SEQ ID NO: 2662613 - RNA, 19 nt, Homo sapiens
  misc_RNA (1)...(19): siRNA sense strand
ggaaauggccacagggagc

SEQ ID NO: 2662614 - RNA, 19 nt, Homo sapiens
  misc_RNA (1)...(19): siRNA sense strand
cuugagagccagaacaaaa

SEQ ID NO: 2662615 - RNA, 19 nt, Homo sapiens
  misc_RNA (1)...(19): siRNA sense strand
uuucaaucauggagagugu

SEQ ID NO: 2662616 - RNA, 19 nt, Homo sapiens
  misc_RNA (1)...(19): siRNA sense strand
uagcuaaacaacagacaca

SEQ ID NO: 2662617 - RNA, 19 nt, Homo sapiens
  misc_RNA (1)...(19): siRNA sense strand
cuagauaugcugggaagaa

SEQ ID NO: 2662618 - RNA, 19 nt, Homo sapiens
  misc_RNA (1)...(19): siRNA sense strand
uauugaaagcugugaagga

SEQ ID NO: 2662619 - RNA, 19 nt, Homo sapiens
  misc_RNA (1)...(19): siRNA sense strand
caauacaagguucagcaaa

SEQ ID NO: 2662620 - RNA, 19 nt, Homo sapiens
  misc_RNA (1)...(19): siRNA sense strand
gggaacucaauguuauuaa

SEQ ID NO: 2662621 - RNA, 19 nt, Homo sapiens
  misc_RNA (1)...(19): siRNA sense strand
guacuaaaccagaugcagu

SEQ ID NO: 2662622 - RNA, 19 nt, Homo sapiens
  misc_RNA (1)...(19): siRNA sense strand
cuuuauagaggaagcuuga

SEQ ID NO: 2662623 - RNA, 19 nt, Homo sapiens
  misc_RNA (1)...(19): siRNA sense strand
gguaauuauuugggguauu

SEQ ID NO: 2662624 - RNA, 19 nt, Homo sapiens
  misc_RNA (1)...(19): siRNA sense strand
acagacacauguaagaaaa

SEQ ID NO: 2662625 - RNA, 19 nt, Homo sapiens
  misc_RNA (1)...(19): siRNA sense strand
agugaagcgagaacugaua

SEQ ID NO: 2662626 - RNA, 19 nt, Homo sapiens
  misc_RNA (1)...(19): siRNA sense strand
ugaaauuugggauguagaa

SEQ ID NO: 2662627 - RNA, 19 nt, Homo sapiens
  misc_RNA (1)...(19): siRNA sense strand
aguccuagaaguuguaaaa

SEQ ID NO: 2662628 - RNA, 19 nt, Homo sapiens
  misc_RNA (1)...(19): siRNA sense strand
gacgguuaccagaggagaa

SEQ ID NO: 2662629 - RNA, 19 nt, Homo sapiens
  misc_RNA (1)...(19): siRNA sense strand
uugaaagcugugaaggauu

SEQ ID NO: 2662630 - RNA, 19 nt, Homo sapiens
  misc_RNA (1)...(19): siRNA sense strand
guuuguugcuauuguuaga

SEQ ID NO: 2662631 - RNA, 19 nt, Homo sapiens
  misc_RNA (1)...(19): siRNA sense strand
acaacagacacauguaaga

SEQ ID NO: 2662632 - RNA, 19 nt, Homo sapiens
  misc_RNA (1)...(19): siRNA sense strand
ugaagcgagaacugauaaa

SEQ ID NO: 2662633 - RNA, 19 nt, Homo sapiens
  misc_RNA (1)...(19): siRNA sense strand
aauuugggauguagaagau

SEQ ID NO: 2662634 - RNA, 19 nt, Homo sapiens
  misc_RNA (1)...(19): siRNA sense strand
uuacauucuagaagaguca

SEQ ID NO: 2662635 - RNA, 19 nt, Homo sapiens
  misc_RNA (1)...(19): siRNA sense strand
aaauuugggauguagaaga

SEQ ID NO: 2662636 - RNA, 19 nt, Homo sapiens
  misc_RNA (1)...(19): siRNA sense strand
agguauacuuggauggaau

SEQ ID NO: 2662637 - RNA, 19 nt, Homo sapiens
  misc_RNA (1)...(19): siRNA sense strand
aaauaaucccacagaggaa

SEQ ID NO: 2662638 - RNA, 19 nt, Homo sapiens
  misc_RNA (1)...(19): siRNA sense strand
agcauuggcuggagggaau

SEQ ID NO: 2662639 - RNA, 19 nt, Homo sapiens
  misc_RNA (1)...(19): siRNA sense strand
uggaacacuuagagaagau

SEQ ID NO: 2662640 - RNA, 19 nt, Homo sapiens
  misc_RNA (1)...(19): siRNA sense strand
cuccaaaagauguagaaaa

SEQ ID NO: 2662641 - RNA, 19 nt, Homo sapiens
  misc_RNA (1)...(19): siRNA sense strand
ucuaaaugcagaagauuca

SEQ ID NO: 2662642 - RNA, 19 nt, Homo sapiens
  misc_RNA (1)...(19): siRNA sense strand
cagaagauucauugaucau

SEQ ID NO: 2662643 - RNA, 19 nt, Homo sapiens
  misc_RNA (1)...(19): siRNA sense strand
cauugaucauugacaacaa

SEQ ID NO: 2662644 - RNA, 19 nt, Homo sapiens
  misc_RNA (1)...(19): siRNA sense strand
aaacaugagcuaaagccaa

SEQ ID NO: 2662645 - RNA, 19 nt, Homo sapiens
  misc_RNA (1)...(19): siRNA sense strand
aggaaggacuagcaagcau

SEQ ID NO: 2662646 - RNA, 19 nt, Homo sapiens
  misc_RNA (1)...(19): siRNA sense strand
gugaaugaacugacugaca

SEQ ID NO: 2662647 - RNA, 19 nt, Homo sapiens
  misc_RNA (1)...(19): siRNA sense strand
uguuacagggaauggcaua

SEQ ID NO: 2662648 - RNA, 19 nt, Homo sapiens
  misc_RNA (1)...(19): siRNA sense strand
acacauuauuuucgaggua

SEQ ID NO: 2662649 - RNA, 19 nt, Homo sapiens
  misc_RNA (1)...(19): siRNA sense strand
gcaugaaauagguacacau

SEQ ID NO: 2662650 - RNA, 19 nt, Homo sapiens
  misc_RNA (1)...(19): siRNA sense strand
gagcauuggcuggagggaa

SEQ ID NO: 2662651 - RNA, 19 nt, Homo sapiens
  misc_RNA (1)...(19): siRNA sense strand
ccaacuuagagaaagaaaa

SEQ ID NO: 2662652 - RNA, 19 nt, Homo sapiens
  misc_RNA (1)...(19): siRNA sense strand
augaagauguggaucgcuu

SEQ ID NO: 2662653 - RNA, 19 nt, Homo sapiens
  misc_RNA (1)...(19): siRNA sense strand
cugacagggaacugaaaga

SEQ ID NO: 2662654 - RNA, 19 nt, Homo sapiens
  misc_RNA (1)...(19): siRNA sense strand
cugccaagcguauuagcua

SEQ ID NO: 2662655 - RNA, 19 nt, Homo sapiens
  misc_RNA (1)...(19): siRNA sense strand
ggauuggcaguuaccgaaa

SEQ ID NO: 2662656 - RNA, 19 nt, Homo sapiens
  misc_RNA (1)...(19): siRNA sense strand
auauggaacacuuagagaa

SEQ ID NO: 2662657 - RNA, 19 nt, Homo sapiens
  misc_RNA (1)...(19): siRNA sense strand
gcguauuagcuaagcauag

SEQ ID NO: 2662658 - RNA, 19 nt, Homo sapiens
  misc_RNA (1)...(19): siRNA sense strand
caauacaagaugggauuau

SEQ ID NO: 2662659 - RNA, 19 nt, Homo sapiens
  misc_RNA (1)...(19): siRNA sense strand
ccgauauauggaacacuua

SEQ ID NO: 2662660 - RNA, 19 nt, Homo sapiens
  misc_RNA (1)...(19): siRNA sense strand
ugaacugacugacagggaa

SEQ ID NO: 2662661 - RNA, 19 nt, Homo sapiens
  misc_RNA (1)...(19): siRNA sense strand
guuuaucaagccagccaaa

SEQ ID NO: 2662662 - RNA, 19 nt, Homo sapiens
  misc_RNA (1)...(19): siRNA sense strand
agguauacuuggauggaau

SEQ ID NO: 2662663 - RNA, 19 nt, Homo sapiens
  misc_RNA (1)...(19): siRNA sense strand
aaauaaucccacagaggaa

SEQ ID NO: 2662664 - RNA, 19 nt, Homo sapiens
  misc_RNA (1)...(19): siRNA sense strand
agcauuggcuggagggaau

SEQ ID NO: 2662665 - RNA, 19 nt, Homo sapiens
  misc_RNA (1)...(19): siRNA sense strand
uggaacacuuagagaagau

SEQ ID NO: 2662666 - RNA, 19 nt, Homo sapiens
  misc_RNA (1)...(19): siRNA sense strand
cuccaaaagauguagaaaa

SEQ ID NO: 2662667 - RNA, 19 nt, Homo sapiens
  misc_RNA (1)...(19): siRNA sense strand
ucuaaaugcagaagauuca

SEQ ID NO: 2662668 - RNA, 19 nt, Homo sapiens
  misc_RNA (1)...(19): siRNA sense strand
cagaagauucauugaucau

SEQ ID NO: 2662669 - RNA, 19 nt, Homo sapiens
  misc_RNA (1)...(19): siRNA sense strand
cauugaucauugacaacaa

SEQ ID NO: 2662670 - RNA, 19 nt, Homo sapiens
  misc_RNA (1)...(19): siRNA sense strand
aaacaugagcuaaagccaa

SEQ ID NO: 2662671 - RNA, 19 nt, Homo sapiens
  misc_RNA (1)...(19): siRNA sense strand
aggaaggacuagcaagcau

SEQ ID NO: 2662672 - RNA, 19 nt, Homo sapiens
  misc_RNA (1)...(19): siRNA sense strand
gugaaugaacugacugaca

SEQ ID NO: 2662673 - RNA, 19 nt, Homo sapiens
  misc_RNA (1)...(19): siRNA sense strand
uguuacagggaauggcaua

SEQ ID NO: 2662674 - RNA, 19 nt, Homo sapiens
  misc_RNA (1)...(19): siRNA sense strand
acacauuauuuucgaggua

SEQ ID NO: 2662675 - RNA, 19 nt, Homo sapiens
  misc_RNA (1)...(19): siRNA sense strand
gcaugaaauagguacacau

SEQ ID NO: 2662676 - RNA, 19 nt, Homo sapiens
  misc_RNA (1)...(19): siRNA sense strand
gagcauuggcuggagggaa

SEQ ID NO: 2662677 - RNA, 19 nt, Homo sapiens
  misc_RNA (1)...(19): siRNA sense strand
ccaacuuagagaaagaaaa

SEQ ID NO: 2662678 - RNA, 19 nt, Homo sapiens
  misc_RNA (1)...(19): siRNA sense strand
augaagauguggaucgcuu

SEQ ID NO: 2662679 - RNA, 19 nt, Homo sapiens
  misc_RNA (1)...(19): siRNA sense strand
cugacagggaacugaaaga

SEQ ID NO: 2662680 - RNA, 19 nt, Homo sapiens
  misc_RNA (1)...(19): siRNA sense strand
cugccaagcguauuagcua

SEQ ID NO: 2662681 - RNA, 19 nt, Homo sapiens
  misc_RNA (1)...(19): siRNA sense strand
ggauuggcaguuaccgaaa

SEQ ID NO: 2662682 - RNA, 19 nt, Homo sapiens
  misc_RNA (1)...(19): siRNA sense strand
auauggaacacuuagagaa

SEQ ID NO: 2662683 - RNA, 19 nt, Homo sapiens
  misc_RNA (1)...(19): siRNA sense strand
gcguauuagcuaagcauag

SEQ ID NO: 2662684 - RNA, 19 nt, Homo sapiens
  misc_RNA (1)...(19): siRNA sense strand
caauacaagaugggauuau

SEQ ID NO: 2662685 - RNA, 19 nt, Homo sapiens
  misc_RNA (1)...(19): siRNA sense strand
ccgauauauggaacacuua

SEQ ID NO: 2662686 - RNA, 19 nt, Homo sapiens
  misc_RNA (1)...(19): siRNA sense strand
ugaacugacugacagggaa

SEQ ID NO: 2662687 - RNA, 19 nt, Homo sapiens
  misc_RNA (1)...(19): siRNA sense strand
guuuaucaagccagccaaa

SEQ ID NO: 2662688 - RNA, 19 nt, Homo sapiens
  misc_RNA (1)...(19): siRNA sense strand
aggccuaagucguccucaa

SEQ ID NO: 2662689 - RNA, 19 nt, Homo sapiens
  misc_RNA (1)...(19): siRNA sense strand
ccucccagcaaguaagcaa

SEQ ID NO: 2662690 - RNA, 19 nt, Homo sapiens
  misc_RNA (1)...(19): siRNA sense strand
gaugcagccaggaggaaca

SEQ ID NO: 2662691 - RNA, 19 nt, Homo sapiens
  misc_RNA (1)...(19): siRNA sense strand
ucaccaagauaaagcggaa

SEQ ID NO: 2662692 - RNA, 19 nt, Homo sapiens
  misc_RNA (1)...(19): siRNA sense strand
caccaaaccaagaggucaa

SEQ ID NO: 2662693 - RNA, 19 nt, Homo sapiens
  misc_RNA (1)...(19): siRNA sense strand
ggucaugacugucgccaca

SEQ ID NO: 2662694 - RNA, 19 nt, Homo sapiens
  misc_RNA (1)...(19): siRNA sense strand
ggugaugguucauucgcau

SEQ ID NO: 2662695 - RNA, 19 nt, Homo sapiens
  misc_RNA (1)...(19): siRNA sense strand
ucaccaagauaaagcggaa

SEQ ID NO: 2662696 - RNA, 19 nt, Homo sapiens
  misc_RNA (1)...(19): siRNA sense strand
caccaaaccaagaggucaa

SEQ ID NO: 2662697 - RNA, 19 nt, Homo sapiens
  misc_RNA (1)...(19): siRNA sense strand
ggucaugacugucgccaca

SEQ ID NO: 2662698 - RNA, 19 nt, Homo sapiens
  misc_RNA (1)...(19): siRNA sense strand
ggugaugguucauucgcau

SEQ ID NO: 2662699 - RNA, 19 nt, Homo sapiens
  misc_RNA (1)...(19): siRNA sense strand
aggaagaguacgagcgcga

SEQ ID NO: 2662700 - RNA, 19 nt, Homo sapiens
  misc_RNA (1)...(19): siRNA sense strand
aggacaagguagcugggaa

SEQ ID NO: 2662701 - RNA, 19 nt, Homo sapiens
  misc_RNA (1)...(19): siRNA sense strand
ggacaagguagcugggaag

SEQ ID NO: 2662702 - RNA, 19 nt, Homo sapiens
  misc_RNA (1)...(19): siRNA sense strand
aguacgagcgcgagggcau

SEQ ID NO: 2662703 - RNA, 19 nt, Homo sapiens
  misc_RNA (1)...(19): siRNA sense strand
ccuacaaggcaaugaagca

SEQ ID NO: 2662704 - RNA, 19 nt, Homo sapiens
  misc_RNA (1)...(19): siRNA sense strand
aggacaagcagcugcauga

SEQ ID NO: 2662705 - RNA, 19 nt, Homo sapiens
  misc_RNA (1)...(19): siRNA sense strand
aggcagugaccgaggccau

SEQ ID NO: 2662706 - RNA, 19 nt, Homo sapiens
  misc_RNA (1)...(19): siRNA sense strand
ugagaggcagugaggacaa

SEQ ID NO: 2662707 - RNA, 19 nt, Homo sapiens
  misc_RNA (1)...(19): siRNA sense strand
aggaacaggaagaguacga

SEQ ID NO: 2662708 - RNA, 19 nt, Homo sapiens
  misc_RNA (1)...(19): siRNA sense strand
ucaagcagcacguggguga

SEQ ID NO: 2662709 - RNA, 19 nt, Homo sapiens
  misc_RNA (1)...(19): siRNA sense strand
aacugcacuuggagagaaa

SEQ ID NO: 2662710 - RNA, 19 nt, Homo sapiens
  misc_RNA (1)...(19): siRNA sense strand
ugaagcaggaacaggaaga

SEQ ID NO: 2662711 - RNA, 19 nt, Homo sapiens
  misc_RNA (1)...(19): siRNA sense strand
gcaucaagcccaaugagga

SEQ ID NO: 2662712 - RNA, 19 nt, Homo sapiens
  misc_RNA (1)...(19): siRNA sense strand
gcugagguggagaggguca

SEQ ID NO: 2662713 - RNA, 19 nt, Homo sapiens
  misc_RNA (1)...(19): siRNA sense strand
gcugagaggcagugaggac

SEQ ID NO: 2662714 - RNA, 19 nt, Homo sapiens
  misc_RNA (1)...(19): siRNA sense strand
ggaagcuggaugagaacca

SEQ ID NO: 2662715 - RNA, 19 nt, Homo sapiens
  misc_RNA (1)...(19): siRNA sense strand
cuggcagagcguugaguau

SEQ ID NO: 2662716 - RNA, 19 nt, Homo sapiens
  misc_RNA (1)...(19): siRNA sense strand
gcaccaucacugaccgaau

SEQ ID NO: 2662717 - RNA, 19 nt, Homo sapiens
  misc_RNA (1)...(19): siRNA sense strand
caucaagccuguuugcuca

SEQ ID NO: 2662718 - RNA, 19 nt, Homo sapiens
  misc_RNA (1)...(19): siRNA sense strand
ucuacaagcuggacccuga

SEQ ID NO: 2662719 - RNA, 19 nt, Homo sapiens
  misc_RNA (1)...(19): siRNA sense strand
agcaggaacaggaagagua

SEQ ID NO: 2662720 - RNA, 19 nt, Homo sapiens
  misc_RNA (1)...(19): siRNA sense strand
ccaucauugugcugcuauu

SEQ ID NO: 2662721 - RNA, 19 nt, Homo sapiens
  misc_RNA (1)...(19): siRNA sense strand
uggagagggucaaggacgu

SEQ ID NO: 2662722 - RNA, 19 nt, Homo sapiens
  misc_RNA (1)...(19): siRNA sense strand
ccugugugcuggaggccuu

SEQ ID NO: 2662723 - RNA, 19 nt, Homo sapiens
  misc_RNA (1)...(19): siRNA sense strand
uguuugaguggguggugaa

SEQ ID NO: 2662724 - RNA, 19 nt, Homo sapiens
  misc_RNA (1)...(19): siRNA sense strand
aggaagaguacgagcgcga

SEQ ID NO: 2662725 - RNA, 19 nt, Homo sapiens
  misc_RNA (1)...(19): siRNA sense strand
aggacaagguagcugggaa

SEQ ID NO: 2662726 - RNA, 19 nt, Homo sapiens
  misc_RNA (1)...(19): siRNA sense strand
ggacaagguagcugggaag

SEQ ID NO: 2662727 - RNA, 19 nt, Homo sapiens
  misc_RNA (1)...(19): siRNA sense strand
aguacgagcgcgagggcau

SEQ ID NO: 2662728 - RNA, 19 nt, Homo sapiens
  misc_RNA (1)...(19): siRNA sense strand
ccuacaaggcaaugaagca

SEQ ID NO: 2662729 - RNA, 19 nt, Homo sapiens
  misc_RNA (1)...(19): siRNA sense strand
aggacaagcagcugcauga

SEQ ID NO: 2662730 - RNA, 19 nt, Homo sapiens
  misc_RNA (1)...(19): siRNA sense strand
aggcagugaccgaggccau

SEQ ID NO: 2662731 - RNA, 19 nt, Homo sapiens
  misc_RNA (1)...(19): siRNA sense strand
ugagaggcagugaggacaa

SEQ ID NO: 2662732 - RNA, 19 nt, Homo sapiens
  misc_RNA (1)...(19): siRNA sense strand
aggaacaggaagaguacga

SEQ ID NO: 2662733 - RNA, 19 nt, Homo sapiens
  misc_RNA (1)...(19): siRNA sense strand
ucaagcagcacguggguga

SEQ ID NO: 2662734 - RNA, 19 nt, Homo sapiens
  misc_RNA (1)...(19): siRNA sense strand
aacugcacuuggagagaaa

SEQ ID NO: 2662735 - RNA, 19 nt, Homo sapiens
  misc_RNA (1)...(19): siRNA sense strand
ugaagcaggaacaggaaga

SEQ ID NO: 2662736 - RNA, 19 nt, Homo sapiens
  misc_RNA (1)...(19): siRNA sense strand
gcaucaagcccaaugagga

SEQ ID NO: 2662737 - RNA, 19 nt, Homo sapiens
  misc_RNA (1)...(19): siRNA sense strand
gcugagguggagaggguca

SEQ ID NO: 2662738 - RNA, 19 nt, Homo sapiens
  misc_RNA (1)...(19): siRNA sense strand
gcugagaggcagugaggac

SEQ ID NO: 2662739 - RNA, 19 nt, Homo sapiens
  misc_RNA (1)...(19): siRNA sense strand
ggaagcuggaugagaacca

SEQ ID NO: 2662740 - RNA, 19 nt, Homo sapiens
  misc_RNA (1)...(19): siRNA sense strand
cuggcagagcguugaguau

SEQ ID NO: 2662741 - RNA, 19 nt, Homo sapiens
  misc_RNA (1)...(19): siRNA sense strand
gcaccaucacugaccgaau

SEQ ID NO: 2662742 - RNA, 19 nt, Homo sapiens
  misc_RNA (1)...(19): siRNA sense strand
caucaagccuguuugcuca

SEQ ID NO: 2662743 - RNA, 19 nt, Homo sapiens
  misc_RNA (1)...(19): siRNA sense strand
ucuacaagcuggacccuga

SEQ ID NO: 2662744 - RNA, 19 nt, Homo sapiens
  misc_RNA (1)...(19): siRNA sense strand
agcaggaacaggaagagua

SEQ ID NO: 2662745 - RNA, 19 nt, Homo sapiens
  misc_RNA (1)...(19): siRNA sense strand
ccaucauugugcugcuauu

SEQ ID NO: 2662746 - RNA, 19 nt, Homo sapiens
  misc_RNA (1)...(19): siRNA sense strand
uggagagggucaaggacgu

SEQ ID NO: 2662747 - RNA, 19 nt, Homo sapiens
  misc_RNA (1)...(19): siRNA sense strand
ccugugugcuggaggccuu

SEQ ID NO: 2662748 - RNA, 19 nt, Homo sapiens
  misc_RNA (1)...(19): siRNA sense strand
uguuugaguggguggugaa

SEQ ID NO: 2662749 - RNA, 19 nt, Homo sapiens
  misc_RNA (1)...(19): siRNA sense strand
ggaaauagcagaagcccuu

SEQ ID NO: 2662750 - RNA, 19 nt, Homo sapiens
  misc_RNA (1)...(19): siRNA sense strand
aggaagacucuguggaaga

SEQ ID NO: 2662751 - RNA, 19 nt, Homo sapiens
  misc_RNA (1)...(19): siRNA sense strand
aggaagaggaagaggagga

SEQ ID NO: 2662752 - RNA, 19 nt, Homo sapiens
  misc_RNA (1)...(19): siRNA sense strand
aggaagaggaggaggagga

SEQ ID NO: 2662753 - RNA, 19 nt, Homo sapiens
  misc_RNA (1)...(19): siRNA sense strand
ccucagaacuugaaggaag

SEQ ID NO: 2662754 - RNA, 19 nt, Homo sapiens
  misc_RNA (1)...(19): siRNA sense strand
agugcaaggaagaggaaga

SEQ ID NO: 2662755 - RNA, 19 nt, Homo sapiens
  misc_RNA (1)...(19): siRNA sense strand
gaagaaggcccgaaaggca

SEQ ID NO: 2662756 - RNA, 19 nt, Homo sapiens
  misc_RNA (1)...(19): siRNA sense strand
gcaaggaagaggaagagga

SEQ ID NO: 2662757 - RNA, 19 nt, Homo sapiens
  misc_RNA (1)...(19): siRNA sense strand
aagaagaagaggaggcugu

SEQ ID NO: 2662758 - RNA, 19 nt, Homo sapiens
  misc_RNA (1)...(19): siRNA sense strand
cagcgagaucuuaggccaa

SEQ ID NO: 2662759 - RNA, 19 nt, Homo sapiens
  misc_RNA (1)...(19): siRNA sense strand
gaaagaggccugaguggca

SEQ ID NO: 2662760 - RNA, 19 nt, Homo sapiens
  misc_RNA (1)...(19): siRNA sense strand
aggccaagauugaggaccu

SEQ ID NO: 2662761 - RNA, 19 nt, Homo sapiens
  misc_RNA (1)...(19): siRNA sense strand
aggaggaagagguggacga

SEQ ID NO: 2662762 - RNA, 19 nt, Homo sapiens
  misc_RNA (1)...(19): siRNA sense strand
cagaaagccuguagcugca

SEQ ID NO: 2662763 - RNA, 19 nt, Homo sapiens
  misc_RNA (1)...(19): siRNA sense strand
gggaugagcugcuggacuc

SEQ ID NO: 2662764 - RNA, 19 nt, Homo sapiens
  misc_RNA (1)...(19): siRNA sense strand
aagaggaagaggaggagga

SEQ ID NO: 2662765 - RNA, 19 nt, Homo sapiens
  misc_RNA (1)...(19): siRNA sense strand
aagaaggcccgaaaggcaa

SEQ ID NO: 2662766 - RNA, 19 nt, Homo sapiens
  misc_RNA (1)...(19): siRNA sense strand
caggagggcaucagcgaga

SEQ ID NO: 2662767 - RNA, 19 nt, Homo sapiens
  misc_RNA (1)...(19): siRNA sense strand
aggaaguaggugaggccuu

SEQ ID NO: 2662768 - RNA, 19 nt, Homo sapiens
  misc_RNA (1)...(19): siRNA sense strand
gccaauguguccagggcca

SEQ ID NO: 2662769 - RNA, 19 nt, Homo sapiens
  misc_RNA (1)...(19): siRNA sense strand
cggcugaagggcuggacuu

SEQ ID NO: 2662770 - RNA, 19 nt, Homo sapiens
  misc_RNA (1)...(19): siRNA sense strand
cagaggaagaagaagagga

SEQ ID NO: 2662771 - RNA, 19 nt, Homo sapiens
  misc_RNA (1)...(19): siRNA sense strand
cggcagauucagggaguca

SEQ ID NO: 2662772 - RNA, 19 nt, Homo sapiens
  misc_RNA (1)...(19): siRNA sense strand
aggaggaggaagaggugga

SEQ ID NO: 2662773 - RNA, 19 nt, Homo sapiens
  misc_RNA (1)...(19): siRNA sense strand
agagacaaccacagugaca

SEQ ID NO: 2662774 - RNA, 19 nt, Homo sapiens
  misc_RNA (1)...(19): siRNA sense strand
auccagaaguccaagaaca

SEQ ID NO: 2662775 - RNA, 19 nt, Homo sapiens
  misc_RNA (1)...(19): siRNA sense strand
gcacaaagccgcagcugag

SEQ ID NO: 2662776 - RNA, 19 nt, Homo sapiens
  misc_RNA (1)...(19): siRNA sense strand
aggcagaugaugagaggcu

SEQ ID NO: 2662777 - RNA, 19 nt, Homo sapiens
  misc_RNA (1)...(19): siRNA sense strand
gcagagucgcagugagaag

SEQ ID NO: 2662778 - RNA, 19 nt, Homo sapiens
  misc_RNA (1)...(19): siRNA sense strand
cuucaagagcccagccuca

SEQ ID NO: 2662779 - RNA, 19 nt, Homo sapiens
  misc_RNA (1)...(19): siRNA sense strand
ccaugguggaugaacgaga

SEQ ID NO: 2662780 - RNA, 19 nt, Homo sapiens
  misc_RNA (1)...(19): siRNA sense strand
gaaggaagaaggagggcug

SEQ ID NO: 2662781 - RNA, 19 nt, Homo sapiens
  misc_RNA (1)...(19): siRNA sense strand
ggcuggagugcaaggaaga

SEQ ID NO: 2662782 - RNA, 19 nt, Homo sapiens
  misc_RNA (1)...(19): siRNA sense strand
ccgaagaccuccagggcau

SEQ ID NO: 2662783 - RNA, 19 nt, Homo sapiens
  misc_RNA (1)...(19): siRNA sense strand
gguauauccaccacagcaa

SEQ ID NO: 2662784 - RNA, 19 nt, Homo sapiens
  misc_RNA (1)...(19): siRNA sense strand
cagcaauuugggagacuca

SEQ ID NO: 2662785 - RNA, 19 nt, Homo sapiens
  misc_RNA (1)...(19): siRNA sense strand
caacaccagcagagcucaa

SEQ ID NO: 2662786 - RNA, 19 nt, Homo sapiens
  misc_RNA (1)...(19): siRNA sense strand
ccgaagaccuccagggcau

SEQ ID NO: 2662787 - RNA, 19 nt, Homo sapiens
  misc_RNA (1)...(19): siRNA sense strand
gguauauccaccacagcaa

SEQ ID NO: 2662788 - RNA, 19 nt, Homo sapiens
  misc_RNA (1)...(19): siRNA sense strand
cagcaauuugggagacuca

SEQ ID NO: 2662789 - RNA, 19 nt, Homo sapiens
  misc_RNA (1)...(19): siRNA sense strand
caacaccagcagagcucaa

SEQ ID NO: 2662790 - RNA, 19 nt, Homo sapiens
  misc_RNA (1)...(19): siRNA sense strand
acgaaauacgcgagguuca

SEQ ID NO: 2662791 - RNA, 19 nt, Homo sapiens
  misc_RNA (1)...(19): siRNA sense strand
accuaaggaugguggaaca

SEQ ID NO: 2662792 - RNA, 19 nt, Homo sapiens
  misc_RNA (1)...(19): siRNA sense strand
agacgaaauacgcgagguu

SEQ ID NO: 2662793 - RNA, 19 nt, Homo sapiens
  misc_RNA (1)...(19): siRNA sense strand
aguaugaacaugcggccaa

SEQ ID NO: 2662794 - RNA, 19 nt, Homo sapiens
  misc_RNA (1)...(19): siRNA sense strand
uggaagaagagccaccuaa

SEQ ID NO: 2662795 - RNA, 19 nt, Homo sapiens
  misc_RNA (1)...(19): siRNA sense strand
gagcaauagaggaggaaaa

SEQ ID NO: 2662796 - RNA, 19 nt, Homo sapiens
  misc_RNA (1)...(19): siRNA sense strand
gugaaaaugaagaggauaa

SEQ ID NO: 2662797 - RNA, 19 nt, Homo sapiens
  misc_RNA (1)...(19): siRNA sense strand
gcuacaaaugugugguaaa

SEQ ID NO: 2662798 - RNA, 19 nt, Homo sapiens
  misc_RNA (1)...(19): siRNA sense strand
gaguagagggaguggaaca

SEQ ID NO: 2662799 - RNA, 19 nt, Homo sapiens
  misc_RNA (1)...(19): siRNA sense strand
gaggaaacuucgagaucau

SEQ ID NO: 2662800 - RNA, 19 nt, Homo sapiens
  misc_RNA (1)...(19): siRNA sense strand
cgaagaaagaugaggaaac

SEQ ID NO: 2662801 - RNA, 19 nt, Homo sapiens
  misc_RNA (1)...(19): siRNA sense strand
caguuaaaucucagggaau

SEQ ID NO: 2662802 - RNA, 19 nt, Homo sapiens
  misc_RNA (1)...(19): siRNA sense strand
cugacaaauggaagaauaa

SEQ ID NO: 2662803 - RNA, 19 nt, Homo sapiens
  misc_RNA (1)...(19): siRNA sense strand
guucaggaguagagggagu

SEQ ID NO: 2662804 - RNA, 19 nt, Homo sapiens
  misc_RNA (1)...(19): siRNA sense strand
acacaaagauaucuggaga

SEQ ID NO: 2662805 - RNA, 19 nt, Homo sapiens
  misc_RNA (1)...(19): siRNA sense strand
ccuaguacagggagugaaa

SEQ ID NO: 2662806 - RNA, 19 nt, Homo sapiens
  misc_RNA (1)...(19): siRNA sense strand
cguuaugaaucuuggaguu

SEQ ID NO: 2662807 - RNA, 19 nt, Homo sapiens
  misc_RNA (1)...(19): siRNA sense strand
gaaauuagucagaggguac

SEQ ID NO: 2662808 - RNA, 19 nt, Homo sapiens
  misc_RNA (1)...(19): siRNA sense strand
cuuugaaauuccagacaau

SEQ ID NO: 2662809 - RNA, 19 nt, Homo sapiens
  misc_RNA (1)...(19): siRNA sense strand
cagaaaggccaguugguga

SEQ ID NO: 2662810 - RNA, 19 nt, Homo sapiens
  misc_RNA (1)...(19): siRNA sense strand
ccagauaaguaauggcagu

SEQ ID NO: 2662811 - RNA, 19 nt, Homo sapiens
  misc_RNA (1)...(19): siRNA sense strand
gaaagaacugagagaagau

SEQ ID NO: 2662812 - RNA, 19 nt, Homo sapiens
  misc_RNA (1)...(19): siRNA sense strand
cgacgagcacagaggaaga

SEQ ID NO: 2662813 - RNA, 19 nt, Homo sapiens
  misc_RNA (1)...(19): siRNA sense strand
ggaaaguauaugcagaauu

SEQ ID NO: 2662814 - RNA, 19 nt, Homo sapiens
  misc_RNA (1)...(19): siRNA sense strand
gggaguggaacaugaagaa

SEQ ID NO: 2662815 - RNA, 19 nt, Homo sapiens
  misc_RNA (1)...(19): siRNA sense strand
gaggauaaaagaaggacaa

SEQ ID NO: 2662816 - RNA, 19 nt, Homo sapiens
  misc_RNA (1)...(19): siRNA sense strand
ccuucagaauggaaaguau

SEQ ID NO: 2662817 - RNA, 19 nt, Homo sapiens
  misc_RNA (1)...(19): siRNA sense strand
caaacaacgucuugggaag

SEQ ID NO: 2662818 - RNA, 19 nt, Homo sapiens
  misc_RNA (1)...(19): siRNA sense strand
cagcuguguuggaguagaa

SEQ ID NO: 2662819 - RNA, 19 nt, Homo sapiens
  misc_RNA (1)...(19): siRNA sense strand
guaccugaauggagagcga

SEQ ID NO: 2662820 - RNA, 19 nt, Homo sapiens
  misc_RNA (1)...(19): siRNA sense strand
cuucagaauggaaaguaua

SEQ ID NO: 2662821 - RNA, 19 nt, Homo sapiens
  misc_RNA (1)...(19): siRNA sense strand
gauacaaagaugucugaau

SEQ ID NO: 2662822 - RNA, 19 nt, Homo sapiens
  misc_RNA (1)...(19): siRNA sense strand
cugaaagaacugagagaag

SEQ ID NO: 2662823 - RNA, 19 nt, Homo sapiens
  misc_RNA (1)...(19): siRNA sense strand
aguuaaaucucagggaauu

SEQ ID NO: 2662824 - RNA, 19 nt, Homo sapiens
  misc_RNA (1)...(19): siRNA sense strand
gggaauuccuauugugugu

SEQ ID NO: 2662825 - RNA, 19 nt, Homo sapiens
  misc_RNA (1)...(19): siRNA sense strand
aggaguagagggaguggaa

SEQ ID NO: 2662826 - RNA, 19 nt, Homo sapiens
  misc_RNA (1)...(19): siRNA sense strand
gguggaggucccugauaua

SEQ ID NO: 2662827 - RNA, 19 nt, Homo sapiens
  misc_RNA (1)...(19): siRNA sense strand
ugucaagacugaagaucca

SEQ ID NO: 2662828 - RNA, 19 nt, Homo sapiens
  misc_RNA (1)...(19): siRNA sense strand
uuggagauaagguggauaa

SEQ ID NO: 2662829 - RNA, 19 nt, Homo sapiens
  misc_RNA (1)...(19): siRNA sense strand
acaucaugcuguugacauu

SEQ ID NO: 2662830 - RNA, 19 nt, Homo sapiens
  misc_RNA (1)...(19): siRNA sense strand
ccgaagaaagaugaggaaa

SEQ ID NO: 2662831 - RNA, 19 nt, Homo sapiens
  misc_RNA (1)...(19): siRNA sense strand
ggauaaaagaaggacaaaa

SEQ ID NO: 2662832 - RNA, 19 nt, Homo sapiens
  misc_RNA (1)...(19): siRNA sense strand
ggaguagaucaucaggaua

SEQ ID NO: 2662833 - RNA, 19 nt, Homo sapiens
  misc_RNA (1)...(19): siRNA sense strand
uccuuaaguugaacagaaa

SEQ ID NO: 2662834 - RNA, 19 nt, Homo sapiens
  misc_RNA (1)...(19): siRNA sense strand
ccaguuaaaucucagggaa

SEQ ID NO: 2662835 - RNA, 19 nt, Homo sapiens
  misc_RNA (1)...(19): siRNA sense strand
caucagaaaggaagguuca

SEQ ID NO: 2662836 - RNA, 19 nt, Homo sapiens
  misc_RNA (1)...(19): siRNA sense strand
agaaaggccaguuggugaa

SEQ ID NO: 2662837 - RNA, 19 nt, Homo sapiens
  misc_RNA (1)...(19): siRNA sense strand
aauaaagccaacagaugaa

SEQ ID NO: 2662838 - RNA, 19 nt, Homo sapiens
  misc_RNA (1)...(19): siRNA sense strand
gguguuaugagauggagaa

SEQ ID NO: 2662839 - RNA, 19 nt, Homo sapiens
  misc_RNA (1)...(19): siRNA sense strand
gaagaaagaugaggaaacu

SEQ ID NO: 2662840 - RNA, 19 nt, Homo sapiens
  misc_RNA (1)...(19): siRNA sense strand
gguacaaaguaggaauuau

SEQ ID NO: 2662841 - RNA, 19 nt, Homo sapiens
  misc_RNA (1)...(19): siRNA sense strand
gccagaaaugcaucagaaa

SEQ ID NO: 2662842 - RNA, 19 nt, Homo sapiens
  misc_RNA (1)...(19): siRNA sense strand
cuguguuggaguagaagaa

SEQ ID NO: 2662843 - RNA, 19 nt, Homo sapiens
  misc_RNA (1)...(19): siRNA sense strand
acuuuaaggaggaaucuaa

SEQ ID NO: 2662844 - RNA, 19 nt, Homo sapiens
  misc_RNA (1)...(19): siRNA sense strand
cacaaagauaucuggagaa

SEQ ID NO: 2662845 - RNA, 19 nt, Homo sapiens
  misc_RNA (1)...(19): siRNA sense strand
acaaagugauagaugucau

SEQ ID NO: 2662846 - RNA, 19 nt, Homo sapiens
  misc_RNA (1)...(19): siRNA sense strand
cggcaaaccaguuaaaucu

SEQ ID NO: 2662847 - RNA, 19 nt, Homo sapiens
  misc_RNA (1)...(19): siRNA sense strand
ggucccugauauagccaaa

SEQ ID NO: 2662848 - RNA, 19 nt, Homo sapiens
  misc_RNA (1)...(19): siRNA sense strand
agagauguguccaugggaa

SEQ ID NO: 2662849 - RNA, 19 nt, Homo sapiens
  misc_RNA (1)...(19): siRNA sense strand
cauccaacuuuaaggagga

SEQ ID NO: 2662850 - RNA, 19 nt, Homo sapiens
  misc_RNA (1)...(19): siRNA sense strand
gugguaaagcagggacaua

SEQ ID NO: 2662851 - RNA, 19 nt, Homo sapiens
  misc_RNA (1)...(19): siRNA sense strand
ggaaacuucgagaucauaa

SEQ ID NO: 2662852 - RNA, 19 nt, Homo sapiens
  misc_RNA (1)...(19): siRNA sense strand
cugaauggagagcgaaaga

SEQ ID NO: 2662853 - RNA, 19 nt, Homo sapiens
  misc_RNA (1)...(19): siRNA sense strand
agaaauuagucagagggua

SEQ ID NO: 2662854 - RNA, 19 nt, Homo sapiens
  misc_RNA (1)...(19): siRNA sense strand
auggaaaguauaugcagaa

SEQ ID NO: 2662855 - RNA, 19 nt, Homo sapiens
  misc_RNA (1)...(19): siRNA sense strand
agguggugacaaagugaua

SEQ ID NO: 2662856 - RNA, 19 nt, Homo sapiens
  misc_RNA (1)...(19): siRNA sense strand
gugacaaagugauagaugu

SEQ ID NO: 2662857 - RNA, 19 nt, Homo sapiens
  misc_RNA (1)...(19): siRNA sense strand
cgaggcaggcagacagcaa

SEQ ID NO: 2662858 - RNA, 19 nt, Homo sapiens
  misc_RNA (1)...(19): siRNA sense strand
cugaagagucugaaaguuc

SEQ ID NO: 2662859 - RNA, 19 nt, Homo sapiens
  misc_RNA (1)...(19): siRNA sense strand
gcacuuuaucggaggagaa

SEQ ID NO: 2662860 - RNA, 19 nt, Homo sapiens
  misc_RNA (1)...(19): siRNA sense strand
caggaagaagagaaagaua

SEQ ID NO: 2662861 - RNA, 19 nt, Homo sapiens
  misc_RNA (1)...(19): siRNA sense strand
gguccggagaggaaagaaa

SEQ ID NO: 2662862 - RNA, 19 nt, Homo sapiens
  misc_RNA (1)...(19): siRNA sense strand
ggagaagaugggagcagaa

SEQ ID NO: 2662863 - RNA, 19 nt, Homo sapiens
  misc_RNA (1)...(19): siRNA sense strand
cuuucaaguucaugagaga

SEQ ID NO: 2662864 - RNA, 19 nt, Homo sapiens
  misc_RNA (1)...(19): siRNA sense strand
ggcaggaagaagagaaaga

SEQ ID NO: 2662865 - RNA, 19 nt, Homo sapiens
  misc_RNA (1)...(19): siRNA sense strand
caggaaagguucaugcaga

SEQ ID NO: 2662866 - RNA, 19 nt, Homo sapiens
  misc_RNA (1)...(19): siRNA sense strand
ugagagaagcugaggacca

SEQ ID NO: 2662867 - RNA, 19 nt, Homo sapiens
  misc_RNA (1)...(19): siRNA sense strand
ccugaagggacuaggcaau

SEQ ID NO: 2662868 - RNA, 19 nt, Homo sapiens
  misc_RNA (1)...(19): siRNA sense strand
cggcuucaggaaagagaaa

SEQ ID NO: 2662869 - RNA, 19 nt, Homo sapiens
  misc_RNA (1)...(19): siRNA sense strand
ucguggagauugugggaca

SEQ ID NO: 2662870 - RNA, 19 nt, Homo sapiens
  misc_RNA (1)...(19): siRNA sense strand
ggagaggaauaaaggagca

SEQ ID NO: 2662871 - RNA, 19 nt, Homo sapiens
  misc_RNA (1)...(19): siRNA sense strand
acauaaaggacaagauauc

SEQ ID NO: 2662872 - RNA, 19 nt, Homo sapiens
  misc_RNA (1)...(19): siRNA sense strand
caagauaucagaaugggaa

SEQ ID NO: 2662873 - RNA, 19 nt, Homo sapiens
  misc_RNA (1)...(19): siRNA sense strand
uaucagaaugggaagggaa

SEQ ID NO: 2662874 - RNA, 19 nt, Homo sapiens
  misc_RNA (1)...(19): siRNA sense strand
uggaaugaggccaggaaca

SEQ ID NO: 2662875 - RNA, 19 nt, Homo sapiens
  misc_RNA (1)...(19): siRNA sense strand
ggaacagagagcacagaga

SEQ ID NO: 2662876 - RNA, 19 nt, Homo sapiens
  misc_RNA (1)...(19): siRNA sense strand
cagaaugggaagggaagaa

SEQ ID NO: 2662877 - RNA, 19 nt, Homo sapiens
  misc_RNA (1)...(19): siRNA sense strand
acggcaggaagaagagaaa

SEQ ID NO: 2662878 - RNA, 19 nt, Homo sapiens
  misc_RNA (1)...(19): siRNA sense strand
cccucaacauaaaggacaa

SEQ ID NO: 2662879 - RNA, 19 nt, Homo sapiens
  misc_RNA (1)...(19): siRNA sense strand
ccaagcugguguugcgaau

SEQ ID NO: 2662880 - RNA, 19 nt, Homo sapiens
  misc_RNA (1)...(19): siRNA sense strand
ggagagcaacucaggaaaa

SEQ ID NO: 2662881 - RNA, 19 nt, Homo sapiens
  misc_RNA (1)...(19): siRNA sense strand
uggaacacauucuggaaca

SEQ ID NO: 2662882 - RNA, 19 nt, Homo sapiens
  misc_RNA (1)...(19): siRNA sense strand
gaaaagugacagaugagaa

SEQ ID NO: 2662883 - RNA, 19 nt, Homo sapiens
  misc_RNA (1)...(19): siRNA sense strand
acagugacacagaggagaa

SEQ ID NO: 2662884 - RNA, 19 nt, Homo sapiens
  misc_RNA (1)...(19): siRNA sense strand
gcaggagagcagacggaca

SEQ ID NO: 2662885 - RNA, 19 nt, Homo sapiens
  misc_RNA (1)...(19): siRNA sense strand
gagcagacggacaggagga

SEQ ID NO: 2662886 - RNA, 19 nt, Homo sapiens
  misc_RNA (1)...(19): siRNA sense strand
ggacaaagaugggaagccu

SEQ ID NO: 2662887 - RNA, 19 nt, Homo sapiens
  misc_RNA (1)...(19): siRNA sense strand
gggaagaaucagcagagca

SEQ ID NO: 2662888 - RNA, 19 nt, Homo sapiens
  misc_RNA (1)...(19): siRNA sense strand
cccagucaauggagagcaa

SEQ ID NO: 2662889 - RNA, 19 nt, Homo sapiens
  misc_RNA (1)...(19): siRNA sense strand
cagaacggcaggaagaaga

SEQ ID NO: 2662890 - RNA, 19 nt, Homo sapiens
  misc_RNA (1)...(19): siRNA sense strand
uggcaucggcuucaggaaa

SEQ ID NO: 2662891 - RNA, 19 nt, Homo sapiens
  misc_RNA (1)...(19): siRNA sense strand
cgaugguggcgcugaucua

SEQ ID NO: 2662892 - RNA, 19 nt, Homo sapiens
  misc_RNA (1)...(19): siRNA sense strand
uaugagguccggagaggaa

SEQ ID NO: 2662893 - RNA, 19 nt, Homo sapiens
  misc_RNA (1)...(19): siRNA sense strand
gcugaagcaggucaagaaa

SEQ ID NO: 2662894 - RNA, 19 nt, Homo sapiens
  misc_RNA (1)...(19): siRNA sense strand
ucaucaacccucugccaaa

SEQ ID NO: 2662895 - RNA, 19 nt, Homo sapiens
  misc_RNA (1)...(19): siRNA sense strand
cguucaaacaugccggaga

SEQ ID NO: 2662896 - RNA, 19 nt, Homo sapiens
  misc_RNA (1)...(19): siRNA sense strand
ucaggaaagagaaaagaaa

SEQ ID NO: 2662897 - RNA, 19 nt, Homo sapiens
  misc_RNA (1)...(19): siRNA sense strand
uuaugaggacaucgaguua

SEQ ID NO: 2662898 - RNA, 19 nt, Homo sapiens
  misc_RNA (1)...(19): siRNA sense strand
cuucuggagaggaggguca

SEQ ID NO: 2662899 - RNA, 19 nt, Homo sapiens
  misc_RNA (1)...(19): siRNA sense strand
agacagaaauccagugcag

SEQ ID NO: 2662900 - RNA, 19 nt, Homo sapiens
  misc_RNA (1)...(19): siRNA sense strand
acugguacgcgcagacuaa

SEQ ID NO: 2662901 - RNA, 19 nt, Homo sapiens
  misc_RNA (1)...(19): siRNA sense strand
agaggaaagaaacggguga

SEQ ID NO: 2662902 - RNA, 19 nt, Homo sapiens
  misc_RNA (1)...(19): siRNA sense strand
ggaccggagccuugagaac

SEQ ID NO: 2662903 - RNA, 19 nt, Homo sapiens
  misc_RNA (1)...(19): siRNA sense strand
aggaagaagagaaagauac

SEQ ID NO: 2662904 - RNA, 19 nt, Homo sapiens
  misc_RNA (1)...(19): siRNA sense strand
ggaucuuggaugaggugga

SEQ ID NO: 2662905 - RNA, 19 nt, Homo sapiens
  misc_RNA (1)...(19): siRNA sense strand
cuagagucaagaauggaua

SEQ ID NO: 2662906 - RNA, 19 nt, Homo sapiens
  misc_RNA (1)...(19): siRNA sense strand
gagcaggcuuugaaggaug

SEQ ID NO: 2662907 - RNA, 19 nt, Homo sapiens
  misc_RNA (1)...(19): siRNA sense strand
guuugagguccgagcccaa

SEQ ID NO: 2662908 - RNA, 19 nt, Homo sapiens
  misc_RNA (1)...(19): siRNA sense strand
ggaagaaucagcagagcag

SEQ ID NO: 2662909 - RNA, 19 nt, Homo sapiens
  misc_RNA (1)...(19): siRNA sense strand
gaggaaagaaacgggugaa

SEQ ID NO: 2662910 - RNA, 19 nt, Homo sapiens
  misc_RNA (1)...(19): siRNA sense strand
acgguggagaggaggagua

SEQ ID NO: 2662911 - RNA, 19 nt, Homo sapiens
  misc_RNA (1)...(19): siRNA sense strand
cagagagcacagagaagga

SEQ ID NO: 2662912 - RNA, 19 nt, Homo sapiens
  misc_RNA (1)...(19): siRNA sense strand
ucgaguaccaggagaggca

SEQ ID NO: 2662913 - RNA, 19 nt, Homo sapiens
  misc_RNA (1)...(19): siRNA sense strand
caggaaagagaaaagaaau

SEQ ID NO: 2662914 - RNA, 19 nt, Homo sapiens
  misc_RNA (1)...(19): siRNA sense strand
cugaagggacuaggcaaua

SEQ ID NO: 2662915 - RNA, 19 nt, Homo sapiens
  misc_RNA (1)...(19): siRNA sense strand
gcacuuuaucggaggagaa

SEQ ID NO: 2662916 - RNA, 19 nt, Homo sapiens
  misc_RNA (1)...(19): siRNA sense strand
caggaagaagagaaagaua

SEQ ID NO: 2662917 - RNA, 19 nt, Homo sapiens
  misc_RNA (1)...(19): siRNA sense strand
gguccggagaggaaagaaa

SEQ ID NO: 2662918 - RNA, 19 nt, Homo sapiens
  misc_RNA (1)...(19): siRNA sense strand
ggagaagaugggagcagaa

SEQ ID NO: 2662919 - RNA, 19 nt, Homo sapiens
  misc_RNA (1)...(19): siRNA sense strand
cuuucaaguucaugagaga

SEQ ID NO: 2662920 - RNA, 19 nt, Homo sapiens
  misc_RNA (1)...(19): siRNA sense strand
ggcaggaagaagagaaaga

SEQ ID NO: 2662921 - RNA, 19 nt, Homo sapiens
  misc_RNA (1)...(19): siRNA sense strand
caggaaagguucaugcaga

SEQ ID NO: 2662922 - RNA, 19 nt, Homo sapiens
  misc_RNA (1)...(19): siRNA sense strand
ugagagaagcugaggacca

SEQ ID NO: 2662923 - RNA, 19 nt, Homo sapiens
  misc_RNA (1)...(19): siRNA sense strand
ccugaagggacuaggcaau

SEQ ID NO: 2662924 - RNA, 19 nt, Homo sapiens
  misc_RNA (1)...(19): siRNA sense strand
cggcuucaggaaagagaaa

SEQ ID NO: 2662925 - RNA, 19 nt, Homo sapiens
  misc_RNA (1)...(19): siRNA sense strand
ucguggagauugugggaca

SEQ ID NO: 2662926 - RNA, 19 nt, Homo sapiens
  misc_RNA (1)...(19): siRNA sense strand
ggagaggaauaaaggagca

SEQ ID NO: 2662927 - RNA, 19 nt, Homo sapiens
  misc_RNA (1)...(19): siRNA sense strand
acauaaaggacaagauauc

SEQ ID NO: 2662928 - RNA, 19 nt, Homo sapiens
  misc_RNA (1)...(19): siRNA sense strand
caagauaucagaaugggaa

SEQ ID NO: 2662929 - RNA, 19 nt, Homo sapiens
  misc_RNA (1)...(19): siRNA sense strand
uaucagaaugggaagggaa

SEQ ID NO: 2662930 - RNA, 19 nt, Homo sapiens
  misc_RNA (1)...(19): siRNA sense strand
uggaaugaggccaggaaca

SEQ ID NO: 2662931 - RNA, 19 nt, Homo sapiens
  misc_RNA (1)...(19): siRNA sense strand
ggaacagagagcacagaga

SEQ ID NO: 2662932 - RNA, 19 nt, Homo sapiens
  misc_RNA (1)...(19): siRNA sense strand
cagaaugggaagggaagaa

SEQ ID NO: 2662933 - RNA, 19 nt, Homo sapiens
  misc_RNA (1)...(19): siRNA sense strand
acggcaggaagaagagaaa

SEQ ID NO: 2662934 - RNA, 19 nt, Homo sapiens
  misc_RNA (1)...(19): siRNA sense strand
cccucaacauaaaggacaa

SEQ ID NO: 2662935 - RNA, 19 nt, Homo sapiens
  misc_RNA (1)...(19): siRNA sense strand
ccaagcugguguugcgaau

SEQ ID NO: 2662936 - RNA, 19 nt, Homo sapiens
  misc_RNA (1)...(19): siRNA sense strand
ggagagcaacucaggaaaa

SEQ ID NO: 2662937 - RNA, 19 nt, Homo sapiens
  misc_RNA (1)...(19): siRNA sense strand
uggaacacauucuggaaca

SEQ ID NO: 2662938 - RNA, 19 nt, Homo sapiens
  misc_RNA (1)...(19): siRNA sense strand
gaaaagugacagaugagaa

SEQ ID NO: 2662939 - RNA, 19 nt, Homo sapiens
  misc_RNA (1)...(19): siRNA sense strand
acagugacacagaggagaa

SEQ ID NO: 2662940 - RNA, 19 nt, Homo sapiens
  misc_RNA (1)...(19): siRNA sense strand
gcaggagagcagacggaca

SEQ ID NO: 2662941 - RNA, 19 nt, Homo sapiens
  misc_RNA (1)...(19): siRNA sense strand
gagcagacggacaggagga

SEQ ID NO: 2662942 - RNA, 19 nt, Homo sapiens
  misc_RNA (1)...(19): siRNA sense strand
ggacaaagaugggaagccu

SEQ ID NO: 2662943 - RNA, 19 nt, Homo sapiens
  misc_RNA (1)...(19): siRNA sense strand
gggaagaaucagcagagca

SEQ ID NO: 2662944 - RNA, 19 nt, Homo sapiens
  misc_RNA (1)...(19): siRNA sense strand
cccagucaauggagagcaa

SEQ ID NO: 2662945 - RNA, 19 nt, Homo sapiens
  misc_RNA (1)...(19): siRNA sense strand
cagaacggcaggaagaaga

SEQ ID NO: 2662946 - RNA, 19 nt, Homo sapiens
  misc_RNA (1)...(19): siRNA sense strand
uggcaucggcuucaggaaa

SEQ ID NO: 2662947 - RNA, 19 nt, Homo sapiens
  misc_RNA (1)...(19): siRNA sense strand
cgaugguggcgcugaucua

SEQ ID NO: 2662948 - RNA, 19 nt, Homo sapiens
  misc_RNA (1)...(19): siRNA sense strand
uaugagguccggagaggaa

SEQ ID NO: 2662949 - RNA, 19 nt, Homo sapiens
  misc_RNA (1)...(19): siRNA sense strand
gcugaagcaggucaagaaa

SEQ ID NO: 2662950 - RNA, 19 nt, Homo sapiens
  misc_RNA (1)...(19): siRNA sense strand
ucaucaacccucugccaaa

SEQ ID NO: 2662951 - RNA, 19 nt, Homo sapiens
  misc_RNA (1)...(19): siRNA sense strand
cguucaaacaugccggaga

SEQ ID NO: 2662952 - RNA, 19 nt, Homo sapiens
  misc_RNA (1)...(19): siRNA sense strand
ucaggaaagagaaaagaaa

SEQ ID NO: 2662953 - RNA, 19 nt, Homo sapiens
  misc_RNA (1)...(19): siRNA sense strand
uuaugaggacaucgaguua

SEQ ID NO: 2662954 - RNA, 19 nt, Homo sapiens
  misc_RNA (1)...(19): siRNA sense strand
cuucuggagaggaggguca

SEQ ID NO: 2662955 - RNA, 19 nt, Homo sapiens
  misc_RNA (1)...(19): siRNA sense strand
agacagaaauccagugcag

SEQ ID NO: 2662956 - RNA, 19 nt, Homo sapiens
  misc_RNA (1)...(19): siRNA sense strand
acugguacgcgcagacuaa

SEQ ID NO: 2662957 - RNA, 19 nt, Homo sapiens
  misc_RNA (1)...(19): siRNA sense strand
agaggaaagaaacggguga

SEQ ID NO: 2662958 - RNA, 19 nt, Homo sapiens
  misc_RNA (1)...(19): siRNA sense strand
ggaccggagccuugagaac

SEQ ID NO: 2662959 - RNA, 19 nt, Homo sapiens
  misc_RNA (1)...(19): siRNA sense strand
aggaagaagagaaagauac

SEQ ID NO: 2662960 - RNA, 19 nt, Homo sapiens
  misc_RNA (1)...(19): siRNA sense strand
ggaucuuggaugaggugga

SEQ ID NO: 2662961 - RNA, 19 nt, Homo sapiens
  misc_RNA (1)...(19): siRNA sense strand
cuagagucaagaauggaua

SEQ ID NO: 2662962 - RNA, 19 nt, Homo sapiens
  misc_RNA (1)...(19): siRNA sense strand
gagcaggcuuugaaggaug

SEQ ID NO: 2662963 - RNA, 19 nt, Homo sapiens
  misc_RNA (1)...(19): siRNA sense strand
guuugagguccgagcccaa

SEQ ID NO: 2662964 - RNA, 19 nt, Homo sapiens
  misc_RNA (1)...(19): siRNA sense strand
ggaagaaucagcagagcag

SEQ ID NO: 2662965 - RNA, 19 nt, Homo sapiens
  misc_RNA (1)...(19): siRNA sense strand
gaggaaagaaacgggugaa

SEQ ID NO: 2662966 - RNA, 19 nt, Homo sapiens
  misc_RNA (1)...(19): siRNA sense strand
acgguggagaggaggagua

SEQ ID NO: 2662967 - RNA, 19 nt, Homo sapiens
  misc_RNA (1)...(19): siRNA sense strand
cagagagcacagagaagga

SEQ ID NO: 2662968 - RNA, 19 nt, Homo sapiens
  misc_RNA (1)...(19): siRNA sense strand
ucgaguaccaggagaggca

SEQ ID NO: 2662969 - RNA, 19 nt, Homo sapiens
  misc_RNA (1)...(19): siRNA sense strand
caggaaagagaaaagaaau

SEQ ID NO: 2662970 - RNA, 19 nt, Homo sapiens
  misc_RNA (1)...(19): siRNA sense strand
cugaagggacuaggcaaua

SEQ ID NO: 2662971 - RNA, 19 nt, Homo sapiens
  misc_RNA (1)...(19): siRNA sense strand
cggcauaagccucgggaga

SEQ ID NO: 2662972 - RNA, 19 nt, Homo sapiens
  misc_RNA (1)...(19): siRNA sense strand
gauaaaacaagaaggacaa

SEQ ID NO: 2662973 - RNA, 19 nt, Homo sapiens
  misc_RNA (1)...(19): siRNA sense strand
agggaaagagagaaagauu

SEQ ID NO: 2662974 - RNA, 19 nt, Homo sapiens
  misc_RNA (1)...(19): siRNA sense strand
uggugaauguggcaggaaa

SEQ ID NO: 2662975 - RNA, 19 nt, Homo sapiens
  misc_RNA (1)...(19): siRNA sense strand
ggugaauguggcaggaaau

SEQ ID NO: 2662976 - RNA, 19 nt, Homo sapiens
  misc_RNA (1)...(19): siRNA sense strand
cugcuaugucuguaggaaa

SEQ ID NO: 2662977 - RNA, 19 nt, Homo sapiens
  misc_RNA (1)...(19): siRNA sense strand
agauaaaacaagaaggaca

SEQ ID NO: 2662978 - RNA, 19 nt, Homo sapiens
  misc_RNA (1)...(19): siRNA sense strand
ggauggaacaagggagaau

SEQ ID NO: 2662979 - RNA, 19 nt, Homo sapiens
  misc_RNA (1)...(19): siRNA sense strand
ccucaagagaagccugaaa

SEQ ID NO: 2662980 - RNA, 19 nt, Homo sapiens
  misc_RNA (1)...(19): siRNA sense strand
cgaaggaacucccaggaca

SEQ ID NO: 2662981 - RNA, 19 nt, Homo sapiens
  misc_RNA (1)...(19): siRNA sense strand
agauuaagcuggacgagca

SEQ ID NO: 2662982 - RNA, 19 nt, Homo sapiens
  misc_RNA (1)...(19): siRNA sense strand
cggagugugacaagagcua

SEQ ID NO: 2662983 - RNA, 19 nt, Homo sapiens
  misc_RNA (1)...(19): siRNA sense strand
cugaugaacaguugaacau

SEQ ID NO: 2662984 - RNA, 19 nt, Homo sapiens
  misc_RNA (1)...(19): siRNA sense strand
acaugaagaauacuggaaa

SEQ ID NO: 2662985 - RNA, 19 nt, Homo sapiens
  misc_RNA (1)...(19): siRNA sense strand
gcgacaagaccuuccggua

SEQ ID NO: 2662986 - RNA, 19 nt, Homo sapiens
  misc_RNA (1)...(19): siRNA sense strand
ccucaagggaaaccugaaa

SEQ ID NO: 2662987 - RNA, 19 nt, Homo sapiens
  misc_RNA (1)...(19): siRNA sense strand
cuuacgagggaaagagaga

SEQ ID NO: 2662988 - RNA, 19 nt, Homo sapiens
  misc_RNA (1)...(19): siRNA sense strand
ccguuuaaaugguccucaa

SEQ ID NO: 2662989 - RNA, 19 nt, Homo sapiens
  misc_RNA (1)...(19): siRNA sense strand
gugagugugagaagagcua

SEQ ID NO: 2662990 - RNA, 19 nt, Homo sapiens
  misc_RNA (1)...(19): siRNA sense strand
cggcaaaaguuucacucaa

SEQ ID NO: 2662991 - RNA, 19 nt, Homo sapiens
  misc_RNA (1)...(19): siRNA sense strand
uacgagggaaagagagaaa

SEQ ID NO: 2662992 - RNA, 19 nt, Homo sapiens
  misc_RNA (1)...(19): siRNA sense strand
agaaauucccacagggcca

SEQ ID NO: 2662993 - RNA, 19 nt, Homo sapiens
  misc_RNA (1)...(19): siRNA sense strand
ggacgcacagcgaggaaaa

SEQ ID NO: 2662994 - RNA, 19 nt, Homo sapiens
  misc_RNA (1)...(19): siRNA sense strand
cugaaugcgagaagacuuu

SEQ ID NO: 2662995 - RNA, 19 nt, Homo sapiens
  misc_RNA (1)...(19): siRNA sense strand
aagcaagagaugaagacca

SEQ ID NO: 2662996 - RNA, 19 nt, Homo sapiens
  misc_RNA (1)...(19): siRNA sense strand
gagaagacuuuccgccuca

SEQ ID NO: 2662997 - RNA, 19 nt, Homo sapiens
  misc_RNA (1)...(19): siRNA sense strand
auggauggaacaagggaga

SEQ ID NO: 2662998 - RNA, 19 nt, Homo sapiens
  misc_RNA (1)...(19): siRNA sense strand
ccugaaugcgagaagacuu

SEQ ID NO: 2662999 - RNA, 19 nt, Homo sapiens
  misc_RNA (1)...(19): siRNA sense strand
aguugaacaugaagaauac

SEQ ID NO: 2663000 - RNA, 19 nt, Homo sapiens
  misc_RNA (1)...(19): siRNA sense strand
aaaacaagaaggacaacua

SEQ ID NO: 2663001 - RNA, 19 nt, Homo sapiens
  misc_RNA (1)...(19): siRNA sense strand
gaacucaggcggacgcaga

SEQ ID NO: 2663002 - RNA, 19 nt, Homo sapiens
  misc_RNA (1)...(19): siRNA sense strand
aagcaaauguauaagcaag

SEQ ID NO: 2663003 - RNA, 19 nt, Homo sapiens
  misc_RNA (1)...(19): siRNA sense strand
agcaaauguauaagcaaga

SEQ ID NO: 2663004 - RNA, 19 nt, Homo sapiens
  misc_RNA (1)...(19): siRNA sense strand
acaagaaagaccugcggca

SEQ ID NO: 2663005 - RNA, 19 nt, Homo sapiens
  misc_RNA (1)...(19): siRNA sense strand
ccgagugcgacaagagcuu

SEQ ID NO: 2663006 - RNA, 19 nt, Homo sapiens
  misc_RNA (1)...(19): siRNA sense strand
uuucgugucccgaguguaa

SEQ ID NO: 2663007 - RNA, 19 nt, Homo sapiens
  misc_RNA (1)...(19): siRNA sense strand
gugagugugacaagaccua

SEQ ID NO: 2663008 - RNA, 19 nt, Homo sapiens
  misc_RNA (1)...(19): siRNA sense strand
cggcauaagccucgggaga

SEQ ID NO: 2663009 - RNA, 19 nt, Homo sapiens
  misc_RNA (1)...(19): siRNA sense strand
gauaaaacaagaaggacaa

SEQ ID NO: 2663010 - RNA, 19 nt, Homo sapiens
  misc_RNA (1)...(19): siRNA sense strand
agggaaagagagaaagauu

SEQ ID NO: 2663011 - RNA, 19 nt, Homo sapiens
  misc_RNA (1)...(19): siRNA sense strand
uggugaauguggcaggaaa

SEQ ID NO: 2663012 - RNA, 19 nt, Homo sapiens
  misc_RNA (1)...(19): siRNA sense strand
ggugaauguggcaggaaau

SEQ ID NO: 2663013 - RNA, 19 nt, Homo sapiens
  misc_RNA (1)...(19): siRNA sense strand
cugcuaugucuguaggaaa

SEQ ID NO: 2663014 - RNA, 19 nt, Homo sapiens
  misc_RNA (1)...(19): siRNA sense strand
agauaaaacaagaaggaca

SEQ ID NO: 2663015 - RNA, 19 nt, Homo sapiens
  misc_RNA (1)...(19): siRNA sense strand
ggauggaacaagggagaau

SEQ ID NO: 2663016 - RNA, 19 nt, Homo sapiens
  misc_RNA (1)...(19): siRNA sense strand
ccucaagagaagccugaaa

SEQ ID NO: 2663017 - RNA, 19 nt, Homo sapiens
  misc_RNA (1)...(19): siRNA sense strand
cgaaggaacucccaggaca

SEQ ID NO: 2663018 - RNA, 19 nt, Homo sapiens
  misc_RNA (1)...(19): siRNA sense strand
agauuaagcuggacgagca

SEQ ID NO: 2663019 - RNA, 19 nt, Homo sapiens
  misc_RNA (1)...(19): siRNA sense strand
cggagugugacaagagcua

SEQ ID NO: 2663020 - RNA, 19 nt, Homo sapiens
  misc_RNA (1)...(19): siRNA sense strand
cugaugaacaguugaacau

SEQ ID NO: 2663021 - RNA, 19 nt, Homo sapiens
  misc_RNA (1)...(19): siRNA sense strand
acaugaagaauacuggaaa

SEQ ID NO: 2663022 - RNA, 19 nt, Homo sapiens
  misc_RNA (1)...(19): siRNA sense strand
gcgacaagaccuuccggua

SEQ ID NO: 2663023 - RNA, 19 nt, Homo sapiens
  misc_RNA (1)...(19): siRNA sense strand
ccucaagggaaaccugaaa

SEQ ID NO: 2663024 - RNA, 19 nt, Homo sapiens
  misc_RNA (1)...(19): siRNA sense strand
cuuacgagggaaagagaga

SEQ ID NO: 2663025 - RNA, 19 nt, Homo sapiens
  misc_RNA (1)...(19): siRNA sense strand
ccguuuaaaugguccucaa

SEQ ID NO: 2663026 - RNA, 19 nt, Homo sapiens
  misc_RNA (1)...(19): siRNA sense strand
gugagugugagaagagcua

SEQ ID NO: 2663027 - RNA, 19 nt, Homo sapiens
  misc_RNA (1)...(19): siRNA sense strand
cggcaaaaguuucacucaa

SEQ ID NO: 2663028 - RNA, 19 nt, Homo sapiens
  misc_RNA (1)...(19): siRNA sense strand
uacgagggaaagagagaaa

SEQ ID NO: 2663029 - RNA, 19 nt, Homo sapiens
  misc_RNA (1)...(19): siRNA sense strand
agaaauucccacagggcca

SEQ ID NO: 2663030 - RNA, 19 nt, Homo sapiens
  misc_RNA (1)...(19): siRNA sense strand
ggacgcacagcgaggaaaa

SEQ ID NO: 2663031 - RNA, 19 nt, Homo sapiens
  misc_RNA (1)...(19): siRNA sense strand
cugaaugcgagaagacuuu

SEQ ID NO: 2663032 - RNA, 19 nt, Homo sapiens
  misc_RNA (1)...(19): siRNA sense strand
aagcaagagaugaagacca

SEQ ID NO: 2663033 - RNA, 19 nt, Homo sapiens
  misc_RNA (1)...(19): siRNA sense strand
gagaagacuuuccgccuca

SEQ ID NO: 2663034 - RNA, 19 nt, Homo sapiens
  misc_RNA (1)...(19): siRNA sense strand
auggauggaacaagggaga

SEQ ID NO: 2663035 - RNA, 19 nt, Homo sapiens
  misc_RNA (1)...(19): siRNA sense strand
ccugaaugcgagaagacuu

SEQ ID NO: 2663036 - RNA, 19 nt, Homo sapiens
  misc_RNA (1)...(19): siRNA sense strand
aguugaacaugaagaauac

SEQ ID NO: 2663037 - RNA, 19 nt, Homo sapiens
  misc_RNA (1)...(19): siRNA sense strand
aaaacaagaaggacaacua

SEQ ID NO: 2663038 - RNA, 19 nt, Homo sapiens
  misc_RNA (1)...(19): siRNA sense strand
gaacucaggcggacgcaga

SEQ ID NO: 2663039 - RNA, 19 nt, Homo sapiens
  misc_RNA (1)...(19): siRNA sense strand
aagcaaauguauaagcaag

SEQ ID NO: 2663040 - RNA, 19 nt, Homo sapiens
  misc_RNA (1)...(19): siRNA sense strand
agcaaauguauaagcaaga

SEQ ID NO: 2663041 - RNA, 19 nt, Homo sapiens
  misc_RNA (1)...(19): siRNA sense strand
acaagaaagaccugcggca

SEQ ID NO: 2663042 - RNA, 19 nt, Homo sapiens
  misc_RNA (1)...(19): siRNA sense strand
ccgagugcgacaagagcuu

SEQ ID NO: 2663043 - RNA, 19 nt, Homo sapiens
  misc_RNA (1)...(19): siRNA sense strand
uuucgugucccgaguguaa

SEQ ID NO: 2663044 - RNA, 19 nt, Homo sapiens
  misc_RNA (1)...(19): siRNA sense strand
gugagugugacaagaccua

SEQ ID NO: 2663045 - RNA, 19 nt, Homo sapiens
  misc_RNA (1)...(19): siRNA sense strand
cggaauuucuccugggaac

SEQ ID NO: 2663046 - RNA, 19 nt, Homo sapiens
  misc_RNA (1)...(19): siRNA sense strand
ggugaagaccccaggagaa

SEQ ID NO: 2663047 - RNA, 19 nt, Homo sapiens
  misc_RNA (1)...(19): siRNA sense strand
ccaugaggacccaggugaa

SEQ ID NO: 2663048 - RNA, 19 nt, Homo sapiens
  misc_RNA (1)...(19): siRNA sense strand
ccgacugggaccuggauuu

SEQ ID NO: 2663049 - RNA, 19 nt, Homo sapiens
  misc_RNA (1)...(19): siRNA sense strand
aggaagagccacagaggac

SEQ ID NO: 2663050 - RNA, 19 nt, Homo sapiens
  misc_RNA (1)...(19): siRNA sense strand
ggggcagcauccuggaaaa

SEQ ID NO: 2663051 - RNA, 19 nt, Homo sapiens
  misc_RNA (1)...(19): siRNA sense strand
cggagaagcuggaucggcu

SEQ ID NO: 2663052 - RNA, 19 nt, Homo sapiens
  misc_RNA (1)...(19): siRNA sense strand
ggagaagucaagggcgcua

SEQ ID NO: 2663053 - RNA, 19 nt, Homo sapiens
  misc_RNA (1)...(19): siRNA sense strand
cuggauggagagagagcga

SEQ ID NO: 2663054 - RNA, 19 nt, Homo sapiens
  misc_RNA (1)...(19): siRNA sense strand
cggaauuucuccugggaac

SEQ ID NO: 2663055 - RNA, 19 nt, Homo sapiens
  misc_RNA (1)...(19): siRNA sense strand
ggugaagaccccaggagaa

SEQ ID NO: 2663056 - RNA, 19 nt, Homo sapiens
  misc_RNA (1)...(19): siRNA sense strand
ccaugaggacccaggugaa

SEQ ID NO: 2663057 - RNA, 19 nt, Homo sapiens
  misc_RNA (1)...(19): siRNA sense strand
ccgacugggaccuggauuu

SEQ ID NO: 2663058 - RNA, 19 nt, Homo sapiens
  misc_RNA (1)...(19): siRNA sense strand
aggaagagccacagaggac

SEQ ID NO: 2663059 - RNA, 19 nt, Homo sapiens
  misc_RNA (1)...(19): siRNA sense strand
ggggcagcauccuggaaaa

SEQ ID NO: 2663060 - RNA, 19 nt, Homo sapiens
  misc_RNA (1)...(19): siRNA sense strand
cggagaagcuggaucggcu

SEQ ID NO: 2663061 - RNA, 19 nt, Homo sapiens
  misc_RNA (1)...(19): siRNA sense strand
ggagaagucaagggcgcua

SEQ ID NO: 2663062 - RNA, 19 nt, Homo sapiens
  misc_RNA (1)...(19): siRNA sense strand
cuggauggagagagagcga

SEQ ID NO: 2663063 - RNA, 19 nt, Homo sapiens
  misc_RNA (1)...(19): siRNA sense strand
aggugaagguggaggacga

SEQ ID NO: 2663064 - RNA, 19 nt, Homo sapiens
  misc_RNA (1)...(19): siRNA sense strand
ggaaagagcuucagccgca

SEQ ID NO: 2663065 - RNA, 19 nt, Homo sapiens
  misc_RNA (1)...(19): siRNA sense strand
acgaagaucaggaggcaga

SEQ ID NO: 2663066 - RNA, 19 nt, Homo sapiens
  misc_RNA (1)...(19): siRNA sense strand
aggcagaagaggaggucga

SEQ ID NO: 2663067 - RNA, 19 nt, Homo sapiens
  misc_RNA (1)...(19): siRNA sense strand
uggguuaccaugagagaga

SEQ ID NO: 2663068 - RNA, 19 nt, Homo sapiens
  misc_RNA (1)...(19): siRNA sense strand
ggacgaagaucaggaggca

SEQ ID NO: 2663069 - RNA, 19 nt, Homo sapiens
  misc_RNA (1)...(19): siRNA sense strand
cggaaugcgagaagcgcuu

SEQ ID NO: 2663070 - RNA, 19 nt, Homo sapiens
  misc_RNA (1)...(19): siRNA sense strand
ggaaggugaagguggagga

SEQ ID NO: 2663071 - RNA, 19 nt, Homo sapiens
  misc_RNA (1)...(19): siRNA sense strand
ggaugauucggaaggugaa

SEQ ID NO: 2663072 - RNA, 19 nt, Homo sapiens
  misc_RNA (1)...(19): siRNA sense strand
ccaggagaggaguggauga

SEQ ID NO: 2663073 - RNA, 19 nt, Homo sapiens
  misc_RNA (1)...(19): siRNA sense strand
agguggaggacgaagauca

SEQ ID NO: 2663074 - RNA, 19 nt, Homo sapiens
  misc_RNA (1)...(19): siRNA sense strand
gaggagcuacucuggguua

SEQ ID NO: 2663075 - RNA, 19 nt, Homo sapiens
  misc_RNA (1)...(19): siRNA sense strand
ugggauucucugugggaca

SEQ ID NO: 2663076 - RNA, 19 nt, Homo sapiens
  misc_RNA (1)...(19): siRNA sense strand
caaagugagcccagggaag

SEQ ID NO: 2663077 - RNA, 19 nt, Homo sapiens
  misc_RNA (1)...(19): siRNA sense strand
gcacgcagcuucacgcaca

SEQ ID NO: 2663078 - RNA, 19 nt, Homo sapiens
  misc_RNA (1)...(19): siRNA sense strand
ugaagguggaggacgaaga

SEQ ID NO: 2663079 - RNA, 19 nt, Homo sapiens
  misc_RNA (1)...(19): siRNA sense strand
ccaaagugagcccagggaa

SEQ ID NO: 2663080 - RNA, 19 nt, Homo sapiens
  misc_RNA (1)...(19): siRNA sense strand
gcucagcacagaaggcuca

SEQ ID NO: 2663081 - RNA, 19 nt, Homo sapiens
  misc_RNA (1)...(19): siRNA sense strand
gcccaggagaggaguggau

SEQ ID NO: 2663082 - RNA, 19 nt, Homo sapiens
  misc_RNA (1)...(19): siRNA sense strand
uggaugauucggaagguga

SEQ ID NO: 2663083 - RNA, 19 nt, Homo sapiens
  misc_RNA (1)...(19): siRNA sense strand
aggugaagguggaggacga

SEQ ID NO: 2663084 - RNA, 19 nt, Homo sapiens
  misc_RNA (1)...(19): siRNA sense strand
ggaaagagcuucagccgca

SEQ ID NO: 2663085 - RNA, 19 nt, Homo sapiens
  misc_RNA (1)...(19): siRNA sense strand
acgaagaucaggaggcaga

SEQ ID NO: 2663086 - RNA, 19 nt, Homo sapiens
  misc_RNA (1)...(19): siRNA sense strand
aggcagaagaggaggucga

SEQ ID NO: 2663087 - RNA, 19 nt, Homo sapiens
  misc_RNA (1)...(19): siRNA sense strand
uggguuaccaugagagaga

SEQ ID NO: 2663088 - RNA, 19 nt, Homo sapiens
  misc_RNA (1)...(19): siRNA sense strand
ggacgaagaucaggaggca

SEQ ID NO: 2663089 - RNA, 19 nt, Homo sapiens
  misc_RNA (1)...(19): siRNA sense strand
cggaaugcgagaagcgcuu

SEQ ID NO: 2663090 - RNA, 19 nt, Homo sapiens
  misc_RNA (1)...(19): siRNA sense strand
ggaaggugaagguggagga

SEQ ID NO: 2663091 - RNA, 19 nt, Homo sapiens
  misc_RNA (1)...(19): siRNA sense strand
ggaugauucggaaggugaa

SEQ ID NO: 2663092 - RNA, 19 nt, Homo sapiens
  misc_RNA (1)...(19): siRNA sense strand
ccaggagaggaguggauga

SEQ ID NO: 2663093 - RNA, 19 nt, Homo sapiens
  misc_RNA (1)...(19): siRNA sense strand
agguggaggacgaagauca

SEQ ID NO: 2663094 - RNA, 19 nt, Homo sapiens
  misc_RNA (1)...(19): siRNA sense strand
gaggagcuacucuggguua

SEQ ID NO: 2663095 - RNA, 19 nt, Homo sapiens
  misc_RNA (1)...(19): siRNA sense strand
ugggauucucugugggaca

SEQ ID NO: 2663096 - RNA, 19 nt, Homo sapiens
  misc_RNA (1)...(19): siRNA sense strand
caaagugagcccagggaag

SEQ ID NO: 2663097 - RNA, 19 nt, Homo sapiens
  misc_RNA (1)...(19): siRNA sense strand
gcacgcagcuucacgcaca

SEQ ID NO: 2663098 - RNA, 19 nt, Homo sapiens
  misc_RNA (1)...(19): siRNA sense strand
ugaagguggaggacgaaga

SEQ ID NO: 2663099 - RNA, 19 nt, Homo sapiens
  misc_RNA (1)...(19): siRNA sense strand
ccaaagugagcccagggaa

SEQ ID NO: 2663100 - RNA, 19 nt, Homo sapiens
  misc_RNA (1)...(19): siRNA sense strand
gcucagcacagaaggcuca

SEQ ID NO: 2663101 - RNA, 19 nt, Homo sapiens
  misc_RNA (1)...(19): siRNA sense strand
gcccaggagaggaguggau

SEQ ID NO: 2663102 - RNA, 19 nt, Homo sapiens
  misc_RNA (1)...(19): siRNA sense strand
uggaugauucggaagguga

SEQ ID NO: 2663103 - RNA, 19 nt, Homo sapiens
  misc_RNA (1)...(19): siRNA sense strand
uagaacaacugcaggcuca

SEQ ID NO: 2663104 - RNA, 19 nt, Homo sapiens
  misc_RNA (1)...(19): siRNA sense strand
ccgacuggccugagaacga

SEQ ID NO: 2663105 - RNA, 19 nt, Homo sapiens
  misc_RNA (1)...(19): siRNA sense strand
gcucauuugaacuggccaa

SEQ ID NO: 2663106 - RNA, 19 nt, Homo sapiens
  misc_RNA (1)...(19): siRNA sense strand
cggcuuuccucgaggccuu

SEQ ID NO: 2663107 - RNA, 19 nt, Homo sapiens
  misc_RNA (1)...(19): siRNA sense strand
ggacgugggugaugcguug

SEQ ID NO: 2663108 - RNA, 19 nt, Homo sapiens
  misc_RNA (1)...(19): siRNA sense strand
ugucagagacccugcgcca

SEQ ID NO: 2663109 - RNA, 19 nt, Homo sapiens
  misc_RNA (1)...(19): siRNA sense strand
uagaacaacugcaggcuca

SEQ ID NO: 2663110 - RNA, 19 nt, Homo sapiens
  misc_RNA (1)...(19): siRNA sense strand
ccgacuggccugagaacga

SEQ ID NO: 2663111 - RNA, 19 nt, Homo sapiens
  misc_RNA (1)...(19): siRNA sense strand
gcucauuugaacuggccaa

SEQ ID NO: 2663112 - RNA, 19 nt, Homo sapiens
  misc_RNA (1)...(19): siRNA sense strand
cggcuuuccucgaggccuu

SEQ ID NO: 2663113 - RNA, 19 nt, Homo sapiens
  misc_RNA (1)...(19): siRNA sense strand
ggacgugggugaugcguug

SEQ ID NO: 2663114 - RNA, 19 nt, Homo sapiens
  misc_RNA (1)...(19): siRNA sense strand
ugucagagacccugcgcca

SEQ ID NO: 2663115 - RNA, 19 nt, Homo sapiens
  misc_RNA (1)...(19): siRNA sense strand
gcacugaacccaagggaga

SEQ ID NO: 2663116 - RNA, 19 nt, Homo sapiens
  misc_RNA (1)...(19): siRNA sense strand
uaguaaaggaagugaccaa

SEQ ID NO: 2663117 - RNA, 19 nt, Homo sapiens
  misc_RNA (1)...(19): siRNA sense strand
ccuaauagucaaagcccaa

SEQ ID NO: 2663118 - RNA, 19 nt, Homo sapiens
  misc_RNA (1)...(19): siRNA sense strand
augaaaucguaguggccaa

SEQ ID NO: 2663119 - RNA, 19 nt, Homo sapiens
  misc_RNA (1)...(19): siRNA sense strand
cggcagaaguuccugguga

SEQ ID NO: 2663120 - RNA, 19 nt, Homo sapiens
  misc_RNA (1)...(19): siRNA sense strand
ggauaauaaauguggccca

SEQ ID NO: 2663121 - RNA, 19 nt, Homo sapiens
  misc_RNA (1)...(19): siRNA sense strand
ugggaagcucugugggcaa

SEQ ID NO: 2663122 - RNA, 19 nt, Homo sapiens
  misc_RNA (1)...(19): siRNA sense strand
agaaaugaguggagugcac

SEQ ID NO: 2663123 - RNA, 19 nt, Homo sapiens
  misc_RNA (1)...(19): siRNA sense strand
acagaaauggcuuuggcaa

SEQ ID NO: 2663124 - RNA, 19 nt, Homo sapiens
  misc_RNA (1)...(19): siRNA sense strand
ugucaagaucccagacuga

SEQ ID NO: 2663125 - RNA, 19 nt, Homo sapiens
  misc_RNA (1)...(19): siRNA sense strand
uagucaaagcccaaggauu

SEQ ID NO: 2663126 - RNA, 19 nt, Homo sapiens
  misc_RNA (1)...(19): siRNA sense strand
ucucagacgugguugcaga

SEQ ID NO: 2663127 - RNA, 19 nt, Homo sapiens
  misc_RNA (1)...(19): siRNA sense strand
gggcuaucaaggagcuaga

SEQ ID NO: 2663128 - RNA, 19 nt, Homo sapiens
  misc_RNA (1)...(19): siRNA sense strand
cucuaagaagacaaagaaa

SEQ ID NO: 2663129 - RNA, 19 nt, Homo sapiens
  misc_RNA (1)...(19): siRNA sense strand
gguuagcaauaucugggaa

SEQ ID NO: 2663130 - RNA, 19 nt, Homo sapiens
  misc_RNA (1)...(19): siRNA sense strand
ggaagcagcccaaacccaa

SEQ ID NO: 2663131 - RNA, 19 nt, Homo sapiens
  misc_RNA (1)...(19): siRNA sense strand
gagcaguggcugagguggu

SEQ ID NO: 2663132 - RNA, 19 nt, Homo sapiens
  misc_RNA (1)...(19): siRNA sense strand
ccaugaaaggagaaacagu

SEQ ID NO: 2663133 - RNA, 19 nt, Homo sapiens
  misc_RNA (1)...(19): siRNA sense strand
ccuccagggguuagcaaua

SEQ ID NO: 2663134 - RNA, 19 nt, Homo sapiens
  misc_RNA (1)...(19): siRNA sense strand
uggcagagaaugcaggcuu

SEQ ID NO: 2663135 - RNA, 19 nt, Homo sapiens
  misc_RNA (1)...(19): siRNA sense strand
caggaaggggugugggaca

SEQ ID NO: 2663136 - RNA, 19 nt, Homo sapiens
  misc_RNA (1)...(19): siRNA sense strand
ucuaagaagacaaagaaac

SEQ ID NO: 2663137 - RNA, 19 nt, Homo sapiens
  misc_RNA (1)...(19): siRNA sense strand
ccaauuacuagaaaagcaa

SEQ ID NO: 2663138 - RNA, 19 nt, Homo sapiens
  misc_RNA (1)...(19): siRNA sense strand
cagcaaagcaacagaggaa

SEQ ID NO: 2663139 - RNA, 19 nt, Homo sapiens
  misc_RNA (1)...(19): siRNA sense strand
agagaaagcuggagggagu

SEQ ID NO: 2663140 - RNA, 19 nt, Homo sapiens
  misc_RNA (1)...(19): siRNA sense strand
aggacagucuagagagaaa

SEQ ID NO: 2663141 - RNA, 19 nt, Homo sapiens
  misc_RNA (1)...(19): siRNA sense strand
agaaauacaacaaggcaaa

SEQ ID NO: 2663142 - RNA, 19 nt, Homo sapiens
  misc_RNA (1)...(19): siRNA sense strand
caguggagcuagagaaaga

SEQ ID NO: 2663143 - RNA, 19 nt, Homo sapiens
  misc_RNA (1)...(19): siRNA sense strand
ggaagcagaaagaaagaaa

SEQ ID NO: 2663144 - RNA, 19 nt, Homo sapiens
  misc_RNA (1)...(19): siRNA sense strand
ggacucaaguuaacaauaa

SEQ ID NO: 2663145 - RNA, 19 nt, Homo sapiens
  misc_RNA (1)...(19): siRNA sense strand
caaagaugguccugaagaa

SEQ ID NO: 2663146 - RNA, 19 nt, Homo sapiens
  misc_RNA (1)...(19): siRNA sense strand
aggcaaagaaguugaucaa

SEQ ID NO: 2663147 - RNA, 19 nt, Homo sapiens
  misc_RNA (1)...(19): siRNA sense strand
agagagagcugcuggaaca

SEQ ID NO: 2663148 - RNA, 19 nt, Homo sapiens
  misc_RNA (1)...(19): siRNA sense strand
gaaugaagcccaaagaauu

SEQ ID NO: 2663149 - RNA, 19 nt, Homo sapiens
  misc_RNA (1)...(19): siRNA sense strand
ucaaagaguugcaaaucaa

SEQ ID NO: 2663150 - RNA, 19 nt, Homo sapiens
  misc_RNA (1)...(19): siRNA sense strand
uguugaaguuggaaagcua

SEQ ID NO: 2663151 - RNA, 19 nt, Homo sapiens
  misc_RNA (1)...(19): siRNA sense strand
gacaggaagcagaaagaaa

SEQ ID NO: 2663152 - RNA, 19 nt, Homo sapiens
  misc_RNA (1)...(19): siRNA sense strand
aggaaagaauguugaaguu

SEQ ID NO: 2663153 - RNA, 19 nt, Homo sapiens
  misc_RNA (1)...(19): siRNA sense strand
ccacagaugaagaagaaga

SEQ ID NO: 2663154 - RNA, 19 nt, Homo sapiens
  misc_RNA (1)...(19): siRNA sense strand
gaaauaaacuuaaggcucu

SEQ ID NO: 2663155 - RNA, 19 nt, Homo sapiens
  misc_RNA (1)...(19): siRNA sense strand
ucagaaacaccaagggcaa

SEQ ID NO: 2663156 - RNA, 19 nt, Homo sapiens
  misc_RNA (1)...(19): siRNA sense strand
gagaauaaggaaagaaugu

SEQ ID NO: 2663157 - RNA, 19 nt, Homo sapiens
  misc_RNA (1)...(19): siRNA sense strand
gaaagauguuugagagaag

SEQ ID NO: 2663158 - RNA, 19 nt, Homo sapiens
  misc_RNA (1)...(19): siRNA sense strand
ugacaaagaugguccugaa

SEQ ID NO: 2663159 - RNA, 19 nt, Homo sapiens
  misc_RNA (1)...(19): siRNA sense strand
agaagaaaucccagcaaau

SEQ ID NO: 2663160 - RNA, 19 nt, Homo sapiens
  misc_RNA (1)...(19): siRNA sense strand
ugaagaagaagaugaggua

SEQ ID NO: 2663161 - RNA, 19 nt, Homo sapiens
  misc_RNA (1)...(19): siRNA sense strand
ggaggacagucuagagaga

SEQ ID NO: 2663162 - RNA, 19 nt, Homo sapiens
  misc_RNA (1)...(19): siRNA sense strand
agggugagauccagguaua

SEQ ID NO: 2663163 - RNA, 19 nt, Homo sapiens
  misc_RNA (1)...(19): siRNA sense strand
gauauggaguacucggaaa

SEQ ID NO: 2663164 - RNA, 19 nt, Homo sapiens
  misc_RNA (1)...(19): siRNA sense strand
ugaggauggucuugguaua

SEQ ID NO: 2663165 - RNA, 19 nt, Homo sapiens
  misc_RNA (1)...(19): siRNA sense strand
agaaguugaucaaggauuu

SEQ ID NO: 2663166 - RNA, 19 nt, Homo sapiens
  misc_RNA (1)...(19): siRNA sense strand
gcuccaaugucaacagaau

SEQ ID NO: 2663167 - RNA, 19 nt, Homo sapiens
  misc_RNA (1)...(19): siRNA sense strand
ggaagauagugaugagaac

SEQ ID NO: 2663168 - RNA, 19 nt, Homo sapiens
  misc_RNA (1)...(19): siRNA sense strand
ugaagaaccuugugcugaa

SEQ ID NO: 2663169 - RNA, 19 nt, Homo sapiens
  misc_RNA (1)...(19): siRNA sense strand
ggagaaaugacgaaguuga

SEQ ID NO: 2663170 - RNA, 19 nt, Homo sapiens
  misc_RNA (1)...(19): siRNA sense strand
ugacgagacaggagaauau

SEQ ID NO: 2663171 - RNA, 19 nt, Homo sapiens
  misc_RNA (1)...(19): siRNA sense strand
aggacaagacuguaugaua

SEQ ID NO: 2663172 - RNA, 19 nt, Homo sapiens
  misc_RNA (1)...(19): siRNA sense strand
agaaugaagcccaaagaau

SEQ ID NO: 2663173 - RNA, 19 nt, Homo sapiens
  misc_RNA (1)...(19): siRNA sense strand
ggagugaaccucaggauga

SEQ ID NO: 2663174 - RNA, 19 nt, Homo sapiens
  misc_RNA (1)...(19): siRNA sense strand
uggagaacuuggauggcaa

SEQ ID NO: 2663175 - RNA, 19 nt, Homo sapiens
  misc_RNA (1)...(19): siRNA sense strand
agagaaaagcuaaggagaa

SEQ ID NO: 2663176 - RNA, 19 nt, Homo sapiens
  misc_RNA (1)...(19): siRNA sense strand
uuacagaagcagagauuca

SEQ ID NO: 2663177 - RNA, 19 nt, Homo sapiens
  misc_RNA (1)...(19): siRNA sense strand
uagaagaugcugaagcuaa

SEQ ID NO: 2663178 - RNA, 19 nt, Homo sapiens
  misc_RNA (1)...(19): siRNA sense strand
agaagaugcugaagcuaau

SEQ ID NO: 2663179 - RNA, 19 nt, Homo sapiens
  misc_RNA (1)...(19): siRNA sense strand
aagaagaaaucccagcaaa

SEQ ID NO: 2663180 - RNA, 19 nt, Homo sapiens
  misc_RNA (1)...(19): siRNA sense strand
ggacaagacuguaugauag

SEQ ID NO: 2663181 - RNA, 19 nt, Homo sapiens
  misc_RNA (1)...(19): siRNA sense strand
ggacagaacaaccgcuauu

SEQ ID NO: 2663182 - RNA, 19 nt, Homo sapiens
  misc_RNA (1)...(19): siRNA sense strand
guuuaaugacagccggaaa

SEQ ID NO: 2663183 - RNA, 19 nt, Homo sapiens
  misc_RNA (1)...(19): siRNA sense strand
ggaaauuguuggauugcca

SEQ ID NO: 2663184 - RNA, 19 nt, Homo sapiens
  misc_RNA (1)...(19): siRNA sense strand
aagaaauacaacaaggcaa

SEQ ID NO: 2663185 - RNA, 19 nt, Homo sapiens
  misc_RNA (1)...(19): siRNA sense strand
ggucuugguauaaguauua

SEQ ID NO: 2663186 - RNA, 19 nt, Homo sapiens
  misc_RNA (1)...(19): siRNA sense strand
ccacaugcauauuaccaaa

SEQ ID NO: 2663187 - RNA, 19 nt, Homo sapiens
  misc_RNA (1)...(19): siRNA sense strand
agagaagaaugaagcccaa

SEQ ID NO: 2663188 - RNA, 19 nt, Homo sapiens
  misc_RNA (1)...(19): siRNA sense strand
cgaaagauguuugagagaa

SEQ ID NO: 2663189 - RNA, 19 nt, Homo sapiens
  misc_RNA (1)...(19): siRNA sense strand
acaacaaggcaaagaaguu

SEQ ID NO: 2663190 - RNA, 19 nt, Homo sapiens
  misc_RNA (1)...(19): siRNA sense strand
gagagaaagccaucaaaca

SEQ ID NO: 2663191 - RNA, 19 nt, Homo sapiens
  misc_RNA (1)...(19): siRNA sense strand
agaauaugccacagaugaa

SEQ ID NO: 2663192 - RNA, 19 nt, Homo sapiens
  misc_RNA (1)...(19): siRNA sense strand
ggagaaaggagcaagagca

SEQ ID NO: 2663193 - RNA, 19 nt, Homo sapiens
  misc_RNA (1)...(19): siRNA sense strand
ggggaaagguggacauuca

SEQ ID NO: 2663194 - RNA, 19 nt, Homo sapiens
  misc_RNA (1)...(19): siRNA sense strand
guguauagggugagaucca

SEQ ID NO: 2663195 - RNA, 19 nt, Homo sapiens
  misc_RNA (1)...(19): siRNA sense strand
uggaauggguguuggagca

SEQ ID NO: 2663196 - RNA, 19 nt, Homo sapiens
  misc_RNA (1)...(19): siRNA sense strand
gcagaauacaagucaauga

SEQ ID NO: 2663197 - RNA, 19 nt, Homo sapiens
  misc_RNA (1)...(19): siRNA sense strand
cagaugaagaagaagauga

SEQ ID NO: 2663198 - RNA, 19 nt, Homo sapiens
  misc_RNA (1)...(19): siRNA sense strand
ggauugaggcccaaacauu

SEQ ID NO: 2663199 - RNA, 19 nt, Homo sapiens
  misc_RNA (1)...(19): siRNA sense strand
ccaagauggccuaagucaa

SEQ ID NO: 2663200 - RNA, 19 nt, Homo sapiens
  misc_RNA (1)...(19): siRNA sense strand
ggaaauaaacuuaaggcuc

SEQ ID NO: 2663201 - RNA, 19 nt, Homo sapiens
  misc_RNA (1)...(19): siRNA sense strand
ucgaaagauguuugagaga

SEQ ID NO: 2663202 - RNA, 19 nt, Homo sapiens
  misc_RNA (1)...(19): siRNA sense strand
caagcgagguguugauaca

SEQ ID NO: 2663203 - RNA, 19 nt, Homo sapiens
  misc_RNA (1)...(19): siRNA sense strand
gggcauuaucccuugaauu

SEQ ID NO: 2663204 - RNA, 19 nt, Homo sapiens
  misc_RNA (1)...(19): siRNA sense strand
gcucacaagaguaaugcaa

SEQ ID NO: 2663205 - RNA, 19 nt, Homo sapiens
  misc_RNA (1)...(19): siRNA sense strand
guacaugcacagugacuau

SEQ ID NO: 2663206 - RNA, 19 nt, Homo sapiens
  misc_RNA (1)...(19): siRNA sense strand
aguuacagaagcagagauu

SEQ ID NO: 2663207 - RNA, 19 nt, Homo sapiens
  misc_RNA (1)...(19): siRNA sense strand
gaucaaggauuuucaacaa

SEQ ID NO: 2663208 - RNA, 19 nt, Homo sapiens
  misc_RNA (1)...(19): siRNA sense strand
gggauaccauggagaacuu

SEQ ID NO: 2663209 - RNA, 19 nt, Homo sapiens
  misc_RNA (1)...(19): siRNA sense strand
aaucaaacaugcaguuaca

SEQ ID NO: 2663210 - RNA, 19 nt, Homo sapiens
  misc_RNA (1)...(19): siRNA sense strand
gagaaagugaggugggaac

SEQ ID NO: 2663211 - RNA, 19 nt, Homo sapiens
  misc_RNA (1)...(19): siRNA sense strand
acucggaaauuguuggauu

SEQ ID NO: 2663212 - RNA, 19 nt, Homo sapiens
  misc_RNA (1)...(19): siRNA sense strand
aguucaaagaguugcaaau

SEQ ID NO: 2663213 - RNA, 19 nt, Homo sapiens
  misc_RNA (1)...(19): siRNA sense strand
cccaagagaaaauggaaaa

SEQ ID NO: 2663214 - RNA, 19 nt, Homo sapiens
  misc_RNA (1)...(19): siRNA sense strand
gagaagugugcaugaauca

SEQ ID NO: 2663215 - RNA, 19 nt, Homo sapiens
  misc_RNA (1)...(19): siRNA sense strand
gauugaggcccaaacauua

SEQ ID NO: 2663216 - RNA, 19 nt, Homo sapiens
  misc_RNA (1)...(19): siRNA sense strand
uaacaacaucuuugagaga

SEQ ID NO: 2663217 - RNA, 19 nt, Homo sapiens
  misc_RNA (1)...(19): siRNA sense strand
cugagaaggcugaaaacaa

SEQ ID NO: 2663218 - RNA, 19 nt, Homo sapiens
  misc_RNA (1)...(19): siRNA sense strand
ggcauuaucccuugaauuu

SEQ ID NO: 2663219 - RNA, 19 nt, Homo sapiens
  misc_RNA (1)...(19): siRNA sense strand
gcaacagaggaaagaacuu

SEQ ID NO: 2663220 - RNA, 19 nt, Homo sapiens
  misc_RNA (1)...(19): siRNA sense strand
ugccagaagaagaagaaau

SEQ ID NO: 2663221 - RNA, 19 nt, Homo sapiens
  misc_RNA (1)...(19): siRNA sense strand
gaagaaaucccagcaaaua

SEQ ID NO: 2663222 - RNA, 19 nt, Homo sapiens
  misc_RNA (1)...(19): siRNA sense strand
cagcaaagcaacagaggaa

SEQ ID NO: 2663223 - RNA, 19 nt, Homo sapiens
  misc_RNA (1)...(19): siRNA sense strand
agagaaagcuggagggagu

SEQ ID NO: 2663224 - RNA, 19 nt, Homo sapiens
  misc_RNA (1)...(19): siRNA sense strand
aggacagucuagagagaaa

SEQ ID NO: 2663225 - RNA, 19 nt, Homo sapiens
  misc_RNA (1)...(19): siRNA sense strand
agaaauacaacaaggcaaa

SEQ ID NO: 2663226 - RNA, 19 nt, Homo sapiens
  misc_RNA (1)...(19): siRNA sense strand
caguggagcuagagaaaga

SEQ ID NO: 2663227 - RNA, 19 nt, Homo sapiens
  misc_RNA (1)...(19): siRNA sense strand
ggaagcagaaagaaagaaa

SEQ ID NO: 2663228 - RNA, 19 nt, Homo sapiens
  misc_RNA (1)...(19): siRNA sense strand
ggacucaaguuaacaauaa

SEQ ID NO: 2663229 - RNA, 19 nt, Homo sapiens
  misc_RNA (1)...(19): siRNA sense strand
caaagaugguccugaagaa

SEQ ID NO: 2663230 - RNA, 19 nt, Homo sapiens
  misc_RNA (1)...(19): siRNA sense strand
aggcaaagaaguugaucaa

SEQ ID NO: 2663231 - RNA, 19 nt, Homo sapiens
  misc_RNA (1)...(19): siRNA sense strand
agagagagcugcuggaaca

SEQ ID NO: 2663232 - RNA, 19 nt, Homo sapiens
  misc_RNA (1)...(19): siRNA sense strand
gaaugaagcccaaagaauu

SEQ ID NO: 2663233 - RNA, 19 nt, Homo sapiens
  misc_RNA (1)...(19): siRNA sense strand
ucaaagaguugcaaaucaa

SEQ ID NO: 2663234 - RNA, 19 nt, Homo sapiens
  misc_RNA (1)...(19): siRNA sense strand
uguugaaguuggaaagcua

SEQ ID NO: 2663235 - RNA, 19 nt, Homo sapiens
  misc_RNA (1)...(19): siRNA sense strand
gacaggaagcagaaagaaa

SEQ ID NO: 2663236 - RNA, 19 nt, Homo sapiens
  misc_RNA (1)...(19): siRNA sense strand
aggaaagaauguugaaguu

SEQ ID NO: 2663237 - RNA, 19 nt, Homo sapiens
  misc_RNA (1)...(19): siRNA sense strand
ccacagaugaagaagaaga

SEQ ID NO: 2663238 - RNA, 19 nt, Homo sapiens
  misc_RNA (1)...(19): siRNA sense strand
gaaauaaacuuaaggcucu

SEQ ID NO: 2663239 - RNA, 19 nt, Homo sapiens
  misc_RNA (1)...(19): siRNA sense strand
ucagaaacaccaagggcaa

SEQ ID NO: 2663240 - RNA, 19 nt, Homo sapiens
  misc_RNA (1)...(19): siRNA sense strand
gagaauaaggaaagaaugu

SEQ ID NO: 2663241 - RNA, 19 nt, Homo sapiens
  misc_RNA (1)...(19): siRNA sense strand
gaaagauguuugagagaag

SEQ ID NO: 2663242 - RNA, 19 nt, Homo sapiens
  misc_RNA (1)...(19): siRNA sense strand
ugacaaagaugguccugaa

SEQ ID NO: 2663243 - RNA, 19 nt, Homo sapiens
  misc_RNA (1)...(19): siRNA sense strand
agaagaaaucccagcaaau

SEQ ID NO: 2663244 - RNA, 19 nt, Homo sapiens
  misc_RNA (1)...(19): siRNA sense strand
ugaagaagaagaugaggua

SEQ ID NO: 2663245 - RNA, 19 nt, Homo sapiens
  misc_RNA (1)...(19): siRNA sense strand
ggaggacagucuagagaga

SEQ ID NO: 2663246 - RNA, 19 nt, Homo sapiens
  misc_RNA (1)...(19): siRNA sense strand
agggugagauccagguaua

SEQ ID NO: 2663247 - RNA, 19 nt, Homo sapiens
  misc_RNA (1)...(19): siRNA sense strand
gauauggaguacucggaaa

SEQ ID NO: 2663248 - RNA, 19 nt, Homo sapiens
  misc_RNA (1)...(19): siRNA sense strand
ugaggauggucuugguaua

SEQ ID NO: 2663249 - RNA, 19 nt, Homo sapiens
  misc_RNA (1)...(19): siRNA sense strand
agaaguugaucaaggauuu

SEQ ID NO: 2663250 - RNA, 19 nt, Homo sapiens
  misc_RNA (1)...(19): siRNA sense strand
gcuccaaugucaacagaau

SEQ ID NO: 2663251 - RNA, 19 nt, Homo sapiens
  misc_RNA (1)...(19): siRNA sense strand
ggaagauagugaugagaac

SEQ ID NO: 2663252 - RNA, 19 nt, Homo sapiens
  misc_RNA (1)...(19): siRNA sense strand
ugaagaaccuugugcugaa

SEQ ID NO: 2663253 - RNA, 19 nt, Homo sapiens
  misc_RNA (1)...(19): siRNA sense strand
ggagaaaugacgaaguuga

SEQ ID NO: 2663254 - RNA, 19 nt, Homo sapiens
  misc_RNA (1)...(19): siRNA sense strand
ugacgagacaggagaauau

SEQ ID NO: 2663255 - RNA, 19 nt, Homo sapiens
  misc_RNA (1)...(19): siRNA sense strand
aggacaagacuguaugaua

SEQ ID NO: 2663256 - RNA, 19 nt, Homo sapiens
  misc_RNA (1)...(19): siRNA sense strand
agaaugaagcccaaagaau

SEQ ID NO: 2663257 - RNA, 19 nt, Homo sapiens
  misc_RNA (1)...(19): siRNA sense strand
ggagugaaccucaggauga

SEQ ID NO: 2663258 - RNA, 19 nt, Homo sapiens
  misc_RNA (1)...(19): siRNA sense strand
uggagaacuuggauggcaa

SEQ ID NO: 2663259 - RNA, 19 nt, Homo sapiens
  misc_RNA (1)...(19): siRNA sense strand
agagaaaagcuaaggagaa

SEQ ID NO: 2663260 - RNA, 19 nt, Homo sapiens
  misc_RNA (1)...(19): siRNA sense strand
uuacagaagcagagauuca

SEQ ID NO: 2663261 - RNA, 19 nt, Homo sapiens
  misc_RNA (1)...(19): siRNA sense strand
uagaagaugcugaagcuaa

SEQ ID NO: 2663262 - RNA, 19 nt, Homo sapiens
  misc_RNA (1)...(19): siRNA sense strand
agaagaugcugaagcuaau

SEQ ID NO: 2663263 - RNA, 19 nt, Homo sapiens
  misc_RNA (1)...(19): siRNA sense strand
aagaagaaaucccagcaaa

SEQ ID NO: 2663264 - RNA, 19 nt, Homo sapiens
  misc_RNA (1)...(19): siRNA sense strand
ggacaagacuguaugauag

SEQ ID NO: 2663265 - RNA, 19 nt, Homo sapiens
  misc_RNA (1)...(19): siRNA sense strand
ggacagaacaaccgcuauu

SEQ ID NO: 2663266 - RNA, 19 nt, Homo sapiens
  misc_RNA (1)...(19): siRNA sense strand
guuuaaugacagccggaaa

SEQ ID NO: 2663267 - RNA, 19 nt, Homo sapiens
  misc_RNA (1)...(19): siRNA sense strand
ggaaauuguuggauugcca

SEQ ID NO: 2663268 - RNA, 19 nt, Homo sapiens
  misc_RNA (1)...(19): siRNA sense strand
cgucaagacaguaacagaa

SEQ ID NO: 2663269 - RNA, 19 nt, Homo sapiens
  misc_RNA (1)...(19): siRNA sense strand
aagaaauacaacaaggcaa

SEQ ID NO: 2663270 - RNA, 19 nt, Homo sapiens
  misc_RNA (1)...(19): siRNA sense strand
ggucuugguauaaguauua

SEQ ID NO: 2663271 - RNA, 19 nt, Homo sapiens
  misc_RNA (1)...(19): siRNA sense strand
ccacaugcauauuaccaaa

SEQ ID NO: 2663272 - RNA, 19 nt, Homo sapiens
  misc_RNA (1)...(19): siRNA sense strand
agagaagaaugaagcccaa

SEQ ID NO: 2663273 - RNA, 19 nt, Homo sapiens
  misc_RNA (1)...(19): siRNA sense strand
cgaaagauguuugagagaa

SEQ ID NO: 2663274 - RNA, 19 nt, Homo sapiens
  misc_RNA (1)...(19): siRNA sense strand
acaacaaggcaaagaaguu

SEQ ID NO: 2663275 - RNA, 19 nt, Homo sapiens
  misc_RNA (1)...(19): siRNA sense strand
gagagaaagccaucaaaca

SEQ ID NO: 2663276 - RNA, 19 nt, Homo sapiens
  misc_RNA (1)...(19): siRNA sense strand
agaauaugccacagaugaa

SEQ ID NO: 2663277 - RNA, 19 nt, Homo sapiens
  misc_RNA (1)...(19): siRNA sense strand
ggagaaaggagcaagagca

SEQ ID NO: 2663278 - RNA, 19 nt, Homo sapiens
  misc_RNA (1)...(19): siRNA sense strand
ggggaaagguggacauuca

SEQ ID NO: 2663279 - RNA, 19 nt, Homo sapiens
  misc_RNA (1)...(19): siRNA sense strand
guguauagggugagaucca

SEQ ID NO: 2663280 - RNA, 19 nt, Homo sapiens
  misc_RNA (1)...(19): siRNA sense strand
uggaauggguguuggagca

SEQ ID NO: 2663281 - RNA, 19 nt, Homo sapiens
  misc_RNA (1)...(19): siRNA sense strand
gcagaauacaagucaauga

SEQ ID NO: 2663282 - RNA, 19 nt, Homo sapiens
  misc_RNA (1)...(19): siRNA sense strand
cagaugaagaagaagauga

SEQ ID NO: 2663283 - RNA, 19 nt, Homo sapiens
  misc_RNA (1)...(19): siRNA sense strand
gggaauauucgucaagaca

SEQ ID NO: 2663284 - RNA, 19 nt, Homo sapiens
  misc_RNA (1)...(19): siRNA sense strand
ggauugaggcccaaacauu

SEQ ID NO: 2663285 - RNA, 19 nt, Homo sapiens
  misc_RNA (1)...(19): siRNA sense strand
ccaagauggccuaagucaa

SEQ ID NO: 2663286 - RNA, 19 nt, Homo sapiens
  misc_RNA (1)...(19): siRNA sense strand
ggaaauaaacuuaaggcuc

SEQ ID NO: 2663287 - RNA, 19 nt, Homo sapiens
  misc_RNA (1)...(19): siRNA sense strand
ucgaaagauguuugagaga

SEQ ID NO: 2663288 - RNA, 19 nt, Homo sapiens
  misc_RNA (1)...(19): siRNA sense strand
caagcgagguguugauaca

SEQ ID NO: 2663289 - RNA, 19 nt, Homo sapiens
  misc_RNA (1)...(19): siRNA sense strand
gaauauucgucaagacagu

SEQ ID NO: 2663290 - RNA, 19 nt, Homo sapiens
  misc_RNA (1)...(19): siRNA sense strand
gggcauuaucccuugaauu

SEQ ID NO: 2663291 - RNA, 19 nt, Homo sapiens
  misc_RNA (1)...(19): siRNA sense strand
gcucacaagaguaaugcaa

SEQ ID NO: 2663292 - RNA, 19 nt, Homo sapiens
  misc_RNA (1)...(19): siRNA sense strand
guacaugcacagugacuau

SEQ ID NO: 2663293 - RNA, 19 nt, Homo sapiens
  misc_RNA (1)...(19): siRNA sense strand
aguuacagaagcagagauu

SEQ ID NO: 2663294 - RNA, 19 nt, Homo sapiens
  misc_RNA (1)...(19): siRNA sense strand
gaucaaggauuuucaacaa

SEQ ID NO: 2663295 - RNA, 19 nt, Homo sapiens
  misc_RNA (1)...(19): siRNA sense strand
gggauaccauggagaacuu

SEQ ID NO: 2663296 - RNA, 19 nt, Homo sapiens
  misc_RNA (1)...(19): siRNA sense strand
aaucaaacaugcaguuaca

SEQ ID NO: 2663297 - RNA, 19 nt, Homo sapiens
  misc_RNA (1)...(19): siRNA sense strand
gagaaagugaggugggaac

SEQ ID NO: 2663298 - RNA, 19 nt, Homo sapiens
  misc_RNA (1)...(19): siRNA sense strand
acucggaaauuguuggauu

SEQ ID NO: 2663299 - RNA, 19 nt, Homo sapiens
  misc_RNA (1)...(19): siRNA sense strand
aguucaaagaguugcaaau

SEQ ID NO: 2663300 - RNA, 19 nt, Homo sapiens
  misc_RNA (1)...(19): siRNA sense strand
cccaagagaaaauggaaaa

SEQ ID NO: 2663301 - RNA, 19 nt, Homo sapiens
  misc_RNA (1)...(19): siRNA sense strand
gagaagugugcaugaauca

SEQ ID NO: 2663302 - RNA, 19 nt, Homo sapiens
  misc_RNA (1)...(19): siRNA sense strand
gauugaggcccaaacauua

SEQ ID NO: 2663303 - RNA, 19 nt, Homo sapiens
  misc_RNA (1)...(19): siRNA sense strand
uaacaacaucuuugagaga

SEQ ID NO: 2663304 - RNA, 19 nt, Homo sapiens
  misc_RNA (1)...(19): siRNA sense strand
cugagaaggcugaaaacaa

SEQ ID NO: 2663305 - RNA, 19 nt, Homo sapiens
  misc_RNA (1)...(19): siRNA sense strand
ggcauuaucccuugaauuu

SEQ ID NO: 2663306 - RNA, 19 nt, Homo sapiens
  misc_RNA (1)...(19): siRNA sense strand
cagaagauuuguagacuuu

SEQ ID NO: 2663307 - RNA, 19 nt, Homo sapiens
  misc_RNA (1)...(19): siRNA sense strand
ucaugaaagaucuggauaa

SEQ ID NO: 2663308 - RNA, 19 nt, Homo sapiens
  misc_RNA (1)...(19): siRNA sense strand
ccucggaauucuaugauua

SEQ ID NO: 2663309 - RNA, 19 nt, Homo sapiens
  misc_RNA (1)...(19): siRNA sense strand
ccagaaggguuaagagaag

SEQ ID NO: 2663310 - RNA, 19 nt, Homo sapiens
  misc_RNA (1)...(19): siRNA sense strand
gcagaagauuuguagacuu

SEQ ID NO: 2663311 - RNA, 19 nt, Homo sapiens
  misc_RNA (1)...(19): siRNA sense strand
caauguggaugcagaauuu

SEQ ID NO: 2663312 - RNA, 19 nt, Homo sapiens
  misc_RNA (1)...(19): siRNA sense strand
caugaaagaucuggauaau

SEQ ID NO: 2663313 - RNA, 19 nt, Homo sapiens
  misc_RNA (1)...(19): siRNA sense strand
gcuucagaacuauaagaaa

SEQ ID NO: 2663314 - RNA, 19 nt, Homo sapiens
  misc_RNA (1)...(19): siRNA sense strand
cuucaauagucguggcagu

SEQ ID NO: 2663315 - RNA, 19 nt, Homo sapiens
  misc_RNA (1)...(19): siRNA sense strand
cuucagaacuauaagaaac

SEQ ID NO: 2663316 - RNA, 19 nt, Homo sapiens
  misc_RNA (1)...(19): siRNA sense strand
cuuagcaggccaagauuaa

SEQ ID NO: 2663317 - RNA, 19 nt, Homo sapiens
  misc_RNA (1)...(19): siRNA sense strand
ugcagaauuuguagaggaa

SEQ ID NO: 2663318 - RNA, 19 nt, Homo sapiens
  misc_RNA (1)...(19): siRNA sense strand
guagaaaccaauuggagga

SEQ ID NO: 2663319 - RNA, 19 nt, Homo sapiens
  misc_RNA (1)...(19): siRNA sense strand
gaaaccaauuggaggaaac

SEQ ID NO: 2663320 - RNA, 19 nt, Homo sapiens
  misc_RNA (1)...(19): siRNA sense strand
gcugauggugucugagcua

SEQ ID NO: 2663321 - RNA, 19 nt, Homo sapiens
  misc_RNA (1)...(19): siRNA sense strand
ugaaagaucuggauaauac

SEQ ID NO: 2663322 - RNA, 19 nt, Homo sapiens
  misc_RNA (1)...(19): siRNA sense strand
ccuaugaguucuaacauca

SEQ ID NO: 2663323 - RNA, 19 nt, Homo sapiens
  misc_RNA (1)...(19): siRNA sense strand
ugauggugucugagcuaaa

SEQ ID NO: 2663324 - RNA, 19 nt, Homo sapiens
  misc_RNA (1)...(19): siRNA sense strand
aagaaacagccucggaauu

SEQ ID NO: 2663325 - RNA, 19 nt, Homo sapiens
  misc_RNA (1)...(19): siRNA sense strand
ugacaauguggaugcagaa

SEQ ID NO: 2663326 - RNA, 19 nt, Homo sapiens
  misc_RNA (1)...(19): siRNA sense strand
accaauuggaggaaacaua

SEQ ID NO: 2663327 - RNA, 19 nt, Homo sapiens
  misc_RNA (1)...(19): siRNA sense strand
augcagaauuuguagagga

SEQ ID NO: 2663328 - RNA, 19 nt, Homo sapiens
  misc_RNA (1)...(19): siRNA sense strand
ccaauuggaggaaacauaa

SEQ ID NO: 2663329 - RNA, 19 nt, Homo sapiens
  misc_RNA (1)...(19): siRNA sense strand
cuuauugggcagaagauuu

SEQ ID NO: 2663330 - RNA, 19 nt, Homo sapiens
  misc_RNA (1)...(19): siRNA sense strand
aggaagcagcucugaaaca

SEQ ID NO: 2663331 - RNA, 19 nt, Homo sapiens
  misc_RNA (1)...(19): siRNA sense strand
gguguagaaaagaagaaaa

SEQ ID NO: 2663332 - RNA, 19 nt, Homo sapiens
  misc_RNA (1)...(19): siRNA sense strand
cccagaaggguuaagagaa

SEQ ID NO: 2663333 - RNA, 19 nt, Homo sapiens
  misc_RNA (1)...(19): siRNA sense strand
cagaauuuguagaggaagc

SEQ ID NO: 2663334 - RNA, 19 nt, Homo sapiens
  misc_RNA (1)...(19): siRNA sense strand
cgcgacugcuucagaacua

SEQ ID NO: 2663335 - RNA, 19 nt, Homo sapiens
  misc_RNA (1)...(19): siRNA sense strand
gagcagagguucuuagcag

SEQ ID NO: 2663336 - RNA, 19 nt, Homo sapiens
  misc_RNA (1)...(19): siRNA sense strand
gggcagaagauuuguagac

SEQ ID NO: 2663337 - RNA, 19 nt, Homo sapiens
  misc_RNA (1)...(19): siRNA sense strand
cggaauucuaugauuaaca

SEQ ID NO: 2663338 - RNA, 19 nt, Homo sapiens
  misc_RNA (1)...(19): siRNA sense strand
cuaacaucauuucgcggaa

SEQ ID NO: 2663339 - RNA, 19 nt, Homo sapiens
  misc_RNA (1)...(19): siRNA sense strand
gaagaaaauugaacagaug

SEQ ID NO: 2663340 - RNA, 19 nt, Homo sapiens
  misc_RNA (1)...(19): siRNA sense strand
cacugaaacagcugucaua

SEQ ID NO: 2663341 - RNA, 19 nt, Homo sapiens
  misc_RNA (1)...(19): siRNA sense strand
augacaauguggaugcaga

SEQ ID NO: 2663342 - RNA, 19 nt, Homo sapiens
  misc_RNA (1)...(19): siRNA sense strand
gccacaucguagaaaccaa

SEQ ID NO: 2663343 - RNA, 19 nt, Homo sapiens
  misc_RNA (1)...(19): siRNA sense strand
ugauauaaguccacagaaa

SEQ ID NO: 2663344 - RNA, 19 nt, Homo sapiens
  misc_RNA (1)...(19): siRNA sense strand
cuauuaaaggagagagaaa

SEQ ID NO: 2663345 - RNA, 19 nt, Homo sapiens
  misc_RNA (1)...(19): siRNA sense strand
ggaauuucguagagggaca

SEQ ID NO: 2663346 - RNA, 19 nt, Homo sapiens
  misc_RNA (1)...(19): siRNA sense strand
ucaaaguagaggaagaaua

SEQ ID NO: 2663347 - RNA, 19 nt, Homo sapiens
  misc_RNA (1)...(19): siRNA sense strand
gaaagcucguguagggaaa

SEQ ID NO: 2663348 - RNA, 19 nt, Homo sapiens
  misc_RNA (1)...(19): siRNA sense strand
uagucaaaguagaggaaga

SEQ ID NO: 2663349 - RNA, 19 nt, Homo sapiens
  misc_RNA (1)...(19): siRNA sense strand
ucaagaaaguagagaccuu

SEQ ID NO: 2663350 - RNA, 19 nt, Homo sapiens
  misc_RNA (1)...(19): siRNA sense strand
ggaaauauggugacagcau

SEQ ID NO: 2663351 - RNA, 19 nt, Homo sapiens
  misc_RNA (1)...(19): siRNA sense strand
gaaagaaguagcauggcaa

SEQ ID NO: 2663352 - RNA, 19 nt, Homo sapiens
  misc_RNA (1)...(19): siRNA sense strand
ccugauuauucaagcuaua

SEQ ID NO: 2663353 - RNA, 19 nt, Homo sapiens
  misc_RNA (1)...(19): siRNA sense strand
agaccaacccgaauagaaa

SEQ ID NO: 2663354 - RNA, 19 nt, Homo sapiens
  misc_RNA (1)...(19): siRNA sense strand
gggaauuaacaggaggaaa

SEQ ID NO: 2663355 - RNA, 19 nt, Homo sapiens
  misc_RNA (1)...(19): siRNA sense strand
gugaguagcacaagaccaa

SEQ ID NO: 2663356 - RNA, 19 nt, Homo sapiens
  misc_RNA (1)...(19): siRNA sense strand
cccaacaccuuuagagauu

SEQ ID NO: 2663357 - RNA, 19 nt, Homo sapiens
  misc_RNA (1)...(19): siRNA sense strand
ccgaauagaaagucagcau

SEQ ID NO: 2663358 - RNA, 19 nt, Homo sapiens
  misc_RNA (1)...(19): siRNA sense strand
agucaaagcauaagaaauc

SEQ ID NO: 2663359 - RNA, 19 nt, Homo sapiens
  misc_RNA (1)...(19): siRNA sense strand
augugaaggcggaggaaga

SEQ ID NO: 2663360 - RNA, 19 nt, Homo sapiens
  misc_RNA (1)...(19): siRNA sense strand
cagucaaagcauaagaaau

SEQ ID NO: 2663361 - RNA, 19 nt, Homo sapiens
  misc_RNA (1)...(19): siRNA sense strand
ggaaagaaguagcauggca

SEQ ID NO: 2663362 - RNA, 19 nt, Homo sapiens
  misc_RNA (1)...(19): siRNA sense strand
ucaaacgguagcagagaua

SEQ ID NO: 2663363 - RNA, 19 nt, Homo sapiens
  misc_RNA (1)...(19): siRNA sense strand
ugcaaaacuucgaaagaaa

SEQ ID NO: 2663364 - RNA, 19 nt, Homo sapiens
  misc_RNA (1)...(19): siRNA sense strand
augccaagguagaaauaau

SEQ ID NO: 2663365 - RNA, 19 nt, Homo sapiens
  misc_RNA (1)...(19): siRNA sense strand
ccaagauucuccaggacau

SEQ ID NO: 2663366 - RNA, 19 nt, Homo sapiens
  misc_RNA (1)...(19): siRNA sense strand
ccuacuagaucaaggagga

SEQ ID NO: 2663367 - RNA, 19 nt, Homo sapiens
  misc_RNA (1)...(19): siRNA sense strand
ucugagaaguauagcauca

SEQ ID NO: 2663368 - RNA, 19 nt, Homo sapiens
  misc_RNA (1)...(19): siRNA sense strand
aggagaaggaucugcagaa

SEQ ID NO: 2663369 - RNA, 19 nt, Homo sapiens
  misc_RNA (1)...(19): siRNA sense strand
agaauagguuuggaggaaa

SEQ ID NO: 2663370 - RNA, 19 nt, Homo sapiens
  misc_RNA (1)...(19): siRNA sense strand
ccaaaggaacagcggcauu

SEQ ID NO: 2663371 - RNA, 19 nt, Homo sapiens
  misc_RNA (1)...(19): siRNA sense strand
guagagggacagagagcuu

SEQ ID NO: 2663372 - RNA, 19 nt, Homo sapiens
  misc_RNA (1)...(19): siRNA sense strand
ggaaagggagucugcaaaa

SEQ ID NO: 2663373 - RNA, 19 nt, Homo sapiens
  misc_RNA (1)...(19): siRNA sense strand
ggcauuuccuccagggcaa

SEQ ID NO: 2663374 - RNA, 19 nt, Homo sapiens
  misc_RNA (1)...(19): siRNA sense strand
acacaugagggaagaauca

SEQ ID NO: 2663375 - RNA, 19 nt, Homo sapiens
  misc_RNA (1)...(19): siRNA sense strand
cggcaaacuacauuauauu

SEQ ID NO: 2663376 - RNA, 19 nt, Homo sapiens
  misc_RNA (1)...(19): siRNA sense strand
gggcacaguuuccaggaga

SEQ ID NO: 2663377 - RNA, 19 nt, Homo sapiens
  misc_RNA (1)...(19): siRNA sense strand
guggaaagggagucugcaa

SEQ ID NO: 2663378 - RNA, 19 nt, Homo sapiens
  misc_RNA (1)...(19): siRNA sense strand
agagcuugaugaagaagaa

SEQ ID NO: 2663379 - RNA, 19 nt, Homo sapiens
  misc_RNA (1)...(19): siRNA sense strand
cccuauuaaaggagagaga

SEQ ID NO: 2663380 - RNA, 19 nt, Homo sapiens
  misc_RNA (1)...(19): siRNA sense strand
agaaggaucugcagaacca

SEQ ID NO: 2663381 - RNA, 19 nt, Homo sapiens
  misc_RNA (1)...(19): siRNA sense strand
agacagagagcuugaucuu

SEQ ID NO: 2663382 - RNA, 19 nt, Homo sapiens
  misc_RNA (1)...(19): siRNA sense strand
gcacaagaccaacccgaau

SEQ ID NO: 2663383 - RNA, 19 nt, Homo sapiens
  misc_RNA (1)...(19): siRNA sense strand
gccaauuagucaaaguaga

SEQ ID NO: 2663384 - RNA, 19 nt, Homo sapiens
  misc_RNA (1)...(19): siRNA sense strand
agucaaaguagaggaagaa

SEQ ID NO: 2663385 - RNA, 19 nt, Homo sapiens
  misc_RNA (1)...(19): siRNA sense strand
gguuuggaggaaagaagua

SEQ ID NO: 2663386 - RNA, 19 nt, Homo sapiens
  misc_RNA (1)...(19): siRNA sense strand
ccuucgaaccacugagaca

SEQ ID NO: 2663387 - RNA, 19 nt, Homo sapiens
  misc_RNA (1)...(19): siRNA sense strand
cgacaaguccuuacacaca

SEQ ID NO: 2663388 - RNA, 19 nt, Homo sapiens
  misc_RNA (1)...(19): siRNA sense strand
cgaguuaaagcuucugaaa

SEQ ID NO: 2663389 - RNA, 19 nt, Homo sapiens
  misc_RNA (1)...(19): siRNA sense strand
ugucuaugggcuugauuua

SEQ ID NO: 2663390 - RNA, 19 nt, Homo sapiens
  misc_RNA (1)...(19): siRNA sense strand
uggaaagggagucugcaaa

SEQ ID NO: 2663391 - RNA, 19 nt, Homo sapiens
  misc_RNA (1)...(19): siRNA sense strand
ccucaaacuaugaagugau

SEQ ID NO: 2663392 - RNA, 19 nt, Homo sapiens
  misc_RNA (1)...(19): siRNA sense strand
ucucaagaagugacagauu

SEQ ID NO: 2663393 - RNA, 19 nt, Homo sapiens
  misc_RNA (1)...(19): siRNA sense strand
aggaagacccaauggagga

SEQ ID NO: 2663394 - RNA, 19 nt, Homo sapiens
  misc_RNA (1)...(19): siRNA sense strand
guagagaccuugaaccuga

SEQ ID NO: 2663395 - RNA, 19 nt, Homo sapiens
  misc_RNA (1)...(19): siRNA sense strand
cuucacaccucaaguucaa

SEQ ID NO: 2663396 - RNA, 19 nt, Homo sapiens
  misc_RNA (1)...(19): siRNA sense strand
acuaugaagugauucgcaa

SEQ ID NO: 2663397 - RNA, 19 nt, Homo sapiens
  misc_RNA (1)...(19): siRNA sense strand
ucaccauacuccacgaaau

SEQ ID NO: 2663398 - RNA, 19 nt, Homo sapiens
  misc_RNA (1)...(19): siRNA sense strand
augaaaaggaucugucaaa

SEQ ID NO: 2663399 - RNA, 19 nt, Homo sapiens
  misc_RNA (1)...(19): siRNA sense strand
ggucucaagaagugacaga

SEQ ID NO: 2663400 - RNA, 19 nt, Homo sapiens
  misc_RNA (1)...(19): siRNA sense strand
aaacagaagcagauucaga

SEQ ID NO: 2663401 - RNA, 19 nt, Homo sapiens
  misc_RNA (1)...(19): siRNA sense strand
agaagcagauucagacaca

SEQ ID NO: 2663402 - RNA, 19 nt, Homo sapiens
  misc_RNA (1)...(19): siRNA sense strand
ggaaagcucguguagggaa

SEQ ID NO: 2663403 - RNA, 19 nt, Homo sapiens
  misc_RNA (1)...(19): siRNA sense strand
cagcaacacaugagggaag

SEQ ID NO: 2663404 - RNA, 19 nt, Homo sapiens
  misc_RNA (1)...(19): siRNA sense strand
ugaaccaguuggaaccaua

SEQ ID NO: 2663405 - RNA, 19 nt, Homo sapiens
  misc_RNA (1)...(19): siRNA sense strand
gaguggaugccaagguaga

SEQ ID NO: 2663406 - RNA, 19 nt, Homo sapiens
  misc_RNA (1)...(19): siRNA sense strand
agugaagugaguagcacaa

SEQ ID NO: 2663407 - RNA, 19 nt, Homo sapiens
  misc_RNA (1)...(19): siRNA sense strand
aguuuagacuugagaauag

SEQ ID NO: 2663408 - RNA, 19 nt, Homo sapiens
  misc_RNA (1)...(19): siRNA sense strand
ccaaaaucugagaaguaua

SEQ ID NO: 2663409 - RNA, 19 nt, Homo sapiens
  misc_RNA (1)...(19): siRNA sense strand
gggcaguuuaggaugucaa

SEQ ID NO: 2663410 - RNA, 19 nt, Homo sapiens
  misc_RNA (1)...(19): siRNA sense strand
aagaagaaaaggagauuga

SEQ ID NO: 2663411 - RNA, 19 nt, Homo sapiens
  misc_RNA (1)...(19): siRNA sense strand
agagaucaccaaaggaaca

SEQ ID NO: 2663412 - RNA, 19 nt, Homo sapiens
  misc_RNA (1)...(19): siRNA sense strand
acaucagauuaaacaggaa

SEQ ID NO: 2663413 - RNA, 19 nt, Homo sapiens
  misc_RNA (1)...(19): siRNA sense strand
cauaagaacacccuccaua

SEQ ID NO: 2663414 - RNA, 19 nt, Homo sapiens
  misc_RNA (1)...(19): siRNA sense strand
cacacaaaguccucaauau

SEQ ID NO: 2663415 - RNA, 19 nt, Homo sapiens
  misc_RNA (1)...(19): siRNA sense strand
ggcacaguuuccaggagaa

SEQ ID NO: 2663416 - RNA, 19 nt, Homo sapiens
  misc_RNA (1)...(19): siRNA sense strand
ugauauaaguccacagaaa

SEQ ID NO: 2663417 - RNA, 19 nt, Homo sapiens
  misc_RNA (1)...(19): siRNA sense strand
cuauuaaaggagagagaaa

SEQ ID NO: 2663418 - RNA, 19 nt, Homo sapiens
  misc_RNA (1)...(19): siRNA sense strand
ggaauuucguagagggaca

SEQ ID NO: 2663419 - RNA, 19 nt, Homo sapiens
  misc_RNA (1)...(19): siRNA sense strand
ucaaaguagaggaagaaua

SEQ ID NO: 2663420 - RNA, 19 nt, Homo sapiens
  misc_RNA (1)...(19): siRNA sense strand
cguccaaacugaugaugaa

SEQ ID NO: 2663421 - RNA, 19 nt, Homo sapiens
  misc_RNA (1)...(19): siRNA sense strand
gaaagcucguguagggaaa

SEQ ID NO: 2663422 - RNA, 19 nt, Homo sapiens
  misc_RNA (1)...(19): siRNA sense strand
uagucaaaguagaggaaga

SEQ ID NO: 2663423 - RNA, 19 nt, Homo sapiens
  misc_RNA (1)...(19): siRNA sense strand
gugaguaggagaaggagaa

SEQ ID NO: 2663424 - RNA, 19 nt, Homo sapiens
  misc_RNA (1)...(19): siRNA sense strand
ucaagaaaguagagaccuu

SEQ ID NO: 2663425 - RNA, 19 nt, Homo sapiens
  misc_RNA (1)...(19): siRNA sense strand
ggaaauauggugacagcau

SEQ ID NO: 2663426 - RNA, 19 nt, Homo sapiens
  misc_RNA (1)...(19): siRNA sense strand
aguaggagaaggagaacua

SEQ ID NO: 2663427 - RNA, 19 nt, Homo sapiens
  misc_RNA (1)...(19): siRNA sense strand
gaaagaaguagcauggcaa

SEQ ID NO: 2663428 - RNA, 19 nt, Homo sapiens
  misc_RNA (1)...(19): siRNA sense strand
ccugauuauucaagcuaua

SEQ ID NO: 2663429 - RNA, 19 nt, Homo sapiens
  misc_RNA (1)...(19): siRNA sense strand
agaccaacccgaauagaaa

SEQ ID NO: 2663430 - RNA, 19 nt, Homo sapiens
  misc_RNA (1)...(19): siRNA sense strand
gggaauuaacaggaggaaa

SEQ ID NO: 2663431 - RNA, 19 nt, Homo sapiens
  misc_RNA (1)...(19): siRNA sense strand
gugaguagcacaagaccaa

SEQ ID NO: 2663432 - RNA, 19 nt, Homo sapiens
  misc_RNA (1)...(19): siRNA sense strand
cccaacaccuuuagagauu

SEQ ID NO: 2663433 - RNA, 19 nt, Homo sapiens
  misc_RNA (1)...(19): siRNA sense strand
ccgaauagaaagucagcau

SEQ ID NO: 2663434 - RNA, 19 nt, Homo sapiens
  misc_RNA (1)...(19): siRNA sense strand
agucaaagcauaagaaauc

SEQ ID NO: 2663435 - RNA, 19 nt, Homo sapiens
  misc_RNA (1)...(19): siRNA sense strand
augugaaggcggaggaaga

SEQ ID NO: 2663436 - RNA, 19 nt, Homo sapiens
  misc_RNA (1)...(19): siRNA sense strand
cagucaaagcauaagaaau

SEQ ID NO: 2663437 - RNA, 19 nt, Homo sapiens
  misc_RNA (1)...(19): siRNA sense strand
ggaaagaaguagcauggca

SEQ ID NO: 2663438 - RNA, 19 nt, Homo sapiens
  misc_RNA (1)...(19): siRNA sense strand
ucaaacgguagcagagaua

SEQ ID NO: 2663439 - RNA, 19 nt, Homo sapiens
  misc_RNA (1)...(19): siRNA sense strand
ugcaaaacuucgaaagaaa

SEQ ID NO: 2663440 - RNA, 19 nt, Homo sapiens
  misc_RNA (1)...(19): siRNA sense strand
augccaagguagaaauaau

SEQ ID NO: 2663441 - RNA, 19 nt, Homo sapiens
  misc_RNA (1)...(19): siRNA sense strand
ggauaugccuacuagauca

SEQ ID NO: 2663442 - RNA, 19 nt, Homo sapiens
  misc_RNA (1)...(19): siRNA sense strand
ccuacuagaucaaggagga

SEQ ID NO: 2663443 - RNA, 19 nt, Homo sapiens
  misc_RNA (1)...(19): siRNA sense strand
ccaagauucuccaggacau

SEQ ID NO: 2663444 - RNA, 19 nt, Homo sapiens
  misc_RNA (1)...(19): siRNA sense strand
ucugagaaguauagcauca

SEQ ID NO: 2663445 - RNA, 19 nt, Homo sapiens
  misc_RNA (1)...(19): siRNA sense strand
aggagaaggaucugcagaa

SEQ ID NO: 2663446 - RNA, 19 nt, Homo sapiens
  misc_RNA (1)...(19): siRNA sense strand
agaauagguuuggaggaaa

SEQ ID NO: 2663447 - RNA, 19 nt, Homo sapiens
  misc_RNA (1)...(19): siRNA sense strand
ccaaaggaacagcggcauu

SEQ ID NO: 2663448 - RNA, 19 nt, Homo sapiens
  misc_RNA (1)...(19): siRNA sense strand
guagagggacagagagcuu

SEQ ID NO: 2663449 - RNA, 19 nt, Homo sapiens
  misc_RNA (1)...(19): siRNA sense strand
ggaaagggagucugcaaaa

SEQ ID NO: 2663450 - RNA, 19 nt, Homo sapiens
  misc_RNA (1)...(19): siRNA sense strand
ggcauuuccuccagggcaa

SEQ ID NO: 2663451 - RNA, 19 nt, Homo sapiens
  misc_RNA (1)...(19): siRNA sense strand
acacaugagggaagaauca

SEQ ID NO: 2663452 - RNA, 19 nt, Homo sapiens
  misc_RNA (1)...(19): siRNA sense strand
ccaaacugaugaugaagau

SEQ ID NO: 2663453 - RNA, 19 nt, Homo sapiens
  misc_RNA (1)...(19): siRNA sense strand
cggcaaacuacauuauauu

SEQ ID NO: 2663454 - RNA, 19 nt, Homo sapiens
  misc_RNA (1)...(19): siRNA sense strand
gggcacaguuuccaggaga

SEQ ID NO: 2663455 - RNA, 19 nt, Homo sapiens
  misc_RNA (1)...(19): siRNA sense strand
guggaaagggagucugcaa

SEQ ID NO: 2663456 - RNA, 19 nt, Homo sapiens
  misc_RNA (1)...(19): siRNA sense strand
agagcuugaugaagaagaa

SEQ ID NO: 2663457 - RNA, 19 nt, Homo sapiens
  misc_RNA (1)...(19): siRNA sense strand
cccuauuaaaggagagaga

SEQ ID NO: 2663458 - RNA, 19 nt, Homo sapiens
  misc_RNA (1)...(19): siRNA sense strand
agaaggaucugcagaacca

SEQ ID NO: 2663459 - RNA, 19 nt, Homo sapiens
  misc_RNA (1)...(19): siRNA sense strand
agacagagagcuugaucuu

SEQ ID NO: 2663460 - RNA, 19 nt, Homo sapiens
  misc_RNA (1)...(19): siRNA sense strand
gcacaagaccaacccgaau

SEQ ID NO: 2663461 - RNA, 19 nt, Homo sapiens
  misc_RNA (1)...(19): siRNA sense strand
gccaauuagucaaaguaga

SEQ ID NO: 2663462 - RNA, 19 nt, Homo sapiens
  misc_RNA (1)...(19): siRNA sense strand
agucaaaguagaggaagaa

SEQ ID NO: 2663463 - RNA, 19 nt, Homo sapiens
  misc_RNA (1)...(19): siRNA sense strand
gguuuggaggaaagaagua

SEQ ID NO: 2663464 - RNA, 19 nt, Homo sapiens
  misc_RNA (1)...(19): siRNA sense strand
ccuucgaaccacugagaca

SEQ ID NO: 2663465 - RNA, 19 nt, Homo sapiens
  misc_RNA (1)...(19): siRNA sense strand
cgacaaguccuuacacaca

SEQ ID NO: 2663466 - RNA, 19 nt, Homo sapiens
  misc_RNA (1)...(19): siRNA sense strand
cgaguuaaagcuucugaaa

SEQ ID NO: 2663467 - RNA, 19 nt, Homo sapiens
  misc_RNA (1)...(19): siRNA sense strand
ugucuaugggcuugauuua

SEQ ID NO: 2663468 - RNA, 19 nt, Homo sapiens
  misc_RNA (1)...(19): siRNA sense strand
uggaaagggagucugcaaa

SEQ ID NO: 2663469 - RNA, 19 nt, Homo sapiens
  misc_RNA (1)...(19): siRNA sense strand
ccucaaacuaugaagugau

SEQ ID NO: 2663470 - RNA, 19 nt, Homo sapiens
  misc_RNA (1)...(19): siRNA sense strand
ucucaagaagugacagauu

SEQ ID NO: 2663471 - RNA, 19 nt, Homo sapiens
  misc_RNA (1)...(19): siRNA sense strand
aggaagacccaauggagga

SEQ ID NO: 2663472 - RNA, 19 nt, Homo sapiens
  misc_RNA (1)...(19): siRNA sense strand
guagagaccuugaaccuga

SEQ ID NO: 2663473 - RNA, 19 nt, Homo sapiens
  misc_RNA (1)...(19): siRNA sense strand
cuucacaccucaaguucaa

SEQ ID NO: 2663474 - RNA, 19 nt, Homo sapiens
  misc_RNA (1)...(19): siRNA sense strand
acuaugaagugauucgcaa

SEQ ID NO: 2663475 - RNA, 19 nt, Homo sapiens
  misc_RNA (1)...(19): siRNA sense strand
ucaccauacuccacgaaau

SEQ ID NO: 2663476 - RNA, 19 nt, Homo sapiens
  misc_RNA (1)...(19): siRNA sense strand
augaaaaggaucugucaaa

SEQ ID NO: 2663477 - RNA, 19 nt, Homo sapiens
  misc_RNA (1)...(19): siRNA sense strand
ggucucaagaagugacaga

SEQ ID NO: 2663478 - RNA, 19 nt, Homo sapiens
  misc_RNA (1)...(19): siRNA sense strand
uaggagaaggagaacuaaa

SEQ ID NO: 2663479 - RNA, 19 nt, Homo sapiens
  misc_RNA (1)...(19): siRNA sense strand
aaacagaagcagauucaga

SEQ ID NO: 2663480 - RNA, 19 nt, Homo sapiens
  misc_RNA (1)...(19): siRNA sense strand
agaagcagauucagacaca

SEQ ID NO: 2663481 - RNA, 19 nt, Homo sapiens
  misc_RNA (1)...(19): siRNA sense strand
ggaaagcucguguagggaa

SEQ ID NO: 2663482 - RNA, 19 nt, Homo sapiens
  misc_RNA (1)...(19): siRNA sense strand
cagcaacacaugagggaag

SEQ ID NO: 2663483 - RNA, 19 nt, Homo sapiens
  misc_RNA (1)...(19): siRNA sense strand
ugaaccaguuggaaccaua

SEQ ID NO: 2663484 - RNA, 19 nt, Homo sapiens
  misc_RNA (1)...(19): siRNA sense strand
gaguggaugccaagguaga

SEQ ID NO: 2663485 - RNA, 19 nt, Homo sapiens
  misc_RNA (1)...(19): siRNA sense strand
agugaagugaguagcacaa

SEQ ID NO: 2663486 - RNA, 19 nt, Homo sapiens
  misc_RNA (1)...(19): siRNA sense strand
aguuuagacuugagaauag

SEQ ID NO: 2663487 - RNA, 19 nt, Homo sapiens
  misc_RNA (1)...(19): siRNA sense strand
ccaaaaucugagaaguaua

SEQ ID NO: 2663488 - RNA, 19 nt, Homo sapiens
  misc_RNA (1)...(19): siRNA sense strand
gggcaguuuaggaugucaa

SEQ ID NO: 2663489 - RNA, 19 nt, Homo sapiens
  misc_RNA (1)...(19): siRNA sense strand
guguaaggucugugggcaa

SEQ ID NO: 2663490 - RNA, 19 nt, Homo sapiens
  misc_RNA (1)...(19): siRNA sense strand
auguggagaaugugggaaa

SEQ ID NO: 2663491 - RNA, 19 nt, Homo sapiens
  misc_RNA (1)...(19): siRNA sense strand
guaaagaauuuguggacag

SEQ ID NO: 2663492 - RNA, 19 nt, Homo sapiens
  misc_RNA (1)...(19): siRNA sense strand
augugauguuggagaacua

SEQ ID NO: 2663493 - RNA, 19 nt, Homo sapiens
  misc_RNA (1)...(19): siRNA sense strand
uuggagaacuacaggaaca

SEQ ID NO: 2663494 - RNA, 19 nt, Homo sapiens
  misc_RNA (1)...(19): siRNA sense strand
gauaugaugaggauggcaa

SEQ ID NO: 2663495 - RNA, 19 nt, Homo sapiens
  misc_RNA (1)...(19): siRNA sense strand
ucuuaugaaugcagugaau

SEQ ID NO: 2663496 - RNA, 19 nt, Homo sapiens
  misc_RNA (1)...(19): siRNA sense strand
ggaaaagucauuaggcgua

SEQ ID NO: 2663497 - RNA, 19 nt, Homo sapiens
  misc_RNA (1)...(19): siRNA sense strand
agaaggaccucuaccgaga

SEQ ID NO: 2663498 - RNA, 19 nt, Homo sapiens
  misc_RNA (1)...(19): siRNA sense strand
cuuucaauguggagaaugu

SEQ ID NO: 2663499 - RNA, 19 nt, Homo sapiens
  misc_RNA (1)...(19): siRNA sense strand
aggaaucagcugagaaacu

SEQ ID NO: 2663500 - RNA, 19 nt, Homo sapiens
  misc_RNA (1)...(19): siRNA sense strand
augcagugaauguggaaaa

SEQ ID NO: 2663501 - RNA, 19 nt, Homo sapiens
  misc_RNA (1)...(19): siRNA sense strand
aggauucacaccaaagaaa

SEQ ID NO: 2663502 - RNA, 19 nt, Homo sapiens
  misc_RNA (1)...(19): siRNA sense strand
cgagaugugauguuggaga

SEQ ID NO: 2663503 - RNA, 19 nt, Homo sapiens
  misc_RNA (1)...(19): siRNA sense strand
cguuugaggauguggcgau

SEQ ID NO: 2663504 - RNA, 19 nt, Homo sapiens
  misc_RNA (1)...(19): siRNA sense strand
gcgcaaacaagguggaagc

SEQ ID NO: 2663505 - RNA, 19 nt, Homo sapiens
  misc_RNA (1)...(19): siRNA sense strand
aagccagacacaagaugaa

SEQ ID NO: 2663506 - RNA, 19 nt, Homo sapiens
  misc_RNA (1)...(19): siRNA sense strand
uucugaagauuuagaguca

SEQ ID NO: 2663507 - RNA, 19 nt, Homo sapiens
  misc_RNA (1)...(19): siRNA sense strand
cguuuaguuuuaagaggaa

SEQ ID NO: 2663508 - RNA, 19 nt, Homo sapiens
  misc_RNA (1)...(19): siRNA sense strand
cccuacuaguggugaugaa

SEQ ID NO: 2663509 - RNA, 19 nt, Homo sapiens
  misc_RNA (1)...(19): siRNA sense strand
acauggucuugcugggauu

SEQ ID NO: 2663510 - RNA, 19 nt, Homo sapiens
  misc_RNA (1)...(19): siRNA sense strand
uguuggagaacuacaggaa

SEQ ID NO: 2663511 - RNA, 19 nt, Homo sapiens
  misc_RNA (1)...(19): siRNA sense strand
cauucacacuggaagccaa

SEQ ID NO: 2663512 - RNA, 19 nt, Homo sapiens
  misc_RNA (1)...(19): siRNA sense strand
auaugaugaggauggcaaa

SEQ ID NO: 2663513 - RNA, 19 nt, Homo sapiens
  misc_RNA (1)...(19): siRNA sense strand
guguaaggucugugggcaa

SEQ ID NO: 2663514 - RNA, 19 nt, Homo sapiens
  misc_RNA (1)...(19): siRNA sense strand
auguggagaaugugggaaa

SEQ ID NO: 2663515 - RNA, 19 nt, Homo sapiens
  misc_RNA (1)...(19): siRNA sense strand
guaaagaauuuguggacag

SEQ ID NO: 2663516 - RNA, 19 nt, Homo sapiens
  misc_RNA (1)...(19): siRNA sense strand
augugauguuggagaacua

SEQ ID NO: 2663517 - RNA, 19 nt, Homo sapiens
  misc_RNA (1)...(19): siRNA sense strand
uuggagaacuacaggaaca

SEQ ID NO: 2663518 - RNA, 19 nt, Homo sapiens
  misc_RNA (1)...(19): siRNA sense strand
gauaugaugaggauggcaa

SEQ ID NO: 2663519 - RNA, 19 nt, Homo sapiens
  misc_RNA (1)...(19): siRNA sense strand
ucuuaugaaugcagugaau

SEQ ID NO: 2663520 - RNA, 19 nt, Homo sapiens
  misc_RNA (1)...(19): siRNA sense strand
ggaaaagucauuaggcgua

SEQ ID NO: 2663521 - RNA, 19 nt, Homo sapiens
  misc_RNA (1)...(19): siRNA sense strand
agaaggaccucuaccgaga

SEQ ID NO: 2663522 - RNA, 19 nt, Homo sapiens
  misc_RNA (1)...(19): siRNA sense strand
cuuucaauguggagaaugu

SEQ ID NO: 2663523 - RNA, 19 nt, Homo sapiens
  misc_RNA (1)...(19): siRNA sense strand
aggaaucagcugagaaacu

SEQ ID NO: 2663524 - RNA, 19 nt, Homo sapiens
  misc_RNA (1)...(19): siRNA sense strand
augcagugaauguggaaaa

SEQ ID NO: 2663525 - RNA, 19 nt, Homo sapiens
  misc_RNA (1)...(19): siRNA sense strand
aggauucacaccaaagaaa

SEQ ID NO: 2663526 - RNA, 19 nt, Homo sapiens
  misc_RNA (1)...(19): siRNA sense strand
cgagaugugauguuggaga

SEQ ID NO: 2663527 - RNA, 19 nt, Homo sapiens
  misc_RNA (1)...(19): siRNA sense strand
cguuugaggauguggcgau

SEQ ID NO: 2663528 - RNA, 19 nt, Homo sapiens
  misc_RNA (1)...(19): siRNA sense strand
gcgcaaacaagguggaagc

SEQ ID NO: 2663529 - RNA, 19 nt, Homo sapiens
  misc_RNA (1)...(19): siRNA sense strand
aagccagacacaagaugaa

SEQ ID NO: 2663530 - RNA, 19 nt, Homo sapiens
  misc_RNA (1)...(19): siRNA sense strand
uucugaagauuuagaguca

SEQ ID NO: 2663531 - RNA, 19 nt, Homo sapiens
  misc_RNA (1)...(19): siRNA sense strand
cguuuaguuuuaagaggaa

SEQ ID NO: 2663532 - RNA, 19 nt, Homo sapiens
  misc_RNA (1)...(19): siRNA sense strand
cccuacuaguggugaugaa

SEQ ID NO: 2663533 - RNA, 19 nt, Homo sapiens
  misc_RNA (1)...(19): siRNA sense strand
acauggucuugcugggauu

SEQ ID NO: 2663534 - RNA, 19 nt, Homo sapiens
  misc_RNA (1)...(19): siRNA sense strand
uguuggagaacuacaggaa

SEQ ID NO: 2663535 - RNA, 19 nt, Homo sapiens
  misc_RNA (1)...(19): siRNA sense strand
cauucacacuggaagccaa

SEQ ID NO: 2663536 - RNA, 19 nt, Homo sapiens
  misc_RNA (1)...(19): siRNA sense strand
auaugaugaggauggcaaa

SEQ ID NO: 2663537 - RNA, 19 nt, Homo sapiens
  misc_RNA (1)...(19): siRNA sense strand
uggugaagaucgaggacau

SEQ ID NO: 2663538 - RNA, 19 nt, Homo sapiens
  misc_RNA (1)...(19): siRNA sense strand
gaaaagagauucagggcca

SEQ ID NO: 2663539 - RNA, 19 nt, Homo sapiens
  misc_RNA (1)...(19): siRNA sense strand
aagaggaagaugaggaaga

SEQ ID NO: 2663540 - RNA, 19 nt, Homo sapiens
  misc_RNA (1)...(19): siRNA sense strand
gagagagguccaagggaga

SEQ ID NO: 2663541 - RNA, 19 nt, Homo sapiens
  misc_RNA (1)...(19): siRNA sense strand
aggcaauggugaagaucga

SEQ ID NO: 2663542 - RNA, 19 nt, Homo sapiens
  misc_RNA (1)...(19): siRNA sense strand
auguagugagugugggaaa

SEQ ID NO: 2663543 - RNA, 19 nt, Homo sapiens
  misc_RNA (1)...(19): siRNA sense strand
gggacaacaggcaggagaa

SEQ ID NO: 2663544 - RNA, 19 nt, Homo sapiens
  misc_RNA (1)...(19): siRNA sense strand
caggaagaucccagaaaga

SEQ ID NO: 2663545 - RNA, 19 nt, Homo sapiens
  misc_RNA (1)...(19): siRNA sense strand
aggaaagagaaaagagauu

SEQ ID NO: 2663546 - RNA, 19 nt, Homo sapiens
  misc_RNA (1)...(19): siRNA sense strand
gagaauuaugggagcgcau

SEQ ID NO: 2663547 - RNA, 19 nt, Homo sapiens
  misc_RNA (1)...(19): siRNA sense strand
cagcuauaggaaaggacaa

SEQ ID NO: 2663548 - RNA, 19 nt, Homo sapiens
  misc_RNA (1)...(19): siRNA sense strand
cccuaugaauguagugaau

SEQ ID NO: 2663549 - RNA, 19 nt, Homo sapiens
  misc_RNA (1)...(19): siRNA sense strand
ugaagguggaagaggaaga

SEQ ID NO: 2663550 - RNA, 19 nt, Homo sapiens
  misc_RNA (1)...(19): siRNA sense strand
aauccaugccagagagaga

SEQ ID NO: 2663551 - RNA, 19 nt, Homo sapiens
  misc_RNA (1)...(19): siRNA sense strand
gaaauaaacaccaaggaac

SEQ ID NO: 2663552 - RNA, 19 nt, Homo sapiens
  misc_RNA (1)...(19): siRNA sense strand
uaauagugaagguggaaga

SEQ ID NO: 2663553 - RNA, 19 nt, Homo sapiens
  misc_RNA (1)...(19): siRNA sense strand
agugaagguggaagaggaa

SEQ ID NO: 2663554 - RNA, 19 nt, Homo sapiens
  misc_RNA (1)...(19): siRNA sense strand
cuccagacccagagauauu

SEQ ID NO: 2663555 - RNA, 19 nt, Homo sapiens
  misc_RNA (1)...(19): siRNA sense strand
ggugaaaacaggaaugaga

SEQ ID NO: 2663556 - RNA, 19 nt, Homo sapiens
  misc_RNA (1)...(19): siRNA sense strand
caggagaaagacagcagaa

SEQ ID NO: 2663557 - RNA, 19 nt, Homo sapiens
  misc_RNA (1)...(19): siRNA sense strand
augugaugaaugugguaaa

SEQ ID NO: 2663558 - RNA, 19 nt, Homo sapiens
  misc_RNA (1)...(19): siRNA sense strand
uggaagaggaagaugagga

SEQ ID NO: 2663559 - RNA, 19 nt, Homo sapiens
  misc_RNA (1)...(19): siRNA sense strand
gggagaaggggaaaggauu

SEQ ID NO: 2663560 - RNA, 19 nt, Homo sapiens
  misc_RNA (1)...(19): siRNA sense strand
ucguaauagugaaggugga

SEQ ID NO: 2663561 - RNA, 19 nt, Homo sapiens
  misc_RNA (1)...(19): siRNA sense strand
uagugaagguggaagagga

SEQ ID NO: 2663562 - RNA, 19 nt, Homo sapiens
  misc_RNA (1)...(19): siRNA sense strand
acaacaggucccaggucaa

SEQ ID NO: 2663563 - RNA, 19 nt, Homo sapiens
  misc_RNA (1)...(19): siRNA sense strand
ggaaugagaacgaggaguc

SEQ ID NO: 2663564 - RNA, 19 nt, Homo sapiens
  misc_RNA (1)...(19): siRNA sense strand
agguggaagaggaagauga

SEQ ID NO: 2663565 - RNA, 19 nt, Homo sapiens
  misc_RNA (1)...(19): siRNA sense strand
aggaaucucaguagggaca

SEQ ID NO: 2663566 - RNA, 19 nt, Homo sapiens
  misc_RNA (1)...(19): siRNA sense strand
aggagaaagacagcagaaa

SEQ ID NO: 2663567 - RNA, 19 nt, Homo sapiens
  misc_RNA (1)...(19): siRNA sense strand
ccucaugaauguaacgagu

SEQ ID NO: 2663568 - RNA, 19 nt, Homo sapiens
  misc_RNA (1)...(19): siRNA sense strand
ucacagaauccaugccaga

SEQ ID NO: 2663569 - RNA, 19 nt, Homo sapiens
  misc_RNA (1)...(19): siRNA sense strand
aggaagaugaggaagacca

SEQ ID NO: 2663570 - RNA, 19 nt, Homo sapiens
  misc_RNA (1)...(19): siRNA sense strand
gaaaaccaggaaagagaaa

SEQ ID NO: 2663571 - RNA, 19 nt, Homo sapiens
  misc_RNA (1)...(19): siRNA sense strand
auguagugaauguggaaaa

SEQ ID NO: 2663572 - RNA, 19 nt, Homo sapiens
  misc_RNA (1)...(19): siRNA sense strand
aggcugaaaccucggaaga

SEQ ID NO: 2663573 - RNA, 19 nt, Homo sapiens
  misc_RNA (1)...(19): siRNA sense strand
gcaaaacaggagaaagaca

SEQ ID NO: 2663574 - RNA, 19 nt, Homo sapiens
  misc_RNA (1)...(19): siRNA sense strand
gaauguaacgaguguggca

SEQ ID NO: 2663575 - RNA, 19 nt, Homo sapiens
  misc_RNA (1)...(19): siRNA sense strand
cguaauagugaagguggaa

SEQ ID NO: 2663576 - RNA, 19 nt, Homo sapiens
  misc_RNA (1)...(19): siRNA sense strand
cagcggauucccaggcaau

SEQ ID NO: 2663577 - RNA, 19 nt, Homo sapiens
  misc_RNA (1)...(19): siRNA sense strand
ggaauggggaugucagaau

SEQ ID NO: 2663578 - RNA, 19 nt, Homo sapiens
  misc_RNA (1)...(19): siRNA sense strand
ccucaaaggcugaaaccuc

SEQ ID NO: 2663579 - RNA, 19 nt, Homo sapiens
  misc_RNA (1)...(19): siRNA sense strand
gaauguaaugagugcggga

SEQ ID NO: 2663580 - RNA, 19 nt, Homo sapiens
  misc_RNA (1)...(19): siRNA sense strand
gaaagagaaaagagauuca

SEQ ID NO: 2663581 - RNA, 19 nt, Homo sapiens
  misc_RNA (1)...(19): siRNA sense strand
agauucagggccagcuaua

SEQ ID NO: 2663582 - RNA, 19 nt, Homo sapiens
  misc_RNA (1)...(19): siRNA sense strand
ggggaaaggauugggaaga

SEQ ID NO: 2663583 - RNA, 19 nt, Homo sapiens
  misc_RNA (1)...(19): siRNA sense strand
gaauguagugaguguggga

SEQ ID NO: 2663584 - RNA, 19 nt, Homo sapiens
  misc_RNA (1)...(19): siRNA sense strand
cccagaaagaguuuggaga

SEQ ID NO: 2663585 - RNA, 19 nt, Homo sapiens
  misc_RNA (1)...(19): siRNA sense strand
gagagaaacgugaccagga

SEQ ID NO: 2663586 - RNA, 19 nt, Homo sapiens
  misc_RNA (1)...(19): siRNA sense strand
ccaaggagcuccaggucug

SEQ ID NO: 2663587 - RNA, 19 nt, Homo sapiens
  misc_RNA (1)...(19): siRNA sense strand
uggugaagaucgaggacau

SEQ ID NO: 2663588 - RNA, 19 nt, Homo sapiens
  misc_RNA (1)...(19): siRNA sense strand
gaaaagagauucagggcca

SEQ ID NO: 2663589 - RNA, 19 nt, Homo sapiens
  misc_RNA (1)...(19): siRNA sense strand
aagaggaagaugaggaaga

SEQ ID NO: 2663590 - RNA, 19 nt, Homo sapiens
  misc_RNA (1)...(19): siRNA sense strand
gagagagguccaagggaga

SEQ ID NO: 2663591 - RNA, 19 nt, Homo sapiens
  misc_RNA (1)...(19): siRNA sense strand
aggcaauggugaagaucga

SEQ ID NO: 2663592 - RNA, 19 nt, Homo sapiens
  misc_RNA (1)...(19): siRNA sense strand
auguagugagugugggaaa

SEQ ID NO: 2663593 - RNA, 19 nt, Homo sapiens
  misc_RNA (1)...(19): siRNA sense strand
gggacaacaggcaggagaa

SEQ ID NO: 2663594 - RNA, 19 nt, Homo sapiens
  misc_RNA (1)...(19): siRNA sense strand
caggaagaucccagaaaga

SEQ ID NO: 2663595 - RNA, 19 nt, Homo sapiens
  misc_RNA (1)...(19): siRNA sense strand
aggaaagagaaaagagauu

SEQ ID NO: 2663596 - RNA, 19 nt, Homo sapiens
  misc_RNA (1)...(19): siRNA sense strand
gagaauuaugggagcgcau

SEQ ID NO: 2663597 - RNA, 19 nt, Homo sapiens
  misc_RNA (1)...(19): siRNA sense strand
cagcuauaggaaaggacaa

SEQ ID NO: 2663598 - RNA, 19 nt, Homo sapiens
  misc_RNA (1)...(19): siRNA sense strand
cccuaugaauguagugaau

SEQ ID NO: 2663599 - RNA, 19 nt, Homo sapiens
  misc_RNA (1)...(19): siRNA sense strand
ugaagguggaagaggaaga

SEQ ID NO: 2663600 - RNA, 19 nt, Homo sapiens
  misc_RNA (1)...(19): siRNA sense strand
aauccaugccagagagaga

SEQ ID NO: 2663601 - RNA, 19 nt, Homo sapiens
  misc_RNA (1)...(19): siRNA sense strand
gaaauaaacaccaaggaac

SEQ ID NO: 2663602 - RNA, 19 nt, Homo sapiens
  misc_RNA (1)...(19): siRNA sense strand
uaauagugaagguggaaga

SEQ ID NO: 2663603 - RNA, 19 nt, Homo sapiens
  misc_RNA (1)...(19): siRNA sense strand
agugaagguggaagaggaa

SEQ ID NO: 2663604 - RNA, 19 nt, Homo sapiens
  misc_RNA (1)...(19): siRNA sense strand
cuccagacccagagauauu

SEQ ID NO: 2663605 - RNA, 19 nt, Homo sapiens
  misc_RNA (1)...(19): siRNA sense strand
ggugaaaacaggaaugaga

SEQ ID NO: 2663606 - RNA, 19 nt, Homo sapiens
  misc_RNA (1)...(19): siRNA sense strand
caggagaaagacagcagaa

SEQ ID NO: 2663607 - RNA, 19 nt, Homo sapiens
  misc_RNA (1)...(19): siRNA sense strand
augugaugaaugugguaaa

SEQ ID NO: 2663608 - RNA, 19 nt, Homo sapiens
  misc_RNA (1)...(19): siRNA sense strand
uggaagaggaagaugagga

SEQ ID NO: 2663609 - RNA, 19 nt, Homo sapiens
  misc_RNA (1)...(19): siRNA sense strand
gggagaaggggaaaggauu

SEQ ID NO: 2663610 - RNA, 19 nt, Homo sapiens
  misc_RNA (1)...(19): siRNA sense strand
ucguaauagugaaggugga

SEQ ID NO: 2663611 - RNA, 19 nt, Homo sapiens
  misc_RNA (1)...(19): siRNA sense strand
uagugaagguggaagagga

SEQ ID NO: 2663612 - RNA, 19 nt, Homo sapiens
  misc_RNA (1)...(19): siRNA sense strand
acaacaggucccaggucaa

SEQ ID NO: 2663613 - RNA, 19 nt, Homo sapiens
  misc_RNA (1)...(19): siRNA sense strand
ggaaugagaacgaggaguc

SEQ ID NO: 2663614 - RNA, 19 nt, Homo sapiens
  misc_RNA (1)...(19): siRNA sense strand
agguggaagaggaagauga

SEQ ID NO: 2663615 - RNA, 19 nt, Homo sapiens
  misc_RNA (1)...(19): siRNA sense strand
aggaaucucaguagggaca

SEQ ID NO: 2663616 - RNA, 19 nt, Homo sapiens
  misc_RNA (1)...(19): siRNA sense strand
aggagaaagacagcagaaa

SEQ ID NO: 2663617 - RNA, 19 nt, Homo sapiens
  misc_RNA (1)...(19): siRNA sense strand
ccucaugaauguaacgagu

SEQ ID NO: 2663618 - RNA, 19 nt, Homo sapiens
  misc_RNA (1)...(19): siRNA sense strand
ucacagaauccaugccaga

SEQ ID NO: 2663619 - RNA, 19 nt, Homo sapiens
  misc_RNA (1)...(19): siRNA sense strand
aggaagaugaggaagacca

SEQ ID NO: 2663620 - RNA, 19 nt, Homo sapiens
  misc_RNA (1)...(19): siRNA sense strand
gaaaaccaggaaagagaaa

SEQ ID NO: 2663621 - RNA, 19 nt, Homo sapiens
  misc_RNA (1)...(19): siRNA sense strand
auguagugaauguggaaaa

SEQ ID NO: 2663622 - RNA, 19 nt, Homo sapiens
  misc_RNA (1)...(19): siRNA sense strand
aggcugaaaccucggaaga

SEQ ID NO: 2663623 - RNA, 19 nt, Homo sapiens
  misc_RNA (1)...(19): siRNA sense strand
gcaaaacaggagaaagaca

SEQ ID NO: 2663624 - RNA, 19 nt, Homo sapiens
  misc_RNA (1)...(19): siRNA sense strand
gaauguaacgaguguggca

SEQ ID NO: 2663625 - RNA, 19 nt, Homo sapiens
  misc_RNA (1)...(19): siRNA sense strand
cguaauagugaagguggaa

SEQ ID NO: 2663626 - RNA, 19 nt, Homo sapiens
  misc_RNA (1)...(19): siRNA sense strand
cagcggauucccaggcaau

SEQ ID NO: 2663627 - RNA, 19 nt, Homo sapiens
  misc_RNA (1)...(19): siRNA sense strand
ggaauggggaugucagaau

SEQ ID NO: 2663628 - RNA, 19 nt, Homo sapiens
  misc_RNA (1)...(19): siRNA sense strand
ccucaaaggcugaaaccuc

SEQ ID NO: 2663629 - RNA, 19 nt, Homo sapiens
  misc_RNA (1)...(19): siRNA sense strand
gaauguaaugagugcggga

SEQ ID NO: 2663630 - RNA, 19 nt, Homo sapiens
  misc_RNA (1)...(19): siRNA sense strand
gaaagagaaaagagauuca

SEQ ID NO: 2663631 - RNA, 19 nt, Homo sapiens
  misc_RNA (1)...(19): siRNA sense strand
agauucagggccagcuaua

SEQ ID NO: 2663632 - RNA, 19 nt, Homo sapiens
  misc_RNA (1)...(19): siRNA sense strand
ggggaaaggauugggaaga

SEQ ID NO: 2663633 - RNA, 19 nt, Homo sapiens
  misc_RNA (1)...(19): siRNA sense strand
gaauguagugaguguggga

SEQ ID NO: 2663634 - RNA, 19 nt, Homo sapiens
  misc_RNA (1)...(19): siRNA sense strand
cccagaaagaguuuggaga

SEQ ID NO: 2663635 - RNA, 19 nt, Homo sapiens
  misc_RNA (1)...(19): siRNA sense strand
gagagaaacgugaccagga

SEQ ID NO: 2663636 - RNA, 19 nt, Homo sapiens
  misc_RNA (1)...(19): siRNA sense strand
ccaaggagcuccaggucug

SEQ ID NO: 2663637 - RNA, 19 nt, Homo sapiens
  misc_RNA (1)...(19): siRNA sense strand
gcagcaucgugguggacua

SEQ ID NO: 2663638 - RNA, 19 nt, Homo sapiens
  misc_RNA (1)...(19): siRNA sense strand
acaacuagaaccacagaaa

SEQ ID NO: 2663639 - RNA, 19 nt, Homo sapiens
  misc_RNA (1)...(19): siRNA sense strand
gcgaguaugagcaggugaa

SEQ ID NO: 2663640 - RNA, 19 nt, Homo sapiens
  misc_RNA (1)...(19): siRNA sense strand
ggaaaugguucgagaccug

SEQ ID NO: 2663641 - RNA, 19 nt, Homo sapiens
  misc_RNA (1)...(19): siRNA sense strand
ccaugaugccagaaaguga

SEQ ID NO: 2663642 - RNA, 19 nt, Homo sapiens
  misc_RNA (1)...(19): siRNA sense strand
cacuaggacuucagagaca

SEQ ID NO: 2663643 - RNA, 19 nt, Homo sapiens
  misc_RNA (1)...(19): siRNA sense strand
uggaagugucuguggauca

SEQ ID NO: 2663644 - RNA, 19 nt, Homo sapiens
  misc_RNA (1)...(19): siRNA sense strand
gugaacaacaacagcaaga

SEQ ID NO: 2663645 - RNA, 19 nt, Homo sapiens
  misc_RNA (1)...(19): siRNA sense strand
ggaaacucccauagugaca

SEQ ID NO: 2663646 - RNA, 19 nt, Homo sapiens
  misc_RNA (1)...(19): siRNA sense strand
gagaaaggaacgucagcca

SEQ ID NO: 2663647 - RNA, 19 nt, Homo sapiens
  misc_RNA (1)...(19): siRNA sense strand
gguacauuguccacagaga

SEQ ID NO: 2663648 - RNA, 19 nt, Homo sapiens
  misc_RNA (1)...(19): siRNA sense strand
gggaaguacgucuacaaau

SEQ ID NO: 2663649 - RNA, 19 nt, Homo sapiens
  misc_RNA (1)...(19): siRNA sense strand
ccuaugacaaacuugguaa

SEQ ID NO: 2663650 - RNA, 19 nt, Homo sapiens
  misc_RNA (1)...(19): siRNA sense strand
gugaguuugcuguggaaca

SEQ ID NO: 2663651 - RNA, 19 nt, Homo sapiens
  misc_RNA (1)...(19): siRNA sense strand
ccuacagggauuucaacaa

SEQ ID NO: 2663652 - RNA, 19 nt, Homo sapiens
  misc_RNA (1)...(19): siRNA sense strand
ccacuaugaaggugcacau

SEQ ID NO: 2663653 - RNA, 19 nt, Homo sapiens
  misc_RNA (1)...(19): siRNA sense strand
cuuacuacauauauggaca

SEQ ID NO: 2663654 - RNA, 19 nt, Homo sapiens
  misc_RNA (1)...(19): siRNA sense strand
guguauccaacgagcuuua

SEQ ID NO: 2663655 - RNA, 19 nt, Homo sapiens
  misc_RNA (1)...(19): siRNA sense strand
acagugacuucuaugacaa

SEQ ID NO: 2663656 - RNA, 19 nt, Homo sapiens
  misc_RNA (1)...(19): siRNA sense strand
aggugaacaacaacagcaa

SEQ ID NO: 2663657 - RNA, 19 nt, Homo sapiens
  misc_RNA (1)...(19): siRNA sense strand
agaccugggaugaggaagu

SEQ ID NO: 2663658 - RNA, 19 nt, Homo sapiens
  misc_RNA (1)...(19): siRNA sense strand
cguccaaguuugccuucaa

SEQ ID NO: 2663659 - RNA, 19 nt, Homo sapiens
  misc_RNA (1)...(19): siRNA sense strand
ccauguccacugugagaau

SEQ ID NO: 2663660 - RNA, 19 nt, Homo sapiens
  misc_RNA (1)...(19): siRNA sense strand
cuuacaucacgcaggacaa

SEQ ID NO: 2663661 - RNA, 19 nt, Homo sapiens
  misc_RNA (1)...(19): siRNA sense strand
cgccggaccucaaugacaa

SEQ ID NO: 2663662 - RNA, 19 nt, Homo sapiens
  misc_RNA (1)...(19): siRNA sense strand
acuccaucaaggugaacaa

SEQ ID NO: 2663663 - RNA, 19 nt, Homo sapiens
  misc_RNA (1)...(19): siRNA sense strand
ggaucuagauguaguggag

SEQ ID NO: 2663664 - RNA, 19 nt, Homo sapiens
  misc_RNA (1)...(19): siRNA sense strand
acaacaacagcaagacaga

SEQ ID NO: 2663665 - RNA, 19 nt, Homo sapiens
  misc_RNA (1)...(19): siRNA sense strand
cgggcuaugaagaguucua

SEQ ID NO: 2663666 - RNA, 19 nt, Homo sapiens
  misc_RNA (1)...(19): siRNA sense strand
gacaggaaaugguucgaga

SEQ ID NO: 2663667 - RNA, 19 nt, Homo sapiens
  misc_RNA (1)...(19): siRNA sense strand
uguccugagcacagaaaca

SEQ ID NO: 2663668 - RNA, 19 nt, Homo sapiens
  misc_RNA (1)...(19): siRNA sense strand
uagauguaguggagaccga

SEQ ID NO: 2663669 - RNA, 19 nt, Homo sapiens
  misc_RNA (1)...(19): siRNA sense strand
ggaagauggccaaggaaua

SEQ ID NO: 2663670 - RNA, 19 nt, Homo sapiens
  misc_RNA (1)...(19): siRNA sense strand
cgaaagaagaacuccauua

SEQ ID NO: 2663671 - RNA, 19 nt, Homo sapiens
  misc_RNA (1)...(19): siRNA sense strand
acauagacccugaaacaaa

SEQ ID NO: 2663672 - RNA, 19 nt, Homo sapiens
  misc_RNA (1)...(19): siRNA sense strand
acacauagacccugaaaca

SEQ ID NO: 2663673 - RNA, 19 nt, Homo sapiens
  misc_RNA (1)...(19): siRNA sense strand
agaaagaagcacuccauua

SEQ ID NO: 2663674 - RNA, 19 nt, Homo sapiens
  misc_RNA (1)...(19): siRNA sense strand
ugucaaugcccauggaaau

SEQ ID NO: 2663675 - RNA, 19 nt, Homo sapiens
  misc_RNA (1)...(19): siRNA sense strand
ggaagaacuccuuuaacaa

SEQ ID NO: 2663676 - RNA, 19 nt, Homo sapiens
  misc_RNA (1)...(19): siRNA sense strand
ggaagaacuccuuuaacaa

SEQ ID NO: 2663677 - RNA, 19 nt, Homo sapiens
  misc_RNA (1)...(19): siRNA sense strand
ggaagaacuccuuuaacaa

SEQ ID NO: 2663678 - RNA, 19 nt, Homo sapiens
  misc_RNA (1)...(19): siRNA sense strand
ccaucaaccuccaguagua

SEQ ID NO: 2663679 - RNA, 19 nt, Homo sapiens
  misc_RNA (1)...(19): siRNA sense strand
ugaaggaagcacugcauua

SEQ ID NO: 2663680 - RNA, 19 nt, Homo sapiens
  misc_RNA (1)...(19): siRNA sense strand
ugaaggaagcacugcauua

SEQ ID NO: 2663681 - RNA, 19 nt, Homo sapiens
  misc_RNA (1)...(19): siRNA sense strand
gcuccaagagagaggugaa

SEQ ID NO: 2663682 - RNA, 19 nt, Homo sapiens
  misc_RNA (1)...(19): siRNA sense strand
acuuauagugacagaagaa

SEQ ID NO: 2663683 - RNA, 19 nt, Homo sapiens
  misc_RNA (1)...(19): siRNA sense strand
acaagacaguauuggacaa

SEQ ID NO: 2663684 - RNA, 19 nt, Homo sapiens
  misc_RNA (1)...(19): siRNA sense strand
cggaagauggccaaggaau

SEQ ID NO: 2663685 - RNA, 19 nt, Homo sapiens
  misc_RNA (1)...(19): siRNA sense strand
aaguauaacugucagaaca

SEQ ID NO: 2663686 - RNA, 19 nt, Homo sapiens
  misc_RNA (1)...(19): siRNA sense strand
auucagaggccucagguaa

SEQ ID NO: 2663687 - RNA, 19 nt, Homo sapiens
  misc_RNA (1)...(19): siRNA sense strand
ggaaguacucuauuaacaa

SEQ ID NO: 2663688 - RNA, 19 nt, Homo sapiens
  misc_RNA (1)...(19): siRNA sense strand
ggaaguacucuauuaacaa

SEQ ID NO: 2663689 - RNA, 19 nt, Homo sapiens
  misc_RNA (1)...(19): siRNA sense strand
gcaccacgcuguuggccaa

SEQ ID NO: 2663690 - RNA, 19 nt, Homo sapiens
  misc_RNA (1)...(19): siRNA sense strand
ggaaguacuccauuaacaa

SEQ ID NO: 2663691 - RNA, 19 nt, Homo sapiens
  misc_RNA (1)...(19): siRNA sense strand
ggaaguacucuauuaacaa

SEQ ID NO: 2663692 - RNA, 19 nt, Homo sapiens
  misc_RNA (1)...(19): siRNA sense strand
ggaaguacuccauuaacaa

SEQ ID NO: 2663693 - RNA, 19 nt, Homo sapiens
  misc_RNA (1)...(19): siRNA sense strand
cggcaaaaguacagauugu

SEQ ID NO: 2663694 - RNA, 19 nt, Homo sapiens
  misc_RNA (1)...(19): siRNA sense strand
aggaaagacuccauuaaaa

SEQ ID NO: 2663695 - RNA, 19 nt, Homo sapiens
  misc_RNA (1)...(19): siRNA sense strand
gguaacacccuuucaacaa

SEQ ID NO: 2663696 - RNA, 19 nt, Homo sapiens
  misc_RNA (1)...(19): siRNA sense strand
gugucaaugcccauggaaa

SEQ ID NO: 2663697 - RNA, 19 nt, Homo sapiens
  misc_RNA (1)...(19): siRNA sense strand
aguauaacugucagaacaa

SEQ ID NO: 2663698 - RNA, 19 nt, Homo sapiens
  misc_RNA (1)...(19): siRNA sense strand
cagcauugacauagggcca

SEQ ID NO: 2663699 - RNA, 19 nt, Homo sapiens
  misc_RNA (1)...(19): siRNA sense strand
augucaacuacgagugaaa

SEQ ID NO: 2663700 - RNA, 19 nt, Homo sapiens
  misc_RNA (1)...(19): siRNA sense strand
ucacggaacagaugaauau

SEQ ID NO: 2663701 - RNA, 19 nt, Homo sapiens
  misc_RNA (1)...(19): siRNA sense strand
gcuaacacccuuucaacaa

SEQ ID NO: 2663702 - RNA, 19 nt, Homo sapiens
  misc_RNA (1)...(19): siRNA sense strand
gcuaacacccuuucaacaa

SEQ ID NO: 2663703 - RNA, 19 nt, Homo sapiens
  misc_RNA (1)...(19): siRNA sense strand
gaagguagcagcaugacaa

SEQ ID NO: 2663704 - RNA, 19 nt, Homo sapiens
  misc_RNA (1)...(19): siRNA sense strand
gaagguagcagcaugacaa

SEQ ID NO: 2663705 - RNA, 19 nt, Homo sapiens
  misc_RNA (1)...(19): siRNA sense strand
agaagaacuccuuuaacaa

SEQ ID NO: 2663706 - RNA, 19 nt, Homo sapiens
  misc_RNA (1)...(19): siRNA sense strand
aggaauuccaggaguucaa

SEQ ID NO: 2663707 - RNA, 19 nt, Homo sapiens
  misc_RNA (1)...(19): siRNA sense strand
aggaaguacucuauuaaca

SEQ ID NO: 2663708 - RNA, 19 nt, Homo sapiens
  misc_RNA (1)...(19): siRNA sense strand
aggaaguacucuauuaaca

SEQ ID NO: 2663709 - RNA, 19 nt, Homo sapiens
  misc_RNA (1)...(19): siRNA sense strand
aggaaguacucuauuaaca

SEQ ID NO: 2663710 - RNA, 19 nt, Homo sapiens
  misc_RNA (1)...(19): siRNA sense strand
ggagguaccagcauacaaa

SEQ ID NO: 2663711 - RNA, 19 nt, Homo sapiens
  misc_RNA (1)...(19): siRNA sense strand
ugaaguaagcacuccauua

SEQ ID NO: 2663712 - RNA, 19 nt, Homo sapiens
  misc_RNA (1)...(19): siRNA sense strand
guguggugguggagcauga

SEQ ID NO: 2663713 - RNA, 19 nt, Homo sapiens
  misc_RNA (1)...(19): siRNA sense strand
ccaaguacacaccagaaua

SEQ ID NO: 2663714 - RNA, 19 nt, Homo sapiens
  misc_RNA (1)...(19): siRNA sense strand
acagauugucucaguuaua

SEQ ID NO: 2663715 - RNA, 19 nt, Homo sapiens
  misc_RNA (1)...(19): siRNA sense strand
ugacagaagaacuccuuua

SEQ ID NO: 2663716 - RNA, 19 nt, Homo sapiens
  misc_RNA (1)...(19): siRNA sense strand
gugcaaaacauuacgguga

SEQ ID NO: 2663717 - RNA, 19 nt, Homo sapiens
  misc_RNA (1)...(19): siRNA sense strand
caaguaugccugucagcaa

SEQ ID NO: 2663718 - RNA, 19 nt, Homo sapiens
  misc_RNA (1)...(19): siRNA sense strand
ggaacgacuccauuaacaa

SEQ ID NO: 2663719 - RNA, 19 nt, Homo sapiens
  misc_RNA (1)...(19): siRNA sense strand
gggaugggcucaagugcca

SEQ ID NO: 2663720 - RNA, 19 nt, Homo sapiens
  misc_RNA (1)...(19): siRNA sense strand
cuacaacugcugaagguau

SEQ ID NO: 2663721 - RNA, 19 nt, Homo sapiens
  misc_RNA (1)...(19): siRNA sense strand
cuacaacugcugaagguau

SEQ ID NO: 2663722 - RNA, 19 nt, Homo sapiens
  misc_RNA (1)...(19): siRNA sense strand
agaagaacuccauuaacaa

SEQ ID NO: 2663723 - RNA, 19 nt, Homo sapiens
  misc_RNA (1)...(19): siRNA sense strand
agaaagaagaggaggaagu

SEQ ID NO: 2663724 - RNA, 19 nt, Homo sapiens
  misc_RNA (1)...(19): siRNA sense strand
ggaggaagucagacagcaa

SEQ ID NO: 2663725 - RNA, 19 nt, Homo sapiens
  misc_RNA (1)...(19): siRNA sense strand
gcaaaucagaaaagagaaa

SEQ ID NO: 2663726 - RNA, 19 nt, Homo sapiens
  misc_RNA (1)...(19): siRNA sense strand
agguggaaauggaaguaaa

SEQ ID NO: 2663727 - RNA, 19 nt, Homo sapiens
  misc_RNA (1)...(19): siRNA sense strand
auuaagaaggaaaggcaaa

SEQ ID NO: 2663728 - RNA, 19 nt, Homo sapiens
  misc_RNA (1)...(19): siRNA sense strand
cagaaaagagaaagaggaa

SEQ ID NO: 2663729 - RNA, 19 nt, Homo sapiens
  misc_RNA (1)...(19): siRNA sense strand
aguaaauacaccugaaaga

SEQ ID NO: 2663730 - RNA, 19 nt, Homo sapiens
  misc_RNA (1)...(19): siRNA sense strand
agaaagaagcagaaaagaa

SEQ ID NO: 2663731 - RNA, 19 nt, Homo sapiens
  misc_RNA (1)...(19): siRNA sense strand
aagaauugcaguuggaaga

SEQ ID NO: 2663732 - RNA, 19 nt, Homo sapiens
  misc_RNA (1)...(19): siRNA sense strand
aagcaaaagcagaagcuaa

SEQ ID NO: 2663733 - RNA, 19 nt, Homo sapiens
  misc_RNA (1)...(19): siRNA sense strand
aggagaaagaagaggagga

SEQ ID NO: 2663734 - RNA, 19 nt, Homo sapiens
  misc_RNA (1)...(19): siRNA sense strand
ccaagaaagaagcagaaaa

SEQ ID NO: 2663735 - RNA, 19 nt, Homo sapiens
  misc_RNA (1)...(19): siRNA sense strand
acggaaagcagcuggugaa

SEQ ID NO: 2663736 - RNA, 19 nt, Homo sapiens
  misc_RNA (1)...(19): siRNA sense strand
acaccugaaagaugggaaa

SEQ ID NO: 2663737 - RNA, 19 nt, Homo sapiens
  misc_RNA (1)...(19): siRNA sense strand
aagcagaagcuaaacggaa

SEQ ID NO: 2663738 - RNA, 19 nt, Homo sapiens
  misc_RNA (1)...(19): siRNA sense strand
gaacagagcaacaagagca

SEQ ID NO: 2663739 - RNA, 19 nt, Homo sapiens
  misc_RNA (1)...(19): siRNA sense strand
aucuaagaacacagagaaa

SEQ ID NO: 2663740 - RNA, 19 nt, Homo sapiens
  misc_RNA (1)...(19): siRNA sense strand
ccgaggaaucagaagauga

SEQ ID NO: 2663741 - RNA, 19 nt, Homo sapiens
  misc_RNA (1)...(19): siRNA sense strand
cagagcaacaagagcacaa

SEQ ID NO: 2663742 - RNA, 19 nt, Homo sapiens
  misc_RNA (1)...(19): siRNA sense strand
gcaucuaagaacacagaga

SEQ ID NO: 2663743 - RNA, 19 nt, Homo sapiens
  misc_RNA (1)...(19): siRNA sense strand
agucaaaagaacugccaaa

SEQ ID NO: 2663744 - RNA, 19 nt, Homo sapiens
  misc_RNA (1)...(19): siRNA sense strand
acaaagaaggacugcauga

SEQ ID NO: 2663745 - RNA, 19 nt, Homo sapiens
  misc_RNA (1)...(19): siRNA sense strand
cauuaagaaggaaaggcaa

SEQ ID NO: 2663746 - RNA, 19 nt, Homo sapiens
  misc_RNA (1)...(19): siRNA sense strand
ccaaagacuggaagaacca

SEQ ID NO: 2663747 - RNA, 19 nt, Homo sapiens
  misc_RNA (1)...(19): siRNA sense strand
aguucaaggaagaagaaaa

SEQ ID NO: 2663748 - RNA, 19 nt, Homo sapiens
  misc_RNA (1)...(19): siRNA sense strand
caugugagauacaaggcua

SEQ ID NO: 2663749 - RNA, 19 nt, Homo sapiens
  misc_RNA (1)...(19): siRNA sense strand
agugaaaagacgagcauuu

SEQ ID NO: 2663750 - RNA, 19 nt, Homo sapiens
  misc_RNA (1)...(19): siRNA sense strand
aggaauuccagauggucaa

SEQ ID NO: 2663751 - RNA, 19 nt, Homo sapiens
  misc_RNA (1)...(19): siRNA sense strand
gaaaagcagaacagagcaa

SEQ ID NO: 2663752 - RNA, 19 nt, Homo sapiens
  misc_RNA (1)...(19): siRNA sense strand
agaucaaagcagcucauaa

SEQ ID NO: 2663753 - RNA, 19 nt, Homo sapiens
  misc_RNA (1)...(19): siRNA sense strand
ccauuaagaaggaaaggca

SEQ ID NO: 2663754 - RNA, 19 nt, Homo sapiens
  misc_RNA (1)...(19): siRNA sense strand
caacagaagaacagaagcu

SEQ ID NO: 2663755 - RNA, 19 nt, Homo sapiens
  misc_RNA (1)...(19): siRNA sense strand
cuacacagagacagaucaa

SEQ ID NO: 2663756 - RNA, 19 nt, Homo sapiens
  misc_RNA (1)...(19): siRNA sense strand
agcaaaagcagaagcuaaa

SEQ ID NO: 2663757 - RNA, 19 nt, Homo sapiens
  misc_RNA (1)...(19): siRNA sense strand
gguuagcuaaggagaaaga

SEQ ID NO: 2663758 - RNA, 19 nt, Homo sapiens
  misc_RNA (1)...(19): siRNA sense strand
cuaagaacacagagaaauc

SEQ ID NO: 2663759 - RNA, 19 nt, Homo sapiens
  misc_RNA (1)...(19): siRNA sense strand
aagaaggagauaaugacua

SEQ ID NO: 2663760 - RNA, 19 nt, Homo sapiens
  misc_RNA (1)...(19): siRNA sense strand
aaagaaagcaaaagcagaa

SEQ ID NO: 2663761 - RNA, 19 nt, Homo sapiens
  misc_RNA (1)...(19): siRNA sense strand
agcaagaagcuaaagaaaa

SEQ ID NO: 2663762 - RNA, 19 nt, Homo sapiens
  misc_RNA (1)...(19): siRNA sense strand
uagcuaaggagaaagaaga

SEQ ID NO: 2663763 - RNA, 19 nt, Homo sapiens
  misc_RNA (1)...(19): siRNA sense strand
agaaagaguuauccgagga

SEQ ID NO: 2663764 - RNA, 19 nt, Homo sapiens
  misc_RNA (1)...(19): siRNA sense strand
gaaaucaacugguggaggu

SEQ ID NO: 2663765 - RNA, 19 nt, Homo sapiens
  misc_RNA (1)...(19): siRNA sense strand
gacuuggccaugugagaua

SEQ ID NO: 2663766 - RNA, 19 nt, Homo sapiens
  misc_RNA (1)...(19): siRNA sense strand
cuaaacggaaggagcaaga

SEQ ID NO: 2663767 - RNA, 19 nt, Homo sapiens
  misc_RNA (1)...(19): siRNA sense strand
aagagaaagaggaagcuga

SEQ ID NO: 2663768 - RNA, 19 nt, Homo sapiens
  misc_RNA (1)...(19): siRNA sense strand
aggaaucagaagaugaaga

SEQ ID NO: 2663769 - RNA, 19 nt, Homo sapiens
  misc_RNA (1)...(19): siRNA sense strand
gguggaaauggaaguaaaa

SEQ ID NO: 2663770 - RNA, 19 nt, Homo sapiens
  misc_RNA (1)...(19): siRNA sense strand
aggacugcaugaaacgaua

SEQ ID NO: 2663771 - RNA, 19 nt, Homo sapiens
  misc_RNA (1)...(19): siRNA sense strand
cucaagaacaagugcugaa

SEQ ID NO: 2663772 - RNA, 19 nt, Homo sapiens
  misc_RNA (1)...(19): siRNA sense strand
cgugaugagaggagaugga

SEQ ID NO: 2663773 - RNA, 19 nt, Homo sapiens
  misc_RNA (1)...(19): siRNA sense strand
cagaagaacagaagcuuuu

SEQ ID NO: 2663774 - RNA, 19 nt, Homo sapiens
  misc_RNA (1)...(19): siRNA sense strand
caugaaacgauacaaggaa

SEQ ID NO: 2663775 - RNA, 19 nt, Homo sapiens
  misc_RNA (1)...(19): siRNA sense strand
cuuaaauggcaaaggaauu

SEQ ID NO: 2663776 - RNA, 19 nt, Homo sapiens
  misc_RNA (1)...(19): siRNA sense strand
ugacaaaucagaaggaaaa

SEQ ID NO: 2663777 - RNA, 19 nt, Homo sapiens
  misc_RNA (1)...(19): siRNA sense strand
gcaaauagcauaagcagca

SEQ ID NO: 2663778 - RNA, 19 nt, Homo sapiens
  misc_RNA (1)...(19): siRNA sense strand
uggcagaacacaaagcaaa

SEQ ID NO: 2663779 - RNA, 19 nt, Homo sapiens
  misc_RNA (1)...(19): siRNA sense strand
uugacaaaucagaaggaaa

SEQ ID NO: 2663780 - RNA, 19 nt, Homo sapiens
  misc_RNA (1)...(19): siRNA sense strand
guggaagacauuaggaaga

SEQ ID NO: 2663781 - RNA, 19 nt, Homo sapiens
  misc_RNA (1)...(19): siRNA sense strand
ccgcggacauagugagaca

SEQ ID NO: 2663782 - RNA, 19 nt, Homo sapiens
  misc_RNA (1)...(19): siRNA sense strand
ccaccauagacaagaaaca

SEQ ID NO: 2663783 - RNA, 19 nt, Homo sapiens
  misc_RNA (1)...(19): siRNA sense strand
caacaagccuuacaggaga

SEQ ID NO: 2663784 - RNA, 19 nt, Homo sapiens
  misc_RNA (1)...(19): siRNA sense strand
uauuggaucccgagacaaa

SEQ ID NO: 2663785 - RNA, 19 nt, Homo sapiens
  misc_RNA (1)...(19): siRNA sense strand
gcacuaaacuccaugguag

SEQ ID NO: 2663786 - RNA, 19 nt, Homo sapiens
  misc_RNA (1)...(19): siRNA sense strand
agaagaucuuaaauggcaa

SEQ ID NO: 2663787 - RNA, 19 nt, Homo sapiens
  misc_RNA (1)...(19): siRNA sense strand
gagaagaucuuaaauggca

SEQ ID NO: 2663788 - RNA, 19 nt, Homo sapiens
  misc_RNA (1)...(19): siRNA sense strand
ucuuaaauggcaaaggaau

SEQ ID NO: 2663789 - RNA, 19 nt, Homo sapiens
  misc_RNA (1)...(19): siRNA sense strand
ggagacuuucagagagaga

SEQ ID NO: 2663790 - RNA, 19 nt, Homo sapiens
  misc_RNA (1)...(19): siRNA sense strand
agacuuucagagagagaau

SEQ ID NO: 2663791 - RNA, 19 nt, Homo sapiens
  misc_RNA (1)...(19): siRNA sense strand
gcguggaagacauuaggaa

SEQ ID NO: 2663792 - RNA, 19 nt, Homo sapiens
  misc_RNA (1)...(19): siRNA sense strand
aagcaaagucccgggaaaa

SEQ ID NO: 2663793 - RNA, 19 nt, Homo sapiens
  misc_RNA (1)...(19): siRNA sense strand
aguauuggaucccgagaca

SEQ ID NO: 2663794 - RNA, 19 nt, Homo sapiens
  misc_RNA (1)...(19): siRNA sense strand
cugcaagacacauucgcua

SEQ ID NO: 2663795 - RNA, 19 nt, Homo sapiens
  misc_RNA (1)...(19): siRNA sense strand
gcaaaggaauucugccaac

SEQ ID NO: 2663796 - RNA, 19 nt, Homo sapiens
  misc_RNA (1)...(19): siRNA sense strand
cacagaaacccgagccaca

SEQ ID NO: 2663797 - RNA, 19 nt, Homo sapiens
  misc_RNA (1)...(19): siRNA sense strand
gaagacauuaggaagaaaa

SEQ ID NO: 2663798 - RNA, 19 nt, Homo sapiens
  misc_RNA (1)...(19): siRNA sense strand
ccuccuggcagaacacaaa

SEQ ID NO: 2663799 - RNA, 19 nt, Homo sapiens
  misc_RNA (1)...(19): siRNA sense strand
ggguacuauguguuugaua

SEQ ID NO: 2663800 - RNA, 19 nt, Homo sapiens
  misc_RNA (1)...(19): siRNA sense strand
cacuaaacuccaugguaga

SEQ ID NO: 2663801 - RNA, 19 nt, Homo sapiens
  misc_RNA (1)...(19): siRNA sense strand
gaagaaaaggaacggccaa

SEQ ID NO: 2663802 - RNA, 19 nt, Homo sapiens
  misc_RNA (1)...(19): siRNA sense strand
ggacauagugagacaggug

SEQ ID NO: 2663803 - RNA, 19 nt, Homo sapiens
  misc_RNA (1)...(19): siRNA sense strand
agagagagaauuugaccca

SEQ ID NO: 2663804 - RNA, 19 nt, Homo sapiens
  misc_RNA (1)...(19): siRNA sense strand
uagcauaagcagcagcaca

SEQ ID NO: 2663805 - RNA, 19 nt, Homo sapiens
  misc_RNA (1)...(19): siRNA sense strand
aagccuuacaggagacuuu

SEQ ID NO: 2663806 - RNA, 19 nt, Homo sapiens
  misc_RNA (1)...(19): siRNA sense strand
cccaucagcucgaggcuca

SEQ ID NO: 2663807 - RNA, 19 nt, Homo sapiens
  misc_RNA (1)...(19): siRNA sense strand
ccucaaaagucaaagaccu

SEQ ID NO: 2663808 - RNA, 19 nt, Homo sapiens
  misc_RNA (1)...(19): siRNA sense strand
cugcagaccuccaggacaa

SEQ ID NO: 2663809 - RNA, 19 nt, Homo sapiens
  misc_RNA (1)...(19): siRNA sense strand
uugacaaaccugaggauaa

SEQ ID NO: 2663810 - RNA, 19 nt, Homo sapiens
  misc_RNA (1)...(19): siRNA sense strand
gagcaaagaaugaagcaga

SEQ ID NO: 2663811 - RNA, 19 nt, Homo sapiens
  misc_RNA (1)...(19): siRNA sense strand
gggaaauauaagaaaccaa

SEQ ID NO: 2663812 - RNA, 19 nt, Homo sapiens
  misc_RNA (1)...(19): siRNA sense strand
gcuaaaugaacaacugaaa

SEQ ID NO: 2663813 - RNA, 19 nt, Homo sapiens
  misc_RNA (1)...(19): siRNA sense strand
ggccaagauaagaagaaua

SEQ ID NO: 2663814 - RNA, 19 nt, Homo sapiens
  misc_RNA (1)...(19): siRNA sense strand
ccucaaggaucaaaggaca

SEQ ID NO: 2663815 - RNA, 19 nt, Homo sapiens
  misc_RNA (1)...(19): siRNA sense strand
gagaauauuggaagaucaa

SEQ ID NO: 2663816 - RNA, 19 nt, Homo sapiens
  misc_RNA (1)...(19): siRNA sense strand
aggaaaaguuaaacagcua

SEQ ID NO: 2663817 - RNA, 19 nt, Homo sapiens
  misc_RNA (1)...(19): siRNA sense strand
cuucaauuguggaggcuuu

SEQ ID NO: 2663818 - RNA, 19 nt, Homo sapiens
  misc_RNA (1)...(19): siRNA sense strand
gguuaaaugaagaagcaga

SEQ ID NO: 2663819 - RNA, 19 nt, Homo sapiens
  misc_RNA (1)...(19): siRNA sense strand
aagaaugggcagugugaau

SEQ ID NO: 2663820 - RNA, 19 nt, Homo sapiens
  misc_RNA (1)...(19): siRNA sense strand
cuucaagguuauacgggua

SEQ ID NO: 2663821 - RNA, 19 nt, Homo sapiens
  misc_RNA (1)...(19): siRNA sense strand
uagaaagagcaaagaauga

SEQ ID NO: 2663822 - RNA, 19 nt, Homo sapiens
  misc_RNA (1)...(19): siRNA sense strand
aggaauuuguugagcugaa

SEQ ID NO: 2663823 - RNA, 19 nt, Homo sapiens
  misc_RNA (1)...(19): siRNA sense strand
ccaaaugcgaccagugcaa

SEQ ID NO: 2663824 - RNA, 19 nt, Homo sapiens
  misc_RNA (1)...(19): siRNA sense strand
gaaaaucaaaccagggaaa

SEQ ID NO: 2663825 - RNA, 19 nt, Homo sapiens
  misc_RNA (1)...(19): siRNA sense strand
gauacaauagaaagagcaa

SEQ ID NO: 2663826 - RNA, 19 nt, Homo sapiens
  misc_RNA (1)...(19): siRNA sense strand
cauuaauaccucugcaaau

SEQ ID NO: 2663827 - RNA, 19 nt, Homo sapiens
  misc_RNA (1)...(19): siRNA sense strand
ugagcagagcccagaaaua

SEQ ID NO: 2663828 - RNA, 19 nt, Homo sapiens
  misc_RNA (1)...(19): siRNA sense strand
gccuuacagcugagggaaa

SEQ ID NO: 2663829 - RNA, 19 nt, Homo sapiens
  misc_RNA (1)...(19): siRNA sense strand
ugagaauauuggaagauca

SEQ ID NO: 2663830 - RNA, 19 nt, Homo sapiens
  misc_RNA (1)...(19): siRNA sense strand
aagaaugcacuguuggaua

SEQ ID NO: 2663831 - RNA, 19 nt, Homo sapiens
  misc_RNA (1)...(19): siRNA sense strand
ggacacuguaugugaccaa

SEQ ID NO: 2663832 - RNA, 19 nt, Homo sapiens
  misc_RNA (1)...(19): siRNA sense strand
uggaaagauuaaagcagau

SEQ ID NO: 2663833 - RNA, 19 nt, Homo sapiens
  misc_RNA (1)...(19): siRNA sense strand
agaucaaguuguugccauu

SEQ ID NO: 2663834 - RNA, 19 nt, Homo sapiens
  misc_RNA (1)...(19): siRNA sense strand
gugaagacugccagcacaa

SEQ ID NO: 2663835 - RNA, 19 nt, Homo sapiens
  misc_RNA (1)...(19): siRNA sense strand
guuuagaaccagauguaca

SEQ ID NO: 2663836 - RNA, 19 nt, Homo sapiens
  misc_RNA (1)...(19): siRNA sense strand
gggaaacguugcagugagu

SEQ ID NO: 2663837 - RNA, 19 nt, Homo sapiens
  misc_RNA (1)...(19): siRNA sense strand
gauacagaggccaagauaa

SEQ ID NO: 2663838 - RNA, 19 nt, Homo sapiens
  misc_RNA (1)...(19): siRNA sense strand
uggcagaggaugucaguca

SEQ ID NO: 2663839 - RNA, 19 nt, Homo sapiens
  misc_RNA (1)...(19): siRNA sense strand
caauagaaagagcaaagaa

SEQ ID NO: 2663840 - RNA, 19 nt, Homo sapiens
  misc_RNA (1)...(19): siRNA sense strand
agaagcagauggagcccaa

SEQ ID NO: 2663841 - RNA, 19 nt, Homo sapiens
  misc_RNA (1)...(19): siRNA sense strand
ccgaugaacuugucaaaau

SEQ ID NO: 2663842 - RNA, 19 nt, Homo sapiens
  misc_RNA (1)...(19): siRNA sense strand
cucaacagguggagagguu

SEQ ID NO: 2663843 - RNA, 19 nt, Homo sapiens
  misc_RNA (1)...(19): siRNA sense strand
gggaaauucuuaaaaguca

SEQ ID NO: 2663844 - RNA, 19 nt, Homo sapiens
  misc_RNA (1)...(19): siRNA sense strand
gcaaauacaaggaaugacu

SEQ ID NO: 2663845 - RNA, 19 nt, Homo sapiens
  misc_RNA (1)...(19): siRNA sense strand
aaguauaagugaacaggca

SEQ ID NO: 2663846 - RNA, 19 nt, Homo sapiens
  misc_RNA (1)...(19): siRNA sense strand
guguauugaugguuacuau

SEQ ID NO: 2663847 - RNA, 19 nt, Homo sapiens
  misc_RNA (1)...(19): siRNA sense strand
cugagaaagcagcaaauau

SEQ ID NO: 2663848 - RNA, 19 nt, Homo sapiens
  misc_RNA (1)...(19): siRNA sense strand
aaauaugcuaggugcuaua

SEQ ID NO: 2663849 - RNA, 19 nt, Homo sapiens
  misc_RNA (1)...(19): siRNA sense strand
ugaaaauggucuugaucau

SEQ ID NO: 2663850 - RNA, 19 nt, Homo sapiens
  misc_RNA (1)...(19): siRNA sense strand
cuggagauacagaggccaa

SEQ ID NO: 2663851 - RNA, 19 nt, Homo sapiens
  misc_RNA (1)...(19): siRNA sense strand
ugauauuggaggugcuuau

SEQ ID NO: 2663852 - RNA, 19 nt, Homo sapiens
  misc_RNA (1)...(19): siRNA sense strand
ccacaacacuccaaggacu

SEQ ID NO: 2663853 - RNA, 19 nt, Homo sapiens
  misc_RNA (1)...(19): siRNA sense strand
cgaugaacuugucaaaaua

SEQ ID NO: 2663854 - RNA, 19 nt, Homo sapiens
  misc_RNA (1)...(19): siRNA sense strand
acaaaggagacauuaggaa

SEQ ID NO: 2663855 - RNA, 19 nt, Homo sapiens
  misc_RNA (1)...(19): siRNA sense strand
cugcaaaccaggucacuau

SEQ ID NO: 2663856 - RNA, 19 nt, Homo sapiens
  misc_RNA (1)...(19): siRNA sense strand
gcagugagugccaggaaaa

SEQ ID NO: 2663857 - RNA, 19 nt, Homo sapiens
  misc_RNA (1)...(19): siRNA sense strand
ugucugaaauagaaaggau

SEQ ID NO: 2663858 - RNA, 19 nt, Homo sapiens
  misc_RNA (1)...(19): siRNA sense strand
guauaagugaacaggcaga

SEQ ID NO: 2663859 - RNA, 19 nt, Homo sapiens
  misc_RNA (1)...(19): siRNA sense strand
agaaugugcugcaggcuga

SEQ ID NO: 2663860 - RNA, 19 nt, Homo sapiens
  misc_RNA (1)...(19): siRNA sense strand
ggccaguguccguguaaau

SEQ ID NO: 2663861 - RNA, 19 nt, Homo sapiens
  misc_RNA (1)...(19): siRNA sense strand
guuaaaugaagaagcagau

SEQ ID NO: 2663862 - RNA, 19 nt, Homo sapiens
  misc_RNA (1)...(19): siRNA sense strand
ugauguggauacaggccaa

SEQ ID NO: 2663863 - RNA, 19 nt, Homo sapiens
  misc_RNA (1)...(19): siRNA sense strand
ccaaagcggugcaaggguu

SEQ ID NO: 2663864 - RNA, 19 nt, Homo sapiens
  misc_RNA (1)...(19): siRNA sense strand
cagguuaaaugaagaagca

SEQ ID NO: 2663865 - RNA, 19 nt, Homo sapiens
  misc_RNA (1)...(19): siRNA sense strand
cagccacaccauugagaau

SEQ ID NO: 2663866 - RNA, 19 nt, Homo sapiens
  misc_RNA (1)...(19): siRNA sense strand
ccagggagugggagacauu

SEQ ID NO: 2663867 - RNA, 19 nt, Homo sapiens
  misc_RNA (1)...(19): siRNA sense strand
guggagagguuguuuuaaa

SEQ ID NO: 2663868 - RNA, 19 nt, Homo sapiens
  misc_RNA (1)...(19): siRNA sense strand
cuggaaugguucacgguca

SEQ ID NO: 2663869 - RNA, 19 nt, Homo sapiens
  misc_RNA (1)...(19): siRNA sense strand
ccaagaaugggcaguguga

SEQ ID NO: 2663870 - RNA, 19 nt, Homo sapiens
  misc_RNA (1)...(19): siRNA sense strand
gcucaagaugacugcaaca

SEQ ID NO: 2663871 - RNA, 19 nt, Homo sapiens
  misc_RNA (1)...(19): siRNA sense strand
agggaacgugucugaaaua

SEQ ID NO: 2663872 - RNA, 19 nt, Homo sapiens
  misc_RNA (1)...(19): siRNA sense strand
caaacagguucguggguug

SEQ ID NO: 2663873 - RNA, 19 nt, Homo sapiens
  misc_RNA (1)...(19): siRNA sense strand
cuguuuagaaccagaugua

SEQ ID NO: 2663874 - RNA, 19 nt, Homo sapiens
  misc_RNA (1)...(19): siRNA sense strand
ccucaagcaaucaguauuu

SEQ ID NO: 2663875 - RNA, 19 nt, Homo sapiens
  misc_RNA (1)...(19): siRNA sense strand
ggaacgugucugaaauaga

SEQ ID NO: 2663876 - RNA, 19 nt, Homo sapiens
  misc_RNA (1)...(19): siRNA sense strand
acacuaaccucaaaaggaa

SEQ ID NO: 2663877 - RNA, 19 nt, Homo sapiens
  misc_RNA (1)...(19): siRNA sense strand
acagaaaugcagaggagaa

SEQ ID NO: 2663878 - RNA, 19 nt, Homo sapiens
  misc_RNA (1)...(19): siRNA sense strand
agucagaagaacaggaaga

SEQ ID NO: 2663879 - RNA, 19 nt, Homo sapiens
  misc_RNA (1)...(19): siRNA sense strand
cagaaaugcagaggagaaa

SEQ ID NO: 2663880 - RNA, 19 nt, Homo sapiens
  misc_RNA (1)...(19): siRNA sense strand
aguuggaaggguugaaaua

SEQ ID NO: 2663881 - RNA, 19 nt, Homo sapiens
  misc_RNA (1)...(19): siRNA sense strand
aauugaugguggaggaaca

SEQ ID NO: 2663882 - RNA, 19 nt, Homo sapiens
  misc_RNA (1)...(19): siRNA sense strand
ccagugaaagggagaggaa

SEQ ID NO: 2663883 - RNA, 19 nt, Homo sapiens
  misc_RNA (1)...(19): siRNA sense strand
uagcuaugcaugaguguaa

SEQ ID NO: 2663884 - RNA, 19 nt, Homo sapiens
  misc_RNA (1)...(19): siRNA sense strand
ugguuuacauauugggauu

SEQ ID NO: 2663885 - RNA, 19 nt, Homo sapiens
  misc_RNA (1)...(19): siRNA sense strand
augagagugaugugagaaa

SEQ ID NO: 2663886 - RNA, 19 nt, Homo sapiens
  misc_RNA (1)...(19): siRNA sense strand
ugauugaaacagcaagaaa

SEQ ID NO: 2663887 - RNA, 19 nt, Homo sapiens
  misc_RNA (1)...(19): siRNA sense strand
cugaauaacccuucggcau

SEQ ID NO: 2663888 - RNA, 19 nt, Homo sapiens
  misc_RNA (1)...(19): siRNA sense strand
gagagugaugugagaaaca

SEQ ID NO: 2663889 - RNA, 19 nt, Homo sapiens
  misc_RNA (1)...(19): siRNA sense strand
agauguaaauggaccaaaa

SEQ ID NO: 2663890 - RNA, 19 nt, Homo sapiens
  misc_RNA (1)...(19): siRNA sense strand
cagcaaagacagaaaugca

SEQ ID NO: 2663891 - RNA, 19 nt, Homo sapiens
  misc_RNA (1)...(19): siRNA sense strand
ggcugcaguuagagaaauu

SEQ ID NO: 2663892 - RNA, 19 nt, Homo sapiens
  misc_RNA (1)...(19): siRNA sense strand
ccguuagagugcauaguau

SEQ ID NO: 2663893 - RNA, 19 nt, Homo sapiens
  misc_RNA (1)...(19): siRNA sense strand
guguaaaugucuuuggcca

SEQ ID NO: 2663894 - RNA, 19 nt, Homo sapiens
  misc_RNA (1)...(19): siRNA sense strand
agauauagguaaacgcagu

SEQ ID NO: 2663895 - RNA, 19 nt, Homo sapiens
  misc_RNA (1)...(19): siRNA sense strand
ggguugaagaacugacuuu

SEQ ID NO: 2663896 - RNA, 19 nt, Homo sapiens
  misc_RNA (1)...(19): siRNA sense strand
guucagaaacuauggucau

SEQ ID NO: 2663897 - RNA, 19 nt, Homo sapiens
  misc_RNA (1)...(19): siRNA sense strand
cgagaaaagauuaucgcaa

SEQ ID NO: 2663898 - RNA, 19 nt, Homo sapiens
  misc_RNA (1)...(19): siRNA sense strand
agugaaagggagaggaauc

SEQ ID NO: 2663899 - RNA, 19 nt, Homo sapiens
  misc_RNA (1)...(19): siRNA sense strand
ucggauaguggcugguuaa

SEQ ID NO: 2663900 - RNA, 19 nt, Homo sapiens
  misc_RNA (1)...(19): siRNA sense strand
agacagaaaugcagaggag

SEQ ID NO: 2663901 - RNA, 19 nt, Homo sapiens
  misc_RNA (1)...(19): siRNA sense strand
gggauaacacccaaagcuu

SEQ ID NO: 2663902 - RNA, 19 nt, Homo sapiens
  misc_RNA (1)...(19): siRNA sense strand
aagaaguguuugugggaag

SEQ ID NO: 2663903 - RNA, 19 nt, Homo sapiens
  misc_RNA (1)...(19): siRNA sense strand
gggacaaaucagaacuuga

SEQ ID NO: 2663904 - RNA, 19 nt, Homo sapiens
  misc_RNA (1)...(19): siRNA sense strand
cuguacauacgguggacaa

SEQ ID NO: 2663905 - RNA, 19 nt, Homo sapiens
  misc_RNA (1)...(19): siRNA sense strand
gagacaaauuaaggaugaa

SEQ ID NO: 2663906 - RNA, 19 nt, Homo sapiens
  misc_RNA (1)...(19): siRNA sense strand
ccuccaaggucuacaugau

SEQ ID NO: 2663907 - RNA, 19 nt, Homo sapiens
  misc_RNA (1)...(19): siRNA sense strand
gaccaaaagugaagcacau

SEQ ID NO: 2663908 - RNA, 19 nt, Homo sapiens
  misc_RNA (1)...(19): siRNA sense strand
ugguuauauugguggacuu

SEQ ID NO: 2663909 - RNA, 19 nt, Homo sapiens
  misc_RNA (1)...(19): siRNA sense strand
ccuaauuggcuauguggau

SEQ ID NO: 2663910 - RNA, 19 nt, Homo sapiens
  misc_RNA (1)...(19): siRNA sense strand
auacagaagaaguccauau

SEQ ID NO: 2663911 - RNA, 19 nt, Homo sapiens
  misc_RNA (1)...(19): siRNA sense strand
gcaagaaguguuuguggga

SEQ ID NO: 2663912 - RNA, 19 nt, Homo sapiens
  misc_RNA (1)...(19): siRNA sense strand
acaaagagguuuucauaca

SEQ ID NO: 2663913 - RNA, 19 nt, Homo sapiens
  misc_RNA (1)...(19): siRNA sense strand
gcagaauaugcauugggaa

SEQ ID NO: 2663914 - RNA, 19 nt, Homo sapiens
  misc_RNA (1)...(19): siRNA sense strand
gaugauugaaacagcaaga

SEQ ID NO: 2663915 - RNA, 19 nt, Homo sapiens
  misc_RNA (1)...(19): siRNA sense strand
cuguaaguaccauaguaaa

SEQ ID NO: 2663916 - RNA, 19 nt, Homo sapiens
  misc_RNA (1)...(19): siRNA sense strand
ugcuacagauacagaagaa

SEQ ID NO: 2663917 - RNA, 19 nt, Homo sapiens
  misc_RNA (1)...(19): siRNA sense strand
gauuucacguuuagcucaa

SEQ ID NO: 2663918 - RNA, 19 nt, Homo sapiens
  misc_RNA (1)...(19): siRNA sense strand
gcaaagacagaaaugcaga

SEQ ID NO: 2663919 - RNA, 19 nt, Homo sapiens
  misc_RNA (1)...(19): siRNA sense strand
uuauuacgacugagacaaa

SEQ ID NO: 2663920 - RNA, 19 nt, Homo sapiens
  misc_RNA (1)...(19): siRNA sense strand
cuacagauacagaagaagu

SEQ ID NO: 2663921 - RNA, 19 nt, Homo sapiens
  misc_RNA (1)...(19): siRNA sense strand
uuggaaggguugaaauaca

SEQ ID NO: 2663922 - RNA, 19 nt, Homo sapiens
  misc_RNA (1)...(19): siRNA sense strand
gugacaaaucagcagaaaa

SEQ ID NO: 2663923 - RNA, 19 nt, Homo sapiens
  misc_RNA (1)...(19): siRNA sense strand
guagaagaggggaaauuaa

SEQ ID NO: 2663924 - RNA, 19 nt, Homo sapiens
  misc_RNA (1)...(19): siRNA sense strand
ggauccagugaaagggaga

SEQ ID NO: 2663925 - RNA, 19 nt, Homo sapiens
  misc_RNA (1)...(19): siRNA sense strand
ggaaaacauucuuaaggau

SEQ ID NO: 2663926 - RNA, 19 nt, Homo sapiens
  misc_RNA (1)...(19): siRNA sense strand
aguaugauucaaagaguca

SEQ ID NO: 2663927 - RNA, 19 nt, Homo sapiens
  misc_RNA (1)...(19): siRNA sense strand
gcguuuaucucuucagcga

SEQ ID NO: 2663928 - RNA, 19 nt, Homo sapiens
  misc_RNA (1)...(19): siRNA sense strand
caggcugcaguuagagaaa

SEQ ID NO: 2663929 - RNA, 19 nt, Homo sapiens
  misc_RNA (1)...(19): siRNA sense strand
acacaagcuugaaaacuaa

SEQ ID NO: 2663930 - RNA, 19 nt, Homo sapiens
  misc_RNA (1)...(19): siRNA sense strand
aagauuaucgcaaggguga

SEQ ID NO: 2663931 - RNA, 19 nt, Homo sapiens
  misc_RNA (1)...(19): siRNA sense strand
cuuggaugaaugugaggaa

SEQ ID NO: 2663932 - RNA, 19 nt, Homo sapiens
  misc_RNA (1)...(19): siRNA sense strand
cauuacuaggguugaagaa

SEQ ID NO: 2663933 - RNA, 19 nt, Homo sapiens
  misc_RNA (1)...(19): siRNA sense strand
cucaauugaugguggagga

SEQ ID NO: 2663934 - RNA, 19 nt, Homo sapiens
  misc_RNA (1)...(19): siRNA sense strand
aagaagaacaacugaccca

SEQ ID NO: 2663935 - RNA, 19 nt, Homo sapiens
  misc_RNA (1)...(19): siRNA sense strand
aggaaauaggcaagauaaa

SEQ ID NO: 2663936 - RNA, 19 nt, Homo sapiens
  misc_RNA (1)...(19): siRNA sense strand
cggaagaggaggaggagga

SEQ ID NO: 2663937 - RNA, 19 nt, Homo sapiens
  misc_RNA (1)...(19): siRNA sense strand
caucagacugcuuggaaau

SEQ ID NO: 2663938 - RNA, 19 nt, Homo sapiens
  misc_RNA (1)...(19): siRNA sense strand
ggacaagcgucauguggca

SEQ ID NO: 2663939 - RNA, 19 nt, Homo sapiens
  misc_RNA (1)...(19): siRNA sense strand
ucaucagacugcuuggaaa

SEQ ID NO: 2663940 - RNA, 19 nt, Homo sapiens
  misc_RNA (1)...(19): siRNA sense strand
uuggaaaucuguauggaau

SEQ ID NO: 2663941 - RNA, 19 nt, Homo sapiens
  misc_RNA (1)...(19): siRNA sense strand
uguaacugcccuugugaua

SEQ ID NO: 2663942 - RNA, 19 nt, Homo sapiens
  misc_RNA (1)...(19): siRNA sense strand
aggaggaggaggaggagga

SEQ ID NO: 2663943 - RNA, 19 nt, Homo sapiens
  misc_RNA (1)...(19): siRNA sense strand
aagaggaggaggaggagga

SEQ ID NO: 2663944 - RNA, 19 nt, Homo sapiens
  misc_RNA (1)...(19): siRNA sense strand
uauggaaugcuguggaauu

SEQ ID NO: 2663945 - RNA, 19 nt, Homo sapiens
  misc_RNA (1)...(19): siRNA sense strand
aggucugagcaauggaaau

SEQ ID NO: 2663946 - RNA, 19 nt, Homo sapiens
  misc_RNA (1)...(19): siRNA sense strand
ugccaaguggugaggaaau

SEQ ID NO: 2663947 - RNA, 19 nt, Homo sapiens
  misc_RNA (1)...(19): siRNA sense strand
auggaugccuguugugaau

SEQ ID NO: 2663948 - RNA, 19 nt, Homo sapiens
  misc_RNA (1)...(19): siRNA sense strand
guggugaggaaauaggcaa

SEQ ID NO: 2663949 - RNA, 19 nt, Homo sapiens
  misc_RNA (1)...(19): siRNA sense strand
gcggagaagcagucaguuc

SEQ ID NO: 2663950 - RNA, 19 nt, Homo sapiens
  misc_RNA (1)...(19): siRNA sense strand
uguauggaaugcuguggaa

SEQ ID NO: 2663951 - RNA, 19 nt, Homo sapiens
  misc_RNA (1)...(19): siRNA sense strand
ccaugaaagacuugugaau

SEQ ID NO: 2663952 - RNA, 19 nt, Homo sapiens
  misc_RNA (1)...(19): siRNA sense strand
agagagacugacugggcaa

SEQ ID NO: 2663953 - RNA, 19 nt, Homo sapiens
  misc_RNA (1)...(19): siRNA sense strand
acuugugaauccaggaaga

SEQ ID NO: 2663954 - RNA, 19 nt, Homo sapiens
  misc_RNA (1)...(19): siRNA sense strand
ggaucuaccaugaaagacu

SEQ ID NO: 2663955 - RNA, 19 nt, Homo sapiens
  misc_RNA (1)...(19): siRNA sense strand
gaauccaggaagagagacu

SEQ ID NO: 2663956 - RNA, 19 nt, Homo sapiens
  misc_RNA (1)...(19): siRNA sense strand
acauccaguugcaggaaaa

SEQ ID NO: 2663957 - RNA, 19 nt, Homo sapiens
  misc_RNA (1)...(19): siRNA sense strand
gugaauccaggaagagaga

SEQ ID NO: 2663958 - RNA, 19 nt, Homo sapiens
  misc_RNA (1)...(19): siRNA sense strand
cggugguguuugaaagcaa

SEQ ID NO: 2663959 - RNA, 19 nt, Homo sapiens
  misc_RNA (1)...(19): siRNA sense strand
ggguuaggacagugaccga

SEQ ID NO: 2663960 - RNA, 19 nt, Homo sapiens
  misc_RNA (1)...(19): siRNA sense strand
ccuucuacaaguucauaua

SEQ ID NO: 2663961 - RNA, 19 nt, Homo sapiens
  misc_RNA (1)...(19): siRNA sense strand
cggugguguuugaaagcaa

SEQ ID NO: 2663962 - RNA, 19 nt, Homo sapiens
  misc_RNA (1)...(19): siRNA sense strand
ggguuaggacagugaccga

SEQ ID NO: 2663963 - RNA, 19 nt, Homo sapiens
  misc_RNA (1)...(19): siRNA sense strand
ccuucuacaaguucauaua

SEQ ID NO: 2663964 - RNA, 19 nt, Homo sapiens
  misc_RNA (1)...(19): siRNA sense strand
gggaagaggugguaccaga

SEQ ID NO: 2663965 - RNA, 19 nt, Homo sapiens
  misc_RNA (1)...(19): siRNA sense strand
gaauguaccuugagggcca

SEQ ID NO: 2663966 - RNA, 19 nt, Homo sapiens
  misc_RNA (1)...(19): siRNA sense strand
agacucaagugcagggcaa

SEQ ID NO: 2663967 - RNA, 19 nt, Homo sapiens
  misc_RNA (1)...(19): siRNA sense strand
aggaaaagcaacaugaaaa

SEQ ID NO: 2663968 - RNA, 19 nt, Homo sapiens
  misc_RNA (1)...(19): siRNA sense strand
ccugagacuaagcgggaua

SEQ ID NO: 2663969 - RNA, 19 nt, Homo sapiens
  misc_RNA (1)...(19): siRNA sense strand
augaagaggagcuggagaa

SEQ ID NO: 2663970 - RNA, 19 nt, Homo sapiens
  misc_RNA (1)...(19): siRNA sense strand
ccacagaggaggaagagga

SEQ ID NO: 2663971 - RNA, 19 nt, Homo sapiens
  misc_RNA (1)...(19): siRNA sense strand
ccgcaaauggcaauggcaa

SEQ ID NO: 2663972 - RNA, 19 nt, Homo sapiens
  misc_RNA (1)...(19): siRNA sense strand
uagcagugcccuucggaaa

SEQ ID NO: 2663973 - RNA, 19 nt, Homo sapiens
  misc_RNA (1)...(19): siRNA sense strand
uacuaaaguuacagaccaa

SEQ ID NO: 2663974 - RNA, 19 nt, Homo sapiens
  misc_RNA (1)...(19): siRNA sense strand
gugaacaggcacaaggaga

SEQ ID NO: 2663975 - RNA, 19 nt, Homo sapiens
  misc_RNA (1)...(19): siRNA sense strand
agauacauugguuggauua

SEQ ID NO: 2663976 - RNA, 19 nt, Homo sapiens
  misc_RNA (1)...(19): siRNA sense strand
ggcuggaguuggaagaaga

SEQ ID NO: 2663977 - RNA, 19 nt, Homo sapiens
  misc_RNA (1)...(19): siRNA sense strand
gaucaagaaugaagaggag

SEQ ID NO: 2663978 - RNA, 19 nt, Homo sapiens
  misc_RNA (1)...(19): siRNA sense strand
aaccuuggauggagagcua

SEQ ID NO: 2663979 - RNA, 19 nt, Homo sapiens
  misc_RNA (1)...(19): siRNA sense strand
caggaggugcuuugaagaa

SEQ ID NO: 2663980 - RNA, 19 nt, Homo sapiens
  misc_RNA (1)...(19): siRNA sense strand
gcucccaccucuaaggcua

SEQ ID NO: 2663981 - RNA, 19 nt, Homo sapiens
  misc_RNA (1)...(19): siRNA sense strand
guuugaauauguaucgcaa

SEQ ID NO: 2663982 - RNA, 19 nt, Homo sapiens
  misc_RNA (1)...(19): siRNA sense strand
ccgccacagaggaggaaga

SEQ ID NO: 2663983 - RNA, 19 nt, Homo sapiens
  misc_RNA (1)...(19): siRNA sense strand
uugaauauguaucgcaaca

SEQ ID NO: 2663984 - RNA, 19 nt, Homo sapiens
  misc_RNA (1)...(19): siRNA sense strand
cucaauaaacugaccaaau

SEQ ID NO: 2663985 - RNA, 19 nt, Homo sapiens
  misc_RNA (1)...(19): siRNA sense strand
acuucaaacucaaccauau

SEQ ID NO: 2663986 - RNA, 19 nt, Homo sapiens
  misc_RNA (1)...(19): siRNA sense strand
gaggaaaagcaacaugaaa

SEQ ID NO: 2663987 - RNA, 19 nt, Homo sapiens
  misc_RNA (1)...(19): siRNA sense strand
aggacagccuggacaucua

SEQ ID NO: 2663988 - RNA, 19 nt, Homo sapiens
  misc_RNA (1)...(19): siRNA sense strand
cuaucaauauccuggcaga

SEQ ID NO: 2663989 - RNA, 19 nt, Homo sapiens
  misc_RNA (1)...(19): siRNA sense strand
gugugcaggagccgggaua

SEQ ID NO: 2663990 - RNA, 19 nt, Homo sapiens
  misc_RNA (1)...(19): siRNA sense strand
ugaacaggcacaaggagau

SEQ ID NO: 2663991 - RNA, 19 nt, Homo sapiens
  misc_RNA (1)...(19): siRNA sense strand
cugcugagcggguggcuuu

SEQ ID NO: 2663992 - RNA, 19 nt, Homo sapiens
  misc_RNA (1)...(19): siRNA sense strand
agaaugaagaggagcugga

SEQ ID NO: 2663993 - RNA, 19 nt, Homo sapiens
  misc_RNA (1)...(19): siRNA sense strand
ugaugcugguaguguuuaa

SEQ ID NO: 2663994 - RNA, 19 nt, Homo sapiens
  misc_RNA (1)...(19): siRNA sense strand
cuacuaaaguuacagacca

SEQ ID NO: 2663995 - RNA, 19 nt, Homo sapiens
  misc_RNA (1)...(19): siRNA sense strand
uggaagaagaugcccaaaa

SEQ ID NO: 2663996 - RNA, 19 nt, Homo sapiens
  misc_RNA (1)...(19): siRNA sense strand
cuccauagcugauagcaca

SEQ ID NO: 2663997 - RNA, 19 nt, Homo sapiens
  misc_RNA (1)...(19): siRNA sense strand
agaucaagaaugaagagga

SEQ ID NO: 2663998 - RNA, 19 nt, Homo sapiens
  misc_RNA (1)...(19): siRNA sense strand
gagcuggagaagugcccua

SEQ ID NO: 2663999 - RNA, 19 nt, Homo sapiens
  misc_RNA (1)...(19): siRNA sense strand
cccaaaaggccuauauaau

SEQ ID NO: 2664000 - RNA, 19 nt, Homo sapiens
  misc_RNA (1)...(19): siRNA sense strand
ccacauggaaauugacaac

SEQ ID NO: 2664001 - RNA, 19 nt, Homo sapiens
  misc_RNA (1)...(19): siRNA sense strand
ccucgguggauuugagcau

SEQ ID NO: 2664002 - RNA, 19 nt, Homo sapiens
  misc_RNA (1)...(19): siRNA sense strand
ucuggaagcuggagacaac

SEQ ID NO: 2664003 - RNA, 19 nt, Homo sapiens
  misc_RNA (1)...(19): siRNA sense strand
ggauaugggacgugugcag

SEQ ID NO: 2664004 - RNA, 19 nt, Homo sapiens
  misc_RNA (1)...(19): siRNA sense strand
ucacuguucuccagagcau

SEQ ID NO: 2664005 - RNA, 19 nt, Homo sapiens
  misc_RNA (1)...(19): siRNA sense strand
ccguggcucucgaaggcaa

SEQ ID NO: 2664006 - RNA, 19 nt, Homo sapiens
  misc_RNA (1)...(19): siRNA sense strand
gggaagaggugguaccaga

SEQ ID NO: 2664007 - RNA, 19 nt, Homo sapiens
  misc_RNA (1)...(19): siRNA sense strand
gaauguaccuugagggcca

SEQ ID NO: 2664008 - RNA, 19 nt, Homo sapiens
  misc_RNA (1)...(19): siRNA sense strand
agacucaagugcagggcaa

SEQ ID NO: 2664009 - RNA, 19 nt, Homo sapiens
  misc_RNA (1)...(19): siRNA sense strand
aggaaaagcaacaugaaaa

SEQ ID NO: 2664010 - RNA, 19 nt, Homo sapiens
  misc_RNA (1)...(19): siRNA sense strand
ccugagacuaagcgggaua

SEQ ID NO: 2664011 - RNA, 19 nt, Homo sapiens
  misc_RNA (1)...(19): siRNA sense strand
augaagaggagcuggagaa

SEQ ID NO: 2664012 - RNA, 19 nt, Homo sapiens
  misc_RNA (1)...(19): siRNA sense strand
ccacagaggaggaagagga

SEQ ID NO: 2664013 - RNA, 19 nt, Homo sapiens
  misc_RNA (1)...(19): siRNA sense strand
ccgcaaauggcaauggcaa

SEQ ID NO: 2664014 - RNA, 19 nt, Homo sapiens
  misc_RNA (1)...(19): siRNA sense strand
uagcagugcccuucggaaa

SEQ ID NO: 2664015 - RNA, 19 nt, Homo sapiens
  misc_RNA (1)...(19): siRNA sense strand
uacuaaaguuacagaccaa

SEQ ID NO: 2664016 - RNA, 19 nt, Homo sapiens
  misc_RNA (1)...(19): siRNA sense strand
gugaacaggcacaaggaga

SEQ ID NO: 2664017 - RNA, 19 nt, Homo sapiens
  misc_RNA (1)...(19): siRNA sense strand
agauacauugguuggauua

SEQ ID NO: 2664018 - RNA, 19 nt, Homo sapiens
  misc_RNA (1)...(19): siRNA sense strand
ggcuggaguuggaagaaga

SEQ ID NO: 2664019 - RNA, 19 nt, Homo sapiens
  misc_RNA (1)...(19): siRNA sense strand
gaucaagaaugaagaggag

SEQ ID NO: 2664020 - RNA, 19 nt, Homo sapiens
  misc_RNA (1)...(19): siRNA sense strand
aaccuuggauggagagcua

SEQ ID NO: 2664021 - RNA, 19 nt, Homo sapiens
  misc_RNA (1)...(19): siRNA sense strand
caggaggugcuuugaagaa

SEQ ID NO: 2664022 - RNA, 19 nt, Homo sapiens
  misc_RNA (1)...(19): siRNA sense strand
gcucccaccucuaaggcua

SEQ ID NO: 2664023 - RNA, 19 nt, Homo sapiens
  misc_RNA (1)...(19): siRNA sense strand
guuugaauauguaucgcaa

SEQ ID NO: 2664024 - RNA, 19 nt, Homo sapiens
  misc_RNA (1)...(19): siRNA sense strand
ccgccacagaggaggaaga

SEQ ID NO: 2664025 - RNA, 19 nt, Homo sapiens
  misc_RNA (1)...(19): siRNA sense strand
uugaauauguaucgcaaca

SEQ ID NO: 2664026 - RNA, 19 nt, Homo sapiens
  misc_RNA (1)...(19): siRNA sense strand
cucaauaaacugaccaaau

SEQ ID NO: 2664027 - RNA, 19 nt, Homo sapiens
  misc_RNA (1)...(19): siRNA sense strand
acuucaaacucaaccauau

SEQ ID NO: 2664028 - RNA, 19 nt, Homo sapiens
  misc_RNA (1)...(19): siRNA sense strand
gaggaaaagcaacaugaaa

SEQ ID NO: 2664029 - RNA, 19 nt, Homo sapiens
  misc_RNA (1)...(19): siRNA sense strand
aggacagccuggacaucua

SEQ ID NO: 2664030 - RNA, 19 nt, Homo sapiens
  misc_RNA (1)...(19): siRNA sense strand
cuaucaauauccuggcaga

SEQ ID NO: 2664031 - RNA, 19 nt, Homo sapiens
  misc_RNA (1)...(19): siRNA sense strand
gugugcaggagccgggaua

SEQ ID NO: 2664032 - RNA, 19 nt, Homo sapiens
  misc_RNA (1)...(19): siRNA sense strand
ugaacaggcacaaggagau

SEQ ID NO: 2664033 - RNA, 19 nt, Homo sapiens
  misc_RNA (1)...(19): siRNA sense strand
cugcugagcggguggcuuu

SEQ ID NO: 2664034 - RNA, 19 nt, Homo sapiens
  misc_RNA (1)...(19): siRNA sense strand
agaaugaagaggagcugga

SEQ ID NO: 2664035 - RNA, 19 nt, Homo sapiens
  misc_RNA (1)...(19): siRNA sense strand
ugaugcugguaguguuuaa

SEQ ID NO: 2664036 - RNA, 19 nt, Homo sapiens
  misc_RNA (1)...(19): siRNA sense strand
cuacuaaaguuacagacca

SEQ ID NO: 2664037 - RNA, 19 nt, Homo sapiens
  misc_RNA (1)...(19): siRNA sense strand
uggaagaagaugcccaaaa

SEQ ID NO: 2664038 - RNA, 19 nt, Homo sapiens
  misc_RNA (1)...(19): siRNA sense strand
cuccauagcugauagcaca

SEQ ID NO: 2664039 - RNA, 19 nt, Homo sapiens
  misc_RNA (1)...(19): siRNA sense strand
agaucaagaaugaagagga

SEQ ID NO: 2664040 - RNA, 19 nt, Homo sapiens
  misc_RNA (1)...(19): siRNA sense strand
gagcuggagaagugcccua

SEQ ID NO: 2664041 - RNA, 19 nt, Homo sapiens
  misc_RNA (1)...(19): siRNA sense strand
cccaaaaggccuauauaau

SEQ ID NO: 2664042 - RNA, 19 nt, Homo sapiens
  misc_RNA (1)...(19): siRNA sense strand
ccacauggaaauugacaac

SEQ ID NO: 2664043 - RNA, 19 nt, Homo sapiens
  misc_RNA (1)...(19): siRNA sense strand
ccucgguggauuugagcau

SEQ ID NO: 2664044 - RNA, 19 nt, Homo sapiens
  misc_RNA (1)...(19): siRNA sense strand
ucuggaagcuggagacaac

SEQ ID NO: 2664045 - RNA, 19 nt, Homo sapiens
  misc_RNA (1)...(19): siRNA sense strand
ggauaugggacgugugcag

SEQ ID NO: 2664046 - RNA, 19 nt, Homo sapiens
  misc_RNA (1)...(19): siRNA sense strand
ucacuguucuccagagcau

SEQ ID NO: 2664047 - RNA, 19 nt, Homo sapiens
  misc_RNA (1)...(19): siRNA sense strand
ccguggcucucgaaggcaa

SEQ ID NO: 2664048 - RNA, 19 nt, Homo sapiens
  misc_RNA (1)...(19): siRNA sense strand
ccaucauccuaaagggcaa

SEQ ID NO: 2664049 - RNA, 19 nt, Homo sapiens
  misc_RNA (1)...(19): siRNA sense strand
gccaaaagcaagugcacaa

SEQ ID NO: 2664050 - RNA, 19 nt, Homo sapiens
  misc_RNA (1)...(19): siRNA sense strand
augaggugcuagagaugaa

SEQ ID NO: 2664051 - RNA, 19 nt, Homo sapiens
  misc_RNA (1)...(19): siRNA sense strand
gagcauugucaguggaaac

SEQ ID NO: 2664052 - RNA, 19 nt, Homo sapiens
  misc_RNA (1)...(19): siRNA sense strand
ugguggugauguuuggaaa

SEQ ID NO: 2664053 - RNA, 19 nt, Homo sapiens
  misc_RNA (1)...(19): siRNA sense strand
ccggaucaucacagagaau

SEQ ID NO: 2664054 - RNA, 19 nt, Homo sapiens
  misc_RNA (1)...(19): siRNA sense strand
cagcucaaaucaaaggaga

SEQ ID NO: 2664055 - RNA, 19 nt, Homo sapiens
  misc_RNA (1)...(19): siRNA sense strand
aguugacagucguguggaa

SEQ ID NO: 2664056 - RNA, 19 nt, Homo sapiens
  misc_RNA (1)...(19): siRNA sense strand
cuaucacgcugaaggccaa

SEQ ID NO: 2664057 - RNA, 19 nt, Homo sapiens
  misc_RNA (1)...(19): siRNA sense strand
ccuaugaagggauggagau

SEQ ID NO: 2664058 - RNA, 19 nt, Homo sapiens
  misc_RNA (1)...(19): siRNA sense strand
agaugaaggugucggugca

SEQ ID NO: 2664059 - RNA, 19 nt, Homo sapiens
  misc_RNA (1)...(19): siRNA sense strand
gggccaagauccaccagga

SEQ ID NO: 2664060 - RNA, 19 nt, Homo sapiens
  misc_RNA (1)...(19): siRNA sense strand
augcaggcuucguggagau

SEQ ID NO: 2664061 - RNA, 19 nt, Homo sapiens
  misc_RNA (1)...(19): siRNA sense strand
cuacaaguguggagccaug

SEQ ID NO: 2664062 - RNA, 19 nt, Homo sapiens
  misc_RNA (1)...(19): siRNA sense strand
ugucagagauggaugggcu

SEQ ID NO: 2664063 - RNA, 19 nt, Homo sapiens
  misc_RNA (1)...(19): siRNA sense strand
aaucaaaggagaccggcau

SEQ ID NO: 2664064 - RNA, 19 nt, Homo sapiens
  misc_RNA (1)...(19): siRNA sense strand
cuaaagggcaagaaccuga

SEQ ID NO: 2664065 - RNA, 19 nt, Homo sapiens
  misc_RNA (1)...(19): siRNA sense strand
ccaucauccuaaagggcaa

SEQ ID NO: 2664066 - RNA, 19 nt, Homo sapiens
  misc_RNA (1)...(19): siRNA sense strand
gccaaaagcaagugcacaa

SEQ ID NO: 2664067 - RNA, 19 nt, Homo sapiens
  misc_RNA (1)...(19): siRNA sense strand
augaggugcuagagaugaa

SEQ ID NO: 2664068 - RNA, 19 nt, Homo sapiens
  misc_RNA (1)...(19): siRNA sense strand
gagcauugucaguggaaac

SEQ ID NO: 2664069 - RNA, 19 nt, Homo sapiens
  misc_RNA (1)...(19): siRNA sense strand
ugguggugauguuuggaaa

SEQ ID NO: 2664070 - RNA, 19 nt, Homo sapiens
  misc_RNA (1)...(19): siRNA sense strand
ccggaucaucacagagaau

SEQ ID NO: 2664071 - RNA, 19 nt, Homo sapiens
  misc_RNA (1)...(19): siRNA sense strand
cagcucaaaucaaaggaga

SEQ ID NO: 2664072 - RNA, 19 nt, Homo sapiens
  misc_RNA (1)...(19): siRNA sense strand
aguugacagucguguggaa

SEQ ID NO: 2664073 - RNA, 19 nt, Homo sapiens
  misc_RNA (1)...(19): siRNA sense strand
cuaucacgcugaaggccaa

SEQ ID NO: 2664074 - RNA, 19 nt, Homo sapiens
  misc_RNA (1)...(19): siRNA sense strand
ccuaugaagggauggagau

SEQ ID NO: 2664075 - RNA, 19 nt, Homo sapiens
  misc_RNA (1)...(19): siRNA sense strand
agaugaaggugucggugca

SEQ ID NO: 2664076 - RNA, 19 nt, Homo sapiens
  misc_RNA (1)...(19): siRNA sense strand
gggccaagauccaccagga

SEQ ID NO: 2664077 - RNA, 19 nt, Homo sapiens
  misc_RNA (1)...(19): siRNA sense strand
augcaggcuucguggagau

SEQ ID NO: 2664078 - RNA, 19 nt, Homo sapiens
  misc_RNA (1)...(19): siRNA sense strand
cuacaaguguggagccaug

SEQ ID NO: 2664079 - RNA, 19 nt, Homo sapiens
  misc_RNA (1)...(19): siRNA sense strand
ugucagagauggaugggcu

SEQ ID NO: 2664080 - RNA, 19 nt, Homo sapiens
  misc_RNA (1)...(19): siRNA sense strand
aaucaaaggagaccggcau

SEQ ID NO: 2664081 - RNA, 19 nt, Homo sapiens
  misc_RNA (1)...(19): siRNA sense strand
cuaaagggcaagaaccuga

SEQ ID NO: 2664082 - RNA, 19 nt, Homo sapiens
  misc_RNA (1)...(19): siRNA sense strand
gcagagaauaggagaccaa

SEQ ID NO: 2664083 - RNA, 19 nt, Homo sapiens
  misc_RNA (1)...(19): siRNA sense strand
guucauagacugauggaga

SEQ ID NO: 2664084 - RNA, 19 nt, Homo sapiens
  misc_RNA (1)...(19): siRNA sense strand
ggccauaguaggaaagaga

SEQ ID NO: 2664085 - RNA, 19 nt, Homo sapiens
  misc_RNA (1)...(19): siRNA sense strand
uggagaaacgagagguuau

SEQ ID NO: 2664086 - RNA, 19 nt, Homo sapiens
  misc_RNA (1)...(19): siRNA sense strand
auggugugauugugggaaa

SEQ ID NO: 2664087 - RNA, 19 nt, Homo sapiens
  misc_RNA (1)...(19): siRNA sense strand
gagcaaagaaggaacagga

SEQ ID NO: 2664088 - RNA, 19 nt, Homo sapiens
  misc_RNA (1)...(19): siRNA sense strand
ccagaagagcaaagaagga

SEQ ID NO: 2664089 - RNA, 19 nt, Homo sapiens
  misc_RNA (1)...(19): siRNA sense strand
gcacaguugcuucgggaca

SEQ ID NO: 2664090 - RNA, 19 nt, Homo sapiens
  misc_RNA (1)...(19): siRNA sense strand
guuugagagugguaaucua

SEQ ID NO: 2664091 - RNA, 19 nt, Homo sapiens
  misc_RNA (1)...(19): siRNA sense strand
aaggaagacuauucagaca

SEQ ID NO: 2664092 - RNA, 19 nt, Homo sapiens
  misc_RNA (1)...(19): siRNA sense strand
ggaaaaugggaaucaggaa

SEQ ID NO: 2664093 - RNA, 19 nt, Homo sapiens
  misc_RNA (1)...(19): siRNA sense strand
cuucgugaaccaagggauu

SEQ ID NO: 2664094 - RNA, 19 nt, Homo sapiens
  misc_RNA (1)...(19): siRNA sense strand
aggaagcuacugugguuua

SEQ ID NO: 2664095 - RNA, 19 nt, Homo sapiens
  misc_RNA (1)...(19): siRNA sense strand
agucaaaguggcagaauac

SEQ ID NO: 2664096 - RNA, 19 nt, Homo sapiens
  misc_RNA (1)...(19): siRNA sense strand
caagaaagcggaaggcugu

SEQ ID NO: 2664097 - RNA, 19 nt, Homo sapiens
  misc_RNA (1)...(19): siRNA sense strand
agaauaucagcuagggaga

SEQ ID NO: 2664098 - RNA, 19 nt, Homo sapiens
  misc_RNA (1)...(19): siRNA sense strand
gugacagaucuaagacauu

SEQ ID NO: 2664099 - RNA, 19 nt, Homo sapiens
  misc_RNA (1)...(19): siRNA sense strand
agagaauaggagaccaaau

SEQ ID NO: 2664100 - RNA, 19 nt, Homo sapiens
  misc_RNA (1)...(19): siRNA sense strand
ucauagacugauggagaaa

SEQ ID NO: 2664101 - RNA, 19 nt, Homo sapiens
  misc_RNA (1)...(19): siRNA sense strand
cagaagagcaaagaaggaa

SEQ ID NO: 2664102 - RNA, 19 nt, Homo sapiens
  misc_RNA (1)...(19): siRNA sense strand
ccauaguaggaaagagaac

SEQ ID NO: 2664103 - RNA, 19 nt, Homo sapiens
  misc_RNA (1)...(19): siRNA sense strand
ggaacaggaagggugguaa

SEQ ID NO: 2664104 - RNA, 19 nt, Homo sapiens
  misc_RNA (1)...(19): siRNA sense strand
accuggaaucaaugggaua

SEQ ID NO: 2664105 - RNA, 19 nt, Homo sapiens
  misc_RNA (1)...(19): siRNA sense strand
gauggagaaacgagagguu

SEQ ID NO: 2664106 - RNA, 19 nt, Homo sapiens
  misc_RNA (1)...(19): siRNA sense strand
gaugguagugacagaucua

SEQ ID NO: 2664107 - RNA, 19 nt, Homo sapiens
  misc_RNA (1)...(19): siRNA sense strand
agaagaaauggaaagacau

SEQ ID NO: 2664108 - RNA, 19 nt, Homo sapiens
  misc_RNA (1)...(19): siRNA sense strand
ggguaacaaacgaggcacu

SEQ ID NO: 2664109 - RNA, 19 nt, Homo sapiens
  misc_RNA (1)...(19): siRNA sense strand
guggaucuacucuggguaa

SEQ ID NO: 2664110 - RNA, 19 nt, Homo sapiens
  misc_RNA (1)...(19): siRNA sense strand
cuuugaggauucagacaca

SEQ ID NO: 2664111 - RNA, 19 nt, Homo sapiens
  misc_RNA (1)...(19): siRNA sense strand
agcugaagaugcuuacaaa

SEQ ID NO: 2664112 - RNA, 19 nt, Homo sapiens
  misc_RNA (1)...(19): siRNA sense strand
agugacagaucuaagacau

SEQ ID NO: 2664113 - RNA, 19 nt, Homo sapiens
  misc_RNA (1)...(19): siRNA sense strand
gcaagguuugagaguggua

SEQ ID NO: 2664114 - RNA, 19 nt, Homo sapiens
  misc_RNA (1)...(19): siRNA sense strand
acgaauaccaauugacugu

SEQ ID NO: 2664115 - RNA, 19 nt, Homo sapiens
  misc_RNA (1)...(19): siRNA sense strand
cuaauaugcgagcaggaau

SEQ ID NO: 2664116 - RNA, 19 nt, Homo sapiens
  misc_RNA (1)...(19): siRNA sense strand
uaucggugccugaaagaau

SEQ ID NO: 2664117 - RNA, 19 nt, Homo sapiens
  misc_RNA (1)...(19): siRNA sense strand
gccugaaagaauuagaaga

SEQ ID NO: 2664118 - RNA, 19 nt, Homo sapiens
  misc_RNA (1)...(19): siRNA sense strand
aagcaagguuugagagugg

SEQ ID NO: 2664119 - RNA, 19 nt, Homo sapiens
  misc_RNA (1)...(19): siRNA sense strand
cuucauggccauaguagga

SEQ ID NO: 2664120 - RNA, 19 nt, Homo sapiens
  misc_RNA (1)...(19): siRNA sense strand
uuaauguccagaagagcaa

SEQ ID NO: 2664121 - RNA, 19 nt, Homo sapiens
  misc_RNA (1)...(19): siRNA sense strand
auucagaaaaggaagacua

SEQ ID NO: 2664122 - RNA, 19 nt, Homo sapiens
  misc_RNA (1)...(19): siRNA sense strand
auaaacacacccaguggua

SEQ ID NO: 2664123 - RNA, 19 nt, Homo sapiens
  misc_RNA (1)...(19): siRNA sense strand
gcaaagaaggaacaggaag

SEQ ID NO: 2664124 - RNA, 19 nt, Homo sapiens
  misc_RNA (1)...(19): siRNA sense strand
cuacaaggauaaaggaaua

SEQ ID NO: 2664125 - RNA, 19 nt, Homo sapiens
  misc_RNA (1)...(19): siRNA sense strand
ggauaaaggaauaguucaa

SEQ ID NO: 2664126 - RNA, 19 nt, Homo sapiens
  misc_RNA (1)...(19): siRNA sense strand
caagaaaucucaagucaaa

SEQ ID NO: 2664127 - RNA, 19 nt, Homo sapiens
  misc_RNA (1)...(19): siRNA sense strand
gcagagaauaggagaccaa

SEQ ID NO: 2664128 - RNA, 19 nt, Homo sapiens
  misc_RNA (1)...(19): siRNA sense strand
guucauagacugauggaga

SEQ ID NO: 2664129 - RNA, 19 nt, Homo sapiens
  misc_RNA (1)...(19): siRNA sense strand
aaaagaagcuacaaggaua

SEQ ID NO: 2664130 - RNA, 19 nt, Homo sapiens
  misc_RNA (1)...(19): siRNA sense strand
gcuacaaggauaaaggaau

SEQ ID NO: 2664131 - RNA, 19 nt, Homo sapiens
  misc_RNA (1)...(19): siRNA sense strand
ggccauaguaggaaagaga

SEQ ID NO: 2664132 - RNA, 19 nt, Homo sapiens
  misc_RNA (1)...(19): siRNA sense strand
aaagaagcuacaaggauaa

SEQ ID NO: 2664133 - RNA, 19 nt, Homo sapiens
  misc_RNA (1)...(19): siRNA sense strand
uggagaaacgagagguuau

SEQ ID NO: 2664134 - RNA, 19 nt, Homo sapiens
  misc_RNA (1)...(19): siRNA sense strand
auggugugauugugggaaa

SEQ ID NO: 2664135 - RNA, 19 nt, Homo sapiens
  misc_RNA (1)...(19): siRNA sense strand
gagcaaagaaggaacagga

SEQ ID NO: 2664136 - RNA, 19 nt, Homo sapiens
  misc_RNA (1)...(19): siRNA sense strand
cucaagaaauauugcagua

SEQ ID NO: 2664137 - RNA, 19 nt, Homo sapiens
  misc_RNA (1)...(19): siRNA sense strand
gcaagaagacuggcauaaa

SEQ ID NO: 2664138 - RNA, 19 nt, Homo sapiens
  misc_RNA (1)...(19): siRNA sense strand
caagaagacuggcauaaau

SEQ ID NO: 2664139 - RNA, 19 nt, Homo sapiens
  misc_RNA (1)...(19): siRNA sense strand
ccagaagagcaaagaagga

SEQ ID NO: 2664140 - RNA, 19 nt, Homo sapiens
  misc_RNA (1)...(19): siRNA sense strand
augcaaaccacucagauaa

SEQ ID NO: 2664141 - RNA, 19 nt, Homo sapiens
  misc_RNA (1)...(19): siRNA sense strand
caugcaaaccacucagaua

SEQ ID NO: 2664142 - RNA, 19 nt, Homo sapiens
  misc_RNA (1)...(19): siRNA sense strand
gcacaguugcuucgggaca

SEQ ID NO: 2664143 - RNA, 19 nt, Homo sapiens
  misc_RNA (1)...(19): siRNA sense strand
acaagaaaucucaagucaa

SEQ ID NO: 2664144 - RNA, 19 nt, Homo sapiens
  misc_RNA (1)...(19): siRNA sense strand
guuugagagugguaaucua

SEQ ID NO: 2664145 - RNA, 19 nt, Homo sapiens
  misc_RNA (1)...(19): siRNA sense strand
aaggaagacuauucagaca

SEQ ID NO: 2664146 - RNA, 19 nt, Homo sapiens
  misc_RNA (1)...(19): siRNA sense strand
ggaaaaugggaaucaggaa

SEQ ID NO: 2664147 - RNA, 19 nt, Homo sapiens
  misc_RNA (1)...(19): siRNA sense strand
ggaaaagaugucagaagau

SEQ ID NO: 2664148 - RNA, 19 nt, Homo sapiens
  misc_RNA (1)...(19): siRNA sense strand
agaauaucagcuagggaga

SEQ ID NO: 2664149 - RNA, 19 nt, Homo sapiens
  misc_RNA (1)...(19): siRNA sense strand
cuucgugaaccaagggauu

SEQ ID NO: 2664150 - RNA, 19 nt, Homo sapiens
  misc_RNA (1)...(19): siRNA sense strand
aggaagcuacugugguuua

SEQ ID NO: 2664151 - RNA, 19 nt, Homo sapiens
  misc_RNA (1)...(19): siRNA sense strand
agucaaaguggcagaauac

SEQ ID NO: 2664152 - RNA, 19 nt, Homo sapiens
  misc_RNA (1)...(19): siRNA sense strand
caagaaagcggaaggcugu

SEQ ID NO: 2664153 - RNA, 19 nt, Homo sapiens
  misc_RNA (1)...(19): siRNA sense strand
uggaaaagaugucagaaga

SEQ ID NO: 2664154 - RNA, 19 nt, Homo sapiens
  misc_RNA (1)...(19): siRNA sense strand
gugacagaucuaagacauu

SEQ ID NO: 2664155 - RNA, 19 nt, Homo sapiens
  misc_RNA (1)...(19): siRNA sense strand
ccaagaaccaacuuccaaa

SEQ ID NO: 2664156 - RNA, 19 nt, Homo sapiens
  misc_RNA (1)...(19): siRNA sense strand
ccguauauuacaagaaauc

SEQ ID NO: 2664157 - RNA, 19 nt, Homo sapiens
  misc_RNA (1)...(19): siRNA sense strand
agagaauaggagaccaaau

SEQ ID NO: 2664158 - RNA, 19 nt, Homo sapiens
  misc_RNA (1)...(19): siRNA sense strand
ucauagacugauggagaaa

SEQ ID NO: 2664159 - RNA, 19 nt, Homo sapiens
  misc_RNA (1)...(19): siRNA sense strand
cagaagagcaaagaaggaa

SEQ ID NO: 2664160 - RNA, 19 nt, Homo sapiens
  misc_RNA (1)...(19): siRNA sense strand
ugucagaagauucagaaaa

SEQ ID NO: 2664161 - RNA, 19 nt, Homo sapiens
  misc_RNA (1)...(19): siRNA sense strand
ccauaguaggaaagagaac

SEQ ID NO: 2664162 - RNA, 19 nt, Homo sapiens
  misc_RNA (1)...(19): siRNA sense strand
ggaacaggaagggugguaa

SEQ ID NO: 2664163 - RNA, 19 nt, Homo sapiens
  misc_RNA (1)...(19): siRNA sense strand
accuggaaucaaugggaua

SEQ ID NO: 2664164 - RNA, 19 nt, Homo sapiens
  misc_RNA (1)...(19): siRNA sense strand
ggcauaaauuggacagaug

SEQ ID NO: 2664165 - RNA, 19 nt, Homo sapiens
  misc_RNA (1)...(19): siRNA sense strand
gauggagaaacgagagguu

SEQ ID NO: 2664166 - RNA, 19 nt, Homo sapiens
  misc_RNA (1)...(19): siRNA sense strand
gaugguagugacagaucua

SEQ ID NO: 2664167 - RNA, 19 nt, Homo sapiens
  misc_RNA (1)...(19): siRNA sense strand
agaagaaauggaaagacau

SEQ ID NO: 2664168 - RNA, 19 nt, Homo sapiens
  misc_RNA (1)...(19): siRNA sense strand
ggguaacaaacgaggcacu

SEQ ID NO: 2664169 - RNA, 19 nt, Homo sapiens
  misc_RNA (1)...(19): siRNA sense strand
guggaucuacucuggguaa

SEQ ID NO: 2664170 - RNA, 19 nt, Homo sapiens
  misc_RNA (1)...(19): siRNA sense strand
cuuugaggauucagacaca

SEQ ID NO: 2664171 - RNA, 19 nt, Homo sapiens
  misc_RNA (1)...(19): siRNA sense strand
gcauaaauuggacagauga

SEQ ID NO: 2664172 - RNA, 19 nt, Homo sapiens
  misc_RNA (1)...(19): siRNA sense strand
agcugaagaugcuuacaaa

SEQ ID NO: 2664173 - RNA, 19 nt, Homo sapiens
  misc_RNA (1)...(19): siRNA sense strand
agugacagaucuaagacau

SEQ ID NO: 2664174 - RNA, 19 nt, Homo sapiens
  misc_RNA (1)...(19): siRNA sense strand
gcaagguuugagaguggua

SEQ ID NO: 2664175 - RNA, 19 nt, Homo sapiens
  misc_RNA (1)...(19): siRNA sense strand
acgaauaccaauugacugu

SEQ ID NO: 2664176 - RNA, 19 nt, Homo sapiens
  misc_RNA (1)...(19): siRNA sense strand
cuaauaugcgagcaggaau

SEQ ID NO: 2664177 - RNA, 19 nt, Homo sapiens
  misc_RNA (1)...(19): siRNA sense strand
uaucggugccugaaagaau

SEQ ID NO: 2664178 - RNA, 19 nt, Homo sapiens
  misc_RNA (1)...(19): siRNA sense strand
gccugaaagaauuagaaga

SEQ ID NO: 2664179 - RNA, 19 nt, Homo sapiens
  misc_RNA (1)...(19): siRNA sense strand
agcaagaagacuggcauaa

SEQ ID NO: 2664180 - RNA, 19 nt, Homo sapiens
  misc_RNA (1)...(19): siRNA sense strand
aagaagacuggcauaaauu

SEQ ID NO: 2664181 - RNA, 19 nt, Homo sapiens
  misc_RNA (1)...(19): siRNA sense strand
gaaccaacuuccaaaucca

SEQ ID NO: 2664182 - RNA, 19 nt, Homo sapiens
  misc_RNA (1)...(19): siRNA sense strand
aagcaagguuugagagugg

SEQ ID NO: 2664183 - RNA, 19 nt, Homo sapiens
  misc_RNA (1)...(19): siRNA sense strand
cuucauggccauaguagga

SEQ ID NO: 2664184 - RNA, 19 nt, Homo sapiens
  misc_RNA (1)...(19): siRNA sense strand
gaaaagaugucagaagauu

SEQ ID NO: 2664185 - RNA, 19 nt, Homo sapiens
  misc_RNA (1)...(19): siRNA sense strand
uuaauguccagaagagcaa

SEQ ID NO: 2664186 - RNA, 19 nt, Homo sapiens
  misc_RNA (1)...(19): siRNA sense strand
auaaacacacccaguggua

SEQ ID NO: 2664187 - RNA, 19 nt, Homo sapiens
  misc_RNA (1)...(19): siRNA sense strand
gcaaagaaggaacaggaag

SEQ ID NO: 2664188 - RNA, 19 nt, Homo sapiens
  misc_RNA (1)...(19): siRNA sense strand
gggaaaugcucuuuggaga

SEQ ID NO: 2664189 - RNA, 19 nt, Homo sapiens
  misc_RNA (1)...(19): siRNA sense strand
agauaaaguugguuggaga

SEQ ID NO: 2664190 - RNA, 19 nt, Homo sapiens
  misc_RNA (1)...(19): siRNA sense strand
acgauaauguggagggaga

SEQ ID NO: 2664191 - RNA, 19 nt, Homo sapiens
  misc_RNA (1)...(19): siRNA sense strand
ggaacuacaaggagaagaa

SEQ ID NO: 2664192 - RNA, 19 nt, Homo sapiens
  misc_RNA (1)...(19): siRNA sense strand
aagaaaaccaugugggaaa

SEQ ID NO: 2664193 - RNA, 19 nt, Homo sapiens
  misc_RNA (1)...(19): siRNA sense strand
ucaauagagcuaaggguaa

SEQ ID NO: 2664194 - RNA, 19 nt, Homo sapiens
  misc_RNA (1)...(19): siRNA sense strand
aggcagauaaugugguaaa

SEQ ID NO: 2664195 - RNA, 19 nt, Homo sapiens
  misc_RNA (1)...(19): siRNA sense strand
gagaagaaaucauagccua

SEQ ID NO: 2664196 - RNA, 19 nt, Homo sapiens
  misc_RNA (1)...(19): siRNA sense strand
gagugacaguugaggcuaa

SEQ ID NO: 2664197 - RNA, 19 nt, Homo sapiens
  misc_RNA (1)...(19): siRNA sense strand
gugaagaugcagaagaauu

SEQ ID NO: 2664198 - RNA, 19 nt, Homo sapiens
  misc_RNA (1)...(19): siRNA sense strand
gaaaggaacggaagggaga

SEQ ID NO: 2664199 - RNA, 19 nt, Homo sapiens
  misc_RNA (1)...(19): siRNA sense strand
cugaagauguauuuagcaa

SEQ ID NO: 2664200 - RNA, 19 nt, Homo sapiens
  misc_RNA (1)...(19): siRNA sense strand
agauggugaaggaggaaua

SEQ ID NO: 2664201 - RNA, 19 nt, Homo sapiens
  misc_RNA (1)...(19): siRNA sense strand
gaaacuacagcgagagaga

SEQ ID NO: 2664202 - RNA, 19 nt, Homo sapiens
  misc_RNA (1)...(19): siRNA sense strand
uggccuuaccagaggauua

SEQ ID NO: 2664203 - RNA, 19 nt, Homo sapiens
  misc_RNA (1)...(19): siRNA sense strand
ggacauuuggaaagaguga

SEQ ID NO: 2664204 - RNA, 19 nt, Homo sapiens
  misc_RNA (1)...(19): siRNA sense strand
uggaaaaucuccugaaauu

SEQ ID NO: 2664205 - RNA, 19 nt, Homo sapiens
  misc_RNA (1)...(19): siRNA sense strand
agagcaaagcacagaggaa

SEQ ID NO: 2664206 - RNA, 19 nt, Homo sapiens
  misc_RNA (1)...(19): siRNA sense strand
ccagaguauaagucagaaa

SEQ ID NO: 2664207 - RNA, 19 nt, Homo sapiens
  misc_RNA (1)...(19): siRNA sense strand
ggaagagggaucagaacuu

SEQ ID NO: 2664208 - RNA, 19 nt, Homo sapiens
  misc_RNA (1)...(19): siRNA sense strand
gaauugucuccguggauaa

SEQ ID NO: 2664209 - RNA, 19 nt, Homo sapiens
  misc_RNA (1)...(19): siRNA sense strand
gagacuagcucaaugccaa

SEQ ID NO: 2664210 - RNA, 19 nt, Homo sapiens
  misc_RNA (1)...(19): siRNA sense strand
uaauggagcuacagggaca

SEQ ID NO: 2664211 - RNA, 19 nt, Homo sapiens
  misc_RNA (1)...(19): siRNA sense strand
cuguagugguaucagaaua

SEQ ID NO: 2664212 - RNA, 19 nt, Homo sapiens
  misc_RNA (1)...(19): siRNA sense strand
aggugaaacagcugaggaa

SEQ ID NO: 2664213 - RNA, 19 nt, Homo sapiens
  misc_RNA (1)...(19): siRNA sense strand
agaaggagcaagauggauu

SEQ ID NO: 2664214 - RNA, 19 nt, Homo sapiens
  misc_RNA (1)...(19): siRNA sense strand
aagcaagaaagaugagauu

SEQ ID NO: 2664215 - RNA, 19 nt, Homo sapiens
  misc_RNA (1)...(19): siRNA sense strand
uugugaagaugcagaagaa

SEQ ID NO: 2664216 - RNA, 19 nt, Homo sapiens
  misc_RNA (1)...(19): siRNA sense strand
gcucaaagucaaugguagu

SEQ ID NO: 2664217 - RNA, 19 nt, Homo sapiens
  misc_RNA (1)...(19): siRNA sense strand
acaagauccaggaguguua

SEQ ID NO: 2664218 - RNA, 19 nt, Homo sapiens
  misc_RNA (1)...(19): siRNA sense strand
uugagaaacuacagcgaga

SEQ ID NO: 2664219 - RNA, 19 nt, Homo sapiens
  misc_RNA (1)...(19): siRNA sense strand
augauaagauacuggauga

SEQ ID NO: 2664220 - RNA, 19 nt, Homo sapiens
  misc_RNA (1)...(19): siRNA sense strand
uggugaaggugaucaacaa

SEQ ID NO: 2664221 - RNA, 19 nt, Homo sapiens
  misc_RNA (1)...(19): siRNA sense strand
ccuugaaagccuugauaca

SEQ ID NO: 2664222 - RNA, 19 nt, Homo sapiens
  misc_RNA (1)...(19): siRNA sense strand
gcaugagaagguucagaaa

SEQ ID NO: 2664223 - RNA, 19 nt, Homo sapiens
  misc_RNA (1)...(19): siRNA sense strand
cuuagaagcagccaagaaa

SEQ ID NO: 2664224 - RNA, 19 nt, Homo sapiens
  misc_RNA (1)...(19): siRNA sense strand
cacaagaguggcaaagaua

SEQ ID NO: 2664225 - RNA, 19 nt, Homo sapiens
  misc_RNA (1)...(19): siRNA sense strand
ugaguaugcagauggguaa

SEQ ID NO: 2664226 - RNA, 19 nt, Homo sapiens
  misc_RNA (1)...(19): siRNA sense strand
gaggaauagaagaugaaaa

SEQ ID NO: 2664227 - RNA, 19 nt, Homo sapiens
  misc_RNA (1)...(19): siRNA sense strand
gcgccagugcuuaggacua

SEQ ID NO: 2664228 - RNA, 19 nt, Homo sapiens
  misc_RNA (1)...(19): siRNA sense strand
cugcugaaacagagugcua

SEQ ID NO: 2664229 - RNA, 19 nt, Homo sapiens
  misc_RNA (1)...(19): siRNA sense strand
ccuuagaagcagccaagaa

SEQ ID NO: 2664230 - RNA, 19 nt, Homo sapiens
  misc_RNA (1)...(19): siRNA sense strand
cagaugagcugauggagca

SEQ ID NO: 2664231 - RNA, 19 nt, Homo sapiens
  misc_RNA (1)...(19): siRNA sense strand
cagaauucacagaggcaga

SEQ ID NO: 2664232 - RNA, 19 nt, Homo sapiens
  misc_RNA (1)...(19): siRNA sense strand
aaggcaagcuauugguauu

SEQ ID NO: 2664233 - RNA, 19 nt, Homo sapiens
  misc_RNA (1)...(19): siRNA sense strand
ugaaggaggaauagaagau

SEQ ID NO: 2664234 - RNA, 19 nt, Homo sapiens
  misc_RNA (1)...(19): siRNA sense strand
gauaauguggagggagaua

SEQ ID NO: 2664235 - RNA, 19 nt, Homo sapiens
  misc_RNA (1)...(19): siRNA sense strand
gaggcaacuaguagaaauu

SEQ ID NO: 2664236 - RNA, 19 nt, Homo sapiens
  misc_RNA (1)...(19): siRNA sense strand
agucaaugguaguagucau

SEQ ID NO: 2664237 - RNA, 19 nt, Homo sapiens
  misc_RNA (1)...(19): siRNA sense strand
ggaugaugaagcugcgcaa

SEQ ID NO: 2664238 - RNA, 19 nt, Homo sapiens
  misc_RNA (1)...(19): siRNA sense strand
aucauuacuuggagugaaa

SEQ ID NO: 2664239 - RNA, 19 nt, Homo sapiens
  misc_RNA (1)...(19): siRNA sense strand
cuauaagccaccuggauuu

SEQ ID NO: 2664240 - RNA, 19 nt, Homo sapiens
  misc_RNA (1)...(19): siRNA sense strand
cagaagaauuuguacgucu

SEQ ID NO: 2664241 - RNA, 19 nt, Homo sapiens
  misc_RNA (1)...(19): siRNA sense strand
ugugguaggaagaaauaaa

SEQ ID NO: 2664242 - RNA, 19 nt, Homo sapiens
  misc_RNA (1)...(19): siRNA sense strand
agcaaauuacagcgagaaa

SEQ ID NO: 2664243 - RNA, 19 nt, Homo sapiens
  misc_RNA (1)...(19): siRNA sense strand
aaacauugccagauaccua

SEQ ID NO: 2664244 - RNA, 19 nt, Homo sapiens
  misc_RNA (1)...(19): siRNA sense strand
cuggauuuguggaguguuu

SEQ ID NO: 2664245 - RNA, 19 nt, Homo sapiens
  misc_RNA (1)...(19): siRNA sense strand
agaugugcaugauaagaua

SEQ ID NO: 2664246 - RNA, 19 nt, Homo sapiens
  misc_RNA (1)...(19): siRNA sense strand
ggaugacaugccagugaaa

SEQ ID NO: 2664247 - RNA, 19 nt, Homo sapiens
  misc_RNA (1)...(19): siRNA sense strand
cagaugaagcaauggcaga

SEQ ID NO: 2664248 - RNA, 19 nt, Homo sapiens
  misc_RNA (1)...(19): siRNA sense strand
ugguauugagguugaacua

SEQ ID NO: 2664249 - RNA, 19 nt, Homo sapiens
  misc_RNA (1)...(19): siRNA sense strand
uggcaauacuaauccagaa

SEQ ID NO: 2664250 - RNA, 19 nt, Homo sapiens
  misc_RNA (1)...(19): siRNA sense strand
aggaggaauagaagaugaa

SEQ ID NO: 2664251 - RNA, 19 nt, Homo sapiens
  misc_RNA (1)...(19): siRNA sense strand
caagaguggcaaagauaca

SEQ ID NO: 2664252 - RNA, 19 nt, Homo sapiens
  misc_RNA (1)...(19): siRNA sense strand
gggaaaugcucuuuggaga

SEQ ID NO: 2664253 - RNA, 19 nt, Homo sapiens
  misc_RNA (1)...(19): siRNA sense strand
agauaaaguugguuggaga

SEQ ID NO: 2664254 - RNA, 19 nt, Homo sapiens
  misc_RNA (1)...(19): siRNA sense strand
acgauaauguggagggaga

SEQ ID NO: 2664255 - RNA, 19 nt, Homo sapiens
  misc_RNA (1)...(19): siRNA sense strand
ggaacuacaaggagaagaa

SEQ ID NO: 2664256 - RNA, 19 nt, Homo sapiens
  misc_RNA (1)...(19): siRNA sense strand
aagaaaaccaugugggaaa

SEQ ID NO: 2664257 - RNA, 19 nt, Homo sapiens
  misc_RNA (1)...(19): siRNA sense strand
ucaauagagcuaaggguaa

SEQ ID NO: 2664258 - RNA, 19 nt, Homo sapiens
  misc_RNA (1)...(19): siRNA sense strand
aggcagauaaugugguaaa

SEQ ID NO: 2664259 - RNA, 19 nt, Homo sapiens
  misc_RNA (1)...(19): siRNA sense strand
gagaagaaaucauagccua

SEQ ID NO: 2664260 - RNA, 19 nt, Homo sapiens
  misc_RNA (1)...(19): siRNA sense strand
gagugacaguugaggcuaa

SEQ ID NO: 2664261 - RNA, 19 nt, Homo sapiens
  misc_RNA (1)...(19): siRNA sense strand
gugaagaugcagaagaauu

SEQ ID NO: 2664262 - RNA, 19 nt, Homo sapiens
  misc_RNA (1)...(19): siRNA sense strand
gaaaggaacggaagggaga

SEQ ID NO: 2664263 - RNA, 19 nt, Homo sapiens
  misc_RNA (1)...(19): siRNA sense strand
cugaagauguauuuagcaa

SEQ ID NO: 2664264 - RNA, 19 nt, Homo sapiens
  misc_RNA (1)...(19): siRNA sense strand
agauggugaaggaggaaua

SEQ ID NO: 2664265 - RNA, 19 nt, Homo sapiens
  misc_RNA (1)...(19): siRNA sense strand
gaaacuacagcgagagaga

SEQ ID NO: 2664266 - RNA, 19 nt, Homo sapiens
  misc_RNA (1)...(19): siRNA sense strand
uggccuuaccagaggauua

SEQ ID NO: 2664267 - RNA, 19 nt, Homo sapiens
  misc_RNA (1)...(19): siRNA sense strand
ggacauuuggaaagaguga

SEQ ID NO: 2664268 - RNA, 19 nt, Homo sapiens
  misc_RNA (1)...(19): siRNA sense strand
uggaaaaucuccugaaauu

SEQ ID NO: 2664269 - RNA, 19 nt, Homo sapiens
  misc_RNA (1)...(19): siRNA sense strand
agagcaaagcacagaggaa

SEQ ID NO: 2664270 - RNA, 19 nt, Homo sapiens
  misc_RNA (1)...(19): siRNA sense strand
ccagaguauaagucagaaa

SEQ ID NO: 2664271 - RNA, 19 nt, Homo sapiens
  misc_RNA (1)...(19): siRNA sense strand
ggaagagggaucagaacuu

SEQ ID NO: 2664272 - RNA, 19 nt, Homo sapiens
  misc_RNA (1)...(19): siRNA sense strand
gaauugucuccguggauaa

SEQ ID NO: 2664273 - RNA, 19 nt, Homo sapiens
  misc_RNA (1)...(19): siRNA sense strand
gagacuagcucaaugccaa

SEQ ID NO: 2664274 - RNA, 19 nt, Homo sapiens
  misc_RNA (1)...(19): siRNA sense strand
uaauggagcuacagggaca

SEQ ID NO: 2664275 - RNA, 19 nt, Homo sapiens
  misc_RNA (1)...(19): siRNA sense strand
cuguagugguaucagaaua

SEQ ID NO: 2664276 - RNA, 19 nt, Homo sapiens
  misc_RNA (1)...(19): siRNA sense strand
aggugaaacagcugaggaa

SEQ ID NO: 2664277 - RNA, 19 nt, Homo sapiens
  misc_RNA (1)...(19): siRNA sense strand
agaaggagcaagauggauu

SEQ ID NO: 2664278 - RNA, 19 nt, Homo sapiens
  misc_RNA (1)...(19): siRNA sense strand
aagcaagaaagaugagauu

SEQ ID NO: 2664279 - RNA, 19 nt, Homo sapiens
  misc_RNA (1)...(19): siRNA sense strand
uugugaagaugcagaagaa

SEQ ID NO: 2664280 - RNA, 19 nt, Homo sapiens
  misc_RNA (1)...(19): siRNA sense strand
gcucaaagucaaugguagu

SEQ ID NO: 2664281 - RNA, 19 nt, Homo sapiens
  misc_RNA (1)...(19): siRNA sense strand
acaagauccaggaguguua

SEQ ID NO: 2664282 - RNA, 19 nt, Homo sapiens
  misc_RNA (1)...(19): siRNA sense strand
uugagaaacuacagcgaga

SEQ ID NO: 2664283 - RNA, 19 nt, Homo sapiens
  misc_RNA (1)...(19): siRNA sense strand
augauaagauacuggauga

SEQ ID NO: 2664284 - RNA, 19 nt, Homo sapiens
  misc_RNA (1)...(19): siRNA sense strand
uggugaaggugaucaacaa

SEQ ID NO: 2664285 - RNA, 19 nt, Homo sapiens
  misc_RNA (1)...(19): siRNA sense strand
ccuugaaagccuugauaca

SEQ ID NO: 2664286 - RNA, 19 nt, Homo sapiens
  misc_RNA (1)...(19): siRNA sense strand
gcaugagaagguucagaaa

SEQ ID NO: 2664287 - RNA, 19 nt, Homo sapiens
  misc_RNA (1)...(19): siRNA sense strand
cuuagaagcagccaagaaa

SEQ ID NO: 2664288 - RNA, 19 nt, Homo sapiens
  misc_RNA (1)...(19): siRNA sense strand
cacaagaguggcaaagaua

SEQ ID NO: 2664289 - RNA, 19 nt, Homo sapiens
  misc_RNA (1)...(19): siRNA sense strand
ugaguaugcagauggguaa

SEQ ID NO: 2664290 - RNA, 19 nt, Homo sapiens
  misc_RNA (1)...(19): siRNA sense strand
gaggaauagaagaugaaaa

SEQ ID NO: 2664291 - RNA, 19 nt, Homo sapiens
  misc_RNA (1)...(19): siRNA sense strand
gcgccagugcuuaggacua

SEQ ID NO: 2664292 - RNA, 19 nt, Homo sapiens
  misc_RNA (1)...(19): siRNA sense strand
cugcugaaacagagugcua

SEQ ID NO: 2664293 - RNA, 19 nt, Homo sapiens
  misc_RNA (1)...(19): siRNA sense strand
ccuuagaagcagccaagaa

SEQ ID NO: 2664294 - RNA, 19 nt, Homo sapiens
  misc_RNA (1)...(19): siRNA sense strand
cagaugagcugauggagca

SEQ ID NO: 2664295 - RNA, 19 nt, Homo sapiens
  misc_RNA (1)...(19): siRNA sense strand
cagaauucacagaggcaga

SEQ ID NO: 2664296 - RNA, 19 nt, Homo sapiens
  misc_RNA (1)...(19): siRNA sense strand
aaggcaagcuauugguauu

SEQ ID NO: 2664297 - RNA, 19 nt, Homo sapiens
  misc_RNA (1)...(19): siRNA sense strand
ugaaggaggaauagaagau

SEQ ID NO: 2664298 - RNA, 19 nt, Homo sapiens
  misc_RNA (1)...(19): siRNA sense strand
gauaauguggagggagaua

SEQ ID NO: 2664299 - RNA, 19 nt, Homo sapiens
  misc_RNA (1)...(19): siRNA sense strand
gaggcaacuaguagaaauu

SEQ ID NO: 2664300 - RNA, 19 nt, Homo sapiens
  misc_RNA (1)...(19): siRNA sense strand
agucaaugguaguagucau

SEQ ID NO: 2664301 - RNA, 19 nt, Homo sapiens
  misc_RNA (1)...(19): siRNA sense strand
ggaugaugaagcugcgcaa

SEQ ID NO: 2664302 - RNA, 19 nt, Homo sapiens
  misc_RNA (1)...(19): siRNA sense strand
aucauuacuuggagugaaa

SEQ ID NO: 2664303 - RNA, 19 nt, Homo sapiens
  misc_RNA (1)...(19): siRNA sense strand
cuauaagccaccuggauuu

SEQ ID NO: 2664304 - RNA, 19 nt, Homo sapiens
  misc_RNA (1)...(19): siRNA sense strand
cagaagaauuuguacgucu

SEQ ID NO: 2664305 - RNA, 19 nt, Homo sapiens
  misc_RNA (1)...(19): siRNA sense strand
ugugguaggaagaaauaaa

SEQ ID NO: 2664306 - RNA, 19 nt, Homo sapiens
  misc_RNA (1)...(19): siRNA sense strand
agcaaauuacagcgagaaa

SEQ ID NO: 2664307 - RNA, 19 nt, Homo sapiens
  misc_RNA (1)...(19): siRNA sense strand
aaacauugccagauaccua

SEQ ID NO: 2664308 - RNA, 19 nt, Homo sapiens
  misc_RNA (1)...(19): siRNA sense strand
cuggauuuguggaguguuu

SEQ ID NO: 2664309 - RNA, 19 nt, Homo sapiens
  misc_RNA (1)...(19): siRNA sense strand
agaugugcaugauaagaua

SEQ ID NO: 2664310 - RNA, 19 nt, Homo sapiens
  misc_RNA (1)...(19): siRNA sense strand
ggaugacaugccagugaaa

SEQ ID NO: 2664311 - RNA, 19 nt, Homo sapiens
  misc_RNA (1)...(19): siRNA sense strand
cagaugaagcaauggcaga

SEQ ID NO: 2664312 - RNA, 19 nt, Homo sapiens
  misc_RNA (1)...(19): siRNA sense strand
ugguauugagguugaacua

SEQ ID NO: 2664313 - RNA, 19 nt, Homo sapiens
  misc_RNA (1)...(19): siRNA sense strand
uggcaauacuaauccagaa

SEQ ID NO: 2664314 - RNA, 19 nt, Homo sapiens
  misc_RNA (1)...(19): siRNA sense strand
aggaggaauagaagaugaa

SEQ ID NO: 2664315 - RNA, 19 nt, Homo sapiens
  misc_RNA (1)...(19): siRNA sense strand
caagaguggcaaagauaca

SEQ ID NO: 2664316 - RNA, 19 nt, Homo sapiens
  misc_RNA (1)...(19): siRNA sense strand
gagucaaagccuagaagaa

SEQ ID NO: 2664317 - RNA, 19 nt, Homo sapiens
  misc_RNA (1)...(19): siRNA sense strand
cggcaauauccgucauaaa

SEQ ID NO: 2664318 - RNA, 19 nt, Homo sapiens
  misc_RNA (1)...(19): siRNA sense strand
ugucgaggcuggagggaga

SEQ ID NO: 2664319 - RNA, 19 nt, Homo sapiens
  misc_RNA (1)...(19): siRNA sense strand
ccauggagcucgugcugaa

SEQ ID NO: 2664320 - RNA, 19 nt, Homo sapiens
  misc_RNA (1)...(19): siRNA sense strand
cagccaucaucuuggguua

SEQ ID NO: 2664321 - RNA, 19 nt, Homo sapiens
  misc_RNA (1)...(19): siRNA sense strand
ucucugaauuugaggaaga

SEQ ID NO: 2664322 - RNA, 19 nt, Homo sapiens
  misc_RNA (1)...(19): siRNA sense strand
caggaagagcucacggaua

SEQ ID NO: 2664323 - RNA, 19 nt, Homo sapiens
  misc_RNA (1)...(19): siRNA sense strand
agucaaagccuagaagaaa

SEQ ID NO: 2664324 - RNA, 19 nt, Homo sapiens
  misc_RNA (1)...(19): siRNA sense strand
cgaccaaaucagugcucua

SEQ ID NO: 2664325 - RNA, 19 nt, Homo sapiens
  misc_RNA (1)...(19): siRNA sense strand
agugaagaguccagcgaga

SEQ ID NO: 2664326 - RNA, 19 nt, Homo sapiens
  misc_RNA (1)...(19): siRNA sense strand
gcacagaugcagaucgaca

SEQ ID NO: 2664327 - RNA, 19 nt, Homo sapiens
  misc_RNA (1)...(19): siRNA sense strand
cugaaguccucuuggguca

SEQ ID NO: 2664328 - RNA, 19 nt, Homo sapiens
  misc_RNA (1)...(19): siRNA sense strand
ucuucuagauccauggaaa

SEQ ID NO: 2664329 - RNA, 19 nt, Homo sapiens
  misc_RNA (1)...(19): siRNA sense strand
cggugcagaucuugaauau

SEQ ID NO: 2664330 - RNA, 19 nt, Homo sapiens
  misc_RNA (1)...(19): siRNA sense strand
cgucacagaggaagaguuu

SEQ ID NO: 2664331 - RNA, 19 nt, Homo sapiens
  misc_RNA (1)...(19): siRNA sense strand
gauacgaagacuauggaau

SEQ ID NO: 2664332 - RNA, 19 nt, Homo sapiens
  misc_RNA (1)...(19): siRNA sense strand
gcgcauugagaaaggccua

SEQ ID NO: 2664333 - RNA, 19 nt, Homo sapiens
  misc_RNA (1)...(19): siRNA sense strand
guguggugcaggugguaaa

SEQ ID NO: 2664334 - RNA, 19 nt, Homo sapiens
  misc_RNA (1)...(19): siRNA sense strand
cugcagaucccuaguguga

SEQ ID NO: 2664335 - RNA, 19 nt, Homo sapiens
  misc_RNA (1)...(19): siRNA sense strand
caguagauacgaagacuau

SEQ ID NO: 2664336 - RNA, 19 nt, Homo sapiens
  misc_RNA (1)...(19): siRNA sense strand
gcaguagauacgaagacua

SEQ ID NO: 2664337 - RNA, 19 nt, Homo sapiens
  misc_RNA (1)...(19): siRNA sense strand
ccuaacagaggguguggaa

SEQ ID NO: 2664338 - RNA, 19 nt, Homo sapiens
  misc_RNA (1)...(19): siRNA sense strand
aagccgagauggaacgcaa

SEQ ID NO: 2664339 - RNA, 19 nt, Homo sapiens
  misc_RNA (1)...(19): siRNA sense strand
ccggaaucccagagcaaca

SEQ ID NO: 2664340 - RNA, 19 nt, Homo sapiens
  misc_RNA (1)...(19): siRNA sense strand
aagcagaggcagccaguau

SEQ ID NO: 2664341 - RNA, 19 nt, Homo sapiens
  misc_RNA (1)...(19): siRNA sense strand
ccgccauauguuugugaua

SEQ ID NO: 2664342 - RNA, 19 nt, Homo sapiens
  misc_RNA (1)...(19): siRNA sense strand
gaguacaucauuacagcaa

SEQ ID NO: 2664343 - RNA, 19 nt, Homo sapiens
  misc_RNA (1)...(19): siRNA sense strand
caucauuacagcaaucaaa

SEQ ID NO: 2664344 - RNA, 19 nt, Homo sapiens
  misc_RNA (1)...(19): siRNA sense strand
uaacagaggguguggaaac

SEQ ID NO: 2664345 - RNA, 19 nt, Homo sapiens
  misc_RNA (1)...(19): siRNA sense strand
uggagaaagacgugggauc

SEQ ID NO: 2664346 - RNA, 19 nt, Homo sapiens
  misc_RNA (1)...(19): siRNA sense strand
agucugagaucgagcacca

SEQ ID NO: 2664347 - RNA, 19 nt, Homo sapiens
  misc_RNA (1)...(19): siRNA sense strand
gggaagcauuagaaccuau

SEQ ID NO: 2664348 - RNA, 19 nt, Homo sapiens
  misc_RNA (1)...(19): siRNA sense strand
ccagaagagcugugcagga

SEQ ID NO: 2664349 - RNA, 19 nt, Homo sapiens
  misc_RNA (1)...(19): siRNA sense strand
cuucaaccgugcaguggaa

SEQ ID NO: 2664350 - RNA, 19 nt, Homo sapiens
  misc_RNA (1)...(19): siRNA sense strand
acaguaagcuuguccguga

SEQ ID NO: 2664351 - RNA, 19 nt, Homo sapiens
  misc_RNA (1)...(19): siRNA sense strand
gcggaaagcaauaaaauca

SEQ ID NO: 2664352 - RNA, 19 nt, Homo sapiens
  misc_RNA (1)...(19): siRNA sense strand
cuucuagauccauggaaau

SEQ ID NO: 2664353 - RNA, 19 nt, Homo sapiens
  misc_RNA (1)...(19): siRNA sense strand
cgagagggacgcaggagau

SEQ ID NO: 2664354 - RNA, 19 nt, Homo sapiens
  misc_RNA (1)...(19): siRNA sense strand
augacgaugagauggauaa

SEQ ID NO: 2664355 - RNA, 19 nt, Homo sapiens
  misc_RNA (1)...(19): siRNA sense strand
ggaaaacagaccaaaagua

SEQ ID NO: 2664356 - RNA, 19 nt, Homo sapiens
  misc_RNA (1)...(19): siRNA sense strand
cacccagcgcauugagaaa

SEQ ID NO: 2664357 - RNA, 19 nt, Homo sapiens
  misc_RNA (1)...(19): siRNA sense strand
ucuaaugaguagcgucgua

SEQ ID NO: 2664358 - RNA, 19 nt, Homo sapiens
  misc_RNA (1)...(19): siRNA sense strand
agagacgaguguuggcauu

SEQ ID NO: 2664359 - RNA, 19 nt, Homo sapiens
  misc_RNA (1)...(19): siRNA sense strand
agaaggcggauguggagaa

SEQ ID NO: 2664360 - RNA, 19 nt, Homo sapiens
  misc_RNA (1)...(19): siRNA sense strand
caaggaaaacagaccaaaa

SEQ ID NO: 2664361 - RNA, 19 nt, Homo sapiens
  misc_RNA (1)...(19): siRNA sense strand
acuccagaaugaaguguuu

SEQ ID NO: 2664362 - RNA, 19 nt, Homo sapiens
  misc_RNA (1)...(19): siRNA sense strand
ggaggaucaagauggagaa

SEQ ID NO: 2664363 - RNA, 19 nt, Homo sapiens
  misc_RNA (1)...(19): siRNA sense strand
ggcacaagucugagaucga

SEQ ID NO: 2664364 - RNA, 19 nt, Homo sapiens
  misc_RNA (1)...(19): siRNA sense strand
gaccaaaaguacagcagau

SEQ ID NO: 2664365 - RNA, 19 nt, Homo sapiens
  misc_RNA (1)...(19): siRNA sense strand
ccgaauucaaggugucauu

SEQ ID NO: 2664366 - RNA, 19 nt, Homo sapiens
  misc_RNA (1)...(19): siRNA sense strand
ucccaagccucgccggaaa

SEQ ID NO: 2664367 - RNA, 19 nt, Homo sapiens
  misc_RNA (1)...(19): siRNA sense strand
gcuuacagucauuuaucaa

SEQ ID NO: 2664368 - RNA, 19 nt, Homo sapiens
  misc_RNA (1)...(19): siRNA sense strand
ucuacuuuguggaggauca

SEQ ID NO: 2664369 - RNA, 19 nt, Homo sapiens
  misc_RNA (1)...(19): siRNA sense strand
ggagaaagacucagugcag

SEQ ID NO: 2664370 - RNA, 19 nt, Homo sapiens
  misc_RNA (1)...(19): siRNA sense strand
gccggaaacaccaggucaa

SEQ ID NO: 2664371 - RNA, 19 nt, Homo sapiens
  misc_RNA (1)...(19): siRNA sense strand
gcaacuuacgugucaguga

SEQ ID NO: 2664372 - RNA, 19 nt, Homo sapiens
  misc_RNA (1)...(19): siRNA sense strand
acaagaugaagaagugaca

SEQ ID NO: 2664373 - RNA, 19 nt, Homo sapiens
  misc_RNA (1)...(19): siRNA sense strand
gagcugugcaggaguacau

SEQ ID NO: 2664374 - RNA, 19 nt, Homo sapiens
  misc_RNA (1)...(19): siRNA sense strand
ggauauuuaugaugagcuc

SEQ ID NO: 2664375 - RNA, 19 nt, Homo sapiens
  misc_RNA (1)...(19): siRNA sense strand
ucacagaggaagaguuucu

SEQ ID NO: 2664376 - RNA, 19 nt, Homo sapiens
  misc_RNA (1)...(19): siRNA sense strand
ggaagagcucacggauaaa

SEQ ID NO: 2664377 - RNA, 19 nt, Homo sapiens
  misc_RNA (1)...(19): siRNA sense strand
cagcagaauuggagcucag

SEQ ID NO: 2664378 - RNA, 19 nt, Homo sapiens
  misc_RNA (1)...(19): siRNA sense strand
gaagagaggccgugccaag

SEQ ID NO: 2664379 - RNA, 19 nt, Homo sapiens
  misc_RNA (1)...(19): siRNA sense strand
gagucaaagccuagaagaa

SEQ ID NO: 2664380 - RNA, 19 nt, Homo sapiens
  misc_RNA (1)...(19): siRNA sense strand
cggcaauauccgucauaaa

SEQ ID NO: 2664381 - RNA, 19 nt, Homo sapiens
  misc_RNA (1)...(19): siRNA sense strand
ugucgaggcuggagggaga

SEQ ID NO: 2664382 - RNA, 19 nt, Homo sapiens
  misc_RNA (1)...(19): siRNA sense strand
ccauggagcucgugcugaa

SEQ ID NO: 2664383 - RNA, 19 nt, Homo sapiens
  misc_RNA (1)...(19): siRNA sense strand
cagccaucaucuuggguua

SEQ ID NO: 2664384 - RNA, 19 nt, Homo sapiens
  misc_RNA (1)...(19): siRNA sense strand
ucucugaauuugaggaaga

SEQ ID NO: 2664385 - RNA, 19 nt, Homo sapiens
  misc_RNA (1)...(19): siRNA sense strand
caggaagagcucacggaua

SEQ ID NO: 2664386 - RNA, 19 nt, Homo sapiens
  misc_RNA (1)...(19): siRNA sense strand
agucaaagccuagaagaaa

SEQ ID NO: 2664387 - RNA, 19 nt, Homo sapiens
  misc_RNA (1)...(19): siRNA sense strand
cgaccaaaucagugcucua

SEQ ID NO: 2664388 - RNA, 19 nt, Homo sapiens
  misc_RNA (1)...(19): siRNA sense strand
agugaagaguccagcgaga

SEQ ID NO: 2664389 - RNA, 19 nt, Homo sapiens
  misc_RNA (1)...(19): siRNA sense strand
gcacagaugcagaucgaca

SEQ ID NO: 2664390 - RNA, 19 nt, Homo sapiens
  misc_RNA (1)...(19): siRNA sense strand
cugaaguccucuuggguca

SEQ ID NO: 2664391 - RNA, 19 nt, Homo sapiens
  misc_RNA (1)...(19): siRNA sense strand
ucuucuagauccauggaaa

SEQ ID NO: 2664392 - RNA, 19 nt, Homo sapiens
  misc_RNA (1)...(19): siRNA sense strand
cggugcagaucuugaauau

SEQ ID NO: 2664393 - RNA, 19 nt, Homo sapiens
  misc_RNA (1)...(19): siRNA sense strand
cgucacagaggaagaguuu

SEQ ID NO: 2664394 - RNA, 19 nt, Homo sapiens
  misc_RNA (1)...(19): siRNA sense strand
gauacgaagacuauggaau

SEQ ID NO: 2664395 - RNA, 19 nt, Homo sapiens
  misc_RNA (1)...(19): siRNA sense strand
gcgcauugagaaaggccua

SEQ ID NO: 2664396 - RNA, 19 nt, Homo sapiens
  misc_RNA (1)...(19): siRNA sense strand
guguggugcaggugguaaa

SEQ ID NO: 2664397 - RNA, 19 nt, Homo sapiens
  misc_RNA (1)...(19): siRNA sense strand
cugcagaucccuaguguga

SEQ ID NO: 2664398 - RNA, 19 nt, Homo sapiens
  misc_RNA (1)...(19): siRNA sense strand
caguagauacgaagacuau

SEQ ID NO: 2664399 - RNA, 19 nt, Homo sapiens
  misc_RNA (1)...(19): siRNA sense strand
gcaguagauacgaagacua

SEQ ID NO: 2664400 - RNA, 19 nt, Homo sapiens
  misc_RNA (1)...(19): siRNA sense strand
ccuaacagaggguguggaa

SEQ ID NO: 2664401 - RNA, 19 nt, Homo sapiens
  misc_RNA (1)...(19): siRNA sense strand
aagccgagauggaacgcaa

SEQ ID NO: 2664402 - RNA, 19 nt, Homo sapiens
  misc_RNA (1)...(19): siRNA sense strand
ccggaaucccagagcaaca

SEQ ID NO: 2664403 - RNA, 19 nt, Homo sapiens
  misc_RNA (1)...(19): siRNA sense strand
aagcagaggcagccaguau

SEQ ID NO: 2664404 - RNA, 19 nt, Homo sapiens
  misc_RNA (1)...(19): siRNA sense strand
ccgccauauguuugugaua

SEQ ID NO: 2664405 - RNA, 19 nt, Homo sapiens
  misc_RNA (1)...(19): siRNA sense strand
gaguacaucauuacagcaa

SEQ ID NO: 2664406 - RNA, 19 nt, Homo sapiens
  misc_RNA (1)...(19): siRNA sense strand
caucauuacagcaaucaaa

SEQ ID NO: 2664407 - RNA, 19 nt, Homo sapiens
  misc_RNA (1)...(19): siRNA sense strand
uaacagaggguguggaaac

SEQ ID NO: 2664408 - RNA, 19 nt, Homo sapiens
  misc_RNA (1)...(19): siRNA sense strand
uggagaaagacgugggauc

SEQ ID NO: 2664409 - RNA, 19 nt, Homo sapiens
  misc_RNA (1)...(19): siRNA sense strand
agucugagaucgagcacca

SEQ ID NO: 2664410 - RNA, 19 nt, Homo sapiens
  misc_RNA (1)...(19): siRNA sense strand
gggaagcauuagaaccuau

SEQ ID NO: 2664411 - RNA, 19 nt, Homo sapiens
  misc_RNA (1)...(19): siRNA sense strand
ccagaagagcugugcagga

SEQ ID NO: 2664412 - RNA, 19 nt, Homo sapiens
  misc_RNA (1)...(19): siRNA sense strand
cuucaaccgugcaguggaa

SEQ ID NO: 2664413 - RNA, 19 nt, Homo sapiens
  misc_RNA (1)...(19): siRNA sense strand
acaguaagcuuguccguga

SEQ ID NO: 2664414 - RNA, 19 nt, Homo sapiens
  misc_RNA (1)...(19): siRNA sense strand
gcggaaagcaauaaaauca

SEQ ID NO: 2664415 - RNA, 19 nt, Homo sapiens
  misc_RNA (1)...(19): siRNA sense strand
cuucuagauccauggaaau

SEQ ID NO: 2664416 - RNA, 19 nt, Homo sapiens
  misc_RNA (1)...(19): siRNA sense strand
cgagagggacgcaggagau

SEQ ID NO: 2664417 - RNA, 19 nt, Homo sapiens
  misc_RNA (1)...(19): siRNA sense strand
augacgaugagauggauaa

SEQ ID NO: 2664418 - RNA, 19 nt, Homo sapiens
  misc_RNA (1)...(19): siRNA sense strand
ggaaaacagaccaaaagua

SEQ ID NO: 2664419 - RNA, 19 nt, Homo sapiens
  misc_RNA (1)...(19): siRNA sense strand
cacccagcgcauugagaaa

SEQ ID NO: 2664420 - RNA, 19 nt, Homo sapiens
  misc_RNA (1)...(19): siRNA sense strand
ucuaaugaguagcgucgua

SEQ ID NO: 2664421 - RNA, 19 nt, Homo sapiens
  misc_RNA (1)...(19): siRNA sense strand
agagacgaguguuggcauu

SEQ ID NO: 2664422 - RNA, 19 nt, Homo sapiens
  misc_RNA (1)...(19): siRNA sense strand
agaaggcggauguggagaa

SEQ ID NO: 2664423 - RNA, 19 nt, Homo sapiens
  misc_RNA (1)...(19): siRNA sense strand
caaggaaaacagaccaaaa

SEQ ID NO: 2664424 - RNA, 19 nt, Homo sapiens
  misc_RNA (1)...(19): siRNA sense strand
acuccagaaugaaguguuu

SEQ ID NO: 2664425 - RNA, 19 nt, Homo sapiens
  misc_RNA (1)...(19): siRNA sense strand
ggaggaucaagauggagaa

SEQ ID NO: 2664426 - RNA, 19 nt, Homo sapiens
  misc_RNA (1)...(19): siRNA sense strand
ggcacaagucugagaucga

SEQ ID NO: 2664427 - RNA, 19 nt, Homo sapiens
  misc_RNA (1)...(19): siRNA sense strand
gaccaaaaguacagcagau

SEQ ID NO: 2664428 - RNA, 19 nt, Homo sapiens
  misc_RNA (1)...(19): siRNA sense strand
ccgaauucaaggugucauu

SEQ ID NO: 2664429 - RNA, 19 nt, Homo sapiens
  misc_RNA (1)...(19): siRNA sense strand
ucccaagccucgccggaaa

SEQ ID NO: 2664430 - RNA, 19 nt, Homo sapiens
  misc_RNA (1)...(19): siRNA sense strand
gcuuacagucauuuaucaa

SEQ ID NO: 2664431 - RNA, 19 nt, Homo sapiens
  misc_RNA (1)...(19): siRNA sense strand
ucuacuuuguggaggauca

SEQ ID NO: 2664432 - RNA, 19 nt, Homo sapiens
  misc_RNA (1)...(19): siRNA sense strand
ggagaaagacucagugcag

SEQ ID NO: 2664433 - RNA, 19 nt, Homo sapiens
  misc_RNA (1)...(19): siRNA sense strand
gccggaaacaccaggucaa

SEQ ID NO: 2664434 - RNA, 19 nt, Homo sapiens
  misc_RNA (1)...(19): siRNA sense strand
gcaacuuacgugucaguga

SEQ ID NO: 2664435 - RNA, 19 nt, Homo sapiens
  misc_RNA (1)...(19): siRNA sense strand
acaagaugaagaagugaca

SEQ ID NO: 2664436 - RNA, 19 nt, Homo sapiens
  misc_RNA (1)...(19): siRNA sense strand
gagcugugcaggaguacau

SEQ ID NO: 2664437 - RNA, 19 nt, Homo sapiens
  misc_RNA (1)...(19): siRNA sense strand
ggauauuuaugaugagcuc

SEQ ID NO: 2664438 - RNA, 19 nt, Homo sapiens
  misc_RNA (1)...(19): siRNA sense strand
ucacagaggaagaguuucu

SEQ ID NO: 2664439 - RNA, 19 nt, Homo sapiens
  misc_RNA (1)...(19): siRNA sense strand
ggaagagcucacggauaaa

SEQ ID NO: 2664440 - RNA, 19 nt, Homo sapiens
  misc_RNA (1)...(19): siRNA sense strand
cagcagaauuggagcucag

SEQ ID NO: 2664441 - RNA, 19 nt, Homo sapiens
  misc_RNA (1)...(19): siRNA sense strand
gaagagaggccgugccaag

SEQ ID NO: 2664442 - RNA, 19 nt, Homo sapiens
  misc_RNA (1)...(19): siRNA sense strand
gagaagaagccaaggaaaa

SEQ ID NO: 2664443 - RNA, 19 nt, Homo sapiens
  misc_RNA (1)...(19): siRNA sense strand
ugaugaagaaggaaggaaa

SEQ ID NO: 2664444 - RNA, 19 nt, Homo sapiens
  misc_RNA (1)...(19): siRNA sense strand
gggaacaggaaguggaaca

SEQ ID NO: 2664445 - RNA, 19 nt, Homo sapiens
  misc_RNA (1)...(19): siRNA sense strand
ggagaagaagccaaggaaa

SEQ ID NO: 2664446 - RNA, 19 nt, Homo sapiens
  misc_RNA (1)...(19): siRNA sense strand
ggaaagaggaaggggaaaa

SEQ ID NO: 2664447 - RNA, 19 nt, Homo sapiens
  misc_RNA (1)...(19): siRNA sense strand
cauaggaccaagaaagaaa

SEQ ID NO: 2664448 - RNA, 19 nt, Homo sapiens
  misc_RNA (1)...(19): siRNA sense strand
cgauggaggccaaaguaaa

SEQ ID NO: 2664449 - RNA, 19 nt, Homo sapiens
  misc_RNA (1)...(19): siRNA sense strand
agguggaaauguuggcuaa

SEQ ID NO: 2664450 - RNA, 19 nt, Homo sapiens
  misc_RNA (1)...(19): siRNA sense strand
cuucagaggucaagccaga

SEQ ID NO: 2664451 - RNA, 19 nt, Homo sapiens
  misc_RNA (1)...(19): siRNA sense strand
gugccaugcaauaaagaaa

SEQ ID NO: 2664452 - RNA, 19 nt, Homo sapiens
  misc_RNA (1)...(19): siRNA sense strand
cugaagaggaugaugauga

SEQ ID NO: 2664453 - RNA, 19 nt, Homo sapiens
  misc_RNA (1)...(19): siRNA sense strand
gugccaaauugcagacaga

SEQ ID NO: 2664454 - RNA, 19 nt, Homo sapiens
  misc_RNA (1)...(19): siRNA sense strand
cuuaaggaguguaguccaa

SEQ ID NO: 2664455 - RNA, 19 nt, Homo sapiens
  misc_RNA (1)...(19): siRNA sense strand
ugaagaagcggaagcggaa

SEQ ID NO: 2664456 - RNA, 19 nt, Homo sapiens
  misc_RNA (1)...(19): siRNA sense strand
gcggaagcggaaagaggaa

SEQ ID NO: 2664457 - RNA, 19 nt, Homo sapiens
  misc_RNA (1)...(19): siRNA sense strand
gguuaugcccaaaguggua

SEQ ID NO: 2664458 - RNA, 19 nt, Homo sapiens
  misc_RNA (1)...(19): siRNA sense strand
uggaaauguuggcuaagaa

SEQ ID NO: 2664459 - RNA, 19 nt, Homo sapiens
  misc_RNA (1)...(19): siRNA sense strand
ccaaaguaaaggaggugau

SEQ ID NO: 2664460 - RNA, 19 nt, Homo sapiens
  misc_RNA (1)...(19): siRNA sense strand
cauaaacagcccaguggaa

SEQ ID NO: 2664461 - RNA, 19 nt, Homo sapiens
  misc_RNA (1)...(19): siRNA sense strand
uugauaacucagaggcuua

SEQ ID NO: 2664462 - RNA, 19 nt, Homo sapiens
  misc_RNA (1)...(19): siRNA sense strand
gcggaaagaggaaggggaa

SEQ ID NO: 2664463 - RNA, 19 nt, Homo sapiens
  misc_RNA (1)...(19): siRNA sense strand
agacagaugaagaacgaga

SEQ ID NO: 2664464 - RNA, 19 nt, Homo sapiens
  misc_RNA (1)...(19): siRNA sense strand
acucagaggcuuaugauga

SEQ ID NO: 2664465 - RNA, 19 nt, Homo sapiens
  misc_RNA (1)...(19): siRNA sense strand
gaugaagaaggaaggaaaa

SEQ ID NO: 2664466 - RNA, 19 nt, Homo sapiens
  misc_RNA (1)...(19): siRNA sense strand
caccuaaacccaaaguaaa

SEQ ID NO: 2664467 - RNA, 19 nt, Homo sapiens
  misc_RNA (1)...(19): siRNA sense strand
acacagggccaguaccaaa

SEQ ID NO: 2664468 - RNA, 19 nt, Homo sapiens
  misc_RNA (1)...(19): siRNA sense strand
cacuaaauuaccacggaaa

SEQ ID NO: 2664469 - RNA, 19 nt, Homo sapiens
  misc_RNA (1)...(19): siRNA sense strand
acagaugaagaacgagaaa

SEQ ID NO: 2664470 - RNA, 19 nt, Homo sapiens
  misc_RNA (1)...(19): siRNA sense strand
gaagaugauauuacagaca

SEQ ID NO: 2664471 - RNA, 19 nt, Homo sapiens
  misc_RNA (1)...(19): siRNA sense strand
ugaagaaguuacaucucaa

SEQ ID NO: 2664472 - RNA, 19 nt, Homo sapiens
  misc_RNA (1)...(19): siRNA sense strand
ggaucggcuacaagauuua

SEQ ID NO: 2664473 - RNA, 19 nt, Homo sapiens
  misc_RNA (1)...(19): siRNA sense strand
ccaaagucccagugaccuu

SEQ ID NO: 2664474 - RNA, 19 nt, Homo sapiens
  misc_RNA (1)...(19): siRNA sense strand
gaaagaaauuccacuggga

SEQ ID NO: 2664475 - RNA, 19 nt, Homo sapiens
  misc_RNA (1)...(19): siRNA sense strand
gaacaacggaagaagcuca

SEQ ID NO: 2664476 - RNA, 19 nt, Homo sapiens
  misc_RNA (1)...(19): siRNA sense strand
cugccaggcucguagucaa

SEQ ID NO: 2664477 - RNA, 19 nt, Homo sapiens
  misc_RNA (1)...(19): siRNA sense strand
uaacaaaggugcaccagca

SEQ ID NO: 2664478 - RNA, 19 nt, Homo sapiens
  misc_RNA (1)...(19): siRNA sense strand
agaagaugauauugagaug

SEQ ID NO: 2664479 - RNA, 19 nt, Homo sapiens
  misc_RNA (1)...(19): siRNA sense strand
agaaggaugcauuaaagaa

SEQ ID NO: 2664480 - RNA, 19 nt, Homo sapiens
  misc_RNA (1)...(19): siRNA sense strand
ugaaacuggcuguuagcaa

SEQ ID NO: 2664481 - RNA, 19 nt, Homo sapiens
  misc_RNA (1)...(19): siRNA sense strand
ucaguaaaucccagaccaa

SEQ ID NO: 2664482 - RNA, 19 nt, Homo sapiens
  misc_RNA (1)...(19): siRNA sense strand
uggcuaagaaguuugaaau

SEQ ID NO: 2664483 - RNA, 19 nt, Homo sapiens
  misc_RNA (1)...(19): siRNA sense strand
gaaaaggagaagaagccaa

SEQ ID NO: 2664484 - RNA, 19 nt, Homo sapiens
  misc_RNA (1)...(19): siRNA sense strand
gcugcugugcggagaacaa

SEQ ID NO: 2664485 - RNA, 19 nt, Homo sapiens
  misc_RNA (1)...(19): siRNA sense strand
aagagaaggaugcauuaaa

SEQ ID NO: 2664486 - RNA, 19 nt, Homo sapiens
  misc_RNA (1)...(19): siRNA sense strand
ucuucuggacauugaguua

SEQ ID NO: 2664487 - RNA, 19 nt, Homo sapiens
  misc_RNA (1)...(19): siRNA sense strand
cggaagaagcucauucaca

SEQ ID NO: 2664488 - RNA, 19 nt, Homo sapiens
  misc_RNA (1)...(19): siRNA sense strand
aggaaggggaaaaggagaa

SEQ ID NO: 2664489 - RNA, 19 nt, Homo sapiens
  misc_RNA (1)...(19): siRNA sense strand
agaaaauuccagaaagaga

SEQ ID NO: 2664490 - RNA, 19 nt, Homo sapiens
  misc_RNA (1)...(19): siRNA sense strand
gcggagaacaacggaagaa

SEQ ID NO: 2664491 - RNA, 19 nt, Homo sapiens
  misc_RNA (1)...(19): siRNA sense strand
agaggcaagagguggaaau

SEQ ID NO: 2664492 - RNA, 19 nt, Homo sapiens
  misc_RNA (1)...(19): siRNA sense strand
acauugaguuacagcuaca

SEQ ID NO: 2664493 - RNA, 19 nt, Homo sapiens
  misc_RNA (1)...(19): siRNA sense strand
guuacagcuacaagaacua

SEQ ID NO: 2664494 - RNA, 19 nt, Homo sapiens
  misc_RNA (1)...(19): siRNA sense strand
agaacuaggcccugucauu

SEQ ID NO: 2664495 - RNA, 19 nt, Homo sapiens
  misc_RNA (1)...(19): siRNA sense strand
aaggaaagccggaguguuc

SEQ ID NO: 2664496 - RNA, 19 nt, Homo sapiens
  misc_RNA (1)...(19): siRNA sense strand
ucgccaagcuucagauacu

SEQ ID NO: 2664497 - RNA, 19 nt, Homo sapiens
  misc_RNA (1)...(19): siRNA sense strand
gaugauauugagaugaaga

SEQ ID NO: 2664498 - RNA, 19 nt, Homo sapiens
  misc_RNA (1)...(19): siRNA sense strand
cggaaagaggaaggggaaa

SEQ ID NO: 2664499 - RNA, 19 nt, Homo sapiens
  misc_RNA (1)...(19): siRNA sense strand
uaguaaaacgucugaagaa

SEQ ID NO: 2664500 - RNA, 19 nt, Homo sapiens
  misc_RNA (1)...(19): siRNA sense strand
ugaugagaaaccaggaaaa

SEQ ID NO: 2664501 - RNA, 19 nt, Homo sapiens
  misc_RNA (1)...(19): siRNA sense strand
acuaaauuaccacggaaau

SEQ ID NO: 2664502 - RNA, 19 nt, Homo sapiens
  misc_RNA (1)...(19): siRNA sense strand
cguaaacaccggaaggauc

SEQ ID NO: 2664503 - RNA, 19 nt, Homo sapiens
  misc_RNA (1)...(19): siRNA sense strand
ccacuggaacuguugggaa

SEQ ID NO: 2664504 - RNA, 19 nt, Homo sapiens
  misc_RNA (1)...(19): siRNA sense strand
acacuaaauuaccacggaa

SEQ ID NO: 2664505 - RNA, 19 nt, Homo sapiens
  misc_RNA (1)...(19): siRNA sense strand
acgauggaggccaaaguaa

SEQ ID NO: 2664506 - RNA, 19 nt, Homo sapiens
  misc_RNA (1)...(19): siRNA sense strand
gagaagaagccaaggaaaa

SEQ ID NO: 2664507 - RNA, 19 nt, Homo sapiens
  misc_RNA (1)...(19): siRNA sense strand
ugaugaagaaggaaggaaa

SEQ ID NO: 2664508 - RNA, 19 nt, Homo sapiens
  misc_RNA (1)...(19): siRNA sense strand
gggaacaggaaguggaaca

SEQ ID NO: 2664509 - RNA, 19 nt, Homo sapiens
  misc_RNA (1)...(19): siRNA sense strand
ggagaagaagccaaggaaa

SEQ ID NO: 2664510 - RNA, 19 nt, Homo sapiens
  misc_RNA (1)...(19): siRNA sense strand
ggaaagaggaaggggaaaa

SEQ ID NO: 2664511 - RNA, 19 nt, Homo sapiens
  misc_RNA (1)...(19): siRNA sense strand
cauaggaccaagaaagaaa

SEQ ID NO: 2664512 - RNA, 19 nt, Homo sapiens
  misc_RNA (1)...(19): siRNA sense strand
cgauggaggccaaaguaaa

SEQ ID NO: 2664513 - RNA, 19 nt, Homo sapiens
  misc_RNA (1)...(19): siRNA sense strand
agguggaaauguuggcuaa

SEQ ID NO: 2664514 - RNA, 19 nt, Homo sapiens
  misc_RNA (1)...(19): siRNA sense strand
cuucagaggucaagccaga

SEQ ID NO: 2664515 - RNA, 19 nt, Homo sapiens
  misc_RNA (1)...(19): siRNA sense strand
gugccaugcaauaaagaaa

SEQ ID NO: 2664516 - RNA, 19 nt, Homo sapiens
  misc_RNA (1)...(19): siRNA sense strand
cugaagaggaugaugauga

SEQ ID NO: 2664517 - RNA, 19 nt, Homo sapiens
  misc_RNA (1)...(19): siRNA sense strand
gugccaaauugcagacaga

SEQ ID NO: 2664518 - RNA, 19 nt, Homo sapiens
  misc_RNA (1)...(19): siRNA sense strand
cuuaaggaguguaguccaa

SEQ ID NO: 2664519 - RNA, 19 nt, Homo sapiens
  misc_RNA (1)...(19): siRNA sense strand
ugaagaagcggaagcggaa

SEQ ID NO: 2664520 - RNA, 19 nt, Homo sapiens
  misc_RNA (1)...(19): siRNA sense strand
gcggaagcggaaagaggaa

SEQ ID NO: 2664521 - RNA, 19 nt, Homo sapiens
  misc_RNA (1)...(19): siRNA sense strand
gguuaugcccaaaguggua

SEQ ID NO: 2664522 - RNA, 19 nt, Homo sapiens
  misc_RNA (1)...(19): siRNA sense strand
uggaaauguuggcuaagaa

SEQ ID NO: 2664523 - RNA, 19 nt, Homo sapiens
  misc_RNA (1)...(19): siRNA sense strand
ccaaaguaaaggaggugau

SEQ ID NO: 2664524 - RNA, 19 nt, Homo sapiens
  misc_RNA (1)...(19): siRNA sense strand
cauaaacagcccaguggaa

SEQ ID NO: 2664525 - RNA, 19 nt, Homo sapiens
  misc_RNA (1)...(19): siRNA sense strand
uugauaacucagaggcuua

SEQ ID NO: 2664526 - RNA, 19 nt, Homo sapiens
  misc_RNA (1)...(19): siRNA sense strand
gcggaaagaggaaggggaa

SEQ ID NO: 2664527 - RNA, 19 nt, Homo sapiens
  misc_RNA (1)...(19): siRNA sense strand
agacagaugaagaacgaga

SEQ ID NO: 2664528 - RNA, 19 nt, Homo sapiens
  misc_RNA (1)...(19): siRNA sense strand
acucagaggcuuaugauga

SEQ ID NO: 2664529 - RNA, 19 nt, Homo sapiens
  misc_RNA (1)...(19): siRNA sense strand
gaugaagaaggaaggaaaa

SEQ ID NO: 2664530 - RNA, 19 nt, Homo sapiens
  misc_RNA (1)...(19): siRNA sense strand
caccuaaacccaaaguaaa

SEQ ID NO: 2664531 - RNA, 19 nt, Homo sapiens
  misc_RNA (1)...(19): siRNA sense strand
acacagggccaguaccaaa

SEQ ID NO: 2664532 - RNA, 19 nt, Homo sapiens
  misc_RNA (1)...(19): siRNA sense strand
cacuaaauuaccacggaaa

SEQ ID NO: 2664533 - RNA, 19 nt, Homo sapiens
  misc_RNA (1)...(19): siRNA sense strand
acagaugaagaacgagaaa

SEQ ID NO: 2664534 - RNA, 19 nt, Homo sapiens
  misc_RNA (1)...(19): siRNA sense strand
gaagaugauauuacagaca

SEQ ID NO: 2664535 - RNA, 19 nt, Homo sapiens
  misc_RNA (1)...(19): siRNA sense strand
ugaagaaguuacaucucaa

SEQ ID NO: 2664536 - RNA, 19 nt, Homo sapiens
  misc_RNA (1)...(19): siRNA sense strand
ggaucggcuacaagauuua

SEQ ID NO: 2664537 - RNA, 19 nt, Homo sapiens
  misc_RNA (1)...(19): siRNA sense strand
ccaaagucccagugaccuu

SEQ ID NO: 2664538 - RNA, 19 nt, Homo sapiens
  misc_RNA (1)...(19): siRNA sense strand
gaaagaaauuccacuggga

SEQ ID NO: 2664539 - RNA, 19 nt, Homo sapiens
  misc_RNA (1)...(19): siRNA sense strand
gaacaacggaagaagcuca

SEQ ID NO: 2664540 - RNA, 19 nt, Homo sapiens
  misc_RNA (1)...(19): siRNA sense strand
cugccaggcucguagucaa

SEQ ID NO: 2664541 - RNA, 19 nt, Homo sapiens
  misc_RNA (1)...(19): siRNA sense strand
uaacaaaggugcaccagca

SEQ ID NO: 2664542 - RNA, 19 nt, Homo sapiens
  misc_RNA (1)...(19): siRNA sense strand
agaagaugauauugagaug

SEQ ID NO: 2664543 - RNA, 19 nt, Homo sapiens
  misc_RNA (1)...(19): siRNA sense strand
agaaggaugcauuaaagaa

SEQ ID NO: 2664544 - RNA, 19 nt, Homo sapiens
  misc_RNA (1)...(19): siRNA sense strand
ugaaacuggcuguuagcaa

SEQ ID NO: 2664545 - RNA, 19 nt, Homo sapiens
  misc_RNA (1)...(19): siRNA sense strand
ucaguaaaucccagaccaa

SEQ ID NO: 2664546 - RNA, 19 nt, Homo sapiens
  misc_RNA (1)...(19): siRNA sense strand
uggcuaagaaguuugaaau

SEQ ID NO: 2664547 - RNA, 19 nt, Homo sapiens
  misc_RNA (1)...(19): siRNA sense strand
gaaaaggagaagaagccaa

SEQ ID NO: 2664548 - RNA, 19 nt, Homo sapiens
  misc_RNA (1)...(19): siRNA sense strand
gcugcugugcggagaacaa

SEQ ID NO: 2664549 - RNA, 19 nt, Homo sapiens
  misc_RNA (1)...(19): siRNA sense strand
aagagaaggaugcauuaaa

SEQ ID NO: 2664550 - RNA, 19 nt, Homo sapiens
  misc_RNA (1)...(19): siRNA sense strand
ucuucuggacauugaguua

SEQ ID NO: 2664551 - RNA, 19 nt, Homo sapiens
  misc_RNA (1)...(19): siRNA sense strand
cggaagaagcucauucaca

SEQ ID NO: 2664552 - RNA, 19 nt, Homo sapiens
  misc_RNA (1)...(19): siRNA sense strand
aggaaggggaaaaggagaa

SEQ ID NO: 2664553 - RNA, 19 nt, Homo sapiens
  misc_RNA (1)...(19): siRNA sense strand
agaaaauuccagaaagaga

SEQ ID NO: 2664554 - RNA, 19 nt, Homo sapiens
  misc_RNA (1)...(19): siRNA sense strand
gcggagaacaacggaagaa

SEQ ID NO: 2664555 - RNA, 19 nt, Homo sapiens
  misc_RNA (1)...(19): siRNA sense strand
agaggcaagagguggaaau

SEQ ID NO: 2664556 - RNA, 19 nt, Homo sapiens
  misc_RNA (1)...(19): siRNA sense strand
acauugaguuacagcuaca

SEQ ID NO: 2664557 - RNA, 19 nt, Homo sapiens
  misc_RNA (1)...(19): siRNA sense strand
guuacagcuacaagaacua

SEQ ID NO: 2664558 - RNA, 19 nt, Homo sapiens
  misc_RNA (1)...(19): siRNA sense strand
agaacuaggcccugucauu

SEQ ID NO: 2664559 - RNA, 19 nt, Homo sapiens
  misc_RNA (1)...(19): siRNA sense strand
aaggaaagccggaguguuc

SEQ ID NO: 2664560 - RNA, 19 nt, Homo sapiens
  misc_RNA (1)...(19): siRNA sense strand
ucgccaagcuucagauacu

SEQ ID NO: 2664561 - RNA, 19 nt, Homo sapiens
  misc_RNA (1)...(19): siRNA sense strand
gaugauauugagaugaaga

SEQ ID NO: 2664562 - RNA, 19 nt, Homo sapiens
  misc_RNA (1)...(19): siRNA sense strand
cggaaagaggaaggggaaa

SEQ ID NO: 2664563 - RNA, 19 nt, Homo sapiens
  misc_RNA (1)...(19): siRNA sense strand
uaguaaaacgucugaagaa

SEQ ID NO: 2664564 - RNA, 19 nt, Homo sapiens
  misc_RNA (1)...(19): siRNA sense strand
ugaugagaaaccaggaaaa

SEQ ID NO: 2664565 - RNA, 19 nt, Homo sapiens
  misc_RNA (1)...(19): siRNA sense strand
acuaaauuaccacggaaau

SEQ ID NO: 2664566 - RNA, 19 nt, Homo sapiens
  misc_RNA (1)...(19): siRNA sense strand
cguaaacaccggaaggauc

SEQ ID NO: 2664567 - RNA, 19 nt, Homo sapiens
  misc_RNA (1)...(19): siRNA sense strand
ccacuggaacuguugggaa

SEQ ID NO: 2664568 - RNA, 19 nt, Homo sapiens
  misc_RNA (1)...(19): siRNA sense strand
acacuaaauuaccacggaa

SEQ ID NO: 2664569 - RNA, 19 nt, Homo sapiens
  misc_RNA (1)...(19): siRNA sense strand
acgauggaggccaaaguaa

SEQ ID NO: 2664570 - RNA, 19 nt, Homo sapiens
  misc_RNA (1)...(19): siRNA sense strand
gagaggugauccugggaga

SEQ ID NO: 2664571 - RNA, 19 nt, Homo sapiens
  misc_RNA (1)...(19): siRNA sense strand
aaguauaagagaugggcuu

SEQ ID NO: 2664572 - RNA, 19 nt, Homo sapiens
  misc_RNA (1)...(19): siRNA sense strand
aaacaaacggacuggguca

SEQ ID NO: 2664573 - RNA, 19 nt, Homo sapiens
  misc_RNA (1)...(19): siRNA sense strand
guguguaaugugaaguaua

SEQ ID NO: 2664574 - RNA, 19 nt, Homo sapiens
  misc_RNA (1)...(19): siRNA sense strand
guauauauggacaggcuau

SEQ ID NO: 2664575 - RNA, 19 nt, Homo sapiens
  misc_RNA (1)...(19): siRNA sense strand
ugaucuaccagaagagaga

SEQ ID NO: 2664576 - RNA, 19 nt, Homo sapiens
  misc_RNA (1)...(19): siRNA sense strand
gcuauaauggagaggugau

SEQ ID NO: 2664577 - RNA, 19 nt, Homo sapiens
  misc_RNA (1)...(19): siRNA sense strand
cagaagagagauaccgaca

SEQ ID NO: 2664578 - RNA, 19 nt, Homo sapiens
  misc_RNA (1)...(19): siRNA sense strand
gagagauaccgacaugaaa

SEQ ID NO: 2664579 - RNA, 19 nt, Homo sapiens
  misc_RNA (1)...(19): siRNA sense strand
auggaggaguggugaacau

SEQ ID NO: 2664580 - RNA, 19 nt, Homo sapiens
  misc_RNA (1)...(19): siRNA sense strand
gguacuuccuggacagcau

SEQ ID NO: 2664581 - RNA, 19 nt, Homo sapiens
  misc_RNA (1)...(19): siRNA sense strand
caugacgggcagaggauuu

SEQ ID NO: 2664582 - RNA, 19 nt, Homo sapiens
  misc_RNA (1)...(19): siRNA sense strand
gggcuauaauggagaggug

SEQ ID NO: 2664583 - RNA, 19 nt, Homo sapiens
  misc_RNA (1)...(19): siRNA sense strand
gggcagaggauuuacaucu

SEQ ID NO: 2664584 - RNA, 19 nt, Homo sapiens
  misc_RNA (1)...(19): siRNA sense strand
agagagauaccgacaugaa

SEQ ID NO: 2664585 - RNA, 19 nt, Homo sapiens
  misc_RNA (1)...(19): siRNA sense strand
agagauaccgacaugaaau

SEQ ID NO: 2664586 - RNA, 19 nt, Homo sapiens
  misc_RNA (1)...(19): siRNA sense strand
gagauaccgacaugaaauu

SEQ ID NO: 2664587 - RNA, 19 nt, Homo sapiens
  misc_RNA (1)...(19): siRNA sense strand
ccacagaccuccaccagca

SEQ ID NO: 2664588 - RNA, 19 nt, Homo sapiens
  misc_RNA (1)...(19): siRNA sense strand
cacuugugcugcauggaaa

SEQ ID NO: 2664589 - RNA, 19 nt, Homo sapiens
  misc_RNA (1)...(19): siRNA sense strand
gcucaaccgcuucgugcaa

SEQ ID NO: 2664590 - RNA, 19 nt, Homo sapiens
  misc_RNA (1)...(19): siRNA sense strand
gaacacaacuucugcaccu

SEQ ID NO: 2664591 - RNA, 19 nt, Homo sapiens
  misc_RNA (1)...(19): siRNA sense strand
gccugauaaugaagacuau

SEQ ID NO: 2664592 - RNA, 19 nt, Homo sapiens
  misc_RNA (1)...(19): siRNA sense strand
uggugaacauccaugaaaa

SEQ ID NO: 2664593 - RNA, 19 nt, Homo sapiens
  misc_RNA (1)...(19): siRNA sense strand
cgaaugccugggaggaaau

SEQ ID NO: 2664594 - RNA, 19 nt, Homo sapiens
  misc_RNA (1)...(19): siRNA sense strand
guacauucauggaggagug

SEQ ID NO: 2664595 - RNA, 19 nt, Homo sapiens
  misc_RNA (1)...(19): siRNA sense strand
auauguguuuggagguuau

SEQ ID NO: 2664596 - RNA, 19 nt, Homo sapiens
  misc_RNA (1)...(19): siRNA sense strand
gagaggugauccugggaga

SEQ ID NO: 2664597 - RNA, 19 nt, Homo sapiens
  misc_RNA (1)...(19): siRNA sense strand
aaguauaagagaugggcuu

SEQ ID NO: 2664598 - RNA, 19 nt, Homo sapiens
  misc_RNA (1)...(19): siRNA sense strand
aaacaaacggacuggguca

SEQ ID NO: 2664599 - RNA, 19 nt, Homo sapiens
  misc_RNA (1)...(19): siRNA sense strand
guguguaaugugaaguaua

SEQ ID NO: 2664600 - RNA, 19 nt, Homo sapiens
  misc_RNA (1)...(19): siRNA sense strand
guauauauggacaggcuau

SEQ ID NO: 2664601 - RNA, 19 nt, Homo sapiens
  misc_RNA (1)...(19): siRNA sense strand
ugaucuaccagaagagaga

SEQ ID NO: 2664602 - RNA, 19 nt, Homo sapiens
  misc_RNA (1)...(19): siRNA sense strand
gcuauaauggagaggugau

SEQ ID NO: 2664603 - RNA, 19 nt, Homo sapiens
  misc_RNA (1)...(19): siRNA sense strand
cagaagagagauaccgaca

SEQ ID NO: 2664604 - RNA, 19 nt, Homo sapiens
  misc_RNA (1)...(19): siRNA sense strand
gagagauaccgacaugaaa

SEQ ID NO: 2664605 - RNA, 19 nt, Homo sapiens
  misc_RNA (1)...(19): siRNA sense strand
auggaggaguggugaacau

SEQ ID NO: 2664606 - RNA, 19 nt, Homo sapiens
  misc_RNA (1)...(19): siRNA sense strand
gguacuuccuggacagcau

SEQ ID NO: 2664607 - RNA, 19 nt, Homo sapiens
  misc_RNA (1)...(19): siRNA sense strand
caugacgggcagaggauuu

SEQ ID NO: 2664608 - RNA, 19 nt, Homo sapiens
  misc_RNA (1)...(19): siRNA sense strand
gggcuauaauggagaggug

SEQ ID NO: 2664609 - RNA, 19 nt, Homo sapiens
  misc_RNA (1)...(19): siRNA sense strand
gggcagaggauuuacaucu

SEQ ID NO: 2664610 - RNA, 19 nt, Homo sapiens
  misc_RNA (1)...(19): siRNA sense strand
agagagauaccgacaugaa

SEQ ID NO: 2664611 - RNA, 19 nt, Homo sapiens
  misc_RNA (1)...(19): siRNA sense strand
agagauaccgacaugaaau

SEQ ID NO: 2664612 - RNA, 19 nt, Homo sapiens
  misc_RNA (1)...(19): siRNA sense strand
gagauaccgacaugaaauu

SEQ ID NO: 2664613 - RNA, 19 nt, Homo sapiens
  misc_RNA (1)...(19): siRNA sense strand
ccacagaccuccaccagca

SEQ ID NO: 2664614 - RNA, 19 nt, Homo sapiens
  misc_RNA (1)...(19): siRNA sense strand
cacuugugcugcauggaaa

SEQ ID NO: 2664615 - RNA, 19 nt, Homo sapiens
  misc_RNA (1)...(19): siRNA sense strand
gcucaaccgcuucgugcaa

SEQ ID NO: 2664616 - RNA, 19 nt, Homo sapiens
  misc_RNA (1)...(19): siRNA sense strand
gaacacaacuucugcaccu

SEQ ID NO: 2664617 - RNA, 19 nt, Homo sapiens
  misc_RNA (1)...(19): siRNA sense strand
gccugauaaugaagacuau

SEQ ID NO: 2664618 - RNA, 19 nt, Homo sapiens
  misc_RNA (1)...(19): siRNA sense strand
uggugaacauccaugaaaa

SEQ ID NO: 2664619 - RNA, 19 nt, Homo sapiens
  misc_RNA (1)...(19): siRNA sense strand
cgaaugccugggaggaaau

SEQ ID NO: 2664620 - RNA, 19 nt, Homo sapiens
  misc_RNA (1)...(19): siRNA sense strand
guacauucauggaggagug

SEQ ID NO: 2664621 - RNA, 19 nt, Homo sapiens
  misc_RNA (1)...(19): siRNA sense strand
auauguguuuggagguuau

SEQ ID NO: 2664622 - RNA, 19 nt, Homo sapiens
  misc_RNA (1)...(19): siRNA sense strand
gagaggugauccugggaga

SEQ ID NO: 2664623 - RNA, 19 nt, Homo sapiens
  misc_RNA (1)...(19): siRNA sense strand
aaguauaagagaugggcuu

SEQ ID NO: 2664624 - RNA, 19 nt, Homo sapiens
  misc_RNA (1)...(19): siRNA sense strand
aaacaaacggacuggguca

SEQ ID NO: 2664625 - RNA, 19 nt, Homo sapiens
  misc_RNA (1)...(19): siRNA sense strand
guguguaaugugaaguaua

SEQ ID NO: 2664626 - RNA, 19 nt, Homo sapiens
  misc_RNA (1)...(19): siRNA sense strand
guauauauggacaggcuau

SEQ ID NO: 2664627 - RNA, 19 nt, Homo sapiens
  misc_RNA (1)...(19): siRNA sense strand
ugaucuaccagaagagaga

SEQ ID NO: 2664628 - RNA, 19 nt, Homo sapiens
  misc_RNA (1)...(19): siRNA sense strand
gcuauaauggagaggugau

SEQ ID NO: 2664629 - RNA, 19 nt, Homo sapiens
  misc_RNA (1)...(19): siRNA sense strand
cagaagagagauaccgaca

SEQ ID NO: 2664630 - RNA, 19 nt, Homo sapiens
  misc_RNA (1)...(19): siRNA sense strand
gagagauaccgacaugaaa

SEQ ID NO: 2664631 - RNA, 19 nt, Homo sapiens
  misc_RNA (1)...(19): siRNA sense strand
auggaggaguggugaacau

SEQ ID NO: 2664632 - RNA, 19 nt, Homo sapiens
  misc_RNA (1)...(19): siRNA sense strand
gguacuuccuggacagcau

SEQ ID NO: 2664633 - RNA, 19 nt, Homo sapiens
  misc_RNA (1)...(19): siRNA sense strand
caugacgggcagaggauuu

SEQ ID NO: 2664634 - RNA, 19 nt, Homo sapiens
  misc_RNA (1)...(19): siRNA sense strand
gggcuauaauggagaggug

SEQ ID NO: 2664635 - RNA, 19 nt, Homo sapiens
  misc_RNA (1)...(19): siRNA sense strand
gggcagaggauuuacaucu

SEQ ID NO: 2664636 - RNA, 19 nt, Homo sapiens
  misc_RNA (1)...(19): siRNA sense strand
agagagauaccgacaugaa

SEQ ID NO: 2664637 - RNA, 19 nt, Homo sapiens
  misc_RNA (1)...(19): siRNA sense strand
agagauaccgacaugaaau

SEQ ID NO: 2664638 - RNA, 19 nt, Homo sapiens
  misc_RNA (1)...(19): siRNA sense strand
gagauaccgacaugaaauu

SEQ ID NO: 2664639 - RNA, 19 nt, Homo sapiens
  misc_RNA (1)...(19): siRNA sense strand
ccacagaccuccaccagca

SEQ ID NO: 2664640 - RNA, 19 nt, Homo sapiens
  misc_RNA (1)...(19): siRNA sense strand
cacuugugcugcauggaaa

SEQ ID NO: 2664641 - RNA, 19 nt, Homo sapiens
  misc_RNA (1)...(19): siRNA sense strand
gcucaaccgcuucgugcaa

SEQ ID NO: 2664642 - RNA, 19 nt, Homo sapiens
  misc_RNA (1)...(19): siRNA sense strand
gaacacaacuucugcaccu

SEQ ID NO: 2664643 - RNA, 19 nt, Homo sapiens
  misc_RNA (1)...(19): siRNA sense strand
gccugauaaugaagacuau

SEQ ID NO: 2664644 - RNA, 19 nt, Homo sapiens
  misc_RNA (1)...(19): siRNA sense strand
uggugaacauccaugaaaa

SEQ ID NO: 2664645 - RNA, 19 nt, Homo sapiens
  misc_RNA (1)...(19): siRNA sense strand
cgaaugccugggaggaaau

SEQ ID NO: 2664646 - RNA, 19 nt, Homo sapiens
  misc_RNA (1)...(19): siRNA sense strand
guacauucauggaggagug

SEQ ID NO: 2664647 - RNA, 19 nt, Homo sapiens
  misc_RNA (1)...(19): siRNA sense strand
auauguguuuggagguuau

SEQ ID NO: 2664648 - RNA, 19 nt, Homo sapiens
  misc_RNA (1)...(19): siRNA sense strand
gugaagagugagagaucaa

SEQ ID NO: 2664649 - RNA, 19 nt, Homo sapiens
  misc_RNA (1)...(19): siRNA sense strand
gagcaugggagguaaagua

SEQ ID NO: 2664650 - RNA, 19 nt, Homo sapiens
  misc_RNA (1)...(19): siRNA sense strand
gagugagagaucaaagaaa

SEQ ID NO: 2664651 - RNA, 19 nt, Homo sapiens
  misc_RNA (1)...(19): siRNA sense strand
ugucaaaauacuagagcaa

SEQ ID NO: 2664652 - RNA, 19 nt, Homo sapiens
  misc_RNA (1)...(19): siRNA sense strand
ggagagcaugggagguaaa

SEQ ID NO: 2664653 - RNA, 19 nt, Homo sapiens
  misc_RNA (1)...(19): siRNA sense strand
gaggaagacuuaaaggcau

SEQ ID NO: 2664654 - RNA, 19 nt, Homo sapiens
  misc_RNA (1)...(19): siRNA sense strand
caguaaauugucagccaaa

SEQ ID NO: 2664655 - RNA, 19 nt, Homo sapiens
  misc_RNA (1)...(19): siRNA sense strand
gagaagagcaugagagagc

SEQ ID NO: 2664656 - RNA, 19 nt, Homo sapiens
  misc_RNA (1)...(19): siRNA sense strand
cggagauaacggaggagau

SEQ ID NO: 2664657 - RNA, 19 nt, Homo sapiens
  misc_RNA (1)...(19): siRNA sense strand
acguaaugcccuucugaua

SEQ ID NO: 2664658 - RNA, 19 nt, Homo sapiens
  misc_RNA (1)...(19): siRNA sense strand
gugagagaucaaagaaaga

SEQ ID NO: 2664659 - RNA, 19 nt, Homo sapiens
  misc_RNA (1)...(19): siRNA sense strand
ccgcaaagugaacgagcuu

SEQ ID NO: 2664660 - RNA, 19 nt, Homo sapiens
  misc_RNA (1)...(19): siRNA sense strand
acagaaaauugcagaacau

SEQ ID NO: 2664661 - RNA, 19 nt, Homo sapiens
  misc_RNA (1)...(19): siRNA sense strand
gagagaucaaagaaagaau

SEQ ID NO: 2664662 - RNA, 19 nt, Homo sapiens
  misc_RNA (1)...(19): siRNA sense strand
uugcagaacaucggagaaa

SEQ ID NO: 2664663 - RNA, 19 nt, Homo sapiens
  misc_RNA (1)...(19): siRNA sense strand
aagaaagaauagaacgagu

SEQ ID NO: 2664664 - RNA, 19 nt, Homo sapiens
  misc_RNA (1)...(19): siRNA sense strand
ucgagaagagcaugagaga

SEQ ID NO: 2664665 - RNA, 19 nt, Homo sapiens
  misc_RNA (1)...(19): siRNA sense strand
gaaaaugugaagagugaga

SEQ ID NO: 2664666 - RNA, 19 nt, Homo sapiens
  misc_RNA (1)...(19): siRNA sense strand
ugaaauucuuagugaucca

SEQ ID NO: 2664667 - RNA, 19 nt, Homo sapiens
  misc_RNA (1)...(19): siRNA sense strand
ggaggaagacuuaaaggca

SEQ ID NO: 2664668 - RNA, 19 nt, Homo sapiens
  misc_RNA (1)...(19): siRNA sense strand
aggaaagugaucuagaaau

SEQ ID NO: 2664669 - RNA, 19 nt, Homo sapiens
  misc_RNA (1)...(19): siRNA sense strand
agauaacggaggagaugau

SEQ ID NO: 2664670 - RNA, 19 nt, Homo sapiens
  misc_RNA (1)...(19): siRNA sense strand
ucaacauagggcacagaaa

SEQ ID NO: 2664671 - RNA, 19 nt, Homo sapiens
  misc_RNA (1)...(19): siRNA sense strand
cagaaguuaugguggccuu

SEQ ID NO: 2664672 - RNA, 19 nt, Homo sapiens
  misc_RNA (1)...(19): siRNA sense strand
ucuuagugauccagagguu

SEQ ID NO: 2664673 - RNA, 19 nt, Homo sapiens
  misc_RNA (1)...(19): siRNA sense strand
agguggaggaagacuuaaa

SEQ ID NO: 2664674 - RNA, 19 nt, Homo sapiens
  misc_RNA (1)...(19): siRNA sense strand
agaugaaaaugcggagaua

SEQ ID NO: 2664675 - RNA, 19 nt, Homo sapiens
  misc_RNA (1)...(19): siRNA sense strand
ggauguggcucgaaaccca

SEQ ID NO: 2664676 - RNA, 19 nt, Homo sapiens
  misc_RNA (1)...(19): siRNA sense strand
acuuaaaggcauaugaaac

SEQ ID NO: 2664677 - RNA, 19 nt, Homo sapiens
  misc_RNA (1)...(19): siRNA sense strand
ggaagaagccagacgacag

SEQ ID NO: 2664678 - RNA, 19 nt, Homo sapiens
  misc_RNA (1)...(19): siRNA sense strand
cggagaaaguaugagcgaa

SEQ ID NO: 2664679 - RNA, 19 nt, Homo sapiens
  misc_RNA (1)...(19): siRNA sense strand
ccuuugugaagauguguaa

SEQ ID NO: 2664680 - RNA, 19 nt, Homo sapiens
  misc_RNA (1)...(19): siRNA sense strand
guuaagaaggcucgagaag

SEQ ID NO: 2664681 - RNA, 19 nt, Homo sapiens
  misc_RNA (1)...(19): siRNA sense strand
ccugcuacucagaaagcua

SEQ ID NO: 2664682 - RNA, 19 nt, Homo sapiens
  misc_RNA (1)...(19): siRNA sense strand
aagugaggaaagugaucua

SEQ ID NO: 2664683 - RNA, 19 nt, Homo sapiens
  misc_RNA (1)...(19): siRNA sense strand
gugacagagccauugaaau

SEQ ID NO: 2664684 - RNA, 19 nt, Homo sapiens
  misc_RNA (1)...(19): siRNA sense strand
agaacaucggagaaaguau

SEQ ID NO: 2664685 - RNA, 19 nt, Homo sapiens
  misc_RNA (1)...(19): siRNA sense strand
aggaaugccuggaauggga

SEQ ID NO: 2664686 - RNA, 19 nt, Homo sapiens
  misc_RNA (1)...(19): siRNA sense strand
aaaugugaagagugagaga

SEQ ID NO: 2664687 - RNA, 19 nt, Homo sapiens
  misc_RNA (1)...(19): siRNA sense strand
ucugauaaauaaagcccuu

SEQ ID NO: 2664688 - RNA, 19 nt, Homo sapiens
  misc_RNA (1)...(19): siRNA sense strand
aagaaacgggagaugaaaa

SEQ ID NO: 2664689 - RNA, 19 nt, Homo sapiens
  misc_RNA (1)...(19): siRNA sense strand
ggcucgaaacccagcaaau

SEQ ID NO: 2664690 - RNA, 19 nt, Homo sapiens
  misc_RNA (1)...(19): siRNA sense strand
auuuggaggucaacguaau

SEQ ID NO: 2664691 - RNA, 19 nt, Homo sapiens
  misc_RNA (1)...(19): siRNA sense strand
gcagugagcuggacggcaa

SEQ ID NO: 2664692 - RNA, 19 nt, Homo sapiens
  misc_RNA (1)...(19): siRNA sense strand
aggaaaacgaggagaauga

SEQ ID NO: 2664693 - RNA, 19 nt, Homo sapiens
  misc_RNA (1)...(19): siRNA sense strand
ccaagaaggaccaggagga

SEQ ID NO: 2664694 - RNA, 19 nt, Homo sapiens
  misc_RNA (1)...(19): siRNA sense strand
ccucggagaaccaggaaaa

SEQ ID NO: 2664695 - RNA, 19 nt, Homo sapiens
  misc_RNA (1)...(19): siRNA sense strand
guuucaacccucuggaaga

SEQ ID NO: 2664696 - RNA, 19 nt, Homo sapiens
  misc_RNA (1)...(19): siRNA sense strand
cgcccaugguggacgagaa

SEQ ID NO: 2664697 - RNA, 19 nt, Homo sapiens
  misc_RNA (1)...(19): siRNA sense strand
cuguugaaguguggggaua

SEQ ID NO: 2664698 - RNA, 19 nt, Homo sapiens
  misc_RNA (1)...(19): siRNA sense strand
gcuacuggcugaaaggugu

SEQ ID NO: 2664699 - RNA, 19 nt, Homo sapiens
  misc_RNA (1)...(19): siRNA sense strand
ggaugaucacucugagcga

SEQ ID NO: 2664700 - RNA, 19 nt, Homo sapiens
  misc_RNA (1)...(19): siRNA sense strand
aggaagaggaagagaguua

SEQ ID NO: 2664701 - RNA, 19 nt, Homo sapiens
  misc_RNA (1)...(19): siRNA sense strand
agaagaaaggaaagggaaa

SEQ ID NO: 2664702 - RNA, 19 nt, Homo sapiens
  misc_RNA (1)...(19): siRNA sense strand
gagaaauagugaaaccaaa

SEQ ID NO: 2664703 - RNA, 19 nt, Homo sapiens
  misc_RNA (1)...(19): siRNA sense strand
ccguagagcaauugggaau

SEQ ID NO: 2664704 - RNA, 19 nt, Homo sapiens
  misc_RNA (1)...(19): siRNA sense strand
agaaagaagcagaagauga

SEQ ID NO: 2664705 - RNA, 19 nt, Homo sapiens
  misc_RNA (1)...(19): siRNA sense strand
cuacagaaggauuuagaaa

SEQ ID NO: 2664706 - RNA, 19 nt, Homo sapiens
  misc_RNA (1)...(19): siRNA sense strand
ccuaaaguugguagaauaa

SEQ ID NO: 2664707 - RNA, 19 nt, Homo sapiens
  misc_RNA (1)...(19): siRNA sense strand
cagaggagaaauagugaaa

SEQ ID NO: 2664708 - RNA, 19 nt, Homo sapiens
  misc_RNA (1)...(19): siRNA sense strand
gcaaagagaaagaagcaga

SEQ ID NO: 2664709 - RNA, 19 nt, Homo sapiens
  misc_RNA (1)...(19): siRNA sense strand
aggaggaagucucaagaaa

SEQ ID NO: 2664710 - RNA, 19 nt, Homo sapiens
  misc_RNA (1)...(19): siRNA sense strand
uccuaaaguugguagaaua

SEQ ID NO: 2664711 - RNA, 19 nt, Homo sapiens
  misc_RNA (1)...(19): siRNA sense strand
ugaacauaauggagaaaga

SEQ ID NO: 2664712 - RNA, 19 nt, Homo sapiens
  misc_RNA (1)...(19): siRNA sense strand
ggaagaaaacccauggaaa

SEQ ID NO: 2664713 - RNA, 19 nt, Homo sapiens
  misc_RNA (1)...(19): siRNA sense strand
ugacggaugcugaaggaaa

SEQ ID NO: 2664714 - RNA, 19 nt, Homo sapiens
  misc_RNA (1)...(19): siRNA sense strand
caagaaacaaaguguacaa

SEQ ID NO: 2664715 - RNA, 19 nt, Homo sapiens
  misc_RNA (1)...(19): siRNA sense strand
aagcagaagaugaagaaaa

SEQ ID NO: 2664716 - RNA, 19 nt, Homo sapiens
  misc_RNA (1)...(19): siRNA sense strand
cacaguaaccguagagcaa

SEQ ID NO: 2664717 - RNA, 19 nt, Homo sapiens
  misc_RNA (1)...(19): siRNA sense strand
caguaaccguagagcaauu

SEQ ID NO: 2664718 - RNA, 19 nt, Homo sapiens
  misc_RNA (1)...(19): siRNA sense strand
aauaugaggaagaggaaga

SEQ ID NO: 2664719 - RNA, 19 nt, Homo sapiens
  misc_RNA (1)...(19): siRNA sense strand
cugaaagcuuuguuaggaa

SEQ ID NO: 2664720 - RNA, 19 nt, Homo sapiens
  misc_RNA (1)...(19): siRNA sense strand
agagaaagaagcagaagau

SEQ ID NO: 2664721 - RNA, 19 nt, Homo sapiens
  misc_RNA (1)...(19): siRNA sense strand
ggagaaauagugaaaccaa

SEQ ID NO: 2664722 - RNA, 19 nt, Homo sapiens
  misc_RNA (1)...(19): siRNA sense strand
ccugguaagaggaggaaga

SEQ ID NO: 2664723 - RNA, 19 nt, Homo sapiens
  misc_RNA (1)...(19): siRNA sense strand
ggauugaacauaauggaga

SEQ ID NO: 2664724 - RNA, 19 nt, Homo sapiens
  misc_RNA (1)...(19): siRNA sense strand
aaacuguugcaaagagaaa

SEQ ID NO: 2664725 - RNA, 19 nt, Homo sapiens
  misc_RNA (1)...(19): siRNA sense strand
ccuaagaagagucagguuu

SEQ ID NO: 2664726 - RNA, 19 nt, Homo sapiens
  misc_RNA (1)...(19): siRNA sense strand
cugacuguguagugggcaa

SEQ ID NO: 2664727 - RNA, 19 nt, Homo sapiens
  misc_RNA (1)...(19): siRNA sense strand
agacuugaccagaaaggaa

SEQ ID NO: 2664728 - RNA, 19 nt, Homo sapiens
  misc_RNA (1)...(19): siRNA sense strand
gguagaauaacaaggacuu

SEQ ID NO: 2664729 - RNA, 19 nt, Homo sapiens
  misc_RNA (1)...(19): siRNA sense strand
guugugaguugcagagaca

SEQ ID NO: 2664730 - RNA, 19 nt, Homo sapiens
  misc_RNA (1)...(19): siRNA sense strand
guucaaaggcuaccggaga

SEQ ID NO: 2664731 - RNA, 19 nt, Homo sapiens
  misc_RNA (1)...(19): siRNA sense strand
ccaaacuguugcaaagaga

SEQ ID NO: 2664732 - RNA, 19 nt, Homo sapiens
  misc_RNA (1)...(19): siRNA sense strand
aagaagaaaggaaagggaa

SEQ ID NO: 2664733 - RNA, 19 nt, Homo sapiens
  misc_RNA (1)...(19): siRNA sense strand
gagcaaaccuuucagagga

SEQ ID NO: 2664734 - RNA, 19 nt, Homo sapiens
  misc_RNA (1)...(19): siRNA sense strand
caaugaauaaugcuggaaa

SEQ ID NO: 2664735 - RNA, 19 nt, Homo sapiens
  misc_RNA (1)...(19): siRNA sense strand
caaagagaaagaagcagaa

SEQ ID NO: 2664736 - RNA, 19 nt, Homo sapiens
  misc_RNA (1)...(19): siRNA sense strand
cgaaguuuacauuuggaaa

SEQ ID NO: 2664737 - RNA, 19 nt, Homo sapiens
  misc_RNA (1)...(19): siRNA sense strand
gggagaaucuugaaaacau

SEQ ID NO: 2664738 - RNA, 19 nt, Homo sapiens
  misc_RNA (1)...(19): siRNA sense strand
gcaaacuggaagaagugaa

SEQ ID NO: 2664739 - RNA, 19 nt, Homo sapiens
  misc_RNA (1)...(19): siRNA sense strand
caggaaagauagaagacgu

SEQ ID NO: 2664740 - RNA, 19 nt, Homo sapiens
  misc_RNA (1)...(19): siRNA sense strand
agaugugucuagagagcuu

SEQ ID NO: 2664741 - RNA, 19 nt, Homo sapiens
  misc_RNA (1)...(19): siRNA sense strand
cuaaauaugaggaagagga

SEQ ID NO: 2664742 - RNA, 19 nt, Homo sapiens
  misc_RNA (1)...(19): siRNA sense strand
ggagaaucuugaaaacaua

SEQ ID NO: 2664743 - RNA, 19 nt, Homo sapiens
  misc_RNA (1)...(19): siRNA sense strand
gugaaagaaaggaugacuu

SEQ ID NO: 2664744 - RNA, 19 nt, Homo sapiens
  misc_RNA (1)...(19): siRNA sense strand
gggacucauccgagcuuaa

SEQ ID NO: 2664745 - RNA, 19 nt, Homo sapiens
  misc_RNA (1)...(19): siRNA sense strand
cggaaguguuugaugaauc

SEQ ID NO: 2664746 - RNA, 19 nt, Homo sapiens
  misc_RNA (1)...(19): siRNA sense strand
cgaaggucuuguauggauu

SEQ ID NO: 2664747 - RNA, 19 nt, Homo sapiens
  misc_RNA (1)...(19): siRNA sense strand
gguaagaggaggaagagcu

SEQ ID NO: 2664748 - RNA, 19 nt, Homo sapiens
  misc_RNA (1)...(19): siRNA sense strand
ggaaaucuccuuuggcaca

SEQ ID NO: 2664749 - RNA, 19 nt, Homo sapiens
  misc_RNA (1)...(19): siRNA sense strand
uaaauaugaggaagaggaa

SEQ ID NO: 2664750 - RNA, 19 nt, Homo sapiens
  misc_RNA (1)...(19): siRNA sense strand
cuucaaauaaccaugagaa

SEQ ID NO: 2664751 - RNA, 19 nt, Homo sapiens
  misc_RNA (1)...(19): siRNA sense strand
cagcaguggauuugaaagu

SEQ ID NO: 2664752 - RNA, 19 nt, Homo sapiens
  misc_RNA (1)...(19): siRNA sense strand
gaauauccuaucagagaga

SEQ ID NO: 2664753 - RNA, 19 nt, Homo sapiens
  misc_RNA (1)...(19): siRNA sense strand
aagacuggguucagguuau

SEQ ID NO: 2664754 - RNA, 19 nt, Homo sapiens
  misc_RNA (1)...(19): siRNA sense strand
gugaggauuugggaagaaa

SEQ ID NO: 2664755 - RNA, 19 nt, Homo sapiens
  misc_RNA (1)...(19): siRNA sense strand
ugcagagacaggaaagaua

SEQ ID NO: 2664756 - RNA, 19 nt, Homo sapiens
  misc_RNA (1)...(19): siRNA sense strand
ugcagaaagaagaaaggaa

SEQ ID NO: 2664757 - RNA, 19 nt, Homo sapiens
  misc_RNA (1)...(19): siRNA sense strand
agccaaaagaagaacaaua

SEQ ID NO: 2664758 - RNA, 19 nt, Homo sapiens
  misc_RNA (1)...(19): siRNA sense strand
gaugaagauccaaauacaa

SEQ ID NO: 2664759 - RNA, 19 nt, Homo sapiens
  misc_RNA (1)...(19): siRNA sense strand
cacuuuaagagaacgaaua

SEQ ID NO: 2664760 - RNA, 19 nt, Homo sapiens
  misc_RNA (1)...(19): siRNA sense strand
agaagcagaagaugaagaa

SEQ ID NO: 2664761 - RNA, 19 nt, Homo sapiens
  misc_RNA (1)...(19): siRNA sense strand
agaagaaaucaauugguca

SEQ ID NO: 2664762 - RNA, 19 nt, Homo sapiens
  misc_RNA (1)...(19): siRNA sense strand
ggucaguguuguagaagag

SEQ ID NO: 2664763 - RNA, 19 nt, Homo sapiens
  misc_RNA (1)...(19): siRNA sense strand
agcagaagaugaagaaaau

SEQ ID NO: 2664764 - RNA, 19 nt, Homo sapiens
  misc_RNA (1)...(19): siRNA sense strand
aggaagaggaagagaguua

SEQ ID NO: 2664765 - RNA, 19 nt, Homo sapiens
  misc_RNA (1)...(19): siRNA sense strand
agaagaaaggaaagggaaa

SEQ ID NO: 2664766 - RNA, 19 nt, Homo sapiens
  misc_RNA (1)...(19): siRNA sense strand
ccguagagcaauugggaau

SEQ ID NO: 2664767 - RNA, 19 nt, Homo sapiens
  misc_RNA (1)...(19): siRNA sense strand
agaaagaagcagaagauga

SEQ ID NO: 2664768 - RNA, 19 nt, Homo sapiens
  misc_RNA (1)...(19): siRNA sense strand
cuacagaaggauuuagaaa

SEQ ID NO: 2664769 - RNA, 19 nt, Homo sapiens
  misc_RNA (1)...(19): siRNA sense strand
ccuaaaguugguagaauaa

SEQ ID NO: 2664770 - RNA, 19 nt, Homo sapiens
  misc_RNA (1)...(19): siRNA sense strand
gcaaagagaaagaagcaga

SEQ ID NO: 2664771 - RNA, 19 nt, Homo sapiens
  misc_RNA (1)...(19): siRNA sense strand
aggaggaagucucaagaaa

SEQ ID NO: 2664772 - RNA, 19 nt, Homo sapiens
  misc_RNA (1)...(19): siRNA sense strand
uccuaaaguugguagaaua

SEQ ID NO: 2664773 - RNA, 19 nt, Homo sapiens
  misc_RNA (1)...(19): siRNA sense strand
ugaacauaauggagaaaga

SEQ ID NO: 2664774 - RNA, 19 nt, Homo sapiens
  misc_RNA (1)...(19): siRNA sense strand
ggaagaaaacccauggaaa

SEQ ID NO: 2664775 - RNA, 19 nt, Homo sapiens
  misc_RNA (1)...(19): siRNA sense strand
ugacggaugcugaaggaaa

SEQ ID NO: 2664776 - RNA, 19 nt, Homo sapiens
  misc_RNA (1)...(19): siRNA sense strand
caagaaacaaaguguacaa

SEQ ID NO: 2664777 - RNA, 19 nt, Homo sapiens
  misc_RNA (1)...(19): siRNA sense strand
aagcagaagaugaagaaaa

SEQ ID NO: 2664778 - RNA, 19 nt, Homo sapiens
  misc_RNA (1)...(19): siRNA sense strand
cacaguaaccguagagcaa

SEQ ID NO: 2664779 - RNA, 19 nt, Homo sapiens
  misc_RNA (1)...(19): siRNA sense strand
caguaaccguagagcaauu

SEQ ID NO: 2664780 - RNA, 19 nt, Homo sapiens
  misc_RNA (1)...(19): siRNA sense strand
aauaugaggaagaggaaga

SEQ ID NO: 2664781 - RNA, 19 nt, Homo sapiens
  misc_RNA (1)...(19): siRNA sense strand
cugaaagcuuuguuaggaa

SEQ ID NO: 2664782 - RNA, 19 nt, Homo sapiens
  misc_RNA (1)...(19): siRNA sense strand
agagaaagaagcagaagau

SEQ ID NO: 2664783 - RNA, 19 nt, Homo sapiens
  misc_RNA (1)...(19): siRNA sense strand
ccugguaagaggaggaaga

SEQ ID NO: 2664784 - RNA, 19 nt, Homo sapiens
  misc_RNA (1)...(19): siRNA sense strand
ggauugaacauaauggaga

SEQ ID NO: 2664785 - RNA, 19 nt, Homo sapiens
  misc_RNA (1)...(19): siRNA sense strand
aaacuguugcaaagagaaa

SEQ ID NO: 2664786 - RNA, 19 nt, Homo sapiens
  misc_RNA (1)...(19): siRNA sense strand
ccuaagaagagucagguuu

SEQ ID NO: 2664787 - RNA, 19 nt, Homo sapiens
  misc_RNA (1)...(19): siRNA sense strand
cugacuguguagugggcaa

SEQ ID NO: 2664788 - RNA, 19 nt, Homo sapiens
  misc_RNA (1)...(19): siRNA sense strand
agacuugaccagaaaggaa

SEQ ID NO: 2664789 - RNA, 19 nt, Homo sapiens
  misc_RNA (1)...(19): siRNA sense strand
gguagaauaacaaggacuu

SEQ ID NO: 2664790 - RNA, 19 nt, Homo sapiens
  misc_RNA (1)...(19): siRNA sense strand
guugugaguugcagagaca

SEQ ID NO: 2664791 - RNA, 19 nt, Homo sapiens
  misc_RNA (1)...(19): siRNA sense strand
guucaaaggcuaccggaga

SEQ ID NO: 2664792 - RNA, 19 nt, Homo sapiens
  misc_RNA (1)...(19): siRNA sense strand
ccaaacuguugcaaagaga

SEQ ID NO: 2664793 - RNA, 19 nt, Homo sapiens
  misc_RNA (1)...(19): siRNA sense strand
aagaagaaaggaaagggaa

SEQ ID NO: 2664794 - RNA, 19 nt, Homo sapiens
  misc_RNA (1)...(19): siRNA sense strand
gagcaaaccuuucagagga

SEQ ID NO: 2664795 - RNA, 19 nt, Homo sapiens
  misc_RNA (1)...(19): siRNA sense strand
caaugaauaaugcuggaaa

SEQ ID NO: 2664796 - RNA, 19 nt, Homo sapiens
  misc_RNA (1)...(19): siRNA sense strand
caaagagaaagaagcagaa

SEQ ID NO: 2664797 - RNA, 19 nt, Homo sapiens
  misc_RNA (1)...(19): siRNA sense strand
cgaaguuuacauuuggaaa

SEQ ID NO: 2664798 - RNA, 19 nt, Homo sapiens
  misc_RNA (1)...(19): siRNA sense strand
gggagaaucuugaaaacau

SEQ ID NO: 2664799 - RNA, 19 nt, Homo sapiens
  misc_RNA (1)...(19): siRNA sense strand
gcaaacuggaagaagugaa

SEQ ID NO: 2664800 - RNA, 19 nt, Homo sapiens
  misc_RNA (1)...(19): siRNA sense strand
caggaaagauagaagacgu

SEQ ID NO: 2664801 - RNA, 19 nt, Homo sapiens
  misc_RNA (1)...(19): siRNA sense strand
agaugugucuagagagcuu

SEQ ID NO: 2664802 - RNA, 19 nt, Homo sapiens
  misc_RNA (1)...(19): siRNA sense strand
cuaaauaugaggaagagga

SEQ ID NO: 2664803 - RNA, 19 nt, Homo sapiens
  misc_RNA (1)...(19): siRNA sense strand
ggagaaucuugaaaacaua

SEQ ID NO: 2664804 - RNA, 19 nt, Homo sapiens
  misc_RNA (1)...(19): siRNA sense strand
gugaaagaaaggaugacuu

SEQ ID NO: 2664805 - RNA, 19 nt, Homo sapiens
  misc_RNA (1)...(19): siRNA sense strand
gggacucauccgagcuuaa

SEQ ID NO: 2664806 - RNA, 19 nt, Homo sapiens
  misc_RNA (1)...(19): siRNA sense strand
cggaaguguuugaugaauc

SEQ ID NO: 2664807 - RNA, 19 nt, Homo sapiens
  misc_RNA (1)...(19): siRNA sense strand
cgaaggucuuguauggauu

SEQ ID NO: 2664808 - RNA, 19 nt, Homo sapiens
  misc_RNA (1)...(19): siRNA sense strand
gguaagaggaggaagagcu

SEQ ID NO: 2664809 - RNA, 19 nt, Homo sapiens
  misc_RNA (1)...(19): siRNA sense strand
ggaaaucuccuuuggcaca

SEQ ID NO: 2664810 - RNA, 19 nt, Homo sapiens
  misc_RNA (1)...(19): siRNA sense strand
uaaauaugaggaagaggaa

SEQ ID NO: 2664811 - RNA, 19 nt, Homo sapiens
  misc_RNA (1)...(19): siRNA sense strand
cuucaaauaaccaugagaa

SEQ ID NO: 2664812 - RNA, 19 nt, Homo sapiens
  misc_RNA (1)...(19): siRNA sense strand
cagcaguggauuugaaagu

SEQ ID NO: 2664813 - RNA, 19 nt, Homo sapiens
  misc_RNA (1)...(19): siRNA sense strand
gaauauccuaucagagaga

SEQ ID NO: 2664814 - RNA, 19 nt, Homo sapiens
  misc_RNA (1)...(19): siRNA sense strand
aagacuggguucagguuau

SEQ ID NO: 2664815 - RNA, 19 nt, Homo sapiens
  misc_RNA (1)...(19): siRNA sense strand
gugaggauuugggaagaaa

SEQ ID NO: 2664816 - RNA, 19 nt, Homo sapiens
  misc_RNA (1)...(19): siRNA sense strand
ugcagagacaggaaagaua

SEQ ID NO: 2664817 - RNA, 19 nt, Homo sapiens
  misc_RNA (1)...(19): siRNA sense strand
ugcagaaagaagaaaggaa

SEQ ID NO: 2664818 - RNA, 19 nt, Homo sapiens
  misc_RNA (1)...(19): siRNA sense strand
agccaaaagaagaacaaua

SEQ ID NO: 2664819 - RNA, 19 nt, Homo sapiens
  misc_RNA (1)...(19): siRNA sense strand
gaugaagauccaaauacaa

SEQ ID NO: 2664820 - RNA, 19 nt, Homo sapiens
  misc_RNA (1)...(19): siRNA sense strand
cacuuuaagagaacgaaua

SEQ ID NO: 2664821 - RNA, 19 nt, Homo sapiens
  misc_RNA (1)...(19): siRNA sense strand
agaagcagaagaugaagaa

SEQ ID NO: 2664822 - RNA, 19 nt, Homo sapiens
  misc_RNA (1)...(19): siRNA sense strand
agaagaaaucaauugguca

SEQ ID NO: 2664823 - RNA, 19 nt, Homo sapiens
  misc_RNA (1)...(19): siRNA sense strand
ggucaguguuguagaagag

SEQ ID NO: 2664824 - RNA, 19 nt, Homo sapiens
  misc_RNA (1)...(19): siRNA sense strand
agcagaagaugaagaaaau

SEQ ID NO: 2664825 - RNA, 19 nt, Homo sapiens
  misc_RNA (1)...(19): siRNA sense strand
gcguaaaggaggaacaccu

SEQ ID NO: 2664826 - RNA, 19 nt, Homo sapiens
  misc_RNA (1)...(19): siRNA sense strand
guaagaggaggaagagcuu

SEQ ID NO: 2664827 - RNA, 19 nt, Homo sapiens
  misc_RNA (1)...(19): siRNA sense strand
aggaagaggaagcaggauu

SEQ ID NO: 2664828 - RNA, 19 nt, Homo sapiens
  misc_RNA (1)...(19): siRNA sense strand
ccaauuguggagaaggaaa

SEQ ID NO: 2664829 - RNA, 19 nt, Homo sapiens
  misc_RNA (1)...(19): siRNA sense strand
ugaaauaaauagacugcca

SEQ ID NO: 2664830 - RNA, 19 nt, Homo sapiens
  misc_RNA (1)...(19): siRNA sense strand
agaagaaagcgcauugcaa

SEQ ID NO: 2664831 - RNA, 19 nt, Homo sapiens
  misc_RNA (1)...(19): siRNA sense strand
uggagagaaagcugauaaa

SEQ ID NO: 2664832 - RNA, 19 nt, Homo sapiens
  misc_RNA (1)...(19): siRNA sense strand
cuagaaauuccaagcaaaa

SEQ ID NO: 2664833 - RNA, 19 nt, Homo sapiens
  misc_RNA (1)...(19): siRNA sense strand
cugucaacuucaugaaaca

SEQ ID NO: 2664834 - RNA, 19 nt, Homo sapiens
  misc_RNA (1)...(19): siRNA sense strand
acguguaguagcagaguuu

SEQ ID NO: 2664835 - RNA, 19 nt, Homo sapiens
  misc_RNA (1)...(19): siRNA sense strand
ccuaaauguccaaacaaaa

SEQ ID NO: 2664836 - RNA, 19 nt, Homo sapiens
  misc_RNA (1)...(19): siRNA sense strand
gcuugguccuagaagagaa

SEQ ID NO: 2664837 - RNA, 19 nt, Homo sapiens
  misc_RNA (1)...(19): siRNA sense strand
caauuguggagaaggaaaa

SEQ ID NO: 2664838 - RNA, 19 nt, Homo sapiens
  misc_RNA (1)...(19): siRNA sense strand
agaagauguccaagaacuu

SEQ ID NO: 2664839 - RNA, 19 nt, Homo sapiens
  misc_RNA (1)...(19): siRNA sense strand
aagaaagcgcauugcaaga

SEQ ID NO: 2664840 - RNA, 19 nt, Homo sapiens
  misc_RNA (1)...(19): siRNA sense strand
caaaauaagugguaccuca

SEQ ID NO: 2664841 - RNA, 19 nt, Homo sapiens
  misc_RNA (1)...(19): siRNA sense strand
cuggagagaaagcugauaa

SEQ ID NO: 2664842 - RNA, 19 nt, Homo sapiens
  misc_RNA (1)...(19): siRNA sense strand
agguagaagauguccaaga

SEQ ID NO: 2664843 - RNA, 19 nt, Homo sapiens
  misc_RNA (1)...(19): siRNA sense strand
agaaaaucgucccuggaaa

SEQ ID NO: 2664844 - RNA, 19 nt, Homo sapiens
  misc_RNA (1)...(19): siRNA sense strand
cuucaaaggaacauaaagu

SEQ ID NO: 2664845 - RNA, 19 nt, Homo sapiens
  misc_RNA (1)...(19): siRNA sense strand
acggaauguccuagggcuu

SEQ ID NO: 2664846 - RNA, 19 nt, Homo sapiens
  misc_RNA (1)...(19): siRNA sense strand
gaaucaaauauguggguug

SEQ ID NO: 2664847 - RNA, 19 nt, Homo sapiens
  misc_RNA (1)...(19): siRNA sense strand
cugcuaaguaucaaccaaa

SEQ ID NO: 2664848 - RNA, 19 nt, Homo sapiens
  misc_RNA (1)...(19): siRNA sense strand
gguugauacccucaggaau

SEQ ID NO: 2664849 - RNA, 19 nt, Homo sapiens
  misc_RNA (1)...(19): siRNA sense strand
agccaauuguggagaagga

SEQ ID NO: 2664850 - RNA, 19 nt, Homo sapiens
  misc_RNA (1)...(19): siRNA sense strand
ggaaaaucguguugguucu

SEQ ID NO: 2664851 - RNA, 19 nt, Homo sapiens
  misc_RNA (1)...(19): siRNA sense strand
aaauauguggguuggaaga

SEQ ID NO: 2664852 - RNA, 19 nt, Homo sapiens
  misc_RNA (1)...(19): siRNA sense strand
guaucaaggaauucuagaa

SEQ ID NO: 2664853 - RNA, 19 nt, Homo sapiens
  misc_RNA (1)...(19): siRNA sense strand
acagguuucuggaaggaau

SEQ ID NO: 2664854 - RNA, 19 nt, Homo sapiens
  misc_RNA (1)...(19): siRNA sense strand
aaagagaguaguugggugu

SEQ ID NO: 2664855 - RNA, 19 nt, Homo sapiens
  misc_RNA (1)...(19): siRNA sense strand
auauguggguuggaagaaa

SEQ ID NO: 2664856 - RNA, 19 nt, Homo sapiens
  misc_RNA (1)...(19): siRNA sense strand
uugcagaacccaucaaaca

SEQ ID NO: 2664857 - RNA, 19 nt, Homo sapiens
  misc_RNA (1)...(19): siRNA sense strand
ccucggguucugagccaaa

SEQ ID NO: 2664858 - RNA, 19 nt, Homo sapiens
  misc_RNA (1)...(19): siRNA sense strand
uguccuagggcuuggcaau

SEQ ID NO: 2664859 - RNA, 19 nt, Homo sapiens
  misc_RNA (1)...(19): siRNA sense strand
uacuaauaccagagauaca

SEQ ID NO: 2664860 - RNA, 19 nt, Homo sapiens
  misc_RNA (1)...(19): siRNA sense strand
agaguaaaucagaagucau

SEQ ID NO: 2664861 - RNA, 19 nt, Homo sapiens
  misc_RNA (1)...(19): siRNA sense strand
cagucugcuccaagaagaa

SEQ ID NO: 2664862 - RNA, 19 nt, Homo sapiens
  misc_RNA (1)...(19): siRNA sense strand
aggacaaaggugugagaau

SEQ ID NO: 2664863 - RNA, 19 nt, Homo sapiens
  misc_RNA (1)...(19): siRNA sense strand
agaagaggcugguggcaga

SEQ ID NO: 2664864 - RNA, 19 nt, Homo sapiens
  misc_RNA (1)...(19): siRNA sense strand
agucaaagcucaaagccuu

SEQ ID NO: 2664865 - RNA, 19 nt, Homo sapiens
  misc_RNA (1)...(19): siRNA sense strand
uggaagaggaggacgguca

SEQ ID NO: 2664866 - RNA, 19 nt, Homo sapiens
  misc_RNA (1)...(19): siRNA sense strand
cagaggaggaagaggacga

SEQ ID NO: 2664867 - RNA, 19 nt, Homo sapiens
  misc_RNA (1)...(19): siRNA sense strand
aggaagaggacgaagagga

SEQ ID NO: 2664868 - RNA, 19 nt, Homo sapiens
  misc_RNA (1)...(19): siRNA sense strand
aggaggaagaggacgaaga

SEQ ID NO: 2664869 - RNA, 19 nt, Homo sapiens
  misc_RNA (1)...(19): siRNA sense strand
uggcagaggaggaagagga

SEQ ID NO: 2664870 - RNA, 19 nt, Homo sapiens
  misc_RNA (1)...(19): siRNA sense strand
aagaggagguggaagagga

SEQ ID NO: 2664871 - RNA, 19 nt, Homo sapiens
  misc_RNA (1)...(19): siRNA sense strand
aggaggaacuggaccgcuu

SEQ ID NO: 2664872 - RNA, 19 nt, Homo sapiens
  misc_RNA (1)...(19): siRNA sense strand
aaggagagucuguuggaga

SEQ ID NO: 2664873 - RNA, 19 nt, Homo sapiens
  misc_RNA (1)...(19): siRNA sense strand
ccaaggagcagcugcgguu

SEQ ID NO: 2664874 - RNA, 19 nt, Homo sapiens
  misc_RNA (1)...(19): siRNA sense strand
gggaguucucggugcucaa

SEQ ID NO: 2664875 - RNA, 19 nt, Homo sapiens
  misc_RNA (1)...(19): siRNA sense strand
ccaagcagucaaagcucaa

SEQ ID NO: 2664876 - RNA, 19 nt, Homo sapiens
  misc_RNA (1)...(19): siRNA sense strand
cuggaaaaggggaaggaga

SEQ ID NO: 2664877 - RNA, 19 nt, Homo sapiens
  misc_RNA (1)...(19): siRNA sense strand
cugcaggagaucacagaca

SEQ ID NO: 2664878 - RNA, 19 nt, Homo sapiens
  misc_RNA (1)...(19): siRNA sense strand
aggacgaagaggaggugga

SEQ ID NO: 2664879 - RNA, 19 nt, Homo sapiens
  misc_RNA (1)...(19): siRNA sense strand
aaggagauucagauagaga

SEQ ID NO: 2664880 - RNA, 19 nt, Homo sapiens
  misc_RNA (1)...(19): siRNA sense strand
agggaacagaggaccuaaa

SEQ ID NO: 2664881 - RNA, 19 nt, Homo sapiens
  misc_RNA (1)...(19): siRNA sense strand
acgaagaaggagauucaga

SEQ ID NO: 2664882 - RNA, 19 nt, Homo sapiens
  misc_RNA (1)...(19): siRNA sense strand
uggaggagcugccuggaga

SEQ ID NO: 2664883 - RNA, 19 nt, Homo sapiens
  misc_RNA (1)...(19): siRNA sense strand
ccaccaacugggaugacaa

SEQ ID NO: 2664884 - RNA, 19 nt, Homo sapiens
  misc_RNA (1)...(19): siRNA sense strand
uugcggaggugaagggcuu

SEQ ID NO: 2664885 - RNA, 19 nt, Homo sapiens
  misc_RNA (1)...(19): siRNA sense strand
gggcuuuguccgggagaau

SEQ ID NO: 2664886 - RNA, 19 nt, Homo sapiens
  misc_RNA (1)...(19): siRNA sense strand
ggagagggauugagccaag

SEQ ID NO: 2664887 - RNA, 19 nt, Homo sapiens
  misc_RNA (1)...(19): siRNA sense strand
aggacaagacccugacuca

SEQ ID NO: 2664888 - RNA, 19 nt, Homo sapiens
  misc_RNA (1)...(19): siRNA sense strand
ucaucauggccgugggcau

SEQ ID NO: 2664889 - RNA, 19 nt, Homo sapiens
  misc_RNA (1)...(19): siRNA sense strand
acgcacugcuggagcggaa

SEQ ID NO: 2664890 - RNA, 19 nt, Homo sapiens
  misc_RNA (1)...(19): siRNA sense strand
cggaagaccacauggacga

SEQ ID NO: 2664891 - RNA, 19 nt, Homo sapiens
  misc_RNA (1)...(19): siRNA sense strand
cugaagagcuccuguggga

SEQ ID NO: 2664892 - RNA, 19 nt, Homo sapiens
  misc_RNA (1)...(19): siRNA sense strand
aggagaaccaggagcugaa

SEQ ID NO: 2664893 - RNA, 19 nt, Homo sapiens
  misc_RNA (1)...(19): siRNA sense strand
cagccuuuguggagcggua

SEQ ID NO: 2664894 - RNA, 19 nt, Homo sapiens
  misc_RNA (1)...(19): siRNA sense strand
cagccaaccagaagggcau

SEQ ID NO: 2664895 - RNA, 19 nt, Homo sapiens
  misc_RNA (1)...(19): siRNA sense strand
gagcgguacaugagggagu

SEQ ID NO: 2664896 - RNA, 19 nt, Homo sapiens
  misc_RNA (1)...(19): siRNA sense strand
gccucaucaucgacaguaa

SEQ ID NO: 2664897 - RNA, 19 nt, Homo sapiens
  misc_RNA (1)...(19): siRNA sense strand
uggacguggugcaggccua

SEQ ID NO: 2664898 - RNA, 19 nt, Homo sapiens
  misc_RNA (1)...(19): siRNA sense strand
acaacgugacccugggcaa

SEQ ID NO: 2664899 - RNA, 19 nt, Homo sapiens
  misc_RNA (1)...(19): siRNA sense strand
augaagaggugcuggaggu

SEQ ID NO: 2664900 - RNA, 19 nt, Homo sapiens
  misc_RNA (1)...(19): siRNA sense strand
gaaugcugagagagggcua

SEQ ID NO: 2664901 - RNA, 19 nt, Homo sapiens
  misc_RNA (1)...(19): siRNA sense strand
cggugcaguuccagauuca

SEQ ID NO: 2664902 - RNA, 19 nt, Homo sapiens
  misc_RNA (1)...(19): siRNA sense strand
aggcggagaacgaucaaau

SEQ ID NO: 2664903 - RNA, 19 nt, Homo sapiens
  misc_RNA (1)...(19): siRNA sense strand
cuacccaggcggagaacga

SEQ ID NO: 2664904 - RNA, 19 nt, Homo sapiens
  misc_RNA (1)...(19): siRNA sense strand
uggcacaggagaacgaaga

SEQ ID NO: 2664905 - RNA, 19 nt, Homo sapiens
  misc_RNA (1)...(19): siRNA sense strand
aagaggugcuggaggugga

SEQ ID NO: 2664906 - RNA, 19 nt, Homo sapiens
  misc_RNA (1)...(19): siRNA sense strand
ggaugguguucgugggcca

SEQ ID NO: 2664907 - RNA, 19 nt, Homo sapiens
  misc_RNA (1)...(19): siRNA sense strand
ggaagaacaagaaccggua

SEQ ID NO: 2664908 - RNA, 19 nt, Homo sapiens
  misc_RNA (1)...(19): siRNA sense strand
caacaguggcaaagccuga

SEQ ID NO: 2664909 - RNA, 19 nt, Homo sapiens
  misc_RNA (1)...(19): siRNA sense strand
gugaagauguggcgcgucu

SEQ ID NO: 2664910 - RNA, 19 nt, Homo sapiens
  misc_RNA (1)...(19): siRNA sense strand
guuaagaagaugugccgga

SEQ ID NO: 2664911 - RNA, 19 nt, Homo sapiens
  misc_RNA (1)...(19): siRNA sense strand
uguaugaugcggauggcua

SEQ ID NO: 2664912 - RNA, 19 nt, Homo sapiens
  misc_RNA (1)...(19): siRNA sense strand
ugugggaggcagaaggcua

SEQ ID NO: 2664913 - RNA, 19 nt, Homo sapiens
  misc_RNA (1)...(19): siRNA sense strand
ccgaagagagccugagccu

SEQ ID NO: 2664914 - RNA, 19 nt, Homo sapiens
  misc_RNA (1)...(19): siRNA sense strand
ccaaagagaagaagaauua

SEQ ID NO: 2664915 - RNA, 19 nt, Homo sapiens
  misc_RNA (1)...(19): siRNA sense strand
aagcagaauuagagaaaca

SEQ ID NO: 2664916 - RNA, 19 nt, Homo sapiens
  misc_RNA (1)...(19): siRNA sense strand
gaaagugaccucugagaaa

SEQ ID NO: 2664917 - RNA, 19 nt, Homo sapiens
  misc_RNA (1)...(19): siRNA sense strand
ugagaagagcagugacuaa

SEQ ID NO: 2664918 - RNA, 19 nt, Homo sapiens
  misc_RNA (1)...(19): siRNA sense strand
cagccaaagagaagaagaa

SEQ ID NO: 2664919 - RNA, 19 nt, Homo sapiens
  misc_RNA (1)...(19): siRNA sense strand
acaagcagaauuagagaaa

SEQ ID NO: 2664920 - RNA, 19 nt, Homo sapiens
  misc_RNA (1)...(19): siRNA sense strand
ugagaaagugagccagaaa

SEQ ID NO: 2664921 - RNA, 19 nt, Homo sapiens
  misc_RNA (1)...(19): siRNA sense strand
gccaaagagaagaagaauu

SEQ ID NO: 2664922 - RNA, 19 nt, Homo sapiens
  misc_RNA (1)...(19): siRNA sense strand
agaagaauuaggaagcaua

SEQ ID NO: 2664923 - RNA, 19 nt, Homo sapiens
  misc_RNA (1)...(19): siRNA sense strand
ccaaaauccaccaaagaaa

SEQ ID NO: 2664924 - RNA, 19 nt, Homo sapiens
  misc_RNA (1)...(19): siRNA sense strand
gaagaauuaggaagcauaa

SEQ ID NO: 2664925 - RNA, 19 nt, Homo sapiens
  misc_RNA (1)...(19): siRNA sense strand
ucuuauagaacaagcagaa

SEQ ID NO: 2664926 - RNA, 19 nt, Homo sapiens
  misc_RNA (1)...(19): siRNA sense strand
agaaagugagccagaaaca

SEQ ID NO: 2664927 - RNA, 19 nt, Homo sapiens
  misc_RNA (1)...(19): siRNA sense strand
acagauggcaccacaauaa

SEQ ID NO: 2664928 - RNA, 19 nt, Homo sapiens
  misc_RNA (1)...(19): siRNA sense strand
gggaugacacagaagauca

SEQ ID NO: 2664929 - RNA, 19 nt, Homo sapiens
  misc_RNA (1)...(19): siRNA sense strand
gagaagaagaauuaggaag

SEQ ID NO: 2664930 - RNA, 19 nt, Homo sapiens
  misc_RNA (1)...(19): siRNA sense strand
cagcaaauuaaaaggaaga

SEQ ID NO: 2664931 - RNA, 19 nt, Homo sapiens
  misc_RNA (1)...(19): siRNA sense strand
agaaggugcugcagagacu

SEQ ID NO: 2664932 - RNA, 19 nt, Homo sapiens
  misc_RNA (1)...(19): siRNA sense strand
gggagaggcuugugaggag

SEQ ID NO: 2664933 - RNA, 19 nt, Homo sapiens
  misc_RNA (1)...(19): siRNA sense strand
ccagaaacaugcugagccu

SEQ ID NO: 2664934 - RNA, 19 nt, Homo sapiens
  misc_RNA (1)...(19): siRNA sense strand
ggccaaggaaagagggaac

SEQ ID NO: 2664935 - RNA, 19 nt, Homo sapiens
  misc_RNA (1)...(19): siRNA sense strand
agaaacaugcugagccuuu

SEQ ID NO: 2664936 - RNA, 19 nt, Homo sapiens
  misc_RNA (1)...(19): siRNA sense strand
ccucugagaaagugagcca

SEQ ID NO: 2664937 - RNA, 19 nt, Homo sapiens
  misc_RNA (1)...(19): siRNA sense strand
ccucaugaccagccaaaga

SEQ ID NO: 2664938 - RNA, 19 nt, Homo sapiens
  misc_RNA (1)...(19): siRNA sense strand
gaacaagcagaauuagaga

SEQ ID NO: 2664939 - RNA, 19 nt, Homo sapiens
  misc_RNA (1)...(19): siRNA sense strand
cagcagcaaugaaggggaa

SEQ ID NO: 2664940 - RNA, 19 nt, Homo sapiens
  misc_RNA (1)...(19): siRNA sense strand
augaaaaggcacacaguau

SEQ ID NO: 2664941 - RNA, 19 nt, Homo sapiens
  misc_RNA (1)...(19): siRNA sense strand
ggaggaagauggugcggac

SEQ ID NO: 2664942 - RNA, 19 nt, Homo sapiens
  misc_RNA (1)...(19): siRNA sense strand
uagagaaacagcagagucu

SEQ ID NO: 2664943 - RNA, 19 nt, Homo sapiens
  misc_RNA (1)...(19): siRNA sense strand
agaaagugaccucugagaa

SEQ ID NO: 2664944 - RNA, 19 nt, Homo sapiens
  misc_RNA (1)...(19): siRNA sense strand
aagaagaauuaggaagcau

SEQ ID NO: 2664945 - RNA, 19 nt, Homo sapiens
  misc_RNA (1)...(19): siRNA sense strand
gguaaagacaccagggagg

SEQ ID NO: 2664946 - RNA, 19 nt, Homo sapiens
  misc_RNA (1)...(19): siRNA sense strand
gcacaggaagcacguguuu

SEQ ID NO: 2664947 - RNA, 19 nt, Homo sapiens
  misc_RNA (1)...(19): siRNA sense strand
gcacacagauggcaccaca

SEQ ID NO: 2664948 - RNA, 19 nt, Homo sapiens
  misc_RNA (1)...(19): siRNA sense strand
augcugagccuuugacaga

SEQ ID NO: 2664949 - RNA, 19 nt, Homo sapiens
  misc_RNA (1)...(19): siRNA sense strand
ccggggaggaagacgguaa

SEQ ID NO: 2664950 - RNA, 19 nt, Homo sapiens
  misc_RNA (1)...(19): siRNA sense strand
ccugagaagagcagugacu

SEQ ID NO: 2664951 - RNA, 19 nt, Homo sapiens
  misc_RNA (1)...(19): siRNA sense strand
agcacguguuuguggagaa

SEQ ID NO: 2664952 - RNA, 19 nt, Homo sapiens
  misc_RNA (1)...(19): siRNA sense strand
agagaagaagaauuaggaa

SEQ ID NO: 2664953 - RNA, 19 nt, Homo sapiens
  misc_RNA (1)...(19): siRNA sense strand
uaaagauaccagggaggaa

SEQ ID NO: 2664954 - RNA, 19 nt, Homo sapiens
  misc_RNA (1)...(19): siRNA sense strand
cagcgaggaagaugauaca

SEQ ID NO: 2664955 - RNA, 19 nt, Homo sapiens
  misc_RNA (1)...(19): siRNA sense strand
cagaagaagcaaaugaaca

SEQ ID NO: 2664956 - RNA, 19 nt, Homo sapiens
  misc_RNA (1)...(19): siRNA sense strand
gugugaauacuguggcaaa

SEQ ID NO: 2664957 - RNA, 19 nt, Homo sapiens
  misc_RNA (1)...(19): siRNA sense strand
cagaagaggagcuggcaga

SEQ ID NO: 2664958 - RNA, 19 nt, Homo sapiens
  misc_RNA (1)...(19): siRNA sense strand
ucaaagaggccuuggacga

SEQ ID NO: 2664959 - RNA, 19 nt, Homo sapiens
  misc_RNA (1)...(19): siRNA sense strand
aauauaagcuacaggcaca

SEQ ID NO: 2664960 - RNA, 19 nt, Homo sapiens
  misc_RNA (1)...(19): siRNA sense strand
ggguuaauguugaugagau

SEQ ID NO: 2664961 - RNA, 19 nt, Homo sapiens
  misc_RNA (1)...(19): siRNA sense strand
ccacaggacaagaagguca

SEQ ID NO: 2664962 - RNA, 19 nt, Homo sapiens
  misc_RNA (1)...(19): siRNA sense strand
aggaaggagaagcagguaa

SEQ ID NO: 2664963 - RNA, 19 nt, Homo sapiens
  misc_RNA (1)...(19): siRNA sense strand
augaagaggaagagaggca

SEQ ID NO: 2664964 - RNA, 19 nt, Homo sapiens
  misc_RNA (1)...(19): siRNA sense strand
ggucagaucaggaaagcca

SEQ ID NO: 2664965 - RNA, 19 nt, Homo sapiens
  misc_RNA (1)...(19): siRNA sense strand
agaacgagcuggaccguga

SEQ ID NO: 2664966 - RNA, 19 nt, Homo sapiens
  misc_RNA (1)...(19): siRNA sense strand
gaaaagaaguguaaggaag

SEQ ID NO: 2664967 - RNA, 19 nt, Homo sapiens
  misc_RNA (1)...(19): siRNA sense strand
gggugaggaggaaggagaa

SEQ ID NO: 2664968 - RNA, 19 nt, Homo sapiens
  misc_RNA (1)...(19): siRNA sense strand
ccuuaaacgccacguaauu

SEQ ID NO: 2664969 - RNA, 19 nt, Homo sapiens
  misc_RNA (1)...(19): siRNA sense strand
acaagaagaucaagcagca

SEQ ID NO: 2664970 - RNA, 19 nt, Homo sapiens
  misc_RNA (1)...(19): siRNA sense strand
ugaacaguuuacagaagaa

SEQ ID NO: 2664971 - RNA, 19 nt, Homo sapiens
  misc_RNA (1)...(19): siRNA sense strand
cggagaggcuaccaggaau

SEQ ID NO: 2664972 - RNA, 19 nt, Homo sapiens
  misc_RNA (1)...(19): siRNA sense strand
caggaaaggaggccagaca

SEQ ID NO: 2664973 - RNA, 19 nt, Homo sapiens
  misc_RNA (1)...(19): siRNA sense strand
auggagaccuggaguguga

SEQ ID NO: 2664974 - RNA, 19 nt, Homo sapiens
  misc_RNA (1)...(19): siRNA sense strand
aaggaagaugaucgggaaa

SEQ ID NO: 2664975 - RNA, 19 nt, Homo sapiens
  misc_RNA (1)...(19): siRNA sense strand
guuuacagaagaagcaaau

SEQ ID NO: 2664976 - RNA, 19 nt, Homo sapiens
  misc_RNA (1)...(19): siRNA sense strand
aggacaagaaggucaaaga

SEQ ID NO: 2664977 - RNA, 19 nt, Homo sapiens
  misc_RNA (1)...(19): siRNA sense strand
aagaggagcuggcagaaaa

SEQ ID NO: 2664978 - RNA, 19 nt, Homo sapiens
  misc_RNA (1)...(19): siRNA sense strand
gcaagaaguucgucagcuc

SEQ ID NO: 2664979 - RNA, 19 nt, Homo sapiens
  misc_RNA (1)...(19): siRNA sense strand
agaaguacucugacgucaa

SEQ ID NO: 2664980 - RNA, 19 nt, Homo sapiens
  misc_RNA (1)...(19): siRNA sense strand
gcgcaugacccacaggaca

SEQ ID NO: 2664981 - RNA, 19 nt, Homo sapiens
  misc_RNA (1)...(19): siRNA sense strand
cgcaugacccacaggacaa

SEQ ID NO: 2664982 - RNA, 19 nt, Homo sapiens
  misc_RNA (1)...(19): siRNA sense strand
cgugaaugcacucaaggaa

SEQ ID NO: 2664983 - RNA, 19 nt, Homo sapiens
  misc_RNA (1)...(19): siRNA sense strand
uaaggaagaugaucgggaa

SEQ ID NO: 2664984 - RNA, 19 nt, Homo sapiens
  misc_RNA (1)...(19): siRNA sense strand
acaucgagcgagugcacaa

SEQ ID NO: 2664985 - RNA, 19 nt, Homo sapiens
  misc_RNA (1)...(19): siRNA sense strand
auucagaaacacaguaaca

SEQ ID NO: 2664986 - RNA, 19 nt, Homo sapiens
  misc_RNA (1)...(19): siRNA sense strand
ggaaggagaagcagguaac

SEQ ID NO: 2664987 - RNA, 19 nt, Homo sapiens
  misc_RNA (1)...(19): siRNA sense strand
ccaucaaggccaaccucaa

SEQ ID NO: 2664988 - RNA, 19 nt, Homo sapiens
  misc_RNA (1)...(19): siRNA sense strand
ccagauaaauauaagcuac

SEQ ID NO: 2664989 - RNA, 19 nt, Homo sapiens
  misc_RNA (1)...(19): siRNA sense strand
cuaccaagauugugccagu

SEQ ID NO: 2664990 - RNA, 19 nt, Homo sapiens
  misc_RNA (1)...(19): siRNA sense strand
gagcaaccaaugaagucaa

SEQ ID NO: 2664991 - RNA, 19 nt, Homo sapiens
  misc_RNA (1)...(19): siRNA sense strand
agaaaagaaguguaaggaa

SEQ ID NO: 2664992 - RNA, 19 nt, Homo sapiens
  misc_RNA (1)...(19): siRNA sense strand
gcacauggaagaagggguu

SEQ ID NO: 2664993 - RNA, 19 nt, Homo sapiens
  misc_RNA (1)...(19): siRNA sense strand
uuacagaagaagcaaauga

SEQ ID NO: 2664994 - RNA, 19 nt, Homo sapiens
  misc_RNA (1)...(19): siRNA sense strand
ccagaagaucucaggaaag

SEQ ID NO: 2664995 - RNA, 19 nt, Homo sapiens
  misc_RNA (1)...(19): siRNA sense strand
ugaugacgagggagggcaa

SEQ ID NO: 2664996 - RNA, 19 nt, Homo sapiens
  misc_RNA (1)...(19): siRNA sense strand
ccuaagggguccacgaaga

SEQ ID NO: 2664997 - RNA, 19 nt, Homo sapiens
  misc_RNA (1)...(19): siRNA sense strand
acgaagaaguccagcacag

SEQ ID NO: 2664998 - RNA, 19 nt, Homo sapiens
  misc_RNA (1)...(19): siRNA sense strand
ugaaacaggagcuacaaau

SEQ ID NO: 2664999 - RNA, 19 nt, Homo sapiens
  misc_RNA (1)...(19): siRNA sense strand
ugggugaggaggaaggaga

SEQ ID NO: 2665000 - RNA, 19 nt, Homo sapiens
  misc_RNA (1)...(19): siRNA sense strand
guccagaagaucucaggaa

SEQ ID NO: 2665001 - RNA, 19 nt, Homo sapiens
  misc_RNA (1)...(19): siRNA sense strand
gccacguaauucagaaaca

SEQ ID NO: 2665002 - RNA, 19 nt, Homo sapiens
  misc_RNA (1)...(19): siRNA sense strand
aaaagaaguguaaggaaga

SEQ ID NO: 2665003 - RNA, 19 nt, Homo sapiens
  misc_RNA (1)...(19): siRNA sense strand
gguuuuaacugcacacgaa

SEQ ID NO: 2665004 - RNA, 19 nt, Homo sapiens
  misc_RNA (1)...(19): siRNA sense strand
gcuuucagcuggugaccca

SEQ ID NO: 2665005 - RNA, 19 nt, Homo sapiens
  misc_RNA (1)...(19): siRNA sense strand
aguuuacagaagaagcaaa

SEQ ID NO: 2665006 - RNA, 19 nt, Homo sapiens
  misc_RNA (1)...(19): siRNA sense strand
ugaauuugggugaggagga

SEQ ID NO: 2665007 - RNA, 19 nt, Homo sapiens
  misc_RNA (1)...(19): siRNA sense strand
cuacaaauucugagaccac

SEQ ID NO: 2665008 - RNA, 19 nt, Homo sapiens
  misc_RNA (1)...(19): siRNA sense strand
ucaaugugcaccugcgcaa

SEQ ID NO: 2665009 - RNA, 19 nt, Homo sapiens
  misc_RNA (1)...(19): siRNA sense strand
cagcaggugucucagguca

SEQ ID NO: 2665010 - RNA, 19 nt, Homo sapiens
  misc_RNA (1)...(19): siRNA sense strand
agaagaagcaaaugaacac

SEQ ID NO: 2665011 - RNA, 19 nt, Homo sapiens
  misc_RNA (1)...(19): siRNA sense strand
uggaacugcaugucaggaa

SEQ ID NO: 2665012 - RNA, 19 nt, Homo sapiens
  misc_RNA (1)...(19): siRNA sense strand
cagaagaagcaaaugaaca

SEQ ID NO: 2665013 - RNA, 19 nt, Homo sapiens
  misc_RNA (1)...(19): siRNA sense strand
gugugaauacuguggcaaa

SEQ ID NO: 2665014 - RNA, 19 nt, Homo sapiens
  misc_RNA (1)...(19): siRNA sense strand
cagaagaggagcuggcaga

SEQ ID NO: 2665015 - RNA, 19 nt, Homo sapiens
  misc_RNA (1)...(19): siRNA sense strand
ucaaagaggccuuggacga

SEQ ID NO: 2665016 - RNA, 19 nt, Homo sapiens
  misc_RNA (1)...(19): siRNA sense strand
aauauaagcuacaggcaca

SEQ ID NO: 2665017 - RNA, 19 nt, Homo sapiens
  misc_RNA (1)...(19): siRNA sense strand
ggguuaauguugaugagau

SEQ ID NO: 2665018 - RNA, 19 nt, Homo sapiens
  misc_RNA (1)...(19): siRNA sense strand
ccacaggacaagaagguca

SEQ ID NO: 2665019 - RNA, 19 nt, Homo sapiens
  misc_RNA (1)...(19): siRNA sense strand
aggaaggagaagcagguaa

SEQ ID NO: 2665020 - RNA, 19 nt, Homo sapiens
  misc_RNA (1)...(19): siRNA sense strand
augaagaggaagagaggca

SEQ ID NO: 2665021 - RNA, 19 nt, Homo sapiens
  misc_RNA (1)...(19): siRNA sense strand
ggucagaucaggaaagcca

SEQ ID NO: 2665022 - RNA, 19 nt, Homo sapiens
  misc_RNA (1)...(19): siRNA sense strand
gaaaagaaguguaaggaag

SEQ ID NO: 2665023 - RNA, 19 nt, Homo sapiens
  misc_RNA (1)...(19): siRNA sense strand
gggugaggaggaaggagaa

SEQ ID NO: 2665024 - RNA, 19 nt, Homo sapiens
  misc_RNA (1)...(19): siRNA sense strand
ccuuaaacgccacguaauu

SEQ ID NO: 2665025 - RNA, 19 nt, Homo sapiens
  misc_RNA (1)...(19): siRNA sense strand
acaagaagaucaagcagca

SEQ ID NO: 2665026 - RNA, 19 nt, Homo sapiens
  misc_RNA (1)...(19): siRNA sense strand
ugaacaguuuacagaagaa

SEQ ID NO: 2665027 - RNA, 19 nt, Homo sapiens
  misc_RNA (1)...(19): siRNA sense strand
cggagaggcuaccaggaau

SEQ ID NO: 2665028 - RNA, 19 nt, Homo sapiens
  misc_RNA (1)...(19): siRNA sense strand
caggaaaggaggccagaca

SEQ ID NO: 2665029 - RNA, 19 nt, Homo sapiens
  misc_RNA (1)...(19): siRNA sense strand
auggagaccuggaguguga

SEQ ID NO: 2665030 - RNA, 19 nt, Homo sapiens
  misc_RNA (1)...(19): siRNA sense strand
aaggaagaugaucgggaaa

SEQ ID NO: 2665031 - RNA, 19 nt, Homo sapiens
  misc_RNA (1)...(19): siRNA sense strand
guuuacagaagaagcaaau

SEQ ID NO: 2665032 - RNA, 19 nt, Homo sapiens
  misc_RNA (1)...(19): siRNA sense strand
aggacaagaaggucaaaga

SEQ ID NO: 2665033 - RNA, 19 nt, Homo sapiens
  misc_RNA (1)...(19): siRNA sense strand
aagaggagcuggcagaaaa

SEQ ID NO: 2665034 - RNA, 19 nt, Homo sapiens
  misc_RNA (1)...(19): siRNA sense strand
gcaagaaguucgucagcuc

SEQ ID NO: 2665035 - RNA, 19 nt, Homo sapiens
  misc_RNA (1)...(19): siRNA sense strand
agaaguacucugacgucaa

SEQ ID NO: 2665036 - RNA, 19 nt, Homo sapiens
  misc_RNA (1)...(19): siRNA sense strand
gcgcaugacccacaggaca

SEQ ID NO: 2665037 - RNA, 19 nt, Homo sapiens
  misc_RNA (1)...(19): siRNA sense strand
cgcaugacccacaggacaa

SEQ ID NO: 2665038 - RNA, 19 nt, Homo sapiens
  misc_RNA (1)...(19): siRNA sense strand
cgugaaugcacucaaggaa

SEQ ID NO: 2665039 - RNA, 19 nt, Homo sapiens
  misc_RNA (1)...(19): siRNA sense strand
uaaggaagaugaucgggaa

SEQ ID NO: 2665040 - RNA, 19 nt, Homo sapiens
  misc_RNA (1)...(19): siRNA sense strand
acaucgagcgagugcacaa

SEQ ID NO: 2665041 - RNA, 19 nt, Homo sapiens
  misc_RNA (1)...(19): siRNA sense strand
auucagaaacacaguaaca

SEQ ID NO: 2665042 - RNA, 19 nt, Homo sapiens
  misc_RNA (1)...(19): siRNA sense strand
ggaaggagaagcagguaac

SEQ ID NO: 2665043 - RNA, 19 nt, Homo sapiens
  misc_RNA (1)...(19): siRNA sense strand
ccaucaaggccaaccucaa

SEQ ID NO: 2665044 - RNA, 19 nt, Homo sapiens
  misc_RNA (1)...(19): siRNA sense strand
ccagauaaauauaagcuac

SEQ ID NO: 2665045 - RNA, 19 nt, Homo sapiens
  misc_RNA (1)...(19): siRNA sense strand
cuaccaagauugugccagu

SEQ ID NO: 2665046 - RNA, 19 nt, Homo sapiens
  misc_RNA (1)...(19): siRNA sense strand
gagcaaccaaugaagucaa

SEQ ID NO: 2665047 - RNA, 19 nt, Homo sapiens
  misc_RNA (1)...(19): siRNA sense strand
agaaaagaaguguaaggaa

SEQ ID NO: 2665048 - RNA, 19 nt, Homo sapiens
  misc_RNA (1)...(19): siRNA sense strand
gcacauggaagaagggguu

SEQ ID NO: 2665049 - RNA, 19 nt, Homo sapiens
  misc_RNA (1)...(19): siRNA sense strand
uuacagaagaagcaaauga

SEQ ID NO: 2665050 - RNA, 19 nt, Homo sapiens
  misc_RNA (1)...(19): siRNA sense strand
ccagaagaucucaggaaag

SEQ ID NO: 2665051 - RNA, 19 nt, Homo sapiens
  misc_RNA (1)...(19): siRNA sense strand
ugaugacgagggagggcaa

SEQ ID NO: 2665052 - RNA, 19 nt, Homo sapiens
  misc_RNA (1)...(19): siRNA sense strand
ccuaagggguccacgaaga

SEQ ID NO: 2665053 - RNA, 19 nt, Homo sapiens
  misc_RNA (1)...(19): siRNA sense strand
acgaagaaguccagcacag

SEQ ID NO: 2665054 - RNA, 19 nt, Homo sapiens
  misc_RNA (1)...(19): siRNA sense strand
ugaaacaggagcuacaaau

SEQ ID NO: 2665055 - RNA, 19 nt, Homo sapiens
  misc_RNA (1)...(19): siRNA sense strand
ugggugaggaggaaggaga

SEQ ID NO: 2665056 - RNA, 19 nt, Homo sapiens
  misc_RNA (1)...(19): siRNA sense strand
guccagaagaucucaggaa

SEQ ID NO: 2665057 - RNA, 19 nt, Homo sapiens
  misc_RNA (1)...(19): siRNA sense strand
gccacguaauucagaaaca

SEQ ID NO: 2665058 - RNA, 19 nt, Homo sapiens
  misc_RNA (1)...(19): siRNA sense strand
aaaagaaguguaaggaaga

SEQ ID NO: 2665059 - RNA, 19 nt, Homo sapiens
  misc_RNA (1)...(19): siRNA sense strand
gguuuuaacugcacacgaa

SEQ ID NO: 2665060 - RNA, 19 nt, Homo sapiens
  misc_RNA (1)...(19): siRNA sense strand
gcuuucagcuggugaccca

SEQ ID NO: 2665061 - RNA, 19 nt, Homo sapiens
  misc_RNA (1)...(19): siRNA sense strand
aguuuacagaagaagcaaa

SEQ ID NO: 2665062 - RNA, 19 nt, Homo sapiens
  misc_RNA (1)...(19): siRNA sense strand
ugaauuugggugaggagga

SEQ ID NO: 2665063 - RNA, 19 nt, Homo sapiens
  misc_RNA (1)...(19): siRNA sense strand
cuacaaauucugagaccac

SEQ ID NO: 2665064 - RNA, 19 nt, Homo sapiens
  misc_RNA (1)...(19): siRNA sense strand
ucaaugugcaccugcgcaa

SEQ ID NO: 2665065 - RNA, 19 nt, Homo sapiens
  misc_RNA (1)...(19): siRNA sense strand
cagcaggugucucagguca

SEQ ID NO: 2665066 - RNA, 19 nt, Homo sapiens
  misc_RNA (1)...(19): siRNA sense strand
agaagaagcaaaugaacac

SEQ ID NO: 2665067 - RNA, 19 nt, Homo sapiens
  misc_RNA (1)...(19): siRNA sense strand
uggaacugcaugucaggaa

SEQ ID NO: 2665068 - RNA, 19 nt, Homo sapiens
  misc_RNA (1)...(19): siRNA sense strand
uggaggaagccgagcacuu

SEQ ID NO: 2665069 - RNA, 19 nt, Homo sapiens
  misc_RNA (1)...(19): siRNA sense strand
gggcaaagcaggagagcca

SEQ ID NO: 2665070 - RNA, 19 nt, Homo sapiens
  misc_RNA (1)...(19): siRNA sense strand
cggaaaagucagaggguca

SEQ ID NO: 2665071 - RNA, 19 nt, Homo sapiens
  misc_RNA (1)...(19): siRNA sense strand
aggugugagaggagagaaa

SEQ ID NO: 2665072 - RNA, 19 nt, Homo sapiens
  misc_RNA (1)...(19): siRNA sense strand
aggaaauccaggagaaaga

SEQ ID NO: 2665073 - RNA, 19 nt, Homo sapiens
  misc_RNA (1)...(19): siRNA sense strand
agaaaggagaccagggaga

SEQ ID NO: 2665074 - RNA, 19 nt, Homo sapiens
  misc_RNA (1)...(19): siRNA sense strand
cggaaggaagacugguaua

SEQ ID NO: 2665075 - RNA, 19 nt, Homo sapiens
  misc_RNA (1)...(19): siRNA sense strand
uggcuaaggaugugugcaa

SEQ ID NO: 2665076 - RNA, 19 nt, Homo sapiens
  misc_RNA (1)...(19): siRNA sense strand
acauugacauccagggcaa

SEQ ID NO: 2665077 - RNA, 19 nt, Homo sapiens
  misc_RNA (1)...(19): siRNA sense strand
aggaaggguuaccaggaaa

SEQ ID NO: 2665078 - RNA, 19 nt, Homo sapiens
  misc_RNA (1)...(19): siRNA sense strand
ggugcaaaguacugaggau

SEQ ID NO: 2665079 - RNA, 19 nt, Homo sapiens
  misc_RNA (1)...(19): siRNA sense strand
ccaaaggagagaagggcga

SEQ ID NO: 2665080 - RNA, 19 nt, Homo sapiens
  misc_RNA (1)...(19): siRNA sense strand
gaaaggaagcaaaggggaa

SEQ ID NO: 2665081 - RNA, 19 nt, Homo sapiens
  misc_RNA (1)...(19): siRNA sense strand
gagaaggcacagaagggaa

SEQ ID NO: 2665082 - RNA, 19 nt, Homo sapiens
  misc_RNA (1)...(19): siRNA sense strand
agaaaggagucccaggcaa

SEQ ID NO: 2665083 - RNA, 19 nt, Homo sapiens
  misc_RNA (1)...(19): siRNA sense strand
agaaggcacagaagggaaa

SEQ ID NO: 2665084 - RNA, 19 nt, Homo sapiens
  misc_RNA (1)...(19): siRNA sense strand
caggaaagccagggagaga

SEQ ID NO: 2665085 - RNA, 19 nt, Homo sapiens
  misc_RNA (1)...(19): siRNA sense strand
cggaccaccaggagacaaa

SEQ ID NO: 2665086 - RNA, 19 nt, Homo sapiens
  misc_RNA (1)...(19): siRNA sense strand
acggaugcccggagaacaa

SEQ ID NO: 2665087 - RNA, 19 nt, Homo sapiens
  misc_RNA (1)...(19): siRNA sense strand
ccaggaaauccaggagaaa

SEQ ID NO: 2665088 - RNA, 19 nt, Homo sapiens
  misc_RNA (1)...(19): siRNA sense strand
aggagaacguggugcagau

SEQ ID NO: 2665089 - RNA, 19 nt, Homo sapiens
  misc_RNA (1)...(19): siRNA sense strand
gcucgcaggaggaggucaa

SEQ ID NO: 2665090 - RNA, 19 nt, Homo sapiens
  misc_RNA (1)...(19): siRNA sense strand
ugaaggaaaucuuggggaa

SEQ ID NO: 2665091 - RNA, 19 nt, Homo sapiens
  misc_RNA (1)...(19): siRNA sense strand
agaaaggugaugugggcau

SEQ ID NO: 2665092 - RNA, 19 nt, Homo sapiens
  misc_RNA (1)...(19): siRNA sense strand
ccuacaagcagguggccau

SEQ ID NO: 2665093 - RNA, 19 nt, Homo sapiens
  misc_RNA (1)...(19): siRNA sense strand
gggacuuccaggacugaaa

SEQ ID NO: 2665094 - RNA, 19 nt, Homo sapiens
  misc_RNA (1)...(19): siRNA sense strand
gcagaaaggugaucagggu

SEQ ID NO: 2665095 - RNA, 19 nt, Homo sapiens
  misc_RNA (1)...(19): siRNA sense strand
agaaaggugaucaggguca

SEQ ID NO: 2665096 - RNA, 19 nt, Homo sapiens
  misc_RNA (1)...(19): siRNA sense strand
aggaaaagauggugacacu

SEQ ID NO: 2665097 - RNA, 19 nt, Homo sapiens
  misc_RNA (1)...(19): siRNA sense strand
cccaggagaagaaggcaaa

SEQ ID NO: 2665098 - RNA, 19 nt, Homo sapiens
  misc_RNA (1)...(19): siRNA sense strand
ugguauaucuggcagguca

SEQ ID NO: 2665099 - RNA, 19 nt, Homo sapiens
  misc_RNA (1)...(19): siRNA sense strand
accaggaaauccaggagaa

SEQ ID NO: 2665100 - RNA, 19 nt, Homo sapiens
  misc_RNA (1)...(19): siRNA sense strand
cuggaaaggacgggccaaa

SEQ ID NO: 2665101 - RNA, 19 nt, Homo sapiens
  misc_RNA (1)...(19): siRNA sense strand
cgccaggaaccaagggaga

SEQ ID NO: 2665102 - RNA, 19 nt, Homo sapiens
  misc_RNA (1)...(19): siRNA sense strand
ucgaggaacgggagaacau

SEQ ID NO: 2665103 - RNA, 19 nt, Homo sapiens
  misc_RNA (1)...(19): siRNA sense strand
cagugaacagauuggguuu

SEQ ID NO: 2665104 - RNA, 19 nt, Homo sapiens
  misc_RNA (1)...(19): siRNA sense strand
acaagauggcccugagcau

SEQ ID NO: 2665105 - RNA, 19 nt, Homo sapiens
  misc_RNA (1)...(19): siRNA sense strand
gaagaaaggugacauggga

SEQ ID NO: 2665106 - RNA, 19 nt, Homo sapiens
  misc_RNA (1)...(19): siRNA sense strand
ugggagagacggcagcaaa

SEQ ID NO: 2665107 - RNA, 19 nt, Homo sapiens
  misc_RNA (1)...(19): siRNA sense strand
ggaaggguuaccaggaaaa

SEQ ID NO: 2665108 - RNA, 19 nt, Homo sapiens
  misc_RNA (1)...(19): siRNA sense strand
aggugagcgaggagccaaa

SEQ ID NO: 2665109 - RNA, 19 nt, Homo sapiens
  misc_RNA (1)...(19): siRNA sense strand
gcaagacugugauuggcaa

SEQ ID NO: 2665110 - RNA, 19 nt, Homo sapiens
  misc_RNA (1)...(19): siRNA sense strand
cagcuggagagaaggguga

SEQ ID NO: 2665111 - RNA, 19 nt, Homo sapiens
  misc_RNA (1)...(19): siRNA sense strand
aggccgaccuggagagaag

SEQ ID NO: 2665112 - RNA, 19 nt, Homo sapiens
  misc_RNA (1)...(19): siRNA sense strand
gggacaggaaggugcacau

SEQ ID NO: 2665113 - RNA, 19 nt, Homo sapiens
  misc_RNA (1)...(19): siRNA sense strand
ugggaucaaaggugacaaa

SEQ ID NO: 2665114 - RNA, 19 nt, Homo sapiens
  misc_RNA (1)...(19): siRNA sense strand
gaaaagggaaggauggaga

SEQ ID NO: 2665115 - RNA, 19 nt, Homo sapiens
  misc_RNA (1)...(19): siRNA sense strand
aaaggagaccagggagaaa

SEQ ID NO: 2665116 - RNA, 19 nt, Homo sapiens
  misc_RNA (1)...(19): siRNA sense strand
uggccagaaaggaagcaaa

SEQ ID NO: 2665117 - RNA, 19 nt, Homo sapiens
  misc_RNA (1)...(19): siRNA sense strand
ccauaggucccaaagguga

SEQ ID NO: 2665118 - RNA, 19 nt, Homo sapiens
  misc_RNA (1)...(19): siRNA sense strand
uggaccuaagggagagaaa

SEQ ID NO: 2665119 - RNA, 19 nt, Homo sapiens
  misc_RNA (1)...(19): siRNA sense strand
auggaggaaccaaggaaau

SEQ ID NO: 2665120 - RNA, 19 nt, Homo sapiens
  misc_RNA (1)...(19): siRNA sense strand
ggaaaagggugaaaagggu

SEQ ID NO: 2665121 - RNA, 19 nt, Homo sapiens
  misc_RNA (1)...(19): siRNA sense strand
gggaagucaaggagaacgu

SEQ ID NO: 2665122 - RNA, 19 nt, Homo sapiens
  misc_RNA (1)...(19): siRNA sense strand
cugggagggcaauguguua

SEQ ID NO: 2665123 - RNA, 19 nt, Homo sapiens
  misc_RNA (1)...(19): siRNA sense strand
cgggagaaccaggagagaa

SEQ ID NO: 2665124 - RNA, 19 nt, Homo sapiens
  misc_RNA (1)...(19): siRNA sense strand
guguagaaggagaucgcuu

SEQ ID NO: 2665125 - RNA, 19 nt, Homo sapiens
  misc_RNA (1)...(19): siRNA sense strand
gggagacauaggagccauu

SEQ ID NO: 2665126 - RNA, 19 nt, Homo sapiens
  misc_RNA (1)...(19): siRNA sense strand
aggaauagcuggaccacag

SEQ ID NO: 2665127 - RNA, 19 nt, Homo sapiens
  misc_RNA (1)...(19): siRNA sense strand
agacaggaccagcuggaca

SEQ ID NO: 2665128 - RNA, 19 nt, Homo sapiens
  misc_RNA (1)...(19): siRNA sense strand
cauaggaccuuuuggccaa

SEQ ID NO: 2665129 - RNA, 19 nt, Homo sapiens
  misc_RNA (1)...(19): siRNA sense strand
gacauaaaucucuuggcua

SEQ ID NO: 2665130 - RNA, 19 nt, Homo sapiens
  misc_RNA (1)...(19): siRNA sense strand
aggcaaagagggcagagau

SEQ ID NO: 2665131 - RNA, 19 nt, Homo sapiens
  misc_RNA (1)...(19): siRNA sense strand
gcgaggcacucaaggagga

SEQ ID NO: 2665132 - RNA, 19 nt, Homo sapiens
  misc_RNA (1)...(19): siRNA sense strand
ugagaggagagaaaggaga

SEQ ID NO: 2665133 - RNA, 19 nt, Homo sapiens
  misc_RNA (1)...(19): siRNA sense strand
gggugaagcugguccugca

SEQ ID NO: 2665134 - RNA, 19 nt, Homo sapiens
  misc_RNA (1)...(19): siRNA sense strand
cgaagaagucagcaaggaa

SEQ ID NO: 2665135 - RNA, 19 nt, Homo sapiens
  misc_RNA (1)...(19): siRNA sense strand
agaggaagaccguggagaa

SEQ ID NO: 2665136 - RNA, 19 nt, Homo sapiens
  misc_RNA (1)...(19): siRNA sense strand
gcuucuaaguccaaggaga

SEQ ID NO: 2665137 - RNA, 19 nt, Homo sapiens
  misc_RNA (1)...(19): siRNA sense strand
ugauugacgccgagaggaa

SEQ ID NO: 2665138 - RNA, 19 nt, Homo sapiens
  misc_RNA (1)...(19): siRNA sense strand
cuggaaacacugaagcaua

SEQ ID NO: 2665139 - RNA, 19 nt, Homo sapiens
  misc_RNA (1)...(19): siRNA sense strand
ggaaggagacggaagcaga

SEQ ID NO: 2665140 - RNA, 19 nt, Homo sapiens
  misc_RNA (1)...(19): siRNA sense strand
gagaccgaccguugagaaa

SEQ ID NO: 2665141 - RNA, 19 nt, Homo sapiens
  misc_RNA (1)...(19): siRNA sense strand
ccucgaagcuggacgacca

SEQ ID NO: 2665142 - RNA, 19 nt, Homo sapiens
  misc_RNA (1)...(19): siRNA sense strand
gcaugauccgggugaagaa

SEQ ID NO: 2665143 - RNA, 19 nt, Homo sapiens
  misc_RNA (1)...(19): siRNA sense strand
agucggaggaggacagaau

SEQ ID NO: 2665144 - RNA, 19 nt, Homo sapiens
  misc_RNA (1)...(19): siRNA sense strand
gcucuacacuccagggcau

SEQ ID NO: 2665145 - RNA, 19 nt, Homo sapiens
  misc_RNA (1)...(19): siRNA sense strand
agaaggagcugguggcgca

SEQ ID NO: 2665146 - RNA, 19 nt, Homo sapiens
  misc_RNA (1)...(19): siRNA sense strand
ucggaggaggacagaauaa

SEQ ID NO: 2665147 - RNA, 19 nt, Homo sapiens
  misc_RNA (1)...(19): siRNA sense strand
uggacgaccacgugaagaa

SEQ ID NO: 2665148 - RNA, 19 nt, Homo sapiens
  misc_RNA (1)...(19): siRNA sense strand
gguaacagcaucaugguca

SEQ ID NO: 2665149 - RNA, 19 nt, Homo sapiens
  misc_RNA (1)...(19): siRNA sense strand
aggacagaauaaauggaau

SEQ ID NO: 2665150 - RNA, 19 nt, Homo sapiens
  misc_RNA (1)...(19): siRNA sense strand
agaaacaaaucgacccaga

SEQ ID NO: 2665151 - RNA, 19 nt, Homo sapiens
  misc_RNA (1)...(19): siRNA sense strand
gugaagaggacgguggaau

SEQ ID NO: 2665152 - RNA, 19 nt, Homo sapiens
  misc_RNA (1)...(19): siRNA sense strand
cuucagaaauauagaggag

SEQ ID NO: 2665153 - RNA, 19 nt, Homo sapiens
  misc_RNA (1)...(19): siRNA sense strand
cgguggacgugcugcucua

SEQ ID NO: 2665154 - RNA, 19 nt, Homo sapiens
  misc_RNA (1)...(19): siRNA sense strand
cggauuugauugugcagga

SEQ ID NO: 2665155 - RNA, 19 nt, Homo sapiens
  misc_RNA (1)...(19): siRNA sense strand
ucagaaauauagaggaggu

SEQ ID NO: 2665156 - RNA, 19 nt, Homo sapiens
  misc_RNA (1)...(19): siRNA sense strand
cggacgauaacguggacau

SEQ ID NO: 2665157 - RNA, 19 nt, Homo sapiens
  misc_RNA (1)...(19): siRNA sense strand
ugaagauugaggagaacuu

SEQ ID NO: 2665158 - RNA, 19 nt, Homo sapiens
  misc_RNA (1)...(19): siRNA sense strand
guuuacaucuggagccuga

SEQ ID NO: 2665159 - RNA, 19 nt, Homo sapiens
  misc_RNA (1)...(19): siRNA sense strand
gugaaggacgccagcauca

SEQ ID NO: 2665160 - RNA, 19 nt, Homo sapiens
  misc_RNA (1)...(19): siRNA sense strand
cuucgaagccaaccugaaa

SEQ ID NO: 2665161 - RNA, 19 nt, Homo sapiens
  misc_RNA (1)...(19): siRNA sense strand
aguucaagcugcccaagaa

SEQ ID NO: 2665162 - RNA, 19 nt, Homo sapiens
  misc_RNA (1)...(19): siRNA sense strand
ccggagacaacccuggaaa

SEQ ID NO: 2665163 - RNA, 19 nt, Homo sapiens
  misc_RNA (1)...(19): siRNA sense strand
aaagugaacugcaugguga

SEQ ID NO: 2665164 - RNA, 19 nt, Homo sapiens
  misc_RNA (1)...(19): siRNA sense strand
cugagaaggugcuacagau

SEQ ID NO: 2665165 - RNA, 19 nt, Homo sapiens
  misc_RNA (1)...(19): siRNA sense strand
cuaugaacacagagucuuu

SEQ ID NO: 2665166 - RNA, 19 nt, Homo sapiens
  misc_RNA (1)...(19): siRNA sense strand
aggacugcucugagaucaa

SEQ ID NO: 2665167 - RNA, 19 nt, Homo sapiens
  misc_RNA (1)...(19): siRNA sense strand
ugauaagaugaguaacgaa

SEQ ID NO: 2665168 - RNA, 19 nt, Homo sapiens
  misc_RNA (1)...(19): siRNA sense strand
auagaggaggucaggagaa

SEQ ID NO: 2665169 - RNA, 19 nt, Homo sapiens
  misc_RNA (1)...(19): siRNA sense strand
gaggaggucaggagaacca

SEQ ID NO: 2665170 - RNA, 19 nt, Homo sapiens
  misc_RNA (1)...(19): siRNA sense strand
cggaggaggacagaauaaa

SEQ ID NO: 2665171 - RNA, 19 nt, Homo sapiens
  misc_RNA (1)...(19): siRNA sense strand
ggagaaacaaaucgaccca

SEQ ID NO: 2665172 - RNA, 19 nt, Homo sapiens
  misc_RNA (1)...(19): siRNA sense strand
aagcagaagcccaggaggu

SEQ ID NO: 2665173 - RNA, 19 nt, Homo sapiens
  misc_RNA (1)...(19): siRNA sense strand
aggccaggcuacuuggaga

SEQ ID NO: 2665174 - RNA, 19 nt, Homo sapiens
  misc_RNA (1)...(19): siRNA sense strand
ugaccaacgucuugcugau

SEQ ID NO: 2665175 - RNA, 19 nt, Homo sapiens
  misc_RNA (1)...(19): siRNA sense strand
ucaucaacguccacagcau

SEQ ID NO: 2665176 - RNA, 19 nt, Homo sapiens
  misc_RNA (1)...(19): siRNA sense strand
guaacagcaucauggucau

SEQ ID NO: 2665177 - RNA, 19 nt, Homo sapiens
  misc_RNA (1)...(19): siRNA sense strand
gcucggcugaggacagaua

SEQ ID NO: 2665178 - RNA, 19 nt, Homo sapiens
  misc_RNA (1)...(19): siRNA sense strand
acuuuccgcuggagagcaa

SEQ ID NO: 2665179 - RNA, 19 nt, Homo sapiens
  misc_RNA (1)...(19): siRNA sense strand
gggaacacccaaggggaaa

SEQ ID NO: 2665180 - RNA, 19 nt, Homo sapiens
  misc_RNA (1)...(19): siRNA sense strand
gguccuggcagcagaaacu

SEQ ID NO: 2665181 - RNA, 19 nt, Homo sapiens
  misc_RNA (1)...(19): siRNA sense strand
aaaacgaguguguguguaa

SEQ ID NO: 2665182 - RNA, 19 nt, Homo sapiens
  misc_RNA (1)...(19): siRNA sense strand
aggccaaggaggagcagaa

SEQ ID NO: 2665183 - RNA, 19 nt, Homo sapiens
  misc_RNA (1)...(19): siRNA sense strand
cgguggagacagaaagaau

SEQ ID NO: 2665184 - RNA, 19 nt, Homo sapiens
  misc_RNA (1)...(19): siRNA sense strand
agacagaaagaaugacgua

SEQ ID NO: 2665185 - RNA, 19 nt, Homo sapiens
  misc_RNA (1)...(19): siRNA sense strand
gcuaaagucccaaacggaa

SEQ ID NO: 2665186 - RNA, 19 nt, Homo sapiens
  misc_RNA (1)...(19): siRNA sense strand
uuacagaaguacuuggaca

SEQ ID NO: 2665187 - RNA, 19 nt, Homo sapiens
  misc_RNA (1)...(19): siRNA sense strand
gagcaguacuacagccuca

SEQ ID NO: 2665188 - RNA, 19 nt, Homo sapiens
  misc_RNA (1)...(19): siRNA sense strand
gaaugaagcuaaaguccca

SEQ ID NO: 2665189 - RNA, 19 nt, Homo sapiens
  misc_RNA (1)...(19): siRNA sense strand
ggaccgguggagacagaaa

SEQ ID NO: 2665190 - RNA, 19 nt, Homo sapiens
  misc_RNA (1)...(19): siRNA sense strand
gcacagagcuggaugaagg

SEQ ID NO: 2665191 - RNA, 19 nt, Homo sapiens
  misc_RNA (1)...(19): siRNA sense strand
ggggagaagcaucgaaauu

SEQ ID NO: 2665192 - RNA, 19 nt, Homo sapiens
  misc_RNA (1)...(19): siRNA sense strand
cagaggaggccaaggagga

SEQ ID NO: 2665193 - RNA, 19 nt, Homo sapiens
  misc_RNA (1)...(19): siRNA sense strand
guggagacagaaagaauga

SEQ ID NO: 2665194 - RNA, 19 nt, Homo sapiens
  misc_RNA (1)...(19): siRNA sense strand
uacagaaguacuuggacaa

SEQ ID NO: 2665195 - RNA, 19 nt, Homo sapiens
  misc_RNA (1)...(19): siRNA sense strand
acgccguggugcugaucaa

SEQ ID NO: 2665196 - RNA, 19 nt, Homo sapiens
  misc_RNA (1)...(19): siRNA sense strand
gcacagccgugauggccau

SEQ ID NO: 2665197 - RNA, 19 nt, Homo sapiens
  misc_RNA (1)...(19): siRNA sense strand
cagaaagaaugacguaucu

SEQ ID NO: 2665198 - RNA, 19 nt, Homo sapiens
  misc_RNA (1)...(19): siRNA sense strand
uguccucguuuuagggaaa

SEQ ID NO: 2665199 - RNA, 19 nt, Homo sapiens
  misc_RNA (1)...(19): siRNA sense strand
agguacagucggagcacga

SEQ ID NO: 2665200 - RNA, 19 nt, Homo sapiens
  misc_RNA (1)...(19): siRNA sense strand
ucgccgaggccguguucua

SEQ ID NO: 2665201 - RNA, 19 nt, Homo sapiens
  misc_RNA (1)...(19): siRNA sense strand
ucagagcaguggaggagca

SEQ ID NO: 2665202 - RNA, 19 nt, Homo sapiens
  misc_RNA (1)...(19): siRNA sense strand
gcaagaacuuucagauaau

SEQ ID NO: 2665203 - RNA, 19 nt, Homo sapiens
  misc_RNA (1)...(19): siRNA sense strand
uugcaaggccagugaaaua

SEQ ID NO: 2665204 - RNA, 19 nt, Homo sapiens
  misc_RNA (1)...(19): siRNA sense strand
agggaaaggcuaugagaau

SEQ ID NO: 2665205 - RNA, 19 nt, Homo sapiens
  misc_RNA (1)...(19): siRNA sense strand
agacaagagaaaugagcaa

SEQ ID NO: 2665206 - RNA, 19 nt, Homo sapiens
  misc_RNA (1)...(19): siRNA sense strand
cugcaagaacuuucagaua

SEQ ID NO: 2665207 - RNA, 19 nt, Homo sapiens
  misc_RNA (1)...(19): siRNA sense strand
ccucagaccuggaaguuga

SEQ ID NO: 2665208 - RNA, 19 nt, Homo sapiens
  misc_RNA (1)...(19): siRNA sense strand
uggauaaagaagaaagaga

SEQ ID NO: 2665209 - RNA, 19 nt, Homo sapiens
  misc_RNA (1)...(19): siRNA sense strand
ugcaagaacuuucagauaa

SEQ ID NO: 2665210 - RNA, 19 nt, Homo sapiens
  misc_RNA (1)...(19): siRNA sense strand
cagugaaauaugaggaguu

SEQ ID NO: 2665211 - RNA, 19 nt, Homo sapiens
  misc_RNA (1)...(19): siRNA sense strand
aggaagaacuagaggcccu

SEQ ID NO: 2665212 - RNA, 19 nt, Homo sapiens
  misc_RNA (1)...(19): siRNA sense strand
caucauaccucaggaaaga

SEQ ID NO: 2665213 - RNA, 19 nt, Homo sapiens
  misc_RNA (1)...(19): siRNA sense strand
cuggaagaaguaagacaua

SEQ ID NO: 2665214 - RNA, 19 nt, Homo sapiens
  misc_RNA (1)...(19): siRNA sense strand
auguauaaccgcuuugaaa

SEQ ID NO: 2665215 - RNA, 19 nt, Homo sapiens
  misc_RNA (1)...(19): siRNA sense strand
cggccuaaacuuaaugcaa

SEQ ID NO: 2665216 - RNA, 19 nt, Homo sapiens
  misc_RNA (1)...(19): siRNA sense strand
uugcaaaggcagugucaga

SEQ ID NO: 2665217 - RNA, 19 nt, Homo sapiens
  misc_RNA (1)...(19): siRNA sense strand
gcagugaagggaaggccaa

SEQ ID NO: 2665218 - RNA, 19 nt, Homo sapiens
  misc_RNA (1)...(19): siRNA sense strand
caaucuagauggugaccca

SEQ ID NO: 2665219 - RNA, 19 nt, Homo sapiens
  misc_RNA (1)...(19): siRNA sense strand
gccuagaggacgagcagau

SEQ ID NO: 2665220 - RNA, 19 nt, Homo sapiens
  misc_RNA (1)...(19): siRNA sense strand
cagugaaggaagaaacuca

SEQ ID NO: 2665221 - RNA, 19 nt, Homo sapiens
  misc_RNA (1)...(19): siRNA sense strand
augucauauucguggaaaa

SEQ ID NO: 2665222 - RNA, 19 nt, Homo sapiens
  misc_RNA (1)...(19): siRNA sense strand
gcuggauaaagaagaaaga

SEQ ID NO: 2665223 - RNA, 19 nt, Homo sapiens
  misc_RNA (1)...(19): siRNA sense strand
ccaaaaggagagacgagaa

SEQ ID NO: 2665224 - RNA, 19 nt, Homo sapiens
  misc_RNA (1)...(19): siRNA sense strand
cucagcagcuagaggaaga

SEQ ID NO: 2665225 - RNA, 19 nt, Homo sapiens
  misc_RNA (1)...(19): siRNA sense strand
aaacuuaaugcaauggcaa

SEQ ID NO: 2665226 - RNA, 19 nt, Homo sapiens
  misc_RNA (1)...(19): siRNA sense strand
cagggaaaggcuaugagaa

SEQ ID NO: 2665227 - RNA, 19 nt, Homo sapiens
  misc_RNA (1)...(19): siRNA sense strand
ccuuugaaccuuucgauuu

SEQ ID NO: 2665228 - RNA, 19 nt, Homo sapiens
  misc_RNA (1)...(19): siRNA sense strand
ggauaaagaagaaagagag

SEQ ID NO: 2665229 - RNA, 19 nt, Homo sapiens
  misc_RNA (1)...(19): siRNA sense strand
aacuagaggcccuggaaga

SEQ ID NO: 2665230 - RNA, 19 nt, Homo sapiens
  misc_RNA (1)...(19): siRNA sense strand
ccucagcagugaagggaag

SEQ ID NO: 2665231 - RNA, 19 nt, Homo sapiens
  misc_RNA (1)...(19): siRNA sense strand
acuuuguauuugacggcua

SEQ ID NO: 2665232 - RNA, 19 nt, Homo sapiens
  misc_RNA (1)...(19): siRNA sense strand
gauaauacagcucaucaua

SEQ ID NO: 2665233 - RNA, 19 nt, Homo sapiens
  misc_RNA (1)...(19): siRNA sense strand
cgaugugaauagagacuac

SEQ ID NO: 2665234 - RNA, 19 nt, Homo sapiens
  misc_RNA (1)...(19): siRNA sense strand
gugaagaauacacgcggau

SEQ ID NO: 2665235 - RNA, 19 nt, Homo sapiens
  misc_RNA (1)...(19): siRNA sense strand
gaaacaugcuggugcacac

SEQ ID NO: 2665236 - RNA, 19 nt, Homo sapiens
  misc_RNA (1)...(19): siRNA sense strand
aggaaagccaauccaggaa

SEQ ID NO: 2665237 - RNA, 19 nt, Homo sapiens
  misc_RNA (1)...(19): siRNA sense strand
aggaacagucugcagaaaa

SEQ ID NO: 2665238 - RNA, 19 nt, Homo sapiens
  misc_RNA (1)...(19): siRNA sense strand
ggauaucagugcagccucu

SEQ ID NO: 2665239 - RNA, 19 nt, Homo sapiens
  misc_RNA (1)...(19): siRNA sense strand
ccaaaucggccacggcaca

SEQ ID NO: 2665240 - RNA, 19 nt, Homo sapiens
  misc_RNA (1)...(19): siRNA sense strand
aagggaaggccaaggagga

SEQ ID NO: 2665241 - RNA, 19 nt, Homo sapiens
  misc_RNA (1)...(19): siRNA sense strand
gcucaucauaccucaggaa

SEQ ID NO: 2665242 - RNA, 19 nt, Homo sapiens
  misc_RNA (1)...(19): siRNA sense strand
gagaacucuggcugguuaa

SEQ ID NO: 2665243 - RNA, 19 nt, Homo sapiens
  misc_RNA (1)...(19): siRNA sense strand
ccuaauggcagugaaggaa

SEQ ID NO: 2665244 - RNA, 19 nt, Homo sapiens
  misc_RNA (1)...(19): siRNA sense strand
ccuggaagaaguaagacau

SEQ ID NO: 2665245 - RNA, 19 nt, Homo sapiens
  misc_RNA (1)...(19): siRNA sense strand
acgucaggcagcagagaua

SEQ ID NO: 2665246 - RNA, 19 nt, Homo sapiens
  misc_RNA (1)...(19): siRNA sense strand
auuugugacaccaggaaua

SEQ ID NO: 2665247 - RNA, 19 nt, Homo sapiens
  misc_RNA (1)...(19): siRNA sense strand
acuccaaugaggauggcaa

SEQ ID NO: 2665248 - RNA, 19 nt, Homo sapiens
  misc_RNA (1)...(19): siRNA sense strand
auacaaacucauucggcuu

SEQ ID NO: 2665249 - RNA, 19 nt, Homo sapiens
  misc_RNA (1)...(19): siRNA sense strand
gugcguugaaugugggaaa

SEQ ID NO: 2665250 - RNA, 19 nt, Homo sapiens
  misc_RNA (1)...(19): siRNA sense strand
guguaaugaauguggaaga

SEQ ID NO: 2665251 - RNA, 19 nt, Homo sapiens
  misc_RNA (1)...(19): siRNA sense strand
gggaaagccuucagccaga

SEQ ID NO: 2665252 - RNA, 19 nt, Homo sapiens
  misc_RNA (1)...(19): siRNA sense strand
augugaugcuggagaacua

SEQ ID NO: 2665253 - RNA, 19 nt, Homo sapiens
  misc_RNA (1)...(19): siRNA sense strand
cauucacacaggagagaaa

SEQ ID NO: 2665254 - RNA, 19 nt, Homo sapiens
  misc_RNA (1)...(19): siRNA sense strand
gacucguguuggagagaaa

SEQ ID NO: 2665255 - RNA, 19 nt, Homo sapiens
  misc_RNA (1)...(19): siRNA sense strand
augugaugaaugugggaaa

SEQ ID NO: 2665256 - RNA, 19 nt, Homo sapiens
  misc_RNA (1)...(19): siRNA sense strand
cggcagagccuuugguuuu

SEQ ID NO: 2665257 - RNA, 19 nt, Homo sapiens
  misc_RNA (1)...(19): siRNA sense strand
cccuauaaaugucaagaau

SEQ ID NO: 2665258 - RNA, 19 nt, Homo sapiens
  misc_RNA (1)...(19): siRNA sense strand
guguagugcauuugauaga

SEQ ID NO: 2665259 - RNA, 19 nt, Homo sapiens
  misc_RNA (1)...(19): siRNA sense strand
gauaaugcaugcuggggaa

SEQ ID NO: 2665260 - RNA, 19 nt, Homo sapiens
  misc_RNA (1)...(19): siRNA sense strand
uugcaguguguaugggaaa

SEQ ID NO: 2665261 - RNA, 19 nt, Homo sapiens
  misc_RNA (1)...(19): siRNA sense strand
ugugauauaugcagcaaaa

SEQ ID NO: 2665262 - RNA, 19 nt, Homo sapiens
  misc_RNA (1)...(19): siRNA sense strand
cuugaaaagcugccagaaa

SEQ ID NO: 2665263 - RNA, 19 nt, Homo sapiens
  misc_RNA (1)...(19): siRNA sense strand
ucacauucacacuggaaau

SEQ ID NO: 2665264 - RNA, 19 nt, Homo sapiens
  misc_RNA (1)...(19): siRNA sense strand
ccucauucagcaucagaaa

SEQ ID NO: 2665265 - RNA, 19 nt, Homo sapiens
  misc_RNA (1)...(19): siRNA sense strand
cuuuaaccauggugcaaau

SEQ ID NO: 2665266 - RNA, 19 nt, Homo sapiens
  misc_RNA (1)...(19): siRNA sense strand
ccaaaauguuguuagacuu

SEQ ID NO: 2665267 - RNA, 19 nt, Homo sapiens
  misc_RNA (1)...(19): siRNA sense strand
ggggagaagccguacgaau

SEQ ID NO: 2665268 - RNA, 19 nt, Homo sapiens
  misc_RNA (1)...(19): siRNA sense strand
ugaauguggaagaggcuuu

SEQ ID NO: 2665269 - RNA, 19 nt, Homo sapiens
  misc_RNA (1)...(19): siRNA sense strand
acccaagaguguagugcau

SEQ ID NO: 2665270 - RNA, 19 nt, Homo sapiens
  misc_RNA (1)...(19): siRNA sense strand
gcucaaaucuuguucugca

SEQ ID NO: 2665271 - RNA, 19 nt, Homo sapiens
  misc_RNA (1)...(19): siRNA sense strand
ccauaaaugcaaucagugu

SEQ ID NO: 2665272 - RNA, 19 nt, Homo sapiens
  misc_RNA (1)...(19): siRNA sense strand
ccaauauucacaagagagu

SEQ ID NO: 2665273 - RNA, 19 nt, Homo sapiens
  misc_RNA (1)...(19): siRNA sense strand
ggggaaaagcccuauaaau

SEQ ID NO: 2665274 - RNA, 19 nt, Homo sapiens
  misc_RNA (1)...(19): siRNA sense strand
ccuuauucagcaugagaga

SEQ ID NO: 2665275 - RNA, 19 nt, Homo sapiens
  misc_RNA (1)...(19): siRNA sense strand
uuguaaugagugcggcaaa

SEQ ID NO: 2665276 - RNA, 19 nt, Homo sapiens
  misc_RNA (1)...(19): siRNA sense strand
ggauguaaugaauauggaa

SEQ ID NO: 2665277 - RNA, 19 nt, Homo sapiens
  misc_RNA (1)...(19): siRNA sense strand
acuugaaucuggaccaaaa

SEQ ID NO: 2665278 - RNA, 19 nt, Homo sapiens
  misc_RNA (1)...(19): siRNA sense strand
aaggauucacacaggagaa

SEQ ID NO: 2665279 - RNA, 19 nt, Homo sapiens
  misc_RNA (1)...(19): siRNA sense strand
uggagagaaaccugcuuua

SEQ ID NO: 2665280 - RNA, 19 nt, Homo sapiens
  misc_RNA (1)...(19): siRNA sense strand
gccuucagccggaggucaa

SEQ ID NO: 2665281 - RNA, 19 nt, Homo sapiens
  misc_RNA (1)...(19): siRNA sense strand
gcuaccgugggcagggaaa

SEQ ID NO: 2665282 - RNA, 19 nt, Homo sapiens
  misc_RNA (1)...(19): siRNA sense strand
ccuaaguagacaccagaga

SEQ ID NO: 2665283 - RNA, 19 nt, Homo sapiens
  misc_RNA (1)...(19): siRNA sense strand
ugauccacacugaggagaa

SEQ ID NO: 2665284 - RNA, 19 nt, Homo sapiens
  misc_RNA (1)...(19): siRNA sense strand
gugcaaugagugugggaaa

SEQ ID NO: 2665285 - RNA, 19 nt, Homo sapiens
  misc_RNA (1)...(19): siRNA sense strand
guguaaugaguguggaaaa

SEQ ID NO: 2665286 - RNA, 19 nt, Homo sapiens
  misc_RNA (1)...(19): siRNA sense strand
cuuaguaaacacaggagaa

SEQ ID NO: 2665287 - RNA, 19 nt, Homo sapiens
  misc_RNA (1)...(19): siRNA sense strand
ugauccagcaugagagaau

SEQ ID NO: 2665288 - RNA, 19 nt, Homo sapiens
  misc_RNA (1)...(19): siRNA sense strand
gaguguaaugaguguggaa

SEQ ID NO: 2665289 - RNA, 19 nt, Homo sapiens
  misc_RNA (1)...(19): siRNA sense strand
ggauccacaccgaggaaaa

SEQ ID NO: 2665290 - RNA, 19 nt, Homo sapiens
  misc_RNA (1)...(19): siRNA sense strand
aaacagugauucuggggaa

SEQ ID NO: 2665291 - RNA, 19 nt, Homo sapiens
  misc_RNA (1)...(19): siRNA sense strand
gauacauacaggagagaag

SEQ ID NO: 2665292 - RNA, 19 nt, Homo sapiens
  misc_RNA (1)...(19): siRNA sense strand
ugauggaaaccuaugggaa

SEQ ID NO: 2665293 - RNA, 19 nt, Homo sapiens
  misc_RNA (1)...(19): siRNA sense strand
aagccauaugagugcaaua

SEQ ID NO: 2665294 - RNA, 19 nt, Homo sapiens
  misc_RNA (1)...(19): siRNA sense strand
gugcaauagcugcgggaag

SEQ ID NO: 2665295 - RNA, 19 nt, Homo sapiens
  misc_RNA (1)...(19): siRNA sense strand
uguccaugggaaugugaaa

SEQ ID NO: 2665296 - RNA, 19 nt, Homo sapiens
  misc_RNA (1)...(19): siRNA sense strand
aaugugaaaccaagggaga

SEQ ID NO: 2665297 - RNA, 19 nt, Homo sapiens
  misc_RNA (1)...(19): siRNA sense strand
gggagagagucaaaauaca

SEQ ID NO: 2665298 - RNA, 19 nt, Homo sapiens
  misc_RNA (1)...(19): siRNA sense strand
cccuaugugugcaguguau

SEQ ID NO: 2665299 - RNA, 19 nt, Homo sapiens
  misc_RNA (1)...(19): siRNA sense strand
gugcaguguaugugggaag

SEQ ID NO: 2665300 - RNA, 19 nt, Homo sapiens
  misc_RNA (1)...(19): siRNA sense strand
ugugaaaccaagggagaga

SEQ ID NO: 2665301 - RNA, 19 nt, Homo sapiens
  misc_RNA (1)...(19): siRNA sense strand
augugaugauggaaaccua

SEQ ID NO: 2665302 - RNA, 19 nt, Homo sapiens
  misc_RNA (1)...(19): siRNA sense strand
gugcaaugagugugggaaa

SEQ ID NO: 2665303 - RNA, 19 nt, Homo sapiens
  misc_RNA (1)...(19): siRNA sense strand
guguaaugaguguggaaaa

SEQ ID NO: 2665304 - RNA, 19 nt, Homo sapiens
  misc_RNA (1)...(19): siRNA sense strand
cuuaguaaacacaggagaa

SEQ ID NO: 2665305 - RNA, 19 nt, Homo sapiens
  misc_RNA (1)...(19): siRNA sense strand
ugauccagcaugagagaau

SEQ ID NO: 2665306 - RNA, 19 nt, Homo sapiens
  misc_RNA (1)...(19): siRNA sense strand
gaguguaaugaguguggaa

SEQ ID NO: 2665307 - RNA, 19 nt, Homo sapiens
  misc_RNA (1)...(19): siRNA sense strand
ggauccacaccgaggaaaa

SEQ ID NO: 2665308 - RNA, 19 nt, Homo sapiens
  misc_RNA (1)...(19): siRNA sense strand
aaacagugauucuggggaa

SEQ ID NO: 2665309 - RNA, 19 nt, Homo sapiens
  misc_RNA (1)...(19): siRNA sense strand
gauacauacaggagagaag

SEQ ID NO: 2665310 - RNA, 19 nt, Homo sapiens
  misc_RNA (1)...(19): siRNA sense strand
ugauggaaaccuaugggaa

SEQ ID NO: 2665311 - RNA, 19 nt, Homo sapiens
  misc_RNA (1)...(19): siRNA sense strand
aagccauaugagugcaaua

SEQ ID NO: 2665312 - RNA, 19 nt, Homo sapiens
  misc_RNA (1)...(19): siRNA sense strand
gugcaauagcugcgggaag

SEQ ID NO: 2665313 - RNA, 19 nt, Homo sapiens
  misc_RNA (1)...(19): siRNA sense strand
uguccaugggaaugugaaa

SEQ ID NO: 2665314 - RNA, 19 nt, Homo sapiens
  misc_RNA (1)...(19): siRNA sense strand
aaugugaaaccaagggaga

SEQ ID NO: 2665315 - RNA, 19 nt, Homo sapiens
  misc_RNA (1)...(19): siRNA sense strand
gggagagagucaaaauaca

SEQ ID NO: 2665316 - RNA, 19 nt, Homo sapiens
  misc_RNA (1)...(19): siRNA sense strand
cccuaugugugcaguguau

SEQ ID NO: 2665317 - RNA, 19 nt, Homo sapiens
  misc_RNA (1)...(19): siRNA sense strand
gugcaguguaugugggaag

SEQ ID NO: 2665318 - RNA, 19 nt, Homo sapiens
  misc_RNA (1)...(19): siRNA sense strand
ugugaaaccaagggagaga

SEQ ID NO: 2665319 - RNA, 19 nt, Homo sapiens
  misc_RNA (1)...(19): siRNA sense strand
augugaugauggaaaccua

SEQ ID NO: 2665320 - RNA, 19 nt, Homo sapiens
  misc_RNA (1)...(19): siRNA sense strand
aggagaaggcugugcacaa

SEQ ID NO: 2665321 - RNA, 19 nt, Homo sapiens
  misc_RNA (1)...(19): siRNA sense strand
ggauagaggaagaagagga

SEQ ID NO: 2665322 - RNA, 19 nt, Homo sapiens
  misc_RNA (1)...(19): siRNA sense strand
aggaagaagaggaggugga

SEQ ID NO: 2665323 - RNA, 19 nt, Homo sapiens
  misc_RNA (1)...(19): siRNA sense strand
cagaagugggauugagaca

SEQ ID NO: 2665324 - RNA, 19 nt, Homo sapiens
  misc_RNA (1)...(19): siRNA sense strand
gcagaaagccucagcccau

SEQ ID NO: 2665325 - RNA, 19 nt, Homo sapiens
  misc_RNA (1)...(19): siRNA sense strand
gagaauaacuggucgcucu

SEQ ID NO: 2665326 - RNA, 19 nt, Homo sapiens
  misc_RNA (1)...(19): siRNA sense strand
aagaagaggagguggagca

SEQ ID NO: 2665327 - RNA, 19 nt, Homo sapiens
  misc_RNA (1)...(19): siRNA sense strand
aagaggagguggagcagga

SEQ ID NO: 2665328 - RNA, 19 nt, Homo sapiens
  misc_RNA (1)...(19): siRNA sense strand
cugcacaacuggaucgaca

SEQ ID NO: 2665329 - RNA, 19 nt, Homo sapiens
  misc_RNA (1)...(19): siRNA sense strand
cuuccaagucacaggccaa

SEQ ID NO: 2665330 - RNA, 19 nt, Homo sapiens
  misc_RNA (1)...(19): siRNA sense strand
cugagagcaccaagaggaa

SEQ ID NO: 2665331 - RNA, 19 nt, Homo sapiens
  misc_RNA (1)...(19): siRNA sense strand
aggagguggagcaggaauu

SEQ ID NO: 2665332 - RNA, 19 nt, Homo sapiens
  misc_RNA (1)...(19): siRNA sense strand
gcagugacuuuguggagca

SEQ ID NO: 2665333 - RNA, 19 nt, Homo sapiens
  misc_RNA (1)...(19): siRNA sense strand
ccagguaugcacagguaau

SEQ ID NO: 2665334 - RNA, 19 nt, Homo sapiens
  misc_RNA (1)...(19): siRNA sense strand
gcucacagugccagcgaga

SEQ ID NO: 2665335 - RNA, 19 nt, Homo sapiens
  misc_RNA (1)...(19): siRNA sense strand
caaggacagaagugggauu

SEQ ID NO: 2665336 - RNA, 19 nt, Homo sapiens
  misc_RNA (1)...(19): siRNA sense strand
gggaccgggaugagcaaau

SEQ ID NO: 2665337 - RNA, 19 nt, Homo sapiens
  misc_RNA (1)...(19): siRNA sense strand
caggagagcuuccgccaga

SEQ ID NO: 2665338 - RNA, 19 nt, Homo sapiens
  misc_RNA (1)...(19): siRNA sense strand
gagagcaagcccaaggaga

SEQ ID NO: 2665339 - RNA, 19 nt, Homo sapiens
  misc_RNA (1)...(19): siRNA sense strand
cgagguaggugaagaggag

SEQ ID NO: 2665340 - RNA, 19 nt, Homo sapiens
  misc_RNA (1)...(19): siRNA sense strand
gcugagagcaccaagagga

SEQ ID NO: 2665341 - RNA, 19 nt, Homo sapiens
  misc_RNA (1)...(19): siRNA sense strand
gaucaaaggugcucgcccu

SEQ ID NO: 2665342 - RNA, 19 nt, Homo sapiens
  misc_RNA (1)...(19): siRNA sense strand
gaagaggaccaucggacga

SEQ ID NO: 2665343 - RNA, 19 nt, Homo sapiens
  misc_RNA (1)...(19): siRNA sense strand
ugagcuucccggaggagaa

SEQ ID NO: 2665344 - RNA, 19 nt, Homo sapiens
  misc_RNA (1)...(19): siRNA sense strand
caggaauugcugagucaca

SEQ ID NO: 2665345 - RNA, 19 nt, Homo sapiens
  misc_RNA (1)...(19): siRNA sense strand
gaaccuaagccacucggaa

SEQ ID NO: 2665346 - RNA, 19 nt, Homo sapiens
  misc_RNA (1)...(19): siRNA sense strand
cuuccgauccucuggagaa

SEQ ID NO: 2665347 - RNA, 19 nt, Homo sapiens
  misc_RNA (1)...(19): siRNA sense strand
aggaaaagaaggagcagau

SEQ ID NO: 2665348 - RNA, 19 nt, Homo sapiens
  misc_RNA (1)...(19): siRNA sense strand
gggcaagacccuuugguac

SEQ ID NO: 2665349 - RNA, 19 nt, Homo sapiens
  misc_RNA (1)...(19): siRNA sense strand
gcagguguggagugggcaa

SEQ ID NO: 2665350 - RNA, 19 nt, Homo sapiens
  misc_RNA (1)...(19): siRNA sense strand
guuuaaggacagaaagaaa

SEQ ID NO: 2665351 - RNA, 19 nt, Homo sapiens
  misc_RNA (1)...(19): siRNA sense strand
aaguagaauugaaggacua

SEQ ID NO: 2665352 - RNA, 19 nt, Homo sapiens
  misc_RNA (1)...(19): siRNA sense strand
gagaaauuccaaaggacaa

SEQ ID NO: 2665353 - RNA, 19 nt, Homo sapiens
  misc_RNA (1)...(19): siRNA sense strand
agaaagagaacaagcgcaa

SEQ ID NO: 2665354 - RNA, 19 nt, Homo sapiens
  misc_RNA (1)...(19): siRNA sense strand
agaaagauggagacgauaa

SEQ ID NO: 2665355 - RNA, 19 nt, Homo sapiens
  misc_RNA (1)...(19): siRNA sense strand
aguagaaggacuugaagaa

SEQ ID NO: 2665356 - RNA, 19 nt, Homo sapiens
  misc_RNA (1)...(19): siRNA sense strand
ugauagaaugccagugaua

SEQ ID NO: 2665357 - RNA, 19 nt, Homo sapiens
  misc_RNA (1)...(19): siRNA sense strand
gaagaaacaugcaagaaca

SEQ ID NO: 2665358 - RNA, 19 nt, Homo sapiens
  misc_RNA (1)...(19): siRNA sense strand
gagaagagauggagagcug

SEQ ID NO: 2665359 - RNA, 19 nt, Homo sapiens
  misc_RNA (1)...(19): siRNA sense strand
aaagaaacuuaaagcggaa

SEQ ID NO: 2665360 - RNA, 19 nt, Homo sapiens
  misc_RNA (1)...(19): siRNA sense strand
cugaaagugacuauggaaa

SEQ ID NO: 2665361 - RNA, 19 nt, Homo sapiens
  misc_RNA (1)...(19): siRNA sense strand
caagaaaagaucacagaaa

SEQ ID NO: 2665362 - RNA, 19 nt, Homo sapiens
  misc_RNA (1)...(19): siRNA sense strand
acaagaaacagcagcaaau

SEQ ID NO: 2665363 - RNA, 19 nt, Homo sapiens
  misc_RNA (1)...(19): siRNA sense strand
aagcagaaguguauugauu

SEQ ID NO: 2665364 - RNA, 19 nt, Homo sapiens
  misc_RNA (1)...(19): siRNA sense strand
gcaagaacauauuugguga

SEQ ID NO: 2665365 - RNA, 19 nt, Homo sapiens
  misc_RNA (1)...(19): siRNA sense strand
gcgaaagacaaaugaaagu

SEQ ID NO: 2665366 - RNA, 19 nt, Homo sapiens
  misc_RNA (1)...(19): siRNA sense strand
guguauugauucugcaaau

SEQ ID NO: 2665367 - RNA, 19 nt, Homo sapiens
  misc_RNA (1)...(19): siRNA sense strand
cugcgaaagacaaaugaaa

SEQ ID NO: 2665368 - RNA, 19 nt, Homo sapiens
  misc_RNA (1)...(19): siRNA sense strand
agaaugaaugucugcgaaa

SEQ ID NO: 2665369 - RNA, 19 nt, Homo sapiens
  misc_RNA (1)...(19): siRNA sense strand
gacuaaacacacugacaaa

SEQ ID NO: 2665370 - RNA, 19 nt, Homo sapiens
  misc_RNA (1)...(19): siRNA sense strand
cauugaaagaacaggaaca

SEQ ID NO: 2665371 - RNA, 19 nt, Homo sapiens
  misc_RNA (1)...(19): siRNA sense strand
aagcaugagcaaaugauaa

SEQ ID NO: 2665372 - RNA, 19 nt, Homo sapiens
  misc_RNA (1)...(19): siRNA sense strand
caaaagaaugcaauggaaa

SEQ ID NO: 2665373 - RNA, 19 nt, Homo sapiens
  misc_RNA (1)...(19): siRNA sense strand
aagacaaguugaugcaauu

SEQ ID NO: 2665374 - RNA, 19 nt, Homo sapiens
  misc_RNA (1)...(19): siRNA sense strand
ucaucgagaaagagaacaa

SEQ ID NO: 2665375 - RNA, 19 nt, Homo sapiens
  misc_RNA (1)...(19): siRNA sense strand
ccaggaugccuuagcuaaa

SEQ ID NO: 2665376 - RNA, 19 nt, Homo sapiens
  misc_RNA (1)...(19): siRNA sense strand
augacaagcagaagaguau

SEQ ID NO: 2665377 - RNA, 19 nt, Homo sapiens
  misc_RNA (1)...(19): siRNA sense strand
aagugauagugaugcauua

SEQ ID NO: 2665378 - RNA, 19 nt, Homo sapiens
  misc_RNA (1)...(19): siRNA sense strand
cagaaaagccaaagacuga

SEQ ID NO: 2665379 - RNA, 19 nt, Homo sapiens
  misc_RNA (1)...(19): siRNA sense strand
guguuaagccagcaguaua

SEQ ID NO: 2665380 - RNA, 19 nt, Homo sapiens
  misc_RNA (1)...(19): siRNA sense strand
cugaguuagcaaagagcaa

SEQ ID NO: 2665381 - RNA, 19 nt, Homo sapiens
  misc_RNA (1)...(19): siRNA sense strand
gcacaaugaaagaaaagaa

SEQ ID NO: 2665382 - RNA, 19 nt, Homo sapiens
  misc_RNA (1)...(19): siRNA sense strand
gcaugauaaaggagaacuu

SEQ ID NO: 2665383 - RNA, 19 nt, Homo sapiens
  misc_RNA (1)...(19): siRNA sense strand
gagauggagagcugagcaa

SEQ ID NO: 2665384 - RNA, 19 nt, Homo sapiens
  misc_RNA (1)...(19): siRNA sense strand
gagaaagaccccagaccaa

SEQ ID NO: 2665385 - RNA, 19 nt, Homo sapiens
  misc_RNA (1)...(19): siRNA sense strand
ccuguaugguaaaggaaca

SEQ ID NO: 2665386 - RNA, 19 nt, Homo sapiens
  misc_RNA (1)...(19): siRNA sense strand
uuggaaaggcacaaugaaa

SEQ ID NO: 2665387 - RNA, 19 nt, Homo sapiens
  misc_RNA (1)...(19): siRNA sense strand
acaaaggcuugcagagcau

SEQ ID NO: 2665388 - RNA, 19 nt, Homo sapiens
  misc_RNA (1)...(19): siRNA sense strand
caggaaggaacuugaaaca

SEQ ID NO: 2665389 - RNA, 19 nt, Homo sapiens
  misc_RNA (1)...(19): siRNA sense strand
ggaaagagacaaaaguauu

SEQ ID NO: 2665390 - RNA, 19 nt, Homo sapiens
  misc_RNA (1)...(19): siRNA sense strand
agccaaagacugaaauaau

SEQ ID NO: 2665391 - RNA, 19 nt, Homo sapiens
  misc_RNA (1)...(19): siRNA sense strand
uguugaagccagaagauuu

SEQ ID NO: 2665392 - RNA, 19 nt, Homo sapiens
  misc_RNA (1)...(19): siRNA sense strand
cuucauggaauuaagcaua

SEQ ID NO: 2665393 - RNA, 19 nt, Homo sapiens
  misc_RNA (1)...(19): siRNA sense strand
cgauuugcagaaugagaua

SEQ ID NO: 2665394 - RNA, 19 nt, Homo sapiens
  misc_RNA (1)...(19): siRNA sense strand
ccaccuuaccuuaaagaau

SEQ ID NO: 2665395 - RNA, 19 nt, Homo sapiens
  misc_RNA (1)...(19): siRNA sense strand
aagcagaagaguauucaaa

SEQ ID NO: 2665396 - RNA, 19 nt, Homo sapiens
  misc_RNA (1)...(19): siRNA sense strand
agcccaaaaucguggaaaa

SEQ ID NO: 2665397 - RNA, 19 nt, Homo sapiens
  misc_RNA (1)...(19): siRNA sense strand
guggaaaauuggaggcuca

SEQ ID NO: 2665398 - RNA, 19 nt, Homo sapiens
  misc_RNA (1)...(19): siRNA sense strand
cugcaaauuuaaaggucca

SEQ ID NO: 2665399 - RNA, 19 nt, Homo sapiens
  misc_RNA (1)...(19): siRNA sense strand
guggcaugauaaaggagaa

SEQ ID NO: 2665400 - RNA, 19 nt, Homo sapiens
  misc_RNA (1)...(19): siRNA sense strand
cuuaaagcggaaagagaca

SEQ ID NO: 2665401 - RNA, 19 nt, Homo sapiens
  misc_RNA (1)...(19): siRNA sense strand
gugacuauggaaacagaaa

SEQ ID NO: 2665402 - RNA, 19 nt, Homo sapiens
  misc_RNA (1)...(19): siRNA sense strand
agcuagaccaagagagaga

SEQ ID NO: 2665403 - RNA, 19 nt, Homo sapiens
  misc_RNA (1)...(19): siRNA sense strand
cggaaagagacaaaaguau

SEQ ID NO: 2665404 - RNA, 19 nt, Homo sapiens
  misc_RNA (1)...(19): siRNA sense strand
agagaaauuccaaaggaca

SEQ ID NO: 2665405 - RNA, 19 nt, Homo sapiens
  misc_RNA (1)...(19): siRNA sense strand
auguaugcuucauggacaa

SEQ ID NO: 2665406 - RNA, 19 nt, Homo sapiens
  misc_RNA (1)...(19): siRNA sense strand
ugaaagugauagugaugca

SEQ ID NO: 2665407 - RNA, 19 nt, Homo sapiens
  misc_RNA (1)...(19): siRNA sense strand
aagaaacaugcaagaacaa

SEQ ID NO: 2665408 - RNA, 19 nt, Homo sapiens
  misc_RNA (1)...(19): siRNA sense strand
ggaagaaacaugcaagaac

SEQ ID NO: 2665409 - RNA, 19 nt, Homo sapiens
  misc_RNA (1)...(19): siRNA sense strand
gaaacaugcaagaacaaaa

SEQ ID NO: 2665410 - RNA, 19 nt, Homo sapiens
  misc_RNA (1)...(19): siRNA sense strand
acagcuagaccaagagaga

SEQ ID NO: 2665411 - RNA, 19 nt, Homo sapiens
  misc_RNA (1)...(19): siRNA sense strand
agcaugagcaaaugauaaa

SEQ ID NO: 2665412 - RNA, 19 nt, Homo sapiens
  misc_RNA (1)...(19): siRNA sense strand
aaagacaaguugaugcaau

SEQ ID NO: 2665413 - RNA, 19 nt, Homo sapiens
  misc_RNA (1)...(19): siRNA sense strand
cauuaaauuuguccugcaa

SEQ ID NO: 2665414 - RNA, 19 nt, Homo sapiens
  misc_RNA (1)...(19): siRNA sense strand
ugguuuaaggacagaaaga

SEQ ID NO: 2665415 - RNA, 19 nt, Homo sapiens
  misc_RNA (1)...(19): siRNA sense strand
gagaaugaaugucugcgaa

SEQ ID NO: 2665416 - RNA, 19 nt, Homo sapiens
  misc_RNA (1)...(19): siRNA sense strand
augaaaagcagaaguguau

SEQ ID NO: 2665417 - RNA, 19 nt, Homo sapiens
  misc_RNA (1)...(19): siRNA sense strand
uuacaaaaguagaaggacu

SEQ ID NO: 2665418 - RNA, 19 nt, Homo sapiens
  misc_RNA (1)...(19): siRNA sense strand
gguuauaacugauggaaga

SEQ ID NO: 2665419 - RNA, 19 nt, Homo sapiens
  misc_RNA (1)...(19): siRNA sense strand
ggauuuaagaugauggaaa

SEQ ID NO: 2665420 - RNA, 19 nt, Homo sapiens
  misc_RNA (1)...(19): siRNA sense strand
uguagaagugcuagggaaa

SEQ ID NO: 2665421 - RNA, 19 nt, Homo sapiens
  misc_RNA (1)...(19): siRNA sense strand
ggacagaggaaaugggagu

SEQ ID NO: 2665422 - RNA, 19 nt, Homo sapiens
  misc_RNA (1)...(19): siRNA sense strand
agacaaaugcugugaacuu

SEQ ID NO: 2665423 - RNA, 19 nt, Homo sapiens
  misc_RNA (1)...(19): siRNA sense strand
guguagaagugcuagggaa

SEQ ID NO: 2665424 - RNA, 19 nt, Homo sapiens
  misc_RNA (1)...(19): siRNA sense strand
cagacgagguggugguaga

SEQ ID NO: 2665425 - RNA, 19 nt, Homo sapiens
  misc_RNA (1)...(19): siRNA sense strand
gauccaaagcccagaguca

SEQ ID NO: 2665426 - RNA, 19 nt, Homo sapiens
  misc_RNA (1)...(19): siRNA sense strand
uggaagaacaggacagaga

SEQ ID NO: 2665427 - RNA, 19 nt, Homo sapiens
  misc_RNA (1)...(19): siRNA sense strand
agaacaggacagagaaauu

SEQ ID NO: 2665428 - RNA, 19 nt, Homo sapiens
  misc_RNA (1)...(19): siRNA sense strand
caccagaagaagugaaauu

SEQ ID NO: 2665429 - RNA, 19 nt, Homo sapiens
  misc_RNA (1)...(19): siRNA sense strand
cugucaaacuccagcaauu

SEQ ID NO: 2665430 - RNA, 19 nt, Homo sapiens
  misc_RNA (1)...(19): siRNA sense strand
gugcagcaguuuaggguga

SEQ ID NO: 2665431 - RNA, 19 nt, Homo sapiens
  misc_RNA (1)...(19): siRNA sense strand
cagcaaaagaaguauguaa

SEQ ID NO: 2665432 - RNA, 19 nt, Homo sapiens
  misc_RNA (1)...(19): siRNA sense strand
auacaaaggaggaaauaca

SEQ ID NO: 2665433 - RNA, 19 nt, Homo sapiens
  misc_RNA (1)...(19): siRNA sense strand
acuucuagccugcggguaa

SEQ ID NO: 2665434 - RNA, 19 nt, Homo sapiens
  misc_RNA (1)...(19): siRNA sense strand
ggaccugaaauuaggaaaa

SEQ ID NO: 2665435 - RNA, 19 nt, Homo sapiens
  misc_RNA (1)...(19): siRNA sense strand
uuuagacaauggugggaaa

SEQ ID NO: 2665436 - RNA, 19 nt, Homo sapiens
  misc_RNA (1)...(19): siRNA sense strand
gguuauugacugcaagcaa

SEQ ID NO: 2665437 - RNA, 19 nt, Homo sapiens
  misc_RNA (1)...(19): siRNA sense strand
ugauugaagcuguccgaaa

SEQ ID NO: 2665438 - RNA, 19 nt, Homo sapiens
  misc_RNA (1)...(19): siRNA sense strand
aaguaaagguguugacucu

SEQ ID NO: 2665439 - RNA, 19 nt, Homo sapiens
  misc_RNA (1)...(19): siRNA sense strand
gcauugaucuugcaggauu

SEQ ID NO: 2665440 - RNA, 19 nt, Homo sapiens
  misc_RNA (1)...(19): siRNA sense strand
gcaaugaacgcaucagcua

SEQ ID NO: 2665441 - RNA, 19 nt, Homo sapiens
  misc_RNA (1)...(19): siRNA sense strand
aggucuaacugguaucaaa

SEQ ID NO: 2665442 - RNA, 19 nt, Homo sapiens
  misc_RNA (1)...(19): siRNA sense strand
ggaucaaggacuggaguau

SEQ ID NO: 2665443 - RNA, 19 nt, Homo sapiens
  misc_RNA (1)...(19): siRNA sense strand
cagagaaauuaaagccuca

SEQ ID NO: 2665444 - RNA, 19 nt, Homo sapiens
  misc_RNA (1)...(19): siRNA sense strand
ugaugaagggcuacacaaa

SEQ ID NO: 2665445 - RNA, 19 nt, Homo sapiens
  misc_RNA (1)...(19): siRNA sense strand
aggaagaagucauaggaac

SEQ ID NO: 2665446 - RNA, 19 nt, Homo sapiens
  misc_RNA (1)...(19): siRNA sense strand
gaaaaucgaagaugaguua

SEQ ID NO: 2665447 - RNA, 19 nt, Homo sapiens
  misc_RNA (1)...(19): siRNA sense strand
uugaaugcauuuagcacaa

SEQ ID NO: 2665448 - RNA, 19 nt, Homo sapiens
  misc_RNA (1)...(19): siRNA sense strand
ccugagagaugaugagucu

SEQ ID NO: 2665449 - RNA, 19 nt, Homo sapiens
  misc_RNA (1)...(19): siRNA sense strand
agucaaaguuguggacaga

SEQ ID NO: 2665450 - RNA, 19 nt, Homo sapiens
  misc_RNA (1)...(19): siRNA sense strand
gcacaaaagaugaagugau

SEQ ID NO: 2665451 - RNA, 19 nt, Homo sapiens
  misc_RNA (1)...(19): siRNA sense strand
gagcauuggagaugaaaau

SEQ ID NO: 2665452 - RNA, 19 nt, Homo sapiens
  misc_RNA (1)...(19): siRNA sense strand
uuagauggcuauagcauuu

SEQ ID NO: 2665453 - RNA, 19 nt, Homo sapiens
  misc_RNA (1)...(19): siRNA sense strand
aguuguggacagaggaaau

SEQ ID NO: 2665454 - RNA, 19 nt, Homo sapiens
  misc_RNA (1)...(19): siRNA sense strand
gugaaugagcugcaggaga

SEQ ID NO: 2665455 - RNA, 19 nt, Homo sapiens
  misc_RNA (1)...(19): siRNA sense strand
acaaaggaggaaauacaaa

SEQ ID NO: 2665456 - RNA, 19 nt, Homo sapiens
  misc_RNA (1)...(19): siRNA sense strand
gaaaaugguucgaucaaga

SEQ ID NO: 2665457 - RNA, 19 nt, Homo sapiens
  misc_RNA (1)...(19): siRNA sense strand
agugugagcauaauggaaa

SEQ ID NO: 2665458 - RNA, 19 nt, Homo sapiens
  misc_RNA (1)...(19): siRNA sense strand
caccaagaaaccugagaau

SEQ ID NO: 2665459 - RNA, 19 nt, Homo sapiens
  misc_RNA (1)...(19): siRNA sense strand
ucaauaagaucaucagcuu

SEQ ID NO: 2665460 - RNA, 19 nt, Homo sapiens
  misc_RNA (1)...(19): siRNA sense strand
gaacaagauuggcacagau

SEQ ID NO: 2665461 - RNA, 19 nt, Homo sapiens
  misc_RNA (1)...(19): siRNA sense strand
caaagguuaucgugguuau

SEQ ID NO: 2665462 - RNA, 19 nt, Homo sapiens
  misc_RNA (1)...(19): siRNA sense strand
gaaggcuccaagagggaaa

SEQ ID NO: 2665463 - RNA, 19 nt, Homo sapiens
  misc_RNA (1)...(19): siRNA sense strand
cccauauaaaggaggaaau

SEQ ID NO: 2665464 - RNA, 19 nt, Homo sapiens
  misc_RNA (1)...(19): siRNA sense strand
guguagaacuguuugccau

SEQ ID NO: 2665465 - RNA, 19 nt, Homo sapiens
  misc_RNA (1)...(19): siRNA sense strand
aagccaaacauguugaaau

SEQ ID NO: 2665466 - RNA, 19 nt, Homo sapiens
  misc_RNA (1)...(19): siRNA sense strand
agaugcaauuagauggcua

SEQ ID NO: 2665467 - RNA, 19 nt, Homo sapiens
  misc_RNA (1)...(19): siRNA sense strand
gagucaaaguuguggacag

SEQ ID NO: 2665468 - RNA, 19 nt, Homo sapiens
  misc_RNA (1)...(19): siRNA sense strand
uagaaaucuucgugagucu

SEQ ID NO: 2665469 - RNA, 19 nt, Homo sapiens
  misc_RNA (1)...(19): siRNA sense strand
ugauggaaauguuugguuu

SEQ ID NO: 2665470 - RNA, 19 nt, Homo sapiens
  misc_RNA (1)...(19): siRNA sense strand
gguauaaccgguugcgcau

SEQ ID NO: 2665471 - RNA, 19 nt, Homo sapiens
  misc_RNA (1)...(19): siRNA sense strand
cacuguggguggagggaca

SEQ ID NO: 2665472 - RNA, 19 nt, Homo sapiens
  misc_RNA (1)...(19): siRNA sense strand
cauugaucuugcaggauuu

SEQ ID NO: 2665473 - RNA, 19 nt, Homo sapiens
  misc_RNA (1)...(19): siRNA sense strand
gggaaaaugguucgaucaa

SEQ ID NO: 2665474 - RNA, 19 nt, Homo sapiens
  misc_RNA (1)...(19): siRNA sense strand
caauuaaguauguucgaga

SEQ ID NO: 2665475 - RNA, 19 nt, Homo sapiens
  misc_RNA (1)...(19): siRNA sense strand
ggaaauguuugguuugguu

SEQ ID NO: 2665476 - RNA, 19 nt, Homo sapiens
  misc_RNA (1)...(19): siRNA sense strand
agauaaagaaagcaagcca

SEQ ID NO: 2665477 - RNA, 19 nt, Homo sapiens
  misc_RNA (1)...(19): siRNA sense strand
gcucagagaagacacgaau

SEQ ID NO: 2665478 - RNA, 19 nt, Homo sapiens
  misc_RNA (1)...(19): siRNA sense strand
caaaagaugaagugauuga

SEQ ID NO: 2665479 - RNA, 19 nt, Homo sapiens
  misc_RNA (1)...(19): siRNA sense strand
ccgccuacggaguugauua

SEQ ID NO: 2665480 - RNA, 19 nt, Homo sapiens
  misc_RNA (1)...(19): siRNA sense strand
gggaaaacucuaacauauu

SEQ ID NO: 2665481 - RNA, 19 nt, Homo sapiens
  misc_RNA (1)...(19): siRNA sense strand
acugcaagcaaguggguga

SEQ ID NO: 2665482 - RNA, 19 nt, Homo sapiens
  misc_RNA (1)...(19): siRNA sense strand
caagccagcucaaggccaa

SEQ ID NO: 2665483 - RNA, 19 nt, Homo sapiens
  misc_RNA (1)...(19): siRNA sense strand
aauuaaagccucagcccau

SEQ ID NO: 2665484 - RNA, 19 nt, Homo sapiens
  misc_RNA (1)...(19): siRNA sense strand
cuggagcauuggagaugaa

SEQ ID NO: 2665485 - RNA, 19 nt, Homo sapiens
  misc_RNA (1)...(19): siRNA sense strand
ugggaaaacucuaacauau

SEQ ID NO: 2665486 - RNA, 19 nt, Homo sapiens
  misc_RNA (1)...(19): siRNA sense strand
cggaaaugcaggcgugcca

SEQ ID NO: 2665487 - RNA, 19 nt, Homo sapiens
  misc_RNA (1)...(19): siRNA sense strand
aagaugagcuggaagccau

SEQ ID NO: 2665488 - RNA, 19 nt, Homo sapiens
  misc_RNA (1)...(19): siRNA sense strand
cgucaugacaauagggcaa

SEQ ID NO: 2665489 - RNA, 19 nt, Homo sapiens
  misc_RNA (1)...(19): siRNA sense strand
gcguugaauucgaagcaaa

SEQ ID NO: 2665490 - RNA, 19 nt, Homo sapiens
  misc_RNA (1)...(19): siRNA sense strand
uggauauaguguugagaga

SEQ ID NO: 2665491 - RNA, 19 nt, Homo sapiens
  misc_RNA (1)...(19): siRNA sense strand
augagaagauugugcagaa

SEQ ID NO: 2665492 - RNA, 19 nt, Homo sapiens
  misc_RNA (1)...(19): siRNA sense strand
ggauauaaagcgaagacga

SEQ ID NO: 2665493 - RNA, 19 nt, Homo sapiens
  misc_RNA (1)...(19): siRNA sense strand
gaauggaagaacaggaaaa

SEQ ID NO: 2665494 - RNA, 19 nt, Homo sapiens
  misc_RNA (1)...(19): siRNA sense strand
gcgucuugugauagagaaa

SEQ ID NO: 2665495 - RNA, 19 nt, Homo sapiens
  misc_RNA (1)...(19): siRNA sense strand
gaauaaugcuguuagacca

SEQ ID NO: 2665496 - RNA, 19 nt, Homo sapiens
  misc_RNA (1)...(19): siRNA sense strand
gauuaucagaggucagaaa

SEQ ID NO: 2665497 - RNA, 19 nt, Homo sapiens
  misc_RNA (1)...(19): siRNA sense strand
cuucgagggaucagaauaa

SEQ ID NO: 2665498 - RNA, 19 nt, Homo sapiens
  misc_RNA (1)...(19): siRNA sense strand
ucuuggaaguaaugcauaa

SEQ ID NO: 2665499 - RNA, 19 nt, Homo sapiens
  misc_RNA (1)...(19): siRNA sense strand
gcuagguggaaguggauau

SEQ ID NO: 2665500 - RNA, 19 nt, Homo sapiens
  misc_RNA (1)...(19): siRNA sense strand
aagaacaggaaaaggaaaa

SEQ ID NO: 2665501 - RNA, 19 nt, Homo sapiens
  misc_RNA (1)...(19): siRNA sense strand
ugucauagugauccagaaa

SEQ ID NO: 2665502 - RNA, 19 nt, Homo sapiens
  misc_RNA (1)...(19): siRNA sense strand
aauacaaguuccaaagaca

SEQ ID NO: 2665503 - RNA, 19 nt, Homo sapiens
  misc_RNA (1)...(19): siRNA sense strand
gggcaaagcuucgagggau

SEQ ID NO: 2665504 - RNA, 19 nt, Homo sapiens
  misc_RNA (1)...(19): siRNA sense strand
ggggaaggguguuugcaaa

SEQ ID NO: 2665505 - RNA, 19 nt, Homo sapiens
  misc_RNA (1)...(19): siRNA sense strand
agauaauguugcugagauc

SEQ ID NO: 2665506 - RNA, 19 nt, Homo sapiens
  misc_RNA (1)...(19): siRNA sense strand
gggaaggguguuugcaaaa

SEQ ID NO: 2665507 - RNA, 19 nt, Homo sapiens
  misc_RNA (1)...(19): siRNA sense strand
gcaauugauaccaguggaa

SEQ ID NO: 2665508 - RNA, 19 nt, Homo sapiens
  misc_RNA (1)...(19): siRNA sense strand
ggcaaagcuucgagggauc

SEQ ID NO: 2665509 - RNA, 19 nt, Homo sapiens
  misc_RNA (1)...(19): siRNA sense strand
cagcauguuagcaagguua

SEQ ID NO: 2665510 - RNA, 19 nt, Homo sapiens
  misc_RNA (1)...(19): siRNA sense strand
gaccauuacuucugggcau

SEQ ID NO: 2665511 - RNA, 19 nt, Homo sapiens
  misc_RNA (1)...(19): siRNA sense strand
gugugaauccaaagcaaau

SEQ ID NO: 2665512 - RNA, 19 nt, Homo sapiens
  misc_RNA (1)...(19): siRNA sense strand
caacugacaaagaagagaa

SEQ ID NO: 2665513 - RNA, 19 nt, Homo sapiens
  misc_RNA (1)...(19): siRNA sense strand
cguugaauucgaagcaaau

SEQ ID NO: 2665514 - RNA, 19 nt, Homo sapiens
  misc_RNA (1)...(19): siRNA sense strand
cagugugaauccaaagcaa

SEQ ID NO: 2665515 - RNA, 19 nt, Homo sapiens
  misc_RNA (1)...(19): siRNA sense strand
cggauguagcugaccuaaa

SEQ ID NO: 2665516 - RNA, 19 nt, Homo sapiens
  misc_RNA (1)...(19): siRNA sense strand
acaaguaacagaugaagau

SEQ ID NO: 2665517 - RNA, 19 nt, Homo sapiens
  misc_RNA (1)...(19): siRNA sense strand
cauuaagccauuuguagaa

SEQ ID NO: 2665518 - RNA, 19 nt, Homo sapiens
  misc_RNA (1)...(19): siRNA sense strand
gcaaaagauagaagaaguu

SEQ ID NO: 2665519 - RNA, 19 nt, Homo sapiens
  misc_RNA (1)...(19): siRNA sense strand
agacaagacacaaguuuca

SEQ ID NO: 2665520 - RNA, 19 nt, Homo sapiens
  misc_RNA (1)...(19): siRNA sense strand
guaaagaggaagacaacgu

SEQ ID NO: 2665521 - RNA, 19 nt, Homo sapiens
  misc_RNA (1)...(19): siRNA sense strand
aguaacagaugaagaucga

SEQ ID NO: 2665522 - RNA, 19 nt, Homo sapiens
  misc_RNA (1)...(19): siRNA sense strand
aagacaaugaugagaagau

SEQ ID NO: 2665523 - RNA, 19 nt, Homo sapiens
  misc_RNA (1)...(19): siRNA sense strand
uggaauggaagaacaggaa

SEQ ID NO: 2665524 - RNA, 19 nt, Homo sapiens
  misc_RNA (1)...(19): siRNA sense strand
ggaauggaagaacaggaaa

SEQ ID NO: 2665525 - RNA, 19 nt, Homo sapiens
  misc_RNA (1)...(19): siRNA sense strand
aaaagauggccuugugaaa

SEQ ID NO: 2665526 - RNA, 19 nt, Homo sapiens
  misc_RNA (1)...(19): siRNA sense strand
gaaaacugauauggagaaa

SEQ ID NO: 2665527 - RNA, 19 nt, Homo sapiens
  misc_RNA (1)...(19): siRNA sense strand
ucucaaagcauuaagccau

SEQ ID NO: 2665528 - RNA, 19 nt, Homo sapiens
  misc_RNA (1)...(19): siRNA sense strand
agaaguugacagucgcaua

SEQ ID NO: 2665529 - RNA, 19 nt, Homo sapiens
  misc_RNA (1)...(19): siRNA sense strand
gucuugugauagagaaauu

SEQ ID NO: 2665530 - RNA, 19 nt, Homo sapiens
  misc_RNA (1)...(19): siRNA sense strand
gauuugggaaccaggagaa

SEQ ID NO: 2665531 - RNA, 19 nt, Homo sapiens
  misc_RNA (1)...(19): siRNA sense strand
gcuucgagggaucagaaua

SEQ ID NO: 2665532 - RNA, 19 nt, Homo sapiens
  misc_RNA (1)...(19): siRNA sense strand
ccaguggaauggaagaaca

SEQ ID NO: 2665533 - RNA, 19 nt, Homo sapiens
  misc_RNA (1)...(19): siRNA sense strand
aggacuacgaacugagaca

SEQ ID NO: 2665534 - RNA, 19 nt, Homo sapiens
  misc_RNA (1)...(19): siRNA sense strand
gaucagaauaauaccggau

SEQ ID NO: 2665535 - RNA, 19 nt, Homo sapiens
  misc_RNA (1)...(19): siRNA sense strand
aggaagacaacguucagaa

SEQ ID NO: 2665536 - RNA, 19 nt, Homo sapiens
  misc_RNA (1)...(19): siRNA sense strand
guauguaccacaaguaaca

SEQ ID NO: 2665537 - RNA, 19 nt, Homo sapiens
  misc_RNA (1)...(19): siRNA sense strand
gaagcauugaagaaagcaa

SEQ ID NO: 2665538 - RNA, 19 nt, Homo sapiens
  misc_RNA (1)...(19): siRNA sense strand
auacaaguuccaaagacaa

SEQ ID NO: 2665539 - RNA, 19 nt, Homo sapiens
  misc_RNA (1)...(19): siRNA sense strand
guuccaaagacaaugauga

SEQ ID NO: 2665540 - RNA, 19 nt, Homo sapiens
  misc_RNA (1)...(19): siRNA sense strand
cagaauaauaccggaugua

SEQ ID NO: 2665541 - RNA, 19 nt, Homo sapiens
  misc_RNA (1)...(19): siRNA sense strand
cuuuagagaagcaugaaaa

SEQ ID NO: 2665542 - RNA, 19 nt, Homo sapiens
  misc_RNA (1)...(19): siRNA sense strand
ccguauguaccacaaguaa

SEQ ID NO: 2665543 - RNA, 19 nt, Homo sapiens
  misc_RNA (1)...(19): siRNA sense strand
gcaaaaggggauacaccaa

SEQ ID NO: 2665544 - RNA, 19 nt, Homo sapiens
  misc_RNA (1)...(19): siRNA sense strand
ugcuggaauuagagguauu

SEQ ID NO: 2665545 - RNA, 19 nt, Homo sapiens
  misc_RNA (1)...(19): siRNA sense strand
caucucucauggaggacua

SEQ ID NO: 2665546 - RNA, 19 nt, Homo sapiens
  misc_RNA (1)...(19): siRNA sense strand
acaccuugaugcucguaaa

SEQ ID NO: 2665547 - RNA, 19 nt, Homo sapiens
  misc_RNA (1)...(19): siRNA sense strand
ugacaauagggcaaagcuu

SEQ ID NO: 2665548 - RNA, 19 nt, Homo sapiens
  misc_RNA (1)...(19): siRNA sense strand
gcagaaagguugagcaggg

SEQ ID NO: 2665549 - RNA, 19 nt, Homo sapiens
  misc_RNA (1)...(19): siRNA sense strand
uggcacugguugcagcaua

SEQ ID NO: 2665550 - RNA, 19 nt, Homo sapiens
  misc_RNA (1)...(19): siRNA sense strand
gugaaauggaacugaaauc

SEQ ID NO: 2665551 - RNA, 19 nt, Homo sapiens
  misc_RNA (1)...(19): siRNA sense strand
cgaccuaagcugugggccu

SEQ ID NO: 2665552 - RNA, 19 nt, Homo sapiens
  misc_RNA (1)...(19): siRNA sense strand
uggaagaugucauugcaga

SEQ ID NO: 2665553 - RNA, 19 nt, Homo sapiens
  misc_RNA (1)...(19): siRNA sense strand
cugaauucuuacuugggua

SEQ ID NO: 2665554 - RNA, 19 nt, Homo sapiens
  misc_RNA (1)...(19): siRNA sense strand
uguaguucaucgagcucaa

SEQ ID NO: 2665555 - RNA, 19 nt, Homo sapiens
  misc_RNA (1)...(19): siRNA sense strand
gggacgugucggaggcuaa

SEQ ID NO: 2665556 - RNA, 19 nt, Homo sapiens
  misc_RNA (1)...(19): siRNA sense strand
guuaaaucccuuauggcaa

SEQ ID NO: 2665557 - RNA, 19 nt, Homo sapiens
  misc_RNA (1)...(19): siRNA sense strand
gguucgaaaucguggagca

SEQ ID NO: 2665558 - RNA, 19 nt, Homo sapiens
  misc_RNA (1)...(19): siRNA sense strand
ccauaaaguuaaaucccuu

SEQ ID NO: 2665559 - RNA, 19 nt, Homo sapiens
  misc_RNA (1)...(19): siRNA sense strand
aaguagagcccgagcagga

SEQ ID NO: 2665560 - RNA, 19 nt, Homo sapiens
  misc_RNA (1)...(19): siRNA sense strand
ccauugaaaaggaggagaa

SEQ ID NO: 2665561 - RNA, 19 nt, Homo sapiens
  misc_RNA (1)...(19): siRNA sense strand
ccuccaaguucgaugggca

SEQ ID NO: 2665562 - RNA, 19 nt, Homo sapiens
  misc_RNA (1)...(19): siRNA sense strand
uugaaaaggaggagaacga

SEQ ID NO: 2665563 - RNA, 19 nt, Homo sapiens
  misc_RNA (1)...(19): siRNA sense strand
ucuuaaagcuggccaggca

SEQ ID NO: 2665564 - RNA, 19 nt, Homo sapiens
  misc_RNA (1)...(19): siRNA sense strand
aguucuacuucgaccgcaa

SEQ ID NO: 2665565 - RNA, 19 nt, Homo sapiens
  misc_RNA (1)...(19): siRNA sense strand
gagcagagugaccaggaga

SEQ ID NO: 2665566 - RNA, 19 nt, Homo sapiens
  misc_RNA (1)...(19): siRNA sense strand
uggugaaccugguggugga

SEQ ID NO: 2665567 - RNA, 19 nt, Homo sapiens
  misc_RNA (1)...(19): siRNA sense strand
cggucaauuuaagggacua

SEQ ID NO: 2665568 - RNA, 19 nt, Homo sapiens
  misc_RNA (1)...(19): siRNA sense strand
acuuugaaauacagcuaca

SEQ ID NO: 2665569 - RNA, 19 nt, Homo sapiens
  misc_RNA (1)...(19): siRNA sense strand
cugacgaacaugagcagga

SEQ ID NO: 2665570 - RNA, 19 nt, Homo sapiens
  misc_RNA (1)...(19): siRNA sense strand
gggacgugucggaggcuaa

SEQ ID NO: 2665571 - RNA, 19 nt, Homo sapiens
  misc_RNA (1)...(19): siRNA sense strand
guuaaaucccuuauggcaa

SEQ ID NO: 2665572 - RNA, 19 nt, Homo sapiens
  misc_RNA (1)...(19): siRNA sense strand
gguucgaaaucguggagca

SEQ ID NO: 2665573 - RNA, 19 nt, Homo sapiens
  misc_RNA (1)...(19): siRNA sense strand
ccauaaaguuaaaucccuu

SEQ ID NO: 2665574 - RNA, 19 nt, Homo sapiens
  misc_RNA (1)...(19): siRNA sense strand
aaguagagcccgagcagga

SEQ ID NO: 2665575 - RNA, 19 nt, Homo sapiens
  misc_RNA (1)...(19): siRNA sense strand
ccauugaaaaggaggagaa

SEQ ID NO: 2665576 - RNA, 19 nt, Homo sapiens
  misc_RNA (1)...(19): siRNA sense strand
ccuccaaguucgaugggca

SEQ ID NO: 2665577 - RNA, 19 nt, Homo sapiens
  misc_RNA (1)...(19): siRNA sense strand
uugaaaaggaggagaacga

SEQ ID NO: 2665578 - RNA, 19 nt, Homo sapiens
  misc_RNA (1)...(19): siRNA sense strand
ucuuaaagcuggccaggca

SEQ ID NO: 2665579 - RNA, 19 nt, Homo sapiens
  misc_RNA (1)...(19): siRNA sense strand
aguucuacuucgaccgcaa

SEQ ID NO: 2665580 - RNA, 19 nt, Homo sapiens
  misc_RNA (1)...(19): siRNA sense strand
gagcagagugaccaggaga

SEQ ID NO: 2665581 - RNA, 19 nt, Homo sapiens
  misc_RNA (1)...(19): siRNA sense strand
uggugaaccugguggugga

SEQ ID NO: 2665582 - RNA, 19 nt, Homo sapiens
  misc_RNA (1)...(19): siRNA sense strand
cggucaauuuaagggacua

SEQ ID NO: 2665583 - RNA, 19 nt, Homo sapiens
  misc_RNA (1)...(19): siRNA sense strand
acuuugaaauacagcuaca

SEQ ID NO: 2665584 - RNA, 19 nt, Homo sapiens
  misc_RNA (1)...(19): siRNA sense strand
cugacgaacaugagcagga

SEQ ID NO: 2665585 - RNA, 19 nt, Homo sapiens
  misc_RNA (1)...(19): siRNA sense strand
agugaaagugccauggaaa

SEQ ID NO: 2665586 - RNA, 19 nt, Homo sapiens
  misc_RNA (1)...(19): siRNA sense strand
caaacagcugagagugaaa

SEQ ID NO: 2665587 - RNA, 19 nt, Homo sapiens
  misc_RNA (1)...(19): siRNA sense strand
ggcaggaguuuguggagga

SEQ ID NO: 2665588 - RNA, 19 nt, Homo sapiens
  misc_RNA (1)...(19): siRNA sense strand
ugcaaacagcugagaguga

SEQ ID NO: 2665589 - RNA, 19 nt, Homo sapiens
  misc_RNA (1)...(19): siRNA sense strand
gcagcaaggugaaggaguc

SEQ ID NO: 2665590 - RNA, 19 nt, Homo sapiens
  misc_RNA (1)...(19): siRNA sense strand
aggaguuuguggaggaucu

SEQ ID NO: 2665591 - RNA, 19 nt, Homo sapiens
  misc_RNA (1)...(19): siRNA sense strand
augaagagcgagagaucaa

SEQ ID NO: 2665592 - RNA, 19 nt, Homo sapiens
  misc_RNA (1)...(19): siRNA sense strand
gagcaugggagguaaagua

SEQ ID NO: 2665593 - RNA, 19 nt, Homo sapiens
  misc_RNA (1)...(19): siRNA sense strand
aggaagacuuaaaggcaga

SEQ ID NO: 2665594 - RNA, 19 nt, Homo sapiens
  misc_RNA (1)...(19): siRNA sense strand
gcgaaaacaugaagagcga

SEQ ID NO: 2665595 - RNA, 19 nt, Homo sapiens
  misc_RNA (1)...(19): siRNA sense strand
ggagagcaugggagguaaa

SEQ ID NO: 2665596 - RNA, 19 nt, Homo sapiens
  misc_RNA (1)...(19): siRNA sense strand
gcgagagaucaaagaaaga

SEQ ID NO: 2665597 - RNA, 19 nt, Homo sapiens
  misc_RNA (1)...(19): siRNA sense strand
caguaaauugucagccaaa

SEQ ID NO: 2665598 - RNA, 19 nt, Homo sapiens
  misc_RNA (1)...(19): siRNA sense strand
ugucaaaauaccagagcaa

SEQ ID NO: 2665599 - RNA, 19 nt, Homo sapiens
  misc_RNA (1)...(19): siRNA sense strand
cggagauaacggaggagau

SEQ ID NO: 2665600 - RNA, 19 nt, Homo sapiens
  misc_RNA (1)...(19): siRNA sense strand
aagaaaauaccgaggaaga

SEQ ID NO: 2665601 - RNA, 19 nt, Homo sapiens
  misc_RNA (1)...(19): siRNA sense strand
aagaaagaguagaacgagu

SEQ ID NO: 2665602 - RNA, 19 nt, Homo sapiens
  misc_RNA (1)...(19): siRNA sense strand
agaaaugggagaugaaaau

SEQ ID NO: 2665603 - RNA, 19 nt, Homo sapiens
  misc_RNA (1)...(19): siRNA sense strand
acagaaaauugcagaacau

SEQ ID NO: 2665604 - RNA, 19 nt, Homo sapiens
  misc_RNA (1)...(19): siRNA sense strand
agaagaaaauaccgaggaa

SEQ ID NO: 2665605 - RNA, 19 nt, Homo sapiens
  misc_RNA (1)...(19): siRNA sense strand
aagaaaugggagaugaaaa

SEQ ID NO: 2665606 - RNA, 19 nt, Homo sapiens
  misc_RNA (1)...(19): siRNA sense strand
uugcagaacaucggagaaa

SEQ ID NO: 2665607 - RNA, 19 nt, Homo sapiens
  misc_RNA (1)...(19): siRNA sense strand
ugaaauucuuagugaucca

SEQ ID NO: 2665608 - RNA, 19 nt, Homo sapiens
  misc_RNA (1)...(19): siRNA sense strand
ggaggaagacuuaaaggca

SEQ ID NO: 2665609 - RNA, 19 nt, Homo sapiens
  misc_RNA (1)...(19): siRNA sense strand
agauaacggaggagaugau

SEQ ID NO: 2665610 - RNA, 19 nt, Homo sapiens
  misc_RNA (1)...(19): siRNA sense strand
ucaacauagggcacagaaa

SEQ ID NO: 2665611 - RNA, 19 nt, Homo sapiens
  misc_RNA (1)...(19): siRNA sense strand
cagaaguuaugguggccuu

SEQ ID NO: 2665612 - RNA, 19 nt, Homo sapiens
  misc_RNA (1)...(19): siRNA sense strand
cugcaaagugaacgagcuu

SEQ ID NO: 2665613 - RNA, 19 nt, Homo sapiens
  misc_RNA (1)...(19): siRNA sense strand
ucgaaaagagcaugagaga

SEQ ID NO: 2665614 - RNA, 19 nt, Homo sapiens
  misc_RNA (1)...(19): siRNA sense strand
ucuuagugauccagagguu

SEQ ID NO: 2665615 - RNA, 19 nt, Homo sapiens
  misc_RNA (1)...(19): siRNA sense strand
agguggaggaagacuuaaa

SEQ ID NO: 2665616 - RNA, 19 nt, Homo sapiens
  misc_RNA (1)...(19): siRNA sense strand
agaugaaaaugcggagaua

SEQ ID NO: 2665617 - RNA, 19 nt, Homo sapiens
  misc_RNA (1)...(19): siRNA sense strand
gaaaacaugaagagcgaga

SEQ ID NO: 2665618 - RNA, 19 nt, Homo sapiens
  misc_RNA (1)...(19): siRNA sense strand
acaugaagagcgagagauc

SEQ ID NO: 2665619 - RNA, 19 nt, Homo sapiens
  misc_RNA (1)...(19): siRNA sense strand
ggaagaagccagacgacag

SEQ ID NO: 2665620 - RNA, 19 nt, Homo sapiens
  misc_RNA (1)...(19): siRNA sense strand
cggagaaaguaugagcgaa

SEQ ID NO: 2665621 - RNA, 19 nt, Homo sapiens
  misc_RNA (1)...(19): siRNA sense strand
gaaaagagcaugagagagc

SEQ ID NO: 2665622 - RNA, 19 nt, Homo sapiens
  misc_RNA (1)...(19): siRNA sense strand
ccugcuacucagaaagcua

SEQ ID NO: 2665623 - RNA, 19 nt, Homo sapiens
  misc_RNA (1)...(19): siRNA sense strand
gugacagagccauugaaau

SEQ ID NO: 2665624 - RNA, 19 nt, Homo sapiens
  misc_RNA (1)...(19): siRNA sense strand
agaacaucggagaaaguau

SEQ ID NO: 2665625 - RNA, 19 nt, Homo sapiens
  misc_RNA (1)...(19): siRNA sense strand
aggaaugccuggaauggga

SEQ ID NO: 2665626 - RNA, 19 nt, Homo sapiens
  misc_RNA (1)...(19): siRNA sense strand
cuuaaaggcagacgaacca

SEQ ID NO: 2665627 - RNA, 19 nt, Homo sapiens
  misc_RNA (1)...(19): siRNA sense strand
agcccuaaaugauggugaa

SEQ ID NO: 2665628 - RNA, 19 nt, Homo sapiens
  misc_RNA (1)...(19): siRNA sense strand
gagaagacgauuacagaaa

SEQ ID NO: 2665629 - RNA, 19 nt, Homo sapiens
  misc_RNA (1)...(19): siRNA sense strand
gcauuggauuggaggaaau

SEQ ID NO: 2665630 - RNA, 19 nt, Homo sapiens
  misc_RNA (1)...(19): siRNA sense strand
gcugaagagaagacgauua

SEQ ID NO: 2665631 - RNA, 19 nt, Homo sapiens
  misc_RNA (1)...(19): siRNA sense strand
gugagaaaguuguugccaa

SEQ ID NO: 2665632 - RNA, 19 nt, Homo sapiens
  misc_RNA (1)...(19): siRNA sense strand
caagacaguuggaagggaa

SEQ ID NO: 2665633 - RNA, 19 nt, Homo sapiens
  misc_RNA (1)...(19): siRNA sense strand
gugaugaauuugaagauga

SEQ ID NO: 2665634 - RNA, 19 nt, Homo sapiens
  misc_RNA (1)...(19): siRNA sense strand
ccucagaaacccacagcua

SEQ ID NO: 2665635 - RNA, 19 nt, Homo sapiens
  misc_RNA (1)...(19): siRNA sense strand
ggagaaggguuucagaaca

SEQ ID NO: 2665636 - RNA, 19 nt, Homo sapiens
  misc_RNA (1)...(19): siRNA sense strand
guuacagagagaugaauua

SEQ ID NO: 2665637 - RNA, 19 nt, Homo sapiens
  misc_RNA (1)...(19): siRNA sense strand
gcuacgaagugaagagugu

SEQ ID NO: 2665638 - RNA, 19 nt, Homo sapiens
  misc_RNA (1)...(19): siRNA sense strand
agaaaagcaccuugaauua

SEQ ID NO: 2665639 - RNA, 19 nt, Homo sapiens
  misc_RNA (1)...(19): siRNA sense strand
gauuauggagagacugaua

SEQ ID NO: 2665640 - RNA, 19 nt, Homo sapiens
  misc_RNA (1)...(19): siRNA sense strand
acugauagauccaaggaca

SEQ ID NO: 2665641 - RNA, 19 nt, Homo sapiens
  misc_RNA (1)...(19): siRNA sense strand
cugauagauccaaggacaa

SEQ ID NO: 2665642 - RNA, 19 nt, Homo sapiens
  misc_RNA (1)...(19): siRNA sense strand
ggacuagcagaaagacuaa

SEQ ID NO: 2665643 - RNA, 19 nt, Homo sapiens
  misc_RNA (1)...(19): siRNA sense strand
cagaaagacuaaauggacu

SEQ ID NO: 2665644 - RNA, 19 nt, Homo sapiens
  misc_RNA (1)...(19): siRNA sense strand
ugaagaguguccucggaaa

SEQ ID NO: 2665645 - RNA, 19 nt, Homo sapiens
  misc_RNA (1)...(19): siRNA sense strand
cauuaacagcugaagagaa

SEQ ID NO: 2665646 - RNA, 19 nt, Homo sapiens
  misc_RNA (1)...(19): siRNA sense strand
gagugaaggucaagcuguu

SEQ ID NO: 2665647 - RNA, 19 nt, Homo sapiens
  misc_RNA (1)...(19): siRNA sense strand
acaaauaccacgugcaguu

SEQ ID NO: 2665648 - RNA, 19 nt, Homo sapiens
  misc_RNA (1)...(19): siRNA sense strand
aguaaucagucuuugacaa

SEQ ID NO: 2665649 - RNA, 19 nt, Homo sapiens
  misc_RNA (1)...(19): siRNA sense strand
ugacgagggugcuguggaa

SEQ ID NO: 2665650 - RNA, 19 nt, Homo sapiens
  misc_RNA (1)...(19): siRNA sense strand
gcuuuuaagagguggacua

SEQ ID NO: 2665651 - RNA, 19 nt, Homo sapiens
  misc_RNA (1)...(19): siRNA sense strand
ccaaggagacugcaggcua

SEQ ID NO: 2665652 - RNA, 19 nt, Homo sapiens
  misc_RNA (1)...(19): siRNA sense strand
acugcagaaucgagagaga

SEQ ID NO: 2665653 - RNA, 19 nt, Homo sapiens
  misc_RNA (1)...(19): siRNA sense strand
caagaaaccaccacaucua

SEQ ID NO: 2665654 - RNA, 19 nt, Homo sapiens
  misc_RNA (1)...(19): siRNA sense strand
cagaaaagcaccuugaauu

SEQ ID NO: 2665655 - RNA, 19 nt, Homo sapiens
  misc_RNA (1)...(19): siRNA sense strand
gagagaugaauuacaguuu

SEQ ID NO: 2665656 - RNA, 19 nt, Homo sapiens
  misc_RNA (1)...(19): siRNA sense strand
cauccaaaucugggacaaa

SEQ ID NO: 2665657 - RNA, 19 nt, Homo sapiens
  misc_RNA (1)...(19): siRNA sense strand
cagugggcuuacagacaua

SEQ ID NO: 2665658 - RNA, 19 nt, Homo sapiens
  misc_RNA (1)...(19): siRNA sense strand
uggacuagcagaaagacua

SEQ ID NO: 2665659 - RNA, 19 nt, Homo sapiens
  misc_RNA (1)...(19): siRNA sense strand
ggcuagugacugugaugaa

SEQ ID NO: 2665660 - RNA, 19 nt, Homo sapiens
  misc_RNA (1)...(19): siRNA sense strand
gagaaggguuucagaacac

SEQ ID NO: 2665661 - RNA, 19 nt, Homo sapiens
  misc_RNA (1)...(19): siRNA sense strand
cuugcagccuggugggaau

SEQ ID NO: 2665662 - RNA, 19 nt, Homo sapiens
  misc_RNA (1)...(19): siRNA sense strand
agugcagagugaaggucaa

SEQ ID NO: 2665663 - RNA, 19 nt, Homo sapiens
  misc_RNA (1)...(19): siRNA sense strand
cagauuauggagagacuga

SEQ ID NO: 2665664 - RNA, 19 nt, Homo sapiens
  misc_RNA (1)...(19): siRNA sense strand
gcaagacagauuauggaga

SEQ ID NO: 2665665 - RNA, 19 nt, Homo sapiens
  misc_RNA (1)...(19): siRNA sense strand
auuaacagcugaagagaag

SEQ ID NO: 2665666 - RNA, 19 nt, Homo sapiens
  misc_RNA (1)...(19): siRNA sense strand
gaauuaugcccuagaccca

SEQ ID NO: 2665667 - RNA, 19 nt, Homo sapiens
  misc_RNA (1)...(19): siRNA sense strand
aggaguuggaauacagaau

SEQ ID NO: 2665668 - RNA, 19 nt, Homo sapiens
  misc_RNA (1)...(19): siRNA sense strand
cugaaguccuggaggcacu

SEQ ID NO: 2665669 - RNA, 19 nt, Homo sapiens
  misc_RNA (1)...(19): siRNA sense strand
ucggauuguuugugcugaa

SEQ ID NO: 2665670 - RNA, 19 nt, Homo sapiens
  misc_RNA (1)...(19): siRNA sense strand
gaagugauuugucggauga

SEQ ID NO: 2665671 - RNA, 19 nt, Homo sapiens
  misc_RNA (1)...(19): siRNA sense strand
cggaugaagauaagacacu

SEQ ID NO: 2665672 - RNA, 19 nt, Homo sapiens
  misc_RNA (1)...(19): siRNA sense strand
ugauagauccaaggacaaa

SEQ ID NO: 2665673 - RNA, 19 nt, Homo sapiens
  misc_RNA (1)...(19): siRNA sense strand
cgucauuaacagcugaaga

SEQ ID NO: 2665674 - RNA, 19 nt, Homo sapiens
  misc_RNA (1)...(19): siRNA sense strand
cuucuggagcaaagggaga

SEQ ID NO: 2665675 - RNA, 19 nt, Homo sapiens
  misc_RNA (1)...(19): siRNA sense strand
gaugaagauaagacacuuu

SEQ ID NO: 2665676 - RNA, 19 nt, Homo sapiens
  misc_RNA (1)...(19): siRNA sense strand
ugguguauuaacugugaaa

SEQ ID NO: 2665677 - RNA, 19 nt, Homo sapiens
  misc_RNA (1)...(19): siRNA sense strand
ggaagugauuugucggaug

SEQ ID NO: 2665678 - RNA, 19 nt, Homo sapiens
  misc_RNA (1)...(19): siRNA sense strand
gugauuugucggaugaaga

SEQ ID NO: 2665679 - RNA, 19 nt, Homo sapiens
  misc_RNA (1)...(19): siRNA sense strand
acgagggugcuguggaaau

SEQ ID NO: 2665680 - RNA, 19 nt, Homo sapiens
  misc_RNA (1)...(19): siRNA sense strand
ggagagacugauagaucca

SEQ ID NO: 2665681 - RNA, 19 nt, Homo sapiens
  misc_RNA (1)...(19): siRNA sense strand
agaccgcagugcagaguga

SEQ ID NO: 2665682 - RNA, 19 nt, Homo sapiens
  misc_RNA (1)...(19): siRNA sense strand
cagcugaagagaagacgau

SEQ ID NO: 2665683 - RNA, 19 nt, Homo sapiens
  misc_RNA (1)...(19): siRNA sense strand
aggacaaaaucaacagaga

SEQ ID NO: 2665684 - RNA, 19 nt, Homo sapiens
  misc_RNA (1)...(19): siRNA sense strand
cugcauuggauuggaggaa

SEQ ID NO: 2665685 - RNA, 19 nt, Homo sapiens
  misc_RNA (1)...(19): siRNA sense strand
ggucagaagagcaggucuc

SEQ ID NO: 2665686 - RNA, 19 nt, Homo sapiens
  misc_RNA (1)...(19): siRNA sense strand
uaagacacuuucucaguua

SEQ ID NO: 2665687 - RNA, 19 nt, Homo sapiens
  misc_RNA (1)...(19): siRNA sense strand
gcaaguaaucagucuuuga

SEQ ID NO: 2665688 - RNA, 19 nt, Homo sapiens
  misc_RNA (1)...(19): siRNA sense strand
cagaaaauucagcaaagaa

SEQ ID NO: 2665689 - RNA, 19 nt, Homo sapiens
  misc_RNA (1)...(19): siRNA sense strand
aagagguggacuagcagaa

SEQ ID NO: 2665690 - RNA, 19 nt, Homo sapiens
  misc_RNA (1)...(19): siRNA sense strand
gacuaaauggacugcagaa

SEQ ID NO: 2665691 - RNA, 19 nt, Homo sapiens
  misc_RNA (1)...(19): siRNA sense strand
aguuacagagagaugaauu

SEQ ID NO: 2665692 - RNA, 19 nt, Homo sapiens
  misc_RNA (1)...(19): siRNA sense strand
cagguguggagaaggguuu

SEQ ID NO: 2665693 - RNA, 19 nt, Homo sapiens
  misc_RNA (1)...(19): siRNA sense strand
ggacugcagaaucgagaga

SEQ ID NO: 2665694 - RNA, 19 nt, Homo sapiens
  misc_RNA (1)...(19): siRNA sense strand
uggaugugguggaaagcca

SEQ ID NO: 2665695 - RNA, 19 nt, Homo sapiens
  misc_RNA (1)...(19): siRNA sense strand
agguggacuagcagaaaga

SEQ ID NO: 2665696 - RNA, 19 nt, Homo sapiens
  misc_RNA (1)...(19): siRNA sense strand
agagaagacgauuacagaa

SEQ ID NO: 2665697 - RNA, 19 nt, Homo sapiens
  misc_RNA (1)...(19): siRNA sense strand
uuuaagagguggacuagca

SEQ ID NO: 2665698 - RNA, 19 nt, Homo sapiens
  misc_RNA (1)...(19): siRNA sense strand
gggucuaacaaauaauuca

SEQ ID NO: 2665699 - RNA, 19 nt, Homo sapiens
  misc_RNA (1)...(19): siRNA sense strand
ccggugaagaugggagcua

SEQ ID NO: 2665700 - RNA, 19 nt, Homo sapiens
  misc_RNA (1)...(19): siRNA sense strand
ccuagacccaagcaagaaa

SEQ ID NO: 2665701 - RNA, 19 nt, Homo sapiens
  misc_RNA (1)...(19): siRNA sense strand
ggcagaggcuagugacugu

SEQ ID NO: 2665702 - RNA, 19 nt, Homo sapiens
  misc_RNA (1)...(19): siRNA sense strand
cugcaaacgaaggaggaga

SEQ ID NO: 2665703 - RNA, 19 nt, Homo sapiens
  misc_RNA (1)...(19): siRNA sense strand
guacaaagaugaugcccuu

SEQ ID NO: 2665704 - RNA, 19 nt, Homo sapiens
  misc_RNA (1)...(19): siRNA sense strand
aggcugaaaaugaagaaaa

SEQ ID NO: 2665705 - RNA, 19 nt, Homo sapiens
  misc_RNA (1)...(19): siRNA sense strand
agaaauucgcagagcggga

SEQ ID NO: 2665706 - RNA, 19 nt, Homo sapiens
  misc_RNA (1)...(19): siRNA sense strand
ggaaagugcuccacagcug

SEQ ID NO: 2665707 - RNA, 19 nt, Homo sapiens
  misc_RNA (1)...(19): siRNA sense strand
auugacuuguucaggaaua

SEQ ID NO: 2665708 - RNA, 19 nt, Homo sapiens
  misc_RNA (1)...(19): siRNA sense strand
aguaugcggaugugaguau

SEQ ID NO: 2665709 - RNA, 19 nt, Homo sapiens
  misc_RNA (1)...(19): siRNA sense strand
gagaaugacagauggaggu

SEQ ID NO: 2665710 - RNA, 19 nt, Homo sapiens
  misc_RNA (1)...(19): siRNA sense strand
gggauuggcuccaggcuug

SEQ ID NO: 2665711 - RNA, 19 nt, Homo sapiens
  misc_RNA (1)...(19): siRNA sense strand
ccuccaaggcugcaguaca

SEQ ID NO: 2665712 - RNA, 19 nt, Homo sapiens
  misc_RNA (1)...(19): siRNA sense strand
uguuaagagaggagagauu

SEQ ID NO: 2665713 - RNA, 19 nt, Homo sapiens
  misc_RNA (1)...(19): siRNA sense strand
cugaauauaucuauggaga

SEQ ID NO: 2665714 - RNA, 19 nt, Homo sapiens
  misc_RNA (1)...(19): siRNA sense strand
gaauaaagagcuaacagau

SEQ ID NO: 2665715 - RNA, 19 nt, Homo sapiens
  misc_RNA (1)...(19): siRNA sense strand
agaugggagucguuugaua

SEQ ID NO: 2665716 - RNA, 19 nt, Homo sapiens
  misc_RNA (1)...(19): siRNA sense strand
cgaauaaagagcuaacaga

SEQ ID NO: 2665717 - RNA, 19 nt, Homo sapiens
  misc_RNA (1)...(19): siRNA sense strand
ccacaagagcuucagguga

SEQ ID NO: 2665718 - RNA, 19 nt, Homo sapiens
  misc_RNA (1)...(19): siRNA sense strand
auaaagagcuaacagauga

SEQ ID NO: 2665719 - RNA, 19 nt, Homo sapiens
  misc_RNA (1)...(19): siRNA sense strand
cagaagaggaggauaaauc

SEQ ID NO: 2665720 - RNA, 19 nt, Homo sapiens
  misc_RNA (1)...(19): siRNA sense strand
aagccuuacaccugaaaua

SEQ ID NO: 2665721 - RNA, 19 nt, Homo sapiens
  misc_RNA (1)...(19): siRNA sense strand
uaauagaccuaaagccaca

SEQ ID NO: 2665722 - RNA, 19 nt, Homo sapiens
  misc_RNA (1)...(19): siRNA sense strand
agaggaggauaaaucaaua

SEQ ID NO: 2665723 - RNA, 19 nt, Homo sapiens
  misc_RNA (1)...(19): siRNA sense strand
cuucaagagcccacggaca

SEQ ID NO: 2665724 - RNA, 19 nt, Homo sapiens
  misc_RNA (1)...(19): siRNA sense strand
uguaugaagaugaagugaa

SEQ ID NO: 2665725 - RNA, 19 nt, Homo sapiens
  misc_RNA (1)...(19): siRNA sense strand
uuucaaagaggcaagggaa

SEQ ID NO: 2665726 - RNA, 19 nt, Homo sapiens
  misc_RNA (1)...(19): siRNA sense strand
gaagaggaggauaaaucaa

SEQ ID NO: 2665727 - RNA, 19 nt, Homo sapiens
  misc_RNA (1)...(19): siRNA sense strand
ugacuucauuuccgaauaa

SEQ ID NO: 2665728 - RNA, 19 nt, Homo sapiens
  misc_RNA (1)...(19): siRNA sense strand
ccuuguucaugguggccaa

SEQ ID NO: 2665729 - RNA, 19 nt, Homo sapiens
  misc_RNA (1)...(19): siRNA sense strand
cugggaaaauugugaauga

SEQ ID NO: 2665730 - RNA, 19 nt, Homo sapiens
  misc_RNA (1)...(19): siRNA sense strand
agcuucaggugaugauaaa

SEQ ID NO: 2665731 - RNA, 19 nt, Homo sapiens
  misc_RNA (1)...(19): siRNA sense strand
auuuacagguggaggauac

SEQ ID NO: 2665732 - RNA, 19 nt, Homo sapiens
  misc_RNA (1)...(19): siRNA sense strand
auuuggauauggaggauca

SEQ ID NO: 2665733 - RNA, 19 nt, Homo sapiens
  misc_RNA (1)...(19): siRNA sense strand
gggauuugcaguuggccuu

SEQ ID NO: 2665734 - RNA, 19 nt, Homo sapiens
  misc_RNA (1)...(19): siRNA sense strand
ggaggauacagauugggua

SEQ ID NO: 2665735 - RNA, 19 nt, Homo sapiens
  misc_RNA (1)...(19): siRNA sense strand
gaacuuuauuguacagucu

SEQ ID NO: 2665736 - RNA, 19 nt, Homo sapiens
  misc_RNA (1)...(19): siRNA sense strand
gugacuucauuuccgaaua

SEQ ID NO: 2665737 - RNA, 19 nt, Homo sapiens
  misc_RNA (1)...(19): siRNA sense strand
cagguuagcagaugggagu

SEQ ID NO: 2665738 - RNA, 19 nt, Homo sapiens
  misc_RNA (1)...(19): siRNA sense strand
ucaugguggccaagugaau

SEQ ID NO: 2665739 - RNA, 19 nt, Homo sapiens
  misc_RNA (1)...(19): siRNA sense strand
ggagaaaggaaaugagaau

SEQ ID NO: 2665740 - RNA, 19 nt, Homo sapiens
  misc_RNA (1)...(19): siRNA sense strand
ccaugaaagcaaugaguaa

SEQ ID NO: 2665741 - RNA, 19 nt, Homo sapiens
  misc_RNA (1)...(19): siRNA sense strand
ccaaagagccaaaggaaaa

SEQ ID NO: 2665742 - RNA, 19 nt, Homo sapiens
  misc_RNA (1)...(19): siRNA sense strand
caguaaagguuuugguaaa

SEQ ID NO: 2665743 - RNA, 19 nt, Homo sapiens
  misc_RNA (1)...(19): siRNA sense strand
ggauaaggaagcagacaaa

SEQ ID NO: 2665744 - RNA, 19 nt, Homo sapiens
  misc_RNA (1)...(19): siRNA sense strand
caauggugcugaagagaaa

SEQ ID NO: 2665745 - RNA, 19 nt, Homo sapiens
  misc_RNA (1)...(19): siRNA sense strand
aggaaaagcuggaggauga

SEQ ID NO: 2665746 - RNA, 19 nt, Homo sapiens
  misc_RNA (1)...(19): siRNA sense strand
agaaugaagacgagaacaa

SEQ ID NO: 2665747 - RNA, 19 nt, Homo sapiens
  misc_RNA (1)...(19): siRNA sense strand
gauccaaauuucuggcaaa

SEQ ID NO: 2665748 - RNA, 19 nt, Homo sapiens
  misc_RNA (1)...(19): siRNA sense strand
agaaagaaauagaggaucu

SEQ ID NO: 2665749 - RNA, 19 nt, Homo sapiens
  misc_RNA (1)...(19): siRNA sense strand
cggcaaaaguggacaagaa

SEQ ID NO: 2665750 - RNA, 19 nt, Homo sapiens
  misc_RNA (1)...(19): siRNA sense strand
cggaggaggaggaggagaa

SEQ ID NO: 2665751 - RNA, 19 nt, Homo sapiens
  misc_RNA (1)...(19): siRNA sense strand
cgaacagaaugaugagcaa

SEQ ID NO: 2665752 - RNA, 19 nt, Homo sapiens
  misc_RNA (1)...(19): siRNA sense strand
ccuaagacaagaagugaua

SEQ ID NO: 2665753 - RNA, 19 nt, Homo sapiens
  misc_RNA (1)...(19): siRNA sense strand
augaaauggguuugggaaa

SEQ ID NO: 2665754 - RNA, 19 nt, Homo sapiens
  misc_RNA (1)...(19): siRNA sense strand
aggaagaauccauggaaau

SEQ ID NO: 2665755 - RNA, 19 nt, Homo sapiens
  misc_RNA (1)...(19): siRNA sense strand
ggaaucggacagaggaaua

SEQ ID NO: 2665756 - RNA, 19 nt, Homo sapiens
  misc_RNA (1)...(19): siRNA sense strand
cagaagagcaggugcaaaa

SEQ ID NO: 2665757 - RNA, 19 nt, Homo sapiens
  misc_RNA (1)...(19): siRNA sense strand
gagccauccuugagaagaa

SEQ ID NO: 2665758 - RNA, 19 nt, Homo sapiens
  misc_RNA (1)...(19): siRNA sense strand
aggagaaaugugagggcaa

SEQ ID NO: 2665759 - RNA, 19 nt, Homo sapiens
  misc_RNA (1)...(19): siRNA sense strand
caagaaagaaauagaggau

SEQ ID NO: 2665760 - RNA, 19 nt, Homo sapiens
  misc_RNA (1)...(19): siRNA sense strand
gcaaaugccaauagaccaa

SEQ ID NO: 2665761 - RNA, 19 nt, Homo sapiens
  misc_RNA (1)...(19): siRNA sense strand
guuucaggguggagaagaa

SEQ ID NO: 2665762 - RNA, 19 nt, Homo sapiens
  misc_RNA (1)...(19): siRNA sense strand
ccugcagauuggugggaua

SEQ ID NO: 2665763 - RNA, 19 nt, Homo sapiens
  misc_RNA (1)...(19): siRNA sense strand
aggauaagucacagggcua

SEQ ID NO: 2665764 - RNA, 19 nt, Homo sapiens
  misc_RNA (1)...(19): siRNA sense strand
gguagauaaccaagaacua

SEQ ID NO: 2665765 - RNA, 19 nt, Homo sapiens
  misc_RNA (1)...(19): siRNA sense strand
aagaaaaggucaaaggcaa

SEQ ID NO: 2665766 - RNA, 19 nt, Homo sapiens
  misc_RNA (1)...(19): siRNA sense strand
gcugaugauuggaagaaau

SEQ ID NO: 2665767 - RNA, 19 nt, Homo sapiens
  misc_RNA (1)...(19): siRNA sense strand
ggaagaaaucggagaguuc

SEQ ID NO: 2665768 - RNA, 19 nt, Homo sapiens
  misc_RNA (1)...(19): siRNA sense strand
gaucgaggaguuugagaaa

SEQ ID NO: 2665769 - RNA, 19 nt, Homo sapiens
  misc_RNA (1)...(19): siRNA sense strand
uggccuaaggauagaguaa

SEQ ID NO: 2665770 - RNA, 19 nt, Homo sapiens
  misc_RNA (1)...(19): siRNA sense strand
agaaaggaaaugagaauga

SEQ ID NO: 2665771 - RNA, 19 nt, Homo sapiens
  misc_RNA (1)...(19): siRNA sense strand
ggagguagaaauugaggaa

SEQ ID NO: 2665772 - RNA, 19 nt, Homo sapiens
  misc_RNA (1)...(19): siRNA sense strand
augagaguuuggagaaaua

SEQ ID NO: 2665773 - RNA, 19 nt, Homo sapiens
  misc_RNA (1)...(19): siRNA sense strand
cccaaagagccaaaggaaa

SEQ ID NO: 2665774 - RNA, 19 nt, Homo sapiens
  misc_RNA (1)...(19): siRNA sense strand
gggauaaggaagcagacaa

SEQ ID NO: 2665775 - RNA, 19 nt, Homo sapiens
  misc_RNA (1)...(19): siRNA sense strand
agaugaagacccagaauau

SEQ ID NO: 2665776 - RNA, 19 nt, Homo sapiens
  misc_RNA (1)...(19): siRNA sense strand
aaggagaggagaaaggaaa

SEQ ID NO: 2665777 - RNA, 19 nt, Homo sapiens
  misc_RNA (1)...(19): siRNA sense strand
ccaacaacauccuggucaa

SEQ ID NO: 2665778 - RNA, 19 nt, Homo sapiens
  misc_RNA (1)...(19): siRNA sense strand
cuauagaagaucuggaaaa

SEQ ID NO: 2665779 - RNA, 19 nt, Homo sapiens
  misc_RNA (1)...(19): siRNA sense strand
gcaagcacagugagaguaa

SEQ ID NO: 2665780 - RNA, 19 nt, Homo sapiens
  misc_RNA (1)...(19): siRNA sense strand
ggagcgagcagaagaggaa

SEQ ID NO: 2665781 - RNA, 19 nt, Homo sapiens
  misc_RNA (1)...(19): siRNA sense strand
caguaaauccuauggguca

SEQ ID NO: 2665782 - RNA, 19 nt, Homo sapiens
  misc_RNA (1)...(19): siRNA sense strand
aaggaagaauccauggaaa

SEQ ID NO: 2665783 - RNA, 19 nt, Homo sapiens
  misc_RNA (1)...(19): siRNA sense strand
ucaaagaggauguagaaaa

SEQ ID NO: 2665784 - RNA, 19 nt, Homo sapiens
  misc_RNA (1)...(19): siRNA sense strand
gggcaaagaagaggaagaa

SEQ ID NO: 2665785 - RNA, 19 nt, Homo sapiens
  misc_RNA (1)...(19): siRNA sense strand
acgaaauagcacaggguga

SEQ ID NO: 2665786 - RNA, 19 nt, Homo sapiens
  misc_RNA (1)...(19): siRNA sense strand
gggaugaaauagaaaacaa

SEQ ID NO: 2665787 - RNA, 19 nt, Homo sapiens
  misc_RNA (1)...(19): siRNA sense strand
gagcaaagaggaacagaca

SEQ ID NO: 2665788 - RNA, 19 nt, Homo sapiens
  misc_RNA (1)...(19): siRNA sense strand
ggcaggagguuuaggcauu

SEQ ID NO: 2665789 - RNA, 19 nt, Homo sapiens
  misc_RNA (1)...(19): siRNA sense strand
ucuaugaguggaagagaaa

SEQ ID NO: 2665790 - RNA, 19 nt, Homo sapiens
  misc_RNA (1)...(19): siRNA sense strand
gacaagaagugauaggaga

SEQ ID NO: 2665791 - RNA, 19 nt, Homo sapiens
  misc_RNA (1)...(19): siRNA sense strand
ccgaggagagccuggauaa

SEQ ID NO: 2665792 - RNA, 19 nt, Homo sapiens
  misc_RNA (1)...(19): siRNA sense strand
uggaacaagccgaaggcaa

SEQ ID NO: 2665793 - RNA, 19 nt, Homo sapiens
  misc_RNA (1)...(19): siRNA sense strand
caaacaaagcugacacauu

SEQ ID NO: 2665794 - RNA, 19 nt, Homo sapiens
  misc_RNA (1)...(19): siRNA sense strand
gccgggaagugcugggaua

SEQ ID NO: 2665795 - RNA, 19 nt, Homo sapiens
  misc_RNA (1)...(19): siRNA sense strand
auaacaaacucagggaaua

SEQ ID NO: 2665796 - RNA, 19 nt, Homo sapiens
  misc_RNA (1)...(19): siRNA sense strand
agaauaggacagagcaaau

SEQ ID NO: 2665797 - RNA, 19 nt, Homo sapiens
  misc_RNA (1)...(19): siRNA sense strand
cuucaaaaggagaggagaa

SEQ ID NO: 2665798 - RNA, 19 nt, Homo sapiens
  misc_RNA (1)...(19): siRNA sense strand
agaaaaggucaaaggcaaa

SEQ ID NO: 2665799 - RNA, 19 nt, Homo sapiens
  misc_RNA (1)...(19): siRNA sense strand
ccauugagucagaagggaa

SEQ ID NO: 2665800 - RNA, 19 nt, Homo sapiens
  misc_RNA (1)...(19): siRNA sense strand
ccgaaagaacccaaggaga

SEQ ID NO: 2665801 - RNA, 19 nt, Homo sapiens
  misc_RNA (1)...(19): siRNA sense strand
agauaagagaauucagcaa

SEQ ID NO: 2665802 - RNA, 19 nt, Homo sapiens
  misc_RNA (1)...(19): siRNA sense strand
gcaaaguggaggagccuga

SEQ ID NO: 2665803 - RNA, 19 nt, Homo sapiens
  misc_RNA (1)...(19): siRNA sense strand
uggacauacuggaagacua

SEQ ID NO: 2665804 - RNA, 19 nt, Homo sapiens
  misc_RNA (1)...(19): siRNA sense strand
cauugagucagaagggaaa

SEQ ID NO: 2665805 - RNA, 19 nt, Homo sapiens
  misc_RNA (1)...(19): siRNA sense strand
ccgaagaggaugaagagga

SEQ ID NO: 2665806 - RNA, 19 nt, Homo sapiens
  misc_RNA (1)...(19): siRNA sense strand
ucagaaaccgaaacagaaa

SEQ ID NO: 2665807 - RNA, 19 nt, Homo sapiens
  misc_RNA (1)...(19): siRNA sense strand
augaagacccagaauauaa

SEQ ID NO: 2665808 - RNA, 19 nt, Homo sapiens
  misc_RNA (1)...(19): siRNA sense strand
caagaagagaagaggcuga

SEQ ID NO: 2665809 - RNA, 19 nt, Homo sapiens
  misc_RNA (1)...(19): siRNA sense strand
gcacauaagcgguugggaa

SEQ ID NO: 2665810 - RNA, 19 nt, Homo sapiens
  misc_RNA (1)...(19): siRNA sense strand
ggaagaagauauucgggaa

SEQ ID NO: 2665811 - RNA, 19 nt, Homo sapiens
  misc_RNA (1)...(19): siRNA sense strand
ccaaagaucaaaaggaaaa

SEQ ID NO: 2665812 - RNA, 19 nt, Homo sapiens
  misc_RNA (1)...(19): siRNA sense strand
ucaaauugugaaugggaaa

SEQ ID NO: 2665813 - RNA, 19 nt, Homo sapiens
  misc_RNA (1)...(19): siRNA sense strand
ucuuguacuugaagggaaa

SEQ ID NO: 2665814 - RNA, 19 nt, Homo sapiens
  misc_RNA (1)...(19): siRNA sense strand
cacauaagcgguugggaaa

SEQ ID NO: 2665815 - RNA, 19 nt, Homo sapiens
  misc_RNA (1)...(19): siRNA sense strand
gcagugaggaugaggauga

SEQ ID NO: 2665816 - RNA, 19 nt, Homo sapiens
  misc_RNA (1)...(19): siRNA sense strand
aggcaauuguauagaacau

SEQ ID NO: 2665817 - RNA, 19 nt, Homo sapiens
  misc_RNA (1)...(19): siRNA sense strand
cugaagaaacucuggaaca

SEQ ID NO: 2665818 - RNA, 19 nt, Homo sapiens
  misc_RNA (1)...(19): siRNA sense strand
gggaagaaagucagaaaau

SEQ ID NO: 2665819 - RNA, 19 nt, Homo sapiens
  misc_RNA (1)...(19): siRNA sense strand
ugaacaagcaagaagauau

SEQ ID NO: 2665820 - RNA, 19 nt, Homo sapiens
  misc_RNA (1)...(19): siRNA sense strand
ggacagaagaggaggacag

SEQ ID NO: 2665821 - RNA, 19 nt, Homo sapiens
  misc_RNA (1)...(19): siRNA sense strand
cagaagaggaggacaggau

SEQ ID NO: 2665822 - RNA, 19 nt, Homo sapiens
  misc_RNA (1)...(19): siRNA sense strand
aaguggaacaggagggcua

SEQ ID NO: 2665823 - RNA, 19 nt, Homo sapiens
  misc_RNA (1)...(19): siRNA sense strand
gggaaaucguugggcagaa

SEQ ID NO: 2665824 - RNA, 19 nt, Homo sapiens
  misc_RNA (1)...(19): siRNA sense strand
cugggaagaaagucagaaa

SEQ ID NO: 2665825 - RNA, 19 nt, Homo sapiens
  misc_RNA (1)...(19): siRNA sense strand
gcuauuuacaagauggaau

SEQ ID NO: 2665826 - RNA, 19 nt, Homo sapiens
  misc_RNA (1)...(19): siRNA sense strand
ccacaaaguuccuggccgu

SEQ ID NO: 2665827 - RNA, 19 nt, Homo sapiens
  misc_RNA (1)...(19): siRNA sense strand
caucgauggcagaaaguuu

SEQ ID NO: 2665828 - RNA, 19 nt, Homo sapiens
  misc_RNA (1)...(19): siRNA sense strand
gaagaaagucagaaaauca

SEQ ID NO: 2665829 - RNA, 19 nt, Homo sapiens
  misc_RNA (1)...(19): siRNA sense strand
guguagagaaagauggcau

SEQ ID NO: 2665830 - RNA, 19 nt, Homo sapiens
  misc_RNA (1)...(19): siRNA sense strand
agucuuagauaauugggaa

SEQ ID NO: 2665831 - RNA, 19 nt, Homo sapiens
  misc_RNA (1)...(19): siRNA sense strand
guucagaaauaugggccaa

SEQ ID NO: 2665832 - RNA, 19 nt, Homo sapiens
  misc_RNA (1)...(19): siRNA sense strand
ggaugaugaccuucaguau

SEQ ID NO: 2665833 - RNA, 19 nt, Homo sapiens
  misc_RNA (1)...(19): siRNA sense strand
ccugauaaggaaaagaaaa

SEQ ID NO: 2665834 - RNA, 19 nt, Homo sapiens
  misc_RNA (1)...(19): siRNA sense strand
uaaugagaauucagcacaa

SEQ ID NO: 2665835 - RNA, 19 nt, Homo sapiens
  misc_RNA (1)...(19): siRNA sense strand
aaaggaaaauguaggguuu

SEQ ID NO: 2665836 - RNA, 19 nt, Homo sapiens
  misc_RNA (1)...(19): siRNA sense strand
ugggaagacagaagaccaa

SEQ ID NO: 2665837 - RNA, 19 nt, Homo sapiens
  misc_RNA (1)...(19): siRNA sense strand
agacagaagaccaacuuau

SEQ ID NO: 2665838 - RNA, 19 nt, Homo sapiens
  misc_RNA (1)...(19): siRNA sense strand
cugaguacuuacacagcua

SEQ ID NO: 2665839 - RNA, 19 nt, Homo sapiens
  misc_RNA (1)...(19): siRNA sense strand
gaagaggaggacaggauca

SEQ ID NO: 2665840 - RNA, 19 nt, Homo sapiens
  misc_RNA (1)...(19): siRNA sense strand
gaagaaaaguggaacagga

SEQ ID NO: 2665841 - RNA, 19 nt, Homo sapiens
  misc_RNA (1)...(19): siRNA sense strand
uguagagaaagauggcaua

SEQ ID NO: 2665842 - RNA, 19 nt, Homo sapiens
  misc_RNA (1)...(19): siRNA sense strand
gucuuagauaauugggaaa

SEQ ID NO: 2665843 - RNA, 19 nt, Homo sapiens
  misc_RNA (1)...(19): siRNA sense strand
gagaaagauggcauaauca

SEQ ID NO: 2665844 - RNA, 19 nt, Homo sapiens
  misc_RNA (1)...(19): siRNA sense strand
ucaucugaauccugaggua

SEQ ID NO: 2665845 - RNA, 19 nt, Homo sapiens
  misc_RNA (1)...(19): siRNA sense strand
ucagacaugcagucagaaa

SEQ ID NO: 2665846 - RNA, 19 nt, Homo sapiens
  misc_RNA (1)...(19): siRNA sense strand
agaaacuggaacagaccua

SEQ ID NO: 2665847 - RNA, 19 nt, Homo sapiens
  misc_RNA (1)...(19): siRNA sense strand
gcugcaaacaagagaauac

SEQ ID NO: 2665848 - RNA, 19 nt, Homo sapiens
  misc_RNA (1)...(19): siRNA sense strand
gucaaauugugaaugggaa

SEQ ID NO: 2665849 - RNA, 19 nt, Homo sapiens
  misc_RNA (1)...(19): siRNA sense strand
gaacagaguaaaauggaca

SEQ ID NO: 2665850 - RNA, 19 nt, Homo sapiens
  misc_RNA (1)...(19): siRNA sense strand
gcgcagugaggaugaggau

SEQ ID NO: 2665851 - RNA, 19 nt, Homo sapiens
  misc_RNA (1)...(19): siRNA sense strand
agaagauaucugaguacuu

SEQ ID NO: 2665852 - RNA, 19 nt, Homo sapiens
  misc_RNA (1)...(19): siRNA sense strand
aucugaauccugagguaaa

SEQ ID NO: 2665853 - RNA, 19 nt, Homo sapiens
  misc_RNA (1)...(19): siRNA sense strand
aaagaaguugguugaacaa

SEQ ID NO: 2665854 - RNA, 19 nt, Homo sapiens
  misc_RNA (1)...(19): siRNA sense strand
acugaugauuggacucuaa

SEQ ID NO: 2665855 - RNA, 19 nt, Homo sapiens
  misc_RNA (1)...(19): siRNA sense strand
aagaagaagaucagagggu

SEQ ID NO: 2665856 - RNA, 19 nt, Homo sapiens
  misc_RNA (1)...(19): siRNA sense strand
gcacaaugaaggagccaug

SEQ ID NO: 2665857 - RNA, 19 nt, Homo sapiens
  misc_RNA (1)...(19): siRNA sense strand
uuacaaaagcugcaaacaa

SEQ ID NO: 2665858 - RNA, 19 nt, Homo sapiens
  misc_RNA (1)...(19): siRNA sense strand
aggcaagcaguguagagaa

SEQ ID NO: 2665859 - RNA, 19 nt, Homo sapiens
  misc_RNA (1)...(19): siRNA sense strand
ucuuaugucagcugagaau

SEQ ID NO: 2665860 - RNA, 19 nt, Homo sapiens
  misc_RNA (1)...(19): siRNA sense strand
auugaacgauggugguaau

SEQ ID NO: 2665861 - RNA, 19 nt, Homo sapiens
  misc_RNA (1)...(19): siRNA sense strand
cccaaagaucaaaaggaaa

SEQ ID NO: 2665862 - RNA, 19 nt, Homo sapiens
  misc_RNA (1)...(19): siRNA sense strand
ucuaauugcuagucaucuu

SEQ ID NO: 2665863 - RNA, 19 nt, Homo sapiens
  misc_RNA (1)...(19): siRNA sense strand
guagagaaagauggcauaa

SEQ ID NO: 2665864 - RNA, 19 nt, Homo sapiens
  misc_RNA (1)...(19): siRNA sense strand
ugagaaugaaguuagaaga

SEQ ID NO: 2665865 - RNA, 19 nt, Homo sapiens
  misc_RNA (1)...(19): siRNA sense strand
gaaguuagaagaaagcgaa

SEQ ID NO: 2665866 - RNA, 19 nt, Homo sapiens
  misc_RNA (1)...(19): siRNA sense strand
cagaaagcucucauuacaa

SEQ ID NO: 2665867 - RNA, 19 nt, Homo sapiens
  misc_RNA (1)...(19): siRNA sense strand
aauaaaggaacuugagaug

SEQ ID NO: 2665868 - RNA, 19 nt, Homo sapiens
  misc_RNA (1)...(19): siRNA sense strand
guuuagaacaccuacuauu

SEQ ID NO: 2665869 - RNA, 19 nt, Homo sapiens
  misc_RNA (1)...(19): siRNA sense strand
gggaaguuuuaaaagaaga

SEQ ID NO: 2665870 - RNA, 19 nt, Homo sapiens
  misc_RNA (1)...(19): siRNA sense strand
acuguugacugaagacauu

SEQ ID NO: 2665871 - RNA, 19 nt, Homo sapiens
  misc_RNA (1)...(19): siRNA sense strand
agagaggaguugagaacau

SEQ ID NO: 2665872 - RNA, 19 nt, Homo sapiens
  misc_RNA (1)...(19): siRNA sense strand
gaguggaauuugagccaau

SEQ ID NO: 2665873 - RNA, 19 nt, Homo sapiens
  misc_RNA (1)...(19): siRNA sense strand
cagccaaguuuuagaggaa

SEQ ID NO: 2665874 - RNA, 19 nt, Homo sapiens
  misc_RNA (1)...(19): siRNA sense strand
cagaagaaacugaagcaga

SEQ ID NO: 2665875 - RNA, 19 nt, Homo sapiens
  misc_RNA (1)...(19): siRNA sense strand
aggaagauuugaagaaacu

SEQ ID NO: 2665876 - RNA, 19 nt, Homo sapiens
  misc_RNA (1)...(19): siRNA sense strand
ggcaggugucugugaaaua

SEQ ID NO: 2665877 - RNA, 19 nt, Homo sapiens
  misc_RNA (1)...(19): siRNA sense strand
auguagaucugcagcgaau

SEQ ID NO: 2665878 - RNA, 19 nt, Homo sapiens
  misc_RNA (1)...(19): siRNA sense strand
gugaaaaggauucgcuaaa

SEQ ID NO: 2665879 - RNA, 19 nt, Homo sapiens
  misc_RNA (1)...(19): siRNA sense strand
aggagaaaguagauaagga

SEQ ID NO: 2665880 - RNA, 19 nt, Homo sapiens
  misc_RNA (1)...(19): siRNA sense strand
acuaugugcuacaggagaa

SEQ ID NO: 2665881 - RNA, 19 nt, Homo sapiens
  misc_RNA (1)...(19): siRNA sense strand
uagaggaagauuugaagaa

SEQ ID NO: 2665882 - RNA, 19 nt, Homo sapiens
  misc_RNA (1)...(19): siRNA sense strand
caguauugcucguccucaa

SEQ ID NO: 2665883 - RNA, 19 nt, Homo sapiens
  misc_RNA (1)...(19): siRNA sense strand
gaugcugaauggaggccaa

SEQ ID NO: 2665884 - RNA, 19 nt, Homo sapiens
  misc_RNA (1)...(19): siRNA sense strand
aggcauauagcucuggaaa

SEQ ID NO: 2665885 - RNA, 19 nt, Homo sapiens
  misc_RNA (1)...(19): siRNA sense strand
acgcauugacuaugugcua

SEQ ID NO: 2665886 - RNA, 19 nt, Homo sapiens
  misc_RNA (1)...(19): siRNA sense strand
ccgagaucuucaggaaaua

SEQ ID NO: 2665887 - RNA, 19 nt, Homo sapiens
  misc_RNA (1)...(19): siRNA sense strand
caucuaugcuacugggagu

SEQ ID NO: 2665888 - RNA, 19 nt, Homo sapiens
  misc_RNA (1)...(19): siRNA sense strand
ugaacuugcuacagacaca

SEQ ID NO: 2665889 - RNA, 19 nt, Homo sapiens
  misc_RNA (1)...(19): siRNA sense strand
uuaagaaagcccaagaaaa

SEQ ID NO: 2665890 - RNA, 19 nt, Homo sapiens
  misc_RNA (1)...(19): siRNA sense strand
cucaauggguauuaagaga

SEQ ID NO: 2665891 - RNA, 19 nt, Homo sapiens
  misc_RNA (1)...(19): siRNA sense strand
accgagaucuucaggaaau

SEQ ID NO: 2665892 - RNA, 19 nt, Homo sapiens
  misc_RNA (1)...(19): siRNA sense strand
ggggauauugacagugaaa

SEQ ID NO: 2665893 - RNA, 19 nt, Homo sapiens
  misc_RNA (1)...(19): siRNA sense strand
ccuuugagcuaauagacau

SEQ ID NO: 2665894 - RNA, 19 nt, Homo sapiens
  misc_RNA (1)...(19): siRNA sense strand
gauugggaggguagaauuu

SEQ ID NO: 2665895 - RNA, 19 nt, Homo sapiens
  misc_RNA (1)...(19): siRNA sense strand
cuucugaaaugaaccgaau

SEQ ID NO: 2665896 - RNA, 19 nt, Homo sapiens
  misc_RNA (1)...(19): siRNA sense strand
caccuacacuagaggaaga

SEQ ID NO: 2665897 - RNA, 19 nt, Homo sapiens
  misc_RNA (1)...(19): siRNA sense strand
aggccaacgcauugacuau

SEQ ID NO: 2665898 - RNA, 19 nt, Homo sapiens
  misc_RNA (1)...(19): siRNA sense strand
ggcauauagcucuggaaaa

SEQ ID NO: 2665899 - RNA, 19 nt, Homo sapiens
  misc_RNA (1)...(19): siRNA sense strand
uuuaagaaagcccaagaaa

SEQ ID NO: 2665900 - RNA, 19 nt, Homo sapiens
  misc_RNA (1)...(19): siRNA sense strand
cuaucuggauguuggcauu

SEQ ID NO: 2665901 - RNA, 19 nt, Homo sapiens
  misc_RNA (1)...(19): siRNA sense strand
ggaaaagguuguaauggga

SEQ ID NO: 2665902 - RNA, 19 nt, Homo sapiens
  misc_RNA (1)...(19): siRNA sense strand
auguaguuccuuugagcua

SEQ ID NO: 2665903 - RNA, 19 nt, Homo sapiens
  misc_RNA (1)...(19): siRNA sense strand
agucacaacaggagcaguu

SEQ ID NO: 2665904 - RNA, 19 nt, Homo sapiens
  misc_RNA (1)...(19): siRNA sense strand
guaauggaucaaggagaua

SEQ ID NO: 2665905 - RNA, 19 nt, Homo sapiens
  misc_RNA (1)...(19): siRNA sense strand
cuacacuagaggaagauuu

SEQ ID NO: 2665906 - RNA, 19 nt, Homo sapiens
  misc_RNA (1)...(19): siRNA sense strand
ccucaaagagaucuaccaa

SEQ ID NO: 2665907 - RNA, 19 nt, Homo sapiens
  misc_RNA (1)...(19): siRNA sense strand
agaaacaccagaagaaacu

SEQ ID NO: 2665908 - RNA, 19 nt, Homo sapiens
  misc_RNA (1)...(19): siRNA sense strand
gguuguaaugggagaguug

SEQ ID NO: 2665909 - RNA, 19 nt, Homo sapiens
  misc_RNA (1)...(19): siRNA sense strand
cauaaaggcaggaagcgga

SEQ ID NO: 2665910 - RNA, 19 nt, Homo sapiens
  misc_RNA (1)...(19): siRNA sense strand
cagaaacaccagaagaaac

SEQ ID NO: 2665911 - RNA, 19 nt, Homo sapiens
  misc_RNA (1)...(19): siRNA sense strand
ugaagagaggaguugagaa

SEQ ID NO: 2665912 - RNA, 19 nt, Homo sapiens
  misc_RNA (1)...(19): siRNA sense strand
ucuucaggaaauaggaauu

SEQ ID NO: 2665913 - RNA, 19 nt, Homo sapiens
  misc_RNA (1)...(19): siRNA sense strand
ucagaaacaccagaagaaa

SEQ ID NO: 2665914 - RNA, 19 nt, Homo sapiens
  misc_RNA (1)...(19): siRNA sense strand
uguggcaguuaaagaagaa

SEQ ID NO: 2665915 - RNA, 19 nt, Homo sapiens
  misc_RNA (1)...(19): siRNA sense strand
gcauugacuaugugcuaca

SEQ ID NO: 2665916 - RNA, 19 nt, Homo sapiens
  misc_RNA (1)...(19): siRNA sense strand
acaauaaguauguucccua

SEQ ID NO: 2665917 - RNA, 19 nt, Homo sapiens
  misc_RNA (1)...(19): siRNA sense strand
cagcagauugggaggguag

SEQ ID NO: 2665918 - RNA, 19 nt, Homo sapiens
  misc_RNA (1)...(19): siRNA sense strand
uuguaauggaucaaggaga

SEQ ID NO: 2665919 - RNA, 19 nt, Homo sapiens
  misc_RNA (1)...(19): siRNA sense strand
uucagaaacaccagaagaa

SEQ ID NO: 2665920 - RNA, 19 nt, Homo sapiens
  misc_RNA (1)...(19): siRNA sense strand
ucugaaaugaaccgaauau

SEQ ID NO: 2665921 - RNA, 19 nt, Homo sapiens
  misc_RNA (1)...(19): siRNA sense strand
ggauauugacagugaaaag

SEQ ID NO: 2665922 - RNA, 19 nt, Homo sapiens
  misc_RNA (1)...(19): siRNA sense strand
ccaccuacugucagacuau

SEQ ID NO: 2665923 - RNA, 19 nt, Homo sapiens
  misc_RNA (1)...(19): siRNA sense strand
gugaagaacugguggcuga

SEQ ID NO: 2665924 - RNA, 19 nt, Homo sapiens
  misc_RNA (1)...(19): siRNA sense strand
gcuuaaugaaugaggauga

SEQ ID NO: 2665925 - RNA, 19 nt, Homo sapiens
  misc_RNA (1)...(19): siRNA sense strand
ggacauuguuguuagcgaa

SEQ ID NO: 2665926 - RNA, 19 nt, Homo sapiens
  misc_RNA (1)...(19): siRNA sense strand
cugcagagcuugaaggcca

SEQ ID NO: 2665927 - RNA, 19 nt, Homo sapiens
  misc_RNA (1)...(19): siRNA sense strand
guacaggagacuaagggaa

SEQ ID NO: 2665928 - RNA, 19 nt, Homo sapiens
  misc_RNA (1)...(19): siRNA sense strand
gaaagagcgccuugggaca

SEQ ID NO: 2665929 - RNA, 19 nt, Homo sapiens
  misc_RNA (1)...(19): siRNA sense strand
gcuucaaggcccuggauga

SEQ ID NO: 2665930 - RNA, 19 nt, Homo sapiens
  misc_RNA (1)...(19): siRNA sense strand
gcaaguuaaaugagggcca

SEQ ID NO: 2665931 - RNA, 19 nt, Homo sapiens
  misc_RNA (1)...(19): siRNA sense strand
gggaaauggagcaggcugu

SEQ ID NO: 2665932 - RNA, 19 nt, Homo sapiens
  misc_RNA (1)...(19): siRNA sense strand
gggccugggaaaugaaaga

SEQ ID NO: 2665933 - RNA, 19 nt, Homo sapiens
  misc_RNA (1)...(19): siRNA sense strand
gcgaagacuugaauggaac

SEQ ID NO: 2665934 - RNA, 19 nt, Homo sapiens
  misc_RNA (1)...(19): siRNA sense strand
guuacagacggaagaagaa

SEQ ID NO: 2665935 - RNA, 19 nt, Homo sapiens
  misc_RNA (1)...(19): siRNA sense strand
gggaaaugaaagagcgccu

SEQ ID NO: 2665936 - RNA, 19 nt, Homo sapiens
  misc_RNA (1)...(19): siRNA sense strand
augaagaauuccauggcuu

SEQ ID NO: 2665937 - RNA, 19 nt, Homo sapiens
  misc_RNA (1)...(19): siRNA sense strand
ugggaucacaucagauaaa

SEQ ID NO: 2665938 - RNA, 19 nt, Homo sapiens
  misc_RNA (1)...(19): siRNA sense strand
cggaagaagaagagcacag

SEQ ID NO: 2665939 - RNA, 19 nt, Homo sapiens
  misc_RNA (1)...(19): siRNA sense strand
gagcuuaaugaaugaggau

SEQ ID NO: 2665940 - RNA, 19 nt, Homo sapiens
  misc_RNA (1)...(19): siRNA sense strand
uggacgaccuagaggagca

SEQ ID NO: 2665941 - RNA, 19 nt, Homo sapiens
  misc_RNA (1)...(19): siRNA sense strand
agccaagaagagugaagaa

SEQ ID NO: 2665942 - RNA, 19 nt, Homo sapiens
  misc_RNA (1)...(19): siRNA sense strand
uggcugagcgacuggagaa

SEQ ID NO: 2665943 - RNA, 19 nt, Homo sapiens
  misc_RNA (1)...(19): siRNA sense strand
uuucagacggcaaguuaaa

SEQ ID NO: 2665944 - RNA, 19 nt, Homo sapiens
  misc_RNA (1)...(19): siRNA sense strand
ugacauugccucugcgcuu

SEQ ID NO: 2665945 - RNA, 19 nt, Homo sapiens
  misc_RNA (1)...(19): siRNA sense strand
agaagagugagguggacau

SEQ ID NO: 2665946 - RNA, 19 nt, Homo sapiens
  misc_RNA (1)...(19): siRNA sense strand
acacauuggacauggaucu

SEQ ID NO: 2665947 - RNA, 19 nt, Homo sapiens
  misc_RNA (1)...(19): siRNA sense strand
cgcuggaacuguugcccaa

SEQ ID NO: 2665948 - RNA, 19 nt, Homo sapiens
  misc_RNA (1)...(19): siRNA sense strand
aggaaacaggugagcagau

SEQ ID NO: 2665949 - RNA, 19 nt, Homo sapiens
  misc_RNA (1)...(19): siRNA sense strand
cuuagauaccuucaugaaa

SEQ ID NO: 2665950 - RNA, 19 nt, Homo sapiens
  misc_RNA (1)...(19): siRNA sense strand
augccaaggagcuggauca

SEQ ID NO: 2665951 - RNA, 19 nt, Homo sapiens
  misc_RNA (1)...(19): siRNA sense strand
ucgagaagaaagugcgagu

SEQ ID NO: 2665952 - RNA, 19 nt, Homo sapiens
  misc_RNA (1)...(19): siRNA sense strand
guggaagcccggauagcau

SEQ ID NO: 2665953 - RNA, 19 nt, Homo sapiens
  misc_RNA (1)...(19): siRNA sense strand
agacggaagaagaagagca

SEQ ID NO: 2665954 - RNA, 19 nt, Homo sapiens
  misc_RNA (1)...(19): siRNA sense strand
augagagucugcagagcuu

SEQ ID NO: 2665955 - RNA, 19 nt, Homo sapiens
  misc_RNA (1)...(19): siRNA sense strand
gguggugagcuuaaugaau

SEQ ID NO: 2665956 - RNA, 19 nt, Homo sapiens
  misc_RNA (1)...(19): siRNA sense strand
uggugagcuuaaugaauga

SEQ ID NO: 2665957 - RNA, 19 nt, Homo sapiens
  misc_RNA (1)...(19): siRNA sense strand
ugaaugaggaugagaagac

SEQ ID NO: 2665958 - RNA, 19 nt, Homo sapiens
  misc_RNA (1)...(19): siRNA sense strand
caauuauggaggaggaaaa

SEQ ID NO: 2665959 - RNA, 19 nt, Homo sapiens
  misc_RNA (1)...(19): siRNA sense strand
acgagguguuugagaacua

SEQ ID NO: 2665960 - RNA, 19 nt, Homo sapiens
  misc_RNA (1)...(19): siRNA sense strand
gaaagaaguuuguagguug

SEQ ID NO: 2665961 - RNA, 19 nt, Homo sapiens
  misc_RNA (1)...(19): siRNA sense strand
caguggaagcugaaggaca

SEQ ID NO: 2665962 - RNA, 19 nt, Homo sapiens
  misc_RNA (1)...(19): siRNA sense strand
uguuucagguucugguaaa

SEQ ID NO: 2665963 - RNA, 19 nt, Homo sapiens
  misc_RNA (1)...(19): siRNA sense strand
acaccuuggaagagaaaga

SEQ ID NO: 2665964 - RNA, 19 nt, Homo sapiens
  misc_RNA (1)...(19): siRNA sense strand
caaacaugcaaguuggaau

SEQ ID NO: 2665965 - RNA, 19 nt, Homo sapiens
  misc_RNA (1)...(19): siRNA sense strand
ugucaauuauggaggagga

SEQ ID NO: 2665966 - RNA, 19 nt, Homo sapiens
  misc_RNA (1)...(19): siRNA sense strand
gauuuggagaauuuggaaa

SEQ ID NO: 2665967 - RNA, 19 nt, Homo sapiens
  misc_RNA (1)...(19): siRNA sense strand
gggaagauugcauggagga

SEQ ID NO: 2665968 - RNA, 19 nt, Homo sapiens
  misc_RNA (1)...(19): siRNA sense strand
cgacaccuuggaagagaaa

SEQ ID NO: 2665969 - RNA, 19 nt, Homo sapiens
  misc_RNA (1)...(19): siRNA sense strand
gaacauugugccucggaga

SEQ ID NO: 2665970 - RNA, 19 nt, Homo sapiens
  misc_RNA (1)...(19): siRNA sense strand
ugaagauggaucaggcuuu

SEQ ID NO: 2665971 - RNA, 19 nt, Homo sapiens
  misc_RNA (1)...(19): siRNA sense strand
uggaauacagauuuggaga

SEQ ID NO: 2665972 - RNA, 19 nt, Homo sapiens
  misc_RNA (1)...(19): siRNA sense strand
uuggauuucuaaagccaua

SEQ ID NO: 2665973 - RNA, 19 nt, Homo sapiens
  misc_RNA (1)...(19): siRNA sense strand
gaaguuuguagguuggaau

SEQ ID NO: 2665974 - RNA, 19 nt, Homo sapiens
  misc_RNA (1)...(19): siRNA sense strand
acucauggucuuugucaau

SEQ ID NO: 2665975 - RNA, 19 nt, Homo sapiens
  misc_RNA (1)...(19): siRNA sense strand
cuggugugcugcagcgauu

SEQ ID NO: 2665976 - RNA, 19 nt, Homo sapiens
  misc_RNA (1)...(19): siRNA sense strand
agcgauugggagugacaua

SEQ ID NO: 2665977 - RNA, 19 nt, Homo sapiens
  misc_RNA (1)...(19): siRNA sense strand
guagguuggaauacagauu

SEQ ID NO: 2665978 - RNA, 19 nt, Homo sapiens
  misc_RNA (1)...(19): siRNA sense strand
ccuaugaccccgagggcau

SEQ ID NO: 2665979 - RNA, 19 nt, Homo sapiens
  misc_RNA (1)...(19): siRNA sense strand
uagaguaugugaagggcua

SEQ ID NO: 2665980 - RNA, 19 nt, Homo sapiens
  misc_RNA (1)...(19): siRNA sense strand
ggcugaagcgggaggacaa

SEQ ID NO: 2665981 - RNA, 19 nt, Homo sapiens
  misc_RNA (1)...(19): siRNA sense strand
ucuucaagcaggaggagaa

SEQ ID NO: 2665982 - RNA, 19 nt, Homo sapiens
  misc_RNA (1)...(19): siRNA sense strand
gggaggacaacaagagcau

SEQ ID NO: 2665983 - RNA, 19 nt, Homo sapiens
  misc_RNA (1)...(19): siRNA sense strand
aaccaaagaucgagccuga

SEQ ID NO: 2665984 - RNA, 19 nt, Homo sapiens
  misc_RNA (1)...(19): siRNA sense strand
augaagacgccaaggccua

SEQ ID NO: 2665985 - RNA, 19 nt, Homo sapiens
  misc_RNA (1)...(19): siRNA sense strand
agguggaguucuacgucaa

SEQ ID NO: 2665986 - RNA, 19 nt, Homo sapiens
  misc_RNA (1)...(19): siRNA sense strand
ugugugaggaggagugcaa

SEQ ID NO: 2665987 - RNA, 19 nt, Homo sapiens
  misc_RNA (1)...(19): siRNA sense strand
uagaaaagagggagcgaga

SEQ ID NO: 2665988 - RNA, 19 nt, Homo sapiens
  misc_RNA (1)...(19): siRNA sense strand
auaauaagcuuccuggaga

SEQ ID NO: 2665989 - RNA, 19 nt, Homo sapiens
  misc_RNA (1)...(19): siRNA sense strand
ggacaguggccauggaccu

SEQ ID NO: 2665990 - RNA, 19 nt, Homo sapiens
  misc_RNA (1)...(19): siRNA sense strand
cggugaacguggaggacug

SEQ ID NO: 2665991 - RNA, 19 nt, Homo sapiens
  misc_RNA (1)...(19): siRNA sense strand
caggaggagaagcggaaga

SEQ ID NO: 2665992 - RNA, 19 nt, Homo sapiens
  misc_RNA (1)...(19): siRNA sense strand
gagcagaucuuccgcgugu

SEQ ID NO: 2665993 - RNA, 19 nt, Homo sapiens
  misc_RNA (1)...(19): siRNA sense strand
cugcagaccaccagaccau

SEQ ID NO: 2665994 - RNA, 19 nt, Homo sapiens
  misc_RNA (1)...(19): siRNA sense strand
aguacgagggcaagagcuu

SEQ ID NO: 2665995 - RNA, 19 nt, Homo sapiens
  misc_RNA (1)...(19): siRNA sense strand
cggagaagcacgugguccu

SEQ ID NO: 2665996 - RNA, 19 nt, Homo sapiens
  misc_RNA (1)...(19): siRNA sense strand
cggacaaccuggugguggu

SEQ ID NO: 2665997 - RNA, 19 nt, Homo sapiens
  misc_RNA (1)...(19): siRNA sense strand
ccaagcacgcgcuggaaaa

SEQ ID NO: 2665998 - RNA, 19 nt, Homo sapiens
  misc_RNA (1)...(19): siRNA sense strand
guagcaaauuuaacagcca

SEQ ID NO: 2665999 - RNA, 19 nt, Homo sapiens
  misc_RNA (1)...(19): siRNA sense strand
uggagggcucuguggacaa

SEQ ID NO: 2666000 - RNA, 19 nt, Homo sapiens
  misc_RNA (1)...(19): siRNA sense strand
accugguggugguggacaa

SEQ ID NO: 2666001 - RNA, 19 nt, Homo sapiens
  misc_RNA (1)...(19): siRNA sense strand
ggacaagggcugcaagcac

SEQ ID NO: 2666002 - RNA, 19 nt, Homo sapiens
  misc_RNA (1)...(19): siRNA sense strand
gacaagggcugcaagcaca

SEQ ID NO: 2666003 - RNA, 19 nt, Homo sapiens
  misc_RNA (1)...(19): siRNA sense strand
gauauuugcaagacgagau

SEQ ID NO: 2666004 - RNA, 19 nt, Homo sapiens
  misc_RNA (1)...(19): siRNA sense strand
acgccaaggccuacggguu

SEQ ID NO: 2666005 - RNA, 19 nt, Homo sapiens
  misc_RNA (1)...(19): siRNA sense strand
ugaaaaucaccgagggcga

SEQ ID NO: 2666006 - RNA, 19 nt, Homo sapiens
  misc_RNA (1)...(19): siRNA sense strand
ggaagagccuccugagcaa

SEQ ID NO: 2666007 - RNA, 19 nt, Homo sapiens
  misc_RNA (1)...(19): siRNA sense strand
gcaauagccuggccagaaa

SEQ ID NO: 2666008 - RNA, 19 nt, Homo sapiens
  misc_RNA (1)...(19): siRNA sense strand
cgacagaacccgagagcgu

SEQ ID NO: 2666009 - RNA, 19 nt, Homo sapiens
  misc_RNA (1)...(19): siRNA sense strand
guauugaggaugaggaaga

SEQ ID NO: 2666010 - RNA, 19 nt, Homo sapiens
  misc_RNA (1)...(19): siRNA sense strand
ccaucgaggcccagaagaa

SEQ ID NO: 2666011 - RNA, 19 nt, Homo sapiens
  misc_RNA (1)...(19): siRNA sense strand
cggccaaacugcaggagga

SEQ ID NO: 2666012 - RNA, 19 nt, Homo sapiens
  misc_RNA (1)...(19): siRNA sense strand
aagaggagcuuguggcuau

SEQ ID NO: 2666013 - RNA, 19 nt, Homo sapiens
  misc_RNA (1)...(19): siRNA sense strand
guguugaagccgaauguua

SEQ ID NO: 2666014 - RNA, 19 nt, Homo sapiens
  misc_RNA (1)...(19): siRNA sense strand
agacagaaacagcagaaau

SEQ ID NO: 2666015 - RNA, 19 nt, Homo sapiens
  misc_RNA (1)...(19): siRNA sense strand
aggaagaccgggugcggaa

SEQ ID NO: 2666016 - RNA, 19 nt, Homo sapiens
  misc_RNA (1)...(19): siRNA sense strand
ccauacagggagaggacau

SEQ ID NO: 2666017 - RNA, 19 nt, Homo sapiens
  misc_RNA (1)...(19): siRNA sense strand
agaaauccauacagggaga

SEQ ID NO: 2666018 - RNA, 19 nt, Homo sapiens
  misc_RNA (1)...(19): siRNA sense strand
gcgaaagagaagcagguga

SEQ ID NO: 2666019 - RNA, 19 nt, Homo sapiens
  misc_RNA (1)...(19): siRNA sense strand
ccaaacugcaggaggacau

SEQ ID NO: 2666020 - RNA, 19 nt, Homo sapiens
  misc_RNA (1)...(19): siRNA sense strand
ggaugaacagaaagcggaa

SEQ ID NO: 2666021 - RNA, 19 nt, Homo sapiens
  misc_RNA (1)...(19): siRNA sense strand
agguggagcucaagcguga

SEQ ID NO: 2666022 - RNA, 19 nt, Homo sapiens
  misc_RNA (1)...(19): siRNA sense strand
ccugauaacuugagccgga

SEQ ID NO: 2666023 - RNA, 19 nt, Homo sapiens
  misc_RNA (1)...(19): siRNA sense strand
caguauugaggaugaggaa

SEQ ID NO: 2666024 - RNA, 19 nt, Homo sapiens
  misc_RNA (1)...(19): siRNA sense strand
gggaggaagagucggccaa

SEQ ID NO: 2666025 - RNA, 19 nt, Homo sapiens
  misc_RNA (1)...(19): siRNA sense strand
ggcgcaaagcugaggaaga

SEQ ID NO: 2666026 - RNA, 19 nt, Homo sapiens
  misc_RNA (1)...(19): siRNA sense strand
aaaguaagccugacaguuu

SEQ ID NO: 2666027 - RNA, 19 nt, Homo sapiens
  misc_RNA (1)...(19): siRNA sense strand
aggaggacaugaaggugaa

SEQ ID NO: 2666028 - RNA, 19 nt, Homo sapiens
  misc_RNA (1)...(19): siRNA sense strand
cugacgacguggaggcaga

SEQ ID NO: 2666029 - RNA, 19 nt, Homo sapiens
  misc_RNA (1)...(19): siRNA sense strand
cuuuauugccacugagaca

SEQ ID NO: 2666030 - RNA, 19 nt, Homo sapiens
  misc_RNA (1)...(19): siRNA sense strand
ccacgaagagccacgggaa

SEQ ID NO: 2666031 - RNA, 19 nt, Homo sapiens
  misc_RNA (1)...(19): siRNA sense strand
gcucagcaacauaaagcaa

SEQ ID NO: 2666032 - RNA, 19 nt, Homo sapiens
  misc_RNA (1)...(19): siRNA sense strand
cauuaguguugaagccgaa

SEQ ID NO: 2666033 - RNA, 19 nt, Homo sapiens
  misc_RNA (1)...(19): siRNA sense strand
gcagaaauccauacaggga

SEQ ID NO: 2666034 - RNA, 19 nt, Homo sapiens
  misc_RNA (1)...(19): siRNA sense strand
gccucgaggagcagcaaua

SEQ ID NO: 2666035 - RNA, 19 nt, Homo sapiens
  misc_RNA (1)...(19): siRNA sense strand
gaagggagaccgaggagca

SEQ ID NO: 2666036 - RNA, 19 nt, Homo sapiens
  misc_RNA (1)...(19): siRNA sense strand
gggagguugucgacgugaa

SEQ ID NO: 2666037 - RNA, 19 nt, Homo sapiens
  misc_RNA (1)...(19): siRNA sense strand
caagaaaaugaucgacaaa

SEQ ID NO: 2666038 - RNA, 19 nt, Homo sapiens
  misc_RNA (1)...(19): siRNA sense strand
ccagcuuugcggagaggaa

SEQ ID NO: 2666039 - RNA, 19 nt, Homo sapiens
  misc_RNA (1)...(19): siRNA sense strand
agaagaagauggaggcgcu

SEQ ID NO: 2666040 - RNA, 19 nt, Homo sapiens
  misc_RNA (1)...(19): siRNA sense strand
aggaguacucucagcacaa

SEQ ID NO: 2666041 - RNA, 19 nt, Homo sapiens
  misc_RNA (1)...(19): siRNA sense strand
gagaaugucaagccagauu

SEQ ID NO: 2666042 - RNA, 19 nt, Homo sapiens
  misc_RNA (1)...(19): siRNA sense strand
caggaggacaugaagguga

SEQ ID NO: 2666043 - RNA, 19 nt, Homo sapiens
  misc_RNA (1)...(19): siRNA sense strand
cagcuggacaccucggaaa

SEQ ID NO: 2666044 - RNA, 19 nt, Homo sapiens
  misc_RNA (1)...(19): siRNA sense strand
cuggagagaaauaagguga

SEQ ID NO: 2666045 - RNA, 19 nt, Homo sapiens
  misc_RNA (1)...(19): siRNA sense strand
cggaagaugagcucgccaa

SEQ ID NO: 2666046 - RNA, 19 nt, Homo sapiens
  misc_RNA (1)...(19): siRNA sense strand
ucggcaagcccaagucaaa

SEQ ID NO: 2666047 - RNA, 19 nt, Homo sapiens
  misc_RNA (1)...(19): siRNA sense strand
ucgagaaugucaagccaga

SEQ ID NO: 2666048 - RNA, 19 nt, Homo sapiens
  misc_RNA (1)...(19): siRNA sense strand
gcuuguggcuauuguuaga

SEQ ID NO: 2666049 - RNA, 19 nt, Homo sapiens
  misc_RNA (1)...(19): siRNA sense strand
ccuuaggccuuacagcaaa

SEQ ID NO: 2666050 - RNA, 19 nt, Homo sapiens
  misc_RNA (1)...(19): siRNA sense strand
agaauaacucgcaggacca

SEQ ID NO: 2666051 - RNA, 19 nt, Homo sapiens
  misc_RNA (1)...(19): siRNA sense strand
cgugaaugaaugugaccuu

SEQ ID NO: 2666052 - RNA, 19 nt, Homo sapiens
  misc_RNA (1)...(19): siRNA sense strand
gcuucuucuucaaggauga

SEQ ID NO: 2666053 - RNA, 19 nt, Homo sapiens
  misc_RNA (1)...(19): siRNA sense strand
ccauauuggaggagcugga

SEQ ID NO: 2666054 - RNA, 19 nt, Homo sapiens
  misc_RNA (1)...(19): siRNA sense strand
aggugaaggaacaugaaga

SEQ ID NO: 2666055 - RNA, 19 nt, Homo sapiens
  misc_RNA (1)...(19): siRNA sense strand
ggagcugaaagacgcgaaa

SEQ ID NO: 2666056 - RNA, 19 nt, Homo sapiens
  misc_RNA (1)...(19): siRNA sense strand
acgaagagccacgggaaga

SEQ ID NO: 2666057 - RNA, 19 nt, Homo sapiens
  misc_RNA (1)...(19): siRNA sense strand
aggaacaugaagacaaaga

SEQ ID NO: 2666058 - RNA, 19 nt, Homo sapiens
  misc_RNA (1)...(19): siRNA sense strand
ugcggaaggaggaggagaa

SEQ ID NO: 2666059 - RNA, 19 nt, Homo sapiens
  misc_RNA (1)...(19): siRNA sense strand
cggaagaaccugaauaccu

SEQ ID NO: 2666060 - RNA, 19 nt, Homo sapiens
  misc_RNA (1)...(19): siRNA sense strand
cgaugaagacaccgaggga

SEQ ID NO: 2666061 - RNA, 19 nt, Homo sapiens
  misc_RNA (1)...(19): siRNA sense strand
augaagacaccgagggaag

SEQ ID NO: 2666062 - RNA, 19 nt, Homo sapiens
  misc_RNA (1)...(19): siRNA sense strand
ugccaggcucuaagaauaa

SEQ ID NO: 2666063 - RNA, 19 nt, Homo sapiens
  misc_RNA (1)...(19): siRNA sense strand
agaaaaugaucgacaaacu

SEQ ID NO: 2666064 - RNA, 19 nt, Homo sapiens
  misc_RNA (1)...(19): siRNA sense strand
acaaagagagccuggccuu

SEQ ID NO: 2666065 - RNA, 19 nt, Homo sapiens
  misc_RNA (1)...(19): siRNA sense strand
aggaguaccugcggaggaa

SEQ ID NO: 2666066 - RNA, 19 nt, Homo sapiens
  misc_RNA (1)...(19): siRNA sense strand
cgacaucgaucgaauucuu

SEQ ID NO: 2666067 - RNA, 19 nt, Homo sapiens
  misc_RNA (1)...(19): siRNA sense strand
uauuggaggagcuggagaa

SEQ ID NO: 2666068 - RNA, 19 nt, Homo sapiens
  misc_RNA (1)...(19): siRNA sense strand
uggagaagugugaugccaa

SEQ ID NO: 2666069 - RNA, 19 nt, Homo sapiens
  misc_RNA (1)...(19): siRNA sense strand
ggacaucccugaucagcga

SEQ ID NO: 2666070 - RNA, 19 nt, Homo sapiens
  misc_RNA (1)...(19): siRNA sense strand
ggaaaguaagccugacagu

SEQ ID NO: 2666071 - RNA, 19 nt, Homo sapiens
  misc_RNA (1)...(19): siRNA sense strand
ugaagaagggcaaggccga

SEQ ID NO: 2666072 - RNA, 19 nt, Homo sapiens
  misc_RNA (1)...(19): siRNA sense strand
ucagcaacauaaagcaaaa

SEQ ID NO: 2666073 - RNA, 19 nt, Homo sapiens
  misc_RNA (1)...(19): siRNA sense strand
gggaagagccuccugagca

SEQ ID NO: 2666074 - RNA, 19 nt, Homo sapiens
  misc_RNA (1)...(19): siRNA sense strand
cauaaauggacuaggacaa

SEQ ID NO: 2666075 - RNA, 19 nt, Homo sapiens
  misc_RNA (1)...(19): siRNA sense strand
caaugaagcuacuaggcaa

SEQ ID NO: 2666076 - RNA, 19 nt, Homo sapiens
  misc_RNA (1)...(19): siRNA sense strand
ccucauuggcagaaauuua

SEQ ID NO: 2666077 - RNA, 19 nt, Homo sapiens
  misc_RNA (1)...(19): siRNA sense strand
aggacaaaucuuagaaaca

SEQ ID NO: 2666078 - RNA, 19 nt, Homo sapiens
  misc_RNA (1)...(19): siRNA sense strand
acagaaaagcaguggacaa

SEQ ID NO: 2666079 - RNA, 19 nt, Homo sapiens
  misc_RNA (1)...(19): siRNA sense strand
ugauagucucucuggaaua

SEQ ID NO: 2666080 - RNA, 19 nt, Homo sapiens
  misc_RNA (1)...(19): siRNA sense strand
agagaaaccugauggccuu

SEQ ID NO: 2666081 - RNA, 19 nt, Homo sapiens
  misc_RNA (1)...(19): siRNA sense strand
cagccaagguggagagcuc

SEQ ID NO: 2666082 - RNA, 19 nt, Homo sapiens
  misc_RNA (1)...(19): siRNA sense strand
guauuuaggugcugggaag

SEQ ID NO: 2666083 - RNA, 19 nt, Homo sapiens
  misc_RNA (1)...(19): siRNA sense strand
aggaagugcgcuggagaaa

SEQ ID NO: 2666084 - RNA, 19 nt, Homo sapiens
  misc_RNA (1)...(19): siRNA sense strand
aaagcgaggaggaggaaaa

SEQ ID NO: 2666085 - RNA, 19 nt, Homo sapiens
  misc_RNA (1)...(19): siRNA sense strand
gaugacacugagagaacaa

SEQ ID NO: 2666086 - RNA, 19 nt, Homo sapiens
  misc_RNA (1)...(19): siRNA sense strand
gcagauaucauucucauua

SEQ ID NO: 2666087 - RNA, 19 nt, Homo sapiens
  misc_RNA (1)...(19): siRNA sense strand
guaaaagaguagcggucau

SEQ ID NO: 2666088 - RNA, 19 nt, Homo sapiens
  misc_RNA (1)...(19): siRNA sense strand
aggaaaugcaaaggaagaa

SEQ ID NO: 2666089 - RNA, 19 nt, Homo sapiens
  misc_RNA (1)...(19): siRNA sense strand
uuccagaagaagauguaaa

SEQ ID NO: 2666090 - RNA, 19 nt, Homo sapiens
  misc_RNA (1)...(19): siRNA sense strand
ggacaauggccuuagagcu

SEQ ID NO: 2666091 - RNA, 19 nt, Homo sapiens
  misc_RNA (1)...(19): siRNA sense strand
cgcaaagcgaggaggagga

SEQ ID NO: 2666092 - RNA, 19 nt, Homo sapiens
  misc_RNA (1)...(19): siRNA sense strand
gucauaaggcugaagggau

SEQ ID NO: 2666093 - RNA, 19 nt, Homo sapiens
  misc_RNA (1)...(19): siRNA sense strand
aaggaagugcgcuggagaa

SEQ ID NO: 2666094 - RNA, 19 nt, Homo sapiens
  misc_RNA (1)...(19): siRNA sense strand
aggaugacacugagagaac

SEQ ID NO: 2666095 - RNA, 19 nt, Homo sapiens
  misc_RNA (1)...(19): siRNA sense strand
aaacagacuugguuccaga

SEQ ID NO: 2666096 - RNA, 19 nt, Homo sapiens
  misc_RNA (1)...(19): siRNA sense strand
augugagaaacaaggacaa

SEQ ID NO: 2666097 - RNA, 19 nt, Homo sapiens
  misc_RNA (1)...(19): siRNA sense strand
gaacaaaucgauugguccu

SEQ ID NO: 2666098 - RNA, 19 nt, Homo sapiens
  misc_RNA (1)...(19): siRNA sense strand
ccaagaucccagucacaau

SEQ ID NO: 2666099 - RNA, 19 nt, Homo sapiens
  misc_RNA (1)...(19): siRNA sense strand
caacauaguaaaagaguag

SEQ ID NO: 2666100 - RNA, 19 nt, Homo sapiens
  misc_RNA (1)...(19): siRNA sense strand
cuggaauaaguuugcagaa

SEQ ID NO: 2666101 - RNA, 19 nt, Homo sapiens
  misc_RNA (1)...(19): siRNA sense strand
ugaucagaguauuguuaca

SEQ ID NO: 2666102 - RNA, 19 nt, Homo sapiens
  misc_RNA (1)...(19): siRNA sense strand
augcaaaggaagaacaucu

SEQ ID NO: 2666103 - RNA, 19 nt, Homo sapiens
  misc_RNA (1)...(19): siRNA sense strand
uguuagagaccacuggauu

SEQ ID NO: 2666104 - RNA, 19 nt, Homo sapiens
  misc_RNA (1)...(19): siRNA sense strand
gguuccagaagaagaugua

SEQ ID NO: 2666105 - RNA, 19 nt, Homo sapiens
  misc_RNA (1)...(19): siRNA sense strand
ucacaauuaucaccgggua

SEQ ID NO: 2666106 - RNA, 19 nt, Homo sapiens
  misc_RNA (1)...(19): siRNA sense strand
gguauuuaggugcugggaa

SEQ ID NO: 2666107 - RNA, 19 nt, Homo sapiens
  misc_RNA (1)...(19): siRNA sense strand
cccauugagacgacgcaaa

SEQ ID NO: 2666108 - RNA, 19 nt, Homo sapiens
  misc_RNA (1)...(19): siRNA sense strand
cgucaagagaauucugcaa

SEQ ID NO: 2666109 - RNA, 19 nt, Homo sapiens
  misc_RNA (1)...(19): siRNA sense strand
auucaaugguauucaguca

SEQ ID NO: 2666110 - RNA, 19 nt, Homo sapiens
  misc_RNA (1)...(19): siRNA sense strand
cauucaagauguuggaggu

SEQ ID NO: 2666111 - RNA, 19 nt, Homo sapiens
  misc_RNA (1)...(19): siRNA sense strand
agugaaggauuuagagaaa

SEQ ID NO: 2666112 - RNA, 19 nt, Homo sapiens
  misc_RNA (1)...(19): siRNA sense strand
caacaaagauucuggccaa

SEQ ID NO: 2666113 - RNA, 19 nt, Homo sapiens
  misc_RNA (1)...(19): siRNA sense strand
cugugaaaguggaggacaa

SEQ ID NO: 2666114 - RNA, 19 nt, Homo sapiens
  misc_RNA (1)...(19): siRNA sense strand
gagauaacucugaaagaaa

SEQ ID NO: 2666115 - RNA, 19 nt, Homo sapiens
  misc_RNA (1)...(19): siRNA sense strand
ugaaaaggaucuugagaaa

SEQ ID NO: 2666116 - RNA, 19 nt, Homo sapiens
  misc_RNA (1)...(19): siRNA sense strand
caauagaugacaugaguaa

SEQ ID NO: 2666117 - RNA, 19 nt, Homo sapiens
  misc_RNA (1)...(19): siRNA sense strand
cuucagaacuacuggacaa

SEQ ID NO: 2666118 - RNA, 19 nt, Homo sapiens
  misc_RNA (1)...(19): siRNA sense strand
ggagaaugccucagggauu

SEQ ID NO: 2666119 - RNA, 19 nt, Homo sapiens
  misc_RNA (1)...(19): siRNA sense strand
augcagagcagcagagaua

SEQ ID NO: 2666120 - RNA, 19 nt, Homo sapiens
  misc_RNA (1)...(19): siRNA sense strand
ggacaaagugaaagugaga

SEQ ID NO: 2666121 - RNA, 19 nt, Homo sapiens
  misc_RNA (1)...(19): siRNA sense strand
gaaagaaauuugagccuga

SEQ ID NO: 2666122 - RNA, 19 nt, Homo sapiens
  misc_RNA (1)...(19): siRNA sense strand
ugaaaguggaggacaaaua

SEQ ID NO: 2666123 - RNA, 19 nt, Homo sapiens
  misc_RNA (1)...(19): siRNA sense strand
ggaaguagaaacagauaau

SEQ ID NO: 2666124 - RNA, 19 nt, Homo sapiens
  misc_RNA (1)...(19): siRNA sense strand
ccucaugagucaaagaaau

SEQ ID NO: 2666125 - RNA, 19 nt, Homo sapiens
  misc_RNA (1)...(19): siRNA sense strand
ggaccaaagugaaggaucu

SEQ ID NO: 2666126 - RNA, 19 nt, Homo sapiens
  misc_RNA (1)...(19): siRNA sense strand
ggacaguggucauuggaga

SEQ ID NO: 2666127 - RNA, 19 nt, Homo sapiens
  misc_RNA (1)...(19): siRNA sense strand
caucaaguccugaguuaaa

SEQ ID NO: 2666128 - RNA, 19 nt, Homo sapiens
  misc_RNA (1)...(19): siRNA sense strand
ggacacaucaggaaagcaa

SEQ ID NO: 2666129 - RNA, 19 nt, Homo sapiens
  misc_RNA (1)...(19): siRNA sense strand
aaucauggaaagagcauaa

SEQ ID NO: 2666130 - RNA, 19 nt, Homo sapiens
  misc_RNA (1)...(19): siRNA sense strand
gggaaauccuacagaugau

SEQ ID NO: 2666131 - RNA, 19 nt, Homo sapiens
  misc_RNA (1)...(19): siRNA sense strand
gcuugagaauccaggguau

SEQ ID NO: 2666132 - RNA, 19 nt, Homo sapiens
  misc_RNA (1)...(19): siRNA sense strand
uuaccaaagugaaggauuu

SEQ ID NO: 2666133 - RNA, 19 nt, Homo sapiens
  misc_RNA (1)...(19): siRNA sense strand
aggcaaauauucugaacau

SEQ ID NO: 2666134 - RNA, 19 nt, Homo sapiens
  misc_RNA (1)...(19): siRNA sense strand
uaucacagauucagagcaa

SEQ ID NO: 2666135 - RNA, 19 nt, Homo sapiens
  misc_RNA (1)...(19): siRNA sense strand
cagcaguggagaaggagaa

SEQ ID NO: 2666136 - RNA, 19 nt, Homo sapiens
  misc_RNA (1)...(19): siRNA sense strand
ugucagaggauguaggaau

SEQ ID NO: 2666137 - RNA, 19 nt, Homo sapiens
  misc_RNA (1)...(19): siRNA sense strand
gauucugucaugagagaua

SEQ ID NO: 2666138 - RNA, 19 nt, Homo sapiens
  misc_RNA (1)...(19): siRNA sense strand
ggaaaauaguuguguuaca

SEQ ID NO: 2666139 - RNA, 19 nt, Homo sapiens
  misc_RNA (1)...(19): siRNA sense strand
ugaagaaagagaaagcaua

SEQ ID NO: 2666140 - RNA, 19 nt, Homo sapiens
  misc_RNA (1)...(19): siRNA sense strand
caauagaggaagagaucca

SEQ ID NO: 2666141 - RNA, 19 nt, Homo sapiens
  misc_RNA (1)...(19): siRNA sense strand
gugguguguuggagauaaa

SEQ ID NO: 2666142 - RNA, 19 nt, Homo sapiens
  misc_RNA (1)...(19): siRNA sense strand
cagaauuggaagaagaaaa

SEQ ID NO: 2666143 - RNA, 19 nt, Homo sapiens
  misc_RNA (1)...(19): siRNA sense strand
ccagagagcaucaucaaua

SEQ ID NO: 2666144 - RNA, 19 nt, Homo sapiens
  misc_RNA (1)...(19): siRNA sense strand
gacuugaagcugaaagaaa

SEQ ID NO: 2666145 - RNA, 19 nt, Homo sapiens
  misc_RNA (1)...(19): siRNA sense strand
cagcagaauuacagaguac

SEQ ID NO: 2666146 - RNA, 19 nt, Homo sapiens
  misc_RNA (1)...(19): siRNA sense strand
ggggcaagguauaugaaaa

SEQ ID NO: 2666147 - RNA, 19 nt, Homo sapiens
  misc_RNA (1)...(19): siRNA sense strand
cugcauuaaaucaggcaaa

SEQ ID NO: 2666148 - RNA, 19 nt, Homo sapiens
  misc_RNA (1)...(19): siRNA sense strand
gagaaugagaauaagucaa

SEQ ID NO: 2666149 - RNA, 19 nt, Homo sapiens
  misc_RNA (1)...(19): siRNA sense strand
ucccaaagaacgaagauaa

SEQ ID NO: 2666150 - RNA, 19 nt, Homo sapiens
  misc_RNA (1)...(19): siRNA sense strand
ggacaaauauggagggacg

SEQ ID NO: 2666151 - RNA, 19 nt, Homo sapiens
  misc_RNA (1)...(19): siRNA sense strand
gagaauaagucaaacccau

SEQ ID NO: 2666152 - RNA, 19 nt, Homo sapiens
  misc_RNA (1)...(19): siRNA sense strand
gggaaguagaaacagauaa

SEQ ID NO: 2666153 - RNA, 19 nt, Homo sapiens
  misc_RNA (1)...(19): siRNA sense strand
aaucagaauacaaggaaga

SEQ ID NO: 2666154 - RNA, 19 nt, Homo sapiens
  misc_RNA (1)...(19): siRNA sense strand
gccaaucacagaagaguaa

SEQ ID NO: 2666155 - RNA, 19 nt, Homo sapiens
  misc_RNA (1)...(19): siRNA sense strand
aagaggaacgggaggacaa

SEQ ID NO: 2666156 - RNA, 19 nt, Homo sapiens
  misc_RNA (1)...(19): siRNA sense strand
acacaagccauuugcuaaa

SEQ ID NO: 2666157 - RNA, 19 nt, Homo sapiens
  misc_RNA (1)...(19): siRNA sense strand
acacagaugguaagaauau

SEQ ID NO: 2666158 - RNA, 19 nt, Homo sapiens
  misc_RNA (1)...(19): siRNA sense strand
gaaaccaggcugagaccaa

SEQ ID NO: 2666159 - RNA, 19 nt, Homo sapiens
  misc_RNA (1)...(19): siRNA sense strand
ggaaauuuugacagagaua

SEQ ID NO: 2666160 - RNA, 19 nt, Homo sapiens
  misc_RNA (1)...(19): siRNA sense strand
gaaacaaaucagugggaac

SEQ ID NO: 2666161 - RNA, 19 nt, Homo sapiens
  misc_RNA (1)...(19): siRNA sense strand
agacauaggaccaccaaau

SEQ ID NO: 2666162 - RNA, 19 nt, Homo sapiens
  misc_RNA (1)...(19): siRNA sense strand
ccaccaacacccaugaaua

SEQ ID NO: 2666163 - RNA, 19 nt, Homo sapiens
  misc_RNA (1)...(19): siRNA sense strand
gccauuugcuaaagaggaa

SEQ ID NO: 2666164 - RNA, 19 nt, Homo sapiens
  misc_RNA (1)...(19): siRNA sense strand
caggacacagagagggaaa

SEQ ID NO: 2666165 - RNA, 19 nt, Homo sapiens
  misc_RNA (1)...(19): siRNA sense strand
ccauuaacggagacugaaa

SEQ ID NO: 2666166 - RNA, 19 nt, Homo sapiens
  misc_RNA (1)...(19): siRNA sense strand
gaggaaaauaguuguguua

SEQ ID NO: 2666167 - RNA, 19 nt, Homo sapiens
  misc_RNA (1)...(19): siRNA sense strand
gcuaucaagcagacauaaa

SEQ ID NO: 2666168 - RNA, 19 nt, Homo sapiens
  misc_RNA (1)...(19): siRNA sense strand
augaagauuuacugagaga

SEQ ID NO: 2666169 - RNA, 19 nt, Homo sapiens
  misc_RNA (1)...(19): siRNA sense strand
ccuccuuaaaugaaagaaa

SEQ ID NO: 2666170 - RNA, 19 nt, Homo sapiens
  misc_RNA (1)...(19): siRNA sense strand
caaagauagccuuguggaa

SEQ ID NO: 2666171 - RNA, 19 nt, Homo sapiens
  misc_RNA (1)...(19): siRNA sense strand
ccgaggaaccagaggaagu

SEQ ID NO: 2666172 - RNA, 19 nt, Homo sapiens
  misc_RNA (1)...(19): siRNA sense strand
ucuaauaaguucuugguca

SEQ ID NO: 2666173 - RNA, 19 nt, Homo sapiens
  misc_RNA (1)...(19): siRNA sense strand
agaaagcauagcugaauua

SEQ ID NO: 2666174 - RNA, 19 nt, Homo sapiens
  misc_RNA (1)...(19): siRNA sense strand
cugaaggacuugauggcau

SEQ ID NO: 2666175 - RNA, 19 nt, Homo sapiens
  misc_RNA (1)...(19): siRNA sense strand
ucacugagccagagauaga

SEQ ID NO: 2666176 - RNA, 19 nt, Homo sapiens
  misc_RNA (1)...(19): siRNA sense strand
acuuguaaaccgugaagaa

SEQ ID NO: 2666177 - RNA, 19 nt, Homo sapiens
  misc_RNA (1)...(19): siRNA sense strand
gugaagaaagagaaagcau

SEQ ID NO: 2666178 - RNA, 19 nt, Homo sapiens
  misc_RNA (1)...(19): siRNA sense strand
acacggaaauggaggagga

SEQ ID NO: 2666179 - RNA, 19 nt, Homo sapiens
  misc_RNA (1)...(19): siRNA sense strand
acauuuauccacagagaau

SEQ ID NO: 2666180 - RNA, 19 nt, Homo sapiens
  misc_RNA (1)...(19): siRNA sense strand
acuugaagcugaaagaaaa

SEQ ID NO: 2666181 - RNA, 19 nt, Homo sapiens
  misc_RNA (1)...(19): siRNA sense strand
ugacagauuuugugggaga

SEQ ID NO: 2666182 - RNA, 19 nt, Homo sapiens
  misc_RNA (1)...(19): siRNA sense strand
cuggagugcauuugguaaa

SEQ ID NO: 2666183 - RNA, 19 nt, Homo sapiens
  misc_RNA (1)...(19): siRNA sense strand
ccuuaaagaugcugggcuu

SEQ ID NO: 2666184 - RNA, 19 nt, Homo sapiens
  misc_RNA (1)...(19): siRNA sense strand
ucagaguaccaguggauaa

SEQ ID NO: 2666185 - RNA, 19 nt, Homo sapiens
  misc_RNA (1)...(19): siRNA sense strand
ucaugaagugccugagaaa

SEQ ID NO: 2666186 - RNA, 19 nt, Homo sapiens
  misc_RNA (1)...(19): siRNA sense strand
gaauggaaggagugccaaa

SEQ ID NO: 2666187 - RNA, 19 nt, Homo sapiens
  misc_RNA (1)...(19): siRNA sense strand
aaacagaaaaggagaacua

SEQ ID NO: 2666188 - RNA, 19 nt, Homo sapiens
  misc_RNA (1)...(19): siRNA sense strand
gagcagaucacauggccaa

SEQ ID NO: 2666189 - RNA, 19 nt, Homo sapiens
  misc_RNA (1)...(19): siRNA sense strand
aguuaaaggaagaaagagu

SEQ ID NO: 2666190 - RNA, 19 nt, Homo sapiens
  misc_RNA (1)...(19): siRNA sense strand
gcuaaagaaccuggagcua

SEQ ID NO: 2666191 - RNA, 19 nt, Homo sapiens
  misc_RNA (1)...(19): siRNA sense strand
gggauagaucagucagauu

SEQ ID NO: 2666192 - RNA, 19 nt, Homo sapiens
  misc_RNA (1)...(19): siRNA sense strand
aaguauaucaagugugcua

SEQ ID NO: 2666193 - RNA, 19 nt, Homo sapiens
  misc_RNA (1)...(19): siRNA sense strand
gaccaaaacaggugaauau

SEQ ID NO: 2666194 - RNA, 19 nt, Homo sapiens
  misc_RNA (1)...(19): siRNA sense strand
gauacaaagaugugaccuu

SEQ ID NO: 2666195 - RNA, 19 nt, Homo sapiens
  misc_RNA (1)...(19): siRNA sense strand
ggccaagaucuuaaaguau

SEQ ID NO: 2666196 - RNA, 19 nt, Homo sapiens
  misc_RNA (1)...(19): siRNA sense strand
agaaagagugauaaggcuu

SEQ ID NO: 2666197 - RNA, 19 nt, Homo sapiens
  misc_RNA (1)...(19): siRNA sense strand
ccuaaagcaguuaaaggaa

SEQ ID NO: 2666198 - RNA, 19 nt, Homo sapiens
  misc_RNA (1)...(19): siRNA sense strand
guauaucaagugugcuaaa

SEQ ID NO: 2666199 - RNA, 19 nt, Homo sapiens
  misc_RNA (1)...(19): siRNA sense strand
cugaauugcaacacacuua

SEQ ID NO: 2666200 - RNA, 19 nt, Homo sapiens
  misc_RNA (1)...(19): siRNA sense strand
aagaagcauuacaggaaaa

SEQ ID NO: 2666201 - RNA, 19 nt, Homo sapiens
  misc_RNA (1)...(19): siRNA sense strand
ccacaauggcugggauaga

SEQ ID NO: 2666202 - RNA, 19 nt, Homo sapiens
  misc_RNA (1)...(19): siRNA sense strand
uguaaguaguggcagaaaa

SEQ ID NO: 2666203 - RNA, 19 nt, Homo sapiens
  misc_RNA (1)...(19): siRNA sense strand
cagaauggaaggagugcca

SEQ ID NO: 2666204 - RNA, 19 nt, Homo sapiens
  misc_RNA (1)...(19): siRNA sense strand
gcuaaacagaaaaggagaa

SEQ ID NO: 2666205 - RNA, 19 nt, Homo sapiens
  misc_RNA (1)...(19): siRNA sense strand
auucugagagagagggauu

SEQ ID NO: 2666206 - RNA, 19 nt, Homo sapiens
  misc_RNA (1)...(19): siRNA sense strand
guugaugauucuucagaga

SEQ ID NO: 2666207 - RNA, 19 nt, Homo sapiens
  misc_RNA (1)...(19): siRNA sense strand
ccaagaucuuaaaguauca

SEQ ID NO: 2666208 - RNA, 19 nt, Homo sapiens
  misc_RNA (1)...(19): siRNA sense strand
aaagaaaagaagaggaguu

SEQ ID NO: 2666209 - RNA, 19 nt, Homo sapiens
  misc_RNA (1)...(19): siRNA sense strand
ucuuaaaguaucagaccau

SEQ ID NO: 2666210 - RNA, 19 nt, Homo sapiens
  misc_RNA (1)...(19): siRNA sense strand
uaguauagaacaagaagca

SEQ ID NO: 2666211 - RNA, 19 nt, Homo sapiens
  misc_RNA (1)...(19): siRNA sense strand
aaccagaaccgaagcagaa

SEQ ID NO: 2666212 - RNA, 19 nt, Homo sapiens
  misc_RNA (1)...(19): siRNA sense strand
cuagcaaagggauugaaua

SEQ ID NO: 2666213 - RNA, 19 nt, Homo sapiens
  misc_RNA (1)...(19): siRNA sense strand
aagucguguuccugcgaua

SEQ ID NO: 2666214 - RNA, 19 nt, Homo sapiens
  misc_RNA (1)...(19): siRNA sense strand
cugaaguugaagagguuga

SEQ ID NO: 2666215 - RNA, 19 nt, Homo sapiens
  misc_RNA (1)...(19): siRNA sense strand
cgauaagauacaaagaugu

SEQ ID NO: 2666216 - RNA, 19 nt, Homo sapiens
  misc_RNA (1)...(19): siRNA sense strand
augagaaggcaugaagaaa

SEQ ID NO: 2666217 - RNA, 19 nt, Homo sapiens
  misc_RNA (1)...(19): siRNA sense strand
gcaacacacuuauugguga

SEQ ID NO: 2666218 - RNA, 19 nt, Homo sapiens
  misc_RNA (1)...(19): siRNA sense strand
acagaaaaggagaacuaua

SEQ ID NO: 2666219 - RNA, 19 nt, Homo sapiens
  misc_RNA (1)...(19): siRNA sense strand
gugccaaaucagaguacca

SEQ ID NO: 2666220 - RNA, 19 nt, Homo sapiens
  misc_RNA (1)...(19): siRNA sense strand
uuaaaggaagaaagaguga

SEQ ID NO: 2666221 - RNA, 19 nt, Homo sapiens
  misc_RNA (1)...(19): siRNA sense strand
gguucugacaugaauaaau

SEQ ID NO: 2666222 - RNA, 19 nt, Homo sapiens
  misc_RNA (1)...(19): siRNA sense strand
gagauggagguuuagaaau

SEQ ID NO: 2666223 - RNA, 19 nt, Homo sapiens
  misc_RNA (1)...(19): siRNA sense strand
aaucagaguaccaguggau

SEQ ID NO: 2666224 - RNA, 19 nt, Homo sapiens
  misc_RNA (1)...(19): siRNA sense strand
aauuacaggugaugcuaga

SEQ ID NO: 2666225 - RNA, 19 nt, Homo sapiens
  misc_RNA (1)...(19): siRNA sense strand
ugaccuuccaguuguguaa

SEQ ID NO: 2666226 - RNA, 19 nt, Homo sapiens
  misc_RNA (1)...(19): siRNA sense strand
aggaaaagcuacuauuaga

SEQ ID NO: 2666227 - RNA, 19 nt, Homo sapiens
  misc_RNA (1)...(19): siRNA sense strand
gccuaaagcaguuaaagga

SEQ ID NO: 2666228 - RNA, 19 nt, Homo sapiens
  misc_RNA (1)...(19): siRNA sense strand
accuguaaguaguggcaga

SEQ ID NO: 2666229 - RNA, 19 nt, Homo sapiens
  misc_RNA (1)...(19): siRNA sense strand
aggaagaaagagugauaag

SEQ ID NO: 2666230 - RNA, 19 nt, Homo sapiens
  misc_RNA (1)...(19): siRNA sense strand
caagguauaaagagcucua

SEQ ID NO: 2666231 - RNA, 19 nt, Homo sapiens
  misc_RNA (1)...(19): siRNA sense strand
caaaagaagaaaugggaaa

SEQ ID NO: 2666232 - RNA, 19 nt, Homo sapiens
  misc_RNA (1)...(19): siRNA sense strand
gguuauagguggcaagaca

SEQ ID NO: 2666233 - RNA, 19 nt, Homo sapiens
  misc_RNA (1)...(19): siRNA sense strand
acaaagugguacaggaauu

SEQ ID NO: 2666234 - RNA, 19 nt, Homo sapiens
  misc_RNA (1)...(19): siRNA sense strand
gugaaguauuugugcuaua

SEQ ID NO: 2666235 - RNA, 19 nt, Homo sapiens
  misc_RNA (1)...(19): siRNA sense strand
cgugaaagaauguggaaaa

SEQ ID NO: 2666236 - RNA, 19 nt, Homo sapiens
  misc_RNA (1)...(19): siRNA sense strand
ucagaaacguggagagcau

SEQ ID NO: 2666237 - RNA, 19 nt, Homo sapiens
  misc_RNA (1)...(19): siRNA sense strand
aggagaagcaagaggaaga

SEQ ID NO: 2666238 - RNA, 19 nt, Homo sapiens
  misc_RNA (1)...(19): siRNA sense strand
cuagaaaccacgucagaaa

SEQ ID NO: 2666239 - RNA, 19 nt, Homo sapiens
  misc_RNA (1)...(19): siRNA sense strand
gccacaaagaucagaguaa

SEQ ID NO: 2666240 - RNA, 19 nt, Homo sapiens
  misc_RNA (1)...(19): siRNA sense strand
aggagagacugaagagaga

SEQ ID NO: 2666241 - RNA, 19 nt, Homo sapiens
  misc_RNA (1)...(19): siRNA sense strand
ggaagagacaggaugacaa

SEQ ID NO: 2666242 - RNA, 19 nt, Homo sapiens
  misc_RNA (1)...(19): siRNA sense strand
guuauuagcaucaggagaa

SEQ ID NO: 2666243 - RNA, 19 nt, Homo sapiens
  misc_RNA (1)...(19): siRNA sense strand
ggcuaaugaagaugaguua

SEQ ID NO: 2666244 - RNA, 19 nt, Homo sapiens
  misc_RNA (1)...(19): siRNA sense strand
aauauaugacucagggaaa

SEQ ID NO: 2666245 - RNA, 19 nt, Homo sapiens
  misc_RNA (1)...(19): siRNA sense strand
ugacaaagugguacaggaa

SEQ ID NO: 2666246 - RNA, 19 nt, Homo sapiens
  misc_RNA (1)...(19): siRNA sense strand
uggaaaacauguagaaaga

SEQ ID NO: 2666247 - RNA, 19 nt, Homo sapiens
  misc_RNA (1)...(19): siRNA sense strand
cguaauaaugagucagaga

SEQ ID NO: 2666248 - RNA, 19 nt, Homo sapiens
  misc_RNA (1)...(19): siRNA sense strand
acgaagaagaggaggagga

SEQ ID NO: 2666249 - RNA, 19 nt, Homo sapiens
  misc_RNA (1)...(19): siRNA sense strand
aguaugaagacgugaaaga

SEQ ID NO: 2666250 - RNA, 19 nt, Homo sapiens
  misc_RNA (1)...(19): siRNA sense strand
cuucauaacacaaggcuuu

SEQ ID NO: 2666251 - RNA, 19 nt, Homo sapiens
  misc_RNA (1)...(19): siRNA sense strand
cacaacaaguacacagaaa

SEQ ID NO: 2666252 - RNA, 19 nt, Homo sapiens
  misc_RNA (1)...(19): siRNA sense strand
gcgcauugccauugaagau

SEQ ID NO: 2666253 - RNA, 19 nt, Homo sapiens
  misc_RNA (1)...(19): siRNA sense strand
gggaagaugaagauggcau

SEQ ID NO: 2666254 - RNA, 19 nt, Homo sapiens
  misc_RNA (1)...(19): siRNA sense strand
gaagauaacaccagggaac

SEQ ID NO: 2666255 - RNA, 19 nt, Homo sapiens
  misc_RNA (1)...(19): siRNA sense strand
cugcagaacuguaagacga

SEQ ID NO: 2666256 - RNA, 19 nt, Homo sapiens
  misc_RNA (1)...(19): siRNA sense strand
cuaaagagugugagggacu

SEQ ID NO: 2666257 - RNA, 19 nt, Homo sapiens
  misc_RNA (1)...(19): siRNA sense strand
gguacaggaauuuggcuua

SEQ ID NO: 2666258 - RNA, 19 nt, Homo sapiens
  misc_RNA (1)...(19): siRNA sense strand
ccagaaacaggaaggaaaa

SEQ ID NO: 2666259 - RNA, 19 nt, Homo sapiens
  misc_RNA (1)...(19): siRNA sense strand
gagugaaguauuugugcua

SEQ ID NO: 2666260 - RNA, 19 nt, Homo sapiens
  misc_RNA (1)...(19): siRNA sense strand
uguuauaaaccgacaaaga

SEQ ID NO: 2666261 - RNA, 19 nt, Homo sapiens
  misc_RNA (1)...(19): siRNA sense strand
agacuagaaaugaggaaaa

SEQ ID NO: 2666262 - RNA, 19 nt, Homo sapiens
  misc_RNA (1)...(19): siRNA sense strand
agagaaaguuggaaggaag

SEQ ID NO: 2666263 - RNA, 19 nt, Homo sapiens
  misc_RNA (1)...(19): siRNA sense strand
ggacacaggcauaacaaaa

SEQ ID NO: 2666264 - RNA, 19 nt, Homo sapiens
  misc_RNA (1)...(19): siRNA sense strand
augaagaggaggaggacga

SEQ ID NO: 2666265 - RNA, 19 nt, Homo sapiens
  misc_RNA (1)...(19): siRNA sense strand
ucaccaaaggcaagggauu

SEQ ID NO: 2666266 - RNA, 19 nt, Homo sapiens
  misc_RNA (1)...(19): siRNA sense strand
cgaaggagcugcuaggcuu

SEQ ID NO: 2666267 - RNA, 19 nt, Homo sapiens
  misc_RNA (1)...(19): siRNA sense strand
cgaaacuacccuacagcaa

SEQ ID NO: 2666268 - RNA, 19 nt, Homo sapiens
  misc_RNA (1)...(19): siRNA sense strand
uccagaaacaggaaggaaa

SEQ ID NO: 2666269 - RNA, 19 nt, Homo sapiens
  misc_RNA (1)...(19): siRNA sense strand
uggcauggcuaaugaagau

SEQ ID NO: 2666270 - RNA, 19 nt, Homo sapiens
  misc_RNA (1)...(19): siRNA sense strand
ggacuauggaugaugauga

SEQ ID NO: 2666271 - RNA, 19 nt, Homo sapiens
  misc_RNA (1)...(19): siRNA sense strand
aaagaagcaaagaggacaa

SEQ ID NO: 2666272 - RNA, 19 nt, Homo sapiens
  misc_RNA (1)...(19): siRNA sense strand
ggaaaagaggcacaagaaa

SEQ ID NO: 2666273 - RNA, 19 nt, Homo sapiens
  misc_RNA (1)...(19): siRNA sense strand
gaagcaaagaggacaaaga

SEQ ID NO: 2666274 - RNA, 19 nt, Homo sapiens
  misc_RNA (1)...(19): siRNA sense strand
gaagaagaaccuaggcuca

SEQ ID NO: 2666275 - RNA, 19 nt, Homo sapiens
  misc_RNA (1)...(19): siRNA sense strand
ccauaagcauaucaaggaa

SEQ ID NO: 2666276 - RNA, 19 nt, Homo sapiens
  misc_RNA (1)...(19): siRNA sense strand
acauuaaggagaagcaaga

SEQ ID NO: 2666277 - RNA, 19 nt, Homo sapiens
  misc_RNA (1)...(19): siRNA sense strand
caacacaaguuaccagauu

SEQ ID NO: 2666278 - RNA, 19 nt, Homo sapiens
  misc_RNA (1)...(19): siRNA sense strand
acaaugagaacuuggaaca

SEQ ID NO: 2666279 - RNA, 19 nt, Homo sapiens
  misc_RNA (1)...(19): siRNA sense strand
ccuaagauuauauggguca

SEQ ID NO: 2666280 - RNA, 19 nt, Homo sapiens
  misc_RNA (1)...(19): siRNA sense strand
guuucuacacagaggaauu

SEQ ID NO: 2666281 - RNA, 19 nt, Homo sapiens
  misc_RNA (1)...(19): siRNA sense strand
ugaugaacauacugguaau

SEQ ID NO: 2666282 - RNA, 19 nt, Homo sapiens
  misc_RNA (1)...(19): siRNA sense strand
cauaagcauaucaaggaaa

SEQ ID NO: 2666283 - RNA, 19 nt, Homo sapiens
  misc_RNA (1)...(19): siRNA sense strand
ggaauuuggcuuacacaau

SEQ ID NO: 2666284 - RNA, 19 nt, Homo sapiens
  misc_RNA (1)...(19): siRNA sense strand
agaagaaaugggaaaugaa

SEQ ID NO: 2666285 - RNA, 19 nt, Homo sapiens
  misc_RNA (1)...(19): siRNA sense strand
uacagaagguacugaggaa

SEQ ID NO: 2666286 - RNA, 19 nt, Homo sapiens
  misc_RNA (1)...(19): siRNA sense strand
agagauauacaaaggugaa

SEQ ID NO: 2666287 - RNA, 19 nt, Homo sapiens
  misc_RNA (1)...(19): siRNA sense strand
aggaaugcccacaguuuaa

SEQ ID NO: 2666288 - RNA, 19 nt, Homo sapiens
  misc_RNA (1)...(19): siRNA sense strand
ccaaaaucccacagcuaaa

SEQ ID NO: 2666289 - RNA, 19 nt, Homo sapiens
  misc_RNA (1)...(19): siRNA sense strand
ccaaagggaagaugaagau

SEQ ID NO: 2666290 - RNA, 19 nt, Homo sapiens
  misc_RNA (1)...(19): siRNA sense strand
cugaagaggaugaugaguu

SEQ ID NO: 2666291 - RNA, 19 nt, Homo sapiens
  misc_RNA (1)...(19): siRNA sense strand
agcaaagaggacaaagaaa

SEQ ID NO: 2666292 - RNA, 19 nt, Homo sapiens
  misc_RNA (1)...(19): siRNA sense strand
aggcugaucuugauggaga

SEQ ID NO: 2666293 - RNA, 19 nt, Homo sapiens
  misc_RNA (1)...(19): siRNA sense strand
ggaugaugaguuaggcgaa

SEQ ID NO: 2666294 - RNA, 19 nt, Homo sapiens
  misc_RNA (1)...(19): siRNA sense strand
ggugaugcaucuagaggca

SEQ ID NO: 2666295 - RNA, 19 nt, Homo sapiens
  misc_RNA (1)...(19): siRNA sense strand
gaggaagaguugcucacua

SEQ ID NO: 2666296 - RNA, 19 nt, Homo sapiens
  misc_RNA (1)...(19): siRNA sense strand
acacauuggcccuucauaa

SEQ ID NO: 2666297 - RNA, 19 nt, Homo sapiens
  misc_RNA (1)...(19): siRNA sense strand
cggugaaguuccagcuaga

SEQ ID NO: 2666298 - RNA, 19 nt, Homo sapiens
  misc_RNA (1)...(19): siRNA sense strand
ggaaccuguaugagagcaa

SEQ ID NO: 2666299 - RNA, 19 nt, Homo sapiens
  misc_RNA (1)...(19): siRNA sense strand
ggaugaauugccagggaca

SEQ ID NO: 2666300 - RNA, 19 nt, Homo sapiens
  misc_RNA (1)...(19): siRNA sense strand
gacagauaccggaggagaa

SEQ ID NO: 2666301 - RNA, 19 nt, Homo sapiens
  misc_RNA (1)...(19): siRNA sense strand
ccacgaagucagagaccca

SEQ ID NO: 2666302 - RNA, 19 nt, Homo sapiens
  misc_RNA (1)...(19): siRNA sense strand
agguaaaucagcaaagaca

SEQ ID NO: 2666303 - RNA, 19 nt, Homo sapiens
  misc_RNA (1)...(19): siRNA sense strand
caagucaggccaagggcaa

SEQ ID NO: 2666304 - RNA, 19 nt, Homo sapiens
  misc_RNA (1)...(19): siRNA sense strand
gggcaaauucugggugaga

SEQ ID NO: 2666305 - RNA, 19 nt, Homo sapiens
  misc_RNA (1)...(19): siRNA sense strand
aguaggaaagccuguguaa

SEQ ID NO: 2666306 - RNA, 19 nt, Homo sapiens
  misc_RNA (1)...(19): siRNA sense strand
caauaagccacuuuggaga

SEQ ID NO: 2666307 - RNA, 19 nt, Homo sapiens
  misc_RNA (1)...(19): siRNA sense strand
aggcacagacggugaaguu

SEQ ID NO: 2666308 - RNA, 19 nt, Homo sapiens
  misc_RNA (1)...(19): siRNA sense strand
ggacagauaccggaggaga

SEQ ID NO: 2666309 - RNA, 19 nt, Homo sapiens
  misc_RNA (1)...(19): siRNA sense strand
ggaaacaacuagaaggugg

SEQ ID NO: 2666310 - RNA, 19 nt, Homo sapiens
  misc_RNA (1)...(19): siRNA sense strand
gaaaggaaccugaggaagc

SEQ ID NO: 2666311 - RNA, 19 nt, Homo sapiens
  misc_RNA (1)...(19): siRNA sense strand
ccuacucacaagagggaga

SEQ ID NO: 2666312 - RNA, 19 nt, Homo sapiens
  misc_RNA (1)...(19): siRNA sense strand
cccaacagagacagacaaa

SEQ ID NO: 2666313 - RNA, 19 nt, Homo sapiens
  misc_RNA (1)...(19): siRNA sense strand
agaauaaagugcaagcucu

SEQ ID NO: 2666314 - RNA, 19 nt, Homo sapiens
  misc_RNA (1)...(19): siRNA sense strand
gcuccuuccagaugggcaa

SEQ ID NO: 2666315 - RNA, 19 nt, Homo sapiens
  misc_RNA (1)...(19): siRNA sense strand
caggaaagacugacaucca

SEQ ID NO: 2666316 - RNA, 19 nt, Homo sapiens
  misc_RNA (1)...(19): siRNA sense strand
agucagagacccagccuca

SEQ ID NO: 2666317 - RNA, 19 nt, Homo sapiens
  misc_RNA (1)...(19): siRNA sense strand
cugagagcuuguagagagu

SEQ ID NO: 2666318 - RNA, 19 nt, Homo sapiens
  misc_RNA (1)...(19): siRNA sense strand
ugcaagagccaaagcccaa

SEQ ID NO: 2666319 - RNA, 19 nt, Homo sapiens
  misc_RNA (1)...(19): siRNA sense strand
caauggcaagucugagaaa

SEQ ID NO: 2666320 - RNA, 19 nt, Homo sapiens
  misc_RNA (1)...(19): siRNA sense strand
agggagaacucuaggaagc

SEQ ID NO: 2666321 - RNA, 19 nt, Homo sapiens
  misc_RNA (1)...(19): siRNA sense strand
aguuccagcuagagaggga

SEQ ID NO: 2666322 - RNA, 19 nt, Homo sapiens
  misc_RNA (1)...(19): siRNA sense strand
gcauguaagcaguuccaga

SEQ ID NO: 2666323 - RNA, 19 nt, Homo sapiens
  misc_RNA (1)...(19): siRNA sense strand
gagacagacaaaucagaga

SEQ ID NO: 2666324 - RNA, 19 nt, Homo sapiens
  misc_RNA (1)...(19): siRNA sense strand
gugcugaagcugagaggcu

SEQ ID NO: 2666325 - RNA, 19 nt, Homo sapiens
  misc_RNA (1)...(19): siRNA sense strand
ggcaagucugagaaagcaa

SEQ ID NO: 2666326 - RNA, 19 nt, Homo sapiens
  misc_RNA (1)...(19): siRNA sense strand
aggaagcccaacuuagaaa

SEQ ID NO: 2666327 - RNA, 19 nt, Homo sapiens
  misc_RNA (1)...(19): siRNA sense strand
gcuccaggcgccagcaaaa

SEQ ID NO: 2666328 - RNA, 19 nt, Homo sapiens
  misc_RNA (1)...(19): siRNA sense strand
ccucgaagguaaaucagca

SEQ ID NO: 2666329 - RNA, 19 nt, Homo sapiens
  misc_RNA (1)...(19): siRNA sense strand
uuauuaagacgcacagaga

SEQ ID NO: 2666330 - RNA, 19 nt, Homo sapiens
  misc_RNA (1)...(19): siRNA sense strand
cgugaaaaccagcaaucua

SEQ ID NO: 2666331 - RNA, 19 nt, Homo sapiens
  misc_RNA (1)...(19): siRNA sense strand
gagcaaaccuccaagccac

SEQ ID NO: 2666332 - RNA, 19 nt, Homo sapiens
  misc_RNA (1)...(19): siRNA sense strand
gaggaggcuguuagugaau

SEQ ID NO: 2666333 - RNA, 19 nt, Homo sapiens
  misc_RNA (1)...(19): siRNA sense strand
gccccaugcuucagagaau

SEQ ID NO: 2666334 - RNA, 19 nt, Homo sapiens
  misc_RNA (1)...(19): siRNA sense strand
ccgagaaacgugacaacaa

SEQ ID NO: 2666335 - RNA, 19 nt, Homo sapiens
  misc_RNA (1)...(19): siRNA sense strand
agccagaagaggagaagaa

SEQ ID NO: 2666336 - RNA, 19 nt, Homo sapiens
  misc_RNA (1)...(19): siRNA sense strand
agacagaaaaugaggagaa

SEQ ID NO: 2666337 - RNA, 19 nt, Homo sapiens
  misc_RNA (1)...(19): siRNA sense strand
agagagagaccgagagguu

SEQ ID NO: 2666338 - RNA, 19 nt, Homo sapiens
  misc_RNA (1)...(19): siRNA sense strand
augagaauguugagaacuu

SEQ ID NO: 2666339 - RNA, 19 nt, Homo sapiens
  misc_RNA (1)...(19): siRNA sense strand
cgucugagcaggaggagau

SEQ ID NO: 2666340 - RNA, 19 nt, Homo sapiens
  misc_RNA (1)...(19): siRNA sense strand
cgaaugaggcaguggagca

SEQ ID NO: 2666341 - RNA, 19 nt, Homo sapiens
  misc_RNA (1)...(19): siRNA sense strand
caguggagcagguggaaga

SEQ ID NO: 2666342 - RNA, 19 nt, Homo sapiens
  misc_RNA (1)...(19): siRNA sense strand
gcucaaggcuagggaggau

SEQ ID NO: 2666343 - RNA, 19 nt, Homo sapiens
  misc_RNA (1)...(19): siRNA sense strand
gaagagacgaggugagcca

SEQ ID NO: 2666344 - RNA, 19 nt, Homo sapiens
  misc_RNA (1)...(19): siRNA sense strand
cugcuuacgcccagaacua

SEQ ID NO: 2666345 - RNA, 19 nt, Homo sapiens
  misc_RNA (1)...(19): siRNA sense strand
ucuuaaaguucgcaaccaa

SEQ ID NO: 2666346 - RNA, 19 nt, Homo sapiens
  misc_RNA (1)...(19): siRNA sense strand
gggcccuggucaugagcaa

SEQ ID NO: 2666347 - RNA, 19 nt, Homo sapiens
  misc_RNA (1)...(19): siRNA sense strand
ccacggaagcugugcacau

SEQ ID NO: 2666348 - RNA, 19 nt, Homo sapiens
  misc_RNA (1)...(19): siRNA sense strand
agguggagcggcagauuaa

SEQ ID NO: 2666349 - RNA, 19 nt, Homo sapiens
  misc_RNA (1)...(19): siRNA sense strand
uuggcuaccuggaaagaaa

SEQ ID NO: 2666350 - RNA, 19 nt, Homo sapiens
  misc_RNA (1)...(19): siRNA sense strand
ccagaugacaagaacaaau

SEQ ID NO: 2666351 - RNA, 19 nt, Homo sapiens
  misc_RNA (1)...(19): siRNA sense strand
gugcuguggagacgagaaa

SEQ ID NO: 2666352 - RNA, 19 nt, Homo sapiens
  misc_RNA (1)...(19): siRNA sense strand
gcaaugaggcugcugguga

SEQ ID NO: 2666353 - RNA, 19 nt, Homo sapiens
  misc_RNA (1)...(19): siRNA sense strand
cggacaggcagccaagaaa

SEQ ID NO: 2666354 - RNA, 19 nt, Homo sapiens
  misc_RNA (1)...(19): siRNA sense strand
gguaaaaccauuugaggca

SEQ ID NO: 2666355 - RNA, 19 nt, Homo sapiens
  misc_RNA (1)...(19): siRNA sense strand
cagccaagaaagaaacgaa

SEQ ID NO: 2666356 - RNA, 19 nt, Homo sapiens
  misc_RNA (1)...(19): siRNA sense strand
ccugaugguaauaaggcaa

SEQ ID NO: 2666357 - RNA, 19 nt, Homo sapiens
  misc_RNA (1)...(19): siRNA sense strand
gcuaugaaauguuugcaga

SEQ ID NO: 2666358 - RNA, 19 nt, Homo sapiens
  misc_RNA (1)...(19): siRNA sense strand
caggcagccaagaaagaaa

SEQ ID NO: 2666359 - RNA, 19 nt, Homo sapiens
  misc_RNA (1)...(19): siRNA sense strand
cagaacaaagcuaugaaau

SEQ ID NO: 2666360 - RNA, 19 nt, Homo sapiens
  misc_RNA (1)...(19): siRNA sense strand
cuaugaaauguuugcagaa

SEQ ID NO: 2666361 - RNA, 19 nt, Homo sapiens
  misc_RNA (1)...(19): siRNA sense strand
cgagcuaagcgaagaaaau

SEQ ID NO: 2666362 - RNA, 19 nt, Homo sapiens
  misc_RNA (1)...(19): siRNA sense strand
guaugagaauguugagaac

SEQ ID NO: 2666363 - RNA, 19 nt, Homo sapiens
  misc_RNA (1)...(19): siRNA sense strand
gcgauuacuaugcaagcua

SEQ ID NO: 2666364 - RNA, 19 nt, Homo sapiens
  misc_RNA (1)...(19): siRNA sense strand
ccaagaaagaaacgaagga

SEQ ID NO: 2666365 - RNA, 19 nt, Homo sapiens
  misc_RNA (1)...(19): siRNA sense strand
ugccagaugacaagaacaa

SEQ ID NO: 2666366 - RNA, 19 nt, Homo sapiens
  misc_RNA (1)...(19): siRNA sense strand
ugacaagaacaaaucgauu

SEQ ID NO: 2666367 - RNA, 19 nt, Homo sapiens
  misc_RNA (1)...(19): siRNA sense strand
cagaaaaugaggagaaucu

SEQ ID NO: 2666368 - RNA, 19 nt, Homo sapiens
  misc_RNA (1)...(19): siRNA sense strand
uguccaacuugaacaacaa

SEQ ID NO: 2666369 - RNA, 19 nt, Homo sapiens
  misc_RNA (1)...(19): siRNA sense strand
cgaagaaaauuuugaugga

SEQ ID NO: 2666370 - RNA, 19 nt, Homo sapiens
  misc_RNA (1)...(19): siRNA sense strand
ggggagagacagaaaauga

SEQ ID NO: 2666371 - RNA, 19 nt, Homo sapiens
  misc_RNA (1)...(19): siRNA sense strand
gcgcuuuaugugugugcaa

SEQ ID NO: 2666372 - RNA, 19 nt, Homo sapiens
  misc_RNA (1)...(19): siRNA sense strand
ugucaaauccagaaagucu

SEQ ID NO: 2666373 - RNA, 19 nt, Homo sapiens
  misc_RNA (1)...(19): siRNA sense strand
agaacaaagcuaugaaaug

SEQ ID NO: 2666374 - RNA, 19 nt, Homo sapiens
  misc_RNA (1)...(19): siRNA sense strand
agagagaccgagagguuca

SEQ ID NO: 2666375 - RNA, 19 nt, Homo sapiens
  misc_RNA (1)...(19): siRNA sense strand
cuuauuugccagaugacaa

SEQ ID NO: 2666376 - RNA, 19 nt, Homo sapiens
  misc_RNA (1)...(19): siRNA sense strand
ggaggauuggccagaggaa

SEQ ID NO: 2666377 - RNA, 19 nt, Homo sapiens
  misc_RNA (1)...(19): siRNA sense strand
aguaugagaauguugagaa

SEQ ID NO: 2666378 - RNA, 19 nt, Homo sapiens
  misc_RNA (1)...(19): siRNA sense strand
ccaaaaugggagaggagga

SEQ ID NO: 2666379 - RNA, 19 nt, Homo sapiens
  misc_RNA (1)...(19): siRNA sense strand
ccucaguccucuagcgugu

SEQ ID NO: 2666380 - RNA, 19 nt, Homo sapiens
  misc_RNA (1)...(19): siRNA sense strand
aagagaagccagaagagga

SEQ ID NO: 2666381 - RNA, 19 nt, Homo sapiens
  misc_RNA (1)...(19): siRNA sense strand
gaaccuaagaagggugaau

SEQ ID NO: 2666382 - RNA, 19 nt, Homo sapiens
  misc_RNA (1)...(19): siRNA sense strand
agacgggacuggcagggaa

SEQ ID NO: 2666383 - RNA, 19 nt, Homo sapiens
  misc_RNA (1)...(19): siRNA sense strand
gugaagugagccagcauuu

SEQ ID NO: 2666384 - RNA, 19 nt, Homo sapiens
  misc_RNA (1)...(19): siRNA sense strand
uuggaaaacccgaggauga

SEQ ID NO: 2666385 - RNA, 19 nt, Homo sapiens
  misc_RNA (1)...(19): siRNA sense strand
ucagcaagaaguuggaaaa

SEQ ID NO: 2666386 - RNA, 19 nt, Homo sapiens
  misc_RNA (1)...(19): siRNA sense strand
ggugugaugcagaguauga

SEQ ID NO: 2666387 - RNA, 19 nt, Homo sapiens
  misc_RNA (1)...(19): siRNA sense strand
cccauaagguggaugucau

SEQ ID NO: 2666388 - RNA, 19 nt, Homo sapiens
  misc_RNA (1)...(19): siRNA sense strand
cuuaauugacaaagagucu

SEQ ID NO: 2666389 - RNA, 19 nt, Homo sapiens
  misc_RNA (1)...(19): siRNA sense strand
cagccugaucacagcuaua

SEQ ID NO: 2666390 - RNA, 19 nt, Homo sapiens
  misc_RNA (1)...(19): siRNA sense strand
gagauggagcaguuggaca

SEQ ID NO: 2666391 - RNA, 19 nt, Homo sapiens
  misc_RNA (1)...(19): siRNA sense strand
cagaagaggagaagaaagc

SEQ ID NO: 2666392 - RNA, 19 nt, Homo sapiens
  misc_RNA (1)...(19): siRNA sense strand
ccacaagguucuggugcuu

SEQ ID NO: 2666393 - RNA, 19 nt, Homo sapiens
  misc_RNA (1)...(19): siRNA sense strand
uggagcagucagagcgauu

SEQ ID NO: 2666394 - RNA, 19 nt, Homo sapiens
  misc_RNA (1)...(19): siRNA sense strand
ccauaagguggaugucauu

SEQ ID NO: 2666395 - RNA, 19 nt, Homo sapiens
  misc_RNA (1)...(19): siRNA sense strand
aggaggcgccuguuggaaa

SEQ ID NO: 2666396 - RNA, 19 nt, Homo sapiens
  misc_RNA (1)...(19): siRNA sense strand
ccaaaguaauuuuccacaa

SEQ ID NO: 2666397 - RNA, 19 nt, Homo sapiens
  misc_RNA (1)...(19): siRNA sense strand
cugcuaauuugcugguuca

SEQ ID NO: 2666398 - RNA, 19 nt, Homo sapiens
  misc_RNA (1)...(19): siRNA sense strand
aggcaaaccauuccaguca

SEQ ID NO: 2666399 - RNA, 19 nt, Homo sapiens
  misc_RNA (1)...(19): siRNA sense strand
aagaaacgaaggaaccuaa

SEQ ID NO: 2666400 - RNA, 19 nt, Homo sapiens
  misc_RNA (1)...(19): siRNA sense strand
auccaggagugaagaauga

SEQ ID NO: 2666401 - RNA, 19 nt, Homo sapiens
  misc_RNA (1)...(19): siRNA sense strand
gggaaggggaggagacaca

SEQ ID NO: 2666402 - RNA, 19 nt, Homo sapiens
  misc_RNA (1)...(19): siRNA sense strand
ggacacaagcccagacgca

SEQ ID NO: 2666403 - RNA, 19 nt, Homo sapiens
  misc_RNA (1)...(19): siRNA sense strand
uggaacccaccgagggaaa

SEQ ID NO: 2666404 - RNA, 19 nt, Homo sapiens
  misc_RNA (1)...(19): siRNA sense strand
agaccauaccacugagaca

SEQ ID NO: 2666405 - RNA, 19 nt, Homo sapiens
  misc_RNA (1)...(19): siRNA sense strand
cuuauuauuuacagagcca

SEQ ID NO: 2666406 - RNA, 19 nt, Homo sapiens
  misc_RNA (1)...(19): siRNA sense strand
gggugguguuugaggcagu

SEQ ID NO: 2666407 - RNA, 19 nt, Homo sapiens
  misc_RNA (1)...(19): siRNA sense strand
ccuguaacuuugagcggga

SEQ ID NO: 2666408 - RNA, 19 nt, Homo sapiens
  misc_RNA (1)...(19): siRNA sense strand
cgaccacaccacaggccaa

SEQ ID NO: 2666409 - RNA, 19 nt, Homo sapiens
  misc_RNA (1)...(19): siRNA sense strand
gugugugacugcagggacu

SEQ ID NO: 2666410 - RNA, 19 nt, Homo sapiens
  misc_RNA (1)...(19): siRNA sense strand
ccaccgagggaaagaggca

SEQ ID NO: 2666411 - RNA, 19 nt, Homo sapiens
  misc_RNA (1)...(19): siRNA sense strand
ccuacguggcucuggauga

SEQ ID NO: 2666412 - RNA, 19 nt, Homo sapiens
  misc_RNA (1)...(19): siRNA sense strand
gggaaggggaggagacaca

SEQ ID NO: 2666413 - RNA, 19 nt, Homo sapiens
  misc_RNA (1)...(19): siRNA sense strand
ggacacaagcccagacgca

SEQ ID NO: 2666414 - RNA, 19 nt, Homo sapiens
  misc_RNA (1)...(19): siRNA sense strand
uggaacccaccgagggaaa

SEQ ID NO: 2666415 - RNA, 19 nt, Homo sapiens
  misc_RNA (1)...(19): siRNA sense strand
agaccauaccacugagaca

SEQ ID NO: 2666416 - RNA, 19 nt, Homo sapiens
  misc_RNA (1)...(19): siRNA sense strand
cuuauuauuuacagagcca

SEQ ID NO: 2666417 - RNA, 19 nt, Homo sapiens
  misc_RNA (1)...(19): siRNA sense strand
gggugguguuugaggcagu

SEQ ID NO: 2666418 - RNA, 19 nt, Homo sapiens
  misc_RNA (1)...(19): siRNA sense strand
ccuguaacuuugagcggga

SEQ ID NO: 2666419 - RNA, 19 nt, Homo sapiens
  misc_RNA (1)...(19): siRNA sense strand
cgaccacaccacaggccaa

SEQ ID NO: 2666420 - RNA, 19 nt, Homo sapiens
  misc_RNA (1)...(19): siRNA sense strand
gugugugacugcagggacu

SEQ ID NO: 2666421 - RNA, 19 nt, Homo sapiens
  misc_RNA (1)...(19): siRNA sense strand
ccaccgagggaaagaggca

SEQ ID NO: 2666422 - RNA, 19 nt, Homo sapiens
  misc_RNA (1)...(19): siRNA sense strand
ccuacguggcucuggauga

SEQ ID NO: 2666423 - RNA, 19 nt, Homo sapiens
  misc_RNA (1)...(19): siRNA sense strand
cugcaggaggacagagcau

SEQ ID NO: 2666424 - RNA, 19 nt, Homo sapiens
  misc_RNA (1)...(19): siRNA sense strand
ugacacugggccuggcaaa

SEQ ID NO: 2666425 - RNA, 19 nt, Homo sapiens
  misc_RNA (1)...(19): siRNA sense strand
agguuauccuggagcggaa

SEQ ID NO: 2666426 - RNA, 19 nt, Homo sapiens
  misc_RNA (1)...(19): siRNA sense strand
ggaaagacaaaguugccau

SEQ ID NO: 2666427 - RNA, 19 nt, Homo sapiens
  misc_RNA (1)...(19): siRNA sense strand
acguguacuguguggacaa

SEQ ID NO: 2666428 - RNA, 19 nt, Homo sapiens
  misc_RNA (1)...(19): siRNA sense strand
aguuugagccuuugcugaa

SEQ ID NO: 2666429 - RNA, 19 nt, Homo sapiens
  misc_RNA (1)...(19): siRNA sense strand
gugguggaguacagcgaga

SEQ ID NO: 2666430 - RNA, 19 nt, Homo sapiens
  misc_RNA (1)...(19): siRNA sense strand
ccuuggaagugcugcggga

SEQ ID NO: 2666431 - RNA, 19 nt, Homo sapiens
  misc_RNA (1)...(19): siRNA sense strand
cggccgaguucuucaggga

SEQ ID NO: 2666432 - RNA, 19 nt, Homo sapiens
  misc_RNA (1)...(19): siRNA sense strand
ccuggagcggaaagacaaa

SEQ ID NO: 2666433 - RNA, 19 nt, Homo sapiens
  misc_RNA (1)...(19): siRNA sense strand
gaguggaguuugugcacgu

SEQ ID NO: 2666434 - RNA, 19 nt, Homo sapiens
  misc_RNA (1)...(19): siRNA sense strand
guuuagaaguguaccugca

SEQ ID NO: 2666435 - RNA, 19 nt, Homo sapiens
  misc_RNA (1)...(19): siRNA sense strand
gggagaucguggagaacaa

SEQ ID NO: 2666436 - RNA, 19 nt, Homo sapiens
  misc_RNA (1)...(19): siRNA sense strand
gggaguugcuggugaagaa

SEQ ID NO: 2666437 - RNA, 19 nt, Homo sapiens
  misc_RNA (1)...(19): siRNA sense strand
gugcaacgccacagggaaa

SEQ ID NO: 2666438 - RNA, 19 nt, Homo sapiens
  misc_RNA (1)...(19): siRNA sense strand
ugaaggaggugaagaccaa

SEQ ID NO: 2666439 - RNA, 19 nt, Homo sapiens
  misc_RNA (1)...(19): siRNA sense strand
uugaaugcguggugagcaa

SEQ ID NO: 2666440 - RNA, 19 nt, Homo sapiens
  misc_RNA (1)...(19): siRNA sense strand
agacagagacagugagcca

SEQ ID NO: 2666441 - RNA, 19 nt, Homo sapiens
  misc_RNA (1)...(19): siRNA sense strand
acagggagaucguggagaa

SEQ ID NO: 2666442 - RNA, 19 nt, Homo sapiens
  misc_RNA (1)...(19): siRNA sense strand
ugaagaacuuggagggcca

SEQ ID NO: 2666443 - RNA, 19 nt, Homo sapiens
  misc_RNA (1)...(19): siRNA sense strand
cgaagaaaguggugauccu

SEQ ID NO: 2666444 - RNA, 19 nt, Homo sapiens
  misc_RNA (1)...(19): siRNA sense strand
ggaacauacaccugugaau

SEQ ID NO: 2666445 - RNA, 19 nt, Homo sapiens
  misc_RNA (1)...(19): siRNA sense strand
caucacaagcccagaauga

SEQ ID NO: 2666446 - RNA, 19 nt, Homo sapiens
  misc_RNA (1)...(19): siRNA sense strand
ggacaaagauggccagccu

SEQ ID NO: 2666447 - RNA, 19 nt, Homo sapiens
  misc_RNA (1)...(19): siRNA sense strand
gggaaguggcgcugaaagu

SEQ ID NO: 2666448 - RNA, 19 nt, Homo sapiens
  misc_RNA (1)...(19): siRNA sense strand
gcagcaacgugguggggaa

SEQ ID NO: 2666449 - RNA, 19 nt, Homo sapiens
  misc_RNA (1)...(19): siRNA sense strand
guauugagaacgaggacuu

SEQ ID NO: 2666450 - RNA, 19 nt, Homo sapiens
  misc_RNA (1)...(19): siRNA sense strand
gaacaacagcagagccaca

SEQ ID NO: 2666451 - RNA, 19 nt, Homo sapiens
  misc_RNA (1)...(19): siRNA sense strand
aggccaacgugucggguau

SEQ ID NO: 2666452 - RNA, 19 nt, Homo sapiens
  misc_RNA (1)...(19): siRNA sense strand
gagaacaacagcagagcca

SEQ ID NO: 2666453 - RNA, 19 nt, Homo sapiens
  misc_RNA (1)...(19): siRNA sense strand
cugggagggcagagaggaa

SEQ ID NO: 2666454 - RNA, 19 nt, Homo sapiens
  misc_RNA (1)...(19): siRNA sense strand
gggcagagaggaaguuuga

SEQ ID NO: 2666455 - RNA, 19 nt, Homo sapiens
  misc_RNA (1)...(19): siRNA sense strand
gggauuguguggugcuuau

SEQ ID NO: 2666456 - RNA, 19 nt, Homo sapiens
  misc_RNA (1)...(19): siRNA sense strand
gggaagccguccugcagua

SEQ ID NO: 2666457 - RNA, 19 nt, Homo sapiens
  misc_RNA (1)...(19): siRNA sense strand
gugcaauugagaagagcuu

SEQ ID NO: 2666458 - RNA, 19 nt, Homo sapiens
  misc_RNA (1)...(19): siRNA sense strand
guguggugcuuaugggaga

SEQ ID NO: 2666459 - RNA, 19 nt, Homo sapiens
  misc_RNA (1)...(19): siRNA sense strand
ccgcaaggacuucguggua

SEQ ID NO: 2666460 - RNA, 19 nt, Homo sapiens
  misc_RNA (1)...(19): siRNA sense strand
cgguauggccuacggguca

SEQ ID NO: 2666461 - RNA, 19 nt, Homo sapiens
  misc_RNA (1)...(19): siRNA sense strand
guggagaaugugcagguua

SEQ ID NO: 2666462 - RNA, 19 nt, Homo sapiens
  misc_RNA (1)...(19): siRNA sense strand
acuuggaggaggugaucaa

SEQ ID NO: 2666463 - RNA, 19 nt, Homo sapiens
  misc_RNA (1)...(19): siRNA sense strand
gcauugugcugcaggagga

SEQ ID NO: 2666464 - RNA, 19 nt, Homo sapiens
  misc_RNA (1)...(19): siRNA sense strand
caacaucaccugggacaaa

SEQ ID NO: 2666465 - RNA, 19 nt, Homo sapiens
  misc_RNA (1)...(19): siRNA sense strand
gggagaagaccaaacacuu

SEQ ID NO: 2666466 - RNA, 19 nt, Homo sapiens
  misc_RNA (1)...(19): siRNA sense strand
gcgaggacgaccaggacuu

SEQ ID NO: 2666467 - RNA, 19 nt, Homo sapiens
  misc_RNA (1)...(19): siRNA sense strand
ggagaagagcugaaugugu

SEQ ID NO: 2666468 - RNA, 19 nt, Homo sapiens
  misc_RNA (1)...(19): siRNA sense strand
agaggaugcuggaaacuau

SEQ ID NO: 2666469 - RNA, 19 nt, Homo sapiens
  misc_RNA (1)...(19): siRNA sense strand
ccaggauccaggaggguga

SEQ ID NO: 2666470 - RNA, 19 nt, Homo sapiens
  misc_RNA (1)...(19): siRNA sense strand
gguuugaaauucugccuga

SEQ ID NO: 2666471 - RNA, 19 nt, Homo sapiens
  misc_RNA (1)...(19): siRNA sense strand
agaugggcguggcgaagaa

SEQ ID NO: 2666472 - RNA, 19 nt, Homo sapiens
  misc_RNA (1)...(19): siRNA sense strand
cguuguggccaaugaguca

SEQ ID NO: 2666473 - RNA, 19 nt, Homo sapiens
  misc_RNA (1)...(19): siRNA sense strand
agaacgaggacuuggagga

SEQ ID NO: 2666474 - RNA, 19 nt, Homo sapiens
  misc_RNA (1)...(19): siRNA sense strand
cagaauggcucgcugacca

SEQ ID NO: 2666475 - RNA, 19 nt, Homo sapiens
  misc_RNA (1)...(19): siRNA sense strand
ggccacacccucaggauuu

SEQ ID NO: 2666476 - RNA, 19 nt, Homo sapiens
  misc_RNA (1)...(19): siRNA sense strand
agagggaaguggcgcugaa

SEQ ID NO: 2666477 - RNA, 19 nt, Homo sapiens
  misc_RNA (1)...(19): siRNA sense strand
ggggagagcaagagggaag

SEQ ID NO: 2666478 - RNA, 19 nt, Homo sapiens
  misc_RNA (1)...(19): siRNA sense strand
ccauggagcuccucuguga

SEQ ID NO: 2666479 - RNA, 19 nt, Homo sapiens
  misc_RNA (1)...(19): siRNA sense strand
acucagagaaacacuacaa

SEQ ID NO: 2666480 - RNA, 19 nt, Homo sapiens
  misc_RNA (1)...(19): siRNA sense strand
cagagaaacacuacaaucu

SEQ ID NO: 2666481 - RNA, 19 nt, Homo sapiens
  misc_RNA (1)...(19): siRNA sense strand
gagaaacacuacaaucuga

SEQ ID NO: 2666482 - RNA, 19 nt, Homo sapiens
  misc_RNA (1)...(19): siRNA sense strand
cguuugaggccuccaggaa

SEQ ID NO: 2666483 - RNA, 19 nt, Homo sapiens
  misc_RNA (1)...(19): siRNA sense strand
ggaagaugcuggccaguac

SEQ ID NO: 2666484 - RNA, 19 nt, Homo sapiens
  misc_RNA (1)...(19): siRNA sense strand
cggaauacagggagaucgu

SEQ ID NO: 2666485 - RNA, 19 nt, Homo sapiens
  misc_RNA (1)...(19): siRNA sense strand
cagugaacgucucagugaa

SEQ ID NO: 2666486 - RNA, 19 nt, Homo sapiens
  misc_RNA (1)...(19): siRNA sense strand
ccaaacaucaccugguuca

SEQ ID NO: 2666487 - RNA, 19 nt, Homo sapiens
  misc_RNA (1)...(19): siRNA sense strand
gcagguggcuggaugcuga

SEQ ID NO: 2666488 - RNA, 19 nt, Homo sapiens
  misc_RNA (1)...(19): siRNA sense strand
ugaagaugacucagacaca

SEQ ID NO: 2666489 - RNA, 19 nt, Homo sapiens
  misc_RNA (1)...(19): siRNA sense strand
ggggaagccaggaggcauu

SEQ ID NO: 2666490 - RNA, 19 nt, Homo sapiens
  misc_RNA (1)...(19): siRNA sense strand
uggcgaagaaaguggugau

SEQ ID NO: 2666491 - RNA, 19 nt, Homo sapiens
  misc_RNA (1)...(19): siRNA sense strand
acaaggcagugcuggaaaa

SEQ ID NO: 2666492 - RNA, 19 nt, Homo sapiens
  misc_RNA (1)...(19): siRNA sense strand
gcgugaaggaggugaagac

SEQ ID NO: 2666493 - RNA, 19 nt, Homo sapiens
  misc_RNA (1)...(19): siRNA sense strand
gaucaaagauggccuucca

SEQ ID NO: 2666494 - RNA, 19 nt, Homo sapiens
  misc_RNA (1)...(19): siRNA sense strand
caucuuaugugcaacguca

SEQ ID NO: 2666495 - RNA, 19 nt, Homo sapiens
  misc_RNA (1)...(19): siRNA sense strand
gaaguggcgcugaaaguuu

SEQ ID NO: 2666496 - RNA, 19 nt, Homo sapiens
  misc_RNA (1)...(19): siRNA sense strand
ccugaugucuccugguuca

SEQ ID NO: 2666497 - RNA, 19 nt, Homo sapiens
  misc_RNA (1)...(19): siRNA sense strand
ccaccucuccgcagacaaa

SEQ ID NO: 2666498 - RNA, 19 nt, Homo sapiens
  misc_RNA (1)...(19): siRNA sense strand
gugaaggaggugaagacca

SEQ ID NO: 2666499 - RNA, 19 nt, Homo sapiens
  misc_RNA (1)...(19): siRNA sense strand
cugagaacacccaggcuga

SEQ ID NO: 2666500 - RNA, 19 nt, Homo sapiens
  misc_RNA (1)...(19): siRNA sense strand
gagaagacagcgggaccua

SEQ ID NO: 2666501 - RNA, 19 nt, Homo sapiens
  misc_RNA (1)...(19): siRNA sense strand
cucaggaggugcuaggauu

SEQ ID NO: 2666502 - RNA, 19 nt, Homo sapiens
  misc_RNA (1)...(19): siRNA sense strand
gcggcucccuggugcuaaa

SEQ ID NO: 2666503 - RNA, 19 nt, Homo sapiens
  misc_RNA (1)...(19): siRNA sense strand
ccugagaucguguggcuga

SEQ ID NO: 2666504 - RNA, 19 nt, Homo sapiens
  misc_RNA (1)...(19): siRNA sense strand
ggaccacacugcacauuga

SEQ ID NO: 2666505 - RNA, 19 nt, Homo sapiens
  misc_RNA (1)...(19): siRNA sense strand
gagaagagcugaauguguc

SEQ ID NO: 2666506 - RNA, 19 nt, Homo sapiens
  misc_RNA (1)...(19): siRNA sense strand
gcgaggacuggcugcacua

SEQ ID NO: 2666507 - RNA, 19 nt, Homo sapiens
  misc_RNA (1)...(19): siRNA sense strand
cccaacaucaccuggcaua

SEQ ID NO: 2666508 - RNA, 19 nt, Homo sapiens
  misc_RNA (1)...(19): siRNA sense strand
guggaguggaccaaggaca

SEQ ID NO: 2666509 - RNA, 19 nt, Homo sapiens
  misc_RNA (1)...(19): siRNA sense strand
agucgcggcuggagacaga

SEQ ID NO: 2666510 - RNA, 19 nt, Homo sapiens
  misc_RNA (1)...(19): siRNA sense strand
ggacagugcagaugaggag

SEQ ID NO: 2666511 - RNA, 19 nt, Homo sapiens
  misc_RNA (1)...(19): siRNA sense strand
gaggauaagaggaaggcaa

SEQ ID NO: 2666512 - RNA, 19 nt, Homo sapiens
  misc_RNA (1)...(19): siRNA sense strand
cgauaaaggacguggugca

SEQ ID NO: 2666513 - RNA, 19 nt, Homo sapiens
  misc_RNA (1)...(19): siRNA sense strand
aggauaagaggaaggcaaa

SEQ ID NO: 2666514 - RNA, 19 nt, Homo sapiens
  misc_RNA (1)...(19): siRNA sense strand
agacaauggaggagaagca

SEQ ID NO: 2666515 - RNA, 19 nt, Homo sapiens
  misc_RNA (1)...(19): siRNA sense strand
gggugaaccugguggugga

SEQ ID NO: 2666516 - RNA, 19 nt, Homo sapiens
  misc_RNA (1)...(19): siRNA sense strand
agaggaaggcaaagaaaau

SEQ ID NO: 2666517 - RNA, 19 nt, Homo sapiens
  misc_RNA (1)...(19): siRNA sense strand
gaauaacgauaaaggacgu

SEQ ID NO: 2666518 - RNA, 19 nt, Homo sapiens
  misc_RNA (1)...(19): siRNA sense strand
cggaggugguggagaacgu

SEQ ID NO: 2666519 - RNA, 19 nt, Homo sapiens
  misc_RNA (1)...(19): siRNA sense strand
accuggugguggaggaaau

SEQ ID NO: 2666520 - RNA, 19 nt, Homo sapiens
  misc_RNA (1)...(19): siRNA sense strand
ccuugaugcuccagaucga

SEQ ID NO: 2666521 - RNA, 19 nt, Homo sapiens
  misc_RNA (1)...(19): siRNA sense strand
gugauaaagcagguggaau

SEQ ID NO: 2666522 - RNA, 19 nt, Homo sapiens
  misc_RNA (1)...(19): siRNA sense strand
ugguggagaacgugggcau

SEQ ID NO: 2666523 - RNA, 19 nt, Homo sapiens
  misc_RNA (1)...(19): siRNA sense strand
agucagagucacugucaga

SEQ ID NO: 2666524 - RNA, 19 nt, Homo sapiens
  misc_RNA (1)...(19): siRNA sense strand
aaugacagacaaagccaaa

SEQ ID NO: 2666525 - RNA, 19 nt, Homo sapiens
  misc_RNA (1)...(19): siRNA sense strand
aggaagaccccuuucguaa

SEQ ID NO: 2666526 - RNA, 19 nt, Homo sapiens
  misc_RNA (1)...(19): siRNA sense strand
aaauggaaaccaaagucaa

SEQ ID NO: 2666527 - RNA, 19 nt, Homo sapiens
  misc_RNA (1)...(19): siRNA sense strand
ugugcuaaugacagacaaa

SEQ ID NO: 2666528 - RNA, 19 nt, Homo sapiens
  misc_RNA (1)...(19): siRNA sense strand
uuuuagaggucaugcagaa

SEQ ID NO: 2666529 - RNA, 19 nt, Homo sapiens
  misc_RNA (1)...(19): siRNA sense strand
uggaaugcauggaugacca

SEQ ID NO: 2666530 - RNA, 19 nt, Homo sapiens
  misc_RNA (1)...(19): siRNA sense strand
ccaggaggucauugaggau

SEQ ID NO: 2666531 - RNA, 19 nt, Homo sapiens
  misc_RNA (1)...(19): siRNA sense strand
aggccguccugaagacaau

SEQ ID NO: 2666532 - RNA, 19 nt, Homo sapiens
  misc_RNA (1)...(19): siRNA sense strand
acaugcuguuagaaggcaa

SEQ ID NO: 2666533 - RNA, 19 nt, Homo sapiens
  misc_RNA (1)...(19): siRNA sense strand
aagaggaaggcaaagaaaa

SEQ ID NO: 2666534 - RNA, 19 nt, Homo sapiens
  misc_RNA (1)...(19): siRNA sense strand
ccguggauuuccugggcaa

SEQ ID NO: 2666535 - RNA, 19 nt, Homo sapiens
  misc_RNA (1)...(19): siRNA sense strand
agguggagcaaguuggcaa

SEQ ID NO: 2666536 - RNA, 19 nt, Homo sapiens
  misc_RNA (1)...(19): siRNA sense strand
gguggagcaaguuggcaaa

SEQ ID NO: 2666537 - RNA, 19 nt, Homo sapiens
  misc_RNA (1)...(19): siRNA sense strand
agacagaggucggugcuga

SEQ ID NO: 2666538 - RNA, 19 nt, Homo sapiens
  misc_RNA (1)...(19): siRNA sense strand
gcaccuaucuagagagcaa

SEQ ID NO: 2666539 - RNA, 19 nt, Homo sapiens
  misc_RNA (1)...(19): siRNA sense strand
guuuagagucucagggauu

SEQ ID NO: 2666540 - RNA, 19 nt, Homo sapiens
  misc_RNA (1)...(19): siRNA sense strand
cagccgaccuaguguguua

SEQ ID NO: 2666541 - RNA, 19 nt, Homo sapiens
  misc_RNA (1)...(19): siRNA sense strand
ccuaauaaccaaaggaaac

SEQ ID NO: 2666542 - RNA, 19 nt, Homo sapiens
  misc_RNA (1)...(19): siRNA sense strand
ugauaagcuuggacagaau

SEQ ID NO: 2666543 - RNA, 19 nt, Homo sapiens
  misc_RNA (1)...(19): siRNA sense strand
ccgaauaugcccuguggaa

SEQ ID NO: 2666544 - RNA, 19 nt, Homo sapiens
  misc_RNA (1)...(19): siRNA sense strand
gcugaauggaggccagaua

SEQ ID NO: 2666545 - RNA, 19 nt, Homo sapiens
  misc_RNA (1)...(19): siRNA sense strand
gcauaagcccagucgagaa

SEQ ID NO: 2666546 - RNA, 19 nt, Homo sapiens
  misc_RNA (1)...(19): siRNA sense strand
ggacaaugccuuugcucau

SEQ ID NO: 2666547 - RNA, 19 nt, Homo sapiens
  misc_RNA (1)...(19): siRNA sense strand
acaucagagacauggaaua

SEQ ID NO: 2666548 - RNA, 19 nt, Homo sapiens
  misc_RNA (1)...(19): siRNA sense strand
augaaguacuggaagaaga

SEQ ID NO: 2666549 - RNA, 19 nt, Homo sapiens
  misc_RNA (1)...(19): siRNA sense strand
caguucaagugguggauuu

SEQ ID NO: 2666550 - RNA, 19 nt, Homo sapiens
  misc_RNA (1)...(19): siRNA sense strand
agauggagguuuagagucu

SEQ ID NO: 2666551 - RNA, 19 nt, Homo sapiens
  misc_RNA (1)...(19): siRNA sense strand
cuagagagcaauuggccua

SEQ ID NO: 2666552 - RNA, 19 nt, Homo sapiens
  misc_RNA (1)...(19): siRNA sense strand
cccuaauaaccaaaggaaa

SEQ ID NO: 2666553 - RNA, 19 nt, Homo sapiens
  misc_RNA (1)...(19): siRNA sense strand
ggcuaucaccuauggguaa

SEQ ID NO: 2666554 - RNA, 19 nt, Homo sapiens
  misc_RNA (1)...(19): siRNA sense strand
cggaacguguguagcagua

SEQ ID NO: 2666555 - RNA, 19 nt, Homo sapiens
  misc_RNA (1)...(19): siRNA sense strand
uuagaagaugugagguuaa

SEQ ID NO: 2666556 - RNA, 19 nt, Homo sapiens
  misc_RNA (1)...(19): siRNA sense strand
gaacguguguagcaguaaa

SEQ ID NO: 2666557 - RNA, 19 nt, Homo sapiens
  misc_RNA (1)...(19): siRNA sense strand
caaauaaacagaaacguca

SEQ ID NO: 2666558 - RNA, 19 nt, Homo sapiens
  misc_RNA (1)...(19): siRNA sense strand
guaauagugaccugggaau

SEQ ID NO: 2666559 - RNA, 19 nt, Homo sapiens
  misc_RNA (1)...(19): siRNA sense strand
agguguugcuucaggguga

SEQ ID NO: 2666560 - RNA, 19 nt, Homo sapiens
  misc_RNA (1)...(19): siRNA sense strand
ucgagcaaauaaacagaaa

SEQ ID NO: 2666561 - RNA, 19 nt, Homo sapiens
  misc_RNA (1)...(19): siRNA sense strand
ggacaaguaccuuuaugaa

SEQ ID NO: 2666562 - RNA, 19 nt, Homo sapiens
  misc_RNA (1)...(19): siRNA sense strand
cauaagcccagucgagaaa

SEQ ID NO: 2666563 - RNA, 19 nt, Homo sapiens
  misc_RNA (1)...(19): siRNA sense strand
cagcauuaaauuuggagau

SEQ ID NO: 2666564 - RNA, 19 nt, Homo sapiens
  misc_RNA (1)...(19): siRNA sense strand
uauccugacauuuggaaua

SEQ ID NO: 2666565 - RNA, 19 nt, Homo sapiens
  misc_RNA (1)...(19): siRNA sense strand
guguagcaguaaauaacaa

SEQ ID NO: 2666566 - RNA, 19 nt, Homo sapiens
  misc_RNA (1)...(19): siRNA sense strand
auuugcagauggagguuua

SEQ ID NO: 2666567 - RNA, 19 nt, Homo sapiens
  misc_RNA (1)...(19): siRNA sense strand
gagaacagcuggaggugcu

SEQ ID NO: 2666568 - RNA, 19 nt, Homo sapiens
  misc_RNA (1)...(19): siRNA sense strand
guuugauggcucaggauuu

SEQ ID NO: 2666569 - RNA, 19 nt, Homo sapiens
  misc_RNA (1)...(19): siRNA sense strand
gcauuaaauuuggagauga

SEQ ID NO: 2666570 - RNA, 19 nt, Homo sapiens
  misc_RNA (1)...(19): siRNA sense strand
uaaauuuggagaugaggaa

SEQ ID NO: 2666571 - RNA, 19 nt, Homo sapiens
  misc_RNA (1)...(19): siRNA sense strand
cguguguagcaguaaauaa

SEQ ID NO: 2666572 - RNA, 19 nt, Homo sapiens
  misc_RNA (1)...(19): siRNA sense strand
ugaaguacuggaagaagaa

SEQ ID NO: 2666573 - RNA, 19 nt, Homo sapiens
  misc_RNA (1)...(19): siRNA sense strand
ccagcugggcuuugaacua

SEQ ID NO: 2666574 - RNA, 19 nt, Homo sapiens
  misc_RNA (1)...(19): siRNA sense strand
ggugcagggaugaaaguuu

SEQ ID NO: 2666575 - RNA, 19 nt, Homo sapiens
  misc_RNA (1)...(19): siRNA sense strand
ccuaguguguuaauuguaa

SEQ ID NO: 2666576 - RNA, 19 nt, Homo sapiens
  misc_RNA (1)...(19): siRNA sense strand
gagaaggacaguaacccua

SEQ ID NO: 2666577 - RNA, 19 nt, Homo sapiens
  misc_RNA (1)...(19): siRNA sense strand
acaaauggaaggaaagcca

SEQ ID NO: 2666578 - RNA, 19 nt, Homo sapiens
  misc_RNA (1)...(19): siRNA sense strand
gagcaaaauaugaucguga

SEQ ID NO: 2666579 - RNA, 19 nt, Homo sapiens
  misc_RNA (1)...(19): siRNA sense strand
agaguauacuugcgaacau

SEQ ID NO: 2666580 - RNA, 19 nt, Homo sapiens
  misc_RNA (1)...(19): siRNA sense strand
cggaacaaugcuagagaac

SEQ ID NO: 2666581 - RNA, 19 nt, Homo sapiens
  misc_RNA (1)...(19): siRNA sense strand
ccaugaaguacuggaagaa

SEQ ID NO: 2666582 - RNA, 19 nt, Homo sapiens
  misc_RNA (1)...(19): siRNA sense strand
aaacauuacccaggagcaa

SEQ ID NO: 2666583 - RNA, 19 nt, Homo sapiens
  misc_RNA (1)...(19): siRNA sense strand
aagcacaagcagaaacauu

SEQ ID NO: 2666584 - RNA, 19 nt, Homo sapiens
  misc_RNA (1)...(19): siRNA sense strand
cuguuaaauugaugagaug

SEQ ID NO: 2666585 - RNA, 19 nt, Homo sapiens
  misc_RNA (1)...(19): siRNA sense strand
gaacaaggcaagugggacc

SEQ ID NO: 2666586 - RNA, 19 nt, Homo sapiens
  misc_RNA (1)...(19): siRNA sense strand
uaauagugaccugggaaua

SEQ ID NO: 2666587 - RNA, 19 nt, Homo sapiens
  misc_RNA (1)...(19): siRNA sense strand
cggcaaauggauacaucuu

SEQ ID NO: 2666588 - RNA, 19 nt, Homo sapiens
  misc_RNA (1)...(19): siRNA sense strand
cuucaugucacuuguacaa

SEQ ID NO: 2666589 - RNA, 19 nt, Homo sapiens
  misc_RNA (1)...(19): siRNA sense strand
caaaggaaguccacaaaug

SEQ ID NO: 2666590 - RNA, 19 nt, Homo sapiens
  misc_RNA (1)...(19): siRNA sense strand
caauuggccuauacgguuu

SEQ ID NO: 2666591 - RNA, 19 nt, Homo sapiens
  misc_RNA (1)...(19): siRNA sense strand
ccugaagagacuccacaaa

SEQ ID NO: 2666592 - RNA, 19 nt, Homo sapiens
  misc_RNA (1)...(19): siRNA sense strand
cauuaaauuuggagaugag

SEQ ID NO: 2666593 - RNA, 19 nt, Homo sapiens
  misc_RNA (1)...(19): siRNA sense strand
aauuuggagaugaggaaaa

SEQ ID NO: 2666594 - RNA, 19 nt, Homo sapiens
  misc_RNA (1)...(19): siRNA sense strand
ucucagggauuaagcacuu

SEQ ID NO: 2666595 - RNA, 19 nt, Homo sapiens
  misc_RNA (1)...(19): siRNA sense strand
gcaaauaaacagaaacguc

SEQ ID NO: 2666596 - RNA, 19 nt, Homo sapiens
  misc_RNA (1)...(19): siRNA sense strand
uguaauagcccugaagaga

SEQ ID NO: 2666597 - RNA, 19 nt, Homo sapiens
  misc_RNA (1)...(19): siRNA sense strand
uuggaaacccuaaggacuu

SEQ ID NO: 2666598 - RNA, 19 nt, Homo sapiens
  misc_RNA (1)...(19): siRNA sense strand
gaaggaaugacaaauggaa

SEQ ID NO: 2666599 - RNA, 19 nt, Homo sapiens
  misc_RNA (1)...(19): siRNA sense strand
ccagugucaaguagauuua

SEQ ID NO: 2666600 - RNA, 19 nt, Homo sapiens
  misc_RNA (1)...(19): siRNA sense strand
gguuuagagucucagggau

SEQ ID NO: 2666601 - RNA, 19 nt, Homo sapiens
  misc_RNA (1)...(19): siRNA sense strand
cagcacuagaacaaggcaa

SEQ ID NO: 2666602 - RNA, 19 nt, Homo sapiens
  misc_RNA (1)...(19): siRNA sense strand
gugacugugcugagaacau

SEQ ID NO: 2666603 - RNA, 19 nt, Homo sapiens
  misc_RNA (1)...(19): siRNA sense strand
ccuuuaugaaccaguguau

SEQ ID NO: 2666604 - RNA, 19 nt, Homo sapiens
  misc_RNA (1)...(19): siRNA sense strand
cuuuaauggugcugaggaa

SEQ ID NO: 2666605 - RNA, 19 nt, Homo sapiens
  misc_RNA (1)...(19): siRNA sense strand
cagcauaugacuagaacau

SEQ ID NO: 2666606 - RNA, 19 nt, Homo sapiens
  misc_RNA (1)...(19): siRNA sense strand
gaauauggaucaauggguu

SEQ ID NO: 2666607 - RNA, 19 nt, Homo sapiens
  misc_RNA (1)...(19): siRNA sense strand
gcauggugcccaaggaaaa

SEQ ID NO: 2666608 - RNA, 19 nt, Homo sapiens
  misc_RNA (1)...(19): siRNA sense strand
cugcuaauccgaagccaaa

SEQ ID NO: 2666609 - RNA, 19 nt, Homo sapiens
  misc_RNA (1)...(19): siRNA sense strand
cuggaugcucugaaggaaa

SEQ ID NO: 2666610 - RNA, 19 nt, Homo sapiens
  misc_RNA (1)...(19): siRNA sense strand
agucacaaguaaaggagga

SEQ ID NO: 2666611 - RNA, 19 nt, Homo sapiens
  misc_RNA (1)...(19): siRNA sense strand
cuaaguaucgacauggaaa

SEQ ID NO: 2666612 - RNA, 19 nt, Homo sapiens
  misc_RNA (1)...(19): siRNA sense strand
aguagagcgucgagaggga

SEQ ID NO: 2666613 - RNA, 19 nt, Homo sapiens
  misc_RNA (1)...(19): siRNA sense strand
aaguaaaggaggagacuac

SEQ ID NO: 2666614 - RNA, 19 nt, Homo sapiens
  misc_RNA (1)...(19): siRNA sense strand
agcagguguaggagggaaa

SEQ ID NO: 2666615 - RNA, 19 nt, Homo sapiens
  misc_RNA (1)...(19): siRNA sense strand
ccuagaggcagcaggugua

SEQ ID NO: 2666616 - RNA, 19 nt, Homo sapiens
  misc_RNA (1)...(19): siRNA sense strand
ggguuugauuauacuggaa

SEQ ID NO: 2666617 - RNA, 19 nt, Homo sapiens
  misc_RNA (1)...(19): siRNA sense strand
agugcagguuucagaagaa

SEQ ID NO: 2666618 - RNA, 19 nt, Homo sapiens
  misc_RNA (1)...(19): siRNA sense strand
aggaauagacuuagcuuuu

SEQ ID NO: 2666619 - RNA, 19 nt, Homo sapiens
  misc_RNA (1)...(19): siRNA sense strand
guaacuacaagaaggacuu

SEQ ID NO: 2666620 - RNA, 19 nt, Homo sapiens
  misc_RNA (1)...(19): siRNA sense strand
gcuccaagccagggauuau

SEQ ID NO: 2666621 - RNA, 19 nt, Homo sapiens
  misc_RNA (1)...(19): siRNA sense strand
guucuuaagcaucuagcua

SEQ ID NO: 2666622 - RNA, 19 nt, Homo sapiens
  misc_RNA (1)...(19): siRNA sense strand
uggaaggaaaugcaguuaa

SEQ ID NO: 2666623 - RNA, 19 nt, Homo sapiens
  misc_RNA (1)...(19): siRNA sense strand
ucuuaagcaucuagcuaca

SEQ ID NO: 2666624 - RNA, 19 nt, Homo sapiens
  misc_RNA (1)...(19): siRNA sense strand
uguaggagggaaagaacuu

SEQ ID NO: 2666625 - RNA, 19 nt, Homo sapiens
  misc_RNA (1)...(19): siRNA sense strand
cggacagaauucuaacaga

SEQ ID NO: 2666626 - RNA, 19 nt, Homo sapiens
  misc_RNA (1)...(19): siRNA sense strand
gugcaaagcaacagccuuc

SEQ ID NO: 2666627 - RNA, 19 nt, Homo sapiens
  misc_RNA (1)...(19): siRNA sense strand
gguaacuacaagaaggacu

SEQ ID NO: 2666628 - RNA, 19 nt, Homo sapiens
  misc_RNA (1)...(19): siRNA sense strand
caggaauagacuuagcuuu

SEQ ID NO: 2666629 - RNA, 19 nt, Homo sapiens
  misc_RNA (1)...(19): siRNA sense strand
ccugcuaauccgaagccaa

SEQ ID NO: 2666630 - RNA, 19 nt, Homo sapiens
  misc_RNA (1)...(19): siRNA sense strand
auucauuaaccuagaggca

SEQ ID NO: 2666631 - RNA, 19 nt, Homo sapiens
  misc_RNA (1)...(19): siRNA sense strand
uuaauggugcugaggaaaa

SEQ ID NO: 2666632 - RNA, 19 nt, Homo sapiens
  misc_RNA (1)...(19): siRNA sense strand
aaucauuccuucagauacu

SEQ ID NO: 2666633 - RNA, 19 nt, Homo sapiens
  misc_RNA (1)...(19): siRNA sense strand
ggaaauagaagaaugggaa

SEQ ID NO: 2666634 - RNA, 19 nt, Homo sapiens
  misc_RNA (1)...(19): siRNA sense strand
uguuaagacuccagagcaa

SEQ ID NO: 2666635 - RNA, 19 nt, Homo sapiens
  misc_RNA (1)...(19): siRNA sense strand
gaaauagaagaaugggaaa

SEQ ID NO: 2666636 - RNA, 19 nt, Homo sapiens
  misc_RNA (1)...(19): siRNA sense strand
uagaagaaugggaaagaaa

SEQ ID NO: 2666637 - RNA, 19 nt, Homo sapiens
  misc_RNA (1)...(19): siRNA sense strand
agaaagagcaggaaaauaa

SEQ ID NO: 2666638 - RNA, 19 nt, Homo sapiens
  misc_RNA (1)...(19): siRNA sense strand
aggaaaagcaguugcaaaa

SEQ ID NO: 2666639 - RNA, 19 nt, Homo sapiens
  misc_RNA (1)...(19): siRNA sense strand
aggaagagauggaggcgau

SEQ ID NO: 2666640 - RNA, 19 nt, Homo sapiens
  misc_RNA (1)...(19): siRNA sense strand
aagcaaagcaagagcugaa

SEQ ID NO: 2666641 - RNA, 19 nt, Homo sapiens
  misc_RNA (1)...(19): siRNA sense strand
cauagauguagcagagaua

SEQ ID NO: 2666642 - RNA, 19 nt, Homo sapiens
  misc_RNA (1)...(19): siRNA sense strand
ugaaggagaucuuggaaaa

SEQ ID NO: 2666643 - RNA, 19 nt, Homo sapiens
  misc_RNA (1)...(19): siRNA sense strand
ugaugaaggugaaggagau

SEQ ID NO: 2666644 - RNA, 19 nt, Homo sapiens
  misc_RNA (1)...(19): siRNA sense strand
aggaagaaggcaaaguuaa

SEQ ID NO: 2666645 - RNA, 19 nt, Homo sapiens
  misc_RNA (1)...(19): siRNA sense strand
ggaaagaaaagaagcagaa

SEQ ID NO: 2666646 - RNA, 19 nt, Homo sapiens
  misc_RNA (1)...(19): siRNA sense strand
uggauauccuggagaaaga

SEQ ID NO: 2666647 - RNA, 19 nt, Homo sapiens
  misc_RNA (1)...(19): siRNA sense strand
gguuaugauuauuuggaga

SEQ ID NO: 2666648 - RNA, 19 nt, Homo sapiens
  misc_RNA (1)...(19): siRNA sense strand
ucaagaaagagcaggaaaa

SEQ ID NO: 2666649 - RNA, 19 nt, Homo sapiens
  misc_RNA (1)...(19): siRNA sense strand
gugaaggagaucuuggaaa

SEQ ID NO: 2666650 - RNA, 19 nt, Homo sapiens
  misc_RNA (1)...(19): siRNA sense strand
ugcaaagaauauugggaau

SEQ ID NO: 2666651 - RNA, 19 nt, Homo sapiens
  misc_RNA (1)...(19): siRNA sense strand
gguaaguguaauuagcaua

SEQ ID NO: 2666652 - RNA, 19 nt, Homo sapiens
  misc_RNA (1)...(19): siRNA sense strand
caacaaauggagauguaau

SEQ ID NO: 2666653 - RNA, 19 nt, Homo sapiens
  misc_RNA (1)...(19): siRNA sense strand
acaacaaguaguucgguaa

SEQ ID NO: 2666654 - RNA, 19 nt, Homo sapiens
  misc_RNA (1)...(19): siRNA sense strand
uggagaaauugaaguguga

SEQ ID NO: 2666655 - RNA, 19 nt, Homo sapiens
  misc_RNA (1)...(19): siRNA sense strand
ucagauaaaggaugugaaa

SEQ ID NO: 2666656 - RNA, 19 nt, Homo sapiens
  misc_RNA (1)...(19): siRNA sense strand
ggcuauaucaacugugaaa

SEQ ID NO: 2666657 - RNA, 19 nt, Homo sapiens
  misc_RNA (1)...(19): siRNA sense strand
ucuuaguccaggugaaaua

SEQ ID NO: 2666658 - RNA, 19 nt, Homo sapiens
  misc_RNA (1)...(19): siRNA sense strand
cccaaaaggagaagacaaa

SEQ ID NO: 2666659 - RNA, 19 nt, Homo sapiens
  misc_RNA (1)...(19): siRNA sense strand
cggacgaucaggaggaaga

SEQ ID NO: 2666660 - RNA, 19 nt, Homo sapiens
  misc_RNA (1)...(19): siRNA sense strand
uaguacaaguaauggagaa

SEQ ID NO: 2666661 - RNA, 19 nt, Homo sapiens
  misc_RNA (1)...(19): siRNA sense strand
aagaaaagaagcagaagaa

SEQ ID NO: 2666662 - RNA, 19 nt, Homo sapiens
  misc_RNA (1)...(19): siRNA sense strand
gcuaaaaugaucuuggaua

SEQ ID NO: 2666663 - RNA, 19 nt, Homo sapiens
  misc_RNA (1)...(19): siRNA sense strand
agaaaguacaacaguggua

SEQ ID NO: 2666664 - RNA, 19 nt, Homo sapiens
  misc_RNA (1)...(19): siRNA sense strand
aaggcaaaguuaagcacaa

SEQ ID NO: 2666665 - RNA, 19 nt, Homo sapiens
  misc_RNA (1)...(19): siRNA sense strand
cuguaaagauucaggugca

SEQ ID NO: 2666666 - RNA, 19 nt, Homo sapiens
  misc_RNA (1)...(19): siRNA sense strand
cauaaauacuccagcaucu

SEQ ID NO: 2666667 - RNA, 19 nt, Homo sapiens
  misc_RNA (1)...(19): siRNA sense strand
acaaagaguaccucggauu

SEQ ID NO: 2666668 - RNA, 19 nt, Homo sapiens
  misc_RNA (1)...(19): siRNA sense strand
ggacaaaacaaugcaaaua

SEQ ID NO: 2666669 - RNA, 19 nt, Homo sapiens
  misc_RNA (1)...(19): siRNA sense strand
cagugaucauccagaaauu

SEQ ID NO: 2666670 - RNA, 19 nt, Homo sapiens
  misc_RNA (1)...(19): siRNA sense strand
agaaauuaacugccacaaa

SEQ ID NO: 2666671 - RNA, 19 nt, Homo sapiens
  misc_RNA (1)...(19): siRNA sense strand
ccacaagaaacucaaacua

SEQ ID NO: 2666672 - RNA, 19 nt, Homo sapiens
  misc_RNA (1)...(19): siRNA sense strand
ucuccaaggaagaaggcaa

SEQ ID NO: 2666673 - RNA, 19 nt, Homo sapiens
  misc_RNA (1)...(19): siRNA sense strand
cagcugugucucagauaaa

SEQ ID NO: 2666674 - RNA, 19 nt, Homo sapiens
  misc_RNA (1)...(19): siRNA sense strand
uggacuaaacauaggucaa

SEQ ID NO: 2666675 - RNA, 19 nt, Homo sapiens
  misc_RNA (1)...(19): siRNA sense strand
aguuacaucuagaggcuau

SEQ ID NO: 2666676 - RNA, 19 nt, Homo sapiens
  misc_RNA (1)...(19): siRNA sense strand
gcugagagcaaaagaagaa

SEQ ID NO: 2666677 - RNA, 19 nt, Homo sapiens
  misc_RNA (1)...(19): siRNA sense strand
cuauaggaaaggagggcuu

SEQ ID NO: 2666678 - RNA, 19 nt, Homo sapiens
  misc_RNA (1)...(19): siRNA sense strand
cuaacuaaaaugagggcaa

SEQ ID NO: 2666679 - RNA, 19 nt, Homo sapiens
  misc_RNA (1)...(19): siRNA sense strand
ugaagaaagacuaugauga

SEQ ID NO: 2666680 - RNA, 19 nt, Homo sapiens
  misc_RNA (1)...(19): siRNA sense strand
aggcaaaguuaagcacaaa

SEQ ID NO: 2666681 - RNA, 19 nt, Homo sapiens
  misc_RNA (1)...(19): siRNA sense strand
ggaacaacuacuacaucua

SEQ ID NO: 2666682 - RNA, 19 nt, Homo sapiens
  misc_RNA (1)...(19): siRNA sense strand
agcaacaaauggagaugua

SEQ ID NO: 2666683 - RNA, 19 nt, Homo sapiens
  misc_RNA (1)...(19): siRNA sense strand
cggauuaaauuggagaaau

SEQ ID NO: 2666684 - RNA, 19 nt, Homo sapiens
  misc_RNA (1)...(19): siRNA sense strand
cugaaaacugugugcauaa

SEQ ID NO: 2666685 - RNA, 19 nt, Homo sapiens
  misc_RNA (1)...(19): siRNA sense strand
uagcauaucagcagcaaau

SEQ ID NO: 2666686 - RNA, 19 nt, Homo sapiens
  misc_RNA (1)...(19): siRNA sense strand
aaaggagggcuuauggaaa

SEQ ID NO: 2666687 - RNA, 19 nt, Homo sapiens
  misc_RNA (1)...(19): siRNA sense strand
cuugaugaacucagggaau

SEQ ID NO: 2666688 - RNA, 19 nt, Homo sapiens
  misc_RNA (1)...(19): siRNA sense strand
gggccacgugauagauaaa

SEQ ID NO: 2666689 - RNA, 19 nt, Homo sapiens
  misc_RNA (1)...(19): siRNA sense strand
uggcaauggaacugcaauu

SEQ ID NO: 2666690 - RNA, 19 nt, Homo sapiens
  misc_RNA (1)...(19): siRNA sense strand
aggucaagcaauuguaaau

SEQ ID NO: 2666691 - RNA, 19 nt, Homo sapiens
  misc_RNA (1)...(19): siRNA sense strand
uucaacaaguccagguaaa

SEQ ID NO: 2666692 - RNA, 19 nt, Homo sapiens
  misc_RNA (1)...(19): siRNA sense strand
uaacaguggccaaggcauu

SEQ ID NO: 2666693 - RNA, 19 nt, Homo sapiens
  misc_RNA (1)...(19): siRNA sense strand
gggagaaaucaguaagucu

SEQ ID NO: 2666694 - RNA, 19 nt, Homo sapiens
  misc_RNA (1)...(19): siRNA sense strand
uugagaaucuagaaaguga

SEQ ID NO: 2666695 - RNA, 19 nt, Homo sapiens
  misc_RNA (1)...(19): siRNA sense strand
cuucaagaauuaugccuau

SEQ ID NO: 2666696 - RNA, 19 nt, Homo sapiens
  misc_RNA (1)...(19): siRNA sense strand
gcaaauuccuguuacgguu

SEQ ID NO: 2666697 - RNA, 19 nt, Homo sapiens
  misc_RNA (1)...(19): siRNA sense strand
ucaacaaggcgucggucaa

SEQ ID NO: 2666698 - RNA, 19 nt, Homo sapiens
  misc_RNA (1)...(19): siRNA sense strand
ccuuauaggaccugggaag

SEQ ID NO: 2666699 - RNA, 19 nt, Homo sapiens
  misc_RNA (1)...(19): siRNA sense strand
cuccaaggaagaaggcaaa

SEQ ID NO: 2666700 - RNA, 19 nt, Homo sapiens
  misc_RNA (1)...(19): siRNA sense strand
gguuaugaggugagacaaa

SEQ ID NO: 2666701 - RNA, 19 nt, Homo sapiens
  misc_RNA (1)...(19): siRNA sense strand
ggguaaaugcugaugaaau

SEQ ID NO: 2666702 - RNA, 19 nt, Homo sapiens
  misc_RNA (1)...(19): siRNA sense strand
guauaauugcagaaggaaa

SEQ ID NO: 2666703 - RNA, 19 nt, Homo sapiens
  misc_RNA (1)...(19): siRNA sense strand
ggaugaugauucagugcua

SEQ ID NO: 2666704 - RNA, 19 nt, Homo sapiens
  misc_RNA (1)...(19): siRNA sense strand
gguaaaugcugaugaaaug

SEQ ID NO: 2666705 - RNA, 19 nt, Homo sapiens
  misc_RNA (1)...(19): siRNA sense strand
ugaaaagacaggaagaaaa

SEQ ID NO: 2666706 - RNA, 19 nt, Homo sapiens
  misc_RNA (1)...(19): siRNA sense strand
cgucagaaauagaagagca

SEQ ID NO: 2666707 - RNA, 19 nt, Homo sapiens
  misc_RNA (1)...(19): siRNA sense strand
guaucgacaugcuggauua

SEQ ID NO: 2666708 - RNA, 19 nt, Homo sapiens
  misc_RNA (1)...(19): siRNA sense strand
gauucuggcuguuaaguua

SEQ ID NO: 2666709 - RNA, 19 nt, Homo sapiens
  misc_RNA (1)...(19): siRNA sense strand
gaugaugaggacuggguaa

SEQ ID NO: 2666710 - RNA, 19 nt, Homo sapiens
  misc_RNA (1)...(19): siRNA sense strand
cuguguaaauguagaugaa

SEQ ID NO: 2666711 - RNA, 19 nt, Homo sapiens
  misc_RNA (1)...(19): siRNA sense strand
ggaggcaagcagaggaaau

SEQ ID NO: 2666712 - RNA, 19 nt, Homo sapiens
  misc_RNA (1)...(19): siRNA sense strand
gcuaaggaguuaagggaag

SEQ ID NO: 2666713 - RNA, 19 nt, Homo sapiens
  misc_RNA (1)...(19): siRNA sense strand
aaauagaagagcagguuau

SEQ ID NO: 2666714 - RNA, 19 nt, Homo sapiens
  misc_RNA (1)...(19): siRNA sense strand
cugaugaaauggaagaaga

SEQ ID NO: 2666715 - RNA, 19 nt, Homo sapiens
  misc_RNA (1)...(19): siRNA sense strand
ucuuagaugccgucagaaa

SEQ ID NO: 2666716 - RNA, 19 nt, Homo sapiens
  misc_RNA (1)...(19): siRNA sense strand
ggagagugcacuagacaga

SEQ ID NO: 2666717 - RNA, 19 nt, Homo sapiens
  misc_RNA (1)...(19): siRNA sense strand
guguaaauguagaugaagu

SEQ ID NO: 2666718 - RNA, 19 nt, Homo sapiens
  misc_RNA (1)...(19): siRNA sense strand
agauaaagaggaagcuauu

SEQ ID NO: 2666719 - RNA, 19 nt, Homo sapiens
  misc_RNA (1)...(19): siRNA sense strand
cagaggaaaucuaugaaaa

SEQ ID NO: 2666720 - RNA, 19 nt, Homo sapiens
  misc_RNA (1)...(19): siRNA sense strand
ccuuacaggaguugcuaaa

SEQ ID NO: 2666721 - RNA, 19 nt, Homo sapiens
  misc_RNA (1)...(19): siRNA sense strand
ugacaauguucgaguggca

SEQ ID NO: 2666722 - RNA, 19 nt, Homo sapiens
  misc_RNA (1)...(19): siRNA sense strand
ggaagaaaacuaugaucaa

SEQ ID NO: 2666723 - RNA, 19 nt, Homo sapiens
  misc_RNA (1)...(19): siRNA sense strand
cagacuggcuugugggcuu

SEQ ID NO: 2666724 - RNA, 19 nt, Homo sapiens
  misc_RNA (1)...(19): siRNA sense strand
uggaagaacugggaggaau

SEQ ID NO: 2666725 - RNA, 19 nt, Homo sapiens
  misc_RNA (1)...(19): siRNA sense strand
uguacuugcuaaugagaau

SEQ ID NO: 2666726 - RNA, 19 nt, Homo sapiens
  misc_RNA (1)...(19): siRNA sense strand
caguugaguuugaaguuau

SEQ ID NO: 2666727 - RNA, 19 nt, Homo sapiens
  misc_RNA (1)...(19): siRNA sense strand
uguggagacucuaggcuua

SEQ ID NO: 2666728 - RNA, 19 nt, Homo sapiens
  misc_RNA (1)...(19): siRNA sense strand
gaaauagaagagcagguua

SEQ ID NO: 2666729 - RNA, 19 nt, Homo sapiens
  misc_RNA (1)...(19): siRNA sense strand
guacuuggguccuuauuua

SEQ ID NO: 2666730 - RNA, 19 nt, Homo sapiens
  misc_RNA (1)...(19): siRNA sense strand
agaugugcucucagaaaua

SEQ ID NO: 2666731 - RNA, 19 nt, Homo sapiens
  misc_RNA (1)...(19): siRNA sense strand
ccauauuggucuugcuguu

SEQ ID NO: 2666732 - RNA, 19 nt, Homo sapiens
  misc_RNA (1)...(19): siRNA sense strand
uguggaauauacagaacaa

SEQ ID NO: 2666733 - RNA, 19 nt, Homo sapiens
  misc_RNA (1)...(19): siRNA sense strand
gugaccuaauugaaaguaa

SEQ ID NO: 2666734 - RNA, 19 nt, Homo sapiens
  misc_RNA (1)...(19): siRNA sense strand
ucagagagaugucaagauu

SEQ ID NO: 2666735 - RNA, 19 nt, Homo sapiens
  misc_RNA (1)...(19): siRNA sense strand
ggaauuugauagaugagga

SEQ ID NO: 2666736 - RNA, 19 nt, Homo sapiens
  misc_RNA (1)...(19): siRNA sense strand
gaucaagaacauccagcaa

SEQ ID NO: 2666737 - RNA, 19 nt, Homo sapiens
  misc_RNA (1)...(19): siRNA sense strand
agacacaaucagacuuaaa

SEQ ID NO: 2666738 - RNA, 19 nt, Homo sapiens
  misc_RNA (1)...(19): siRNA sense strand
gugaaaagacaggaagaaa

SEQ ID NO: 2666739 - RNA, 19 nt, Homo sapiens
  misc_RNA (1)...(19): siRNA sense strand
ugucauugcuacagagaac

SEQ ID NO: 2666740 - RNA, 19 nt, Homo sapiens
  misc_RNA (1)...(19): siRNA sense strand
augaaauggaagaagauga

SEQ ID NO: 2666741 - RNA, 19 nt, Homo sapiens
  misc_RNA (1)...(19): siRNA sense strand
gcagaggaaaucuaugaaa

SEQ ID NO: 2666742 - RNA, 19 nt, Homo sapiens
  misc_RNA (1)...(19): siRNA sense strand
ccaguguauucaagaucaa

SEQ ID NO: 2666743 - RNA, 19 nt, Homo sapiens
  misc_RNA (1)...(19): siRNA sense strand
cuaaguuggcuuuggaaca

SEQ ID NO: 2666744 - RNA, 19 nt, Homo sapiens
  misc_RNA (1)...(19): siRNA sense strand
aagauaaagaggaagcuau

SEQ ID NO: 2666745 - RNA, 19 nt, Homo sapiens
  misc_RNA (1)...(19): siRNA sense strand
uagcuaaugucgugcguca

SEQ ID NO: 2666746 - RNA, 19 nt, Homo sapiens
  misc_RNA (1)...(19): siRNA sense strand
aggaauacugaaagcaaaa

SEQ ID NO: 2666747 - RNA, 19 nt, Homo sapiens
  misc_RNA (1)...(19): siRNA sense strand
aaucaaggcuauugguacu

SEQ ID NO: 2666748 - RNA, 19 nt, Homo sapiens
  misc_RNA (1)...(19): siRNA sense strand
augaugaacacuuggaaga

SEQ ID NO: 2666749 - RNA, 19 nt, Homo sapiens
  misc_RNA (1)...(19): siRNA sense strand
aagcaaaacuugaagggca

SEQ ID NO: 2666750 - RNA, 19 nt, Homo sapiens
  misc_RNA (1)...(19): siRNA sense strand
gcggaggcaagcagaggaa

SEQ ID NO: 2666751 - RNA, 19 nt, Homo sapiens
  misc_RNA (1)...(19): siRNA sense strand
aggaugaaugugauguuua

SEQ ID NO: 2666752 - RNA, 19 nt, Homo sapiens
  misc_RNA (1)...(19): siRNA sense strand
cagguuaugaggugagaca

SEQ ID NO: 2666753 - RNA, 19 nt, Homo sapiens
  misc_RNA (1)...(19): siRNA sense strand
uuagaugccgucagaaaua

SEQ ID NO: 2666754 - RNA, 19 nt, Homo sapiens
  misc_RNA (1)...(19): siRNA sense strand
uugaggagguuuauccaaa

SEQ ID NO: 2666755 - RNA, 19 nt, Homo sapiens
  misc_RNA (1)...(19): siRNA sense strand
cuggguaaaugcugaugaa

SEQ ID NO: 2666756 - RNA, 19 nt, Homo sapiens
  misc_RNA (1)...(19): siRNA sense strand
gguuguuggaccaguguau

SEQ ID NO: 2666757 - RNA, 19 nt, Homo sapiens
  misc_RNA (1)...(19): siRNA sense strand
gaaguuauguggagacucu

SEQ ID NO: 2666758 - RNA, 19 nt, Homo sapiens
  misc_RNA (1)...(19): siRNA sense strand
ugaaauggaagaagaugau

SEQ ID NO: 2666759 - RNA, 19 nt, Homo sapiens
  misc_RNA (1)...(19): siRNA sense strand
aaaugugguucuaugggaa

SEQ ID NO: 2666760 - RNA, 19 nt, Homo sapiens
  misc_RNA (1)...(19): siRNA sense strand
cugcauuuguacuugcuaa

SEQ ID NO: 2666761 - RNA, 19 nt, Homo sapiens
  misc_RNA (1)...(19): siRNA sense strand
agguaaucagcgugugcaa

SEQ ID NO: 2666762 - RNA, 19 nt, Homo sapiens
  misc_RNA (1)...(19): siRNA sense strand
acagaugugcucucagaaa

SEQ ID NO: 2666763 - RNA, 19 nt, Homo sapiens
  misc_RNA (1)...(19): siRNA sense strand
gcaaauuccaaaaccaaaa

SEQ ID NO: 2666764 - RNA, 19 nt, Homo sapiens
  misc_RNA (1)...(19): siRNA sense strand
ugacgaugauggcuggcaa

SEQ ID NO: 2666765 - RNA, 19 nt, Homo sapiens
  misc_RNA (1)...(19): siRNA sense strand
aagaauugagacaggugaa

SEQ ID NO: 2666766 - RNA, 19 nt, Homo sapiens
  misc_RNA (1)...(19): siRNA sense strand
gugccaaacgccuagcuaa

SEQ ID NO: 2666767 - RNA, 19 nt, Homo sapiens
  misc_RNA (1)...(19): siRNA sense strand
auagugaccuugucugaaa

SEQ ID NO: 2666768 - RNA, 19 nt, Homo sapiens
  misc_RNA (1)...(19): siRNA sense strand
acacuuggacagauggcua

SEQ ID NO: 2666769 - RNA, 19 nt, Homo sapiens
  misc_RNA (1)...(19): siRNA sense strand
cauggaaaaucaagguaau

SEQ ID NO: 2666770 - RNA, 19 nt, Homo sapiens
  misc_RNA (1)...(19): siRNA sense strand
ugccaaacgccuagcuaau

SEQ ID NO: 2666771 - RNA, 19 nt, Homo sapiens
  misc_RNA (1)...(19): siRNA sense strand
caaugaugguugaucuaca

SEQ ID NO: 2666772 - RNA, 19 nt, Homo sapiens
  misc_RNA (1)...(19): siRNA sense strand
ugaugaaauggaagaagau

SEQ ID NO: 2666773 - RNA, 19 nt, Homo sapiens
  misc_RNA (1)...(19): siRNA sense strand
gguuaugaggugagacaaa

SEQ ID NO: 2666774 - RNA, 19 nt, Homo sapiens
  misc_RNA (1)...(19): siRNA sense strand
ggguaaaugcugaugaaau

SEQ ID NO: 2666775 - RNA, 19 nt, Homo sapiens
  misc_RNA (1)...(19): siRNA sense strand
guauaauugcagaaggaaa

SEQ ID NO: 2666776 - RNA, 19 nt, Homo sapiens
  misc_RNA (1)...(19): siRNA sense strand
ggaugaugauucagugcua

SEQ ID NO: 2666777 - RNA, 19 nt, Homo sapiens
  misc_RNA (1)...(19): siRNA sense strand
gguaaaugcugaugaaaug

SEQ ID NO: 2666778 - RNA, 19 nt, Homo sapiens
  misc_RNA (1)...(19): siRNA sense strand
ugaaaagacaggaagaaaa

SEQ ID NO: 2666779 - RNA, 19 nt, Homo sapiens
  misc_RNA (1)...(19): siRNA sense strand
cgucagaaauagaagagca

SEQ ID NO: 2666780 - RNA, 19 nt, Homo sapiens
  misc_RNA (1)...(19): siRNA sense strand
guaucgacaugcuggauua

SEQ ID NO: 2666781 - RNA, 19 nt, Homo sapiens
  misc_RNA (1)...(19): siRNA sense strand
gauucuggcuguuaaguua

SEQ ID NO: 2666782 - RNA, 19 nt, Homo sapiens
  misc_RNA (1)...(19): siRNA sense strand
gaugaugaggacuggguaa

SEQ ID NO: 2666783 - RNA, 19 nt, Homo sapiens
  misc_RNA (1)...(19): siRNA sense strand
cuguguaaauguagaugaa

SEQ ID NO: 2666784 - RNA, 19 nt, Homo sapiens
  misc_RNA (1)...(19): siRNA sense strand
ggaggcaagcagaggaaau

SEQ ID NO: 2666785 - RNA, 19 nt, Homo sapiens
  misc_RNA (1)...(19): siRNA sense strand
gcuaaggaguuaagggaag

SEQ ID NO: 2666786 - RNA, 19 nt, Homo sapiens
  misc_RNA (1)...(19): siRNA sense strand
aaauagaagagcagguuau

SEQ ID NO: 2666787 - RNA, 19 nt, Homo sapiens
  misc_RNA (1)...(19): siRNA sense strand
cugaugaaauggaagaaga

SEQ ID NO: 2666788 - RNA, 19 nt, Homo sapiens
  misc_RNA (1)...(19): siRNA sense strand
ucuuagaugccgucagaaa

SEQ ID NO: 2666789 - RNA, 19 nt, Homo sapiens
  misc_RNA (1)...(19): siRNA sense strand
ggagagugcacuagacaga

SEQ ID NO: 2666790 - RNA, 19 nt, Homo sapiens
  misc_RNA (1)...(19): siRNA sense strand
guguaaauguagaugaagu

SEQ ID NO: 2666791 - RNA, 19 nt, Homo sapiens
  misc_RNA (1)...(19): siRNA sense strand
agauaaagaggaagcuauu

SEQ ID NO: 2666792 - RNA, 19 nt, Homo sapiens
  misc_RNA (1)...(19): siRNA sense strand
cagaggaaaucuaugaaaa

SEQ ID NO: 2666793 - RNA, 19 nt, Homo sapiens
  misc_RNA (1)...(19): siRNA sense strand
ccuuacaggaguugcuaaa

SEQ ID NO: 2666794 - RNA, 19 nt, Homo sapiens
  misc_RNA (1)...(19): siRNA sense strand
ugacaauguucgaguggca

SEQ ID NO: 2666795 - RNA, 19 nt, Homo sapiens
  misc_RNA (1)...(19): siRNA sense strand
ggaagaaaacuaugaucaa

SEQ ID NO: 2666796 - RNA, 19 nt, Homo sapiens
  misc_RNA (1)...(19): siRNA sense strand
cagacuggcuugugggcuu

SEQ ID NO: 2666797 - RNA, 19 nt, Homo sapiens
  misc_RNA (1)...(19): siRNA sense strand
uggaagaacugggaggaau

SEQ ID NO: 2666798 - RNA, 19 nt, Homo sapiens
  misc_RNA (1)...(19): siRNA sense strand
uguacuugcuaaugagaau

SEQ ID NO: 2666799 - RNA, 19 nt, Homo sapiens
  misc_RNA (1)...(19): siRNA sense strand
caguugaguuugaaguuau

SEQ ID NO: 2666800 - RNA, 19 nt, Homo sapiens
  misc_RNA (1)...(19): siRNA sense strand
uguggagacucuaggcuua

SEQ ID NO: 2666801 - RNA, 19 nt, Homo sapiens
  misc_RNA (1)...(19): siRNA sense strand
gaaauagaagagcagguua

SEQ ID NO: 2666802 - RNA, 19 nt, Homo sapiens
  misc_RNA (1)...(19): siRNA sense strand
guacuuggguccuuauuua

SEQ ID NO: 2666803 - RNA, 19 nt, Homo sapiens
  misc_RNA (1)...(19): siRNA sense strand
agaugugcucucagaaaua

SEQ ID NO: 2666804 - RNA, 19 nt, Homo sapiens
  misc_RNA (1)...(19): siRNA sense strand
ccauauuggucuugcuguu

SEQ ID NO: 2666805 - RNA, 19 nt, Homo sapiens
  misc_RNA (1)...(19): siRNA sense strand
uguggaauauacagaacaa

SEQ ID NO: 2666806 - RNA, 19 nt, Homo sapiens
  misc_RNA (1)...(19): siRNA sense strand
gugaccuaauugaaaguaa

SEQ ID NO: 2666807 - RNA, 19 nt, Homo sapiens
  misc_RNA (1)...(19): siRNA sense strand
ucagagagaugucaagauu

SEQ ID NO: 2666808 - RNA, 19 nt, Homo sapiens
  misc_RNA (1)...(19): siRNA sense strand
ggaauuugauagaugagga

SEQ ID NO: 2666809 - RNA, 19 nt, Homo sapiens
  misc_RNA (1)...(19): siRNA sense strand
gaucaagaacauccagcaa

SEQ ID NO: 2666810 - RNA, 19 nt, Homo sapiens
  misc_RNA (1)...(19): siRNA sense strand
agacacaaucagacuuaaa

SEQ ID NO: 2666811 - RNA, 19 nt, Homo sapiens
  misc_RNA (1)...(19): siRNA sense strand
gugaaaagacaggaagaaa

SEQ ID NO: 2666812 - RNA, 19 nt, Homo sapiens
  misc_RNA (1)...(19): siRNA sense strand
ugucauugcuacagagaac

SEQ ID NO: 2666813 - RNA, 19 nt, Homo sapiens
  misc_RNA (1)...(19): siRNA sense strand
augaaauggaagaagauga

SEQ ID NO: 2666814 - RNA, 19 nt, Homo sapiens
  misc_RNA (1)...(19): siRNA sense strand
gcagaggaaaucuaugaaa

SEQ ID NO: 2666815 - RNA, 19 nt, Homo sapiens
  misc_RNA (1)...(19): siRNA sense strand
ccaguguauucaagaucaa

SEQ ID NO: 2666816 - RNA, 19 nt, Homo sapiens
  misc_RNA (1)...(19): siRNA sense strand
cuaaguuggcuuuggaaca

SEQ ID NO: 2666817 - RNA, 19 nt, Homo sapiens
  misc_RNA (1)...(19): siRNA sense strand
aagauaaagaggaagcuau

SEQ ID NO: 2666818 - RNA, 19 nt, Homo sapiens
  misc_RNA (1)...(19): siRNA sense strand
uagcuaaugucgugcguca

SEQ ID NO: 2666819 - RNA, 19 nt, Homo sapiens
  misc_RNA (1)...(19): siRNA sense strand
aggaauacugaaagcaaaa

SEQ ID NO: 2666820 - RNA, 19 nt, Homo sapiens
  misc_RNA (1)...(19): siRNA sense strand
aaucaaggcuauugguacu

SEQ ID NO: 2666821 - RNA, 19 nt, Homo sapiens
  misc_RNA (1)...(19): siRNA sense strand
augaugaacacuuggaaga

SEQ ID NO: 2666822 - RNA, 19 nt, Homo sapiens
  misc_RNA (1)...(19): siRNA sense strand
aagcaaaacuugaagggca

SEQ ID NO: 2666823 - RNA, 19 nt, Homo sapiens
  misc_RNA (1)...(19): siRNA sense strand
gcggaggcaagcagaggaa

SEQ ID NO: 2666824 - RNA, 19 nt, Homo sapiens
  misc_RNA (1)...(19): siRNA sense strand
aggaugaaugugauguuua

SEQ ID NO: 2666825 - RNA, 19 nt, Homo sapiens
  misc_RNA (1)...(19): siRNA sense strand
cagguuaugaggugagaca

SEQ ID NO: 2666826 - RNA, 19 nt, Homo sapiens
  misc_RNA (1)...(19): siRNA sense strand
uuagaugccgucagaaaua

SEQ ID NO: 2666827 - RNA, 19 nt, Homo sapiens
  misc_RNA (1)...(19): siRNA sense strand
uugaggagguuuauccaaa

SEQ ID NO: 2666828 - RNA, 19 nt, Homo sapiens
  misc_RNA (1)...(19): siRNA sense strand
cuggguaaaugcugaugaa

SEQ ID NO: 2666829 - RNA, 19 nt, Homo sapiens
  misc_RNA (1)...(19): siRNA sense strand
gguuguuggaccaguguau

SEQ ID NO: 2666830 - RNA, 19 nt, Homo sapiens
  misc_RNA (1)...(19): siRNA sense strand
gaaguuauguggagacucu

SEQ ID NO: 2666831 - RNA, 19 nt, Homo sapiens
  misc_RNA (1)...(19): siRNA sense strand
ugaaauggaagaagaugau

SEQ ID NO: 2666832 - RNA, 19 nt, Homo sapiens
  misc_RNA (1)...(19): siRNA sense strand
aaaugugguucuaugggaa

SEQ ID NO: 2666833 - RNA, 19 nt, Homo sapiens
  misc_RNA (1)...(19): siRNA sense strand
cugcauuuguacuugcuaa

SEQ ID NO: 2666834 - RNA, 19 nt, Homo sapiens
  misc_RNA (1)...(19): siRNA sense strand
agguaaucagcgugugcaa

SEQ ID NO: 2666835 - RNA, 19 nt, Homo sapiens
  misc_RNA (1)...(19): siRNA sense strand
acagaugugcucucagaaa

SEQ ID NO: 2666836 - RNA, 19 nt, Homo sapiens
  misc_RNA (1)...(19): siRNA sense strand
gcaaauuccaaaaccaaaa

SEQ ID NO: 2666837 - RNA, 19 nt, Homo sapiens
  misc_RNA (1)...(19): siRNA sense strand
ugacgaugauggcuggcaa

SEQ ID NO: 2666838 - RNA, 19 nt, Homo sapiens
  misc_RNA (1)...(19): siRNA sense strand
aagaauugagacaggugaa

SEQ ID NO: 2666839 - RNA, 19 nt, Homo sapiens
  misc_RNA (1)...(19): siRNA sense strand
gugccaaacgccuagcuaa

SEQ ID NO: 2666840 - RNA, 19 nt, Homo sapiens
  misc_RNA (1)...(19): siRNA sense strand
auagugaccuugucugaaa

SEQ ID NO: 2666841 - RNA, 19 nt, Homo sapiens
  misc_RNA (1)...(19): siRNA sense strand
acacuuggacagauggcua

SEQ ID NO: 2666842 - RNA, 19 nt, Homo sapiens
  misc_RNA (1)...(19): siRNA sense strand
cauggaaaaucaagguaau

SEQ ID NO: 2666843 - RNA, 19 nt, Homo sapiens
  misc_RNA (1)...(19): siRNA sense strand
ugccaaacgccuagcuaau

SEQ ID NO: 2666844 - RNA, 19 nt, Homo sapiens
  misc_RNA (1)...(19): siRNA sense strand
caaugaugguugaucuaca

SEQ ID NO: 2666845 - RNA, 19 nt, Homo sapiens
  misc_RNA (1)...(19): siRNA sense strand
ugaugaaauggaagaagau

SEQ ID NO: 2666846 - RNA, 19 nt, Homo sapiens
  misc_RNA (1)...(19): siRNA sense strand
gaaacaaaguaucggguca

SEQ ID NO: 2666847 - RNA, 19 nt, Homo sapiens
  misc_RNA (1)...(19): siRNA sense strand
gcaaagaacacaagccaga

SEQ ID NO: 2666848 - RNA, 19 nt, Homo sapiens
  misc_RNA (1)...(19): siRNA sense strand
cucaauaacuuguggcaga

SEQ ID NO: 2666849 - RNA, 19 nt, Homo sapiens
  misc_RNA (1)...(19): siRNA sense strand
acucagaagaacuggaaaa

SEQ ID NO: 2666850 - RNA, 19 nt, Homo sapiens
  misc_RNA (1)...(19): siRNA sense strand
cagcagagaccgaggcguu

SEQ ID NO: 2666851 - RNA, 19 nt, Homo sapiens
  misc_RNA (1)...(19): siRNA sense strand
agagaguaaaugugaguca

SEQ ID NO: 2666852 - RNA, 19 nt, Homo sapiens
  misc_RNA (1)...(19): siRNA sense strand
agagcaaucaggaggugaa

SEQ ID NO: 2666853 - RNA, 19 nt, Homo sapiens
  misc_RNA (1)...(19): siRNA sense strand
aaugaaagugaauggguca

SEQ ID NO: 2666854 - RNA, 19 nt, Homo sapiens
  misc_RNA (1)...(19): siRNA sense strand
augccagaauggacaagaa

SEQ ID NO: 2666855 - RNA, 19 nt, Homo sapiens
  misc_RNA (1)...(19): siRNA sense strand
agggaugauuagagauucu

SEQ ID NO: 2666856 - RNA, 19 nt, Homo sapiens
  misc_RNA (1)...(19): siRNA sense strand
ugucagcgcucaagggcca

SEQ ID NO: 2666857 - RNA, 19 nt, Homo sapiens
  misc_RNA (1)...(19): siRNA sense strand
uagcaaacucagaagaacu

SEQ ID NO: 2666858 - RNA, 19 nt, Homo sapiens
  misc_RNA (1)...(19): siRNA sense strand
gggaugugguccaagccau

SEQ ID NO: 2666859 - RNA, 19 nt, Homo sapiens
  misc_RNA (1)...(19): siRNA sense strand
uccucauccuggagagcaa

SEQ ID NO: 2666860 - RNA, 19 nt, Homo sapiens
  misc_RNA (1)...(19): siRNA sense strand
ucaggaaaugaaagugaau

SEQ ID NO: 2666861 - RNA, 19 nt, Homo sapiens
  misc_RNA (1)...(19): siRNA sense strand
acaacaggaaccuagcaaa

SEQ ID NO: 2666862 - RNA, 19 nt, Homo sapiens
  misc_RNA (1)...(19): siRNA sense strand
uggaauugguuuuggaacu

SEQ ID NO: 2666863 - RNA, 19 nt, Homo sapiens
  misc_RNA (1)...(19): siRNA sense strand
guccauuaaggcuggcaua

SEQ ID NO: 2666864 - RNA, 19 nt, Homo sapiens
  misc_RNA (1)...(19): siRNA sense strand
gaaacaaaguaucggguca

SEQ ID NO: 2666865 - RNA, 19 nt, Homo sapiens
  misc_RNA (1)...(19): siRNA sense strand
gcaaagaacacaagccaga

SEQ ID NO: 2666866 - RNA, 19 nt, Homo sapiens
  misc_RNA (1)...(19): siRNA sense strand
cucaauaacuuguggcaga

SEQ ID NO: 2666867 - RNA, 19 nt, Homo sapiens
  misc_RNA (1)...(19): siRNA sense strand
acucagaagaacuggaaaa

SEQ ID NO: 2666868 - RNA, 19 nt, Homo sapiens
  misc_RNA (1)...(19): siRNA sense strand
cagcagagaccgaggcguu

SEQ ID NO: 2666869 - RNA, 19 nt, Homo sapiens
  misc_RNA (1)...(19): siRNA sense strand
agagaguaaaugugaguca

SEQ ID NO: 2666870 - RNA, 19 nt, Homo sapiens
  misc_RNA (1)...(19): siRNA sense strand
agagcaaucaggaggugaa

SEQ ID NO: 2666871 - RNA, 19 nt, Homo sapiens
  misc_RNA (1)...(19): siRNA sense strand
aaugaaagugaauggguca

SEQ ID NO: 2666872 - RNA, 19 nt, Homo sapiens
  misc_RNA (1)...(19): siRNA sense strand
augccagaauggacaagaa

SEQ ID NO: 2666873 - RNA, 19 nt, Homo sapiens
  misc_RNA (1)...(19): siRNA sense strand
agggaugauuagagauucu

SEQ ID NO: 2666874 - RNA, 19 nt, Homo sapiens
  misc_RNA (1)...(19): siRNA sense strand
ugucagcgcucaagggcca

SEQ ID NO: 2666875 - RNA, 19 nt, Homo sapiens
  misc_RNA (1)...(19): siRNA sense strand
uagcaaacucagaagaacu

SEQ ID NO: 2666876 - RNA, 19 nt, Homo sapiens
  misc_RNA (1)...(19): siRNA sense strand
gggaugugguccaagccau

SEQ ID NO: 2666877 - RNA, 19 nt, Homo sapiens
  misc_RNA (1)...(19): siRNA sense strand
uccucauccuggagagcaa

SEQ ID NO: 2666878 - RNA, 19 nt, Homo sapiens
  misc_RNA (1)...(19): siRNA sense strand
ucaggaaaugaaagugaau

SEQ ID NO: 2666879 - RNA, 19 nt, Homo sapiens
  misc_RNA (1)...(19): siRNA sense strand
acaacaggaaccuagcaaa

SEQ ID NO: 2666880 - RNA, 19 nt, Homo sapiens
  misc_RNA (1)...(19): siRNA sense strand
uggaauugguuuuggaacu

SEQ ID NO: 2666881 - RNA, 19 nt, Homo sapiens
  misc_RNA (1)...(19): siRNA sense strand
guccauuaaggcuggcaua

SEQ ID NO: 2666882 - RNA, 19 nt, Homo sapiens
  misc_RNA (1)...(19): siRNA sense strand
ucaaaauaaugcugggaau

SEQ ID NO: 2666883 - RNA, 19 nt, Homo sapiens
  misc_RNA (1)...(19): siRNA sense strand
agaaacaacuacuagcgaa

SEQ ID NO: 2666884 - RNA, 19 nt, Homo sapiens
  misc_RNA (1)...(19): siRNA sense strand
gaaauaucugugagagcca

SEQ ID NO: 2666885 - RNA, 19 nt, Homo sapiens
  misc_RNA (1)...(19): siRNA sense strand
agaucaggcacaagaacau

SEQ ID NO: 2666886 - RNA, 19 nt, Homo sapiens
  misc_RNA (1)...(19): siRNA sense strand
uuccauaggcucagauaau

SEQ ID NO: 2666887 - RNA, 19 nt, Homo sapiens
  misc_RNA (1)...(19): siRNA sense strand
caccauugaagaagaaaca

SEQ ID NO: 2666888 - RNA, 19 nt, Homo sapiens
  misc_RNA (1)...(19): siRNA sense strand
gaaacaacuacuagcgaac

SEQ ID NO: 2666889 - RNA, 19 nt, Homo sapiens
  misc_RNA (1)...(19): siRNA sense strand
ggaagaaaagaaugaagau

SEQ ID NO: 2666890 - RNA, 19 nt, Homo sapiens
  misc_RNA (1)...(19): siRNA sense strand
uaugagaagaucaggcaca

SEQ ID NO: 2666891 - RNA, 19 nt, Homo sapiens
  misc_RNA (1)...(19): siRNA sense strand
acgcggaagugguggccau

SEQ ID NO: 2666892 - RNA, 19 nt, Homo sapiens
  misc_RNA (1)...(19): siRNA sense strand
uggaaaucgacgacaugua

SEQ ID NO: 2666893 - RNA, 19 nt, Homo sapiens
  misc_RNA (1)...(19): siRNA sense strand
aggacacggucaugugcua

SEQ ID NO: 2666894 - RNA, 19 nt, Homo sapiens
  misc_RNA (1)...(19): siRNA sense strand
cggucgaccuggaugagau

SEQ ID NO: 2666895 - RNA, 19 nt, Homo sapiens
  misc_RNA (1)...(19): siRNA sense strand
ccaaagaccugaagccgcu

SEQ ID NO: 2666896 - RNA, 19 nt, Homo sapiens
  misc_RNA (1)...(19): siRNA sense strand
gcuacaagggugagcuuuu

SEQ ID NO: 2666897 - RNA, 19 nt, Homo sapiens
  misc_RNA (1)...(19): siRNA sense strand
gcuaccagucacagaacau

SEQ ID NO: 2666898 - RNA, 19 nt, Homo sapiens
  misc_RNA (1)...(19): siRNA sense strand
ggcaaguggcgcagcuaca

SEQ ID NO: 2666899 - RNA, 19 nt, Homo sapiens
  misc_RNA (1)...(19): siRNA sense strand
aggagguacaggaggagaa

SEQ ID NO: 2666900 - RNA, 19 nt, Homo sapiens
  misc_RNA (1)...(19): siRNA sense strand
gagcaggugcagaagguga

SEQ ID NO: 2666901 - RNA, 19 nt, Homo sapiens
  misc_RNA (1)...(19): siRNA sense strand
auguauagccucacggaga

SEQ ID NO: 2666902 - RNA, 19 nt, Homo sapiens
  misc_RNA (1)...(19): siRNA sense strand
agguacaggaggagaagga

SEQ ID NO: 2666903 - RNA, 19 nt, Homo sapiens
  misc_RNA (1)...(19): siRNA sense strand
gagcaggaguccagauuug

SEQ ID NO: 2666904 - RNA, 19 nt, Homo sapiens
  misc_RNA (1)...(19): siRNA sense strand
gaaggaagcagaagcagga

SEQ ID NO: 2666905 - RNA, 19 nt, Homo sapiens
  misc_RNA (1)...(19): siRNA sense strand
ugacagugaaggagcggga

SEQ ID NO: 2666906 - RNA, 19 nt, Homo sapiens
  misc_RNA (1)...(19): siRNA sense strand
aggaggagaaggaagcaga

SEQ ID NO: 2666907 - RNA, 19 nt, Homo sapiens
  misc_RNA (1)...(19): siRNA sense strand
gaggaguuugacaggacaa

SEQ ID NO: 2666908 - RNA, 19 nt, Homo sapiens
  misc_RNA (1)...(19): siRNA sense strand
gugaggagcaagaagagca

SEQ ID NO: 2666909 - RNA, 19 nt, Homo sapiens
  misc_RNA (1)...(19): siRNA sense strand
cuaccuuccugcaagagaa

SEQ ID NO: 2666910 - RNA, 19 nt, Homo sapiens
  misc_RNA (1)...(19): siRNA sense strand
gguguaaagucaucccuga

SEQ ID NO: 2666911 - RNA, 19 nt, Homo sapiens
  misc_RNA (1)...(19): siRNA sense strand
cggagauggcccacacaga

SEQ ID NO: 2666912 - RNA, 19 nt, Homo sapiens
  misc_RNA (1)...(19): siRNA sense strand
ccucagagcuacugggcaa

SEQ ID NO: 2666913 - RNA, 19 nt, Homo sapiens
  misc_RNA (1)...(19): siRNA sense strand
cgaucaagaccuaggacaa

SEQ ID NO: 2666914 - RNA, 19 nt, Homo sapiens
  misc_RNA (1)...(19): siRNA sense strand
ccacugugcuugagggaca

SEQ ID NO: 2666915 - RNA, 19 nt, Homo sapiens
  misc_RNA (1)...(19): siRNA sense strand
aggaagaagaggagacaga

SEQ ID NO: 2666916 - RNA, 19 nt, Homo sapiens
  misc_RNA (1)...(19): siRNA sense strand
cgggaauacaggaggaaga

SEQ ID NO: 2666917 - RNA, 19 nt, Homo sapiens
  misc_RNA (1)...(19): siRNA sense strand
agacagaagagguggcaga

SEQ ID NO: 2666918 - RNA, 19 nt, Homo sapiens
  misc_RNA (1)...(19): siRNA sense strand
ugaaaguggaggaagggaa

SEQ ID NO: 2666919 - RNA, 19 nt, Homo sapiens
  misc_RNA (1)...(19): siRNA sense strand
uggagaagaggaagaggaa

SEQ ID NO: 2666920 - RNA, 19 nt, Homo sapiens
  misc_RNA (1)...(19): siRNA sense strand
agaagguggagaagaggaa

SEQ ID NO: 2666921 - RNA, 19 nt, Homo sapiens
  misc_RNA (1)...(19): siRNA sense strand
gaagaaaacuggaggcucu

SEQ ID NO: 2666922 - RNA, 19 nt, Homo sapiens
  misc_RNA (1)...(19): siRNA sense strand
aggaagaggaagaagagga

SEQ ID NO: 2666923 - RNA, 19 nt, Homo sapiens
  misc_RNA (1)...(19): siRNA sense strand
aagaggaagaggaagaaga

SEQ ID NO: 2666924 - RNA, 19 nt, Homo sapiens
  misc_RNA (1)...(19): siRNA sense strand
ggagguggugggagcacaa

SEQ ID NO: 2666925 - RNA, 19 nt, Homo sapiens
  misc_RNA (1)...(19): siRNA sense strand
agacuauggagcuggauga

SEQ ID NO: 2666926 - RNA, 19 nt, Homo sapiens
  misc_RNA (1)...(19): siRNA sense strand
agccagaaguccagccaga

SEQ ID NO: 2666927 - RNA, 19 nt, Homo sapiens
  misc_RNA (1)...(19): siRNA sense strand
cagagggaugcaagagcua

SEQ ID NO: 2666928 - RNA, 19 nt, Homo sapiens
  misc_RNA (1)...(19): siRNA sense strand
gagccagagcccaaggaga

SEQ ID NO: 2666929 - RNA, 19 nt, Homo sapiens
  misc_RNA (1)...(19): siRNA sense strand
gcccucaaguggcgggaau

SEQ ID NO: 2666930 - RNA, 19 nt, Homo sapiens
  misc_RNA (1)...(19): siRNA sense strand
agaccgaagaucacaagaa

SEQ ID NO: 2666931 - RNA, 19 nt, Homo sapiens
  misc_RNA (1)...(19): siRNA sense strand
ugaaggcaaagcugggaaa

SEQ ID NO: 2666932 - RNA, 19 nt, Homo sapiens
  misc_RNA (1)...(19): siRNA sense strand
guggagaagaggaagagga

SEQ ID NO: 2666933 - RNA, 19 nt, Homo sapiens
  misc_RNA (1)...(19): siRNA sense strand
gcucugaggaacacaccaa

SEQ ID NO: 2666934 - RNA, 19 nt, Homo sapiens
  misc_RNA (1)...(19): siRNA sense strand
gggacaaguauacacgaau

SEQ ID NO: 2666935 - RNA, 19 nt, Homo sapiens
  misc_RNA (1)...(19): siRNA sense strand
ccugcuggccucagagcua

SEQ ID NO: 2666936 - RNA, 19 nt, Homo sapiens
  misc_RNA (1)...(19): siRNA sense strand
agcaaggaacagaggccaa

SEQ ID NO: 2666937 - RNA, 19 nt, Homo sapiens
  misc_RNA (1)...(19): siRNA sense strand
cgcagaaggaggaucagaa

SEQ ID NO: 2666938 - RNA, 19 nt, Homo sapiens
  misc_RNA (1)...(19): siRNA sense strand
cagccagcccucugaguau

SEQ ID NO: 2666939 - RNA, 19 nt, Homo sapiens
  misc_RNA (1)...(19): siRNA sense strand
agggacaaguauacacgaa

SEQ ID NO: 2666940 - RNA, 19 nt, Homo sapiens
  misc_RNA (1)...(19): siRNA sense strand
uccaagaagcccagcaaga

SEQ ID NO: 2666941 - RNA, 19 nt, Homo sapiens
  misc_RNA (1)...(19): siRNA sense strand
caucugaacugccggcuga

SEQ ID NO: 2666942 - RNA, 19 nt, Homo sapiens
  misc_RNA (1)...(19): siRNA sense strand
gcugauggauccagggccu

SEQ ID NO: 2666943 - RNA, 19 nt, Homo sapiens
  misc_RNA (1)...(19): siRNA sense strand
aggaugggcucaaggccuu

SEQ ID NO: 2666944 - RNA, 19 nt, Homo sapiens
  misc_RNA (1)...(19): siRNA sense strand
gcacaagaccuaaucccuu

SEQ ID NO: 2666945 - RNA, 19 nt, Homo sapiens
  misc_RNA (1)...(19): siRNA sense strand
ugguggaagggcaggaaca

SEQ ID NO: 2666946 - RNA, 19 nt, Homo sapiens
  misc_RNA (1)...(19): siRNA sense strand
gagggaugcaagagcuaga

SEQ ID NO: 2666947 - RNA, 19 nt, Homo sapiens
  misc_RNA (1)...(19): siRNA sense strand
ccgaagaucacaagaagcu

SEQ ID NO: 2666948 - RNA, 19 nt, Homo sapiens
  misc_RNA (1)...(19): siRNA sense strand
ucuauaaccacgaagacau

SEQ ID NO: 2666949 - RNA, 19 nt, Homo sapiens
  misc_RNA (1)...(19): siRNA sense strand
gaagaacccacuagggcca

SEQ ID NO: 2666950 - RNA, 19 nt, Homo sapiens
  misc_RNA (1)...(19): siRNA sense strand
cuggagugguggaagggca

SEQ ID NO: 2666951 - RNA, 19 nt, Homo sapiens
  misc_RNA (1)...(19): siRNA sense strand
ccuuugaccaggaauggaa

SEQ ID NO: 2666952 - RNA, 19 nt, Homo sapiens
  misc_RNA (1)...(19): siRNA sense strand
cugaccaguccaugggcua

SEQ ID NO: 2666953 - RNA, 19 nt, Homo sapiens
  misc_RNA (1)...(19): siRNA sense strand
aaguccagccagaggaaca

SEQ ID NO: 2666954 - RNA, 19 nt, Homo sapiens
  misc_RNA (1)...(19): siRNA sense strand
ggagugugguugaggcuuc

SEQ ID NO: 2666955 - RNA, 19 nt, Homo sapiens
  misc_RNA (1)...(19): siRNA sense strand
ugguaaaagcuguuaacau

SEQ ID NO: 2666956 - RNA, 19 nt, Homo sapiens
  misc_RNA (1)...(19): siRNA sense strand
gaccaggaauggaagcuca

SEQ ID NO: 2666957 - RNA, 19 nt, Homo sapiens
  misc_RNA (1)...(19): siRNA sense strand
cuccugagcuugaugccaa

SEQ ID NO: 2666958 - RNA, 19 nt, Homo sapiens
  misc_RNA (1)...(19): siRNA sense strand
aacaagaagcagugaguuc

SEQ ID NO: 2666959 - RNA, 19 nt, Homo sapiens
  misc_RNA (1)...(19): siRNA sense strand
ggaaauaccaucuacgcua

SEQ ID NO: 2666960 - RNA, 19 nt, Homo sapiens
  misc_RNA (1)...(19): siRNA sense strand
cguccuuggcaaugggaaa

SEQ ID NO: 2666961 - RNA, 19 nt, Homo sapiens
  misc_RNA (1)...(19): siRNA sense strand
gggcagaaggugacagcca

SEQ ID NO: 2666962 - RNA, 19 nt, Homo sapiens
  misc_RNA (1)...(19): siRNA sense strand
ggaaaggcaucauccggaa

SEQ ID NO: 2666963 - RNA, 19 nt, Homo sapiens
  misc_RNA (1)...(19): siRNA sense strand
aggaugaagaugaggacca

SEQ ID NO: 2666964 - RNA, 19 nt, Homo sapiens
  misc_RNA (1)...(19): siRNA sense strand
agguugaggcccagugcaa

SEQ ID NO: 2666965 - RNA, 19 nt, Homo sapiens
  misc_RNA (1)...(19): siRNA sense strand
acaucaucuuccagggcaa

SEQ ID NO: 2666966 - RNA, 19 nt, Homo sapiens
  misc_RNA (1)...(19): siRNA sense strand
cugcauguguaauaaagaa

SEQ ID NO: 2666967 - RNA, 19 nt, Homo sapiens
  misc_RNA (1)...(19): siRNA sense strand
gggagacagagcuggagaa

SEQ ID NO: 2666968 - RNA, 19 nt, Homo sapiens
  misc_RNA (1)...(19): siRNA sense strand
ccaauaaggaggcuggcau

SEQ ID NO: 2666969 - RNA, 19 nt, Homo sapiens
  misc_RNA (1)...(19): siRNA sense strand
ugugggagacgaaggcaaa

SEQ ID NO: 2666970 - RNA, 19 nt, Homo sapiens
  misc_RNA (1)...(19): siRNA sense strand
gguggguagugauggugaa

SEQ ID NO: 2666971 - RNA, 19 nt, Homo sapiens
  misc_RNA (1)...(19): siRNA sense strand
gaguaugucugcaugugua

SEQ ID NO: 2666972 - RNA, 19 nt, Homo sapiens
  misc_RNA (1)...(19): siRNA sense strand
gcagauaagaacugggccu

SEQ ID NO: 2666973 - RNA, 19 nt, Homo sapiens
  misc_RNA (1)...(19): siRNA sense strand
aggagcugcagaaggauaa

SEQ ID NO: 2666974 - RNA, 19 nt, Homo sapiens
  misc_RNA (1)...(19): siRNA sense strand
gguguauacauaauagcaa

SEQ ID NO: 2666975 - RNA, 19 nt, Homo sapiens
  misc_RNA (1)...(19): siRNA sense strand
cagugaaugagaacggcaa

SEQ ID NO: 2666976 - RNA, 19 nt, Homo sapiens
  misc_RNA (1)...(19): siRNA sense strand
cacaaugggcagaagguga

SEQ ID NO: 2666977 - RNA, 19 nt, Homo sapiens
  misc_RNA (1)...(19): siRNA sense strand
caggagcugcagaaggaua

SEQ ID NO: 2666978 - RNA, 19 nt, Homo sapiens
  misc_RNA (1)...(19): siRNA sense strand
ugguguagacauccggaaa

SEQ ID NO: 2666979 - RNA, 19 nt, Homo sapiens
  misc_RNA (1)...(19): siRNA sense strand
gcauugucguccuuggcaa

SEQ ID NO: 2666980 - RNA, 19 nt, Homo sapiens
  misc_RNA (1)...(19): siRNA sense strand
ccggcauagcagugaauga

SEQ ID NO: 2666981 - RNA, 19 nt, Homo sapiens
  misc_RNA (1)...(19): siRNA sense strand
guauuuagccagaaggaug

SEQ ID NO: 2666982 - RNA, 19 nt, Homo sapiens
  misc_RNA (1)...(19): siRNA sense strand
ugaaggugccuguggagau

SEQ ID NO: 2666983 - RNA, 19 nt, Homo sapiens
  misc_RNA (1)...(19): siRNA sense strand
agccagauguggagccuga

SEQ ID NO: 2666984 - RNA, 19 nt, Homo sapiens
  misc_RNA (1)...(19): siRNA sense strand
ccuggaaaacugugaauuu

SEQ ID NO: 2666985 - RNA, 19 nt, Homo sapiens
  misc_RNA (1)...(19): siRNA sense strand
ggguagugauggugaaagg

SEQ ID NO: 2666986 - RNA, 19 nt, Homo sapiens
  misc_RNA (1)...(19): siRNA sense strand
auggugugguugugggaga

SEQ ID NO: 2666987 - RNA, 19 nt, Homo sapiens
  misc_RNA (1)...(19): siRNA sense strand
ccaaugugauccacgcgaa

SEQ ID NO: 2666988 - RNA, 19 nt, Homo sapiens
  misc_RNA (1)...(19): siRNA sense strand
gcauuaucaccaagggcga

SEQ ID NO: 2666989 - RNA, 19 nt, Homo sapiens
  misc_RNA (1)...(19): siRNA sense strand
cagaaaaugucauccguga

SEQ ID NO: 2666990 - RNA, 19 nt, Homo sapiens
  misc_RNA (1)...(19): siRNA sense strand
aaaugucauccgugagaau

SEQ ID NO: 2666991 - RNA, 19 nt, Homo sapiens
  misc_RNA (1)...(19): siRNA sense strand
ccugagucuuggagagaag

SEQ ID NO: 2666992 - RNA, 19 nt, Homo sapiens
  misc_RNA (1)...(19): siRNA sense strand
acgaagagcaaggugaaau

SEQ ID NO: 2666993 - RNA, 19 nt, Homo sapiens
  misc_RNA (1)...(19): siRNA sense strand
agguguguacgaagagcaa

SEQ ID NO: 2666994 - RNA, 19 nt, Homo sapiens
  misc_RNA (1)...(19): siRNA sense strand
agugaaugagaacggcaaa

SEQ ID NO: 2666995 - RNA, 19 nt, Homo sapiens
  misc_RNA (1)...(19): siRNA sense strand
aaggauggcuccagcgagu

SEQ ID NO: 2666996 - RNA, 19 nt, Homo sapiens
  misc_RNA (1)...(19): siRNA sense strand
cggaggagggaacgacgua

SEQ ID NO: 2666997 - RNA, 19 nt, Homo sapiens
  misc_RNA (1)...(19): siRNA sense strand
agaaggauaaggaggccau

SEQ ID NO: 2666998 - RNA, 19 nt, Homo sapiens
  misc_RNA (1)...(19): siRNA sense strand
guugagucuaacaguauua

SEQ ID NO: 2666999 - RNA, 19 nt, Homo sapiens
  misc_RNA (1)...(19): siRNA sense strand
cgaagagcaaggugaaauc

SEQ ID NO: 2667000 - RNA, 19 nt, Homo sapiens
  misc_RNA (1)...(19): siRNA sense strand
cagauaagaacugggccua

SEQ ID NO: 2667001 - RNA, 19 nt, Homo sapiens
  misc_RNA (1)...(19): siRNA sense strand
caaacaaccgagaaugcau

SEQ ID NO: 2667002 - RNA, 19 nt, Homo sapiens
  misc_RNA (1)...(19): siRNA sense strand
cuuucagcauugagaguau

SEQ ID NO: 2667003 - RNA, 19 nt, Homo sapiens
  misc_RNA (1)...(19): siRNA sense strand
gguaucaggcgguggcaga

SEQ ID NO: 2667004 - RNA, 19 nt, Homo sapiens
  misc_RNA (1)...(19): siRNA sense strand
aaaucgauguccugggaga

SEQ ID NO: 2667005 - RNA, 19 nt, Homo sapiens
  misc_RNA (1)...(19): siRNA sense strand
aagaugaagacgaggagga

SEQ ID NO: 2667006 - RNA, 19 nt, Homo sapiens
  misc_RNA (1)...(19): siRNA sense strand
agccuugggaggagggcaa

SEQ ID NO: 2667007 - RNA, 19 nt, Homo sapiens
  misc_RNA (1)...(19): siRNA sense strand
aggaggaagaugaagacga

SEQ ID NO: 2667008 - RNA, 19 nt, Homo sapiens
  misc_RNA (1)...(19): siRNA sense strand
aggaagaugaagacgagga

SEQ ID NO: 2667009 - RNA, 19 nt, Homo sapiens
  misc_RNA (1)...(19): siRNA sense strand
ccgauggggaagacgguaa

SEQ ID NO: 2667010 - RNA, 19 nt, Homo sapiens
  misc_RNA (1)...(19): siRNA sense strand
cauugagaguaucaugcaa

SEQ ID NO: 2667011 - RNA, 19 nt, Homo sapiens
  misc_RNA (1)...(19): siRNA sense strand
ggaaagagaugaagcacaa

SEQ ID NO: 2667012 - RNA, 19 nt, Homo sapiens
  misc_RNA (1)...(19): siRNA sense strand
agaaagaagaggagacaaa

SEQ ID NO: 2667013 - RNA, 19 nt, Homo sapiens
  misc_RNA (1)...(19): siRNA sense strand
cugaagagcuuaagagcaa

SEQ ID NO: 2667014 - RNA, 19 nt, Homo sapiens
  misc_RNA (1)...(19): siRNA sense strand
ggaagaagcuauacaacua

SEQ ID NO: 2667015 - RNA, 19 nt, Homo sapiens
  misc_RNA (1)...(19): siRNA sense strand
gguccuagaaauugagaaa

SEQ ID NO: 2667016 - RNA, 19 nt, Homo sapiens
  misc_RNA (1)...(19): siRNA sense strand
gcagagagguucagcagaa

SEQ ID NO: 2667017 - RNA, 19 nt, Homo sapiens
  misc_RNA (1)...(19): siRNA sense strand
gauagaaacugaagagcuu

SEQ ID NO: 2667018 - RNA, 19 nt, Homo sapiens
  misc_RNA (1)...(19): siRNA sense strand
cagcaaaauugaaggcaua

SEQ ID NO: 2667019 - RNA, 19 nt, Homo sapiens
  misc_RNA (1)...(19): siRNA sense strand
agacauuguugcagagauu

SEQ ID NO: 2667020 - RNA, 19 nt, Homo sapiens
  misc_RNA (1)...(19): siRNA sense strand
acagaagaccauagaauua

SEQ ID NO: 2667021 - RNA, 19 nt, Homo sapiens
  misc_RNA (1)...(19): siRNA sense strand
uggcagugcuagaggagaa

SEQ ID NO: 2667022 - RNA, 19 nt, Homo sapiens
  misc_RNA (1)...(19): siRNA sense strand
uggcagaggcugagaguga

SEQ ID NO: 2667023 - RNA, 19 nt, Homo sapiens
  misc_RNA (1)...(19): siRNA sense strand
augaagagaaggagagaau

SEQ ID NO: 2667024 - RNA, 19 nt, Homo sapiens
  misc_RNA (1)...(19): siRNA sense strand
gugugaaguagaagaauua

SEQ ID NO: 2667025 - RNA, 19 nt, Homo sapiens
  misc_RNA (1)...(19): siRNA sense strand
aagcagaacuugagaagga

SEQ ID NO: 2667026 - RNA, 19 nt, Homo sapiens
  misc_RNA (1)...(19): siRNA sense strand
uagaaagacuggaaagaga

SEQ ID NO: 2667027 - RNA, 19 nt, Homo sapiens
  misc_RNA (1)...(19): siRNA sense strand
aggaaacggaagagauuaa

SEQ ID NO: 2667028 - RNA, 19 nt, Homo sapiens
  misc_RNA (1)...(19): siRNA sense strand
cagcaaauggagaaugaaa

SEQ ID NO: 2667029 - RNA, 19 nt, Homo sapiens
  misc_RNA (1)...(19): siRNA sense strand
gagggauaaacgagaaaua

SEQ ID NO: 2667030 - RNA, 19 nt, Homo sapiens
  misc_RNA (1)...(19): siRNA sense strand
gagaaagugaagaaagcaa

SEQ ID NO: 2667031 - RNA, 19 nt, Homo sapiens
  misc_RNA (1)...(19): siRNA sense strand
gaaagcagaaggagauuaa

SEQ ID NO: 2667032 - RNA, 19 nt, Homo sapiens
  misc_RNA (1)...(19): siRNA sense strand
gggaugagaaagagacauu

SEQ ID NO: 2667033 - RNA, 19 nt, Homo sapiens
  misc_RNA (1)...(19): siRNA sense strand
ugacagaagucgagcagga

SEQ ID NO: 2667034 - RNA, 19 nt, Homo sapiens
  misc_RNA (1)...(19): siRNA sense strand
gcaaauggagaaugaaauu

SEQ ID NO: 2667035 - RNA, 19 nt, Homo sapiens
  misc_RNA (1)...(19): siRNA sense strand
gagcagaagcugagaucga

SEQ ID NO: 2667036 - RNA, 19 nt, Homo sapiens
  misc_RNA (1)...(19): siRNA sense strand
cggagaaagaaauggaaga

SEQ ID NO: 2667037 - RNA, 19 nt, Homo sapiens
  misc_RNA (1)...(19): siRNA sense strand
cuccagaaagagagagaaa

SEQ ID NO: 2667038 - RNA, 19 nt, Homo sapiens
  misc_RNA (1)...(19): siRNA sense strand
agagagagaaagugaagaa

SEQ ID NO: 2667039 - RNA, 19 nt, Homo sapiens
  misc_RNA (1)...(19): siRNA sense strand
caaaugaagcccugaagaa

SEQ ID NO: 2667040 - RNA, 19 nt, Homo sapiens
  misc_RNA (1)...(19): siRNA sense strand
gcacuaaagaaaagacaaa

SEQ ID NO: 2667041 - RNA, 19 nt, Homo sapiens
  misc_RNA (1)...(19): siRNA sense strand
guuugaagacugucagaaa

SEQ ID NO: 2667042 - RNA, 19 nt, Homo sapiens
  misc_RNA (1)...(19): siRNA sense strand
ccauaaaggagcugauuca

SEQ ID NO: 2667043 - RNA, 19 nt, Homo sapiens
  misc_RNA (1)...(19): siRNA sense strand
gagcaugucagaagcaaua

SEQ ID NO: 2667044 - RNA, 19 nt, Homo sapiens
  misc_RNA (1)...(19): siRNA sense strand
cggcagucggagaaagaaa

SEQ ID NO: 2667045 - RNA, 19 nt, Homo sapiens
  misc_RNA (1)...(19): siRNA sense strand
aagcaagaauccagcaaau

SEQ ID NO: 2667046 - RNA, 19 nt, Homo sapiens
  misc_RNA (1)...(19): siRNA sense strand
uggaauugaaugucagaaa

SEQ ID NO: 2667047 - RNA, 19 nt, Homo sapiens
  misc_RNA (1)...(19): siRNA sense strand
cagaaagggagcagcaauu

SEQ ID NO: 2667048 - RNA, 19 nt, Homo sapiens
  misc_RNA (1)...(19): siRNA sense strand
agaagaaauugcugaacuu

SEQ ID NO: 2667049 - RNA, 19 nt, Homo sapiens
  misc_RNA (1)...(19): siRNA sense strand
gggaaagagaugaagcaca

SEQ ID NO: 2667050 - RNA, 19 nt, Homo sapiens
  misc_RNA (1)...(19): siRNA sense strand
gagaaaacuccaagaagaa

SEQ ID NO: 2667051 - RNA, 19 nt, Homo sapiens
  misc_RNA (1)...(19): siRNA sense strand
gagcuuaagagcaaacaaa

SEQ ID NO: 2667052 - RNA, 19 nt, Homo sapiens
  misc_RNA (1)...(19): siRNA sense strand
agaacugcaugaugaaaua

SEQ ID NO: 2667053 - RNA, 19 nt, Homo sapiens
  misc_RNA (1)...(19): siRNA sense strand
ccagaaagagagagaaagu

SEQ ID NO: 2667054 - RNA, 19 nt, Homo sapiens
  misc_RNA (1)...(19): siRNA sense strand
agaaagagagagaaaguga

SEQ ID NO: 2667055 - RNA, 19 nt, Homo sapiens
  misc_RNA (1)...(19): siRNA sense strand
ccggaaagcagaaggagau

SEQ ID NO: 2667056 - RNA, 19 nt, Homo sapiens
  misc_RNA (1)...(19): siRNA sense strand
ccaaccagcucaaggaaga

SEQ ID NO: 2667057 - RNA, 19 nt, Homo sapiens
  misc_RNA (1)...(19): siRNA sense strand
gguuagggaagaaguuaaa

SEQ ID NO: 2667058 - RNA, 19 nt, Homo sapiens
  misc_RNA (1)...(19): siRNA sense strand
aaacagaagaccauagaau

SEQ ID NO: 2667059 - RNA, 19 nt, Homo sapiens
  misc_RNA (1)...(19): siRNA sense strand
cggaagagauuaaggaccu

SEQ ID NO: 2667060 - RNA, 19 nt, Homo sapiens
  misc_RNA (1)...(19): siRNA sense strand
agcacaaguuagagagaga

SEQ ID NO: 2667061 - RNA, 19 nt, Homo sapiens
  misc_RNA (1)...(19): siRNA sense strand
ucaaagaagcgggaagaaa

SEQ ID NO: 2667062 - RNA, 19 nt, Homo sapiens
  misc_RNA (1)...(19): siRNA sense strand
gggauaaacgagaaauaga

SEQ ID NO: 2667063 - RNA, 19 nt, Homo sapiens
  misc_RNA (1)...(19): siRNA sense strand
uagaagagguagaaagacu

SEQ ID NO: 2667064 - RNA, 19 nt, Homo sapiens
  misc_RNA (1)...(19): siRNA sense strand
ucaagaagauggagccaga

SEQ ID NO: 2667065 - RNA, 19 nt, Homo sapiens
  misc_RNA (1)...(19): siRNA sense strand
cagaugaacaacuuagaaa

SEQ ID NO: 2667066 - RNA, 19 nt, Homo sapiens
  misc_RNA (1)...(19): siRNA sense strand
cuucagaugucuuagggaa

SEQ ID NO: 2667067 - RNA, 19 nt, Homo sapiens
  misc_RNA (1)...(19): siRNA sense strand
agagaagacaaauggaaau

SEQ ID NO: 2667068 - RNA, 19 nt, Homo sapiens
  misc_RNA (1)...(19): siRNA sense strand
gcuuaaccuugcaggaaau

SEQ ID NO: 2667069 - RNA, 19 nt, Homo sapiens
  misc_RNA (1)...(19): siRNA sense strand
guggaugagcuaagaagaa

SEQ ID NO: 2667070 - RNA, 19 nt, Homo sapiens
  misc_RNA (1)...(19): siRNA sense strand
cugcaaauagccauagaua

SEQ ID NO: 2667071 - RNA, 19 nt, Homo sapiens
  misc_RNA (1)...(19): siRNA sense strand
guaaagaacaacagcuuga

SEQ ID NO: 2667072 - RNA, 19 nt, Homo sapiens
  misc_RNA (1)...(19): siRNA sense strand
cagcagaaaggcagcacaa

SEQ ID NO: 2667073 - RNA, 19 nt, Homo sapiens
  misc_RNA (1)...(19): siRNA sense strand
gaaagguggaugagagcau

SEQ ID NO: 2667074 - RNA, 19 nt, Homo sapiens
  misc_RNA (1)...(19): siRNA sense strand
gcagaagaaaauagcaaaa

SEQ ID NO: 2667075 - RNA, 19 nt, Homo sapiens
  misc_RNA (1)...(19): siRNA sense strand
gagcaaucaaacuuagaaa

SEQ ID NO: 2667076 - RNA, 19 nt, Homo sapiens
  misc_RNA (1)...(19): siRNA sense strand
acgaaaaccuagaaggaga

SEQ ID NO: 2667077 - RNA, 19 nt, Homo sapiens
  misc_RNA (1)...(19): siRNA sense strand
gagagagaccagcuggaaa

SEQ ID NO: 2667078 - RNA, 19 nt, Homo sapiens
  misc_RNA (1)...(19): siRNA sense strand
cagaaggacaucagugaau

SEQ ID NO: 2667079 - RNA, 19 nt, Homo sapiens
  misc_RNA (1)...(19): siRNA sense strand
cuaauagggaagauugaaa

SEQ ID NO: 2667080 - RNA, 19 nt, Homo sapiens
  misc_RNA (1)...(19): siRNA sense strand
gcaguugagugguagacua

SEQ ID NO: 2667081 - RNA, 19 nt, Homo sapiens
  misc_RNA (1)...(19): siRNA sense strand
cgguaaagaacaacagcuu

SEQ ID NO: 2667082 - RNA, 19 nt, Homo sapiens
  misc_RNA (1)...(19): siRNA sense strand
cgggaagaaagguggauga

SEQ ID NO: 2667083 - RNA, 19 nt, Homo sapiens
  misc_RNA (1)...(19): siRNA sense strand
agagauugacagugggaaa

SEQ ID NO: 2667084 - RNA, 19 nt, Homo sapiens
  misc_RNA (1)...(19): siRNA sense strand
cguaugaaucaauggauaa

SEQ ID NO: 2667085 - RNA, 19 nt, Homo sapiens
  misc_RNA (1)...(19): siRNA sense strand
cgugagagaagguuagaaa

SEQ ID NO: 2667086 - RNA, 19 nt, Homo sapiens
  misc_RNA (1)...(19): siRNA sense strand
uggaagaaauuuagcccaa

SEQ ID NO: 2667087 - RNA, 19 nt, Homo sapiens
  misc_RNA (1)...(19): siRNA sense strand
cuguaaaccagaagaagaa

SEQ ID NO: 2667088 - RNA, 19 nt, Homo sapiens
  misc_RNA (1)...(19): siRNA sense strand
cucaauauccagagguaaa

SEQ ID NO: 2667089 - RNA, 19 nt, Homo sapiens
  misc_RNA (1)...(19): siRNA sense strand
ucguaugaaucaauggaua

SEQ ID NO: 2667090 - RNA, 19 nt, Homo sapiens
  misc_RNA (1)...(19): siRNA sense strand
ccggaagaaaucugauaaa

SEQ ID NO: 2667091 - RNA, 19 nt, Homo sapiens
  misc_RNA (1)...(19): siRNA sense strand
ccaaaagauuucugggaca

SEQ ID NO: 2667092 - RNA, 19 nt, Homo sapiens
  misc_RNA (1)...(19): siRNA sense strand
ugaugagagucuuaguaaa

SEQ ID NO: 2667093 - RNA, 19 nt, Homo sapiens
  misc_RNA (1)...(19): siRNA sense strand
cagaaugaugagagucuua

SEQ ID NO: 2667094 - RNA, 19 nt, Homo sapiens
  misc_RNA (1)...(19): siRNA sense strand
cagaagaacgacagaaaau

SEQ ID NO: 2667095 - RNA, 19 nt, Homo sapiens
  misc_RNA (1)...(19): siRNA sense strand
ccuguaaaccagaagaaga

SEQ ID NO: 2667096 - RNA, 19 nt, Homo sapiens
  misc_RNA (1)...(19): siRNA sense strand
gcguucaggaaguggcuua

SEQ ID NO: 2667097 - RNA, 19 nt, Homo sapiens
  misc_RNA (1)...(19): siRNA sense strand
cuguaaacgaauuugcuaa

SEQ ID NO: 2667098 - RNA, 19 nt, Homo sapiens
  misc_RNA (1)...(19): siRNA sense strand
gcaacuucucuuuggaaau

SEQ ID NO: 2667099 - RNA, 19 nt, Homo sapiens
  misc_RNA (1)...(19): siRNA sense strand
ggagaaacaccaaaaggaa

SEQ ID NO: 2667100 - RNA, 19 nt, Homo sapiens
  misc_RNA (1)...(19): siRNA sense strand
auacauugccacacacaaa

SEQ ID NO: 2667101 - RNA, 19 nt, Homo sapiens
  misc_RNA (1)...(19): siRNA sense strand
acauauaaccaaugccaca

SEQ ID NO: 2667102 - RNA, 19 nt, Homo sapiens
  misc_RNA (1)...(19): siRNA sense strand
ucucaaguuugcagccuaa

SEQ ID NO: 2667103 - RNA, 19 nt, Homo sapiens
  misc_RNA (1)...(19): siRNA sense strand
gucugaaacacgugagaga

SEQ ID NO: 2667104 - RNA, 19 nt, Homo sapiens
  misc_RNA (1)...(19): siRNA sense strand
cccaagugauacagaugaa

SEQ ID NO: 2667105 - RNA, 19 nt, Homo sapiens
  misc_RNA (1)...(19): siRNA sense strand
aucagaagaacgacagaaa

SEQ ID NO: 2667106 - RNA, 19 nt, Homo sapiens
  misc_RNA (1)...(19): siRNA sense strand
ugagagaagguuagaaaau

SEQ ID NO: 2667107 - RNA, 19 nt, Homo sapiens
  misc_RNA (1)...(19): siRNA sense strand
cacucaaaccagaauguaa

SEQ ID NO: 2667108 - RNA, 19 nt, Homo sapiens
  misc_RNA (1)...(19): siRNA sense strand
acucaaaccagaauguaau

SEQ ID NO: 2667109 - RNA, 19 nt, Homo sapiens
  misc_RNA (1)...(19): siRNA sense strand
gcagaaaacaauuugaaga

SEQ ID NO: 2667110 - RNA, 19 nt, Homo sapiens
  misc_RNA (1)...(19): siRNA sense strand
cagaaaaugcuaagagacu

SEQ ID NO: 2667111 - RNA, 19 nt, Homo sapiens
  misc_RNA (1)...(19): siRNA sense strand
gggcagcacaugacguauu

SEQ ID NO: 2667112 - RNA, 19 nt, Homo sapiens
  misc_RNA (1)...(19): siRNA sense strand
ccacaucagaagaacgaca

SEQ ID NO: 2667113 - RNA, 19 nt, Homo sapiens
  misc_RNA (1)...(19): siRNA sense strand
ccuauagagaagagguguu

SEQ ID NO: 2667114 - RNA, 19 nt, Homo sapiens
  misc_RNA (1)...(19): siRNA sense strand
cugaacagugagucugaaa

SEQ ID NO: 2667115 - RNA, 19 nt, Homo sapiens
  misc_RNA (1)...(19): siRNA sense strand
cggaagaaaucugauaaaa

SEQ ID NO: 2667116 - RNA, 19 nt, Homo sapiens
  misc_RNA (1)...(19): siRNA sense strand
gaaaaugcuaagagacuuu

SEQ ID NO: 2667117 - RNA, 19 nt, Homo sapiens
  misc_RNA (1)...(19): siRNA sense strand
gagaaacaccaaaaggaau

SEQ ID NO: 2667118 - RNA, 19 nt, Homo sapiens
  misc_RNA (1)...(19): siRNA sense strand
augcagaaacuaagaaauc

SEQ ID NO: 2667119 - RNA, 19 nt, Homo sapiens
  misc_RNA (1)...(19): siRNA sense strand
cauauuuccuauagagaag

SEQ ID NO: 2667120 - RNA, 19 nt, Homo sapiens
  misc_RNA (1)...(19): siRNA sense strand
ccgaagauacugugacauc

SEQ ID NO: 2667121 - RNA, 19 nt, Homo sapiens
  misc_RNA (1)...(19): siRNA sense strand
ugauaagcuuacuugguga

SEQ ID NO: 2667122 - RNA, 19 nt, Homo sapiens
  misc_RNA (1)...(19): siRNA sense strand
acaucuugaaugagcagaa

SEQ ID NO: 2667123 - RNA, 19 nt, Homo sapiens
  misc_RNA (1)...(19): siRNA sense strand
gagagaagagccagcaacu

SEQ ID NO: 2667124 - RNA, 19 nt, Homo sapiens
  misc_RNA (1)...(19): siRNA sense strand
aggaaguggcuuauauuca

SEQ ID NO: 2667125 - RNA, 19 nt, Homo sapiens
  misc_RNA (1)...(19): siRNA sense strand
ugaugcagaaacuaagaaa

SEQ ID NO: 2667126 - RNA, 19 nt, Homo sapiens
  misc_RNA (1)...(19): siRNA sense strand
uaguucuacucaagagauu

SEQ ID NO: 2667127 - RNA, 19 nt, Homo sapiens
  misc_RNA (1)...(19): siRNA sense strand
cugaaacacgugagagaag

SEQ ID NO: 2667128 - RNA, 19 nt, Homo sapiens
  misc_RNA (1)...(19): siRNA sense strand
ucuugaaugagcagaauga

SEQ ID NO: 2667129 - RNA, 19 nt, Homo sapiens
  misc_RNA (1)...(19): siRNA sense strand
cgagcaaagcugaaaauca

SEQ ID NO: 2667130 - RNA, 19 nt, Homo sapiens
  misc_RNA (1)...(19): siRNA sense strand
ucacaugagccgaugggca

SEQ ID NO: 2667131 - RNA, 19 nt, Homo sapiens
  misc_RNA (1)...(19): siRNA sense strand
cagcgcacccggaagaaau

SEQ ID NO: 2667132 - RNA, 19 nt, Homo sapiens
  misc_RNA (1)...(19): siRNA sense strand
cacacaacugccaaagaaa

SEQ ID NO: 2667133 - RNA, 19 nt, Homo sapiens
  misc_RNA (1)...(19): siRNA sense strand
aaaaggaauccgcagaaaa

SEQ ID NO: 2667134 - RNA, 19 nt, Homo sapiens
  misc_RNA (1)...(19): siRNA sense strand
gaugcagaaacuaagaaau

SEQ ID NO: 2667135 - RNA, 19 nt, Homo sapiens
  misc_RNA (1)...(19): siRNA sense strand
guauuugaguugaagcagu

SEQ ID NO: 2667136 - RNA, 19 nt, Homo sapiens
  misc_RNA (1)...(19): siRNA sense strand
guaaaccagaagaagaaaa

SEQ ID NO: 2667137 - RNA, 19 nt, Homo sapiens
  misc_RNA (1)...(19): siRNA sense strand
ugaaagaccaacaggaccu

SEQ ID NO: 2667138 - RNA, 19 nt, Homo sapiens
  misc_RNA (1)...(19): siRNA sense strand
augaugagagucuuaguaa

SEQ ID NO: 2667139 - RNA, 19 nt, Homo sapiens
  misc_RNA (1)...(19): siRNA sense strand
cccaaaggagcuagggaaa

SEQ ID NO: 2667140 - RNA, 19 nt, Homo sapiens
  misc_RNA (1)...(19): siRNA sense strand
uguuaaacuuuguaggguu

SEQ ID NO: 2667141 - RNA, 19 nt, Homo sapiens
  misc_RNA (1)...(19): siRNA sense strand
ggauauuaaucgguggaga

SEQ ID NO: 2667142 - RNA, 19 nt, Homo sapiens
  misc_RNA (1)...(19): siRNA sense strand
agggaaauacggaguacuu

SEQ ID NO: 2667143 - RNA, 19 nt, Homo sapiens
  misc_RNA (1)...(19): siRNA sense strand
aaccuaaaccuguggguga

SEQ ID NO: 2667144 - RNA, 19 nt, Homo sapiens
  misc_RNA (1)...(19): siRNA sense strand
acccaaaggagcuagggaa

SEQ ID NO: 2667145 - RNA, 19 nt, Homo sapiens
  misc_RNA (1)...(19): siRNA sense strand
ccucagugucuuugccauu

SEQ ID NO: 2667146 - RNA, 19 nt, Homo sapiens
  misc_RNA (1)...(19): siRNA sense strand
cuuuuaacuuagaaggcua

SEQ ID NO: 2667147 - RNA, 19 nt, Homo sapiens
  misc_RNA (1)...(19): siRNA sense strand
uauauguguccaagcuaaa

SEQ ID NO: 2667148 - RNA, 19 nt, Homo sapiens
  misc_RNA (1)...(19): siRNA sense strand
uuucauagcagcugggucu

SEQ ID NO: 2667149 - RNA, 19 nt, Homo sapiens
  misc_RNA (1)...(19): siRNA sense strand
gauauuaaucgguggagac

SEQ ID NO: 2667150 - RNA, 19 nt, Homo sapiens
  misc_RNA (1)...(19): siRNA sense strand
cccaaaggagcuagggaaa

SEQ ID NO: 2667151 - RNA, 19 nt, Homo sapiens
  misc_RNA (1)...(19): siRNA sense strand
uguuaaacuuuguaggguu

SEQ ID NO: 2667152 - RNA, 19 nt, Homo sapiens
  misc_RNA (1)...(19): siRNA sense strand
ggauauuaaucgguggaga

SEQ ID NO: 2667153 - RNA, 19 nt, Homo sapiens
  misc_RNA (1)...(19): siRNA sense strand
agggaaauacggaguacuu

SEQ ID NO: 2667154 - RNA, 19 nt, Homo sapiens
  misc_RNA (1)...(19): siRNA sense strand
aaccuaaaccuguggguga

SEQ ID NO: 2667155 - RNA, 19 nt, Homo sapiens
  misc_RNA (1)...(19): siRNA sense strand
acccaaaggagcuagggaa

SEQ ID NO: 2667156 - RNA, 19 nt, Homo sapiens
  misc_RNA (1)...(19): siRNA sense strand
ccucagugucuuugccauu

SEQ ID NO: 2667157 - RNA, 19 nt, Homo sapiens
  misc_RNA (1)...(19): siRNA sense strand
cuuuuaacuuagaaggcua

SEQ ID NO: 2667158 - RNA, 19 nt, Homo sapiens
  misc_RNA (1)...(19): siRNA sense strand
uauauguguccaagcuaaa

SEQ ID NO: 2667159 - RNA, 19 nt, Homo sapiens
  misc_RNA (1)...(19): siRNA sense strand
uuucauagcagcugggucu

SEQ ID NO: 2667160 - RNA, 19 nt, Homo sapiens
  misc_RNA (1)...(19): siRNA sense strand
gauauuaaucgguggagac

SEQ ID NO: 2667161 - RNA, 19 nt, Homo sapiens
  misc_RNA (1)...(19): siRNA sense strand
gggaaugaaaagaggugaa

SEQ ID NO: 2667162 - RNA, 19 nt, Homo sapiens
  misc_RNA (1)...(19): siRNA sense strand
acguagaggaucuggccaa

SEQ ID NO: 2667163 - RNA, 19 nt, Homo sapiens
  misc_RNA (1)...(19): siRNA sense strand
aaugaaaagaggugaagaa

SEQ ID NO: 2667164 - RNA, 19 nt, Homo sapiens
  misc_RNA (1)...(19): siRNA sense strand
guuacaucugcaaggaaua

SEQ ID NO: 2667165 - RNA, 19 nt, Homo sapiens
  misc_RNA (1)...(19): siRNA sense strand
ugaaaagaggugaagaaau

SEQ ID NO: 2667166 - RNA, 19 nt, Homo sapiens
  misc_RNA (1)...(19): siRNA sense strand
cggcauuuccuguguuaca

SEQ ID NO: 2667167 - RNA, 19 nt, Homo sapiens
  misc_RNA (1)...(19): siRNA sense strand
gcaaggaauacguagagga

SEQ ID NO: 2667168 - RNA, 19 nt, Homo sapiens
  misc_RNA (1)...(19): siRNA sense strand
gcuuguaggaguucagcau

SEQ ID NO: 2667169 - RNA, 19 nt, Homo sapiens
  misc_RNA (1)...(19): siRNA sense strand
augucgauccugagagaga

SEQ ID NO: 2667170 - RNA, 19 nt, Homo sapiens
  misc_RNA (1)...(19): siRNA sense strand
cuggauauucucaugaaau

SEQ ID NO: 2667171 - RNA, 19 nt, Homo sapiens
  misc_RNA (1)...(19): siRNA sense strand
cgauccugagagagaaauu

SEQ ID NO: 2667172 - RNA, 19 nt, Homo sapiens
  misc_RNA (1)...(19): siRNA sense strand
ccaacaaaauggagagaaa

SEQ ID NO: 2667173 - RNA, 19 nt, Homo sapiens
  misc_RNA (1)...(19): siRNA sense strand
aggagaagcuggaggaaga

SEQ ID NO: 2667174 - RNA, 19 nt, Homo sapiens
  misc_RNA (1)...(19): siRNA sense strand
aagcauaaguagugggaca

SEQ ID NO: 2667175 - RNA, 19 nt, Homo sapiens
  misc_RNA (1)...(19): siRNA sense strand
gaaggaagagagugagaaa

SEQ ID NO: 2667176 - RNA, 19 nt, Homo sapiens
  misc_RNA (1)...(19): siRNA sense strand
aggaagagaaggaggagaa

SEQ ID NO: 2667177 - RNA, 19 nt, Homo sapiens
  misc_RNA (1)...(19): siRNA sense strand
uggagaaguuggagaauga

SEQ ID NO: 2667178 - RNA, 19 nt, Homo sapiens
  misc_RNA (1)...(19): siRNA sense strand
uagaagagguggaagaaga

SEQ ID NO: 2667179 - RNA, 19 nt, Homo sapiens
  misc_RNA (1)...(19): siRNA sense strand
caguagaagagguggaaga

SEQ ID NO: 2667180 - RNA, 19 nt, Homo sapiens
  misc_RNA (1)...(19): siRNA sense strand
aggaagaagacaaggaaga

SEQ ID NO: 2667181 - RNA, 19 nt, Homo sapiens
  misc_RNA (1)...(19): siRNA sense strand
ugugaagggucaaggagaa

SEQ ID NO: 2667182 - RNA, 19 nt, Homo sapiens
  misc_RNA (1)...(19): siRNA sense strand
cagcagaaguggaugcaca

SEQ ID NO: 2667183 - RNA, 19 nt, Homo sapiens
  misc_RNA (1)...(19): siRNA sense strand
ugcagaagucauagagaaa

SEQ ID NO: 2667184 - RNA, 19 nt, Homo sapiens
  misc_RNA (1)...(19): siRNA sense strand
uggaagaaaugcagguuga

SEQ ID NO: 2667185 - RNA, 19 nt, Homo sapiens
  misc_RNA (1)...(19): siRNA sense strand
cagaggaguucuaccguaa

SEQ ID NO: 2667186 - RNA, 19 nt, Homo sapiens
  misc_RNA (1)...(19): siRNA sense strand
ggaauguaccagaaggaau

SEQ ID NO: 2667187 - RNA, 19 nt, Homo sapiens
  misc_RNA (1)...(19): siRNA sense strand
gaaggaagcugcccggaua

SEQ ID NO: 2667188 - RNA, 19 nt, Homo sapiens
  misc_RNA (1)...(19): siRNA sense strand
ucauagaacaagugacaau

SEQ ID NO: 2667189 - RNA, 19 nt, Homo sapiens
  misc_RNA (1)...(19): siRNA sense strand
cauuugaggaggagcuaaa

SEQ ID NO: 2667190 - RNA, 19 nt, Homo sapiens
  misc_RNA (1)...(19): siRNA sense strand
aggagaaugugaaggguca

SEQ ID NO: 2667191 - RNA, 19 nt, Homo sapiens
  misc_RNA (1)...(19): siRNA sense strand
cugcuggagcugugggaua

SEQ ID NO: 2667192 - RNA, 19 nt, Homo sapiens
  misc_RNA (1)...(19): siRNA sense strand
ggacaaauccuucgagacu

SEQ ID NO: 2667193 - RNA, 19 nt, Homo sapiens
  misc_RNA (1)...(19): siRNA sense strand
aggagaagcuggaggaaug

SEQ ID NO: 2667194 - RNA, 19 nt, Homo sapiens
  misc_RNA (1)...(19): siRNA sense strand
agauauacuaugaggacau

SEQ ID NO: 2667195 - RNA, 19 nt, Homo sapiens
  misc_RNA (1)...(19): siRNA sense strand
cagaagaacuccucagcuu

SEQ ID NO: 2667196 - RNA, 19 nt, Homo sapiens
  misc_RNA (1)...(19): siRNA sense strand
aggaggagcuaaagaggau

SEQ ID NO: 2667197 - RNA, 19 nt, Homo sapiens
  misc_RNA (1)...(19): siRNA sense strand
agucagaggaggaagauga

SEQ ID NO: 2667198 - RNA, 19 nt, Homo sapiens
  misc_RNA (1)...(19): siRNA sense strand
ccugaaauauuuagcauca

SEQ ID NO: 2667199 - RNA, 19 nt, Homo sapiens
  misc_RNA (1)...(19): siRNA sense strand
ggaugaaagcguuccacaa

SEQ ID NO: 2667200 - RNA, 19 nt, Homo sapiens
  misc_RNA (1)...(19): siRNA sense strand
ggauagaguugguugaaag

SEQ ID NO: 2667201 - RNA, 19 nt, Homo sapiens
  misc_RNA (1)...(19): siRNA sense strand
gcucagcgcuggaaggaca

SEQ ID NO: 2667202 - RNA, 19 nt, Homo sapiens
  misc_RNA (1)...(19): siRNA sense strand
uggagaauuucaaggaaca

SEQ ID NO: 2667203 - RNA, 19 nt, Homo sapiens
  misc_RNA (1)...(19): siRNA sense strand
aggaaagagccaagaggga

SEQ ID NO: 2667204 - RNA, 19 nt, Homo sapiens
  misc_RNA (1)...(19): siRNA sense strand
gcgcaggugggaaaggaaa

SEQ ID NO: 2667205 - RNA, 19 nt, Homo sapiens
  misc_RNA (1)...(19): siRNA sense strand
aggcagagacccuggugaa

SEQ ID NO: 2667206 - RNA, 19 nt, Homo sapiens
  misc_RNA (1)...(19): siRNA sense strand
ggaaagagccaagagggaa

SEQ ID NO: 2667207 - RNA, 19 nt, Homo sapiens
  misc_RNA (1)...(19): siRNA sense strand
ggaagaagcaagggucuaa

SEQ ID NO: 2667208 - RNA, 19 nt, Homo sapiens
  misc_RNA (1)...(19): siRNA sense strand
gaaauggaguccuucauaa

SEQ ID NO: 2667209 - RNA, 19 nt, Homo sapiens
  misc_RNA (1)...(19): siRNA sense strand
ugaaggaccaggaggaaga

SEQ ID NO: 2667210 - RNA, 19 nt, Homo sapiens
  misc_RNA (1)...(19): siRNA sense strand
agauuaaggagcuggauga

SEQ ID NO: 2667211 - RNA, 19 nt, Homo sapiens
  misc_RNA (1)...(19): siRNA sense strand
ugcaacagcuucagaacaa

SEQ ID NO: 2667212 - RNA, 19 nt, Homo sapiens
  misc_RNA (1)...(19): siRNA sense strand
cagaggaggaagaugagaa

SEQ ID NO: 2667213 - RNA, 19 nt, Homo sapiens
  misc_RNA (1)...(19): siRNA sense strand
guucauggccagugagagu

SEQ ID NO: 2667214 - RNA, 19 nt, Homo sapiens
  misc_RNA (1)...(19): siRNA sense strand
gaagaaaacgaucaagaaa

SEQ ID NO: 2667215 - RNA, 19 nt, Homo sapiens
  misc_RNA (1)...(19): siRNA sense strand
agauugcgcaggugggaaa

SEQ ID NO: 2667216 - RNA, 19 nt, Homo sapiens
  misc_RNA (1)...(19): siRNA sense strand
aagagaaggaggagaagga

SEQ ID NO: 2667217 - RNA, 19 nt, Homo sapiens
  misc_RNA (1)...(19): siRNA sense strand
aggcacaggaagagcaaga

SEQ ID NO: 2667218 - RNA, 19 nt, Homo sapiens
  misc_RNA (1)...(19): siRNA sense strand
agaaauaugcagaagucau

SEQ ID NO: 2667219 - RNA, 19 nt, Homo sapiens
  misc_RNA (1)...(19): siRNA sense strand
agggcaaaguggaggagga

SEQ ID NO: 2667220 - RNA, 19 nt, Homo sapiens
  misc_RNA (1)...(19): siRNA sense strand
agaagugaggaaagcauaa

SEQ ID NO: 2667221 - RNA, 19 nt, Homo sapiens
  misc_RNA (1)...(19): siRNA sense strand
gcaaaguggaggaggaccu

SEQ ID NO: 2667222 - RNA, 19 nt, Homo sapiens
  misc_RNA (1)...(19): siRNA sense strand
gugaagggucaaggagaaa

SEQ ID NO: 2667223 - RNA, 19 nt, Homo sapiens
  misc_RNA (1)...(19): siRNA sense strand
ggaagagggucuagaggag

SEQ ID NO: 2667224 - RNA, 19 nt, Homo sapiens
  misc_RNA (1)...(19): siRNA sense strand
acaauuccaucgagacuaa

SEQ ID NO: 2667225 - RNA, 19 nt, Homo sapiens
  misc_RNA (1)...(19): siRNA sense strand
cccugaaggaagagaguga

SEQ ID NO: 2667226 - RNA, 19 nt, Homo sapiens
  misc_RNA (1)...(19): siRNA sense strand
gcaaauaaguaccacaacu

SEQ ID NO: 2667227 - RNA, 19 nt, Homo sapiens
  misc_RNA (1)...(19): siRNA sense strand
ggucaguagaagaggugga

SEQ ID NO: 2667228 - RNA, 19 nt, Homo sapiens
  misc_RNA (1)...(19): siRNA sense strand
agaagagguggaagaagaa

SEQ ID NO: 2667229 - RNA, 19 nt, Homo sapiens
  misc_RNA (1)...(19): siRNA sense strand
acauggagaaguuggagaa

SEQ ID NO: 2667230 - RNA, 19 nt, Homo sapiens
  misc_RNA (1)...(19): siRNA sense strand
gcagaagcggcuggagaaa

SEQ ID NO: 2667231 - RNA, 19 nt, Homo sapiens
  misc_RNA (1)...(19): siRNA sense strand
ucacugaggaggaggcaga

SEQ ID NO: 2667232 - RNA, 19 nt, Homo sapiens
  misc_RNA (1)...(19): siRNA sense strand
gaucagacagaguggcaga

SEQ ID NO: 2667233 - RNA, 19 nt, Homo sapiens
  misc_RNA (1)...(19): siRNA sense strand
cccagaagcuccaucuaaa

SEQ ID NO: 2667234 - RNA, 19 nt, Homo sapiens
  misc_RNA (1)...(19): siRNA sense strand
gagaagacauggcaggagu

SEQ ID NO: 2667235 - RNA, 19 nt, Homo sapiens
  misc_RNA (1)...(19): siRNA sense strand
agaaaugcagguugaaaga

SEQ ID NO: 2667236 - RNA, 19 nt, Homo sapiens
  misc_RNA (1)...(19): siRNA sense strand
aaaugcagguugaaagaga

SEQ ID NO: 2667237 - RNA, 19 nt, Homo sapiens
  misc_RNA (1)...(19): siRNA sense strand
ggcuggugauggagaauuu

SEQ ID NO: 2667238 - RNA, 19 nt, Homo sapiens
  misc_RNA (1)...(19): siRNA sense strand
cagaagugaggaaagcaua

SEQ ID NO: 2667239 - RNA, 19 nt, Homo sapiens
  misc_RNA (1)...(19): siRNA sense strand
aggcaaauaaguaccacaa

SEQ ID NO: 2667240 - RNA, 19 nt, Homo sapiens
  misc_RNA (1)...(19): siRNA sense strand
ugacgaaucugcaagugaa

SEQ ID NO: 2667241 - RNA, 19 nt, Homo sapiens
  misc_RNA (1)...(19): siRNA sense strand
accuggagcucuuggacaa

SEQ ID NO: 2667242 - RNA, 19 nt, Homo sapiens
  misc_RNA (1)...(19): siRNA sense strand
aggaggagaaggaggcaca

SEQ ID NO: 2667243 - RNA, 19 nt, Homo sapiens
  misc_RNA (1)...(19): siRNA sense strand
cggauagaguugguugaaa

SEQ ID NO: 2667244 - RNA, 19 nt, Homo sapiens
  misc_RNA (1)...(19): siRNA sense strand
ggagaaaagaaaggacaaa

SEQ ID NO: 2667245 - RNA, 19 nt, Homo sapiens
  misc_RNA (1)...(19): siRNA sense strand
agaagaggauggagcagca

SEQ ID NO: 2667246 - RNA, 19 nt, Homo sapiens
  misc_RNA (1)...(19): siRNA sense strand
gaagaaaugcagguugaaa

SEQ ID NO: 2667247 - RNA, 19 nt, Homo sapiens
  misc_RNA (1)...(19): siRNA sense strand
ugacagucgcagaggaguu

SEQ ID NO: 2667248 - RNA, 19 nt, Homo sapiens
  misc_RNA (1)...(19): siRNA sense strand
cugaaggaagagagugaga

SEQ ID NO: 2667249 - RNA, 19 nt, Homo sapiens
  misc_RNA (1)...(19): siRNA sense strand
gcagaguggcuaugaggga

SEQ ID NO: 2667250 - RNA, 19 nt, Homo sapiens
  misc_RNA (1)...(19): siRNA sense strand
cggcaauuaauaagugaaa

SEQ ID NO: 2667251 - RNA, 19 nt, Homo sapiens
  misc_RNA (1)...(19): siRNA sense strand
cugacauagcccagagaua

SEQ ID NO: 2667252 - RNA, 19 nt, Homo sapiens
  misc_RNA (1)...(19): siRNA sense strand
cuacaaaccaccagggcau

SEQ ID NO: 2667253 - RNA, 19 nt, Homo sapiens
  misc_RNA (1)...(19): siRNA sense strand
aggaauuagagcagaaaga

SEQ ID NO: 2667254 - RNA, 19 nt, Homo sapiens
  misc_RNA (1)...(19): siRNA sense strand
ggccaaugauggaggcuca

SEQ ID NO: 2667255 - RNA, 19 nt, Homo sapiens
  misc_RNA (1)...(19): siRNA sense strand
agauacaggauaagcaaau

SEQ ID NO: 2667256 - RNA, 19 nt, Homo sapiens
  misc_RNA (1)...(19): siRNA sense strand
gggucagcgaucagugaaa

SEQ ID NO: 2667257 - RNA, 19 nt, Homo sapiens
  misc_RNA (1)...(19): siRNA sense strand
cagugaaagcauuggcaga

SEQ ID NO: 2667258 - RNA, 19 nt, Homo sapiens
  misc_RNA (1)...(19): siRNA sense strand
gaaugaaguagcucggcaa

SEQ ID NO: 2667259 - RNA, 19 nt, Homo sapiens
  misc_RNA (1)...(19): siRNA sense strand
augaugaugaagagagaau

SEQ ID NO: 2667260 - RNA, 19 nt, Homo sapiens
  misc_RNA (1)...(19): siRNA sense strand
cggaagugagggugugaga

SEQ ID NO: 2667261 - RNA, 19 nt, Homo sapiens
  misc_RNA (1)...(19): siRNA sense strand
ccaggaaggccgugagucu

SEQ ID NO: 2667262 - RNA, 19 nt, Homo sapiens
  misc_RNA (1)...(19): siRNA sense strand
ggaaaacugcacagagaau

SEQ ID NO: 2667263 - RNA, 19 nt, Homo sapiens
  misc_RNA (1)...(19): siRNA sense strand
aagucuugauacagagaau

SEQ ID NO: 2667264 - RNA, 19 nt, Homo sapiens
  misc_RNA (1)...(19): siRNA sense strand
ggaaagauauaguggcgac

SEQ ID NO: 2667265 - RNA, 19 nt, Homo sapiens
  misc_RNA (1)...(19): siRNA sense strand
gggccaaggcggacuacau

SEQ ID NO: 2667266 - RNA, 19 nt, Homo sapiens
  misc_RNA (1)...(19): siRNA sense strand
ucacaugaaagaagauaca

SEQ ID NO: 2667267 - RNA, 19 nt, Homo sapiens
  misc_RNA (1)...(19): siRNA sense strand
gggcauucugcuccggaua

SEQ ID NO: 2667268 - RNA, 19 nt, Homo sapiens
  misc_RNA (1)...(19): siRNA sense strand
cuggaaaacugcacagaga

SEQ ID NO: 2667269 - RNA, 19 nt, Homo sapiens
  misc_RNA (1)...(19): siRNA sense strand
uugaaaauggagaggaauu

SEQ ID NO: 2667270 - RNA, 19 nt, Homo sapiens
  misc_RNA (1)...(19): siRNA sense strand
acaugaaagaagauacaga

SEQ ID NO: 2667271 - RNA, 19 nt, Homo sapiens
  misc_RNA (1)...(19): siRNA sense strand
acagaaaacuccagcagau

SEQ ID NO: 2667272 - RNA, 19 nt, Homo sapiens
  misc_RNA (1)...(19): siRNA sense strand
uccuguaacaacugaaaua

SEQ ID NO: 2667273 - RNA, 19 nt, Homo sapiens
  misc_RNA (1)...(19): siRNA sense strand
agagauacaggauaagcaa

SEQ ID NO: 2667274 - RNA, 19 nt, Homo sapiens
  misc_RNA (1)...(19): siRNA sense strand
cccucaaauuguuucguaa

SEQ ID NO: 2667275 - RNA, 19 nt, Homo sapiens
  misc_RNA (1)...(19): siRNA sense strand
ccucaaauuguuucguaau

SEQ ID NO: 2667276 - RNA, 19 nt, Homo sapiens
  misc_RNA (1)...(19): siRNA sense strand
cauuggauauuuugagcaa

SEQ ID NO: 2667277 - RNA, 19 nt, Homo sapiens
  misc_RNA (1)...(19): siRNA sense strand
uugaacgaguagcgaauau

SEQ ID NO: 2667278 - RNA, 19 nt, Homo sapiens
  misc_RNA (1)...(19): siRNA sense strand
acuugggagcuaugacaaa

SEQ ID NO: 2667279 - RNA, 19 nt, Homo sapiens
  misc_RNA (1)...(19): siRNA sense strand
gaauuagagcagaaagaag

SEQ ID NO: 2667280 - RNA, 19 nt, Homo sapiens
  misc_RNA (1)...(19): siRNA sense strand
auggagaggaauugacaga

SEQ ID NO: 2667281 - RNA, 19 nt, Homo sapiens
  misc_RNA (1)...(19): siRNA sense strand
gguauacucuauugaggga

SEQ ID NO: 2667282 - RNA, 19 nt, Homo sapiens
  misc_RNA (1)...(19): siRNA sense strand
agaggaauugacagaagaa

SEQ ID NO: 2667283 - RNA, 19 nt, Homo sapiens
  misc_RNA (1)...(19): siRNA sense strand
gagcaaaaggacucggaca

SEQ ID NO: 2667284 - RNA, 19 nt, Homo sapiens
  misc_RNA (1)...(19): siRNA sense strand
agcaaaaggacucggacaa

SEQ ID NO: 2667285 - RNA, 19 nt, Homo sapiens
  misc_RNA (1)...(19): siRNA sense strand
aggauaagcaaauacccaa

SEQ ID NO: 2667286 - RNA, 19 nt, Homo sapiens
  misc_RNA (1)...(19): siRNA sense strand
uccucuuguccgagaaaua

SEQ ID NO: 2667287 - RNA, 19 nt, Homo sapiens
  misc_RNA (1)...(19): siRNA sense strand
auauguauguguuuggaga

SEQ ID NO: 2667288 - RNA, 19 nt, Homo sapiens
  misc_RNA (1)...(19): siRNA sense strand
acuagcacccagugaauau

SEQ ID NO: 2667289 - RNA, 19 nt, Homo sapiens
  misc_RNA (1)...(19): siRNA sense strand
ccugagagcuccuuccaga

SEQ ID NO: 2667290 - RNA, 19 nt, Homo sapiens
  misc_RNA (1)...(19): siRNA sense strand
gcagaagacucaugugaca

SEQ ID NO: 2667291 - RNA, 19 nt, Homo sapiens
  misc_RNA (1)...(19): siRNA sense strand
agacacagaugguugggua

SEQ ID NO: 2667292 - RNA, 19 nt, Homo sapiens
  misc_RNA (1)...(19): siRNA sense strand
auuuaaacgcccugugaau

SEQ ID NO: 2667293 - RNA, 19 nt, Homo sapiens
  misc_RNA (1)...(19): siRNA sense strand
aauguaggccagugggcaa

SEQ ID NO: 2667294 - RNA, 19 nt, Homo sapiens
  misc_RNA (1)...(19): siRNA sense strand
ccagagaugaagaaggagu

SEQ ID NO: 2667295 - RNA, 19 nt, Homo sapiens
  misc_RNA (1)...(19): siRNA sense strand
cugcauuugaguugguauu

SEQ ID NO: 2667296 - RNA, 19 nt, Homo sapiens
  misc_RNA (1)...(19): siRNA sense strand
cagagaugaagaaggaguu

SEQ ID NO: 2667297 - RNA, 19 nt, Homo sapiens
  misc_RNA (1)...(19): siRNA sense strand
ucgacaugauauagacuca

SEQ ID NO: 2667298 - RNA, 19 nt, Homo sapiens
  misc_RNA (1)...(19): siRNA sense strand
aagggaugcuuuagcugua

SEQ ID NO: 2667299 - RNA, 19 nt, Homo sapiens
  misc_RNA (1)...(19): siRNA sense strand
cugauaugcagaagacuca

SEQ ID NO: 2667300 - RNA, 19 nt, Homo sapiens
  misc_RNA (1)...(19): siRNA sense strand
agaaguaacaccagagaua

SEQ ID NO: 2667301 - RNA, 19 nt, Homo sapiens
  misc_RNA (1)...(19): siRNA sense strand
ggacaguagauuagaaaga

SEQ ID NO: 2667302 - RNA, 19 nt, Homo sapiens
  misc_RNA (1)...(19): siRNA sense strand
ccaagaaggaguacguaaa

SEQ ID NO: 2667303 - RNA, 19 nt, Homo sapiens
  misc_RNA (1)...(19): siRNA sense strand
gaaucuaaacagugggaau

SEQ ID NO: 2667304 - RNA, 19 nt, Homo sapiens
  misc_RNA (1)...(19): siRNA sense strand
ggaauguagcaaagagaau

SEQ ID NO: 2667305 - RNA, 19 nt, Homo sapiens
  misc_RNA (1)...(19): siRNA sense strand
aaguaacaccagagauaaa

SEQ ID NO: 2667306 - RNA, 19 nt, Homo sapiens
  misc_RNA (1)...(19): siRNA sense strand
agacaaaacagaauggaua

SEQ ID NO: 2667307 - RNA, 19 nt, Homo sapiens
  misc_RNA (1)...(19): siRNA sense strand
caggaaaggaggagcuauu

SEQ ID NO: 2667308 - RNA, 19 nt, Homo sapiens
  misc_RNA (1)...(19): siRNA sense strand
gguagaaacagaaaagaaa

SEQ ID NO: 2667309 - RNA, 19 nt, Homo sapiens
  misc_RNA (1)...(19): siRNA sense strand
ccaccaaagaggacagauu

SEQ ID NO: 2667310 - RNA, 19 nt, Homo sapiens
  misc_RNA (1)...(19): siRNA sense strand
gggugaaauuggcagaaau

SEQ ID NO: 2667311 - RNA, 19 nt, Homo sapiens
  misc_RNA (1)...(19): siRNA sense strand
gguuaaugcuuuuggaaga

SEQ ID NO: 2667312 - RNA, 19 nt, Homo sapiens
  misc_RNA (1)...(19): siRNA sense strand
cgggauagcagcacugaaa

SEQ ID NO: 2667313 - RNA, 19 nt, Homo sapiens
  misc_RNA (1)...(19): siRNA sense strand
ugaacuaggcaaugaacaa

SEQ ID NO: 2667314 - RNA, 19 nt, Homo sapiens
  misc_RNA (1)...(19): siRNA sense strand
gaacagugugauucagaaa

SEQ ID NO: 2667315 - RNA, 19 nt, Homo sapiens
  misc_RNA (1)...(19): siRNA sense strand
cagaagugguguaggucuu

SEQ ID NO: 2667316 - RNA, 19 nt, Homo sapiens
  misc_RNA (1)...(19): siRNA sense strand
aggcaaugaacaagaucaa

SEQ ID NO: 2667317 - RNA, 19 nt, Homo sapiens
  misc_RNA (1)...(19): siRNA sense strand
gacaaguggcugugaaauu

SEQ ID NO: 2667318 - RNA, 19 nt, Homo sapiens
  misc_RNA (1)...(19): siRNA sense strand
cagaauggauaaagagucu

SEQ ID NO: 2667319 - RNA, 19 nt, Homo sapiens
  misc_RNA (1)...(19): siRNA sense strand
guauauggagaaagaagaa

SEQ ID NO: 2667320 - RNA, 19 nt, Homo sapiens
  misc_RNA (1)...(19): siRNA sense strand
ugaaguuucuggagagaca

SEQ ID NO: 2667321 - RNA, 19 nt, Homo sapiens
  misc_RNA (1)...(19): siRNA sense strand
auucagagugcuacagaaa

SEQ ID NO: 2667322 - RNA, 19 nt, Homo sapiens
  misc_RNA (1)...(19): siRNA sense strand
gugggaagguauuuggcua

SEQ ID NO: 2667323 - RNA, 19 nt, Homo sapiens
  misc_RNA (1)...(19): siRNA sense strand
acgaaaagcggcagaacua

SEQ ID NO: 2667324 - RNA, 19 nt, Homo sapiens
  misc_RNA (1)...(19): siRNA sense strand
gcugauaucuugaaggcca

SEQ ID NO: 2667325 - RNA, 19 nt, Homo sapiens
  misc_RNA (1)...(19): siRNA sense strand
caaauugggaaucgugaaa

SEQ ID NO: 2667326 - RNA, 19 nt, Homo sapiens
  misc_RNA (1)...(19): siRNA sense strand
guaaagaagaaaugcgcga

SEQ ID NO: 2667327 - RNA, 19 nt, Homo sapiens
  misc_RNA (1)...(19): siRNA sense strand
ucaaggaaucuguacgaaa

SEQ ID NO: 2667328 - RNA, 19 nt, Homo sapiens
  misc_RNA (1)...(19): siRNA sense strand
ucagagugcuacagaaaca

SEQ ID NO: 2667329 - RNA, 19 nt, Homo sapiens
  misc_RNA (1)...(19): siRNA sense strand
gaacaagaucaacaggaau

SEQ ID NO: 2667330 - RNA, 19 nt, Homo sapiens
  misc_RNA (1)...(19): siRNA sense strand
uagcaaagagaaugucaaa

SEQ ID NO: 2667331 - RNA, 19 nt, Homo sapiens
  misc_RNA (1)...(19): siRNA sense strand
cuggagagacagugguauu

SEQ ID NO: 2667332 - RNA, 19 nt, Homo sapiens
  misc_RNA (1)...(19): siRNA sense strand
gaacagugcaaauugggaa

SEQ ID NO: 2667333 - RNA, 19 nt, Homo sapiens
  misc_RNA (1)...(19): siRNA sense strand
aggagaaugaaaaggaaaa

SEQ ID NO: 2667334 - RNA, 19 nt, Homo sapiens
  misc_RNA (1)...(19): siRNA sense strand
gcaggagaaagcagcguua

SEQ ID NO: 2667335 - RNA, 19 nt, Homo sapiens
  misc_RNA (1)...(19): siRNA sense strand
gcaaugaacaagaucaaca

SEQ ID NO: 2667336 - RNA, 19 nt, Homo sapiens
  misc_RNA (1)...(19): siRNA sense strand
ugugagaacagaagcuuua

SEQ ID NO: 2667337 - RNA, 19 nt, Homo sapiens
  misc_RNA (1)...(19): siRNA sense strand
cccaagaaggaguacguaa

SEQ ID NO: 2667338 - RNA, 19 nt, Homo sapiens
  misc_RNA (1)...(19): siRNA sense strand
gguuuaugaacuaggcaau

SEQ ID NO: 2667339 - RNA, 19 nt, Homo sapiens
  misc_RNA (1)...(19): siRNA sense strand
gaguacaagaugauaucaa

SEQ ID NO: 2667340 - RNA, 19 nt, Homo sapiens
  misc_RNA (1)...(19): siRNA sense strand
uaugaugguuggagcguau

SEQ ID NO: 2667341 - RNA, 19 nt, Homo sapiens
  misc_RNA (1)...(19): siRNA sense strand
gcuacuggcugcaggagau

SEQ ID NO: 2667342 - RNA, 19 nt, Homo sapiens
  misc_RNA (1)...(19): siRNA sense strand
cagaaaagcuggcuaccaa

SEQ ID NO: 2667343 - RNA, 19 nt, Homo sapiens
  misc_RNA (1)...(19): siRNA sense strand
gcaacaagaccuggagaga

SEQ ID NO: 2667344 - RNA, 19 nt, Homo sapiens
  misc_RNA (1)...(19): siRNA sense strand
gguauauggagaaagaaga

SEQ ID NO: 2667345 - RNA, 19 nt, Homo sapiens
  misc_RNA (1)...(19): siRNA sense strand
caaacgaguuauuggugau

SEQ ID NO: 2667346 - RNA, 19 nt, Homo sapiens
  misc_RNA (1)...(19): siRNA sense strand
gcuuaauugacuggaauaa

SEQ ID NO: 2667347 - RNA, 19 nt, Homo sapiens
  misc_RNA (1)...(19): siRNA sense strand
ugggaagguauuuggcuaa

SEQ ID NO: 2667348 - RNA, 19 nt, Homo sapiens
  misc_RNA (1)...(19): siRNA sense strand
aaugagaaugucagagcaa

SEQ ID NO: 2667349 - RNA, 19 nt, Homo sapiens
  misc_RNA (1)...(19): siRNA sense strand
gaugaaagaacgagcaauc

SEQ ID NO: 2667350 - RNA, 19 nt, Homo sapiens
  misc_RNA (1)...(19): siRNA sense strand
ucaggaaggaagcaggaaa

SEQ ID NO: 2667351 - RNA, 19 nt, Homo sapiens
  misc_RNA (1)...(19): siRNA sense strand
ccaucugaauaaacguaua

SEQ ID NO: 2667352 - RNA, 19 nt, Homo sapiens
  misc_RNA (1)...(19): siRNA sense strand
ugagaaugucagagcaaca

SEQ ID NO: 2667353 - RNA, 19 nt, Homo sapiens
  misc_RNA (1)...(19): siRNA sense strand
caugacaaguauuuggaau

SEQ ID NO: 2667354 - RNA, 19 nt, Homo sapiens
  misc_RNA (1)...(19): siRNA sense strand
auucagaaaucuugugcau

SEQ ID NO: 2667355 - RNA, 19 nt, Homo sapiens
  misc_RNA (1)...(19): siRNA sense strand
ccgaaguguggcaggaaaa

SEQ ID NO: 2667356 - RNA, 19 nt, Homo sapiens
  misc_RNA (1)...(19): siRNA sense strand
gcugaaauucugcuugaaa

SEQ ID NO: 2667357 - RNA, 19 nt, Homo sapiens
  misc_RNA (1)...(19): siRNA sense strand
ccacagcaggauagcuuaa

SEQ ID NO: 2667358 - RNA, 19 nt, Homo sapiens
  misc_RNA (1)...(19): siRNA sense strand
caguacaagagucaaguua

SEQ ID NO: 2667359 - RNA, 19 nt, Homo sapiens
  misc_RNA (1)...(19): siRNA sense strand
aggagauccacgugaagaa

SEQ ID NO: 2667360 - RNA, 19 nt, Homo sapiens
  misc_RNA (1)...(19): siRNA sense strand
cggcagcagaccuggaauu

SEQ ID NO: 2667361 - RNA, 19 nt, Homo sapiens
  misc_RNA (1)...(19): siRNA sense strand
gagucaaguuaaagauugu

SEQ ID NO: 2667362 - RNA, 19 nt, Homo sapiens
  misc_RNA (1)...(19): siRNA sense strand
aaugaagaggagaaugaaa

SEQ ID NO: 2667363 - RNA, 19 nt, Homo sapiens
  misc_RNA (1)...(19): siRNA sense strand
ggaaggaagcaggaaacua

SEQ ID NO: 2667364 - RNA, 19 nt, Homo sapiens
  misc_RNA (1)...(19): siRNA sense strand
ucgacaaguggcugugaaa

SEQ ID NO: 2667365 - RNA, 19 nt, Homo sapiens
  misc_RNA (1)...(19): siRNA sense strand
aaaugacugaagaggaaua

SEQ ID NO: 2667366 - RNA, 19 nt, Homo sapiens
  misc_RNA (1)...(19): siRNA sense strand
gggaaaugagaguggagaa

SEQ ID NO: 2667367 - RNA, 19 nt, Homo sapiens
  misc_RNA (1)...(19): siRNA sense strand
uggaagaaucccagcaaua

SEQ ID NO: 2667368 - RNA, 19 nt, Homo sapiens
  misc_RNA (1)...(19): siRNA sense strand
aagaaaucucggagguaua

SEQ ID NO: 2667369 - RNA, 19 nt, Homo sapiens
  misc_RNA (1)...(19): siRNA sense strand
auguaaagacugugggaga

SEQ ID NO: 2667370 - RNA, 19 nt, Homo sapiens
  misc_RNA (1)...(19): siRNA sense strand
aucuaaugauggugggaaa

SEQ ID NO: 2667371 - RNA, 19 nt, Homo sapiens
  misc_RNA (1)...(19): siRNA sense strand
aauucauacaggagagaaa

SEQ ID NO: 2667372 - RNA, 19 nt, Homo sapiens
  misc_RNA (1)...(19): siRNA sense strand
aggaagugcuacuggaaaa

SEQ ID NO: 2667373 - RNA, 19 nt, Homo sapiens
  misc_RNA (1)...(19): siRNA sense strand
guguaaugaauguggaaaa

SEQ ID NO: 2667374 - RNA, 19 nt, Homo sapiens
  misc_RNA (1)...(19): siRNA sense strand
aacucauaguggagagaaa

SEQ ID NO: 2667375 - RNA, 19 nt, Homo sapiens
  misc_RNA (1)...(19): siRNA sense strand
cagaggaggaucacgguaa

SEQ ID NO: 2667376 - RNA, 19 nt, Homo sapiens
  misc_RNA (1)...(19): siRNA sense strand
cuguagugcccuugaacaa

SEQ ID NO: 2667377 - RNA, 19 nt, Homo sapiens
  misc_RNA (1)...(19): siRNA sense strand
gugggaaaguccugaguca

SEQ ID NO: 2667378 - RNA, 19 nt, Homo sapiens
  misc_RNA (1)...(19): siRNA sense strand
augcaguaagugugggaua

SEQ ID NO: 2667379 - RNA, 19 nt, Homo sapiens
  misc_RNA (1)...(19): siRNA sense strand
augugaugacugugggaaa

SEQ ID NO: 2667380 - RNA, 19 nt, Homo sapiens
  misc_RNA (1)...(19): siRNA sense strand
cccuauacauguagcaauu

SEQ ID NO: 2667381 - RNA, 19 nt, Homo sapiens
  misc_RNA (1)...(19): siRNA sense strand
ccaggaaagcucugaguca

SEQ ID NO: 2667382 - RNA, 19 nt, Homo sapiens
  misc_RNA (1)...(19): siRNA sense strand
agacagagguuuagguggu

SEQ ID NO: 2667383 - RNA, 19 nt, Homo sapiens
  misc_RNA (1)...(19): siRNA sense strand
guaagaaauuugacccaga

SEQ ID NO: 2667384 - RNA, 19 nt, Homo sapiens
  misc_RNA (1)...(19): siRNA sense strand
agguauaaugaaagcaaga

SEQ ID NO: 2667385 - RNA, 19 nt, Homo sapiens
  misc_RNA (1)...(19): siRNA sense strand
gugugagaaaugucggaaa

SEQ ID NO: 2667386 - RNA, 19 nt, Homo sapiens
  misc_RNA (1)...(19): siRNA sense strand
ucggaaagauucaugucaa

SEQ ID NO: 2667387 - RNA, 19 nt, Homo sapiens
  misc_RNA (1)...(19): siRNA sense strand
aaauguaaccagugugaga

SEQ ID NO: 2667388 - RNA, 19 nt, Homo sapiens
  misc_RNA (1)...(19): siRNA sense strand
uuuccaaacaucagagaau

SEQ ID NO: 2667389 - RNA, 19 nt, Homo sapiens
  misc_RNA (1)...(19): siRNA sense strand
aggaaaugcugcugaugca

SEQ ID NO: 2667390 - RNA, 19 nt, Homo sapiens
  misc_RNA (1)...(19): siRNA sense strand
gggaaauucaaaaggaaga

SEQ ID NO: 2667391 - RNA, 19 nt, Homo sapiens
  misc_RNA (1)...(19): siRNA sense strand
acauguagcaauuguggaa

SEQ ID NO: 2667392 - RNA, 19 nt, Homo sapiens
  misc_RNA (1)...(19): siRNA sense strand
aaauguaguaaguguggaa

SEQ ID NO: 2667393 - RNA, 19 nt, Homo sapiens
  misc_RNA (1)...(19): siRNA sense strand
cccuauauguguaaugaau

SEQ ID NO: 2667394 - RNA, 19 nt, Homo sapiens
  misc_RNA (1)...(19): siRNA sense strand
cggaaggagagaauaugaa

SEQ ID NO: 2667395 - RNA, 19 nt, Homo sapiens
  misc_RNA (1)...(19): siRNA sense strand
gcuauauaaggaagugcua

SEQ ID NO: 2667396 - RNA, 19 nt, Homo sapiens
  misc_RNA (1)...(19): siRNA sense strand
cggagaaaagucacggaaa

SEQ ID NO: 2667397 - RNA, 19 nt, Homo sapiens
  misc_RNA (1)...(19): siRNA sense strand
cccagaugcuugaagaaaa

SEQ ID NO: 2667398 - RNA, 19 nt, Homo sapiens
  misc_RNA (1)...(19): siRNA sense strand
uuucaagaggagaguggaa

SEQ ID NO: 2667399 - RNA, 19 nt, Homo sapiens
  misc_RNA (1)...(19): siRNA sense strand
gggaguggcaguaggggua

SEQ ID NO: 2667400 - RNA, 19 nt, Homo sapiens
  misc_RNA (1)...(19): siRNA sense strand
agaaauuugacccagauaa

SEQ ID NO: 2667401 - RNA, 19 nt, Homo sapiens
  misc_RNA (1)...(19): siRNA sense strand
auguaaccagugugagaaa

SEQ ID NO: 2667402 - RNA, 19 nt, Homo sapiens
  misc_RNA (1)...(19): siRNA sense strand
auguaaagaaugugggaag

SEQ ID NO: 2667403 - RNA, 19 nt, Homo sapiens
  misc_RNA (1)...(19): siRNA sense strand
guguaaugauugcggaaug

SEQ ID NO: 2667404 - RNA, 19 nt, Homo sapiens
  misc_RNA (1)...(19): siRNA sense strand
gggaaaguccugagucacu

SEQ ID NO: 2667405 - RNA, 19 nt, Homo sapiens
  misc_RNA (1)...(19): siRNA sense strand
gaagcuauuuuaagaggaa

SEQ ID NO: 2667406 - RNA, 19 nt, Homo sapiens
  misc_RNA (1)...(19): siRNA sense strand
agaucaggauuuggguaaa

SEQ ID NO: 2667407 - RNA, 19 nt, Homo sapiens
  misc_RNA (1)...(19): siRNA sense strand
ucaagaggagaguggaaga

SEQ ID NO: 2667408 - RNA, 19 nt, Homo sapiens
  misc_RNA (1)...(19): siRNA sense strand
agagucuacuugaggaaga

SEQ ID NO: 2667409 - RNA, 19 nt, Homo sapiens
  misc_RNA (1)...(19): siRNA sense strand
cuuaaauaaagaugaggga

SEQ ID NO: 2667410 - RNA, 19 nt, Homo sapiens
  misc_RNA (1)...(19): siRNA sense strand
auguagcaauuguggaaaa

SEQ ID NO: 2667411 - RNA, 19 nt, Homo sapiens
  misc_RNA (1)...(19): siRNA sense strand
cccaagaggagaacucaaa

SEQ ID NO: 2667412 - RNA, 19 nt, Homo sapiens
  misc_RNA (1)...(19): siRNA sense strand
aauacugaguccugugaau

SEQ ID NO: 2667413 - RNA, 19 nt, Homo sapiens
  misc_RNA (1)...(19): siRNA sense strand
ugcaguaagugugggauaa

SEQ ID NO: 2667414 - RNA, 19 nt, Homo sapiens
  misc_RNA (1)...(19): siRNA sense strand
ccucauuaaacaucagaga

SEQ ID NO: 2667415 - RNA, 19 nt, Homo sapiens
  misc_RNA (1)...(19): siRNA sense strand
ucuuucagacagagguuua

SEQ ID NO: 2667416 - RNA, 19 nt, Homo sapiens
  misc_RNA (1)...(19): siRNA sense strand
aggauguagcugugaacuu

SEQ ID NO: 2667417 - RNA, 19 nt, Homo sapiens
  misc_RNA (1)...(19): siRNA sense strand
aggaagaaaucucggaggu

SEQ ID NO: 2667418 - RNA, 19 nt, Homo sapiens
  misc_RNA (1)...(19): siRNA sense strand
aagacuucauucaggagaa

SEQ ID NO: 2667419 - RNA, 19 nt, Homo sapiens
  misc_RNA (1)...(19): siRNA sense strand
cgaauucauacuggagaaa

SEQ ID NO: 2667420 - RNA, 19 nt, Homo sapiens
  misc_RNA (1)...(19): siRNA sense strand
uaauagaagauuugaccca

SEQ ID NO: 2667421 - RNA, 19 nt, Homo sapiens
  misc_RNA (1)...(19): siRNA sense strand
guguaaugaaugugggaaa

SEQ ID NO: 2667422 - RNA, 19 nt, Homo sapiens
  misc_RNA (1)...(19): siRNA sense strand
auguaaugaaugugggaaa

SEQ ID NO: 2667423 - RNA, 19 nt, Homo sapiens
  misc_RNA (1)...(19): siRNA sense strand
auguaaugaaugugggaaa

SEQ ID NO: 2667424 - RNA, 19 nt, Homo sapiens
  misc_RNA (1)...(19): siRNA sense strand
uuguaaugaaugugggaaa

SEQ ID NO: 2667425 - RNA, 19 nt, Homo sapiens
  misc_RNA (1)...(19): siRNA sense strand
guguaagcaaugucggaaa

SEQ ID NO: 2667426 - RNA, 19 nt, Homo sapiens
  misc_RNA (1)...(19): siRNA sense strand
gaguguaaugaaugugaaa

SEQ ID NO: 2667427 - RNA, 19 nt, Homo sapiens
  misc_RNA (1)...(19): siRNA sense strand
cuguacugaaugugggaaa

SEQ ID NO: 2667428 - RNA, 19 nt, Homo sapiens
  misc_RNA (1)...(19): siRNA sense strand
aagcaaugucggaaaguuu

SEQ ID NO: 2667429 - RNA, 19 nt, Homo sapiens
  misc_RNA (1)...(19): siRNA sense strand
gacgcauacaggagagaaa

SEQ ID NO: 2667430 - RNA, 19 nt, Homo sapiens
  misc_RNA (1)...(19): siRNA sense strand
cuuaauucgacaucagaaa

SEQ ID NO: 2667431 - RNA, 19 nt, Homo sapiens
  misc_RNA (1)...(19): siRNA sense strand
cgaauacauacaagggaga

SEQ ID NO: 2667432 - RNA, 19 nt, Homo sapiens
  misc_RNA (1)...(19): siRNA sense strand
guguaaugcauguggaaag

SEQ ID NO: 2667433 - RNA, 19 nt, Homo sapiens
  misc_RNA (1)...(19): siRNA sense strand
gaacaucacuaauucgaca

SEQ ID NO: 2667434 - RNA, 19 nt, Homo sapiens
  misc_RNA (1)...(19): siRNA sense strand
gggaaagcuuuuagucaga

SEQ ID NO: 2667435 - RNA, 19 nt, Homo sapiens
  misc_RNA (1)...(19): siRNA sense strand
gaguguaaugcauguggaa

SEQ ID NO: 2667436 - RNA, 19 nt, Homo sapiens
  misc_RNA (1)...(19): siRNA sense strand
cuaacuaaacauaagcgaa

SEQ ID NO: 2667437 - RNA, 19 nt, Homo sapiens
  misc_RNA (1)...(19): siRNA sense strand
cccuauguuuguaaagaau

SEQ ID NO: 2667438 - RNA, 19 nt, Homo sapiens
  misc_RNA (1)...(19): siRNA sense strand
uggaaagaaaccauaugaa

SEQ ID NO: 2667439 - RNA, 19 nt, Homo sapiens
  misc_RNA (1)...(19): siRNA sense strand
guacaucacuaauccgaca

SEQ ID NO: 2667440 - RNA, 19 nt, Homo sapiens
  misc_RNA (1)...(19): siRNA sense strand
aacccacacaggagagaaa

SEQ ID NO: 2667441 - RNA, 19 nt, Homo sapiens
  misc_RNA (1)...(19): siRNA sense strand
cugaaugugggaaaggcua

SEQ ID NO: 2667442 - RNA, 19 nt, Homo sapiens
  misc_RNA (1)...(19): siRNA sense strand
agaaaccuuaugaguguaa

SEQ ID NO: 2667443 - RNA, 19 nt, Homo sapiens
  misc_RNA (1)...(19): siRNA sense strand
aguccauacuggggagaaa

SEQ ID NO: 2667444 - RNA, 19 nt, Homo sapiens
  misc_RNA (1)...(19): siRNA sense strand
cauagaauucauacuggaa

SEQ ID NO: 2667445 - RNA, 19 nt, Homo sapiens
  misc_RNA (1)...(19): siRNA sense strand
gcgaauacauacaagggag

SEQ ID NO: 2667446 - RNA, 19 nt, Homo sapiens
  misc_RNA (1)...(19): siRNA sense strand
aggaaaccuuagcagagua

SEQ ID NO: 2667447 - RNA, 19 nt, Homo sapiens
  misc_RNA (1)...(19): siRNA sense strand
guuuguaaagaauguggaa

SEQ ID NO: 2667448 - RNA, 19 nt, Homo sapiens
  misc_RNA (1)...(19): siRNA sense strand
aggccaaggaggagaagaa

SEQ ID NO: 2667449 - RNA, 19 nt, Homo sapiens
  misc_RNA (1)...(19): siRNA sense strand
ucacugaaauccugggcaa

SEQ ID NO: 2667450 - RNA, 19 nt, Homo sapiens
  misc_RNA (1)...(19): siRNA sense strand
aguagaaggcaaagcacaa

SEQ ID NO: 2667451 - RNA, 19 nt, Homo sapiens
  misc_RNA (1)...(19): siRNA sense strand
cggacgaggugaaggagga

SEQ ID NO: 2667452 - RNA, 19 nt, Homo sapiens
  misc_RNA (1)...(19): siRNA sense strand
cagugcagccggaaggaaa

SEQ ID NO: 2667453 - RNA, 19 nt, Homo sapiens
  misc_RNA (1)...(19): siRNA sense strand
ucggagaguagaaggcaaa

SEQ ID NO: 2667454 - RNA, 19 nt, Homo sapiens
  misc_RNA (1)...(19): siRNA sense strand
acgaggagaucaucggcaa

SEQ ID NO: 2667455 - RNA, 19 nt, Homo sapiens
  misc_RNA (1)...(19): siRNA sense strand
uuguagaagagaaguggaa

SEQ ID NO: 2667456 - RNA, 19 nt, Homo sapiens
  misc_RNA (1)...(19): siRNA sense strand
ggcaauuacaccugugaau

SEQ ID NO: 2667457 - RNA, 19 nt, Homo sapiens
  misc_RNA (1)...(19): siRNA sense strand
agaugaucggcuaggcaaa

SEQ ID NO: 2667458 - RNA, 19 nt, Homo sapiens
  misc_RNA (1)...(19): siRNA sense strand
ggacaguguacgugacgga

SEQ ID NO: 2667459 - RNA, 19 nt, Homo sapiens
  misc_RNA (1)...(19): siRNA sense strand
uugaccaagcauugagaua

SEQ ID NO: 2667460 - RNA, 19 nt, Homo sapiens
  misc_RNA (1)...(19): siRNA sense strand
guagaagagaaguggaaac

SEQ ID NO: 2667461 - RNA, 19 nt, Homo sapiens
  misc_RNA (1)...(19): siRNA sense strand
gaguagaaggcaaagcaca

SEQ ID NO: 2667462 - RNA, 19 nt, Homo sapiens
  misc_RNA (1)...(19): siRNA sense strand
cugugaauucugcggcaaa

SEQ ID NO: 2667463 - RNA, 19 nt, Homo sapiens
  misc_RNA (1)...(19): siRNA sense strand
ucaggaagaugaucggcua

SEQ ID NO: 2667464 - RNA, 19 nt, Homo sapiens
  misc_RNA (1)...(19): siRNA sense strand
ccagaggaacagugccaau

SEQ ID NO: 2667465 - RNA, 19 nt, Homo sapiens
  misc_RNA (1)...(19): siRNA sense strand
cggcaaggucugugagcuc

SEQ ID NO: 2667466 - RNA, 19 nt, Homo sapiens
  misc_RNA (1)...(19): siRNA sense strand
agaagaaagaaguuaggca

SEQ ID NO: 2667467 - RNA, 19 nt, Homo sapiens
  misc_RNA (1)...(19): siRNA sense strand
gagcggcuguugaggguca

SEQ ID NO: 2667468 - RNA, 19 nt, Homo sapiens
  misc_RNA (1)...(19): siRNA sense strand
gcagcaugcacgaggucau

SEQ ID NO: 2667469 - RNA, 19 nt, Homo sapiens
  misc_RNA (1)...(19): siRNA sense strand
gugugaagggugcggacau

SEQ ID NO: 2667470 - RNA, 19 nt, Homo sapiens
  misc_RNA (1)...(19): siRNA sense strand
cugcuguuguagaagagaa

SEQ ID NO: 2667471 - RNA, 19 nt, Homo sapiens
  misc_RNA (1)...(19): siRNA sense strand
gaagagaaguggaaaccuc

SEQ ID NO: 2667472 - RNA, 19 nt, Homo sapiens
  misc_RNA (1)...(19): siRNA sense strand
aaaucgggccaaugaacaa

SEQ ID NO: 2667473 - RNA, 19 nt, Homo sapiens
  misc_RNA (1)...(19): siRNA sense strand
aggagaacuucaaggugca

SEQ ID NO: 2667474 - RNA, 19 nt, Homo sapiens
  misc_RNA (1)...(19): siRNA sense strand
ccuaccagcacgaggagau

SEQ ID NO: 2667475 - RNA, 19 nt, Homo sapiens
  misc_RNA (1)...(19): siRNA sense strand
cagucaucgagcugagcaa

SEQ ID NO: 2667476 - RNA, 19 nt, Homo sapiens
  misc_RNA (1)...(19): siRNA sense strand
aguccagaagauaugaaua

SEQ ID NO: 2667477 - RNA, 19 nt, Homo sapiens
  misc_RNA (1)...(19): siRNA sense strand
gucggagaguagaaggcaa

SEQ ID NO: 2667478 - RNA, 19 nt, Homo sapiens
  misc_RNA (1)...(19): siRNA sense strand
agcaacaauuucagguaca

SEQ ID NO: 2667479 - RNA, 19 nt, Homo sapiens
  misc_RNA (1)...(19): siRNA sense strand
acgcaggcacugucagcaa

SEQ ID NO: 2667480 - RNA, 19 nt, Homo sapiens
  misc_RNA (1)...(19): siRNA sense strand
gcgaggccaaggaggagaa

SEQ ID NO: 2667481 - RNA, 19 nt, Homo sapiens
  misc_RNA (1)...(19): siRNA sense strand
aguuccaguucuacaacaa

SEQ ID NO: 2667482 - RNA, 19 nt, Homo sapiens
  misc_RNA (1)...(19): siRNA sense strand
gccaagaagaugaaccuca

SEQ ID NO: 2667483 - RNA, 19 nt, Homo sapiens
  misc_RNA (1)...(19): siRNA sense strand
gcccagaggaacagugcca

SEQ ID NO: 2667484 - RNA, 19 nt, Homo sapiens
  misc_RNA (1)...(19): siRNA sense strand
gggccaagaagaugaaccu

SEQ ID NO: 2667485 - RNA, 19 nt, Homo sapiens
  misc_RNA (1)...(19): siRNA sense strand
gcaaggagcugccucggaa

SEQ ID NO: 2667486 - RNA, 19 nt, Homo sapiens
  misc_RNA (1)...(19): siRNA sense strand
ggaggaaacuggcgaggcu

SEQ ID NO: 2667487 - RNA, 19 nt, Homo sapiens
  misc_RNA (1)...(19): siRNA sense strand
cgcaagaccuagaacgcuu

SEQ ID NO: 2667488 - RNA, 19 nt, Homo sapiens
  misc_RNA (1)...(19): siRNA sense strand
ggugcugaggcgugagauu

SEQ ID NO: 2667489 - RNA, 19 nt, Homo sapiens
  misc_RNA (1)...(19): siRNA sense strand
gcauuaucgccgaggccuu

SEQ ID NO: 2667490 - RNA, 19 nt, Homo sapiens
  misc_RNA (1)...(19): siRNA sense strand
aguucaaugugaugcucua

SEQ ID NO: 2667491 - RNA, 19 nt, Homo sapiens
  misc_RNA (1)...(19): siRNA sense strand
ccaagaagcuggugcuguc

SEQ ID NO: 2667492 - RNA, 19 nt, Homo sapiens
  misc_RNA (1)...(19): siRNA sense strand
cggcaggguuucuuggcga

SEQ ID NO: 2667493 - RNA, 19 nt, Homo sapiens
  misc_RNA (1)...(19): siRNA sense strand
cgaggaaggcagucggugu

SEQ ID NO: 2667494 - RNA, 19 nt, Homo sapiens
  misc_RNA (1)...(19): siRNA sense strand
ugaggcagcaggaggguga

SEQ ID NO: 2667495 - RNA, 19 nt, Homo sapiens
  misc_RNA (1)...(19): siRNA sense strand
acgugauucuggaagugaa

SEQ ID NO: 2667496 - RNA, 19 nt, Homo sapiens
  misc_RNA (1)...(19): siRNA sense strand
gcaaggagcugccucggaa

SEQ ID NO: 2667497 - RNA, 19 nt, Homo sapiens
  misc_RNA (1)...(19): siRNA sense strand
ggaggaaacuggcgaggcu

SEQ ID NO: 2667498 - RNA, 19 nt, Homo sapiens
  misc_RNA (1)...(19): siRNA sense strand
cgcaagaccuagaacgcuu

SEQ ID NO: 2667499 - RNA, 19 nt, Homo sapiens
  misc_RNA (1)...(19): siRNA sense strand
ggugcugaggcgugagauu

SEQ ID NO: 2667500 - RNA, 19 nt, Homo sapiens
  misc_RNA (1)...(19): siRNA sense strand
gcauuaucgccgaggccuu

SEQ ID NO: 2667501 - RNA, 19 nt, Homo sapiens
  misc_RNA (1)...(19): siRNA sense strand
aguucaaugugaugcucua

SEQ ID NO: 2667502 - RNA, 19 nt, Homo sapiens
  misc_RNA (1)...(19): siRNA sense strand
ccaagaagcuggugcuguc

SEQ ID NO: 2667503 - RNA, 19 nt, Homo sapiens
  misc_RNA (1)...(19): siRNA sense strand
cggcaggguuucuuggcga

SEQ ID NO: 2667504 - RNA, 19 nt, Homo sapiens
  misc_RNA (1)...(19): siRNA sense strand
cgaggaaggcagucggugu

SEQ ID NO: 2667505 - RNA, 19 nt, Homo sapiens
  misc_RNA (1)...(19): siRNA sense strand
ugaggcagcaggaggguga

SEQ ID NO: 2667506 - RNA, 19 nt, Homo sapiens
  misc_RNA (1)...(19): siRNA sense strand
acgugauucuggaagugaa

SEQ ID NO: 2667507 - RNA, 19 nt, Homo sapiens
  misc_RNA (1)...(19): siRNA sense strand
cgaaguaagucguguauuu

SEQ ID NO: 2667508 - RNA, 19 nt, Homo sapiens
  misc_RNA (1)...(19): siRNA sense strand
gggaagaucaagaggguca

SEQ ID NO: 2667509 - RNA, 19 nt, Homo sapiens
  misc_RNA (1)...(19): siRNA sense strand
guaagagaggaaagagcaa

SEQ ID NO: 2667510 - RNA, 19 nt, Homo sapiens
  misc_RNA (1)...(19): siRNA sense strand
gggucacaccugagggcaa

SEQ ID NO: 2667511 - RNA, 19 nt, Homo sapiens
  misc_RNA (1)...(19): siRNA sense strand
aggcgaguuuauagaagaa

SEQ ID NO: 2667512 - RNA, 19 nt, Homo sapiens
  misc_RNA (1)...(19): siRNA sense strand
gcgaguuuauagaagaaaa

SEQ ID NO: 2667513 - RNA, 19 nt, Homo sapiens
  misc_RNA (1)...(19): siRNA sense strand
ccaaacugacggagggcca

SEQ ID NO: 2667514 - RNA, 19 nt, Homo sapiens
  misc_RNA (1)...(19): siRNA sense strand
agugacagaucgaggacca

SEQ ID NO: 2667515 - RNA, 19 nt, Homo sapiens
  misc_RNA (1)...(19): siRNA sense strand
cagcagaaaaggcgaguuu

SEQ ID NO: 2667516 - RNA, 19 nt, Homo sapiens
  misc_RNA (1)...(19): siRNA sense strand
aggggaagcugauggagaa

SEQ ID NO: 2667517 - RNA, 19 nt, Homo sapiens
  misc_RNA (1)...(19): siRNA sense strand
aagcaaagcugccucguga

SEQ ID NO: 2667518 - RNA, 19 nt, Homo sapiens
  misc_RNA (1)...(19): siRNA sense strand
acuuugacuuugaggagau

SEQ ID NO: 2667519 - RNA, 19 nt, Homo sapiens
  misc_RNA (1)...(19): siRNA sense strand
aagaagaagaagugcaucu

SEQ ID NO: 2667520 - RNA, 19 nt, Homo sapiens
  misc_RNA (1)...(19): siRNA sense strand
gagaaugguaccugcggau

SEQ ID NO: 2667521 - RNA, 19 nt, Homo sapiens
  misc_RNA (1)...(19): siRNA sense strand
cagaguacaucgagaggcu

SEQ ID NO: 2667522 - RNA, 19 nt, Homo sapiens
  misc_RNA (1)...(19): siRNA sense strand
acgaauuccagcagcagaa

SEQ ID NO: 2667523 - RNA, 19 nt, Homo sapiens
  misc_RNA (1)...(19): siRNA sense strand
aggagaucaagaagaagaa

SEQ ID NO: 2667524 - RNA, 19 nt, Homo sapiens
  misc_RNA (1)...(19): siRNA sense strand
aggcaaagccaccguuuca

SEQ ID NO: 2667525 - RNA, 19 nt, Homo sapiens
  misc_RNA (1)...(19): siRNA sense strand
cguaagagaggaaagagca

SEQ ID NO: 2667526 - RNA, 19 nt, Homo sapiens
  misc_RNA (1)...(19): siRNA sense strand
gccacacauuugagagcau

SEQ ID NO: 2667527 - RNA, 19 nt, Homo sapiens
  misc_RNA (1)...(19): siRNA sense strand
cuaugcuggucuugguaau

SEQ ID NO: 2667528 - RNA, 19 nt, Homo sapiens
  misc_RNA (1)...(19): siRNA sense strand
gguaauccguggucccuau

SEQ ID NO: 2667529 - RNA, 19 nt, Homo sapiens
  misc_RNA (1)...(19): siRNA sense strand
acgaaggcauugacagcca

SEQ ID NO: 2667530 - RNA, 19 nt, Homo sapiens
  misc_RNA (1)...(19): siRNA sense strand
ccaaaugagaacagcgccu

SEQ ID NO: 2667531 - RNA, 19 nt, Homo sapiens
  misc_RNA (1)...(19): siRNA sense strand
guacagagguuauggguga

SEQ ID NO: 2667532 - RNA, 19 nt, Homo sapiens
  misc_RNA (1)...(19): siRNA sense strand
gguauaagcaauugggauu

SEQ ID NO: 2667533 - RNA, 19 nt, Homo sapiens
  misc_RNA (1)...(19): siRNA sense strand
aaacaaacuccaugguaaa

SEQ ID NO: 2667534 - RNA, 19 nt, Homo sapiens
  misc_RNA (1)...(19): siRNA sense strand
cagaagagguguuggucau

SEQ ID NO: 2667535 - RNA, 19 nt, Homo sapiens
  misc_RNA (1)...(19): siRNA sense strand
gguuaugggugauggugaa

SEQ ID NO: 2667536 - RNA, 19 nt, Homo sapiens
  misc_RNA (1)...(19): siRNA sense strand
gggacaaagaaguggccaa

SEQ ID NO: 2667537 - RNA, 19 nt, Homo sapiens
  misc_RNA (1)...(19): siRNA sense strand
gaaaagaagaucagggaau

SEQ ID NO: 2667538 - RNA, 19 nt, Homo sapiens
  misc_RNA (1)...(19): siRNA sense strand
acacagacccagaagacaa

SEQ ID NO: 2667539 - RNA, 19 nt, Homo sapiens
  misc_RNA (1)...(19): siRNA sense strand
cuggaaggauugagcagaa

SEQ ID NO: 2667540 - RNA, 19 nt, Homo sapiens
  misc_RNA (1)...(19): siRNA sense strand
cuaugaaaguacagagguu

SEQ ID NO: 2667541 - RNA, 19 nt, Homo sapiens
  misc_RNA (1)...(19): siRNA sense strand
ugauaaucuggaaggaaua

SEQ ID NO: 2667542 - RNA, 19 nt, Homo sapiens
  misc_RNA (1)...(19): siRNA sense strand
caggaaaugaagagcgaga

SEQ ID NO: 2667543 - RNA, 19 nt, Homo sapiens
  misc_RNA (1)...(19): siRNA sense strand
auguaaacucugagaaaca

SEQ ID NO: 2667544 - RNA, 19 nt, Homo sapiens
  misc_RNA (1)...(19): siRNA sense strand
uuugguugcuggagagaaa

SEQ ID NO: 2667545 - RNA, 19 nt, Homo sapiens
  misc_RNA (1)...(19): siRNA sense strand
uaucagaaacagugaguga

SEQ ID NO: 2667546 - RNA, 19 nt, Homo sapiens
  misc_RNA (1)...(19): siRNA sense strand
guacagacgucuugggaag

SEQ ID NO: 2667547 - RNA, 19 nt, Homo sapiens
  misc_RNA (1)...(19): siRNA sense strand
gaugauaagcuaaggaagu

SEQ ID NO: 2667548 - RNA, 19 nt, Homo sapiens
  misc_RNA (1)...(19): siRNA sense strand
aagcaggagcucugauaua

SEQ ID NO: 2667549 - RNA, 19 nt, Homo sapiens
  misc_RNA (1)...(19): siRNA sense strand
uugagucgauugagggaaa

SEQ ID NO: 2667550 - RNA, 19 nt, Homo sapiens
  misc_RNA (1)...(19): siRNA sense strand
ggauggaggacaaggagau

SEQ ID NO: 2667551 - RNA, 19 nt, Homo sapiens
  misc_RNA (1)...(19): siRNA sense strand
gcgaagcaacagagaauca

SEQ ID NO: 2667552 - RNA, 19 nt, Homo sapiens
  misc_RNA (1)...(19): siRNA sense strand
cuggaaaggcuauugcaaa

SEQ ID NO: 2667553 - RNA, 19 nt, Homo sapiens
  misc_RNA (1)...(19): siRNA sense strand
uaucauaaccagugcugaa

SEQ ID NO: 2667554 - RNA, 19 nt, Homo sapiens
  misc_RNA (1)...(19): siRNA sense strand
ggucauuuccuuagguaca

SEQ ID NO: 2667555 - RNA, 19 nt, Homo sapiens
  misc_RNA (1)...(19): siRNA sense strand
aaaacaaacuccaugguaa

SEQ ID NO: 2667556 - RNA, 19 nt, Homo sapiens
  misc_RNA (1)...(19): siRNA sense strand
aagcuaaggaaguuugaaa

SEQ ID NO: 2667557 - RNA, 19 nt, Homo sapiens
  misc_RNA (1)...(19): siRNA sense strand
ggguauaagcaauugggau

SEQ ID NO: 2667558 - RNA, 19 nt, Homo sapiens
  misc_RNA (1)...(19): siRNA sense strand
ggguaaagauucugucacu

SEQ ID NO: 2667559 - RNA, 19 nt, Homo sapiens
  misc_RNA (1)...(19): siRNA sense strand
ugcaagaagaugaaagcua

SEQ ID NO: 2667560 - RNA, 19 nt, Homo sapiens
  misc_RNA (1)...(19): siRNA sense strand
uggcaguaauggaguugaa

SEQ ID NO: 2667561 - RNA, 19 nt, Homo sapiens
  misc_RNA (1)...(19): siRNA sense strand
cagaagcagacaugagaau

SEQ ID NO: 2667562 - RNA, 19 nt, Homo sapiens
  misc_RNA (1)...(19): siRNA sense strand
acugaagaacgcaaagaua

SEQ ID NO: 2667563 - RNA, 19 nt, Homo sapiens
  misc_RNA (1)...(19): siRNA sense strand
agagaagggcucagauaga

SEQ ID NO: 2667564 - RNA, 19 nt, Homo sapiens
  misc_RNA (1)...(19): siRNA sense strand
gcuuucggauggaggacaa

SEQ ID NO: 2667565 - RNA, 19 nt, Homo sapiens
  misc_RNA (1)...(19): siRNA sense strand
cuacaauacaccucagcua

SEQ ID NO: 2667566 - RNA, 19 nt, Homo sapiens
  misc_RNA (1)...(19): siRNA sense strand
gagaaaucagacaggaaca

SEQ ID NO: 2667567 - RNA, 19 nt, Homo sapiens
  misc_RNA (1)...(19): siRNA sense strand
cugaggauauucuggacaa

SEQ ID NO: 2667568 - RNA, 19 nt, Homo sapiens
  misc_RNA (1)...(19): siRNA sense strand
cuaaaguagugacugcaaa

SEQ ID NO: 2667569 - RNA, 19 nt, Homo sapiens
  misc_RNA (1)...(19): siRNA sense strand
gugauggagcaauggcaaa

SEQ ID NO: 2667570 - RNA, 19 nt, Homo sapiens
  misc_RNA (1)...(19): siRNA sense strand
ggacaaagaaguggccaau

SEQ ID NO: 2667571 - RNA, 19 nt, Homo sapiens
  misc_RNA (1)...(19): siRNA sense strand
aagaaguggccaaucgaua

SEQ ID NO: 2667572 - RNA, 19 nt, Homo sapiens
  misc_RNA (1)...(19): siRNA sense strand
augaacauauccagagauu

SEQ ID NO: 2667573 - RNA, 19 nt, Homo sapiens
  misc_RNA (1)...(19): siRNA sense strand
ccagggaugaugucagaaa

SEQ ID NO: 2667574 - RNA, 19 nt, Homo sapiens
  misc_RNA (1)...(19): siRNA sense strand
gaacagaccuugguggaga

SEQ ID NO: 2667575 - RNA, 19 nt, Homo sapiens
  misc_RNA (1)...(19): siRNA sense strand
caaucagaaaucaggacaa

SEQ ID NO: 2667576 - RNA, 19 nt, Homo sapiens
  misc_RNA (1)...(19): siRNA sense strand
cagcaguagaauucauuaa

SEQ ID NO: 2667577 - RNA, 19 nt, Homo sapiens
  misc_RNA (1)...(19): siRNA sense strand
uugcugaggacuacagaaa

SEQ ID NO: 2667578 - RNA, 19 nt, Homo sapiens
  misc_RNA (1)...(19): siRNA sense strand
gcaaaacgcgagugaagaa

SEQ ID NO: 2667579 - RNA, 19 nt, Homo sapiens
  misc_RNA (1)...(19): siRNA sense strand
ugguguuuguguugauaaa

SEQ ID NO: 2667580 - RNA, 19 nt, Homo sapiens
  misc_RNA (1)...(19): siRNA sense strand
guugauggguauaagcaau

SEQ ID NO: 2667581 - RNA, 19 nt, Homo sapiens
  misc_RNA (1)...(19): siRNA sense strand
gugcaauggcccaggaugu

SEQ ID NO: 2667582 - RNA, 19 nt, Homo sapiens
  misc_RNA (1)...(19): siRNA sense strand
gcuuauuacucuggugaau

SEQ ID NO: 2667583 - RNA, 19 nt, Homo sapiens
  misc_RNA (1)...(19): siRNA sense strand
augagaaaucagacaggaa

SEQ ID NO: 2667584 - RNA, 19 nt, Homo sapiens
  misc_RNA (1)...(19): siRNA sense strand
cccagaagacaaugaaauu

SEQ ID NO: 2667585 - RNA, 19 nt, Homo sapiens
  misc_RNA (1)...(19): siRNA sense strand
ccaugguaaaccugauaaa

SEQ ID NO: 2667586 - RNA, 19 nt, Homo sapiens
  misc_RNA (1)...(19): siRNA sense strand
ggcucaacuucaagaaaca

SEQ ID NO: 2667587 - RNA, 19 nt, Homo sapiens
  misc_RNA (1)...(19): siRNA sense strand
gcucaaugcagauguacuu

SEQ ID NO: 2667588 - RNA, 19 nt, Homo sapiens
  misc_RNA (1)...(19): siRNA sense strand
cuucgauugcugaggacua

SEQ ID NO: 2667589 - RNA, 19 nt, Homo sapiens
  misc_RNA (1)...(19): siRNA sense strand
acgaagcacugcagaacau

SEQ ID NO: 2667590 - RNA, 19 nt, Homo sapiens
  misc_RNA (1)...(19): siRNA sense strand
caggaugucauauggcaaa

SEQ ID NO: 2667591 - RNA, 19 nt, Homo sapiens
  misc_RNA (1)...(19): siRNA sense strand
guucacagcagcaguagaa

SEQ ID NO: 2667592 - RNA, 19 nt, Homo sapiens
  misc_RNA (1)...(19): siRNA sense strand
gagagaaacuuaaucagga

SEQ ID NO: 2667593 - RNA, 19 nt, Homo sapiens
  misc_RNA (1)...(19): siRNA sense strand
gagcagaagccgcaccaau

SEQ ID NO: 2667594 - RNA, 19 nt, Homo sapiens
  misc_RNA (1)...(19): siRNA sense strand
ucagaaacagugagugaga

SEQ ID NO: 2667595 - RNA, 19 nt, Homo sapiens
  misc_RNA (1)...(19): siRNA sense strand
ugguaaggccaaagguuca

SEQ ID NO: 2667596 - RNA, 19 nt, Homo sapiens
  misc_RNA (1)...(19): siRNA sense strand
gcauucaagcaaaggcauu

SEQ ID NO: 2667597 - RNA, 19 nt, Homo sapiens
  misc_RNA (1)...(19): siRNA sense strand
ggaaaugaagagcgagaac

SEQ ID NO: 2667598 - RNA, 19 nt, Homo sapiens
  misc_RNA (1)...(19): siRNA sense strand
cugcucagguagaagauuu

SEQ ID NO: 2667599 - RNA, 19 nt, Homo sapiens
  misc_RNA (1)...(19): siRNA sense strand
gaugaagaucaccuggaaa

SEQ ID NO: 2667600 - RNA, 19 nt, Homo sapiens
  misc_RNA (1)...(19): siRNA sense strand
gcagagaacauguuaggca

SEQ ID NO: 2667601 - RNA, 19 nt, Homo sapiens
  misc_RNA (1)...(19): siRNA sense strand
ccucccagguucaggguca

SEQ ID NO: 2667602 - RNA, 19 nt, Homo sapiens
  misc_RNA (1)...(19): siRNA sense strand
augaaaguacagagguuau

SEQ ID NO: 2667603 - RNA, 19 nt, Homo sapiens
  misc_RNA (1)...(19): siRNA sense strand
uggaaaggcuauugcaaag

SEQ ID NO: 2667604 - RNA, 19 nt, Homo sapiens
  misc_RNA (1)...(19): siRNA sense strand
ccaccaugccugaagucaa

SEQ ID NO: 2667605 - RNA, 19 nt, Homo sapiens
  misc_RNA (1)...(19): siRNA sense strand
ucucagaagccuugccaga

SEQ ID NO: 2667606 - RNA, 19 nt, Homo sapiens
  misc_RNA (1)...(19): siRNA sense strand
gcuaugacguaguugcaca

SEQ ID NO: 2667607 - RNA, 19 nt, Homo sapiens
  misc_RNA (1)...(19): siRNA sense strand
ucgaaugggcagaguacca

SEQ ID NO: 2667608 - RNA, 19 nt, Homo sapiens
  misc_RNA (1)...(19): siRNA sense strand
cagaaaguaugcagcccuu

SEQ ID NO: 2667609 - RNA, 19 nt, Homo sapiens
  misc_RNA (1)...(19): siRNA sense strand
acguguuaguagauaugaa

SEQ ID NO: 2667610 - RNA, 19 nt, Homo sapiens
  misc_RNA (1)...(19): siRNA sense strand
ugggcagaguaccaagaaa

SEQ ID NO: 2667611 - RNA, 19 nt, Homo sapiens
  misc_RNA (1)...(19): siRNA sense strand
cagaguaccaagaaaucau

SEQ ID NO: 2667612 - RNA, 19 nt, Homo sapiens
  misc_RNA (1)...(19): siRNA sense strand
ccaucaaaucucuagcaga

SEQ ID NO: 2667613 - RNA, 19 nt, Homo sapiens
  misc_RNA (1)...(19): siRNA sense strand
ggaccacauccgugagcga

SEQ ID NO: 2667614 - RNA, 19 nt, Homo sapiens
  misc_RNA (1)...(19): siRNA sense strand
gaucaugagaagaagcuga

SEQ ID NO: 2667615 - RNA, 19 nt, Homo sapiens
  misc_RNA (1)...(19): siRNA sense strand
uggaacgaguggagagacu

SEQ ID NO: 2667616 - RNA, 19 nt, Homo sapiens
  misc_RNA (1)...(19): siRNA sense strand
ucacaguggaggagaggca

SEQ ID NO: 2667617 - RNA, 19 nt, Homo sapiens
  misc_RNA (1)...(19): siRNA sense strand
ucucaagagcauggauaaa

SEQ ID NO: 2667618 - RNA, 19 nt, Homo sapiens
  misc_RNA (1)...(19): siRNA sense strand
agaccgaguuccaguacuu

SEQ ID NO: 2667619 - RNA, 19 nt, Homo sapiens
  misc_RNA (1)...(19): siRNA sense strand
gcaucagcuacguggucua

SEQ ID NO: 2667620 - RNA, 19 nt, Homo sapiens
  misc_RNA (1)...(19): siRNA sense strand
cuuugaugugggugagaau

SEQ ID NO: 2667621 - RNA, 19 nt, Homo sapiens
  misc_RNA (1)...(19): siRNA sense strand
cgaucuuugauguggguga

SEQ ID NO: 2667622 - RNA, 19 nt, Homo sapiens
  misc_RNA (1)...(19): siRNA sense strand
gcagcaacaacaugggcau

SEQ ID NO: 2667623 - RNA, 19 nt, Homo sapiens
  misc_RNA (1)...(19): siRNA sense strand
gagaagaagcugaggcugg

SEQ ID NO: 2667624 - RNA, 19 nt, Homo sapiens
  misc_RNA (1)...(19): siRNA sense strand
gggcaucguugguggcuuc

SEQ ID NO: 2667625 - RNA, 19 nt, Homo sapiens
  misc_RNA (1)...(19): siRNA sense strand
uggccuaugagcagaucaa

SEQ ID NO: 2667626 - RNA, 19 nt, Homo sapiens
  misc_RNA (1)...(19): siRNA sense strand
aggcugguguuuaagauuu

SEQ ID NO: 2667627 - RNA, 19 nt, Homo sapiens
  misc_RNA (1)...(19): siRNA sense strand
cugaacagcaggcagaaaa

SEQ ID NO: 2667628 - RNA, 19 nt, Homo sapiens
  misc_RNA (1)...(19): siRNA sense strand
cggaggugagugagaacaa

SEQ ID NO: 2667629 - RNA, 19 nt, Homo sapiens
  misc_RNA (1)...(19): siRNA sense strand
gagagcagcuacagcgaca

SEQ ID NO: 2667630 - RNA, 19 nt, Homo sapiens
  misc_RNA (1)...(19): siRNA sense strand
gcuuggugguggaggagga

SEQ ID NO: 2667631 - RNA, 19 nt, Homo sapiens
  misc_RNA (1)...(19): siRNA sense strand
ccgucuacuacgugcacaa

SEQ ID NO: 2667632 - RNA, 19 nt, Homo sapiens
  misc_RNA (1)...(19): siRNA sense strand
acgaguggacgcuggacaa

SEQ ID NO: 2667633 - RNA, 19 nt, Homo sapiens
  misc_RNA (1)...(19): siRNA sense strand
gguacaaccacaucgccua

SEQ ID NO: 2667634 - RNA, 19 nt, Homo sapiens
  misc_RNA (1)...(19): siRNA sense strand
ccguggacauugagagccu

SEQ ID NO: 2667635 - RNA, 19 nt, Homo sapiens
  misc_RNA (1)...(19): siRNA sense strand
uggaggaggaccuguucaa

SEQ ID NO: 2667636 - RNA, 19 nt, Homo sapiens
  misc_RNA (1)...(19): siRNA sense strand
acaucaaguucgacgugga

SEQ ID NO: 2667637 - RNA, 19 nt, Homo sapiens
  misc_RNA (1)...(19): siRNA sense strand
cagccaaaauauagagaaa

SEQ ID NO: 2667638 - RNA, 19 nt, Homo sapiens
  misc_RNA (1)...(19): siRNA sense strand
augaagaugaagaggguua

SEQ ID NO: 2667639 - RNA, 19 nt, Homo sapiens
  misc_RNA (1)...(19): siRNA sense strand
agacauaugcagagguuga

SEQ ID NO: 2667640 - RNA, 19 nt, Homo sapiens
  misc_RNA (1)...(19): siRNA sense strand
agaaagucgaugaguuaaa

SEQ ID NO: 2667641 - RNA, 19 nt, Homo sapiens
  misc_RNA (1)...(19): siRNA sense strand
aggaagaagaauacaagua

SEQ ID NO: 2667642 - RNA, 19 nt, Homo sapiens
  misc_RNA (1)...(19): siRNA sense strand
gugaaagaaaggacagaga

SEQ ID NO: 2667643 - RNA, 19 nt, Homo sapiens
  misc_RNA (1)...(19): siRNA sense strand
cugaaacaggagaggaaau

SEQ ID NO: 2667644 - RNA, 19 nt, Homo sapiens
  misc_RNA (1)...(19): siRNA sense strand
aagaaaggacagagauuga

SEQ ID NO: 2667645 - RNA, 19 nt, Homo sapiens
  misc_RNA (1)...(19): siRNA sense strand
guggcaaauccaaaggaaa

SEQ ID NO: 2667646 - RNA, 19 nt, Homo sapiens
  misc_RNA (1)...(19): siRNA sense strand
cguaguugaaggagaaaca

SEQ ID NO: 2667647 - RNA, 19 nt, Homo sapiens
  misc_RNA (1)...(19): siRNA sense strand
aaagaaauucagaaggaga

SEQ ID NO: 2667648 - RNA, 19 nt, Homo sapiens
  misc_RNA (1)...(19): siRNA sense strand
acucgaaggaggaagaaga

SEQ ID NO: 2667649 - RNA, 19 nt, Homo sapiens
  misc_RNA (1)...(19): siRNA sense strand
agacauugaauuugaggau

SEQ ID NO: 2667650 - RNA, 19 nt, Homo sapiens
  misc_RNA (1)...(19): siRNA sense strand
augcaaagcaacucaggaa

SEQ ID NO: 2667651 - RNA, 19 nt, Homo sapiens
  misc_RNA (1)...(19): siRNA sense strand
aaacaggagaggaaaucaa

SEQ ID NO: 2667652 - RNA, 19 nt, Homo sapiens
  misc_RNA (1)...(19): siRNA sense strand
cagcuugaaucuaguaaaa

SEQ ID NO: 2667653 - RNA, 19 nt, Homo sapiens
  misc_RNA (1)...(19): siRNA sense strand
ugaaaaggcccgacaacaa

SEQ ID NO: 2667654 - RNA, 19 nt, Homo sapiens
  misc_RNA (1)...(19): siRNA sense strand
aacugaaacaggagaggaa

SEQ ID NO: 2667655 - RNA, 19 nt, Homo sapiens
  misc_RNA (1)...(19): siRNA sense strand
ccgacaacaagcucaaaua

SEQ ID NO: 2667656 - RNA, 19 nt, Homo sapiens
  misc_RNA (1)...(19): siRNA sense strand
aggaggaagaagaauacaa

SEQ ID NO: 2667657 - RNA, 19 nt, Homo sapiens
  misc_RNA (1)...(19): siRNA sense strand
auacaagagauggaggaaa

SEQ ID NO: 2667658 - RNA, 19 nt, Homo sapiens
  misc_RNA (1)...(19): siRNA sense strand
acgacgaguuugaugauga

SEQ ID NO: 2667659 - RNA, 19 nt, Homo sapiens
  misc_RNA (1)...(19): siRNA sense strand
uuccagaggagaaggcaaa

SEQ ID NO: 2667660 - RNA, 19 nt, Homo sapiens
  misc_RNA (1)...(19): siRNA sense strand
uggcaaauccaaaggaaag

SEQ ID NO: 2667661 - RNA, 19 nt, Homo sapiens
  misc_RNA (1)...(19): siRNA sense strand
ccaugaagacauaugcaga

SEQ ID NO: 2667662 - RNA, 19 nt, Homo sapiens
  misc_RNA (1)...(19): siRNA sense strand
gccaaaauauagagaaacu

SEQ ID NO: 2667663 - RNA, 19 nt, Homo sapiens
  misc_RNA (1)...(19): siRNA sense strand
gauuugaacgcgauugcaa

SEQ ID NO: 2667664 - RNA, 19 nt, Homo sapiens
  misc_RNA (1)...(19): siRNA sense strand
caaaagcggauguugaaaa

SEQ ID NO: 2667665 - RNA, 19 nt, Homo sapiens
  misc_RNA (1)...(19): siRNA sense strand
ccaacaucuuccagaaaau

SEQ ID NO: 2667666 - RNA, 19 nt, Homo sapiens
  misc_RNA (1)...(19): siRNA sense strand
ggauugugagaaugggaga

SEQ ID NO: 2667667 - RNA, 19 nt, Homo sapiens
  misc_RNA (1)...(19): siRNA sense strand
ggagaguccaugaagacau

SEQ ID NO: 2667668 - RNA, 19 nt, Homo sapiens
  misc_RNA (1)...(19): siRNA sense strand
aagaaauucagaaggagau

SEQ ID NO: 2667669 - RNA, 19 nt, Homo sapiens
  misc_RNA (1)...(19): siRNA sense strand
aaaugaagaugaagagggu

SEQ ID NO: 2667670 - RNA, 19 nt, Homo sapiens
  misc_RNA (1)...(19): siRNA sense strand
ggacagagauugaacucag

SEQ ID NO: 2667671 - RNA, 19 nt, Homo sapiens
  misc_RNA (1)...(19): siRNA sense strand
ggaucacaaauuagcagaa

SEQ ID NO: 2667672 - RNA, 19 nt, Homo sapiens
  misc_RNA (1)...(19): siRNA sense strand
gcaguuacacagaggagca

SEQ ID NO: 2667673 - RNA, 19 nt, Homo sapiens
  misc_RNA (1)...(19): siRNA sense strand
ucagaaugaaggaacgauu

SEQ ID NO: 2667674 - RNA, 19 nt, Homo sapiens
  misc_RNA (1)...(19): siRNA sense strand
ccugaacaaagaaggaaaa

SEQ ID NO: 2667675 - RNA, 19 nt, Homo sapiens
  misc_RNA (1)...(19): siRNA sense strand
aggagauggaucaaagaga

SEQ ID NO: 2667676 - RNA, 19 nt, Homo sapiens
  misc_RNA (1)...(19): siRNA sense strand
augcagagguugaucggca

SEQ ID NO: 2667677 - RNA, 19 nt, Homo sapiens
  misc_RNA (1)...(19): siRNA sense strand
aguuauggccguucaucaa

SEQ ID NO: 2667678 - RNA, 19 nt, Homo sapiens
  misc_RNA (1)...(19): siRNA sense strand
accugaacaaagaaggaaa

SEQ ID NO: 2667679 - RNA, 19 nt, Homo sapiens
  misc_RNA (1)...(19): siRNA sense strand
agcagaaagucgaugaguu

SEQ ID NO: 2667680 - RNA, 19 nt, Homo sapiens
  misc_RNA (1)...(19): siRNA sense strand
caaagagaugccauaacaa

SEQ ID NO: 2667681 - RNA, 19 nt, Homo sapiens
  misc_RNA (1)...(19): siRNA sense strand
ucacaaaagcggauguuga

SEQ ID NO: 2667682 - RNA, 19 nt, Homo sapiens
  misc_RNA (1)...(19): siRNA sense strand
aguaaaagcagccgaauca

SEQ ID NO: 2667683 - RNA, 19 nt, Homo sapiens
  misc_RNA (1)...(19): siRNA sense strand
agaacucgaaggaggaaga

SEQ ID NO: 2667684 - RNA, 19 nt, Homo sapiens
  misc_RNA (1)...(19): siRNA sense strand
cgaaaugaaugauuacgca

SEQ ID NO: 2667685 - RNA, 19 nt, Homo sapiens
  misc_RNA (1)...(19): siRNA sense strand
agaaaauacaagagaugga

SEQ ID NO: 2667686 - RNA, 19 nt, Homo sapiens
  misc_RNA (1)...(19): siRNA sense strand
uucaaauuccagaggagaa

SEQ ID NO: 2667687 - RNA, 19 nt, Homo sapiens
  misc_RNA (1)...(19): siRNA sense strand
ucgaagucuguuuggacaa

SEQ ID NO: 2667688 - RNA, 19 nt, Homo sapiens
  misc_RNA (1)...(19): siRNA sense strand
uuccguaguugaaggagaa

SEQ ID NO: 2667689 - RNA, 19 nt, Homo sapiens
  misc_RNA (1)...(19): siRNA sense strand
agauaacagccuuucaaau

SEQ ID NO: 2667690 - RNA, 19 nt, Homo sapiens
  misc_RNA (1)...(19): siRNA sense strand
aggcaaaccagaccucaaa

SEQ ID NO: 2667691 - RNA, 19 nt, Homo sapiens
  misc_RNA (1)...(19): siRNA sense strand
caaguauacgucauguaaa

SEQ ID NO: 2667692 - RNA, 19 nt, Homo sapiens
  misc_RNA (1)...(19): siRNA sense strand
guaaagcacagcagcacau

SEQ ID NO: 2667693 - RNA, 19 nt, Homo sapiens
  misc_RNA (1)...(19): siRNA sense strand
agcaguacuuugagaaaau

SEQ ID NO: 2667694 - RNA, 19 nt, Homo sapiens
  misc_RNA (1)...(19): siRNA sense strand
acgaggaguuucuggccaa

SEQ ID NO: 2667695 - RNA, 19 nt, Homo sapiens
  misc_RNA (1)...(19): siRNA sense strand
gcuggaaccuggagccaca

SEQ ID NO: 2667696 - RNA, 19 nt, Homo sapiens
  misc_RNA (1)...(19): siRNA sense strand
gaaggaaagcccugcccua

SEQ ID NO: 2667697 - RNA, 19 nt, Homo sapiens
  misc_RNA (1)...(19): siRNA sense strand
ccagaacacucgaggaccu

SEQ ID NO: 2667698 - RNA, 19 nt, Homo sapiens
  misc_RNA (1)...(19): siRNA sense strand
auguaaaucuagagaagag

SEQ ID NO: 2667699 - RNA, 19 nt, Homo sapiens
  misc_RNA (1)...(19): siRNA sense strand
gcauaaagcaggugccgag

SEQ ID NO: 2667700 - RNA, 19 nt, Homo sapiens
  misc_RNA (1)...(19): siRNA sense strand
gcagcgaggaugaggcacu

SEQ ID NO: 2667701 - RNA, 19 nt, Homo sapiens
  misc_RNA (1)...(19): siRNA sense strand
ugacaacgcucuugggcaa

SEQ ID NO: 2667702 - RNA, 19 nt, Homo sapiens
  misc_RNA (1)...(19): siRNA sense strand
gcuacggucuccuggguga

SEQ ID NO: 2667703 - RNA, 19 nt, Homo sapiens
  misc_RNA (1)...(19): siRNA sense strand
agggaagaaacaaggcuuu

SEQ ID NO: 2667704 - RNA, 19 nt, Homo sapiens
  misc_RNA (1)...(19): siRNA sense strand
gcacaaguucacugcucau

SEQ ID NO: 2667705 - RNA, 19 nt, Homo sapiens
  misc_RNA (1)...(19): siRNA sense strand
gagggaagaaacaaggcuu

SEQ ID NO: 2667706 - RNA, 19 nt, Homo sapiens
  misc_RNA (1)...(19): siRNA sense strand
ugacaacgcucuugggcaa

SEQ ID NO: 2667707 - RNA, 19 nt, Homo sapiens
  misc_RNA (1)...(19): siRNA sense strand
agggaagaaacaaggcuuu

SEQ ID NO: 2667708 - RNA, 19 nt, Homo sapiens
  misc_RNA (1)...(19): siRNA sense strand
gcacaaguucacugcucau

SEQ ID NO: 2667709 - RNA, 19 nt, Homo sapiens
  misc_RNA (1)...(19): siRNA sense strand
gagggaagaaacaaggcuu

SEQ ID NO: 2667710 - RNA, 19 nt, Homo sapiens
  misc_RNA (1)...(19): siRNA sense strand
ggaugaaacuguugaagaa

SEQ ID NO: 2667711 - RNA, 19 nt, Homo sapiens
  misc_RNA (1)...(19): siRNA sense strand
ccaagaaacucaaggagaa

SEQ ID NO: 2667712 - RNA, 19 nt, Homo sapiens
  misc_RNA (1)...(19): siRNA sense strand
aagcaaagcuagacuguaa

SEQ ID NO: 2667713 - RNA, 19 nt, Homo sapiens
  misc_RNA (1)...(19): siRNA sense strand
gcaaggaguuggaugccua

SEQ ID NO: 2667714 - RNA, 19 nt, Homo sapiens
  misc_RNA (1)...(19): siRNA sense strand
cagaagacugcuaggguau

SEQ ID NO: 2667715 - RNA, 19 nt, Homo sapiens
  misc_RNA (1)...(19): siRNA sense strand
gggucuguuuccaggauaa

SEQ ID NO: 2667716 - RNA, 19 nt, Homo sapiens
  misc_RNA (1)...(19): siRNA sense strand
ccagaagacugcuagggua

SEQ ID NO: 2667717 - RNA, 19 nt, Homo sapiens
  misc_RNA (1)...(19): siRNA sense strand
gugaagaccaugugugaga

SEQ ID NO: 2667718 - RNA, 19 nt, Homo sapiens
  misc_RNA (1)...(19): siRNA sense strand
agguauggcuauagcauca

SEQ ID NO: 2667719 - RNA, 19 nt, Homo sapiens
  misc_RNA (1)...(19): siRNA sense strand
cuguaaaggaaaaggaaau

SEQ ID NO: 2667720 - RNA, 19 nt, Homo sapiens
  misc_RNA (1)...(19): siRNA sense strand
gguaugaggagcagaggau

SEQ ID NO: 2667721 - RNA, 19 nt, Homo sapiens
  misc_RNA (1)...(19): siRNA sense strand
cugaaacaagagagauuua

SEQ ID NO: 2667722 - RNA, 19 nt, Homo sapiens
  misc_RNA (1)...(19): siRNA sense strand
ucugauagucccaguauaa

SEQ ID NO: 2667723 - RNA, 19 nt, Homo sapiens
  misc_RNA (1)...(19): siRNA sense strand
agaacugacaggaggagua

SEQ ID NO: 2667724 - RNA, 19 nt, Homo sapiens
  misc_RNA (1)...(19): siRNA sense strand
gaacacagguauggcuaua

SEQ ID NO: 2667725 - RNA, 19 nt, Homo sapiens
  misc_RNA (1)...(19): siRNA sense strand
ugacaugguuugugagucu

SEQ ID NO: 2667726 - RNA, 19 nt, Homo sapiens
  misc_RNA (1)...(19): siRNA sense strand
ccacccaaauggaggccaa

SEQ ID NO: 2667727 - RNA, 19 nt, Homo sapiens
  misc_RNA (1)...(19): siRNA sense strand
ccaagaaggucaagcugga

SEQ ID NO: 2667728 - RNA, 19 nt, Homo sapiens
  misc_RNA (1)...(19): siRNA sense strand
ccaaaggccucaaagcauu

SEQ ID NO: 2667729 - RNA, 19 nt, Homo sapiens
  misc_RNA (1)...(19): siRNA sense strand
gcaagaacaagcuggccaa

SEQ ID NO: 2667730 - RNA, 19 nt, Homo sapiens
  misc_RNA (1)...(19): siRNA sense strand
agaugaggauagugacuuu

SEQ ID NO: 2667731 - RNA, 19 nt, Homo sapiens
  misc_RNA (1)...(19): siRNA sense strand
ucgaaagguaccugaaaga

SEQ ID NO: 2667732 - RNA, 19 nt, Homo sapiens
  misc_RNA (1)...(19): siRNA sense strand
gcacggagcuagacccaca

SEQ ID NO: 2667733 - RNA, 19 nt, Homo sapiens
  misc_RNA (1)...(19): siRNA sense strand
gcccugaagcagaagcaaa

SEQ ID NO: 2667734 - RNA, 19 nt, Homo sapiens
  misc_RNA (1)...(19): siRNA sense strand
caagagagauuuaugucau

SEQ ID NO: 2667735 - RNA, 19 nt, Homo sapiens
  misc_RNA (1)...(19): siRNA sense strand
ccaucaagccagucgugaa

SEQ ID NO: 2667736 - RNA, 19 nt, Homo sapiens
  misc_RNA (1)...(19): siRNA sense strand
ucgcaaaagaccuggggua

SEQ ID NO: 2667737 - RNA, 19 nt, Homo sapiens
  misc_RNA (1)...(19): siRNA sense strand
cuaacaaacagaucaguau

SEQ ID NO: 2667738 - RNA, 19 nt, Homo sapiens
  misc_RNA (1)...(19): siRNA sense strand
caugggaaccugacagcaa

SEQ ID NO: 2667739 - RNA, 19 nt, Homo sapiens
  misc_RNA (1)...(19): siRNA sense strand
gcuuaucacuggccacuaa

SEQ ID NO: 2667740 - RNA, 19 nt, Homo sapiens
  misc_RNA (1)...(19): siRNA sense strand
cagugaaagcaaagcuaga

SEQ ID NO: 2667741 - RNA, 19 nt, Homo sapiens
  misc_RNA (1)...(19): siRNA sense strand
gugagugucaaguguguaa

SEQ ID NO: 2667742 - RNA, 19 nt, Homo sapiens
  misc_RNA (1)...(19): siRNA sense strand
ucaccagggauaaggaauu

SEQ ID NO: 2667743 - RNA, 19 nt, Homo sapiens
  misc_RNA (1)...(19): siRNA sense strand
ggaaauaagccacacaagu

SEQ ID NO: 2667744 - RNA, 19 nt, Homo sapiens
  misc_RNA (1)...(19): siRNA sense strand
agaacaagcuggccaagau

SEQ ID NO: 2667745 - RNA, 19 nt, Homo sapiens
  misc_RNA (1)...(19): siRNA sense strand
ccaugugugagaagggcaa

SEQ ID NO: 2667746 - RNA, 19 nt, Homo sapiens
  misc_RNA (1)...(19): siRNA sense strand
ccaaauacuaccaaagcca

SEQ ID NO: 2667747 - RNA, 19 nt, Homo sapiens
  misc_RNA (1)...(19): siRNA sense strand
agcugugggugcugaguaa

SEQ ID NO: 2667748 - RNA, 19 nt, Homo sapiens
  misc_RNA (1)...(19): siRNA sense strand
ggagaccagugaaagcaaa

SEQ ID NO: 2667749 - RNA, 19 nt, Homo sapiens
  misc_RNA (1)...(19): siRNA sense strand
ccuugaauguguggcguua

SEQ ID NO: 2667750 - RNA, 19 nt, Homo sapiens
  misc_RNA (1)...(19): siRNA sense strand
caaguauccuucugaaaca

SEQ ID NO: 2667751 - RNA, 19 nt, Homo sapiens
  misc_RNA (1)...(19): siRNA sense strand
gcagggagcagaacgagaa

SEQ ID NO: 2667752 - RNA, 19 nt, Homo sapiens
  misc_RNA (1)...(19): siRNA sense strand
ggacacaaacagugcccuu

SEQ ID NO: 2667753 - RNA, 19 nt, Homo sapiens
  misc_RNA (1)...(19): siRNA sense strand
caggauaacagaaguuuua

SEQ ID NO: 2667754 - RNA, 19 nt, Homo sapiens
  misc_RNA (1)...(19): siRNA sense strand
guuugugagucuucuguua

SEQ ID NO: 2667755 - RNA, 19 nt, Homo sapiens
  misc_RNA (1)...(19): siRNA sense strand
ccuaacaaacagaucagua

SEQ ID NO: 2667756 - RNA, 19 nt, Homo sapiens
  misc_RNA (1)...(19): siRNA sense strand
ugaaagguacccugggaga

SEQ ID NO: 2667757 - RNA, 19 nt, Homo sapiens
  misc_RNA (1)...(19): siRNA sense strand
ccucugaacuggaugaaac

SEQ ID NO: 2667758 - RNA, 19 nt, Homo sapiens
  misc_RNA (1)...(19): siRNA sense strand
gcucgaaagguaccugaaa

SEQ ID NO: 2667759 - RNA, 19 nt, Homo sapiens
  misc_RNA (1)...(19): siRNA sense strand
gcuguaaaggaaaaggaaa

SEQ ID NO: 2667760 - RNA, 19 nt, Homo sapiens
  misc_RNA (1)...(19): siRNA sense strand
cugagaaucuguccaaauu

SEQ ID NO: 2667761 - RNA, 19 nt, Homo sapiens
  misc_RNA (1)...(19): siRNA sense strand
cuguguagggucugcuaaa

SEQ ID NO: 2667762 - RNA, 19 nt, Homo sapiens
  misc_RNA (1)...(19): siRNA sense strand
agugugggcucgaaaggua

SEQ ID NO: 2667763 - RNA, 19 nt, Homo sapiens
  misc_RNA (1)...(19): siRNA sense strand
uuacagaugaggauaguga

SEQ ID NO: 2667764 - RNA, 19 nt, Homo sapiens
  misc_RNA (1)...(19): siRNA sense strand
cccugaagcagaagcaaau

SEQ ID NO: 2667765 - RNA, 19 nt, Homo sapiens
  misc_RNA (1)...(19): siRNA sense strand
ggaaggaggccacagacau

SEQ ID NO: 2667766 - RNA, 19 nt, Homo sapiens
  misc_RNA (1)...(19): siRNA sense strand
gggcuguagugcuggccau

SEQ ID NO: 2667767 - RNA, 19 nt, Homo sapiens
  misc_RNA (1)...(19): siRNA sense strand
caguuaacacagagccaga

SEQ ID NO: 2667768 - RNA, 19 nt, Homo sapiens
  misc_RNA (1)...(19): siRNA sense strand
uucugaaacaagagagauu

SEQ ID NO: 2667769 - RNA, 19 nt, Homo sapiens
  misc_RNA (1)...(19): siRNA sense strand
ucgaguacuuggaguggau

SEQ ID NO: 2667770 - RNA, 19 nt, Homo sapiens
  misc_RNA (1)...(19): siRNA sense strand
gggacuauuugcagccuca

SEQ ID NO: 2667771 - RNA, 19 nt, Homo sapiens
  misc_RNA (1)...(19): siRNA sense strand
gaaugcaggugucggcuuu

SEQ ID NO: 2667772 - RNA, 19 nt, Homo sapiens
  misc_RNA (1)...(19): siRNA sense strand
aagaaggucaagcuggaaa

SEQ ID NO: 2667773 - RNA, 19 nt, Homo sapiens
  misc_RNA (1)...(19): siRNA sense strand
uauagcaucaccagggaua

SEQ ID NO: 2667774 - RNA, 19 nt, Homo sapiens
  misc_RNA (1)...(19): siRNA sense strand
uggaugaaacuguugaaga

SEQ ID NO: 2667775 - RNA, 19 nt, Homo sapiens
  misc_RNA (1)...(19): siRNA sense strand
ccuugacacagauggcaaa

SEQ ID NO: 2667776 - RNA, 19 nt, Homo sapiens
  misc_RNA (1)...(19): siRNA sense strand
caacagguggccaugcaaa

SEQ ID NO: 2667777 - RNA, 19 nt, Homo sapiens
  misc_RNA (1)...(19): siRNA sense strand
ccuucugaaacaagagaga

SEQ ID NO: 2667778 - RNA, 19 nt, Homo sapiens
  misc_RNA (1)...(19): siRNA sense strand
gauaaggaauucaagcguu

SEQ ID NO: 2667779 - RNA, 19 nt, Homo sapiens
  misc_RNA (1)...(19): siRNA sense strand
gguccgaauacgaacccaa

SEQ ID NO: 2667780 - RNA, 19 nt, Homo sapiens
  misc_RNA (1)...(19): siRNA sense strand
gcggaaaaggggacugcua

SEQ ID NO: 2667781 - RNA, 19 nt, Homo sapiens
  misc_RNA (1)...(19): siRNA sense strand
uggcguuauuggugcauga

SEQ ID NO: 2667782 - RNA, 19 nt, Homo sapiens
  misc_RNA (1)...(19): siRNA sense strand
ccgcaauuuccgugaguuc

SEQ ID NO: 2667783 - RNA, 19 nt, Homo sapiens
  misc_RNA (1)...(19): siRNA sense strand
gaaagguaccugaaagaac

SEQ ID NO: 2667784 - RNA, 19 nt, Homo sapiens
  misc_RNA (1)...(19): siRNA sense strand
aaagguaccugaaagaaca

SEQ ID NO: 2667785 - RNA, 19 nt, Homo sapiens
  misc_RNA (1)...(19): siRNA sense strand
cccaagaggcccugaagca

SEQ ID NO: 2667786 - RNA, 19 nt, Homo sapiens
  misc_RNA (1)...(19): siRNA sense strand
uggaaaacugugagaacuu

SEQ ID NO: 2667787 - RNA, 19 nt, Homo sapiens
  misc_RNA (1)...(19): siRNA sense strand
cugaagaguuccuguccca

SEQ ID NO: 2667788 - RNA, 19 nt, Homo sapiens
  misc_RNA (1)...(19): siRNA sense strand
gaacuccgcuguaaaggaa

SEQ ID NO: 2667789 - RNA, 19 nt, Homo sapiens
  misc_RNA (1)...(19): siRNA sense strand
cggaaaaggggacugcuaa

SEQ ID NO: 2667790 - RNA, 19 nt, Homo sapiens
  misc_RNA (1)...(19): siRNA sense strand
cuguugaagaauaugaaga

SEQ ID NO: 2667791 - RNA, 19 nt, Homo sapiens
  misc_RNA (1)...(19): siRNA sense strand
cccaaaggccucaaagcau

SEQ ID NO: 2667792 - RNA, 19 nt, Homo sapiens
  misc_RNA (1)...(19): siRNA sense strand
cagaaggauggguccgaau

SEQ ID NO: 2667793 - RNA, 19 nt, Homo sapiens
  misc_RNA (1)...(19): siRNA sense strand
accaagaaacucaaggaga

SEQ ID NO: 2667794 - RNA, 19 nt, Homo sapiens
  misc_RNA (1)...(19): siRNA sense strand
gggagaccagugaaagcaa

SEQ ID NO: 2667795 - RNA, 19 nt, Homo sapiens
  misc_RNA (1)...(19): siRNA sense strand
cuggagacuugaaugccaa

SEQ ID NO: 2667796 - RNA, 19 nt, Homo sapiens
  misc_RNA (1)...(19): siRNA sense strand
cugcagugaaguugaacga

SEQ ID NO: 2667797 - RNA, 19 nt, Homo sapiens
  misc_RNA (1)...(19): siRNA sense strand
aggaaggaggccacagaca

SEQ ID NO: 2667798 - RNA, 19 nt, Homo sapiens
  misc_RNA (1)...(19): siRNA sense strand
gcauaccagaccaggauga

SEQ ID NO: 2667799 - RNA, 19 nt, Homo sapiens
  misc_RNA (1)...(19): siRNA sense strand
ccaacgggcucaaagacca

SEQ ID NO: 2667800 - RNA, 19 nt, Homo sapiens
  misc_RNA (1)...(19): siRNA sense strand
ggcaaaugcagaacugaca

SEQ ID NO: 2667801 - RNA, 19 nt, Homo sapiens
  misc_RNA (1)...(19): siRNA sense strand
agaaggauggguccgaaua

SEQ ID NO: 2667802 - RNA, 19 nt, Homo sapiens
  misc_RNA (1)...(19): siRNA sense strand
gcgugugguaugaggagca

SEQ ID NO: 2667803 - RNA, 19 nt, Homo sapiens
  misc_RNA (1)...(19): siRNA sense strand
uaucagagcugcagcaccu

SEQ ID NO: 2667804 - RNA, 19 nt, Homo sapiens
  misc_RNA (1)...(19): siRNA sense strand
guguguaaccuccguguuu

SEQ ID NO: 2667805 - RNA, 19 nt, Homo sapiens
  misc_RNA (1)...(19): siRNA sense strand
ggaaaauagcaaaggaaau

SEQ ID NO: 2667806 - RNA, 19 nt, Homo sapiens
  misc_RNA (1)...(19): siRNA sense strand
cugaaugugaccaguguaa

SEQ ID NO: 2667807 - RNA, 19 nt, Homo sapiens
  misc_RNA (1)...(19): siRNA sense strand
guuuaaacugccaggaaaa

SEQ ID NO: 2667808 - RNA, 19 nt, Homo sapiens
  misc_RNA (1)...(19): siRNA sense strand
uucacgaccucgagggaaa

SEQ ID NO: 2667809 - RNA, 19 nt, Homo sapiens
  misc_RNA (1)...(19): siRNA sense strand
aggaaaauagcaaaggaaa

SEQ ID NO: 2667810 - RNA, 19 nt, Homo sapiens
  misc_RNA (1)...(19): siRNA sense strand
cugugaagaauguaaagaa

SEQ ID NO: 2667811 - RNA, 19 nt, Homo sapiens
  misc_RNA (1)...(19): siRNA sense strand
gcaaugaaguggcucccaa

SEQ ID NO: 2667812 - RNA, 19 nt, Homo sapiens
  misc_RNA (1)...(19): siRNA sense strand
ggaccaucgagcugaaaga

SEQ ID NO: 2667813 - RNA, 19 nt, Homo sapiens
  misc_RNA (1)...(19): siRNA sense strand
uguuggaagaugauggcaa

SEQ ID NO: 2667814 - RNA, 19 nt, Homo sapiens
  misc_RNA (1)...(19): siRNA sense strand
ccugaugccacuaaagaau

SEQ ID NO: 2667815 - RNA, 19 nt, Homo sapiens
  misc_RNA (1)...(19): siRNA sense strand
guauauauguaccgcgagu

SEQ ID NO: 2667816 - RNA, 19 nt, Homo sapiens
  misc_RNA (1)...(19): siRNA sense strand
auacauaacuacaaagccu

SEQ ID NO: 2667817 - RNA, 19 nt, Homo sapiens
  misc_RNA (1)...(19): siRNA sense strand
caggaaaauagcaaaggaa

SEQ ID NO: 2667818 - RNA, 19 nt, Homo sapiens
  misc_RNA (1)...(19): siRNA sense strand
cgagugaauuggaaccuga

SEQ ID NO: 2667819 - RNA, 19 nt, Homo sapiens
  misc_RNA (1)...(19): siRNA sense strand
cgagcugaaagaagacaau

SEQ ID NO: 2667820 - RNA, 19 nt, Homo sapiens
  misc_RNA (1)...(19): siRNA sense strand
agcugaaagaagacaauau

SEQ ID NO: 2667821 - RNA, 19 nt, Homo sapiens
  misc_RNA (1)...(19): siRNA sense strand
cugacgacgcccauacaua

SEQ ID NO: 2667822 - RNA, 19 nt, Homo sapiens
  misc_RNA (1)...(19): siRNA sense strand
acauaacuacaaagccuaa

SEQ ID NO: 2667823 - RNA, 19 nt, Homo sapiens
  misc_RNA (1)...(19): siRNA sense strand
cuguauauauguaccgcga

SEQ ID NO: 2667824 - RNA, 19 nt, Homo sapiens
  misc_RNA (1)...(19): siRNA sense strand
gcgugaaccucguggccaa

SEQ ID NO: 2667825 - RNA, 19 nt, Homo sapiens
  misc_RNA (1)...(19): siRNA sense strand
gagaaugaguucagggacu

SEQ ID NO: 2667826 - RNA, 19 nt, Homo sapiens
  misc_RNA (1)...(19): siRNA sense strand
gccaauaacaagaaggaga

SEQ ID NO: 2667827 - RNA, 19 nt, Homo sapiens
  misc_RNA (1)...(19): siRNA sense strand
gggccaucaaagagaacaa

SEQ ID NO: 2667828 - RNA, 19 nt, Homo sapiens
  misc_RNA (1)...(19): siRNA sense strand
uggaggagcaggugcggaa

SEQ ID NO: 2667829 - RNA, 19 nt, Homo sapiens
  misc_RNA (1)...(19): siRNA sense strand
gagaacacccagaagguca

SEQ ID NO: 2667830 - RNA, 19 nt, Homo sapiens
  misc_RNA (1)...(19): siRNA sense strand
uagccaaagagauggagaa

SEQ ID NO: 2667831 - RNA, 19 nt, Homo sapiens
  misc_RNA (1)...(19): siRNA sense strand
augcauacaaccuggagaa

SEQ ID NO: 2667832 - RNA, 19 nt, Homo sapiens
  misc_RNA (1)...(19): siRNA sense strand
gcucaagggaagacagaac

SEQ ID NO: 2667833 - RNA, 19 nt, Homo sapiens
  misc_RNA (1)...(19): siRNA sense strand
gagcagaagguucgggcca

SEQ ID NO: 2667834 - RNA, 19 nt, Homo sapiens
  misc_RNA (1)...(19): siRNA sense strand
gcuaaugagcagaagguuc

SEQ ID NO: 2667835 - RNA, 19 nt, Homo sapiens
  misc_RNA (1)...(19): siRNA sense strand
ucaaagagaacaacggcau

SEQ ID NO: 2667836 - RNA, 19 nt, Homo sapiens
  misc_RNA (1)...(19): siRNA sense strand
cugaagagccagagagacc

SEQ ID NO: 2667837 - RNA, 19 nt, Homo sapiens
  misc_RNA (1)...(19): siRNA sense strand
aggagaugaaggaguucua

SEQ ID NO: 2667838 - RNA, 19 nt, Homo sapiens
  misc_RNA (1)...(19): siRNA sense strand
cuuauuuccacgugggaga

SEQ ID NO: 2667839 - RNA, 19 nt, Homo sapiens
  misc_RNA (1)...(19): siRNA sense strand
agaaagaggaggucacgga

SEQ ID NO: 2667840 - RNA, 19 nt, Homo sapiens
  misc_RNA (1)...(19): siRNA sense strand
aguuugagcagcuggccaa

SEQ ID NO: 2667841 - RNA, 19 nt, Homo sapiens
  misc_RNA (1)...(19): siRNA sense strand
ucacagaccucaacgagca

SEQ ID NO: 2667842 - RNA, 19 nt, Homo sapiens
  misc_RNA (1)...(19): siRNA sense strand
acaaggacagacugaggaa

SEQ ID NO: 2667843 - RNA, 19 nt, Homo sapiens
  misc_RNA (1)...(19): siRNA sense strand
cuaagaagugccaggagca

SEQ ID NO: 2667844 - RNA, 19 nt, Homo sapiens
  misc_RNA (1)...(19): siRNA sense strand
ccuccuuccuacagaacau

SEQ ID NO: 2667845 - RNA, 19 nt, Homo sapiens
  misc_RNA (1)...(19): siRNA sense strand
acgaguuccaggagaccaa

SEQ ID NO: 2667846 - RNA, 19 nt, Homo sapiens
  misc_RNA (1)...(19): siRNA sense strand
agaagaagucggugcugga

SEQ ID NO: 2667847 - RNA, 19 nt, Homo sapiens
  misc_RNA (1)...(19): siRNA sense strand
ggaacuggcuaaugagcag

SEQ ID NO: 2667848 - RNA, 19 nt, Homo sapiens
  misc_RNA (1)...(19): siRNA sense strand
cagccauggcacaaggaga

SEQ ID NO: 2667849 - RNA, 19 nt, Homo sapiens
  misc_RNA (1)...(19): siRNA sense strand
ucaagggaagacagaacaa

SEQ ID NO: 2667850 - RNA, 19 nt, Homo sapiens
  misc_RNA (1)...(19): siRNA sense strand
uggccaaggagaugaagga

SEQ ID NO: 2667851 - RNA, 19 nt, Homo sapiens
  misc_RNA (1)...(19): siRNA sense strand
aguucagggacuaugcaua

SEQ ID NO: 2667852 - RNA, 19 nt, Homo sapiens
  misc_RNA (1)...(19): siRNA sense strand
cacugaagagccagagaga

SEQ ID NO: 2667853 - RNA, 19 nt, Homo sapiens
  misc_RNA (1)...(19): siRNA sense strand
uggcugugcaggagaagau

SEQ ID NO: 2667854 - RNA, 19 nt, Homo sapiens
  misc_RNA (1)...(19): siRNA sense strand
aggagaagauguuccgcca

SEQ ID NO: 2667855 - RNA, 19 nt, Homo sapiens
  misc_RNA (1)...(19): siRNA sense strand
augcaguauuugugggaaa

SEQ ID NO: 2667856 - RNA, 19 nt, Homo sapiens
  misc_RNA (1)...(19): siRNA sense strand
aauucauacuggagggaaa

SEQ ID NO: 2667857 - RNA, 19 nt, Homo sapiens
  misc_RNA (1)...(19): siRNA sense strand
gagaagugaugcuggaaaa

SEQ ID NO: 2667858 - RNA, 19 nt, Homo sapiens
  misc_RNA (1)...(19): siRNA sense strand
ccuuaugaguacagugaau

SEQ ID NO: 2667859 - RNA, 19 nt, Homo sapiens
  misc_RNA (1)...(19): siRNA sense strand
uuguaaugaaugugggaaa

SEQ ID NO: 2667860 - RNA, 19 nt, Homo sapiens
  misc_RNA (1)...(19): siRNA sense strand
uuaaauagacacaggagaa

SEQ ID NO: 2667861 - RNA, 19 nt, Homo sapiens
  misc_RNA (1)...(19): siRNA sense strand
gugucauacuggagagaga

SEQ ID NO: 2667862 - RNA, 19 nt, Homo sapiens
  misc_RNA (1)...(19): siRNA sense strand
cauuaugagugcagugaau

SEQ ID NO: 2667863 - RNA, 19 nt, Homo sapiens
  misc_RNA (1)...(19): siRNA sense strand
cuauaaaugcagugacuau

SEQ ID NO: 2667864 - RNA, 19 nt, Homo sapiens
  misc_RNA (1)...(19): siRNA sense strand
augcagugaaugugggaaa

SEQ ID NO: 2667865 - RNA, 19 nt, Homo sapiens
  misc_RNA (1)...(19): siRNA sense strand
gauucacacaggagagaaa

SEQ ID NO: 2667866 - RNA, 19 nt, Homo sapiens
  misc_RNA (1)...(19): siRNA sense strand
aauucauacaggagagaaa

SEQ ID NO: 2667867 - RNA, 19 nt, Homo sapiens
  misc_RNA (1)...(19): siRNA sense strand
ugauaagacuauuggagau

SEQ ID NO: 2667868 - RNA, 19 nt, Homo sapiens
  misc_RNA (1)...(19): siRNA sense strand
cugaauaugagaaggauuu

SEQ ID NO: 2667869 - RNA, 19 nt, Homo sapiens
  misc_RNA (1)...(19): siRNA sense strand
auguagugacugugggaaa

SEQ ID NO: 2667870 - RNA, 19 nt, Homo sapiens
  misc_RNA (1)...(19): siRNA sense strand
gagaauucauagaggggaa

SEQ ID NO: 2667871 - RNA, 19 nt, Homo sapiens
  misc_RNA (1)...(19): siRNA sense strand
ccuuauaaauguagugacu

SEQ ID NO: 2667872 - RNA, 19 nt, Homo sapiens
  misc_RNA (1)...(19): siRNA sense strand
ggaaagaauuuggagccua

SEQ ID NO: 2667873 - RNA, 19 nt, Homo sapiens
  misc_RNA (1)...(19): siRNA sense strand
agaaacaaugcaacagaaa

SEQ ID NO: 2667874 - RNA, 19 nt, Homo sapiens
  misc_RNA (1)...(19): siRNA sense strand
ccuuauaaaugcagcgacu

SEQ ID NO: 2667875 - RNA, 19 nt, Homo sapiens
  misc_RNA (1)...(19): siRNA sense strand
gggaauuacuauaaaugca

SEQ ID NO: 2667876 - RNA, 19 nt, Homo sapiens
  misc_RNA (1)...(19): siRNA sense strand
ucacaagagaugacccaua

SEQ ID NO: 2667877 - RNA, 19 nt, Homo sapiens
  misc_RNA (1)...(19): siRNA sense strand
gaacaaaccuuuaagucgu

SEQ ID NO: 2667878 - RNA, 19 nt, Homo sapiens
  misc_RNA (1)...(19): siRNA sense strand
aauucacacaggagagaaa

SEQ ID NO: 2667879 - RNA, 19 nt, Homo sapiens
  misc_RNA (1)...(19): siRNA sense strand
ggacucagaaggugaccaa

SEQ ID NO: 2667880 - RNA, 19 nt, Homo sapiens
  misc_RNA (1)...(19): siRNA sense strand
acaagaaaauguggagaaa

SEQ ID NO: 2667881 - RNA, 19 nt, Homo sapiens
  misc_RNA (1)...(19): siRNA sense strand
aagaaaauguggagaaaac

SEQ ID NO: 2667882 - RNA, 19 nt, Homo sapiens
  misc_RNA (1)...(19): siRNA sense strand
caagaaaacacuagcuaau

SEQ ID NO: 2667883 - RNA, 19 nt, Homo sapiens
  misc_RNA (1)...(19): siRNA sense strand
acgaugaacacacaagaaa

SEQ ID NO: 2667884 - RNA, 19 nt, Homo sapiens
  misc_RNA (1)...(19): siRNA sense strand
auguaaccaaugugggaaa

SEQ ID NO: 2667885 - RNA, 19 nt, Homo sapiens
  misc_RNA (1)...(19): siRNA sense strand
gggaaauccuucauccaga

SEQ ID NO: 2667886 - RNA, 19 nt, Homo sapiens
  misc_RNA (1)...(19): siRNA sense strand
auauauaugugcugagugu

SEQ ID NO: 2667887 - RNA, 19 nt, Homo sapiens
  misc_RNA (1)...(19): siRNA sense strand
agaaaagccuguacagaga

SEQ ID NO: 2667888 - RNA, 19 nt, Homo sapiens
  misc_RNA (1)...(19): siRNA sense strand
agagaagugaugcuggaaa

SEQ ID NO: 2667889 - RNA, 19 nt, Homo sapiens
  misc_RNA (1)...(19): siRNA sense strand
cgaugaacacacaagaaaa

SEQ ID NO: 2667890 - RNA, 19 nt, Homo sapiens
  misc_RNA (1)...(19): siRNA sense strand
ugagaguauuugugcugaa

SEQ ID NO: 2667891 - RNA, 19 nt, Homo sapiens
  misc_RNA (1)...(19): siRNA sense strand
acuaaguaugcaucagaaa

SEQ ID NO: 2667892 - RNA, 19 nt, Homo sapiens
  misc_RNA (1)...(19): siRNA sense strand
ggauacaucagaaguguca

SEQ ID NO: 2667893 - RNA, 19 nt, Homo sapiens
  misc_RNA (1)...(19): siRNA sense strand
ucucauucaacaacagaaa

SEQ ID NO: 2667894 - RNA, 19 nt, Homo sapiens
  misc_RNA (1)...(19): siRNA sense strand
aauucauacaggagaaaga

SEQ ID NO: 2667895 - RNA, 19 nt, Homo sapiens
  misc_RNA (1)...(19): siRNA sense strand
guggagaaaaccagaacaa

SEQ ID NO: 2667896 - RNA, 19 nt, Homo sapiens
  misc_RNA (1)...(19): siRNA sense strand
gugggaaauccuuuauuaa

SEQ ID NO: 2667897 - RNA, 19 nt, Homo sapiens
  misc_RNA (1)...(19): siRNA sense strand
cuauauauguacugugugu

SEQ ID NO: 2667898 - RNA, 19 nt, Homo sapiens
  misc_RNA (1)...(19): siRNA sense strand
cuuuccagucugagauuaa

SEQ ID NO: 2667899 - RNA, 19 nt, Homo sapiens
  misc_RNA (1)...(19): siRNA sense strand
cugauaagacuauuggaga

SEQ ID NO: 2667900 - RNA, 19 nt, Homo sapiens
  misc_RNA (1)...(19): siRNA sense strand
aggagaaagacccuauaua

SEQ ID NO: 2667901 - RNA, 19 nt, Homo sapiens
  misc_RNA (1)...(19): siRNA sense strand
uaaguaugcaccagagaau

SEQ ID NO: 2667902 - RNA, 19 nt, Homo sapiens
  misc_RNA (1)...(19): siRNA sense strand
ccauauguuugcacugaau

SEQ ID NO: 2667903 - RNA, 19 nt, Homo sapiens
  misc_RNA (1)...(19): siRNA sense strand
cccuauaagugcagugacu

SEQ ID NO: 2667904 - RNA, 19 nt, Homo sapiens
  misc_RNA (1)...(19): siRNA sense strand
aacuguaacucguguggaa

SEQ ID NO: 2667905 - RNA, 19 nt, Homo sapiens
  misc_RNA (1)...(19): siRNA sense strand
ccuuauguauguacugaau

SEQ ID NO: 2667906 - RNA, 19 nt, Homo sapiens
  misc_RNA (1)...(19): siRNA sense strand
gauggcagucagaggguuu

SEQ ID NO: 2667907 - RNA, 19 nt, Homo sapiens
  misc_RNA (1)...(19): siRNA sense strand
auacaucagaagugucaua

SEQ ID NO: 2667908 - RNA, 19 nt, Homo sapiens
  misc_RNA (1)...(19): siRNA sense strand
agaaggaaguugugaaaga

SEQ ID NO: 2667909 - RNA, 19 nt, Homo sapiens
  misc_RNA (1)...(19): siRNA sense strand
gaagaaggaaguugugaaa

SEQ ID NO: 2667910 - RNA, 19 nt, Homo sapiens
  misc_RNA (1)...(19): siRNA sense strand
aggaagaagaagcggcauu

SEQ ID NO: 2667911 - RNA, 19 nt, Homo sapiens
  misc_RNA (1)...(19): siRNA sense strand
acuuaaaggagaagaagga

SEQ ID NO: 2667912 - RNA, 19 nt, Homo sapiens
  misc_RNA (1)...(19): siRNA sense strand
ccaccaagccaccgagaga

SEQ ID NO: 2667913 - RNA, 19 nt, Homo sapiens
  misc_RNA (1)...(19): siRNA sense strand
gccaaggacuuaaaggaga

SEQ ID NO: 2667914 - RNA, 19 nt, Homo sapiens
  misc_RNA (1)...(19): siRNA sense strand
agaagaaggaaguugugaa

SEQ ID NO: 2667915 - RNA, 19 nt, Homo sapiens
  misc_RNA (1)...(19): siRNA sense strand
ccugagggacaacgggaaa

SEQ ID NO: 2667916 - RNA, 19 nt, Homo sapiens
  misc_RNA (1)...(19): siRNA sense strand
aggacuuaaaggagaagaa

SEQ ID NO: 2667917 - RNA, 19 nt, Homo sapiens
  misc_RNA (1)...(19): siRNA sense strand
gcucugaaaucauugccaa

SEQ ID NO: 2667918 - RNA, 19 nt, Homo sapiens
  misc_RNA (1)...(19): siRNA sense strand
ggucaagugaggagacgga

SEQ ID NO: 2667919 - RNA, 19 nt, Homo sapiens
  misc_RNA (1)...(19): siRNA sense strand
ucuacgagauggcggaaaa

SEQ ID NO: 2667920 - RNA, 19 nt, Homo sapiens
  misc_RNA (1)...(19): siRNA sense strand
gggaaugcuaaugaggaaa

SEQ ID NO: 2667921 - RNA, 19 nt, Homo sapiens
  misc_RNA (1)...(19): siRNA sense strand
cggaugaucuucuacgaga

SEQ ID NO: 2667922 - RNA, 19 nt, Homo sapiens
  misc_RNA (1)...(19): siRNA sense strand
uggccaagaagcagcgaga

SEQ ID NO: 2667923 - RNA, 19 nt, Homo sapiens
  misc_RNA (1)...(19): siRNA sense strand
uugcccagcuaguggagaa

SEQ ID NO: 2667924 - RNA, 19 nt, Homo sapiens
  misc_RNA (1)...(19): siRNA sense strand
ggaggaagaagaagcggca

SEQ ID NO: 2667925 - RNA, 19 nt, Homo sapiens
  misc_RNA (1)...(19): siRNA sense strand
aggcugaggaggagaugca

SEQ ID NO: 2667926 - RNA, 19 nt, Homo sapiens
  misc_RNA (1)...(19): siRNA sense strand
gggagcaggaggcugacaa

SEQ ID NO: 2667927 - RNA, 19 nt, Homo sapiens
  misc_RNA (1)...(19): siRNA sense strand
agucacaugggcuggcuaa

SEQ ID NO: 2667928 - RNA, 19 nt, Homo sapiens
  misc_RNA (1)...(19): siRNA sense strand
cugcuaacgggaaugcuaa

SEQ ID NO: 2667929 - RNA, 19 nt, Homo sapiens
  misc_RNA (1)...(19): siRNA sense strand
cgagcaacuuugaccggau

SEQ ID NO: 2667930 - RNA, 19 nt, Homo sapiens
  misc_RNA (1)...(19): siRNA sense strand
gcaaaguggagcagccgca

SEQ ID NO: 2667931 - RNA, 19 nt, Homo sapiens
  misc_RNA (1)...(19): siRNA sense strand
cacuaaacgaggagggaaa

SEQ ID NO: 2667932 - RNA, 19 nt, Homo sapiens
  misc_RNA (1)...(19): siRNA sense strand
uguugaagaaccaggcaaa

SEQ ID NO: 2667933 - RNA, 19 nt, Homo sapiens
  misc_RNA (1)...(19): siRNA sense strand
ggauuaugcuguuuguuau

SEQ ID NO: 2667934 - RNA, 19 nt, Homo sapiens
  misc_RNA (1)...(19): siRNA sense strand
gcuauaaauucuaggagac

SEQ ID NO: 2667935 - RNA, 19 nt, Homo sapiens
  misc_RNA (1)...(19): siRNA sense strand
cagaagcauucaacaacaa

SEQ ID NO: 2667936 - RNA, 19 nt, Homo sapiens
  misc_RNA (1)...(19): siRNA sense strand
uuucagaagcauucaacaa

SEQ ID NO: 2667937 - RNA, 19 nt, Homo sapiens
  misc_RNA (1)...(19): siRNA sense strand
ugacaauuucagaagaaca

SEQ ID NO: 2667938 - RNA, 19 nt, Homo sapiens
  misc_RNA (1)...(19): siRNA sense strand
aggauuaugcuguuuguua

SEQ ID NO: 2667939 - RNA, 19 nt, Homo sapiens
  misc_RNA (1)...(19): siRNA sense strand
gggacugggaacugcggaa

SEQ ID NO: 2667940 - RNA, 19 nt, Homo sapiens
  misc_RNA (1)...(19): siRNA sense strand
gcacuaaacgaggagggaa

SEQ ID NO: 2667941 - RNA, 19 nt, Homo sapiens
  misc_RNA (1)...(19): siRNA sense strand
ugcuauaaauucuaggaga

SEQ ID NO: 2667942 - RNA, 19 nt, Homo sapiens
  misc_RNA (1)...(19): siRNA sense strand
agaagaugccagaucaaca

SEQ ID NO: 2667943 - RNA, 19 nt, Homo sapiens
  misc_RNA (1)...(19): siRNA sense strand
cuauaaauucuaggagaca

SEQ ID NO: 2667944 - RNA, 19 nt, Homo sapiens
  misc_RNA (1)...(19): siRNA sense strand
augcaaauauugaagcacu

SEQ ID NO: 2667945 - RNA, 19 nt, Homo sapiens
  misc_RNA (1)...(19): siRNA sense strand
gagacagcaaauuguggaa

SEQ ID NO: 2667946 - RNA, 19 nt, Homo sapiens
  misc_RNA (1)...(19): siRNA sense strand
cggaagauccacagggcug

SEQ ID NO: 2667947 - RNA, 19 nt, Homo sapiens
  misc_RNA (1)...(19): siRNA sense strand
ggggaugagccuuggguca

SEQ ID NO: 2667948 - RNA, 19 nt, Homo sapiens
  misc_RNA (1)...(19): siRNA sense strand
gcgagucacaggagggaaa

SEQ ID NO: 2667949 - RNA, 19 nt, Homo sapiens
  misc_RNA (1)...(19): siRNA sense strand
gccacaaagaggaggaauu

SEQ ID NO: 2667950 - RNA, 19 nt, Homo sapiens
  misc_RNA (1)...(19): siRNA sense strand
ccaacgaggucauggagga

SEQ ID NO: 2667951 - RNA, 19 nt, Homo sapiens
  misc_RNA (1)...(19): siRNA sense strand
cggaucaggcucaggagaa

SEQ ID NO: 2667952 - RNA, 19 nt, Homo sapiens
  misc_RNA (1)...(19): siRNA sense strand
cagcuagagaggacagcaa

SEQ ID NO: 2667953 - RNA, 19 nt, Homo sapiens
  misc_RNA (1)...(19): siRNA sense strand
gggcaaagaagcuggcaag

SEQ ID NO: 2667954 - RNA, 19 nt, Homo sapiens
  misc_RNA (1)...(19): siRNA sense strand
gggaguacuuuguguucga

SEQ ID NO: 2667955 - RNA, 19 nt, Homo sapiens
  misc_RNA (1)...(19): siRNA sense strand
gugugaagugcauggccaa

SEQ ID NO: 2667956 - RNA, 19 nt, Homo sapiens
  misc_RNA (1)...(19): siRNA sense strand
cugcacagcuagagaggac

SEQ ID NO: 2667957 - RNA, 19 nt, Homo sapiens
  misc_RNA (1)...(19): siRNA sense strand
cgggcaaagaagcuggcaa

SEQ ID NO: 2667958 - RNA, 19 nt, Homo sapiens
  misc_RNA (1)...(19): siRNA sense strand
ggaagacggaucaggcuca

SEQ ID NO: 2667959 - RNA, 19 nt, Homo sapiens
  misc_RNA (1)...(19): siRNA sense strand
caccagguuucaagaguca

SEQ ID NO: 2667960 - RNA, 19 nt, Homo sapiens
  misc_RNA (1)...(19): siRNA sense strand
ccugaaaggugcaaggguu

SEQ ID NO: 2667961 - RNA, 19 nt, Homo sapiens
  misc_RNA (1)...(19): siRNA sense strand
cugaaaggugcaaggguuu

SEQ ID NO: 2667962 - RNA, 19 nt, Homo sapiens
  misc_RNA (1)...(19): siRNA sense strand
ccaccaaggaacagagcga

SEQ ID NO: 2667963 - RNA, 19 nt, Homo sapiens
  misc_RNA (1)...(19): siRNA sense strand
ccaaggagcccauggcaga

SEQ ID NO: 2667964 - RNA, 19 nt, Homo sapiens
  misc_RNA (1)...(19): siRNA sense strand
gaucauaacuucucccuga

SEQ ID NO: 2667965 - RNA, 19 nt, Homo sapiens
  misc_RNA (1)...(19): siRNA sense strand
aaauggaggaagacagaga

SEQ ID NO: 2667966 - RNA, 19 nt, Homo sapiens
  misc_RNA (1)...(19): siRNA sense strand
aggaacagagcgaggcaga

SEQ ID NO: 2667967 - RNA, 19 nt, Homo sapiens
  misc_RNA (1)...(19): siRNA sense strand
gaggcagagaagaguguau

SEQ ID NO: 2667968 - RNA, 19 nt, Homo sapiens
  misc_RNA (1)...(19): siRNA sense strand
agggccaaauggaggaaga

SEQ ID NO: 2667969 - RNA, 19 nt, Homo sapiens
  misc_RNA (1)...(19): siRNA sense strand
gggaccaagcccggaguaa

SEQ ID NO: 2667970 - RNA, 19 nt, Homo sapiens
  misc_RNA (1)...(19): siRNA sense strand
ggaggaagacagagagagg

SEQ ID NO: 2667971 - RNA, 19 nt, Homo sapiens
  misc_RNA (1)...(19): siRNA sense strand
cagaguaaccgcacggcca

SEQ ID NO: 2667972 - RNA, 19 nt, Homo sapiens
  misc_RNA (1)...(19): siRNA sense strand
agggagaaggugaggagaa

SEQ ID NO: 2667973 - RNA, 19 nt, Homo sapiens
  misc_RNA (1)...(19): siRNA sense strand
aggcauggacagccggaaa

SEQ ID NO: 2667974 - RNA, 19 nt, Homo sapiens
  misc_RNA (1)...(19): siRNA sense strand
agguguaccaggaggaaga

SEQ ID NO: 2667975 - RNA, 19 nt, Homo sapiens
  misc_RNA (1)...(19): siRNA sense strand
gaugagaaguugcugcaga

SEQ ID NO: 2667976 - RNA, 19 nt, Homo sapiens
  misc_RNA (1)...(19): siRNA sense strand
cagaaggaaaagaggaaca

SEQ ID NO: 2667977 - RNA, 19 nt, Homo sapiens
  misc_RNA (1)...(19): siRNA sense strand
aagaaguaucugcaggcaa

SEQ ID NO: 2667978 - RNA, 19 nt, Homo sapiens
  misc_RNA (1)...(19): siRNA sense strand
aggccuuucuggacaggaa

SEQ ID NO: 2667979 - RNA, 19 nt, Homo sapiens
  misc_RNA (1)...(19): siRNA sense strand
gaaaugaaauccagggugc

SEQ ID NO: 2667980 - RNA, 19 nt, Homo sapiens
  misc_RNA (1)...(19): siRNA sense strand
uguccaagcugaaagggca

SEQ ID NO: 2667981 - RNA, 19 nt, Homo sapiens
  misc_RNA (1)...(19): siRNA sense strand
gcgccauuuccgagaaguu

SEQ ID NO: 2667982 - RNA, 19 nt, Homo sapiens
  misc_RNA (1)...(19): siRNA sense strand
acaaagguuccgacgucaa

SEQ ID NO: 2667983 - RNA, 19 nt, Homo sapiens
  misc_RNA (1)...(19): siRNA sense strand
ggugagaaauggcgagagc

SEQ ID NO: 2667984 - RNA, 19 nt, Homo sapiens
  misc_RNA (1)...(19): siRNA sense strand
uuuacgaggaggacggcaa

SEQ ID NO: 2667985 - RNA, 19 nt, Homo sapiens
  misc_RNA (1)...(19): siRNA sense strand
acaaugggcuggaggcucu

SEQ ID NO: 2667986 - RNA, 19 nt, Homo sapiens
  misc_RNA (1)...(19): siRNA sense strand
gggaguacaucuucgccuu

SEQ ID NO: 2667987 - RNA, 19 nt, Homo sapiens
  misc_RNA (1)...(19): siRNA sense strand
cgaugagagaauuccagaa

SEQ ID NO: 2667988 - RNA, 19 nt, Homo sapiens
  misc_RNA (1)...(19): siRNA sense strand
agagggagggagaagguga

SEQ ID NO: 2667989 - RNA, 19 nt, Homo sapiens
  misc_RNA (1)...(19): siRNA sense strand
uguacugggaugagaaguu

SEQ ID NO: 2667990 - RNA, 19 nt, Homo sapiens
  misc_RNA (1)...(19): siRNA sense strand
agaaaagaaacuaccgcaa

SEQ ID NO: 2667991 - RNA, 19 nt, Homo sapiens
  misc_RNA (1)...(19): siRNA sense strand
aggaaggccuuucuggaca

SEQ ID NO: 2667992 - RNA, 19 nt, Homo sapiens
  misc_RNA (1)...(19): siRNA sense strand
ccguaaaagccgagagagc

SEQ ID NO: 2667993 - RNA, 19 nt, Homo sapiens
  misc_RNA (1)...(19): siRNA sense strand
cugcaggaugucagcgaga

SEQ ID NO: 2667994 - RNA, 19 nt, Homo sapiens
  misc_RNA (1)...(19): siRNA sense strand
agaaguaucugcaggcaag

SEQ ID NO: 2667995 - RNA, 19 nt, Homo sapiens
  misc_RNA (1)...(19): siRNA sense strand
agggagaaggugaggagaa

SEQ ID NO: 2667996 - RNA, 19 nt, Homo sapiens
  misc_RNA (1)...(19): siRNA sense strand
aggcauggacagccggaaa

SEQ ID NO: 2667997 - RNA, 19 nt, Homo sapiens
  misc_RNA (1)...(19): siRNA sense strand
agguguaccaggaggaaga

SEQ ID NO: 2667998 - RNA, 19 nt, Homo sapiens
  misc_RNA (1)...(19): siRNA sense strand
gaugagaaguugcugcaga

SEQ ID NO: 2667999 - RNA, 19 nt, Homo sapiens
  misc_RNA (1)...(19): siRNA sense strand
cagaaggaaaagaggaaca

SEQ ID NO: 2668000 - RNA, 19 nt, Homo sapiens
  misc_RNA (1)...(19): siRNA sense strand
aagaaguaucugcaggcaa

SEQ ID NO: 2668001 - RNA, 19 nt, Homo sapiens
  misc_RNA (1)...(19): siRNA sense strand
aggccuuucuggacaggaa

SEQ ID NO: 2668002 - RNA, 19 nt, Homo sapiens
  misc_RNA (1)...(19): siRNA sense strand
gaaaugaaauccagggugc

SEQ ID NO: 2668003 - RNA, 19 nt, Homo sapiens
  misc_RNA (1)...(19): siRNA sense strand
uguccaagcugaaagggca

SEQ ID NO: 2668004 - RNA, 19 nt, Homo sapiens
  misc_RNA (1)...(19): siRNA sense strand
gcgccauuuccgagaaguu

SEQ ID NO: 2668005 - RNA, 19 nt, Homo sapiens
  misc_RNA (1)...(19): siRNA sense strand
acaaagguuccgacgucaa

SEQ ID NO: 2668006 - RNA, 19 nt, Homo sapiens
  misc_RNA (1)...(19): siRNA sense strand
ggugagaaauggcgagagc

SEQ ID NO: 2668007 - RNA, 19 nt, Homo sapiens
  misc_RNA (1)...(19): siRNA sense strand
uuuacgaggaggacggcaa

SEQ ID NO: 2668008 - RNA, 19 nt, Homo sapiens
  misc_RNA (1)...(19): siRNA sense strand
acaaugggcuggaggcucu

SEQ ID NO: 2668009 - RNA, 19 nt, Homo sapiens
  misc_RNA (1)...(19): siRNA sense strand
gggaguacaucuucgccuu

SEQ ID NO: 2668010 - RNA, 19 nt, Homo sapiens
  misc_RNA (1)...(19): siRNA sense strand
cgaugagagaauuccagaa

SEQ ID NO: 2668011 - RNA, 19 nt, Homo sapiens
  misc_RNA (1)...(19): siRNA sense strand
agagggagggagaagguga

SEQ ID NO: 2668012 - RNA, 19 nt, Homo sapiens
  misc_RNA (1)...(19): siRNA sense strand
uguacugggaugagaaguu

SEQ ID NO: 2668013 - RNA, 19 nt, Homo sapiens
  misc_RNA (1)...(19): siRNA sense strand
agaaaagaaacuaccgcaa

SEQ ID NO: 2668014 - RNA, 19 nt, Homo sapiens
  misc_RNA (1)...(19): siRNA sense strand
aggaaggccuuucuggaca

SEQ ID NO: 2668015 - RNA, 19 nt, Homo sapiens
  misc_RNA (1)...(19): siRNA sense strand
ccguaaaagccgagagagc

SEQ ID NO: 2668016 - RNA, 19 nt, Homo sapiens
  misc_RNA (1)...(19): siRNA sense strand
cugcaggaugucagcgaga

SEQ ID NO: 2668017 - RNA, 19 nt, Homo sapiens
  misc_RNA (1)...(19): siRNA sense strand
agaaguaucugcaggcaag

SEQ ID NO: 2668018 - RNA, 19 nt, Homo sapiens
  misc_RNA (1)...(19): siRNA sense strand
caauagaauuaaagcgcuu

SEQ ID NO: 2668019 - RNA, 19 nt, Homo sapiens
  misc_RNA (1)...(19): siRNA sense strand
ccuccaaaugcgugagcaa

SEQ ID NO: 2668020 - RNA, 19 nt, Homo sapiens
  misc_RNA (1)...(19): siRNA sense strand
ggccuugaacauugagaaa

SEQ ID NO: 2668021 - RNA, 19 nt, Homo sapiens
  misc_RNA (1)...(19): siRNA sense strand
gugcccugcaggagagaaa

SEQ ID NO: 2668022 - RNA, 19 nt, Homo sapiens
  misc_RNA (1)...(19): siRNA sense strand
ugggauuaaccuugaacaa

SEQ ID NO: 2668023 - RNA, 19 nt, Homo sapiens
  misc_RNA (1)...(19): siRNA sense strand
gcaaagagaaaucgccaca

SEQ ID NO: 2668024 - RNA, 19 nt, Homo sapiens
  misc_RNA (1)...(19): siRNA sense strand
ggaugugggcaguagaaca

SEQ ID NO: 2668025 - RNA, 19 nt, Homo sapiens
  misc_RNA (1)...(19): siRNA sense strand
cugaaagcacugaaccuaa

SEQ ID NO: 2668026 - RNA, 19 nt, Homo sapiens
  misc_RNA (1)...(19): siRNA sense strand
caggaaaguaccacugaau

SEQ ID NO: 2668027 - RNA, 19 nt, Homo sapiens
  misc_RNA (1)...(19): siRNA sense strand
cugccgaggaucuggaaau

SEQ ID NO: 2668028 - RNA, 19 nt, Homo sapiens
  misc_RNA (1)...(19): siRNA sense strand
ccuccaaagauguucacaa

SEQ ID NO: 2668029 - RNA, 19 nt, Homo sapiens
  misc_RNA (1)...(19): siRNA sense strand
auauggagaaucaggaaau

SEQ ID NO: 2668030 - RNA, 19 nt, Homo sapiens
  misc_RNA (1)...(19): siRNA sense strand
gagaaauuuagaagagaag

SEQ ID NO: 2668031 - RNA, 19 nt, Homo sapiens
  misc_RNA (1)...(19): siRNA sense strand
cagaagggauugguggcua

SEQ ID NO: 2668032 - RNA, 19 nt, Homo sapiens
  misc_RNA (1)...(19): siRNA sense strand
gaaagaacuaccaaagcca

SEQ ID NO: 2668033 - RNA, 19 nt, Homo sapiens
  misc_RNA (1)...(19): siRNA sense strand
cugcaggaguggagagagc

SEQ ID NO: 2668034 - RNA, 19 nt, Homo sapiens
  misc_RNA (1)...(19): siRNA sense strand
agaggaugaggaagaggaa

SEQ ID NO: 2668035 - RNA, 19 nt, Homo sapiens
  misc_RNA (1)...(19): siRNA sense strand
aggaugaaguauugaagcu

SEQ ID NO: 2668036 - RNA, 19 nt, Homo sapiens
  misc_RNA (1)...(19): siRNA sense strand
cuccgguacaauagaauua

SEQ ID NO: 2668037 - RNA, 19 nt, Homo sapiens
  misc_RNA (1)...(19): siRNA sense strand
cacuggaggagaugaggaa

SEQ ID NO: 2668038 - RNA, 19 nt, Homo sapiens
  misc_RNA (1)...(19): siRNA sense strand
ucguugugcagaagggauu

SEQ ID NO: 2668039 - RNA, 19 nt, Homo sapiens
  misc_RNA (1)...(19): siRNA sense strand
caaauggcgauccgagcaa

SEQ ID NO: 2668040 - RNA, 19 nt, Homo sapiens
  misc_RNA (1)...(19): siRNA sense strand
auagauaacaggaaaguac

SEQ ID NO: 2668041 - RNA, 19 nt, Homo sapiens
  misc_RNA (1)...(19): siRNA sense strand
gaacaaagaucgucgacgg

SEQ ID NO: 2668042 - RNA, 19 nt, Homo sapiens
  misc_RNA (1)...(19): siRNA sense strand
aauauggagaaucaggaaa

SEQ ID NO: 2668043 - RNA, 19 nt, Homo sapiens
  misc_RNA (1)...(19): siRNA sense strand
aggaaauguucgcagauac

SEQ ID NO: 2668044 - RNA, 19 nt, Homo sapiens
  misc_RNA (1)...(19): siRNA sense strand
aggagagaaauuuagaaga

SEQ ID NO: 2668045 - RNA, 19 nt, Homo sapiens
  misc_RNA (1)...(19): siRNA sense strand
aggaggagcaagagggaga

SEQ ID NO: 2668046 - RNA, 19 nt, Homo sapiens
  misc_RNA (1)...(19): siRNA sense strand
gggauguaucggaaagcua

SEQ ID NO: 2668047 - RNA, 19 nt, Homo sapiens
  misc_RNA (1)...(19): siRNA sense strand
cugcaaaugccgcaagaca

SEQ ID NO: 2668048 - RNA, 19 nt, Homo sapiens
  misc_RNA (1)...(19): siRNA sense strand
gccagaaggaggacggaga

SEQ ID NO: 2668049 - RNA, 19 nt, Homo sapiens
  misc_RNA (1)...(19): siRNA sense strand
ggguaagauccaugguuuu

SEQ ID NO: 2668050 - RNA, 19 nt, Homo sapiens
  misc_RNA (1)...(19): siRNA sense strand
cggaaaucagggagcucuu

SEQ ID NO: 2668051 - RNA, 19 nt, Homo sapiens
  misc_RNA (1)...(19): siRNA sense strand
ugugagaagugcaagagca

SEQ ID NO: 2668052 - RNA, 19 nt, Homo sapiens
  misc_RNA (1)...(19): siRNA sense strand
gggacaucgucugggguaa

SEQ ID NO: 2668053 - RNA, 19 nt, Homo sapiens
  misc_RNA (1)...(19): siRNA sense strand
cgggugaggacgaugacuu

SEQ ID NO: 2668054 - RNA, 19 nt, Homo sapiens
  misc_RNA (1)...(19): siRNA sense strand
aggaggagcaagagggaga

SEQ ID NO: 2668055 - RNA, 19 nt, Homo sapiens
  misc_RNA (1)...(19): siRNA sense strand
gggauguaucggaaagcua

SEQ ID NO: 2668056 - RNA, 19 nt, Homo sapiens
  misc_RNA (1)...(19): siRNA sense strand
cugcaaaugccgcaagaca

SEQ ID NO: 2668057 - RNA, 19 nt, Homo sapiens
  misc_RNA (1)...(19): siRNA sense strand
gccagaaggaggacggaga

SEQ ID NO: 2668058 - RNA, 19 nt, Homo sapiens
  misc_RNA (1)...(19): siRNA sense strand
ggguggagcaggucgucaa

SEQ ID NO: 2668059 - RNA, 19 nt, Homo sapiens
  misc_RNA (1)...(19): siRNA sense strand
ggguaagauccaugguuuu

SEQ ID NO: 2668060 - RNA, 19 nt, Homo sapiens
  misc_RNA (1)...(19): siRNA sense strand
cggaaaucagggagcucuu

SEQ ID NO: 2668061 - RNA, 19 nt, Homo sapiens
  misc_RNA (1)...(19): siRNA sense strand
ugugagaagugcaagagca

SEQ ID NO: 2668062 - RNA, 19 nt, Homo sapiens
  misc_RNA (1)...(19): siRNA sense strand
gggacaucgucugggguaa

SEQ ID NO: 2668063 - RNA, 19 nt, Homo sapiens
  misc_RNA (1)...(19): siRNA sense strand
cgggugaggacgaugacuu

SEQ ID NO: 2668064 - RNA, 19 nt, Homo sapiens
  misc_RNA (1)...(19): siRNA sense strand
gugaggaggcggacagcau

SEQ ID NO: 2668065 - RNA, 19 nt, Homo sapiens
  misc_RNA (1)...(19): siRNA sense strand
ggucggagagacaguguuu

SEQ ID NO: 2668066 - RNA, 19 nt, Homo sapiens
  misc_RNA (1)...(19): siRNA sense strand
ucucaguguacaagaucaa

SEQ ID NO: 2668067 - RNA, 19 nt, Homo sapiens
  misc_RNA (1)...(19): siRNA sense strand
cuucugggucggagagaca

SEQ ID NO: 2668068 - RNA, 19 nt, Homo sapiens
  misc_RNA (1)...(19): siRNA sense strand
ucacugaccugguagacga

SEQ ID NO: 2668069 - RNA, 19 nt, Homo sapiens
  misc_RNA (1)...(19): siRNA sense strand
gugaggaggcggacagcau

SEQ ID NO: 2668070 - RNA, 19 nt, Homo sapiens
  misc_RNA (1)...(19): siRNA sense strand
ggucggagagacaguguuu

SEQ ID NO: 2668071 - RNA, 19 nt, Homo sapiens
  misc_RNA (1)...(19): siRNA sense strand
ucucaguguacaagaucaa

SEQ ID NO: 2668072 - RNA, 19 nt, Homo sapiens
  misc_RNA (1)...(19): siRNA sense strand
cuucugggucggagagaca

SEQ ID NO: 2668073 - RNA, 19 nt, Homo sapiens
  misc_RNA (1)...(19): siRNA sense strand
ucacugaccugguagacga

SEQ ID NO: 2668074 - RNA, 19 nt, Homo sapiens
  misc_RNA (1)...(19): siRNA sense strand
ggacagaggugaaaggccu

SEQ ID NO: 2668075 - RNA, 19 nt, Homo sapiens
  misc_RNA (1)...(19): siRNA sense strand
aggagaugguagagaagac

SEQ ID NO: 2668076 - RNA, 19 nt, Homo sapiens
  misc_RNA (1)...(19): siRNA sense strand
ucauggaggagaugguaga

SEQ ID NO: 2668077 - RNA, 19 nt, Homo sapiens
  misc_RNA (1)...(19): siRNA sense strand
auucaaagguggaaaggca

SEQ ID NO: 2668078 - RNA, 19 nt, Homo sapiens
  misc_RNA (1)...(19): siRNA sense strand
aagcaagaaacaagcuaaa

SEQ ID NO: 2668079 - RNA, 19 nt, Homo sapiens
  misc_RNA (1)...(19): siRNA sense strand
agucagagaacuuggugaa

SEQ ID NO: 2668080 - RNA, 19 nt, Homo sapiens
  misc_RNA (1)...(19): siRNA sense strand
gggauagaggucaggaaga

SEQ ID NO: 2668081 - RNA, 19 nt, Homo sapiens
  misc_RNA (1)...(19): siRNA sense strand
cagaacaacaagaagugaa

SEQ ID NO: 2668082 - RNA, 19 nt, Homo sapiens
  misc_RNA (1)...(19): siRNA sense strand
ggucagaagacuacgaacu

SEQ ID NO: 2668083 - RNA, 19 nt, Homo sapiens
  misc_RNA (1)...(19): siRNA sense strand
aaaaggaccuggugggcua

SEQ ID NO: 2668084 - RNA, 19 nt, Homo sapiens
  misc_RNA (1)...(19): siRNA sense strand
agaacuuggugaagagcca

SEQ ID NO: 2668085 - RNA, 19 nt, Homo sapiens
  misc_RNA (1)...(19): siRNA sense strand
gaauugucaucgugggcau

SEQ ID NO: 2668086 - RNA, 19 nt, Homo sapiens
  misc_RNA (1)...(19): siRNA sense strand
cgauugucuuauagcagaa

SEQ ID NO: 2668087 - RNA, 19 nt, Homo sapiens
  misc_RNA (1)...(19): siRNA sense strand
ggauccaaagagugaagaa

SEQ ID NO: 2668088 - RNA, 19 nt, Homo sapiens
  misc_RNA (1)...(19): siRNA sense strand
gcguagaaaccgaggacag

SEQ ID NO: 2668089 - RNA, 19 nt, Homo sapiens
  misc_RNA (1)...(19): siRNA sense strand
cagccaaaucagaacgaga

SEQ ID NO: 2668090 - RNA, 19 nt, Homo sapiens
  misc_RNA (1)...(19): siRNA sense strand
cucaaagcauccagcacaa

SEQ ID NO: 2668091 - RNA, 19 nt, Homo sapiens
  misc_RNA (1)...(19): siRNA sense strand
aaguaggcuagguggaauu

SEQ ID NO: 2668092 - RNA, 19 nt, Homo sapiens
  misc_RNA (1)...(19): siRNA sense strand
uuaauagcuuggagcaaaa

SEQ ID NO: 2668093 - RNA, 19 nt, Homo sapiens
  misc_RNA (1)...(19): siRNA sense strand
aggaguccguugugaucaa

SEQ ID NO: 2668094 - RNA, 19 nt, Homo sapiens
  misc_RNA (1)...(19): siRNA sense strand
cuaaacaaauccaagagca

SEQ ID NO: 2668095 - RNA, 19 nt, Homo sapiens
  misc_RNA (1)...(19): siRNA sense strand
cauccagcacaauggcaaa

SEQ ID NO: 2668096 - RNA, 19 nt, Homo sapiens
  misc_RNA (1)...(19): siRNA sense strand
gggaccagcauaucagcaa

SEQ ID NO: 2668097 - RNA, 19 nt, Homo sapiens
  misc_RNA (1)...(19): siRNA sense strand
ccugagucccacagccaaa

SEQ ID NO: 2668098 - RNA, 19 nt, Homo sapiens
  misc_RNA (1)...(19): siRNA sense strand
uuucauacgacgacauauu

SEQ ID NO: 2668099 - RNA, 19 nt, Homo sapiens
  misc_RNA (1)...(19): siRNA sense strand
gcauccagcacaauggcaa

SEQ ID NO: 2668100 - RNA, 19 nt, Homo sapiens
  misc_RNA (1)...(19): siRNA sense strand
gcaaagaaguggcaugcuc

SEQ ID NO: 2668101 - RNA, 19 nt, Homo sapiens
  misc_RNA (1)...(19): siRNA sense strand
gcgagugcuuugugaucga

SEQ ID NO: 2668102 - RNA, 19 nt, Homo sapiens
  misc_RNA (1)...(19): siRNA sense strand
ccagacggucagaagacua

SEQ ID NO: 2668103 - RNA, 19 nt, Homo sapiens
  misc_RNA (1)...(19): siRNA sense strand
gcaaugcccuccuggccua

SEQ ID NO: 2668104 - RNA, 19 nt, Homo sapiens
  misc_RNA (1)...(19): siRNA sense strand
ccgaaguaggcuaggugga

SEQ ID NO: 2668105 - RNA, 19 nt, Homo sapiens
  misc_RNA (1)...(19): siRNA sense strand
uucaguggguuuagaggaa

SEQ ID NO: 2668106 - RNA, 19 nt, Homo sapiens
  misc_RNA (1)...(19): siRNA sense strand
aaucagaacgagaggcgca

SEQ ID NO: 2668107 - RNA, 19 nt, Homo sapiens
  misc_RNA (1)...(19): siRNA sense strand
cggauuagcacucgccuga

SEQ ID NO: 2668108 - RNA, 19 nt, Homo sapiens
  misc_RNA (1)...(19): siRNA sense strand
ccaucuuaucggauccaaa

SEQ ID NO: 2668109 - RNA, 19 nt, Homo sapiens
  misc_RNA (1)...(19): siRNA sense strand
gggcauguucugugcagca

SEQ ID NO: 2668110 - RNA, 19 nt, Homo sapiens
  misc_RNA (1)...(19): siRNA sense strand
cagaacgagaggcgcaauu

SEQ ID NO: 2668111 - RNA, 19 nt, Homo sapiens
  misc_RNA (1)...(19): siRNA sense strand
gcugaaagugccacaaaau

SEQ ID NO: 2668112 - RNA, 19 nt, Homo sapiens
  misc_RNA (1)...(19): siRNA sense strand
uggcaugcuccauaggaau

SEQ ID NO: 2668113 - RNA, 19 nt, Homo sapiens
  misc_RNA (1)...(19): siRNA sense strand
gcgcaauuugucuuaagaa

SEQ ID NO: 2668114 - RNA, 19 nt, Homo sapiens
  misc_RNA (1)...(19): siRNA sense strand
uagcagaacaacaagaagu

SEQ ID NO: 2668115 - RNA, 19 nt, Homo sapiens
  misc_RNA (1)...(19): siRNA sense strand
cagaaaugcacgaggaaca

SEQ ID NO: 2668116 - RNA, 19 nt, Homo sapiens
  misc_RNA (1)...(19): siRNA sense strand
gugccaucuucgaggagaa

SEQ ID NO: 2668117 - RNA, 19 nt, Homo sapiens
  misc_RNA (1)...(19): siRNA sense strand
cugcaaaggacaaucagaa

SEQ ID NO: 2668118 - RNA, 19 nt, Homo sapiens
  misc_RNA (1)...(19): siRNA sense strand
gggcuuuaaauaugagauu

SEQ ID NO: 2668119 - RNA, 19 nt, Homo sapiens
  misc_RNA (1)...(19): siRNA sense strand
cagaggagcugaaucgcua

SEQ ID NO: 2668120 - RNA, 19 nt, Homo sapiens
  misc_RNA (1)...(19): siRNA sense strand
ccucaacugcauacggaaa

SEQ ID NO: 2668121 - RNA, 19 nt, Homo sapiens
  misc_RNA (1)...(19): siRNA sense strand
ggaaaugucuuauggcacu

SEQ ID NO: 2668122 - RNA, 19 nt, Homo sapiens
  misc_RNA (1)...(19): siRNA sense strand
cugcagagcgagaagauca

SEQ ID NO: 2668123 - RNA, 19 nt, Homo sapiens
  misc_RNA (1)...(19): siRNA sense strand
gagaagggcuugaauggca

SEQ ID NO: 2668124 - RNA, 19 nt, Homo sapiens
  misc_RNA (1)...(19): siRNA sense strand
cuggaguugugguggaaca

SEQ ID NO: 2668125 - RNA, 19 nt, Homo sapiens
  misc_RNA (1)...(19): siRNA sense strand
ggucuuugugaaugaggaa

SEQ ID NO: 2668126 - RNA, 19 nt, Homo sapiens
  misc_RNA (1)...(19): siRNA sense strand
guaugauauccgugggcuu

SEQ ID NO: 2668127 - RNA, 19 nt, Homo sapiens
  misc_RNA (1)...(19): siRNA sense strand
cgaugaagacagaggagcu

SEQ ID NO: 2668128 - RNA, 19 nt, Homo sapiens
  misc_RNA (1)...(19): siRNA sense strand
ugcaaaggacaaucagaaa

SEQ ID NO: 2668129 - RNA, 19 nt, Homo sapiens
  misc_RNA (1)...(19): siRNA sense strand
ucaaggucaucgaggccaa

SEQ ID NO: 2668130 - RNA, 19 nt, Homo sapiens
  misc_RNA (1)...(19): siRNA sense strand
cugagaacauccuaggaca

SEQ ID NO: 2668131 - RNA, 19 nt, Homo sapiens
  misc_RNA (1)...(19): siRNA sense strand
cugaaucgcuaccgggaca

SEQ ID NO: 2668132 - RNA, 19 nt, Homo sapiens
  misc_RNA (1)...(19): siRNA sense strand
uggccaaggcucugggcuu

SEQ ID NO: 2668133 - RNA, 19 nt, Homo sapiens
  misc_RNA (1)...(19): siRNA sense strand
ugaugguggcugagaacau

SEQ ID NO: 2668134 - RNA, 19 nt, Homo sapiens
  misc_RNA (1)...(19): siRNA sense strand
aaucagaaaugcacgagga

SEQ ID NO: 2668135 - RNA, 19 nt, Homo sapiens
  misc_RNA (1)...(19): siRNA sense strand
cggaaauccacuaagccau

SEQ ID NO: 2668136 - RNA, 19 nt, Homo sapiens
  misc_RNA (1)...(19): siRNA sense strand
cagaagugguggccgcaca

SEQ ID NO: 2668137 - RNA, 19 nt, Homo sapiens
  misc_RNA (1)...(19): siRNA sense strand
ucuuugugaaugaggaaau

SEQ ID NO: 2668138 - RNA, 19 nt, Homo sapiens
  misc_RNA (1)...(19): siRNA sense strand
gcguuguggacuucagcaa

SEQ ID NO: 2668139 - RNA, 19 nt, Homo sapiens
  misc_RNA (1)...(19): siRNA sense strand
aggcaaagaaggggaacua

SEQ ID NO: 2668140 - RNA, 19 nt, Homo sapiens
  misc_RNA (1)...(19): siRNA sense strand
auguggccgugguggaaua

SEQ ID NO: 2668141 - RNA, 19 nt, Homo sapiens
  misc_RNA (1)...(19): siRNA sense strand
uaggacagcccaagcgcua

SEQ ID NO: 2668142 - RNA, 19 nt, Homo sapiens
  misc_RNA (1)...(19): siRNA sense strand
ccagagagggagagcguug

SEQ ID NO: 2668143 - RNA, 19 nt, Homo sapiens
  misc_RNA (1)...(19): siRNA sense strand
gaggaccggaaguggcaua

SEQ ID NO: 2668144 - RNA, 19 nt, Homo sapiens
  misc_RNA (1)...(19): siRNA sense strand
cguacagcaagguggcgaa

SEQ ID NO: 2668145 - RNA, 19 nt, Homo sapiens
  misc_RNA (1)...(19): siRNA sense strand
gcagcaaggguuacgggau

SEQ ID NO: 2668146 - RNA, 19 nt, Homo sapiens
  misc_RNA (1)...(19): siRNA sense strand
agaaaugcacgaggaacaa

SEQ ID NO: 2668147 - RNA, 19 nt, Homo sapiens
  misc_RNA (1)...(19): siRNA sense strand
gggacucagagaagggcuu

SEQ ID NO: 2668148 - RNA, 19 nt, Homo sapiens
  misc_RNA (1)...(19): siRNA sense strand
gcaaaucccucaagcugca

SEQ ID NO: 2668149 - RNA, 19 nt, Homo sapiens
  misc_RNA (1)...(19): siRNA sense strand
ugaagacagaggagcugaa

SEQ ID NO: 2668150 - RNA, 19 nt, Homo sapiens
  misc_RNA (1)...(19): siRNA sense strand
acgaggccguggagaccaa

SEQ ID NO: 2668151 - RNA, 19 nt, Homo sapiens
  misc_RNA (1)...(19): siRNA sense strand
guggaaaugucuuauggca

SEQ ID NO: 2668152 - RNA, 19 nt, Homo sapiens
  misc_RNA (1)...(19): siRNA sense strand
gaaggcaucaggaaggcaa

SEQ ID NO: 2668153 - RNA, 19 nt, Homo sapiens
  misc_RNA (1)...(19): siRNA sense strand
agaugaggaugaagagaaa

SEQ ID NO: 2668154 - RNA, 19 nt, Homo sapiens
  misc_RNA (1)...(19): siRNA sense strand
gaaagaaagacaagcaaaa

SEQ ID NO: 2668155 - RNA, 19 nt, Homo sapiens
  misc_RNA (1)...(19): siRNA sense strand
ggaaaauaccagaaagauu

SEQ ID NO: 2668156 - RNA, 19 nt, Homo sapiens
  misc_RNA (1)...(19): siRNA sense strand
agaagaaaguacuggagau

SEQ ID NO: 2668157 - RNA, 19 nt, Homo sapiens
  misc_RNA (1)...(19): siRNA sense strand
agaaggaggaggaggauga

SEQ ID NO: 2668158 - RNA, 19 nt, Homo sapiens
  misc_RNA (1)...(19): siRNA sense strand
caauaaagcccuucagcau

SEQ ID NO: 2668159 - RNA, 19 nt, Homo sapiens
  misc_RNA (1)...(19): siRNA sense strand
ggacacuuuacuugggaaa

SEQ ID NO: 2668160 - RNA, 19 nt, Homo sapiens
  misc_RNA (1)...(19): siRNA sense strand
agaaagaaagacaagcaaa

SEQ ID NO: 2668161 - RNA, 19 nt, Homo sapiens
  misc_RNA (1)...(19): siRNA sense strand
agaauuuagcccagguuaa

SEQ ID NO: 2668162 - RNA, 19 nt, Homo sapiens
  misc_RNA (1)...(19): siRNA sense strand
gggaaagaaaagagcacaa

SEQ ID NO: 2668163 - RNA, 19 nt, Homo sapiens
  misc_RNA (1)...(19): siRNA sense strand
caguaggaaagguggaaau

SEQ ID NO: 2668164 - RNA, 19 nt, Homo sapiens
  misc_RNA (1)...(19): siRNA sense strand
augcagacgagaagacaaa

SEQ ID NO: 2668165 - RNA, 19 nt, Homo sapiens
  misc_RNA (1)...(19): siRNA sense strand
caagaaacaaguggagaaa

SEQ ID NO: 2668166 - RNA, 19 nt, Homo sapiens
  misc_RNA (1)...(19): siRNA sense strand
ggagaaauacagugggugu

SEQ ID NO: 2668167 - RNA, 19 nt, Homo sapiens
  misc_RNA (1)...(19): siRNA sense strand
ugaugguacagaagagaaa

SEQ ID NO: 2668168 - RNA, 19 nt, Homo sapiens
  misc_RNA (1)...(19): siRNA sense strand
cagaagagaaacauaagaa

SEQ ID NO: 2668169 - RNA, 19 nt, Homo sapiens
  misc_RNA (1)...(19): siRNA sense strand
cggacuacccuuagcacaa

SEQ ID NO: 2668170 - RNA, 19 nt, Homo sapiens
  misc_RNA (1)...(19): siRNA sense strand
ccauaaauaaacaaggaga

SEQ ID NO: 2668171 - RNA, 19 nt, Homo sapiens
  misc_RNA (1)...(19): siRNA sense strand
aaacagaugaguugaucaa

SEQ ID NO: 2668172 - RNA, 19 nt, Homo sapiens
  misc_RNA (1)...(19): siRNA sense strand
cuucagauaaaguggagaa

SEQ ID NO: 2668173 - RNA, 19 nt, Homo sapiens
  misc_RNA (1)...(19): siRNA sense strand
cugaaaucaaggaaacaaa

SEQ ID NO: 2668174 - RNA, 19 nt, Homo sapiens
  misc_RNA (1)...(19): siRNA sense strand
agaugaaggaugacgauuu

SEQ ID NO: 2668175 - RNA, 19 nt, Homo sapiens
  misc_RNA (1)...(19): siRNA sense strand
aagcauaaguagcuguaau

SEQ ID NO: 2668176 - RNA, 19 nt, Homo sapiens
  misc_RNA (1)...(19): siRNA sense strand
acugucaaguagaaagaaa

SEQ ID NO: 2668177 - RNA, 19 nt, Homo sapiens
  misc_RNA (1)...(19): siRNA sense strand
ccagaaucaccaucagaaa

SEQ ID NO: 2668178 - RNA, 19 nt, Homo sapiens
  misc_RNA (1)...(19): siRNA sense strand
ggaguauagugcucggaau

SEQ ID NO: 2668179 - RNA, 19 nt, Homo sapiens
  misc_RNA (1)...(19): siRNA sense strand
aaaccgaauuguagaagau

SEQ ID NO: 2668180 - RNA, 19 nt, Homo sapiens
  misc_RNA (1)...(19): siRNA sense strand
caaacagugaaucgaguaa

SEQ ID NO: 2668181 - RNA, 19 nt, Homo sapiens
  misc_RNA (1)...(19): siRNA sense strand
aaauauaacgacugggcau

SEQ ID NO: 2668182 - RNA, 19 nt, Homo sapiens
  misc_RNA (1)...(19): siRNA sense strand
ccagcuagcagaaaguaaa

SEQ ID NO: 2668183 - RNA, 19 nt, Homo sapiens
  misc_RNA (1)...(19): siRNA sense strand
gguacagaagagaaacaua

SEQ ID NO: 2668184 - RNA, 19 nt, Homo sapiens
  misc_RNA (1)...(19): siRNA sense strand
cagucaggccuuagccaaa

SEQ ID NO: 2668185 - RNA, 19 nt, Homo sapiens
  misc_RNA (1)...(19): siRNA sense strand
gcaucuugaucuagaaaau

SEQ ID NO: 2668186 - RNA, 19 nt, Homo sapiens
  misc_RNA (1)...(19): siRNA sense strand
aguggagaguggcaagaaa

SEQ ID NO: 2668187 - RNA, 19 nt, Homo sapiens
  misc_RNA (1)...(19): siRNA sense strand
auaagaaggaggaggagga

SEQ ID NO: 2668188 - RNA, 19 nt, Homo sapiens
  misc_RNA (1)...(19): siRNA sense strand
ggagaauuuucaugaagaa

SEQ ID NO: 2668189 - RNA, 19 nt, Homo sapiens
  misc_RNA (1)...(19): siRNA sense strand
ugaugacaguacuaagaaa

SEQ ID NO: 2668190 - RNA, 19 nt, Homo sapiens
  misc_RNA (1)...(19): siRNA sense strand
ccaucuugcuugucaguuu

SEQ ID NO: 2668191 - RNA, 19 nt, Homo sapiens
  misc_RNA (1)...(19): siRNA sense strand
ucaaguagaaagaaagaca

SEQ ID NO: 2668192 - RNA, 19 nt, Homo sapiens
  misc_RNA (1)...(19): siRNA sense strand
gaaaacauacaguaggaaa

SEQ ID NO: 2668193 - RNA, 19 nt, Homo sapiens
  misc_RNA (1)...(19): siRNA sense strand
ggaaauggcaguucaaaau

SEQ ID NO: 2668194 - RNA, 19 nt, Homo sapiens
  misc_RNA (1)...(19): siRNA sense strand
uaacuaaccauguaggcaa

SEQ ID NO: 2668195 - RNA, 19 nt, Homo sapiens
  misc_RNA (1)...(19): siRNA sense strand
acugaaaugcagacgagaa

SEQ ID NO: 2668196 - RNA, 19 nt, Homo sapiens
  misc_RNA (1)...(19): siRNA sense strand
gugaaacuguacacaacaa

SEQ ID NO: 2668197 - RNA, 19 nt, Homo sapiens
  misc_RNA (1)...(19): siRNA sense strand
aaccuaaaguggaagaaga

SEQ ID NO: 2668198 - RNA, 19 nt, Homo sapiens
  misc_RNA (1)...(19): siRNA sense strand
agaaaguacuggagauccu

SEQ ID NO: 2668199 - RNA, 19 nt, Homo sapiens
  misc_RNA (1)...(19): siRNA sense strand
gugaaagcgaagaugauga

SEQ ID NO: 2668200 - RNA, 19 nt, Homo sapiens
  misc_RNA (1)...(19): siRNA sense strand
ggagcagagauuugauauu

SEQ ID NO: 2668201 - RNA, 19 nt, Homo sapiens
  misc_RNA (1)...(19): siRNA sense strand
gcuucugaaaucaaggaaa

SEQ ID NO: 2668202 - RNA, 19 nt, Homo sapiens
  misc_RNA (1)...(19): siRNA sense strand
gguacuaacaaugcagaaa

SEQ ID NO: 2668203 - RNA, 19 nt, Homo sapiens
  misc_RNA (1)...(19): siRNA sense strand
agacugguuuaaagaagaa

SEQ ID NO: 2668204 - RNA, 19 nt, Homo sapiens
  misc_RNA (1)...(19): siRNA sense strand
guagagaugaggaugaaga

SEQ ID NO: 2668205 - RNA, 19 nt, Homo sapiens
  misc_RNA (1)...(19): siRNA sense strand
uuuaaggauagguggacaa

SEQ ID NO: 2668206 - RNA, 19 nt, Homo sapiens
  misc_RNA (1)...(19): siRNA sense strand
ugaaaagacugaugguaca

SEQ ID NO: 2668207 - RNA, 19 nt, Homo sapiens
  misc_RNA (1)...(19): siRNA sense strand
accuaaaguggaagaagaa

SEQ ID NO: 2668208 - RNA, 19 nt, Homo sapiens
  misc_RNA (1)...(19): siRNA sense strand
cagugaaagcgaagaugau

SEQ ID NO: 2668209 - RNA, 19 nt, Homo sapiens
  misc_RNA (1)...(19): siRNA sense strand
aggaggaggaggaugaaga

SEQ ID NO: 2668210 - RNA, 19 nt, Homo sapiens
  misc_RNA (1)...(19): siRNA sense strand
agaccacauuuauggcuaa

SEQ ID NO: 2668211 - RNA, 19 nt, Homo sapiens
  misc_RNA (1)...(19): siRNA sense strand
guagaaagaaagacaagca

SEQ ID NO: 2668212 - RNA, 19 nt, Homo sapiens
  misc_RNA (1)...(19): siRNA sense strand
agaugaggaugaagagaaa

SEQ ID NO: 2668213 - RNA, 19 nt, Homo sapiens
  misc_RNA (1)...(19): siRNA sense strand
gaaagaaagacaagcaaaa

SEQ ID NO: 2668214 - RNA, 19 nt, Homo sapiens
  misc_RNA (1)...(19): siRNA sense strand
ggaaaauaccagaaagauu

SEQ ID NO: 2668215 - RNA, 19 nt, Homo sapiens
  misc_RNA (1)...(19): siRNA sense strand
auaugaaacuggugucaaa

SEQ ID NO: 2668216 - RNA, 19 nt, Homo sapiens
  misc_RNA (1)...(19): siRNA sense strand
agaagaaaguacuggagau

SEQ ID NO: 2668217 - RNA, 19 nt, Homo sapiens
  misc_RNA (1)...(19): siRNA sense strand
agaaggaggaggaggauga

SEQ ID NO: 2668218 - RNA, 19 nt, Homo sapiens
  misc_RNA (1)...(19): siRNA sense strand
caauaaagcccuucagcau

SEQ ID NO: 2668219 - RNA, 19 nt, Homo sapiens
  misc_RNA (1)...(19): siRNA sense strand
ggacacuuuacuugggaaa

SEQ ID NO: 2668220 - RNA, 19 nt, Homo sapiens
  misc_RNA (1)...(19): siRNA sense strand
agaaagaaagacaagcaaa

SEQ ID NO: 2668221 - RNA, 19 nt, Homo sapiens
  misc_RNA (1)...(19): siRNA sense strand
agaauuuagcccagguuaa

SEQ ID NO: 2668222 - RNA, 19 nt, Homo sapiens
  misc_RNA (1)...(19): siRNA sense strand
caguaggaaagguggaaau

SEQ ID NO: 2668223 - RNA, 19 nt, Homo sapiens
  misc_RNA (1)...(19): siRNA sense strand
gggaaagaaaagagcacaa

SEQ ID NO: 2668224 - RNA, 19 nt, Homo sapiens
  misc_RNA (1)...(19): siRNA sense strand
augcagacgagaagacaaa

SEQ ID NO: 2668225 - RNA, 19 nt, Homo sapiens
  misc_RNA (1)...(19): siRNA sense strand
caagaaacaaguggagaaa

SEQ ID NO: 2668226 - RNA, 19 nt, Homo sapiens
  misc_RNA (1)...(19): siRNA sense strand
ggagaaauacagugggugu

SEQ ID NO: 2668227 - RNA, 19 nt, Homo sapiens
  misc_RNA (1)...(19): siRNA sense strand
ugaugguacagaagagaaa

SEQ ID NO: 2668228 - RNA, 19 nt, Homo sapiens
  misc_RNA (1)...(19): siRNA sense strand
cagaagagaaacauaagaa

SEQ ID NO: 2668229 - RNA, 19 nt, Homo sapiens
  misc_RNA (1)...(19): siRNA sense strand
cggacuacccuuagcacaa

SEQ ID NO: 2668230 - RNA, 19 nt, Homo sapiens
  misc_RNA (1)...(19): siRNA sense strand
ccauaaauaaacaaggaga

SEQ ID NO: 2668231 - RNA, 19 nt, Homo sapiens
  misc_RNA (1)...(19): siRNA sense strand
aaacagaugaguugaucaa

SEQ ID NO: 2668232 - RNA, 19 nt, Homo sapiens
  misc_RNA (1)...(19): siRNA sense strand
cuucagauaaaguggagaa

SEQ ID NO: 2668233 - RNA, 19 nt, Homo sapiens
  misc_RNA (1)...(19): siRNA sense strand
cugaaaucaaggaaacaaa

SEQ ID NO: 2668234 - RNA, 19 nt, Homo sapiens
  misc_RNA (1)...(19): siRNA sense strand
agaugaaggaugacgauuu

SEQ ID NO: 2668235 - RNA, 19 nt, Homo sapiens
  misc_RNA (1)...(19): siRNA sense strand
aagcauaaguagcuguaau

SEQ ID NO: 2668236 - RNA, 19 nt, Homo sapiens
  misc_RNA (1)...(19): siRNA sense strand
acugucaaguagaaagaaa

SEQ ID NO: 2668237 - RNA, 19 nt, Homo sapiens
  misc_RNA (1)...(19): siRNA sense strand
ccagaaucaccaucagaaa

SEQ ID NO: 2668238 - RNA, 19 nt, Homo sapiens
  misc_RNA (1)...(19): siRNA sense strand
ggaguauagugcucggaau

SEQ ID NO: 2668239 - RNA, 19 nt, Homo sapiens
  misc_RNA (1)...(19): siRNA sense strand
aaaccgaauuguagaagau

SEQ ID NO: 2668240 - RNA, 19 nt, Homo sapiens
  misc_RNA (1)...(19): siRNA sense strand
caaacagugaaucgaguaa

SEQ ID NO: 2668241 - RNA, 19 nt, Homo sapiens
  misc_RNA (1)...(19): siRNA sense strand
aaauauaacgacugggcau

SEQ ID NO: 2668242 - RNA, 19 nt, Homo sapiens
  misc_RNA (1)...(19): siRNA sense strand
ccagcuagcagaaaguaaa

SEQ ID NO: 2668243 - RNA, 19 nt, Homo sapiens
  misc_RNA (1)...(19): siRNA sense strand
gguacagaagagaaacaua

SEQ ID NO: 2668244 - RNA, 19 nt, Homo sapiens
  misc_RNA (1)...(19): siRNA sense strand
cagucaggccuuagccaaa

SEQ ID NO: 2668245 - RNA, 19 nt, Homo sapiens
  misc_RNA (1)...(19): siRNA sense strand
gcaucuugaucuagaaaau

SEQ ID NO: 2668246 - RNA, 19 nt, Homo sapiens
  misc_RNA (1)...(19): siRNA sense strand
aguggagaguggcaagaaa

SEQ ID NO: 2668247 - RNA, 19 nt, Homo sapiens
  misc_RNA (1)...(19): siRNA sense strand
auaagaaggaggaggagga

SEQ ID NO: 2668248 - RNA, 19 nt, Homo sapiens
  misc_RNA (1)...(19): siRNA sense strand
gaaaacauacaguaggaaa

SEQ ID NO: 2668249 - RNA, 19 nt, Homo sapiens
  misc_RNA (1)...(19): siRNA sense strand
ggagaauuuucaugaagaa

SEQ ID NO: 2668250 - RNA, 19 nt, Homo sapiens
  misc_RNA (1)...(19): siRNA sense strand
ugaugacaguacuaagaaa

SEQ ID NO: 2668251 - RNA, 19 nt, Homo sapiens
  misc_RNA (1)...(19): siRNA sense strand
ccaucuugcuugucaguuu

SEQ ID NO: 2668252 - RNA, 19 nt, Homo sapiens
  misc_RNA (1)...(19): siRNA sense strand
ucaaguagaaagaaagaca

SEQ ID NO: 2668253 - RNA, 19 nt, Homo sapiens
  misc_RNA (1)...(19): siRNA sense strand
ggaaauggcaguucaaaau

SEQ ID NO: 2668254 - RNA, 19 nt, Homo sapiens
  misc_RNA (1)...(19): siRNA sense strand
uaacuaaccauguaggcaa

SEQ ID NO: 2668255 - RNA, 19 nt, Homo sapiens
  misc_RNA (1)...(19): siRNA sense strand
acugaaaugcagacgagaa

SEQ ID NO: 2668256 - RNA, 19 nt, Homo sapiens
  misc_RNA (1)...(19): siRNA sense strand
gugaaacuguacacaacaa

SEQ ID NO: 2668257 - RNA, 19 nt, Homo sapiens
  misc_RNA (1)...(19): siRNA sense strand
aaccuaaaguggaagaaga

SEQ ID NO: 2668258 - RNA, 19 nt, Homo sapiens
  misc_RNA (1)...(19): siRNA sense strand
agaaaguacuggagauccu

SEQ ID NO: 2668259 - RNA, 19 nt, Homo sapiens
  misc_RNA (1)...(19): siRNA sense strand
gugaaagcgaagaugauga

SEQ ID NO: 2668260 - RNA, 19 nt, Homo sapiens
  misc_RNA (1)...(19): siRNA sense strand
ggagcagagauuugauauu

SEQ ID NO: 2668261 - RNA, 19 nt, Homo sapiens
  misc_RNA (1)...(19): siRNA sense strand
gcuucugaaaucaaggaaa

SEQ ID NO: 2668262 - RNA, 19 nt, Homo sapiens
  misc_RNA (1)...(19): siRNA sense strand
gguacuaacaaugcagaaa

SEQ ID NO: 2668263 - RNA, 19 nt, Homo sapiens
  misc_RNA (1)...(19): siRNA sense strand
agacugguuuaaagaagaa

SEQ ID NO: 2668264 - RNA, 19 nt, Homo sapiens
  misc_RNA (1)...(19): siRNA sense strand
guagagaugaggaugaaga

SEQ ID NO: 2668265 - RNA, 19 nt, Homo sapiens
  misc_RNA (1)...(19): siRNA sense strand
uuuaaggauagguggacaa

SEQ ID NO: 2668266 - RNA, 19 nt, Homo sapiens
  misc_RNA (1)...(19): siRNA sense strand
ugaaaagacugaugguaca

SEQ ID NO: 2668267 - RNA, 19 nt, Homo sapiens
  misc_RNA (1)...(19): siRNA sense strand
accuaaaguggaagaagaa

SEQ ID NO: 2668268 - RNA, 19 nt, Homo sapiens
  misc_RNA (1)...(19): siRNA sense strand
cagugaaagcgaagaugau

SEQ ID NO: 2668269 - RNA, 19 nt, Homo sapiens
  misc_RNA (1)...(19): siRNA sense strand
gcgcaaauggcguugagau

SEQ ID NO: 2668270 - RNA, 19 nt, Homo sapiens
  misc_RNA (1)...(19): siRNA sense strand
aggaggaggaggaugaaga

SEQ ID NO: 2668271 - RNA, 19 nt, Homo sapiens
  misc_RNA (1)...(19): siRNA sense strand
gcaagaagccuuuugggaa

SEQ ID NO: 2668272 - RNA, 19 nt, Homo sapiens
  misc_RNA (1)...(19): siRNA sense strand
gcuuuguggaagagcagaa

SEQ ID NO: 2668273 - RNA, 19 nt, Homo sapiens
  misc_RNA (1)...(19): siRNA sense strand
gaugauagcuucucccaga

SEQ ID NO: 2668274 - RNA, 19 nt, Homo sapiens
  misc_RNA (1)...(19): siRNA sense strand
gggaaguaaugcaugccuu

SEQ ID NO: 2668275 - RNA, 19 nt, Homo sapiens
  misc_RNA (1)...(19): siRNA sense strand
agaucaagucugccagcua

SEQ ID NO: 2668276 - RNA, 19 nt, Homo sapiens
  misc_RNA (1)...(19): siRNA sense strand
gcaagaagccuuuugggaa

SEQ ID NO: 2668277 - RNA, 19 nt, Homo sapiens
  misc_RNA (1)...(19): siRNA sense strand
gcuuuguggaagagcagaa

SEQ ID NO: 2668278 - RNA, 19 nt, Homo sapiens
  misc_RNA (1)...(19): siRNA sense strand
gaugauagcuucucccaga

SEQ ID NO: 2668279 - RNA, 19 nt, Homo sapiens
  misc_RNA (1)...(19): siRNA sense strand
gggaaguaaugcaugccuu

SEQ ID NO: 2668280 - RNA, 19 nt, Homo sapiens
  misc_RNA (1)...(19): siRNA sense strand
agaucaagucugccagcua

SEQ ID NO: 2668281 - RNA, 19 nt, Homo sapiens
  misc_RNA (1)...(19): siRNA sense strand
cuuaaagcgaagugggaaa

SEQ ID NO: 2668282 - RNA, 19 nt, Homo sapiens
  misc_RNA (1)...(19): siRNA sense strand
gggaaauggcugaagacau

SEQ ID NO: 2668283 - RNA, 19 nt, Homo sapiens
  misc_RNA (1)...(19): siRNA sense strand
aagaaauggaggugggagu

SEQ ID NO: 2668284 - RNA, 19 nt, Homo sapiens
  misc_RNA (1)...(19): siRNA sense strand
ccuguuuacaucugagaaa

SEQ ID NO: 2668285 - RNA, 19 nt, Homo sapiens
  misc_RNA (1)...(19): siRNA sense strand
caauaauaucugugaccuu

SEQ ID NO: 2668286 - RNA, 19 nt, Homo sapiens
  misc_RNA (1)...(19): siRNA sense strand
agggagugacccagacaaa

SEQ ID NO: 2668287 - RNA, 19 nt, Homo sapiens
  misc_RNA (1)...(19): siRNA sense strand
cugaggaagaagaagaaaa

SEQ ID NO: 2668288 - RNA, 19 nt, Homo sapiens
  misc_RNA (1)...(19): siRNA sense strand
caucaucauaucacggaaa

SEQ ID NO: 2668289 - RNA, 19 nt, Homo sapiens
  misc_RNA (1)...(19): siRNA sense strand
cugcugaggaagaagaaga

SEQ ID NO: 2668290 - RNA, 19 nt, Homo sapiens
  misc_RNA (1)...(19): siRNA sense strand
uggcugaagacauggaaaa

SEQ ID NO: 2668291 - RNA, 19 nt, Homo sapiens
  misc_RNA (1)...(19): siRNA sense strand
caauagagucaacgaggga

SEQ ID NO: 2668292 - RNA, 19 nt, Homo sapiens
  misc_RNA (1)...(19): siRNA sense strand
cgacguaugaggagcggga

SEQ ID NO: 2668293 - RNA, 19 nt, Homo sapiens
  misc_RNA (1)...(19): siRNA sense strand
ggaacacagcgcugaccua

SEQ ID NO: 2668294 - RNA, 19 nt, Homo sapiens
  misc_RNA (1)...(19): siRNA sense strand
ugagaaagggagugaccca

SEQ ID NO: 2668295 - RNA, 19 nt, Homo sapiens
  misc_RNA (1)...(19): siRNA sense strand
gggcaugcucuuaaagcga

SEQ ID NO: 2668296 - RNA, 19 nt, Homo sapiens
  misc_RNA (1)...(19): siRNA sense strand
acauggaagcucugcauau

SEQ ID NO: 2668297 - RNA, 19 nt, Homo sapiens
  misc_RNA (1)...(19): siRNA sense strand
cgaagugggaaauggcuga

SEQ ID NO: 2668298 - RNA, 19 nt, Homo sapiens
  misc_RNA (1)...(19): siRNA sense strand
cagucaugcgagagcagua

SEQ ID NO: 2668299 - RNA, 19 nt, Homo sapiens
  misc_RNA (1)...(19): siRNA sense strand
ggaaugugguccuggcgca

SEQ ID NO: 2668300 - RNA, 19 nt, Homo sapiens
  misc_RNA (1)...(19): siRNA sense strand
agucaacgagggaagagaa

SEQ ID NO: 2668301 - RNA, 19 nt, Homo sapiens
  misc_RNA (1)...(19): siRNA sense strand
gugcacauuacgaagaaaa

SEQ ID NO: 2668302 - RNA, 19 nt, Homo sapiens
  misc_RNA (1)...(19): siRNA sense strand
aggaagaagaagaaaaguu

SEQ ID NO: 2668303 - RNA, 19 nt, Homo sapiens
  misc_RNA (1)...(19): siRNA sense strand
agagauugaccuucggaca

SEQ ID NO: 2668304 - RNA, 19 nt, Homo sapiens
  misc_RNA (1)...(19): siRNA sense strand
ccaacaacuuaaaagauga

SEQ ID NO: 2668305 - RNA, 19 nt, Homo sapiens
  misc_RNA (1)...(19): siRNA sense strand
acuuuaaagccacgacgua

SEQ ID NO: 2668306 - RNA, 19 nt, Homo sapiens
  misc_RNA (1)...(19): siRNA sense strand
cgugaggaggugaacgaga

SEQ ID NO: 2668307 - RNA, 19 nt, Homo sapiens
  misc_RNA (1)...(19): siRNA sense strand
gccaaggagcagagagaga

SEQ ID NO: 2668308 - RNA, 19 nt, Homo sapiens
  misc_RNA (1)...(19): siRNA sense strand
gagaagaagcagcguugua

SEQ ID NO: 2668309 - RNA, 19 nt, Homo sapiens
  misc_RNA (1)...(19): siRNA sense strand
ggucaagugaggaggagga

SEQ ID NO: 2668310 - RNA, 19 nt, Homo sapiens
  misc_RNA (1)...(19): siRNA sense strand
uggccaaggagcagagaga

SEQ ID NO: 2668311 - RNA, 19 nt, Homo sapiens
  misc_RNA (1)...(19): siRNA sense strand
ccaaagcccuucacagaau

SEQ ID NO: 2668312 - RNA, 19 nt, Homo sapiens
  misc_RNA (1)...(19): siRNA sense strand
ggccaaagcccuucacaga

SEQ ID NO: 2668313 - RNA, 19 nt, Homo sapiens
  misc_RNA (1)...(19): siRNA sense strand
ucuacgagauggcggaaaa

SEQ ID NO: 2668314 - RNA, 19 nt, Homo sapiens
  misc_RNA (1)...(19): siRNA sense strand
gcugugagucagaaggaca

SEQ ID NO: 2668315 - RNA, 19 nt, Homo sapiens
  misc_RNA (1)...(19): siRNA sense strand
aguuugaggcugaggagga

SEQ ID NO: 2668316 - RNA, 19 nt, Homo sapiens
  misc_RNA (1)...(19): siRNA sense strand
cggaugaucuucuacgaga

SEQ ID NO: 2668317 - RNA, 19 nt, Homo sapiens
  misc_RNA (1)...(19): siRNA sense strand
cuaaagaggcacacgccau

SEQ ID NO: 2668318 - RNA, 19 nt, Homo sapiens
  misc_RNA (1)...(19): siRNA sense strand
ccaagggaaugcugggcca

SEQ ID NO: 2668319 - RNA, 19 nt, Homo sapiens
  misc_RNA (1)...(19): siRNA sense strand
gcgaagugaagcagccaca

SEQ ID NO: 2668320 - RNA, 19 nt, Homo sapiens
  misc_RNA (1)...(19): siRNA sense strand
uugcccagcuaguggagaa

SEQ ID NO: 2668321 - RNA, 19 nt, Homo sapiens
  misc_RNA (1)...(19): siRNA sense strand
guucuugccuaauggccaa

SEQ ID NO: 2668322 - RNA, 19 nt, Homo sapiens
  misc_RNA (1)...(19): siRNA sense strand
ccuaauggccaaagcccuu

SEQ ID NO: 2668323 - RNA, 19 nt, Homo sapiens
  misc_RNA (1)...(19): siRNA sense strand
cugugagucagaaggacaa

SEQ ID NO: 2668324 - RNA, 19 nt, Homo sapiens
  misc_RNA (1)...(19): siRNA sense strand
cccagaggccagugaccaa

SEQ ID NO: 2668325 - RNA, 19 nt, Homo sapiens
  misc_RNA (1)...(19): siRNA sense strand
ccgagaaacaacgggaaga

SEQ ID NO: 2668326 - RNA, 19 nt, Homo sapiens
  misc_RNA (1)...(19): siRNA sense strand
cugcggagguguugugugu

SEQ ID NO: 2668327 - RNA, 19 nt, Homo sapiens
  misc_RNA (1)...(19): siRNA sense strand
aggcugaggaggagaugca

SEQ ID NO: 2668328 - RNA, 19 nt, Homo sapiens
  misc_RNA (1)...(19): siRNA sense strand
cgagcaacuuugaccggau

SEQ ID NO: 2668329 - RNA, 19 nt, Homo sapiens
  misc_RNA (1)...(19): siRNA sense strand
aggagcaucuggugagcca

SEQ ID NO: 2668330 - RNA, 19 nt, Homo sapiens
  misc_RNA (1)...(19): siRNA sense strand
ggagugucuaugagaacuu

SEQ ID NO: 2668331 - RNA, 19 nt, Homo sapiens
  misc_RNA (1)...(19): siRNA sense strand
gauuuaagcaggaagaaaa

SEQ ID NO: 2668332 - RNA, 19 nt, Homo sapiens
  misc_RNA (1)...(19): siRNA sense strand
cccuaguguccgugggaaa

SEQ ID NO: 2668333 - RNA, 19 nt, Homo sapiens
  misc_RNA (1)...(19): siRNA sense strand
cgauuuaagcaggaagaaa

SEQ ID NO: 2668334 - RNA, 19 nt, Homo sapiens
  misc_RNA (1)...(19): siRNA sense strand
cugccaaaucuguggaaga

SEQ ID NO: 2668335 - RNA, 19 nt, Homo sapiens
  misc_RNA (1)...(19): siRNA sense strand
agaugguggcugaggcuaa

SEQ ID NO: 2668336 - RNA, 19 nt, Homo sapiens
  misc_RNA (1)...(19): siRNA sense strand
acgaugagaugguggcuga

SEQ ID NO: 2668337 - RNA, 19 nt, Homo sapiens
  misc_RNA (1)...(19): siRNA sense strand
gcaucuguaaugaaggaua

SEQ ID NO: 2668338 - RNA, 19 nt, Homo sapiens
  misc_RNA (1)...(19): siRNA sense strand
cagucuuacaccagauaua

SEQ ID NO: 2668339 - RNA, 19 nt, Homo sapiens
  misc_RNA (1)...(19): siRNA sense strand
ggaaguaaugcguaguaca

SEQ ID NO: 2668340 - RNA, 19 nt, Homo sapiens
  misc_RNA (1)...(19): siRNA sense strand
aguaaugcguaguacaaga

SEQ ID NO: 2668341 - RNA, 19 nt, Homo sapiens
  misc_RNA (1)...(19): siRNA sense strand
ggagucuagcuguaggaaa

SEQ ID NO: 2668342 - RNA, 19 nt, Homo sapiens
  misc_RNA (1)...(19): siRNA sense strand
acgaggaggaggaggcuga

SEQ ID NO: 2668343 - RNA, 19 nt, Homo sapiens
  misc_RNA (1)...(19): siRNA sense strand
caucaaaucuuccugccaa

SEQ ID NO: 2668344 - RNA, 19 nt, Homo sapiens
  misc_RNA (1)...(19): siRNA sense strand
uggaagaagcuuuacguca

SEQ ID NO: 2668345 - RNA, 19 nt, Homo sapiens
  misc_RNA (1)...(19): siRNA sense strand
ucaaugaaauacugcccaa

SEQ ID NO: 2668346 - RNA, 19 nt, Homo sapiens
  misc_RNA (1)...(19): siRNA sense strand
gcguaguacaagaagaguu

SEQ ID NO: 2668347 - RNA, 19 nt, Homo sapiens
  misc_RNA (1)...(19): siRNA sense strand
cuguaggaaaugaacuaaa

SEQ ID NO: 2668348 - RNA, 19 nt, Homo sapiens
  misc_RNA (1)...(19): siRNA sense strand
ggaagaagcuuuacgucac

SEQ ID NO: 2668349 - RNA, 19 nt, Homo sapiens
  misc_RNA (1)...(19): siRNA sense strand
gagaaauuaaggaagcaca

SEQ ID NO: 2668350 - RNA, 19 nt, Homo sapiens
  misc_RNA (1)...(19): siRNA sense strand
gcauaguauuuuaggggca

SEQ ID NO: 2668351 - RNA, 19 nt, Homo sapiens
  misc_RNA (1)...(19): siRNA sense strand
gcaggaauaugaagcacga

SEQ ID NO: 2668352 - RNA, 19 nt, Homo sapiens
  misc_RNA (1)...(19): siRNA sense strand
ucaauuuggaagaggcaga

SEQ ID NO: 2668353 - RNA, 19 nt, Homo sapiens
  misc_RNA (1)...(19): siRNA sense strand
agaaauuaaggaagcacau

SEQ ID NO: 2668354 - RNA, 19 nt, Homo sapiens
  misc_RNA (1)...(19): siRNA sense strand
guacaagaagaguucgaga

SEQ ID NO: 2668355 - RNA, 19 nt, Homo sapiens
  misc_RNA (1)...(19): siRNA sense strand
gugcaaugguaauuuggau

SEQ ID NO: 2668356 - RNA, 19 nt, Homo sapiens
  misc_RNA (1)...(19): siRNA sense strand
gacaagaauacgaugagau

SEQ ID NO: 2668357 - RNA, 19 nt, Homo sapiens
  misc_RNA (1)...(19): siRNA sense strand
cugaauaagccaugccagu

SEQ ID NO: 2668358 - RNA, 19 nt, Homo sapiens
  misc_RNA (1)...(19): siRNA sense strand
uauuaaagaaggagacaag

SEQ ID NO: 2668359 - RNA, 19 nt, Homo sapiens
  misc_RNA (1)...(19): siRNA sense strand
agucccuccuagagagaau

SEQ ID NO: 2668360 - RNA, 19 nt, Homo sapiens
  misc_RNA (1)...(19): siRNA sense strand
aguuuggagucuagcugua

SEQ ID NO: 2668361 - RNA, 19 nt, Homo sapiens
  misc_RNA (1)...(19): siRNA sense strand
agagagaaucuucagaaaa

SEQ ID NO: 2668362 - RNA, 19 nt, Homo sapiens
  misc_RNA (1)...(19): siRNA sense strand
agagaaugauacagaaggu

SEQ ID NO: 2668363 - RNA, 19 nt, Homo sapiens
  misc_RNA (1)...(19): siRNA sense strand
aggaagcacauaaaagaaa

SEQ ID NO: 2668364 - RNA, 19 nt, Homo sapiens
  misc_RNA (1)...(19): siRNA sense strand
ugggaaaguuuggagucua

SEQ ID NO: 2668365 - RNA, 19 nt, Homo sapiens
  misc_RNA (1)...(19): siRNA sense strand
agcuguaggaaaugaacua

SEQ ID NO: 2668366 - RNA, 19 nt, Homo sapiens
  misc_RNA (1)...(19): siRNA sense strand
gcagagauggggaagaauu

SEQ ID NO: 2668367 - RNA, 19 nt, Homo sapiens
  misc_RNA (1)...(19): siRNA sense strand
aggcugacgaggaggagga

SEQ ID NO: 2668368 - RNA, 19 nt, Homo sapiens
  misc_RNA (1)...(19): siRNA sense strand
aggcugacgaggaggagga

SEQ ID NO: 2668369 - RNA, 19 nt, Homo sapiens
  misc_RNA (1)...(19): siRNA sense strand
ggauauuaaagaaggagac

SEQ ID NO: 2668370 - RNA, 19 nt, Homo sapiens
  misc_RNA (1)...(19): siRNA sense strand
gaauugugguggcagggau

SEQ ID NO: 2668371 - RNA, 19 nt, Homo sapiens
  misc_RNA (1)...(19): siRNA sense strand
aagaauacgaugagauggu

SEQ ID NO: 2668372 - RNA, 19 nt, Homo sapiens
  misc_RNA (1)...(19): siRNA sense strand
aggaggaggcugacgagga

SEQ ID NO: 2668373 - RNA, 19 nt, Homo sapiens
  misc_RNA (1)...(19): siRNA sense strand
acuaaauugccagaagaua

SEQ ID NO: 2668374 - RNA, 19 nt, Homo sapiens
  misc_RNA (1)...(19): siRNA sense strand
aggauauuaaagaaggaga

SEQ ID NO: 2668375 - RNA, 19 nt, Homo sapiens
  misc_RNA (1)...(19): siRNA sense strand
aagcaaaacaagauggaaa

SEQ ID NO: 2668376 - RNA, 19 nt, Homo sapiens
  misc_RNA (1)...(19): siRNA sense strand
agggaagccucuugggcaa

SEQ ID NO: 2668377 - RNA, 19 nt, Homo sapiens
  misc_RNA (1)...(19): siRNA sense strand
ccugcagauuagugaagaa

SEQ ID NO: 2668378 - RNA, 19 nt, Homo sapiens
  misc_RNA (1)...(19): siRNA sense strand
gugaagaacuacugagcag

SEQ ID NO: 2668379 - RNA, 19 nt, Homo sapiens
  misc_RNA (1)...(19): siRNA sense strand
agacaguacaacagugaga

SEQ ID NO: 2668380 - RNA, 19 nt, Homo sapiens
  misc_RNA (1)...(19): siRNA sense strand
gcacaaagaaccaaagccu

SEQ ID NO: 2668381 - RNA, 19 nt, Homo sapiens
  misc_RNA (1)...(19): siRNA sense strand
uuuccaaagcucagaguau

SEQ ID NO: 2668382 - RNA, 19 nt, Homo sapiens
  misc_RNA (1)...(19): siRNA sense strand
auuacagaaucauggacaa

SEQ ID NO: 2668383 - RNA, 19 nt, Homo sapiens
  misc_RNA (1)...(19): siRNA sense strand
gcuauagcucuuugguaau

SEQ ID NO: 2668384 - RNA, 19 nt, Homo sapiens
  misc_RNA (1)...(19): siRNA sense strand
aagcaaucucagugguuau

SEQ ID NO: 2668385 - RNA, 19 nt, Homo sapiens
  misc_RNA (1)...(19): siRNA sense strand
agcaaaacaagauggaaaa

SEQ ID NO: 2668386 - RNA, 19 nt, Homo sapiens
  misc_RNA (1)...(19): siRNA sense strand
gcaaacuucucauggcuga

SEQ ID NO: 2668387 - RNA, 19 nt, Homo sapiens
  misc_RNA (1)...(19): siRNA sense strand
caucggaucaagaaggaga

SEQ ID NO: 2668388 - RNA, 19 nt, Homo sapiens
  misc_RNA (1)...(19): siRNA sense strand
gaguacaaaguaaaggaga

SEQ ID NO: 2668389 - RNA, 19 nt, Homo sapiens
  misc_RNA (1)...(19): siRNA sense strand
ccaagaagcuuacaggaug

SEQ ID NO: 2668390 - RNA, 19 nt, Homo sapiens
  misc_RNA (1)...(19): siRNA sense strand
ccuugggccaucuggauua

SEQ ID NO: 2668391 - RNA, 19 nt, Homo sapiens
  misc_RNA (1)...(19): siRNA sense strand
gcucuuugguaauggguuc

SEQ ID NO: 2668392 - RNA, 19 nt, Homo sapiens
  misc_RNA (1)...(19): siRNA sense strand
ggaucaagaaggagacccu

SEQ ID NO: 2668393 - RNA, 19 nt, Homo sapiens
  misc_RNA (1)...(19): siRNA sense strand
ggaagaaaagagggcguua

SEQ ID NO: 2668394 - RNA, 19 nt, Homo sapiens
  misc_RNA (1)...(19): siRNA sense strand
ccaauagcacaaagaacca

SEQ ID NO: 2668395 - RNA, 19 nt, Homo sapiens
  misc_RNA (1)...(19): siRNA sense strand
cagcaacaucagugaccuu

SEQ ID NO: 2668396 - RNA, 19 nt, Homo sapiens
  misc_RNA (1)...(19): siRNA sense strand
cguuacagacaguacaaca

SEQ ID NO: 2668397 - RNA, 19 nt, Homo sapiens
  misc_RNA (1)...(19): siRNA sense strand
gugagauacuggaggaagc

SEQ ID NO: 2668398 - RNA, 19 nt, Homo sapiens
  misc_RNA (1)...(19): siRNA sense strand
aguacaaaguaaaggagag

SEQ ID NO: 2668399 - RNA, 19 nt, Homo sapiens
  misc_RNA (1)...(19): siRNA sense strand
gcucagaguauuuauggga

SEQ ID NO: 2668400 - RNA, 19 nt, Homo sapiens
  misc_RNA (1)...(19): siRNA sense strand
acaaaguaaaggagaggcu

SEQ ID NO: 2668401 - RNA, 19 nt, Homo sapiens
  misc_RNA (1)...(19): siRNA sense strand
agaugaaauuaaugagguc

SEQ ID NO: 2668402 - RNA, 19 nt, Homo sapiens
  misc_RNA (1)...(19): siRNA sense strand
cuuaauauuauccagggaa

SEQ ID NO: 2668403 - RNA, 19 nt, Homo sapiens
  misc_RNA (1)...(19): siRNA sense strand
cagaaaagcuaaaggacaa

SEQ ID NO: 2668404 - RNA, 19 nt, Homo sapiens
  misc_RNA (1)...(19): siRNA sense strand
cguaggagaagaagagaua

SEQ ID NO: 2668405 - RNA, 19 nt, Homo sapiens
  misc_RNA (1)...(19): siRNA sense strand
cgucaaaggaugugcaaga

SEQ ID NO: 2668406 - RNA, 19 nt, Homo sapiens
  misc_RNA (1)...(19): siRNA sense strand
ggaaauaugcagaugguga

SEQ ID NO: 2668407 - RNA, 19 nt, Homo sapiens
  misc_RNA (1)...(19): siRNA sense strand
ccuuaggaguagaggaaca

SEQ ID NO: 2668408 - RNA, 19 nt, Homo sapiens
  misc_RNA (1)...(19): siRNA sense strand
gggaugagcuugagggaac

SEQ ID NO: 2668409 - RNA, 19 nt, Homo sapiens
  misc_RNA (1)...(19): siRNA sense strand
agacagaaguacagagcca

SEQ ID NO: 2668410 - RNA, 19 nt, Homo sapiens
  misc_RNA (1)...(19): siRNA sense strand
gaagauagccuuauggaga

SEQ ID NO: 2668411 - RNA, 19 nt, Homo sapiens
  misc_RNA (1)...(19): siRNA sense strand
ggaggauguuacaggacaa

SEQ ID NO: 2668412 - RNA, 19 nt, Homo sapiens
  misc_RNA (1)...(19): siRNA sense strand
cagagagauuggagaugaa

SEQ ID NO: 2668413 - RNA, 19 nt, Homo sapiens
  misc_RNA (1)...(19): siRNA sense strand
ccguaagggugaugaagau

SEQ ID NO: 2668414 - RNA, 19 nt, Homo sapiens
  misc_RNA (1)...(19): siRNA sense strand
cggcacagagccagauaaa

SEQ ID NO: 2668415 - RNA, 19 nt, Homo sapiens
  misc_RNA (1)...(19): siRNA sense strand
ccuuagugcuggugaggau

SEQ ID NO: 2668416 - RNA, 19 nt, Homo sapiens
  misc_RNA (1)...(19): siRNA sense strand
uggugaggauugaggaaau

SEQ ID NO: 2668417 - RNA, 19 nt, Homo sapiens
  misc_RNA (1)...(19): siRNA sense strand
gcagugaggcagaaggcaa

SEQ ID NO: 2668418 - RNA, 19 nt, Homo sapiens
  misc_RNA (1)...(19): siRNA sense strand
ggaaaugccucuugccaca

SEQ ID NO: 2668419 - RNA, 19 nt, Homo sapiens
  misc_RNA (1)...(19): siRNA sense strand
gaguagaggaacaaagaca

SEQ ID NO: 2668420 - RNA, 19 nt, Homo sapiens
  misc_RNA (1)...(19): siRNA sense strand
ggugguuagcugagguuaa

SEQ ID NO: 2668421 - RNA, 19 nt, Homo sapiens
  misc_RNA (1)...(19): siRNA sense strand
uggcagugguggaugaauu

SEQ ID NO: 2668422 - RNA, 19 nt, Homo sapiens
  misc_RNA (1)...(19): siRNA sense strand
ccggaaacuucuuuggauu

SEQ ID NO: 2668423 - RNA, 19 nt, Homo sapiens
  misc_RNA (1)...(19): siRNA sense strand
ccauaagcugguacagaaa

SEQ ID NO: 2668424 - RNA, 19 nt, Homo sapiens
  misc_RNA (1)...(19): siRNA sense strand
acgagaaggaugagaagau

SEQ ID NO: 2668425 - RNA, 19 nt, Homo sapiens
  misc_RNA (1)...(19): siRNA sense strand
aaaccaguacagagaguaa

SEQ ID NO: 2668426 - RNA, 19 nt, Homo sapiens
  misc_RNA (1)...(19): siRNA sense strand
aguaugacacagacagaaa

SEQ ID NO: 2668427 - RNA, 19 nt, Homo sapiens
  misc_RNA (1)...(19): siRNA sense strand
gcagagaacgaaugcggua

SEQ ID NO: 2668428 - RNA, 19 nt, Homo sapiens
  misc_RNA (1)...(19): siRNA sense strand
ccaaaugagcugagcgugu

SEQ ID NO: 2668429 - RNA, 19 nt, Homo sapiens
  misc_RNA (1)...(19): siRNA sense strand
cggaugaggaugaggagga

SEQ ID NO: 2668430 - RNA, 19 nt, Homo sapiens
  misc_RNA (1)...(19): siRNA sense strand
gucaguaaguucuggaaau

SEQ ID NO: 2668431 - RNA, 19 nt, Homo sapiens
  misc_RNA (1)...(19): siRNA sense strand
agucaaacccagacaauca

SEQ ID NO: 2668432 - RNA, 19 nt, Homo sapiens
  misc_RNA (1)...(19): siRNA sense strand
aguaaguucuggaaaucaa

SEQ ID NO: 2668433 - RNA, 19 nt, Homo sapiens
  misc_RNA (1)...(19): siRNA sense strand
agaaguagucaaugguauu

SEQ ID NO: 2668434 - RNA, 19 nt, Homo sapiens
  misc_RNA (1)...(19): siRNA sense strand
gagaagagagccaagguca

SEQ ID NO: 2668435 - RNA, 19 nt, Homo sapiens
  misc_RNA (1)...(19): siRNA sense strand
aagaaauccaaccgaguua

SEQ ID NO: 2668436 - RNA, 19 nt, Homo sapiens
  misc_RNA (1)...(19): siRNA sense strand
agcaaggacuagagacuau

SEQ ID NO: 2668437 - RNA, 19 nt, Homo sapiens
  misc_RNA (1)...(19): siRNA sense strand
caccuuaggaguagaggaa

SEQ ID NO: 2668438 - RNA, 19 nt, Homo sapiens
  misc_RNA (1)...(19): siRNA sense strand
gaagcaaggacuagagacu

SEQ ID NO: 2668439 - RNA, 19 nt, Homo sapiens
  misc_RNA (1)...(19): siRNA sense strand
gcagaaaagcuaaaggaca

SEQ ID NO: 2668440 - RNA, 19 nt, Homo sapiens
  misc_RNA (1)...(19): siRNA sense strand
gaugaagccugguccgcaa

SEQ ID NO: 2668441 - RNA, 19 nt, Homo sapiens
  misc_RNA (1)...(19): siRNA sense strand
agccaaggucauagaagaa

SEQ ID NO: 2668442 - RNA, 19 nt, Homo sapiens
  misc_RNA (1)...(19): siRNA sense strand
guacagaacgggcagaaaa

SEQ ID NO: 2668443 - RNA, 19 nt, Homo sapiens
  misc_RNA (1)...(19): siRNA sense strand
caacacauucacagggaga

SEQ ID NO: 2668444 - RNA, 19 nt, Homo sapiens
  misc_RNA (1)...(19): siRNA sense strand
uguuaauggugaaguagau

SEQ ID NO: 2668445 - RNA, 19 nt, Homo sapiens
  misc_RNA (1)...(19): siRNA sense strand
ggugaugaagauagccuua

SEQ ID NO: 2668446 - RNA, 19 nt, Homo sapiens
  misc_RNA (1)...(19): siRNA sense strand
uagcugagguuaacgggaa

SEQ ID NO: 2668447 - RNA, 19 nt, Homo sapiens
  misc_RNA (1)...(19): siRNA sense strand
cugcagauguagcuagaga

SEQ ID NO: 2668448 - RNA, 19 nt, Homo sapiens
  misc_RNA (1)...(19): siRNA sense strand
acaugaaaccagugaccau

SEQ ID NO: 2668449 - RNA, 19 nt, Homo sapiens
  misc_RNA (1)...(19): siRNA sense strand
gccaaaagaaugugaccaa

SEQ ID NO: 2668450 - RNA, 19 nt, Homo sapiens
  misc_RNA (1)...(19): siRNA sense strand
guuuaaagauguuacagga

SEQ ID NO: 2668451 - RNA, 19 nt, Homo sapiens
  misc_RNA (1)...(19): siRNA sense strand
uaggaaagaaggaggaugu

SEQ ID NO: 2668452 - RNA, 19 nt, Homo sapiens
  misc_RNA (1)...(19): siRNA sense strand
ccucaaaguuaaucaccga

SEQ ID NO: 2668453 - RNA, 19 nt, Homo sapiens
  misc_RNA (1)...(19): siRNA sense strand
gcucuuugugggagauauu

SEQ ID NO: 2668454 - RNA, 19 nt, Homo sapiens
  misc_RNA (1)...(19): siRNA sense strand
augagaagauccagaagca

SEQ ID NO: 2668455 - RNA, 19 nt, Homo sapiens
  misc_RNA (1)...(19): siRNA sense strand
uugacaagcuccuggacuu

SEQ ID NO: 2668456 - RNA, 19 nt, Homo sapiens
  misc_RNA (1)...(19): siRNA sense strand
guacaguagagcucaagaa

SEQ ID NO: 2668457 - RNA, 19 nt, Homo sapiens
  misc_RNA (1)...(19): siRNA sense strand
agggaacauacaagauuua

SEQ ID NO: 2668458 - RNA, 19 nt, Homo sapiens
  misc_RNA (1)...(19): siRNA sense strand
acucaaaguggcuggcaga

SEQ ID NO: 2668459 - RNA, 19 nt, Homo sapiens
  misc_RNA (1)...(19): siRNA sense strand
uggcuggcagagagggaaa

SEQ ID NO: 2668460 - RNA, 19 nt, Homo sapiens
  misc_RNA (1)...(19): siRNA sense strand
acacacggguggaggaaac

SEQ ID NO: 2668461 - RNA, 19 nt, Homo sapiens
  misc_RNA (1)...(19): siRNA sense strand
acgaaaugggcaaagucaa

SEQ ID NO: 2668462 - RNA, 19 nt, Homo sapiens
  misc_RNA (1)...(19): siRNA sense strand
cagaaggcaaccaggucua

SEQ ID NO: 2668463 - RNA, 19 nt, Homo sapiens
  misc_RNA (1)...(19): siRNA sense strand
cuucagaguaugacacaga

SEQ ID NO: 2668464 - RNA, 19 nt, Homo sapiens
  misc_RNA (1)...(19): siRNA sense strand
cagaaaagccaguauuauu

SEQ ID NO: 2668465 - RNA, 19 nt, Homo sapiens
  misc_RNA (1)...(19): siRNA sense strand
ccagaaucccacccagaua

SEQ ID NO: 2668466 - RNA, 19 nt, Homo sapiens
  misc_RNA (1)...(19): siRNA sense strand
ccaacuguguccacggcua

SEQ ID NO: 2668467 - RNA, 19 nt, Homo sapiens
  misc_RNA (1)...(19): siRNA sense strand
cugcauuauuucugaagca

SEQ ID NO: 2668468 - RNA, 19 nt, Homo sapiens
  misc_RNA (1)...(19): siRNA sense strand
uggaggagaagcaggauga

SEQ ID NO: 2668469 - RNA, 19 nt, Homo sapiens
  misc_RNA (1)...(19): siRNA sense strand
cuccagcaacuaagagaaa

SEQ ID NO: 2668470 - RNA, 19 nt, Homo sapiens
  misc_RNA (1)...(19): siRNA sense strand
agaagagagccaaggucau

SEQ ID NO: 2668471 - RNA, 19 nt, Homo sapiens
  misc_RNA (1)...(19): siRNA sense strand
acaagaagacccuggagga

SEQ ID NO: 2668472 - RNA, 19 nt, Homo sapiens
  misc_RNA (1)...(19): siRNA sense strand
auccagaaauaguuggcua

SEQ ID NO: 2668473 - RNA, 19 nt, Homo sapiens
  misc_RNA (1)...(19): siRNA sense strand
ccguaggagaagaagagau

SEQ ID NO: 2668474 - RNA, 19 nt, Homo sapiens
  misc_RNA (1)...(19): siRNA sense strand
ugaaagagucucaggcaga

SEQ ID NO: 2668475 - RNA, 19 nt, Homo sapiens
  misc_RNA (1)...(19): siRNA sense strand
cagagaaggagcaggugau

SEQ ID NO: 2668476 - RNA, 19 nt, Homo sapiens
  misc_RNA (1)...(19): siRNA sense strand
cagagagugaugaggccaa

SEQ ID NO: 2668477 - RNA, 19 nt, Homo sapiens
  misc_RNA (1)...(19): siRNA sense strand
aggcauacgaggagcggca

SEQ ID NO: 2668478 - RNA, 19 nt, Homo sapiens
  misc_RNA (1)...(19): siRNA sense strand
cagcaggagaagcggcaau

SEQ ID NO: 2668479 - RNA, 19 nt, Homo sapiens
  misc_RNA (1)...(19): siRNA sense strand
gcagagaaggagcagguga

SEQ ID NO: 2668480 - RNA, 19 nt, Homo sapiens
  misc_RNA (1)...(19): siRNA sense strand
cuggagaagaacauggaga

SEQ ID NO: 2668481 - RNA, 19 nt, Homo sapiens
  misc_RNA (1)...(19): siRNA sense strand
ccuacaucaaugaggacuu

SEQ ID NO: 2668482 - RNA, 19 nt, Homo sapiens
  misc_RNA (1)...(19): siRNA sense strand
ccaagugggaggugugcca

SEQ ID NO: 2668483 - RNA, 19 nt, Homo sapiens
  misc_RNA (1)...(19): siRNA sense strand
cagcacaacuacauccaga

SEQ ID NO: 2668484 - RNA, 19 nt, Homo sapiens
  misc_RNA (1)...(19): siRNA sense strand
aggcagagaaggagcaggu

SEQ ID NO: 2668485 - RNA, 19 nt, Homo sapiens
  misc_RNA (1)...(19): siRNA sense strand
ugaaagagucucaggcaga

SEQ ID NO: 2668486 - RNA, 19 nt, Homo sapiens
  misc_RNA (1)...(19): siRNA sense strand
cagagaaggagcaggugau

SEQ ID NO: 2668487 - RNA, 19 nt, Homo sapiens
  misc_RNA (1)...(19): siRNA sense strand
aggcauacgaggagcggca

SEQ ID NO: 2668488 - RNA, 19 nt, Homo sapiens
  misc_RNA (1)...(19): siRNA sense strand
cagcaggagaagcggcaau

SEQ ID NO: 2668489 - RNA, 19 nt, Homo sapiens
  misc_RNA (1)...(19): siRNA sense strand
gcagagaaggagcagguga

SEQ ID NO: 2668490 - RNA, 19 nt, Homo sapiens
  misc_RNA (1)...(19): siRNA sense strand
cuggagaagaacauggaga

SEQ ID NO: 2668491 - RNA, 19 nt, Homo sapiens
  misc_RNA (1)...(19): siRNA sense strand
ccuacaucaaugaggacuu

SEQ ID NO: 2668492 - RNA, 19 nt, Homo sapiens
  misc_RNA (1)...(19): siRNA sense strand
ccaagugggaggugugcca

SEQ ID NO: 2668493 - RNA, 19 nt, Homo sapiens
  misc_RNA (1)...(19): siRNA sense strand
cagcacaacuacauccaga

SEQ ID NO: 2668494 - RNA, 19 nt, Homo sapiens
  misc_RNA (1)...(19): siRNA sense strand
aggcagagaaggagcaggu

SEQ ID NO: 2668495 - RNA, 19 nt, Homo sapiens
  misc_RNA (1)...(19): siRNA sense strand
acgaauggcugucagacga

SEQ ID NO: 2668496 - RNA, 19 nt, Homo sapiens
  misc_RNA (1)...(19): siRNA sense strand
gcuggauguguaugggaua

SEQ ID NO: 2668497 - RNA, 19 nt, Homo sapiens
  misc_RNA (1)...(19): siRNA sense strand
agauguuauuggagcuauu

SEQ ID NO: 2668498 - RNA, 19 nt, Homo sapiens
  misc_RNA (1)...(19): siRNA sense strand
ucaacauuaaccugagaaa

SEQ ID NO: 2668499 - RNA, 19 nt, Homo sapiens
  misc_RNA (1)...(19): siRNA sense strand
uugagaugugggagagaau

SEQ ID NO: 2668500 - RNA, 19 nt, Homo sapiens
  misc_RNA (1)...(19): siRNA sense strand
aggccaaagacaucagaca

SEQ ID NO: 2668501 - RNA, 19 nt, Homo sapiens
  misc_RNA (1)...(19): siRNA sense strand
cugagaaacaagccugaau

SEQ ID NO: 2668502 - RNA, 19 nt, Homo sapiens
  misc_RNA (1)...(19): siRNA sense strand
caacaaaaucagagaacaa

SEQ ID NO: 2668503 - RNA, 19 nt, Homo sapiens
  misc_RNA (1)...(19): siRNA sense strand
ggccaaaugcagagagcua

SEQ ID NO: 2668504 - RNA, 19 nt, Homo sapiens
  misc_RNA (1)...(19): siRNA sense strand
cauaaaaguucgugaaaca

SEQ ID NO: 2668505 - RNA, 19 nt, Homo sapiens
  misc_RNA (1)...(19): siRNA sense strand
acaaagagcagaaggccaa

SEQ ID NO: 2668506 - RNA, 19 nt, Homo sapiens
  misc_RNA (1)...(19): siRNA sense strand
gguaaagcuccaugaacaa

SEQ ID NO: 2668507 - RNA, 19 nt, Homo sapiens
  misc_RNA (1)...(19): siRNA sense strand
cugaagaggugguugaaaa

SEQ ID NO: 2668508 - RNA, 19 nt, Homo sapiens
  misc_RNA (1)...(19): siRNA sense strand
agaggaaccuggagggaga

SEQ ID NO: 2668509 - RNA, 19 nt, Homo sapiens
  misc_RNA (1)...(19): siRNA sense strand
gguuggaggacaugagaau

SEQ ID NO: 2668510 - RNA, 19 nt, Homo sapiens
  misc_RNA (1)...(19): siRNA sense strand
guucaaagaagaagugaca

SEQ ID NO: 2668511 - RNA, 19 nt, Homo sapiens
  misc_RNA (1)...(19): siRNA sense strand
ggggagagguugagacaga

SEQ ID NO: 2668512 - RNA, 19 nt, Homo sapiens
  misc_RNA (1)...(19): siRNA sense strand
ccaaaugcagagagcuaaa

SEQ ID NO: 2668513 - RNA, 19 nt, Homo sapiens
  misc_RNA (1)...(19): siRNA sense strand
gauuagagagagagguaga

SEQ ID NO: 2668514 - RNA, 19 nt, Homo sapiens
  misc_RNA (1)...(19): siRNA sense strand
gcagagagcuaaaugcaga

SEQ ID NO: 2668515 - RNA, 19 nt, Homo sapiens
  misc_RNA (1)...(19): siRNA sense strand
aagaagcugaagagagaaa

SEQ ID NO: 2668516 - RNA, 19 nt, Homo sapiens
  misc_RNA (1)...(19): siRNA sense strand
gaauaauugcugaggcuga

SEQ ID NO: 2668517 - RNA, 19 nt, Homo sapiens
  misc_RNA (1)...(19): siRNA sense strand
gagcagaaggccaaggaga

SEQ ID NO: 2668518 - RNA, 19 nt, Homo sapiens
  misc_RNA (1)...(19): siRNA sense strand
agagaauuguugaaggaga

SEQ ID NO: 2668519 - RNA, 19 nt, Homo sapiens
  misc_RNA (1)...(19): siRNA sense strand
gaucaaaagaggaggcuga

SEQ ID NO: 2668520 - RNA, 19 nt, Homo sapiens
  misc_RNA (1)...(19): siRNA sense strand
agagaaaacuccugcgaau

SEQ ID NO: 2668521 - RNA, 19 nt, Homo sapiens
  misc_RNA (1)...(19): siRNA sense strand
gcgaauaauugcugaggcu

SEQ ID NO: 2668522 - RNA, 19 nt, Homo sapiens
  misc_RNA (1)...(19): siRNA sense strand
ugaccaaacuaguggagca

SEQ ID NO: 2668523 - RNA, 19 nt, Homo sapiens
  misc_RNA (1)...(19): siRNA sense strand
aauaugagguagagaaacu

SEQ ID NO: 2668524 - RNA, 19 nt, Homo sapiens
  misc_RNA (1)...(19): siRNA sense strand
cagcaggcagacagaaaua

SEQ ID NO: 2668525 - RNA, 19 nt, Homo sapiens
  misc_RNA (1)...(19): siRNA sense strand
augaacaagccaagaggaa

SEQ ID NO: 2668526 - RNA, 19 nt, Homo sapiens
  misc_RNA (1)...(19): siRNA sense strand
augcagagauuguagugaa

SEQ ID NO: 2668527 - RNA, 19 nt, Homo sapiens
  misc_RNA (1)...(19): siRNA sense strand
aggcucagaagcagagaaa

SEQ ID NO: 2668528 - RNA, 19 nt, Homo sapiens
  misc_RNA (1)...(19): siRNA sense strand
ccaaagaggaagaagucca

SEQ ID NO: 2668529 - RNA, 19 nt, Homo sapiens
  misc_RNA (1)...(19): siRNA sense strand
gagaaagagcucaagcaga

SEQ ID NO: 2668530 - RNA, 19 nt, Homo sapiens
  misc_RNA (1)...(19): siRNA sense strand
gagcaauuucagaugagaa

SEQ ID NO: 2668531 - RNA, 19 nt, Homo sapiens
  misc_RNA (1)...(19): siRNA sense strand
gauugugggauuagagaga

SEQ ID NO: 2668532 - RNA, 19 nt, Homo sapiens
  misc_RNA (1)...(19): siRNA sense strand
acagaaaggcaauggacga

SEQ ID NO: 2668533 - RNA, 19 nt, Homo sapiens
  misc_RNA (1)...(19): siRNA sense strand
ugaaagaggaaauagugaa

SEQ ID NO: 2668534 - RNA, 19 nt, Homo sapiens
  misc_RNA (1)...(19): siRNA sense strand
gaacuugacagaaaggcaa

SEQ ID NO: 2668535 - RNA, 19 nt, Homo sapiens
  misc_RNA (1)...(19): siRNA sense strand
ugaacauggaagacauaaa

SEQ ID NO: 2668536 - RNA, 19 nt, Homo sapiens
  misc_RNA (1)...(19): siRNA sense strand
aggcagaagucgaacagca

SEQ ID NO: 2668537 - RNA, 19 nt, Homo sapiens
  misc_RNA (1)...(19): siRNA sense strand
agagagagguagaggcuuc

SEQ ID NO: 2668538 - RNA, 19 nt, Homo sapiens
  misc_RNA (1)...(19): siRNA sense strand
aguaugugcagaagagcaa

SEQ ID NO: 2668539 - RNA, 19 nt, Homo sapiens
  misc_RNA (1)...(19): siRNA sense strand
agguagaugagcugaaaga

SEQ ID NO: 2668540 - RNA, 19 nt, Homo sapiens
  misc_RNA (1)...(19): siRNA sense strand
agacugaagaggugguuga

SEQ ID NO: 2668541 - RNA, 19 nt, Homo sapiens
  misc_RNA (1)...(19): siRNA sense strand
gcucagaaacguaaagaac

SEQ ID NO: 2668542 - RNA, 19 nt, Homo sapiens
  misc_RNA (1)...(19): siRNA sense strand
ucuuaucagaagugguaaa

SEQ ID NO: 2668543 - RNA, 19 nt, Homo sapiens
  misc_RNA (1)...(19): siRNA sense strand
agguagaggcuucaaagaa

SEQ ID NO: 2668544 - RNA, 19 nt, Homo sapiens
  misc_RNA (1)...(19): siRNA sense strand
ccuaugacaaagagcagaa

SEQ ID NO: 2668545 - RNA, 19 nt, Homo sapiens
  misc_RNA (1)...(19): siRNA sense strand
acagauaugaagagaaagu

SEQ ID NO: 2668546 - RNA, 19 nt, Homo sapiens
  misc_RNA (1)...(19): siRNA sense strand
aggaaacauugaaggcuga

SEQ ID NO: 2668547 - RNA, 19 nt, Homo sapiens
  misc_RNA (1)...(19): siRNA sense strand
uggaggaggagcuggagaa

SEQ ID NO: 2668548 - RNA, 19 nt, Homo sapiens
  misc_RNA (1)...(19): siRNA sense strand
ggaaacagagcgaucaaaa

SEQ ID NO: 2668549 - RNA, 19 nt, Homo sapiens
  misc_RNA (1)...(19): siRNA sense strand
cagaagucgaacagcacaa

SEQ ID NO: 2668550 - RNA, 19 nt, Homo sapiens
  misc_RNA (1)...(19): siRNA sense strand
ccaacaagaaauccagcaa

SEQ ID NO: 2668551 - RNA, 19 nt, Homo sapiens
  misc_RNA (1)...(19): siRNA sense strand
gaagaagugacaaaggaga

SEQ ID NO: 2668552 - RNA, 19 nt, Homo sapiens
  misc_RNA (1)...(19): siRNA sense strand
gcaccacaccgaagaucaa

SEQ ID NO: 2668553 - RNA, 19 nt, Homo sapiens
  misc_RNA (1)...(19): siRNA sense strand
ucuaagagaaagggacaua

SEQ ID NO: 2668554 - RNA, 19 nt, Homo sapiens
  misc_RNA (1)...(19): siRNA sense strand
gacagcaggcagacagaaa

SEQ ID NO: 2668555 - RNA, 19 nt, Homo sapiens
  misc_RNA (1)...(19): siRNA sense strand
guuuaucacuggaaggcaa

SEQ ID NO: 2668556 - RNA, 19 nt, Homo sapiens
  misc_RNA (1)...(19): siRNA sense strand
acgggaaucuggagagaca

SEQ ID NO: 2668557 - RNA, 19 nt, Homo sapiens
  misc_RNA (1)...(19): siRNA sense strand
cggcaaucgcauuuguaaa

SEQ ID NO: 2668558 - RNA, 19 nt, Homo sapiens
  misc_RNA (1)...(19): siRNA sense strand
gagcaguagaucuggaaga

SEQ ID NO: 2668559 - RNA, 19 nt, Homo sapiens
  misc_RNA (1)...(19): siRNA sense strand
aagauaaagaugugguaga

SEQ ID NO: 2668560 - RNA, 19 nt, Homo sapiens
  misc_RNA (1)...(19): siRNA sense strand
auugauagcaggagcagua

SEQ ID NO: 2668561 - RNA, 19 nt, Homo sapiens
  misc_RNA (1)...(19): siRNA sense strand
ucugaugagauaagcauaa

SEQ ID NO: 2668562 - RNA, 19 nt, Homo sapiens
  misc_RNA (1)...(19): siRNA sense strand
agaagaaaaugaacgggaa

SEQ ID NO: 2668563 - RNA, 19 nt, Homo sapiens
  misc_RNA (1)...(19): siRNA sense strand
aauuagacucuguggugaa

SEQ ID NO: 2668564 - RNA, 19 nt, Homo sapiens
  misc_RNA (1)...(19): siRNA sense strand
ugagauaagcauaaugaca

SEQ ID NO: 2668565 - RNA, 19 nt, Homo sapiens
  misc_RNA (1)...(19): siRNA sense strand
cuagcaacaccaacagaaa

SEQ ID NO: 2668566 - RNA, 19 nt, Homo sapiens
  misc_RNA (1)...(19): siRNA sense strand
uggugaaguccuagcaaca

SEQ ID NO: 2668567 - RNA, 19 nt, Homo sapiens
  misc_RNA (1)...(19): siRNA sense strand
cauuauauaccuuggggaa

SEQ ID NO: 2668568 - RNA, 19 nt, Homo sapiens
  misc_RNA (1)...(19): siRNA sense strand
gcucauuaaggaagcccaa

SEQ ID NO: 2668569 - RNA, 19 nt, Homo sapiens
  misc_RNA (1)...(19): siRNA sense strand
gcauagguuaauugaacau

SEQ ID NO: 2668570 - RNA, 19 nt, Homo sapiens
  misc_RNA (1)...(19): siRNA sense strand
agauauacugguucaagaa

SEQ ID NO: 2668571 - RNA, 19 nt, Homo sapiens
  misc_RNA (1)...(19): siRNA sense strand
gaagaaaaugaacgggaau

SEQ ID NO: 2668572 - RNA, 19 nt, Homo sapiens
  misc_RNA (1)...(19): siRNA sense strand
ggcuugaugcuguuaguaa

SEQ ID NO: 2668573 - RNA, 19 nt, Homo sapiens
  misc_RNA (1)...(19): siRNA sense strand
uguugagggcacaggauau

SEQ ID NO: 2668574 - RNA, 19 nt, Homo sapiens
  misc_RNA (1)...(19): siRNA sense strand
uguuagauauacugguuca

SEQ ID NO: 2668575 - RNA, 19 nt, Homo sapiens
  misc_RNA (1)...(19): siRNA sense strand
gugcgaagcugaaacagga

SEQ ID NO: 2668576 - RNA, 19 nt, Homo sapiens
  misc_RNA (1)...(19): siRNA sense strand
cagaauagcugugaaggca

SEQ ID NO: 2668577 - RNA, 19 nt, Homo sapiens
  misc_RNA (1)...(19): siRNA sense strand
cuuugugcccagaagauaa

SEQ ID NO: 2668578 - RNA, 19 nt, Homo sapiens
  misc_RNA (1)...(19): siRNA sense strand
agaagauaaagauguggua

SEQ ID NO: 2668579 - RNA, 19 nt, Homo sapiens
  misc_RNA (1)...(19): siRNA sense strand
aggccagugcagaaauuaa

SEQ ID NO: 2668580 - RNA, 19 nt, Homo sapiens
  misc_RNA (1)...(19): siRNA sense strand
caacagaaaaugaagagau

SEQ ID NO: 2668581 - RNA, 19 nt, Homo sapiens
  misc_RNA (1)...(19): siRNA sense strand
aggaguaccaaauguaauu

SEQ ID NO: 2668582 - RNA, 19 nt, Homo sapiens
  misc_RNA (1)...(19): siRNA sense strand
uagaaguccugauggcaga

SEQ ID NO: 2668583 - RNA, 19 nt, Homo sapiens
  misc_RNA (1)...(19): siRNA sense strand
cuuccaaaggaguaccaaa

SEQ ID NO: 2668584 - RNA, 19 nt, Homo sapiens
  misc_RNA (1)...(19): siRNA sense strand
gggcacaggauaugacacu

SEQ ID NO: 2668585 - RNA, 19 nt, Homo sapiens
  misc_RNA (1)...(19): siRNA sense strand
ccacaagcuuggauaaccu

SEQ ID NO: 2668586 - RNA, 19 nt, Homo sapiens
  misc_RNA (1)...(19): siRNA sense strand
uuggauaaccucaguguca

SEQ ID NO: 2668587 - RNA, 19 nt, Homo sapiens
  misc_RNA (1)...(19): siRNA sense strand
ccagaaaacacuuugccaa

SEQ ID NO: 2668588 - RNA, 19 nt, Homo sapiens
  misc_RNA (1)...(19): siRNA sense strand
gugugauuguguuagaaga

SEQ ID NO: 2668589 - RNA, 19 nt, Homo sapiens
  misc_RNA (1)...(19): siRNA sense strand
ccagcguauucaagacuuu

SEQ ID NO: 2668590 - RNA, 19 nt, Homo sapiens
  misc_RNA (1)...(19): siRNA sense strand
acccauuacuacauagaga

SEQ ID NO: 2668591 - RNA, 19 nt, Homo sapiens
  misc_RNA (1)...(19): siRNA sense strand
caggauuacaauuuaguga

SEQ ID NO: 2668592 - RNA, 19 nt, Homo sapiens
  misc_RNA (1)...(19): siRNA sense strand
agauauugaaaccguggaa

SEQ ID NO: 2668593 - RNA, 19 nt, Homo sapiens
  misc_RNA (1)...(19): siRNA sense strand
uugaaaccguggaagcaau

SEQ ID NO: 2668594 - RNA, 19 nt, Homo sapiens
  misc_RNA (1)...(19): siRNA sense strand
uccuagagaauaagaugaa

SEQ ID NO: 2668595 - RNA, 19 nt, Homo sapiens
  misc_RNA (1)...(19): siRNA sense strand
agcaaacagaauuggaaga

SEQ ID NO: 2668596 - RNA, 19 nt, Homo sapiens
  misc_RNA (1)...(19): siRNA sense strand
ucaguggauccguuagaua

SEQ ID NO: 2668597 - RNA, 19 nt, Homo sapiens
  misc_RNA (1)...(19): siRNA sense strand
caggguuguuggagaccuu

SEQ ID NO: 2668598 - RNA, 19 nt, Homo sapiens
  misc_RNA (1)...(19): siRNA sense strand
gggugaagcuugugauauu

SEQ ID NO: 2668599 - RNA, 19 nt, Homo sapiens
  misc_RNA (1)...(19): siRNA sense strand
ggucaugggaaguguacaa

SEQ ID NO: 2668600 - RNA, 19 nt, Homo sapiens
  misc_RNA (1)...(19): siRNA sense strand
gggaaauuuauguggguga

SEQ ID NO: 2668601 - RNA, 19 nt, Homo sapiens
  misc_RNA (1)...(19): siRNA sense strand
cugcaaugauaguuggcaa

SEQ ID NO: 2668602 - RNA, 19 nt, Homo sapiens
  misc_RNA (1)...(19): siRNA sense strand
ggaagugggagcugaacaa

SEQ ID NO: 2668603 - RNA, 19 nt, Homo sapiens
  misc_RNA (1)...(19): siRNA sense strand
aggcagaauugaaacaaau

SEQ ID NO: 2668604 - RNA, 19 nt, Homo sapiens
  misc_RNA (1)...(19): siRNA sense strand
gucaauuccaguagagaaa

SEQ ID NO: 2668605 - RNA, 19 nt, Homo sapiens
  misc_RNA (1)...(19): siRNA sense strand
ggaaagggcugcaguggca

SEQ ID NO: 2668606 - RNA, 19 nt, Homo sapiens
  misc_RNA (1)...(19): siRNA sense strand
gguaauccacuuagaggaa

SEQ ID NO: 2668607 - RNA, 19 nt, Homo sapiens
  misc_RNA (1)...(19): siRNA sense strand
uuugauagucccugaaaua

SEQ ID NO: 2668608 - RNA, 19 nt, Homo sapiens
  misc_RNA (1)...(19): siRNA sense strand
agaaagcaguauauggaau

SEQ ID NO: 2668609 - RNA, 19 nt, Homo sapiens
  misc_RNA (1)...(19): siRNA sense strand
agucagucauggaguacaa

SEQ ID NO: 2668610 - RNA, 19 nt, Homo sapiens
  misc_RNA (1)...(19): siRNA sense strand
gcuuauuacaggaagauga

SEQ ID NO: 2668611 - RNA, 19 nt, Homo sapiens
  misc_RNA (1)...(19): siRNA sense strand
ccucaaaagaaguagaauu

SEQ ID NO: 2668612 - RNA, 19 nt, Homo sapiens
  misc_RNA (1)...(19): siRNA sense strand
gugcaaugauccuaguaau

SEQ ID NO: 2668613 - RNA, 19 nt, Homo sapiens
  misc_RNA (1)...(19): siRNA sense strand
guauggaagaucaaacaaa

SEQ ID NO: 2668614 - RNA, 19 nt, Homo sapiens
  misc_RNA (1)...(19): siRNA sense strand
uuugaaagaaaguggguuu

SEQ ID NO: 2668615 - RNA, 19 nt, Homo sapiens
  misc_RNA (1)...(19): siRNA sense strand
uggcaaugucacagaugaa

SEQ ID NO: 2668616 - RNA, 19 nt, Homo sapiens
  misc_RNA (1)...(19): siRNA sense strand
ccuuguacaucuauggcaa

SEQ ID NO: 2668617 - RNA, 19 nt, Homo sapiens
  misc_RNA (1)...(19): siRNA sense strand
gcaacugcuucgagaacga

SEQ ID NO: 2668618 - RNA, 19 nt, Homo sapiens
  misc_RNA (1)...(19): siRNA sense strand
caugggaaguguacaacua

SEQ ID NO: 2668619 - RNA, 19 nt, Homo sapiens
  misc_RNA (1)...(19): siRNA sense strand
aggaauaaaaggugaccaa

SEQ ID NO: 2668620 - RNA, 19 nt, Homo sapiens
  misc_RNA (1)...(19): siRNA sense strand
aggaauacagagauaguuu

SEQ ID NO: 2668621 - RNA, 19 nt, Homo sapiens
  misc_RNA (1)...(19): siRNA sense strand
ccagaacagucgaacaaaa

SEQ ID NO: 2668622 - RNA, 19 nt, Homo sapiens
  misc_RNA (1)...(19): siRNA sense strand
gaaauaaggggcaaugaaa

SEQ ID NO: 2668623 - RNA, 19 nt, Homo sapiens
  misc_RNA (1)...(19): siRNA sense strand
gcaaugaaacugugccuga

SEQ ID NO: 2668624 - RNA, 19 nt, Homo sapiens
  misc_RNA (1)...(19): siRNA sense strand
auaaauacuggaaggguga

SEQ ID NO: 2668625 - RNA, 19 nt, Homo sapiens
  misc_RNA (1)...(19): siRNA sense strand
ugcaaugauccuaguaaua

SEQ ID NO: 2668626 - RNA, 19 nt, Homo sapiens
  misc_RNA (1)...(19): siRNA sense strand
acaaauauggauugguuga

SEQ ID NO: 2668627 - RNA, 19 nt, Homo sapiens
  misc_RNA (1)...(19): siRNA sense strand
uaauacaggaagaggacau

SEQ ID NO: 2668628 - RNA, 19 nt, Homo sapiens
  misc_RNA (1)...(19): siRNA sense strand
cuauccaaaugcaguguua

SEQ ID NO: 2668629 - RNA, 19 nt, Homo sapiens
  misc_RNA (1)...(19): siRNA sense strand
gugggugauugguggauau

SEQ ID NO: 2668630 - RNA, 19 nt, Homo sapiens
  misc_RNA (1)...(19): siRNA sense strand
cuuuauguauggaggcaga

SEQ ID NO: 2668631 - RNA, 19 nt, Homo sapiens
  misc_RNA (1)...(19): siRNA sense strand
ccuccaaauugcaaggcuu

SEQ ID NO: 2668632 - RNA, 19 nt, Homo sapiens
  misc_RNA (1)...(19): siRNA sense strand
agucaauuccaguagagaa

SEQ ID NO: 2668633 - RNA, 19 nt, Homo sapiens
  misc_RNA (1)...(19): siRNA sense strand
uguacuuagugguuugaua

SEQ ID NO: 2668634 - RNA, 19 nt, Homo sapiens
  misc_RNA (1)...(19): siRNA sense strand
gcauacaggaauaccauau

SEQ ID NO: 2668635 - RNA, 19 nt, Homo sapiens
  misc_RNA (1)...(19): siRNA sense strand
caaaugcaguguuaagauu

SEQ ID NO: 2668636 - RNA, 19 nt, Homo sapiens
  misc_RNA (1)...(19): siRNA sense strand
uguuuaugauggagauuca

SEQ ID NO: 2668637 - RNA, 19 nt, Homo sapiens
  misc_RNA (1)...(19): siRNA sense strand
cguauaaucuaacugguuu

SEQ ID NO: 2668638 - RNA, 19 nt, Homo sapiens
  misc_RNA (1)...(19): siRNA sense strand
gauaaauacuggaagggug

SEQ ID NO: 2668639 - RNA, 19 nt, Homo sapiens
  misc_RNA (1)...(19): siRNA sense strand
aggaagaggacauugcauu

SEQ ID NO: 2668640 - RNA, 19 nt, Homo sapiens
  misc_RNA (1)...(19): siRNA sense strand
ccacaggaaagcaguguca

SEQ ID NO: 2668641 - RNA, 19 nt, Homo sapiens
  misc_RNA (1)...(19): siRNA sense strand
gaauguagcugggaucaua

SEQ ID NO: 2668642 - RNA, 19 nt, Homo sapiens
  misc_RNA (1)...(19): siRNA sense strand
ggauaaaauguguuuggaa

SEQ ID NO: 2668643 - RNA, 19 nt, Homo sapiens
  misc_RNA (1)...(19): siRNA sense strand
ugcuauaaucuuaguggaa

SEQ ID NO: 2668644 - RNA, 19 nt, Homo sapiens
  misc_RNA (1)...(19): siRNA sense strand
gaaaguaucaccuugggua

SEQ ID NO: 2668645 - RNA, 19 nt, Homo sapiens
  misc_RNA (1)...(19): siRNA sense strand
uguauguggugcagcagua

SEQ ID NO: 2668646 - RNA, 19 nt, Homo sapiens
  misc_RNA (1)...(19): siRNA sense strand
cuuacuggauucugccaaa

SEQ ID NO: 2668647 - RNA, 19 nt, Homo sapiens
  misc_RNA (1)...(19): siRNA sense strand
ggugauugguggauauacu

SEQ ID NO: 2668648 - RNA, 19 nt, Homo sapiens
  misc_RNA (1)...(19): siRNA sense strand
uuauguucauggaggguau

SEQ ID NO: 2668649 - RNA, 19 nt, Homo sapiens
  misc_RNA (1)...(19): siRNA sense strand
aagcauugccagggaacaa
